United States Patent Application Publication US 2019/0048337 A1 - sequence listing, part 6

SEQ ID NO: 169473 - RNA, 18 nt, Artificial Sequence
  Synthetic
cuagcuuuaucaucaaaa

SEQ ID NO: 169474 - RNA, 19 nt, Artificial Sequence
  Synthetic
acuagcuuuaucaucaaaa

SEQ ID NO: 169475 - RNA, 20 nt, Artificial Sequence
  Synthetic
aacuagcuuuaucaucaaaa

SEQ ID NO: 169476 - RNA, 21 nt, Artificial Sequence
  Synthetic
aaacuagcuuuaucaucaaaa

SEQ ID NO: 169477 - RNA, 22 nt, Artificial Sequence
  Synthetic
aaaacuagcuuuaucaucaaaa

SEQ ID NO: 169478 - RNA, 23 nt, Artificial Sequence
  Synthetic
gaaaacuagcuuuaucaucaaaa

SEQ ID NO: 169479 - RNA, 24 nt, Artificial Sequence
  Synthetic
ugaaaacuagcuuuaucaucaaaa

SEQ ID NO: 169480 - RNA, 18 nt, Artificial Sequence
  Synthetic
gggcaagaaagaucaaaa

SEQ ID NO: 169481 - RNA, 19 nt, Artificial Sequence
  Synthetic
agggcaagaaagaucaaaa

SEQ ID NO: 169482 - RNA, 20 nt, Artificial Sequence
  Synthetic
gagggcaagaaagaucaaaa

SEQ ID NO: 169483 - RNA, 21 nt, Artificial Sequence
  Synthetic
agagggcaagaaagaucaaaa

SEQ ID NO: 169484 - RNA, 22 nt, Artificial Sequence
  Synthetic
uagagggcaagaaagaucaaaa

SEQ ID NO: 169485 - RNA, 23 nt, Artificial Sequence
  Synthetic
uuagagggcaagaaagaucaaaa

SEQ ID NO: 169486 - RNA, 24 nt, Artificial Sequence
  Synthetic
auuagagggcaagaaagaucaaaa

SEQ ID NO: 169487 - RNA, 18 nt, Artificial Sequence
  Synthetic
agagugagcagaucaaaa

SEQ ID NO: 169488 - RNA, 19 nt, Artificial Sequence
  Synthetic
cagagugagcagaucaaaa

SEQ ID NO: 169489 - RNA, 20 nt, Artificial Sequence
  Synthetic
ccagagugagcagaucaaaa

SEQ ID NO: 169490 - RNA, 21 nt, Artificial Sequence
  Synthetic
accagagugagcagaucaaaa

SEQ ID NO: 169491 - RNA, 22 nt, Artificial Sequence
  Synthetic
uaccagagugagcagaucaaaa

SEQ ID NO: 169492 - RNA, 23 nt, Artificial Sequence
  Synthetic
cuaccagagugagcagaucaaaa

SEQ ID NO: 169493 - RNA, 24 nt, Artificial Sequence
  Synthetic
acuaccagagugagcagaucaaaa

SEQ ID NO: 169494 - RNA, 18 nt, Artificial Sequence
  Synthetic
cagauagucagaucaaaa

SEQ ID NO: 169495 - RNA, 19 nt, Artificial Sequence
  Synthetic
acagauagucagaucaaaa

SEQ ID NO: 169496 - RNA, 20 nt, Artificial Sequence
  Synthetic
aacagauagucagaucaaaa

SEQ ID NO: 169497 - RNA, 21 nt, Artificial Sequence
  Synthetic
gaacagauagucagaucaaaa

SEQ ID NO: 169498 - RNA, 22 nt, Artificial Sequence
  Synthetic
cgaacagauagucagaucaaaa

SEQ ID NO: 169499 - RNA, 23 nt, Artificial Sequence
  Synthetic
gcgaacagauagucagaucaaaa

SEQ ID NO: 169500 - RNA, 24 nt, Artificial Sequence
  Synthetic
agcgaacagauagucagaucaaaa

SEQ ID NO: 169501 - RNA, 18 nt, Artificial Sequence
  Synthetic
aguucagcaugaucaaaa

SEQ ID NO: 169502 - RNA, 19 nt, Artificial Sequence
  Synthetic
aaguucagcaugaucaaaa

SEQ ID NO: 169503 - RNA, 20 nt, Artificial Sequence
  Synthetic
uaaguucagcaugaucaaaa

SEQ ID NO: 169504 - RNA, 21 nt, Artificial Sequence
  Synthetic
cuaaguucagcaugaucaaaa

SEQ ID NO: 169505 - RNA, 22 nt, Artificial Sequence
  Synthetic
acuaaguucagcaugaucaaaa

SEQ ID NO: 169506 - RNA, 23 nt, Artificial Sequence
  Synthetic
uacuaaguucagcaugaucaaaa

SEQ ID NO: 169507 - RNA, 24 nt, Artificial Sequence
  Synthetic
uuacuaaguucagcaugaucaaaa

SEQ ID NO: 169508 - RNA, 18 nt, Artificial Sequence
  Synthetic
uaccuaagaugaucaaaa

SEQ ID NO: 169509 - RNA, 19 nt, Artificial Sequence
  Synthetic
cuaccuaagaugaucaaaa

SEQ ID NO: 169510 - RNA, 20 nt, Artificial Sequence
  Synthetic
gcuaccuaagaugaucaaaa

SEQ ID NO: 169511 - RNA, 21 nt, Artificial Sequence
  Synthetic
ggcuaccuaagaugaucaaaa

SEQ ID NO: 169512 - RNA, 22 nt, Artificial Sequence
  Synthetic
aggcuaccuaagaugaucaaaa

SEQ ID NO: 169513 - RNA, 23 nt, Artificial Sequence
  Synthetic
caggcuaccuaagaugaucaaaa

SEQ ID NO: 169514 - RNA, 24 nt, Artificial Sequence
  Synthetic
ccaggcuaccuaagaugaucaaaa

SEQ ID NO: 169515 - RNA, 18 nt, Artificial Sequence
  Synthetic
gaaaaccccuuaucaaaa

SEQ ID NO: 169516 - RNA, 19 nt, Artificial Sequence
  Synthetic
ggaaaaccccuuaucaaaa

SEQ ID NO: 169517 - RNA, 20 nt, Artificial Sequence
  Synthetic
gggaaaaccccuuaucaaaa

SEQ ID NO: 169518 - RNA, 21 nt, Artificial Sequence
  Synthetic
agggaaaaccccuuaucaaaa

SEQ ID NO: 169519 - RNA, 22 nt, Artificial Sequence
  Synthetic
cagggaaaaccccuuaucaaaa

SEQ ID NO: 169520 - RNA, 23 nt, Artificial Sequence
  Synthetic
acagggaaaaccccuuaucaaaa

SEQ ID NO: 169521 - RNA, 24 nt, Artificial Sequence
  Synthetic
aacagggaaaaccccuuaucaaaa

SEQ ID NO: 169522 - RNA, 18 nt, Artificial Sequence
  Synthetic
aaugggcagaacucaaaa

SEQ ID NO: 169523 - RNA, 19 nt, Artificial Sequence
  Synthetic
aaaugggcagaacucaaaa

SEQ ID NO: 169524 - RNA, 20 nt, Artificial Sequence
  Synthetic
aaaaugggcagaacucaaaa

SEQ ID NO: 169525 - RNA, 21 nt, Artificial Sequence
  Synthetic
caaaaugggcagaacucaaaa

SEQ ID NO: 169526 - RNA, 22 nt, Artificial Sequence
  Synthetic
ucaaaaugggcagaacucaaaa

SEQ ID NO: 169527 - RNA, 23 nt, Artificial Sequence
  Synthetic
cucaaaaugggcagaacucaaaa

SEQ ID NO: 169528 - RNA, 24 nt, Artificial Sequence
  Synthetic
gcucaaaaugggcagaacucaaaa

SEQ ID NO: 169529 - RNA, 18 nt, Artificial Sequence
  Synthetic
ccugugcuucacucaaaa

SEQ ID NO: 169530 - RNA, 19 nt, Artificial Sequence
  Synthetic
uccugugcuucacucaaaa

SEQ ID NO: 169531 - RNA, 20 nt, Artificial Sequence
  Synthetic
uuccugugcuucacucaaaa

SEQ ID NO: 169532 - RNA, 21 nt, Artificial Sequence
  Synthetic
guuccugugcuucacucaaaa

SEQ ID NO: 169533 - RNA, 22 nt, Artificial Sequence
  Synthetic
cguuccugugcuucacucaaaa

SEQ ID NO: 169534 - RNA, 23 nt, Artificial Sequence
  Synthetic
acguuccugugcuucacucaaaa

SEQ ID NO: 169535 - RNA, 24 nt, Artificial Sequence
  Synthetic
cacguuccugugcuucacucaaaa

SEQ ID NO: 169536 - RNA, 18 nt, Artificial Sequence
  Synthetic
guacccuaccgcucaaaa

SEQ ID NO: 169537 - RNA, 19 nt, Artificial Sequence
  Synthetic
aguacccuaccgcucaaaa

SEQ ID NO: 169538 - RNA, 20 nt, Artificial Sequence
  Synthetic
aaguacccuaccgcucaaaa

SEQ ID NO: 169539 - RNA, 21 nt, Artificial Sequence
  Synthetic
uaaguacccuaccgcucaaaa

SEQ ID NO: 169540 - RNA, 22 nt, Artificial Sequence
  Synthetic
guaaguacccuaccgcucaaaa

SEQ ID NO: 169541 - RNA, 23 nt, Artificial Sequence
  Synthetic
aguaaguacccuaccgcucaaaa

SEQ ID NO: 169542 - RNA, 24 nt, Artificial Sequence
  Synthetic
gaguaaguacccuaccgcucaaaa

SEQ ID NO: 169543 - RNA, 18 nt, Artificial Sequence
  Synthetic
uuauggaauugcucaaaa

SEQ ID NO: 169544 - RNA, 19 nt, Artificial Sequence
  Synthetic
auuauggaauugcucaaaa

SEQ ID NO: 169545 - RNA, 20 nt, Artificial Sequence
  Synthetic
aauuauggaauugcucaaaa

SEQ ID NO: 169546 - RNA, 21 nt, Artificial Sequence
  Synthetic
caauuauggaauugcucaaaa

SEQ ID NO: 169547 - RNA, 22 nt, Artificial Sequence
  Synthetic
acaauuauggaauugcucaaaa

SEQ ID NO: 169548 - RNA, 23 nt, Artificial Sequence
  Synthetic
gacaauuauggaauugcucaaaa

SEQ ID NO: 169549 - RNA, 24 nt, Artificial Sequence
  Synthetic
ggacaauuauggaauugcucaaaa

SEQ ID NO: 169550 - RNA, 18 nt, Artificial Sequence
  Synthetic
ccgacuccuugcucaaaa

SEQ ID NO: 169551 - RNA, 19 nt, Artificial Sequence
  Synthetic
uccgacuccuugcucaaaa

SEQ ID NO: 169552 - RNA, 20 nt, Artificial Sequence
  Synthetic
uuccgacuccuugcucaaaa

SEQ ID NO: 169553 - RNA, 21 nt, Artificial Sequence
  Synthetic
uuuccgacuccuugcucaaaa

SEQ ID NO: 169554 - RNA, 22 nt, Artificial Sequence
  Synthetic
cuuuccgacuccuugcucaaaa

SEQ ID NO: 169555 - RNA, 23 nt, Artificial Sequence
  Synthetic
gcuuuccgacuccuugcucaaaa

SEQ ID NO: 169556 - RNA, 24 nt, Artificial Sequence
  Synthetic
ggcuuuccgacuccuugcucaaaa

SEQ ID NO: 169557 - RNA, 18 nt, Artificial Sequence
  Synthetic
uugcaaugguucucaaaa

SEQ ID NO: 169558 - RNA, 19 nt, Artificial Sequence
  Synthetic
auugcaaugguucucaaaa

SEQ ID NO: 169559 - RNA, 20 nt, Artificial Sequence
  Synthetic
uauugcaaugguucucaaaa

SEQ ID NO: 169560 - RNA, 21 nt, Artificial Sequence
  Synthetic
cuauugcaaugguucucaaaa

SEQ ID NO: 169561 - RNA, 22 nt, Artificial Sequence
  Synthetic
ucuauugcaaugguucucaaaa

SEQ ID NO: 169562 - RNA, 23 nt, Artificial Sequence
  Synthetic
gucuauugcaaugguucucaaaa

SEQ ID NO: 169563 - RNA, 24 nt, Artificial Sequence
  Synthetic
ugucuauugcaaugguucucaaaa

SEQ ID NO: 169564 - RNA, 18 nt, Artificial Sequence
  Synthetic
guagcuuugaagucaaaa

SEQ ID NO: 169565 - RNA, 19 nt, Artificial Sequence
  Synthetic
aguagcuuugaagucaaaa

SEQ ID NO: 169566 - RNA, 20 nt, Artificial Sequence
  Synthetic
uaguagcuuugaagucaaaa

SEQ ID NO: 169567 - RNA, 21 nt, Artificial Sequence
  Synthetic
cuaguagcuuugaagucaaaa

SEQ ID NO: 169568 - RNA, 22 nt, Artificial Sequence
  Synthetic
ccuaguagcuuugaagucaaaa

SEQ ID NO: 169569 - RNA, 23 nt, Artificial Sequence
  Synthetic
cccuaguagcuuugaagucaaaa

SEQ ID NO: 169570 - RNA, 24 nt, Artificial Sequence
  Synthetic
ccccuaguagcuuugaagucaaaa

SEQ ID NO: 169571 - RNA, 18 nt, Artificial Sequence
  Synthetic
ugaugacaagggucaaaa

SEQ ID NO: 169572 - RNA, 19 nt, Artificial Sequence
  Synthetic
gugaugacaagggucaaaa

SEQ ID NO: 169573 - RNA, 20 nt, Artificial Sequence
  Synthetic
agugaugacaagggucaaaa

SEQ ID NO: 169574 - RNA, 21 nt, Artificial Sequence
  Synthetic
cagugaugacaagggucaaaa

SEQ ID NO: 169575 - RNA, 22 nt, Artificial Sequence
  Synthetic
ccagugaugacaagggucaaaa

SEQ ID NO: 169576 - RNA, 23 nt, Artificial Sequence
  Synthetic
uccagugaugacaagggucaaaa

SEQ ID NO: 169577 - RNA, 24 nt, Artificial Sequence
  Synthetic
uuccagugaugacaagggucaaaa

SEQ ID NO: 169578 - RNA, 18 nt, Artificial Sequence
  Synthetic
uauauauauuugucaaaa

SEQ ID NO: 169579 - RNA, 19 nt, Artificial Sequence
  Synthetic
auauauauauuugucaaaa

SEQ ID NO: 169580 - RNA, 20 nt, Artificial Sequence
  Synthetic
aauauauauauuugucaaaa

SEQ ID NO: 169581 - RNA, 21 nt, Artificial Sequence
  Synthetic
aaauauauauauuugucaaaa

SEQ ID NO: 169582 - RNA, 22 nt, Artificial Sequence
  Synthetic
caaauauauauauuugucaaaa

SEQ ID NO: 169583 - RNA, 23 nt, Artificial Sequence
  Synthetic
acaaauauauauauuugucaaaa

SEQ ID NO: 169584 - RNA, 24 nt, Artificial Sequence
  Synthetic
gacaaauauauauauuugucaaaa

SEQ ID NO: 169585 - RNA, 18 nt, Artificial Sequence
  Synthetic
aaaccccaaaauucaaaa

SEQ ID NO: 169586 - RNA, 19 nt, Artificial Sequence
  Synthetic
caaaccccaaaauucaaaa

SEQ ID NO: 169587 - RNA, 20 nt, Artificial Sequence
  Synthetic
ccaaaccccaaaauucaaaa

SEQ ID NO: 169588 - RNA, 21 nt, Artificial Sequence
  Synthetic
cccaaaccccaaaauucaaaa

SEQ ID NO: 169589 - RNA, 22 nt, Artificial Sequence
  Synthetic
ucccaaaccccaaaauucaaaa

SEQ ID NO: 169590 - RNA, 23 nt, Artificial Sequence
  Synthetic
aucccaaaccccaaaauucaaaa

SEQ ID NO: 169591 - RNA, 24 nt, Artificial Sequence
  Synthetic
caucccaaaccccaaaauucaaaa

SEQ ID NO: 169592 - RNA, 18 nt, Artificial Sequence
  Synthetic
ccaaaaauuaauucaaaa

SEQ ID NO: 169593 - RNA, 19 nt, Artificial Sequence
  Synthetic
uccaaaaauuaauucaaaa

SEQ ID NO: 169594 - RNA, 20 nt, Artificial Sequence
  Synthetic
auccaaaaauuaauucaaaa

SEQ ID NO: 169595 - RNA, 21 nt, Artificial Sequence
  Synthetic
aauccaaaaauuaauucaaaa

SEQ ID NO: 169596 - RNA, 22 nt, Artificial Sequence
  Synthetic
gaauccaaaaauuaauucaaaa

SEQ ID NO: 169597 - RNA, 23 nt, Artificial Sequence
  Synthetic
ggaauccaaaaauuaauucaaaa

SEQ ID NO: 169598 - RNA, 24 nt, Artificial Sequence
  Synthetic
uggaauccaaaaauuaauucaaaa

SEQ ID NO: 169599 - RNA, 18 nt, Artificial Sequence
  Synthetic
cuaguagaacauucaaaa

SEQ ID NO: 169600 - RNA, 19 nt, Artificial Sequence
  Synthetic
gcuaguagaacauucaaaa

SEQ ID NO: 169601 - RNA, 20 nt, Artificial Sequence
  Synthetic
ugcuaguagaacauucaaaa

SEQ ID NO: 169602 - RNA, 21 nt, Artificial Sequence
  Synthetic
gugcuaguagaacauucaaaa

SEQ ID NO: 169603 - RNA, 22 nt, Artificial Sequence
  Synthetic
ggugcuaguagaacauucaaaa

SEQ ID NO: 169604 - RNA, 23 nt, Artificial Sequence
  Synthetic
aggugcuaguagaacauucaaaa

SEQ ID NO: 169605 - RNA, 24 nt, Artificial Sequence
  Synthetic
gaggugcuaguagaacauucaaaa

SEQ ID NO: 169606 - RNA, 18 nt, Artificial Sequence
  Synthetic
cauuuugaugauucaaaa

SEQ ID NO: 169607 - RNA, 19 nt, Artificial Sequence
  Synthetic
ucauuuugaugauucaaaa

SEQ ID NO: 169608 - RNA, 20 nt, Artificial Sequence
  Synthetic
aucauuuugaugauucaaaa

SEQ ID NO: 169609 - RNA, 21 nt, Artificial Sequence
  Synthetic
gaucauuuugaugauucaaaa

SEQ ID NO: 169610 - RNA, 22 nt, Artificial Sequence
  Synthetic
ugaucauuuugaugauucaaaa

SEQ ID NO: 169611 - RNA, 23 nt, Artificial Sequence
  Synthetic
gugaucauuuugaugauucaaaa

SEQ ID NO: 169612 - RNA, 24 nt, Artificial Sequence
  Synthetic
ggugaucauuuugaugauucaaaa

SEQ ID NO: 169613 - RNA, 18 nt, Artificial Sequence
  Synthetic
cccuugauuaguucaaaa

SEQ ID NO: 169614 - RNA, 19 nt, Artificial Sequence
  Synthetic
gcccuugauuaguucaaaa

SEQ ID NO: 169615 - RNA, 20 nt, Artificial Sequence
  Synthetic
ugcccuugauuaguucaaaa

SEQ ID NO: 169616 - RNA, 21 nt, Artificial Sequence
  Synthetic
cugcccuugauuaguucaaaa

SEQ ID NO: 169617 - RNA, 22 nt, Artificial Sequence
  Synthetic
gcugcccuugauuaguucaaaa

SEQ ID NO: 169618 - RNA, 23 nt, Artificial Sequence
  Synthetic
agcugcccuugauuaguucaaaa

SEQ ID NO: 169619 - RNA, 24 nt, Artificial Sequence
  Synthetic
gagcugcccuugauuaguucaaaa

SEQ ID NO: 169620 - RNA, 18 nt, Artificial Sequence
  Synthetic
gcuucaguauguucaaaa

SEQ ID NO: 169621 - RNA, 19 nt, Artificial Sequence
  Synthetic
ggcuucaguauguucaaaa

SEQ ID NO: 169622 - RNA, 20 nt, Artificial Sequence
  Synthetic
gggcuucaguauguucaaaa

SEQ ID NO: 169623 - RNA, 21 nt, Artificial Sequence
  Synthetic
ugggcuucaguauguucaaaa

SEQ ID NO: 169624 - RNA, 22 nt, Artificial Sequence
  Synthetic
cugggcuucaguauguucaaaa

SEQ ID NO: 169625 - RNA, 23 nt, Artificial Sequence
  Synthetic
ccugggcuucaguauguucaaaa

SEQ ID NO: 169626 - RNA, 24 nt, Artificial Sequence
  Synthetic
uccugggcuucaguauguucaaaa

SEQ ID NO: 169627 - RNA, 18 nt, Artificial Sequence
  Synthetic
ugacugcaccuuucaaaa

SEQ ID NO: 169628 - RNA, 19 nt, Artificial Sequence
  Synthetic
uugacugcaccuuucaaaa

SEQ ID NO: 169629 - RNA, 20 nt, Artificial Sequence
  Synthetic
auugacugcaccuuucaaaa

SEQ ID NO: 169630 - RNA, 21 nt, Artificial Sequence
  Synthetic
aauugacugcaccuuucaaaa

SEQ ID NO: 169631 - RNA, 22 nt, Artificial Sequence
  Synthetic
gaauugacugcaccuuucaaaa

SEQ ID NO: 169632 - RNA, 23 nt, Artificial Sequence
  Synthetic
agaauugacugcaccuuucaaaa

SEQ ID NO: 169633 - RNA, 24 nt, Artificial Sequence
  Synthetic
gagaauugacugcaccuuucaaaa

SEQ ID NO: 169634 - RNA, 18 nt, Artificial Sequence
  Synthetic
acaguagaucuuucaaaa

SEQ ID NO: 169635 - RNA, 19 nt, Artificial Sequence
  Synthetic
cacaguagaucuuucaaaa

SEQ ID NO: 169636 - RNA, 20 nt, Artificial Sequence
  Synthetic
ccacaguagaucuuucaaaa

SEQ ID NO: 169637 - RNA, 21 nt, Artificial Sequence
  Synthetic
cccacaguagaucuuucaaaa

SEQ ID NO: 169638 - RNA, 22 nt, Artificial Sequence
  Synthetic
acccacaguagaucuuucaaaa

SEQ ID NO: 169639 - RNA, 23 nt, Artificial Sequence
  Synthetic
uacccacaguagaucuuucaaaa

SEQ ID NO: 169640 - RNA, 24 nt, Artificial Sequence
  Synthetic
uuacccacaguagaucuuucaaaa

SEQ ID NO: 169641 - RNA, 18 nt, Artificial Sequence
  Synthetic
cuucucagaaaaagaaaa

SEQ ID NO: 169642 - RNA, 19 nt, Artificial Sequence
  Synthetic
ccuucucagaaaaagaaaa

SEQ ID NO: 169643 - RNA, 20 nt, Artificial Sequence
  Synthetic
uccuucucagaaaaagaaaa

SEQ ID NO: 169644 - RNA, 21 nt, Artificial Sequence
  Synthetic
uuccuucucagaaaaagaaaa

SEQ ID NO: 169645 - RNA, 22 nt, Artificial Sequence
  Synthetic
uuuccuucucagaaaaagaaaa

SEQ ID NO: 169646 - RNA, 23 nt, Artificial Sequence
  Synthetic
uuuuccuucucagaaaaagaaaa

SEQ ID NO: 169647 - RNA, 24 nt, Artificial Sequence
  Synthetic
cuuuuccuucucagaaaaagaaaa

SEQ ID NO: 169648 - RNA, 18 nt, Artificial Sequence
  Synthetic
gaugagugaaaaagaaaa

SEQ ID NO: 169649 - RNA, 19 nt, Artificial Sequence
  Synthetic
cgaugagugaaaaagaaaa

SEQ ID NO: 169650 - RNA, 20 nt, Artificial Sequence
  Synthetic
ucgaugagugaaaaagaaaa

SEQ ID NO: 169651 - RNA, 21 nt, Artificial Sequence
  Synthetic
cucgaugagugaaaaagaaaa

SEQ ID NO: 169652 - RNA, 22 nt, Artificial Sequence
  Synthetic
gcucgaugagugaaaaagaaaa

SEQ ID NO: 169653 - RNA, 23 nt, Artificial Sequence
  Synthetic
ugcucgaugagugaaaaagaaaa

SEQ ID NO: 169654 - RNA, 24 nt, Artificial Sequence
  Synthetic
augcucgaugagugaaaaagaaaa

SEQ ID NO: 169655 - RNA, 18 nt, Artificial Sequence
  Synthetic
ucguguaucaaaagaaaa

SEQ ID NO: 169656 - RNA, 19 nt, Artificial Sequence
  Synthetic
uucguguaucaaaagaaaa

SEQ ID NO: 169657 - RNA, 20 nt, Artificial Sequence
  Synthetic
cuucguguaucaaaagaaaa

SEQ ID NO: 169658 - RNA, 21 nt, Artificial Sequence
  Synthetic
ccuucguguaucaaaagaaaa

SEQ ID NO: 169659 - RNA, 22 nt, Artificial Sequence
  Synthetic
accuucguguaucaaaagaaaa

SEQ ID NO: 169660 - RNA, 23 nt, Artificial Sequence
  Synthetic
caccuucguguaucaaaagaaaa

SEQ ID NO: 169661 - RNA, 24 nt, Artificial Sequence
  Synthetic
ucaccuucguguaucaaaagaaaa

SEQ ID NO: 169662 - RNA, 18 nt, Artificial Sequence
  Synthetic
cucugucucaaaagaaaa

SEQ ID NO: 169663 - RNA, 19 nt, Artificial Sequence
  Synthetic
acucugucucaaaagaaaa

SEQ ID NO: 169664 - RNA, 20 nt, Artificial Sequence
  Synthetic
gacucugucucaaaagaaaa

SEQ ID NO: 169665 - RNA, 21 nt, Artificial Sequence
  Synthetic
agacucugucucaaaagaaaa

SEQ ID NO: 169666 - RNA, 22 nt, Artificial Sequence
  Synthetic
gagacucugucucaaaagaaaa

SEQ ID NO: 169667 - RNA, 23 nt, Artificial Sequence
  Synthetic
ugagacucugucucaaaagaaaa

SEQ ID NO: 169668 - RNA, 24 nt, Artificial Sequence
  Synthetic
gugagacucugucucaaaagaaaa

SEQ ID NO: 169669 - RNA, 18 nt, Artificial Sequence
  Synthetic
ccucaggauaaaagaaaa

SEQ ID NO: 169670 - RNA, 19 nt, Artificial Sequence
  Synthetic
uccucaggauaaaagaaaa

SEQ ID NO: 169671 - RNA, 20 nt, Artificial Sequence
  Synthetic
uuccucaggauaaaagaaaa

SEQ ID NO: 169672 - RNA, 21 nt, Artificial Sequence
  Synthetic
auuccucaggauaaaagaaaa

SEQ ID NO: 169673 - RNA, 22 nt, Artificial Sequence
  Synthetic
aauuccucaggauaaaagaaaa

SEQ ID NO: 169674 - RNA, 23 nt, Artificial Sequence
  Synthetic
uaauuccucaggauaaaagaaaa

SEQ ID NO: 169675 - RNA, 24 nt, Artificial Sequence
  Synthetic
auaauuccucaggauaaaagaaaa

SEQ ID NO: 169676 - RNA, 18 nt, Artificial Sequence
  Synthetic
augacaaaacaaagaaaa

SEQ ID NO: 169677 - RNA, 19 nt, Artificial Sequence
  Synthetic
aaugacaaaacaaagaaaa

SEQ ID NO: 169678 - RNA, 20 nt, Artificial Sequence
  Synthetic
aaaugacaaaacaaagaaaa

SEQ ID NO: 169679 - RNA, 21 nt, Artificial Sequence
  Synthetic
gaaaugacaaaacaaagaaaa

SEQ ID NO: 169680 - RNA, 22 nt, Artificial Sequence
  Synthetic
agaaaugacaaaacaaagaaaa

SEQ ID NO: 169681 - RNA, 23 nt, Artificial Sequence
  Synthetic
gagaaaugacaaaacaaagaaaa

SEQ ID NO: 169682 - RNA, 24 nt, Artificial Sequence
  Synthetic
agagaaaugacaaaacaaagaaaa

SEQ ID NO: 169683 - RNA, 18 nt, Artificial Sequence
  Synthetic
agguacaagcaaagaaaa

SEQ ID NO: 169684 - RNA, 19 nt, Artificial Sequence
  Synthetic
gagguacaagcaaagaaaa

SEQ ID NO: 169685 - RNA, 20 nt, Artificial Sequence
  Synthetic
agagguacaagcaaagaaaa

SEQ ID NO: 169686 - RNA, 21 nt, Artificial Sequence
  Synthetic
uagagguacaagcaaagaaaa

SEQ ID NO: 169687 - RNA, 22 nt, Artificial Sequence
  Synthetic
uuagagguacaagcaaagaaaa

SEQ ID NO: 169688 - RNA, 23 nt, Artificial Sequence
  Synthetic
auuagagguacaagcaaagaaaa

SEQ ID NO: 169689 - RNA, 24 nt, Artificial Sequence
  Synthetic
aauuagagguacaagcaaagaaaa

SEQ ID NO: 169690 - RNA, 18 nt, Artificial Sequence
  Synthetic
agucuucagcaaagaaaa

SEQ ID NO: 169691 - RNA, 19 nt, Artificial Sequence
  Synthetic
cagucuucagcaaagaaaa

SEQ ID NO: 169692 - RNA, 20 nt, Artificial Sequence
  Synthetic
gcagucuucagcaaagaaaa

SEQ ID NO: 169693 - RNA, 21 nt, Artificial Sequence
  Synthetic
ugcagucuucagcaaagaaaa

SEQ ID NO: 169694 - RNA, 22 nt, Artificial Sequence
  Synthetic
gugcagucuucagcaaagaaaa

SEQ ID NO: 169695 - RNA, 23 nt, Artificial Sequence
  Synthetic
ggugcagucuucagcaaagaaaa

SEQ ID NO: 169696 - RNA, 24 nt, Artificial Sequence
  Synthetic
gggugcagucuucagcaaagaaaa

SEQ ID NO: 169697 - RNA, 18 nt, Artificial Sequence
  Synthetic
uaccuggugcaaagaaaa

SEQ ID NO: 169698 - RNA, 19 nt, Artificial Sequence
  Synthetic
guaccuggugcaaagaaaa

SEQ ID NO: 169699 - RNA, 20 nt, Artificial Sequence
  Synthetic
gguaccuggugcaaagaaaa

SEQ ID NO: 169700 - RNA, 21 nt, Artificial Sequence
  Synthetic
ggguaccuggugcaaagaaaa

SEQ ID NO: 169701 - RNA, 22 nt, Artificial Sequence
  Synthetic
aggguaccuggugcaaagaaaa

SEQ ID NO: 169702 - RNA, 23 nt, Artificial Sequence
  Synthetic
gaggguaccuggugcaaagaaaa

SEQ ID NO: 169703 - RNA, 24 nt, Artificial Sequence
  Synthetic
agaggguaccuggugcaaagaaaa

SEQ ID NO: 169704 - RNA, 18 nt, Artificial Sequence
  Synthetic
auauaauuucaaagaaaa

SEQ ID NO: 169705 - RNA, 19 nt, Artificial Sequence
  Synthetic
cauauaauuucaaagaaaa

SEQ ID NO: 169706 - RNA, 20 nt, Artificial Sequence
  Synthetic
ccauauaauuucaaagaaaa

SEQ ID NO: 169707 - RNA, 21 nt, Artificial Sequence
  Synthetic
accauauaauuucaaagaaaa

SEQ ID NO: 169708 - RNA, 22 nt, Artificial Sequence
  Synthetic
aaccauauaauuucaaagaaaa

SEQ ID NO: 169709 - RNA, 23 nt, Artificial Sequence
  Synthetic
aaaccauauaauuucaaagaaaa

SEQ ID NO: 169710 - RNA, 24 nt, Artificial Sequence
  Synthetic
aaaaccauauaauuucaaagaaaa

SEQ ID NO: 169711 - RNA, 18 nt, Artificial Sequence
  Synthetic
agaauagaagaaagaaaa

SEQ ID NO: 169712 - RNA, 19 nt, Artificial Sequence
  Synthetic
aagaauagaagaaagaaaa

SEQ ID NO: 169713 - RNA, 20 nt, Artificial Sequence
  Synthetic
gaagaauagaagaaagaaaa

SEQ ID NO: 169714 - RNA, 21 nt, Artificial Sequence
  Synthetic
agaagaauagaagaaagaaaa

SEQ ID NO: 169715 - RNA, 22 nt, Artificial Sequence
  Synthetic
gagaagaauagaagaaagaaaa

SEQ ID NO: 169716 - RNA, 23 nt, Artificial Sequence
  Synthetic
agagaagaauagaagaaagaaaa

SEQ ID NO: 169717 - RNA, 24 nt, Artificial Sequence
  Synthetic
uagagaagaauagaagaaagaaaa

SEQ ID NO: 169718 - RNA, 18 nt, Artificial Sequence
  Synthetic
ggaaggaaggaaagaaaa

SEQ ID NO: 169719 - RNA, 19 nt, Artificial Sequence
  Synthetic
aggaaggaaggaaagaaaa

SEQ ID NO: 169720 - RNA, 20 nt, Artificial Sequence
  Synthetic
aaggaaggaaggaaagaaaa

SEQ ID NO: 169721 - RNA, 21 nt, Artificial Sequence
  Synthetic
gaaggaaggaaggaaagaaaa

SEQ ID NO: 169722 - RNA, 22 nt, Artificial Sequence
  Synthetic
ggaaggaaggaaggaaagaaaa

SEQ ID NO: 169723 - RNA, 23 nt, Artificial Sequence
  Synthetic
aggaaggaaggaaggaaagaaaa

SEQ ID NO: 169724 - RNA, 24 nt, Artificial Sequence
  Synthetic
aaggaaggaaggaaggaaagaaaa

SEQ ID NO: 169725 - RNA, 18 nt, Artificial Sequence
  Synthetic
uaaguacuauaaagaaaa

SEQ ID NO: 169726 - RNA, 19 nt, Artificial Sequence
  Synthetic
auaaguacuauaaagaaaa

SEQ ID NO: 169727 - RNA, 20 nt, Artificial Sequence
  Synthetic
aauaaguacuauaaagaaaa

SEQ ID NO: 169728 - RNA, 21 nt, Artificial Sequence
  Synthetic
uaauaaguacuauaaagaaaa

SEQ ID NO: 169729 - RNA, 22 nt, Artificial Sequence
  Synthetic
guaauaaguacuauaaagaaaa

SEQ ID NO: 169730 - RNA, 23 nt, Artificial Sequence
  Synthetic
aguaauaaguacuauaaagaaaa

SEQ ID NO: 169731 - RNA, 24 nt, Artificial Sequence
  Synthetic
uaguaauaaguacuauaaagaaaa

SEQ ID NO: 169732 - RNA, 18 nt, Artificial Sequence
  Synthetic
uucauugcaacaagaaaa

SEQ ID NO: 169733 - RNA, 19 nt, Artificial Sequence
  Synthetic
cuucauugcaacaagaaaa

SEQ ID NO: 169734 - RNA, 20 nt, Artificial Sequence
  Synthetic
ucuucauugcaacaagaaaa

SEQ ID NO: 169735 - RNA, 21 nt, Artificial Sequence
  Synthetic
aucuucauugcaacaagaaaa

SEQ ID NO: 169736 - RNA, 22 nt, Artificial Sequence
  Synthetic
caucuucauugcaacaagaaaa

SEQ ID NO: 169737 - RNA, 23 nt, Artificial Sequence
  Synthetic
ucaucuucauugcaacaagaaaa

SEQ ID NO: 169738 - RNA, 24 nt, Artificial Sequence
  Synthetic
cucaucuucauugcaacaagaaaa

SEQ ID NO: 169739 - RNA, 18 nt, Artificial Sequence
  Synthetic
aaagccaagacaagaaaa

SEQ ID NO: 169740 - RNA, 19 nt, Artificial Sequence
  Synthetic
aaaagccaagacaagaaaa

SEQ ID NO: 169741 - RNA, 20 nt, Artificial Sequence
  Synthetic
uaaaagccaagacaagaaaa

SEQ ID NO: 169742 - RNA, 21 nt, Artificial Sequence
  Synthetic
guaaaagccaagacaagaaaa

SEQ ID NO: 169743 - RNA, 22 nt, Artificial Sequence
  Synthetic
uguaaaagccaagacaagaaaa

SEQ ID NO: 169744 - RNA, 23 nt, Artificial Sequence
  Synthetic
auguaaaagccaagacaagaaaa

SEQ ID NO: 169745 - RNA, 24 nt, Artificial Sequence
  Synthetic
aauguaaaagccaagacaagaaaa

SEQ ID NO: 169746 - RNA, 18 nt, Artificial Sequence
  Synthetic
guccauguaccaagaaaa

SEQ ID NO: 169747 - RNA, 19 nt, Artificial Sequence
  Synthetic
gguccauguaccaagaaaa

SEQ ID NO: 169748 - RNA, 20 nt, Artificial Sequence
  Synthetic
agguccauguaccaagaaaa

SEQ ID NO: 169749 - RNA, 21 nt, Artificial Sequence
  Synthetic
gagguccauguaccaagaaaa

SEQ ID NO: 169750 - RNA, 22 nt, Artificial Sequence
  Synthetic
agagguccauguaccaagaaaa

SEQ ID NO: 169751 - RNA, 23 nt, Artificial Sequence
  Synthetic
gagagguccauguaccaagaaaa

SEQ ID NO: 169752 - RNA, 24 nt, Artificial Sequence
  Synthetic
agagagguccauguaccaagaaaa

SEQ ID NO: 169753 - RNA, 18 nt, Artificial Sequence
  Synthetic
aggagugagccaagaaaa

SEQ ID NO: 169754 - RNA, 19 nt, Artificial Sequence
  Synthetic
gaggagugagccaagaaaa

SEQ ID NO: 169755 - RNA, 20 nt, Artificial Sequence
  Synthetic
agaggagugagccaagaaaa

SEQ ID NO: 169756 - RNA, 21 nt, Artificial Sequence
  Synthetic
gagaggagugagccaagaaaa

SEQ ID NO: 169757 - RNA, 22 nt, Artificial Sequence
  Synthetic
ggagaggagugagccaagaaaa

SEQ ID NO: 169758 - RNA, 23 nt, Artificial Sequence
  Synthetic
aggagaggagugagccaagaaaa

SEQ ID NO: 169759 - RNA, 24 nt, Artificial Sequence
  Synthetic
gaggagaggagugagccaagaaaa

SEQ ID NO: 169760 - RNA, 18 nt, Artificial Sequence
  Synthetic
aaaaagugggcaagaaaa

SEQ ID NO: 169761 - RNA, 19 nt, Artificial Sequence
  Synthetic
caaaaagugggcaagaaaa

SEQ ID NO: 169762 - RNA, 20 nt, Artificial Sequence
  Synthetic
ccaaaaagugggcaagaaaa

SEQ ID NO: 169763 - RNA, 21 nt, Artificial Sequence
  Synthetic
accaaaaagugggcaagaaaa

SEQ ID NO: 169764 - RNA, 22 nt, Artificial Sequence
  Synthetic
aaccaaaaagugggcaagaaaa

SEQ ID NO: 169765 - RNA, 23 nt, Artificial Sequence
  Synthetic
uaaccaaaaagugggcaagaaaa

SEQ ID NO: 169766 - RNA, 24 nt, Artificial Sequence
  Synthetic
uuaaccaaaaagugggcaagaaaa

SEQ ID NO: 169767 - RNA, 18 nt, Artificial Sequence
  Synthetic
gacuaauaaagaagaaaa

SEQ ID NO: 169768 - RNA, 19 nt, Artificial Sequence
  Synthetic
agacuaauaaagaagaaaa

SEQ ID NO: 169769 - RNA, 20 nt, Artificial Sequence
  Synthetic
cagacuaauaaagaagaaaa

SEQ ID NO: 169770 - RNA, 24 nt, Artificial Sequence
  Synthetic
uagccagacuaauaaagaagaaaa

SEQ ID NO: 169771 - RNA, 18 nt, Artificial Sequence
  Synthetic
aaaguguuaagaagaaaa

SEQ ID NO: 169772 - RNA, 19 nt, Artificial Sequence
  Synthetic
uaaaguguuaagaagaaaa

SEQ ID NO: 169773 - RNA, 20 nt, Artificial Sequence
  Synthetic
uuaaaguguuaagaagaaaa

SEQ ID NO: 169774 - RNA, 21 nt, Artificial Sequence
  Synthetic
auuaaaguguuaagaagaaaa

SEQ ID NO: 169775 - RNA, 22 nt, Artificial Sequence
  Synthetic
uauuaaaguguuaagaagaaaa

SEQ ID NO: 169776 - RNA, 23 nt, Artificial Sequence
  Synthetic
guauuaaaguguuaagaagaaaa

SEQ ID NO: 169777 - RNA, 24 nt, Artificial Sequence
  Synthetic
aguauuaaaguguuaagaagaaaa

SEQ ID NO: 169778 - RNA, 18 nt, Artificial Sequence
  Synthetic
aguuugcagagaagaaaa

SEQ ID NO: 169779 - RNA, 19 nt, Artificial Sequence
  Synthetic
uaguuugcagagaagaaaa

SEQ ID NO: 169780 - RNA, 20 nt, Artificial Sequence
  Synthetic
uuaguuugcagagaagaaaa

SEQ ID NO: 169781 - RNA, 21 nt, Artificial Sequence
  Synthetic
cuuaguuugcagagaagaaaa

SEQ ID NO: 169782 - RNA, 22 nt, Artificial Sequence
  Synthetic
ucuuaguuugcagagaagaaaa

SEQ ID NO: 169783 - RNA, 23 nt, Artificial Sequence
  Synthetic
uucuuaguuugcagagaagaaaa

SEQ ID NO: 169784 - RNA, 24 nt, Artificial Sequence
  Synthetic
auucuuaguuugcagagaagaaaa

SEQ ID NO: 169785 - RNA, 18 nt, Artificial Sequence
  Synthetic
ugugcuacaugaagaaaa

SEQ ID NO: 169786 - RNA, 19 nt, Artificial Sequence
  Synthetic
uugugcuacaugaagaaaa

SEQ ID NO: 169787 - RNA, 20 nt, Artificial Sequence
  Synthetic
uuugugcuacaugaagaaaa

SEQ ID NO: 169788 - RNA, 21 nt, Artificial Sequence
  Synthetic
auuugugcuacaugaagaaaa

SEQ ID NO: 169789 - RNA, 22 nt, Artificial Sequence
  Synthetic
cauuugugcuacaugaagaaaa

SEQ ID NO: 169790 - RNA, 23 nt, Artificial Sequence
  Synthetic
ccauuugugcuacaugaagaaaa

SEQ ID NO: 169791 - RNA, 24 nt, Artificial Sequence
  Synthetic
gccauuugugcuacaugaagaaaa

SEQ ID NO: 169792 - RNA, 18 nt, Artificial Sequence
  Synthetic
auguauaccugaagaaaa

SEQ ID NO: 169793 - RNA, 19 nt, Artificial Sequence
  Synthetic
aauguauaccugaagaaaa

SEQ ID NO: 169794 - RNA, 20 nt, Artificial Sequence
  Synthetic
gaauguauaccugaagaaaa

SEQ ID NO: 169795 - RNA, 21 nt, Artificial Sequence
  Synthetic
agaauguauaccugaagaaaa

SEQ ID NO: 169796 - RNA, 22 nt, Artificial Sequence
  Synthetic
gagaauguauaccugaagaaaa

SEQ ID NO: 169797 - RNA, 23 nt, Artificial Sequence
  Synthetic
ggagaauguauaccugaagaaaa

SEQ ID NO: 169798 - RNA, 24 nt, Artificial Sequence
  Synthetic
aggagaauguauaccugaagaaaa

SEQ ID NO: 169799 - RNA, 18 nt, Artificial Sequence
  Synthetic
uuucaccaaauaagaaaa

SEQ ID NO: 169800 - RNA, 19 nt, Artificial Sequence
  Synthetic
auuucaccaaauaagaaaa

SEQ ID NO: 169801 - RNA, 20 nt, Artificial Sequence
  Synthetic
cauuucaccaaauaagaaaa

SEQ ID NO: 169802 - RNA, 21 nt, Artificial Sequence
  Synthetic
ucauuucaccaaauaagaaaa

SEQ ID NO: 169803 - RNA, 22 nt, Artificial Sequence
  Synthetic
cucauuucaccaaauaagaaaa

SEQ ID NO: 169804 - RNA, 23 nt, Artificial Sequence
  Synthetic
ccucauuucaccaaauaagaaaa

SEQ ID NO: 169805 - RNA, 24 nt, Artificial Sequence
  Synthetic
uccucauuucaccaaauaagaaaa

SEQ ID NO: 169806 - RNA, 18 nt, Artificial Sequence
  Synthetic
aagacaacaauaagaaaa

SEQ ID NO: 169807 - RNA, 19 nt, Artificial Sequence
  Synthetic
aaagacaacaauaagaaaa

SEQ ID NO: 169808 - RNA, 20 nt, Artificial Sequence
  Synthetic
caaagacaacaauaagaaaa

SEQ ID NO: 169809 - RNA, 21 nt, Artificial Sequence
  Synthetic
ccaaagacaacaauaagaaaa

SEQ ID NO: 169810 - RNA, 22 nt, Artificial Sequence
  Synthetic
cccaaagacaacaauaagaaaa

SEQ ID NO: 169811 - RNA, 23 nt, Artificial Sequence
  Synthetic
acccaaagacaacaauaagaaaa

SEQ ID NO: 169812 - RNA, 24 nt, Artificial Sequence
  Synthetic
gacccaaagacaacaauaagaaaa

SEQ ID NO: 169813 - RNA, 18 nt, Artificial Sequence
  Synthetic
cacaagaagguaagaaaa

SEQ ID NO: 169814 - RNA, 19 nt, Artificial Sequence
  Synthetic
ccacaagaagguaagaaaa

SEQ ID NO: 169815 - RNA, 20 nt, Artificial Sequence
  Synthetic
cccacaagaagguaagaaaa

SEQ ID NO: 169816 - RNA, 21 nt, Artificial Sequence
  Synthetic
acccacaagaagguaagaaaa

SEQ ID NO: 169817 - RNA, 22 nt, Artificial Sequence
  Synthetic
aacccacaagaagguaagaaaa

SEQ ID NO: 169818 - RNA, 23 nt, Artificial Sequence
  Synthetic
uaacccacaagaagguaagaaaa

SEQ ID NO: 169819 - RNA, 24 nt, Artificial Sequence
  Synthetic
auaacccacaagaagguaagaaaa

SEQ ID NO: 169820 - RNA, 18 nt, Artificial Sequence
  Synthetic
uuuaugaauuuaagaaaa

SEQ ID NO: 169821 - RNA, 19 nt, Artificial Sequence
  Synthetic
uuuuaugaauuuaagaaaa

SEQ ID NO: 169822 - RNA, 20 nt, Artificial Sequence
  Synthetic
auuuuaugaauuuaagaaaa

SEQ ID NO: 169823 - RNA, 21 nt, Artificial Sequence
  Synthetic
cauuuuaugaauuuaagaaaa

SEQ ID NO: 169824 - RNA, 22 nt, Artificial Sequence
  Synthetic
acauuuuaugaauuuaagaaaa

SEQ ID NO: 169825 - RNA, 23 nt, Artificial Sequence
  Synthetic
uacauuuuaugaauuuaagaaaa

SEQ ID NO: 169826 - RNA, 24 nt, Artificial Sequence
  Synthetic
auacauuuuaugaauuuaagaaaa

SEQ ID NO: 169827 - RNA, 18 nt, Artificial Sequence
  Synthetic
uccacauauuuaagaaaa

SEQ ID NO: 169828 - RNA, 19 nt, Artificial Sequence
  Synthetic
auccacauauuuaagaaaa

SEQ ID NO: 169829 - RNA, 20 nt, Artificial Sequence
  Synthetic
cauccacauauuuaagaaaa

SEQ ID NO: 169830 - RNA, 21 nt, Artificial Sequence
  Synthetic
acauccacauauuuaagaaaa

SEQ ID NO: 169831 - RNA, 22 nt, Artificial Sequence
  Synthetic
cacauccacauauuuaagaaaa

SEQ ID NO: 169832 - RNA, 23 nt, Artificial Sequence
  Synthetic
ccacauccacauauuuaagaaaa

SEQ ID NO: 169833 - RNA, 24 nt, Artificial Sequence
  Synthetic
uccacauccacauauuuaagaaaa

SEQ ID NO: 169834 - RNA, 18 nt, Artificial Sequence
  Synthetic
uaaugcaggaacagaaaa

SEQ ID NO: 169835 - RNA, 19 nt, Artificial Sequence
  Synthetic
uuaaugcaggaacagaaaa

SEQ ID NO: 169836 - RNA, 20 nt, Artificial Sequence
  Synthetic
auuaaugcaggaacagaaaa

SEQ ID NO: 169837 - RNA, 21 nt, Artificial Sequence
  Synthetic
aauuaaugcaggaacagaaaa

SEQ ID NO: 169838 - RNA, 22 nt, Artificial Sequence
  Synthetic
gaauuaaugcaggaacagaaaa

SEQ ID NO: 169839 - RNA, 23 nt, Artificial Sequence
  Synthetic
ugaauuaaugcaggaacagaaaa

SEQ ID NO: 169840 - RNA, 24 nt, Artificial Sequence
  Synthetic
gugaauuaaugcaggaacagaaaa

SEQ ID NO: 169841 - RNA, 18 nt, Artificial Sequence
  Synthetic
guugaagaacacagaaaa

SEQ ID NO: 169842 - RNA, 19 nt, Artificial Sequence
  Synthetic
gguugaagaacacagaaaa

SEQ ID NO: 169843 - RNA, 20 nt, Artificial Sequence
  Synthetic
agguugaagaacacagaaaa

SEQ ID NO: 169844 - RNA, 21 nt, Artificial Sequence
  Synthetic
aagguugaagaacacagaaaa

SEQ ID NO: 169845 - RNA, 22 nt, Artificial Sequence
  Synthetic
uaagguugaagaacacagaaaa

SEQ ID NO: 169846 - RNA, 23 nt, Artificial Sequence
  Synthetic
uuaagguugaagaacacagaaaa

SEQ ID NO: 169847 - RNA, 24 nt, Artificial Sequence
  Synthetic
uuuaagguugaagaacacagaaaa

SEQ ID NO: 169848 - RNA, 18 nt, Artificial Sequence
  Synthetic
cagcugucagacagaaaa

SEQ ID NO: 169849 - RNA, 19 nt, Artificial Sequence
  Synthetic
acagcugucagacagaaaa

SEQ ID NO: 169850 - RNA, 20 nt, Artificial Sequence
  Synthetic
aacagcugucagacagaaaa

SEQ ID NO: 169851 - RNA, 21 nt, Artificial Sequence
  Synthetic
aaacagcugucagacagaaaa

SEQ ID NO: 169852 - RNA, 22 nt, Artificial Sequence
  Synthetic
caaacagcugucagacagaaaa

SEQ ID NO: 169853 - RNA, 23 nt, Artificial Sequence
  Synthetic
gcaaacagcugucagacagaaaa

SEQ ID NO: 169854 - RNA, 24 nt, Artificial Sequence
  Synthetic
ugcaaacagcugucagacagaaaa

SEQ ID NO: 169855 - RNA, 18 nt, Artificial Sequence
  Synthetic
cauuuuagagacagaaaa

SEQ ID NO: 169856 - RNA, 19 nt, Artificial Sequence
  Synthetic
ccauuuuagagacagaaaa

SEQ ID NO: 169857 - RNA, 20 nt, Artificial Sequence
  Synthetic
cccauuuuagagacagaaaa

SEQ ID NO: 169858 - RNA, 21 nt, Artificial Sequence
  Synthetic
ucccauuuuagagacagaaaa

SEQ ID NO: 169859 - RNA, 22 nt, Artificial Sequence
  Synthetic
cucccauuuuagagacagaaaa

SEQ ID NO: 169860 - RNA, 23 nt, Artificial Sequence
  Synthetic
acucccauuuuagagacagaaaa

SEQ ID NO: 169861 - RNA, 24 nt, Artificial Sequence
  Synthetic
uacucccauuuuagagacagaaaa

SEQ ID NO: 169862 - RNA, 18 nt, Artificial Sequence
  Synthetic
aggaaaugagacagaaaa

SEQ ID NO: 169863 - RNA, 19 nt, Artificial Sequence
  Synthetic
aaggaaaugagacagaaaa

SEQ ID NO: 169864 - RNA, 20 nt, Artificial Sequence
  Synthetic
gaaggaaaugagacagaaaa

SEQ ID NO: 169865 - RNA, 21 nt, Artificial Sequence
  Synthetic
ugaaggaaaugagacagaaaa

SEQ ID NO: 169866 - RNA, 22 nt, Artificial Sequence
  Synthetic
uugaaggaaaugagacagaaaa

SEQ ID NO: 169867 - RNA, 23 nt, Artificial Sequence
  Synthetic
cuugaaggaaaugagacagaaaa

SEQ ID NO: 169868 - RNA, 24 nt, Artificial Sequence
  Synthetic
gcuugaaggaaaugagacagaaaa

SEQ ID NO: 169869 - RNA, 18 nt, Artificial Sequence
  Synthetic
uaugucuuauacagaaaa

SEQ ID NO: 169870 - RNA, 19 nt, Artificial Sequence
  Synthetic
auaugucuuauacagaaaa

SEQ ID NO: 169871 - RNA, 20 nt, Artificial Sequence
  Synthetic
aauaugucuuauacagaaaa

SEQ ID NO: 169872 - RNA, 21 nt, Artificial Sequence
  Synthetic
caauaugucuuauacagaaaa

SEQ ID NO: 169873 - RNA, 22 nt, Artificial Sequence
  Synthetic
ucaauaugucuuauacagaaaa

SEQ ID NO: 169874 - RNA, 23 nt, Artificial Sequence
  Synthetic
aucaauaugucuuauacagaaaa

SEQ ID NO: 169875 - RNA, 24 nt, Artificial Sequence
  Synthetic
uaucaauaugucuuauacagaaaa

SEQ ID NO: 169876 - RNA, 18 nt, Artificial Sequence
  Synthetic
cuagccaucuacagaaaa

SEQ ID NO: 169877 - RNA, 19 nt, Artificial Sequence
  Synthetic
gcuagccaucuacagaaaa

SEQ ID NO: 169878 - RNA, 20 nt, Artificial Sequence
  Synthetic
ggcuagccaucuacagaaaa

SEQ ID NO: 169879 - RNA, 21 nt, Artificial Sequence
  Synthetic
cggcuagccaucuacagaaaa

SEQ ID NO: 169880 - RNA, 22 nt, Artificial Sequence
  Synthetic
ccggcuagccaucuacagaaaa

SEQ ID NO: 169881 - RNA, 23 nt, Artificial Sequence
  Synthetic
accggcuagccaucuacagaaaa

SEQ ID NO: 169882 - RNA, 24 nt, Artificial Sequence
  Synthetic
aaccggcuagccaucuacagaaaa

SEQ ID NO: 169883 - RNA, 18 nt, Artificial Sequence
  Synthetic
ucuccgagaggcagaaaa

SEQ ID NO: 169884 - RNA, 19 nt, Artificial Sequence
  Synthetic
aucuccgagaggcagaaaa

SEQ ID NO: 169885 - RNA, 20 nt, Artificial Sequence
  Synthetic
gaucuccgagaggcagaaaa

SEQ ID NO: 169886 - RNA, 21 nt, Artificial Sequence
  Synthetic
agaucuccgagaggcagaaaa

SEQ ID NO: 169887 - RNA, 22 nt, Artificial Sequence
  Synthetic
aagaucuccgagaggcagaaaa

SEQ ID NO: 169888 - RNA, 23 nt, Artificial Sequence
  Synthetic
uaagaucuccgagaggcagaaaa

SEQ ID NO: 169889 - RNA, 24 nt, Artificial Sequence
  Synthetic
uuaagaucuccgagaggcagaaaa

SEQ ID NO: 169890 - RNA, 18 nt, Artificial Sequence
  Synthetic
ggaguucacugcagaaaa

SEQ ID NO: 169891 - RNA, 19 nt, Artificial Sequence
  Synthetic
cggaguucacugcagaaaa

SEQ ID NO: 169892 - RNA, 20 nt, Artificial Sequence
  Synthetic
acggaguucacugcagaaaa

SEQ ID NO: 169893 - RNA, 21 nt, Artificial Sequence
  Synthetic
aacggaguucacugcagaaaa

SEQ ID NO: 169894 - RNA, 22 nt, Artificial Sequence
  Synthetic
uaacggaguucacugcagaaaa

SEQ ID NO: 169895 - RNA, 23 nt, Artificial Sequence
  Synthetic
auaacggaguucacugcagaaaa

SEQ ID NO: 169896 - RNA, 24 nt, Artificial Sequence
  Synthetic
uauaacggaguucacugcagaaaa

SEQ ID NO: 169897 - RNA, 18 nt, Artificial Sequence
  Synthetic
agauaacuuaagagaaaa

SEQ ID NO: 169898 - RNA, 19 nt, Artificial Sequence
  Synthetic
uagauaacuuaagagaaaa

SEQ ID NO: 169899 - RNA, 20 nt, Artificial Sequence
  Synthetic
auagauaacuuaagagaaaa

SEQ ID NO: 169900 - RNA, 21 nt, Artificial Sequence
  Synthetic
uauagauaacuuaagagaaaa

SEQ ID NO: 169901 - RNA, 22 nt, Artificial Sequence
  Synthetic
uuauagauaacuuaagagaaaa

SEQ ID NO: 169902 - RNA, 23 nt, Artificial Sequence
  Synthetic
guuauagauaacuuaagagaaaa

SEQ ID NO: 169903 - RNA, 24 nt, Artificial Sequence
  Synthetic
aguuauagauaacuuaagagaaaa

SEQ ID NO: 169904 - RNA, 18 nt, Artificial Sequence
  Synthetic
aagcccucacagagaaaa

SEQ ID NO: 169905 - RNA, 19 nt, Artificial Sequence
  Synthetic
aaagcccucacagagaaaa

SEQ ID NO: 169906 - RNA, 20 nt, Artificial Sequence
  Synthetic
aaaagcccucacagagaaaa

SEQ ID NO: 169907 - RNA, 21 nt, Artificial Sequence
  Synthetic
aaaaagcccucacagagaaaa

SEQ ID NO: 169908 - RNA, 22 nt, Artificial Sequence
  Synthetic
aaaaaagcccucacagagaaaa

SEQ ID NO: 169909 - RNA, 23 nt, Artificial Sequence
  Synthetic
aaaaaaagcccucacagagaaaa

SEQ ID NO: 169910 - RNA, 24 nt, Artificial Sequence
  Synthetic
aaaaaaaagcccucacagagaaaa

SEQ ID NO: 169911 - RNA, 18 nt, Artificial Sequence
  Synthetic
gugaggcugcagagaaaa

SEQ ID NO: 169912 - RNA, 19 nt, Artificial Sequence
  Synthetic
ggugaggcugcagagaaaa

SEQ ID NO: 169913 - RNA, 20 nt, Artificial Sequence
  Synthetic
uggugaggcugcagagaaaa

SEQ ID NO: 169914 - RNA, 21 nt, Artificial Sequence
  Synthetic
uuggugaggcugcagagaaaa

SEQ ID NO: 169915 - RNA, 22 nt, Artificial Sequence
  Synthetic
guuggugaggcugcagagaaaa

SEQ ID NO: 169916 - RNA, 23 nt, Artificial Sequence
  Synthetic
uguuggugaggcugcagagaaaa

SEQ ID NO: 169917 - RNA, 24 nt, Artificial Sequence
  Synthetic
auguuggugaggcugcagagaaaa

SEQ ID NO: 169918 - RNA, 18 nt, Artificial Sequence
  Synthetic
cgaggagacgagagaaaa

SEQ ID NO: 169919 - RNA, 19 nt, Artificial Sequence
  Synthetic
acgaggagacgagagaaaa

SEQ ID NO: 169920 - RNA, 20 nt, Artificial Sequence
  Synthetic
uacgaggagacgagagaaaa

SEQ ID NO: 169921 - RNA, 21 nt, Artificial Sequence
  Synthetic
auacgaggagacgagagaaaa

SEQ ID NO: 169922 - RNA, 22 nt, Artificial Sequence
  Synthetic
uauacgaggagacgagagaaaa

SEQ ID NO: 169923 - RNA, 23 nt, Artificial Sequence
  Synthetic
uuauacgaggagacgagagaaaa

SEQ ID NO: 169924 - RNA, 24 nt, Artificial Sequence
  Synthetic
auuauacgaggagacgagagaaaa

SEQ ID NO: 169925 - RNA, 18 nt, Artificial Sequence
  Synthetic
aaacgaaaggagagaaaa

SEQ ID NO: 169926 - RNA, 19 nt, Artificial Sequence
  Synthetic
gaaacgaaaggagagaaaa

SEQ ID NO: 169927 - RNA, 20 nt, Artificial Sequence
  Synthetic
agaaacgaaaggagagaaaa

SEQ ID NO: 169928 - RNA, 21 nt, Artificial Sequence
  Synthetic
aagaaacgaaaggagagaaaa

SEQ ID NO: 169929 - RNA, 22 nt, Artificial Sequence
  Synthetic
aaagaaacgaaaggagagaaaa

SEQ ID NO: 169930 - RNA, 23 nt, Artificial Sequence
  Synthetic
gaaagaaacgaaaggagagaaaa

SEQ ID NO: 169931 - RNA, 24 nt, Artificial Sequence
  Synthetic
ugaaagaaacgaaaggagagaaaa

SEQ ID NO: 169932 - RNA, 18 nt, Artificial Sequence
  Synthetic
ggugccagugagagaaaa

SEQ ID NO: 169933 - RNA, 19 nt, Artificial Sequence
  Synthetic
uggugccagugagagaaaa

SEQ ID NO: 169934 - RNA, 20 nt, Artificial Sequence
  Synthetic
auggugccagugagagaaaa

SEQ ID NO: 169935 - RNA, 21 nt, Artificial Sequence
  Synthetic
aauggugccagugagagaaaa

SEQ ID NO: 169936 - RNA, 22 nt, Artificial Sequence
  Synthetic
uaauggugccagugagagaaaa

SEQ ID NO: 169937 - RNA, 23 nt, Artificial Sequence
  Synthetic
guaauggugccagugagagaaaa

SEQ ID NO: 169938 - RNA, 24 nt, Artificial Sequence
  Synthetic
gguaauggugccagugagagaaaa

SEQ ID NO: 169939 - RNA, 18 nt, Artificial Sequence
  Synthetic
gguagccccaggagaaaa

SEQ ID NO: 169940 - RNA, 19 nt, Artificial Sequence
  Synthetic
ggguagccccaggagaaaa

SEQ ID NO: 169941 - RNA, 20 nt, Artificial Sequence
  Synthetic
cggguagccccaggagaaaa

SEQ ID NO: 169942 - RNA, 21 nt, Artificial Sequence
  Synthetic
acggguagccccaggagaaaa

SEQ ID NO: 169943 - RNA, 22 nt, Artificial Sequence
  Synthetic
aacggguagccccaggagaaaa

SEQ ID NO: 169944 - RNA, 23 nt, Artificial Sequence
  Synthetic
aaacggguagccccaggagaaaa

SEQ ID NO: 169945 - RNA, 24 nt, Artificial Sequence
  Synthetic
caaacggguagccccaggagaaaa

SEQ ID NO: 169946 - RNA, 18 nt, Artificial Sequence
  Synthetic
ucauaacagaggagaaaa

SEQ ID NO: 169947 - RNA, 19 nt, Artificial Sequence
  Synthetic
uucauaacagaggagaaaa

SEQ ID NO: 169948 - RNA, 20 nt, Artificial Sequence
  Synthetic
uuucauaacagaggagaaaa

SEQ ID NO: 169949 - RNA, 21 nt, Artificial Sequence
  Synthetic
guuucauaacagaggagaaaa

SEQ ID NO: 169950 - RNA, 22 nt, Artificial Sequence
  Synthetic
aguuucauaacagaggagaaaa

SEQ ID NO: 169951 - RNA, 23 nt, Artificial Sequence
  Synthetic
caguuucauaacagaggagaaaa

SEQ ID NO: 169952 - RNA, 24 nt, Artificial Sequence
  Synthetic
acaguuucauaacagaggagaaaa

SEQ ID NO: 169953 - RNA, 18 nt, Artificial Sequence
  Synthetic
ucuguguggaggagaaaa

SEQ ID NO: 169954 - RNA, 19 nt, Artificial Sequence
  Synthetic
uucuguguggaggagaaaa

SEQ ID NO: 169955 - RNA, 20 nt, Artificial Sequence
  Synthetic
auucuguguggaggagaaaa

SEQ ID NO: 169956 - RNA, 21 nt, Artificial Sequence
  Synthetic
gauucuguguggaggagaaaa

SEQ ID NO: 169957 - RNA, 22 nt, Artificial Sequence
  Synthetic
ugauucuguguggaggagaaaa

SEQ ID NO: 169958 - RNA, 23 nt, Artificial Sequence
  Synthetic
cugauucuguguggaggagaaaa

SEQ ID NO: 169959 - RNA, 24 nt, Artificial Sequence
  Synthetic
ucugauucuguguggaggagaaaa

SEQ ID NO: 169960 - RNA, 18 nt, Artificial Sequence
  Synthetic
uauguagguaggagaaaa

SEQ ID NO: 169961 - RNA, 19 nt, Artificial Sequence
  Synthetic
auauguagguaggagaaaa

SEQ ID NO: 169962 - RNA, 20 nt, Artificial Sequence
  Synthetic
aauauguagguaggagaaaa

SEQ ID NO: 169963 - RNA, 21 nt, Artificial Sequence
  Synthetic
uaauauguagguaggagaaaa

SEQ ID NO: 169964 - RNA, 22 nt, Artificial Sequence
  Synthetic
auaauauguagguaggagaaaa

SEQ ID NO: 169965 - RNA, 23 nt, Artificial Sequence
  Synthetic
uauaauauguagguaggagaaaa

SEQ ID NO: 169966 - RNA, 24 nt, Artificial Sequence
  Synthetic
cuauaauauguagguaggagaaaa

SEQ ID NO: 169967 - RNA, 18 nt, Artificial Sequence
  Synthetic
aaggggcaugggagaaaa

SEQ ID NO: 169968 - RNA, 19 nt, Artificial Sequence
  Synthetic
uaaggggcaugggagaaaa

SEQ ID NO: 169969 - RNA, 20 nt, Artificial Sequence
  Synthetic
auaaggggcaugggagaaaa

SEQ ID NO: 169970 - RNA, 21 nt, Artificial Sequence
  Synthetic
gauaaggggcaugggagaaaa

SEQ ID NO: 169971 - RNA, 22 nt, Artificial Sequence
  Synthetic
ggauaaggggcaugggagaaaa

SEQ ID NO: 169972 - RNA, 23 nt, Artificial Sequence
  Synthetic
uggauaaggggcaugggagaaaa

SEQ ID NO: 169973 - RNA, 24 nt, Artificial Sequence
  Synthetic
uuggauaaggggcaugggagaaaa

SEQ ID NO: 169974 - RNA, 18 nt, Artificial Sequence
  Synthetic
uuaaaggaaaugagaaaa

SEQ ID NO: 169975 - RNA, 19 nt, Artificial Sequence
  Synthetic
guuaaaggaaaugagaaaa

SEQ ID NO: 169976 - RNA, 20 nt, Artificial Sequence
  Synthetic
uguuaaaggaaaugagaaaa

SEQ ID NO: 169977 - RNA, 21 nt, Artificial Sequence
  Synthetic
auguuaaaggaaaugagaaaa

SEQ ID NO: 169978 - RNA, 22 nt, Artificial Sequence
  Synthetic
gauguuaaaggaaaugagaaaa

SEQ ID NO: 169979 - RNA, 23 nt, Artificial Sequence
  Synthetic
agauguuaaaggaaaugagaaaa

SEQ ID NO: 169980 - RNA, 24 nt, Artificial Sequence
  Synthetic
uagauguuaaaggaaaugagaaaa

SEQ ID NO: 169981 - RNA, 18 nt, Artificial Sequence
  Synthetic
auaaaaacuaugagaaaa

SEQ ID NO: 169982 - RNA, 19 nt, Artificial Sequence
  Synthetic
gauaaaaacuaugagaaaa

SEQ ID NO: 169983 - RNA, 20 nt, Artificial Sequence
  Synthetic
ugauaaaaacuaugagaaaa

SEQ ID NO: 169984 - RNA, 21 nt, Artificial Sequence
  Synthetic
augauaaaaacuaugagaaaa

SEQ ID NO: 169985 - RNA, 22 nt, Artificial Sequence
  Synthetic
caugauaaaaacuaugagaaaa

SEQ ID NO: 169986 - RNA, 23 nt, Artificial Sequence
  Synthetic
ucaugauaaaaacuaugagaaaa

SEQ ID NO: 169987 - RNA, 24 nt, Artificial Sequence
  Synthetic
uucaugauaaaaacuaugagaaaa

SEQ ID NO: 169988 - RNA, 18 nt, Artificial Sequence
  Synthetic
aauaauccaaauagaaaa

SEQ ID NO: 169989 - RNA, 19 nt, Artificial Sequence
  Synthetic
aaauaauccaaauagaaaa

SEQ ID NO: 169990 - RNA, 20 nt, Artificial Sequence
  Synthetic
caaauaauccaaauagaaaa

SEQ ID NO: 169991 - RNA, 21 nt, Artificial Sequence
  Synthetic
gcaaauaauccaaauagaaaa

SEQ ID NO: 169992 - RNA, 22 nt, Artificial Sequence
  Synthetic
agcaaauaauccaaauagaaaa

SEQ ID NO: 169993 - RNA, 23 nt, Artificial Sequence
  Synthetic
aagcaaauaauccaaauagaaaa

SEQ ID NO: 169994 - RNA, 24 nt, Artificial Sequence
  Synthetic
aaagcaaauaauccaaauagaaaa

SEQ ID NO: 169995 - RNA, 18 nt, Artificial Sequence
  Synthetic
agauaauccaauagaaaa

SEQ ID NO: 169996 - RNA, 19 nt, Artificial Sequence
  Synthetic
cagauaauccaauagaaaa

SEQ ID NO: 169997 - RNA, 20 nt, Artificial Sequence
  Synthetic
acagauaauccaauagaaaa

SEQ ID NO: 169998 - RNA, 21 nt, Artificial Sequence
  Synthetic
aacagauaauccaauagaaaa

SEQ ID NO: 169999 - RNA, 22 nt, Artificial Sequence
  Synthetic
gaacagauaauccaauagaaaa

SEQ ID NO: 170000 - RNA, 23 nt, Artificial Sequence
  Synthetic
agaacagauaauccaauagaaaa

SEQ ID NO: 170001 - RNA, 24 nt, Artificial Sequence
  Synthetic
aagaacagauaauccaauagaaaa

SEQ ID NO: 170002 - RNA, 18 nt, Artificial Sequence
  Synthetic
auaaagcuuaauagaaaa

SEQ ID NO: 170003 - RNA, 19 nt, Artificial Sequence
  Synthetic
aauaaagcuuaauagaaaa

SEQ ID NO: 170004 - RNA, 20 nt, Artificial Sequence
  Synthetic
aaauaaagcuuaauagaaaa

SEQ ID NO: 170005 - RNA, 21 nt, Artificial Sequence
  Synthetic
caaauaaagcuuaauagaaaa

SEQ ID NO: 170006 - RNA, 22 nt, Artificial Sequence
  Synthetic
gcaaauaaagcuuaauagaaaa

SEQ ID NO: 170007 - RNA, 23 nt, Artificial Sequence
  Synthetic
ggcaaauaaagcuuaauagaaaa

SEQ ID NO: 170008 - RNA, 24 nt, Artificial Sequence
  Synthetic
aggcaaauaaagcuuaauagaaaa

SEQ ID NO: 170009 - RNA, 18 nt, Artificial Sequence
  Synthetic
guauuuauagauagaaaa

SEQ ID NO: 170010 - RNA, 19 nt, Artificial Sequence
  Synthetic
aguauuuauagauagaaaa

SEQ ID NO: 170011 - RNA, 20 nt, Artificial Sequence
  Synthetic
caguauuuauagauagaaaa

SEQ ID NO: 170012 - RNA, 21 nt, Artificial Sequence
  Synthetic
gcaguauuuauagauagaaaa

SEQ ID NO: 170013 - RNA, 22 nt, Artificial Sequence
  Synthetic
ggcaguauuuauagauagaaaa

SEQ ID NO: 170014 - RNA, 23 nt, Artificial Sequence
  Synthetic
aggcaguauuuauagauagaaaa

SEQ ID NO: 170015 - RNA, 24 nt, Artificial Sequence
  Synthetic
caggcaguauuuauagauagaaaa

SEQ ID NO: 170016 - RNA, 18 nt, Artificial Sequence
  Synthetic
gggcucgcuuauagaaaa

SEQ ID NO: 170017 - RNA, 19 nt, Artificial Sequence
  Synthetic
ggggcucgcuuauagaaaa

SEQ ID NO: 170018 - RNA, 20 nt, Artificial Sequence
  Synthetic
gggggcucgcuuauagaaaa

SEQ ID NO: 170019 - RNA, 21 nt, Artificial Sequence
  Synthetic
agggggcucgcuuauagaaaa

SEQ ID NO: 170020 - RNA, 22 nt, Artificial Sequence
  Synthetic
gagggggcucgcuuauagaaaa

SEQ ID NO: 170021 - RNA, 23 nt, Artificial Sequence
  Synthetic
ggagggggcucgcuuauagaaaa

SEQ ID NO: 170022 - RNA, 24 nt, Artificial Sequence
  Synthetic
uggagggggcucgcuuauagaaaa

SEQ ID NO: 170023 - RNA, 18 nt, Artificial Sequence
  Synthetic
gauuuuggaaguagaaaa

SEQ ID NO: 170024 - RNA, 19 nt, Artificial Sequence
  Synthetic
agauuuuggaaguagaaaa

SEQ ID NO: 170025 - RNA, 20 nt, Artificial Sequence
  Synthetic
uagauuuuggaaguagaaaa

SEQ ID NO: 170026 - RNA, 21 nt, Artificial Sequence
  Synthetic
cuagauuuuggaaguagaaaa

SEQ ID NO: 170027 - RNA, 22 nt, Artificial Sequence
  Synthetic
acuagauuuuggaaguagaaaa

SEQ ID NO: 170028 - RNA, 23 nt, Artificial Sequence
  Synthetic
aacuagauuuuggaaguagaaaa

SEQ ID NO: 170029 - RNA, 24 nt, Artificial Sequence
  Synthetic
uaacuagauuuuggaaguagaaaa

SEQ ID NO: 170030 - RNA, 18 nt, Artificial Sequence
  Synthetic
gacaguugcaguagaaaa

SEQ ID NO: 170031 - RNA, 19 nt, Artificial Sequence
  Synthetic
agacaguugcaguagaaaa

SEQ ID NO: 170032 - RNA, 20 nt, Artificial Sequence
  Synthetic
uagacaguugcaguagaaaa

SEQ ID NO: 170033 - RNA, 21 nt, Artificial Sequence
  Synthetic
cuagacaguugcaguagaaaa

SEQ ID NO: 170034 - RNA, 22 nt, Artificial Sequence
  Synthetic
ucuagacaguugcaguagaaaa

SEQ ID NO: 170035 - RNA, 23 nt, Artificial Sequence
  Synthetic
aucuagacaguugcaguagaaaa

SEQ ID NO: 170036 - RNA, 24 nt, Artificial Sequence
  Synthetic
caucuagacaguugcaguagaaaa

SEQ ID NO: 170037 - RNA, 18 nt, Artificial Sequence
  Synthetic
agccuagaagguagaaaa

SEQ ID NO: 170038 - RNA, 19 nt, Artificial Sequence
  Synthetic
aagccuagaagguagaaaa

SEQ ID NO: 170039 - RNA, 20 nt, Artificial Sequence
  Synthetic
aaagccuagaagguagaaaa

SEQ ID NO: 170040 - RNA, 21 nt, Artificial Sequence
  Synthetic
caaagccuagaagguagaaaa

SEQ ID NO: 170041 - RNA, 22 nt, Artificial Sequence
  Synthetic
ucaaagccuagaagguagaaaa

SEQ ID NO: 170042 - RNA, 23 nt, Artificial Sequence
  Synthetic
cucaaagccuagaagguagaaaa

SEQ ID NO: 170043 - RNA, 24 nt, Artificial Sequence
  Synthetic
acucaaagccuagaagguagaaaa

SEQ ID NO: 170044 - RNA, 18 nt, Artificial Sequence
  Synthetic
aagaagguagguagaaaa

SEQ ID NO: 170045 - RNA, 19 nt, Artificial Sequence
  Synthetic
aaagaagguagguagaaaa

SEQ ID NO: 170046 - RNA, 20 nt, Artificial Sequence
  Synthetic
aaaagaagguagguagaaaa

SEQ ID NO: 170047 - RNA, 21 nt, Artificial Sequence
  Synthetic
aaaaagaagguagguagaaaa

SEQ ID NO: 170048 - RNA, 22 nt, Artificial Sequence
  Synthetic
gaaaaagaagguagguagaaaa

SEQ ID NO: 170049 - RNA, 23 nt, Artificial Sequence
  Synthetic
agaaaaagaagguagguagaaaa

SEQ ID NO: 170050 - RNA, 24 nt, Artificial Sequence
  Synthetic
uagaaaaagaagguagguagaaaa

SEQ ID NO: 170051 - RNA, 18 nt, Artificial Sequence
  Synthetic
ccauuugauauuagaaaa

SEQ ID NO: 170052 - RNA, 19 nt, Artificial Sequence
  Synthetic
gccauuugauauuagaaaa

SEQ ID NO: 170053 - RNA, 20 nt, Artificial Sequence
  Synthetic
ugccauuugauauuagaaaa

SEQ ID NO: 170054 - RNA, 21 nt, Artificial Sequence
  Synthetic
uugccauuugauauuagaaaa

SEQ ID NO: 170055 - RNA, 22 nt, Artificial Sequence
  Synthetic
uuugccauuugauauuagaaaa

SEQ ID NO: 170056 - RNA, 23 nt, Artificial Sequence
  Synthetic
guuugccauuugauauuagaaaa

SEQ ID NO: 170057 - RNA, 24 nt, Artificial Sequence
  Synthetic
uguuugccauuugauauuagaaaa

SEQ ID NO: 170058 - RNA, 18 nt, Artificial Sequence
  Synthetic
guuuuagguguuagaaaa

SEQ ID NO: 170059 - RNA, 19 nt, Artificial Sequence
  Synthetic
gguuuuagguguuagaaaa

SEQ ID NO: 170060 - RNA, 20 nt, Artificial Sequence
  Synthetic
ugguuuuagguguuagaaaa

SEQ ID NO: 170061 - RNA, 21 nt, Artificial Sequence
  Synthetic
augguuuuagguguuagaaaa

SEQ ID NO: 170062 - RNA, 22 nt, Artificial Sequence
  Synthetic
uaugguuuuagguguuagaaaa

SEQ ID NO: 170063 - RNA, 23 nt, Artificial Sequence
  Synthetic
auaugguuuuagguguuagaaaa

SEQ ID NO: 170064 - RNA, 24 nt, Artificial Sequence
  Synthetic
aauaugguuuuagguguuagaaaa

SEQ ID NO: 170065 - RNA, 18 nt, Artificial Sequence
  Synthetic
cuagcagauuuuagaaaa

SEQ ID NO: 170066 - RNA, 19 nt, Artificial Sequence
  Synthetic
ucuagcagauuuuagaaaa

SEQ ID NO: 170067 - RNA, 20 nt, Artificial Sequence
  Synthetic
cucuagcagauuuuagaaaa

SEQ ID NO: 170068 - RNA, 21 nt, Artificial Sequence
  Synthetic
acucuagcagauuuuagaaaa

SEQ ID NO: 170069 - RNA, 22 nt, Artificial Sequence
  Synthetic
gacucuagcagauuuuagaaaa

SEQ ID NO: 170070 - RNA, 23 nt, Artificial Sequence
  Synthetic
ugacucuagcagauuuuagaaaa

SEQ ID NO: 170071 - RNA, 24 nt, Artificial Sequence
  Synthetic
cugacucuagcagauuuuagaaaa

SEQ ID NO: 170072 - RNA, 18 nt, Artificial Sequence
  Synthetic
gcgcugagaaaccgaaaa

SEQ ID NO: 170073 - RNA, 19 nt, Artificial Sequence
  Synthetic
agcgcugagaaaccgaaaa

SEQ ID NO: 170074 - RNA, 20 nt, Artificial Sequence
  Synthetic
gagcgcugagaaaccgaaaa

SEQ ID NO: 170075 - RNA, 21 nt, Artificial Sequence
  Synthetic
agagcgcugagaaaccgaaaa

SEQ ID NO: 170076 - RNA, 22 nt, Artificial Sequence
  Synthetic
gagagcgcugagaaaccgaaaa

SEQ ID NO: 170077 - RNA, 23 nt, Artificial Sequence
  Synthetic
agagagcgcugagaaaccgaaaa

SEQ ID NO: 170078 - RNA, 24 nt, Artificial Sequence
  Synthetic
uagagagcgcugagaaaccgaaaa

SEQ ID NO: 170079 - RNA, 18 nt, Artificial Sequence
  Synthetic
guuauacuggcccgaaaa

SEQ ID NO: 170080 - RNA, 19 nt, Artificial Sequence
  Synthetic
aguuauacuggcccgaaaa

SEQ ID NO: 170081 - RNA, 20 nt, Artificial Sequence
  Synthetic
aaguuauacuggcccgaaaa

SEQ ID NO: 170082 - RNA, 21 nt, Artificial Sequence
  Synthetic
uaaguuauacuggcccgaaaa

SEQ ID NO: 170083 - RNA, 22 nt, Artificial Sequence
  Synthetic
uuaaguuauacuggcccgaaaa

SEQ ID NO: 170084 - RNA, 23 nt, Artificial Sequence
  Synthetic
auuaaguuauacuggcccgaaaa

SEQ ID NO: 170085 - RNA, 24 nt, Artificial Sequence
  Synthetic
uauuaaguuauacuggcccgaaaa

SEQ ID NO: 170086 - RNA, 18 nt, Artificial Sequence
  Synthetic
uuguucacagggcgaaaa

SEQ ID NO: 170087 - RNA, 19 nt, Artificial Sequence
  Synthetic
auuguucacagggcgaaaa

SEQ ID NO: 170088 - RNA, 20 nt, Artificial Sequence
  Synthetic
aauuguucacagggcgaaaa

SEQ ID NO: 170089 - RNA, 21 nt, Artificial Sequence
  Synthetic
aaauuguucacagggcgaaaa

SEQ ID NO: 170090 - RNA, 22 nt, Artificial Sequence
  Synthetic
uaaauuguucacagggcgaaaa

SEQ ID NO: 170091 - RNA, 23 nt, Artificial Sequence
  Synthetic
uuaaauuguucacagggcgaaaa

SEQ ID NO: 170092 - RNA, 24 nt, Artificial Sequence
  Synthetic
auuaaauuguucacagggcgaaaa

SEQ ID NO: 170093 - RNA, 18 nt, Artificial Sequence
  Synthetic
caaagguaaaaaggaaaa

SEQ ID NO: 170094 - RNA, 19 nt, Artificial Sequence
  Synthetic
acaaagguaaaaaggaaaa

SEQ ID NO: 170095 - RNA, 20 nt, Artificial Sequence
  Synthetic
aacaaagguaaaaaggaaaa

SEQ ID NO: 170096 - RNA, 21 nt, Artificial Sequence
  Synthetic
uaacaaagguaaaaaggaaaa

SEQ ID NO: 170097 - RNA, 22 nt, Artificial Sequence
  Synthetic
cuaacaaagguaaaaaggaaaa

SEQ ID NO: 170098 - RNA, 23 nt, Artificial Sequence
  Synthetic
ucuaacaaagguaaaaaggaaaa

SEQ ID NO: 170099 - RNA, 24 nt, Artificial Sequence
  Synthetic
aucuaacaaagguaaaaaggaaaa

SEQ ID NO: 170100 - RNA, 18 nt, Artificial Sequence
  Synthetic
acguaggcaaaaggaaaa

SEQ ID NO: 170101 - RNA, 19 nt, Artificial Sequence
  Synthetic
cacguaggcaaaaggaaaa

SEQ ID NO: 170102 - RNA, 20 nt, Artificial Sequence
  Synthetic
ccacguaggcaaaaggaaaa

SEQ ID NO: 170103 - RNA, 21 nt, Artificial Sequence
  Synthetic
uccacguaggcaaaaggaaaa

SEQ ID NO: 170104 - RNA, 22 nt, Artificial Sequence
  Synthetic
uuccacguaggcaaaaggaaaa

SEQ ID NO: 170105 - RNA, 23 nt, Artificial Sequence
  Synthetic
auuccacguaggcaaaaggaaaa

SEQ ID NO: 170106 - RNA, 24 nt, Artificial Sequence
  Synthetic
uauuccacguaggcaaaaggaaaa

SEQ ID NO: 170107 - RNA, 18 nt, Artificial Sequence
  Synthetic
caucaggguaaaggaaaa

SEQ ID NO: 170108 - RNA, 19 nt, Artificial Sequence
  Synthetic
ucaucaggguaaaggaaaa

SEQ ID NO: 170109 - RNA, 20 nt, Artificial Sequence
  Synthetic
aucaucaggguaaaggaaaa

SEQ ID NO: 170110 - RNA, 21 nt, Artificial Sequence
  Synthetic
aaucaucaggguaaaggaaaa

SEQ ID NO: 170111 - RNA, 22 nt, Artificial Sequence
  Synthetic
aaaucaucaggguaaaggaaaa

SEQ ID NO: 170112 - RNA, 23 nt, Artificial Sequence
  Synthetic
aaaaucaucaggguaaaggaaaa

SEQ ID NO: 170113 - RNA, 24 nt, Artificial Sequence
  Synthetic
aaaaaucaucaggguaaaggaaaa

SEQ ID NO: 170114 - RNA, 18 nt, Artificial Sequence
  Synthetic
ugauaguggcaaggaaaa

SEQ ID NO: 170115 - RNA, 19 nt, Artificial Sequence
  Synthetic
uugauaguggcaaggaaaa

SEQ ID NO: 170116 - RNA, 20 nt, Artificial Sequence
  Synthetic
uuugauaguggcaaggaaaa

SEQ ID NO: 170117 - RNA, 21 nt, Artificial Sequence
  Synthetic
auuugauaguggcaaggaaaa

SEQ ID NO: 170118 - RNA, 22 nt, Artificial Sequence
  Synthetic
aauuugauaguggcaaggaaaa

SEQ ID NO: 170119 - RNA, 23 nt, Artificial Sequence
  Synthetic
gaauuugauaguggcaaggaaaa

SEQ ID NO: 170120 - RNA, 24 nt, Artificial Sequence
  Synthetic
ugaauuugauaguggcaaggaaaa

SEQ ID NO: 170121 - RNA, 18 nt, Artificial Sequence
  Synthetic
guugagagucaaggaaaa

SEQ ID NO: 170122 - RNA, 19 nt, Artificial Sequence
  Synthetic
uguugagagucaaggaaaa

SEQ ID NO: 170123 - RNA, 20 nt, Artificial Sequence
  Synthetic
guguugagagucaaggaaaa

SEQ ID NO: 170124 - RNA, 21 nt, Artificial Sequence
  Synthetic
gguguugagagucaaggaaaa

SEQ ID NO: 170125 - RNA, 22 nt, Artificial Sequence
  Synthetic
ggguguugagagucaaggaaaa

SEQ ID NO: 170126 - RNA, 23 nt, Artificial Sequence
  Synthetic
aggguguugagagucaaggaaaa

SEQ ID NO: 170127 - RNA, 24 nt, Artificial Sequence
  Synthetic
uaggguguugagagucaaggaaaa

SEQ ID NO: 170128 - RNA, 18 nt, Artificial Sequence
  Synthetic
agagcaaaauaaggaaaa

SEQ ID NO: 170129 - RNA, 19 nt, Artificial Sequence
  Synthetic
uagagcaaaauaaggaaaa

SEQ ID NO: 170130 - RNA, 20 nt, Artificial Sequence
  Synthetic
auagagcaaaauaaggaaaa

SEQ ID NO: 170131 - RNA, 21 nt, Artificial Sequence
  Synthetic
gauagagcaaaauaaggaaaa

SEQ ID NO: 170132 - RNA, 22 nt, Artificial Sequence
  Synthetic
ugauagagcaaaauaaggaaaa

SEQ ID NO: 170133 - RNA, 23 nt, Artificial Sequence
  Synthetic
cugauagagcaaaauaaggaaaa

SEQ ID NO: 170134 - RNA, 24 nt, Artificial Sequence
  Synthetic
acugauagagcaaaauaaggaaaa

SEQ ID NO: 170135 - RNA, 18 nt, Artificial Sequence
  Synthetic
uaggaaaacacaggaaaa

SEQ ID NO: 170136 - RNA, 19 nt, Artificial Sequence
  Synthetic
auaggaaaacacaggaaaa

SEQ ID NO: 170137 - RNA, 20 nt, Artificial Sequence
  Synthetic
aauaggaaaacacaggaaaa

SEQ ID NO: 170138 - RNA, 21 nt, Artificial Sequence
  Synthetic
aaauaggaaaacacaggaaaa

SEQ ID NO: 170139 - RNA, 22 nt, Artificial Sequence
  Synthetic
aaaauaggaaaacacaggaaaa

SEQ ID NO: 170140 - RNA, 23 nt, Artificial Sequence
  Synthetic
aaaaauaggaaaacacaggaaaa

SEQ ID NO: 170141 - RNA, 24 nt, Artificial Sequence
  Synthetic
uaaaaauaggaaaacacaggaaaa

SEQ ID NO: 170142 - RNA, 18 nt, Artificial Sequence
  Synthetic
ggaaggaaagcaggaaaa

SEQ ID NO: 170143 - RNA, 19 nt, Artificial Sequence
  Synthetic
aggaaggaaagcaggaaaa

SEQ ID NO: 170144 - RNA, 20 nt, Artificial Sequence
  Synthetic
gaggaaggaaagcaggaaaa

SEQ ID NO: 170145 - RNA, 21 nt, Artificial Sequence
  Synthetic
agaggaaggaaagcaggaaaa

SEQ ID NO: 170146 - RNA, 22 nt, Artificial Sequence
  Synthetic
gagaggaaggaaagcaggaaaa

SEQ ID NO: 170147 - RNA, 23 nt, Artificial Sequence
  Synthetic
agagaggaaggaaagcaggaaaa

SEQ ID NO: 170148 - RNA, 24 nt, Artificial Sequence
  Synthetic
aagagaggaaggaaagcaggaaaa

SEQ ID NO: 170149 - RNA, 18 nt, Artificial Sequence
  Synthetic
gaaaaaaaaagaggaaaa

SEQ ID NO: 170150 - RNA, 19 nt, Artificial Sequence
  Synthetic
agaaaaaaaaagaggaaaa

SEQ ID NO: 170151 - RNA, 20 nt, Artificial Sequence
  Synthetic
aagaaaaaaaaagaggaaaa

SEQ ID NO: 170152 - RNA, 21 nt, Artificial Sequence
  Synthetic
aaagaaaaaaaaagaggaaaa

SEQ ID NO: 170153 - RNA, 22 nt, Artificial Sequence
  Synthetic
aaaagaaaaaaaaagaggaaaa

SEQ ID NO: 170154 - RNA, 23 nt, Artificial Sequence
  Synthetic
aaaaagaaaaaaaaagaggaaaa

SEQ ID NO: 170155 - RNA, 24 nt, Artificial Sequence
  Synthetic
uaaaaagaaaaaaaaagaggaaaa

SEQ ID NO: 170156 - RNA, 18 nt, Artificial Sequence
  Synthetic
uucuaaacaauaggaaaa

SEQ ID NO: 170157 - RNA, 19 nt, Artificial Sequence
  Synthetic
auucuaaacaauaggaaaa

SEQ ID NO: 170158 - RNA, 20 nt, Artificial Sequence
  Synthetic
uauucuaaacaauaggaaaa

SEQ ID NO: 170159 - RNA, 21 nt, Artificial Sequence
  Synthetic
cuauucuaaacaauaggaaaa

SEQ ID NO: 170160 - RNA, 22 nt, Artificial Sequence
  Synthetic
acuauucuaaacaauaggaaaa

SEQ ID NO: 170161 - RNA, 23 nt, Artificial Sequence
  Synthetic
aacuauucuaaacaauaggaaaa

SEQ ID NO: 170162 - RNA, 24 nt, Artificial Sequence
  Synthetic
aaacuauucuaaacaauaggaaaa

SEQ ID NO: 170163 - RNA, 18 nt, Artificial Sequence
  Synthetic
accauucgaguaggaaaa

SEQ ID NO: 170164 - RNA, 19 nt, Artificial Sequence
  Synthetic
caccauucgaguaggaaaa

SEQ ID NO: 170165 - RNA, 20 nt, Artificial Sequence
  Synthetic
acaccauucgaguaggaaaa

SEQ ID NO: 170166 - RNA, 21 nt, Artificial Sequence
  Synthetic
aacaccauucgaguaggaaaa

SEQ ID NO: 170167 - RNA, 22 nt, Artificial Sequence
  Synthetic
aaacaccauucgaguaggaaaa

SEQ ID NO: 170168 - RNA, 23 nt, Artificial Sequence
  Synthetic
uaaacaccauucgaguaggaaaa

SEQ ID NO: 170169 - RNA, 24 nt, Artificial Sequence
  Synthetic
auaaacaccauucgaguaggaaaa

SEQ ID NO: 170170 - RNA, 18 nt, Artificial Sequence
  Synthetic
aaucuaguuguaggaaaa

SEQ ID NO: 170171 - RNA, 19 nt, Artificial Sequence
  Synthetic
aaaucuaguuguaggaaaa

SEQ ID NO: 170172 - RNA, 20 nt, Artificial Sequence
  Synthetic
aaaaucuaguuguaggaaaa

SEQ ID NO: 170173 - RNA, 21 nt, Artificial Sequence
  Synthetic
aaaaaucuaguuguaggaaaa

SEQ ID NO: 170174 - RNA, 22 nt, Artificial Sequence
  Synthetic
gaaaaaucuaguuguaggaaaa

SEQ ID NO: 170175 - RNA, 23 nt, Artificial Sequence
  Synthetic
agaaaaaucuaguuguaggaaaa

SEQ ID NO: 170176 - RNA, 24 nt, Artificial Sequence
  Synthetic
uagaaaaaucuaguuguaggaaaa

SEQ ID NO: 170177 - RNA, 18 nt, Artificial Sequence
  Synthetic
gguauucaauuaggaaaa

SEQ ID NO: 170178 - RNA, 19 nt, Artificial Sequence
  Synthetic
ggguauucaauuaggaaaa

SEQ ID NO: 170179 - RNA, 20 nt, Artificial Sequence
  Synthetic
aggguauucaauuaggaaaa

SEQ ID NO: 170180 - RNA, 18 nt, Artificial Sequence
  Synthetic
cuagauaucuuaggaaaa

SEQ ID NO: 170181 - RNA, 19 nt, Artificial Sequence
  Synthetic
ucuagauaucuuaggaaaa

SEQ ID NO: 170182 - RNA, 20 nt, Artificial Sequence
  Synthetic
aucuagauaucuuaggaaaa

SEQ ID NO: 170183 - RNA, 21 nt, Artificial Sequence
  Synthetic
uaucuagauaucuuaggaaaa

SEQ ID NO: 170184 - RNA, 22 nt, Artificial Sequence
  Synthetic
uuaucuagauaucuuaggaaaa

SEQ ID NO: 170185 - RNA, 23 nt, Artificial Sequence
  Synthetic
cuuaucuagauaucuuaggaaaa

SEQ ID NO: 170186 - RNA, 24 nt, Artificial Sequence
  Synthetic
ucuuaucuagauaucuuaggaaaa

SEQ ID NO: 170187 - RNA, 18 nt, Artificial Sequence
  Synthetic
gguauucaguuaggaaaa

SEQ ID NO: 170188 - RNA, 19 nt, Artificial Sequence
  Synthetic
agguauucaguuaggaaaa

SEQ ID NO: 170189 - RNA, 20 nt, Artificial Sequence
  Synthetic
aagguauucaguuaggaaaa

SEQ ID NO: 170190 - RNA, 21 nt, Artificial Sequence
  Synthetic
aaagguauucaguuaggaaaa

SEQ ID NO: 170191 - RNA, 22 nt, Artificial Sequence
  Synthetic
aaaagguauucaguuaggaaaa

SEQ ID NO: 170192 - RNA, 23 nt, Artificial Sequence
  Synthetic
uaaaagguauucaguuaggaaaa

SEQ ID NO: 170193 - RNA, 24 nt, Artificial Sequence
  Synthetic
auaaaagguauucaguuaggaaaa

SEQ ID NO: 170194 - RNA, 18 nt, Artificial Sequence
  Synthetic
agccuaggauccggaaaa

SEQ ID NO: 170195 - RNA, 19 nt, Artificial Sequence
  Synthetic
aagccuaggauccggaaaa

SEQ ID NO: 170196 - RNA, 20 nt, Artificial Sequence
  Synthetic
aaagccuaggauccggaaaa

SEQ ID NO: 170197 - RNA, 21 nt, Artificial Sequence
  Synthetic
caaagccuaggauccggaaaa

SEQ ID NO: 170198 - RNA, 22 nt, Artificial Sequence
  Synthetic
gcaaagccuaggauccggaaaa

SEQ ID NO: 170199 - RNA, 23 nt, Artificial Sequence
  Synthetic
ugcaaagccuaggauccggaaaa

SEQ ID NO: 170200 - RNA, 24 nt, Artificial Sequence
  Synthetic
cugcaaagccuaggauccggaaaa

SEQ ID NO: 170201 - RNA, 18 nt, Artificial Sequence
  Synthetic
aaauggaagaagggaaaa

SEQ ID NO: 170202 - RNA, 19 nt, Artificial Sequence
  Synthetic
aaaauggaagaagggaaaa

SEQ ID NO: 170203 - RNA, 20 nt, Artificial Sequence
  Synthetic
uaaaauggaagaagggaaaa

SEQ ID NO: 170204 - RNA, 21 nt, Artificial Sequence
  Synthetic
uuaaaauggaagaagggaaaa

SEQ ID NO: 170205 - RNA, 22 nt, Artificial Sequence
  Synthetic
uuuaaaauggaagaagggaaaa

SEQ ID NO: 170206 - RNA, 23 nt, Artificial Sequence
  Synthetic
cuuuaaaauggaagaagggaaaa

SEQ ID NO: 170207 - RNA, 24 nt, Artificial Sequence
  Synthetic
acuuuaaaauggaagaagggaaaa

SEQ ID NO: 170208 - RNA, 18 nt, Artificial Sequence
  Synthetic
aucaaaauuuagggaaaa

SEQ ID NO: 170209 - RNA, 19 nt, Artificial Sequence
  Synthetic
uaucaaaauuuagggaaaa

SEQ ID NO: 170210 - RNA, 20 nt, Artificial Sequence
  Synthetic
cuaucaaaauuuagggaaaa

SEQ ID NO: 170211 - RNA, 21 nt, Artificial Sequence
  Synthetic
acuaucaaaauuuagggaaaa

SEQ ID NO: 170212 - RNA, 22 nt, Artificial Sequence
  Synthetic
aacuaucaaaauuuagggaaaa

SEQ ID NO: 170213 - RNA, 23 nt, Artificial Sequence
  Synthetic
aaacuaucaaaauuuagggaaaa

SEQ ID NO: 170214 - RNA, 24 nt, Artificial Sequence
  Synthetic
aaaacuaucaaaauuuagggaaaa

SEQ ID NO: 170215 - RNA, 18 nt, Artificial Sequence
  Synthetic
gggggaaguaggggaaaa

SEQ ID NO: 170216 - RNA, 19 nt, Artificial Sequence
  Synthetic
ugggggaaguaggggaaaa

SEQ ID NO: 170217 - RNA, 20 nt, Artificial Sequence
  Synthetic
augggggaaguaggggaaaa

SEQ ID NO: 170218 - RNA, 21 nt, Artificial Sequence
  Synthetic
aaugggggaaguaggggaaaa

SEQ ID NO: 170219 - RNA, 22 nt, Artificial Sequence
  Synthetic
gaaugggggaaguaggggaaaa

SEQ ID NO: 170220 - RNA, 23 nt, Artificial Sequence
  Synthetic
agaaugggggaaguaggggaaaa

SEQ ID NO: 170221 - RNA, 24 nt, Artificial Sequence
  Synthetic
aagaaugggggaaguaggggaaaa

SEQ ID NO: 170222 - RNA, 18 nt, Artificial Sequence
  Synthetic
ugcaauuguaggggaaaa

SEQ ID NO: 170223 - RNA, 19 nt, Artificial Sequence
  Synthetic
augcaauuguaggggaaaa

SEQ ID NO: 170224 - RNA, 20 nt, Artificial Sequence
  Synthetic
gaugcaauuguaggggaaaa

SEQ ID NO: 170225 - RNA, 21 nt, Artificial Sequence
  Synthetic
agaugcaauuguaggggaaaa

SEQ ID NO: 170226 - RNA, 22 nt, Artificial Sequence
  Synthetic
gagaugcaauuguaggggaaaa

SEQ ID NO: 170227 - RNA, 23 nt, Artificial Sequence
  Synthetic
ggagaugcaauuguaggggaaaa

SEQ ID NO: 170228 - RNA, 24 nt, Artificial Sequence
  Synthetic
uggagaugcaauuguaggggaaaa

SEQ ID NO: 170229 - RNA, 18 nt, Artificial Sequence
  Synthetic
guucuuugcuggggaaaa

SEQ ID NO: 170230 - RNA, 19 nt, Artificial Sequence
  Synthetic
aguucuuugcuggggaaaa

SEQ ID NO: 170231 - RNA, 20 nt, Artificial Sequence
  Synthetic
aaguucuuugcuggggaaaa

SEQ ID NO: 170232 - RNA, 21 nt, Artificial Sequence
  Synthetic
uaaguucuuugcuggggaaaa

SEQ ID NO: 170233 - RNA, 22 nt, Artificial Sequence
  Synthetic
cuaaguucuuugcuggggaaaa

SEQ ID NO: 170234 - RNA, 23 nt, Artificial Sequence
  Synthetic
ucuaaguucuuugcuggggaaaa

SEQ ID NO: 170235 - RNA, 24 nt, Artificial Sequence
  Synthetic
uucuaaguucuuugcuggggaaaa

SEQ ID NO: 170236 - RNA, 18 nt, Artificial Sequence
  Synthetic
guuuucuccaauggaaaa

SEQ ID NO: 170237 - RNA, 19 nt, Artificial Sequence
  Synthetic
uguuuucuccaauggaaaa

SEQ ID NO: 170238 - RNA, 20 nt, Artificial Sequence
  Synthetic
cuguuuucuccaauggaaaa

SEQ ID NO: 170239 - RNA, 21 nt, Artificial Sequence
  Synthetic
ucuguuuucuccaauggaaaa

SEQ ID NO: 170240 - RNA, 22 nt, Artificial Sequence
  Synthetic
cucuguuuucuccaauggaaaa

SEQ ID NO: 170241 - RNA, 23 nt, Artificial Sequence
  Synthetic
ccucuguuuucuccaauggaaaa

SEQ ID NO: 170242 - RNA, 24 nt, Artificial Sequence
  Synthetic
gccucuguuuucuccaauggaaaa

SEQ ID NO: 170243 - RNA, 18 nt, Artificial Sequence
  Synthetic
uuaauguucaauggaaaa

SEQ ID NO: 170244 - RNA, 19 nt, Artificial Sequence
  Synthetic
auuaauguucaauggaaaa

SEQ ID NO: 170245 - RNA, 20 nt, Artificial Sequence
  Synthetic
gauuaauguucaauggaaaa

SEQ ID NO: 170246 - RNA, 21 nt, Artificial Sequence
  Synthetic
ugauuaauguucaauggaaaa

SEQ ID NO: 170247 - RNA, 22 nt, Artificial Sequence
  Synthetic
uugauuaauguucaauggaaaa

SEQ ID NO: 170248 - RNA, 23 nt, Artificial Sequence
  Synthetic
uuugauuaauguucaauggaaaa

SEQ ID NO: 170249 - RNA, 24 nt, Artificial Sequence
  Synthetic
auuugauuaauguucaauggaaaa

SEQ ID NO: 170250 - RNA, 18 nt, Artificial Sequence
  Synthetic
agccaaaagcauggaaaa

SEQ ID NO: 170251 - RNA, 19 nt, Artificial Sequence
  Synthetic
uagccaaaagcauggaaaa

SEQ ID NO: 170252 - RNA, 20 nt, Artificial Sequence
  Synthetic
auagccaaaagcauggaaaa

SEQ ID NO: 170253 - RNA, 21 nt, Artificial Sequence
  Synthetic
aauagccaaaagcauggaaaa

SEQ ID NO: 170254 - RNA, 22 nt, Artificial Sequence
  Synthetic
aaauagccaaaagcauggaaaa

SEQ ID NO: 170255 - RNA, 23 nt, Artificial Sequence
  Synthetic
uaaauagccaaaagcauggaaaa

SEQ ID NO: 170256 - RNA, 24 nt, Artificial Sequence
  Synthetic
auaaauagccaaaagcauggaaaa

SEQ ID NO: 170257 - RNA, 18 nt, Artificial Sequence
  Synthetic
agaugcccauauggaaaa

SEQ ID NO: 170258 - RNA, 19 nt, Artificial Sequence
  Synthetic
cagaugcccauauggaaaa

SEQ ID NO: 170259 - RNA, 20 nt, Artificial Sequence
  Synthetic
ccagaugcccauauggaaaa

SEQ ID NO: 170260 - RNA, 21 nt, Artificial Sequence
  Synthetic
cccagaugcccauauggaaaa

SEQ ID NO: 170261 - RNA, 22 nt, Artificial Sequence
  Synthetic
ccccagaugcccauauggaaaa

SEQ ID NO: 170262 - RNA, 23 nt, Artificial Sequence
  Synthetic
gccccagaugcccauauggaaaa

SEQ ID NO: 170263 - RNA, 24 nt, Artificial Sequence
  Synthetic
agccccagaugcccauauggaaaa

SEQ ID NO: 170264 - RNA, 18 nt, Artificial Sequence
  Synthetic
uaaucuaucuauggaaaa

SEQ ID NO: 170265 - RNA, 19 nt, Artificial Sequence
  Synthetic
cuaaucuaucuauggaaaa

SEQ ID NO: 170266 - RNA, 20 nt, Artificial Sequence
  Synthetic
acuaaucuaucuauggaaaa

SEQ ID NO: 170267 - RNA, 21 nt, Artificial Sequence
  Synthetic
aacuaaucuaucuauggaaaa

SEQ ID NO: 170268 - RNA, 22 nt, Artificial Sequence
  Synthetic
gaacuaaucuaucuauggaaaa

SEQ ID NO: 170269 - RNA, 23 nt, Artificial Sequence
  Synthetic
ggaacuaaucuaucuauggaaaa

SEQ ID NO: 170270 - RNA, 24 nt, Artificial Sequence
  Synthetic
aggaacuaaucuaucuauggaaaa

SEQ ID NO: 170271 - RNA, 18 nt, Artificial Sequence
  Synthetic
acucuugucccuggaaaa

SEQ ID NO: 170272 - RNA, 19 nt, Artificial Sequence
  Synthetic
cacucuugucccuggaaaa

SEQ ID NO: 170273 - RNA, 20 nt, Artificial Sequence
  Synthetic
ccacucuugucccuggaaaa

SEQ ID NO: 170274 - RNA, 21 nt, Artificial Sequence
  Synthetic
cccacucuugucccuggaaaa

SEQ ID NO: 170275 - RNA, 22 nt, Artificial Sequence
  Synthetic
acccacucuugucccuggaaaa

SEQ ID NO: 170276 - RNA, 23 nt, Artificial Sequence
  Synthetic
aacccacucuugucccuggaaaa

SEQ ID NO: 170277 - RNA, 24 nt, Artificial Sequence
  Synthetic
aaacccacucuugucccuggaaaa

SEQ ID NO: 170278 - RNA, 18 nt, Artificial Sequence
  Synthetic
aucuucagaaguggaaaa

SEQ ID NO: 170279 - RNA, 19 nt, Artificial Sequence
  Synthetic
gaucuucagaaguggaaaa

SEQ ID NO: 170280 - RNA, 20 nt, Artificial Sequence
  Synthetic
agaucuucagaaguggaaaa

SEQ ID NO: 170281 - RNA, 21 nt, Artificial Sequence
  Synthetic
cagaucuucagaaguggaaaa

SEQ ID NO: 170282 - RNA, 22 nt, Artificial Sequence
  Synthetic
acagaucuucagaaguggaaaa

SEQ ID NO: 170283 - RNA, 23 nt, Artificial Sequence
  Synthetic
aacagaucuucagaaguggaaaa

SEQ ID NO: 170284 - RNA, 24 nt, Artificial Sequence
  Synthetic
aaacagaucuucagaaguggaaaa

SEQ ID NO: 170285 - RNA, 18 nt, Artificial Sequence
  Synthetic
caguagaagaguggaaaa

SEQ ID NO: 170286 - RNA, 19 nt, Artificial Sequence
  Synthetic
ucaguagaagaguggaaaa

SEQ ID NO: 170287 - RNA, 20 nt, Artificial Sequence
  Synthetic
aucaguagaagaguggaaaa

SEQ ID NO: 170288 - RNA, 21 nt, Artificial Sequence
  Synthetic
aaucaguagaagaguggaaaa

SEQ ID NO: 170289 - RNA, 22 nt, Artificial Sequence
  Synthetic
uaaucaguagaagaguggaaaa

SEQ ID NO: 170290 - RNA, 23 nt, Artificial Sequence
  Synthetic
uuaaucaguagaagaguggaaaa

SEQ ID NO: 170291 - RNA, 24 nt, Artificial Sequence
  Synthetic
auuaaucaguagaagaguggaaaa

SEQ ID NO: 170292 - RNA, 18 nt, Artificial Sequence
  Synthetic
ggauuuagggguggaaaa

SEQ ID NO: 170293 - RNA, 19 nt, Artificial Sequence
  Synthetic
uggauuuagggguggaaaa

SEQ ID NO: 170294 - RNA, 20 nt, Artificial Sequence
  Synthetic
guggauuuagggguggaaaa

SEQ ID NO: 170295 - RNA, 21 nt, Artificial Sequence
  Synthetic
uguggauuuagggguggaaaa

SEQ ID NO: 170296 - RNA, 22 nt, Artificial Sequence
  Synthetic
cuguggauuuagggguggaaaa

SEQ ID NO: 170297 - RNA, 23 nt, Artificial Sequence
  Synthetic
gcuguggauuuagggguggaaaa

SEQ ID NO: 170298 - RNA, 24 nt, Artificial Sequence
  Synthetic
ggcuguggauuuagggguggaaaa

SEQ ID NO: 170299 - RNA, 18 nt, Artificial Sequence
  Synthetic
uaaaaacugauuggaaaa

SEQ ID NO: 170300 - RNA, 19 nt, Artificial Sequence
  Synthetic
auaaaaacugauuggaaaa

SEQ ID NO: 170301 - RNA, 20 nt, Artificial Sequence
  Synthetic
uauaaaaacugauuggaaaa

SEQ ID NO: 170302 - RNA, 21 nt, Artificial Sequence
  Synthetic
uuauaaaaacugauuggaaaa

SEQ ID NO: 170303 - RNA, 22 nt, Artificial Sequence
  Synthetic
auuauaaaaacugauuggaaaa

SEQ ID NO: 170304 - RNA, 23 nt, Artificial Sequence
  Synthetic
uauuauaaaaacugauuggaaaa

SEQ ID NO: 170305 - RNA, 24 nt, Artificial Sequence
  Synthetic
uuauuauaaaaacugauuggaaaa

SEQ ID NO: 170306 - RNA, 18 nt, Artificial Sequence
  Synthetic
uuagagacauuuggaaaa

SEQ ID NO: 170307 - RNA, 19 nt, Artificial Sequence
  Synthetic
auuagagacauuuggaaaa

SEQ ID NO: 170308 - RNA, 20 nt, Artificial Sequence
  Synthetic
cauuagagacauuuggaaaa

SEQ ID NO: 170309 - RNA, 21 nt, Artificial Sequence
  Synthetic
gcauuagagacauuuggaaaa

SEQ ID NO: 170310 - RNA, 22 nt, Artificial Sequence
  Synthetic
agcauuagagacauuuggaaaa

SEQ ID NO: 170311 - RNA, 23 nt, Artificial Sequence
  Synthetic
uagcauuagagacauuuggaaaa

SEQ ID NO: 170312 - RNA, 24 nt, Artificial Sequence
  Synthetic
auagcauuagagacauuuggaaaa

SEQ ID NO: 170313 - RNA, 18 nt, Artificial Sequence
  Synthetic
auggcaggauuuggaaaa

SEQ ID NO: 170314 - RNA, 19 nt, Artificial Sequence
  Synthetic
gauggcaggauuuggaaaa

SEQ ID NO: 170315 - RNA, 20 nt, Artificial Sequence
  Synthetic
agauggcaggauuuggaaaa

SEQ ID NO: 170316 - RNA, 21 nt, Artificial Sequence
  Synthetic
aagauggcaggauuuggaaaa

SEQ ID NO: 170317 - RNA, 22 nt, Artificial Sequence
  Synthetic
aaagauggcaggauuuggaaaa

SEQ ID NO: 170318 - RNA, 23 nt, Artificial Sequence
  Synthetic
aaaagauggcaggauuuggaaaa

SEQ ID NO: 170319 - RNA, 24 nt, Artificial Sequence
  Synthetic
aaaaagauggcaggauuuggaaaa

SEQ ID NO: 170320 - RNA, 18 nt, Artificial Sequence
  Synthetic
ccuucagagaaaugaaaa

SEQ ID NO: 170321 - RNA, 19 nt, Artificial Sequence
  Synthetic
uccuucagagaaaugaaaa

SEQ ID NO: 170322 - RNA, 20 nt, Artificial Sequence
  Synthetic
guccuucagagaaaugaaaa

SEQ ID NO: 170323 - RNA, 21 nt, Artificial Sequence
  Synthetic
aguccuucagagaaaugaaaa

SEQ ID NO: 170324 - RNA, 22 nt, Artificial Sequence
  Synthetic
uaguccuucagagaaaugaaaa

SEQ ID NO: 170325 - RNA, 23 nt, Artificial Sequence
  Synthetic
uuaguccuucagagaaaugaaaa

SEQ ID NO: 170326 - RNA, 24 nt, Artificial Sequence
  Synthetic
guuaguccuucagagaaaugaaaa

SEQ ID NO: 170327 - RNA, 18 nt, Artificial Sequence
  Synthetic
aucucaagaacaugaaaa

SEQ ID NO: 170328 - RNA, 19 nt, Artificial Sequence
  Synthetic
aaucucaagaacaugaaaa

SEQ ID NO: 170329 - RNA, 20 nt, Artificial Sequence
  Synthetic
uaaucucaagaacaugaaaa

SEQ ID NO: 170330 - RNA, 21 nt, Artificial Sequence
  Synthetic
auaaucucaagaacaugaaaa

SEQ ID NO: 170331 - RNA, 22 nt, Artificial Sequence
  Synthetic
aauaaucucaagaacaugaaaa

SEQ ID NO: 170332 - RNA, 23 nt, Artificial Sequence
  Synthetic
aaauaaucucaagaacaugaaaa

SEQ ID NO: 170333 - RNA, 24 nt, Artificial Sequence
  Synthetic
aaaauaaucucaagaacaugaaaa

SEQ ID NO: 170334 - RNA, 18 nt, Artificial Sequence
  Synthetic
gaccuuucuacaugaaaa

SEQ ID NO: 170335 - RNA, 19 nt, Artificial Sequence
  Synthetic
ugaccuuucuacaugaaaa

SEQ ID NO: 170336 - RNA, 20 nt, Artificial Sequence
  Synthetic
gugaccuuucuacaugaaaa

SEQ ID NO: 170337 - RNA, 21 nt, Artificial Sequence
  Synthetic
ugugaccuuucuacaugaaaa

SEQ ID NO: 170338 - RNA, 22 nt, Artificial Sequence
  Synthetic
uugugaccuuucuacaugaaaa

SEQ ID NO: 170339 - RNA, 23 nt, Artificial Sequence
  Synthetic
auugugaccuuucuacaugaaaa

SEQ ID NO: 170340 - RNA, 24 nt, Artificial Sequence
  Synthetic
gauugugaccuuucuacaugaaaa

SEQ ID NO: 170341 - RNA, 18 nt, Artificial Sequence
  Synthetic
uaaaagccuccaugaaaa

SEQ ID NO: 170342 - RNA, 19 nt, Artificial Sequence
  Synthetic
uuaaaagccuccaugaaaa

SEQ ID NO: 170343 - RNA, 20 nt, Artificial Sequence
  Synthetic
cuuaaaagccuccaugaaaa

SEQ ID NO: 170344 - RNA, 21 nt, Artificial Sequence
  Synthetic
acuuaaaagccuccaugaaaa

SEQ ID NO: 170345 - RNA, 22 nt, Artificial Sequence
  Synthetic
aacuuaaaagccuccaugaaaa

SEQ ID NO: 170346 - RNA, 23 nt, Artificial Sequence
  Synthetic
aaacuuaaaagccuccaugaaaa

SEQ ID NO: 170347 - RNA, 24 nt, Artificial Sequence
  Synthetic
aaaacuuaaaagccuccaugaaaa

SEQ ID NO: 170348 - RNA, 18 nt, Artificial Sequence
  Synthetic
gaagauacaagaugaaaa

SEQ ID NO: 170349 - RNA, 19 nt, Artificial Sequence
  Synthetic
ggaagauacaagaugaaaa

SEQ ID NO: 170350 - RNA, 20 nt, Artificial Sequence
  Synthetic
uggaagauacaagaugaaaa

SEQ ID NO: 170351 - RNA, 21 nt, Artificial Sequence
  Synthetic
guggaagauacaagaugaaaa

SEQ ID NO: 170352 - RNA, 22 nt, Artificial Sequence
  Synthetic
aguggaagauacaagaugaaaa

SEQ ID NO: 170353 - RNA, 23 nt, Artificial Sequence
  Synthetic
aaguggaagauacaagaugaaaa

SEQ ID NO: 170354 - RNA, 24 nt, Artificial Sequence
  Synthetic
caaguggaagauacaagaugaaaa

SEQ ID NO: 170355 - RNA, 18 nt, Artificial Sequence
  Synthetic
uauaaaugaugaugaaaa

SEQ ID NO: 170356 - RNA, 19 nt, Artificial Sequence
  Synthetic
guauaaaugaugaugaaaa

SEQ ID NO: 170357 - RNA, 20 nt, Artificial Sequence
  Synthetic
aguauaaaugaugaugaaaa

SEQ ID NO: 170358 - RNA, 21 nt, Artificial Sequence
  Synthetic
gaguauaaaugaugaugaaaa

SEQ ID NO: 170359 - RNA, 22 nt, Artificial Sequence
  Synthetic
agaguauaaaugaugaugaaaa

SEQ ID NO: 170360 - RNA, 23 nt, Artificial Sequence
  Synthetic
aagaguauaaaugaugaugaaaa

SEQ ID NO: 170361 - RNA, 24 nt, Artificial Sequence
  Synthetic
gaagaguauaaaugaugaugaaaa

SEQ ID NO: 170362 - RNA, 18 nt, Artificial Sequence
  Synthetic
uugugaaugugaugaaaa

SEQ ID NO: 170363 - RNA, 19 nt, Artificial Sequence
  Synthetic
guugugaaugugaugaaaa

SEQ ID NO: 170364 - RNA, 20 nt, Artificial Sequence
  Synthetic
uguugugaaugugaugaaaa

SEQ ID NO: 170365 - RNA, 21 nt, Artificial Sequence
  Synthetic
uuguugugaaugugaugaaaa

SEQ ID NO: 170366 - RNA, 22 nt, Artificial Sequence
  Synthetic
uuuguugugaaugugaugaaaa

SEQ ID NO: 170367 - RNA, 23 nt, Artificial Sequence
  Synthetic
uuuuguugugaaugugaugaaaa

SEQ ID NO: 170368 - RNA, 24 nt, Artificial Sequence
  Synthetic
auuuuguugugaaugugaugaaaa

SEQ ID NO: 170369 - RNA, 18 nt, Artificial Sequence
  Synthetic
ccaaggagaauaugaaaa

SEQ ID NO: 170370 - RNA, 19 nt, Artificial Sequence
  Synthetic
uccaaggagaauaugaaaa

SEQ ID NO: 170371 - RNA, 20 nt, Artificial Sequence
  Synthetic
uuccaaggagaauaugaaaa

SEQ ID NO: 170372 - RNA, 21 nt, Artificial Sequence
  Synthetic
guuccaaggagaauaugaaaa

SEQ ID NO: 170373 - RNA, 22 nt, Artificial Sequence
  Synthetic
aguuccaaggagaauaugaaaa

SEQ ID NO: 170374 - RNA, 23 nt, Artificial Sequence
  Synthetic
caguuccaaggagaauaugaaaa

SEQ ID NO: 170375 - RNA, 24 nt, Artificial Sequence
  Synthetic
ucaguuccaaggagaauaugaaaa

SEQ ID NO: 170376 - RNA, 18 nt, Artificial Sequence
  Synthetic
caagguaguuuaugaaaa

SEQ ID NO: 170377 - RNA, 19 nt, Artificial Sequence
  Synthetic
acaagguaguuuaugaaaa

SEQ ID NO: 170378 - RNA, 20 nt, Artificial Sequence
  Synthetic
aacaagguaguuuaugaaaa

SEQ ID NO: 170379 - RNA, 21 nt, Artificial Sequence
  Synthetic
aaacaagguaguuuaugaaaa

SEQ ID NO: 170380 - RNA, 22 nt, Artificial Sequence
  Synthetic
caaacaagguaguuuaugaaaa

SEQ ID NO: 170381 - RNA, 23 nt, Artificial Sequence
  Synthetic
ucaaacaagguaguuuaugaaaa

SEQ ID NO: 170382 - RNA, 24 nt, Artificial Sequence
  Synthetic
uucaaacaagguaguuuaugaaaa

SEQ ID NO: 170383 - RNA, 18 nt, Artificial Sequence
  Synthetic
gauaaaguaaacugaaaa

SEQ ID NO: 170384 - RNA, 19 nt, Artificial Sequence
  Synthetic
ggauaaaguaaacugaaaa

SEQ ID NO: 170385 - RNA, 20 nt, Artificial Sequence
  Synthetic
uggauaaaguaaacugaaaa

SEQ ID NO: 170386 - RNA, 21 nt, Artificial Sequence
  Synthetic
cuggauaaaguaaacugaaaa

SEQ ID NO: 170387 - RNA, 22 nt, Artificial Sequence
  Synthetic
ucuggauaaaguaaacugaaaa

SEQ ID NO: 170388 - RNA, 23 nt, Artificial Sequence
  Synthetic
aucuggauaaaguaaacugaaaa

SEQ ID NO: 170389 - RNA, 24 nt, Artificial Sequence
  Synthetic
gaucuggauaaaguaaacugaaaa

SEQ ID NO: 170390 - RNA, 18 nt, Artificial Sequence
  Synthetic
uggguaacuaacugaaaa

SEQ ID NO: 170391 - RNA, 19 nt, Artificial Sequence
  Synthetic
cuggguaacuaacugaaaa

SEQ ID NO: 170392 - RNA, 20 nt, Artificial Sequence
  Synthetic
ccuggguaacuaacugaaaa

SEQ ID NO: 170393 - RNA, 21 nt, Artificial Sequence
  Synthetic
cccuggguaacuaacugaaaa

SEQ ID NO: 170394 - RNA, 22 nt, Artificial Sequence
  Synthetic
acccuggguaacuaacugaaaa

SEQ ID NO: 170395 - RNA, 23 nt, Artificial Sequence
  Synthetic
aacccuggguaacuaacugaaaa

SEQ ID NO: 170396 - RNA, 24 nt, Artificial Sequence
  Synthetic
aaacccuggguaacuaacugaaaa

SEQ ID NO: 170397 - RNA, 18 nt, Artificial Sequence
  Synthetic
uuugcuaaagacugaaaa

SEQ ID NO: 170398 - RNA, 19 nt, Artificial Sequence
  Synthetic
auuugcuaaagacugaaaa

SEQ ID NO: 170399 - RNA, 20 nt, Artificial Sequence
  Synthetic
aauuugcuaaagacugaaaa

SEQ ID NO: 170400 - RNA, 21 nt, Artificial Sequence
  Synthetic
gaauuugcuaaagacugaaaa

SEQ ID NO: 170401 - RNA, 22 nt, Artificial Sequence
  Synthetic
ggaauuugcuaaagacugaaaa

SEQ ID NO: 170402 - RNA, 23 nt, Artificial Sequence
  Synthetic
uggaauuugcuaaagacugaaaa

SEQ ID NO: 170403 - RNA, 24 nt, Artificial Sequence
  Synthetic
guggaauuugcuaaagacugaaaa

SEQ ID NO: 170404 - RNA, 18 nt, Artificial Sequence
  Synthetic
auauucauuuacugaaaa

SEQ ID NO: 170405 - RNA, 19 nt, Artificial Sequence
  Synthetic
cauauucauuuacugaaaa

SEQ ID NO: 170406 - RNA, 20 nt, Artificial Sequence
  Synthetic
ucauauucauuuacugaaaa

SEQ ID NO: 170407 - RNA, 21 nt, Artificial Sequence
  Synthetic
uucauauucauuuacugaaaa

SEQ ID NO: 170408 - RNA, 22 nt, Artificial Sequence
  Synthetic
auucauauucauuuacugaaaa

SEQ ID NO: 170409 - RNA, 23 nt, Artificial Sequence
  Synthetic
aauucauauucauuuacugaaaa

SEQ ID NO: 170410 - RNA, 24 nt, Artificial Sequence
  Synthetic
uaauucauauucauuuacugaaaa

SEQ ID NO: 170411 - RNA, 18 nt, Artificial Sequence
  Synthetic
caagaauugcccugaaaa

SEQ ID NO: 170412 - RNA, 19 nt, Artificial Sequence
  Synthetic
acaagaauugcccugaaaa

SEQ ID NO: 170413 - RNA, 20 nt, Artificial Sequence
  Synthetic
uacaagaauugcccugaaaa

SEQ ID NO: 170414 - RNA, 21 nt, Artificial Sequence
  Synthetic
uuacaagaauugcccugaaaa

SEQ ID NO: 170415 - RNA, 22 nt, Artificial Sequence
  Synthetic
uuuacaagaauugcccugaaaa

SEQ ID NO: 170416 - RNA, 23 nt, Artificial Sequence
  Synthetic
guuuacaagaauugcccugaaaa

SEQ ID NO: 170417 - RNA, 24 nt, Artificial Sequence
  Synthetic
aguuuacaagaauugcccugaaaa

SEQ ID NO: 170418 - RNA, 18 nt, Artificial Sequence
  Synthetic
aaugaauagagcugaaaa

SEQ ID NO: 170419 - RNA, 19 nt, Artificial Sequence
  Synthetic
aaaugaauagagcugaaaa

SEQ ID NO: 170420 - RNA, 20 nt, Artificial Sequence
  Synthetic
aaaaugaauagagcugaaaa

SEQ ID NO: 170421 - RNA, 21 nt, Artificial Sequence
  Synthetic
aaaaaugaauagagcugaaaa

SEQ ID NO: 170422 - RNA, 22 nt, Artificial Sequence
  Synthetic
caaaaaugaauagagcugaaaa

SEQ ID NO: 170423 - RNA, 23 nt, Artificial Sequence
  Synthetic
gcaaaaaugaauagagcugaaaa

SEQ ID NO: 170424 - RNA, 24 nt, Artificial Sequence
  Synthetic
agcaaaaaugaauagagcugaaaa

SEQ ID NO: 170425 - RNA, 18 nt, Artificial Sequence
  Synthetic
agugcgaggaucugaaaa

SEQ ID NO: 170426 - RNA, 19 nt, Artificial Sequence
  Synthetic
uagugcgaggaucugaaaa

SEQ ID NO: 170427 - RNA, 20 nt, Artificial Sequence
  Synthetic
auagugcgaggaucugaaaa

SEQ ID NO: 170428 - RNA, 21 nt, Artificial Sequence
  Synthetic
aauagugcgaggaucugaaaa

SEQ ID NO: 170429 - RNA, 22 nt, Artificial Sequence
  Synthetic
aaauagugcgaggaucugaaaa

SEQ ID NO: 170430 - RNA, 23 nt, Artificial Sequence
  Synthetic
caaauagugcgaggaucugaaaa

SEQ ID NO: 170431 - RNA, 24 nt, Artificial Sequence
  Synthetic
ucaaauagugcgaggaucugaaaa

SEQ ID NO: 170432 - RNA, 18 nt, Artificial Sequence
  Synthetic
aucaaaaauaucugaaaa

SEQ ID NO: 170433 - RNA, 19 nt, Artificial Sequence
  Synthetic
aaucaaaaauaucugaaaa

SEQ ID NO: 170434 - RNA, 20 nt, Artificial Sequence
  Synthetic
caaucaaaaauaucugaaaa

SEQ ID NO: 170435 - RNA, 21 nt, Artificial Sequence
  Synthetic
acaaucaaaaauaucugaaaa

SEQ ID NO: 170436 - RNA, 22 nt, Artificial Sequence
  Synthetic
aacaaucaaaaauaucugaaaa

SEQ ID NO: 170437 - RNA, 23 nt, Artificial Sequence
  Synthetic
aaacaaucaaaaauaucugaaaa

SEQ ID NO: 170438 - RNA, 24 nt, Artificial Sequence
  Synthetic
uaaacaaucaaaaauaucugaaaa

SEQ ID NO: 170439 - RNA, 18 nt, Artificial Sequence
  Synthetic
gguucauauaagugaaaa

SEQ ID NO: 170440 - RNA, 19 nt, Artificial Sequence
  Synthetic
ggguucauauaagugaaaa

SEQ ID NO: 170441 - RNA, 20 nt, Artificial Sequence
  Synthetic
aggguucauauaagugaaaa

SEQ ID NO: 170442 - RNA, 21 nt, Artificial Sequence
  Synthetic
caggguucauauaagugaaaa

SEQ ID NO: 170443 - RNA, 22 nt, Artificial Sequence
  Synthetic
acaggguucauauaagugaaaa

SEQ ID NO: 170444 - RNA, 23 nt, Artificial Sequence
  Synthetic
cacaggguucauauaagugaaaa

SEQ ID NO: 170445 - RNA, 24 nt, Artificial Sequence
  Synthetic
ccacaggguucauauaagugaaaa

SEQ ID NO: 170446 - RNA, 18 nt, Artificial Sequence
  Synthetic
augcauaaacagugaaaa

SEQ ID NO: 170447 - RNA, 19 nt, Artificial Sequence
  Synthetic
uaugcauaaacagugaaaa

SEQ ID NO: 170448 - RNA, 20 nt, Artificial Sequence
  Synthetic
auaugcauaaacagugaaaa

SEQ ID NO: 170449 - RNA, 21 nt, Artificial Sequence
  Synthetic
cauaugcauaaacagugaaaa

SEQ ID NO: 170450 - RNA, 22 nt, Artificial Sequence
  Synthetic
ccauaugcauaaacagugaaaa

SEQ ID NO: 170451 - RNA, 23 nt, Artificial Sequence
  Synthetic
uccauaugcauaaacagugaaaa

SEQ ID NO: 170452 - RNA, 24 nt, Artificial Sequence
  Synthetic
uuccauaugcauaaacagugaaaa

SEQ ID NO: 170453 - RNA, 18 nt, Artificial Sequence
  Synthetic
uguagagcccagugaaaa

SEQ ID NO: 170454 - RNA, 19 nt, Artificial Sequence
  Synthetic
cuguagagcccagugaaaa

SEQ ID NO: 170455 - RNA, 20 nt, Artificial Sequence
  Synthetic
ucuguagagcccagugaaaa

SEQ ID NO: 170456 - RNA, 21 nt, Artificial Sequence
  Synthetic
aucuguagagcccagugaaaa

SEQ ID NO: 170457 - RNA, 22 nt, Artificial Sequence
  Synthetic
aaucuguagagcccagugaaaa

SEQ ID NO: 170458 - RNA, 23 nt, Artificial Sequence
  Synthetic
uaaucuguagagcccagugaaaa

SEQ ID NO: 170459 - RNA, 24 nt, Artificial Sequence
  Synthetic
guaaucuguagagcccagugaaaa

SEQ ID NO: 170460 - RNA, 18 nt, Artificial Sequence
  Synthetic
aagucccuucagugaaaa

SEQ ID NO: 170461 - RNA, 19 nt, Artificial Sequence
  Synthetic
caagucccuucagugaaaa

SEQ ID NO: 170462 - RNA, 20 nt, Artificial Sequence
  Synthetic
ucaagucccuucagugaaaa

SEQ ID NO: 170463 - RNA, 21 nt, Artificial Sequence
  Synthetic
uucaagucccuucagugaaaa

SEQ ID NO: 170464 - RNA, 22 nt, Artificial Sequence
  Synthetic
uuucaagucccuucagugaaaa

SEQ ID NO: 170465 - RNA, 23 nt, Artificial Sequence
  Synthetic
cuuucaagucccuucagugaaaa

SEQ ID NO: 170466 - RNA, 24 nt, Artificial Sequence
  Synthetic
gcuuucaagucccuucagugaaaa

SEQ ID NO: 170467 - RNA, 18 nt, Artificial Sequence
  Synthetic
gaaaugaagaugugaaaa

SEQ ID NO: 170468 - RNA, 19 nt, Artificial Sequence
  Synthetic
ggaaaugaagaugugaaaa

SEQ ID NO: 170469 - RNA, 20 nt, Artificial Sequence
  Synthetic
uggaaaugaagaugugaaaa

SEQ ID NO: 170470 - RNA, 21 nt, Artificial Sequence
  Synthetic
uuggaaaugaagaugugaaaa

SEQ ID NO: 170471 - RNA, 22 nt, Artificial Sequence
  Synthetic
guuggaaaugaagaugugaaaa

SEQ ID NO: 170472 - RNA, 23 nt, Artificial Sequence
  Synthetic
uguuggaaaugaagaugugaaaa

SEQ ID NO: 170473 - RNA, 24 nt, Artificial Sequence
  Synthetic
auguuggaaaugaagaugugaaaa

SEQ ID NO: 170474 - RNA, 18 nt, Artificial Sequence
  Synthetic
guugauaugaugugaaaa

SEQ ID NO: 170475 - RNA, 19 nt, Artificial Sequence
  Synthetic
gguugauaugaugugaaaa

SEQ ID NO: 170476 - RNA, 20 nt, Artificial Sequence
  Synthetic
ugguugauaugaugugaaaa

SEQ ID NO: 170477 - RNA, 21 nt, Artificial Sequence
  Synthetic
cugguugauaugaugugaaaa

SEQ ID NO: 170478 - RNA, 22 nt, Artificial Sequence
  Synthetic
acugguugauaugaugugaaaa

SEQ ID NO: 170479 - RNA, 23 nt, Artificial Sequence
  Synthetic
gacugguugauaugaugugaaaa

SEQ ID NO: 170480 - RNA, 24 nt, Artificial Sequence
  Synthetic
agacugguugauaugaugugaaaa

SEQ ID NO: 170481 - RNA, 18 nt, Artificial Sequence
  Synthetic
uuaacuucuaugugaaaa

SEQ ID NO: 170482 - RNA, 19 nt, Artificial Sequence
  Synthetic
cuuaacuucuaugugaaaa

SEQ ID NO: 170483 - RNA, 20 nt, Artificial Sequence
  Synthetic
acuuaacuucuaugugaaaa

SEQ ID NO: 170484 - RNA, 21 nt, Artificial Sequence
  Synthetic
gacuuaacuucuaugugaaaa

SEQ ID NO: 170485 - RNA, 22 nt, Artificial Sequence
  Synthetic
ugacuuaacuucuaugugaaaa

SEQ ID NO: 170486 - RNA, 23 nt, Artificial Sequence
  Synthetic
gugacuuaacuucuaugugaaaa

SEQ ID NO: 170487 - RNA, 24 nt, Artificial Sequence
  Synthetic
ugugacuuaacuucuaugugaaaa

SEQ ID NO: 170488 - RNA, 18 nt, Artificial Sequence
  Synthetic
uguaaacguaugugaaaa

SEQ ID NO: 170489 - RNA, 19 nt, Artificial Sequence
  Synthetic
auguaaacguaugugaaaa

SEQ ID NO: 170490 - RNA, 20 nt, Artificial Sequence
  Synthetic
cauguaaacguaugugaaaa

SEQ ID NO: 170491 - RNA, 21 nt, Artificial Sequence
  Synthetic
gcauguaaacguaugugaaaa

SEQ ID NO: 170492 - RNA, 22 nt, Artificial Sequence
  Synthetic
agcauguaaacguaugugaaaa

SEQ ID NO: 170493 - RNA, 23 nt, Artificial Sequence
  Synthetic
aagcauguaaacguaugugaaaa

SEQ ID NO: 170494 - RNA, 24 nt, Artificial Sequence
  Synthetic
uaagcauguaaacguaugugaaaa

SEQ ID NO: 170495 - RNA, 18 nt, Artificial Sequence
  Synthetic
ugcaugcguaugugaaaa

SEQ ID NO: 170496 - RNA, 19 nt, Artificial Sequence
  Synthetic
cugcaugcguaugugaaaa

SEQ ID NO: 170497 - RNA, 20 nt, Artificial Sequence
  Synthetic
gcugcaugcguaugugaaaa

SEQ ID NO: 170498 - RNA, 21 nt, Artificial Sequence
  Synthetic
ugcugcaugcguaugugaaaa

SEQ ID NO: 170499 - RNA, 22 nt, Artificial Sequence
  Synthetic
augcugcaugcguaugugaaaa

SEQ ID NO: 170500 - RNA, 23 nt, Artificial Sequence
  Synthetic
aaugcugcaugcguaugugaaaa

SEQ ID NO: 170501 - RNA, 24 nt, Artificial Sequence
  Synthetic
aaaugcugcaugcguaugugaaaa

SEQ ID NO: 170502 - RNA, 18 nt, Artificial Sequence
  Synthetic
aaugcuucauauugaaaa

SEQ ID NO: 170503 - RNA, 19 nt, Artificial Sequence
  Synthetic
aaaugcuucauauugaaaa

SEQ ID NO: 170504 - RNA, 20 nt, Artificial Sequence
  Synthetic
uaaaugcuucauauugaaaa

SEQ ID NO: 170505 - RNA, 21 nt, Artificial Sequence
  Synthetic
auaaaugcuucauauugaaaa

SEQ ID NO: 170506 - RNA, 22 nt, Artificial Sequence
  Synthetic
aauaaaugcuucauauugaaaa

SEQ ID NO: 170507 - RNA, 23 nt, Artificial Sequence
  Synthetic
gaauaaaugcuucauauugaaaa

SEQ ID NO: 170508 - RNA, 24 nt, Artificial Sequence
  Synthetic
ugaauaaaugcuucauauugaaaa

SEQ ID NO: 170509 - RNA, 18 nt, Artificial Sequence
  Synthetic
uauuucguuuauugaaaa

SEQ ID NO: 170510 - RNA, 19 nt, Artificial Sequence
  Synthetic
cuauuucguuuauugaaaa

SEQ ID NO: 170511 - RNA, 20 nt, Artificial Sequence
  Synthetic
gcuauuucguuuauugaaaa

SEQ ID NO: 170512 - RNA, 21 nt, Artificial Sequence
  Synthetic
ggcuauuucguuuauugaaaa

SEQ ID NO: 170513 - RNA, 22 nt, Artificial Sequence
  Synthetic
cggcuauuucguuuauugaaaa

SEQ ID NO: 170514 - RNA, 23 nt, Artificial Sequence
  Synthetic
acggcuauuucguuuauugaaaa

SEQ ID NO: 170515 - RNA, 24 nt, Artificial Sequence
  Synthetic
cacggcuauuucguuuauugaaaa

SEQ ID NO: 170516 - RNA, 18 nt, Artificial Sequence
  Synthetic
ucaaaacaaccuugaaaa

SEQ ID NO: 170517 - RNA, 19 nt, Artificial Sequence
  Synthetic
gucaaaacaaccuugaaaa

SEQ ID NO: 170518 - RNA, 20 nt, Artificial Sequence
  Synthetic
agucaaaacaaccuugaaaa

SEQ ID NO: 170519 - RNA, 21 nt, Artificial Sequence
  Synthetic
uagucaaaacaaccuugaaaa

SEQ ID NO: 170520 - RNA, 22 nt, Artificial Sequence
  Synthetic
auagucaaaacaaccuugaaaa

SEQ ID NO: 170521 - RNA, 23 nt, Artificial Sequence
  Synthetic
aauagucaaaacaaccuugaaaa

SEQ ID NO: 170522 - RNA, 24 nt, Artificial Sequence
  Synthetic
gaauagucaaaacaaccuugaaaa

SEQ ID NO: 170523 - RNA, 18 nt, Artificial Sequence
  Synthetic
uuauaaguuccuugaaaa

SEQ ID NO: 170524 - RNA, 19 nt, Artificial Sequence
  Synthetic
auuauaaguuccuugaaaa

SEQ ID NO: 170525 - RNA, 20 nt, Artificial Sequence
  Synthetic
gauuauaaguuccuugaaaa

SEQ ID NO: 170526 - RNA, 21 nt, Artificial Sequence
  Synthetic
agauuauaaguuccuugaaaa

SEQ ID NO: 170527 - RNA, 22 nt, Artificial Sequence
  Synthetic
uagauuauaaguuccuugaaaa

SEQ ID NO: 170528 - RNA, 23 nt, Artificial Sequence
  Synthetic
cuagauuauaaguuccuugaaaa

SEQ ID NO: 170529 - RNA, 24 nt, Artificial Sequence
  Synthetic
gcuagauuauaaguuccuugaaaa

SEQ ID NO: 170530 - RNA, 18 nt, Artificial Sequence
  Synthetic
gggaaaaguucuugaaaa

SEQ ID NO: 170531 - RNA, 19 nt, Artificial Sequence
  Synthetic
ugggaaaaguucuugaaaa

SEQ ID NO: 170532 - RNA, 20 nt, Artificial Sequence
  Synthetic
augggaaaaguucuugaaaa

SEQ ID NO: 170533 - RNA, 21 nt, Artificial Sequence
  Synthetic
aaugggaaaaguucuugaaaa

SEQ ID NO: 170534 - RNA, 22 nt, Artificial Sequence
  Synthetic
aaaugggaaaaguucuugaaaa

SEQ ID NO: 170535 - RNA, 23 nt, Artificial Sequence
  Synthetic
aaaaugggaaaaguucuugaaaa

SEQ ID NO: 170536 - RNA, 24 nt, Artificial Sequence
  Synthetic
aaaaaugggaaaaguucuugaaaa

SEQ ID NO: 170537 - RNA, 18 nt, Artificial Sequence
  Synthetic
aaacuuuauaguugaaaa

SEQ ID NO: 170538 - RNA, 19 nt, Artificial Sequence
  Synthetic
uaaacuuuauaguugaaaa

SEQ ID NO: 170539 - RNA, 20 nt, Artificial Sequence
  Synthetic
auaaacuuuauaguugaaaa

SEQ ID NO: 170540 - RNA, 21 nt, Artificial Sequence
  Synthetic
cauaaacuuuauaguugaaaa

SEQ ID NO: 170541 - RNA, 22 nt, Artificial Sequence
  Synthetic
ucauaaacuuuauaguugaaaa

SEQ ID NO: 170542 - RNA, 23 nt, Artificial Sequence
  Synthetic
uucauaaacuuuauaguugaaaa

SEQ ID NO: 170543 - RNA, 24 nt, Artificial Sequence
  Synthetic
uuucauaaacuuuauaguugaaaa

SEQ ID NO: 170544 - RNA, 18 nt, Artificial Sequence
  Synthetic
uugagacauauuugaaaa

SEQ ID NO: 170545 - RNA, 19 nt, Artificial Sequence
  Synthetic
uuugagacauauuugaaaa

SEQ ID NO: 170546 - RNA, 20 nt, Artificial Sequence
  Synthetic
auuugagacauauuugaaaa

SEQ ID NO: 170547 - RNA, 21 nt, Artificial Sequence
  Synthetic
aauuugagacauauuugaaaa

SEQ ID NO: 170548 - RNA, 22 nt, Artificial Sequence
  Synthetic
uaauuugagacauauuugaaaa

SEQ ID NO: 170549 - RNA, 23 nt, Artificial Sequence
  Synthetic
auaauuugagacauauuugaaaa

SEQ ID NO: 170550 - RNA, 24 nt, Artificial Sequence
  Synthetic
aauaauuugagacauauuugaaaa

SEQ ID NO: 170551 - RNA, 18 nt, Artificial Sequence
  Synthetic
aaaaaaagucuuugaaaa

SEQ ID NO: 170552 - RNA, 19 nt, Artificial Sequence
  Synthetic
aaaaaaaagucuuugaaaa

SEQ ID NO: 170553 - RNA, 20 nt, Artificial Sequence
  Synthetic
aaaaaaaaagucuuugaaaa

SEQ ID NO: 170554 - RNA, 21 nt, Artificial Sequence
  Synthetic
aaaaaaaaaagucuuugaaaa

SEQ ID NO: 170555 - RNA, 22 nt, Artificial Sequence
  Synthetic
aaaaaaaaaaagucuuugaaaa

SEQ ID NO: 170556 - RNA, 23 nt, Artificial Sequence
  Synthetic
aaaaaaaaaaaagucuuugaaaa

SEQ ID NO: 170557 - RNA, 24 nt, Artificial Sequence
  Synthetic
aaaaaaaaaaaaagucuuugaaaa

SEQ ID NO: 170558 - RNA, 18 nt, Artificial Sequence
  Synthetic
aacuuuuaauuuugaaaa

SEQ ID NO: 170559 - RNA, 19 nt, Artificial Sequence
  Synthetic
aaacuuuuaauuuugaaaa

SEQ ID NO: 170560 - RNA, 20 nt, Artificial Sequence
  Synthetic
aaaacuuuuaauuuugaaaa

SEQ ID NO: 170561 - RNA, 21 nt, Artificial Sequence
  Synthetic
aaaaacuuuuaauuuugaaaa

SEQ ID NO: 170562 - RNA, 22 nt, Artificial Sequence
  Synthetic
aaaaaacuuuuaauuuugaaaa

SEQ ID NO: 170563 - RNA, 23 nt, Artificial Sequence
  Synthetic
aaaaaaacuuuuaauuuugaaaa

SEQ ID NO: 170564 - RNA, 24 nt, Artificial Sequence
  Synthetic
aaaaaaaacuuuuaauuuugaaaa

SEQ ID NO: 170565 - RNA, 18 nt, Artificial Sequence
  Synthetic
aagagcagauuuugaaaa

SEQ ID NO: 170566 - RNA, 19 nt, Artificial Sequence
  Synthetic
aaagagcagauuuugaaaa

SEQ ID NO: 170567 - RNA, 20 nt, Artificial Sequence
  Synthetic
gaaagagcagauuuugaaaa

SEQ ID NO: 170568 - RNA, 21 nt, Artificial Sequence
  Synthetic
agaaagagcagauuuugaaaa

SEQ ID NO: 170569 - RNA, 22 nt, Artificial Sequence
  Synthetic
aagaaagagcagauuuugaaaa

SEQ ID NO: 170570 - RNA, 23 nt, Artificial Sequence
  Synthetic
uaagaaagagcagauuuugaaaa

SEQ ID NO: 170571 - RNA, 24 nt, Artificial Sequence
  Synthetic
auaagaaagagcagauuuugaaaa

SEQ ID NO: 170572 - RNA, 18 nt, Artificial Sequence
  Synthetic
uagauguuaaaaauaaaa

SEQ ID NO: 170573 - RNA, 19 nt, Artificial Sequence
  Synthetic
auagauguuaaaaauaaaa

SEQ ID NO: 170574 - RNA, 20 nt, Artificial Sequence
  Synthetic
aauagauguuaaaaauaaaa

SEQ ID NO: 170575 - RNA, 21 nt, Artificial Sequence
  Synthetic
uaauagauguuaaaaauaaaa

SEQ ID NO: 170576 - RNA, 22 nt, Artificial Sequence
  Synthetic
auaauagauguuaaaaauaaaa

SEQ ID NO: 170577 - RNA, 23 nt, Artificial Sequence
  Synthetic
aauaauagauguuaaaaauaaaa

SEQ ID NO: 170578 - RNA, 24 nt, Artificial Sequence
  Synthetic
aaauaauagauguuaaaaauaaaa

SEQ ID NO: 170579 - RNA, 18 nt, Artificial Sequence
  Synthetic
aaauaaaauaaaauaaaa

SEQ ID NO: 170580 - RNA, 19 nt, Artificial Sequence
  Synthetic
aaaauaaaauaaaauaaaa

SEQ ID NO: 170581 - RNA, 20 nt, Artificial Sequence
  Synthetic
uaaaauaaaauaaaauaaaa

SEQ ID NO: 170582 - RNA, 21 nt, Artificial Sequence
  Synthetic
uuaaaauaaaauaaaauaaaa

SEQ ID NO: 170583 - RNA, 22 nt, Artificial Sequence
  Synthetic
auuaaaauaaaauaaaauaaaa

SEQ ID NO: 170584 - RNA, 23 nt, Artificial Sequence
  Synthetic
aauuaaaauaaaauaaaauaaaa

SEQ ID NO: 170585 - RNA, 24 nt, Artificial Sequence
  Synthetic
aaauuaaaauaaaauaaaauaaaa

SEQ ID NO: 170586 - RNA, 18 nt, Artificial Sequence
  Synthetic
aauuucuguaaaauaaaa

SEQ ID NO: 170587 - RNA, 19 nt, Artificial Sequence
  Synthetic
aaauuucuguaaaauaaaa

SEQ ID NO: 170588 - RNA, 20 nt, Artificial Sequence
  Synthetic
aaaauuucuguaaaauaaaa

SEQ ID NO: 170589 - RNA, 21 nt, Artificial Sequence
  Synthetic
uaaaauuucuguaaaauaaaa

SEQ ID NO: 170590 - RNA, 22 nt, Artificial Sequence
  Synthetic
auaaaauuucuguaaaauaaaa

SEQ ID NO: 170591 - RNA, 23 nt, Artificial Sequence
  Synthetic
aauaaaauuucuguaaaauaaaa

SEQ ID NO: 170592 - RNA, 24 nt, Artificial Sequence
  Synthetic
uaauaaaauuucuguaaaauaaaa

SEQ ID NO: 170593 - RNA, 18 nt, Artificial Sequence
  Synthetic
acaaaaauuaaaauaaaa

SEQ ID NO: 170594 - RNA, 19 nt, Artificial Sequence
  Synthetic
cacaaaaauuaaaauaaaa

SEQ ID NO: 170595 - RNA, 20 nt, Artificial Sequence
  Synthetic
ccacaaaaauuaaaauaaaa

SEQ ID NO: 170596 - RNA, 21 nt, Artificial Sequence
  Synthetic
cccacaaaaauuaaaauaaaa

SEQ ID NO: 170597 - RNA, 22 nt, Artificial Sequence
  Synthetic
acccacaaaaauuaaaauaaaa

SEQ ID NO: 170598 - RNA, 23 nt, Artificial Sequence
  Synthetic
uacccacaaaaauuaaaauaaaa

SEQ ID NO: 170599 - RNA, 24 nt, Artificial Sequence
  Synthetic
guacccacaaaaauuaaaauaaaa

SEQ ID NO: 170600 - RNA, 18 nt, Artificial Sequence
  Synthetic
guacauuuuaaaauaaaa

SEQ ID NO: 170601 - RNA, 19 nt, Artificial Sequence
  Synthetic
uguacauuuuaaaauaaaa

SEQ ID NO: 170602 - RNA, 20 nt, Artificial Sequence
  Synthetic
auguacauuuuaaaauaaaa

SEQ ID NO: 170603 - RNA, 21 nt, Artificial Sequence
  Synthetic
aauguacauuuuaaaauaaaa

SEQ ID NO: 170604 - RNA, 22 nt, Artificial Sequence
  Synthetic
aaauguacauuuuaaaauaaaa

SEQ ID NO: 170605 - RNA, 23 nt, Artificial Sequence
  Synthetic
aaaauguacauuuuaaaauaaaa

SEQ ID NO: 170606 - RNA, 24 nt, Artificial Sequence
  Synthetic
uaaaauguacauuuuaaaauaaaa

SEQ ID NO: 170607 - RNA, 18 nt, Artificial Sequence
  Synthetic
auaaaaugacaaauaaaa

SEQ ID NO: 170608 - RNA, 19 nt, Artificial Sequence
  Synthetic
cauaaaaugacaaauaaaa

SEQ ID NO: 170609 - RNA, 20 nt, Artificial Sequence
  Synthetic
ucauaaaaugacaaauaaaa

SEQ ID NO: 170610 - RNA, 21 nt, Artificial Sequence
  Synthetic
gucauaaaaugacaaauaaaa

SEQ ID NO: 170611 - RNA, 22 nt, Artificial Sequence
  Synthetic
agucauaaaaugacaaauaaaa

SEQ ID NO: 170612 - RNA, 23 nt, Artificial Sequence
  Synthetic
cagucauaaaaugacaaauaaaa

SEQ ID NO: 170613 - RNA, 24 nt, Artificial Sequence
  Synthetic
acagucauaaaaugacaaauaaaa

SEQ ID NO: 170614 - RNA, 18 nt, Artificial Sequence
  Synthetic
gucucaaaagaaauaaaa

SEQ ID NO: 170615 - RNA, 19 nt, Artificial Sequence
  Synthetic
ugucucaaaagaaauaaaa

SEQ ID NO: 170616 - RNA, 20 nt, Artificial Sequence
  Synthetic
cugucucaaaagaaauaaaa

SEQ ID NO: 170617 - RNA, 21 nt, Artificial Sequence
  Synthetic
ucugucucaaaagaaauaaaa

SEQ ID NO: 170618 - RNA, 22 nt, Artificial Sequence
  Synthetic
cucugucucaaaagaaauaaaa

SEQ ID NO: 170619 - RNA, 23 nt, Artificial Sequence
  Synthetic
acucugucucaaaagaaauaaaa

SEQ ID NO: 170620 - RNA, 24 nt, Artificial Sequence
  Synthetic
gacucugucucaaaagaaauaaaa

SEQ ID NO: 170621 - RNA, 18 nt, Artificial Sequence
  Synthetic
cacagaacagaaauaaaa

SEQ ID NO: 170622 - RNA, 19 nt, Artificial Sequence
  Synthetic
ucacagaacagaaauaaaa

SEQ ID NO: 170623 - RNA, 20 nt, Artificial Sequence
  Synthetic
uucacagaacagaaauaaaa

SEQ ID NO: 170624 - RNA, 21 nt, Artificial Sequence
  Synthetic
auucacagaacagaaauaaaa

SEQ ID NO: 170625 - RNA, 22 nt, Artificial Sequence
  Synthetic
uauucacagaacagaaauaaaa

SEQ ID NO: 170626 - RNA, 23 nt, Artificial Sequence
  Synthetic
cuauucacagaacagaaauaaaa

SEQ ID NO: 170627 - RNA, 24 nt, Artificial Sequence
  Synthetic
ccuauucacagaacagaaauaaaa

SEQ ID NO: 170628 - RNA, 18 nt, Artificial Sequence
  Synthetic
gaaaucaaggaaauaaaa

SEQ ID NO: 170629 - RNA, 19 nt, Artificial Sequence
  Synthetic
agaaaucaaggaaauaaaa

SEQ ID NO: 170630 - RNA, 20 nt, Artificial Sequence
  Synthetic
cagaaaucaaggaaauaaaa

SEQ ID NO: 170631 - RNA, 21 nt, Artificial Sequence
  Synthetic
ucagaaaucaaggaaauaaaa

SEQ ID NO: 170632 - RNA, 22 nt, Artificial Sequence
  Synthetic
uucagaaaucaaggaaauaaaa

SEQ ID NO: 170633 - RNA, 23 nt, Artificial Sequence
  Synthetic
uuucagaaaucaaggaaauaaaa

SEQ ID NO: 170634 - RNA, 24 nt, Artificial Sequence
  Synthetic
guuucagaaaucaaggaaauaaaa

SEQ ID NO: 170635 - RNA, 18 nt, Artificial Sequence
  Synthetic
cugcucaaggaaauaaaa

SEQ ID NO: 170636 - RNA, 19 nt, Artificial Sequence
  Synthetic
acugcucaaggaaauaaaa

SEQ ID NO: 170637 - RNA, 20 nt, Artificial Sequence
  Synthetic
cacugcucaaggaaauaaaa

SEQ ID NO: 170638 - RNA, 18 nt, Artificial Sequence
  Synthetic
aauaauaaauaaauaaaa

SEQ ID NO: 170639 - RNA, 19 nt, Artificial Sequence
  Synthetic
aaauaauaaauaaauaaaa

SEQ ID NO: 170640 - RNA, 20 nt, Artificial Sequence
  Synthetic
aaaauaauaaauaaauaaaa

SEQ ID NO: 170641 - RNA, 21 nt, Artificial Sequence
  Synthetic
uaaaauaauaaauaaauaaaa

SEQ ID NO: 170642 - RNA, 22 nt, Artificial Sequence
  Synthetic
cuaaaauaauaaauaaauaaaa

SEQ ID NO: 170643 - RNA, 23 nt, Artificial Sequence
  Synthetic
acuaaaauaauaaauaaauaaaa

SEQ ID NO: 170644 - RNA, 24 nt, Artificial Sequence
  Synthetic
aacuaaaauaauaaauaaauaaaa

SEQ ID NO: 170645 - RNA, 18 nt, Artificial Sequence
  Synthetic
aacagaugguaaauaaaa

SEQ ID NO: 170646 - RNA, 19 nt, Artificial Sequence
  Synthetic
uaacagaugguaaauaaaa

SEQ ID NO: 170647 - RNA, 20 nt, Artificial Sequence
  Synthetic
cuaacagaugguaaauaaaa

SEQ ID NO: 170648 - RNA, 21 nt, Artificial Sequence
  Synthetic
ucuaacagaugguaaauaaaa

SEQ ID NO: 170649 - RNA, 22 nt, Artificial Sequence
  Synthetic
gucuaacagaugguaaauaaaa

SEQ ID NO: 170650 - RNA, 23 nt, Artificial Sequence
  Synthetic
ugucuaacagaugguaaauaaaa

SEQ ID NO: 170651 - RNA, 24 nt, Artificial Sequence
  Synthetic
gugucuaacagaugguaaauaaaa

SEQ ID NO: 170652 - RNA, 18 nt, Artificial Sequence
  Synthetic
gaaaugacuuaaauaaaa

SEQ ID NO: 170653 - RNA, 19 nt, Artificial Sequence
  Synthetic
agaaaugacuuaaauaaaa

SEQ ID NO: 170654 - RNA, 20 nt, Artificial Sequence
  Synthetic
uagaaaugacuuaaauaaaa

SEQ ID NO: 170655 - RNA, 21 nt, Artificial Sequence
  Synthetic
guagaaaugacuuaaauaaaa

SEQ ID NO: 170656 - RNA, 22 nt, Artificial Sequence
  Synthetic
gguagaaaugacuuaaauaaaa

SEQ ID NO: 170657 - RNA, 23 nt, Artificial Sequence
  Synthetic
agguagaaaugacuuaaauaaaa

SEQ ID NO: 170658 - RNA, 24 nt, Artificial Sequence
  Synthetic
aagguagaaaugacuuaaauaaaa

SEQ ID NO: 170659 - RNA, 18 nt, Artificial Sequence
  Synthetic
ccuuuaaguuaaauaaaa

SEQ ID NO: 170660 - RNA, 19 nt, Artificial Sequence
  Synthetic
gccuuuaaguuaaauaaaa

SEQ ID NO: 170661 - RNA, 20 nt, Artificial Sequence
  Synthetic
cgccuuuaaguuaaauaaaa

SEQ ID NO: 170662 - RNA, 21 nt, Artificial Sequence
  Synthetic
acgccuuuaaguuaaauaaaa

SEQ ID NO: 170663 - RNA, 22 nt, Artificial Sequence
  Synthetic
aacgccuuuaaguuaaauaaaa

SEQ ID NO: 170664 - RNA, 23 nt, Artificial Sequence
  Synthetic
aaacgccuuuaaguuaaauaaaa

SEQ ID NO: 170665 - RNA, 24 nt, Artificial Sequence
  Synthetic
caaacgccuuuaaguuaaauaaaa

SEQ ID NO: 170666 - RNA, 18 nt, Artificial Sequence
  Synthetic
aucucgguaccaauaaaa

SEQ ID NO: 170667 - RNA, 19 nt, Artificial Sequence
  Synthetic
aaucucgguaccaauaaaa

SEQ ID NO: 170668 - RNA, 20 nt, Artificial Sequence
  Synthetic
aaaucucgguaccaauaaaa

SEQ ID NO: 170669 - RNA, 21 nt, Artificial Sequence
  Synthetic
aaaaucucgguaccaauaaaa

SEQ ID NO: 170670 - RNA, 22 nt, Artificial Sequence
  Synthetic
gaaaaucucgguaccaauaaaa

SEQ ID NO: 170671 - RNA, 23 nt, Artificial Sequence
  Synthetic
ggaaaaucucgguaccaauaaaa

SEQ ID NO: 170672 - RNA, 24 nt, Artificial Sequence
  Synthetic
uggaaaaucucgguaccaauaaaa

SEQ ID NO: 170673 - RNA, 18 nt, Artificial Sequence
  Synthetic
gagcagaagucaauaaaa

SEQ ID NO: 170674 - RNA, 19 nt, Artificial Sequence
  Synthetic
agagcagaagucaauaaaa

SEQ ID NO: 170675 - RNA, 20 nt, Artificial Sequence
  Synthetic
uagagcagaagucaauaaaa

SEQ ID NO: 170676 - RNA, 21 nt, Artificial Sequence
  Synthetic
uuagagcagaagucaauaaaa

SEQ ID NO: 170677 - RNA, 22 nt, Artificial Sequence
  Synthetic
guuagagcagaagucaauaaaa

SEQ ID NO: 170678 - RNA, 23 nt, Artificial Sequence
  Synthetic
gguuagagcagaagucaauaaaa

SEQ ID NO: 170679 - RNA, 24 nt, Artificial Sequence
  Synthetic
ggguuagagcagaagucaauaaaa

SEQ ID NO: 170680 - RNA, 18 nt, Artificial Sequence
  Synthetic
aagugacaaagaauaaaa

SEQ ID NO: 170681 - RNA, 19 nt, Artificial Sequence
  Synthetic
aaagugacaaagaauaaaa

SEQ ID NO: 170682 - RNA, 20 nt, Artificial Sequence
  Synthetic
aaaagugacaaagaauaaaa

SEQ ID NO: 170683 - RNA, 21 nt, Artificial Sequence
  Synthetic
aaaaagugacaaagaauaaaa

SEQ ID NO: 170684 - RNA, 22 nt, Artificial Sequence
  Synthetic
aaaaaagugacaaagaauaaaa

SEQ ID NO: 170685 - RNA, 23 nt, Artificial Sequence
  Synthetic
aaaaaaagugacaaagaauaaaa

SEQ ID NO: 170686 - RNA, 24 nt, Artificial Sequence
  Synthetic
aaaaaaaagugacaaagaauaaaa

SEQ ID NO: 170687 - RNA, 18 nt, Artificial Sequence
  Synthetic
cauuugagaagaauaaaa

SEQ ID NO: 170688 - RNA, 19 nt, Artificial Sequence
  Synthetic
ucauuugagaagaauaaaa

SEQ ID NO: 170689 - RNA, 20 nt, Artificial Sequence
  Synthetic
uucauuugagaagaauaaaa

SEQ ID NO: 170690 - RNA, 21 nt, Artificial Sequence
  Synthetic
uuucauuugagaagaauaaaa

SEQ ID NO: 170691 - RNA, 22 nt, Artificial Sequence
  Synthetic
uuuucauuugagaagaauaaaa

SEQ ID NO: 170692 - RNA, 23 nt, Artificial Sequence
  Synthetic
auuuucauuugagaagaauaaaa

SEQ ID NO: 170693 - RNA, 24 nt, Artificial Sequence
  Synthetic
cauuuucauuugagaagaauaaaa

SEQ ID NO: 170694 - RNA, 18 nt, Artificial Sequence
  Synthetic
uaauuacaaggaauaaaa

SEQ ID NO: 170695 - RNA, 19 nt, Artificial Sequence
  Synthetic
uuaauuacaaggaauaaaa

SEQ ID NO: 170696 - RNA, 20 nt, Artificial Sequence
  Synthetic
cuuaauuacaaggaauaaaa

SEQ ID NO: 170697 - RNA, 21 nt, Artificial Sequence
  Synthetic
ucuuaauuacaaggaauaaaa

SEQ ID NO: 170698 - RNA, 22 nt, Artificial Sequence
  Synthetic
uucuuaauuacaaggaauaaaa

SEQ ID NO: 170699 - RNA, 23 nt, Artificial Sequence
  Synthetic
uuucuuaauuacaaggaauaaaa

SEQ ID NO: 170700 - RNA, 24 nt, Artificial Sequence
  Synthetic
uuuucuuaauuacaaggaauaaaa

SEQ ID NO: 170701 - RNA, 18 nt, Artificial Sequence
  Synthetic
aauaaauaaauaauaaaa

SEQ ID NO: 170702 - RNA, 19 nt, Artificial Sequence
  Synthetic
aaauaaauaaauaauaaaa

SEQ ID NO: 170703 - RNA, 20 nt, Artificial Sequence
  Synthetic
uaaauaaauaaauaauaaaa

SEQ ID NO: 170704 - RNA, 21 nt, Artificial Sequence
  Synthetic
auaaauaaauaaauaauaaaa

SEQ ID NO: 170705 - RNA, 22 nt, Artificial Sequence
  Synthetic
aauaaauaaauaaauaauaaaa

SEQ ID NO: 170706 - RNA, 23 nt, Artificial Sequence
  Synthetic
aaauaaauaaauaaauaauaaaa

SEQ ID NO: 170707 - RNA, 24 nt, Artificial Sequence
  Synthetic
uaaauaaauaaauaaauaauaaaa

SEQ ID NO: 170708 - RNA, 18 nt, Artificial Sequence
  Synthetic
gaaaccugccuaauaaaa

SEQ ID NO: 170709 - RNA, 19 nt, Artificial Sequence
  Synthetic
agaaaccugccuaauaaaa

SEQ ID NO: 170710 - RNA, 20 nt, Artificial Sequence
  Synthetic
gagaaaccugccuaauaaaa

SEQ ID NO: 170711 - RNA, 21 nt, Artificial Sequence
  Synthetic
ugagaaaccugccuaauaaaa

SEQ ID NO: 170712 - RNA, 22 nt, Artificial Sequence
  Synthetic
augagaaaccugccuaauaaaa

SEQ ID NO: 170713 - RNA, 23 nt, Artificial Sequence
  Synthetic
aaugagaaaccugccuaauaaaa

SEQ ID NO: 170714 - RNA, 24 nt, Artificial Sequence
  Synthetic
uaaugagaaaccugccuaauaaaa

SEQ ID NO: 170715 - RNA, 18 nt, Artificial Sequence
  Synthetic
ugcacagaauuaauaaaa

SEQ ID NO: 170716 - RNA, 19 nt, Artificial Sequence
  Synthetic
augcacagaauuaauaaaa

SEQ ID NO: 170717 - RNA, 20 nt, Artificial Sequence
  Synthetic
uaugcacagaauuaauaaaa

SEQ ID NO: 170718 - RNA, 21 nt, Artificial Sequence
  Synthetic
uuaugcacagaauuaauaaaa

SEQ ID NO: 170719 - RNA, 22 nt, Artificial Sequence
  Synthetic
auuaugcacagaauuaauaaaa

SEQ ID NO: 170720 - RNA, 23 nt, Artificial Sequence
  Synthetic
uauuaugcacagaauuaauaaaa

SEQ ID NO: 170721 - RNA, 24 nt, Artificial Sequence
  Synthetic
auauuaugcacagaauuaauaaaa

SEQ ID NO: 170722 - RNA, 18 nt, Artificial Sequence
  Synthetic
guuuauguauuaauaaaa

SEQ ID NO: 170723 - RNA, 19 nt, Artificial Sequence
  Synthetic
aguuuauguauuaauaaaa

SEQ ID NO: 170724 - RNA, 20 nt, Artificial Sequence
  Synthetic
gaguuuauguauuaauaaaa

SEQ ID NO: 170725 - RNA, 21 nt, Artificial Sequence
  Synthetic
agaguuuauguauuaauaaaa

SEQ ID NO: 170726 - RNA, 22 nt, Artificial Sequence
  Synthetic
uagaguuuauguauuaauaaaa

SEQ ID NO: 170727 - RNA, 23 nt, Artificial Sequence
  Synthetic
uuagaguuuauguauuaauaaaa

SEQ ID NO: 170728 - RNA, 24 nt, Artificial Sequence
  Synthetic
uuuagaguuuauguauuaauaaaa

SEQ ID NO: 170729 - RNA, 18 nt, Artificial Sequence
  Synthetic
ugggaguuauuaauaaaa

SEQ ID NO: 170730 - RNA, 19 nt, Artificial Sequence
  Synthetic
gugggaguuauuaauaaaa

SEQ ID NO: 170731 - RNA, 20 nt, Artificial Sequence
  Synthetic
ggugggaguuauuaauaaaa

SEQ ID NO: 170732 - RNA, 21 nt, Artificial Sequence
  Synthetic
uggugggaguuauuaauaaaa

SEQ ID NO: 170733 - RNA, 22 nt, Artificial Sequence
  Synthetic
auggugggaguuauuaauaaaa

SEQ ID NO: 170734 - RNA, 23 nt, Artificial Sequence
  Synthetic
cauggugggaguuauuaauaaaa

SEQ ID NO: 170735 - RNA, 24 nt, Artificial Sequence
  Synthetic
acauggugggaguuauuaauaaaa

SEQ ID NO: 170736 - RNA, 18 nt, Artificial Sequence
  Synthetic
ucuaauggaaacauaaaa

SEQ ID NO: 170737 - RNA, 19 nt, Artificial Sequence
  Synthetic
aucuaauggaaacauaaaa

SEQ ID NO: 170738 - RNA, 20 nt, Artificial Sequence
  Synthetic
caucuaauggaaacauaaaa

SEQ ID NO: 170739 - RNA, 21 nt, Artificial Sequence
  Synthetic
ccaucuaauggaaacauaaaa

SEQ ID NO: 170740 - RNA, 22 nt, Artificial Sequence
  Synthetic
gccaucuaauggaaacauaaaa

SEQ ID NO: 170741 - RNA, 23 nt, Artificial Sequence
  Synthetic
agccaucuaauggaaacauaaaa

SEQ ID NO: 170742 - RNA, 24 nt, Artificial Sequence
  Synthetic
uagccaucuaauggaaacauaaaa

SEQ ID NO: 170743 - RNA, 18 nt, Artificial Sequence
  Synthetic
agcuucuggaacauaaaa

SEQ ID NO: 170744 - RNA, 19 nt, Artificial Sequence
  Synthetic
cagcuucuggaacauaaaa

SEQ ID NO: 170745 - RNA, 20 nt, Artificial Sequence
  Synthetic
acagcuucuggaacauaaaa

SEQ ID NO: 170746 - RNA, 21 nt, Artificial Sequence
  Synthetic
cacagcuucuggaacauaaaa

SEQ ID NO: 170747 - RNA, 22 nt, Artificial Sequence
  Synthetic
acacagcuucuggaacauaaaa

SEQ ID NO: 170748 - RNA, 23 nt, Artificial Sequence
  Synthetic
gacacagcuucuggaacauaaaa

SEQ ID NO: 170749 - RNA, 24 nt, Artificial Sequence
  Synthetic
agacacagcuucuggaacauaaaa

SEQ ID NO: 170750 - RNA, 18 nt, Artificial Sequence
  Synthetic
ucauaugaucacauaaaa

SEQ ID NO: 170751 - RNA, 19 nt, Artificial Sequence
  Synthetic
cucauaugaucacauaaaa

SEQ ID NO: 170752 - RNA, 20 nt, Artificial Sequence
  Synthetic
acucauaugaucacauaaaa

SEQ ID NO: 170753 - RNA, 21 nt, Artificial Sequence
  Synthetic
uacucauaugaucacauaaaa

SEQ ID NO: 170754 - RNA, 22 nt, Artificial Sequence
  Synthetic
auacucauaugaucacauaaaa

SEQ ID NO: 170755 - RNA, 23 nt, Artificial Sequence
  Synthetic
gauacucauaugaucacauaaaa

SEQ ID NO: 170756 - RNA, 24 nt, Artificial Sequence
  Synthetic
agauacucauaugaucacauaaaa

SEQ ID NO: 170757 - RNA, 18 nt, Artificial Sequence
  Synthetic
aacugauuggacauaaaa

SEQ ID NO: 170758 - RNA, 19 nt, Artificial Sequence
  Synthetic
uaacugauuggacauaaaa

SEQ ID NO: 170759 - RNA, 20 nt, Artificial Sequence
  Synthetic
guaacugauuggacauaaaa

SEQ ID NO: 170760 - RNA, 21 nt, Artificial Sequence
  Synthetic
gguaacugauuggacauaaaa

SEQ ID NO: 170761 - RNA, 22 nt, Artificial Sequence
  Synthetic
ugguaacugauuggacauaaaa

SEQ ID NO: 170762 - RNA, 23 nt, Artificial Sequence
  Synthetic
cugguaacugauuggacauaaaa

SEQ ID NO: 170763 - RNA, 24 nt, Artificial Sequence
  Synthetic
ccugguaacugauuggacauaaaa

SEQ ID NO: 170764 - RNA, 18 nt, Artificial Sequence
  Synthetic
gggaggggguacauaaaa

SEQ ID NO: 170765 - RNA, 19 nt, Artificial Sequence
  Synthetic
ugggaggggguacauaaaa

SEQ ID NO: 170766 - RNA, 20 nt, Artificial Sequence
  Synthetic
augggaggggguacauaaaa

SEQ ID NO: 170767 - RNA, 21 nt, Artificial Sequence
  Synthetic
gaugggaggggguacauaaaa

SEQ ID NO: 170768 - RNA, 22 nt, Artificial Sequence
  Synthetic
agaugggaggggguacauaaaa

SEQ ID NO: 170769 - RNA, 23 nt, Artificial Sequence
  Synthetic
uagaugggaggggguacauaaaa

SEQ ID NO: 170770 - RNA, 24 nt, Artificial Sequence
  Synthetic
uuagaugggaggggguacauaaaa

SEQ ID NO: 170771 - RNA, 18 nt, Artificial Sequence
  Synthetic
uacuaugaauccauaaaa

SEQ ID NO: 170772 - RNA, 19 nt, Artificial Sequence
  Synthetic
auacuaugaauccauaaaa

SEQ ID NO: 170773 - RNA, 20 nt, Artificial Sequence
  Synthetic
aauacuaugaauccauaaaa

SEQ ID NO: 170774 - RNA, 21 nt, Artificial Sequence
  Synthetic
gaauacuaugaauccauaaaa

SEQ ID NO: 170775 - RNA, 22 nt, Artificial Sequence
  Synthetic
ggaauacuaugaauccauaaaa

SEQ ID NO: 170776 - RNA, 23 nt, Artificial Sequence
  Synthetic
uggaauacuaugaauccauaaaa

SEQ ID NO: 170777 - RNA, 24 nt, Artificial Sequence
  Synthetic
auggaauacuaugaauccauaaaa

SEQ ID NO: 170778 - RNA, 18 nt, Artificial Sequence
  Synthetic
uugaggagucagauaaaa

SEQ ID NO: 170779 - RNA, 19 nt, Artificial Sequence
  Synthetic
cuugaggagucagauaaaa

SEQ ID NO: 170780 - RNA, 20 nt, Artificial Sequence
  Synthetic
acuugaggagucagauaaaa

SEQ ID NO: 170781 - RNA, 21 nt, Artificial Sequence
  Synthetic
gacuugaggagucagauaaaa

SEQ ID NO: 170782 - RNA, 22 nt, Artificial Sequence
  Synthetic
agacuugaggagucagauaaaa

SEQ ID NO: 170783 - RNA, 23 nt, Artificial Sequence
  Synthetic
uagacuugaggagucagauaaaa

SEQ ID NO: 170784 - RNA, 24 nt, Artificial Sequence
  Synthetic
uuagacuugaggagucagauaaaa

SEQ ID NO: 170785 - RNA, 18 nt, Artificial Sequence
  Synthetic
guuacuuccuagauaaaa

SEQ ID NO: 170786 - RNA, 19 nt, Artificial Sequence
  Synthetic
aguuacuuccuagauaaaa

SEQ ID NO: 170787 - RNA, 20 nt, Artificial Sequence
  Synthetic
uaguuacuuccuagauaaaa

SEQ ID NO: 170788 - RNA, 21 nt, Artificial Sequence
  Synthetic
uuaguuacuuccuagauaaaa

SEQ ID NO: 170789 - RNA, 22 nt, Artificial Sequence
  Synthetic
guuaguuacuuccuagauaaaa

SEQ ID NO: 170790 - RNA, 23 nt, Artificial Sequence
  Synthetic
aguuaguuacuuccuagauaaaa

SEQ ID NO: 170791 - RNA, 24 nt, Artificial Sequence
  Synthetic
aaguuaguuacuuccuagauaaaa

SEQ ID NO: 170792 - RNA, 18 nt, Artificial Sequence
  Synthetic
uacccagacaggauaaaa

SEQ ID NO: 170793 - RNA, 19 nt, Artificial Sequence
  Synthetic
guacccagacaggauaaaa

SEQ ID NO: 170794 - RNA, 20 nt, Artificial Sequence
  Synthetic
uguacccagacaggauaaaa

SEQ ID NO: 170795 - RNA, 21 nt, Artificial Sequence
  Synthetic
auguacccagacaggauaaaa

SEQ ID NO: 170796 - RNA, 22 nt, Artificial Sequence
  Synthetic
uauguacccagacaggauaaaa

SEQ ID NO: 170797 - RNA, 23 nt, Artificial Sequence
  Synthetic
auauguacccagacaggauaaaa

SEQ ID NO: 170798 - RNA, 24 nt, Artificial Sequence
  Synthetic
uauauguacccagacaggauaaaa

SEQ ID NO: 170799 - RNA, 18 nt, Artificial Sequence
  Synthetic
uuuugaucacugauaaaa

SEQ ID NO: 170800 - RNA, 19 nt, Artificial Sequence
  Synthetic
auuuugaucacugauaaaa

SEQ ID NO: 170801 - RNA, 20 nt, Artificial Sequence
  Synthetic
gauuuugaucacugauaaaa

SEQ ID NO: 170802 - RNA, 21 nt, Artificial Sequence
  Synthetic
ggauuuugaucacugauaaaa

SEQ ID NO: 170803 - RNA, 22 nt, Artificial Sequence
  Synthetic
aggauuuugaucacugauaaaa

SEQ ID NO: 170804 - RNA, 23 nt, Artificial Sequence
  Synthetic
aaggauuuugaucacugauaaaa

SEQ ID NO: 170805 - RNA, 24 nt, Artificial Sequence
  Synthetic
caaggauuuugaucacugauaaaa

SEQ ID NO: 170806 - RNA, 18 nt, Artificial Sequence
  Synthetic
ggucacauggugauaaaa

SEQ ID NO: 170807 - RNA, 19 nt, Artificial Sequence
  Synthetic
aggucacauggugauaaaa

SEQ ID NO: 170808 - RNA, 20 nt, Artificial Sequence
  Synthetic
gaggucacauggugauaaaa

SEQ ID NO: 170809 - RNA, 21 nt, Artificial Sequence
  Synthetic
cgaggucacauggugauaaaa

SEQ ID NO: 170810 - RNA, 22 nt, Artificial Sequence
  Synthetic
ccgaggucacauggugauaaaa

SEQ ID NO: 170811 - RNA, 23 nt, Artificial Sequence
  Synthetic
cccgaggucacauggugauaaaa

SEQ ID NO: 170812 - RNA, 24 nt, Artificial Sequence
  Synthetic
gcccgaggucacauggugauaaaa

SEQ ID NO: 170813 - RNA, 18 nt, Artificial Sequence
  Synthetic
gauuuuucaaauauaaaa

SEQ ID NO: 170814 - RNA, 19 nt, Artificial Sequence
  Synthetic
ugauuuuucaaauauaaaa

SEQ ID NO: 170815 - RNA, 20 nt, Artificial Sequence
  Synthetic
gugauuuuucaaauauaaaa

SEQ ID NO: 170816 - RNA, 21 nt, Artificial Sequence
  Synthetic
agugauuuuucaaauauaaaa

SEQ ID NO: 170817 - RNA, 22 nt, Artificial Sequence
  Synthetic
gagugauuuuucaaauauaaaa

SEQ ID NO: 170818 - RNA, 23 nt, Artificial Sequence
  Synthetic
ugagugauuuuucaaauauaaaa

SEQ ID NO: 170819 - RNA, 24 nt, Artificial Sequence
  Synthetic
uugagugauuuuucaaauauaaaa

SEQ ID NO: 170820 - RNA, 18 nt, Artificial Sequence
  Synthetic
augguauaucauauaaaa

SEQ ID NO: 170821 - RNA, 19 nt, Artificial Sequence
  Synthetic
uaugguauaucauauaaaa

SEQ ID NO: 170822 - RNA, 20 nt, Artificial Sequence
  Synthetic
uuaugguauaucauauaaaa

SEQ ID NO: 170823 - RNA, 21 nt, Artificial Sequence
  Synthetic
cuuaugguauaucauauaaaa

SEQ ID NO: 170824 - RNA, 22 nt, Artificial Sequence
  Synthetic
ucuuaugguauaucauauaaaa

SEQ ID NO: 170825 - RNA, 23 nt, Artificial Sequence
  Synthetic
cucuuaugguauaucauauaaaa

SEQ ID NO: 170826 - RNA, 24 nt, Artificial Sequence
  Synthetic
ccucuuaugguauaucauauaaaa

SEQ ID NO: 170827 - RNA, 18 nt, Artificial Sequence
  Synthetic
aucauagcugauauaaaa

SEQ ID NO: 170828 - RNA, 19 nt, Artificial Sequence
  Synthetic
uaucauagcugauauaaaa

SEQ ID NO: 170829 - RNA, 20 nt, Artificial Sequence
  Synthetic
uuaucauagcugauauaaaa

SEQ ID NO: 170830 - RNA, 21 nt, Artificial Sequence
  Synthetic
uuuaucauagcugauauaaaa

SEQ ID NO: 170831 - RNA, 22 nt, Artificial Sequence
  Synthetic
uuuuaucauagcugauauaaaa

SEQ ID NO: 170832 - RNA, 23 nt, Artificial Sequence
  Synthetic
cuuuuaucauagcugauauaaaa

SEQ ID NO: 170833 - RNA, 24 nt, Artificial Sequence
  Synthetic
ucuuuuaucauagcugauauaaaa

SEQ ID NO: 170834 - RNA, 18 nt, Artificial Sequence
  Synthetic
acuacaaguuauauaaaa

SEQ ID NO: 170835 - RNA, 19 nt, Artificial Sequence
  Synthetic
uacuacaaguuauauaaaa

SEQ ID NO: 170836 - RNA, 20 nt, Artificial Sequence
  Synthetic
guacuacaaguuauauaaaa

SEQ ID NO: 170837 - RNA, 21 nt, Artificial Sequence
  Synthetic
gguacuacaaguuauauaaaa

SEQ ID NO: 170838 - RNA, 22 nt, Artificial Sequence
  Synthetic
ugguacuacaaguuauauaaaa

SEQ ID NO: 170839 - RNA, 23 nt, Artificial Sequence
  Synthetic
augguacuacaaguuauauaaaa

SEQ ID NO: 170840 - RNA, 24 nt, Artificial Sequence
  Synthetic
gaugguacuacaaguuauauaaaa

SEQ ID NO: 170841 - RNA, 18 nt, Artificial Sequence
  Synthetic
guuuaucuagcuauaaaa

SEQ ID NO: 170842 - RNA, 19 nt, Artificial Sequence
  Synthetic
aguuuaucuagcuauaaaa

SEQ ID NO: 170843 - RNA, 20 nt, Artificial Sequence
  Synthetic
aaguuuaucuagcuauaaaa

SEQ ID NO: 170844 - RNA, 21 nt, Artificial Sequence
  Synthetic
caaguuuaucuagcuauaaaa

SEQ ID NO: 170845 - RNA, 22 nt, Artificial Sequence
  Synthetic
ccaaguuuaucuagcuauaaaa

SEQ ID NO: 170846 - RNA, 23 nt, Artificial Sequence
  Synthetic
cccaaguuuaucuagcuauaaaa

SEQ ID NO: 170847 - RNA, 24 nt, Artificial Sequence
  Synthetic
gcccaaguuuaucuagcuauaaaa

SEQ ID NO: 170848 - RNA, 18 nt, Artificial Sequence
  Synthetic
auccaagccaguauaaaa

SEQ ID NO: 170849 - RNA, 19 nt, Artificial Sequence
  Synthetic
uauccaagccaguauaaaa

SEQ ID NO: 170850 - RNA, 20 nt, Artificial Sequence
  Synthetic
auauccaagccaguauaaaa

SEQ ID NO: 170851 - RNA, 21 nt, Artificial Sequence
  Synthetic
aauauccaagccaguauaaaa

SEQ ID NO: 170852 - RNA, 22 nt, Artificial Sequence
  Synthetic
caauauccaagccaguauaaaa

SEQ ID NO: 170853 - RNA, 23 nt, Artificial Sequence
  Synthetic
ucaauauccaagccaguauaaaa

SEQ ID NO: 170854 - RNA, 24 nt, Artificial Sequence
  Synthetic
aucaauauccaagccaguauaaaa

SEQ ID NO: 170855 - RNA, 18 nt, Artificial Sequence
  Synthetic
auauaggaaauuauaaaa

SEQ ID NO: 170856 - RNA, 19 nt, Artificial Sequence
  Synthetic
gauauaggaaauuauaaaa

SEQ ID NO: 170857 - RNA, 20 nt, Artificial Sequence
  Synthetic
ggauauaggaaauuauaaaa

SEQ ID NO: 170858 - RNA, 21 nt, Artificial Sequence
  Synthetic
aggauauaggaaauuauaaaa

SEQ ID NO: 170859 - RNA, 22 nt, Artificial Sequence
  Synthetic
gaggauauaggaaauuauaaaa

SEQ ID NO: 170860 - RNA, 23 nt, Artificial Sequence
  Synthetic
agaggauauaggaaauuauaaaa

SEQ ID NO: 170861 - RNA, 24 nt, Artificial Sequence
  Synthetic
aagaggauauaggaaauuauaaaa

SEQ ID NO: 170862 - RNA, 18 nt, Artificial Sequence
  Synthetic
acuacuguaauuauaaaa

SEQ ID NO: 170863 - RNA, 19 nt, Artificial Sequence
  Synthetic
aacuacuguaauuauaaaa

SEQ ID NO: 170864 - RNA, 20 nt, Artificial Sequence
  Synthetic
aaacuacuguaauuauaaaa

SEQ ID NO: 170865 - RNA, 21 nt, Artificial Sequence
  Synthetic
gaaacuacuguaauuauaaaa

SEQ ID NO: 170866 - RNA, 22 nt, Artificial Sequence
  Synthetic
ggaaacuacuguaauuauaaaa

SEQ ID NO: 170867 - RNA, 23 nt, Artificial Sequence
  Synthetic
aggaaacuacuguaauuauaaaa

SEQ ID NO: 170868 - RNA, 24 nt, Artificial Sequence
  Synthetic
uaggaaacuacuguaauuauaaaa

SEQ ID NO: 170869 - RNA, 18 nt, Artificial Sequence
  Synthetic
aaugauacuauuauaaaa

SEQ ID NO: 170870 - RNA, 19 nt, Artificial Sequence
  Synthetic
gaaugauacuauuauaaaa

SEQ ID NO: 170871 - RNA, 20 nt, Artificial Sequence
  Synthetic
agaaugauacuauuauaaaa

SEQ ID NO: 170872 - RNA, 21 nt, Artificial Sequence
  Synthetic
aagaaugauacuauuauaaaa

SEQ ID NO: 170873 - RNA, 22 nt, Artificial Sequence
  Synthetic
uaagaaugauacuauuauaaaa

SEQ ID NO: 170874 - RNA, 23 nt, Artificial Sequence
  Synthetic
auaagaaugauacuauuauaaaa

SEQ ID NO: 170875 - RNA, 24 nt, Artificial Sequence
  Synthetic
uauaagaaugauacuauuauaaaa

SEQ ID NO: 170876 - RNA, 18 nt, Artificial Sequence
  Synthetic
augcauuuucuuauaaaa

SEQ ID NO: 170877 - RNA, 19 nt, Artificial Sequence
  Synthetic
aaugcauuuucuuauaaaa

SEQ ID NO: 170878 - RNA, 20 nt, Artificial Sequence
  Synthetic
aaaugcauuuucuuauaaaa

SEQ ID NO: 170879 - RNA, 21 nt, Artificial Sequence
  Synthetic
gaaaugcauuuucuuauaaaa

SEQ ID NO: 170880 - RNA, 22 nt, Artificial Sequence
  Synthetic
agaaaugcauuuucuuauaaaa

SEQ ID NO: 170881 - RNA, 23 nt, Artificial Sequence
  Synthetic
uagaaaugcauuuucuuauaaaa

SEQ ID NO: 170882 - RNA, 24 nt, Artificial Sequence
  Synthetic
uuagaaaugcauuuucuuauaaaa

SEQ ID NO: 170883 - RNA, 18 nt, Artificial Sequence
  Synthetic
ucaaagagauuuauaaaa

SEQ ID NO: 170884 - RNA, 19 nt, Artificial Sequence
  Synthetic
gucaaagagauuuauaaaa

SEQ ID NO: 170885 - RNA, 20 nt, Artificial Sequence
  Synthetic
ugucaaagagauuuauaaaa

SEQ ID NO: 170886 - RNA, 21 nt, Artificial Sequence
  Synthetic
gugucaaagagauuuauaaaa

SEQ ID NO: 170887 - RNA, 22 nt, Artificial Sequence
  Synthetic
ugugucaaagagauuuauaaaa

SEQ ID NO: 170888 - RNA, 23 nt, Artificial Sequence
  Synthetic
uugugucaaagagauuuauaaaa

SEQ ID NO: 170889 - RNA, 24 nt, Artificial Sequence
  Synthetic
auugugucaaagagauuuauaaaa

SEQ ID NO: 170890 - RNA, 18 nt, Artificial Sequence
  Synthetic
agaugaugccaacuaaaa

SEQ ID NO: 170891 - RNA, 19 nt, Artificial Sequence
  Synthetic
uagaugaugccaacuaaaa

SEQ ID NO: 170892 - RNA, 20 nt, Artificial Sequence
  Synthetic
uuagaugaugccaacuaaaa

SEQ ID NO: 170893 - RNA, 21 nt, Artificial Sequence
  Synthetic
cuuagaugaugccaacuaaaa

SEQ ID NO: 170894 - RNA, 22 nt, Artificial Sequence
  Synthetic
acuuagaugaugccaacuaaaa

SEQ ID NO: 170895 - RNA, 23 nt, Artificial Sequence
  Synthetic
cacuuagaugaugccaacuaaaa

SEQ ID NO: 170896 - RNA, 24 nt, Artificial Sequence
  Synthetic
gcacuuagaugaugccaacuaaaa

SEQ ID NO: 170897 - RNA, 18 nt, Artificial Sequence
  Synthetic
ccuucuucuucacuaaaa

SEQ ID NO: 170898 - RNA, 19 nt, Artificial Sequence
  Synthetic
accuucuucuucacuaaaa

SEQ ID NO: 170899 - RNA, 20 nt, Artificial Sequence
  Synthetic
gaccuucuucuucacuaaaa

SEQ ID NO: 170900 - RNA, 21 nt, Artificial Sequence
  Synthetic
ugaccuucuucuucacuaaaa

SEQ ID NO: 170901 - RNA, 22 nt, Artificial Sequence
  Synthetic
cugaccuucuucuucacuaaaa

SEQ ID NO: 170902 - RNA, 23 nt, Artificial Sequence
  Synthetic
ccugaccuucuucuucacuaaaa

SEQ ID NO: 170903 - RNA, 24 nt, Artificial Sequence
  Synthetic
accugaccuucuucuucacuaaaa

SEQ ID NO: 170904 - RNA, 18 nt, Artificial Sequence
  Synthetic
guaggaguaauacuaaaa

SEQ ID NO: 170905 - RNA, 19 nt, Artificial Sequence
  Synthetic
aguaggaguaauacuaaaa

SEQ ID NO: 170906 - RNA, 20 nt, Artificial Sequence
  Synthetic
caguaggaguaauacuaaaa

SEQ ID NO: 170907 - RNA, 21 nt, Artificial Sequence
  Synthetic
acaguaggaguaauacuaaaa

SEQ ID NO: 170908 - RNA, 22 nt, Artificial Sequence
  Synthetic
aacaguaggaguaauacuaaaa

SEQ ID NO: 170909 - RNA, 23 nt, Artificial Sequence
  Synthetic
aaacaguaggaguaauacuaaaa

SEQ ID NO: 170910 - RNA, 24 nt, Artificial Sequence
  Synthetic
aaaacaguaggaguaauacuaaaa

SEQ ID NO: 170911 - RNA, 18 nt, Artificial Sequence
  Synthetic
uaagcgcugguacuaaaa

SEQ ID NO: 170912 - RNA, 19 nt, Artificial Sequence
  Synthetic
guaagcgcugguacuaaaa

SEQ ID NO: 170913 - RNA, 20 nt, Artificial Sequence
  Synthetic
aguaagcgcugguacuaaaa

SEQ ID NO: 170914 - RNA, 21 nt, Artificial Sequence
  Synthetic
uaguaagcgcugguacuaaaa

SEQ ID NO: 170915 - RNA, 22 nt, Artificial Sequence
  Synthetic
uuaguaagcgcugguacuaaaa

SEQ ID NO: 170916 - RNA, 23 nt, Artificial Sequence
  Synthetic
guuaguaagcgcugguacuaaaa

SEQ ID NO: 170917 - RNA, 24 nt, Artificial Sequence
  Synthetic
uguuaguaagcgcugguacuaaaa

SEQ ID NO: 170918 - RNA, 18 nt, Artificial Sequence
  Synthetic
caaauuauuuuacuaaaa

SEQ ID NO: 170919 - RNA, 19 nt, Artificial Sequence
  Synthetic
ucaaauuauuuuacuaaaa

SEQ ID NO: 170920 - RNA, 20 nt, Artificial Sequence
  Synthetic
cucaaauuauuuuacuaaaa

SEQ ID NO: 170921 - RNA, 21 nt, Artificial Sequence
  Synthetic
ucucaaauuauuuuacuaaaa

SEQ ID NO: 170922 - RNA, 22 nt, Artificial Sequence
  Synthetic
gucucaaauuauuuuacuaaaa

SEQ ID NO: 170923 - RNA, 23 nt, Artificial Sequence
  Synthetic
ugucucaaauuauuuuacuaaaa

SEQ ID NO: 170924 - RNA, 24 nt, Artificial Sequence
  Synthetic
gugucucaaauuauuuuacuaaaa

SEQ ID NO: 170925 - RNA, 18 nt, Artificial Sequence
  Synthetic
cugggaccaccccuaaaa

SEQ ID NO: 170926 - RNA, 19 nt, Artificial Sequence
  Synthetic
gcugggaccaccccuaaaa

SEQ ID NO: 170927 - RNA, 20 nt, Artificial Sequence
  Synthetic
ggcugggaccaccccuaaaa

SEQ ID NO: 170928 - RNA, 21 nt, Artificial Sequence
  Synthetic
uggcugggaccaccccuaaaa

SEQ ID NO: 170929 - RNA, 22 nt, Artificial Sequence
  Synthetic
auggcugggaccaccccuaaaa

SEQ ID NO: 170930 - RNA, 23 nt, Artificial Sequence
  Synthetic
cauggcugggaccaccccuaaaa

SEQ ID NO: 170931 - RNA, 24 nt, Artificial Sequence
  Synthetic
ucauggcugggaccaccccuaaaa

SEQ ID NO: 170932 - RNA, 18 nt, Artificial Sequence
  Synthetic
agaugaaaaagccuaaaa

SEQ ID NO: 170933 - RNA, 19 nt, Artificial Sequence
  Synthetic
gagaugaaaaagccuaaaa

SEQ ID NO: 170934 - RNA, 20 nt, Artificial Sequence
  Synthetic
ggagaugaaaaagccuaaaa

SEQ ID NO: 170935 - RNA, 21 nt, Artificial Sequence
  Synthetic
aggagaugaaaaagccuaaaa

SEQ ID NO: 170936 - RNA, 22 nt, Artificial Sequence
  Synthetic
uaggagaugaaaaagccuaaaa

SEQ ID NO: 170937 - RNA, 23 nt, Artificial Sequence
  Synthetic
cuaggagaugaaaaagccuaaaa

SEQ ID NO: 170938 - RNA, 24 nt, Artificial Sequence
  Synthetic
ccuaggagaugaaaaagccuaaaa

SEQ ID NO: 170939 - RNA, 18 nt, Artificial Sequence
  Synthetic
uucacacauagccuaaaa

SEQ ID NO: 170940 - RNA, 19 nt, Artificial Sequence
  Synthetic
auucacacauagccuaaaa

SEQ ID NO: 170941 - RNA, 20 nt, Artificial Sequence
  Synthetic
uauucacacauagccuaaaa

SEQ ID NO: 170942 - RNA, 21 nt, Artificial Sequence
  Synthetic
auauucacacauagccuaaaa

SEQ ID NO: 170943 - RNA, 22 nt, Artificial Sequence
  Synthetic
gauauucacacauagccuaaaa

SEQ ID NO: 170944 - RNA, 23 nt, Artificial Sequence
  Synthetic
ggauauucacacauagccuaaaa

SEQ ID NO: 170945 - RNA, 24 nt, Artificial Sequence
  Synthetic
uggauauucacacauagccuaaaa

SEQ ID NO: 170946 - RNA, 18 nt, Artificial Sequence
  Synthetic
ugcucacauugccuaaaa

SEQ ID NO: 170947 - RNA, 19 nt, Artificial Sequence
  Synthetic
gugcucacauugccuaaaa

SEQ ID NO: 170948 - RNA, 20 nt, Artificial Sequence
  Synthetic
ugugcucacauugccuaaaa

SEQ ID NO: 170949 - RNA, 21 nt, Artificial Sequence
  Synthetic
cugugcucacauugccuaaaa

SEQ ID NO: 170950 - RNA, 22 nt, Artificial Sequence
  Synthetic
ucugugcucacauugccuaaaa

SEQ ID NO: 170951 - RNA, 23 nt, Artificial Sequence
  Synthetic
uucugugcucacauugccuaaaa

SEQ ID NO: 170952 - RNA, 24 nt, Artificial Sequence
  Synthetic
cuucugugcucacauugccuaaaa

SEQ ID NO: 170953 - RNA, 18 nt, Artificial Sequence
  Synthetic
uucugucacauccuaaaa

SEQ ID NO: 170954 - RNA, 19 nt, Artificial Sequence
  Synthetic
auucugucacauccuaaaa

SEQ ID NO: 170955 - RNA, 20 nt, Artificial Sequence
  Synthetic
aauucugucacauccuaaaa

SEQ ID NO: 170956 - RNA, 21 nt, Artificial Sequence
  Synthetic
aaauucugucacauccuaaaa

SEQ ID NO: 170957 - RNA, 22 nt, Artificial Sequence
  Synthetic
gaaauucugucacauccuaaaa

SEQ ID NO: 170958 - RNA, 23 nt, Artificial Sequence
  Synthetic
ugaaauucugucacauccuaaaa

SEQ ID NO: 170959 - RNA, 24 nt, Artificial Sequence
  Synthetic
augaaauucugucacauccuaaaa

SEQ ID NO: 170960 - RNA, 18 nt, Artificial Sequence
  Synthetic
caaauaaaauagcuaaaa

SEQ ID NO: 170961 - RNA, 19 nt, Artificial Sequence
  Synthetic
acaaauaaaauagcuaaaa

SEQ ID NO: 170962 - RNA, 20 nt, Artificial Sequence
  Synthetic
uacaaauaaaauagcuaaaa

SEQ ID NO: 170963 - RNA, 21 nt, Artificial Sequence
  Synthetic
auacaaauaaaauagcuaaaa

SEQ ID NO: 170964 - RNA, 22 nt, Artificial Sequence
  Synthetic
aauacaaauaaaauagcuaaaa

SEQ ID NO: 170965 - RNA, 23 nt, Artificial Sequence
  Synthetic
aaauacaaauaaaauagcuaaaa

SEQ ID NO: 170966 - RNA, 24 nt, Artificial Sequence
  Synthetic
aaaauacaaauaaaauagcuaaaa

SEQ ID NO: 170967 - RNA, 18 nt, Artificial Sequence
  Synthetic
aacccagaaucgcuaaaa

SEQ ID NO: 170968 - RNA, 19 nt, Artificial Sequence
  Synthetic
uaacccagaaucgcuaaaa

SEQ ID NO: 170969 - RNA, 20 nt, Artificial Sequence
  Synthetic
guaacccagaaucgcuaaaa

SEQ ID NO: 170970 - RNA, 21 nt, Artificial Sequence
  Synthetic
aguaacccagaaucgcuaaaa

SEQ ID NO: 170971 - RNA, 22 nt, Artificial Sequence
  Synthetic
gaguaacccagaaucgcuaaaa

SEQ ID NO: 170972 - RNA, 23 nt, Artificial Sequence
  Synthetic
cgaguaacccagaaucgcuaaaa

SEQ ID NO: 170973 - RNA, 24 nt, Artificial Sequence
  Synthetic
ccgaguaacccagaaucgcuaaaa

SEQ ID NO: 170974 - RNA, 18 nt, Artificial Sequence
  Synthetic
aaaaugaauaaucuaaaa

SEQ ID NO: 170975 - RNA, 19 nt, Artificial Sequence
  Synthetic
aaaaaugaauaaucuaaaa

SEQ ID NO: 170976 - RNA, 20 nt, Artificial Sequence
  Synthetic
uaaaaaugaauaaucuaaaa

SEQ ID NO: 170977 - RNA, 21 nt, Artificial Sequence
  Synthetic
uuaaaaaugaauaaucuaaaa

SEQ ID NO: 170978 - RNA, 22 nt, Artificial Sequence
  Synthetic
auuaaaaaugaauaaucuaaaa

SEQ ID NO: 170979 - RNA, 23 nt, Artificial Sequence
  Synthetic
cauuaaaaaugaauaaucuaaaa

SEQ ID NO: 170980 - RNA, 24 nt, Artificial Sequence
  Synthetic
acauuaaaaaugaauaaucuaaaa

SEQ ID NO: 170981 - RNA, 18 nt, Artificial Sequence
  Synthetic
ugaauaauguaucuaaaa

SEQ ID NO: 170982 - RNA, 19 nt, Artificial Sequence
  Synthetic
gugaauaauguaucuaaaa

SEQ ID NO: 170983 - RNA, 20 nt, Artificial Sequence
  Synthetic
agugaauaauguaucuaaaa

SEQ ID NO: 170984 - RNA, 21 nt, Artificial Sequence
  Synthetic
cagugaauaauguaucuaaaa

SEQ ID NO: 170985 - RNA, 22 nt, Artificial Sequence
  Synthetic
acagugaauaauguaucuaaaa

SEQ ID NO: 170986 - RNA, 23 nt, Artificial Sequence
  Synthetic
aacagugaauaauguaucuaaaa

SEQ ID NO: 170987 - RNA, 24 nt, Artificial Sequence
  Synthetic
aaacagugaauaauguaucuaaaa

SEQ ID NO: 170988 - RNA, 18 nt, Artificial Sequence
  Synthetic
caauaaaguacucuaaaa

SEQ ID NO: 170989 - RNA, 19 nt, Artificial Sequence
  Synthetic
acaauaaaguacucuaaaa

SEQ ID NO: 170990 - RNA, 20 nt, Artificial Sequence
  Synthetic
aacaauaaaguacucuaaaa

SEQ ID NO: 170991 - RNA, 21 nt, Artificial Sequence
  Synthetic
uaacaauaaaguacucuaaaa

SEQ ID NO: 170992 - RNA, 22 nt, Artificial Sequence
  Synthetic
auaacaauaaaguacucuaaaa

SEQ ID NO: 170993 - RNA, 23 nt, Artificial Sequence
  Synthetic
aauaacaauaaaguacucuaaaa

SEQ ID NO: 170994 - RNA, 24 nt, Artificial Sequence
  Synthetic
aaauaacaauaaaguacucuaaaa

SEQ ID NO: 170995 - RNA, 18 nt, Artificial Sequence
  Synthetic
guagucucugcucuaaaa

SEQ ID NO: 170996 - RNA, 19 nt, Artificial Sequence
  Synthetic
cguagucucugcucuaaaa

SEQ ID NO: 170997 - RNA, 20 nt, Artificial Sequence
  Synthetic
acguagucucugcucuaaaa

SEQ ID NO: 170998 - RNA, 21 nt, Artificial Sequence
  Synthetic
uacguagucucugcucuaaaa

SEQ ID NO: 170999 - RNA, 22 nt, Artificial Sequence
  Synthetic
guacguagucucugcucuaaaa

SEQ ID NO: 171000 - RNA, 23 nt, Artificial Sequence
  Synthetic
gguacguagucucugcucuaaaa

SEQ ID NO: 171001 - RNA, 24 nt, Artificial Sequence
  Synthetic
agguacguagucucugcucuaaaa

SEQ ID NO: 171002 - RNA, 18 nt, Artificial Sequence
  Synthetic
acuuaauugucucuaaaa

SEQ ID NO: 171003 - RNA, 19 nt, Artificial Sequence
  Synthetic
aacuuaauugucucuaaaa

SEQ ID NO: 171004 - RNA, 20 nt, Artificial Sequence
  Synthetic
uaacuuaauugucucuaaaa

SEQ ID NO: 171005 - RNA, 21 nt, Artificial Sequence
  Synthetic
cuaacuuaauugucucuaaaa

SEQ ID NO: 171006 - RNA, 22 nt, Artificial Sequence
  Synthetic
ucuaacuuaauugucucuaaaa

SEQ ID NO: 171007 - RNA, 23 nt, Artificial Sequence
  Synthetic
gucuaacuuaauugucucuaaaa

SEQ ID NO: 171008 - RNA, 24 nt, Artificial Sequence
  Synthetic
ugucuaacuuaauugucucuaaaa

SEQ ID NO: 171009 - RNA, 18 nt, Artificial Sequence
  Synthetic
cuaagauauucucuaaaa

SEQ ID NO: 171010 - RNA, 19 nt, Artificial Sequence
  Synthetic
acuaagauauucucuaaaa

SEQ ID NO: 171011 - RNA, 20 nt, Artificial Sequence
  Synthetic
aacuaagauauucucuaaaa

SEQ ID NO: 171012 - RNA, 21 nt, Artificial Sequence
  Synthetic
aaacuaagauauucucuaaaa

SEQ ID NO: 171013 - RNA, 22 nt, Artificial Sequence
  Synthetic
caaacuaagauauucucuaaaa

SEQ ID NO: 171014 - RNA, 23 nt, Artificial Sequence
  Synthetic
ccaaacuaagauauucucuaaaa

SEQ ID NO: 171015 - RNA, 24 nt, Artificial Sequence
  Synthetic
cccaaacuaagauauucucuaaaa

SEQ ID NO: 171016 - RNA, 18 nt, Artificial Sequence
  Synthetic
gauuucucuucucuaaaa

SEQ ID NO: 171017 - RNA, 19 nt, Artificial Sequence
  Synthetic
ugauuucucuucucuaaaa

SEQ ID NO: 171018 - RNA, 20 nt, Artificial Sequence
  Synthetic
cugauuucucuucucuaaaa

SEQ ID NO: 171019 - RNA, 21 nt, Artificial Sequence
  Synthetic
ucugauuucucuucucuaaaa

SEQ ID NO: 171020 - RNA, 22 nt, Artificial Sequence
  Synthetic
cucugauuucucuucucuaaaa

SEQ ID NO: 171021 - RNA, 23 nt, Artificial Sequence
  Synthetic
ucucugauuucucuucucuaaaa

SEQ ID NO: 171022 - RNA, 24 nt, Artificial Sequence
  Synthetic
gucucugauuucucuucucuaaaa

SEQ ID NO: 171023 - RNA, 18 nt, Artificial Sequence
  Synthetic
agaauuuacauucuaaaa

SEQ ID NO: 171024 - RNA, 19 nt, Artificial Sequence
  Synthetic
uagaauuuacauucuaaaa

SEQ ID NO: 171025 - RNA, 20 nt, Artificial Sequence
  Synthetic
guagaauuuacauucuaaaa

SEQ ID NO: 171026 - RNA, 21 nt, Artificial Sequence
  Synthetic
gguagaauuuacauucuaaaa

SEQ ID NO: 171027 - RNA, 22 nt, Artificial Sequence
  Synthetic
ggguagaauuuacauucuaaaa

SEQ ID NO: 171028 - RNA, 23 nt, Artificial Sequence
  Synthetic
gggguagaauuuacauucuaaaa

SEQ ID NO: 171029 - RNA, 24 nt, Artificial Sequence
  Synthetic
ugggguagaauuuacauucuaaaa

SEQ ID NO: 171030 - RNA, 18 nt, Artificial Sequence
  Synthetic
ccuuugaguauucuaaaa

SEQ ID NO: 171031 - RNA, 19 nt, Artificial Sequence
  Synthetic
cccuuugaguauucuaaaa

SEQ ID NO: 171032 - RNA, 20 nt, Artificial Sequence
  Synthetic
gcccuuugaguauucuaaaa

SEQ ID NO: 171033 - RNA, 21 nt, Artificial Sequence
  Synthetic
agcccuuugaguauucuaaaa

SEQ ID NO: 171034 - RNA, 22 nt, Artificial Sequence
  Synthetic
cagcccuuugaguauucuaaaa

SEQ ID NO: 171035 - RNA, 23 nt, Artificial Sequence
  Synthetic
gcagcccuuugaguauucuaaaa

SEQ ID NO: 171036 - RNA, 24 nt, Artificial Sequence
  Synthetic
agcagcccuuugaguauucuaaaa

SEQ ID NO: 171037 - RNA, 18 nt, Artificial Sequence
  Synthetic
auuuuauaucuucuaaaa

SEQ ID NO: 171038 - RNA, 19 nt, Artificial Sequence
  Synthetic
uauuuuauaucuucuaaaa

SEQ ID NO: 171039 - RNA, 20 nt, Artificial Sequence
  Synthetic
cuauuuuauaucuucuaaaa

SEQ ID NO: 171040 - RNA, 21 nt, Artificial Sequence
  Synthetic
ccuauuuuauaucuucuaaaa

SEQ ID NO: 171041 - RNA, 22 nt, Artificial Sequence
  Synthetic
uccuauuuuauaucuucuaaaa

SEQ ID NO: 171042 - RNA, 23 nt, Artificial Sequence
  Synthetic
auccuauuuuauaucuucuaaaa

SEQ ID NO: 171043 - RNA, 24 nt, Artificial Sequence
  Synthetic
uauccuauuuuauaucuucuaaaa

SEQ ID NO: 171044 - RNA, 18 nt, Artificial Sequence
  Synthetic
uaaauguugguucuaaaa

SEQ ID NO: 171045 - RNA, 19 nt, Artificial Sequence
  Synthetic
cuaaauguugguucuaaaa

SEQ ID NO: 171046 - RNA, 20 nt, Artificial Sequence
  Synthetic
acuaaauguugguucuaaaa

SEQ ID NO: 171047 - RNA, 21 nt, Artificial Sequence
  Synthetic
uacuaaauguugguucuaaaa

SEQ ID NO: 171048 - RNA, 22 nt, Artificial Sequence
  Synthetic
uuacuaaauguugguucuaaaa

SEQ ID NO: 171049 - RNA, 23 nt, Artificial Sequence
  Synthetic
guuacuaaauguugguucuaaaa

SEQ ID NO: 171050 - RNA, 24 nt, Artificial Sequence
  Synthetic
uguuacuaaauguugguucuaaaa

SEQ ID NO: 171051 - RNA, 18 nt, Artificial Sequence
  Synthetic
caacuuauaaaaguaaaa

SEQ ID NO: 171052 - RNA, 19 nt, Artificial Sequence
  Synthetic
ccaacuuauaaaaguaaaa

SEQ ID NO: 171053 - RNA, 20 nt, Artificial Sequence
  Synthetic
uccaacuuauaaaaguaaaa

SEQ ID NO: 171054 - RNA, 21 nt, Artificial Sequence
  Synthetic
uuccaacuuauaaaaguaaaa

SEQ ID NO: 171055 - RNA, 22 nt, Artificial Sequence
  Synthetic
auuccaacuuauaaaaguaaaa

SEQ ID NO: 171056 - RNA, 23 nt, Artificial Sequence
  Synthetic
aauuccaacuuauaaaaguaaaa

SEQ ID NO: 171057 - RNA, 24 nt, Artificial Sequence
  Synthetic
aaauuccaacuuauaaaaguaaaa

SEQ ID NO: 171058 - RNA, 18 nt, Artificial Sequence
  Synthetic
ugauaccuacaaguaaaa

SEQ ID NO: 171059 - RNA, 19 nt, Artificial Sequence
  Synthetic
augauaccuacaaguaaaa

SEQ ID NO: 171060 - RNA, 20 nt, Artificial Sequence
  Synthetic
aaugauaccuacaaguaaaa

SEQ ID NO: 171061 - RNA, 21 nt, Artificial Sequence
  Synthetic
uaaugauaccuacaaguaaaa

SEQ ID NO: 171062 - RNA, 22 nt, Artificial Sequence
  Synthetic
uuaaugauaccuacaaguaaaa

SEQ ID NO: 171063 - RNA, 23 nt, Artificial Sequence
  Synthetic
cuuaaugauaccuacaaguaaaa

SEQ ID NO: 171064 - RNA, 24 nt, Artificial Sequence
  Synthetic
acuuaaugauaccuacaaguaaaa

SEQ ID NO: 171065 - RNA, 18 nt, Artificial Sequence
  Synthetic
aaaaggcccacaguaaaa

SEQ ID NO: 171066 - RNA, 19 nt, Artificial Sequence
  Synthetic
caaaaggcccacaguaaaa

SEQ ID NO: 171067 - RNA, 20 nt, Artificial Sequence
  Synthetic
gcaaaaggcccacaguaaaa

SEQ ID NO: 171068 - RNA, 21 nt, Artificial Sequence
  Synthetic
agcaaaaggcccacaguaaaa

SEQ ID NO: 171069 - RNA, 22 nt, Artificial Sequence
  Synthetic
cagcaaaaggcccacaguaaaa

SEQ ID NO: 171070 - RNA, 23 nt, Artificial Sequence
  Synthetic
acagcaaaaggcccacaguaaaa

SEQ ID NO: 171071 - RNA, 24 nt, Artificial Sequence
  Synthetic
uacagcaaaaggcccacaguaaaa

SEQ ID NO: 171072 - RNA, 18 nt, Artificial Sequence
  Synthetic
aaagcuuuuacaguaaaa

SEQ ID NO: 171073 - RNA, 19 nt, Artificial Sequence
  Synthetic
uaaagcuuuuacaguaaaa

SEQ ID NO: 171074 - RNA, 20 nt, Artificial Sequence
  Synthetic
auaaagcuuuuacaguaaaa

SEQ ID NO: 171075 - RNA, 21 nt, Artificial Sequence
  Synthetic
gauaaagcuuuuacaguaaaa

SEQ ID NO: 171076 - RNA, 22 nt, Artificial Sequence
  Synthetic
ugauaaagcuuuuacaguaaaa

SEQ ID NO: 171077 - RNA, 23 nt, Artificial Sequence
  Synthetic
uugauaaagcuuuuacaguaaaa

SEQ ID NO: 171078 - RNA, 24 nt, Artificial Sequence
  Synthetic
auugauaaagcuuuuacaguaaaa

SEQ ID NO: 171079 - RNA, 18 nt, Artificial Sequence
  Synthetic
ugaguaguagcaguaaaa

SEQ ID NO: 171080 - RNA, 19 nt, Artificial Sequence
  Synthetic
augaguaguagcaguaaaa

SEQ ID NO: 171081 - RNA, 20 nt, Artificial Sequence
  Synthetic
aaugaguaguagcaguaaaa

SEQ ID NO: 171082 - RNA, 21 nt, Artificial Sequence
  Synthetic
gaaugaguaguagcaguaaaa

SEQ ID NO: 171083 - RNA, 22 nt, Artificial Sequence
  Synthetic
agaaugaguaguagcaguaaaa

SEQ ID NO: 171084 - RNA, 23 nt, Artificial Sequence
  Synthetic
gagaaugaguaguagcaguaaaa

SEQ ID NO: 171085 - RNA, 24 nt, Artificial Sequence
  Synthetic
ggagaaugaguaguagcaguaaaa

SEQ ID NO: 171086 - RNA, 18 nt, Artificial Sequence
  Synthetic
ccccaagaaucaguaaaa

SEQ ID NO: 171087 - RNA, 19 nt, Artificial Sequence
  Synthetic
uccccaagaaucaguaaaa

SEQ ID NO: 171088 - RNA, 20 nt, Artificial Sequence
  Synthetic
cuccccaagaaucaguaaaa

SEQ ID NO: 171089 - RNA, 21 nt, Artificial Sequence
  Synthetic
ucuccccaagaaucaguaaaa

SEQ ID NO: 171090 - RNA, 22 nt, Artificial Sequence
  Synthetic
aucuccccaagaaucaguaaaa

SEQ ID NO: 171091 - RNA, 23 nt, Artificial Sequence
  Synthetic
aaucuccccaagaaucaguaaaa

SEQ ID NO: 171092 - RNA, 24 nt, Artificial Sequence
  Synthetic
aaaucuccccaagaaucaguaaaa

SEQ ID NO: 171093 - RNA, 18 nt, Artificial Sequence
  Synthetic
uccuaccguucaguaaaa

SEQ ID NO: 171094 - RNA, 19 nt, Artificial Sequence
  Synthetic
cuccuaccguucaguaaaa

SEQ ID NO: 171095 - RNA, 20 nt, Artificial Sequence
  Synthetic
ucuccuaccguucaguaaaa

SEQ ID NO: 171096 - RNA, 21 nt, Artificial Sequence
  Synthetic
cucuccuaccguucaguaaaa

SEQ ID NO: 171097 - RNA, 22 nt, Artificial Sequence
  Synthetic
acucuccuaccguucaguaaaa

SEQ ID NO: 171098 - RNA, 23 nt, Artificial Sequence
  Synthetic
uacucuccuaccguucaguaaaa

SEQ ID NO: 171099 - RNA, 24 nt, Artificial Sequence
  Synthetic
uuacucuccuaccguucaguaaaa

SEQ ID NO: 171100 - RNA, 18 nt, Artificial Sequence
  Synthetic
gauacaagcagaguaaaa

SEQ ID NO: 171101 - RNA, 19 nt, Artificial Sequence
  Synthetic
ugauacaagcagaguaaaa

SEQ ID NO: 171102 - RNA, 20 nt, Artificial Sequence
  Synthetic
augauacaagcagaguaaaa

SEQ ID NO: 171103 - RNA, 21 nt, Artificial Sequence
  Synthetic
gaugauacaagcagaguaaaa

SEQ ID NO: 171104 - RNA, 22 nt, Artificial Sequence
  Synthetic
ugaugauacaagcagaguaaaa

SEQ ID NO: 171105 - RNA, 23 nt, Artificial Sequence
  Synthetic
gugaugauacaagcagaguaaaa

SEQ ID NO: 171106 - RNA, 24 nt, Artificial Sequence
  Synthetic
ggugaugauacaagcagaguaaaa

SEQ ID NO: 171107 - RNA, 18 nt, Artificial Sequence
  Synthetic
agcacugagagaguaaaa

SEQ ID NO: 171108 - RNA, 19 nt, Artificial Sequence
  Synthetic
cagcacugagagaguaaaa

SEQ ID NO: 171109 - RNA, 20 nt, Artificial Sequence
  Synthetic
acagcacugagagaguaaaa

SEQ ID NO: 171110 - RNA, 21 nt, Artificial Sequence
  Synthetic
gacagcacugagagaguaaaa

SEQ ID NO: 171111 - RNA, 22 nt, Artificial Sequence
  Synthetic
agacagcacugagagaguaaaa

SEQ ID NO: 171112 - RNA, 23 nt, Artificial Sequence
  Synthetic
aagacagcacugagagaguaaaa

SEQ ID NO: 171113 - RNA, 24 nt, Artificial Sequence
  Synthetic
aaagacagcacugagagaguaaaa

SEQ ID NO: 171114 - RNA, 18 nt, Artificial Sequence
  Synthetic
uuuucuuuacuaguaaaa

SEQ ID NO: 171115 - RNA, 19 nt, Artificial Sequence
  Synthetic
auuuucuuuacuaguaaaa

SEQ ID NO: 171116 - RNA, 20 nt, Artificial Sequence
  Synthetic
cauuuucuuuacuaguaaaa

SEQ ID NO: 171117 - RNA, 21 nt, Artificial Sequence
  Synthetic
ucauuuucuuuacuaguaaaa

SEQ ID NO: 171118 - RNA, 22 nt, Artificial Sequence
  Synthetic
uucauuuucuuuacuaguaaaa

SEQ ID NO: 171119 - RNA, 23 nt, Artificial Sequence
  Synthetic
auucauuuucuuuacuaguaaaa

SEQ ID NO: 171120 - RNA, 24 nt, Artificial Sequence
  Synthetic
cauucauuuucuuuacuaguaaaa

SEQ ID NO: 171121 - RNA, 18 nt, Artificial Sequence
  Synthetic
cauuauccaguaguaaaa

SEQ ID NO: 171122 - RNA, 19 nt, Artificial Sequence
  Synthetic
ucauuauccaguaguaaaa

SEQ ID NO: 171123 - RNA, 20 nt, Artificial Sequence
  Synthetic
gucauuauccaguaguaaaa

SEQ ID NO: 171124 - RNA, 21 nt, Artificial Sequence
  Synthetic
ugucauuauccaguaguaaaa

SEQ ID NO: 171125 - RNA, 22 nt, Artificial Sequence
  Synthetic
uugucauuauccaguaguaaaa

SEQ ID NO: 171126 - RNA, 23 nt, Artificial Sequence
  Synthetic
auugucauuauccaguaguaaaa

SEQ ID NO: 171127 - RNA, 24 nt, Artificial Sequence
  Synthetic
cauugucauuauccaguaguaaaa

SEQ ID NO: 171128 - RNA, 18 nt, Artificial Sequence
  Synthetic
accaaucaaaagguaaaa

SEQ ID NO: 171129 - RNA, 19 nt, Artificial Sequence
  Synthetic
aaccaaucaaaagguaaaa

SEQ ID NO: 171130 - RNA, 20 nt, Artificial Sequence
  Synthetic
uaaccaaucaaaagguaaaa

SEQ ID NO: 171131 - RNA, 21 nt, Artificial Sequence
  Synthetic
auaaccaaucaaaagguaaaa

SEQ ID NO: 171132 - RNA, 22 nt, Artificial Sequence
  Synthetic
aauaaccaaucaaaagguaaaa

SEQ ID NO: 171133 - RNA, 23 nt, Artificial Sequence
  Synthetic
caauaaccaaucaaaagguaaaa

SEQ ID NO: 171134 - RNA, 24 nt, Artificial Sequence
  Synthetic
acaauaaccaaucaaaagguaaaa

SEQ ID NO: 171135 - RNA, 18 nt, Artificial Sequence
  Synthetic
caucuaacaaagguaaaa

SEQ ID NO: 171136 - RNA, 19 nt, Artificial Sequence
  Synthetic
gcaucuaacaaagguaaaa

SEQ ID NO: 171137 - RNA, 20 nt, Artificial Sequence
  Synthetic
ggcaucuaacaaagguaaaa

SEQ ID NO: 171138 - RNA, 21 nt, Artificial Sequence
  Synthetic
gggcaucuaacaaagguaaaa

SEQ ID NO: 171139 - RNA, 22 nt, Artificial Sequence
  Synthetic
ugggcaucuaacaaagguaaaa

SEQ ID NO: 171140 - RNA, 23 nt, Artificial Sequence
  Synthetic
cugggcaucuaacaaagguaaaa

SEQ ID NO: 171141 - RNA, 24 nt, Artificial Sequence
  Synthetic
ccugggcaucuaacaaagguaaaa

SEQ ID NO: 171142 - RNA, 18 nt, Artificial Sequence
  Synthetic
auaguagaauggguaaaa

SEQ ID NO: 171143 - RNA, 19 nt, Artificial Sequence
  Synthetic
aauaguagaauggguaaaa

SEQ ID NO: 171144 - RNA, 20 nt, Artificial Sequence
  Synthetic
aaauaguagaauggguaaaa

SEQ ID NO: 171145 - RNA, 21 nt, Artificial Sequence
  Synthetic
aaaauaguagaauggguaaaa

SEQ ID NO: 171146 - RNA, 22 nt, Artificial Sequence
  Synthetic
gaaaauaguagaauggguaaaa

SEQ ID NO: 171147 - RNA, 23 nt, Artificial Sequence
  Synthetic
agaaaauaguagaauggguaaaa

SEQ ID NO: 171148 - RNA, 24 nt, Artificial Sequence
  Synthetic
aagaaaauaguagaauggguaaaa

SEQ ID NO: 171149 - RNA, 18 nt, Artificial Sequence
  Synthetic
uucguuaccuugguaaaa

SEQ ID NO: 171150 - RNA, 19 nt, Artificial Sequence
  Synthetic
uuucguuaccuugguaaaa

SEQ ID NO: 171151 - RNA, 20 nt, Artificial Sequence
  Synthetic
guuucguuaccuugguaaaa

SEQ ID NO: 171152 - RNA, 21 nt, Artificial Sequence
  Synthetic
aguuucguuaccuugguaaaa

SEQ ID NO: 171153 - RNA, 22 nt, Artificial Sequence
  Synthetic
aaguuucguuaccuugguaaaa

SEQ ID NO: 171154 - RNA, 23 nt, Artificial Sequence
  Synthetic
caaguuucguuaccuugguaaaa

SEQ ID NO: 171155 - RNA, 24 nt, Artificial Sequence
  Synthetic
acaaguuucguuaccuugguaaaa

SEQ ID NO: 171156 - RNA, 18 nt, Artificial Sequence
  Synthetic
auuuuaacgcauguaaaa

SEQ ID NO: 171157 - RNA, 19 nt, Artificial Sequence
  Synthetic
uauuuuaacgcauguaaaa

SEQ ID NO: 171158 - RNA, 20 nt, Artificial Sequence
  Synthetic
cuauuuuaacgcauguaaaa

SEQ ID NO: 171159 - RNA, 21 nt, Artificial Sequence
  Synthetic
gcuauuuuaacgcauguaaaa

SEQ ID NO: 171160 - RNA, 22 nt, Artificial Sequence
  Synthetic
agcuauuuuaacgcauguaaaa

SEQ ID NO: 171161 - RNA, 23 nt, Artificial Sequence
  Synthetic
uagcuauuuuaacgcauguaaaa

SEQ ID NO: 171162 - RNA, 24 nt, Artificial Sequence
  Synthetic
auagcuauuuuaacgcauguaaaa

SEQ ID NO: 171163 - RNA, 18 nt, Artificial Sequence
  Synthetic
uguaguuacgauguaaaa

SEQ ID NO: 171164 - RNA, 19 nt, Artificial Sequence
  Synthetic
uuguaguuacgauguaaaa

SEQ ID NO: 171165 - RNA, 20 nt, Artificial Sequence
  Synthetic
auuguaguuacgauguaaaa

SEQ ID NO: 171166 - RNA, 21 nt, Artificial Sequence
  Synthetic
aauuguaguuacgauguaaaa

SEQ ID NO: 171167 - RNA, 22 nt, Artificial Sequence
  Synthetic
aaauuguaguuacgauguaaaa

SEQ ID NO: 171168 - RNA, 23 nt, Artificial Sequence
  Synthetic
gaaauuguaguuacgauguaaaa

SEQ ID NO: 171169 - RNA, 24 nt, Artificial Sequence
  Synthetic
cgaaauuguaguuacgauguaaaa

SEQ ID NO: 171170 - RNA, 18 nt, Artificial Sequence
  Synthetic
uccuuuugggauguaaaa

SEQ ID NO: 171171 - RNA, 19 nt, Artificial Sequence
  Synthetic
guccuuuugggauguaaaa

SEQ ID NO: 171172 - RNA, 20 nt, Artificial Sequence
  Synthetic
aguccuuuugggauguaaaa

SEQ ID NO: 171173 - RNA, 21 nt, Artificial Sequence
  Synthetic
caguccuuuugggauguaaaa

SEQ ID NO: 171174 - RNA, 22 nt, Artificial Sequence
  Synthetic
acaguccuuuugggauguaaaa

SEQ ID NO: 171175 - RNA, 23 nt, Artificial Sequence
  Synthetic
cacaguccuuuugggauguaaaa

SEQ ID NO: 171176 - RNA, 24 nt, Artificial Sequence
  Synthetic
gcacaguccuuuugggauguaaaa

SEQ ID NO: 171177 - RNA, 18 nt, Artificial Sequence
  Synthetic
auuucgucaacuguaaaa

SEQ ID NO: 171178 - RNA, 19 nt, Artificial Sequence
  Synthetic
uauuucgucaacuguaaaa

SEQ ID NO: 171179 - RNA, 20 nt, Artificial Sequence
  Synthetic
cuauuucgucaacuguaaaa

SEQ ID NO: 171180 - RNA, 21 nt, Artificial Sequence
  Synthetic
ucuauuucgucaacuguaaaa

SEQ ID NO: 171181 - RNA, 22 nt, Artificial Sequence
  Synthetic
uucuauuucgucaacuguaaaa

SEQ ID NO: 171182 - RNA, 23 nt, Artificial Sequence
  Synthetic
cuucuauuucgucaacuguaaaa

SEQ ID NO: 171183 - RNA, 24 nt, Artificial Sequence
  Synthetic
ucuucuauuucgucaacuguaaaa

SEQ ID NO: 171184 - RNA, 18 nt, Artificial Sequence
  Synthetic
gugcccucgccuguaaaa

SEQ ID NO: 171185 - RNA, 19 nt, Artificial Sequence
  Synthetic
ugugcccucgccuguaaaa

SEQ ID NO: 171186 - RNA, 20 nt, Artificial Sequence
  Synthetic
uugugcccucgccuguaaaa

SEQ ID NO: 171187 - RNA, 21 nt, Artificial Sequence
  Synthetic
uuugugcccucgccuguaaaa

SEQ ID NO: 171188 - RNA, 22 nt, Artificial Sequence
  Synthetic
cuuugugcccucgccuguaaaa

SEQ ID NO: 171189 - RNA, 23 nt, Artificial Sequence
  Synthetic
ucuuugugcccucgccuguaaaa

SEQ ID NO: 171190 - RNA, 24 nt, Artificial Sequence
  Synthetic
cucuuugugcccucgccuguaaaa

SEQ ID NO: 171191 - RNA, 18 nt, Artificial Sequence
  Synthetic
guugucucaucuguaaaa

SEQ ID NO: 171192 - RNA, 19 nt, Artificial Sequence
  Synthetic
gguugucucaucuguaaaa

SEQ ID NO: 171193 - RNA, 20 nt, Artificial Sequence
  Synthetic
ugguugucucaucuguaaaa

SEQ ID NO: 171194 - RNA, 21 nt, Artificial Sequence
  Synthetic
uugguugucucaucuguaaaa

SEQ ID NO: 171195 - RNA, 22 nt, Artificial Sequence
  Synthetic
cuugguugucucaucuguaaaa

SEQ ID NO: 171196 - RNA, 23 nt, Artificial Sequence
  Synthetic
ucuugguugucucaucuguaaaa

SEQ ID NO: 171197 - RNA, 24 nt, Artificial Sequence
  Synthetic
gucuugguugucucaucuguaaaa

SEQ ID NO: 171198 - RNA, 18 nt, Artificial Sequence
  Synthetic
auuuucucaucuguaaaa

SEQ ID NO: 171199 - RNA, 19 nt, Artificial Sequence
  Synthetic
aauuuucucaucuguaaaa

SEQ ID NO: 171200 - RNA, 20 nt, Artificial Sequence
  Synthetic
uaauuuucucaucuguaaaa

SEQ ID NO: 171201 - RNA, 21 nt, Artificial Sequence
  Synthetic
uuaauuuucucaucuguaaaa

SEQ ID NO: 171202 - RNA, 22 nt, Artificial Sequence
  Synthetic
guuaauuuucucaucuguaaaa

SEQ ID NO: 171203 - RNA, 23 nt, Artificial Sequence
  Synthetic
aguuaauuuucucaucuguaaaa

SEQ ID NO: 171204 - RNA, 24 nt, Artificial Sequence
  Synthetic
caguuaauuuucucaucuguaaaa

SEQ ID NO: 171205 - RNA, 18 nt, Artificial Sequence
  Synthetic
uggaaagccauuguaaaa

SEQ ID NO: 171206 - RNA, 19 nt, Artificial Sequence
  Synthetic
uuggaaagccauuguaaaa

SEQ ID NO: 171207 - RNA, 20 nt, Artificial Sequence
  Synthetic
cuuggaaagccauuguaaaa

SEQ ID NO: 171208 - RNA, 21 nt, Artificial Sequence
  Synthetic
ucuuggaaagccauuguaaaa

SEQ ID NO: 171209 - RNA, 22 nt, Artificial Sequence
  Synthetic
uucuuggaaagccauuguaaaa

SEQ ID NO: 171210 - RNA, 23 nt, Artificial Sequence
  Synthetic
uuucuuggaaagccauuguaaaa

SEQ ID NO: 171211 - RNA, 24 nt, Artificial Sequence
  Synthetic
guuucuuggaaagccauuguaaaa

SEQ ID NO: 171212 - RNA, 18 nt, Artificial Sequence
  Synthetic
agaccaggcauuguaaaa

SEQ ID NO: 171213 - RNA, 19 nt, Artificial Sequence
  Synthetic
aagaccaggcauuguaaaa

SEQ ID NO: 171214 - RNA, 20 nt, Artificial Sequence
  Synthetic
caagaccaggcauuguaaaa

SEQ ID NO: 171215 - RNA, 21 nt, Artificial Sequence
  Synthetic
acaagaccaggcauuguaaaa

SEQ ID NO: 171216 - RNA, 22 nt, Artificial Sequence
  Synthetic
aacaagaccaggcauuguaaaa

SEQ ID NO: 171217 - RNA, 23 nt, Artificial Sequence
  Synthetic
caacaagaccaggcauuguaaaa

SEQ ID NO: 171218 - RNA, 24 nt, Artificial Sequence
  Synthetic
acaacaagaccaggcauuguaaaa

SEQ ID NO: 171219 - RNA, 18 nt, Artificial Sequence
  Synthetic
uguagauaacuuguaaaa

SEQ ID NO: 171220 - RNA, 19 nt, Artificial Sequence
  Synthetic
uuguagauaacuuguaaaa

SEQ ID NO: 171221 - RNA, 20 nt, Artificial Sequence
  Synthetic
cuuguagauaacuuguaaaa

SEQ ID NO: 171222 - RNA, 21 nt, Artificial Sequence
  Synthetic
acuuguagauaacuuguaaaa

SEQ ID NO: 171223 - RNA, 22 nt, Artificial Sequence
  Synthetic
aacuuguagauaacuuguaaaa

SEQ ID NO: 171224 - RNA, 23 nt, Artificial Sequence
  Synthetic
aaacuuguagauaacuuguaaaa

SEQ ID NO: 171225 - RNA, 24 nt, Artificial Sequence
  Synthetic
gaaacuuguagauaacuuguaaaa

SEQ ID NO: 171226 - RNA, 18 nt, Artificial Sequence
  Synthetic
uuuugugccuuuguaaaa

SEQ ID NO: 171227 - RNA, 19 nt, Artificial Sequence
  Synthetic
cuuuugugccuuuguaaaa

SEQ ID NO: 171228 - RNA, 20 nt, Artificial Sequence
  Synthetic
acuuuugugccuuuguaaaa

SEQ ID NO: 171229 - RNA, 21 nt, Artificial Sequence
  Synthetic
uacuuuugugccuuuguaaaa

SEQ ID NO: 171230 - RNA, 22 nt, Artificial Sequence
  Synthetic
uuacuuuugugccuuuguaaaa

SEQ ID NO: 171231 - RNA, 23 nt, Artificial Sequence
  Synthetic
uuuacuuuugugccuuuguaaaa

SEQ ID NO: 171232 - RNA, 24 nt, Artificial Sequence
  Synthetic
uuuuacuuuugugccuuuguaaaa

SEQ ID NO: 171233 - RNA, 18 nt, Artificial Sequence
  Synthetic
aagugaaaguuuguaaaa

SEQ ID NO: 171234 - RNA, 19 nt, Artificial Sequence
  Synthetic
aaagugaaaguuuguaaaa

SEQ ID NO: 171235 - RNA, 20 nt, Artificial Sequence
  Synthetic
gaaagugaaaguuuguaaaa

SEQ ID NO: 171236 - RNA, 21 nt, Artificial Sequence
  Synthetic
ugaaagugaaaguuuguaaaa

SEQ ID NO: 171237 - RNA, 22 nt, Artificial Sequence
  Synthetic
cugaaagugaaaguuuguaaaa

SEQ ID NO: 171238 - RNA, 23 nt, Artificial Sequence
  Synthetic
ucugaaagugaaaguuuguaaaa

SEQ ID NO: 171239 - RNA, 24 nt, Artificial Sequence
  Synthetic
uucugaaagugaaaguuuguaaaa

SEQ ID NO: 171240 - RNA, 18 nt, Artificial Sequence
  Synthetic
uaugauagaaaauuaaaa

SEQ ID NO: 171241 - RNA, 19 nt, Artificial Sequence
  Synthetic
uuaugauagaaaauuaaaa

SEQ ID NO: 171242 - RNA, 20 nt, Artificial Sequence
  Synthetic
uuuaugauagaaaauuaaaa

SEQ ID NO: 171243 - RNA, 21 nt, Artificial Sequence
  Synthetic
uuuuaugauagaaaauuaaaa

SEQ ID NO: 171244 - RNA, 22 nt, Artificial Sequence
  Synthetic
uuuuuaugauagaaaauuaaaa

SEQ ID NO: 171245 - RNA, 23 nt, Artificial Sequence
  Synthetic
auuuuuaugauagaaaauuaaaa

SEQ ID NO: 171246 - RNA, 24 nt, Artificial Sequence
  Synthetic
aauuuuuaugauagaaaauuaaaa

SEQ ID NO: 171247 - RNA, 18 nt, Artificial Sequence
  Synthetic
ggcaggugaaaauuaaaa

SEQ ID NO: 171248 - RNA, 19 nt, Artificial Sequence
  Synthetic
aggcaggugaaaauuaaaa

SEQ ID NO: 171249 - RNA, 20 nt, Artificial Sequence
  Synthetic
caggcaggugaaaauuaaaa

SEQ ID NO: 171250 - RNA, 21 nt, Artificial Sequence
  Synthetic
acaggcaggugaaaauuaaaa

SEQ ID NO: 171251 - RNA, 22 nt, Artificial Sequence
  Synthetic
gacaggcaggugaaaauuaaaa

SEQ ID NO: 171252 - RNA, 23 nt, Artificial Sequence
  Synthetic
agacaggcaggugaaaauuaaaa

SEQ ID NO: 171253 - RNA, 24 nt, Artificial Sequence
  Synthetic
cagacaggcaggugaaaauuaaaa

SEQ ID NO: 171254 - RNA, 18 nt, Artificial Sequence
  Synthetic
augaucaggaaauuaaaa

SEQ ID NO: 171255 - RNA, 19 nt, Artificial Sequence
  Synthetic
uaugaucaggaaauuaaaa

SEQ ID NO: 171256 - RNA, 20 nt, Artificial Sequence
  Synthetic
cuaugaucaggaaauuaaaa

SEQ ID NO: 171257 - RNA, 21 nt, Artificial Sequence
  Synthetic
acuaugaucaggaaauuaaaa

SEQ ID NO: 171258 - RNA, 22 nt, Artificial Sequence
  Synthetic
aacuaugaucaggaaauuaaaa

SEQ ID NO: 171259 - RNA, 23 nt, Artificial Sequence
  Synthetic
uaacuaugaucaggaaauuaaaa

SEQ ID NO: 171260 - RNA, 24 nt, Artificial Sequence
  Synthetic
auaacuaugaucaggaaauuaaaa

SEQ ID NO: 171261 - RNA, 18 nt, Artificial Sequence
  Synthetic
acauaauugaaauuaaaa

SEQ ID NO: 171262 - RNA, 19 nt, Artificial Sequence
  Synthetic
uacauaauugaaauuaaaa

SEQ ID NO: 171263 - RNA, 20 nt, Artificial Sequence
  Synthetic
auacauaauugaaauuaaaa

SEQ ID NO: 171264 - RNA, 21 nt, Artificial Sequence
  Synthetic
aauacauaauugaaauuaaaa

SEQ ID NO: 171265 - RNA, 22 nt, Artificial Sequence
  Synthetic
aaauacauaauugaaauuaaaa

SEQ ID NO: 171266 - RNA, 23 nt, Artificial Sequence
  Synthetic
aaaauacauaauugaaauuaaaa

SEQ ID NO: 171267 - RNA, 24 nt, Artificial Sequence
  Synthetic
uaaaauacauaauugaaauuaaaa

SEQ ID NO: 171268 - RNA, 18 nt, Artificial Sequence
  Synthetic
ugaaagucacaauuaaaa

SEQ ID NO: 171269 - RNA, 19 nt, Artificial Sequence
  Synthetic
augaaagucacaauuaaaa

SEQ ID NO: 171270 - RNA, 20 nt, Artificial Sequence
  Synthetic
uaugaaagucacaauuaaaa

SEQ ID NO: 171271 - RNA, 21 nt, Artificial Sequence
  Synthetic
guaugaaagucacaauuaaaa

SEQ ID NO: 171272 - RNA, 22 nt, Artificial Sequence
  Synthetic
uguaugaaagucacaauuaaaa

SEQ ID NO: 171273 - RNA, 23 nt, Artificial Sequence
  Synthetic
auguaugaaagucacaauuaaaa

SEQ ID NO: 171274 - RNA, 24 nt, Artificial Sequence
  Synthetic
aauguaugaaagucacaauuaaaa

SEQ ID NO: 171275 - RNA, 18 nt, Artificial Sequence
  Synthetic
ugguuuucuuaauuaaaa

SEQ ID NO: 171276 - RNA, 19 nt, Artificial Sequence
  Synthetic
uugguuuucuuaauuaaaa

SEQ ID NO: 171277 - RNA, 20 nt, Artificial Sequence
  Synthetic
cuugguuuucuuaauuaaaa

SEQ ID NO: 171278 - RNA, 21 nt, Artificial Sequence
  Synthetic
ccuugguuuucuuaauuaaaa

SEQ ID NO: 171279 - RNA, 22 nt, Artificial Sequence
  Synthetic
accuugguuuucuuaauuaaaa

SEQ ID NO: 171280 - RNA, 23 nt, Artificial Sequence
  Synthetic
uaccuugguuuucuuaauuaaaa

SEQ ID NO: 171281 - RNA, 24 nt, Artificial Sequence
  Synthetic
cuaccuugguuuucuuaauuaaaa

SEQ ID NO: 171282 - RNA, 18 nt, Artificial Sequence
  Synthetic
aguagccauacauuaaaa

SEQ ID NO: 171283 - RNA, 19 nt, Artificial Sequence
  Synthetic
aaguagccauacauuaaaa

SEQ ID NO: 171284 - RNA, 20 nt, Artificial Sequence
  Synthetic
aaaguagccauacauuaaaa

SEQ ID NO: 171285 - RNA, 21 nt, Artificial Sequence
  Synthetic
aaaaguagccauacauuaaaa

SEQ ID NO: 171286 - RNA, 22 nt, Artificial Sequence
  Synthetic
caaaaguagccauacauuaaaa

SEQ ID NO: 171287 - RNA, 23 nt, Artificial Sequence
  Synthetic
acaaaaguagccauacauuaaaa

SEQ ID NO: 171288 - RNA, 24 nt, Artificial Sequence
  Synthetic
aacaaaaguagccauacauuaaaa

SEQ ID NO: 171289 - RNA, 18 nt, Artificial Sequence
  Synthetic
auauuacaaggauuaaaa

SEQ ID NO: 171290 - RNA, 19 nt, Artificial Sequence
  Synthetic
cauauuacaaggauuaaaa

SEQ ID NO: 171291 - RNA, 20 nt, Artificial Sequence
  Synthetic
acauauuacaaggauuaaaa

SEQ ID NO: 171292 - RNA, 21 nt, Artificial Sequence
  Synthetic
aacauauuacaaggauuaaaa

SEQ ID NO: 171293 - RNA, 22 nt, Artificial Sequence
  Synthetic
uaacauauuacaaggauuaaaa

SEQ ID NO: 171294 - RNA, 23 nt, Artificial Sequence
  Synthetic
uuaacauauuacaaggauuaaaa

SEQ ID NO: 171295 - RNA, 24 nt, Artificial Sequence
  Synthetic
auuaacauauuacaaggauuaaaa

SEQ ID NO: 171296 - RNA, 18 nt, Artificial Sequence
  Synthetic
acaauucuaggauuaaaa

SEQ ID NO: 171297 - RNA, 19 nt, Artificial Sequence
  Synthetic
cacaauucuaggauuaaaa

SEQ ID NO: 171298 - RNA, 20 nt, Artificial Sequence
  Synthetic
acacaauucuaggauuaaaa

SEQ ID NO: 171299 - RNA, 21 nt, Artificial Sequence
  Synthetic
gacacaauucuaggauuaaaa

SEQ ID NO: 171300 - RNA, 22 nt, Artificial Sequence
  Synthetic
agacacaauucuaggauuaaaa

SEQ ID NO: 171301 - RNA, 23 nt, Artificial Sequence
  Synthetic
uagacacaauucuaggauuaaaa

SEQ ID NO: 171302 - RNA, 24 nt, Artificial Sequence
  Synthetic
uuagacacaauucuaggauuaaaa

SEQ ID NO: 171303 - RNA, 18 nt, Artificial Sequence
  Synthetic
uuaugaaugugauuaaaa

SEQ ID NO: 171304 - RNA, 19 nt, Artificial Sequence
  Synthetic
cuuaugaaugugauuaaaa

SEQ ID NO: 171305 - RNA, 20 nt, Artificial Sequence
  Synthetic
acuuaugaaugugauuaaaa

SEQ ID NO: 171306 - RNA, 21 nt, Artificial Sequence
  Synthetic
gacuuaugaaugugauuaaaa

SEQ ID NO: 171307 - RNA, 22 nt, Artificial Sequence
  Synthetic
ugacuuaugaaugugauuaaaa

SEQ ID NO: 171308 - RNA, 23 nt, Artificial Sequence
  Synthetic
uugacuuaugaaugugauuaaaa

SEQ ID NO: 171309 - RNA, 24 nt, Artificial Sequence
  Synthetic
auugacuuaugaaugugauuaaaa

SEQ ID NO: 171310 - RNA, 18 nt, Artificial Sequence
  Synthetic
aauauccuaauauuaaaa

SEQ ID NO: 171311 - RNA, 19 nt, Artificial Sequence
  Synthetic
uaauauccuaauauuaaaa

SEQ ID NO: 171312 - RNA, 20 nt, Artificial Sequence
  Synthetic
auaauauccuaauauuaaaa

SEQ ID NO: 171313 - RNA, 21 nt, Artificial Sequence
  Synthetic
gauaauauccuaauauuaaaa

SEQ ID NO: 171314 - RNA, 22 nt, Artificial Sequence
  Synthetic
ggauaauauccuaauauuaaaa

SEQ ID NO: 171315 - RNA, 23 nt, Artificial Sequence
  Synthetic
uggauaauauccuaauauuaaaa

SEQ ID NO: 171316 - RNA, 24 nt, Artificial Sequence
  Synthetic
guggauaauauccuaauauuaaaa

SEQ ID NO: 171317 - RNA, 18 nt, Artificial Sequence
  Synthetic
uucucagcuauauuaaaa

SEQ ID NO: 171318 - RNA, 19 nt, Artificial Sequence
  Synthetic
cuucucagcuauauuaaaa

SEQ ID NO: 171319 - RNA, 20 nt, Artificial Sequence
  Synthetic
acuucucagcuauauuaaaa

SEQ ID NO: 171320 - RNA, 21 nt, Artificial Sequence
  Synthetic
uacuucucagcuauauuaaaa

SEQ ID NO: 171321 - RNA, 22 nt, Artificial Sequence
  Synthetic
uuacuucucagcuauauuaaaa

SEQ ID NO: 171322 - RNA, 23 nt, Artificial Sequence
  Synthetic
cuuacuucucagcuauauuaaaa

SEQ ID NO: 171323 - RNA, 24 nt, Artificial Sequence
  Synthetic
ccuuacuucucagcuauauuaaaa

SEQ ID NO: 171324 - RNA, 18 nt, Artificial Sequence
  Synthetic
uuaaguuuccuauuaaaa

SEQ ID NO: 171325 - RNA, 19 nt, Artificial Sequence
  Synthetic
cuuaaguuuccuauuaaaa

SEQ ID NO: 171326 - RNA, 20 nt, Artificial Sequence
  Synthetic
acuuaaguuuccuauuaaaa

SEQ ID NO: 171327 - RNA, 21 nt, Artificial Sequence
  Synthetic
uacuuaaguuuccuauuaaaa

SEQ ID NO: 171328 - RNA, 22 nt, Artificial Sequence
  Synthetic
auacuuaaguuuccuauuaaaa

SEQ ID NO: 171329 - RNA, 23 nt, Artificial Sequence
  Synthetic
gauacuuaaguuuccuauuaaaa

SEQ ID NO: 171330 - RNA, 24 nt, Artificial Sequence
  Synthetic
ugauacuuaaguuuccuauuaaaa

SEQ ID NO: 171331 - RNA, 18 nt, Artificial Sequence
  Synthetic
aaaucaagucuauuaaaa

SEQ ID NO: 171332 - RNA, 19 nt, Artificial Sequence
  Synthetic
aaaaucaagucuauuaaaa

SEQ ID NO: 171333 - RNA, 20 nt, Artificial Sequence
  Synthetic
aaaaaucaagucuauuaaaa

SEQ ID NO: 171334 - RNA, 21 nt, Artificial Sequence
  Synthetic
aaaaaaucaagucuauuaaaa

SEQ ID NO: 171335 - RNA, 22 nt, Artificial Sequence
  Synthetic
uaaaaaaucaagucuauuaaaa

SEQ ID NO: 171336 - RNA, 23 nt, Artificial Sequence
  Synthetic
uuaaaaaaucaagucuauuaaaa

SEQ ID NO: 171337 - RNA, 24 nt, Artificial Sequence
  Synthetic
uuuaaaaaaucaagucuauuaaaa

SEQ ID NO: 171338 - RNA, 21 nt, Artificial Sequence
  Synthetic
aauuucucaaagaacuuaaaa

SEQ ID NO: 171339 - RNA, 22 nt, Artificial Sequence
  Synthetic
aaauuucucaaagaacuuaaaa

SEQ ID NO: 171340 - RNA, 23 nt, Artificial Sequence
  Synthetic
aaaauuucucaaagaacuuaaaa

SEQ ID NO: 171341 - RNA, 24 nt, Artificial Sequence
  Synthetic
gaaaauuucucaaagaacuuaaaa

SEQ ID NO: 171342 - RNA, 21 nt, Artificial Sequence
  Synthetic
cauuucucaaagaacuuaaaa

SEQ ID NO: 171343 - RNA, 22 nt, Artificial Sequence
  Synthetic
acauuucucaaagaacuuaaaa

SEQ ID NO: 171344 - RNA, 23 nt, Artificial Sequence
  Synthetic
gacauuucucaaagaacuuaaaa

SEQ ID NO: 171345 - RNA, 24 nt, Artificial Sequence
  Synthetic
ggacauuucucaaagaacuuaaaa

SEQ ID NO: 171346 - RNA, 18 nt, Artificial Sequence
  Synthetic
acauguucucacuuaaaa

SEQ ID NO: 171347 - RNA, 19 nt, Artificial Sequence
  Synthetic
cacauguucucacuuaaaa

SEQ ID NO: 171348 - RNA, 20 nt, Artificial Sequence
  Synthetic
ucacauguucucacuuaaaa

SEQ ID NO: 171349 - RNA, 21 nt, Artificial Sequence
  Synthetic
aucacauguucucacuuaaaa

SEQ ID NO: 171350 - RNA, 22 nt, Artificial Sequence
  Synthetic
uaucacauguucucacuuaaaa

SEQ ID NO: 171351 - RNA, 23 nt, Artificial Sequence
  Synthetic
auaucacauguucucacuuaaaa

SEQ ID NO: 171352 - RNA, 24 nt, Artificial Sequence
  Synthetic
aauaucacauguucucacuuaaaa

SEQ ID NO: 171353 - RNA, 18 nt, Artificial Sequence
  Synthetic
guuaucagauacuuaaaa

SEQ ID NO: 171354 - RNA, 19 nt, Artificial Sequence
  Synthetic
uguuaucagauacuuaaaa

SEQ ID NO: 171355 - RNA, 20 nt, Artificial Sequence
  Synthetic
cuguuaucagauacuuaaaa

SEQ ID NO: 171356 - RNA, 21 nt, Artificial Sequence
  Synthetic
acuguuaucagauacuuaaaa

SEQ ID NO: 171357 - RNA, 22 nt, Artificial Sequence
  Synthetic
cacuguuaucagauacuuaaaa

SEQ ID NO: 171358 - RNA, 23 nt, Artificial Sequence
  Synthetic
ucacuguuaucagauacuuaaaa

SEQ ID NO: 171359 - RNA, 24 nt, Artificial Sequence
  Synthetic
uucacuguuaucagauacuuaaaa

SEQ ID NO: 171360 - RNA, 18 nt, Artificial Sequence
  Synthetic
ucaaagaucuacuuaaaa

SEQ ID NO: 171361 - RNA, 19 nt, Artificial Sequence
  Synthetic
aucaaagaucuacuuaaaa

SEQ ID NO: 171362 - RNA, 20 nt, Artificial Sequence
  Synthetic
uaucaaagaucuacuuaaaa

SEQ ID NO: 171363 - RNA, 21 nt, Artificial Sequence
  Synthetic
uuaucaaagaucuacuuaaaa

SEQ ID NO: 171364 - RNA, 22 nt, Artificial Sequence
  Synthetic
guuaucaaagaucuacuuaaaa

SEQ ID NO: 171365 - RNA, 23 nt, Artificial Sequence
  Synthetic
cguuaucaaagaucuacuuaaaa

SEQ ID NO: 171366 - RNA, 24 nt, Artificial Sequence
  Synthetic
ccguuaucaaagaucuacuuaaaa

SEQ ID NO: 171367 - RNA, 18 nt, Artificial Sequence
  Synthetic
guugaaggaaccuuaaaa

SEQ ID NO: 171368 - RNA, 19 nt, Artificial Sequence
  Synthetic
uguugaaggaaccuuaaaa

SEQ ID NO: 171369 - RNA, 20 nt, Artificial Sequence
  Synthetic
auguugaaggaaccuuaaaa

SEQ ID NO: 171370 - RNA, 21 nt, Artificial Sequence
  Synthetic
cauguugaaggaaccuuaaaa

SEQ ID NO: 171371 - RNA, 22 nt, Artificial Sequence
  Synthetic
gcauguugaaggaaccuuaaaa

SEQ ID NO: 171372 - RNA, 23 nt, Artificial Sequence
  Synthetic
ggcauguugaaggaaccuuaaaa

SEQ ID NO: 171373 - RNA, 24 nt, Artificial Sequence
  Synthetic
uggcauguugaaggaaccuuaaaa

SEQ ID NO: 171374 - RNA, 18 nt, Artificial Sequence
  Synthetic
uaugcaaagaccuuaaaa

SEQ ID NO: 171375 - RNA, 19 nt, Artificial Sequence
  Synthetic
uuaugcaaagaccuuaaaa

SEQ ID NO: 171376 - RNA, 20 nt, Artificial Sequence
  Synthetic
cuuaugcaaagaccuuaaaa

SEQ ID NO: 171377 - RNA, 21 nt, Artificial Sequence
  Synthetic
gcuuaugcaaagaccuuaaaa

SEQ ID NO: 171378 - RNA, 22 nt, Artificial Sequence
  Synthetic
agcuuaugcaaagaccuuaaaa

SEQ ID NO: 171379 - RNA, 23 nt, Artificial Sequence
  Synthetic
cagcuuaugcaaagaccuuaaaa

SEQ ID NO: 171380 - RNA, 24 nt, Artificial Sequence
  Synthetic
acagcuuaugcaaagaccuuaaaa

SEQ ID NO: 171381 - RNA, 18 nt, Artificial Sequence
  Synthetic
aacaugaauaccuuaaaa

SEQ ID NO: 171382 - RNA, 19 nt, Artificial Sequence
  Synthetic
aaacaugaauaccuuaaaa

SEQ ID NO: 171383 - RNA, 20 nt, Artificial Sequence
  Synthetic
aaaacaugaauaccuuaaaa

SEQ ID NO: 171384 - RNA, 21 nt, Artificial Sequence
  Synthetic
uaaaacaugaauaccuuaaaa

SEQ ID NO: 171385 - RNA, 22 nt, Artificial Sequence
  Synthetic
cuaaaacaugaauaccuuaaaa

SEQ ID NO: 171386 - RNA, 23 nt, Artificial Sequence
  Synthetic
acuaaaacaugaauaccuuaaaa

SEQ ID NO: 171387 - RNA, 24 nt, Artificial Sequence
  Synthetic
gacuaaaacaugaauaccuuaaaa

SEQ ID NO: 171388 - RNA, 18 nt, Artificial Sequence
  Synthetic
uauuauuuggccuuaaaa

SEQ ID NO: 171389 - RNA, 19 nt, Artificial Sequence
  Synthetic
auauuauuuggccuuaaaa

SEQ ID NO: 171390 - RNA, 20 nt, Artificial Sequence
  Synthetic
aauauuauuuggccuuaaaa

SEQ ID NO: 171391 - RNA, 21 nt, Artificial Sequence
  Synthetic
gaauauuauuuggccuuaaaa

SEQ ID NO: 171392 - RNA, 22 nt, Artificial Sequence
  Synthetic
ggaauauuauuuggccuuaaaa

SEQ ID NO: 171393 - RNA, 23 nt, Artificial Sequence
  Synthetic
gggaauauuauuuggccuuaaaa

SEQ ID NO: 171394 - RNA, 24 nt, Artificial Sequence
  Synthetic
agggaauauuauuuggccuuaaaa

SEQ ID NO: 171395 - RNA, 18 nt, Artificial Sequence
  Synthetic
auuaaacucaucuuaaaa

SEQ ID NO: 171396 - RNA, 19 nt, Artificial Sequence
  Synthetic
uauuaaacucaucuuaaaa

SEQ ID NO: 171397 - RNA, 20 nt, Artificial Sequence
  Synthetic
auauuaaacucaucuuaaaa

SEQ ID NO: 171398 - RNA, 21 nt, Artificial Sequence
  Synthetic
uauauuaaacucaucuuaaaa

SEQ ID NO: 171399 - RNA, 22 nt, Artificial Sequence
  Synthetic
uuauauuaaacucaucuuaaaa

SEQ ID NO: 171400 - RNA, 23 nt, Artificial Sequence
  Synthetic
guuauauuaaacucaucuuaaaa

SEQ ID NO: 171401 - RNA, 24 nt, Artificial Sequence
  Synthetic
uguuauauuaaacucaucuuaaaa

SEQ ID NO: 171402 - RNA, 18 nt, Artificial Sequence
  Synthetic
agaggcuggaucuuaaaa

SEQ ID NO: 171403 - RNA, 19 nt, Artificial Sequence
  Synthetic
cagaggcuggaucuuaaaa

SEQ ID NO: 171404 - RNA, 20 nt, Artificial Sequence
  Synthetic
ucagaggcuggaucuuaaaa

SEQ ID NO: 171405 - RNA, 21 nt, Artificial Sequence
  Synthetic
aucagaggcuggaucuuaaaa

SEQ ID NO: 171406 - RNA, 22 nt, Artificial Sequence
  Synthetic
gaucagaggcuggaucuuaaaa

SEQ ID NO: 171407 - RNA, 23 nt, Artificial Sequence
  Synthetic
agaucagaggcuggaucuuaaaa

SEQ ID NO: 171408 - RNA, 24 nt, Artificial Sequence
  Synthetic
uagaucagaggcuggaucuuaaaa

SEQ ID NO: 171409 - RNA, 18 nt, Artificial Sequence
  Synthetic
caaauccaggucuuaaaa

SEQ ID NO: 171410 - RNA, 19 nt, Artificial Sequence
  Synthetic
acaaauccaggucuuaaaa

SEQ ID NO: 171411 - RNA, 20 nt, Artificial Sequence
  Synthetic
gacaaauccaggucuuaaaa

SEQ ID NO: 171412 - RNA, 21 nt, Artificial Sequence
  Synthetic
ggacaaauccaggucuuaaaa

SEQ ID NO: 171413 - RNA, 22 nt, Artificial Sequence
  Synthetic
uggacaaauccaggucuuaaaa

SEQ ID NO: 171414 - RNA, 23 nt, Artificial Sequence
  Synthetic
uuggacaaauccaggucuuaaaa

SEQ ID NO: 171415 - RNA, 24 nt, Artificial Sequence
  Synthetic
guuggacaaauccaggucuuaaaa

SEQ ID NO: 171416 - RNA, 18 nt, Artificial Sequence
  Synthetic
aaucaagaacaguuaaaa

SEQ ID NO: 171417 - RNA, 19 nt, Artificial Sequence
  Synthetic
aaaucaagaacaguuaaaa

SEQ ID NO: 171418 - RNA, 20 nt, Artificial Sequence
  Synthetic
uaaaucaagaacaguuaaaa

SEQ ID NO: 171419 - RNA, 21 nt, Artificial Sequence
  Synthetic
auaaaucaagaacaguuaaaa

SEQ ID NO: 171420 - RNA, 22 nt, Artificial Sequence
  Synthetic
uauaaaucaagaacaguuaaaa

SEQ ID NO: 171421 - RNA, 23 nt, Artificial Sequence
  Synthetic
auauaaaucaagaacaguuaaaa

SEQ ID NO: 171422 - RNA, 24 nt, Artificial Sequence
  Synthetic
gauauaaaucaagaacaguuaaaa

SEQ ID NO: 171423 - RNA, 18 nt, Artificial Sequence
  Synthetic
ucaacgaguuaguuaaaa

SEQ ID NO: 171424 - RNA, 19 nt, Artificial Sequence
  Synthetic
cucaacgaguuaguuaaaa

SEQ ID NO: 171425 - RNA, 20 nt, Artificial Sequence
  Synthetic
gcucaacgaguuaguuaaaa

SEQ ID NO: 171426 - RNA, 21 nt, Artificial Sequence
  Synthetic
agcucaacgaguuaguuaaaa

SEQ ID NO: 171427 - RNA, 22 nt, Artificial Sequence
  Synthetic
aagcucaacgaguuaguuaaaa

SEQ ID NO: 171428 - RNA, 23 nt, Artificial Sequence
  Synthetic
caagcucaacgaguuaguuaaaa

SEQ ID NO: 171429 - RNA, 24 nt, Artificial Sequence
  Synthetic
acaagcucaacgaguuaguuaaaa

SEQ ID NO: 171430 - RNA, 18 nt, Artificial Sequence
  Synthetic
uguuuugugccguuaaaa

SEQ ID NO: 171431 - RNA, 19 nt, Artificial Sequence
  Synthetic
cuguuuugugccguuaaaa

SEQ ID NO: 171432 - RNA, 20 nt, Artificial Sequence
  Synthetic
gcuguuuugugccguuaaaa

SEQ ID NO: 171433 - RNA, 21 nt, Artificial Sequence
  Synthetic
agcuguuuugugccguuaaaa

SEQ ID NO: 171434 - RNA, 22 nt, Artificial Sequence
  Synthetic
cagcuguuuugugccguuaaaa

SEQ ID NO: 171435 - RNA, 23 nt, Artificial Sequence
  Synthetic
ucagcuguuuugugccguuaaaa

SEQ ID NO: 171436 - RNA, 24 nt, Artificial Sequence
  Synthetic
cucagcuguuuugugccguuaaaa

SEQ ID NO: 171437 - RNA, 18 nt, Artificial Sequence
  Synthetic
gugaauggcagguuaaaa

SEQ ID NO: 171438 - RNA, 19 nt, Artificial Sequence
  Synthetic
agugaauggcagguuaaaa

SEQ ID NO: 171439 - RNA, 20 nt, Artificial Sequence
  Synthetic
aagugaauggcagguuaaaa

SEQ ID NO: 171440 - RNA, 21 nt, Artificial Sequence
  Synthetic
caagugaauggcagguuaaaa

SEQ ID NO: 171441 - RNA, 22 nt, Artificial Sequence
  Synthetic
ccaagugaauggcagguuaaaa

SEQ ID NO: 171442 - RNA, 23 nt, Artificial Sequence
  Synthetic
cccaagugaauggcagguuaaaa

SEQ ID NO: 171443 - RNA, 24 nt, Artificial Sequence
  Synthetic
ucccaagugaauggcagguuaaaa

SEQ ID NO: 171444 - RNA, 18 nt, Artificial Sequence
  Synthetic
ggguauauaugguuaaaa

SEQ ID NO: 171445 - RNA, 19 nt, Artificial Sequence
  Synthetic
gggguauauaugguuaaaa

SEQ ID NO: 171446 - RNA, 20 nt, Artificial Sequence
  Synthetic
ugggguauauaugguuaaaa

SEQ ID NO: 171447 - RNA, 21 nt, Artificial Sequence
  Synthetic
uugggguauauaugguuaaaa

SEQ ID NO: 171448 - RNA, 22 nt, Artificial Sequence
  Synthetic
uuugggguauauaugguuaaaa

SEQ ID NO: 171449 - RNA, 23 nt, Artificial Sequence
  Synthetic
cuuugggguauauaugguuaaaa

SEQ ID NO: 171450 - RNA, 24 nt, Artificial Sequence
  Synthetic
ucuuugggguauauaugguuaaaa

SEQ ID NO: 171451 - RNA, 18 nt, Artificial Sequence
  Synthetic
uaacaguccguguuaaaa

SEQ ID NO: 171452 - RNA, 19 nt, Artificial Sequence
  Synthetic
guaacaguccguguuaaaa

SEQ ID NO: 171453 - RNA, 20 nt, Artificial Sequence
  Synthetic
uguaacaguccguguuaaaa

SEQ ID NO: 171454 - RNA, 21 nt, Artificial Sequence
  Synthetic
auguaacaguccguguuaaaa

SEQ ID NO: 171455 - RNA, 22 nt, Artificial Sequence
  Synthetic
aauguaacaguccguguuaaaa

SEQ ID NO: 171456 - RNA, 23 nt, Artificial Sequence
  Synthetic
aaauguaacaguccguguuaaaa

SEQ ID NO: 171457 - RNA, 24 nt, Artificial Sequence
  Synthetic
aaaauguaacaguccguguuaaaa

SEQ ID NO: 171458 - RNA, 18 nt, Artificial Sequence
  Synthetic
uaagacugcaauuuaaaa

SEQ ID NO: 171459 - RNA, 19 nt, Artificial Sequence
  Synthetic
guaagacugcaauuuaaaa

SEQ ID NO: 171460 - RNA, 20 nt, Artificial Sequence
  Synthetic
uguaagacugcaauuuaaaa

SEQ ID NO: 171461 - RNA, 21 nt, Artificial Sequence
  Synthetic
cuguaagacugcaauuuaaaa

SEQ ID NO: 171462 - RNA, 22 nt, Artificial Sequence
  Synthetic
ucuguaagacugcaauuuaaaa

SEQ ID NO: 171463 - RNA, 23 nt, Artificial Sequence
  Synthetic
aucuguaagacugcaauuuaaaa

SEQ ID NO: 171464 - RNA, 24 nt, Artificial Sequence
  Synthetic
gaucuguaagacugcaauuuaaaa

SEQ ID NO: 171465 - RNA, 18 nt, Artificial Sequence
  Synthetic
uggguuaaagauuuaaaa

SEQ ID NO: 171466 - RNA, 19 nt, Artificial Sequence
  Synthetic
cuggguuaaagauuuaaaa

SEQ ID NO: 171467 - RNA, 20 nt, Artificial Sequence
  Synthetic
ucuggguuaaagauuuaaaa

SEQ ID NO: 171468 - RNA, 21 nt, Artificial Sequence
  Synthetic
aucuggguuaaagauuuaaaa

SEQ ID NO: 171469 - RNA, 22 nt, Artificial Sequence
  Synthetic
gaucuggguuaaagauuuaaaa

SEQ ID NO: 171470 - RNA, 23 nt, Artificial Sequence
  Synthetic
agaucuggguuaaagauuuaaaa

SEQ ID NO: 171471 - RNA, 24 nt, Artificial Sequence
  Synthetic
aagaucuggguuaaagauuuaaaa

SEQ ID NO: 171472 - RNA, 18 nt, Artificial Sequence
  Synthetic
guggacugugauuuaaaa

SEQ ID NO: 171473 - RNA, 19 nt, Artificial Sequence
  Synthetic
uguggacugugauuuaaaa

SEQ ID NO: 171474 - RNA, 20 nt, Artificial Sequence
  Synthetic
cuguggacugugauuuaaaa

SEQ ID NO: 171475 - RNA, 21 nt, Artificial Sequence
  Synthetic
acuguggacugugauuuaaaa

SEQ ID NO: 171476 - RNA, 22 nt, Artificial Sequence
  Synthetic
aacuguggacugugauuuaaaa

SEQ ID NO: 171477 - RNA, 23 nt, Artificial Sequence
  Synthetic
gaacuguggacugugauuuaaaa

SEQ ID NO: 171478 - RNA, 24 nt, Artificial Sequence
  Synthetic
ugaacuguggacugugauuuaaaa

SEQ ID NO: 171479 - RNA, 18 nt, Artificial Sequence
  Synthetic
aaauaccuauauuuaaaa

SEQ ID NO: 171480 - RNA, 19 nt, Artificial Sequence
  Synthetic
uaaauaccuauauuuaaaa

SEQ ID NO: 171481 - RNA, 20 nt, Artificial Sequence
  Synthetic
auaaauaccuauauuuaaaa

SEQ ID NO: 171482 - RNA, 21 nt, Artificial Sequence
  Synthetic
uauaaauaccuauauuuaaaa

SEQ ID NO: 171483 - RNA, 22 nt, Artificial Sequence
  Synthetic
cuauaaauaccuauauuuaaaa

SEQ ID NO: 171484 - RNA, 23 nt, Artificial Sequence
  Synthetic
acuauaaauaccuauauuuaaaa

SEQ ID NO: 171485 - RNA, 24 nt, Artificial Sequence
  Synthetic
aacuauaaauaccuauauuuaaaa

SEQ ID NO: 171486 - RNA, 18 nt, Artificial Sequence
  Synthetic
ccccugcacuauuuaaaa

SEQ ID NO: 171487 - RNA, 19 nt, Artificial Sequence
  Synthetic
gccccugcacuauuuaaaa

SEQ ID NO: 171488 - RNA, 20 nt, Artificial Sequence
  Synthetic
agccccugcacuauuuaaaa

SEQ ID NO: 171489 - RNA, 21 nt, Artificial Sequence
  Synthetic
cagccccugcacuauuuaaaa

SEQ ID NO: 171490 - RNA, 22 nt, Artificial Sequence
  Synthetic
ccagccccugcacuauuuaaaa

SEQ ID NO: 171491 - RNA, 23 nt, Artificial Sequence
  Synthetic
cccagccccugcacuauuuaaaa

SEQ ID NO: 171492 - RNA, 24 nt, Artificial Sequence
  Synthetic
gcccagccccugcacuauuuaaaa

SEQ ID NO: 171493 - RNA, 18 nt, Artificial Sequence
  Synthetic
uuuucacauuauuuaaaa

SEQ ID NO: 171494 - RNA, 19 nt, Artificial Sequence
  Synthetic
guuuucacauuauuuaaaa

SEQ ID NO: 171495 - RNA, 20 nt, Artificial Sequence
  Synthetic
aguuuucacauuauuuaaaa

SEQ ID NO: 171496 - RNA, 21 nt, Artificial Sequence
  Synthetic
uaguuuucacauuauuuaaaa

SEQ ID NO: 171497 - RNA, 22 nt, Artificial Sequence
  Synthetic
uuaguuuucacauuauuuaaaa

SEQ ID NO: 171498 - RNA, 23 nt, Artificial Sequence
  Synthetic
cuuaguuuucacauuauuuaaaa

SEQ ID NO: 171499 - RNA, 24 nt, Artificial Sequence
  Synthetic
ucuuaguuuucacauuauuuaaaa

SEQ ID NO: 171500 - RNA, 18 nt, Artificial Sequence
  Synthetic
caguugucuacuuuaaaa

SEQ ID NO: 171501 - RNA, 19 nt, Artificial Sequence
  Synthetic
acaguugucuacuuuaaaa

SEQ ID NO: 171502 - RNA, 20 nt, Artificial Sequence
  Synthetic
gacaguugucuacuuuaaaa

SEQ ID NO: 171503 - RNA, 21 nt, Artificial Sequence
  Synthetic
cgacaguugucuacuuuaaaa

SEQ ID NO: 171504 - RNA, 22 nt, Artificial Sequence
  Synthetic
ccgacaguugucuacuuuaaaa

SEQ ID NO: 171505 - RNA, 23 nt, Artificial Sequence
  Synthetic
uccgacaguugucuacuuuaaaa

SEQ ID NO: 171506 - RNA, 24 nt, Artificial Sequence
  Synthetic
uuccgacaguugucuacuuuaaaa

SEQ ID NO: 171507 - RNA, 18 nt, Artificial Sequence
  Synthetic
uaugucuguacuuuaaaa

SEQ ID NO: 171508 - RNA, 19 nt, Artificial Sequence
  Synthetic
cuaugucuguacuuuaaaa

SEQ ID NO: 171509 - RNA, 20 nt, Artificial Sequence
  Synthetic
acuaugucuguacuuuaaaa

SEQ ID NO: 171510 - RNA, 21 nt, Artificial Sequence
  Synthetic
cacuaugucuguacuuuaaaa

SEQ ID NO: 171511 - RNA, 22 nt, Artificial Sequence
  Synthetic
gcacuaugucuguacuuuaaaa

SEQ ID NO: 171512 - RNA, 23 nt, Artificial Sequence
  Synthetic
ggcacuaugucuguacuuuaaaa

SEQ ID NO: 171513 - RNA, 24 nt, Artificial Sequence
  Synthetic
aggcacuaugucuguacuuuaaaa

SEQ ID NO: 171514 - RNA, 18 nt, Artificial Sequence
  Synthetic
uuccucaaaccuuuaaaa

SEQ ID NO: 171515 - RNA, 19 nt, Artificial Sequence
  Synthetic
guuccucaaaccuuuaaaa

SEQ ID NO: 171516 - RNA, 20 nt, Artificial Sequence
  Synthetic
aguuccucaaaccuuuaaaa

SEQ ID NO: 171517 - RNA, 21 nt, Artificial Sequence
  Synthetic
gaguuccucaaaccuuuaaaa

SEQ ID NO: 171518 - RNA, 22 nt, Artificial Sequence
  Synthetic
ugaguuccucaaaccuuuaaaa

SEQ ID NO: 171519 - RNA, 23 nt, Artificial Sequence
  Synthetic
uugaguuccucaaaccuuuaaaa

SEQ ID NO: 171520 - RNA, 24 nt, Artificial Sequence
  Synthetic
guugaguuccucaaaccuuuaaaa

SEQ ID NO: 171521 - RNA, 18 nt, Artificial Sequence
  Synthetic
aauccacaugcuuuaaaa

SEQ ID NO: 171522 - RNA, 19 nt, Artificial Sequence
  Synthetic
aaauccacaugcuuuaaaa

SEQ ID NO: 171523 - RNA, 20 nt, Artificial Sequence
  Synthetic
aaaauccacaugcuuuaaaa

SEQ ID NO: 171524 - RNA, 21 nt, Artificial Sequence
  Synthetic
uaaaauccacaugcuuuaaaa

SEQ ID NO: 171525 - RNA, 22 nt, Artificial Sequence
  Synthetic
guaaaauccacaugcuuuaaaa

SEQ ID NO: 171526 - RNA, 23 nt, Artificial Sequence
  Synthetic
aguaaaauccacaugcuuuaaaa

SEQ ID NO: 171527 - RNA, 24 nt, Artificial Sequence
  Synthetic
aaguaaaauccacaugcuuuaaaa

SEQ ID NO: 171528 - RNA, 18 nt, Artificial Sequence
  Synthetic
gcuaugggcucuuuaaaa

SEQ ID NO: 171529 - RNA, 19 nt, Artificial Sequence
  Synthetic
ggcuaugggcucuuuaaaa

SEQ ID NO: 171530 - RNA, 20 nt, Artificial Sequence
  Synthetic
aggcuaugggcucuuuaaaa

SEQ ID NO: 171531 - RNA, 21 nt, Artificial Sequence
  Synthetic
aaggcuaugggcucuuuaaaa

SEQ ID NO: 171532 - RNA, 22 nt, Artificial Sequence
  Synthetic
gaaggcuaugggcucuuuaaaa

SEQ ID NO: 171533 - RNA, 23 nt, Artificial Sequence
  Synthetic
agaaggcuaugggcucuuuaaaa

SEQ ID NO: 171534 - RNA, 24 nt, Artificial Sequence
  Synthetic
cagaaggcuaugggcucuuuaaaa

SEQ ID NO: 171535 - RNA, 18 nt, Artificial Sequence
  Synthetic
aguagaugaaguuuaaaa

SEQ ID NO: 171536 - RNA, 19 nt, Artificial Sequence
  Synthetic
aaguagaugaaguuuaaaa

SEQ ID NO: 171537 - RNA, 20 nt, Artificial Sequence
  Synthetic
aaaguagaugaaguuuaaaa

SEQ ID NO: 171538 - RNA, 21 nt, Artificial Sequence
  Synthetic
aaaaguagaugaaguuuaaaa

SEQ ID NO: 171539 - RNA, 22 nt, Artificial Sequence
  Synthetic
aaaaaguagaugaaguuuaaaa

SEQ ID NO: 171540 - RNA, 23 nt, Artificial Sequence
  Synthetic
caaaaaguagaugaaguuuaaaa

SEQ ID NO: 171541 - RNA, 24 nt, Artificial Sequence
  Synthetic
ucaaaaaguagaugaaguuuaaaa

SEQ ID NO: 171542 - RNA, 18 nt, Artificial Sequence
  Synthetic
ggcuaggucuguuuaaaa

SEQ ID NO: 171543 - RNA, 19 nt, Artificial Sequence
  Synthetic
uggcuaggucuguuuaaaa

SEQ ID NO: 171544 - RNA, 20 nt, Artificial Sequence
  Synthetic
auggcuaggucuguuuaaaa

SEQ ID NO: 171545 - RNA, 21 nt, Artificial Sequence
  Synthetic
cauggcuaggucuguuuaaaa

SEQ ID NO: 171546 - RNA, 22 nt, Artificial Sequence
  Synthetic
acauggcuaggucuguuuaaaa

SEQ ID NO: 171547 - RNA, 23 nt, Artificial Sequence
  Synthetic
uacauggcuaggucuguuuaaaa

SEQ ID NO: 171548 - RNA, 24 nt, Artificial Sequence
  Synthetic
guacauggcuaggucuguuuaaaa

SEQ ID NO: 171549 - RNA, 18 nt, Artificial Sequence
  Synthetic
accauaguuuguuuaaaa

SEQ ID NO: 171550 - RNA, 19 nt, Artificial Sequence
  Synthetic
aaccauaguuuguuuaaaa

SEQ ID NO: 171551 - RNA, 20 nt, Artificial Sequence
  Synthetic
caaccauaguuuguuuaaaa

SEQ ID NO: 171552 - RNA, 21 nt, Artificial Sequence
  Synthetic
ccaaccauaguuuguuuaaaa

SEQ ID NO: 171553 - RNA, 22 nt, Artificial Sequence
  Synthetic
uccaaccauaguuuguuuaaaa

SEQ ID NO: 171554 - RNA, 23 nt, Artificial Sequence
  Synthetic
auccaaccauaguuuguuuaaaa

SEQ ID NO: 171555 - RNA, 24 nt, Artificial Sequence
  Synthetic
uauccaaccauaguuuguuuaaaa

SEQ ID NO: 171556 - RNA, 18 nt, Artificial Sequence
  Synthetic
accauagaaauuuuaaaa

SEQ ID NO: 171557 - RNA, 19 nt, Artificial Sequence
  Synthetic
uaccauagaaauuuuaaaa

SEQ ID NO: 171558 - RNA, 20 nt, Artificial Sequence
  Synthetic
guaccauagaaauuuuaaaa

SEQ ID NO: 171559 - RNA, 21 nt, Artificial Sequence
  Synthetic
aguaccauagaaauuuuaaaa

SEQ ID NO: 171560 - RNA, 22 nt, Artificial Sequence
  Synthetic
aaguaccauagaaauuuuaaaa

SEQ ID NO: 171561 - RNA, 23 nt, Artificial Sequence
  Synthetic
aaaguaccauagaaauuuuaaaa

SEQ ID NO: 171562 - RNA, 24 nt, Artificial Sequence
  Synthetic
aaaaguaccauagaaauuuuaaaa

SEQ ID NO: 171563 - RNA, 18 nt, Artificial Sequence
  Synthetic
guuugcugaauuuuaaaa

SEQ ID NO: 171564 - RNA, 19 nt, Artificial Sequence
  Synthetic
uguuugcugaauuuuaaaa

SEQ ID NO: 171565 - RNA, 20 nt, Artificial Sequence
  Synthetic
cuguuugcugaauuuuaaaa

SEQ ID NO: 171566 - RNA, 21 nt, Artificial Sequence
  Synthetic
ucuguuugcugaauuuuaaaa

SEQ ID NO: 171567 - RNA, 22 nt, Artificial Sequence
  Synthetic
aucuguuugcugaauuuuaaaa

SEQ ID NO: 171568 - RNA, 23 nt, Artificial Sequence
  Synthetic
aaucuguuugcugaauuuuaaaa

SEQ ID NO: 171569 - RNA, 24 nt, Artificial Sequence
  Synthetic
aaaucuguuugcugaauuuuaaaa

SEQ ID NO: 171570 - RNA, 18 nt, Artificial Sequence
  Synthetic
cagacuucuauuuuaaaa

SEQ ID NO: 171571 - RNA, 19 nt, Artificial Sequence
  Synthetic
ucagacuucuauuuuaaaa

SEQ ID NO: 171572 - RNA, 20 nt, Artificial Sequence
  Synthetic
cucagacuucuauuuuaaaa

SEQ ID NO: 171573 - RNA, 21 nt, Artificial Sequence
  Synthetic
gcucagacuucuauuuuaaaa

SEQ ID NO: 171574 - RNA, 22 nt, Artificial Sequence
  Synthetic
ggcucagacuucuauuuuaaaa

SEQ ID NO: 171575 - RNA, 23 nt, Artificial Sequence
  Synthetic
uggcucagacuucuauuuuaaaa

SEQ ID NO: 171576 - RNA, 24 nt, Artificial Sequence
  Synthetic
uuggcucagacuucuauuuuaaaa

SEQ ID NO: 171577 - RNA, 18 nt, Artificial Sequence
  Synthetic
uccaaaauuauuuuaaaa

SEQ ID NO: 171578 - RNA, 19 nt, Artificial Sequence
  Synthetic
uuccaaaauuauuuuaaaa

SEQ ID NO: 171579 - RNA, 20 nt, Artificial Sequence
  Synthetic
auuccaaaauuauuuuaaaa

SEQ ID NO: 171580 - RNA, 21 nt, Artificial Sequence
  Synthetic
gauuccaaaauuauuuuaaaa

SEQ ID NO: 171581 - RNA, 22 nt, Artificial Sequence
  Synthetic
agauuccaaaauuauuuuaaaa

SEQ ID NO: 171582 - RNA, 23 nt, Artificial Sequence
  Synthetic
aagauuccaaaauuauuuuaaaa

SEQ ID NO: 171583 - RNA, 24 nt, Artificial Sequence
  Synthetic
uaagauuccaaaauuauuuuaaaa

SEQ ID NO: 171584 - RNA, 18 nt, Artificial Sequence
  Synthetic
uaaacuuuccuuuuaaaa

SEQ ID NO: 171585 - RNA, 19 nt, Artificial Sequence
  Synthetic
auaaacuuuccuuuuaaaa

SEQ ID NO: 171586 - RNA, 20 nt, Artificial Sequence
  Synthetic
uauaaacuuuccuuuuaaaa

SEQ ID NO: 171587 - RNA, 21 nt, Artificial Sequence
  Synthetic
auauaaacuuuccuuuuaaaa

SEQ ID NO: 171588 - RNA, 22 nt, Artificial Sequence
  Synthetic
uauauaaacuuuccuuuuaaaa

SEQ ID NO: 171589 - RNA, 23 nt, Artificial Sequence
  Synthetic
uuauauaaacuuuccuuuuaaaa

SEQ ID NO: 171590 - RNA, 24 nt, Artificial Sequence
  Synthetic
uuuauauaaacuuuccuuuuaaaa

SEQ ID NO: 171591 - RNA, 18 nt, Artificial Sequence
  Synthetic
cuauuuuuucuuuuaaaa

SEQ ID NO: 171592 - RNA, 19 nt, Artificial Sequence
  Synthetic
gcuauuuuuucuuuuaaaa

SEQ ID NO: 171593 - RNA, 20 nt, Artificial Sequence
  Synthetic
ugcuauuuuuucuuuuaaaa

SEQ ID NO: 171594 - RNA, 21 nt, Artificial Sequence
  Synthetic
uugcuauuuuuucuuuuaaaa

SEQ ID NO: 171595 - RNA, 22 nt, Artificial Sequence
  Synthetic
cuugcuauuuuuucuuuuaaaa

SEQ ID NO: 171596 - RNA, 23 nt, Artificial Sequence
  Synthetic
ccuugcuauuuuuucuuuuaaaa

SEQ ID NO: 171597 - RNA, 24 nt, Artificial Sequence
  Synthetic
uccuugcuauuuuuucuuuuaaaa

SEQ ID NO: 171598 - RNA, 18 nt, Artificial Sequence
  Synthetic
uuaaguacauuuuuaaaa

SEQ ID NO: 171599 - RNA, 19 nt, Artificial Sequence
  Synthetic
auuaaguacauuuuuaaaa

SEQ ID NO: 171600 - RNA, 20 nt, Artificial Sequence
  Synthetic
aauuaaguacauuuuuaaaa

SEQ ID NO: 171601 - RNA, 21 nt, Artificial Sequence
  Synthetic
aaauuaaguacauuuuuaaaa

SEQ ID NO: 171602 - RNA, 22 nt, Artificial Sequence
  Synthetic
aaaauuaaguacauuuuuaaaa

SEQ ID NO: 171603 - RNA, 23 nt, Artificial Sequence
  Synthetic
aaaaauuaaguacauuuuuaaaa

SEQ ID NO: 171604 - RNA, 24 nt, Artificial Sequence
  Synthetic
aaaaaauuaaguacauuuuuaaaa

SEQ ID NO: 171605 - RNA, 18 nt, Artificial Sequence
  Synthetic
uauagucuuuuuuuaaaa

SEQ ID NO: 171606 - RNA, 19 nt, Artificial Sequence
  Synthetic
auauagucuuuuuuuaaaa

SEQ ID NO: 171607 - RNA, 20 nt, Artificial Sequence
  Synthetic
uauauagucuuuuuuuaaaa

SEQ ID NO: 171608 - RNA, 21 nt, Artificial Sequence
  Synthetic
guauauagucuuuuuuuaaaa

SEQ ID NO: 171609 - RNA, 22 nt, Artificial Sequence
  Synthetic
gguauauagucuuuuuuuaaaa

SEQ ID NO: 171610 - RNA, 23 nt, Artificial Sequence
  Synthetic
agguauauagucuuuuuuuaaaa

SEQ ID NO: 171611 - RNA, 24 nt, Artificial Sequence
  Synthetic
uagguauauagucuuuuuuuaaaa

SEQ ID NO: 171612 - RNA, 18 nt, Artificial Sequence
  Synthetic
guuaaaaaacaaaacaaa

SEQ ID NO: 171613 - RNA, 19 nt, Artificial Sequence
  Synthetic
aguuaaaaaacaaaacaaa

SEQ ID NO: 171614 - RNA, 20 nt, Artificial Sequence
  Synthetic
aaguuaaaaaacaaaacaaa

SEQ ID NO: 171615 - RNA, 21 nt, Artificial Sequence
  Synthetic
uaaguuaaaaaacaaaacaaa

SEQ ID NO: 171616 - RNA, 22 nt, Artificial Sequence
  Synthetic
uuaaguuaaaaaacaaaacaaa

SEQ ID NO: 171617 - RNA, 23 nt, Artificial Sequence
  Synthetic
uuuaaguuaaaaaacaaaacaaa

SEQ ID NO: 171618 - RNA, 24 nt, Artificial Sequence
  Synthetic
uuuuaaguuaaaaaacaaaacaaa

SEQ ID NO: 171619 - RNA, 18 nt, Artificial Sequence
  Synthetic
guuaccagccaaaacaaa

SEQ ID NO: 171620 - RNA, 19 nt, Artificial Sequence
  Synthetic
uguuaccagccaaaacaaa

SEQ ID NO: 171621 - RNA, 20 nt, Artificial Sequence
  Synthetic
auguuaccagccaaaacaaa

SEQ ID NO: 171622 - RNA, 21 nt, Artificial Sequence
  Synthetic
aauguuaccagccaaaacaaa

SEQ ID NO: 171623 - RNA, 22 nt, Artificial Sequence
  Synthetic
aaauguuaccagccaaaacaaa

SEQ ID NO: 171624 - RNA, 23 nt, Artificial Sequence
  Synthetic
gaaauguuaccagccaaaacaaa

SEQ ID NO: 171625 - RNA, 24 nt, Artificial Sequence
  Synthetic
ugaaauguuaccagccaaaacaaa

SEQ ID NO: 171626 - RNA, 18 nt, Artificial Sequence
  Synthetic
agaaauaaagaaaacaaa

SEQ ID NO: 171627 - RNA, 19 nt, Artificial Sequence
  Synthetic
gagaaauaaagaaaacaaa

SEQ ID NO: 171628 - RNA, 20 nt, Artificial Sequence
  Synthetic
ugagaaauaaagaaaacaaa

SEQ ID NO: 171629 - RNA, 21 nt, Artificial Sequence
  Synthetic
augagaaauaaagaaaacaaa

SEQ ID NO: 171630 - RNA, 22 nt, Artificial Sequence
  Synthetic
aaugagaaauaaagaaaacaaa

SEQ ID NO: 171631 - RNA, 23 nt, Artificial Sequence
  Synthetic
gaaugagaaauaaagaaaacaaa

SEQ ID NO: 171632 - RNA, 24 nt, Artificial Sequence
  Synthetic
agaaugagaaauaaagaaaacaaa

SEQ ID NO: 171633 - RNA, 18 nt, Artificial Sequence
  Synthetic
acuccaaaugaaaacaaa

SEQ ID NO: 171634 - RNA, 19 nt, Artificial Sequence
  Synthetic
uacuccaaaugaaaacaaa

SEQ ID NO: 171635 - RNA, 20 nt, Artificial Sequence
  Synthetic
auacuccaaaugaaaacaaa

SEQ ID NO: 171636 - RNA, 21 nt, Artificial Sequence
  Synthetic
aauacuccaaaugaaaacaaa

SEQ ID NO: 171637 - RNA, 22 nt, Artificial Sequence
  Synthetic
aaauacuccaaaugaaaacaaa

SEQ ID NO: 171638 - RNA, 23 nt, Artificial Sequence
  Synthetic
uaaauacuccaaaugaaaacaaa

SEQ ID NO: 171639 - RNA, 24 nt, Artificial Sequence
  Synthetic
auaaauacuccaaaugaaaacaaa

SEQ ID NO: 171640 - RNA, 18 nt, Artificial Sequence
  Synthetic
uucaguggcuaaaacaaa

SEQ ID NO: 171641 - RNA, 19 nt, Artificial Sequence
  Synthetic
cuucaguggcuaaaacaaa

SEQ ID NO: 171642 - RNA, 20 nt, Artificial Sequence
  Synthetic
acuucaguggcuaaaacaaa

SEQ ID NO: 171643 - RNA, 21 nt, Artificial Sequence
  Synthetic
uacuucaguggcuaaaacaaa

SEQ ID NO: 171644 - RNA, 22 nt, Artificial Sequence
  Synthetic
uuacuucaguggcuaaaacaaa

SEQ ID NO: 171645 - RNA, 23 nt, Artificial Sequence
  Synthetic
auuacuucaguggcuaaaacaaa

SEQ ID NO: 171646 - RNA, 24 nt, Artificial Sequence
  Synthetic
uauuacuucaguggcuaaaacaaa

SEQ ID NO: 171647 - RNA, 18 nt, Artificial Sequence
  Synthetic
caaaacaaaacaaacaaa

SEQ ID NO: 171648 - RNA, 19 nt, Artificial Sequence
  Synthetic
acaaaacaaaacaaacaaa

SEQ ID NO: 171649 - RNA, 20 nt, Artificial Sequence
  Synthetic
aacaaaacaaaacaaacaaa

SEQ ID NO: 171650 - RNA, 21 nt, Artificial Sequence
  Synthetic
gaacaaaacaaaacaaacaaa

SEQ ID NO: 171651 - RNA, 22 nt, Artificial Sequence
  Synthetic
agaacaaaacaaaacaaacaaa

SEQ ID NO: 171652 - RNA, 23 nt, Artificial Sequence
  Synthetic
cagaacaaaacaaaacaaacaaa

SEQ ID NO: 171653 - RNA, 24 nt, Artificial Sequence
  Synthetic
gcagaacaaaacaaaacaaacaaa

SEQ ID NO: 171654 - RNA, 18 nt, Artificial Sequence
  Synthetic
auagauaacacaaacaaa

SEQ ID NO: 171655 - RNA, 19 nt, Artificial Sequence
  Synthetic
cauagauaacacaaacaaa

SEQ ID NO: 171656 - RNA, 20 nt, Artificial Sequence
  Synthetic
ccauagauaacacaaacaaa

SEQ ID NO: 171657 - RNA, 21 nt, Artificial Sequence
  Synthetic
accauagauaacacaaacaaa

SEQ ID NO: 171658 - RNA, 22 nt, Artificial Sequence
  Synthetic
aaccauagauaacacaaacaaa

SEQ ID NO: 171659 - RNA, 23 nt, Artificial Sequence
  Synthetic
aaaccauagauaacacaaacaaa

SEQ ID NO: 171660 - RNA, 24 nt, Artificial Sequence
  Synthetic
gaaaccauagauaacacaaacaaa

SEQ ID NO: 171661 - RNA, 18 nt, Artificial Sequence
  Synthetic
aaagaggacacaaacaaa

SEQ ID NO: 171662 - RNA, 19 nt, Artificial Sequence
  Synthetic
aaaagaggacacaaacaaa

SEQ ID NO: 171663 - RNA, 20 nt, Artificial Sequence
  Synthetic
uaaaagaggacacaaacaaa

SEQ ID NO: 171664 - RNA, 18 nt, Artificial Sequence
  Synthetic
gaggacaccacaaacaaa

SEQ ID NO: 171665 - RNA, 19 nt, Artificial Sequence
  Synthetic
agaggacaccacaaacaaa

SEQ ID NO: 171666 - RNA, 20 nt, Artificial Sequence
  Synthetic
gagaggacaccacaaacaaa

SEQ ID NO: 171667 - RNA, 21 nt, Artificial Sequence
  Synthetic
agagaggacaccacaaacaaa

SEQ ID NO: 171668 - RNA, 22 nt, Artificial Sequence
  Synthetic
gagagaggacaccacaaacaaa

SEQ ID NO: 171669 - RNA, 23 nt, Artificial Sequence
  Synthetic
ugagagaggacaccacaaacaaa

SEQ ID NO: 171670 - RNA, 24 nt, Artificial Sequence
  Synthetic
augagagaggacaccacaaacaaa

SEQ ID NO: 171671 - RNA, 18 nt, Artificial Sequence
  Synthetic
aaagaggauacaaacaaa

SEQ ID NO: 171672 - RNA, 19 nt, Artificial Sequence
  Synthetic
aaaagaggauacaaacaaa

SEQ ID NO: 171673 - RNA, 20 nt, Artificial Sequence
  Synthetic
uaaaagaggauacaaacaaa

SEQ ID NO: 171674 - RNA, 18 nt, Artificial Sequence
  Synthetic
ucuugaucaccaaacaaa

SEQ ID NO: 171675 - RNA, 19 nt, Artificial Sequence
  Synthetic
cucuugaucaccaaacaaa

SEQ ID NO: 171676 - RNA, 20 nt, Artificial Sequence
  Synthetic
gcucuugaucaccaaacaaa

SEQ ID NO: 171677 - RNA, 21 nt, Artificial Sequence
  Synthetic
agcucuugaucaccaaacaaa

SEQ ID NO: 171678 - RNA, 22 nt, Artificial Sequence
  Synthetic
uagcucuugaucaccaaacaaa

SEQ ID NO: 171679 - RNA, 23 nt, Artificial Sequence
  Synthetic
guagcucuugaucaccaaacaaa

SEQ ID NO: 171680 - RNA, 24 nt, Artificial Sequence
  Synthetic
aguagcucuugaucaccaaacaaa

SEQ ID NO: 171681 - RNA, 18 nt, Artificial Sequence
  Synthetic
uaaguuccaucaaacaaa

SEQ ID NO: 171682 - RNA, 19 nt, Artificial Sequence
  Synthetic
uuaaguuccaucaaacaaa

SEQ ID NO: 171683 - RNA, 20 nt, Artificial Sequence
  Synthetic
uuuaaguuccaucaaacaaa

SEQ ID NO: 171684 - RNA, 21 nt, Artificial Sequence
  Synthetic
auuuaaguuccaucaaacaaa

SEQ ID NO: 171685 - RNA, 22 nt, Artificial Sequence
  Synthetic
aauuuaaguuccaucaaacaaa

SEQ ID NO: 171686 - RNA, 23 nt, Artificial Sequence
  Synthetic
uaauuuaaguuccaucaaacaaa

SEQ ID NO: 171687 - RNA, 24 nt, Artificial Sequence
  Synthetic
auaauuuaaguuccaucaaacaaa

SEQ ID NO: 171688 - RNA, 18 nt, Artificial Sequence
  Synthetic
ugacaauauucaaacaaa

SEQ ID NO: 171689 - RNA, 19 nt, Artificial Sequence
  Synthetic
cugacaauauucaaacaaa

SEQ ID NO: 171690 - RNA, 20 nt, Artificial Sequence
  Synthetic
ucugacaauauucaaacaaa

SEQ ID NO: 171691 - RNA, 21 nt, Artificial Sequence
  Synthetic
uucugacaauauucaaacaaa

SEQ ID NO: 171692 - RNA, 22 nt, Artificial Sequence
  Synthetic
cuucugacaauauucaaacaaa

SEQ ID NO: 171693 - RNA, 23 nt, Artificial Sequence
  Synthetic
ucuucugacaauauucaaacaaa

SEQ ID NO: 171694 - RNA, 24 nt, Artificial Sequence
  Synthetic
gucuucugacaauauucaaacaaa

SEQ ID NO: 171695 - RNA, 18 nt, Artificial Sequence
  Synthetic
gcaaguaguagaaacaaa

SEQ ID NO: 171696 - RNA, 19 nt, Artificial Sequence
  Synthetic
ugcaaguaguagaaacaaa

SEQ ID NO: 171697 - RNA, 20 nt, Artificial Sequence
  Synthetic
uugcaaguaguagaaacaaa

SEQ ID NO: 171698 - RNA, 21 nt, Artificial Sequence
  Synthetic
auugcaaguaguagaaacaaa

SEQ ID NO: 171699 - RNA, 22 nt, Artificial Sequence
  Synthetic
uauugcaaguaguagaaacaaa

SEQ ID NO: 171700 - RNA, 23 nt, Artificial Sequence
  Synthetic
auauugcaaguaguagaaacaaa

SEQ ID NO: 171701 - RNA, 24 nt, Artificial Sequence
  Synthetic
gauauugcaaguaguagaaacaaa

SEQ ID NO: 171702 - RNA, 18 nt, Artificial Sequence
  Synthetic
gcacaggaaggaaacaaa

SEQ ID NO: 171703 - RNA, 19 nt, Artificial Sequence
  Synthetic
ugcacaggaaggaaacaaa

SEQ ID NO: 171704 - RNA, 20 nt, Artificial Sequence
  Synthetic
gugcacaggaaggaaacaaa

SEQ ID NO: 171705 - RNA, 21 nt, Artificial Sequence
  Synthetic
ggugcacaggaaggaaacaaa

SEQ ID NO: 171706 - RNA, 22 nt, Artificial Sequence
  Synthetic
aggugcacaggaaggaaacaaa

SEQ ID NO: 171707 - RNA, 23 nt, Artificial Sequence
  Synthetic
caggugcacaggaaggaaacaaa

SEQ ID NO: 171708 - RNA, 24 nt, Artificial Sequence
  Synthetic
ucaggugcacaggaaggaaacaaa

SEQ ID NO: 171709 - RNA, 18 nt, Artificial Sequence
  Synthetic
accagucugggaaacaaa

SEQ ID NO: 171710 - RNA, 19 nt, Artificial Sequence
  Synthetic
gaccagucugggaaacaaa

SEQ ID NO: 171711 - RNA, 20 nt, Artificial Sequence
  Synthetic
agaccagucugggaaacaaa

SEQ ID NO: 171712 - RNA, 21 nt, Artificial Sequence
  Synthetic
gagaccagucugggaaacaaa

SEQ ID NO: 171713 - RNA, 22 nt, Artificial Sequence
  Synthetic
ugagaccagucugggaaacaaa

SEQ ID NO: 171714 - RNA, 23 nt, Artificial Sequence
  Synthetic
uugagaccagucugggaaacaaa

SEQ ID NO: 171715 - RNA, 24 nt, Artificial Sequence
  Synthetic
uuugagaccagucugggaaacaaa

SEQ ID NO: 171716 - RNA, 18 nt, Artificial Sequence
  Synthetic
uacaauacacacaacaaa

SEQ ID NO: 171717 - RNA, 19 nt, Artificial Sequence
  Synthetic
auacaauacacacaacaaa

SEQ ID NO: 171718 - RNA, 20 nt, Artificial Sequence
  Synthetic
cauacaauacacacaacaaa

SEQ ID NO: 171719 - RNA, 21 nt, Artificial Sequence
  Synthetic
acauacaauacacacaacaaa

SEQ ID NO: 171720 - RNA, 22 nt, Artificial Sequence
  Synthetic
cacauacaauacacacaacaaa

SEQ ID NO: 171721 - RNA, 23 nt, Artificial Sequence
  Synthetic
acacauacaauacacacaacaaa

SEQ ID NO: 171722 - RNA, 24 nt, Artificial Sequence
  Synthetic
gacacauacaauacacacaacaaa

SEQ ID NO: 171723 - RNA, 18 nt, Artificial Sequence
  Synthetic
aauucaagaagcaacaaa

SEQ ID NO: 171724 - RNA, 19 nt, Artificial Sequence
  Synthetic
gaauucaagaagcaacaaa

SEQ ID NO: 171725 - RNA, 20 nt, Artificial Sequence
  Synthetic
agaauucaagaagcaacaaa

SEQ ID NO: 171726 - RNA, 21 nt, Artificial Sequence
  Synthetic
aagaauucaagaagcaacaaa

SEQ ID NO: 171727 - RNA, 22 nt, Artificial Sequence
  Synthetic
aaagaauucaagaagcaacaaa

SEQ ID NO: 171728 - RNA, 23 nt, Artificial Sequence
  Synthetic
aaaagaauucaagaagcaacaaa

SEQ ID NO: 171729 - RNA, 24 nt, Artificial Sequence
  Synthetic
gaaaagaauucaagaagcaacaaa

SEQ ID NO: 171730 - RNA, 18 nt, Artificial Sequence
  Synthetic
guguugaagagcaacaaa

SEQ ID NO: 171731 - RNA, 19 nt, Artificial Sequence
  Synthetic
gguguugaagagcaacaaa

SEQ ID NO: 171732 - RNA, 20 nt, Artificial Sequence
  Synthetic
ugguguugaagagcaacaaa

SEQ ID NO: 171733 - RNA, 21 nt, Artificial Sequence
  Synthetic
cugguguugaagagcaacaaa

SEQ ID NO: 171734 - RNA, 22 nt, Artificial Sequence
  Synthetic
acugguguugaagagcaacaaa

SEQ ID NO: 171735 - RNA, 23 nt, Artificial Sequence
  Synthetic
aacugguguugaagagcaacaaa

SEQ ID NO: 171736 - RNA, 24 nt, Artificial Sequence
  Synthetic
aaacugguguugaagagcaacaaa

SEQ ID NO: 171737 - RNA, 18 nt, Artificial Sequence
  Synthetic
agcaucaacaucaacaaa

SEQ ID NO: 171738 - RNA, 19 nt, Artificial Sequence
  Synthetic
uagcaucaacaucaacaaa

SEQ ID NO: 171739 - RNA, 20 nt, Artificial Sequence
  Synthetic
cuagcaucaacaucaacaaa

SEQ ID NO: 171740 - RNA, 21 nt, Artificial Sequence
  Synthetic
gcuagcaucaacaucaacaaa

SEQ ID NO: 171741 - RNA, 22 nt, Artificial Sequence
  Synthetic
ugcuagcaucaacaucaacaaa

SEQ ID NO: 171742 - RNA, 23 nt, Artificial Sequence
  Synthetic
cugcuagcaucaacaucaacaaa

SEQ ID NO: 171743 - RNA, 24 nt, Artificial Sequence
  Synthetic
acugcuagcaucaacaucaacaaa

SEQ ID NO: 171744 - RNA, 18 nt, Artificial Sequence
  Synthetic
ccccaaaauaucaacaaa

SEQ ID NO: 171745 - RNA, 19 nt, Artificial Sequence
  Synthetic
uccccaaaauaucaacaaa

SEQ ID NO: 171746 - RNA, 20 nt, Artificial Sequence
  Synthetic
cuccccaaaauaucaacaaa

SEQ ID NO: 171747 - RNA, 21 nt, Artificial Sequence
  Synthetic
acuccccaaaauaucaacaaa

SEQ ID NO: 171748 - RNA, 22 nt, Artificial Sequence
  Synthetic
aacuccccaaaauaucaacaaa

SEQ ID NO: 171749 - RNA, 23 nt, Artificial Sequence
  Synthetic
uaacuccccaaaauaucaacaaa

SEQ ID NO: 171750 - RNA, 24 nt, Artificial Sequence
  Synthetic
uuaacuccccaaaauaucaacaaa

SEQ ID NO: 171751 - RNA, 18 nt, Artificial Sequence
  Synthetic
acaguguggaagaacaaa

SEQ ID NO: 171752 - RNA, 19 nt, Artificial Sequence
  Synthetic
cacaguguggaagaacaaa

SEQ ID NO: 171753 - RNA, 20 nt, Artificial Sequence
  Synthetic
acacaguguggaagaacaaa

SEQ ID NO: 171754 - RNA, 21 nt, Artificial Sequence
  Synthetic
cacacaguguggaagaacaaa

SEQ ID NO: 171755 - RNA, 22 nt, Artificial Sequence
  Synthetic
acacacaguguggaagaacaaa

SEQ ID NO: 171756 - RNA, 23 nt, Artificial Sequence
  Synthetic
uacacacaguguggaagaacaaa

SEQ ID NO: 171757 - RNA, 24 nt, Artificial Sequence
  Synthetic
auacacacaguguggaagaacaaa

SEQ ID NO: 171758 - RNA, 18 nt, Artificial Sequence
  Synthetic
auaauaaagcagaacaaa

SEQ ID NO: 171759 - RNA, 19 nt, Artificial Sequence
  Synthetic
aauaauaaagcagaacaaa

SEQ ID NO: 171760 - RNA, 20 nt, Artificial Sequence
  Synthetic
uaauaauaaagcagaacaaa

SEQ ID NO: 171761 - RNA, 21 nt, Artificial Sequence
  Synthetic
auaauaauaaagcagaacaaa

SEQ ID NO: 171762 - RNA, 22 nt, Artificial Sequence
  Synthetic
aauaauaauaaagcagaacaaa

SEQ ID NO: 171763 - RNA, 23 nt, Artificial Sequence
  Synthetic
aaauaauaauaaagcagaacaaa

SEQ ID NO: 171764 - RNA, 24 nt, Artificial Sequence
  Synthetic
gaaauaauaauaaagcagaacaaa

SEQ ID NO: 171765 - RNA, 18 nt, Artificial Sequence
  Synthetic
ucucagaugaggaacaaa

SEQ ID NO: 171766 - RNA, 19 nt, Artificial Sequence
  Synthetic
cucucagaugaggaacaaa

SEQ ID NO: 171767 - RNA, 20 nt, Artificial Sequence
  Synthetic
ucucucagaugaggaacaaa

SEQ ID NO: 171768 - RNA, 21 nt, Artificial Sequence
  Synthetic
aucucucagaugaggaacaaa

SEQ ID NO: 171769 - RNA, 22 nt, Artificial Sequence
  Synthetic
gaucucucagaugaggaacaaa

SEQ ID NO: 171770 - RNA, 23 nt, Artificial Sequence
  Synthetic
ugaucucucagaugaggaacaaa

SEQ ID NO: 171771 - RNA, 24 nt, Artificial Sequence
  Synthetic
gugaucucucagaugaggaacaaa

SEQ ID NO: 171772 - RNA, 18 nt, Artificial Sequence
  Synthetic
aucaaacaaaugaacaaa

SEQ ID NO: 171773 - RNA, 19 nt, Artificial Sequence
  Synthetic
uaucaaacaaaugaacaaa

SEQ ID NO: 171774 - RNA, 20 nt, Artificial Sequence
  Synthetic
uuaucaaacaaaugaacaaa

SEQ ID NO: 171775 - RNA, 21 nt, Artificial Sequence
  Synthetic
uuuaucaaacaaaugaacaaa

SEQ ID NO: 171776 - RNA, 22 nt, Artificial Sequence
  Synthetic
uuuuaucaaacaaaugaacaaa

SEQ ID NO: 171777 - RNA, 23 nt, Artificial Sequence
  Synthetic
uuuuuaucaaacaaaugaacaaa

SEQ ID NO: 171778 - RNA, 24 nt, Artificial Sequence
  Synthetic
auuuuuaucaaacaaaugaacaaa

SEQ ID NO: 171779 - RNA, 18 nt, Artificial Sequence
  Synthetic
augaguggaaauaacaaa

SEQ ID NO: 171780 - RNA, 19 nt, Artificial Sequence
  Synthetic
aaugaguggaaauaacaaa

SEQ ID NO: 171781 - RNA, 20 nt, Artificial Sequence
  Synthetic
aaaugaguggaaauaacaaa

SEQ ID NO: 171782 - RNA, 21 nt, Artificial Sequence
  Synthetic
caaaugaguggaaauaacaaa

SEQ ID NO: 171783 - RNA, 22 nt, Artificial Sequence
  Synthetic
acaaaugaguggaaauaacaaa

SEQ ID NO: 171784 - RNA, 23 nt, Artificial Sequence
  Synthetic
aacaaaugaguggaaauaacaaa

SEQ ID NO: 171785 - RNA, 24 nt, Artificial Sequence
  Synthetic
aaacaaaugaguggaaauaacaaa

SEQ ID NO: 171786 - RNA, 18 nt, Artificial Sequence
  Synthetic
ugaacaagagcuaacaaa

SEQ ID NO: 171787 - RNA, 19 nt, Artificial Sequence
  Synthetic
gugaacaagagcuaacaaa

SEQ ID NO: 171788 - RNA, 20 nt, Artificial Sequence
  Synthetic
agugaacaagagcuaacaaa

SEQ ID NO: 171789 - RNA, 21 nt, Artificial Sequence
  Synthetic
uagugaacaagagcuaacaaa

SEQ ID NO: 171790 - RNA, 22 nt, Artificial Sequence
  Synthetic
guagugaacaagagcuaacaaa

SEQ ID NO: 171791 - RNA, 23 nt, Artificial Sequence
  Synthetic
aguagugaacaagagcuaacaaa

SEQ ID NO: 171792 - RNA, 24 nt, Artificial Sequence
  Synthetic
aaguagugaacaagagcuaacaaa

SEQ ID NO: 171793 - RNA, 18 nt, Artificial Sequence
  Synthetic
augagauauucuaacaaa

SEQ ID NO: 171794 - RNA, 19 nt, Artificial Sequence
  Synthetic
uaugagauauucuaacaaa

SEQ ID NO: 171795 - RNA, 20 nt, Artificial Sequence
  Synthetic
cuaugagauauucuaacaaa

SEQ ID NO: 171796 - RNA, 21 nt, Artificial Sequence
  Synthetic
gcuaugagauauucuaacaaa

SEQ ID NO: 171797 - RNA, 22 nt, Artificial Sequence
  Synthetic
agcuaugagauauucuaacaaa

SEQ ID NO: 171798 - RNA, 23 nt, Artificial Sequence
  Synthetic
gagcuaugagauauucuaacaaa

SEQ ID NO: 171799 - RNA, 24 nt, Artificial Sequence
  Synthetic
ggagcuaugagauauucuaacaaa

SEQ ID NO: 171800 - RNA, 18 nt, Artificial Sequence
  Synthetic
caucaugggcuuaacaaa

SEQ ID NO: 171801 - RNA, 19 nt, Artificial Sequence
  Synthetic
ucaucaugggcuuaacaaa

SEQ ID NO: 171802 - RNA, 20 nt, Artificial Sequence
  Synthetic
uucaucaugggcuuaacaaa

SEQ ID NO: 171803 - RNA, 21 nt, Artificial Sequence
  Synthetic
uuucaucaugggcuuaacaaa

SEQ ID NO: 171804 - RNA, 22 nt, Artificial Sequence
  Synthetic
cuuucaucaugggcuuaacaaa

SEQ ID NO: 171805 - RNA, 23 nt, Artificial Sequence
  Synthetic
gcuuucaucaugggcuuaacaaa

SEQ ID NO: 171806 - RNA, 24 nt, Artificial Sequence
  Synthetic
agcuuucaucaugggcuuaacaaa

SEQ ID NO: 171807 - RNA, 18 nt, Artificial Sequence
  Synthetic
ugugcuugucuuaacaaa

SEQ ID NO: 171808 - RNA, 19 nt, Artificial Sequence
  Synthetic
augugcuugucuuaacaaa

SEQ ID NO: 171809 - RNA, 20 nt, Artificial Sequence
  Synthetic
caugugcuugucuuaacaaa

SEQ ID NO: 171810 - RNA, 21 nt, Artificial Sequence
  Synthetic
ccaugugcuugucuuaacaaa

SEQ ID NO: 171811 - RNA, 22 nt, Artificial Sequence
  Synthetic
cccaugugcuugucuuaacaaa

SEQ ID NO: 171812 - RNA, 23 nt, Artificial Sequence
  Synthetic
gcccaugugcuugucuuaacaaa

SEQ ID NO: 171813 - RNA, 24 nt, Artificial Sequence
  Synthetic
agcccaugugcuugucuuaacaaa

SEQ ID NO: 171814 - RNA, 18 nt, Artificial Sequence
  Synthetic
uuaucauuuuuuaacaaa

SEQ ID NO: 171815 - RNA, 19 nt, Artificial Sequence
  Synthetic
uuuaucauuuuuuaacaaa

SEQ ID NO: 171816 - RNA, 20 nt, Artificial Sequence
  Synthetic
uuuuaucauuuuuuaacaaa

SEQ ID NO: 171817 - RNA, 21 nt, Artificial Sequence
  Synthetic
auuuuaucauuuuuuaacaaa

SEQ ID NO: 171818 - RNA, 22 nt, Artificial Sequence
  Synthetic
uauuuuaucauuuuuuaacaaa

SEQ ID NO: 171819 - RNA, 23 nt, Artificial Sequence
  Synthetic
auauuuuaucauuuuuuaacaaa

SEQ ID NO: 171820 - RNA, 24 nt, Artificial Sequence
  Synthetic
aauauuuuaucauuuuuuaacaaa

SEQ ID NO: 171821 - RNA, 18 nt, Artificial Sequence
  Synthetic
uauaaaugcaaacacaaa

SEQ ID NO: 171822 - RNA, 19 nt, Artificial Sequence
  Synthetic
auauaaaugcaaacacaaa

SEQ ID NO: 171823 - RNA, 20 nt, Artificial Sequence
  Synthetic
aauauaaaugcaaacacaaa

SEQ ID NO: 171824 - RNA, 21 nt, Artificial Sequence
  Synthetic
aaauauaaaugcaaacacaaa

SEQ ID NO: 171825 - RNA, 22 nt, Artificial Sequence
  Synthetic
uaaauauaaaugcaaacacaaa

SEQ ID NO: 171826 - RNA, 23 nt, Artificial Sequence
  Synthetic
auaaauauaaaugcaaacacaaa

SEQ ID NO: 171827 - RNA, 24 nt, Artificial Sequence
  Synthetic
aauaaauauaaaugcaaacacaaa

SEQ ID NO: 171828 - RNA, 18 nt, Artificial Sequence
  Synthetic
gaaguuggaacacacaaa

SEQ ID NO: 171829 - RNA, 19 nt, Artificial Sequence
  Synthetic
agaaguuggaacacacaaa

SEQ ID NO: 171830 - RNA, 20 nt, Artificial Sequence
  Synthetic
aagaaguuggaacacacaaa

SEQ ID NO: 171831 - RNA, 21 nt, Artificial Sequence
  Synthetic
caagaaguuggaacacacaaa

SEQ ID NO: 171832 - RNA, 22 nt, Artificial Sequence
  Synthetic
gcaagaaguuggaacacacaaa

SEQ ID NO: 171833 - RNA, 23 nt, Artificial Sequence
  Synthetic
ggcaagaaguuggaacacacaaa

SEQ ID NO: 171834 - RNA, 24 nt, Artificial Sequence
  Synthetic
aggcaagaaguuggaacacacaaa

SEQ ID NO: 171835 - RNA, 18 nt, Artificial Sequence
  Synthetic
gcagggauugcacacaaa

SEQ ID NO: 171836 - RNA, 19 nt, Artificial Sequence
  Synthetic
ugcagggauugcacacaaa

SEQ ID NO: 171837 - RNA, 20 nt, Artificial Sequence
  Synthetic
uugcagggauugcacacaaa

SEQ ID NO: 171838 - RNA, 21 nt, Artificial Sequence
  Synthetic
cuugcagggauugcacacaaa

SEQ ID NO: 171839 - RNA, 22 nt, Artificial Sequence
  Synthetic
gcuugcagggauugcacacaaa

SEQ ID NO: 171840 - RNA, 23 nt, Artificial Sequence
  Synthetic
agcuugcagggauugcacacaaa

SEQ ID NO: 171841 - RNA, 24 nt, Artificial Sequence
  Synthetic
uagcuugcagggauugcacacaaa

SEQ ID NO: 171842 - RNA, 18 nt, Artificial Sequence
  Synthetic
aaauaaaccagacacaaa

SEQ ID NO: 171843 - RNA, 19 nt, Artificial Sequence
  Synthetic
gaaauaaaccagacacaaa

SEQ ID NO: 171844 - RNA, 20 nt, Artificial Sequence
  Synthetic
ugaaauaaaccagacacaaa

SEQ ID NO: 171845 - RNA, 21 nt, Artificial Sequence
  Synthetic
gugaaauaaaccagacacaaa

SEQ ID NO: 171846 - RNA, 22 nt, Artificial Sequence
  Synthetic
agugaaauaaaccagacacaaa

SEQ ID NO: 171847 - RNA, 23 nt, Artificial Sequence
  Synthetic
aagugaaauaaaccagacacaaa

SEQ ID NO: 171848 - RNA, 24 nt, Artificial Sequence
  Synthetic
uaagugaaauaaaccagacacaaa

SEQ ID NO: 171849 - RNA, 18 nt, Artificial Sequence
  Synthetic
agaacauauggacacaaa

SEQ ID NO: 171850 - RNA, 19 nt, Artificial Sequence
  Synthetic
gagaacauauggacacaaa

SEQ ID NO: 171851 - RNA, 20 nt, Artificial Sequence
  Synthetic
ugagaacauauggacacaaa

SEQ ID NO: 171852 - RNA, 21 nt, Artificial Sequence
  Synthetic
augagaacauauggacacaaa

SEQ ID NO: 171853 - RNA, 22 nt, Artificial Sequence
  Synthetic
gaugagaacauauggacacaaa

SEQ ID NO: 171854 - RNA, 23 nt, Artificial Sequence
  Synthetic
ugaugagaacauauggacacaaa

SEQ ID NO: 171855 - RNA, 24 nt, Artificial Sequence
  Synthetic
augaugagaacauauggacacaaa

SEQ ID NO: 171856 - RNA, 18 nt, Artificial Sequence
  Synthetic
auaugagaaugacacaaa

SEQ ID NO: 171857 - RNA, 19 nt, Artificial Sequence
  Synthetic
cauaugagaaugacacaaa

SEQ ID NO: 171858 - RNA, 20 nt, Artificial Sequence
  Synthetic
acauaugagaaugacacaaa

SEQ ID NO: 171859 - RNA, 21 nt, Artificial Sequence
  Synthetic
aacauaugagaaugacacaaa

SEQ ID NO: 171860 - RNA, 22 nt, Artificial Sequence
  Synthetic
aaacauaugagaaugacacaaa

SEQ ID NO: 171861 - RNA, 23 nt, Artificial Sequence
  Synthetic
aaaacauaugagaaugacacaaa

SEQ ID NO: 171862 - RNA, 24 nt, Artificial Sequence
  Synthetic
caaaacauaugagaaugacacaaa

SEQ ID NO: 171863 - RNA, 18 nt, Artificial Sequence
  Synthetic
ccuaagugcauacacaaa

SEQ ID NO: 171864 - RNA, 19 nt, Artificial Sequence
  Synthetic
cccuaagugcauacacaaa

SEQ ID NO: 171865 - RNA, 20 nt, Artificial Sequence
  Synthetic
ccccuaagugcauacacaaa

SEQ ID NO: 171866 - RNA, 21 nt, Artificial Sequence
  Synthetic
uccccuaagugcauacacaaa

SEQ ID NO: 171867 - RNA, 22 nt, Artificial Sequence
  Synthetic
auccccuaagugcauacacaaa

SEQ ID NO: 171868 - RNA, 23 nt, Artificial Sequence
  Synthetic
aauccccuaagugcauacacaaa

SEQ ID NO: 171869 - RNA, 24 nt, Artificial Sequence
  Synthetic
uaauccccuaagugcauacacaaa

SEQ ID NO: 171870 - RNA, 18 nt, Artificial Sequence
  Synthetic
ucauagacuuuacacaaa

SEQ ID NO: 171871 - RNA, 19 nt, Artificial Sequence
  Synthetic
gucauagacuuuacacaaa

SEQ ID NO: 171872 - RNA, 20 nt, Artificial Sequence
  Synthetic
ggucauagacuuuacacaaa

SEQ ID NO: 171873 - RNA, 21 nt, Artificial Sequence
  Synthetic
aggucauagacuuuacacaaa

SEQ ID NO: 171874 - RNA, 22 nt, Artificial Sequence
  Synthetic
caggucauagacuuuacacaaa

SEQ ID NO: 171875 - RNA, 23 nt, Artificial Sequence
  Synthetic
gcaggucauagacuuuacacaaa

SEQ ID NO: 171876 - RNA, 24 nt, Artificial Sequence
  Synthetic
agcaggucauagacuuuacacaaa

SEQ ID NO: 171877 - RNA, 18 nt, Artificial Sequence
  Synthetic
uucagaagucaccacaaa

SEQ ID NO: 171878 - RNA, 19 nt, Artificial Sequence
  Synthetic
cuucagaagucaccacaaa

SEQ ID NO: 171879 - RNA, 20 nt, Artificial Sequence
  Synthetic
ucuucagaagucaccacaaa

SEQ ID NO: 171880 - RNA, 21 nt, Artificial Sequence
  Synthetic
uucuucagaagucaccacaaa

SEQ ID NO: 171881 - RNA, 22 nt, Artificial Sequence
  Synthetic
uuucuucagaagucaccacaaa

SEQ ID NO: 171882 - RNA, 23 nt, Artificial Sequence
  Synthetic
auuucuucagaagucaccacaaa

SEQ ID NO: 171883 - RNA, 24 nt, Artificial Sequence
  Synthetic
gauuucuucagaagucaccacaaa

SEQ ID NO: 171884 - RNA, 18 nt, Artificial Sequence
  Synthetic
aaugauauuuaccacaaa

SEQ ID NO: 171885 - RNA, 19 nt, Artificial Sequence
  Synthetic
aaaugauauuuaccacaaa

SEQ ID NO: 171886 - RNA, 20 nt, Artificial Sequence
  Synthetic
aaaaugauauuuaccacaaa

SEQ ID NO: 171887 - RNA, 21 nt, Artificial Sequence
  Synthetic
uaaaaugauauuuaccacaaa

SEQ ID NO: 171888 - RNA, 22 nt, Artificial Sequence
  Synthetic
uuaaaaugauauuuaccacaaa

SEQ ID NO: 171889 - RNA, 23 nt, Artificial Sequence
  Synthetic
auuaaaaugauauuuaccacaaa

SEQ ID NO: 171890 - RNA, 24 nt, Artificial Sequence
  Synthetic
aauuaaaaugauauuuaccacaaa

SEQ ID NO: 171891 - RNA, 18 nt, Artificial Sequence
  Synthetic
ggcuggguuacccacaaa

SEQ ID NO: 171892 - RNA, 19 nt, Artificial Sequence
  Synthetic
aggcuggguuacccacaaa

SEQ ID NO: 171893 - RNA, 20 nt, Artificial Sequence
  Synthetic
aaggcuggguuacccacaaa

SEQ ID NO: 171894 - RNA, 21 nt, Artificial Sequence
  Synthetic
aaaggcuggguuacccacaaa

SEQ ID NO: 171895 - RNA, 22 nt, Artificial Sequence
  Synthetic
gaaaggcuggguuacccacaaa

SEQ ID NO: 171896 - RNA, 23 nt, Artificial Sequence
  Synthetic
agaaaggcuggguuacccacaaa

SEQ ID NO: 171897 - RNA, 24 nt, Artificial Sequence
  Synthetic
gagaaaggcuggguuacccacaaa

SEQ ID NO: 171898 - RNA, 18 nt, Artificial Sequence
  Synthetic
uuucugccagcccacaaa

SEQ ID NO: 171899 - RNA, 19 nt, Artificial Sequence
  Synthetic
cuuucugccagcccacaaa

SEQ ID NO: 171900 - RNA, 20 nt, Artificial Sequence
  Synthetic
ucuuucugccagcccacaaa

SEQ ID NO: 171901 - RNA, 21 nt, Artificial Sequence
  Synthetic
aucuuucugccagcccacaaa

SEQ ID NO: 171902 - RNA, 22 nt, Artificial Sequence
  Synthetic
caucuuucugccagcccacaaa

SEQ ID NO: 171903 - RNA, 23 nt, Artificial Sequence
  Synthetic
ccaucuuucugccagcccacaaa

SEQ ID NO: 171904 - RNA, 24 nt, Artificial Sequence
  Synthetic
cccaucuuucugccagcccacaaa

SEQ ID NO: 171905 - RNA, 18 nt, Artificial Sequence
  Synthetic
acccguaagagccacaaa

SEQ ID NO: 171906 - RNA, 19 nt, Artificial Sequence
  Synthetic
uacccguaagagccacaaa

SEQ ID NO: 171907 - RNA, 20 nt, Artificial Sequence
  Synthetic
auacccguaagagccacaaa

SEQ ID NO: 171908 - RNA, 21 nt, Artificial Sequence
  Synthetic
gauacccguaagagccacaaa

SEQ ID NO: 171909 - RNA, 22 nt, Artificial Sequence
  Synthetic
ugauacccguaagagccacaaa

SEQ ID NO: 171910 - RNA, 23 nt, Artificial Sequence
  Synthetic
augauacccguaagagccacaaa

SEQ ID NO: 171911 - RNA, 24 nt, Artificial Sequence
  Synthetic
aaugauacccguaagagccacaaa

SEQ ID NO: 171912 - RNA, 18 nt, Artificial Sequence
  Synthetic
agugaaccauggcacaaa

SEQ ID NO: 171913 - RNA, 19 nt, Artificial Sequence
  Synthetic
aagugaaccauggcacaaa

SEQ ID NO: 171914 - RNA, 20 nt, Artificial Sequence
  Synthetic
aaagugaaccauggcacaaa

SEQ ID NO: 171915 - RNA, 21 nt, Artificial Sequence
  Synthetic
aaaagugaaccauggcacaaa

SEQ ID NO: 171916 - RNA, 22 nt, Artificial Sequence
  Synthetic
gaaaagugaaccauggcacaaa

SEQ ID NO: 171917 - RNA, 23 nt, Artificial Sequence
  Synthetic
ugaaaagugaaccauggcacaaa

SEQ ID NO: 171918 - RNA, 24 nt, Artificial Sequence
  Synthetic
uugaaaagugaaccauggcacaaa

SEQ ID NO: 171919 - RNA, 18 nt, Artificial Sequence
  Synthetic
gcacaaucuuggcacaaa

SEQ ID NO: 171920 - RNA, 19 nt, Artificial Sequence
  Synthetic
ugcacaaucuuggcacaaa

SEQ ID NO: 171921 - RNA, 20 nt, Artificial Sequence
  Synthetic
uugcacaaucuuggcacaaa

SEQ ID NO: 171922 - RNA, 21 nt, Artificial Sequence
  Synthetic
auugcacaaucuuggcacaaa

SEQ ID NO: 171923 - RNA, 22 nt, Artificial Sequence
  Synthetic
aauugcacaaucuuggcacaaa

SEQ ID NO: 171924 - RNA, 23 nt, Artificial Sequence
  Synthetic
aaauugcacaaucuuggcacaaa

SEQ ID NO: 171925 - RNA, 24 nt, Artificial Sequence
  Synthetic
aaaauugcacaaucuuggcacaaa

SEQ ID NO: 171926 - RNA, 18 nt, Artificial Sequence
  Synthetic
agcagauguuggcacaaa

SEQ ID NO: 171927 - RNA, 19 nt, Artificial Sequence
  Synthetic
uagcagauguuggcacaaa

SEQ ID NO: 171928 - RNA, 20 nt, Artificial Sequence
  Synthetic
uuagcagauguuggcacaaa

SEQ ID NO: 171929 - RNA, 21 nt, Artificial Sequence
  Synthetic
cuuagcagauguuggcacaaa

SEQ ID NO: 171930 - RNA, 22 nt, Artificial Sequence
  Synthetic
ucuuagcagauguuggcacaaa

SEQ ID NO: 171931 - RNA, 23 nt, Artificial Sequence
  Synthetic
aucuuagcagauguuggcacaaa

SEQ ID NO: 171932 - RNA, 24 nt, Artificial Sequence
  Synthetic
caucuuagcagauguuggcacaaa

SEQ ID NO: 171933 - RNA, 18 nt, Artificial Sequence
  Synthetic
auacaauuuuggcacaaa

SEQ ID NO: 171934 - RNA, 19 nt, Artificial Sequence
  Synthetic
uauacaauuuuggcacaaa

SEQ ID NO: 171935 - RNA, 20 nt, Artificial Sequence
  Synthetic
auauacaauuuuggcacaaa

SEQ ID NO: 171936 - RNA, 21 nt, Artificial Sequence
  Synthetic
uauauacaauuuuggcacaaa

SEQ ID NO: 171937 - RNA, 22 nt, Artificial Sequence
  Synthetic
auauauacaauuuuggcacaaa

SEQ ID NO: 171938 - RNA, 23 nt, Artificial Sequence
  Synthetic
uauauauacaauuuuggcacaaa

SEQ ID NO: 171939 - RNA, 24 nt, Artificial Sequence
  Synthetic
auauauauacaauuuuggcacaaa

SEQ ID NO: 171940 - RNA, 18 nt, Artificial Sequence
  Synthetic
gugggaaaacugcacaaa

SEQ ID NO: 171941 - RNA, 19 nt, Artificial Sequence
  Synthetic
ugugggaaaacugcacaaa

SEQ ID NO: 171942 - RNA, 20 nt, Artificial Sequence
  Synthetic
uugugggaaaacugcacaaa

SEQ ID NO: 171943 - RNA, 21 nt, Artificial Sequence
  Synthetic
auugugggaaaacugcacaaa

SEQ ID NO: 171944 - RNA, 22 nt, Artificial Sequence
  Synthetic
uauugugggaaaacugcacaaa

SEQ ID NO: 171945 - RNA, 23 nt, Artificial Sequence
  Synthetic
cuauugugggaaaacugcacaaa

SEQ ID NO: 171946 - RNA, 24 nt, Artificial Sequence
  Synthetic
ucuauugugggaaaacugcacaaa

SEQ ID NO: 171947 - RNA, 18 nt, Artificial Sequence
  Synthetic
uagaaaauucugcacaaa

SEQ ID NO: 171948 - RNA, 19 nt, Artificial Sequence
  Synthetic
guagaaaauucugcacaaa

SEQ ID NO: 171949 - RNA, 20 nt, Artificial Sequence
  Synthetic
aguagaaaauucugcacaaa

SEQ ID NO: 171950 - RNA, 21 nt, Artificial Sequence
  Synthetic
gaguagaaaauucugcacaaa

SEQ ID NO: 171951 - RNA, 22 nt, Artificial Sequence
  Synthetic
ugaguagaaaauucugcacaaa

SEQ ID NO: 171952 - RNA, 23 nt, Artificial Sequence
  Synthetic
uugaguagaaaauucugcacaaa

SEQ ID NO: 171953 - RNA, 24 nt, Artificial Sequence
  Synthetic
uuugaguagaaaauucugcacaaa

SEQ ID NO: 171954 - RNA, 18 nt, Artificial Sequence
  Synthetic
uagaugaauuugcacaaa

SEQ ID NO: 171955 - RNA, 19 nt, Artificial Sequence
  Synthetic
cuagaugaauuugcacaaa

SEQ ID NO: 171956 - RNA, 20 nt, Artificial Sequence
  Synthetic
gcuagaugaauuugcacaaa

SEQ ID NO: 171957 - RNA, 21 nt, Artificial Sequence
  Synthetic
agcuagaugaauuugcacaaa

SEQ ID NO: 171958 - RNA, 22 nt, Artificial Sequence
  Synthetic
cagcuagaugaauuugcacaaa

SEQ ID NO: 171959 - RNA, 23 nt, Artificial Sequence
  Synthetic
gcagcuagaugaauuugcacaaa

SEQ ID NO: 171960 - RNA, 24 nt, Artificial Sequence
  Synthetic
ugcagcuagaugaauuugcacaaa

SEQ ID NO: 171961 - RNA, 18 nt, Artificial Sequence
  Synthetic
cugacaugacaucacaaa

SEQ ID NO: 171962 - RNA, 19 nt, Artificial Sequence
  Synthetic
gcugacaugacaucacaaa

SEQ ID NO: 171963 - RNA, 20 nt, Artificial Sequence
  Synthetic
ugcugacaugacaucacaaa

SEQ ID NO: 171964 - RNA, 21 nt, Artificial Sequence
  Synthetic
augcugacaugacaucacaaa

SEQ ID NO: 171965 - RNA, 22 nt, Artificial Sequence
  Synthetic
aaugcugacaugacaucacaaa

SEQ ID NO: 171966 - RNA, 23 nt, Artificial Sequence
  Synthetic
gaaugcugacaugacaucacaaa

SEQ ID NO: 171967 - RNA, 24 nt, Artificial Sequence
  Synthetic
ugaaugcugacaugacaucacaaa

SEQ ID NO: 171968 - RNA, 18 nt, Artificial Sequence
  Synthetic
agguaaguguuucacaaa

SEQ ID NO: 171969 - RNA, 19 nt, Artificial Sequence
  Synthetic
uagguaaguguuucacaaa

SEQ ID NO: 171970 - RNA, 20 nt, Artificial Sequence
  Synthetic
cuagguaaguguuucacaaa

SEQ ID NO: 171971 - RNA, 21 nt, Artificial Sequence
  Synthetic
ucuagguaaguguuucacaaa

SEQ ID NO: 171972 - RNA, 22 nt, Artificial Sequence
  Synthetic
uucuagguaaguguuucacaaa

SEQ ID NO: 171973 - RNA, 23 nt, Artificial Sequence
  Synthetic
auucuagguaaguguuucacaaa

SEQ ID NO: 171974 - RNA, 24 nt, Artificial Sequence
  Synthetic
cauucuagguaaguguuucacaaa

SEQ ID NO: 171975 - RNA, 18 nt, Artificial Sequence
  Synthetic
ucacgucauuuucacaaa

SEQ ID NO: 171976 - RNA, 19 nt, Artificial Sequence
  Synthetic
cucacgucauuuucacaaa

SEQ ID NO: 171977 - RNA, 20 nt, Artificial Sequence
  Synthetic
acucacgucauuuucacaaa

SEQ ID NO: 171978 - RNA, 21 nt, Artificial Sequence
  Synthetic
cacucacgucauuuucacaaa

SEQ ID NO: 171979 - RNA, 22 nt, Artificial Sequence
  Synthetic
ucacucacgucauuuucacaaa

SEQ ID NO: 171980 - RNA, 23 nt, Artificial Sequence
  Synthetic
cucacucacgucauuuucacaaa

SEQ ID NO: 171981 - RNA, 24 nt, Artificial Sequence
  Synthetic
ucucacucacgucauuuucacaaa

SEQ ID NO: 171982 - RNA, 18 nt, Artificial Sequence
  Synthetic
aaauuauugaaagacaaa

SEQ ID NO: 171983 - RNA, 19 nt, Artificial Sequence
  Synthetic
gaaauuauugaaagacaaa

SEQ ID NO: 171984 - RNA, 20 nt, Artificial Sequence
  Synthetic
ugaaauuauugaaagacaaa

SEQ ID NO: 171985 - RNA, 21 nt, Artificial Sequence
  Synthetic
uugaaauuauugaaagacaaa

SEQ ID NO: 171986 - RNA, 22 nt, Artificial Sequence
  Synthetic
uuugaaauuauugaaagacaaa

SEQ ID NO: 171987 - RNA, 23 nt, Artificial Sequence
  Synthetic
auuugaaauuauugaaagacaaa

SEQ ID NO: 171988 - RNA, 24 nt, Artificial Sequence
  Synthetic
cauuugaaauuauugaaagacaaa

SEQ ID NO: 171989 - RNA, 18 nt, Artificial Sequence
  Synthetic
auugcagcugaagacaaa

SEQ ID NO: 171990 - RNA, 19 nt, Artificial Sequence
  Synthetic
cauugcagcugaagacaaa

SEQ ID NO: 171991 - RNA, 20 nt, Artificial Sequence
  Synthetic
ucauugcagcugaagacaaa

SEQ ID NO: 171992 - RNA, 21 nt, Artificial Sequence
  Synthetic
cucauugcagcugaagacaaa

SEQ ID NO: 171993 - RNA, 22 nt, Artificial Sequence
  Synthetic
ucucauugcagcugaagacaaa

SEQ ID NO: 171994 - RNA, 23 nt, Artificial Sequence
  Synthetic
uucucauugcagcugaagacaaa

SEQ ID NO: 171995 - RNA, 24 nt, Artificial Sequence
  Synthetic
uuucucauugcagcugaagacaaa

SEQ ID NO: 171996 - RNA, 18 nt, Artificial Sequence
  Synthetic
guuauaacuuaagacaaa

SEQ ID NO: 171997 - RNA, 19 nt, Artificial Sequence
  Synthetic
uguuauaacuuaagacaaa

SEQ ID NO: 171998 - RNA, 20 nt, Artificial Sequence
  Synthetic
auguuauaacuuaagacaaa

SEQ ID NO: 171999 - RNA, 21 nt, Artificial Sequence
  Synthetic
uauguuauaacuuaagacaaa

SEQ ID NO: 172000 - RNA, 22 nt, Artificial Sequence
  Synthetic
uuauguuauaacuuaagacaaa

SEQ ID NO: 172001 - RNA, 23 nt, Artificial Sequence
  Synthetic
guuauguuauaacuuaagacaaa

SEQ ID NO: 172002 - RNA, 24 nt, Artificial Sequence
  Synthetic
uguuauguuauaacuuaagacaaa

SEQ ID NO: 172003 - RNA, 18 nt, Artificial Sequence
  Synthetic
uugacuaaaacagacaaa

SEQ ID NO: 172004 - RNA, 19 nt, Artificial Sequence
  Synthetic
cuugacuaaaacagacaaa

SEQ ID NO: 172005 - RNA, 20 nt, Artificial Sequence
  Synthetic
acuugacuaaaacagacaaa

SEQ ID NO: 172006 - RNA, 21 nt, Artificial Sequence
  Synthetic
gacuugacuaaaacagacaaa

SEQ ID NO: 172007 - RNA, 22 nt, Artificial Sequence
  Synthetic
ugacuugacuaaaacagacaaa

SEQ ID NO: 172008 - RNA, 23 nt, Artificial Sequence
  Synthetic
gugacuugacuaaaacagacaaa

SEQ ID NO: 172009 - RNA, 24 nt, Artificial Sequence
  Synthetic
agugacuugacuaaaacagacaaa

SEQ ID NO: 172010 - RNA, 18 nt, Artificial Sequence
  Synthetic
acaccaacaacagacaaa

SEQ ID NO: 172011 - RNA, 19 nt, Artificial Sequence
  Synthetic
uacaccaacaacagacaaa

SEQ ID NO: 172012 - RNA, 20 nt, Artificial Sequence
  Synthetic
auacaccaacaacagacaaa

SEQ ID NO: 172013 - RNA, 21 nt, Artificial Sequence
  Synthetic
uauacaccaacaacagacaaa

SEQ ID NO: 172014 - RNA, 22 nt, Artificial Sequence
  Synthetic
uuauacaccaacaacagacaaa

SEQ ID NO: 172015 - RNA, 23 nt, Artificial Sequence
  Synthetic
cuuauacaccaacaacagacaaa

SEQ ID NO: 172016 - RNA, 24 nt, Artificial Sequence
  Synthetic
ucuuauacaccaacaacagacaaa

SEQ ID NO: 172017 - RNA, 18 nt, Artificial Sequence
  Synthetic
uuuauguacacagacaaa

SEQ ID NO: 172018 - RNA, 19 nt, Artificial Sequence
  Synthetic
uuuuauguacacagacaaa

SEQ ID NO: 172019 - RNA, 20 nt, Artificial Sequence
  Synthetic
cuuuuauguacacagacaaa

SEQ ID NO: 172020 - RNA, 21 nt, Artificial Sequence
  Synthetic
ucuuuuauguacacagacaaa

SEQ ID NO: 172021 - RNA, 22 nt, Artificial Sequence
  Synthetic
gucuuuuauguacacagacaaa

SEQ ID NO: 172022 - RNA, 23 nt, Artificial Sequence
  Synthetic
ugucuuuuauguacacagacaaa

SEQ ID NO: 172023 - RNA, 24 nt, Artificial Sequence
  Synthetic
cugucuuuuauguacacagacaaa

SEQ ID NO: 172024 - RNA, 18 nt, Artificial Sequence
  Synthetic
uaucugaagacagacaaa

SEQ ID NO: 172025 - RNA, 19 nt, Artificial Sequence
  Synthetic
uuaucugaagacagacaaa

SEQ ID NO: 172026 - RNA, 20 nt, Artificial Sequence
  Synthetic
guuaucugaagacagacaaa

SEQ ID NO: 172027 - RNA, 21 nt, Artificial Sequence
  Synthetic
aguuaucugaagacagacaaa

SEQ ID NO: 172028 - RNA, 22 nt, Artificial Sequence
  Synthetic
aaguuaucugaagacagacaaa

SEQ ID NO: 172029 - RNA, 23 nt, Artificial Sequence
  Synthetic
uaaguuaucugaagacagacaaa

SEQ ID NO: 172030 - RNA, 24 nt, Artificial Sequence
  Synthetic
auaaguuaucugaagacagacaaa

SEQ ID NO: 172031 - RNA, 18 nt, Artificial Sequence
  Synthetic
auuuuauacucagacaaa

SEQ ID NO: 172032 - RNA, 19 nt, Artificial Sequence
  Synthetic
aauuuuauacucagacaaa

SEQ ID NO: 172033 - RNA, 20 nt, Artificial Sequence
  Synthetic
gaauuuuauacucagacaaa

SEQ ID NO: 172034 - RNA, 21 nt, Artificial Sequence
  Synthetic
agaauuuuauacucagacaaa

SEQ ID NO: 172035 - RNA, 22 nt, Artificial Sequence
  Synthetic
aagaauuuuauacucagacaaa

SEQ ID NO: 172036 - RNA, 23 nt, Artificial Sequence
  Synthetic
aaagaauuuuauacucagacaaa

SEQ ID NO: 172037 - RNA, 24 nt, Artificial Sequence
  Synthetic
uaaagaauuuuauacucagacaaa

SEQ ID NO: 172038 - RNA, 18 nt, Artificial Sequence
  Synthetic
uugaggcacagagacaaa

SEQ ID NO: 172039 - RNA, 19 nt, Artificial Sequence
  Synthetic
guugaggcacagagacaaa

SEQ ID NO: 172040 - RNA, 20 nt, Artificial Sequence
  Synthetic
aguugaggcacagagacaaa

SEQ ID NO: 172041 - RNA, 21 nt, Artificial Sequence
  Synthetic
gaguugaggcacagagacaaa

SEQ ID NO: 172042 - RNA, 22 nt, Artificial Sequence
  Synthetic
agaguugaggcacagagacaaa

SEQ ID NO: 172043 - RNA, 23 nt, Artificial Sequence
  Synthetic
gagaguugaggcacagagacaaa

SEQ ID NO: 172044 - RNA, 24 nt, Artificial Sequence
  Synthetic
agagaguugaggcacagagacaaa

SEQ ID NO: 172045 - RNA, 18 nt, Artificial Sequence
  Synthetic
aauacaauuauagacaaa

SEQ ID NO: 172046 - RNA, 19 nt, Artificial Sequence
  Synthetic
aaauacaauuauagacaaa

SEQ ID NO: 172047 - RNA, 20 nt, Artificial Sequence
  Synthetic
aaaauacaauuauagacaaa

SEQ ID NO: 172048 - RNA, 21 nt, Artificial Sequence
  Synthetic
caaaauacaauuauagacaaa

SEQ ID NO: 172049 - RNA, 22 nt, Artificial Sequence
  Synthetic
acaaaauacaauuauagacaaa

SEQ ID NO: 172050 - RNA, 23 nt, Artificial Sequence
  Synthetic
gacaaaauacaauuauagacaaa

SEQ ID NO: 172051 - RNA, 24 nt, Artificial Sequence
  Synthetic
ugacaaaauacaauuauagacaaa

SEQ ID NO: 172052 - RNA, 18 nt, Artificial Sequence
  Synthetic
aagcacauuguagacaaa

SEQ ID NO: 172053 - RNA, 19 nt, Artificial Sequence
  Synthetic
aaagcacauuguagacaaa

SEQ ID NO: 172054 - RNA, 20 nt, Artificial Sequence
  Synthetic
aaaagcacauuguagacaaa

SEQ ID NO: 172055 - RNA, 21 nt, Artificial Sequence
  Synthetic
gaaaagcacauuguagacaaa

SEQ ID NO: 172056 - RNA, 22 nt, Artificial Sequence
  Synthetic
ugaaaagcacauuguagacaaa

SEQ ID NO: 172057 - RNA, 23 nt, Artificial Sequence
  Synthetic
augaaaagcacauuguagacaaa

SEQ ID NO: 172058 - RNA, 24 nt, Artificial Sequence
  Synthetic
uaugaaaagcacauuguagacaaa

SEQ ID NO: 172059 - RNA, 18 nt, Artificial Sequence
  Synthetic
uacaaaaacaaggacaaa

SEQ ID NO: 172060 - RNA, 19 nt, Artificial Sequence
  Synthetic
uuacaaaaacaaggacaaa

SEQ ID NO: 172061 - RNA, 20 nt, Artificial Sequence
  Synthetic
uuuacaaaaacaaggacaaa

SEQ ID NO: 172062 - RNA, 21 nt, Artificial Sequence
  Synthetic
uuuuacaaaaacaaggacaaa

SEQ ID NO: 172063 - RNA, 22 nt, Artificial Sequence
  Synthetic
uuuuuacaaaaacaaggacaaa

SEQ ID NO: 172064 - RNA, 23 nt, Artificial Sequence
  Synthetic
auuuuuacaaaaacaaggacaaa

SEQ ID NO: 172065 - RNA, 24 nt, Artificial Sequence
  Synthetic
aauuuuuacaaaaacaaggacaaa

SEQ ID NO: 172066 - RNA, 18 nt, Artificial Sequence
  Synthetic
ccaguaugacuggacaaa

SEQ ID NO: 172067 - RNA, 19 nt, Artificial Sequence
  Synthetic
uccaguaugacuggacaaa

SEQ ID NO: 172068 - RNA, 20 nt, Artificial Sequence
  Synthetic
guccaguaugacuggacaaa

SEQ ID NO: 172069 - RNA, 21 nt, Artificial Sequence
  Synthetic
uguccaguaugacuggacaaa

SEQ ID NO: 172070 - RNA, 22 nt, Artificial Sequence
  Synthetic
auguccaguaugacuggacaaa

SEQ ID NO: 172071 - RNA, 23 nt, Artificial Sequence
  Synthetic
gauguccaguaugacuggacaaa

SEQ ID NO: 172072 - RNA, 24 nt, Artificial Sequence
  Synthetic
agauguccaguaugacuggacaaa

SEQ ID NO: 172073 - RNA, 18 nt, Artificial Sequence
  Synthetic
agaacaaauuaugacaaa

SEQ ID NO: 172074 - RNA, 19 nt, Artificial Sequence
  Synthetic
gagaacaaauuaugacaaa

SEQ ID NO: 172075 - RNA, 20 nt, Artificial Sequence
  Synthetic
ugagaacaaauuaugacaaa

SEQ ID NO: 172076 - RNA, 21 nt, Artificial Sequence
  Synthetic
uugagaacaaauuaugacaaa

SEQ ID NO: 172077 - RNA, 22 nt, Artificial Sequence
  Synthetic
auugagaacaaauuaugacaaa

SEQ ID NO: 172078 - RNA, 23 nt, Artificial Sequence
  Synthetic
aauugagaacaaauuaugacaaa

SEQ ID NO: 172079 - RNA, 24 nt, Artificial Sequence
  Synthetic
uaauugagaacaaauuaugacaaa

SEQ ID NO: 172080 - RNA, 18 nt, Artificial Sequence
  Synthetic
aguacaucuuaugacaaa

SEQ ID NO: 172081 - RNA, 19 nt, Artificial Sequence
  Synthetic
caguacaucuuaugacaaa

SEQ ID NO: 172082 - RNA, 20 nt, Artificial Sequence
  Synthetic
ucaguacaucuuaugacaaa

SEQ ID NO: 172083 - RNA, 21 nt, Artificial Sequence
  Synthetic
cucaguacaucuuaugacaaa

SEQ ID NO: 172084 - RNA, 22 nt, Artificial Sequence
  Synthetic
ucucaguacaucuuaugacaaa

SEQ ID NO: 172085 - RNA, 23 nt, Artificial Sequence
  Synthetic
aucucaguacaucuuaugacaaa

SEQ ID NO: 172086 - RNA, 24 nt, Artificial Sequence
  Synthetic
uaucucaguacaucuuaugacaaa

SEQ ID NO: 172087 - RNA, 18 nt, Artificial Sequence
  Synthetic
aaaauuacuagugacaaa

SEQ ID NO: 172088 - RNA, 19 nt, Artificial Sequence
  Synthetic
gaaaauuacuagugacaaa

SEQ ID NO: 172089 - RNA, 20 nt, Artificial Sequence
  Synthetic
agaaaauuacuagugacaaa

SEQ ID NO: 172090 - RNA, 21 nt, Artificial Sequence
  Synthetic
aagaaaauuacuagugacaaa

SEQ ID NO: 172091 - RNA, 22 nt, Artificial Sequence
  Synthetic
aaagaaaauuacuagugacaaa

SEQ ID NO: 172092 - RNA, 23 nt, Artificial Sequence
  Synthetic
caaagaaaauuacuagugacaaa

SEQ ID NO: 172093 - RNA, 24 nt, Artificial Sequence
  Synthetic
gcaaagaaaauuacuagugacaaa

SEQ ID NO: 172094 - RNA, 18 nt, Artificial Sequence
  Synthetic
uccagccugggugacaaa

SEQ ID NO: 172095 - RNA, 19 nt, Artificial Sequence
  Synthetic
cuccagccugggugacaaa

SEQ ID NO: 172096 - RNA, 20 nt, Artificial Sequence
  Synthetic
acuccagccugggugacaaa

SEQ ID NO: 172097 - RNA, 21 nt, Artificial Sequence
  Synthetic
cacuccagccugggugacaaa

SEQ ID NO: 172098 - RNA, 22 nt, Artificial Sequence
  Synthetic
gcacuccagccugggugacaaa

SEQ ID NO: 172099 - RNA, 23 nt, Artificial Sequence
  Synthetic
ugcacuccagccugggugacaaa

SEQ ID NO: 172100 - RNA, 24 nt, Artificial Sequence
  Synthetic
cugcacuccagccugggugacaaa

SEQ ID NO: 172101 - RNA, 18 nt, Artificial Sequence
  Synthetic
uuccaaaaaauugacaaa

SEQ ID NO: 172102 - RNA, 19 nt, Artificial Sequence
  Synthetic
uuuccaaaaaauugacaaa

SEQ ID NO: 172103 - RNA, 20 nt, Artificial Sequence
  Synthetic
uuuuccaaaaaauugacaaa

SEQ ID NO: 172104 - RNA, 21 nt, Artificial Sequence
  Synthetic
guuuuccaaaaaauugacaaa

SEQ ID NO: 172105 - RNA, 22 nt, Artificial Sequence
  Synthetic
gguuuuccaaaaaauugacaaa

SEQ ID NO: 172106 - RNA, 23 nt, Artificial Sequence
  Synthetic
ugguuuuccaaaaaauugacaaa

SEQ ID NO: 172107 - RNA, 24 nt, Artificial Sequence
  Synthetic
uugguuuuccaaaaaauugacaaa

SEQ ID NO: 172108 - RNA, 18 nt, Artificial Sequence
  Synthetic
guauguuuacuugacaaa

SEQ ID NO: 172109 - RNA, 19 nt, Artificial Sequence
  Synthetic
uguauguuuacuugacaaa

SEQ ID NO: 172110 - RNA, 20 nt, Artificial Sequence
  Synthetic
uuguauguuuacuugacaaa

SEQ ID NO: 172111 - RNA, 21 nt, Artificial Sequence
  Synthetic
uuuguauguuuacuugacaaa

SEQ ID NO: 172112 - RNA, 22 nt, Artificial Sequence
  Synthetic
uuuuguauguuuacuugacaaa

SEQ ID NO: 172113 - RNA, 23 nt, Artificial Sequence
  Synthetic
guuuuguauguuuacuugacaaa

SEQ ID NO: 172114 - RNA, 24 nt, Artificial Sequence
  Synthetic
cguuuuguauguuuacuugacaaa

SEQ ID NO: 172115 - RNA, 18 nt, Artificial Sequence
  Synthetic
cuuucauuccuugacaaa

SEQ ID NO: 172116 - RNA, 19 nt, Artificial Sequence
  Synthetic
gcuuucauuccuugacaaa

SEQ ID NO: 172117 - RNA, 20 nt, Artificial Sequence
  Synthetic
ugcuuucauuccuugacaaa

SEQ ID NO: 172118 - RNA, 21 nt, Artificial Sequence
  Synthetic
uugcuuucauuccuugacaaa

SEQ ID NO: 172119 - RNA, 22 nt, Artificial Sequence
  Synthetic
uuugcuuucauuccuugacaaa

SEQ ID NO: 172120 - RNA, 23 nt, Artificial Sequence
  Synthetic
auuugcuuucauuccuugacaaa

SEQ ID NO: 172121 - RNA, 24 nt, Artificial Sequence
  Synthetic
gauuugcuuucauuccuugacaaa

SEQ ID NO: 172122 - RNA, 18 nt, Artificial Sequence
  Synthetic
uaauaagacaaauacaaa

SEQ ID NO: 172123 - RNA, 19 nt, Artificial Sequence
  Synthetic
cuaauaagacaaauacaaa

SEQ ID NO: 172124 - RNA, 20 nt, Artificial Sequence
  Synthetic
gcuaauaagacaaauacaaa

SEQ ID NO: 172125 - RNA, 21 nt, Artificial Sequence
  Synthetic
agcuaauaagacaaauacaaa

SEQ ID NO: 172126 - RNA, 22 nt, Artificial Sequence
  Synthetic
gagcuaauaagacaaauacaaa

SEQ ID NO: 172127 - RNA, 23 nt, Artificial Sequence
  Synthetic
ugagcuaauaagacaaauacaaa

SEQ ID NO: 172128 - RNA, 24 nt, Artificial Sequence
  Synthetic
gugagcuaauaagacaaauacaaa

SEQ ID NO: 172129 - RNA, 18 nt, Artificial Sequence
  Synthetic
auuggauauaaauacaaa

SEQ ID NO: 172130 - RNA, 19 nt, Artificial Sequence
  Synthetic
uauuggauauaaauacaaa

SEQ ID NO: 172131 - RNA, 20 nt, Artificial Sequence
  Synthetic
auauuggauauaaauacaaa

SEQ ID NO: 172132 - RNA, 21 nt, Artificial Sequence
  Synthetic
aauauuggauauaaauacaaa

SEQ ID NO: 172133 - RNA, 22 nt, Artificial Sequence
  Synthetic
aaauauuggauauaaauacaaa

SEQ ID NO: 172134 - RNA, 23 nt, Artificial Sequence
  Synthetic
gaaauauuggauauaaauacaaa

SEQ ID NO: 172135 - RNA, 24 nt, Artificial Sequence
  Synthetic
agaaauauuggauauaaauacaaa

SEQ ID NO: 172136 - RNA, 18 nt, Artificial Sequence
  Synthetic
cuguuuugaagauacaaa

SEQ ID NO: 172137 - RNA, 19 nt, Artificial Sequence
  Synthetic
acuguuuugaagauacaaa

SEQ ID NO: 172138 - RNA, 20 nt, Artificial Sequence
  Synthetic
cacuguuuugaagauacaaa

SEQ ID NO: 172139 - RNA, 21 nt, Artificial Sequence
  Synthetic
ccacuguuuugaagauacaaa

SEQ ID NO: 172140 - RNA, 22 nt, Artificial Sequence
  Synthetic
cccacuguuuugaagauacaaa

SEQ ID NO: 172141 - RNA, 23 nt, Artificial Sequence
  Synthetic
ucccacuguuuugaagauacaaa

SEQ ID NO: 172142 - RNA, 24 nt, Artificial Sequence
  Synthetic
uucccacuguuuugaagauacaaa

SEQ ID NO: 172143 - RNA, 18 nt, Artificial Sequence
  Synthetic
gcagggauaggauacaaa

SEQ ID NO: 172144 - RNA, 19 nt, Artificial Sequence
  Synthetic
agcagggauaggauacaaa

SEQ ID NO: 172145 - RNA, 20 nt, Artificial Sequence
  Synthetic
aagcagggauaggauacaaa

SEQ ID NO: 172146 - RNA, 21 nt, Artificial Sequence
  Synthetic
uaagcagggauaggauacaaa

SEQ ID NO: 172147 - RNA, 22 nt, Artificial Sequence
  Synthetic
guaagcagggauaggauacaaa

SEQ ID NO: 172148 - RNA, 23 nt, Artificial Sequence
  Synthetic
aguaagcagggauaggauacaaa

SEQ ID NO: 172149 - RNA, 24 nt, Artificial Sequence
  Synthetic
uaguaagcagggauaggauacaaa

SEQ ID NO: 172150 - RNA, 18 nt, Artificial Sequence
  Synthetic
aauggauuaauauacaaa

SEQ ID NO: 172151 - RNA, 19 nt, Artificial Sequence
  Synthetic
uaauggauuaauauacaaa

SEQ ID NO: 172152 - RNA, 20 nt, Artificial Sequence
  Synthetic
guaauggauuaauauacaaa

SEQ ID NO: 172153 - RNA, 21 nt, Artificial Sequence
  Synthetic
aguaauggauuaauauacaaa

SEQ ID NO: 172154 - RNA, 22 nt, Artificial Sequence
  Synthetic
uaguaauggauuaauauacaaa

SEQ ID NO: 172155 - RNA, 23 nt, Artificial Sequence
  Synthetic
cuaguaauggauuaauauacaaa

SEQ ID NO: 172156 - RNA, 24 nt, Artificial Sequence
  Synthetic
ucuaguaauggauuaauauacaaa

SEQ ID NO: 172157 - RNA, 18 nt, Artificial Sequence
  Synthetic
gguaacaauaacuacaaa

SEQ ID NO: 172158 - RNA, 19 nt, Artificial Sequence
  Synthetic
ugguaacaauaacuacaaa

SEQ ID NO: 172159 - RNA, 20 nt, Artificial Sequence
  Synthetic
augguaacaauaacuacaaa

SEQ ID NO: 172160 - RNA, 21 nt, Artificial Sequence
  Synthetic
uaugguaacaauaacuacaaa

SEQ ID NO: 172161 - RNA, 22 nt, Artificial Sequence
  Synthetic
guaugguaacaauaacuacaaa

SEQ ID NO: 172162 - RNA, 23 nt, Artificial Sequence
  Synthetic
aguaugguaacaauaacuacaaa

SEQ ID NO: 172163 - RNA, 24 nt, Artificial Sequence
  Synthetic
aaguaugguaacaauaacuacaaa

SEQ ID NO: 172164 - RNA, 18 nt, Artificial Sequence
  Synthetic
gaacaggcaaccuacaaa

SEQ ID NO: 172165 - RNA, 19 nt, Artificial Sequence
  Synthetic
ugaacaggcaaccuacaaa

SEQ ID NO: 172166 - RNA, 20 nt, Artificial Sequence
  Synthetic
gugaacaggcaaccuacaaa

SEQ ID NO: 172167 - RNA, 18 nt, Artificial Sequence
  Synthetic
acuuaaacuuccuacaaa

SEQ ID NO: 172168 - RNA, 19 nt, Artificial Sequence
  Synthetic
aacuuaaacuuccuacaaa

SEQ ID NO: 172169 - RNA, 20 nt, Artificial Sequence
  Synthetic
gaacuuaaacuuccuacaaa

SEQ ID NO: 172170 - RNA, 21 nt, Artificial Sequence
  Synthetic
ggaacuuaaacuuccuacaaa

SEQ ID NO: 172171 - RNA, 22 nt, Artificial Sequence
  Synthetic
uggaacuuaaacuuccuacaaa

SEQ ID NO: 172172 - RNA, 23 nt, Artificial Sequence
  Synthetic
guggaacuuaaacuuccuacaaa

SEQ ID NO: 172173 - RNA, 24 nt, Artificial Sequence
  Synthetic
uguggaacuuaaacuuccuacaaa

SEQ ID NO: 172174 - RNA, 18 nt, Artificial Sequence
  Synthetic
acagcuaugugcuacaaa

SEQ ID NO: 172175 - RNA, 19 nt, Artificial Sequence
  Synthetic
uacagcuaugugcuacaaa

SEQ ID NO: 172176 - RNA, 20 nt, Artificial Sequence
  Synthetic
auacagcuaugugcuacaaa

SEQ ID NO: 172177 - RNA, 21 nt, Artificial Sequence
  Synthetic
cauacagcuaugugcuacaaa

SEQ ID NO: 172178 - RNA, 22 nt, Artificial Sequence
  Synthetic
acauacagcuaugugcuacaaa

SEQ ID NO: 172179 - RNA, 23 nt, Artificial Sequence
  Synthetic
uacauacagcuaugugcuacaaa

SEQ ID NO: 172180 - RNA, 24 nt, Artificial Sequence
  Synthetic
auacauacagcuaugugcuacaaa

SEQ ID NO: 172181 - RNA, 18 nt, Artificial Sequence
  Synthetic
uucuaccagagguacaaa

SEQ ID NO: 172182 - RNA, 19 nt, Artificial Sequence
  Synthetic
auucuaccagagguacaaa

SEQ ID NO: 172183 - RNA, 20 nt, Artificial Sequence
  Synthetic
aauucuaccagagguacaaa

SEQ ID NO: 172184 - RNA, 21 nt, Artificial Sequence
  Synthetic
gaauucuaccagagguacaaa

SEQ ID NO: 172185 - RNA, 22 nt, Artificial Sequence
  Synthetic
ugaauucuaccagagguacaaa

SEQ ID NO: 172186 - RNA, 23 nt, Artificial Sequence
  Synthetic
cugaauucuaccagagguacaaa

SEQ ID NO: 172187 - RNA, 24 nt, Artificial Sequence
  Synthetic
gcugaauucuaccagagguacaaa

SEQ ID NO: 172188 - RNA, 18 nt, Artificial Sequence
  Synthetic
aaccaccagggguacaaa

SEQ ID NO: 172189 - RNA, 19 nt, Artificial Sequence
  Synthetic
aaaccaccagggguacaaa

SEQ ID NO: 172190 - RNA, 20 nt, Artificial Sequence
  Synthetic
aaaaccaccagggguacaaa

SEQ ID NO: 172191 - RNA, 21 nt, Artificial Sequence
  Synthetic
uaaaaccaccagggguacaaa

SEQ ID NO: 172192 - RNA, 22 nt, Artificial Sequence
  Synthetic
uuaaaaccaccagggguacaaa

SEQ ID NO: 172193 - RNA, 23 nt, Artificial Sequence
  Synthetic
cuuaaaaccaccagggguacaaa

SEQ ID NO: 172194 - RNA, 24 nt, Artificial Sequence
  Synthetic
ucuuaaaaccaccagggguacaaa

SEQ ID NO: 172195 - RNA, 18 nt, Artificial Sequence
  Synthetic
aaauauacccauuacaaa

SEQ ID NO: 172196 - RNA, 19 nt, Artificial Sequence
  Synthetic
uaaauauacccauuacaaa

SEQ ID NO: 172197 - RNA, 20 nt, Artificial Sequence
  Synthetic
guaaauauacccauuacaaa

SEQ ID NO: 172198 - RNA, 21 nt, Artificial Sequence
  Synthetic
gguaaauauacccauuacaaa

SEQ ID NO: 172199 - RNA, 22 nt, Artificial Sequence
  Synthetic
ggguaaauauacccauuacaaa

SEQ ID NO: 172200 - RNA, 23 nt, Artificial Sequence
  Synthetic
uggguaaauauacccauuacaaa

SEQ ID NO: 172201 - RNA, 24 nt, Artificial Sequence
  Synthetic
cuggguaaauauacccauuacaaa

SEQ ID NO: 172202 - RNA, 18 nt, Artificial Sequence
  Synthetic
uggaacaaaacuuacaaa

SEQ ID NO: 172203 - RNA, 19 nt, Artificial Sequence
  Synthetic
uuggaacaaaacuuacaaa

SEQ ID NO: 172204 - RNA, 20 nt, Artificial Sequence
  Synthetic
auuggaacaaaacuuacaaa

SEQ ID NO: 172205 - RNA, 21 nt, Artificial Sequence
  Synthetic
cauuggaacaaaacuuacaaa

SEQ ID NO: 172206 - RNA, 22 nt, Artificial Sequence
  Synthetic
gcauuggaacaaaacuuacaaa

SEQ ID NO: 172207 - RNA, 23 nt, Artificial Sequence
  Synthetic
ggcauuggaacaaaacuuacaaa

SEQ ID NO: 172208 - RNA, 24 nt, Artificial Sequence
  Synthetic
aggcauuggaacaaaacuuacaaa

SEQ ID NO: 172209 - RNA, 18 nt, Artificial Sequence
  Synthetic
gaaaauauugcuuacaaa

SEQ ID NO: 172210 - RNA, 19 nt, Artificial Sequence
  Synthetic
agaaaauauugcuuacaaa

SEQ ID NO: 172211 - RNA, 20 nt, Artificial Sequence
  Synthetic
gagaaaauauugcuuacaaa

SEQ ID NO: 172212 - RNA, 21 nt, Artificial Sequence
  Synthetic
agagaaaauauugcuuacaaa

SEQ ID NO: 172213 - RNA, 22 nt, Artificial Sequence
  Synthetic
gagagaaaauauugcuuacaaa

SEQ ID NO: 172214 - RNA, 23 nt, Artificial Sequence
  Synthetic
agagagaaaauauugcuuacaaa

SEQ ID NO: 172215 - RNA, 24 nt, Artificial Sequence
  Synthetic
aagagagaaaauauugcuuacaaa

SEQ ID NO: 172216 - RNA, 18 nt, Artificial Sequence
  Synthetic
gauccacauuaaaccaaa

SEQ ID NO: 172217 - RNA, 19 nt, Artificial Sequence
  Synthetic
agauccacauuaaaccaaa

SEQ ID NO: 172218 - RNA, 20 nt, Artificial Sequence
  Synthetic
gagauccacauuaaaccaaa

SEQ ID NO: 172219 - RNA, 21 nt, Artificial Sequence
  Synthetic
agagauccacauuaaaccaaa

SEQ ID NO: 172220 - RNA, 22 nt, Artificial Sequence
  Synthetic
gagagauccacauuaaaccaaa

SEQ ID NO: 172221 - RNA, 23 nt, Artificial Sequence
  Synthetic
ugagagauccacauuaaaccaaa

SEQ ID NO: 172222 - RNA, 24 nt, Artificial Sequence
  Synthetic
uugagagauccacauuaaaccaaa

SEQ ID NO: 172223 - RNA, 18 nt, Artificial Sequence
  Synthetic
aauuuuuauuaaaccaaa

SEQ ID NO: 172224 - RNA, 19 nt, Artificial Sequence
  Synthetic
aaauuuuuauuaaaccaaa

SEQ ID NO: 172225 - RNA, 20 nt, Artificial Sequence
  Synthetic
gaaauuuuuauuaaaccaaa

SEQ ID NO: 172226 - RNA, 21 nt, Artificial Sequence
  Synthetic
ugaaauuuuuauuaaaccaaa

SEQ ID NO: 172227 - RNA, 22 nt, Artificial Sequence
  Synthetic
cugaaauuuuuauuaaaccaaa

SEQ ID NO: 172228 - RNA, 23 nt, Artificial Sequence
  Synthetic
ucugaaauuuuuauuaaaccaaa

SEQ ID NO: 172229 - RNA, 24 nt, Artificial Sequence
  Synthetic
gucugaaauuuuuauuaaaccaaa

SEQ ID NO: 172230 - RNA, 18 nt, Artificial Sequence
  Synthetic
aacacuugaagaaccaaa

SEQ ID NO: 172231 - RNA, 19 nt, Artificial Sequence
  Synthetic
gaacacuugaagaaccaaa

SEQ ID NO: 172232 - RNA, 20 nt, Artificial Sequence
  Synthetic
agaacacuugaagaaccaaa

SEQ ID NO: 172233 - RNA, 21 nt, Artificial Sequence
  Synthetic
gagaacacuugaagaaccaaa

SEQ ID NO: 172234 - RNA, 22 nt, Artificial Sequence
  Synthetic
agagaacacuugaagaaccaaa

SEQ ID NO: 172235 - RNA, 23 nt, Artificial Sequence
  Synthetic
gagagaacacuugaagaaccaaa

SEQ ID NO: 172236 - RNA, 24 nt, Artificial Sequence
  Synthetic
ggagagaacacuugaagaaccaaa

SEQ ID NO: 172237 - RNA, 18 nt, Artificial Sequence
  Synthetic
ugaauacuuagaaccaaa

SEQ ID NO: 172238 - RNA, 19 nt, Artificial Sequence
  Synthetic
uugaauacuuagaaccaaa

SEQ ID NO: 172239 - RNA, 20 nt, Artificial Sequence
  Synthetic
uuugaauacuuagaaccaaa

SEQ ID NO: 172240 - RNA, 21 nt, Artificial Sequence
  Synthetic
guuugaauacuuagaaccaaa

SEQ ID NO: 172241 - RNA, 22 nt, Artificial Sequence
  Synthetic
gguuugaauacuuagaaccaaa

SEQ ID NO: 172242 - RNA, 23 nt, Artificial Sequence
  Synthetic
ggguuugaauacuuagaaccaaa

SEQ ID NO: 172243 - RNA, 24 nt, Artificial Sequence
  Synthetic
aggguuugaauacuuagaaccaaa

SEQ ID NO: 172244 - RNA, 18 nt, Artificial Sequence
  Synthetic
aagggccagugaaccaaa

SEQ ID NO: 172245 - RNA, 19 nt, Artificial Sequence
  Synthetic
aaagggccagugaaccaaa

SEQ ID NO: 172246 - RNA, 20 nt, Artificial Sequence
  Synthetic
uaaagggccagugaaccaaa

SEQ ID NO: 172247 - RNA, 21 nt, Artificial Sequence
  Synthetic
uuaaagggccagugaaccaaa

SEQ ID NO: 172248 - RNA, 22 nt, Artificial Sequence
  Synthetic
guuaaagggccagugaaccaaa

SEQ ID NO: 172249 - RNA, 23 nt, Artificial Sequence
  Synthetic
gguuaaagggccagugaaccaaa

SEQ ID NO: 172250 - RNA, 24 nt, Artificial Sequence
  Synthetic
ggguuaaagggccagugaaccaaa

SEQ ID NO: 172251 - RNA, 18 nt, Artificial Sequence
  Synthetic
cuugauaugauaaccaaa

SEQ ID NO: 172252 - RNA, 19 nt, Artificial Sequence
  Synthetic
acuugauaugauaaccaaa

SEQ ID NO: 172253 - RNA, 20 nt, Artificial Sequence
  Synthetic
gacuugauaugauaaccaaa

SEQ ID NO: 172254 - RNA, 21 nt, Artificial Sequence
  Synthetic
ggacuugauaugauaaccaaa

SEQ ID NO: 172255 - RNA, 22 nt, Artificial Sequence
  Synthetic
gggacuugauaugauaaccaaa

SEQ ID NO: 172256 - RNA, 23 nt, Artificial Sequence
  Synthetic
ugggacuugauaugauaaccaaa

SEQ ID NO: 172257 - RNA, 24 nt, Artificial Sequence
  Synthetic
uugggacuugauaugauaaccaaa

SEQ ID NO: 172258 - RNA, 18 nt, Artificial Sequence
  Synthetic
ucuagcuauauaaccaaa

SEQ ID NO: 172259 - RNA, 19 nt, Artificial Sequence
  Synthetic
uucuagcuauauaaccaaa

SEQ ID NO: 172260 - RNA, 20 nt, Artificial Sequence
  Synthetic
uuucuagcuauauaaccaaa

SEQ ID NO: 172261 - RNA, 21 nt, Artificial Sequence
  Synthetic
cuuucuagcuauauaaccaaa

SEQ ID NO: 172262 - RNA, 22 nt, Artificial Sequence
  Synthetic
acuuucuagcuauauaaccaaa

SEQ ID NO: 172263 - RNA, 23 nt, Artificial Sequence
  Synthetic
gacuuucuagcuauauaaccaaa

SEQ ID NO: 172264 - RNA, 24 nt, Artificial Sequence
  Synthetic
ugacuuucuagcuauauaaccaaa

SEQ ID NO: 172265 - RNA, 18 nt, Artificial Sequence
  Synthetic
aaacagacaaacaccaaa

SEQ ID NO: 172266 - RNA, 19 nt, Artificial Sequence
  Synthetic
uaaacagacaaacaccaaa

SEQ ID NO: 172267 - RNA, 20 nt, Artificial Sequence
  Synthetic
guaaacagacaaacaccaaa

SEQ ID NO: 172268 - RNA, 21 nt, Artificial Sequence
  Synthetic
aguaaacagacaaacaccaaa

SEQ ID NO: 172269 - RNA, 22 nt, Artificial Sequence
  Synthetic
gaguaaacagacaaacaccaaa

SEQ ID NO: 172270 - RNA, 23 nt, Artificial Sequence
  Synthetic
agaguaaacagacaaacaccaaa

SEQ ID NO: 172271 - RNA, 24 nt, Artificial Sequence
  Synthetic
cagaguaaacagacaaacaccaaa

SEQ ID NO: 172272 - RNA, 18 nt, Artificial Sequence
  Synthetic
cacauauucaacaccaaa

SEQ ID NO: 172273 - RNA, 19 nt, Artificial Sequence
  Synthetic
acacauauucaacaccaaa

SEQ ID NO: 172274 - RNA, 20 nt, Artificial Sequence
  Synthetic
cacacauauucaacaccaaa

SEQ ID NO: 172275 - RNA, 21 nt, Artificial Sequence
  Synthetic
acacacauauucaacaccaaa

SEQ ID NO: 172276 - RNA, 22 nt, Artificial Sequence
  Synthetic
uacacacauauucaacaccaaa

SEQ ID NO: 172277 - RNA, 23 nt, Artificial Sequence
  Synthetic
auacacacauauucaacaccaaa

SEQ ID NO: 172278 - RNA, 24 nt, Artificial Sequence
  Synthetic
uauacacacauauucaacaccaaa

SEQ ID NO: 172279 - RNA, 18 nt, Artificial Sequence
  Synthetic
gagcagcuugucaccaaa

SEQ ID NO: 172280 - RNA, 19 nt, Artificial Sequence
  Synthetic
agagcagcuugucaccaaa

SEQ ID NO: 172281 - RNA, 20 nt, Artificial Sequence
  Synthetic
aagagcagcuugucaccaaa

SEQ ID NO: 172282 - RNA, 21 nt, Artificial Sequence
  Synthetic
gaagagcagcuugucaccaaa

SEQ ID NO: 172283 - RNA, 22 nt, Artificial Sequence
  Synthetic
ugaagagcagcuugucaccaaa

SEQ ID NO: 172284 - RNA, 23 nt, Artificial Sequence
  Synthetic
cugaagagcagcuugucaccaaa

SEQ ID NO: 172285 - RNA, 24 nt, Artificial Sequence
  Synthetic
ccugaagagcagcuugucaccaaa

SEQ ID NO: 172286 - RNA, 18 nt, Artificial Sequence
  Synthetic
caaugccaucauaccaaa

SEQ ID NO: 172287 - RNA, 19 nt, Artificial Sequence
  Synthetic
ucaaugccaucauaccaaa

SEQ ID NO: 172288 - RNA, 20 nt, Artificial Sequence
  Synthetic
uucaaugccaucauaccaaa

SEQ ID NO: 172289 - RNA, 21 nt, Artificial Sequence
  Synthetic
uuucaaugccaucauaccaaa

SEQ ID NO: 172290 - RNA, 22 nt, Artificial Sequence
  Synthetic
uuuucaaugccaucauaccaaa

SEQ ID NO: 172291 - RNA, 23 nt, Artificial Sequence
  Synthetic
cuuuucaaugccaucauaccaaa

SEQ ID NO: 172292 - RNA, 24 nt, Artificial Sequence
  Synthetic
ucuuuucaaugccaucauaccaaa

SEQ ID NO: 172293 - RNA, 18 nt, Artificial Sequence
  Synthetic
uuucagaguucuaccaaa

SEQ ID NO: 172294 - RNA, 19 nt, Artificial Sequence
  Synthetic
cuuucagaguucuaccaaa

SEQ ID NO: 172295 - RNA, 20 nt, Artificial Sequence
  Synthetic
ucuuucagaguucuaccaaa

SEQ ID NO: 172296 - RNA, 21 nt, Artificial Sequence
  Synthetic
gucuuucagaguucuaccaaa

SEQ ID NO: 172297 - RNA, 22 nt, Artificial Sequence
  Synthetic
ggucuuucagaguucuaccaaa

SEQ ID NO: 172298 - RNA, 23 nt, Artificial Sequence
  Synthetic
uggucuuucagaguucuaccaaa

SEQ ID NO: 172299 - RNA, 24 nt, Artificial Sequence
  Synthetic
auggucuuucagaguucuaccaaa

SEQ ID NO: 172300 - RNA, 18 nt, Artificial Sequence
  Synthetic
gaaacaaggaguaccaaa

SEQ ID NO: 172301 - RNA, 19 nt, Artificial Sequence
  Synthetic
ggaaacaaggaguaccaaa

SEQ ID NO: 172302 - RNA, 20 nt, Artificial Sequence
  Synthetic
uggaaacaaggaguaccaaa

SEQ ID NO: 172303 - RNA, 21 nt, Artificial Sequence
  Synthetic
cuggaaacaaggaguaccaaa

SEQ ID NO: 172304 - RNA, 22 nt, Artificial Sequence
  Synthetic
ucuggaaacaaggaguaccaaa

SEQ ID NO: 172305 - RNA, 23 nt, Artificial Sequence
  Synthetic
uucuggaaacaaggaguaccaaa

SEQ ID NO: 172306 - RNA, 24 nt, Artificial Sequence
  Synthetic
cuucuggaaacaaggaguaccaaa

SEQ ID NO: 172307 - RNA, 18 nt, Artificial Sequence
  Synthetic
aggucaguuguuaccaaa

SEQ ID NO: 172308 - RNA, 19 nt, Artificial Sequence
  Synthetic
uaggucaguuguuaccaaa

SEQ ID NO: 172309 - RNA, 20 nt, Artificial Sequence
  Synthetic
cuaggucaguuguuaccaaa

SEQ ID NO: 172310 - RNA, 21 nt, Artificial Sequence
  Synthetic
ucuaggucaguuguuaccaaa

SEQ ID NO: 172311 - RNA, 22 nt, Artificial Sequence
  Synthetic
aucuaggucaguuguuaccaaa

SEQ ID NO: 172312 - RNA, 23 nt, Artificial Sequence
  Synthetic
uaucuaggucaguuguuaccaaa

SEQ ID NO: 172313 - RNA, 24 nt, Artificial Sequence
  Synthetic
uuaucuaggucaguuguuaccaaa

SEQ ID NO: 172314 - RNA, 18 nt, Artificial Sequence
  Synthetic
uaguucucaaaacccaaa

SEQ ID NO: 172315 - RNA, 19 nt, Artificial Sequence
  Synthetic
auaguucucaaaacccaaa

SEQ ID NO: 172316 - RNA, 20 nt, Artificial Sequence
  Synthetic
uauaguucucaaaacccaaa

SEQ ID NO: 172317 - RNA, 21 nt, Artificial Sequence
  Synthetic
auauaguucucaaaacccaaa

SEQ ID NO: 172318 - RNA, 22 nt, Artificial Sequence
  Synthetic
gauauaguucucaaaacccaaa

SEQ ID NO: 172319 - RNA, 23 nt, Artificial Sequence
  Synthetic
ugauauaguucucaaaacccaaa

SEQ ID NO: 172320 - RNA, 24 nt, Artificial Sequence
  Synthetic
uugauauaguucucaaaacccaaa

SEQ ID NO: 172321 - RNA, 18 nt, Artificial Sequence
  Synthetic
uccuuggucaaacccaaa

SEQ ID NO: 172322 - RNA, 19 nt, Artificial Sequence
  Synthetic
cuccuuggucaaacccaaa

SEQ ID NO: 172323 - RNA, 20 nt, Artificial Sequence
  Synthetic
ucuccuuggucaaacccaaa

SEQ ID NO: 172324 - RNA, 21 nt, Artificial Sequence
  Synthetic
cucuccuuggucaaacccaaa

SEQ ID NO: 172325 - RNA, 22 nt, Artificial Sequence
  Synthetic
ccucuccuuggucaaacccaaa

SEQ ID NO: 172326 - RNA, 23 nt, Artificial Sequence
  Synthetic
uccucuccuuggucaaacccaaa

SEQ ID NO: 172327 - RNA, 24 nt, Artificial Sequence
  Synthetic
guccucuccuuggucaaacccaaa

SEQ ID NO: 172328 - RNA, 18 nt, Artificial Sequence
  Synthetic
acauagcaaacacccaaa

SEQ ID NO: 172329 - RNA, 19 nt, Artificial Sequence
  Synthetic
uacauagcaaacacccaaa

SEQ ID NO: 172330 - RNA, 20 nt, Artificial Sequence
  Synthetic
auacauagcaaacacccaaa

SEQ ID NO: 172331 - RNA, 21 nt, Artificial Sequence
  Synthetic
aauacauagcaaacacccaaa

SEQ ID NO: 172332 - RNA, 22 nt, Artificial Sequence
  Synthetic
caauacauagcaaacacccaaa

SEQ ID NO: 172333 - RNA, 23 nt, Artificial Sequence
  Synthetic
gcaauacauagcaaacacccaaa

SEQ ID NO: 172334 - RNA, 24 nt, Artificial Sequence
  Synthetic
ugcaauacauagcaaacacccaaa

SEQ ID NO: 172335 - RNA, 18 nt, Artificial Sequence
  Synthetic
ccccaccaccaccccaaa

SEQ ID NO: 172336 - RNA, 19 nt, Artificial Sequence
  Synthetic
cccccaccaccaccccaaa

SEQ ID NO: 172337 - RNA, 20 nt, Artificial Sequence
  Synthetic
ccccccaccaccaccccaaa

SEQ ID NO: 172338 - RNA, 21 nt, Artificial Sequence
  Synthetic
gccccccaccaccaccccaaa

SEQ ID NO: 172339 - RNA, 22 nt, Artificial Sequence
  Synthetic
cgccccccaccaccaccccaaa

SEQ ID NO: 172340 - RNA, 23 nt, Artificial Sequence
  Synthetic
ucgccccccaccaccaccccaaa

SEQ ID NO: 172341 - RNA, 24 nt, Artificial Sequence
  Synthetic
uucgccccccaccaccaccccaaa

SEQ ID NO: 172342 - RNA, 18 nt, Artificial Sequence
  Synthetic
ucuagagacuuccccaaa

SEQ ID NO: 172343 - RNA, 19 nt, Artificial Sequence
  Synthetic
aucuagagacuuccccaaa

SEQ ID NO: 172344 - RNA, 20 nt, Artificial Sequence
  Synthetic
caucuagagacuuccccaaa

SEQ ID NO: 172345 - RNA, 21 nt, Artificial Sequence
  Synthetic
ccaucuagagacuuccccaaa

SEQ ID NO: 172346 - RNA, 22 nt, Artificial Sequence
  Synthetic
cccaucuagagacuuccccaaa

SEQ ID NO: 172347 - RNA, 23 nt, Artificial Sequence
  Synthetic
ccccaucuagagacuuccccaaa

SEQ ID NO: 172348 - RNA, 24 nt, Artificial Sequence
  Synthetic
accccaucuagagacuuccccaaa

SEQ ID NO: 172349 - RNA, 18 nt, Artificial Sequence
  Synthetic
auauucagccagcccaaa

SEQ ID NO: 172350 - RNA, 19 nt, Artificial Sequence
  Synthetic
gauauucagccagcccaaa

SEQ ID NO: 172351 - RNA, 20 nt, Artificial Sequence
  Synthetic
agauauucagccagcccaaa

SEQ ID NO: 172352 - RNA, 21 nt, Artificial Sequence
  Synthetic
aagauauucagccagcccaaa

SEQ ID NO: 172353 - RNA, 22 nt, Artificial Sequence
  Synthetic
gaagauauucagccagcccaaa

SEQ ID NO: 172354 - RNA, 23 nt, Artificial Sequence
  Synthetic
ugaagauauucagccagcccaaa

SEQ ID NO: 172355 - RNA, 24 nt, Artificial Sequence
  Synthetic
cugaagauauucagccagcccaaa

SEQ ID NO: 172356 - RNA, 18 nt, Artificial Sequence
  Synthetic
uuucaguuucagcccaaa

SEQ ID NO: 172357 - RNA, 19 nt, Artificial Sequence
  Synthetic
uuuucaguuucagcccaaa

SEQ ID NO: 172358 - RNA, 20 nt, Artificial Sequence
  Synthetic
uuuuucaguuucagcccaaa

SEQ ID NO: 172359 - RNA, 21 nt, Artificial Sequence
  Synthetic
cuuuuucaguuucagcccaaa

SEQ ID NO: 172360 - RNA, 22 nt, Artificial Sequence
  Synthetic
gcuuuuucaguuucagcccaaa

SEQ ID NO: 172361 - RNA, 23 nt, Artificial Sequence
  Synthetic
ugcuuuuucaguuucagcccaaa

SEQ ID NO: 172362 - RNA, 24 nt, Artificial Sequence
  Synthetic
uugcuuuuucaguuucagcccaaa

SEQ ID NO: 172363 - RNA, 18 nt, Artificial Sequence
  Synthetic
uguggaaucagucccaaa

SEQ ID NO: 172364 - RNA, 19 nt, Artificial Sequence
  Synthetic
cuguggaaucagucccaaa

SEQ ID NO: 172365 - RNA, 20 nt, Artificial Sequence
  Synthetic
gcuguggaaucagucccaaa

SEQ ID NO: 172366 - RNA, 21 nt, Artificial Sequence
  Synthetic
ggcuguggaaucagucccaaa

SEQ ID NO: 172367 - RNA, 22 nt, Artificial Sequence
  Synthetic
gggcuguggaaucagucccaaa

SEQ ID NO: 172368 - RNA, 23 nt, Artificial Sequence
  Synthetic
agggcuguggaaucagucccaaa

SEQ ID NO: 172369 - RNA, 24 nt, Artificial Sequence
  Synthetic
cagggcuguggaaucagucccaaa

SEQ ID NO: 172370 - RNA, 18 nt, Artificial Sequence
  Synthetic
acauuagcaugucccaaa

SEQ ID NO: 172371 - RNA, 19 nt, Artificial Sequence
  Synthetic
aacauuagcaugucccaaa

SEQ ID NO: 172372 - RNA, 20 nt, Artificial Sequence
  Synthetic
uaacauuagcaugucccaaa

SEQ ID NO: 172373 - RNA, 21 nt, Artificial Sequence
  Synthetic
uuaacauuagcaugucccaaa

SEQ ID NO: 172374 - RNA, 22 nt, Artificial Sequence
  Synthetic
uuuaacauuagcaugucccaaa

SEQ ID NO: 172375 - RNA, 23 nt, Artificial Sequence
  Synthetic
uuuuaacauuagcaugucccaaa

SEQ ID NO: 172376 - RNA, 24 nt, Artificial Sequence
  Synthetic
auuuuaacauuagcaugucccaaa

SEQ ID NO: 172377 - RNA, 18 nt, Artificial Sequence
  Synthetic
ucuuauagaguucccaaa

SEQ ID NO: 172378 - RNA, 19 nt, Artificial Sequence
  Synthetic
uucuuauagaguucccaaa

SEQ ID NO: 172379 - RNA, 20 nt, Artificial Sequence
  Synthetic
cuucuuauagaguucccaaa

SEQ ID NO: 172380 - RNA, 21 nt, Artificial Sequence
  Synthetic
gcuucuuauagaguucccaaa

SEQ ID NO: 172381 - RNA, 22 nt, Artificial Sequence
  Synthetic
ggcuucuuauagaguucccaaa

SEQ ID NO: 172382 - RNA, 23 nt, Artificial Sequence
  Synthetic
uggcuucuuauagaguucccaaa

SEQ ID NO: 172383 - RNA, 24 nt, Artificial Sequence
  Synthetic
auggcuucuuauagaguucccaaa

SEQ ID NO: 172384 - RNA, 18 nt, Artificial Sequence
  Synthetic
cgggacaguuuucccaaa

SEQ ID NO: 172385 - RNA, 19 nt, Artificial Sequence
  Synthetic
ccgggacaguuuucccaaa

SEQ ID NO: 172386 - RNA, 20 nt, Artificial Sequence
  Synthetic
accgggacaguuuucccaaa

SEQ ID NO: 172387 - RNA, 21 nt, Artificial Sequence
  Synthetic
uaccgggacaguuuucccaaa

SEQ ID NO: 172388 - RNA, 22 nt, Artificial Sequence
  Synthetic
guaccgggacaguuuucccaaa

SEQ ID NO: 172389 - RNA, 23 nt, Artificial Sequence
  Synthetic
gguaccgggacaguuuucccaaa

SEQ ID NO: 172390 - RNA, 24 nt, Artificial Sequence
  Synthetic
agguaccgggacaguuuucccaaa

SEQ ID NO: 172391 - RNA, 18 nt, Artificial Sequence
  Synthetic
auuuuuuuuuuucccaaa

SEQ ID NO: 172392 - RNA, 19 nt, Artificial Sequence
  Synthetic
cauuuuuuuuuuucccaaa

SEQ ID NO: 172393 - RNA, 20 nt, Artificial Sequence
  Synthetic
gcauuuuuuuuuuucccaaa

SEQ ID NO: 172394 - RNA, 21 nt, Artificial Sequence
  Synthetic
agcauuuuuuuuuuucccaaa

SEQ ID NO: 172395 - RNA, 22 nt, Artificial Sequence
  Synthetic
aagcauuuuuuuuuuucccaaa

SEQ ID NO: 172396 - RNA, 23 nt, Artificial Sequence
  Synthetic
aaagcauuuuuuuuuuucccaaa

SEQ ID NO: 172397 - RNA, 24 nt, Artificial Sequence
  Synthetic
uaaagcauuuuuuuuuuucccaaa

SEQ ID NO: 172398 - RNA, 18 nt, Artificial Sequence
  Synthetic
uuaaagucuuaagccaaa

SEQ ID NO: 172399 - RNA, 19 nt, Artificial Sequence
  Synthetic
uuuaaagucuuaagccaaa

SEQ ID NO: 172400 - RNA, 20 nt, Artificial Sequence
  Synthetic
auuuaaagucuuaagccaaa

SEQ ID NO: 172401 - RNA, 21 nt, Artificial Sequence
  Synthetic
cauuuaaagucuuaagccaaa

SEQ ID NO: 172402 - RNA, 22 nt, Artificial Sequence
  Synthetic
gcauuuaaagucuuaagccaaa

SEQ ID NO: 172403 - RNA, 23 nt, Artificial Sequence
  Synthetic
ugcauuuaaagucuuaagccaaa

SEQ ID NO: 172404 - RNA, 24 nt, Artificial Sequence
  Synthetic
uugcauuuaaagucuuaagccaaa

SEQ ID NO: 172405 - RNA, 18 nt, Artificial Sequence
  Synthetic
gaaccucccucagccaaa

SEQ ID NO: 172406 - RNA, 19 nt, Artificial Sequence
  Synthetic
agaaccucccucagccaaa

SEQ ID NO: 172407 - RNA, 20 nt, Artificial Sequence
  Synthetic
gagaaccucccucagccaaa

SEQ ID NO: 172408 - RNA, 21 nt, Artificial Sequence
  Synthetic
agagaaccucccucagccaaa

SEQ ID NO: 172409 - RNA, 22 nt, Artificial Sequence
  Synthetic
cagagaaccucccucagccaaa

SEQ ID NO: 172410 - RNA, 23 nt, Artificial Sequence
  Synthetic
ccagagaaccucccucagccaaa

SEQ ID NO: 172411 - RNA, 24 nt, Artificial Sequence
  Synthetic
uccagagaaccucccucagccaaa

SEQ ID NO: 172412 - RNA, 18 nt, Artificial Sequence
  Synthetic
gagugauugugagccaaa

SEQ ID NO: 172413 - RNA, 19 nt, Artificial Sequence
  Synthetic
agagugauugugagccaaa

SEQ ID NO: 172414 - RNA, 20 nt, Artificial Sequence
  Synthetic
gagagugauugugagccaaa

SEQ ID NO: 172415 - RNA, 21 nt, Artificial Sequence
  Synthetic
agagagugauugugagccaaa

SEQ ID NO: 172416 - RNA, 22 nt, Artificial Sequence
  Synthetic
gagagagugauugugagccaaa

SEQ ID NO: 172417 - RNA, 23 nt, Artificial Sequence
  Synthetic
ugagagagugauugugagccaaa

SEQ ID NO: 172418 - RNA, 24 nt, Artificial Sequence
  Synthetic
cugagagagugauugugagccaaa

SEQ ID NO: 172419 - RNA, 18 nt, Artificial Sequence
  Synthetic
ccaacagaaauagccaaa

SEQ ID NO: 172420 - RNA, 19 nt, Artificial Sequence
  Synthetic
gccaacagaaauagccaaa

SEQ ID NO: 172421 - RNA, 20 nt, Artificial Sequence
  Synthetic
cgccaacagaaauagccaaa

SEQ ID NO: 172422 - RNA, 21 nt, Artificial Sequence
  Synthetic
ucgccaacagaaauagccaaa

SEQ ID NO: 172423 - RNA, 22 nt, Artificial Sequence
  Synthetic
cucgccaacagaaauagccaaa

SEQ ID NO: 172424 - RNA, 23 nt, Artificial Sequence
  Synthetic
gcucgccaacagaaauagccaaa

SEQ ID NO: 172425 - RNA, 24 nt, Artificial Sequence
  Synthetic
agcucgccaacagaaauagccaaa

SEQ ID NO: 172426 - RNA, 18 nt, Artificial Sequence
  Synthetic
ugggagaaauuagccaaa

SEQ ID NO: 172427 - RNA, 19 nt, Artificial Sequence
  Synthetic
augggagaaauuagccaaa

SEQ ID NO: 172428 - RNA, 20 nt, Artificial Sequence
  Synthetic
aaugggagaaauuagccaaa

SEQ ID NO: 172429 - RNA, 21 nt, Artificial Sequence
  Synthetic
aaaugggagaaauuagccaaa

SEQ ID NO: 172430 - RNA, 22 nt, Artificial Sequence
  Synthetic
caaaugggagaaauuagccaaa

SEQ ID NO: 172431 - RNA, 23 nt, Artificial Sequence
  Synthetic
acaaaugggagaaauuagccaaa

SEQ ID NO: 172432 - RNA, 24 nt, Artificial Sequence
  Synthetic
uacaaaugggagaaauuagccaaa

SEQ ID NO: 172433 - RNA, 18 nt, Artificial Sequence
  Synthetic
uuucuuuaaaaggccaaa

SEQ ID NO: 172434 - RNA, 19 nt, Artificial Sequence
  Synthetic
uuuucuuuaaaaggccaaa

SEQ ID NO: 172435 - RNA, 20 nt, Artificial Sequence
  Synthetic
uuuuucuuuaaaaggccaaa

SEQ ID NO: 172436 - RNA, 21 nt, Artificial Sequence
  Synthetic
uuuuuucuuuaaaaggccaaa

SEQ ID NO: 172437 - RNA, 22 nt, Artificial Sequence
  Synthetic
cuuuuuucuuuaaaaggccaaa

SEQ ID NO: 172438 - RNA, 23 nt, Artificial Sequence
  Synthetic
acuuuuuucuuuaaaaggccaaa

SEQ ID NO: 172439 - RNA, 24 nt, Artificial Sequence
  Synthetic
aacuuuuuucuuuaaaaggccaaa

SEQ ID NO: 172440 - RNA, 18 nt, Artificial Sequence
  Synthetic
uguuugacuaaggccaaa

SEQ ID NO: 172441 - RNA, 19 nt, Artificial Sequence
  Synthetic
cuguuugacuaaggccaaa

SEQ ID NO: 172442 - RNA, 20 nt, Artificial Sequence
  Synthetic
ucuguuugacuaaggccaaa

SEQ ID NO: 172443 - RNA, 21 nt, Artificial Sequence
  Synthetic
uucuguuugacuaaggccaaa

SEQ ID NO: 172444 - RNA, 22 nt, Artificial Sequence
  Synthetic
auucuguuugacuaaggccaaa

SEQ ID NO: 172445 - RNA, 23 nt, Artificial Sequence
  Synthetic
gauucuguuugacuaaggccaaa

SEQ ID NO: 172446 - RNA, 24 nt, Artificial Sequence
  Synthetic
ugauucuguuugacuaaggccaaa

SEQ ID NO: 172447 - RNA, 18 nt, Artificial Sequence
  Synthetic
cuaaugugccaggccaaa

SEQ ID NO: 172448 - RNA, 19 nt, Artificial Sequence
  Synthetic
ucuaaugugccaggccaaa

SEQ ID NO: 172449 - RNA, 20 nt, Artificial Sequence
  Synthetic
gucuaaugugccaggccaaa

SEQ ID NO: 172450 - RNA, 21 nt, Artificial Sequence
  Synthetic
ggucuaaugugccaggccaaa

SEQ ID NO: 172451 - RNA, 22 nt, Artificial Sequence
  Synthetic
uggucuaaugugccaggccaaa

SEQ ID NO: 172452 - RNA, 23 nt, Artificial Sequence
  Synthetic
auggucuaaugugccaggccaaa

SEQ ID NO: 172453 - RNA, 24 nt, Artificial Sequence
  Synthetic
gauggucuaaugugccaggccaaa

SEQ ID NO: 172454 - RNA, 18 nt, Artificial Sequence
  Synthetic
ggugccucagaggccaaa

SEQ ID NO: 172455 - RNA, 19 nt, Artificial Sequence
  Synthetic
aggugccucagaggccaaa

SEQ ID NO: 172456 - RNA, 20 nt, Artificial Sequence
  Synthetic
aaggugccucagaggccaaa

SEQ ID NO: 172457 - RNA, 21 nt, Artificial Sequence
  Synthetic
caaggugccucagaggccaaa

SEQ ID NO: 172458 - RNA, 22 nt, Artificial Sequence
  Synthetic
gcaaggugccucagaggccaaa

SEQ ID NO: 172459 - RNA, 23 nt, Artificial Sequence
  Synthetic
ugcaaggugccucagaggccaaa

SEQ ID NO: 172460 - RNA, 24 nt, Artificial Sequence
  Synthetic
cugcaaggugccucagaggccaaa

SEQ ID NO: 172461 - RNA, 18 nt, Artificial Sequence
  Synthetic
ccuaaaucaaaugccaaa

SEQ ID NO: 172462 - RNA, 19 nt, Artificial Sequence
  Synthetic
accuaaaucaaaugccaaa

SEQ ID NO: 172463 - RNA, 20 nt, Artificial Sequence
  Synthetic
aaccuaaaucaaaugccaaa

SEQ ID NO: 172464 - RNA, 21 nt, Artificial Sequence
  Synthetic
aaaccuaaaucaaaugccaaa

SEQ ID NO: 172465 - RNA, 22 nt, Artificial Sequence
  Synthetic
aaaaccuaaaucaaaugccaaa

SEQ ID NO: 172466 - RNA, 23 nt, Artificial Sequence
  Synthetic
caaaaccuaaaucaaaugccaaa

SEQ ID NO: 172467 - RNA, 24 nt, Artificial Sequence
  Synthetic
ccaaaaccuaaaucaaaugccaaa

SEQ ID NO: 172468 - RNA, 18 nt, Artificial Sequence
  Synthetic
ccaccgagaucugccaaa

SEQ ID NO: 172469 - RNA, 19 nt, Artificial Sequence
  Synthetic
cccaccgagaucugccaaa

SEQ ID NO: 172470 - RNA, 20 nt, Artificial Sequence
  Synthetic
gcccaccgagaucugccaaa

SEQ ID NO: 172471 - RNA, 21 nt, Artificial Sequence
  Synthetic
ggcccaccgagaucugccaaa

SEQ ID NO: 172472 - RNA, 22 nt, Artificial Sequence
  Synthetic
gggcccaccgagaucugccaaa

SEQ ID NO: 172473 - RNA, 23 nt, Artificial Sequence
  Synthetic
ugggcccaccgagaucugccaaa

SEQ ID NO: 172474 - RNA, 24 nt, Artificial Sequence
  Synthetic
cugggcccaccgagaucugccaaa

SEQ ID NO: 172475 - RNA, 18 nt, Artificial Sequence
  Synthetic
uccuaccccaaauccaaa

SEQ ID NO: 172476 - RNA, 19 nt, Artificial Sequence
  Synthetic
cuccuaccccaaauccaaa

SEQ ID NO: 172477 - RNA, 20 nt, Artificial Sequence
  Synthetic
ccuccuaccccaaauccaaa

SEQ ID NO: 172478 - RNA, 21 nt, Artificial Sequence
  Synthetic
uccuccuaccccaaauccaaa

SEQ ID NO: 172479 - RNA, 22 nt, Artificial Sequence
  Synthetic
uuccuccuaccccaaauccaaa

SEQ ID NO: 172480 - RNA, 23 nt, Artificial Sequence
  Synthetic
cuuccuccuaccccaaauccaaa

SEQ ID NO: 172481 - RNA, 24 nt, Artificial Sequence
  Synthetic
ccuuccuccuaccccaaauccaaa

SEQ ID NO: 172482 - RNA, 18 nt, Artificial Sequence
  Synthetic
uaaagcaaauaauccaaa

SEQ ID NO: 172483 - RNA, 19 nt, Artificial Sequence
  Synthetic
uuaaagcaaauaauccaaa

SEQ ID NO: 172484 - RNA, 20 nt, Artificial Sequence
  Synthetic
guuaaagcaaauaauccaaa

SEQ ID NO: 172485 - RNA, 21 nt, Artificial Sequence
  Synthetic
aguuaaagcaaauaauccaaa

SEQ ID NO: 172486 - RNA, 22 nt, Artificial Sequence
  Synthetic
aaguuaaagcaaauaauccaaa

SEQ ID NO: 172487 - RNA, 23 nt, Artificial Sequence
  Synthetic
uaaguuaaagcaaauaauccaaa

SEQ ID NO: 172488 - RNA, 24 nt, Artificial Sequence
  Synthetic
uuaaguuaaagcaaauaauccaaa

SEQ ID NO: 172489 - RNA, 18 nt, Artificial Sequence
  Synthetic
agggccuuguaauccaaa

SEQ ID NO: 172490 - RNA, 19 nt, Artificial Sequence
  Synthetic
gagggccuuguaauccaaa

SEQ ID NO: 172491 - RNA, 20 nt, Artificial Sequence
  Synthetic
cgagggccuuguaauccaaa

SEQ ID NO: 172492 - RNA, 21 nt, Artificial Sequence
  Synthetic
ucgagggccuuguaauccaaa

SEQ ID NO: 172493 - RNA, 22 nt, Artificial Sequence
  Synthetic
uucgagggccuuguaauccaaa

SEQ ID NO: 172494 - RNA, 23 nt, Artificial Sequence
  Synthetic
auucgagggccuuguaauccaaa

SEQ ID NO: 172495 - RNA, 24 nt, Artificial Sequence
  Synthetic
uauucgagggccuuguaauccaaa

SEQ ID NO: 172496 - RNA, 18 nt, Artificial Sequence
  Synthetic
uucagaaucauauccaaa

SEQ ID NO: 172497 - RNA, 19 nt, Artificial Sequence
  Synthetic
auucagaaucauauccaaa

SEQ ID NO: 172498 - RNA, 20 nt, Artificial Sequence
  Synthetic
aauucagaaucauauccaaa

SEQ ID NO: 172499 - RNA, 21 nt, Artificial Sequence
  Synthetic
aaauucagaaucauauccaaa

SEQ ID NO: 172500 - RNA, 22 nt, Artificial Sequence
  Synthetic
aaaauucagaaucauauccaaa

SEQ ID NO: 172501 - RNA, 23 nt, Artificial Sequence
  Synthetic
caaaauucagaaucauauccaaa

SEQ ID NO: 172502 - RNA, 24 nt, Artificial Sequence
  Synthetic
ccaaaauucagaaucauauccaaa

SEQ ID NO: 172503 - RNA, 18 nt, Artificial Sequence
  Synthetic
gagguggaauccuccaaa

SEQ ID NO: 172504 - RNA, 19 nt, Artificial Sequence
  Synthetic
agagguggaauccuccaaa

SEQ ID NO: 172505 - RNA, 20 nt, Artificial Sequence
  Synthetic
cagagguggaauccuccaaa

SEQ ID NO: 172506 - RNA, 21 nt, Artificial Sequence
  Synthetic
gcagagguggaauccuccaaa

SEQ ID NO: 172507 - RNA, 22 nt, Artificial Sequence
  Synthetic
agcagagguggaauccuccaaa

SEQ ID NO: 172508 - RNA, 23 nt, Artificial Sequence
  Synthetic
uagcagagguggaauccuccaaa

SEQ ID NO: 172509 - RNA, 24 nt, Artificial Sequence
  Synthetic
guagcagagguggaauccuccaaa

SEQ ID NO: 172510 - RNA, 18 nt, Artificial Sequence
  Synthetic
gguucuucuuccuccaaa

SEQ ID NO: 172511 - RNA, 19 nt, Artificial Sequence
  Synthetic
ugguucuucuuccuccaaa

SEQ ID NO: 172512 - RNA, 20 nt, Artificial Sequence
  Synthetic
cugguucuucuuccuccaaa

SEQ ID NO: 172513 - RNA, 21 nt, Artificial Sequence
  Synthetic
ucugguucuucuuccuccaaa

SEQ ID NO: 172514 - RNA, 22 nt, Artificial Sequence
  Synthetic
uucugguucuucuuccuccaaa

SEQ ID NO: 172515 - RNA, 23 nt, Artificial Sequence
  Synthetic
uuucugguucuucuuccuccaaa

SEQ ID NO: 172516 - RNA, 24 nt, Artificial Sequence
  Synthetic
cuuucugguucuucuuccuccaaa

SEQ ID NO: 172517 - RNA, 18 nt, Artificial Sequence
  Synthetic
ccccaucuuuccuccaaa

SEQ ID NO: 172518 - RNA, 19 nt, Artificial Sequence
  Synthetic
cccccaucuuuccuccaaa

SEQ ID NO: 172519 - RNA, 20 nt, Artificial Sequence
  Synthetic
acccccaucuuuccuccaaa

SEQ ID NO: 172520 - RNA, 21 nt, Artificial Sequence
  Synthetic
gacccccaucuuuccuccaaa

SEQ ID NO: 172521 - RNA, 22 nt, Artificial Sequence
  Synthetic
ugacccccaucuuuccuccaaa

SEQ ID NO: 172522 - RNA, 23 nt, Artificial Sequence
  Synthetic
augacccccaucuuuccuccaaa

SEQ ID NO: 172523 - RNA, 24 nt, Artificial Sequence
  Synthetic
aaugacccccaucuuuccuccaaa

SEQ ID NO: 172524 - RNA, 18 nt, Artificial Sequence
  Synthetic
agaagucacuucuccaaa

SEQ ID NO: 172525 - RNA, 19 nt, Artificial Sequence
  Synthetic
gagaagucacuucuccaaa

SEQ ID NO: 172526 - RNA, 20 nt, Artificial Sequence
  Synthetic
ggagaagucacuucuccaaa

SEQ ID NO: 172527 - RNA, 21 nt, Artificial Sequence
  Synthetic
aggagaagucacuucuccaaa

SEQ ID NO: 172528 - RNA, 22 nt, Artificial Sequence
  Synthetic
gaggagaagucacuucuccaaa

SEQ ID NO: 172529 - RNA, 23 nt, Artificial Sequence
  Synthetic
ugaggagaagucacuucuccaaa

SEQ ID NO: 172530 - RNA, 24 nt, Artificial Sequence
  Synthetic
uugaggagaagucacuucuccaaa

SEQ ID NO: 172531 - RNA, 18 nt, Artificial Sequence
  Synthetic
ccucccuucagguccaaa

SEQ ID NO: 172532 - RNA, 19 nt, Artificial Sequence
  Synthetic
gccucccuucagguccaaa

SEQ ID NO: 172533 - RNA, 20 nt, Artificial Sequence
  Synthetic
ugccucccuucagguccaaa

SEQ ID NO: 172534 - RNA, 21 nt, Artificial Sequence
  Synthetic
uugccucccuucagguccaaa

SEQ ID NO: 172535 - RNA, 22 nt, Artificial Sequence
  Synthetic
auugccucccuucagguccaaa

SEQ ID NO: 172536 - RNA, 23 nt, Artificial Sequence
  Synthetic
aauugccucccuucagguccaaa

SEQ ID NO: 172537 - RNA, 24 nt, Artificial Sequence
  Synthetic
uaauugccucccuucagguccaaa

SEQ ID NO: 172538 - RNA, 18 nt, Artificial Sequence
  Synthetic
cugauugcaaauuccaaa

SEQ ID NO: 172539 - RNA, 19 nt, Artificial Sequence
  Synthetic
gcugauugcaaauuccaaa

SEQ ID NO: 172540 - RNA, 20 nt, Artificial Sequence
  Synthetic
ugcugauugcaaauuccaaa

SEQ ID NO: 172541 - RNA, 21 nt, Artificial Sequence
  Synthetic
augcugauugcaaauuccaaa

SEQ ID NO: 172542 - RNA, 22 nt, Artificial Sequence
  Synthetic
aaugcugauugcaaauuccaaa

SEQ ID NO: 172543 - RNA, 23 nt, Artificial Sequence
  Synthetic
gaaugcugauugcaaauuccaaa

SEQ ID NO: 172544 - RNA, 24 nt, Artificial Sequence
  Synthetic
agaaugcugauugcaaauuccaaa

SEQ ID NO: 172545 - RNA, 18 nt, Artificial Sequence
  Synthetic
ugcuuaaacucuuccaaa

SEQ ID NO: 172546 - RNA, 19 nt, Artificial Sequence
  Synthetic
cugcuuaaacucuuccaaa

SEQ ID NO: 172547 - RNA, 20 nt, Artificial Sequence
  Synthetic
acugcuuaaacucuuccaaa

SEQ ID NO: 172548 - RNA, 21 nt, Artificial Sequence
  Synthetic
aacugcuuaaacucuuccaaa

SEQ ID NO: 172549 - RNA, 22 nt, Artificial Sequence
  Synthetic
aaacugcuuaaacucuuccaaa

SEQ ID NO: 172550 - RNA, 23 nt, Artificial Sequence
  Synthetic
aaaacugcuuaaacucuuccaaa

SEQ ID NO: 172551 - RNA, 24 nt, Artificial Sequence
  Synthetic
gaaaacugcuuaaacucuuccaaa

SEQ ID NO: 172552 - RNA, 18 nt, Artificial Sequence
  Synthetic
aaguccuucauuuccaaa

SEQ ID NO: 172553 - RNA, 19 nt, Artificial Sequence
  Synthetic
uaaguccuucauuuccaaa

SEQ ID NO: 172554 - RNA, 20 nt, Artificial Sequence
  Synthetic
cuaaguccuucauuuccaaa

SEQ ID NO: 172555 - RNA, 21 nt, Artificial Sequence
  Synthetic
acuaaguccuucauuuccaaa

SEQ ID NO: 172556 - RNA, 22 nt, Artificial Sequence
  Synthetic
aacuaaguccuucauuuccaaa

SEQ ID NO: 172557 - RNA, 23 nt, Artificial Sequence
  Synthetic
gaacuaaguccuucauuuccaaa

SEQ ID NO: 172558 - RNA, 24 nt, Artificial Sequence
  Synthetic
ggaacuaaguccuucauuuccaaa

SEQ ID NO: 172559 - RNA, 18 nt, Artificial Sequence
  Synthetic
uuuuuaguucuuuccaaa

SEQ ID NO: 172560 - RNA, 19 nt, Artificial Sequence
  Synthetic
guuuuuaguucuuuccaaa

SEQ ID NO: 172561 - RNA, 20 nt, Artificial Sequence
  Synthetic
aguuuuuaguucuuuccaaa

SEQ ID NO: 172562 - RNA, 21 nt, Artificial Sequence
  Synthetic
aaguuuuuaguucuuuccaaa

SEQ ID NO: 172563 - RNA, 22 nt, Artificial Sequence
  Synthetic
aaaguuuuuaguucuuuccaaa

SEQ ID NO: 172564 - RNA, 23 nt, Artificial Sequence
  Synthetic
aaaaguuuuuaguucuuuccaaa

SEQ ID NO: 172565 - RNA, 24 nt, Artificial Sequence
  Synthetic
uaaaaguuuuuaguucuuuccaaa

SEQ ID NO: 172566 - RNA, 18 nt, Artificial Sequence
  Synthetic
ucuguuucauuuuccaaa

SEQ ID NO: 172567 - RNA, 19 nt, Artificial Sequence
  Synthetic
uucuguuucauuuuccaaa

SEQ ID NO: 172568 - RNA, 20 nt, Artificial Sequence
  Synthetic
cuucuguuucauuuuccaaa

SEQ ID NO: 172569 - RNA, 21 nt, Artificial Sequence
  Synthetic
acuucuguuucauuuuccaaa

SEQ ID NO: 172570 - RNA, 22 nt, Artificial Sequence
  Synthetic
gacuucuguuucauuuuccaaa

SEQ ID NO: 172571 - RNA, 23 nt, Artificial Sequence
  Synthetic
ugacuucuguuucauuuuccaaa

SEQ ID NO: 172572 - RNA, 24 nt, Artificial Sequence
  Synthetic
augacuucuguuucauuuuccaaa

SEQ ID NO: 172573 - RNA, 18 nt, Artificial Sequence
  Synthetic
agagaagugaaaagcaaa

SEQ ID NO: 172574 - RNA, 19 nt, Artificial Sequence
  Synthetic
cagagaagugaaaagcaaa

SEQ ID NO: 172575 - RNA, 20 nt, Artificial Sequence
  Synthetic
ccagagaagugaaaagcaaa

SEQ ID NO: 172576 - RNA, 21 nt, Artificial Sequence
  Synthetic
gccagagaagugaaaagcaaa

SEQ ID NO: 172577 - RNA, 22 nt, Artificial Sequence
  Synthetic
ugccagagaagugaaaagcaaa

SEQ ID NO: 172578 - RNA, 23 nt, Artificial Sequence
  Synthetic
augccagagaagugaaaagcaaa

SEQ ID NO: 172579 - RNA, 24 nt, Artificial Sequence
  Synthetic
aaugccagagaagugaaaagcaaa

SEQ ID NO: 172580 - RNA, 18 nt, Artificial Sequence
  Synthetic
aucaugguggaaagcaaa

SEQ ID NO: 172581 - RNA, 19 nt, Artificial Sequence
  Synthetic
aaucaugguggaaagcaaa

SEQ ID NO: 172582 - RNA, 20 nt, Artificial Sequence
  Synthetic
uaaucaugguggaaagcaaa

SEQ ID NO: 172583 - RNA, 21 nt, Artificial Sequence
  Synthetic
auaaucaugguggaaagcaaa

SEQ ID NO: 172584 - RNA, 22 nt, Artificial Sequence
  Synthetic
uauaaucaugguggaaagcaaa

SEQ ID NO: 172585 - RNA, 23 nt, Artificial Sequence
  Synthetic
uuauaaucaugguggaaagcaaa

SEQ ID NO: 172586 - RNA, 24 nt, Artificial Sequence
  Synthetic
cuuauaaucaugguggaaagcaaa

SEQ ID NO: 172587 - RNA, 18 nt, Artificial Sequence
  Synthetic
aucaaauauuaaagcaaa

SEQ ID NO: 172588 - RNA, 19 nt, Artificial Sequence
  Synthetic
uaucaaauauuaaagcaaa

SEQ ID NO: 172589 - RNA, 20 nt, Artificial Sequence
  Synthetic
guaucaaauauuaaagcaaa

SEQ ID NO: 172590 - RNA, 21 nt, Artificial Sequence
  Synthetic
aguaucaaauauuaaagcaaa

SEQ ID NO: 172591 - RNA, 22 nt, Artificial Sequence
  Synthetic
caguaucaaauauuaaagcaaa

SEQ ID NO: 172592 - RNA, 23 nt, Artificial Sequence
  Synthetic
acaguaucaaauauuaaagcaaa

SEQ ID NO: 172593 - RNA, 24 nt, Artificial Sequence
  Synthetic
uacaguaucaaauauuaaagcaaa

SEQ ID NO: 172594 - RNA, 18 nt, Artificial Sequence
  Synthetic
acagagcagacaagcaaa

SEQ ID NO: 172595 - RNA, 19 nt, Artificial Sequence
  Synthetic
gacagagcagacaagcaaa

SEQ ID NO: 172596 - RNA, 20 nt, Artificial Sequence
  Synthetic
ugacagagcagacaagcaaa

SEQ ID NO: 172597 - RNA, 21 nt, Artificial Sequence
  Synthetic
uugacagagcagacaagcaaa

SEQ ID NO: 172598 - RNA, 22 nt, Artificial Sequence
  Synthetic
cuugacagagcagacaagcaaa

SEQ ID NO: 172599 - RNA, 23 nt, Artificial Sequence
  Synthetic
ccuugacagagcagacaagcaaa

SEQ ID NO: 172600 - RNA, 24 nt, Artificial Sequence
  Synthetic
uccuugacagagcagacaagcaaa

SEQ ID NO: 172601 - RNA, 18 nt, Artificial Sequence
  Synthetic
gaauauuuuccaagcaaa

SEQ ID NO: 172602 - RNA, 19 nt, Artificial Sequence
  Synthetic
ggaauauuuuccaagcaaa

SEQ ID NO: 172603 - RNA, 20 nt, Artificial Sequence
  Synthetic
cggaauauuuuccaagcaaa

SEQ ID NO: 172604 - RNA, 21 nt, Artificial Sequence
  Synthetic
gcggaauauuuuccaagcaaa

SEQ ID NO: 172605 - RNA, 22 nt, Artificial Sequence
  Synthetic
ggcggaauauuuuccaagcaaa

SEQ ID NO: 172606 - RNA, 23 nt, Artificial Sequence
  Synthetic
uggcggaauauuuuccaagcaaa

SEQ ID NO: 172607 - RNA, 24 nt, Artificial Sequence
  Synthetic
auggcggaauauuuuccaagcaaa

SEQ ID NO: 172608 - RNA, 18 nt, Artificial Sequence
  Synthetic
aaacacaaaucaagcaaa

SEQ ID NO: 172609 - RNA, 19 nt, Artificial Sequence
  Synthetic
aaaacacaaaucaagcaaa

SEQ ID NO: 172610 - RNA, 20 nt, Artificial Sequence
  Synthetic
caaaacacaaaucaagcaaa

SEQ ID NO: 172611 - RNA, 21 nt, Artificial Sequence
  Synthetic
acaaaacacaaaucaagcaaa

SEQ ID NO: 172612 - RNA, 22 nt, Artificial Sequence
  Synthetic
cacaaaacacaaaucaagcaaa

SEQ ID NO: 172613 - RNA, 23 nt, Artificial Sequence
  Synthetic
ucacaaaacacaaaucaagcaaa

SEQ ID NO: 172614 - RNA, 24 nt, Artificial Sequence
  Synthetic
cucacaaaacacaaaucaagcaaa

SEQ ID NO: 172615 - RNA, 18 nt, Artificial Sequence
  Synthetic
aucacagugagaagcaaa

SEQ ID NO: 172616 - RNA, 19 nt, Artificial Sequence
  Synthetic
aaucacagugagaagcaaa

SEQ ID NO: 172617 - RNA, 20 nt, Artificial Sequence
  Synthetic
aaaucacagugagaagcaaa

SEQ ID NO: 172618 - RNA, 21 nt, Artificial Sequence
  Synthetic
aaaaucacagugagaagcaaa

SEQ ID NO: 172619 - RNA, 22 nt, Artificial Sequence
  Synthetic
uaaaaucacagugagaagcaaa

SEQ ID NO: 172620 - RNA, 23 nt, Artificial Sequence
  Synthetic
uuaaaaucacagugagaagcaaa

SEQ ID NO: 172621 - RNA, 24 nt, Artificial Sequence
  Synthetic
auuaaaaucacagugagaagcaaa

SEQ ID NO: 172622 - RNA, 18 nt, Artificial Sequence
  Synthetic
aagucaauccuaagcaaa

SEQ ID NO: 172623 - RNA, 19 nt, Artificial Sequence
  Synthetic
caagucaauccuaagcaaa

SEQ ID NO: 172624 - RNA, 20 nt, Artificial Sequence
  Synthetic
ccaagucaauccuaagcaaa

SEQ ID NO: 172625 - RNA, 21 nt, Artificial Sequence
  Synthetic
gccaagucaauccuaagcaaa

SEQ ID NO: 172626 - RNA, 22 nt, Artificial Sequence
  Synthetic
agccaagucaauccuaagcaaa

SEQ ID NO: 172627 - RNA, 23 nt, Artificial Sequence
  Synthetic
uagccaagucaauccuaagcaaa

SEQ ID NO: 172628 - RNA, 24 nt, Artificial Sequence
  Synthetic
auagccaagucaauccuaagcaaa

SEQ ID NO: 172629 - RNA, 18 nt, Artificial Sequence
  Synthetic
uauuuaccaagcagcaaa

SEQ ID NO: 172630 - RNA, 19 nt, Artificial Sequence
  Synthetic
auauuuaccaagcagcaaa

SEQ ID NO: 172631 - RNA, 20 nt, Artificial Sequence
  Synthetic
aauauuuaccaagcagcaaa

SEQ ID NO: 172632 - RNA, 21 nt, Artificial Sequence
  Synthetic
gaauauuuaccaagcagcaaa

SEQ ID NO: 172633 - RNA, 22 nt, Artificial Sequence
  Synthetic
ugaauauuuaccaagcagcaaa

SEQ ID NO: 172634 - RNA, 23 nt, Artificial Sequence
  Synthetic
augaauauuuaccaagcagcaaa

SEQ ID NO: 172635 - RNA, 24 nt, Artificial Sequence
  Synthetic
gaugaauauuuaccaagcagcaaa

SEQ ID NO: 172636 - RNA, 18 nt, Artificial Sequence
  Synthetic
caccauccacagagcaaa

SEQ ID NO: 172637 - RNA, 19 nt, Artificial Sequence
  Synthetic
acaccauccacagagcaaa

SEQ ID NO: 172638 - RNA, 20 nt, Artificial Sequence
  Synthetic
cacaccauccacagagcaaa

SEQ ID NO: 172639 - RNA, 21 nt, Artificial Sequence
  Synthetic
acacaccauccacagagcaaa

SEQ ID NO: 172640 - RNA, 22 nt, Artificial Sequence
  Synthetic
uacacaccauccacagagcaaa

SEQ ID NO: 172641 - RNA, 23 nt, Artificial Sequence
  Synthetic
guacacaccauccacagagcaaa

SEQ ID NO: 172642 - RNA, 24 nt, Artificial Sequence
  Synthetic
aguacacaccauccacagagcaaa

SEQ ID NO: 172643 - RNA, 18 nt, Artificial Sequence
  Synthetic
gcuggaacugagagcaaa

SEQ ID NO: 172644 - RNA, 19 nt, Artificial Sequence
  Synthetic
ugcuggaacugagagcaaa

SEQ ID NO: 172645 - RNA, 20 nt, Artificial Sequence
  Synthetic
uugcuggaacugagagcaaa

SEQ ID NO: 172646 - RNA, 21 nt, Artificial Sequence
  Synthetic
uuugcuggaacugagagcaaa

SEQ ID NO: 172647 - RNA, 22 nt, Artificial Sequence
  Synthetic
uuuugcuggaacugagagcaaa

SEQ ID NO: 172648 - RNA, 23 nt, Artificial Sequence
  Synthetic
guuuugcuggaacugagagcaaa

SEQ ID NO: 172649 - RNA, 24 nt, Artificial Sequence
  Synthetic
uguuuugcuggaacugagagcaaa

SEQ ID NO: 172650 - RNA, 18 nt, Artificial Sequence
  Synthetic
gacccuccccugagcaaa

SEQ ID NO: 172651 - RNA, 19 nt, Artificial Sequence
  Synthetic
ugacccuccccugagcaaa

SEQ ID NO: 172652 - RNA, 20 nt, Artificial Sequence
  Synthetic
cugacccuccccugagcaaa

SEQ ID NO: 172653 - RNA, 21 nt, Artificial Sequence
  Synthetic
acugacccuccccugagcaaa

SEQ ID NO: 172654 - RNA, 22 nt, Artificial Sequence
  Synthetic
cacugacccuccccugagcaaa

SEQ ID NO: 172655 - RNA, 23 nt, Artificial Sequence
  Synthetic
acacugacccuccccugagcaaa

SEQ ID NO: 172656 - RNA, 24 nt, Artificial Sequence
  Synthetic
aacacugacccuccccugagcaaa

SEQ ID NO: 172657 - RNA, 18 nt, Artificial Sequence
  Synthetic
ggagaagugcugagcaaa

SEQ ID NO: 172658 - RNA, 19 nt, Artificial Sequence
  Synthetic
aggagaagugcugagcaaa

SEQ ID NO: 172659 - RNA, 20 nt, Artificial Sequence
  Synthetic
aaggagaagugcugagcaaa

SEQ ID NO: 172660 - RNA, 21 nt, Artificial Sequence
  Synthetic
aaaggagaagugcugagcaaa

SEQ ID NO: 172661 - RNA, 22 nt, Artificial Sequence
  Synthetic
gaaaggagaagugcugagcaaa

SEQ ID NO: 172662 - RNA, 23 nt, Artificial Sequence
  Synthetic
agaaaggagaagugcugagcaaa

SEQ ID NO: 172663 - RNA, 24 nt, Artificial Sequence
  Synthetic
cagaaaggagaagugcugagcaaa

SEQ ID NO: 172664 - RNA, 18 nt, Artificial Sequence
  Synthetic
ucugcugauuugagcaaa

SEQ ID NO: 172665 - RNA, 19 nt, Artificial Sequence
  Synthetic
aucugcugauuugagcaaa

SEQ ID NO: 172666 - RNA, 20 nt, Artificial Sequence
  Synthetic
gaucugcugauuugagcaaa

SEQ ID NO: 172667 - RNA, 21 nt, Artificial Sequence
  Synthetic
ggaucugcugauuugagcaaa

SEQ ID NO: 172668 - RNA, 22 nt, Artificial Sequence
  Synthetic
aggaucugcugauuugagcaaa

SEQ ID NO: 172669 - RNA, 23 nt, Artificial Sequence
  Synthetic
gaggaucugcugauuugagcaaa

SEQ ID NO: 172670 - RNA, 24 nt, Artificial Sequence
  Synthetic
ggaggaucugcugauuugagcaaa

SEQ ID NO: 172671 - RNA, 18 nt, Artificial Sequence
  Synthetic
agaauauaaaauagcaaa

SEQ ID NO: 172672 - RNA, 19 nt, Artificial Sequence
  Synthetic
uagaauauaaaauagcaaa

SEQ ID NO: 172673 - RNA, 20 nt, Artificial Sequence
  Synthetic
auagaauauaaaauagcaaa

SEQ ID NO: 172674 - RNA, 21 nt, Artificial Sequence
  Synthetic
gauagaauauaaaauagcaaa

SEQ ID NO: 172675 - RNA, 22 nt, Artificial Sequence
  Synthetic
agauagaauauaaaauagcaaa

SEQ ID NO: 172676 - RNA, 23 nt, Artificial Sequence
  Synthetic
aagauagaauauaaaauagcaaa

SEQ ID NO: 172677 - RNA, 24 nt, Artificial Sequence
  Synthetic
uaagauagaauauaaaauagcaaa

SEQ ID NO: 172678 - RNA, 18 nt, Artificial Sequence
  Synthetic
auaaaugugaauagcaaa

SEQ ID NO: 172679 - RNA, 19 nt, Artificial Sequence
  Synthetic
uauaaaugugaauagcaaa

SEQ ID NO: 172680 - RNA, 20 nt, Artificial Sequence
  Synthetic
guauaaaugugaauagcaaa

SEQ ID NO: 172681 - RNA, 21 nt, Artificial Sequence
  Synthetic
aguauaaaugugaauagcaaa

SEQ ID NO: 172682 - RNA, 22 nt, Artificial Sequence
  Synthetic
caguauaaaugugaauagcaaa

SEQ ID NO: 172683 - RNA, 23 nt, Artificial Sequence
  Synthetic
ucaguauaaaugugaauagcaaa

SEQ ID NO: 172684 - RNA, 24 nt, Artificial Sequence
  Synthetic
gucaguauaaaugugaauagcaaa

SEQ ID NO: 172685 - RNA, 18 nt, Artificial Sequence
  Synthetic
guguccuaacauagcaaa

SEQ ID NO: 172686 - RNA, 19 nt, Artificial Sequence
  Synthetic
uguguccuaacauagcaaa

SEQ ID NO: 172687 - RNA, 20 nt, Artificial Sequence
  Synthetic
cuguguccuaacauagcaaa

SEQ ID NO: 172688 - RNA, 21 nt, Artificial Sequence
  Synthetic
ucuguguccuaacauagcaaa

SEQ ID NO: 172689 - RNA, 22 nt, Artificial Sequence
  Synthetic
cucuguguccuaacauagcaaa

SEQ ID NO: 172690 - RNA, 23 nt, Artificial Sequence
  Synthetic
ucucuguguccuaacauagcaaa

SEQ ID NO: 172691 - RNA, 24 nt, Artificial Sequence
  Synthetic
cucucuguguccuaacauagcaaa

SEQ ID NO: 172692 - RNA, 18 nt, Artificial Sequence
  Synthetic
aaugaaggaaguagcaaa

SEQ ID NO: 172693 - RNA, 19 nt, Artificial Sequence
  Synthetic
caaugaaggaaguagcaaa

SEQ ID NO: 172694 - RNA, 20 nt, Artificial Sequence
  Synthetic
acaaugaaggaaguagcaaa

SEQ ID NO: 172695 - RNA, 21 nt, Artificial Sequence
  Synthetic
aacaaugaaggaaguagcaaa

SEQ ID NO: 172696 - RNA, 22 nt, Artificial Sequence
  Synthetic
uaacaaugaaggaaguagcaaa

SEQ ID NO: 172697 - RNA, 23 nt, Artificial Sequence
  Synthetic
auaacaaugaaggaaguagcaaa

SEQ ID NO: 172698 - RNA, 24 nt, Artificial Sequence
  Synthetic
aauaacaaugaaggaaguagcaaa

SEQ ID NO: 172699 - RNA, 18 nt, Artificial Sequence
  Synthetic
uuucuuuuccguagcaaa

SEQ ID NO: 172700 - RNA, 19 nt, Artificial Sequence
  Synthetic
uuuucuuuuccguagcaaa

SEQ ID NO: 172701 - RNA, 20 nt, Artificial Sequence
  Synthetic
uuuuucuuuuccguagcaaa

SEQ ID NO: 172702 - RNA, 21 nt, Artificial Sequence
  Synthetic
auuuuucuuuuccguagcaaa

SEQ ID NO: 172703 - RNA, 22 nt, Artificial Sequence
  Synthetic
cauuuuucuuuuccguagcaaa

SEQ ID NO: 172704 - RNA, 23 nt, Artificial Sequence
  Synthetic
ucauuuuucuuuuccguagcaaa

SEQ ID NO: 172705 - RNA, 24 nt, Artificial Sequence
  Synthetic
uucauuuuucuuuuccguagcaaa

SEQ ID NO: 172706 - RNA, 18 nt, Artificial Sequence
  Synthetic
uagaggaagcuuagcaaa

SEQ ID NO: 172707 - RNA, 19 nt, Artificial Sequence
  Synthetic
cuagaggaagcuuagcaaa

SEQ ID NO: 172708 - RNA, 20 nt, Artificial Sequence
  Synthetic
acuagaggaagcuuagcaaa

SEQ ID NO: 172709 - RNA, 21 nt, Artificial Sequence
  Synthetic
gacuagaggaagcuuagcaaa

SEQ ID NO: 172710 - RNA, 22 nt, Artificial Sequence
  Synthetic
ggacuagaggaagcuuagcaaa

SEQ ID NO: 172711 - RNA, 23 nt, Artificial Sequence
  Synthetic
gggacuagaggaagcuuagcaaa

SEQ ID NO: 172712 - RNA, 24 nt, Artificial Sequence
  Synthetic
agggacuagaggaagcuuagcaaa

SEQ ID NO: 172713 - RNA, 18 nt, Artificial Sequence
  Synthetic
uuucuuguauuuagcaaa

SEQ ID NO: 172714 - RNA, 19 nt, Artificial Sequence
  Synthetic
guuucuuguauuuagcaaa

SEQ ID NO: 172715 - RNA, 20 nt, Artificial Sequence
  Synthetic
cguuucuuguauuuagcaaa

SEQ ID NO: 172716 - RNA, 21 nt, Artificial Sequence
  Synthetic
gcguuucuuguauuuagcaaa

SEQ ID NO: 172717 - RNA, 22 nt, Artificial Sequence
  Synthetic
ggcguuucuuguauuuagcaaa

SEQ ID NO: 172718 - RNA, 23 nt, Artificial Sequence
  Synthetic
aggcguuucuuguauuuagcaaa

SEQ ID NO: 172719 - RNA, 24 nt, Artificial Sequence
  Synthetic
aaggcguuucuuguauuuagcaaa

SEQ ID NO: 172720 - RNA, 18 nt, Artificial Sequence
  Synthetic
uucauccucuuuagcaaa

SEQ ID NO: 172721 - RNA, 19 nt, Artificial Sequence
  Synthetic
uuucauccucuuuagcaaa

SEQ ID NO: 172722 - RNA, 20 nt, Artificial Sequence
  Synthetic
uuuucauccucuuuagcaaa

SEQ ID NO: 172723 - RNA, 21 nt, Artificial Sequence
  Synthetic
cuuuucauccucuuuagcaaa

SEQ ID NO: 172724 - RNA, 22 nt, Artificial Sequence
  Synthetic
gcuuuucauccucuuuagcaaa

SEQ ID NO: 172725 - RNA, 23 nt, Artificial Sequence
  Synthetic
ugcuuuucauccucuuuagcaaa

SEQ ID NO: 172726 - RNA, 24 nt, Artificial Sequence
  Synthetic
gugcuuuucauccucuuuagcaaa

SEQ ID NO: 172727 - RNA, 18 nt, Artificial Sequence
  Synthetic
uuugauauacaccgcaaa

SEQ ID NO: 172728 - RNA, 19 nt, Artificial Sequence
  Synthetic
auuugauauacaccgcaaa

SEQ ID NO: 172729 - RNA, 20 nt, Artificial Sequence
  Synthetic
aauuugauauacaccgcaaa

SEQ ID NO: 172730 - RNA, 21 nt, Artificial Sequence
  Synthetic
caauuugauauacaccgcaaa

SEQ ID NO: 172731 - RNA, 22 nt, Artificial Sequence
  Synthetic
acaauuugauauacaccgcaaa

SEQ ID NO: 172732 - RNA, 23 nt, Artificial Sequence
  Synthetic
aacaauuugauauacaccgcaaa

SEQ ID NO: 172733 - RNA, 24 nt, Artificial Sequence
  Synthetic
caacaauuugauauacaccgcaaa

SEQ ID NO: 172734 - RNA, 18 nt, Artificial Sequence
  Synthetic
aacuaccaucuucgcaaa

SEQ ID NO: 172735 - RNA, 19 nt, Artificial Sequence
  Synthetic
gaacuaccaucuucgcaaa

SEQ ID NO: 172736 - RNA, 20 nt, Artificial Sequence
  Synthetic
agaacuaccaucuucgcaaa

SEQ ID NO: 172737 - RNA, 21 nt, Artificial Sequence
  Synthetic
aagaacuaccaucuucgcaaa

SEQ ID NO: 172738 - RNA, 22 nt, Artificial Sequence
  Synthetic
uaagaacuaccaucuucgcaaa

SEQ ID NO: 172739 - RNA, 23 nt, Artificial Sequence
  Synthetic
uuaagaacuaccaucuucgcaaa

SEQ ID NO: 172740 - RNA, 24 nt, Artificial Sequence
  Synthetic
guuaagaacuaccaucuucgcaaa

SEQ ID NO: 172741 - RNA, 18 nt, Artificial Sequence
  Synthetic
aaacuacuaaaaggcaaa

SEQ ID NO: 172742 - RNA, 19 nt, Artificial Sequence
  Synthetic
aaaacuacuaaaaggcaaa

SEQ ID NO: 172743 - RNA, 20 nt, Artificial Sequence
  Synthetic
aaaaacuacuaaaaggcaaa

SEQ ID NO: 172744 - RNA, 21 nt, Artificial Sequence
  Synthetic
aaaaaacuacuaaaaggcaaa

SEQ ID NO: 172745 - RNA, 22 nt, Artificial Sequence
  Synthetic
gaaaaaacuacuaaaaggcaaa

SEQ ID NO: 172746 - RNA, 23 nt, Artificial Sequence
  Synthetic
agaaaaaacuacuaaaaggcaaa

SEQ ID NO: 172747 - RNA, 24 nt, Artificial Sequence
  Synthetic
uagaaaaaacuacuaaaaggcaaa

SEQ ID NO: 172748 - RNA, 18 nt, Artificial Sequence
  Synthetic
aacgaaagcgaaggcaaa

SEQ ID NO: 172749 - RNA, 19 nt, Artificial Sequence
  Synthetic
uaacgaaagcgaaggcaaa

SEQ ID NO: 172750 - RNA, 20 nt, Artificial Sequence
  Synthetic
cuaacgaaagcgaaggcaaa

SEQ ID NO: 172751 - RNA, 21 nt, Artificial Sequence
  Synthetic
acuaacgaaagcgaaggcaaa

SEQ ID NO: 172752 - RNA, 22 nt, Artificial Sequence
  Synthetic
gacuaacgaaagcgaaggcaaa

SEQ ID NO: 172753 - RNA, 23 nt, Artificial Sequence
  Synthetic
agacuaacgaaagcgaaggcaaa

SEQ ID NO: 172754 - RNA, 24 nt, Artificial Sequence
  Synthetic
aagacuaacgaaagcgaaggcaaa

SEQ ID NO: 172755 - RNA, 18 nt, Artificial Sequence
  Synthetic
guaacaguuggaggcaaa

SEQ ID NO: 172756 - RNA, 19 nt, Artificial Sequence
  Synthetic
aguaacaguuggaggcaaa

SEQ ID NO: 172757 - RNA, 20 nt, Artificial Sequence
  Synthetic
aaguaacaguuggaggcaaa

SEQ ID NO: 172758 - RNA, 21 nt, Artificial Sequence
  Synthetic
caaguaacaguuggaggcaaa

SEQ ID NO: 172759 - RNA, 22 nt, Artificial Sequence
  Synthetic
acaaguaacaguuggaggcaaa

SEQ ID NO: 172760 - RNA, 23 nt, Artificial Sequence
  Synthetic
aacaaguaacaguuggaggcaaa

SEQ ID NO: 172761 - RNA, 24 nt, Artificial Sequence
  Synthetic
aaacaaguaacaguuggaggcaaa

SEQ ID NO: 172762 - RNA, 18 nt, Artificial Sequence
  Synthetic
agaaaugugugaggcaaa

SEQ ID NO: 172763 - RNA, 19 nt, Artificial Sequence
  Synthetic
aagaaaugugugaggcaaa

SEQ ID NO: 172764 - RNA, 20 nt, Artificial Sequence
  Synthetic
uaagaaaugugugaggcaaa

SEQ ID NO: 172765 - RNA, 21 nt, Artificial Sequence
  Synthetic
uuaagaaaugugugaggcaaa

SEQ ID NO: 172766 - RNA, 22 nt, Artificial Sequence
  Synthetic
guuaagaaaugugugaggcaaa

SEQ ID NO: 172767 - RNA, 23 nt, Artificial Sequence
  Synthetic
uguuaagaaaugugugaggcaaa

SEQ ID NO: 172768 - RNA, 24 nt, Artificial Sequence
  Synthetic
uuguuaagaaaugugugaggcaaa

SEQ ID NO: 172769 - RNA, 18 nt, Artificial Sequence
  Synthetic
gguggauccauaggcaaa

SEQ ID NO: 172770 - RNA, 19 nt, Artificial Sequence
  Synthetic
agguggauccauaggcaaa

SEQ ID NO: 172771 - RNA, 20 nt, Artificial Sequence
  Synthetic
cagguggauccauaggcaaa

SEQ ID NO: 172772 - RNA, 21 nt, Artificial Sequence
  Synthetic
gcagguggauccauaggcaaa

SEQ ID NO: 172773 - RNA, 22 nt, Artificial Sequence
  Synthetic
ugcagguggauccauaggcaaa

SEQ ID NO: 172774 - RNA, 23 nt, Artificial Sequence
  Synthetic
uugcagguggauccauaggcaaa

SEQ ID NO: 172775 - RNA, 24 nt, Artificial Sequence
  Synthetic
cuugcagguggauccauaggcaaa

SEQ ID NO: 172776 - RNA, 18 nt, Artificial Sequence
  Synthetic
uuauuccacguaggcaaa

SEQ ID NO: 172777 - RNA, 19 nt, Artificial Sequence
  Synthetic
guuauuccacguaggcaaa

SEQ ID NO: 172778 - RNA, 20 nt, Artificial Sequence
  Synthetic
uguuauuccacguaggcaaa

SEQ ID NO: 172779 - RNA, 21 nt, Artificial Sequence
  Synthetic
auguuauuccacguaggcaaa

SEQ ID NO: 172780 - RNA, 22 nt, Artificial Sequence
  Synthetic
cauguuauuccacguaggcaaa

SEQ ID NO: 172781 - RNA, 23 nt, Artificial Sequence
  Synthetic
gcauguuauuccacguaggcaaa

SEQ ID NO: 172782 - RNA, 24 nt, Artificial Sequence
  Synthetic
ggcauguuauuccacguaggcaaa

SEQ ID NO: 172783 - RNA, 18 nt, Artificial Sequence
  Synthetic
uaccucgacuuaggcaaa

SEQ ID NO: 172784 - RNA, 19 nt, Artificial Sequence
  Synthetic
cuaccucgacuuaggcaaa

SEQ ID NO: 172785 - RNA, 20 nt, Artificial Sequence
  Synthetic
ccuaccucgacuuaggcaaa

SEQ ID NO: 172786 - RNA, 21 nt, Artificial Sequence
  Synthetic
cccuaccucgacuuaggcaaa

SEQ ID NO: 172787 - RNA, 22 nt, Artificial Sequence
  Synthetic
ccccuaccucgacuuaggcaaa

SEQ ID NO: 172788 - RNA, 23 nt, Artificial Sequence
  Synthetic
gccccuaccucgacuuaggcaaa

SEQ ID NO: 172789 - RNA, 24 nt, Artificial Sequence
  Synthetic
agccccuaccucgacuuaggcaaa

SEQ ID NO: 172790 - RNA, 18 nt, Artificial Sequence
  Synthetic
gaacaaaagaagggcaaa

SEQ ID NO: 172791 - RNA, 19 nt, Artificial Sequence
  Synthetic
agaacaaaagaagggcaaa

SEQ ID NO: 172792 - RNA, 20 nt, Artificial Sequence
  Synthetic
gagaacaaaagaagggcaaa

SEQ ID NO: 172793 - RNA, 21 nt, Artificial Sequence
  Synthetic
ggagaacaaaagaagggcaaa

SEQ ID NO: 172794 - RNA, 22 nt, Artificial Sequence
  Synthetic
uggagaacaaaagaagggcaaa

SEQ ID NO: 172795 - RNA, 23 nt, Artificial Sequence
  Synthetic
auggagaacaaaagaagggcaaa

SEQ ID NO: 172796 - RNA, 24 nt, Artificial Sequence
  Synthetic
aauggagaacaaaagaagggcaaa

SEQ ID NO: 172797 - RNA, 18 nt, Artificial Sequence
  Synthetic
uucauggugaagggcaaa

SEQ ID NO: 172798 - RNA, 19 nt, Artificial Sequence
  Synthetic
auucauggugaagggcaaa

SEQ ID NO: 172799 - RNA, 20 nt, Artificial Sequence
  Synthetic
cauucauggugaagggcaaa

SEQ ID NO: 172800 - RNA, 21 nt, Artificial Sequence
  Synthetic
ccauucauggugaagggcaaa

SEQ ID NO: 172801 - RNA, 22 nt, Artificial Sequence
  Synthetic
uccauucauggugaagggcaaa

SEQ ID NO: 172802 - RNA, 23 nt, Artificial Sequence
  Synthetic
uuccauucauggugaagggcaaa

SEQ ID NO: 172803 - RNA, 24 nt, Artificial Sequence
  Synthetic
cuuccauucauggugaagggcaaa

SEQ ID NO: 172804 - RNA, 18 nt, Artificial Sequence
  Synthetic
gucuaagaacagggcaaa

SEQ ID NO: 172805 - RNA, 19 nt, Artificial Sequence
  Synthetic
ugucuaagaacagggcaaa

SEQ ID NO: 172806 - RNA, 20 nt, Artificial Sequence
  Synthetic
gugucuaagaacagggcaaa

SEQ ID NO: 172807 - RNA, 21 nt, Artificial Sequence
  Synthetic
cgugucuaagaacagggcaaa

SEQ ID NO: 172808 - RNA, 22 nt, Artificial Sequence
  Synthetic
ccgugucuaagaacagggcaaa

SEQ ID NO: 172809 - RNA, 23 nt, Artificial Sequence
  Synthetic
gccgugucuaagaacagggcaaa

SEQ ID NO: 172810 - RNA, 24 nt, Artificial Sequence
  Synthetic
ggccgugucuaagaacagggcaaa

SEQ ID NO: 172811 - RNA, 18 nt, Artificial Sequence
  Synthetic
gaucauuauaugggcaaa

SEQ ID NO: 172812 - RNA, 19 nt, Artificial Sequence
  Synthetic
ggaucauuauaugggcaaa

SEQ ID NO: 172813 - RNA, 20 nt, Artificial Sequence
  Synthetic
uggaucauuauaugggcaaa

SEQ ID NO: 172814 - RNA, 21 nt, Artificial Sequence
  Synthetic
uuggaucauuauaugggcaaa

SEQ ID NO: 172815 - RNA, 22 nt, Artificial Sequence
  Synthetic
auuggaucauuauaugggcaaa

SEQ ID NO: 172816 - RNA, 23 nt, Artificial Sequence
  Synthetic
gauuggaucauuauaugggcaaa

SEQ ID NO: 172817 - RNA, 24 nt, Artificial Sequence
  Synthetic
ugauuggaucauuauaugggcaaa

SEQ ID NO: 172818 - RNA, 18 nt, Artificial Sequence
  Synthetic
caguuagaaaauggcaaa

SEQ ID NO: 172819 - RNA, 19 nt, Artificial Sequence
  Synthetic
acaguuagaaaauggcaaa

SEQ ID NO: 172820 - RNA, 20 nt, Artificial Sequence
  Synthetic
uacaguuagaaaauggcaaa

SEQ ID NO: 172821 - RNA, 21 nt, Artificial Sequence
  Synthetic
auacaguuagaaaauggcaaa

SEQ ID NO: 172822 - RNA, 22 nt, Artificial Sequence
  Synthetic
uauacaguuagaaaauggcaaa

SEQ ID NO: 172823 - RNA, 23 nt, Artificial Sequence
  Synthetic
guauacaguuagaaaauggcaaa

SEQ ID NO: 172824 - RNA, 24 nt, Artificial Sequence
  Synthetic
uguauacaguuagaaaauggcaaa

SEQ ID NO: 172825 - RNA, 18 nt, Artificial Sequence
  Synthetic
uaucacuuguuuggcaaa

SEQ ID NO: 172826 - RNA, 19 nt, Artificial Sequence
  Synthetic
uuaucacuuguuuggcaaa

SEQ ID NO: 172827 - RNA, 20 nt, Artificial Sequence
  Synthetic
uuuaucacuuguuuggcaaa

SEQ ID NO: 172828 - RNA, 21 nt, Artificial Sequence
  Synthetic
auuuaucacuuguuuggcaaa

SEQ ID NO: 172829 - RNA, 22 nt, Artificial Sequence
  Synthetic
cauuuaucacuuguuuggcaaa

SEQ ID NO: 172830 - RNA, 23 nt, Artificial Sequence
  Synthetic
acauuuaucacuuguuuggcaaa

SEQ ID NO: 172831 - RNA, 24 nt, Artificial Sequence
  Synthetic
uacauuuaucacuuguuuggcaaa

SEQ ID NO: 172832 - RNA, 18 nt, Artificial Sequence
  Synthetic
aaugacuauaaaugcaaa

SEQ ID NO: 172833 - RNA, 19 nt, Artificial Sequence
  Synthetic
uaaugacuauaaaugcaaa

SEQ ID NO: 172834 - RNA, 20 nt, Artificial Sequence
  Synthetic
uuaaugacuauaaaugcaaa

SEQ ID NO: 172835 - RNA, 21 nt, Artificial Sequence
  Synthetic
auuaaugacuauaaaugcaaa

SEQ ID NO: 172836 - RNA, 22 nt, Artificial Sequence
  Synthetic
uauuaaugacuauaaaugcaaa

SEQ ID NO: 172837 - RNA, 23 nt, Artificial Sequence
  Synthetic
auauuaaugacuauaaaugcaaa

SEQ ID NO: 172838 - RNA, 24 nt, Artificial Sequence
  Synthetic
cauauuaaugacuauaaaugcaaa

SEQ ID NO: 172839 - RNA, 18 nt, Artificial Sequence
  Synthetic
uugaacuuuuaaugcaaa

SEQ ID NO: 172840 - RNA, 19 nt, Artificial Sequence
  Synthetic
auugaacuuuuaaugcaaa

SEQ ID NO: 172841 - RNA, 20 nt, Artificial Sequence
  Synthetic
uauugaacuuuuaaugcaaa

SEQ ID NO: 172842 - RNA, 21 nt, Artificial Sequence
  Synthetic
guauugaacuuuuaaugcaaa

SEQ ID NO: 172843 - RNA, 22 nt, Artificial Sequence
  Synthetic
aguauugaacuuuuaaugcaaa

SEQ ID NO: 172844 - RNA, 23 nt, Artificial Sequence
  Synthetic
uaguauugaacuuuuaaugcaaa

SEQ ID NO: 172845 - RNA, 24 nt, Artificial Sequence
  Synthetic
auaguauugaacuuuuaaugcaaa

SEQ ID NO: 172846 - RNA, 18 nt, Artificial Sequence
  Synthetic
uuuugguuuccaugcaaa

SEQ ID NO: 172847 - RNA, 19 nt, Artificial Sequence
  Synthetic
auuuugguuuccaugcaaa

SEQ ID NO: 172848 - RNA, 20 nt, Artificial Sequence
  Synthetic
uauuuugguuuccaugcaaa

SEQ ID NO: 172849 - RNA, 21 nt, Artificial Sequence
  Synthetic
auauuuugguuuccaugcaaa

SEQ ID NO: 172850 - RNA, 22 nt, Artificial Sequence
  Synthetic
gauauuuugguuuccaugcaaa

SEQ ID NO: 172851 - RNA, 23 nt, Artificial Sequence
  Synthetic
agauauuuugguuuccaugcaaa

SEQ ID NO: 172852 - RNA, 24 nt, Artificial Sequence
  Synthetic
aagauauuuugguuuccaugcaaa

SEQ ID NO: 172853 - RNA, 18 nt, Artificial Sequence
  Synthetic
ugugucugcagaugcaaa

SEQ ID NO: 172854 - RNA, 19 nt, Artificial Sequence
  Synthetic
cugugucugcagaugcaaa

SEQ ID NO: 172855 - RNA, 20 nt, Artificial Sequence
  Synthetic
ccugugucugcagaugcaaa

SEQ ID NO: 172856 - RNA, 21 nt, Artificial Sequence
  Synthetic
gccugugucugcagaugcaaa

SEQ ID NO: 172857 - RNA, 22 nt, Artificial Sequence
  Synthetic
agccugugucugcagaugcaaa

SEQ ID NO: 172858 - RNA, 23 nt, Artificial Sequence
  Synthetic
aagccugugucugcagaugcaaa

SEQ ID NO: 172859 - RNA, 24 nt, Artificial Sequence
  Synthetic
caagccugugucugcagaugcaaa

SEQ ID NO: 172860 - RNA, 18 nt, Artificial Sequence
  Synthetic
uggcagccaguaugcaaa

SEQ ID NO: 172861 - RNA, 19 nt, Artificial Sequence
  Synthetic
guggcagccaguaugcaaa

SEQ ID NO: 172862 - RNA, 20 nt, Artificial Sequence
  Synthetic
gguggcagccaguaugcaaa

SEQ ID NO: 172863 - RNA, 21 nt, Artificial Sequence
  Synthetic
agguggcagccaguaugcaaa

SEQ ID NO: 172864 - RNA, 22 nt, Artificial Sequence
  Synthetic
uagguggcagccaguaugcaaa

SEQ ID NO: 172865 - RNA, 23 nt, Artificial Sequence
  Synthetic
auagguggcagccaguaugcaaa

SEQ ID NO: 172866 - RNA, 24 nt, Artificial Sequence
  Synthetic
aauagguggcagccaguaugcaaa

SEQ ID NO: 172867 - RNA, 18 nt, Artificial Sequence
  Synthetic
guaauaugaaacugcaaa

SEQ ID NO: 172868 - RNA, 19 nt, Artificial Sequence
  Synthetic
uguaauaugaaacugcaaa

SEQ ID NO: 172869 - RNA, 20 nt, Artificial Sequence
  Synthetic
auguaauaugaaacugcaaa

SEQ ID NO: 172870 - RNA, 21 nt, Artificial Sequence
  Synthetic
cauguaauaugaaacugcaaa

SEQ ID NO: 172871 - RNA, 22 nt, Artificial Sequence
  Synthetic
acauguaauaugaaacugcaaa

SEQ ID NO: 172872 - RNA, 23 nt, Artificial Sequence
  Synthetic
aacauguaauaugaaacugcaaa

SEQ ID NO: 172873 - RNA, 24 nt, Artificial Sequence
  Synthetic
gaacauguaauaugaaacugcaaa

SEQ ID NO: 172874 - RNA, 18 nt, Artificial Sequence
  Synthetic
ugcaaguuuuccugcaaa

SEQ ID NO: 172875 - RNA, 19 nt, Artificial Sequence
  Synthetic
uugcaaguuuuccugcaaa

SEQ ID NO: 172876 - RNA, 20 nt, Artificial Sequence
  Synthetic
guugcaaguuuuccugcaaa

SEQ ID NO: 172877 - RNA, 21 nt, Artificial Sequence
  Synthetic
gguugcaaguuuuccugcaaa

SEQ ID NO: 172878 - RNA, 22 nt, Artificial Sequence
  Synthetic
ggguugcaaguuuuccugcaaa

SEQ ID NO: 172879 - RNA, 23 nt, Artificial Sequence
  Synthetic
aggguugcaaguuuuccugcaaa

SEQ ID NO: 172880 - RNA, 24 nt, Artificial Sequence
  Synthetic
uaggguugcaaguuuuccugcaaa

SEQ ID NO: 172881 - RNA, 18 nt, Artificial Sequence
  Synthetic
ugagcagagugcugcaaa

SEQ ID NO: 172882 - RNA, 19 nt, Artificial Sequence
  Synthetic
uugagcagagugcugcaaa

SEQ ID NO: 172883 - RNA, 20 nt, Artificial Sequence
  Synthetic
uuugagcagagugcugcaaa

SEQ ID NO: 172884 - RNA, 21 nt, Artificial Sequence
  Synthetic
uuuugagcagagugcugcaaa

SEQ ID NO: 172885 - RNA, 22 nt, Artificial Sequence
  Synthetic
cuuuugagcagagugcugcaaa

SEQ ID NO: 172886 - RNA, 23 nt, Artificial Sequence
  Synthetic
acuuuugagcagagugcugcaaa

SEQ ID NO: 172887 - RNA, 24 nt, Artificial Sequence
  Synthetic
gacuuuugagcagagugcugcaaa

SEQ ID NO: 172888 - RNA, 18 nt, Artificial Sequence
  Synthetic
aaucaugucaucugcaaa

SEQ ID NO: 172889 - RNA, 19 nt, Artificial Sequence
  Synthetic
caaucaugucaucugcaaa

SEQ ID NO: 172890 - RNA, 20 nt, Artificial Sequence
  Synthetic
acaaucaugucaucugcaaa

SEQ ID NO: 172891 - RNA, 21 nt, Artificial Sequence
  Synthetic
uacaaucaugucaucugcaaa

SEQ ID NO: 172892 - RNA, 22 nt, Artificial Sequence
  Synthetic
auacaaucaugucaucugcaaa

SEQ ID NO: 172893 - RNA, 23 nt, Artificial Sequence
  Synthetic
uauacaaucaugucaucugcaaa

SEQ ID NO: 172894 - RNA, 24 nt, Artificial Sequence
  Synthetic
auauacaaucaugucaucugcaaa

SEQ ID NO: 172895 - RNA, 18 nt, Artificial Sequence
  Synthetic
aaccagcauaucugcaaa

SEQ ID NO: 172896 - RNA, 19 nt, Artificial Sequence
  Synthetic
uaaccagcauaucugcaaa

SEQ ID NO: 172897 - RNA, 20 nt, Artificial Sequence
  Synthetic
uuaaccagcauaucugcaaa

SEQ ID NO: 172898 - RNA, 21 nt, Artificial Sequence
  Synthetic
uuuaaccagcauaucugcaaa

SEQ ID NO: 172899 - RNA, 22 nt, Artificial Sequence
  Synthetic
auuuaaccagcauaucugcaaa

SEQ ID NO: 172900 - RNA, 23 nt, Artificial Sequence
  Synthetic
aauuuaaccagcauaucugcaaa

SEQ ID NO: 172901 - RNA, 24 nt, Artificial Sequence
  Synthetic
uaauuuaaccagcauaucugcaaa

SEQ ID NO: 172902 - RNA, 18 nt, Artificial Sequence
  Synthetic
aaucaugucgucugcaaa

SEQ ID NO: 172903 - RNA, 19 nt, Artificial Sequence
  Synthetic
caaucaugucgucugcaaa

SEQ ID NO: 172904 - RNA, 20 nt, Artificial Sequence
  Synthetic
acaaucaugucgucugcaaa

SEQ ID NO: 172905 - RNA, 21 nt, Artificial Sequence
  Synthetic
uacaaucaugucgucugcaaa

SEQ ID NO: 172906 - RNA, 22 nt, Artificial Sequence
  Synthetic
auacaaucaugucgucugcaaa

SEQ ID NO: 172907 - RNA, 23 nt, Artificial Sequence
  Synthetic
uauacaaucaugucgucugcaaa

SEQ ID NO: 172908 - RNA, 24 nt, Artificial Sequence
  Synthetic
auauacaaucaugucgucugcaaa

SEQ ID NO: 172909 - RNA, 18 nt, Artificial Sequence
  Synthetic
aauuaugaucagugcaaa

SEQ ID NO: 172910 - RNA, 19 nt, Artificial Sequence
  Synthetic
gaauuaugaucagugcaaa

SEQ ID NO: 172911 - RNA, 20 nt, Artificial Sequence
  Synthetic
agaauuaugaucagugcaaa

SEQ ID NO: 172912 - RNA, 21 nt, Artificial Sequence
  Synthetic
aagaauuaugaucagugcaaa

SEQ ID NO: 172913 - RNA, 22 nt, Artificial Sequence
  Synthetic
gaagaauuaugaucagugcaaa

SEQ ID NO: 172914 - RNA, 23 nt, Artificial Sequence
  Synthetic
ugaagaauuaugaucagugcaaa

SEQ ID NO: 172915 - RNA, 24 nt, Artificial Sequence
  Synthetic
augaagaauuaugaucagugcaaa

SEQ ID NO: 172916 - RNA, 18 nt, Artificial Sequence
  Synthetic
ugugaaccucugugcaaa

SEQ ID NO: 172917 - RNA, 19 nt, Artificial Sequence
  Synthetic
augugaaccucugugcaaa

SEQ ID NO: 172918 - RNA, 20 nt, Artificial Sequence
  Synthetic
aaugugaaccucugugcaaa

SEQ ID NO: 172919 - RNA, 21 nt, Artificial Sequence
  Synthetic
gaaugugaaccucugugcaaa

SEQ ID NO: 172920 - RNA, 22 nt, Artificial Sequence
  Synthetic
ugaaugugaaccucugugcaaa

SEQ ID NO: 172921 - RNA, 23 nt, Artificial Sequence
  Synthetic
uugaaugugaaccucugugcaaa

SEQ ID NO: 172922 - RNA, 24 nt, Artificial Sequence
  Synthetic
cuugaaugugaaccucugugcaaa

SEQ ID NO: 172923 - RNA, 18 nt, Artificial Sequence
  Synthetic
aaaagcuuuuauugcaaa

SEQ ID NO: 172924 - RNA, 19 nt, Artificial Sequence
  Synthetic
aaaaagcuuuuauugcaaa

SEQ ID NO: 172925 - RNA, 20 nt, Artificial Sequence
  Synthetic
uaaaaagcuuuuauugcaaa

SEQ ID NO: 172926 - RNA, 21 nt, Artificial Sequence
  Synthetic
uuaaaaagcuuuuauugcaaa

SEQ ID NO: 172927 - RNA, 22 nt, Artificial Sequence
  Synthetic
auuaaaaagcuuuuauugcaaa

SEQ ID NO: 172928 - RNA, 23 nt, Artificial Sequence
  Synthetic
uauuaaaaagcuuuuauugcaaa

SEQ ID NO: 172929 - RNA, 24 nt, Artificial Sequence
  Synthetic
cuauuaaaaagcuuuuauugcaaa

SEQ ID NO: 172930 - RNA, 18 nt, Artificial Sequence
  Synthetic
uacacuggggcuugcaaa

SEQ ID NO: 172931 - RNA, 19 nt, Artificial Sequence
  Synthetic
uuacacuggggcuugcaaa

SEQ ID NO: 172932 - RNA, 20 nt, Artificial Sequence
  Synthetic
auuacacuggggcuugcaaa

SEQ ID NO: 172933 - RNA, 21 nt, Artificial Sequence
  Synthetic
uauuacacuggggcuugcaaa

SEQ ID NO: 172934 - RNA, 22 nt, Artificial Sequence
  Synthetic
uuauuacacuggggcuugcaaa

SEQ ID NO: 172935 - RNA, 23 nt, Artificial Sequence
  Synthetic
guuauuacacuggggcuugcaaa

SEQ ID NO: 172936 - RNA, 24 nt, Artificial Sequence
  Synthetic
aguuauuacacuggggcuugcaaa

SEQ ID NO: 172937 - RNA, 18 nt, Artificial Sequence
  Synthetic
uucuuuacaaaaaucaaa

SEQ ID NO: 172938 - RNA, 19 nt, Artificial Sequence
  Synthetic
guucuuuacaaaaaucaaa

SEQ ID NO: 172939 - RNA, 20 nt, Artificial Sequence
  Synthetic
aguucuuuacaaaaaucaaa

SEQ ID NO: 172940 - RNA, 21 nt, Artificial Sequence
  Synthetic
gaguucuuuacaaaaaucaaa

SEQ ID NO: 172941 - RNA, 22 nt, Artificial Sequence
  Synthetic
agaguucuuuacaaaaaucaaa

SEQ ID NO: 172942 - RNA, 23 nt, Artificial Sequence
  Synthetic
cagaguucuuuacaaaaaucaaa

SEQ ID NO: 172943 - RNA, 24 nt, Artificial Sequence
  Synthetic
acagaguucuuuacaaaaaucaaa

SEQ ID NO: 172944 - RNA, 18 nt, Artificial Sequence
  Synthetic
uugacuggcaaaaucaaa

SEQ ID NO: 172945 - RNA, 19 nt, Artificial Sequence
  Synthetic
uuugacuggcaaaaucaaa

SEQ ID NO: 172946 - RNA, 20 nt, Artificial Sequence
  Synthetic
auuugacuggcaaaaucaaa

SEQ ID NO: 172947 - RNA, 21 nt, Artificial Sequence
  Synthetic
aauuugacuggcaaaaucaaa

SEQ ID NO: 172948 - RNA, 22 nt, Artificial Sequence
  Synthetic
aaauuugacuggcaaaaucaaa

SEQ ID NO: 172949 - RNA, 23 nt, Artificial Sequence
  Synthetic
gaaauuugacuggcaaaaucaaa

SEQ ID NO: 172950 - RNA, 24 nt, Artificial Sequence
  Synthetic
ugaaauuugacuggcaaaaucaaa

SEQ ID NO: 172951 - RNA, 18 nt, Artificial Sequence
  Synthetic
ucaagaucccaaaucaaa

SEQ ID NO: 172952 - RNA, 19 nt, Artificial Sequence
  Synthetic
gucaagaucccaaaucaaa

SEQ ID NO: 172953 - RNA, 20 nt, Artificial Sequence
  Synthetic
ggucaagaucccaaaucaaa

SEQ ID NO: 172954 - RNA, 21 nt, Artificial Sequence
  Synthetic
uggucaagaucccaaaucaaa

SEQ ID NO: 172955 - RNA, 22 nt, Artificial Sequence
  Synthetic
auggucaagaucccaaaucaaa

SEQ ID NO: 172956 - RNA, 23 nt, Artificial Sequence
  Synthetic
cauggucaagaucccaaaucaaa

SEQ ID NO: 172957 - RNA, 24 nt, Artificial Sequence
  Synthetic
gcauggucaagaucccaaaucaaa

SEQ ID NO: 172958 - RNA, 18 nt, Artificial Sequence
  Synthetic
guacauguucaaaucaaa

SEQ ID NO: 172959 - RNA, 19 nt, Artificial Sequence
  Synthetic
uguacauguucaaaucaaa

SEQ ID NO: 172960 - RNA, 20 nt, Artificial Sequence
  Synthetic
auguacauguucaaaucaaa

SEQ ID NO: 172961 - RNA, 21 nt, Artificial Sequence
  Synthetic
aauguacauguucaaaucaaa

SEQ ID NO: 172962 - RNA, 22 nt, Artificial Sequence
  Synthetic
uaauguacauguucaaaucaaa

SEQ ID NO: 172963 - RNA, 23 nt, Artificial Sequence
  Synthetic
auaauguacauguucaaaucaaa

SEQ ID NO: 172964 - RNA, 24 nt, Artificial Sequence
  Synthetic
aauaauguacauguucaaaucaaa

SEQ ID NO: 172965 - RNA, 18 nt, Artificial Sequence
  Synthetic
aaagagagagaaaucaaa

SEQ ID NO: 172966 - RNA, 19 nt, Artificial Sequence
  Synthetic
uaaagagagagaaaucaaa

SEQ ID NO: 172967 - RNA, 20 nt, Artificial Sequence
  Synthetic
guaaagagagagaaaucaaa

SEQ ID NO: 172968 - RNA, 21 nt, Artificial Sequence
  Synthetic
uguaaagagagagaaaucaaa

SEQ ID NO: 172969 - RNA, 22 nt, Artificial Sequence
  Synthetic
guguaaagagagagaaaucaaa

SEQ ID NO: 172970 - RNA, 23 nt, Artificial Sequence
  Synthetic
uguguaaagagagagaaaucaaa

SEQ ID NO: 172971 - RNA, 24 nt, Artificial Sequence
  Synthetic
cuguguaaagagagagaaaucaaa

SEQ ID NO: 172972 - RNA, 18 nt, Artificial Sequence
  Synthetic
auaucaaguuaaaucaaa

SEQ ID NO: 172973 - RNA, 19 nt, Artificial Sequence
  Synthetic
aauaucaaguuaaaucaaa

SEQ ID NO: 172974 - RNA, 20 nt, Artificial Sequence
  Synthetic
uaauaucaaguuaaaucaaa

SEQ ID NO: 172975 - RNA, 21 nt, Artificial Sequence
  Synthetic
guaauaucaaguuaaaucaaa

SEQ ID NO: 172976 - RNA, 22 nt, Artificial Sequence
  Synthetic
gguaauaucaaguuaaaucaaa

SEQ ID NO: 172977 - RNA, 23 nt, Artificial Sequence
  Synthetic
agguaauaucaaguuaaaucaaa

SEQ ID NO: 172978 - RNA, 24 nt, Artificial Sequence
  Synthetic
uagguaauaucaaguuaaaucaaa

SEQ ID NO: 172979 - RNA, 18 nt, Artificial Sequence
  Synthetic
ccuauaauaacaaucaaa

SEQ ID NO: 172980 - RNA, 19 nt, Artificial Sequence
  Synthetic
uccuauaauaacaaucaaa

SEQ ID NO: 172981 - RNA, 20 nt, Artificial Sequence
  Synthetic
cuccuauaauaacaaucaaa

SEQ ID NO: 172982 - RNA, 21 nt, Artificial Sequence
  Synthetic
ucuccuauaauaacaaucaaa

SEQ ID NO: 172983 - RNA, 22 nt, Artificial Sequence
  Synthetic
aucuccuauaauaacaaucaaa

SEQ ID NO: 172984 - RNA, 23 nt, Artificial Sequence
  Synthetic
gaucuccuauaauaacaaucaaa

SEQ ID NO: 172985 - RNA, 24 nt, Artificial Sequence
  Synthetic
ugaucuccuauaauaacaaucaaa

SEQ ID NO: 172986 - RNA, 18 nt, Artificial Sequence
  Synthetic
aagauuaaggcaaucaaa

SEQ ID NO: 172987 - RNA, 19 nt, Artificial Sequence
  Synthetic
aaagauuaaggcaaucaaa

SEQ ID NO: 172988 - RNA, 20 nt, Artificial Sequence
  Synthetic
gaaagauuaaggcaaucaaa

SEQ ID NO: 172989 - RNA, 21 nt, Artificial Sequence
  Synthetic
cgaaagauuaaggcaaucaaa

SEQ ID NO: 172990 - RNA, 22 nt, Artificial Sequence
  Synthetic
gcgaaagauuaaggcaaucaaa

SEQ ID NO: 172991 - RNA, 23 nt, Artificial Sequence
  Synthetic
agcgaaagauuaaggcaaucaaa

SEQ ID NO: 172992 - RNA, 24 nt, Artificial Sequence
  Synthetic
aagcgaaagauuaaggcaaucaaa

SEQ ID NO: 172993 - RNA, 18 nt, Artificial Sequence
  Synthetic
gccaaguucagaaucaaa

SEQ ID NO: 172994 - RNA, 19 nt, Artificial Sequence
  Synthetic
ggccaaguucagaaucaaa

SEQ ID NO: 172995 - RNA, 20 nt, Artificial Sequence
  Synthetic
uggccaaguucagaaucaaa

SEQ ID NO: 172996 - RNA, 21 nt, Artificial Sequence
  Synthetic
auggccaaguucagaaucaaa

SEQ ID NO: 172997 - RNA, 22 nt, Artificial Sequence
  Synthetic
uauggccaaguucagaaucaaa

SEQ ID NO: 172998 - RNA, 23 nt, Artificial Sequence
  Synthetic
auauggccaaguucagaaucaaa

SEQ ID NO: 172999 - RNA, 24 nt, Artificial Sequence
  Synthetic
cauauggccaaguucagaaucaaa

SEQ ID NO: 173000 - RNA, 18 nt, Artificial Sequence
  Synthetic
guacaugaaggaaucaaa

SEQ ID NO: 173001 - RNA, 19 nt, Artificial Sequence
  Synthetic
gguacaugaaggaaucaaa

SEQ ID NO: 173002 - RNA, 20 nt, Artificial Sequence
  Synthetic
ugguacaugaaggaaucaaa

SEQ ID NO: 173003 - RNA, 21 nt, Artificial Sequence
  Synthetic
uugguacaugaaggaaucaaa

SEQ ID NO: 173004 - RNA, 22 nt, Artificial Sequence
  Synthetic
auugguacaugaaggaaucaaa

SEQ ID NO: 173005 - RNA, 23 nt, Artificial Sequence
  Synthetic
aauugguacaugaaggaaucaaa

SEQ ID NO: 173006 - RNA, 24 nt, Artificial Sequence
  Synthetic
caauugguacaugaaggaaucaaa

SEQ ID NO: 173007 - RNA, 18 nt, Artificial Sequence
  Synthetic
cacggucacauaaucaaa

SEQ ID NO: 173008 - RNA, 19 nt, Artificial Sequence
  Synthetic
acacggucacauaaucaaa

SEQ ID NO: 173009 - RNA, 20 nt, Artificial Sequence
  Synthetic
uacacggucacauaaucaaa

SEQ ID NO: 173010 - RNA, 21 nt, Artificial Sequence
  Synthetic
uuacacggucacauaaucaaa

SEQ ID NO: 173011 - RNA, 22 nt, Artificial Sequence
  Synthetic
uuuacacggucacauaaucaaa

SEQ ID NO: 173012 - RNA, 23 nt, Artificial Sequence
  Synthetic
uuuuacacggucacauaaucaaa

SEQ ID NO: 173013 - RNA, 24 nt, Artificial Sequence
  Synthetic
auuuuacacggucacauaaucaaa

SEQ ID NO: 173014 - RNA, 18 nt, Artificial Sequence
  Synthetic
acaggacauuuaaucaaa

SEQ ID NO: 173015 - RNA, 19 nt, Artificial Sequence
  Synthetic
gacaggacauuuaaucaaa

SEQ ID NO: 173016 - RNA, 20 nt, Artificial Sequence
  Synthetic
ugacaggacauuuaaucaaa

SEQ ID NO: 173017 - RNA, 21 nt, Artificial Sequence
  Synthetic
augacaggacauuuaaucaaa

SEQ ID NO: 173018 - RNA, 22 nt, Artificial Sequence
  Synthetic
caugacaggacauuuaaucaaa

SEQ ID NO: 173019 - RNA, 23 nt, Artificial Sequence
  Synthetic
ucaugacaggacauuuaaucaaa

SEQ ID NO: 173020 - RNA, 24 nt, Artificial Sequence
  Synthetic
uucaugacaggacauuuaaucaaa

SEQ ID NO: 173021 - RNA, 18 nt, Artificial Sequence
  Synthetic
uuuuuuuuuuuaaucaaa

SEQ ID NO: 173022 - RNA, 19 nt, Artificial Sequence
  Synthetic
cuuuuuuuuuuuaaucaaa

SEQ ID NO: 173023 - RNA, 20 nt, Artificial Sequence
  Synthetic
ucuuuuuuuuuuuaaucaaa

SEQ ID NO: 173024 - RNA, 21 nt, Artificial Sequence
  Synthetic
aucuuuuuuuuuuuaaucaaa

SEQ ID NO: 173025 - RNA, 22 nt, Artificial Sequence
  Synthetic
aaucuuuuuuuuuuuaaucaaa

SEQ ID NO: 173026 - RNA, 23 nt, Artificial Sequence
  Synthetic
uaaucuuuuuuuuuuuaaucaaa

SEQ ID NO: 173027 - RNA, 24 nt, Artificial Sequence
  Synthetic
auaaucuuuuuuuuuuuaaucaaa

SEQ ID NO: 173028 - RNA, 18 nt, Artificial Sequence
  Synthetic
agcccgaggcacaucaaa

SEQ ID NO: 173029 - RNA, 19 nt, Artificial Sequence
  Synthetic
aagcccgaggcacaucaaa

SEQ ID NO: 173030 - RNA, 20 nt, Artificial Sequence
  Synthetic
aaagcccgaggcacaucaaa

SEQ ID NO: 173031 - RNA, 21 nt, Artificial Sequence
  Synthetic
uaaagcccgaggcacaucaaa

SEQ ID NO: 173032 - RNA, 22 nt, Artificial Sequence
  Synthetic
uuaaagcccgaggcacaucaaa

SEQ ID NO: 173033 - RNA, 23 nt, Artificial Sequence
  Synthetic
uuuaaagcccgaggcacaucaaa

SEQ ID NO: 173034 - RNA, 24 nt, Artificial Sequence
  Synthetic
uuuuaaagcccgaggcacaucaaa

SEQ ID NO: 173035 - RNA, 18 nt, Artificial Sequence
  Synthetic
aaaagaagagacaucaaa

SEQ ID NO: 173036 - RNA, 19 nt, Artificial Sequence
  Synthetic
aaaaagaagagacaucaaa

SEQ ID NO: 173037 - RNA, 20 nt, Artificial Sequence
  Synthetic
aaaaaagaagagacaucaaa

SEQ ID NO: 173038 - RNA, 21 nt, Artificial Sequence
  Synthetic
gaaaaaagaagagacaucaaa

SEQ ID NO: 173039 - RNA, 22 nt, Artificial Sequence
  Synthetic
ugaaaaaagaagagacaucaaa

SEQ ID NO: 173040 - RNA, 23 nt, Artificial Sequence
  Synthetic
cugaaaaaagaagagacaucaaa

SEQ ID NO: 173041 - RNA, 24 nt, Artificial Sequence
  Synthetic
acugaaaaaagaagagacaucaaa

SEQ ID NO: 173042 - RNA, 18 nt, Artificial Sequence
  Synthetic
uaagauaaauacaucaaa

SEQ ID NO: 173043 - RNA, 19 nt, Artificial Sequence
  Synthetic
auaagauaaauacaucaaa

SEQ ID NO: 173044 - RNA, 20 nt, Artificial Sequence
  Synthetic
aauaagauaaauacaucaaa

SEQ ID NO: 173045 - RNA, 21 nt, Artificial Sequence
  Synthetic
gaauaagauaaauacaucaaa

SEQ ID NO: 173046 - RNA, 22 nt, Artificial Sequence
  Synthetic
ugaauaagauaaauacaucaaa

SEQ ID NO: 173047 - RNA, 23 nt, Artificial Sequence
  Synthetic
augaauaagauaaauacaucaaa

SEQ ID NO: 173048 - RNA, 24 nt, Artificial Sequence
  Synthetic
uaugaauaagauaaauacaucaaa

SEQ ID NO: 173049 - RNA, 18 nt, Artificial Sequence
  Synthetic
acucaggcugccaucaaa

SEQ ID NO: 173050 - RNA, 19 nt, Artificial Sequence
  Synthetic
cacucaggcugccaucaaa

SEQ ID NO: 173051 - RNA, 20 nt, Artificial Sequence
  Synthetic
ucacucaggcugccaucaaa

SEQ ID NO: 173052 - RNA, 21 nt, Artificial Sequence
  Synthetic
uucacucaggcugccaucaaa

SEQ ID NO: 173053 - RNA, 22 nt, Artificial Sequence
  Synthetic
uuucacucaggcugccaucaaa

SEQ ID NO: 173054 - RNA, 23 nt, Artificial Sequence
  Synthetic
uuuucacucaggcugccaucaaa

SEQ ID NO: 173055 - RNA, 24 nt, Artificial Sequence
  Synthetic
auuuucacucaggcugccaucaaa

SEQ ID NO: 173056 - RNA, 18 nt, Artificial Sequence
  Synthetic
ucaaaugcuaucaucaaa

SEQ ID NO: 173057 - RNA, 19 nt, Artificial Sequence
  Synthetic
uucaaaugcuaucaucaaa

SEQ ID NO: 173058 - RNA, 20 nt, Artificial Sequence
  Synthetic
guucaaaugcuaucaucaaa

SEQ ID NO: 173059 - RNA, 21 nt, Artificial Sequence
  Synthetic
aguucaaaugcuaucaucaaa

SEQ ID NO: 173060 - RNA, 22 nt, Artificial Sequence
  Synthetic
caguucaaaugcuaucaucaaa

SEQ ID NO: 173061 - RNA, 23 nt, Artificial Sequence
  Synthetic
acaguucaaaugcuaucaucaaa

SEQ ID NO: 173062 - RNA, 24 nt, Artificial Sequence
  Synthetic
aacaguucaaaugcuaucaucaaa

SEQ ID NO: 173063 - RNA, 18 nt, Artificial Sequence
  Synthetic
gaaaacaaaaagaucaaa

SEQ ID NO: 173064 - RNA, 19 nt, Artificial Sequence
  Synthetic
ugaaaacaaaaagaucaaa

SEQ ID NO: 173065 - RNA, 20 nt, Artificial Sequence
  Synthetic
gugaaaacaaaaagaucaaa

SEQ ID NO: 173066 - RNA, 21 nt, Artificial Sequence
  Synthetic
agugaaaacaaaaagaucaaa

SEQ ID NO: 173067 - RNA, 22 nt, Artificial Sequence
  Synthetic
aagugaaaacaaaaagaucaaa

SEQ ID NO: 173068 - RNA, 23 nt, Artificial Sequence
  Synthetic
aaagugaaaacaaaaagaucaaa

SEQ ID NO: 173069 - RNA, 24 nt, Artificial Sequence
  Synthetic
uaaagugaaaacaaaaagaucaaa

SEQ ID NO: 173070 - RNA, 18 nt, Artificial Sequence
  Synthetic
agggcaagaaagaucaaa

SEQ ID NO: 173071 - RNA, 19 nt, Artificial Sequence
  Synthetic
gagggcaagaaagaucaaa

SEQ ID NO: 173072 - RNA, 20 nt, Artificial Sequence
  Synthetic
agagggcaagaaagaucaaa

SEQ ID NO: 173073 - RNA, 21 nt, Artificial Sequence
  Synthetic
uagagggcaagaaagaucaaa

SEQ ID NO: 173074 - RNA, 22 nt, Artificial Sequence
  Synthetic
uuagagggcaagaaagaucaaa

SEQ ID NO: 173075 - RNA, 23 nt, Artificial Sequence
  Synthetic
auuagagggcaagaaagaucaaa

SEQ ID NO: 173076 - RNA, 24 nt, Artificial Sequence
  Synthetic
gauuagagggcaagaaagaucaaa

SEQ ID NO: 173077 - RNA, 18 nt, Artificial Sequence
  Synthetic
aaaccaauaaagaucaaa

SEQ ID NO: 173078 - RNA, 19 nt, Artificial Sequence
  Synthetic
uaaaccaauaaagaucaaa

SEQ ID NO: 173079 - RNA, 20 nt, Artificial Sequence
  Synthetic
uuaaaccaauaaagaucaaa

SEQ ID NO: 173080 - RNA, 21 nt, Artificial Sequence
  Synthetic
uuuaaaccaauaaagaucaaa

SEQ ID NO: 173081 - RNA, 22 nt, Artificial Sequence
  Synthetic
cuuuaaaccaauaaagaucaaa

SEQ ID NO: 173082 - RNA, 23 nt, Artificial Sequence
  Synthetic
acuuuaaaccaauaaagaucaaa

SEQ ID NO: 173083 - RNA, 24 nt, Artificial Sequence
  Synthetic
gacuuuaaaccaauaaagaucaaa

SEQ ID NO: 173084 - RNA, 18 nt, Artificial Sequence
  Synthetic
auuacagugcugaucaaa

SEQ ID NO: 173085 - RNA, 19 nt, Artificial Sequence
  Synthetic
gauuacagugcugaucaaa

SEQ ID NO: 173086 - RNA, 20 nt, Artificial Sequence
  Synthetic
agauuacagugcugaucaaa

SEQ ID NO: 173087 - RNA, 21 nt, Artificial Sequence
  Synthetic
aagauuacagugcugaucaaa

SEQ ID NO: 173088 - RNA, 22 nt, Artificial Sequence
  Synthetic
uaagauuacagugcugaucaaa

SEQ ID NO: 173089 - RNA, 23 nt, Artificial Sequence
  Synthetic
uuaagauuacagugcugaucaaa

SEQ ID NO: 173090 - RNA, 24 nt, Artificial Sequence
  Synthetic
uuuaagauuacagugcugaucaaa

SEQ ID NO: 173091 - RNA, 18 nt, Artificial Sequence
  Synthetic
uacacacccaguaucaaa

SEQ ID NO: 173092 - RNA, 19 nt, Artificial Sequence
  Synthetic
uuacacacccaguaucaaa

SEQ ID NO: 173093 - RNA, 20 nt, Artificial Sequence
  Synthetic
uuuacacacccaguaucaaa

SEQ ID NO: 173094 - RNA, 21 nt, Artificial Sequence
  Synthetic
uuuuacacacccaguaucaaa

SEQ ID NO: 173095 - RNA, 22 nt, Artificial Sequence
  Synthetic
auuuuacacacccaguaucaaa

SEQ ID NO: 173096 - RNA, 23 nt, Artificial Sequence
  Synthetic
uauuuuacacacccaguaucaaa

SEQ ID NO: 173097 - RNA, 24 nt, Artificial Sequence
  Synthetic
cuauuuuacacacccaguaucaaa

SEQ ID NO: 173098 - RNA, 18 nt, Artificial Sequence
  Synthetic
gauaacagcauuaucaaa

SEQ ID NO: 173099 - RNA, 19 nt, Artificial Sequence
  Synthetic
agauaacagcauuaucaaa

SEQ ID NO: 173100 - RNA, 20 nt, Artificial Sequence
  Synthetic
aagauaacagcauuaucaaa

SEQ ID NO: 173101 - RNA, 21 nt, Artificial Sequence
  Synthetic
gaagauaacagcauuaucaaa

SEQ ID NO: 173102 - RNA, 22 nt, Artificial Sequence
  Synthetic
ugaagauaacagcauuaucaaa

SEQ ID NO: 173103 - RNA, 23 nt, Artificial Sequence
  Synthetic
cugaagauaacagcauuaucaaa

SEQ ID NO: 173104 - RNA, 24 nt, Artificial Sequence
  Synthetic
acugaagauaacagcauuaucaaa

SEQ ID NO: 173105 - RNA, 18 nt, Artificial Sequence
  Synthetic
guacauuuuacacucaaa

SEQ ID NO: 173106 - RNA, 19 nt, Artificial Sequence
  Synthetic
cguacauuuuacacucaaa

SEQ ID NO: 173107 - RNA, 20 nt, Artificial Sequence
  Synthetic
ucguacauuuuacacucaaa

SEQ ID NO: 173108 - RNA, 21 nt, Artificial Sequence
  Synthetic
aucguacauuuuacacucaaa

SEQ ID NO: 173109 - RNA, 22 nt, Artificial Sequence
  Synthetic
gaucguacauuuuacacucaaa

SEQ ID NO: 173110 - RNA, 23 nt, Artificial Sequence
  Synthetic
ugaucguacauuuuacacucaaa

SEQ ID NO: 173111 - RNA, 24 nt, Artificial Sequence
  Synthetic
augaucguacauuuuacacucaaa

SEQ ID NO: 173112 - RNA, 18 nt, Artificial Sequence
  Synthetic
aguaaugauaaccucaaa

SEQ ID NO: 173113 - RNA, 19 nt, Artificial Sequence
  Synthetic
uaguaaugauaaccucaaa

SEQ ID NO: 173114 - RNA, 20 nt, Artificial Sequence
  Synthetic
auaguaaugauaaccucaaa

SEQ ID NO: 173115 - RNA, 21 nt, Artificial Sequence
  Synthetic
aauaguaaugauaaccucaaa

SEQ ID NO: 173116 - RNA, 22 nt, Artificial Sequence
  Synthetic
uaauaguaaugauaaccucaaa

SEQ ID NO: 173117 - RNA, 23 nt, Artificial Sequence
  Synthetic
auaauaguaaugauaaccucaaa

SEQ ID NO: 173118 - RNA, 24 nt, Artificial Sequence
  Synthetic
aauaauaguaaugauaaccucaaa

SEQ ID NO: 173119 - RNA, 18 nt, Artificial Sequence
  Synthetic
guuuccaagguccucaaa

SEQ ID NO: 173120 - RNA, 19 nt, Artificial Sequence
  Synthetic
aguuuccaagguccucaaa

SEQ ID NO: 173121 - RNA, 20 nt, Artificial Sequence
  Synthetic
uaguuuccaagguccucaaa

SEQ ID NO: 173122 - RNA, 21 nt, Artificial Sequence
  Synthetic
auaguuuccaagguccucaaa

SEQ ID NO: 173123 - RNA, 22 nt, Artificial Sequence
  Synthetic
cauaguuuccaagguccucaaa

SEQ ID NO: 173124 - RNA, 23 nt, Artificial Sequence
  Synthetic
acauaguuuccaagguccucaaa

SEQ ID NO: 173125 - RNA, 24 nt, Artificial Sequence
  Synthetic
aacauaguuuccaagguccucaaa

SEQ ID NO: 173126 - RNA, 18 nt, Artificial Sequence
  Synthetic
auagaaaaccagcucaaa

SEQ ID NO: 173127 - RNA, 19 nt, Artificial Sequence
  Synthetic
gauagaaaaccagcucaaa

SEQ ID NO: 173128 - RNA, 20 nt, Artificial Sequence
  Synthetic
ggauagaaaaccagcucaaa

SEQ ID NO: 173129 - RNA, 21 nt, Artificial Sequence
  Synthetic
gggauagaaaaccagcucaaa

SEQ ID NO: 173130 - RNA, 22 nt, Artificial Sequence
  Synthetic
agggauagaaaaccagcucaaa

SEQ ID NO: 173131 - RNA, 23 nt, Artificial Sequence
  Synthetic
aagggauagaaaaccagcucaaa

SEQ ID NO: 173132 - RNA, 24 nt, Artificial Sequence
  Synthetic
aaagggauagaaaaccagcucaaa

SEQ ID NO: 173133 - RNA, 18 nt, Artificial Sequence
  Synthetic
cugaaaccgcagcucaaa

SEQ ID NO: 173134 - RNA, 19 nt, Artificial Sequence
  Synthetic
ccugaaaccgcagcucaaa

SEQ ID NO: 173135 - RNA, 20 nt, Artificial Sequence
  Synthetic
gccugaaaccgcagcucaaa

SEQ ID NO: 173136 - RNA, 21 nt, Artificial Sequence
  Synthetic
agccugaaaccgcagcucaaa

SEQ ID NO: 173137 - RNA, 22 nt, Artificial Sequence
  Synthetic
aagccugaaaccgcagcucaaa

SEQ ID NO: 173138 - RNA, 23 nt, Artificial Sequence
  Synthetic
aaagccugaaaccgcagcucaaa

SEQ ID NO: 173139 - RNA, 24 nt, Artificial Sequence
  Synthetic
aaaagccugaaaccgcagcucaaa

SEQ ID NO: 173140 - RNA, 18 nt, Artificial Sequence
  Synthetic
aguacccuaccgcucaaa

SEQ ID NO: 173141 - RNA, 19 nt, Artificial Sequence
  Synthetic
aaguacccuaccgcucaaa

SEQ ID NO: 173142 - RNA, 20 nt, Artificial Sequence
  Synthetic
uaaguacccuaccgcucaaa

SEQ ID NO: 173143 - RNA, 21 nt, Artificial Sequence
  Synthetic
guaaguacccuaccgcucaaa

SEQ ID NO: 173144 - RNA, 22 nt, Artificial Sequence
  Synthetic
aguaaguacccuaccgcucaaa

SEQ ID NO: 173145 - RNA, 23 nt, Artificial Sequence
  Synthetic
gaguaaguacccuaccgcucaaa

SEQ ID NO: 173146 - RNA, 24 nt, Artificial Sequence
  Synthetic
agaguaaguacccuaccgcucaaa

SEQ ID NO: 173147 - RNA, 18 nt, Artificial Sequence
  Synthetic
cuucuagaaaugcucaaa

SEQ ID NO: 173148 - RNA, 19 nt, Artificial Sequence
  Synthetic
acuucuagaaaugcucaaa

SEQ ID NO: 173149 - RNA, 20 nt, Artificial Sequence
  Synthetic
aacuucuagaaaugcucaaa

SEQ ID NO: 173150 - RNA, 21 nt, Artificial Sequence
  Synthetic
aaacuucuagaaaugcucaaa

SEQ ID NO: 173151 - RNA, 22 nt, Artificial Sequence
  Synthetic
gaaacuucuagaaaugcucaaa

SEQ ID NO: 173152 - RNA, 23 nt, Artificial Sequence
  Synthetic
ugaaacuucuagaaaugcucaaa

SEQ ID NO: 173153 - RNA, 24 nt, Artificial Sequence
  Synthetic
augaaacuucuagaaaugcucaaa

SEQ ID NO: 173154 - RNA, 18 nt, Artificial Sequence
  Synthetic
auuauggaauugcucaaa

SEQ ID NO: 173155 - RNA, 19 nt, Artificial Sequence
  Synthetic
aauuauggaauugcucaaa

SEQ ID NO: 173156 - RNA, 20 nt, Artificial Sequence
  Synthetic
caauuauggaauugcucaaa

SEQ ID NO: 173157 - RNA, 21 nt, Artificial Sequence
  Synthetic
acaauuauggaauugcucaaa

SEQ ID NO: 173158 - RNA, 22 nt, Artificial Sequence
  Synthetic
gacaauuauggaauugcucaaa

SEQ ID NO: 173159 - RNA, 23 nt, Artificial Sequence
  Synthetic
ggacaauuauggaauugcucaaa

SEQ ID NO: 173160 - RNA, 24 nt, Artificial Sequence
  Synthetic
uggacaauuauggaauugcucaaa

SEQ ID NO: 173161 - RNA, 18 nt, Artificial Sequence
  Synthetic
gcgagacuccaucucaaa

SEQ ID NO: 173162 - RNA, 19 nt, Artificial Sequence
  Synthetic
agcgagacuccaucucaaa

SEQ ID NO: 173163 - RNA, 20 nt, Artificial Sequence
  Synthetic
gagcgagacuccaucucaaa

SEQ ID NO: 173164 - RNA, 21 nt, Artificial Sequence
  Synthetic
agagcgagacuccaucucaaa

SEQ ID NO: 173165 - RNA, 22 nt, Artificial Sequence
  Synthetic
cagagcgagacuccaucucaaa

SEQ ID NO: 173166 - RNA, 23 nt, Artificial Sequence
  Synthetic
acagagcgagacuccaucucaaa

SEQ ID NO: 173167 - RNA, 24 nt, Artificial Sequence
  Synthetic
aacagagcgagacuccaucucaaa

SEQ ID NO: 173168 - RNA, 18 nt, Artificial Sequence
  Synthetic
gggagacuccaucucaaa

SEQ ID NO: 173169 - RNA, 19 nt, Artificial Sequence
  Synthetic
agggagacuccaucucaaa

SEQ ID NO: 173170 - RNA, 20 nt, Artificial Sequence
  Synthetic
gagggagacuccaucucaaa

SEQ ID NO: 173171 - RNA, 21 nt, Artificial Sequence
  Synthetic
agagggagacuccaucucaaa

SEQ ID NO: 173172 - RNA, 22 nt, Artificial Sequence
  Synthetic
cagagggagacuccaucucaaa

SEQ ID NO: 173173 - RNA, 23 nt, Artificial Sequence
  Synthetic
acagagggagacuccaucucaaa

SEQ ID NO: 173174 - RNA, 24 nt, Artificial Sequence
  Synthetic
gacagagggagacuccaucucaaa

SEQ ID NO: 173175 - RNA, 18 nt, Artificial Sequence
  Synthetic
guccuucuggaucucaaa

SEQ ID NO: 173176 - RNA, 19 nt, Artificial Sequence
  Synthetic
uguccuucuggaucucaaa

SEQ ID NO: 173177 - RNA, 20 nt, Artificial Sequence
  Synthetic
uuguccuucuggaucucaaa

SEQ ID NO: 173178 - RNA, 21 nt, Artificial Sequence
  Synthetic
uuuguccuucuggaucucaaa

SEQ ID NO: 173179 - RNA, 22 nt, Artificial Sequence
  Synthetic
uuuuguccuucuggaucucaaa

SEQ ID NO: 173180 - RNA, 23 nt, Artificial Sequence
  Synthetic
cuuuuguccuucuggaucucaaa

SEQ ID NO: 173181 - RNA, 24 nt, Artificial Sequence
  Synthetic
ccuuuuguccuucuggaucucaaa

SEQ ID NO: 173182 - RNA, 18 nt, Artificial Sequence
  Synthetic
cuucacguggaucucaaa

SEQ ID NO: 173183 - RNA, 19 nt, Artificial Sequence
  Synthetic
acuucacguggaucucaaa

SEQ ID NO: 173184 - RNA, 20 nt, Artificial Sequence
  Synthetic
uacuucacguggaucucaaa

SEQ ID NO: 173185 - RNA, 21 nt, Artificial Sequence
  Synthetic
auacuucacguggaucucaaa

SEQ ID NO: 173186 - RNA, 22 nt, Artificial Sequence
  Synthetic
cauacuucacguggaucucaaa

SEQ ID NO: 173187 - RNA, 23 nt, Artificial Sequence
  Synthetic
ucauacuucacguggaucucaaa

SEQ ID NO: 173188 - RNA, 24 nt, Artificial Sequence
  Synthetic
cucauacuucacguggaucucaaa

SEQ ID NO: 173189 - RNA, 18 nt, Artificial Sequence
  Synthetic
aaauaucugcuucucaaa

SEQ ID NO: 173190 - RNA, 19 nt, Artificial Sequence
  Synthetic
gaaauaucugcuucucaaa

SEQ ID NO: 173191 - RNA, 20 nt, Artificial Sequence
  Synthetic
ggaaauaucugcuucucaaa

SEQ ID NO: 173192 - RNA, 21 nt, Artificial Sequence
  Synthetic
gggaaauaucugcuucucaaa

SEQ ID NO: 173193 - RNA, 22 nt, Artificial Sequence
  Synthetic
ugggaaauaucugcuucucaaa

SEQ ID NO: 173194 - RNA, 23 nt, Artificial Sequence
  Synthetic
gugggaaauaucugcuucucaaa

SEQ ID NO: 173195 - RNA, 24 nt, Artificial Sequence
  Synthetic
agugggaaauaucugcuucucaaa

SEQ ID NO: 173196 - RNA, 18 nt, Artificial Sequence
  Synthetic
agaguaguaguucucaaa

SEQ ID NO: 173197 - RNA, 19 nt, Artificial Sequence
  Synthetic
uagaguaguaguucucaaa

SEQ ID NO: 173198 - RNA, 20 nt, Artificial Sequence
  Synthetic
cuagaguaguaguucucaaa

SEQ ID NO: 173199 - RNA, 21 nt, Artificial Sequence
  Synthetic
ucuagaguaguaguucucaaa

SEQ ID NO: 173200 - RNA, 22 nt, Artificial Sequence
  Synthetic
aucuagaguaguaguucucaaa

SEQ ID NO: 173201 - RNA, 23 nt, Artificial Sequence
  Synthetic
uaucuagaguaguaguucucaaa

SEQ ID NO: 173202 - RNA, 24 nt, Artificial Sequence
  Synthetic
uuaucuagaguaguaguucucaaa

SEQ ID NO: 173203 - RNA, 18 nt, Artificial Sequence
  Synthetic
auugcaaugguucucaaa

SEQ ID NO: 173204 - RNA, 19 nt, Artificial Sequence
  Synthetic
uauugcaaugguucucaaa

SEQ ID NO: 173205 - RNA, 20 nt, Artificial Sequence
  Synthetic
cuauugcaaugguucucaaa

SEQ ID NO: 173206 - RNA, 21 nt, Artificial Sequence
  Synthetic
ucuauugcaaugguucucaaa

SEQ ID NO: 173207 - RNA, 22 nt, Artificial Sequence
  Synthetic
gucuauugcaaugguucucaaa

SEQ ID NO: 173208 - RNA, 23 nt, Artificial Sequence
  Synthetic
ugucuauugcaaugguucucaaa

SEQ ID NO: 173209 - RNA, 24 nt, Artificial Sequence
  Synthetic
uugucuauugcaaugguucucaaa

SEQ ID NO: 173210 - RNA, 18 nt, Artificial Sequence
  Synthetic
gaaaaacaguuucucaaa

SEQ ID NO: 173211 - RNA, 19 nt, Artificial Sequence
  Synthetic
agaaaaacaguuucucaaa

SEQ ID NO: 173212 - RNA, 20 nt, Artificial Sequence
  Synthetic
aagaaaaacaguuucucaaa

SEQ ID NO: 173213 - RNA, 21 nt, Artificial Sequence
  Synthetic
gaagaaaaacaguuucucaaa

SEQ ID NO: 173214 - RNA, 22 nt, Artificial Sequence
  Synthetic
ggaagaaaaacaguuucucaaa

SEQ ID NO: 173215 - RNA, 23 nt, Artificial Sequence
  Synthetic
aggaagaaaaacaguuucucaaa

SEQ ID NO: 173216 - RNA, 24 nt, Artificial Sequence
  Synthetic
aaggaagaaaaacaguuucucaaa

SEQ ID NO: 173217 - RNA, 18 nt, Artificial Sequence
  Synthetic
cugucuacuuuucucaaa

SEQ ID NO: 173218 - RNA, 19 nt, Artificial Sequence
  Synthetic
ucugucuacuuuucucaaa

SEQ ID NO: 173219 - RNA, 20 nt, Artificial Sequence
  Synthetic
uucugucuacuuuucucaaa

SEQ ID NO: 173220 - RNA, 21 nt, Artificial Sequence
  Synthetic
uuucugucuacuuuucucaaa

SEQ ID NO: 173221 - RNA, 22 nt, Artificial Sequence
  Synthetic
uuuucugucuacuuuucucaaa

SEQ ID NO: 173222 - RNA, 23 nt, Artificial Sequence
  Synthetic
cuuuucugucuacuuuucucaaa

SEQ ID NO: 173223 - RNA, 24 nt, Artificial Sequence
  Synthetic
acuuuucugucuacuuuucucaaa

SEQ ID NO: 173224 - RNA, 18 nt, Artificial Sequence
  Synthetic
cauuaaacaaaagucaaa

SEQ ID NO: 173225 - RNA, 19 nt, Artificial Sequence
  Synthetic
ccauuaaacaaaagucaaa

SEQ ID NO: 173226 - RNA, 20 nt, Artificial Sequence
  Synthetic
accauuaaacaaaagucaaa

SEQ ID NO: 173227 - RNA, 21 nt, Artificial Sequence
  Synthetic
uaccauuaaacaaaagucaaa

SEQ ID NO: 173228 - RNA, 22 nt, Artificial Sequence
  Synthetic
uuaccauuaaacaaaagucaaa

SEQ ID NO: 173229 - RNA, 23 nt, Artificial Sequence
  Synthetic
auuaccauuaaacaaaagucaaa

SEQ ID NO: 173230 - RNA, 24 nt, Artificial Sequence
  Synthetic
aauuaccauuaaacaaaagucaaa

SEQ ID NO: 173231 - RNA, 18 nt, Artificial Sequence
  Synthetic
uuuauaaaggaagucaaa

SEQ ID NO: 173232 - RNA, 19 nt, Artificial Sequence
  Synthetic
uuuuauaaaggaagucaaa

SEQ ID NO: 173233 - RNA, 20 nt, Artificial Sequence
  Synthetic
guuuuauaaaggaagucaaa

SEQ ID NO: 173234 - RNA, 21 nt, Artificial Sequence
  Synthetic
aguuuuauaaaggaagucaaa

SEQ ID NO: 173235 - RNA, 22 nt, Artificial Sequence
  Synthetic
uaguuuuauaaaggaagucaaa

SEQ ID NO: 173236 - RNA, 23 nt, Artificial Sequence
  Synthetic
uuaguuuuauaaaggaagucaaa

SEQ ID NO: 173237 - RNA, 24 nt, Artificial Sequence
  Synthetic
auuaguuuuauaaaggaagucaaa

SEQ ID NO: 173238 - RNA, 18 nt, Artificial Sequence
  Synthetic
aguagcuuugaagucaaa

SEQ ID NO: 173239 - RNA, 19 nt, Artificial Sequence
  Synthetic
uaguagcuuugaagucaaa

SEQ ID NO: 173240 - RNA, 20 nt, Artificial Sequence
  Synthetic
cuaguagcuuugaagucaaa

SEQ ID NO: 173241 - RNA, 21 nt, Artificial Sequence
  Synthetic
ccuaguagcuuugaagucaaa

SEQ ID NO: 173242 - RNA, 22 nt, Artificial Sequence
  Synthetic
cccuaguagcuuugaagucaaa

SEQ ID NO: 173243 - RNA, 23 nt, Artificial Sequence
  Synthetic
ccccuaguagcuuugaagucaaa

SEQ ID NO: 173244 - RNA, 24 nt, Artificial Sequence
  Synthetic
gccccuaguagcuuugaagucaaa

SEQ ID NO: 173245 - RNA, 18 nt, Artificial Sequence
  Synthetic
ggaugggcagcagucaaa

SEQ ID NO: 173246 - RNA, 19 nt, Artificial Sequence
  Synthetic
uggaugggcagcagucaaa

SEQ ID NO: 173247 - RNA, 20 nt, Artificial Sequence
  Synthetic
guggaugggcagcagucaaa

SEQ ID NO: 173248 - RNA, 21 nt, Artificial Sequence
  Synthetic
cguggaugggcagcagucaaa

SEQ ID NO: 173249 - RNA, 22 nt, Artificial Sequence
  Synthetic
acguggaugggcagcagucaaa

SEQ ID NO: 173250 - RNA, 23 nt, Artificial Sequence
  Synthetic
uacguggaugggcagcagucaaa

SEQ ID NO: 173251 - RNA, 24 nt, Artificial Sequence
  Synthetic
uuacguggaugggcagcagucaaa

SEQ ID NO: 173252 - RNA, 18 nt, Artificial Sequence
  Synthetic
ugagucaaugaggucaaa

SEQ ID NO: 173253 - RNA, 19 nt, Artificial Sequence
  Synthetic
uugagucaaugaggucaaa

SEQ ID NO: 173254 - RNA, 20 nt, Artificial Sequence
  Synthetic
auugagucaaugaggucaaa

SEQ ID NO: 173255 - RNA, 21 nt, Artificial Sequence
  Synthetic
aauugagucaaugaggucaaa

SEQ ID NO: 173256 - RNA, 22 nt, Artificial Sequence
  Synthetic
gaauugagucaaugaggucaaa

SEQ ID NO: 173257 - RNA, 23 nt, Artificial Sequence
  Synthetic
ugaauugagucaaugaggucaaa

SEQ ID NO: 173258 - RNA, 24 nt, Artificial Sequence
  Synthetic
gugaauugagucaaugaggucaaa

SEQ ID NO: 173259 - RNA, 18 nt, Artificial Sequence
  Synthetic
gugaugacaagggucaaa

SEQ ID NO: 173260 - RNA, 19 nt, Artificial Sequence
  Synthetic
agugaugacaagggucaaa

SEQ ID NO: 173261 - RNA, 20 nt, Artificial Sequence
  Synthetic
cagugaugacaagggucaaa

SEQ ID NO: 173262 - RNA, 21 nt, Artificial Sequence
  Synthetic
ccagugaugacaagggucaaa

SEQ ID NO: 173263 - RNA, 22 nt, Artificial Sequence
  Synthetic
uccagugaugacaagggucaaa

SEQ ID NO: 173264 - RNA, 23 nt, Artificial Sequence
  Synthetic
uuccagugaugacaagggucaaa

SEQ ID NO: 173265 - RNA, 24 nt, Artificial Sequence
  Synthetic
cuuccagugaugacaagggucaaa

SEQ ID NO: 173266 - RNA, 18 nt, Artificial Sequence
  Synthetic
cucuauauuuaugucaaa

SEQ ID NO: 173267 - RNA, 19 nt, Artificial Sequence
  Synthetic
ccucuauauuuaugucaaa

SEQ ID NO: 173268 - RNA, 20 nt, Artificial Sequence
  Synthetic
uccucuauauuuaugucaaa

SEQ ID NO: 173269 - RNA, 21 nt, Artificial Sequence
  Synthetic
uuccucuauauuuaugucaaa

SEQ ID NO: 173270 - RNA, 22 nt, Artificial Sequence
  Synthetic
uuuccucuauauuuaugucaaa

SEQ ID NO: 173271 - RNA, 23 nt, Artificial Sequence
  Synthetic
uuuuccucuauauuuaugucaaa

SEQ ID NO: 173272 - RNA, 24 nt, Artificial Sequence
  Synthetic
uuuuuccucuauauuuaugucaaa

SEQ ID NO: 173273 - RNA, 18 nt, Artificial Sequence
  Synthetic
uuuauuccuccugucaaa

SEQ ID NO: 173274 - RNA, 19 nt, Artificial Sequence
  Synthetic
auuuauuccuccugucaaa

SEQ ID NO: 173275 - RNA, 20 nt, Artificial Sequence
  Synthetic
gauuuauuccuccugucaaa

SEQ ID NO: 173276 - RNA, 21 nt, Artificial Sequence
  Synthetic
ggauuuauuccuccugucaaa

SEQ ID NO: 173277 - RNA, 22 nt, Artificial Sequence
  Synthetic
aggauuuauuccuccugucaaa

SEQ ID NO: 173278 - RNA, 23 nt, Artificial Sequence
  Synthetic
uaggauuuauuccuccugucaaa

SEQ ID NO: 173279 - RNA, 24 nt, Artificial Sequence
  Synthetic
cuaggauuuauuccuccugucaaa

SEQ ID NO: 173280 - RNA, 18 nt, Artificial Sequence
  Synthetic
uagcaagcggcugucaaa

SEQ ID NO: 173281 - RNA, 19 nt, Artificial Sequence
  Synthetic
uuagcaagcggcugucaaa

SEQ ID NO: 173282 - RNA, 20 nt, Artificial Sequence
  Synthetic
uuuagcaagcggcugucaaa

SEQ ID NO: 173283 - RNA, 21 nt, Artificial Sequence
  Synthetic
auuuagcaagcggcugucaaa

SEQ ID NO: 173284 - RNA, 22 nt, Artificial Sequence
  Synthetic
aauuuagcaagcggcugucaaa

SEQ ID NO: 173285 - RNA, 23 nt, Artificial Sequence
  Synthetic
gaauuuagcaagcggcugucaaa

SEQ ID NO: 173286 - RNA, 24 nt, Artificial Sequence
  Synthetic
ggaauuuagcaagcggcugucaaa

SEQ ID NO: 173287 - RNA, 18 nt, Artificial Sequence
  Synthetic
agaguaguaucugucaaa

SEQ ID NO: 173288 - RNA, 19 nt, Artificial Sequence
  Synthetic
cagaguaguaucugucaaa

SEQ ID NO: 173289 - RNA, 20 nt, Artificial Sequence
  Synthetic
ucagaguaguaucugucaaa

SEQ ID NO: 173290 - RNA, 21 nt, Artificial Sequence
  Synthetic
aucagaguaguaucugucaaa

SEQ ID NO: 173291 - RNA, 22 nt, Artificial Sequence
  Synthetic
uaucagaguaguaucugucaaa

SEQ ID NO: 173292 - RNA, 23 nt, Artificial Sequence
  Synthetic
guaucagaguaguaucugucaaa

SEQ ID NO: 173293 - RNA, 24 nt, Artificial Sequence
  Synthetic
uguaucagaguaguaucugucaaa

SEQ ID NO: 173294 - RNA, 18 nt, Artificial Sequence
  Synthetic
uuuucucuuuuugucaaa

SEQ ID NO: 173295 - RNA, 19 nt, Artificial Sequence
  Synthetic
guuuucucuuuuugucaaa

SEQ ID NO: 173296 - RNA, 20 nt, Artificial Sequence
  Synthetic
aguuuucucuuuuugucaaa

SEQ ID NO: 173297 - RNA, 21 nt, Artificial Sequence
  Synthetic
uaguuuucucuuuuugucaaa

SEQ ID NO: 173298 - RNA, 22 nt, Artificial Sequence
  Synthetic
guaguuuucucuuuuugucaaa

SEQ ID NO: 173299 - RNA, 23 nt, Artificial Sequence
  Synthetic
aguaguuuucucuuuuugucaaa

SEQ ID NO: 173300 - RNA, 24 nt, Artificial Sequence
  Synthetic
aaguaguuuucucuuuuugucaaa

SEQ ID NO: 173301 - RNA, 18 nt, Artificial Sequence
  Synthetic
aaaaugaguuaauucaaa

SEQ ID NO: 173302 - RNA, 19 nt, Artificial Sequence
  Synthetic
uaaaaugaguuaauucaaa

SEQ ID NO: 173303 - RNA, 20 nt, Artificial Sequence
  Synthetic
uuaaaaugaguuaauucaaa

SEQ ID NO: 173304 - RNA, 21 nt, Artificial Sequence
  Synthetic
uuuaaaaugaguuaauucaaa

SEQ ID NO: 173305 - RNA, 22 nt, Artificial Sequence
  Synthetic
uuuuaaaaugaguuaauucaaa

SEQ ID NO: 173306 - RNA, 23 nt, Artificial Sequence
  Synthetic
cuuuuaaaaugaguuaauucaaa

SEQ ID NO: 173307 - RNA, 24 nt, Artificial Sequence
  Synthetic
ucuuuuaaaaugaguuaauucaaa

SEQ ID NO: 173308 - RNA, 18 nt, Artificial Sequence
  Synthetic
uaccccugcacauucaaa

SEQ ID NO: 173309 - RNA, 19 nt, Artificial Sequence
  Synthetic
auaccccugcacauucaaa

SEQ ID NO: 173310 - RNA, 20 nt, Artificial Sequence
  Synthetic
cauaccccugcacauucaaa

SEQ ID NO: 173311 - RNA, 21 nt, Artificial Sequence
  Synthetic
ucauaccccugcacauucaaa

SEQ ID NO: 173312 - RNA, 22 nt, Artificial Sequence
  Synthetic
cucauaccccugcacauucaaa

SEQ ID NO: 173313 - RNA, 23 nt, Artificial Sequence
  Synthetic
ccucauaccccugcacauucaaa

SEQ ID NO: 173314 - RNA, 24 nt, Artificial Sequence
  Synthetic
uccucauaccccugcacauucaaa

SEQ ID NO: 173315 - RNA, 18 nt, Artificial Sequence
  Synthetic
ccuuuuuuggcauucaaa

SEQ ID NO: 173316 - RNA, 19 nt, Artificial Sequence
  Synthetic
accuuuuuuggcauucaaa

SEQ ID NO: 173317 - RNA, 20 nt, Artificial Sequence
  Synthetic
aaccuuuuuuggcauucaaa

SEQ ID NO: 173318 - RNA, 21 nt, Artificial Sequence
  Synthetic
aaaccuuuuuuggcauucaaa

SEQ ID NO: 173319 - RNA, 22 nt, Artificial Sequence
  Synthetic
uaaaccuuuuuuggcauucaaa

SEQ ID NO: 173320 - RNA, 23 nt, Artificial Sequence
  Synthetic
uuaaaccuuuuuuggcauucaaa

SEQ ID NO: 173321 - RNA, 24 nt, Artificial Sequence
  Synthetic
auuaaaccuuuuuuggcauucaaa

SEQ ID NO: 173322 - RNA, 18 nt, Artificial Sequence
  Synthetic
uggaacagaucauucaaa

SEQ ID NO: 173323 - RNA, 19 nt, Artificial Sequence
  Synthetic
cuggaacagaucauucaaa

SEQ ID NO: 173324 - RNA, 20 nt, Artificial Sequence
  Synthetic
ccuggaacagaucauucaaa

SEQ ID NO: 173325 - RNA, 21 nt, Artificial Sequence
  Synthetic
uccuggaacagaucauucaaa

SEQ ID NO: 173326 - RNA, 22 nt, Artificial Sequence
  Synthetic
uuccuggaacagaucauucaaa

SEQ ID NO: 173327 - RNA, 23 nt, Artificial Sequence
  Synthetic
auuccuggaacagaucauucaaa

SEQ ID NO: 173328 - RNA, 24 nt, Artificial Sequence
  Synthetic
aauuccuggaacagaucauucaaa

SEQ ID NO: 173329 - RNA, 18 nt, Artificial Sequence
  Synthetic
uccuuucaaauauucaaa

SEQ ID NO: 173330 - RNA, 19 nt, Artificial Sequence
  Synthetic
auccuuucaaauauucaaa

SEQ ID NO: 173331 - RNA, 20 nt, Artificial Sequence
  Synthetic
cauccuuucaaauauucaaa

SEQ ID NO: 173332 - RNA, 21 nt, Artificial Sequence
  Synthetic
ccauccuuucaaauauucaaa

SEQ ID NO: 173333 - RNA, 22 nt, Artificial Sequence
  Synthetic
gccauccuuucaaauauucaaa

SEQ ID NO: 173334 - RNA, 23 nt, Artificial Sequence
  Synthetic
ugccauccuuucaaauauucaaa

SEQ ID NO: 173335 - RNA, 24 nt, Artificial Sequence
  Synthetic
augccauccuuucaaauauucaaa

SEQ ID NO: 173336 - RNA, 18 nt, Artificial Sequence
  Synthetic
uuuuaccagauauucaaa

SEQ ID NO: 173337 - RNA, 19 nt, Artificial Sequence
  Synthetic
auuuuaccagauauucaaa

SEQ ID NO: 173338 - RNA, 20 nt, Artificial Sequence
  Synthetic
aauuuuaccagauauucaaa

SEQ ID NO: 173339 - RNA, 21 nt, Artificial Sequence
  Synthetic
aaauuuuaccagauauucaaa

SEQ ID NO: 173340 - RNA, 22 nt, Artificial Sequence
  Synthetic
aaaauuuuaccagauauucaaa

SEQ ID NO: 173341 - RNA, 23 nt, Artificial Sequence
  Synthetic
aaaaauuuuaccagauauucaaa

SEQ ID NO: 173342 - RNA, 24 nt, Artificial Sequence
  Synthetic
uaaaaauuuuaccagauauucaaa

SEQ ID NO: 173343 - RNA, 18 nt, Artificial Sequence
  Synthetic
cuuuuugguauauucaaa

SEQ ID NO: 173344 - RNA, 19 nt, Artificial Sequence
  Synthetic
acuuuuugguauauucaaa

SEQ ID NO: 173345 - RNA, 20 nt, Artificial Sequence
  Synthetic
uacuuuuugguauauucaaa

SEQ ID NO: 173346 - RNA, 21 nt, Artificial Sequence
  Synthetic
guacuuuuugguauauucaaa

SEQ ID NO: 173347 - RNA, 22 nt, Artificial Sequence
  Synthetic
uguacuuuuugguauauucaaa

SEQ ID NO: 173348 - RNA, 23 nt, Artificial Sequence
  Synthetic
auguacuuuuugguauauucaaa

SEQ ID NO: 173349 - RNA, 24 nt, Artificial Sequence
  Synthetic
uauguacuuuuugguauauucaaa

SEQ ID NO: 173350 - RNA, 18 nt, Artificial Sequence
  Synthetic
aaauaaaggguauucaaa

SEQ ID NO: 173351 - RNA, 19 nt, Artificial Sequence
  Synthetic
gaaauaaaggguauucaaa

SEQ ID NO: 173352 - RNA, 20 nt, Artificial Sequence
  Synthetic
agaaauaaaggguauucaaa

SEQ ID NO: 173353 - RNA, 21 nt, Artificial Sequence
  Synthetic
aagaaauaaaggguauucaaa

SEQ ID NO: 173354 - RNA, 22 nt, Artificial Sequence
  Synthetic
aaagaaauaaaggguauucaaa

SEQ ID NO: 173355 - RNA, 23 nt, Artificial Sequence
  Synthetic
gaaagaaauaaaggguauucaaa

SEQ ID NO: 173356 - RNA, 24 nt, Artificial Sequence
  Synthetic
ggaaagaaauaaaggguauucaaa

SEQ ID NO: 173357 - RNA, 18 nt, Artificial Sequence
  Synthetic
agcuuuuaaaacuucaaa

SEQ ID NO: 173358 - RNA, 19 nt, Artificial Sequence
  Synthetic
cagcuuuuaaaacuucaaa

SEQ ID NO: 173359 - RNA, 20 nt, Artificial Sequence
  Synthetic
gcagcuuuuaaaacuucaaa

SEQ ID NO: 173360 - RNA, 21 nt, Artificial Sequence
  Synthetic
ugcagcuuuuaaaacuucaaa

SEQ ID NO: 173361 - RNA, 22 nt, Artificial Sequence
  Synthetic
uugcagcuuuuaaaacuucaaa

SEQ ID NO: 173362 - RNA, 23 nt, Artificial Sequence
  Synthetic
auugcagcuuuuaaaacuucaaa

SEQ ID NO: 173363 - RNA, 24 nt, Artificial Sequence
  Synthetic
aauugcagcuuuuaaaacuucaaa

SEQ ID NO: 173364 - RNA, 18 nt, Artificial Sequence
  Synthetic
acagaacuuuacuucaaa

SEQ ID NO: 173365 - RNA, 19 nt, Artificial Sequence
  Synthetic
cacagaacuuuacuucaaa

SEQ ID NO: 173366 - RNA, 20 nt, Artificial Sequence
  Synthetic
ucacagaacuuuacuucaaa

SEQ ID NO: 173367 - RNA, 21 nt, Artificial Sequence
  Synthetic
cucacagaacuuuacuucaaa

SEQ ID NO: 173368 - RNA, 22 nt, Artificial Sequence
  Synthetic
acucacagaacuuuacuucaaa

SEQ ID NO: 173369 - RNA, 23 nt, Artificial Sequence
  Synthetic
aacucacagaacuuuacuucaaa

SEQ ID NO: 173370 - RNA, 24 nt, Artificial Sequence
  Synthetic
gaacucacagaacuuuacuucaaa

SEQ ID NO: 173371 - RNA, 18 nt, Artificial Sequence
  Synthetic
ugcccgacugccuucaaa

SEQ ID NO: 173372 - RNA, 19 nt, Artificial Sequence
  Synthetic
cugcccgacugccuucaaa

SEQ ID NO: 173373 - RNA, 20 nt, Artificial Sequence
  Synthetic
ucugcccgacugccuucaaa

SEQ ID NO: 173374 - RNA, 21 nt, Artificial Sequence
  Synthetic
uucugcccgacugccuucaaa

SEQ ID NO: 173375 - RNA, 22 nt, Artificial Sequence
  Synthetic
guucugcccgacugccuucaaa

SEQ ID NO: 173376 - RNA, 23 nt, Artificial Sequence
  Synthetic
cguucugcccgacugccuucaaa

SEQ ID NO: 173377 - RNA, 24 nt, Artificial Sequence
  Synthetic
ucguucugcccgacugccuucaaa

SEQ ID NO: 173378 - RNA, 18 nt, Artificial Sequence
  Synthetic
caagccaacaucuucaaa

SEQ ID NO: 173379 - RNA, 19 nt, Artificial Sequence
  Synthetic
ccaagccaacaucuucaaa

SEQ ID NO: 173380 - RNA, 20 nt, Artificial Sequence
  Synthetic
uccaagccaacaucuucaaa

SEQ ID NO: 173381 - RNA, 21 nt, Artificial Sequence
  Synthetic
auccaagccaacaucuucaaa

SEQ ID NO: 173382 - RNA, 22 nt, Artificial Sequence
  Synthetic
aauccaagccaacaucuucaaa

SEQ ID NO: 173383 - RNA, 23 nt, Artificial Sequence
  Synthetic
uaauccaagccaacaucuucaaa

SEQ ID NO: 173384 - RNA, 24 nt, Artificial Sequence
  Synthetic
cuaauccaagccaacaucuucaaa

SEQ ID NO: 173385 - RNA, 18 nt, Artificial Sequence
  Synthetic
caggucaacuucuucaaa

SEQ ID NO: 173386 - RNA, 19 nt, Artificial Sequence
  Synthetic
acaggucaacuucuucaaa

SEQ ID NO: 173387 - RNA, 20 nt, Artificial Sequence
  Synthetic
gacaggucaacuucuucaaa

SEQ ID NO: 173388 - RNA, 21 nt, Artificial Sequence
  Synthetic
agacaggucaacuucuucaaa

SEQ ID NO: 173389 - RNA, 22 nt, Artificial Sequence
  Synthetic
cagacaggucaacuucuucaaa

SEQ ID NO: 173390 - RNA, 23 nt, Artificial Sequence
  Synthetic
gcagacaggucaacuucuucaaa

SEQ ID NO: 173391 - RNA, 24 nt, Artificial Sequence
  Synthetic
agcagacaggucaacuucuucaaa

SEQ ID NO: 173392 - RNA, 18 nt, Artificial Sequence
  Synthetic
ucucugcuuuucuucaaa

SEQ ID NO: 173393 - RNA, 19 nt, Artificial Sequence
  Synthetic
cucucugcuuuucuucaaa

SEQ ID NO: 173394 - RNA, 20 nt, Artificial Sequence
  Synthetic
ucucucugcuuuucuucaaa

SEQ ID NO: 173395 - RNA, 21 nt, Artificial Sequence
  Synthetic
uucucucugcuuuucuucaaa

SEQ ID NO: 173396 - RNA, 22 nt, Artificial Sequence
  Synthetic
cuucucucugcuuuucuucaaa

SEQ ID NO: 173397 - RNA, 23 nt, Artificial Sequence
  Synthetic
ucuucucucugcuuuucuucaaa

SEQ ID NO: 173398 - RNA, 24 nt, Artificial Sequence
  Synthetic
gucuucucucugcuuuucuucaaa

SEQ ID NO: 173399 - RNA, 18 nt, Artificial Sequence
  Synthetic
gcauggacucaguucaaa

SEQ ID NO: 173400 - RNA, 19 nt, Artificial Sequence
  Synthetic
ugcauggacucaguucaaa

SEQ ID NO: 173401 - RNA, 20 nt, Artificial Sequence
  Synthetic
uugcauggacucaguucaaa

SEQ ID NO: 173402 - RNA, 21 nt, Artificial Sequence
  Synthetic
guugcauggacucaguucaaa

SEQ ID NO: 173403 - RNA, 22 nt, Artificial Sequence
  Synthetic
cguugcauggacucaguucaaa

SEQ ID NO: 173404 - RNA, 23 nt, Artificial Sequence
  Synthetic
acguugcauggacucaguucaaa

SEQ ID NO: 173405 - RNA, 24 nt, Artificial Sequence
  Synthetic
gacguugcauggacucaguucaaa

SEQ ID NO: 173406 - RNA, 18 nt, Artificial Sequence
  Synthetic
gcccuugauuaguucaaa

SEQ ID NO: 173407 - RNA, 19 nt, Artificial Sequence
  Synthetic
ugcccuugauuaguucaaa

SEQ ID NO: 173408 - RNA, 20 nt, Artificial Sequence
  Synthetic
cugcccuugauuaguucaaa

SEQ ID NO: 173409 - RNA, 21 nt, Artificial Sequence
  Synthetic
gcugcccuugauuaguucaaa

SEQ ID NO: 173410 - RNA, 22 nt, Artificial Sequence
  Synthetic
agcugcccuugauuaguucaaa

SEQ ID NO: 173411 - RNA, 23 nt, Artificial Sequence
  Synthetic
gagcugcccuugauuaguucaaa

SEQ ID NO: 173412 - RNA, 24 nt, Artificial Sequence
  Synthetic
ugagcugcccuugauuaguucaaa

SEQ ID NO: 173413 - RNA, 18 nt, Artificial Sequence
  Synthetic
agaugacugaauuucaaa

SEQ ID NO: 173414 - RNA, 19 nt, Artificial Sequence
  Synthetic
uagaugacugaauuucaaa

SEQ ID NO: 173415 - RNA, 20 nt, Artificial Sequence
  Synthetic
guagaugacugaauuucaaa

SEQ ID NO: 173416 - RNA, 21 nt, Artificial Sequence
  Synthetic
uguagaugacugaauuucaaa

SEQ ID NO: 173417 - RNA, 22 nt, Artificial Sequence
  Synthetic
auguagaugacugaauuucaaa

SEQ ID NO: 173418 - RNA, 23 nt, Artificial Sequence
  Synthetic
cauguagaugacugaauuucaaa

SEQ ID NO: 173419 - RNA, 24 nt, Artificial Sequence
  Synthetic
ccauguagaugacugaauuucaaa

SEQ ID NO: 173420 - RNA, 18 nt, Artificial Sequence
  Synthetic
cagagccaauauuucaaa

SEQ ID NO: 173421 - RNA, 19 nt, Artificial Sequence
  Synthetic
acagagccaauauuucaaa

SEQ ID NO: 173422 - RNA, 20 nt, Artificial Sequence
  Synthetic
aacagagccaauauuucaaa

SEQ ID NO: 173423 - RNA, 21 nt, Artificial Sequence
  Synthetic
uaacagagccaauauuucaaa

SEQ ID NO: 173424 - RNA, 22 nt, Artificial Sequence
  Synthetic
guaacagagccaauauuucaaa

SEQ ID NO: 173425 - RNA, 23 nt, Artificial Sequence
  Synthetic
gguaacagagccaauauuucaaa

SEQ ID NO: 173426 - RNA, 24 nt, Artificial Sequence
  Synthetic
ugguaacagagccaauauuucaaa

SEQ ID NO: 173427 - RNA, 18 nt, Artificial Sequence
  Synthetic
cacauucgauauuucaaa

SEQ ID NO: 173428 - RNA, 19 nt, Artificial Sequence
  Synthetic
ccacauucgauauuucaaa

SEQ ID NO: 173429 - RNA, 20 nt, Artificial Sequence
  Synthetic
accacauucgauauuucaaa

SEQ ID NO: 173430 - RNA, 21 nt, Artificial Sequence
  Synthetic
aaccacauucgauauuucaaa

SEQ ID NO: 173431 - RNA, 22 nt, Artificial Sequence
  Synthetic
aaaccacauucgauauuucaaa

SEQ ID NO: 173432 - RNA, 23 nt, Artificial Sequence
  Synthetic
uaaaccacauucgauauuucaaa

SEQ ID NO: 173433 - RNA, 24 nt, Artificial Sequence
  Synthetic
guaaaccacauucgauauuucaaa

SEQ ID NO: 173434 - RNA, 18 nt, Artificial Sequence
  Synthetic
aauaugugguauuucaaa

SEQ ID NO: 173435 - RNA, 19 nt, Artificial Sequence
  Synthetic
aaauaugugguauuucaaa

SEQ ID NO: 173436 - RNA, 20 nt, Artificial Sequence
  Synthetic
uaaauaugugguauuucaaa

SEQ ID NO: 173437 - RNA, 21 nt, Artificial Sequence
  Synthetic
auaaauaugugguauuucaaa

SEQ ID NO: 173438 - RNA, 22 nt, Artificial Sequence
  Synthetic
aauaaauaugugguauuucaaa

SEQ ID NO: 173439 - RNA, 23 nt, Artificial Sequence
  Synthetic
aaauaaauaugugguauuucaaa

SEQ ID NO: 173440 - RNA, 24 nt, Artificial Sequence
  Synthetic
aaaauaaauaugugguauuucaaa

SEQ ID NO: 173441 - RNA, 18 nt, Artificial Sequence
  Synthetic
uaagcucauuauuucaaa

SEQ ID NO: 173442 - RNA, 19 nt, Artificial Sequence
  Synthetic
auaagcucauuauuucaaa

SEQ ID NO: 173443 - RNA, 20 nt, Artificial Sequence
  Synthetic
gauaagcucauuauuucaaa

SEQ ID NO: 173444 - RNA, 21 nt, Artificial Sequence
  Synthetic
agauaagcucauuauuucaaa

SEQ ID NO: 173445 - RNA, 22 nt, Artificial Sequence
  Synthetic
cagauaagcucauuauuucaaa

SEQ ID NO: 173446 - RNA, 23 nt, Artificial Sequence
  Synthetic
acagauaagcucauuauuucaaa

SEQ ID NO: 173447 - RNA, 24 nt, Artificial Sequence
  Synthetic
uacagauaagcucauuauuucaaa

SEQ ID NO: 173448 - RNA, 18 nt, Artificial Sequence
  Synthetic
uagaucagugcuuucaaa

SEQ ID NO: 173449 - RNA, 19 nt, Artificial Sequence
  Synthetic
cuagaucagugcuuucaaa

SEQ ID NO: 173450 - RNA, 20 nt, Artificial Sequence
  Synthetic
ucuagaucagugcuuucaaa

SEQ ID NO: 173451 - RNA, 21 nt, Artificial Sequence
  Synthetic
aucuagaucagugcuuucaaa

SEQ ID NO: 173452 - RNA, 22 nt, Artificial Sequence
  Synthetic
aaucuagaucagugcuuucaaa

SEQ ID NO: 173453 - RNA, 23 nt, Artificial Sequence
  Synthetic
gaaucuagaucagugcuuucaaa

SEQ ID NO: 173454 - RNA, 24 nt, Artificial Sequence
  Synthetic
agaaucuagaucagugcuuucaaa

SEQ ID NO: 173455 - RNA, 18 nt, Artificial Sequence
  Synthetic
agacuccuuauuuucaaa

SEQ ID NO: 173456 - RNA, 19 nt, Artificial Sequence
  Synthetic
aagacuccuuauuuucaaa

SEQ ID NO: 173457 - RNA, 20 nt, Artificial Sequence
  Synthetic
caagacuccuuauuuucaaa

SEQ ID NO: 173458 - RNA, 21 nt, Artificial Sequence
  Synthetic
gcaagacuccuuauuuucaaa

SEQ ID NO: 173459 - RNA, 22 nt, Artificial Sequence
  Synthetic
ugcaagacuccuuauuuucaaa

SEQ ID NO: 173460 - RNA, 23 nt, Artificial Sequence
  Synthetic
augcaagacuccuuauuuucaaa

SEQ ID NO: 173461 - RNA, 24 nt, Artificial Sequence
  Synthetic
aaugcaagacuccuuauuuucaaa

SEQ ID NO: 173462 - RNA, 18 nt, Artificial Sequence
  Synthetic
auaucuagacuuuucaaa

SEQ ID NO: 173463 - RNA, 19 nt, Artificial Sequence
  Synthetic
uauaucuagacuuuucaaa

SEQ ID NO: 173464 - RNA, 20 nt, Artificial Sequence
  Synthetic
uuauaucuagacuuuucaaa

SEQ ID NO: 173465 - RNA, 21 nt, Artificial Sequence
  Synthetic
cuuauaucuagacuuuucaaa

SEQ ID NO: 173466 - RNA, 22 nt, Artificial Sequence
  Synthetic
ucuuauaucuagacuuuucaaa

SEQ ID NO: 173467 - RNA, 23 nt, Artificial Sequence
  Synthetic
cucuuauaucuagacuuuucaaa

SEQ ID NO: 173468 - RNA, 24 nt, Artificial Sequence
  Synthetic
ccucuuauaucuagacuuuucaaa

SEQ ID NO: 173469 - RNA, 18 nt, Artificial Sequence
  Synthetic
gaaacacauuuuuucaaa

SEQ ID NO: 173470 - RNA, 19 nt, Artificial Sequence
  Synthetic
ugaaacacauuuuuucaaa

SEQ ID NO: 173471 - RNA, 20 nt, Artificial Sequence
  Synthetic
cugaaacacauuuuuucaaa

SEQ ID NO: 173472 - RNA, 21 nt, Artificial Sequence
  Synthetic
ccugaaacacauuuuuucaaa

SEQ ID NO: 173473 - RNA, 22 nt, Artificial Sequence
  Synthetic
accugaaacacauuuuuucaaa

SEQ ID NO: 173474 - RNA, 23 nt, Artificial Sequence
  Synthetic
aaccugaaacacauuuuuucaaa

SEQ ID NO: 173475 - RNA, 24 nt, Artificial Sequence
  Synthetic
gaaccugaaacacauuuuuucaaa

SEQ ID NO: 173476 - RNA, 18 nt, Artificial Sequence
  Synthetic
aaaaaaaaaaaaaagaaa

SEQ ID NO: 173477 - RNA, 19 nt, Artificial Sequence
  Synthetic
aaaaaaaaaaaaaaagaaa

SEQ ID NO: 173478 - RNA, 20 nt, Artificial Sequence
  Synthetic
aaaaaaaaaaaaaaaagaaa

SEQ ID NO: 173479 - RNA, 21 nt, Artificial Sequence
  Synthetic
aaaaaaaaaaaaaaaaagaaa

SEQ ID NO: 173480 - RNA, 22 nt, Artificial Sequence
  Synthetic
aaaaaaaaaaaaaaaaaagaaa

SEQ ID NO: 173481 - RNA, 23 nt, Artificial Sequence
  Synthetic
caaaaaaaaaaaaaaaaaagaaa

SEQ ID NO: 173482 - RNA, 24 nt, Artificial Sequence
  Synthetic
gcaaaaaaaaaaaaaaaaaagaaa

SEQ ID NO: 173483 - RNA, 21 nt, Artificial Sequence
  Synthetic
caaaaaaaaaaaaaaaagaaa

SEQ ID NO: 173484 - RNA, 22 nt, Artificial Sequence
  Synthetic
ucaaaaaaaaaaaaaaaagaaa

SEQ ID NO: 173485 - RNA, 23 nt, Artificial Sequence
  Synthetic
cucaaaaaaaaaaaaaaaagaaa

SEQ ID NO: 173486 - RNA, 24 nt, Artificial Sequence
  Synthetic
ucucaaaaaaaaaaaaaaaagaaa

SEQ ID NO: 173487 - RNA, 18 nt, Artificial Sequence
  Synthetic
aagguaagaaaaaagaaa

SEQ ID NO: 173488 - RNA, 19 nt, Artificial Sequence
  Synthetic
gaagguaagaaaaaagaaa

SEQ ID NO: 173489 - RNA, 20 nt, Artificial Sequence
  Synthetic
agaagguaagaaaaaagaaa

SEQ ID NO: 173490 - RNA, 21 nt, Artificial Sequence
  Synthetic
aagaagguaagaaaaaagaaa

SEQ ID NO: 173491 - RNA, 22 nt, Artificial Sequence
  Synthetic
caagaagguaagaaaaaagaaa

SEQ ID NO: 173492 - RNA, 23 nt, Artificial Sequence
  Synthetic
acaagaagguaagaaaaaagaaa

SEQ ID NO: 173493 - RNA, 24 nt, Artificial Sequence
  Synthetic
cacaagaagguaagaaaaaagaaa

SEQ ID NO: 173494 - RNA, 18 nt, Artificial Sequence
  Synthetic
ccauauuagaaaaagaaa

SEQ ID NO: 173495 - RNA, 19 nt, Artificial Sequence
  Synthetic
gccauauuagaaaaagaaa

SEQ ID NO: 173496 - RNA, 20 nt, Artificial Sequence
  Synthetic
agccauauuagaaaaagaaa

SEQ ID NO: 173497 - RNA, 21 nt, Artificial Sequence
  Synthetic
uagccauauuagaaaaagaaa

SEQ ID NO: 173498 - RNA, 22 nt, Artificial Sequence
  Synthetic
cuagccauauuagaaaaagaaa

SEQ ID NO: 173499 - RNA, 23 nt, Artificial Sequence
  Synthetic
acuagccauauuagaaaaagaaa

SEQ ID NO: 173500 - RNA, 24 nt, Artificial Sequence
  Synthetic
uacuagccauauuagaaaaagaaa

SEQ ID NO: 173501 - RNA, 18 nt, Artificial Sequence
  Synthetic
ucaaaaaauaaaaagaaa

SEQ ID NO: 173502 - RNA, 19 nt, Artificial Sequence
  Synthetic
cucaaaaaauaaaaagaaa

SEQ ID NO: 173503 - RNA, 20 nt, Artificial Sequence
  Synthetic
ucucaaaaaauaaaaagaaa

SEQ ID NO: 173504 - RNA, 21 nt, Artificial Sequence
  Synthetic
gucucaaaaaauaaaaagaaa

SEQ ID NO: 173505 - RNA, 22 nt, Artificial Sequence
  Synthetic
cgucucaaaaaauaaaaagaaa

SEQ ID NO: 173506 - RNA, 23 nt, Artificial Sequence
  Synthetic
ccgucucaaaaaauaaaaagaaa

SEQ ID NO: 173507 - RNA, 24 nt, Artificial Sequence
  Synthetic
uccgucucaaaaaauaaaaagaaa

SEQ ID NO: 173508 - RNA, 18 nt, Artificial Sequence
  Synthetic
auauucuuuaaaaagaaa

SEQ ID NO: 173509 - RNA, 19 nt, Artificial Sequence
  Synthetic
gauauucuuuaaaaagaaa

SEQ ID NO: 173510 - RNA, 20 nt, Artificial Sequence
  Synthetic
ugauauucuuuaaaaagaaa

SEQ ID NO: 173511 - RNA, 21 nt, Artificial Sequence
  Synthetic
augauauucuuuaaaaagaaa

SEQ ID NO: 173512 - RNA, 22 nt, Artificial Sequence
  Synthetic
aaugauauucuuuaaaaagaaa

SEQ ID NO: 173513 - RNA, 23 nt, Artificial Sequence
  Synthetic
aaaugauauucuuuaaaaagaaa

SEQ ID NO: 173514 - RNA, 24 nt, Artificial Sequence
  Synthetic
aaaaugauauucuuuaaaaagaaa

SEQ ID NO: 173515 - RNA, 18 nt, Artificial Sequence
  Synthetic
uuuucugcacaaaagaaa

SEQ ID NO: 173516 - RNA, 19 nt, Artificial Sequence
  Synthetic
cuuuucugcacaaaagaaa

SEQ ID NO: 173517 - RNA, 20 nt, Artificial Sequence
  Synthetic
ucuuuucugcacaaaagaaa

SEQ ID NO: 173518 - RNA, 21 nt, Artificial Sequence
  Synthetic
uucuuuucugcacaaaagaaa

SEQ ID NO: 173519 - RNA, 22 nt, Artificial Sequence
  Synthetic
auucuuuucugcacaaaagaaa

SEQ ID NO: 173520 - RNA, 23 nt, Artificial Sequence
  Synthetic
uauucuuuucugcacaaaagaaa

SEQ ID NO: 173521 - RNA, 24 nt, Artificial Sequence
  Synthetic
uuauucuuuucugcacaaaagaaa

SEQ ID NO: 173522 - RNA, 18 nt, Artificial Sequence
  Synthetic
aagucuucucaaaagaaa

SEQ ID NO: 173523 - RNA, 19 nt, Artificial Sequence
  Synthetic
aaagucuucucaaaagaaa

SEQ ID NO: 173524 - RNA, 20 nt, Artificial Sequence
  Synthetic
aaaagucuucucaaaagaaa

SEQ ID NO: 173525 - RNA, 21 nt, Artificial Sequence
  Synthetic
caaaagucuucucaaaagaaa

SEQ ID NO: 173526 - RNA, 22 nt, Artificial Sequence
  Synthetic
ucaaaagucuucucaaaagaaa

SEQ ID NO: 173527 - RNA, 23 nt, Artificial Sequence
  Synthetic
uucaaaagucuucucaaaagaaa

SEQ ID NO: 173528 - RNA, 24 nt, Artificial Sequence
  Synthetic
uuucaaaagucuucucaaaagaaa

SEQ ID NO: 173529 - RNA, 18 nt, Artificial Sequence
  Synthetic
ggagggaaagaaaagaaa

SEQ ID NO: 173530 - RNA, 19 nt, Artificial Sequence
  Synthetic
gggagggaaagaaaagaaa

SEQ ID NO: 173531 - RNA, 20 nt, Artificial Sequence
  Synthetic
agggagggaaagaaaagaaa

SEQ ID NO: 173532 - RNA, 21 nt, Artificial Sequence
  Synthetic
gagggagggaaagaaaagaaa

SEQ ID NO: 173533 - RNA, 22 nt, Artificial Sequence
  Synthetic
ggagggagggaaagaaaagaaa

SEQ ID NO: 173534 - RNA, 23 nt, Artificial Sequence
  Synthetic
gggagggagggaaagaaaagaaa

SEQ ID NO: 173535 - RNA, 24 nt, Artificial Sequence
  Synthetic
agggagggagggaaagaaaagaaa

SEQ ID NO: 173536 - RNA, 18 nt, Artificial Sequence
  Synthetic
auaaauaaauaaaagaaa

SEQ ID NO: 173537 - RNA, 19 nt, Artificial Sequence
  Synthetic
aauaaauaaauaaaagaaa

SEQ ID NO: 173538 - RNA, 20 nt, Artificial Sequence
  Synthetic
aaauaaauaaauaaaagaaa

SEQ ID NO: 173539 - RNA, 21 nt, Artificial Sequence
  Synthetic
uaaauaaauaaauaaaagaaa

SEQ ID NO: 173540 - RNA, 22 nt, Artificial Sequence
  Synthetic
auaaauaaauaaauaaaagaaa

SEQ ID NO: 173541 - RNA, 23 nt, Artificial Sequence
  Synthetic
aauaaauaaauaaauaaaagaaa

SEQ ID NO: 173542 - RNA, 24 nt, Artificial Sequence
  Synthetic
aaauaaauaaauaaauaaaagaaa

SEQ ID NO: 173543 - RNA, 18 nt, Artificial Sequence
  Synthetic
uccucaggauaaaagaaa

SEQ ID NO: 173544 - RNA, 19 nt, Artificial Sequence
  Synthetic
uuccucaggauaaaagaaa

SEQ ID NO: 173545 - RNA, 20 nt, Artificial Sequence
  Synthetic
auuccucaggauaaaagaaa

SEQ ID NO: 173546 - RNA, 21 nt, Artificial Sequence
  Synthetic
aauuccucaggauaaaagaaa

SEQ ID NO: 173547 - RNA, 22 nt, Artificial Sequence
  Synthetic
uaauuccucaggauaaaagaaa

SEQ ID NO: 173548 - RNA, 23 nt, Artificial Sequence
  Synthetic
auaauuccucaggauaaaagaaa

SEQ ID NO: 173549 - RNA, 24 nt, Artificial Sequence
  Synthetic
uauaauuccucaggauaaaagaaa

SEQ ID NO: 173550 - RNA, 18 nt, Artificial Sequence
  Synthetic
agaaaaaaguaaaagaaa

SEQ ID NO: 173551 - RNA, 19 nt, Artificial Sequence
  Synthetic
aagaaaaaaguaaaagaaa

SEQ ID NO: 173552 - RNA, 20 nt, Artificial Sequence
  Synthetic
aaagaaaaaaguaaaagaaa

SEQ ID NO: 173553 - RNA, 21 nt, Artificial Sequence
  Synthetic
aaaagaaaaaaguaaaagaaa

SEQ ID NO: 173554 - RNA, 22 nt, Artificial Sequence
  Synthetic
aaaaagaaaaaaguaaaagaaa

SEQ ID NO: 173555 - RNA, 23 nt, Artificial Sequence
  Synthetic
aaaaaagaaaaaaguaaaagaaa

SEQ ID NO: 173556 - RNA, 24 nt, Artificial Sequence
  Synthetic
gaaaaaagaaaaaaguaaaagaaa

SEQ ID NO: 173557 - RNA, 18 nt, Artificial Sequence
  Synthetic
aaaacaggcacaaagaaa

SEQ ID NO: 173558 - RNA, 19 nt, Artificial Sequence
  Synthetic
gaaaacaggcacaaagaaa

SEQ ID NO: 173559 - RNA, 20 nt, Artificial Sequence
  Synthetic
agaaaacaggcacaaagaaa

SEQ ID NO: 173560 - RNA, 21 nt, Artificial Sequence
  Synthetic
gagaaaacaggcacaaagaaa

SEQ ID NO: 173561 - RNA, 22 nt, Artificial Sequence
  Synthetic
ugagaaaacaggcacaaagaaa

SEQ ID NO: 173562 - RNA, 23 nt, Artificial Sequence
  Synthetic
uugagaaaacaggcacaaagaaa

SEQ ID NO: 173563 - RNA, 24 nt, Artificial Sequence
  Synthetic
guugagaaaacaggcacaaagaaa

SEQ ID NO: 173564 - RNA, 18 nt, Artificial Sequence
  Synthetic
aacauuacuacaaagaaa

SEQ ID NO: 173565 - RNA, 19 nt, Artificial Sequence
  Synthetic
aaacauuacuacaaagaaa

SEQ ID NO: 173566 - RNA, 20 nt, Artificial Sequence
  Synthetic
gaaacauuacuacaaagaaa

SEQ ID NO: 173567 - RNA, 21 nt, Artificial Sequence
  Synthetic
ugaaacauuacuacaaagaaa

SEQ ID NO: 173568 - RNA, 22 nt, Artificial Sequence
  Synthetic
uugaaacauuacuacaaagaaa

SEQ ID NO: 173569 - RNA, 23 nt, Artificial Sequence
  Synthetic
auugaaacauuacuacaaagaaa

SEQ ID NO: 173570 - RNA, 24 nt, Artificial Sequence
  Synthetic
aauugaaacauuacuacaaagaaa

SEQ ID NO: 173571 - RNA, 18 nt, Artificial Sequence
  Synthetic
ggcauuuauccaaagaaa

SEQ ID NO: 173572 - RNA, 19 nt, Artificial Sequence
  Synthetic
gggcauuuauccaaagaaa

SEQ ID NO: 173573 - RNA, 20 nt, Artificial Sequence
  Synthetic
ugggcauuuauccaaagaaa

SEQ ID NO: 173574 - RNA, 21 nt, Artificial Sequence
  Synthetic
cugggcauuuauccaaagaaa

SEQ ID NO: 173575 - RNA, 22 nt, Artificial Sequence
  Synthetic
acugggcauuuauccaaagaaa

SEQ ID NO: 173576 - RNA, 23 nt, Artificial Sequence
  Synthetic
uacugggcauuuauccaaagaaa

SEQ ID NO: 173577 - RNA, 24 nt, Artificial Sequence
  Synthetic
cuacugggcauuuauccaaagaaa

SEQ ID NO: 173578 - RNA, 18 nt, Artificial Sequence
  Synthetic
aaaaaaaaaagaaagaaa

SEQ ID NO: 173579 - RNA, 19 nt, Artificial Sequence
  Synthetic
aaaaaaaaaaagaaagaaa

SEQ ID NO: 173580 - RNA, 20 nt, Artificial Sequence
  Synthetic
aaaaaaaaaaaagaaagaaa

SEQ ID NO: 173581 - RNA, 21 nt, Artificial Sequence
  Synthetic
caaaaaaaaaaaagaaagaaa

SEQ ID NO: 173582 - RNA, 22 nt, Artificial Sequence
  Synthetic
ucaaaaaaaaaaaagaaagaaa

SEQ ID NO: 173583 - RNA, 23 nt, Artificial Sequence
  Synthetic
aucaaaaaaaaaaaagaaagaaa

SEQ ID NO: 173584 - RNA, 24 nt, Artificial Sequence
  Synthetic
caucaaaaaaaaaaaagaaagaaa

SEQ ID NO: 173585 - RNA, 18 nt, Artificial Sequence
  Synthetic
aagaauagaagaaagaaa

SEQ ID NO: 173586 - RNA, 19 nt, Artificial Sequence
  Synthetic
gaagaauagaagaaagaaa

SEQ ID NO: 173587 - RNA, 20 nt, Artificial Sequence
  Synthetic
agaagaauagaagaaagaaa

SEQ ID NO: 173588 - RNA, 21 nt, Artificial Sequence
  Synthetic
gagaagaauagaagaaagaaa

SEQ ID NO: 173589 - RNA, 22 nt, Artificial Sequence
  Synthetic
agagaagaauagaagaaagaaa

SEQ ID NO: 173590 - RNA, 23 nt, Artificial Sequence
  Synthetic
uagagaagaauagaagaaagaaa

SEQ ID NO: 173591 - RNA, 24 nt, Artificial Sequence
  Synthetic
auagagaagaauagaagaaagaaa

SEQ ID NO: 173592 - RNA, 18 nt, Artificial Sequence
  Synthetic
agcgcuggaagaaagaaa

SEQ ID NO: 173593 - RNA, 19 nt, Artificial Sequence
  Synthetic
uagcgcuggaagaaagaaa

SEQ ID NO: 173594 - RNA, 20 nt, Artificial Sequence
  Synthetic
auagcgcuggaagaaagaaa

SEQ ID NO: 173595 - RNA, 21 nt, Artificial Sequence
  Synthetic
uauagcgcuggaagaaagaaa

SEQ ID NO: 173596 - RNA, 22 nt, Artificial Sequence
  Synthetic
auauagcgcuggaagaaagaaa

SEQ ID NO: 173597 - RNA, 23 nt, Artificial Sequence
  Synthetic
aauauagcgcuggaagaaagaaa

SEQ ID NO: 173598 - RNA, 24 nt, Artificial Sequence
  Synthetic
uaauauagcgcuggaagaaagaaa

SEQ ID NO: 173599 - RNA, 18 nt, Artificial Sequence
  Synthetic
aagaagggaggaaagaaa

SEQ ID NO: 173600 - RNA, 19 nt, Artificial Sequence
  Synthetic
aaagaagggaggaaagaaa

SEQ ID NO: 173601 - RNA, 20 nt, Artificial Sequence
  Synthetic
caaagaagggaggaaagaaa

SEQ ID NO: 173602 - RNA, 21 nt, Artificial Sequence
  Synthetic
acaaagaagggaggaaagaaa

SEQ ID NO: 173603 - RNA, 22 nt, Artificial Sequence
  Synthetic
aacaaagaagggaggaaagaaa

SEQ ID NO: 173604 - RNA, 23 nt, Artificial Sequence
  Synthetic
gaacaaagaagggaggaaagaaa

SEQ ID NO: 173605 - RNA, 24 nt, Artificial Sequence
  Synthetic
agaacaaagaagggaggaaagaaa

SEQ ID NO: 173606 - RNA, 18 nt, Artificial Sequence
  Synthetic
uauggggugggaaagaaa

SEQ ID NO: 173607 - RNA, 19 nt, Artificial Sequence
  Synthetic
guauggggugggaaagaaa

SEQ ID NO: 173608 - RNA, 20 nt, Artificial Sequence
  Synthetic
gguauggggugggaaagaaa

SEQ ID NO: 173609 - RNA, 21 nt, Artificial Sequence
  Synthetic
ggguauggggugggaaagaaa

SEQ ID NO: 173610 - RNA, 22 nt, Artificial Sequence
  Synthetic
gggguauggggugggaaagaaa

SEQ ID NO: 173611 - RNA, 23 nt, Artificial Sequence
  Synthetic
ugggguauggggugggaaagaaa

SEQ ID NO: 173612 - RNA, 24 nt, Artificial Sequence
  Synthetic
augggguauggggugggaaagaaa

SEQ ID NO: 173613 - RNA, 18 nt, Artificial Sequence
  Synthetic
ucaagaaagauaaagaaa

SEQ ID NO: 173614 - RNA, 19 nt, Artificial Sequence
  Synthetic
aucaagaaagauaaagaaa

SEQ ID NO: 173615 - RNA, 20 nt, Artificial Sequence
  Synthetic
caucaagaaagauaaagaaa

SEQ ID NO: 173616 - RNA, 21 nt, Artificial Sequence
  Synthetic
ucaucaagaaagauaaagaaa

SEQ ID NO: 173617 - RNA, 22 nt, Artificial Sequence
  Synthetic
aucaucaagaaagauaaagaaa

SEQ ID NO: 173618 - RNA, 23 nt, Artificial Sequence
  Synthetic
gaucaucaagaaagauaaagaaa

SEQ ID NO: 173619 - RNA, 24 nt, Artificial Sequence
  Synthetic
agaucaucaagaaagauaaagaaa

SEQ ID NO: 173620 - RNA, 18 nt, Artificial Sequence
  Synthetic
auaaguacuauaaagaaa

SEQ ID NO: 173621 - RNA, 19 nt, Artificial Sequence
  Synthetic
aauaaguacuauaaagaaa

SEQ ID NO: 173622 - RNA, 20 nt, Artificial Sequence
  Synthetic
uaauaaguacuauaaagaaa

SEQ ID NO: 173623 - RNA, 21 nt, Artificial Sequence
  Synthetic
guaauaaguacuauaaagaaa

SEQ ID NO: 173624 - RNA, 22 nt, Artificial Sequence
  Synthetic
aguaauaaguacuauaaagaaa

SEQ ID NO: 173625 - RNA, 23 nt, Artificial Sequence
  Synthetic
uaguaauaaguacuauaaagaaa

SEQ ID NO: 173626 - RNA, 24 nt, Artificial Sequence
  Synthetic
uuaguaauaaguacuauaaagaaa

SEQ ID NO: 173627 - RNA, 18 nt, Artificial Sequence
  Synthetic
aggaaguauguaaagaaa

SEQ ID NO: 173628 - RNA, 19 nt, Artificial Sequence
  Synthetic
gaggaaguauguaaagaaa

SEQ ID NO: 173629 - RNA, 20 nt, Artificial Sequence
  Synthetic
agaggaaguauguaaagaaa

SEQ ID NO: 173630 - RNA, 21 nt, Artificial Sequence
  Synthetic
aagaggaaguauguaaagaaa

SEQ ID NO: 173631 - RNA, 22 nt, Artificial Sequence
  Synthetic
aaagaggaaguauguaaagaaa

SEQ ID NO: 173632 - RNA, 23 nt, Artificial Sequence
  Synthetic
aaaagaggaaguauguaaagaaa

SEQ ID NO: 173633 - RNA, 24 nt, Artificial Sequence
  Synthetic
uaaaagaggaaguauguaaagaaa

SEQ ID NO: 173634 - RNA, 18 nt, Artificial Sequence
  Synthetic
agcaauauuguaaagaaa

SEQ ID NO: 173635 - RNA, 19 nt, Artificial Sequence
  Synthetic
aagcaauauuguaaagaaa

SEQ ID NO: 173636 - RNA, 20 nt, Artificial Sequence
  Synthetic
caagcaauauuguaaagaaa

SEQ ID NO: 173637 - RNA, 21 nt, Artificial Sequence
  Synthetic
gcaagcaauauuguaaagaaa

SEQ ID NO: 173638 - RNA, 22 nt, Artificial Sequence
  Synthetic
ugcaagcaauauuguaaagaaa

SEQ ID NO: 173639 - RNA, 23 nt, Artificial Sequence
  Synthetic
cugcaagcaauauuguaaagaaa

SEQ ID NO: 173640 - RNA, 24 nt, Artificial Sequence
  Synthetic
acugcaagcaauauuguaaagaaa

SEQ ID NO: 173641 - RNA, 18 nt, Artificial Sequence
  Synthetic
guaauuuauuuaaagaaa

SEQ ID NO: 173642 - RNA, 19 nt, Artificial Sequence
  Synthetic
gguaauuuauuuaaagaaa

SEQ ID NO: 173643 - RNA, 20 nt, Artificial Sequence
  Synthetic
ggguaauuuauuuaaagaaa

SEQ ID NO: 173644 - RNA, 21 nt, Artificial Sequence
  Synthetic
gggguaauuuauuuaaagaaa

SEQ ID NO: 173645 - RNA, 22 nt, Artificial Sequence
  Synthetic
ugggguaauuuauuuaaagaaa

SEQ ID NO: 173646 - RNA, 23 nt, Artificial Sequence
  Synthetic
cugggguaauuuauuuaaagaaa

SEQ ID NO: 173647 - RNA, 24 nt, Artificial Sequence
  Synthetic
acugggguaauuuauuuaaagaaa

SEQ ID NO: 173648 - RNA, 18 nt, Artificial Sequence
  Synthetic
ccugaaacuuuaaagaaa

SEQ ID NO: 173649 - RNA, 19 nt, Artificial Sequence
  Synthetic
accugaaacuuuaaagaaa

SEQ ID NO: 173650 - RNA, 20 nt, Artificial Sequence
  Synthetic
aaccugaaacuuuaaagaaa

SEQ ID NO: 173651 - RNA, 21 nt, Artificial Sequence
  Synthetic
aaaccugaaacuuuaaagaaa

SEQ ID NO: 173652 - RNA, 22 nt, Artificial Sequence
  Synthetic
caaaccugaaacuuuaaagaaa

SEQ ID NO: 173653 - RNA, 23 nt, Artificial Sequence
  Synthetic
ccaaaccugaaacuuuaaagaaa

SEQ ID NO: 173654 - RNA, 24 nt, Artificial Sequence
  Synthetic
uccaaaccugaaacuuuaaagaaa

SEQ ID NO: 173655 - RNA, 18 nt, Artificial Sequence
  Synthetic
agaauguaagacaagaaa

SEQ ID NO: 173656 - RNA, 19 nt, Artificial Sequence
  Synthetic
cagaauguaagacaagaaa

SEQ ID NO: 173657 - RNA, 20 nt, Artificial Sequence
  Synthetic
acagaauguaagacaagaaa

SEQ ID NO: 173658 - RNA, 21 nt, Artificial Sequence
  Synthetic
aacagaauguaagacaagaaa

SEQ ID NO: 173659 - RNA, 22 nt, Artificial Sequence
  Synthetic
gaacagaauguaagacaagaaa

SEQ ID NO: 173660 - RNA, 23 nt, Artificial Sequence
  Synthetic
agaacagaauguaagacaagaaa

SEQ ID NO: 173661 - RNA, 24 nt, Artificial Sequence
  Synthetic
aagaacagaauguaagacaagaaa

SEQ ID NO: 173662 - RNA, 18 nt, Artificial Sequence
  Synthetic
uuaaauaggaucaagaaa

SEQ ID NO: 173663 - RNA, 19 nt, Artificial Sequence
  Synthetic
uuuaaauaggaucaagaaa

SEQ ID NO: 173664 - RNA, 20 nt, Artificial Sequence
  Synthetic
uuuuaaauaggaucaagaaa

SEQ ID NO: 173665 - RNA, 21 nt, Artificial Sequence
  Synthetic
auuuuaaauaggaucaagaaa

SEQ ID NO: 173666 - RNA, 22 nt, Artificial Sequence
  Synthetic
gauuuuaaauaggaucaagaaa

SEQ ID NO: 173667 - RNA, 23 nt, Artificial Sequence
  Synthetic
agauuuuaaauaggaucaagaaa

SEQ ID NO: 173668 - RNA, 24 nt, Artificial Sequence
  Synthetic
uagauuuuaaauaggaucaagaaa

SEQ ID NO: 173669 - RNA, 18 nt, Artificial Sequence
  Synthetic
aggcccuggaucaagaaa

SEQ ID NO: 173670 - RNA, 19 nt, Artificial Sequence
  Synthetic
gaggcccuggaucaagaaa

SEQ ID NO: 173671 - RNA, 20 nt, Artificial Sequence
  Synthetic
ggaggcccuggaucaagaaa

SEQ ID NO: 173672 - RNA, 21 nt, Artificial Sequence
  Synthetic
uggaggcccuggaucaagaaa

SEQ ID NO: 173673 - RNA, 22 nt, Artificial Sequence
  Synthetic
uuggaggcccuggaucaagaaa

SEQ ID NO: 173674 - RNA, 23 nt, Artificial Sequence
  Synthetic
uuuggaggcccuggaucaagaaa

SEQ ID NO: 173675 - RNA, 24 nt, Artificial Sequence
  Synthetic
auuuggaggcccuggaucaagaaa

SEQ ID NO: 173676 - RNA, 18 nt, Artificial Sequence
  Synthetic
gaucacuaggucaagaaa

SEQ ID NO: 173677 - RNA, 19 nt, Artificial Sequence
  Synthetic
agaucacuaggucaagaaa

SEQ ID NO: 173678 - RNA, 20 nt, Artificial Sequence
  Synthetic
cagaucacuaggucaagaaa

SEQ ID NO: 173679 - RNA, 21 nt, Artificial Sequence
  Synthetic
gcagaucacuaggucaagaaa

SEQ ID NO: 173680 - RNA, 22 nt, Artificial Sequence
  Synthetic
ggcagaucacuaggucaagaaa

SEQ ID NO: 173681 - RNA, 23 nt, Artificial Sequence
  Synthetic
aggcagaucacuaggucaagaaa

SEQ ID NO: 173682 - RNA, 24 nt, Artificial Sequence
  Synthetic
caggcagaucacuaggucaagaaa

SEQ ID NO: 173683 - RNA, 18 nt, Artificial Sequence
  Synthetic
cauuuuuaguucaagaaa

SEQ ID NO: 173684 - RNA, 19 nt, Artificial Sequence
  Synthetic
ccauuuuuaguucaagaaa

SEQ ID NO: 173685 - RNA, 20 nt, Artificial Sequence
  Synthetic
cccauuuuuaguucaagaaa

SEQ ID NO: 173686 - RNA, 21 nt, Artificial Sequence
  Synthetic
ucccauuuuuaguucaagaaa

SEQ ID NO: 173687 - RNA, 22 nt, Artificial Sequence
  Synthetic
cucccauuuuuaguucaagaaa

SEQ ID NO: 173688 - RNA, 23 nt, Artificial Sequence
  Synthetic
ucucccauuuuuaguucaagaaa

SEQ ID NO: 173689 - RNA, 24 nt, Artificial Sequence
  Synthetic
cucucccauuuuuaguucaagaaa

SEQ ID NO: 173690 - RNA, 18 nt, Artificial Sequence
  Synthetic
aaaguucuuuucaagaaa

SEQ ID NO: 173691 - RNA, 19 nt, Artificial Sequence
  Synthetic
aaaaguucuuuucaagaaa

SEQ ID NO: 173692 - RNA, 20 nt, Artificial Sequence
  Synthetic
uaaaaguucuuuucaagaaa

SEQ ID NO: 173693 - RNA, 21 nt, Artificial Sequence
  Synthetic
guaaaaguucuuuucaagaaa

SEQ ID NO: 173694 - RNA, 22 nt, Artificial Sequence
  Synthetic
gguaaaaguucuuuucaagaaa

SEQ ID NO: 173695 - RNA, 23 nt, Artificial Sequence
  Synthetic
ugguaaaaguucuuuucaagaaa

SEQ ID NO: 173696 - RNA, 24 nt, Artificial Sequence
  Synthetic
cugguaaaaguucuuuucaagaaa

SEQ ID NO: 173697 - RNA, 18 nt, Artificial Sequence
  Synthetic
augaagaacaagaagaaa

SEQ ID NO: 173698 - RNA, 19 nt, Artificial Sequence
  Synthetic
caugaagaacaagaagaaa

SEQ ID NO: 173699 - RNA, 20 nt, Artificial Sequence
  Synthetic
ucaugaagaacaagaagaaa

SEQ ID NO: 173700 - RNA, 21 nt, Artificial Sequence
  Synthetic
gucaugaagaacaagaagaaa

SEQ ID NO: 173701 - RNA, 22 nt, Artificial Sequence
  Synthetic
ggucaugaagaacaagaagaaa

SEQ ID NO: 173702 - RNA, 23 nt, Artificial Sequence
  Synthetic
aggucaugaagaacaagaagaaa

SEQ ID NO: 173703 - RNA, 24 nt, Artificial Sequence
  Synthetic
aaggucaugaagaacaagaagaaa

SEQ ID NO: 173704 - RNA, 18 nt, Artificial Sequence
  Synthetic
gaauugcagaagaagaaa

SEQ ID NO: 173705 - RNA, 19 nt, Artificial Sequence
  Synthetic
ggaauugcagaagaagaaa

SEQ ID NO: 173706 - RNA, 20 nt, Artificial Sequence
  Synthetic
gggaauugcagaagaagaaa

SEQ ID NO: 173707 - RNA, 21 nt, Artificial Sequence
  Synthetic
cgggaauugcagaagaagaaa

SEQ ID NO: 173708 - RNA, 22 nt, Artificial Sequence
  Synthetic
ucgggaauugcagaagaagaaa

SEQ ID NO: 173709 - RNA, 23 nt, Artificial Sequence
  Synthetic
aucgggaauugcagaagaagaaa

SEQ ID NO: 173710 - RNA, 24 nt, Artificial Sequence
  Synthetic
gaucgggaauugcagaagaagaaa

SEQ ID NO: 173711 - RNA, 18 nt, Artificial Sequence
  Synthetic
aaucaugaccagaagaaa

SEQ ID NO: 173712 - RNA, 19 nt, Artificial Sequence
  Synthetic
gaaucaugaccagaagaaa

SEQ ID NO: 173713 - RNA, 20 nt, Artificial Sequence
  Synthetic
ggaaucaugaccagaagaaa

SEQ ID NO: 173714 - RNA, 21 nt, Artificial Sequence
  Synthetic
aggaaucaugaccagaagaaa

SEQ ID NO: 173715 - RNA, 22 nt, Artificial Sequence
  Synthetic
gaggaaucaugaccagaagaaa

SEQ ID NO: 173716 - RNA, 23 nt, Artificial Sequence
  Synthetic
ugaggaaucaugaccagaagaaa

SEQ ID NO: 173717 - RNA, 24 nt, Artificial Sequence
  Synthetic
uugaggaaucaugaccagaagaaa

SEQ ID NO: 173718 - RNA, 18 nt, Artificial Sequence
  Synthetic
auuaugagggagaagaaa

SEQ ID NO: 173719 - RNA, 19 nt, Artificial Sequence
  Synthetic
aauuaugagggagaagaaa

SEQ ID NO: 173720 - RNA, 20 nt, Artificial Sequence
  Synthetic
gaauuaugagggagaagaaa

SEQ ID NO: 173721 - RNA, 21 nt, Artificial Sequence
  Synthetic
agaauuaugagggagaagaaa

SEQ ID NO: 173722 - RNA, 22 nt, Artificial Sequence
  Synthetic
cagaauuaugagggagaagaaa

SEQ ID NO: 173723 - RNA, 23 nt, Artificial Sequence
  Synthetic
ucagaauuaugagggagaagaaa

SEQ ID NO: 173724 - RNA, 24 nt, Artificial Sequence
  Synthetic
uucagaauuaugagggagaagaaa

SEQ ID NO: 173725 - RNA, 18 nt, Artificial Sequence
  Synthetic
ucccuuacugagaagaaa

SEQ ID NO: 173726 - RNA, 19 nt, Artificial Sequence
  Synthetic
uucccuuacugagaagaaa

SEQ ID NO: 173727 - RNA, 20 nt, Artificial Sequence
  Synthetic
cuucccuuacugagaagaaa

SEQ ID NO: 173728 - RNA, 21 nt, Artificial Sequence
  Synthetic
ccuucccuuacugagaagaaa

SEQ ID NO: 173729 - RNA, 22 nt, Artificial Sequence
  Synthetic
uccuucccuuacugagaagaaa

SEQ ID NO: 173730 - RNA, 23 nt, Artificial Sequence
  Synthetic
auccuucccuuacugagaagaaa

SEQ ID NO: 173731 - RNA, 24 nt, Artificial Sequence
  Synthetic
aauccuucccuuacugagaagaaa

SEQ ID NO: 173732 - RNA, 18 nt, Artificial Sequence
  Synthetic
cauuccagguagaagaaa

SEQ ID NO: 173733 - RNA, 19 nt, Artificial Sequence
  Synthetic
gcauuccagguagaagaaa

SEQ ID NO: 173734 - RNA, 20 nt, Artificial Sequence
  Synthetic
agcauuccagguagaagaaa

SEQ ID NO: 173735 - RNA, 21 nt, Artificial Sequence
  Synthetic
gagcauuccagguagaagaaa

SEQ ID NO: 173736 - RNA, 22 nt, Artificial Sequence
  Synthetic
agagcauuccagguagaagaaa

SEQ ID NO: 173737 - RNA, 23 nt, Artificial Sequence
  Synthetic
aagagcauuccagguagaagaaa

SEQ ID NO: 173738 - RNA, 24 nt, Artificial Sequence
  Synthetic
aaagagcauuccagguagaagaaa

SEQ ID NO: 173739 - RNA, 18 nt, Artificial Sequence
  Synthetic
ugcuaggaaacgaagaaa

SEQ ID NO: 173740 - RNA, 19 nt, Artificial Sequence
  Synthetic
gugcuaggaaacgaagaaa

SEQ ID NO: 173741 - RNA, 20 nt, Artificial Sequence
  Synthetic
agugcuaggaaacgaagaaa

SEQ ID NO: 173742 - RNA, 21 nt, Artificial Sequence
  Synthetic
aagugcuaggaaacgaagaaa

SEQ ID NO: 173743 - RNA, 22 nt, Artificial Sequence
  Synthetic
gaagugcuaggaaacgaagaaa

SEQ ID NO: 173744 - RNA, 23 nt, Artificial Sequence
  Synthetic
agaagugcuaggaaacgaagaaa

SEQ ID NO: 173745 - RNA, 24 nt, Artificial Sequence
  Synthetic
cagaagugcuaggaaacgaagaaa

SEQ ID NO: 173746 - RNA, 18 nt, Artificial Sequence
  Synthetic
uuguggguuaggaagaaa

SEQ ID NO: 173747 - RNA, 19 nt, Artificial Sequence
  Synthetic
guuguggguuaggaagaaa

SEQ ID NO: 173748 - RNA, 20 nt, Artificial Sequence
  Synthetic
gguuguggguuaggaagaaa

SEQ ID NO: 173749 - RNA, 21 nt, Artificial Sequence
  Synthetic
ugguuguggguuaggaagaaa

SEQ ID NO: 173750 - RNA, 22 nt, Artificial Sequence
  Synthetic
uugguuguggguuaggaagaaa

SEQ ID NO: 173751 - RNA, 23 nt, Artificial Sequence
  Synthetic
guugguuguggguuaggaagaaa

SEQ ID NO: 173752 - RNA, 24 nt, Artificial Sequence
  Synthetic
aguugguuguggguuaggaagaaa

SEQ ID NO: 173753 - RNA, 18 nt, Artificial Sequence
  Synthetic
guaaagagugggaagaaa

SEQ ID NO: 173754 - RNA, 19 nt, Artificial Sequence
  Synthetic
aguaaagagugggaagaaa

SEQ ID NO: 173755 - RNA, 20 nt, Artificial Sequence
  Synthetic
gaguaaagagugggaagaaa

SEQ ID NO: 173756 - RNA, 21 nt, Artificial Sequence
  Synthetic
ggaguaaagagugggaagaaa

SEQ ID NO: 173757 - RNA, 22 nt, Artificial Sequence
  Synthetic
aggaguaaagagugggaagaaa

SEQ ID NO: 173758 - RNA, 23 nt, Artificial Sequence
  Synthetic
gaggaguaaagagugggaagaaa

SEQ ID NO: 173759 - RNA, 24 nt, Artificial Sequence
  Synthetic
ggaggaguaaagagugggaagaaa

SEQ ID NO: 173760 - RNA, 18 nt, Artificial Sequence
  Synthetic
cuuacuuuuuggaagaaa

SEQ ID NO: 173761 - RNA, 19 nt, Artificial Sequence
  Synthetic
ccuuacuuuuuggaagaaa

SEQ ID NO: 173762 - RNA, 20 nt, Artificial Sequence
  Synthetic
uccuuacuuuuuggaagaaa

SEQ ID NO: 173763 - RNA, 21 nt, Artificial Sequence
  Synthetic
auccuuacuuuuuggaagaaa

SEQ ID NO: 173764 - RNA, 22 nt, Artificial Sequence
  Synthetic
uauccuuacuuuuuggaagaaa

SEQ ID NO: 173765 - RNA, 23 nt, Artificial Sequence
  Synthetic
uuauccuuacuuuuuggaagaaa

SEQ ID NO: 173766 - RNA, 24 nt, Artificial Sequence
  Synthetic
uuuauccuuacuuuuuggaagaaa

SEQ ID NO: 173767 - RNA, 18 nt, Artificial Sequence
  Synthetic
caaagaaagaugaagaaa

SEQ ID NO: 173768 - RNA, 19 nt, Artificial Sequence
  Synthetic
gcaaagaaagaugaagaaa

SEQ ID NO: 173769 - RNA, 20 nt, Artificial Sequence
  Synthetic
ugcaaagaaagaugaagaaa

SEQ ID NO: 173770 - RNA, 21 nt, Artificial Sequence
  Synthetic
gugcaaagaaagaugaagaaa

SEQ ID NO: 173771 - RNA, 22 nt, Artificial Sequence
  Synthetic
agugcaaagaaagaugaagaaa

SEQ ID NO: 173772 - RNA, 23 nt, Artificial Sequence
  Synthetic
cagugcaaagaaagaugaagaaa

SEQ ID NO: 173773 - RNA, 24 nt, Artificial Sequence
  Synthetic
acagugcaaagaaagaugaagaaa

SEQ ID NO: 173774 - RNA, 18 nt, Artificial Sequence
  Synthetic
cuccuucagaugaagaaa

SEQ ID NO: 173775 - RNA, 19 nt, Artificial Sequence
  Synthetic
ucuccuucagaugaagaaa

SEQ ID NO: 173776 - RNA, 20 nt, Artificial Sequence
  Synthetic
cucuccuucagaugaagaaa

SEQ ID NO: 173777 - RNA, 21 nt, Artificial Sequence
  Synthetic
ccucuccuucagaugaagaaa

SEQ ID NO: 173778 - RNA, 22 nt, Artificial Sequence
  Synthetic
gccucuccuucagaugaagaaa

SEQ ID NO: 173779 - RNA, 23 nt, Artificial Sequence
  Synthetic
agccucuccuucagaugaagaaa

SEQ ID NO: 173780 - RNA, 24 nt, Artificial Sequence
  Synthetic
cagccucuccuucagaugaagaaa

SEQ ID NO: 173781 - RNA, 18 nt, Artificial Sequence
  Synthetic
uaugugaggaugaagaaa

SEQ ID NO: 173782 - RNA, 19 nt, Artificial Sequence
  Synthetic
guaugugaggaugaagaaa

SEQ ID NO: 173783 - RNA, 20 nt, Artificial Sequence
  Synthetic
uguaugugaggaugaagaaa

SEQ ID NO: 173784 - RNA, 21 nt, Artificial Sequence
  Synthetic
guguaugugaggaugaagaaa

SEQ ID NO: 173785 - RNA, 22 nt, Artificial Sequence
  Synthetic
uguguaugugaggaugaagaaa

SEQ ID NO: 173786 - RNA, 23 nt, Artificial Sequence
  Synthetic
auguguaugugaggaugaagaaa

SEQ ID NO: 173787 - RNA, 24 nt, Artificial Sequence
  Synthetic
aauguguaugugaggaugaagaaa

SEQ ID NO: 173788 - RNA, 18 nt, Artificial Sequence
  Synthetic
aaauagacacugaagaaa

SEQ ID NO: 173789 - RNA, 19 nt, Artificial Sequence
  Synthetic
aaaauagacacugaagaaa

SEQ ID NO: 173790 - RNA, 20 nt, Artificial Sequence
  Synthetic
gaaaauagacacugaagaaa

SEQ ID NO: 173791 - RNA, 21 nt, Artificial Sequence
  Synthetic
agaaaauagacacugaagaaa

SEQ ID NO: 173792 - RNA, 22 nt, Artificial Sequence
  Synthetic
gagaaaauagacacugaagaaa

SEQ ID NO: 173793 - RNA, 23 nt, Artificial Sequence
  Synthetic
agagaaaauagacacugaagaaa

SEQ ID NO: 173794 - RNA, 24 nt, Artificial Sequence
  Synthetic
cagagaaaauagacacugaagaaa

SEQ ID NO: 173795 - RNA, 18 nt, Artificial Sequence
  Synthetic
accucugcucugaagaaa

SEQ ID NO: 173796 - RNA, 19 nt, Artificial Sequence
  Synthetic
aaccucugcucugaagaaa

SEQ ID NO: 173797 - RNA, 20 nt, Artificial Sequence
  Synthetic
aaaccucugcucugaagaaa

SEQ ID NO: 173798 - RNA, 21 nt, Artificial Sequence
  Synthetic
aaaaccucugcucugaagaaa

SEQ ID NO: 173799 - RNA, 22 nt, Artificial Sequence
  Synthetic
aaaaaccucugcucugaagaaa

SEQ ID NO: 173800 - RNA, 23 nt, Artificial Sequence
  Synthetic
uaaaaaccucugcucugaagaaa

SEQ ID NO: 173801 - RNA, 24 nt, Artificial Sequence
  Synthetic
uuaaaaaccucugcucugaagaaa

SEQ ID NO: 173802 - RNA, 18 nt, Artificial Sequence
  Synthetic
cccacuucagugaagaaa

SEQ ID NO: 173803 - RNA, 19 nt, Artificial Sequence
  Synthetic
gcccacuucagugaagaaa

SEQ ID NO: 173804 - RNA, 20 nt, Artificial Sequence
  Synthetic
agcccacuucagugaagaaa

SEQ ID NO: 173805 - RNA, 21 nt, Artificial Sequence
  Synthetic
aagcccacuucagugaagaaa

SEQ ID NO: 173806 - RNA, 22 nt, Artificial Sequence
  Synthetic
aaagcccacuucagugaagaaa

SEQ ID NO: 173807 - RNA, 23 nt, Artificial Sequence
  Synthetic
aaaagcccacuucagugaagaaa

SEQ ID NO: 173808 - RNA, 24 nt, Artificial Sequence
  Synthetic
aaaaagcccacuucagugaagaaa

SEQ ID NO: 173809 - RNA, 18 nt, Artificial Sequence
  Synthetic
uuuuuacauuugaagaaa

SEQ ID NO: 173810 - RNA, 19 nt, Artificial Sequence
  Synthetic
cuuuuuacauuugaagaaa

SEQ ID NO: 173811 - RNA, 20 nt, Artificial Sequence
  Synthetic
ucuuuuuacauuugaagaaa

SEQ ID NO: 173812 - RNA, 21 nt, Artificial Sequence
  Synthetic
uucuuuuuacauuugaagaaa

SEQ ID NO: 173813 - RNA, 22 nt, Artificial Sequence
  Synthetic
auucuuuuuacauuugaagaaa

SEQ ID NO: 173814 - RNA, 23 nt, Artificial Sequence
  Synthetic
aauucuuuuuacauuugaagaaa

SEQ ID NO: 173815 - RNA, 24 nt, Artificial Sequence
  Synthetic
gaauucuuuuuacauuugaagaaa

SEQ ID NO: 173816 - RNA, 18 nt, Artificial Sequence
  Synthetic
gaacacaggaauaagaaa

SEQ ID NO: 173817 - RNA, 19 nt, Artificial Sequence
  Synthetic
ugaacacaggaauaagaaa

SEQ ID NO: 173818 - RNA, 20 nt, Artificial Sequence
  Synthetic
uugaacacaggaauaagaaa

SEQ ID NO: 173819 - RNA, 21 nt, Artificial Sequence
  Synthetic
guugaacacaggaauaagaaa

SEQ ID NO: 173820 - RNA, 22 nt, Artificial Sequence
  Synthetic
uguugaacacaggaauaagaaa

SEQ ID NO: 173821 - RNA, 23 nt, Artificial Sequence
  Synthetic
cuguugaacacaggaauaagaaa

SEQ ID NO: 173822 - RNA, 24 nt, Artificial Sequence
  Synthetic
ucuguugaacacaggaauaagaaa

SEQ ID NO: 173823 - RNA, 18 nt, Artificial Sequence
  Synthetic
acgcuauuauauaagaaa

SEQ ID NO: 173824 - RNA, 19 nt, Artificial Sequence
  Synthetic
aacgcuauuauauaagaaa

SEQ ID NO: 173825 - RNA, 20 nt, Artificial Sequence
  Synthetic
aaacgcuauuauauaagaaa

SEQ ID NO: 173826 - RNA, 21 nt, Artificial Sequence
  Synthetic
aaaacgcuauuauauaagaaa

SEQ ID NO: 173827 - RNA, 22 nt, Artificial Sequence
  Synthetic
uaaaacgcuauuauauaagaaa

SEQ ID NO: 173828 - RNA, 23 nt, Artificial Sequence
  Synthetic
cuaaaacgcuauuauauaagaaa

SEQ ID NO: 173829 - RNA, 24 nt, Artificial Sequence
  Synthetic
gcuaaaacgcuauuauauaagaaa

SEQ ID NO: 173830 - RNA, 18 nt, Artificial Sequence
  Synthetic
ucccucccuuauaagaaa

SEQ ID NO: 173831 - RNA, 19 nt, Artificial Sequence
  Synthetic
cucccucccuuauaagaaa

SEQ ID NO: 173832 - RNA, 20 nt, Artificial Sequence
  Synthetic
ucucccucccuuauaagaaa

SEQ ID NO: 173833 - RNA, 21 nt, Artificial Sequence
  Synthetic
uucucccucccuuauaagaaa

SEQ ID NO: 173834 - RNA, 22 nt, Artificial Sequence
  Synthetic
cuucucccucccuuauaagaaa

SEQ ID NO: 173835 - RNA, 23 nt, Artificial Sequence
  Synthetic
ucuucucccucccuuauaagaaa

SEQ ID NO: 173836 - RNA, 24 nt, Artificial Sequence
  Synthetic
cucuucucccucccuuauaagaaa

SEQ ID NO: 173837 - RNA, 18 nt, Artificial Sequence
  Synthetic
uccauauuuccuaagaaa

SEQ ID NO: 173838 - RNA, 19 nt, Artificial Sequence
  Synthetic
uuccauauuuccuaagaaa

SEQ ID NO: 173839 - RNA, 20 nt, Artificial Sequence
  Synthetic
auuccauauuuccuaagaaa

SEQ ID NO: 173840 - RNA, 21 nt, Artificial Sequence
  Synthetic
aauuccauauuuccuaagaaa

SEQ ID NO: 173841 - RNA, 22 nt, Artificial Sequence
  Synthetic
aaauuccauauuuccuaagaaa

SEQ ID NO: 173842 - RNA, 23 nt, Artificial Sequence
  Synthetic
gaaauuccauauuuccuaagaaa

SEQ ID NO: 173843 - RNA, 24 nt, Artificial Sequence
  Synthetic
ugaaauuccauauuuccuaagaaa

SEQ ID NO: 173844 - RNA, 18 nt, Artificial Sequence
  Synthetic
aguaaaugcucuaagaaa

SEQ ID NO: 173845 - RNA, 19 nt, Artificial Sequence
  Synthetic
gaguaaaugcucuaagaaa

SEQ ID NO: 173846 - RNA, 20 nt, Artificial Sequence
  Synthetic
agaguaaaugcucuaagaaa

SEQ ID NO: 173847 - RNA, 21 nt, Artificial Sequence
  Synthetic
uagaguaaaugcucuaagaaa

SEQ ID NO: 173848 - RNA, 22 nt, Artificial Sequence
  Synthetic
cuagaguaaaugcucuaagaaa

SEQ ID NO: 173849 - RNA, 23 nt, Artificial Sequence
  Synthetic
ucuagaguaaaugcucuaagaaa

SEQ ID NO: 173850 - RNA, 24 nt, Artificial Sequence
  Synthetic
uucuagaguaaaugcucuaagaaa

SEQ ID NO: 173851 - RNA, 18 nt, Artificial Sequence
  Synthetic
aguaaauguucuaagaaa

SEQ ID NO: 173852 - RNA, 19 nt, Artificial Sequence
  Synthetic
gaguaaauguucuaagaaa

SEQ ID NO: 173853 - RNA, 20 nt, Artificial Sequence
  Synthetic
ugaguaaauguucuaagaaa

SEQ ID NO: 173854 - RNA, 21 nt, Artificial Sequence
  Synthetic
uugaguaaauguucuaagaaa

SEQ ID NO: 173855 - RNA, 22 nt, Artificial Sequence
  Synthetic
uuugaguaaauguucuaagaaa

SEQ ID NO: 173856 - RNA, 23 nt, Artificial Sequence
  Synthetic
uuuugaguaaauguucuaagaaa

SEQ ID NO: 173857 - RNA, 24 nt, Artificial Sequence
  Synthetic
cuuuugaguaaauguucuaagaaa

SEQ ID NO: 173858 - RNA, 18 nt, Artificial Sequence
  Synthetic
aauccuaaagguaagaaa

SEQ ID NO: 173859 - RNA, 19 nt, Artificial Sequence
  Synthetic
aaauccuaaagguaagaaa

SEQ ID NO: 173860 - RNA, 20 nt, Artificial Sequence
  Synthetic
gaaauccuaaagguaagaaa

SEQ ID NO: 173861 - RNA, 21 nt, Artificial Sequence
  Synthetic
ggaaauccuaaagguaagaaa

SEQ ID NO: 173862 - RNA, 22 nt, Artificial Sequence
  Synthetic
aggaaauccuaaagguaagaaa

SEQ ID NO: 173863 - RNA, 23 nt, Artificial Sequence
  Synthetic
caggaaauccuaaagguaagaaa

SEQ ID NO: 173864 - RNA, 24 nt, Artificial Sequence
  Synthetic
ccaggaaauccuaaagguaagaaa

SEQ ID NO: 173865 - RNA, 18 nt, Artificial Sequence
  Synthetic
gauucuauacuuaagaaa

SEQ ID NO: 173866 - RNA, 19 nt, Artificial Sequence
  Synthetic
ugauucuauacuuaagaaa

SEQ ID NO: 173867 - RNA, 20 nt, Artificial Sequence
  Synthetic
uugauucuauacuuaagaaa

SEQ ID NO: 173868 - RNA, 21 nt, Artificial Sequence
  Synthetic
guugauucuauacuuaagaaa

SEQ ID NO: 173869 - RNA, 22 nt, Artificial Sequence
  Synthetic
aguugauucuauacuuaagaaa

SEQ ID NO: 173870 - RNA, 23 nt, Artificial Sequence
  Synthetic
gaguugauucuauacuuaagaaa

SEQ ID NO: 173871 - RNA, 24 nt, Artificial Sequence
  Synthetic
ugaguugauucuauacuuaagaaa

SEQ ID NO: 173872 - RNA, 18 nt, Artificial Sequence
  Synthetic
cuucauucccuuaagaaa

SEQ ID NO: 173873 - RNA, 19 nt, Artificial Sequence
  Synthetic
gcuucauucccuuaagaaa

SEQ ID NO: 173874 - RNA, 20 nt, Artificial Sequence
  Synthetic
ggcuucauucccuuaagaaa

SEQ ID NO: 173875 - RNA, 21 nt, Artificial Sequence
  Synthetic
uggcuucauucccuuaagaaa

SEQ ID NO: 173876 - RNA, 22 nt, Artificial Sequence
  Synthetic
cuggcuucauucccuuaagaaa

SEQ ID NO: 173877 - RNA, 23 nt, Artificial Sequence
  Synthetic
ucuggcuucauucccuuaagaaa

SEQ ID NO: 173878 - RNA, 24 nt, Artificial Sequence
  Synthetic
gucuggcuucauucccuuaagaaa

SEQ ID NO: 173879 - RNA, 18 nt, Artificial Sequence
  Synthetic
cuucaagaaguuaagaaa

SEQ ID NO: 173880 - RNA, 19 nt, Artificial Sequence
  Synthetic
gcuucaagaaguuaagaaa

SEQ ID NO: 173881 - RNA, 20 nt, Artificial Sequence
  Synthetic
ggcuucaagaaguuaagaaa

SEQ ID NO: 173882 - RNA, 21 nt, Artificial Sequence
  Synthetic
aggcuucaagaaguuaagaaa

SEQ ID NO: 173883 - RNA, 22 nt, Artificial Sequence
  Synthetic
aaggcuucaagaaguuaagaaa

SEQ ID NO: 173884 - RNA, 23 nt, Artificial Sequence
  Synthetic
uaaggcuucaagaaguuaagaaa

SEQ ID NO: 173885 - RNA, 24 nt, Artificial Sequence
  Synthetic
uuaaggcuucaagaaguuaagaaa

SEQ ID NO: 173886 - RNA, 18 nt, Artificial Sequence
  Synthetic
acaaauaaaacacagaaa

SEQ ID NO: 173887 - RNA, 19 nt, Artificial Sequence
  Synthetic
uacaaauaaaacacagaaa

SEQ ID NO: 173888 - RNA, 20 nt, Artificial Sequence
  Synthetic
auacaaauaaaacacagaaa

SEQ ID NO: 173889 - RNA, 21 nt, Artificial Sequence
  Synthetic
uauacaaauaaaacacagaaa

SEQ ID NO: 173890 - RNA, 22 nt, Artificial Sequence
  Synthetic
uuauacaaauaaaacacagaaa

SEQ ID NO: 173891 - RNA, 23 nt, Artificial Sequence
  Synthetic
cuuauacaaauaaaacacagaaa

SEQ ID NO: 173892 - RNA, 24 nt, Artificial Sequence
  Synthetic
ccuuauacaaauaaaacacagaaa

SEQ ID NO: 173893 - RNA, 18 nt, Artificial Sequence
  Synthetic
aaacugaagacacagaaa

SEQ ID NO: 173894 - RNA, 19 nt, Artificial Sequence
  Synthetic
gaaacugaagacacagaaa

SEQ ID NO: 173895 - RNA, 20 nt, Artificial Sequence
  Synthetic
cgaaacugaagacacagaaa

SEQ ID NO: 173896 - RNA, 21 nt, Artificial Sequence
  Synthetic
gcgaaacugaagacacagaaa

SEQ ID NO: 173897 - RNA, 22 nt, Artificial Sequence
  Synthetic
agcgaaacugaagacacagaaa

SEQ ID NO: 173898 - RNA, 23 nt, Artificial Sequence
  Synthetic
gagcgaaacugaagacacagaaa

SEQ ID NO: 173899 - RNA, 24 nt, Artificial Sequence
  Synthetic
agagcgaaacugaagacacagaaa

SEQ ID NO: 173900 - RNA, 18 nt, Artificial Sequence
  Synthetic
agacuagcaagacagaaa

SEQ ID NO: 173901 - RNA, 19 nt, Artificial Sequence
  Synthetic
aagacuagcaagacagaaa

SEQ ID NO: 173902 - RNA, 20 nt, Artificial Sequence
  Synthetic
gaagacuagcaagacagaaa

SEQ ID NO: 173903 - RNA, 21 nt, Artificial Sequence
  Synthetic
agaagacuagcaagacagaaa

SEQ ID NO: 173904 - RNA, 22 nt, Artificial Sequence
  Synthetic
gagaagacuagcaagacagaaa

SEQ ID NO: 173905 - RNA, 23 nt, Artificial Sequence
  Synthetic
agagaagacuagcaagacagaaa

SEQ ID NO: 173906 - RNA, 24 nt, Artificial Sequence
  Synthetic
uagagaagacuagcaagacagaaa

SEQ ID NO: 173907 - RNA, 18 nt, Artificial Sequence
  Synthetic
gaacuauaaggacagaaa

SEQ ID NO: 173908 - RNA, 19 nt, Artificial Sequence
  Synthetic
agaacuauaaggacagaaa

SEQ ID NO: 173909 - RNA, 20 nt, Artificial Sequence
  Synthetic
gagaacuauaaggacagaaa

SEQ ID NO: 173910 - RNA, 21 nt, Artificial Sequence
  Synthetic
ugagaacuauaaggacagaaa

SEQ ID NO: 173911 - RNA, 22 nt, Artificial Sequence
  Synthetic
augagaacuauaaggacagaaa

SEQ ID NO: 173912 - RNA, 23 nt, Artificial Sequence
  Synthetic
aaugagaacuauaaggacagaaa

SEQ ID NO: 173913 - RNA, 24 nt, Artificial Sequence
  Synthetic
aaaugagaacuauaaggacagaaa

SEQ ID NO: 173914 - RNA, 18 nt, Artificial Sequence
  Synthetic
agcaggauuggacagaaa

SEQ ID NO: 173915 - RNA, 19 nt, Artificial Sequence
  Synthetic
aagcaggauuggacagaaa

SEQ ID NO: 173916 - RNA, 20 nt, Artificial Sequence
  Synthetic
gaagcaggauuggacagaaa

SEQ ID NO: 173917 - RNA, 21 nt, Artificial Sequence
  Synthetic
agaagcaggauuggacagaaa

SEQ ID NO: 173918 - RNA, 22 nt, Artificial Sequence
  Synthetic
uagaagcaggauuggacagaaa

SEQ ID NO: 173919 - RNA, 23 nt, Artificial Sequence
  Synthetic
uuagaagcaggauuggacagaaa

SEQ ID NO: 173920 - RNA, 24 nt, Artificial Sequence
  Synthetic
cuuagaagcaggauuggacagaaa

SEQ ID NO: 173921 - RNA, 18 nt, Artificial Sequence
  Synthetic
ccaauuagaugacagaaa

SEQ ID NO: 173922 - RNA, 19 nt, Artificial Sequence
  Synthetic
cccaauuagaugacagaaa

SEQ ID NO: 173923 - RNA, 20 nt, Artificial Sequence
  Synthetic
gcccaauuagaugacagaaa

SEQ ID NO: 173924 - RNA, 21 nt, Artificial Sequence
  Synthetic
agcccaauuagaugacagaaa

SEQ ID NO: 173925 - RNA, 22 nt, Artificial Sequence
  Synthetic
uagcccaauuagaugacagaaa

SEQ ID NO: 173926 - RNA, 23 nt, Artificial Sequence
  Synthetic
cuagcccaauuagaugacagaaa

SEQ ID NO: 173927 - RNA, 24 nt, Artificial Sequence
  Synthetic
ucuagcccaauuagaugacagaaa

SEQ ID NO: 173928 - RNA, 18 nt, Artificial Sequence
  Synthetic
ugcugauuuugacagaaa

SEQ ID NO: 173929 - RNA, 19 nt, Artificial Sequence
  Synthetic
uugcugauuuugacagaaa

SEQ ID NO: 173930 - RNA, 20 nt, Artificial Sequence
  Synthetic
uuugcugauuuugacagaaa

SEQ ID NO: 173931 - RNA, 21 nt, Artificial Sequence
  Synthetic
cuuugcugauuuugacagaaa

SEQ ID NO: 173932 - RNA, 22 nt, Artificial Sequence
  Synthetic
ccuuugcugauuuugacagaaa

SEQ ID NO: 173933 - RNA, 23 nt, Artificial Sequence
  Synthetic
uccuuugcugauuuugacagaaa

SEQ ID NO: 173934 - RNA, 24 nt, Artificial Sequence
  Synthetic
uuccuuugcugauuuugacagaaa

SEQ ID NO: 173935 - RNA, 18 nt, Artificial Sequence
  Synthetic
aauaccugaguacagaaa

SEQ ID NO: 173936 - RNA, 19 nt, Artificial Sequence
  Synthetic
uaauaccugaguacagaaa

SEQ ID NO: 173937 - RNA, 20 nt, Artificial Sequence
  Synthetic
uuaauaccugaguacagaaa

SEQ ID NO: 173938 - RNA, 21 nt, Artificial Sequence
  Synthetic
uuuaauaccugaguacagaaa

SEQ ID NO: 173939 - RNA, 22 nt, Artificial Sequence
  Synthetic
auuuaauaccugaguacagaaa

SEQ ID NO: 173940 - RNA, 23 nt, Artificial Sequence
  Synthetic
gauuuaauaccugaguacagaaa

SEQ ID NO: 173941 - RNA, 24 nt, Artificial Sequence
  Synthetic
ugauuuaauaccugaguacagaaa

SEQ ID NO: 173942 - RNA, 18 nt, Artificial Sequence
  Synthetic
auuguuaguguacagaaa

SEQ ID NO: 173943 - RNA, 19 nt, Artificial Sequence
  Synthetic
uauuguuaguguacagaaa

SEQ ID NO: 173944 - RNA, 20 nt, Artificial Sequence
  Synthetic
uuauuguuaguguacagaaa

SEQ ID NO: 173945 - RNA, 21 nt, Artificial Sequence
  Synthetic
cuuauuguuaguguacagaaa

SEQ ID NO: 173946 - RNA, 22 nt, Artificial Sequence
  Synthetic
gcuuauuguuaguguacagaaa

SEQ ID NO: 173947 - RNA, 23 nt, Artificial Sequence
  Synthetic
agcuuauuguuaguguacagaaa

SEQ ID NO: 173948 - RNA, 24 nt, Artificial Sequence
  Synthetic
uagcuuauuguuaguguacagaaa

SEQ ID NO: 173949 - RNA, 18 nt, Artificial Sequence
  Synthetic
guuuucuuuuuacagaaa

SEQ ID NO: 173950 - RNA, 19 nt, Artificial Sequence
  Synthetic
uguuuucuuuuuacagaaa

SEQ ID NO: 173951 - RNA, 20 nt, Artificial Sequence
  Synthetic
guguuuucuuuuuacagaaa

SEQ ID NO: 173952 - RNA, 21 nt, Artificial Sequence
  Synthetic
uguguuuucuuuuuacagaaa

SEQ ID NO: 173953 - RNA, 22 nt, Artificial Sequence
  Synthetic
cuguguuuucuuuuuacagaaa

SEQ ID NO: 173954 - RNA, 23 nt, Artificial Sequence
  Synthetic
ucuguguuuucuuuuuacagaaa

SEQ ID NO: 173955 - RNA, 24 nt, Artificial Sequence
  Synthetic
uucuguguuuucuuuuuacagaaa

SEQ ID NO: 173956 - RNA, 18 nt, Artificial Sequence
  Synthetic
gacccauucagccagaaa

SEQ ID NO: 173957 - RNA, 19 nt, Artificial Sequence
  Synthetic
ggacccauucagccagaaa

SEQ ID NO: 173958 - RNA, 20 nt, Artificial Sequence
  Synthetic
aggacccauucagccagaaa

SEQ ID NO: 173959 - RNA, 21 nt, Artificial Sequence
  Synthetic
uaggacccauucagccagaaa

SEQ ID NO: 173960 - RNA, 22 nt, Artificial Sequence
  Synthetic
uuaggacccauucagccagaaa

SEQ ID NO: 173961 - RNA, 23 nt, Artificial Sequence
  Synthetic
auuaggacccauucagccagaaa

SEQ ID NO: 173962 - RNA, 24 nt, Artificial Sequence
  Synthetic
uauuaggacccauucagccagaaa

SEQ ID NO: 173963 - RNA, 18 nt, Artificial Sequence
  Synthetic
gaaugaggaaggcagaaa

SEQ ID NO: 173964 - RNA, 19 nt, Artificial Sequence
  Synthetic
ugaaugaggaaggcagaaa

SEQ ID NO: 173965 - RNA, 20 nt, Artificial Sequence
  Synthetic
augaaugaggaaggcagaaa

SEQ ID NO: 173966 - RNA, 21 nt, Artificial Sequence
  Synthetic
aaugaaugaggaaggcagaaa

SEQ ID NO: 173967 - RNA, 22 nt, Artificial Sequence
  Synthetic
gaaugaaugaggaaggcagaaa

SEQ ID NO: 173968 - RNA, 23 nt, Artificial Sequence
  Synthetic
ggaaugaaugaggaaggcagaaa

SEQ ID NO: 173969 - RNA, 24 nt, Artificial Sequence
  Synthetic
gggaaugaaugaggaaggcagaaa

SEQ ID NO: 173970 - RNA, 18 nt, Artificial Sequence
  Synthetic
gugaaccccaggcagaaa

SEQ ID NO: 173971 - RNA, 19 nt, Artificial Sequence
  Synthetic
agugaaccccaggcagaaa

SEQ ID NO: 173972 - RNA, 20 nt, Artificial Sequence
  Synthetic
cagugaaccccaggcagaaa

SEQ ID NO: 173973 - RNA, 21 nt, Artificial Sequence
  Synthetic
gcagugaaccccaggcagaaa

SEQ ID NO: 173974 - RNA, 22 nt, Artificial Sequence
  Synthetic
ugcagugaaccccaggcagaaa

SEQ ID NO: 173975 - RNA, 23 nt, Artificial Sequence
  Synthetic
gugcagugaaccccaggcagaaa

SEQ ID NO: 173976 - RNA, 24 nt, Artificial Sequence
  Synthetic
cgugcagugaaccccaggcagaaa

SEQ ID NO: 173977 - RNA, 18 nt, Artificial Sequence
  Synthetic
ucggucagcaggcagaaa

SEQ ID NO: 173978 - RNA, 19 nt, Artificial Sequence
  Synthetic
gucggucagcaggcagaaa

SEQ ID NO: 173979 - RNA, 20 nt, Artificial Sequence
  Synthetic
agucggucagcaggcagaaa

SEQ ID NO: 173980 - RNA, 21 nt, Artificial Sequence
  Synthetic
gagucggucagcaggcagaaa

SEQ ID NO: 173981 - RNA, 22 nt, Artificial Sequence
  Synthetic
agagucggucagcaggcagaaa

SEQ ID NO: 173982 - RNA, 23 nt, Artificial Sequence
  Synthetic
cagagucggucagcaggcagaaa

SEQ ID NO: 173983 - RNA, 24 nt, Artificial Sequence
  Synthetic
ccagagucggucagcaggcagaaa

SEQ ID NO: 173984 - RNA, 18 nt, Artificial Sequence
  Synthetic
aucuccgagaggcagaaa

SEQ ID NO: 173985 - RNA, 19 nt, Artificial Sequence
  Synthetic
gaucuccgagaggcagaaa

SEQ ID NO: 173986 - RNA, 20 nt, Artificial Sequence
  Synthetic
agaucuccgagaggcagaaa

SEQ ID NO: 173987 - RNA, 21 nt, Artificial Sequence
  Synthetic
aagaucuccgagaggcagaaa

SEQ ID NO: 173988 - RNA, 22 nt, Artificial Sequence
  Synthetic
uaagaucuccgagaggcagaaa

SEQ ID NO: 173989 - RNA, 23 nt, Artificial Sequence
  Synthetic
uuaagaucuccgagaggcagaaa

SEQ ID NO: 173990 - RNA, 24 nt, Artificial Sequence
  Synthetic
uuuaagaucuccgagaggcagaaa

SEQ ID NO: 173991 - RNA, 18 nt, Artificial Sequence
  Synthetic
uuaaaaucauggcagaaa

SEQ ID NO: 173992 - RNA, 19 nt, Artificial Sequence
  Synthetic
cuuaaaaucauggcagaaa

SEQ ID NO: 173993 - RNA, 20 nt, Artificial Sequence
  Synthetic
acuuaaaaucauggcagaaa

SEQ ID NO: 173994 - RNA, 21 nt, Artificial Sequence
  Synthetic
aacuuaaaaucauggcagaaa

SEQ ID NO: 173995 - RNA, 22 nt, Artificial Sequence
  Synthetic
aaacuuaaaaucauggcagaaa

SEQ ID NO: 173996 - RNA, 23 nt, Artificial Sequence
  Synthetic
gaaacuuaaaaucauggcagaaa

SEQ ID NO: 173997 - RNA, 24 nt, Artificial Sequence
  Synthetic
ggaaacuuaaaaucauggcagaaa

SEQ ID NO: 173998 - RNA, 18 nt, Artificial Sequence
  Synthetic
uuggagucauggcagaaa

SEQ ID NO: 173999 - RNA, 19 nt, Artificial Sequence
  Synthetic
auuggagucauggcagaaa

SEQ ID NO: 174000 - RNA, 20 nt, Artificial Sequence
  Synthetic
gauuggagucauggcagaaa

SEQ ID NO: 174001 - RNA, 21 nt, Artificial Sequence
  Synthetic
ggauuggagucauggcagaaa

SEQ ID NO: 174002 - RNA, 22 nt, Artificial Sequence
  Synthetic
aggauuggagucauggcagaaa

SEQ ID NO: 174003 - RNA, 23 nt, Artificial Sequence
  Synthetic
caggauuggagucauggcagaaa

SEQ ID NO: 174004 - RNA, 24 nt, Artificial Sequence
  Synthetic
gcaggauuggagucauggcagaaa

SEQ ID NO: 174005 - RNA, 18 nt, Artificial Sequence
  Synthetic
aaauauuaguggcagaaa

SEQ ID NO: 174006 - RNA, 19 nt, Artificial Sequence
  Synthetic
uaaauauuaguggcagaaa

SEQ ID NO: 174007 - RNA, 20 nt, Artificial Sequence
  Synthetic
auaaauauuaguggcagaaa

SEQ ID NO: 174008 - RNA, 21 nt, Artificial Sequence
  Synthetic
gauaaauauuaguggcagaaa

SEQ ID NO: 174009 - RNA, 22 nt, Artificial Sequence
  Synthetic
ugauaaauauuaguggcagaaa

SEQ ID NO: 174010 - RNA, 23 nt, Artificial Sequence
  Synthetic
augauaaauauuaguggcagaaa

SEQ ID NO: 174011 - RNA, 24 nt, Artificial Sequence
  Synthetic
aaugauaaauauuaguggcagaaa

SEQ ID NO: 174012 - RNA, 18 nt, Artificial Sequence
  Synthetic
gcuauuaaaaugcagaaa

SEQ ID NO: 174013 - RNA, 19 nt, Artificial Sequence
  Synthetic
agcuauuaaaaugcagaaa

SEQ ID NO: 174014 - RNA, 20 nt, Artificial Sequence
  Synthetic
aagcuauuaaaaugcagaaa

SEQ ID NO: 174015 - RNA, 21 nt, Artificial Sequence
  Synthetic
uaagcuauuaaaaugcagaaa

SEQ ID NO: 174016 - RNA, 22 nt, Artificial Sequence
  Synthetic
auaagcuauuaaaaugcagaaa

SEQ ID NO: 174017 - RNA, 23 nt, Artificial Sequence
  Synthetic
gauaagcuauuaaaaugcagaaa

SEQ ID NO: 174018 - RNA, 24 nt, Artificial Sequence
  Synthetic
agauaagcuauuaaaaugcagaaa

SEQ ID NO: 174019 - RNA, 18 nt, Artificial Sequence
  Synthetic
caaaagccacugcagaaa

SEQ ID NO: 174020 - RNA, 19 nt, Artificial Sequence
  Synthetic
ccaaaagccacugcagaaa

SEQ ID NO: 174021 - RNA, 20 nt, Artificial Sequence
  Synthetic
gccaaaagccacugcagaaa

SEQ ID NO: 174022 - RNA, 21 nt, Artificial Sequence
  Synthetic
ugccaaaagccacugcagaaa

SEQ ID NO: 174023 - RNA, 22 nt, Artificial Sequence
  Synthetic
cugccaaaagccacugcagaaa

SEQ ID NO: 174024 - RNA, 23 nt, Artificial Sequence
  Synthetic
acugccaaaagccacugcagaaa

SEQ ID NO: 174025 - RNA, 24 nt, Artificial Sequence
  Synthetic
cacugccaaaagccacugcagaaa

SEQ ID NO: 174026 - RNA, 18 nt, Artificial Sequence
  Synthetic
auuuauccccugcagaaa

SEQ ID NO: 174027 - RNA, 19 nt, Artificial Sequence
  Synthetic
aauuuauccccugcagaaa

SEQ ID NO: 174028 - RNA, 20 nt, Artificial Sequence
  Synthetic
caauuuauccccugcagaaa

SEQ ID NO: 174029 - RNA, 21 nt, Artificial Sequence
  Synthetic
ccaauuuauccccugcagaaa

SEQ ID NO: 174030 - RNA, 22 nt, Artificial Sequence
  Synthetic
cccaauuuauccccugcagaaa

SEQ ID NO: 174031 - RNA, 23 nt, Artificial Sequence
  Synthetic
ucccaauuuauccccugcagaaa

SEQ ID NO: 174032 - RNA, 24 nt, Artificial Sequence
  Synthetic
uucccaauuuauccccugcagaaa

SEQ ID NO: 174033 - RNA, 18 nt, Artificial Sequence
  Synthetic
caaaugguccugcagaaa

SEQ ID NO: 174034 - RNA, 19 nt, Artificial Sequence
  Synthetic
acaaaugguccugcagaaa

SEQ ID NO: 174035 - RNA, 20 nt, Artificial Sequence
  Synthetic
aacaaaugguccugcagaaa

SEQ ID NO: 174036 - RNA, 21 nt, Artificial Sequence
  Synthetic
caacaaaugguccugcagaaa

SEQ ID NO: 174037 - RNA, 22 nt, Artificial Sequence
  Synthetic
ucaacaaaugguccugcagaaa

SEQ ID NO: 174038 - RNA, 23 nt, Artificial Sequence
  Synthetic
uucaacaaaugguccugcagaaa

SEQ ID NO: 174039 - RNA, 24 nt, Artificial Sequence
  Synthetic
uuucaacaaaugguccugcagaaa

SEQ ID NO: 174040 - RNA, 18 nt, Artificial Sequence
  Synthetic
cagaaaucucugcagaaa

SEQ ID NO: 174041 - RNA, 19 nt, Artificial Sequence
  Synthetic
acagaaaucucugcagaaa

SEQ ID NO: 174042 - RNA, 20 nt, Artificial Sequence
  Synthetic
aacagaaaucucugcagaaa

SEQ ID NO: 174043 - RNA, 21 nt, Artificial Sequence
  Synthetic
aaacagaaaucucugcagaaa

SEQ ID NO: 174044 - RNA, 22 nt, Artificial Sequence
  Synthetic
gaaacagaaaucucugcagaaa

SEQ ID NO: 174045 - RNA, 23 nt, Artificial Sequence
  Synthetic
ugaaacagaaaucucugcagaaa

SEQ ID NO: 174046 - RNA, 24 nt, Artificial Sequence
  Synthetic
augaaacagaaaucucugcagaaa

SEQ ID NO: 174047 - RNA, 18 nt, Artificial Sequence
  Synthetic
aauaguuuuaaucagaaa

SEQ ID NO: 174048 - RNA, 19 nt, Artificial Sequence
  Synthetic
aaauaguuuuaaucagaaa

SEQ ID NO: 174049 - RNA, 20 nt, Artificial Sequence
  Synthetic
aaaauaguuuuaaucagaaa

SEQ ID NO: 174050 - RNA, 21 nt, Artificial Sequence
  Synthetic
caaaauaguuuuaaucagaaa

SEQ ID NO: 174051 - RNA, 22 nt, Artificial Sequence
  Synthetic
acaaaauaguuuuaaucagaaa

SEQ ID NO: 174052 - RNA, 23 nt, Artificial Sequence
  Synthetic
uacaaaauaguuuuaaucagaaa

SEQ ID NO: 174053 - RNA, 24 nt, Artificial Sequence
  Synthetic
guacaaaauaguuuuaaucagaaa

SEQ ID NO: 174054 - RNA, 18 nt, Artificial Sequence
  Synthetic
aucaucuuugcucagaaa

SEQ ID NO: 174055 - RNA, 19 nt, Artificial Sequence
  Synthetic
caucaucuuugcucagaaa

SEQ ID NO: 174056 - RNA, 20 nt, Artificial Sequence
  Synthetic
gcaucaucuuugcucagaaa

SEQ ID NO: 174057 - RNA, 21 nt, Artificial Sequence
  Synthetic
agcaucaucuuugcucagaaa

SEQ ID NO: 174058 - RNA, 22 nt, Artificial Sequence
  Synthetic
aagcaucaucuuugcucagaaa

SEQ ID NO: 174059 - RNA, 23 nt, Artificial Sequence
  Synthetic
aaagcaucaucuuugcucagaaa

SEQ ID NO: 174060 - RNA, 24 nt, Artificial Sequence
  Synthetic
uaaagcaucaucuuugcucagaaa

SEQ ID NO: 174061 - RNA, 18 nt, Artificial Sequence
  Synthetic
ucuuuuccuucucagaaa

SEQ ID NO: 174062 - RNA, 19 nt, Artificial Sequence
  Synthetic
cucuuuuccuucucagaaa

SEQ ID NO: 174063 - RNA, 20 nt, Artificial Sequence
  Synthetic
ccucuuuuccuucucagaaa

SEQ ID NO: 174064 - RNA, 21 nt, Artificial Sequence
  Synthetic
uccucuuuuccuucucagaaa

SEQ ID NO: 174065 - RNA, 22 nt, Artificial Sequence
  Synthetic
uuccucuuuuccuucucagaaa

SEQ ID NO: 174066 - RNA, 23 nt, Artificial Sequence
  Synthetic
cuuccucuuuuccuucucagaaa

SEQ ID NO: 174067 - RNA, 24 nt, Artificial Sequence
  Synthetic
ucuuccucuuuuccuucucagaaa

SEQ ID NO: 174068 - RNA, 18 nt, Artificial Sequence
  Synthetic
aggccuccaugucagaaa

SEQ ID NO: 174069 - RNA, 19 nt, Artificial Sequence
  Synthetic
caggccuccaugucagaaa

SEQ ID NO: 174070 - RNA, 20 nt, Artificial Sequence
  Synthetic
ucaggccuccaugucagaaa

SEQ ID NO: 174071 - RNA, 21 nt, Artificial Sequence
  Synthetic
uucaggccuccaugucagaaa

SEQ ID NO: 174072 - RNA, 22 nt, Artificial Sequence
  Synthetic
auucaggccuccaugucagaaa

SEQ ID NO: 174073 - RNA, 23 nt, Artificial Sequence
  Synthetic
gauucaggccuccaugucagaaa

SEQ ID NO: 174074 - RNA, 24 nt, Artificial Sequence
  Synthetic
ggauucaggccuccaugucagaaa

SEQ ID NO: 174075 - RNA, 18 nt, Artificial Sequence
  Synthetic
gucaauggaauucagaaa

SEQ ID NO: 174076 - RNA, 19 nt, Artificial Sequence
  Synthetic
ugucaauggaauucagaaa

SEQ ID NO: 174077 - RNA, 20 nt, Artificial Sequence
  Synthetic
uugucaauggaauucagaaa

SEQ ID NO: 174078 - RNA, 21 nt, Artificial Sequence
  Synthetic
auugucaauggaauucagaaa

SEQ ID NO: 174079 - RNA, 22 nt, Artificial Sequence
  Synthetic
cauugucaauggaauucagaaa

SEQ ID NO: 174080 - RNA, 23 nt, Artificial Sequence
  Synthetic
ccauugucaauggaauucagaaa

SEQ ID NO: 174081 - RNA, 24 nt, Artificial Sequence
  Synthetic
accauugucaauggaauucagaaa

SEQ ID NO: 174082 - RNA, 18 nt, Artificial Sequence
  Synthetic
aucagagaacuucagaaa

SEQ ID NO: 174083 - RNA, 19 nt, Artificial Sequence
  Synthetic
uaucagagaacuucagaaa

SEQ ID NO: 174084 - RNA, 20 nt, Artificial Sequence
  Synthetic
auaucagagaacuucagaaa

SEQ ID NO: 174085 - RNA, 21 nt, Artificial Sequence
  Synthetic
aauaucagagaacuucagaaa

SEQ ID NO: 174086 - RNA, 22 nt, Artificial Sequence
  Synthetic
caauaucagagaacuucagaaa

SEQ ID NO: 174087 - RNA, 23 nt, Artificial Sequence
  Synthetic
acaauaucagagaacuucagaaa

SEQ ID NO: 174088 - RNA, 24 nt, Artificial Sequence
  Synthetic
gacaauaucagagaacuucagaaa

SEQ ID NO: 174089 - RNA, 18 nt, Artificial Sequence
  Synthetic
uuucucuuucuucagaaa

SEQ ID NO: 174090 - RNA, 19 nt, Artificial Sequence
  Synthetic
guuucucuuucuucagaaa

SEQ ID NO: 174091 - RNA, 20 nt, Artificial Sequence
  Synthetic
uguuucucuuucuucagaaa

SEQ ID NO: 174092 - RNA, 21 nt, Artificial Sequence
  Synthetic
auguuucucuuucuucagaaa

SEQ ID NO: 174093 - RNA, 22 nt, Artificial Sequence
  Synthetic
cauguuucucuuucuucagaaa

SEQ ID NO: 174094 - RNA, 23 nt, Artificial Sequence
  Synthetic
ucauguuucucuuucuucagaaa

SEQ ID NO: 174095 - RNA, 24 nt, Artificial Sequence
  Synthetic
uucauguuucucuuucuucagaaa

SEQ ID NO: 174096 - RNA, 18 nt, Artificial Sequence
  Synthetic
ucuuucuuuguucagaaa

SEQ ID NO: 174097 - RNA, 19 nt, Artificial Sequence
  Synthetic
gucuuucuuuguucagaaa

SEQ ID NO: 174098 - RNA, 20 nt, Artificial Sequence
  Synthetic
ugucuuucuuuguucagaaa

SEQ ID NO: 174099 - RNA, 21 nt, Artificial Sequence
  Synthetic
uugucuuucuuuguucagaaa

SEQ ID NO: 174100 - RNA, 22 nt, Artificial Sequence
  Synthetic
cuugucuuucuuuguucagaaa

SEQ ID NO: 174101 - RNA, 23 nt, Artificial Sequence
  Synthetic
ucuugucuuucuuuguucagaaa

SEQ ID NO: 174102 - RNA, 24 nt, Artificial Sequence
  Synthetic
aucuugucuuucuuuguucagaaa

SEQ ID NO: 174103 - RNA, 18 nt, Artificial Sequence
  Synthetic
caguuagaaaaagagaaa

SEQ ID NO: 174104 - RNA, 19 nt, Artificial Sequence
  Synthetic
ucaguuagaaaaagagaaa

SEQ ID NO: 174105 - RNA, 20 nt, Artificial Sequence
  Synthetic
cucaguuagaaaaagagaaa

SEQ ID NO: 174106 - RNA, 21 nt, Artificial Sequence
  Synthetic
acucaguuagaaaaagagaaa

SEQ ID NO: 174107 - RNA, 22 nt, Artificial Sequence
  Synthetic
aacucaguuagaaaaagagaaa

SEQ ID NO: 174108 - RNA, 23 nt, Artificial Sequence
  Synthetic
gaacucaguuagaaaaagagaaa

SEQ ID NO: 174109 - RNA, 24 nt, Artificial Sequence
  Synthetic
ugaacucaguuagaaaaagagaaa

SEQ ID NO: 174110 - RNA, 18 nt, Artificial Sequence
  Synthetic
uaucauuauaaagagaaa

SEQ ID NO: 174111 - RNA, 19 nt, Artificial Sequence
  Synthetic
auaucauuauaaagagaaa

SEQ ID NO: 174112 - RNA, 20 nt, Artificial Sequence
  Synthetic
uauaucauuauaaagagaaa

SEQ ID NO: 174113 - RNA, 21 nt, Artificial Sequence
  Synthetic
uuauaucauuauaaagagaaa

SEQ ID NO: 174114 - RNA, 22 nt, Artificial Sequence
  Synthetic
uuuauaucauuauaaagagaaa

SEQ ID NO: 174115 - RNA, 23 nt, Artificial Sequence
  Synthetic
uuuuauaucauuauaaagagaaa

SEQ ID NO: 174116 - RNA, 24 nt, Artificial Sequence
  Synthetic
uuuuuauaucauuauaaagagaaa

SEQ ID NO: 174117 - RNA, 18 nt, Artificial Sequence
  Synthetic
uugacauuuaaagagaaa

SEQ ID NO: 174118 - RNA, 19 nt, Artificial Sequence
  Synthetic
guugacauuuaaagagaaa

SEQ ID NO: 174119 - RNA, 20 nt, Artificial Sequence
  Synthetic
aguugacauuuaaagagaaa

SEQ ID NO: 174120 - RNA, 21 nt, Artificial Sequence
  Synthetic
gaguugacauuuaaagagaaa

SEQ ID NO: 174121 - RNA, 22 nt, Artificial Sequence
  Synthetic
agaguugacauuuaaagagaaa

SEQ ID NO: 174122 - RNA, 23 nt, Artificial Sequence
  Synthetic
uagaguugacauuuaaagagaaa

SEQ ID NO: 174123 - RNA, 24 nt, Artificial Sequence
  Synthetic
cuagaguugacauuuaaagagaaa

SEQ ID NO: 174124 - RNA, 18 nt, Artificial Sequence
  Synthetic
uugcauaaagaagagaaa

SEQ ID NO: 174125 - RNA, 19 nt, Artificial Sequence
  Synthetic
uuugcauaaagaagagaaa

SEQ ID NO: 174126 - RNA, 20 nt, Artificial Sequence
  Synthetic
uuuugcauaaagaagagaaa

SEQ ID NO: 174127 - RNA, 21 nt, Artificial Sequence
  Synthetic
auuuugcauaaagaagagaaa

SEQ ID NO: 174128 - RNA, 22 nt, Artificial Sequence
  Synthetic
gauuuugcauaaagaagagaaa

SEQ ID NO: 174129 - RNA, 23 nt, Artificial Sequence
  Synthetic
ggauuuugcauaaagaagagaaa

SEQ ID NO: 174130 - RNA, 24 nt, Artificial Sequence
  Synthetic
uggauuuugcauaaagaagagaaa

SEQ ID NO: 174131 - RNA, 18 nt, Artificial Sequence
  Synthetic
cugcugauggaagagaaa

SEQ ID NO: 174132 - RNA, 19 nt, Artificial Sequence
  Synthetic
gcugcugauggaagagaaa

SEQ ID NO: 174133 - RNA, 20 nt, Artificial Sequence
  Synthetic
ugcugcugauggaagagaaa

SEQ ID NO: 174134 - RNA, 21 nt, Artificial Sequence
  Synthetic
gugcugcugauggaagagaaa

SEQ ID NO: 174135 - RNA, 22 nt, Artificial Sequence
  Synthetic
ugugcugcugauggaagagaaa

SEQ ID NO: 174136 - RNA, 23 nt, Artificial Sequence
  Synthetic
cugugcugcugauggaagagaaa

SEQ ID NO: 174137 - RNA, 24 nt, Artificial Sequence
  Synthetic
gcugugcugcugauggaagagaaa

SEQ ID NO: 174138 - RNA, 18 nt, Artificial Sequence
  Synthetic
aagcagcuggaagagaaa

SEQ ID NO: 174139 - RNA, 19 nt, Artificial Sequence
  Synthetic
aaagcagcuggaagagaaa

SEQ ID NO: 174140 - RNA, 20 nt, Artificial Sequence
  Synthetic
caaagcagcuggaagagaaa

SEQ ID NO: 174141 - RNA, 21 nt, Artificial Sequence
  Synthetic
ccaaagcagcuggaagagaaa

SEQ ID NO: 174142 - RNA, 22 nt, Artificial Sequence
  Synthetic
uccaaagcagcuggaagagaaa

SEQ ID NO: 174143 - RNA, 23 nt, Artificial Sequence
  Synthetic
uuccaaagcagcuggaagagaaa

SEQ ID NO: 174144 - RNA, 24 nt, Artificial Sequence
  Synthetic
auuccaaagcagcuggaagagaaa

SEQ ID NO: 174145 - RNA, 18 nt, Artificial Sequence
  Synthetic
cauaucauugaagagaaa

SEQ ID NO: 174146 - RNA, 19 nt, Artificial Sequence
  Synthetic
acauaucauugaagagaaa

SEQ ID NO: 174147 - RNA, 20 nt, Artificial Sequence
  Synthetic
uacauaucauugaagagaaa

SEQ ID NO: 174148 - RNA, 21 nt, Artificial Sequence
  Synthetic
auacauaucauugaagagaaa

SEQ ID NO: 174149 - RNA, 22 nt, Artificial Sequence
  Synthetic
cauacauaucauugaagagaaa

SEQ ID NO: 174150 - RNA, 23 nt, Artificial Sequence
  Synthetic
ucauacauaucauugaagagaaa

SEQ ID NO: 174151 - RNA, 24 nt, Artificial Sequence
  Synthetic
uucauacauaucauugaagagaaa

SEQ ID NO: 174152 - RNA, 18 nt, Artificial Sequence
  Synthetic
uagauaacuuaagagaaa

SEQ ID NO: 174153 - RNA, 19 nt, Artificial Sequence
  Synthetic
auagauaacuuaagagaaa

SEQ ID NO: 174154 - RNA, 20 nt, Artificial Sequence
  Synthetic
uauagauaacuuaagagaaa

SEQ ID NO: 174155 - RNA, 21 nt, Artificial Sequence
  Synthetic
uuauagauaacuuaagagaaa

SEQ ID NO: 174156 - RNA, 22 nt, Artificial Sequence
  Synthetic
guuauagauaacuuaagagaaa

SEQ ID NO: 174157 - RNA, 23 nt, Artificial Sequence
  Synthetic
aguuauagauaacuuaagagaaa

SEQ ID NO: 174158 - RNA, 24 nt, Artificial Sequence
  Synthetic
gaguuauagauaacuuaagagaaa

SEQ ID NO: 174159 - RNA, 18 nt, Artificial Sequence
  Synthetic
uguguugguuaagagaaa

SEQ ID NO: 174160 - RNA, 19 nt, Artificial Sequence
  Synthetic
guguguugguuaagagaaa

SEQ ID NO: 174161 - RNA, 20 nt, Artificial Sequence
  Synthetic
gguguguugguuaagagaaa

SEQ ID NO: 174162 - RNA, 21 nt, Artificial Sequence
  Synthetic
agguguguugguuaagagaaa

SEQ ID NO: 174163 - RNA, 22 nt, Artificial Sequence
  Synthetic
aagguguguugguuaagagaaa

SEQ ID NO: 174164 - RNA, 23 nt, Artificial Sequence
  Synthetic
caagguguguugguuaagagaaa

SEQ ID NO: 174165 - RNA, 24 nt, Artificial Sequence
  Synthetic
ucaagguguguugguuaagagaaa

SEQ ID NO: 174166 - RNA, 18 nt, Artificial Sequence
  Synthetic
gagagagaaacagagaaa

SEQ ID NO: 174167 - RNA, 19 nt, Artificial Sequence
  Synthetic
agagagagaaacagagaaa

SEQ ID NO: 174168 - RNA, 20 nt, Artificial Sequence
  Synthetic
gagagagagaaacagagaaa

SEQ ID NO: 174169 - RNA, 21 nt, Artificial Sequence
  Synthetic
agagagagagaaacagagaaa

SEQ ID NO: 174170 - RNA, 22 nt, Artificial Sequence
  Synthetic
gagagagagagaaacagagaaa

SEQ ID NO: 174171 - RNA, 23 nt, Artificial Sequence
  Synthetic
agagagagagagaaacagagaaa

SEQ ID NO: 174172 - RNA, 24 nt, Artificial Sequence
  Synthetic
gagagagagagagaaacagagaaa

SEQ ID NO: 174173 - RNA, 18 nt, Artificial Sequence
  Synthetic
uuuuuucucccagagaaa

SEQ ID NO: 174174 - RNA, 19 nt, Artificial Sequence
  Synthetic
uuuuuuucucccagagaaa

SEQ ID NO: 174175 - RNA, 20 nt, Artificial Sequence
  Synthetic
uuuuuuuucucccagagaaa

SEQ ID NO: 174176 - RNA, 21 nt, Artificial Sequence
  Synthetic
uuuuuuuuucucccagagaaa

SEQ ID NO: 174177 - RNA, 22 nt, Artificial Sequence
  Synthetic
auuuuuuuuucucccagagaaa

SEQ ID NO: 174178 - RNA, 23 nt, Artificial Sequence
  Synthetic
cauuuuuuuuucucccagagaaa

SEQ ID NO: 174179 - RNA, 24 nt, Artificial Sequence
  Synthetic
gcauuuuuuuuucucccagagaaa

SEQ ID NO: 174180 - RNA, 18 nt, Artificial Sequence
  Synthetic
ggugaggcugcagagaaa

SEQ ID NO: 174181 - RNA, 19 nt, Artificial Sequence
  Synthetic
uggugaggcugcagagaaa

SEQ ID NO: 174182 - RNA, 20 nt, Artificial Sequence
  Synthetic
uuggugaggcugcagagaaa

SEQ ID NO: 174183 - RNA, 21 nt, Artificial Sequence
  Synthetic
guuggugaggcugcagagaaa

SEQ ID NO: 174184 - RNA, 22 nt, Artificial Sequence
  Synthetic
uguuggugaggcugcagagaaa

SEQ ID NO: 174185 - RNA, 23 nt, Artificial Sequence
  Synthetic
auguuggugaggcugcagagaaa

SEQ ID NO: 174186 - RNA, 24 nt, Artificial Sequence
  Synthetic
gauguuggugaggcugcagagaaa

SEQ ID NO: 174187 - RNA, 18 nt, Artificial Sequence
  Synthetic
ggugaggcuucagagaaa

SEQ ID NO: 174188 - RNA, 19 nt, Artificial Sequence
  Synthetic
uggugaggcuucagagaaa

SEQ ID NO: 174189 - RNA, 20 nt, Artificial Sequence
  Synthetic
auggugaggcuucagagaaa

SEQ ID NO: 174190 - RNA, 21 nt, Artificial Sequence
  Synthetic
gauggugaggcuucagagaaa

SEQ ID NO: 174191 - RNA, 22 nt, Artificial Sequence
  Synthetic
ugauggugaggcuucagagaaa

SEQ ID NO: 174192 - RNA, 23 nt, Artificial Sequence
  Synthetic
augauggugaggcuucagagaaa

SEQ ID NO: 174193 - RNA, 24 nt, Artificial Sequence
  Synthetic
gaugauggugaggcuucagagaaa

SEQ ID NO: 174194 - RNA, 18 nt, Artificial Sequence
  Synthetic
aagagagagagagagaaa

SEQ ID NO: 174195 - RNA, 19 nt, Artificial Sequence
  Synthetic
aaagagagagagagagaaa

SEQ ID NO: 174196 - RNA, 20 nt, Artificial Sequence
  Synthetic
gaaagagagagagagagaaa

SEQ ID NO: 174197 - RNA, 21 nt, Artificial Sequence
  Synthetic
agaaagagagagagagagaaa

SEQ ID NO: 174198 - RNA, 22 nt, Artificial Sequence
  Synthetic
cagaaagagagagagagagaaa

SEQ ID NO: 174199 - RNA, 23 nt, Artificial Sequence
  Synthetic
acagaaagagagagagagagaaa

SEQ ID NO: 174200 - RNA, 24 nt, Artificial Sequence
  Synthetic
gacagaaagagagagagagagaaa

SEQ ID NO: 174201 - RNA, 18 nt, Artificial Sequence
  Synthetic
gagagagagagagagaaa

SEQ ID NO: 174202 - RNA, 19 nt, Artificial Sequence
  Synthetic
agagagagagagagagaaa

SEQ ID NO: 174203 - RNA, 20 nt, Artificial Sequence
  Synthetic
gagagagagagagagagaaa

SEQ ID NO: 174204 - RNA, 21 nt, Artificial Sequence
  Synthetic
agagagagagagagagagaaa

SEQ ID NO: 174205 - RNA, 22 nt, Artificial Sequence
  Synthetic
gagagagagagagagagagaaa

SEQ ID NO: 174206 - RNA, 23 nt, Artificial Sequence
  Synthetic
agagagagagagagagagagaaa

SEQ ID NO: 174207 - RNA, 24 nt, Artificial Sequence
  Synthetic
gagagagagagagagagagagaaa

SEQ ID NO: 174208 - RNA, 18 nt, Artificial Sequence
  Synthetic
uugagagagagagagaaa

SEQ ID NO: 174209 - RNA, 19 nt, Artificial Sequence
  Synthetic
auugagagagagagagaaa

SEQ ID NO: 174210 - RNA, 20 nt, Artificial Sequence
  Synthetic
gauugagagagagagagaaa

SEQ ID NO: 174211 - RNA, 21 nt, Artificial Sequence
  Synthetic
agauugagagagagagagaaa

SEQ ID NO: 174212 - RNA, 22 nt, Artificial Sequence
  Synthetic
gagauugagagagagagagaaa

SEQ ID NO: 174213 - RNA, 23 nt, Artificial Sequence
  Synthetic
agagauugagagagagagagaaa

SEQ ID NO: 174214 - RNA, 24 nt, Artificial Sequence
  Synthetic
gagagauugagagagagagagaaa

SEQ ID NO: 174215 - RNA, 18 nt, Artificial Sequence
  Synthetic
acgaggagacgagagaaa

SEQ ID NO: 174216 - RNA, 19 nt, Artificial Sequence
  Synthetic
uacgaggagacgagagaaa

SEQ ID NO: 174217 - RNA, 20 nt, Artificial Sequence
  Synthetic
auacgaggagacgagagaaa

SEQ ID NO: 174218 - RNA, 21 nt, Artificial Sequence
  Synthetic
uauacgaggagacgagagaaa

SEQ ID NO: 174219 - RNA, 22 nt, Artificial Sequence
  Synthetic
uuauacgaggagacgagagaaa

SEQ ID NO: 174220 - RNA, 23 nt, Artificial Sequence
  Synthetic
auuauacgaggagacgagagaaa

SEQ ID NO: 174221 - RNA, 24 nt, Artificial Sequence
  Synthetic
gauuauacgaggagacgagagaaa

SEQ ID NO: 174222 - RNA, 18 nt, Artificial Sequence
  Synthetic
guaucaggaggagagaaa

SEQ ID NO: 174223 - RNA, 19 nt, Artificial Sequence
  Synthetic
uguaucaggaggagagaaa

SEQ ID NO: 174224 - RNA, 20 nt, Artificial Sequence
  Synthetic
auguaucaggaggagagaaa

SEQ ID NO: 174225 - RNA, 21 nt, Artificial Sequence
  Synthetic
gauguaucaggaggagagaaa

SEQ ID NO: 174226 - RNA, 22 nt, Artificial Sequence
  Synthetic
ugauguaucaggaggagagaaa

SEQ ID NO: 174227 - RNA, 23 nt, Artificial Sequence
  Synthetic
cugauguaucaggaggagagaaa

SEQ ID NO: 174228 - RNA, 24 nt, Artificial Sequence
  Synthetic
ccugauguaucaggaggagagaaa

SEQ ID NO: 174229 - RNA, 18 nt, Artificial Sequence
  Synthetic
acuauucagggagagaaa

SEQ ID NO: 174230 - RNA, 19 nt, Artificial Sequence
  Synthetic
aacuauucagggagagaaa

SEQ ID NO: 174231 - RNA, 20 nt, Artificial Sequence
  Synthetic
gaacuauucagggagagaaa

SEQ ID NO: 174232 - RNA, 21 nt, Artificial Sequence
  Synthetic
ggaacuauucagggagagaaa

SEQ ID NO: 174233 - RNA, 22 nt, Artificial Sequence
  Synthetic
aggaacuauucagggagagaaa

SEQ ID NO: 174234 - RNA, 23 nt, Artificial Sequence
  Synthetic
aaggaacuauucagggagagaaa

SEQ ID NO: 174235 - RNA, 24 nt, Artificial Sequence
  Synthetic
uaaggaacuauucagggagagaaa

SEQ ID NO: 174236 - RNA, 18 nt, Artificial Sequence
  Synthetic
aggaauuugggagagaaa

SEQ ID NO: 174237 - RNA, 19 nt, Artificial Sequence
  Synthetic
caggaauuugggagagaaa

SEQ ID NO: 174238 - RNA, 20 nt, Artificial Sequence
  Synthetic
ucaggaauuugggagagaaa

SEQ ID NO: 174239 - RNA, 21 nt, Artificial Sequence
  Synthetic
cucaggaauuugggagagaaa

SEQ ID NO: 174240 - RNA, 22 nt, Artificial Sequence
  Synthetic
gcucaggaauuugggagagaaa

SEQ ID NO: 174241 - RNA, 23 nt, Artificial Sequence
  Synthetic
ugcucaggaauuugggagagaaa

SEQ ID NO: 174242 - RNA, 24 nt, Artificial Sequence
  Synthetic
gugcucaggaauuugggagagaaa

SEQ ID NO: 174243 - RNA, 18 nt, Artificial Sequence
  Synthetic
caaaaucagugagagaaa

SEQ ID NO: 174244 - RNA, 19 nt, Artificial Sequence
  Synthetic
ucaaaaucagugagagaaa

SEQ ID NO: 174245 - RNA, 20 nt, Artificial Sequence
  Synthetic
aucaaaaucagugagagaaa

SEQ ID NO: 174246 - RNA, 21 nt, Artificial Sequence
  Synthetic
caucaaaaucagugagagaaa

SEQ ID NO: 174247 - RNA, 22 nt, Artificial Sequence
  Synthetic
ucaucaaaaucagugagagaaa

SEQ ID NO: 174248 - RNA, 23 nt, Artificial Sequence
  Synthetic
cucaucaaaaucagugagagaaa

SEQ ID NO: 174249 - RNA, 24 nt, Artificial Sequence
  Synthetic
ccucaucaaaaucagugagagaaa

SEQ ID NO: 174250 - RNA, 18 nt, Artificial Sequence
  Synthetic
caaucaacuugagagaaa

SEQ ID NO: 174251 - RNA, 19 nt, Artificial Sequence
  Synthetic
acaaucaacuugagagaaa

SEQ ID NO: 174252 - RNA, 20 nt, Artificial Sequence
  Synthetic
uacaaucaacuugagagaaa

SEQ ID NO: 174253 - RNA, 21 nt, Artificial Sequence
  Synthetic
auacaaucaacuugagagaaa

SEQ ID NO: 174254 - RNA, 22 nt, Artificial Sequence
  Synthetic
uauacaaucaacuugagagaaa

SEQ ID NO: 174255 - RNA, 23 nt, Artificial Sequence
  Synthetic
auauacaaucaacuugagagaaa

SEQ ID NO: 174256 - RNA, 24 nt, Artificial Sequence
  Synthetic
uauauacaaucaacuugagagaaa

SEQ ID NO: 174257 - RNA, 18 nt, Artificial Sequence
  Synthetic
uuacuaauauuagagaaa

SEQ ID NO: 174258 - RNA, 19 nt, Artificial Sequence
  Synthetic
auuacuaauauuagagaaa

SEQ ID NO: 174259 - RNA, 20 nt, Artificial Sequence
  Synthetic
aauuacuaauauuagagaaa

SEQ ID NO: 174260 - RNA, 21 nt, Artificial Sequence
  Synthetic
aaauuacuaauauuagagaaa

SEQ ID NO: 174261 - RNA, 22 nt, Artificial Sequence
  Synthetic
caaauuacuaauauuagagaaa

SEQ ID NO: 174262 - RNA, 23 nt, Artificial Sequence
  Synthetic
ucaaauuacuaauauuagagaaa

SEQ ID NO: 174263 - RNA, 24 nt, Artificial Sequence
  Synthetic
gucaaauuacuaauauuagagaaa

SEQ ID NO: 174264 - RNA, 18 nt, Artificial Sequence
  Synthetic
cgcucaguguuagagaaa

SEQ ID NO: 174265 - RNA, 19 nt, Artificial Sequence
  Synthetic
acgcucaguguuagagaaa

SEQ ID NO: 174266 - RNA, 20 nt, Artificial Sequence
  Synthetic
uacgcucaguguuagagaaa

SEQ ID NO: 174267 - RNA, 21 nt, Artificial Sequence
  Synthetic
cuacgcucaguguuagagaaa

SEQ ID NO: 174268 - RNA, 22 nt, Artificial Sequence
  Synthetic
gcuacgcucaguguuagagaaa

SEQ ID NO: 174269 - RNA, 23 nt, Artificial Sequence
  Synthetic
ugcuacgcucaguguuagagaaa

SEQ ID NO: 174270 - RNA, 24 nt, Artificial Sequence
  Synthetic
uugcuacgcucaguguuagagaaa

SEQ ID NO: 174271 - RNA, 18 nt, Artificial Sequence
  Synthetic
agugcaguaaaggagaaa

SEQ ID NO: 174272 - RNA, 19 nt, Artificial Sequence
  Synthetic
cagugcaguaaaggagaaa

SEQ ID NO: 174273 - RNA, 20 nt, Artificial Sequence
  Synthetic
acagugcaguaaaggagaaa

SEQ ID NO: 174274 - RNA, 21 nt, Artificial Sequence
  Synthetic
gacagugcaguaaaggagaaa

SEQ ID NO: 174275 - RNA, 22 nt, Artificial Sequence
  Synthetic
agacagugcaguaaaggagaaa

SEQ ID NO: 174276 - RNA, 23 nt, Artificial Sequence
  Synthetic
aagacagugcaguaaaggagaaa

SEQ ID NO: 174277 - RNA, 24 nt, Artificial Sequence
  Synthetic
caagacagugcaguaaaggagaaa

SEQ ID NO: 174278 - RNA, 18 nt, Artificial Sequence
  Synthetic
cugagaaacaaggagaaa

SEQ ID NO: 174279 - RNA, 19 nt, Artificial Sequence
  Synthetic
ccugagaaacaaggagaaa

SEQ ID NO: 174280 - RNA, 20 nt, Artificial Sequence
  Synthetic
accugagaaacaaggagaaa

SEQ ID NO: 174281 - RNA, 21 nt, Artificial Sequence
  Synthetic
uaccugagaaacaaggagaaa

SEQ ID NO: 174282 - RNA, 22 nt, Artificial Sequence
  Synthetic
uuaccugagaaacaaggagaaa

SEQ ID NO: 174283 - RNA, 23 nt, Artificial Sequence
  Synthetic
uuuaccugagaaacaaggagaaa

SEQ ID NO: 174284 - RNA, 24 nt, Artificial Sequence
  Synthetic
cuuuaccugagaaacaaggagaaa

SEQ ID NO: 174285 - RNA, 18 nt, Artificial Sequence
  Synthetic
aagaaggagaaggagaaa

SEQ ID NO: 174286 - RNA, 19 nt, Artificial Sequence
  Synthetic
gaagaaggagaaggagaaa

SEQ ID NO: 174287 - RNA, 20 nt, Artificial Sequence
  Synthetic
agaagaaggagaaggagaaa

SEQ ID NO: 174288 - RNA, 21 nt, Artificial Sequence
  Synthetic
aagaagaaggagaaggagaaa

SEQ ID NO: 174289 - RNA, 22 nt, Artificial Sequence
  Synthetic
gaagaagaaggagaaggagaaa

SEQ ID NO: 174290 - RNA, 23 nt, Artificial Sequence
  Synthetic
agaagaagaaggagaaggagaaa

SEQ ID NO: 174291 - RNA, 24 nt, Artificial Sequence
  Synthetic
aagaagaagaaggagaaggagaaa

SEQ ID NO: 174292 - RNA, 18 nt, Artificial Sequence
  Synthetic
gguuguugagaggagaaa

SEQ ID NO: 174293 - RNA, 19 nt, Artificial Sequence
  Synthetic
ggguuguugagaggagaaa

SEQ ID NO: 174294 - RNA, 20 nt, Artificial Sequence
  Synthetic
aggguuguugagaggagaaa

SEQ ID NO: 174295 - RNA, 21 nt, Artificial Sequence
  Synthetic
gaggguuguugagaggagaaa

SEQ ID NO: 174296 - RNA, 22 nt, Artificial Sequence
  Synthetic
agaggguuguugagaggagaaa

SEQ ID NO: 174297 - RNA, 23 nt, Artificial Sequence
  Synthetic
uagaggguuguugagaggagaaa

SEQ ID NO: 174298 - RNA, 24 nt, Artificial Sequence
  Synthetic
cuagaggguuguugagaggagaaa

SEQ ID NO: 174299 - RNA, 18 nt, Artificial Sequence
  Synthetic
auauuaccguaggagaaa

SEQ ID NO: 174300 - RNA, 19 nt, Artificial Sequence
  Synthetic
aauauuaccguaggagaaa

SEQ ID NO: 174301 - RNA, 20 nt, Artificial Sequence
  Synthetic
gaauauuaccguaggagaaa

SEQ ID NO: 174302 - RNA, 21 nt, Artificial Sequence
  Synthetic
agaauauuaccguaggagaaa

SEQ ID NO: 174303 - RNA, 22 nt, Artificial Sequence
  Synthetic
cagaauauuaccguaggagaaa

SEQ ID NO: 174304 - RNA, 23 nt, Artificial Sequence
  Synthetic
gcagaauauuaccguaggagaaa

SEQ ID NO: 174305 - RNA, 24 nt, Artificial Sequence
  Synthetic
ggcagaauauuaccguaggagaaa

SEQ ID NO: 174306 - RNA, 18 nt, Artificial Sequence
  Synthetic
uaaugguauagggagaaa

SEQ ID NO: 174307 - RNA, 19 nt, Artificial Sequence
  Synthetic
uuaaugguauagggagaaa

SEQ ID NO: 174308 - RNA, 20 nt, Artificial Sequence
  Synthetic
auuaaugguauagggagaaa

SEQ ID NO: 174309 - RNA, 21 nt, Artificial Sequence
  Synthetic
cauuaaugguauagggagaaa

SEQ ID NO: 174310 - RNA, 22 nt, Artificial Sequence
  Synthetic
ucauuaaugguauagggagaaa

SEQ ID NO: 174311 - RNA, 23 nt, Artificial Sequence
  Synthetic
gucauuaaugguauagggagaaa

SEQ ID NO: 174312 - RNA, 24 nt, Artificial Sequence
  Synthetic
ugucauuaaugguauagggagaaa

SEQ ID NO: 174313 - RNA, 18 nt, Artificial Sequence
  Synthetic
ggagaggauggggagaaa

SEQ ID NO: 174314 - RNA, 19 nt, Artificial Sequence
  Synthetic
uggagaggauggggagaaa

SEQ ID NO: 174315 - RNA, 20 nt, Artificial Sequence
  Synthetic
cuggagaggauggggagaaa

SEQ ID NO: 174316 - RNA, 21 nt, Artificial Sequence
  Synthetic
gcuggagaggauggggagaaa

SEQ ID NO: 174317 - RNA, 22 nt, Artificial Sequence
  Synthetic
ugcuggagaggauggggagaaa

SEQ ID NO: 174318 - RNA, 23 nt, Artificial Sequence
  Synthetic
gugcuggagaggauggggagaaa

SEQ ID NO: 174319 - RNA, 24 nt, Artificial Sequence
  Synthetic
ggugcuggagaggauggggagaaa

SEQ ID NO: 174320 - RNA, 18 nt, Artificial Sequence
  Synthetic
ugcuuuaagugggagaaa

SEQ ID NO: 174321 - RNA, 19 nt, Artificial Sequence
  Synthetic
cugcuuuaagugggagaaa

SEQ ID NO: 174322 - RNA, 20 nt, Artificial Sequence
  Synthetic
acugcuuuaagugggagaaa

SEQ ID NO: 174323 - RNA, 21 nt, Artificial Sequence
  Synthetic
aacugcuuuaagugggagaaa

SEQ ID NO: 174324 - RNA, 22 nt, Artificial Sequence
  Synthetic
uaacugcuuuaagugggagaaa

SEQ ID NO: 174325 - RNA, 23 nt, Artificial Sequence
  Synthetic
uuaacugcuuuaagugggagaaa

SEQ ID NO: 174326 - RNA, 24 nt, Artificial Sequence
  Synthetic
auuaacugcuuuaagugggagaaa

SEQ ID NO: 174327 - RNA, 18 nt, Artificial Sequence
  Synthetic
acagcuuguugggagaaa

SEQ ID NO: 174328 - RNA, 19 nt, Artificial Sequence
  Synthetic
aacagcuuguugggagaaa

SEQ ID NO: 174329 - RNA, 20 nt, Artificial Sequence
  Synthetic
uaacagcuuguugggagaaa

SEQ ID NO: 174330 - RNA, 21 nt, Artificial Sequence
  Synthetic
auaacagcuuguugggagaaa

SEQ ID NO: 174331 - RNA, 22 nt, Artificial Sequence
  Synthetic
gauaacagcuuguugggagaaa

SEQ ID NO: 174332 - RNA, 23 nt, Artificial Sequence
  Synthetic
agauaacagcuuguugggagaaa

SEQ ID NO: 174333 - RNA, 24 nt, Artificial Sequence
  Synthetic
uagauaacagcuuguugggagaaa

SEQ ID NO: 174334 - RNA, 18 nt, Artificial Sequence
  Synthetic
aaauuacacauggagaaa

SEQ ID NO: 174335 - RNA, 19 nt, Artificial Sequence
  Synthetic
uaaauuacacauggagaaa

SEQ ID NO: 174336 - RNA, 20 nt, Artificial Sequence
  Synthetic
guaaauuacacauggagaaa

SEQ ID NO: 174337 - RNA, 21 nt, Artificial Sequence
  Synthetic
aguaaauuacacauggagaaa

SEQ ID NO: 174338 - RNA, 22 nt, Artificial Sequence
  Synthetic
gaguaaauuacacauggagaaa

SEQ ID NO: 174339 - RNA, 23 nt, Artificial Sequence
  Synthetic
ggaguaaauuacacauggagaaa

SEQ ID NO: 174340 - RNA, 24 nt, Artificial Sequence
  Synthetic
uggaguaaauuacacauggagaaa

SEQ ID NO: 174341 - RNA, 18 nt, Artificial Sequence
  Synthetic
gagggaagcauggagaaa

SEQ ID NO: 174342 - RNA, 19 nt, Artificial Sequence
  Synthetic
ggagggaagcauggagaaa

SEQ ID NO: 174343 - RNA, 20 nt, Artificial Sequence
  Synthetic
gggagggaagcauggagaaa

SEQ ID NO: 174344 - RNA, 21 nt, Artificial Sequence
  Synthetic
agggagggaagcauggagaaa

SEQ ID NO: 174345 - RNA, 22 nt, Artificial Sequence
  Synthetic
gagggagggaagcauggagaaa

SEQ ID NO: 174346 - RNA, 23 nt, Artificial Sequence
  Synthetic
agagggagggaagcauggagaaa

SEQ ID NO: 174347 - RNA, 24 nt, Artificial Sequence
  Synthetic
gagagggagggaagcauggagaaa

SEQ ID NO: 174348 - RNA, 18 nt, Artificial Sequence
  Synthetic
auuuccaagauggagaaa

SEQ ID NO: 174349 - RNA, 19 nt, Artificial Sequence
  Synthetic
uauuuccaagauggagaaa

SEQ ID NO: 174350 - RNA, 20 nt, Artificial Sequence
  Synthetic
uuauuuccaagauggagaaa

SEQ ID NO: 174351 - RNA, 21 nt, Artificial Sequence
  Synthetic
cuuauuuccaagauggagaaa

SEQ ID NO: 174352 - RNA, 22 nt, Artificial Sequence
  Synthetic
ucuuauuuccaagauggagaaa

SEQ ID NO: 174353 - RNA, 23 nt, Artificial Sequence
  Synthetic
uucuuauuuccaagauggagaaa

SEQ ID NO: 174354 - RNA, 24 nt, Artificial Sequence
  Synthetic
uuucuuauuuccaagauggagaaa

SEQ ID NO: 174355 - RNA, 18 nt, Artificial Sequence
  Synthetic
cauacucagauggagaaa

SEQ ID NO: 174356 - RNA, 19 nt, Artificial Sequence
  Synthetic
ccauacucagauggagaaa

SEQ ID NO: 174357 - RNA, 20 nt, Artificial Sequence
  Synthetic
cccauacucagauggagaaa

SEQ ID NO: 174358 - RNA, 21 nt, Artificial Sequence
  Synthetic
acccauacucagauggagaaa

SEQ ID NO: 174359 - RNA, 22 nt, Artificial Sequence
  Synthetic
uacccauacucagauggagaaa

SEQ ID NO: 174360 - RNA, 23 nt, Artificial Sequence
  Synthetic
auacccauacucagauggagaaa

SEQ ID NO: 174361 - RNA, 24 nt, Artificial Sequence
  Synthetic
uauacccauacucagauggagaaa

SEQ ID NO: 174362 - RNA, 18 nt, Artificial Sequence
  Synthetic
ggagaggauguggagaaa

SEQ ID NO: 174363 - RNA, 19 nt, Artificial Sequence
  Synthetic
uggagaggauguggagaaa

SEQ ID NO: 174364 - RNA, 20 nt, Artificial Sequence
  Synthetic
cuggagaggauguggagaaa

SEQ ID NO: 174365 - RNA, 21 nt, Artificial Sequence
  Synthetic
gcuggagaggauguggagaaa

SEQ ID NO: 174366 - RNA, 22 nt, Artificial Sequence
  Synthetic
ugcuggagaggauguggagaaa

SEQ ID NO: 174367 - RNA, 23 nt, Artificial Sequence
  Synthetic
augcuggagaggauguggagaaa

SEQ ID NO: 174368 - RNA, 24 nt, Artificial Sequence
  Synthetic
gaugcuggagaggauguggagaaa

SEQ ID NO: 174369 - RNA, 23 nt, Artificial Sequence
  Synthetic
gugcuggagaggauguggagaaa

SEQ ID NO: 174370 - RNA, 24 nt, Artificial Sequence
  Synthetic
ggugcuggagaggauguggagaaa

SEQ ID NO: 174371 - RNA, 18 nt, Artificial Sequence
  Synthetic
ggugaggauguggagaaa

SEQ ID NO: 174372 - RNA, 19 nt, Artificial Sequence
  Synthetic
uggugaggauguggagaaa

SEQ ID NO: 174373 - RNA, 20 nt, Artificial Sequence
  Synthetic
cuggugaggauguggagaaa

SEQ ID NO: 174374 - RNA, 21 nt, Artificial Sequence
  Synthetic
gcuggugaggauguggagaaa

SEQ ID NO: 174375 - RNA, 22 nt, Artificial Sequence
  Synthetic
ugcuggugaggauguggagaaa

SEQ ID NO: 174376 - RNA, 23 nt, Artificial Sequence
  Synthetic
gugcuggugaggauguggagaaa

SEQ ID NO: 174377 - RNA, 24 nt, Artificial Sequence
  Synthetic
ggugcuggugaggauguggagaaa

SEQ ID NO: 174378 - RNA, 18 nt, Artificial Sequence
  Synthetic
aacugaggguuggagaaa

SEQ ID NO: 174379 - RNA, 19 nt, Artificial Sequence
  Synthetic
aaacugaggguuggagaaa

SEQ ID NO: 174380 - RNA, 20 nt, Artificial Sequence
  Synthetic
gaaacugaggguuggagaaa

SEQ ID NO: 174381 - RNA, 21 nt, Artificial Sequence
  Synthetic
agaaacugaggguuggagaaa

SEQ ID NO: 174382 - RNA, 22 nt, Artificial Sequence
  Synthetic
gagaaacugaggguuggagaaa

SEQ ID NO: 174383 - RNA, 23 nt, Artificial Sequence
  Synthetic
ggagaaacugaggguuggagaaa

SEQ ID NO: 174384 - RNA, 24 nt, Artificial Sequence
  Synthetic
uggagaaacugaggguuggagaaa

SEQ ID NO: 174385 - RNA, 18 nt, Artificial Sequence
  Synthetic
auuuuuauguuggagaaa

SEQ ID NO: 174386 - RNA, 19 nt, Artificial Sequence
  Synthetic
uauuuuuauguuggagaaa

SEQ ID NO: 174387 - RNA, 20 nt, Artificial Sequence
  Synthetic
auauuuuuauguuggagaaa

SEQ ID NO: 174388 - RNA, 21 nt, Artificial Sequence
  Synthetic
aauauuuuuauguuggagaaa

SEQ ID NO: 174389 - RNA, 22 nt, Artificial Sequence
  Synthetic
gaauauuuuuauguuggagaaa

SEQ ID NO: 174390 - RNA, 23 nt, Artificial Sequence
  Synthetic
ugaauauuuuuauguuggagaaa

SEQ ID NO: 174391 - RNA, 24 nt, Artificial Sequence
  Synthetic
cugaauauuuuuauguuggagaaa

SEQ ID NO: 174392 - RNA, 18 nt, Artificial Sequence
  Synthetic
gcaacacuguuggagaaa

SEQ ID NO: 174393 - RNA, 19 nt, Artificial Sequence
  Synthetic
ugcaacacuguuggagaaa

SEQ ID NO: 174394 - RNA, 20 nt, Artificial Sequence
  Synthetic
augcaacacuguuggagaaa

SEQ ID NO: 174395 - RNA, 21 nt, Artificial Sequence
  Synthetic
caugcaacacuguuggagaaa

SEQ ID NO: 174396 - RNA, 22 nt, Artificial Sequence
  Synthetic
acaugcaacacuguuggagaaa

SEQ ID NO: 174397 - RNA, 23 nt, Artificial Sequence
  Synthetic
uacaugcaacacuguuggagaaa

SEQ ID NO: 174398 - RNA, 24 nt, Artificial Sequence
  Synthetic
uuacaugcaacacuguuggagaaa

SEQ ID NO: 174399 - RNA, 18 nt, Artificial Sequence
  Synthetic
augaagaaaaaugagaaa

SEQ ID NO: 174400 - RNA, 19 nt, Artificial Sequence
  Synthetic
caugaagaaaaaugagaaa

SEQ ID NO: 174401 - RNA, 20 nt, Artificial Sequence
  Synthetic
acaugaagaaaaaugagaaa

SEQ ID NO: 174402 - RNA, 21 nt, Artificial Sequence
  Synthetic
uacaugaagaaaaaugagaaa

SEQ ID NO: 174403 - RNA, 22 nt, Artificial Sequence
  Synthetic
cuacaugaagaaaaaugagaaa

SEQ ID NO: 174404 - RNA, 23 nt, Artificial Sequence
  Synthetic
gcuacaugaagaaaaaugagaaa

SEQ ID NO: 174405 - RNA, 24 nt, Artificial Sequence
  Synthetic
ugcuacaugaagaaaaaugagaaa

SEQ ID NO: 174406 - RNA, 18 nt, Artificial Sequence
  Synthetic
gggcagggcaaugagaaa

SEQ ID NO: 174407 - RNA, 19 nt, Artificial Sequence
  Synthetic
ggggcagggcaaugagaaa

SEQ ID NO: 174408 - RNA, 20 nt, Artificial Sequence
  Synthetic
gggggcagggcaaugagaaa

SEQ ID NO: 174409 - RNA, 21 nt, Artificial Sequence
  Synthetic
agggggcagggcaaugagaaa

SEQ ID NO: 174410 - RNA, 22 nt, Artificial Sequence
  Synthetic
cagggggcagggcaaugagaaa

SEQ ID NO: 174411 - RNA, 23 nt, Artificial Sequence
  Synthetic
ccagggggcagggcaaugagaaa

SEQ ID NO: 174412 - RNA, 24 nt, Artificial Sequence
  Synthetic
uccagggggcagggcaaugagaaa

SEQ ID NO: 174413 - RNA, 18 nt, Artificial Sequence
  Synthetic
gauauugcagaugagaaa

SEQ ID NO: 174414 - RNA, 19 nt, Artificial Sequence
  Synthetic
agauauugcagaugagaaa

SEQ ID NO: 174415 - RNA, 20 nt, Artificial Sequence
  Synthetic
uagauauugcagaugagaaa

SEQ ID NO: 174416 - RNA, 21 nt, Artificial Sequence
  Synthetic
auagauauugcagaugagaaa

SEQ ID NO: 174417 - RNA, 22 nt, Artificial Sequence
  Synthetic
aauagauauugcagaugagaaa

SEQ ID NO: 174418 - RNA, 23 nt, Artificial Sequence
  Synthetic
caauagauauugcagaugagaaa

SEQ ID NO: 174419 - RNA, 24 nt, Artificial Sequence
  Synthetic
gcaauagauauugcagaugagaaa

SEQ ID NO: 174420 - RNA, 18 nt, Artificial Sequence
  Synthetic
uuagagagcgcugagaaa

SEQ ID NO: 174421 - RNA, 19 nt, Artificial Sequence
  Synthetic
guuagagagcgcugagaaa

SEQ ID NO: 174422 - RNA, 20 nt, Artificial Sequence
  Synthetic
uguuagagagcgcugagaaa

SEQ ID NO: 174423 - RNA, 21 nt, Artificial Sequence
  Synthetic
cuguuagagagcgcugagaaa

SEQ ID NO: 174424 - RNA, 22 nt, Artificial Sequence
  Synthetic
ucuguuagagagcgcugagaaa

SEQ ID NO: 174425 - RNA, 23 nt, Artificial Sequence
  Synthetic
gucuguuagagagcgcugagaaa

SEQ ID NO: 174426 - RNA, 24 nt, Artificial Sequence
  Synthetic
ugucuguuagagagcgcugagaaa

SEQ ID NO: 174427 - RNA, 18 nt, Artificial Sequence
  Synthetic
aaggauacaucugagaaa

SEQ ID NO: 174428 - RNA, 19 nt, Artificial Sequence
  Synthetic
caaggauacaucugagaaa

SEQ ID NO: 174429 - RNA, 20 nt, Artificial Sequence
  Synthetic
ccaaggauacaucugagaaa

SEQ ID NO: 174430 - RNA, 21 nt, Artificial Sequence
  Synthetic
uccaaggauacaucugagaaa

SEQ ID NO: 174431 - RNA, 22 nt, Artificial Sequence
  Synthetic
guccaaggauacaucugagaaa

SEQ ID NO: 174432 - RNA, 23 nt, Artificial Sequence
  Synthetic
uguccaaggauacaucugagaaa

SEQ ID NO: 174433 - RNA, 24 nt, Artificial Sequence
  Synthetic
uuguccaaggauacaucugagaaa

SEQ ID NO: 174434 - RNA, 18 nt, Artificial Sequence
  Synthetic
cuuaggaaaugugagaaa

SEQ ID NO: 174435 - RNA, 19 nt, Artificial Sequence
  Synthetic
gcuuaggaaaugugagaaa

SEQ ID NO: 174436 - RNA, 20 nt, Artificial Sequence
  Synthetic
ugcuuaggaaaugugagaaa

SEQ ID NO: 174437 - RNA, 21 nt, Artificial Sequence
  Synthetic
cugcuuaggaaaugugagaaa

SEQ ID NO: 174438 - RNA, 22 nt, Artificial Sequence
  Synthetic
acugcuuaggaaaugugagaaa

SEQ ID NO: 174439 - RNA, 23 nt, Artificial Sequence
  Synthetic
uacugcuuaggaaaugugagaaa

SEQ ID NO: 174440 - RNA, 24 nt, Artificial Sequence
  Synthetic
cuacugcuuaggaaaugugagaaa

SEQ ID NO: 174441 - RNA, 18 nt, Artificial Sequence
  Synthetic
ugauugagaauugagaaa

SEQ ID NO: 174442 - RNA, 19 nt, Artificial Sequence
  Synthetic
augauugagaauugagaaa

SEQ ID NO: 174443 - RNA, 20 nt, Artificial Sequence
  Synthetic
caugauugagaauugagaaa

SEQ ID NO: 174444 - RNA, 21 nt, Artificial Sequence
  Synthetic
gcaugauugagaauugagaaa

SEQ ID NO: 174445 - RNA, 22 nt, Artificial Sequence
  Synthetic
ggcaugauugagaauugagaaa

SEQ ID NO: 174446 - RNA, 23 nt, Artificial Sequence
  Synthetic
aggcaugauugagaauugagaaa

SEQ ID NO: 174447 - RNA, 24 nt, Artificial Sequence
  Synthetic
caggcaugauugagaauugagaaa

SEQ ID NO: 174448 - RNA, 18 nt, Artificial Sequence
  Synthetic
uucuuacuccuugagaaa

SEQ ID NO: 174449 - RNA, 19 nt, Artificial Sequence
  Synthetic
uuucuuacuccuugagaaa

SEQ ID NO: 174450 - RNA, 20 nt, Artificial Sequence
  Synthetic
uuuucuuacuccuugagaaa

SEQ ID NO: 174451 - RNA, 21 nt, Artificial Sequence
  Synthetic
uuuuucuuacuccuugagaaa

SEQ ID NO: 174452 - RNA, 22 nt, Artificial Sequence
  Synthetic
uuuuuucuuacuccuugagaaa

SEQ ID NO: 174453 - RNA, 23 nt, Artificial Sequence
  Synthetic
uuuuuuucuuacuccuugagaaa

SEQ ID NO: 174454 - RNA, 24 nt, Artificial Sequence
  Synthetic
auuuuuuucuuacuccuugagaaa

SEQ ID NO: 174455 - RNA, 18 nt, Artificial Sequence
  Synthetic
ccagaaaggcuugagaaa

SEQ ID NO: 174456 - RNA, 19 nt, Artificial Sequence
  Synthetic
accagaaaggcuugagaaa

SEQ ID NO: 174457 - RNA, 20 nt, Artificial Sequence
  Synthetic
gaccagaaaggcuugagaaa

SEQ ID NO: 174458 - RNA, 21 nt, Artificial Sequence
  Synthetic
ggaccagaaaggcuugagaaa

SEQ ID NO: 174459 - RNA, 22 nt, Artificial Sequence
  Synthetic
aggaccagaaaggcuugagaaa

SEQ ID NO: 174460 - RNA, 23 nt, Artificial Sequence
  Synthetic
uaggaccagaaaggcuugagaaa

SEQ ID NO: 174461 - RNA, 24 nt, Artificial Sequence
  Synthetic
auaggaccagaaaggcuugagaaa

SEQ ID NO: 174462 - RNA, 18 nt, Artificial Sequence
  Synthetic
uugcagugccaauagaaa

SEQ ID NO: 174463 - RNA, 19 nt, Artificial Sequence
  Synthetic
uuugcagugccaauagaaa

SEQ ID NO: 174464 - RNA, 20 nt, Artificial Sequence
  Synthetic
guuugcagugccaauagaaa

SEQ ID NO: 174465 - RNA, 21 nt, Artificial Sequence
  Synthetic
gguuugcagugccaauagaaa

SEQ ID NO: 174466 - RNA, 22 nt, Artificial Sequence
  Synthetic
agguuugcagugccaauagaaa

SEQ ID NO: 174467 - RNA, 23 nt, Artificial Sequence
  Synthetic
gagguuugcagugccaauagaaa

SEQ ID NO: 174468 - RNA, 24 nt, Artificial Sequence
  Synthetic
agagguuugcagugccaauagaaa

SEQ ID NO: 174469 - RNA, 18 nt, Artificial Sequence
  Synthetic
uaauugcagcaauagaaa

SEQ ID NO: 174470 - RNA, 19 nt, Artificial Sequence
  Synthetic
auaauugcagcaauagaaa

SEQ ID NO: 174471 - RNA, 20 nt, Artificial Sequence
  Synthetic
gauaauugcagcaauagaaa

SEQ ID NO: 174472 - RNA, 21 nt, Artificial Sequence
  Synthetic
ggauaauugcagcaauagaaa

SEQ ID NO: 174473 - RNA, 22 nt, Artificial Sequence
  Synthetic
aggauaauugcagcaauagaaa

SEQ ID NO: 174474 - RNA, 23 nt, Artificial Sequence
  Synthetic
gaggauaauugcagcaauagaaa

SEQ ID NO: 174475 - RNA, 24 nt, Artificial Sequence
  Synthetic
ugaggauaauugcagcaauagaaa

SEQ ID NO: 174476 - RNA, 18 nt, Artificial Sequence
  Synthetic
uauuccaaucaauagaaa

SEQ ID NO: 174477 - RNA, 19 nt, Artificial Sequence
  Synthetic
cuauuccaaucaauagaaa

SEQ ID NO: 174478 - RNA, 20 nt, Artificial Sequence
  Synthetic
acuauuccaaucaauagaaa

SEQ ID NO: 174479 - RNA, 21 nt, Artificial Sequence
  Synthetic
aacuauuccaaucaauagaaa

SEQ ID NO: 174480 - RNA, 22 nt, Artificial Sequence
  Synthetic
aaacuauuccaaucaauagaaa

SEQ ID NO: 174481 - RNA, 23 nt, Artificial Sequence
  Synthetic
gaaacuauuccaaucaauagaaa

SEQ ID NO: 174482 - RNA, 24 nt, Artificial Sequence
  Synthetic
ugaaacuauuccaaucaauagaaa

SEQ ID NO: 174483 - RNA, 18 nt, Artificial Sequence
  Synthetic
uaaaaauauuaauagaaa

SEQ ID NO: 174484 - RNA, 19 nt, Artificial Sequence
  Synthetic
uuaaaaauauuaauagaaa

SEQ ID NO: 174485 - RNA, 20 nt, Artificial Sequence
  Synthetic
cuuaaaaauauuaauagaaa

SEQ ID NO: 174486 - RNA, 21 nt, Artificial Sequence
  Synthetic
ccuuaaaaauauuaauagaaa

SEQ ID NO: 174487 - RNA, 22 nt, Artificial Sequence
  Synthetic
accuuaaaaauauuaauagaaa

SEQ ID NO: 174488 - RNA, 23 nt, Artificial Sequence
  Synthetic
gaccuuaaaaauauuaauagaaa

SEQ ID NO: 174489 - RNA, 24 nt, Artificial Sequence
  Synthetic
ugaccuuaaaaauauuaauagaaa

SEQ ID NO: 174490 - RNA, 18 nt, Artificial Sequence
  Synthetic
gcugaguauacauagaaa

SEQ ID NO: 174491 - RNA, 19 nt, Artificial Sequence
  Synthetic
agcugaguauacauagaaa

SEQ ID NO: 174492 - RNA, 20 nt, Artificial Sequence
  Synthetic
cagcugaguauacauagaaa

SEQ ID NO: 174493 - RNA, 21 nt, Artificial Sequence
  Synthetic
ccagcugaguauacauagaaa

SEQ ID NO: 174494 - RNA, 22 nt, Artificial Sequence
  Synthetic
uccagcugaguauacauagaaa

SEQ ID NO: 174495 - RNA, 23 nt, Artificial Sequence
  Synthetic
auccagcugaguauacauagaaa

SEQ ID NO: 174496 - RNA, 24 nt, Artificial Sequence
  Synthetic
uauccagcugaguauacauagaaa

SEQ ID NO: 174497 - RNA, 18 nt, Artificial Sequence
  Synthetic
uauauguauacauagaaa

SEQ ID NO: 174498 - RNA, 19 nt, Artificial Sequence
  Synthetic
auauauguauacauagaaa

SEQ ID NO: 174499 - RNA, 20 nt, Artificial Sequence
  Synthetic
cauauauguauacauagaaa

SEQ ID NO: 174500 - RNA, 21 nt, Artificial Sequence
  Synthetic
acauauauguauacauagaaa

SEQ ID NO: 174501 - RNA, 22 nt, Artificial Sequence
  Synthetic
aacauauauguauacauagaaa

SEQ ID NO: 174502 - RNA, 23 nt, Artificial Sequence
  Synthetic
aaacauauauguauacauagaaa

SEQ ID NO: 174503 - RNA, 24 nt, Artificial Sequence
  Synthetic
gaaacauauauguauacauagaaa

SEQ ID NO: 174504 - RNA, 18 nt, Artificial Sequence
  Synthetic
caacugcacagauagaaa

SEQ ID NO: 174505 - RNA, 19 nt, Artificial Sequence
  Synthetic
acaacugcacagauagaaa

SEQ ID NO: 174506 - RNA, 20 nt, Artificial Sequence
  Synthetic
cacaacugcacagauagaaa

SEQ ID NO: 174507 - RNA, 21 nt, Artificial Sequence
  Synthetic
ccacaacugcacagauagaaa

SEQ ID NO: 174508 - RNA, 22 nt, Artificial Sequence
  Synthetic
cccacaacugcacagauagaaa

SEQ ID NO: 174509 - RNA, 23 nt, Artificial Sequence
  Synthetic
ucccacaacugcacagauagaaa

SEQ ID NO: 174510 - RNA, 24 nt, Artificial Sequence
  Synthetic
uucccacaacugcacagauagaaa

SEQ ID NO: 174511 - RNA, 18 nt, Artificial Sequence
  Synthetic
aguauuuauagauagaaa

SEQ ID NO: 174512 - RNA, 19 nt, Artificial Sequence
  Synthetic
caguauuuauagauagaaa

SEQ ID NO: 174513 - RNA, 20 nt, Artificial Sequence
  Synthetic
gcaguauuuauagauagaaa

SEQ ID NO: 174514 - RNA, 21 nt, Artificial Sequence
  Synthetic
ggcaguauuuauagauagaaa

SEQ ID NO: 174515 - RNA, 22 nt, Artificial Sequence
  Synthetic
aggcaguauuuauagauagaaa

SEQ ID NO: 174516 - RNA, 23 nt, Artificial Sequence
  Synthetic
caggcaguauuuauagauagaaa

SEQ ID NO: 174517 - RNA, 24 nt, Artificial Sequence
  Synthetic
gcaggcaguauuuauagauagaaa

SEQ ID NO: 174518 - RNA, 18 nt, Artificial Sequence
  Synthetic
uauuuuuguguauagaaa

SEQ ID NO: 174519 - RNA, 19 nt, Artificial Sequence
  Synthetic
auauuuuuguguauagaaa

SEQ ID NO: 174520 - RNA, 20 nt, Artificial Sequence
  Synthetic
uauauuuuuguguauagaaa

SEQ ID NO: 174521 - RNA, 21 nt, Artificial Sequence
  Synthetic
guauauuuuuguguauagaaa

SEQ ID NO: 174522 - RNA, 22 nt, Artificial Sequence
  Synthetic
gguauauuuuuguguauagaaa

SEQ ID NO: 174523 - RNA, 23 nt, Artificial Sequence
  Synthetic
ggguauauuuuuguguauagaaa

SEQ ID NO: 174524 - RNA, 24 nt, Artificial Sequence
  Synthetic
aggguauauuuuuguguauagaaa

SEQ ID NO: 174525 - RNA, 18 nt, Artificial Sequence
  Synthetic
ggggcucgcuuauagaaa

SEQ ID NO: 174526 - RNA, 19 nt, Artificial Sequence
  Synthetic
gggggcucgcuuauagaaa

SEQ ID NO: 174527 - RNA, 20 nt, Artificial Sequence
  Synthetic
agggggcucgcuuauagaaa

SEQ ID NO: 174528 - RNA, 21 nt, Artificial Sequence
  Synthetic
gagggggcucgcuuauagaaa

SEQ ID NO: 174529 - RNA, 22 nt, Artificial Sequence
  Synthetic
ggagggggcucgcuuauagaaa

SEQ ID NO: 174530 - RNA, 23 nt, Artificial Sequence
  Synthetic
uggagggggcucgcuuauagaaa

SEQ ID NO: 174531 - RNA, 24 nt, Artificial Sequence
  Synthetic
guggagggggcucgcuuauagaaa

SEQ ID NO: 174532 - RNA, 18 nt, Artificial Sequence
  Synthetic
uuaaaaguuuuauagaaa

SEQ ID NO: 174533 - RNA, 19 nt, Artificial Sequence
  Synthetic
uuuaaaaguuuuauagaaa

SEQ ID NO: 174534 - RNA, 20 nt, Artificial Sequence
  Synthetic
uuuuaaaaguuuuauagaaa

SEQ ID NO: 174535 - RNA, 21 nt, Artificial Sequence
  Synthetic
auuuuaaaaguuuuauagaaa

SEQ ID NO: 174536 - RNA, 22 nt, Artificial Sequence
  Synthetic
uauuuuaaaaguuuuauagaaa

SEQ ID NO: 174537 - RNA, 23 nt, Artificial Sequence
  Synthetic
guauuuuaaaaguuuuauagaaa

SEQ ID NO: 174538 - RNA, 24 nt, Artificial Sequence
  Synthetic
uguauuuuaaaaguuuuauagaaa

SEQ ID NO: 174539 - RNA, 18 nt, Artificial Sequence
  Synthetic
gccauaagaaacuagaaa

SEQ ID NO: 174540 - RNA, 19 nt, Artificial Sequence
  Synthetic
cgccauaagaaacuagaaa

SEQ ID NO: 174541 - RNA, 20 nt, Artificial Sequence
  Synthetic
ucgccauaagaaacuagaaa

SEQ ID NO: 174542 - RNA, 21 nt, Artificial Sequence
  Synthetic
uucgccauaagaaacuagaaa

SEQ ID NO: 174543 - RNA, 22 nt, Artificial Sequence
  Synthetic
uuucgccauaagaaacuagaaa

SEQ ID NO: 174544 - RNA, 23 nt, Artificial Sequence
  Synthetic
cuuucgccauaagaaacuagaaa

SEQ ID NO: 174545 - RNA, 24 nt, Artificial Sequence
  Synthetic
gcuuucgccauaagaaacuagaaa

SEQ ID NO: 174546 - RNA, 18 nt, Artificial Sequence
  Synthetic
accuuaagaaacuagaaa

SEQ ID NO: 174547 - RNA, 19 nt, Artificial Sequence
  Synthetic
uaccuuaagaaacuagaaa

SEQ ID NO: 174548 - RNA, 20 nt, Artificial Sequence
  Synthetic
cuaccuuaagaaacuagaaa

SEQ ID NO: 174549 - RNA, 21 nt, Artificial Sequence
  Synthetic
ucuaccuuaagaaacuagaaa

SEQ ID NO: 174550 - RNA, 22 nt, Artificial Sequence
  Synthetic
uucuaccuuaagaaacuagaaa

SEQ ID NO: 174551 - RNA, 23 nt, Artificial Sequence
  Synthetic
cuucuaccuuaagaaacuagaaa

SEQ ID NO: 174552 - RNA, 24 nt, Artificial Sequence
  Synthetic
gcuucuaccuuaagaaacuagaaa

SEQ ID NO: 174553 - RNA, 18 nt, Artificial Sequence
  Synthetic
guacuccuuuccuagaaa

SEQ ID NO: 174554 - RNA, 19 nt, Artificial Sequence
  Synthetic
aguacuccuuuccuagaaa

SEQ ID NO: 174555 - RNA, 20 nt, Artificial Sequence
  Synthetic
caguacuccuuuccuagaaa

SEQ ID NO: 174556 - RNA, 21 nt, Artificial Sequence
  Synthetic
ccaguacuccuuuccuagaaa

SEQ ID NO: 174557 - RNA, 22 nt, Artificial Sequence
  Synthetic
cccaguacuccuuuccuagaaa

SEQ ID NO: 174558 - RNA, 23 nt, Artificial Sequence
  Synthetic
ccccaguacuccuuuccuagaaa

SEQ ID NO: 174559 - RNA, 24 nt, Artificial Sequence
  Synthetic
accccaguacuccuuuccuagaaa

SEQ ID NO: 174560 - RNA, 18 nt, Artificial Sequence
  Synthetic
agugauagguucuagaaa

SEQ ID NO: 174561 - RNA, 19 nt, Artificial Sequence
  Synthetic
cagugauagguucuagaaa

SEQ ID NO: 174562 - RNA, 20 nt, Artificial Sequence
  Synthetic
acagugauagguucuagaaa

SEQ ID NO: 174563 - RNA, 21 nt, Artificial Sequence
  Synthetic
gacagugauagguucuagaaa

SEQ ID NO: 174564 - RNA, 22 nt, Artificial Sequence
  Synthetic
agacagugauagguucuagaaa

SEQ ID NO: 174565 - RNA, 23 nt, Artificial Sequence
  Synthetic
uagacagugauagguucuagaaa

SEQ ID NO: 174566 - RNA, 24 nt, Artificial Sequence
  Synthetic
guagacagugauagguucuagaaa

SEQ ID NO: 174567 - RNA, 18 nt, Artificial Sequence
  Synthetic
ucuuuuuguuucuagaaa

SEQ ID NO: 174568 - RNA, 19 nt, Artificial Sequence
  Synthetic
aucuuuuuguuucuagaaa

SEQ ID NO: 174569 - RNA, 20 nt, Artificial Sequence
  Synthetic
uaucuuuuuguuucuagaaa

SEQ ID NO: 174570 - RNA, 21 nt, Artificial Sequence
  Synthetic
auaucuuuuuguuucuagaaa

SEQ ID NO: 174571 - RNA, 22 nt, Artificial Sequence
  Synthetic
cauaucuuuuuguuucuagaaa

SEQ ID NO: 174572 - RNA, 23 nt, Artificial Sequence
  Synthetic
acauaucuuuuuguuucuagaaa

SEQ ID NO: 174573 - RNA, 24 nt, Artificial Sequence
  Synthetic
cacauaucuuuuuguuucuagaaa

SEQ ID NO: 174574 - RNA, 18 nt, Artificial Sequence
  Synthetic
agauuuuggaaguagaaa

SEQ ID NO: 174575 - RNA, 19 nt, Artificial Sequence
  Synthetic
uagauuuuggaaguagaaa

SEQ ID NO: 174576 - RNA, 20 nt, Artificial Sequence
  Synthetic
cuagauuuuggaaguagaaa

SEQ ID NO: 174577 - RNA, 21 nt, Artificial Sequence
  Synthetic
acuagauuuuggaaguagaaa

SEQ ID NO: 174578 - RNA, 22 nt, Artificial Sequence
  Synthetic
aacuagauuuuggaaguagaaa

SEQ ID NO: 174579 - RNA, 23 nt, Artificial Sequence
  Synthetic
uaacuagauuuuggaaguagaaa

SEQ ID NO: 174580 - RNA, 24 nt, Artificial Sequence
  Synthetic
auaacuagauuuuggaaguagaaa

SEQ ID NO: 174581 - RNA, 18 nt, Artificial Sequence
  Synthetic
agacaguugcaguagaaa

SEQ ID NO: 174582 - RNA, 19 nt, Artificial Sequence
  Synthetic
uagacaguugcaguagaaa

SEQ ID NO: 174583 - RNA, 20 nt, Artificial Sequence
  Synthetic
cuagacaguugcaguagaaa

SEQ ID NO: 174584 - RNA, 21 nt, Artificial Sequence
  Synthetic
ucuagacaguugcaguagaaa

SEQ ID NO: 174585 - RNA, 22 nt, Artificial Sequence
  Synthetic
aucuagacaguugcaguagaaa

SEQ ID NO: 174586 - RNA, 23 nt, Artificial Sequence
  Synthetic
caucuagacaguugcaguagaaa

SEQ ID NO: 174587 - RNA, 24 nt, Artificial Sequence
  Synthetic
acaucuagacaguugcaguagaaa

SEQ ID NO: 174588 - RNA, 18 nt, Artificial Sequence
  Synthetic
ugauuugcagaguagaaa

SEQ ID NO: 174589 - RNA, 19 nt, Artificial Sequence
  Synthetic
augauuugcagaguagaaa

SEQ ID NO: 174590 - RNA, 20 nt, Artificial Sequence
  Synthetic
aaugauuugcagaguagaaa

SEQ ID NO: 174591 - RNA, 21 nt, Artificial Sequence
  Synthetic
caaugauuugcagaguagaaa

SEQ ID NO: 174592 - RNA, 22 nt, Artificial Sequence
  Synthetic
gcaaugauuugcagaguagaaa

SEQ ID NO: 174593 - RNA, 23 nt, Artificial Sequence
  Synthetic
ggcaaugauuugcagaguagaaa

SEQ ID NO: 174594 - RNA, 24 nt, Artificial Sequence
  Synthetic
aggcaaugauuugcagaguagaaa

SEQ ID NO: 174595 - RNA, 18 nt, Artificial Sequence
  Synthetic
uaaaccaacagguagaaa

SEQ ID NO: 174596 - RNA, 19 nt, Artificial Sequence
  Synthetic
auaaaccaacagguagaaa

SEQ ID NO: 174597 - RNA, 20 nt, Artificial Sequence
  Synthetic
gauaaaccaacagguagaaa

SEQ ID NO: 174598 - RNA, 21 nt, Artificial Sequence
  Synthetic
ugauaaaccaacagguagaaa

SEQ ID NO: 174599 - RNA, 22 nt, Artificial Sequence
  Synthetic
cugauaaaccaacagguagaaa

SEQ ID NO: 174600 - RNA, 23 nt, Artificial Sequence
  Synthetic
acugauaaaccaacagguagaaa

SEQ ID NO: 174601 - RNA, 24 nt, Artificial Sequence
  Synthetic
uacugauaaaccaacagguagaaa

SEQ ID NO: 174602 - RNA, 18 nt, Artificial Sequence
  Synthetic
guguacccgagguagaaa

SEQ ID NO: 174603 - RNA, 19 nt, Artificial Sequence
  Synthetic
aguguacccgagguagaaa

SEQ ID NO: 174604 - RNA, 20 nt, Artificial Sequence
  Synthetic
caguguacccgagguagaaa

SEQ ID NO: 174605 - RNA, 21 nt, Artificial Sequence
  Synthetic
ucaguguacccgagguagaaa

SEQ ID NO: 174606 - RNA, 22 nt, Artificial Sequence
  Synthetic
uucaguguacccgagguagaaa

SEQ ID NO: 174607 - RNA, 23 nt, Artificial Sequence
  Synthetic
uuucaguguacccgagguagaaa

SEQ ID NO: 174608 - RNA, 24 nt, Artificial Sequence
  Synthetic
cuuucaguguacccgagguagaaa

SEQ ID NO: 174609 - RNA, 18 nt, Artificial Sequence
  Synthetic
aaauuacauggguagaaa

SEQ ID NO: 174610 - RNA, 19 nt, Artificial Sequence
  Synthetic
aaaauuacauggguagaaa

SEQ ID NO: 174611 - RNA, 20 nt, Artificial Sequence
  Synthetic
uaaaauuacauggguagaaa

SEQ ID NO: 174612 - RNA, 21 nt, Artificial Sequence
  Synthetic
cuaaaauuacauggguagaaa

SEQ ID NO: 174613 - RNA, 22 nt, Artificial Sequence
  Synthetic
gcuaaaauuacauggguagaaa

SEQ ID NO: 174614 - RNA, 23 nt, Artificial Sequence
  Synthetic
ugcuaaaauuacauggguagaaa

SEQ ID NO: 174615 - RNA, 24 nt, Artificial Sequence
  Synthetic
augcuaaaauuacauggguagaaa

SEQ ID NO: 174616 - RNA, 18 nt, Artificial Sequence
  Synthetic
aaugaggguugguagaaa

SEQ ID NO: 174617 - RNA, 19 nt, Artificial Sequence
  Synthetic
aaaugaggguugguagaaa

SEQ ID NO: 174618 - RNA, 20 nt, Artificial Sequence
  Synthetic
uaaaugaggguugguagaaa

SEQ ID NO: 174619 - RNA, 21 nt, Artificial Sequence
  Synthetic
auaaaugaggguugguagaaa

SEQ ID NO: 174620 - RNA, 22 nt, Artificial Sequence
  Synthetic
gauaaaugaggguugguagaaa

SEQ ID NO: 174621 - RNA, 23 nt, Artificial Sequence
  Synthetic
ggauaaaugaggguugguagaaa

SEQ ID NO: 174622 - RNA, 24 nt, Artificial Sequence
  Synthetic
gggauaaaugaggguugguagaaa

SEQ ID NO: 174623 - RNA, 18 nt, Artificial Sequence
  Synthetic
uuugcuugaauguagaaa

SEQ ID NO: 174624 - RNA, 19 nt, Artificial Sequence
  Synthetic
uuuugcuugaauguagaaa

SEQ ID NO: 174625 - RNA, 20 nt, Artificial Sequence
  Synthetic
auuuugcuugaauguagaaa

SEQ ID NO: 174626 - RNA, 21 nt, Artificial Sequence
  Synthetic
aauuuugcuugaauguagaaa

SEQ ID NO: 174627 - RNA, 22 nt, Artificial Sequence
  Synthetic
uaauuuugcuugaauguagaaa

SEQ ID NO: 174628 - RNA, 23 nt, Artificial Sequence
  Synthetic
auaauuuugcuugaauguagaaa

SEQ ID NO: 174629 - RNA, 24 nt, Artificial Sequence
  Synthetic
aauaauuuugcuugaauguagaaa

SEQ ID NO: 174630 - RNA, 18 nt, Artificial Sequence
  Synthetic
ugugucacacuguagaaa

SEQ ID NO: 174631 - RNA, 19 nt, Artificial Sequence
  Synthetic
augugucacacuguagaaa

SEQ ID NO: 174632 - RNA, 20 nt, Artificial Sequence
  Synthetic
gaugugucacacuguagaaa

SEQ ID NO: 174633 - RNA, 21 nt, Artificial Sequence
  Synthetic
agaugugucacacuguagaaa

SEQ ID NO: 174634 - RNA, 22 nt, Artificial Sequence
  Synthetic
gagaugugucacacuguagaaa

SEQ ID NO: 174635 - RNA, 23 nt, Artificial Sequence
  Synthetic
ugagaugugucacacuguagaaa

SEQ ID NO: 174636 - RNA, 24 nt, Artificial Sequence
  Synthetic
augagaugugucacacuguagaaa

SEQ ID NO: 174637 - RNA, 18 nt, Artificial Sequence
  Synthetic
cugccuaggguguagaaa

SEQ ID NO: 174638 - RNA, 19 nt, Artificial Sequence
  Synthetic
gcugccuaggguguagaaa

SEQ ID NO: 174639 - RNA, 20 nt, Artificial Sequence
  Synthetic
ggcugccuaggguguagaaa

SEQ ID NO: 174640 - RNA, 21 nt, Artificial Sequence
  Synthetic
aggcugccuaggguguagaaa

SEQ ID NO: 174641 - RNA, 22 nt, Artificial Sequence
  Synthetic
aaggcugccuaggguguagaaa

SEQ ID NO: 174642 - RNA, 23 nt, Artificial Sequence
  Synthetic
aaaggcugccuaggguguagaaa

SEQ ID NO: 174643 - RNA, 24 nt, Artificial Sequence
  Synthetic
aaaaggcugccuaggguguagaaa

SEQ ID NO: 174644 - RNA, 18 nt, Artificial Sequence
  Synthetic
agaauuuuuuuguagaaa

SEQ ID NO: 174645 - RNA, 19 nt, Artificial Sequence
  Synthetic
uagaauuuuuuuguagaaa

SEQ ID NO: 174646 - RNA, 20 nt, Artificial Sequence
  Synthetic
uuagaauuuuuuuguagaaa

SEQ ID NO: 174647 - RNA, 21 nt, Artificial Sequence
  Synthetic
auuagaauuuuuuuguagaaa

SEQ ID NO: 174648 - RNA, 22 nt, Artificial Sequence
  Synthetic
aauuagaauuuuuuuguagaaa

SEQ ID NO: 174649 - RNA, 23 nt, Artificial Sequence
  Synthetic
caauuagaauuuuuuuguagaaa

SEQ ID NO: 174650 - RNA, 24 nt, Artificial Sequence
  Synthetic
ucaauuagaauuuuuuuguagaaa

SEQ ID NO: 174651 - RNA, 18 nt, Artificial Sequence
  Synthetic
uacuagccauauuagaaa

SEQ ID NO: 174652 - RNA, 19 nt, Artificial Sequence
  Synthetic
cuacuagccauauuagaaa

SEQ ID NO: 174653 - RNA, 20 nt, Artificial Sequence
  Synthetic
ucuacuagccauauuagaaa

SEQ ID NO: 174654 - RNA, 21 nt, Artificial Sequence
  Synthetic
uucuacuagccauauuagaaa

SEQ ID NO: 174655 - RNA, 22 nt, Artificial Sequence
  Synthetic
uuucuacuagccauauuagaaa

SEQ ID NO: 174656 - RNA, 23 nt, Artificial Sequence
  Synthetic
uuuucuacuagccauauuagaaa

SEQ ID NO: 174657 - RNA, 24 nt, Artificial Sequence
  Synthetic
auuuucuacuagccauauuagaaa

SEQ ID NO: 174658 - RNA, 18 nt, Artificial Sequence
  Synthetic
auuuuaagauauuagaaa

SEQ ID NO: 174659 - RNA, 19 nt, Artificial Sequence
  Synthetic
aauuuuaagauauuagaaa

SEQ ID NO: 174660 - RNA, 20 nt, Artificial Sequence
  Synthetic
aaauuuuaagauauuagaaa

SEQ ID NO: 174661 - RNA, 21 nt, Artificial Sequence
  Synthetic
gaaauuuuaagauauuagaaa

SEQ ID NO: 174662 - RNA, 22 nt, Artificial Sequence
  Synthetic
ugaaauuuuaagauauuagaaa

SEQ ID NO: 174663 - RNA, 23 nt, Artificial Sequence
  Synthetic
cugaaauuuuaagauauuagaaa

SEQ ID NO: 174664 - RNA, 24 nt, Artificial Sequence
  Synthetic
ucugaaauuuuaagauauuagaaa

SEQ ID NO: 174665 - RNA, 18 nt, Artificial Sequence
  Synthetic
auaaauacugcuuagaaa

SEQ ID NO: 174666 - RNA, 19 nt, Artificial Sequence
  Synthetic
gauaaauacugcuuagaaa

SEQ ID NO: 174667 - RNA, 20 nt, Artificial Sequence
  Synthetic
ugauaaauacugcuuagaaa

SEQ ID NO: 174668 - RNA, 21 nt, Artificial Sequence
  Synthetic
cugauaaauacugcuuagaaa

SEQ ID NO: 174669 - RNA, 22 nt, Artificial Sequence
  Synthetic
acugauaaauacugcuuagaaa

SEQ ID NO: 174670 - RNA, 23 nt, Artificial Sequence
  Synthetic
uacugauaaauacugcuuagaaa

SEQ ID NO: 174671 - RNA, 24 nt, Artificial Sequence
  Synthetic
auacugauaaauacugcuuagaaa

SEQ ID NO: 174672 - RNA, 18 nt, Artificial Sequence
  Synthetic
ccugaacucaguuagaaa

SEQ ID NO: 174673 - RNA, 19 nt, Artificial Sequence
  Synthetic
uccugaacucaguuagaaa

SEQ ID NO: 174674 - RNA, 20 nt, Artificial Sequence
  Synthetic
cuccugaacucaguuagaaa

SEQ ID NO: 174675 - RNA, 21 nt, Artificial Sequence
  Synthetic
ucuccugaacucaguuagaaa

SEQ ID NO: 174676 - RNA, 22 nt, Artificial Sequence
  Synthetic
aucuccugaacucaguuagaaa

SEQ ID NO: 174677 - RNA, 23 nt, Artificial Sequence
  Synthetic
gaucuccugaacucaguuagaaa

SEQ ID NO: 174678 - RNA, 24 nt, Artificial Sequence
  Synthetic
agaucuccugaacucaguuagaaa

SEQ ID NO: 174679 - RNA, 18 nt, Artificial Sequence
  Synthetic
auuugaaaguguuagaaa

SEQ ID NO: 174680 - RNA, 19 nt, Artificial Sequence
  Synthetic
aauuugaaaguguuagaaa

SEQ ID NO: 174681 - RNA, 20 nt, Artificial Sequence
  Synthetic
uaauuugaaaguguuagaaa

SEQ ID NO: 174682 - RNA, 21 nt, Artificial Sequence
  Synthetic
cuaauuugaaaguguuagaaa

SEQ ID NO: 174683 - RNA, 22 nt, Artificial Sequence
  Synthetic
gcuaauuugaaaguguuagaaa

SEQ ID NO: 174684 - RNA, 23 nt, Artificial Sequence
  Synthetic
ugcuaauuugaaaguguuagaaa

SEQ ID NO: 174685 - RNA, 24 nt, Artificial Sequence
  Synthetic
gugcuaauuugaaaguguuagaaa

SEQ ID NO: 174686 - RNA, 18 nt, Artificial Sequence
  Synthetic
aggaaaacaauuuagaaa

SEQ ID NO: 174687 - RNA, 19 nt, Artificial Sequence
  Synthetic
aaggaaaacaauuuagaaa

SEQ ID NO: 174688 - RNA, 20 nt, Artificial Sequence
  Synthetic
aaaggaaaacaauuuagaaa

SEQ ID NO: 174689 - RNA, 21 nt, Artificial Sequence
  Synthetic
gaaaggaaaacaauuuagaaa

SEQ ID NO: 174690 - RNA, 22 nt, Artificial Sequence
  Synthetic
agaaaggaaaacaauuuagaaa

SEQ ID NO: 174691 - RNA, 23 nt, Artificial Sequence
  Synthetic
gagaaaggaaaacaauuuagaaa

SEQ ID NO: 174692 - RNA, 24 nt, Artificial Sequence
  Synthetic
ugagaaaggaaaacaauuuagaaa

SEQ ID NO: 174693 - RNA, 18 nt, Artificial Sequence
  Synthetic
uaauuaaaaguuuagaaa

SEQ ID NO: 174694 - RNA, 19 nt, Artificial Sequence
  Synthetic
auaauuaaaaguuuagaaa

SEQ ID NO: 174695 - RNA, 20 nt, Artificial Sequence
  Synthetic
aauaauuaaaaguuuagaaa

SEQ ID NO: 174696 - RNA, 21 nt, Artificial Sequence
  Synthetic
aaauaauuaaaaguuuagaaa

SEQ ID NO: 174697 - RNA, 22 nt, Artificial Sequence
  Synthetic
aaaauaauuaaaaguuuagaaa

SEQ ID NO: 174698 - RNA, 23 nt, Artificial Sequence
  Synthetic
gaaaauaauuaaaaguuuagaaa

SEQ ID NO: 174699 - RNA, 24 nt, Artificial Sequence
  Synthetic
ugaaaauaauuaaaaguuuagaaa

SEQ ID NO: 174700 - RNA, 18 nt, Artificial Sequence
  Synthetic
ugaauucuauuuuagaaa

SEQ ID NO: 174701 - RNA, 19 nt, Artificial Sequence
  Synthetic
cugaauucuauuuuagaaa

SEQ ID NO: 174702 - RNA, 20 nt, Artificial Sequence
  Synthetic
acugaauucuauuuuagaaa

SEQ ID NO: 174703 - RNA, 21 nt, Artificial Sequence
  Synthetic
cacugaauucuauuuuagaaa

SEQ ID NO: 174704 - RNA, 22 nt, Artificial Sequence
  Synthetic
ccacugaauucuauuuuagaaa

SEQ ID NO: 174705 - RNA, 23 nt, Artificial Sequence
  Synthetic
cccacugaauucuauuuuagaaa

SEQ ID NO: 174706 - RNA, 24 nt, Artificial Sequence
  Synthetic
acccacugaauucuauuuuagaaa

SEQ ID NO: 174707 - RNA, 18 nt, Artificial Sequence
  Synthetic
aaugauuuauuuuagaaa

SEQ ID NO: 174708 - RNA, 19 nt, Artificial Sequence
  Synthetic
aaaugauuuauuuuagaaa

SEQ ID NO: 174709 - RNA, 20 nt, Artificial Sequence
  Synthetic
gaaaugauuuauuuuagaaa

SEQ ID NO: 174710 - RNA, 21 nt, Artificial Sequence
  Synthetic
agaaaugauuuauuuuagaaa

SEQ ID NO: 174711 - RNA, 22 nt, Artificial Sequence
  Synthetic
cagaaaugauuuauuuuagaaa

SEQ ID NO: 174712 - RNA, 23 nt, Artificial Sequence
  Synthetic
ucagaaaugauuuauuuuagaaa

SEQ ID NO: 174713 - RNA, 24 nt, Artificial Sequence
  Synthetic
aucagaaaugauuuauuuuagaaa

SEQ ID NO: 174714 - RNA, 18 nt, Artificial Sequence
  Synthetic
uuagacggaucaacgaaa

SEQ ID NO: 174715 - RNA, 19 nt, Artificial Sequence
  Synthetic
auuagacggaucaacgaaa

SEQ ID NO: 174716 - RNA, 20 nt, Artificial Sequence
  Synthetic
uauuagacggaucaacgaaa

SEQ ID NO: 174717 - RNA, 21 nt, Artificial Sequence
  Synthetic
auauuagacggaucaacgaaa

SEQ ID NO: 174718 - RNA, 22 nt, Artificial Sequence
  Synthetic
aauauuagacggaucaacgaaa

SEQ ID NO: 174719 - RNA, 23 nt, Artificial Sequence
  Synthetic
caauauuagacggaucaacgaaa

SEQ ID NO: 174720 - RNA, 24 nt, Artificial Sequence
  Synthetic
ucaauauuagacggaucaacgaaa

SEQ ID NO: 174721 - RNA, 18 nt, Artificial Sequence
  Synthetic
uucuucccaugaacgaaa

SEQ ID NO: 174722 - RNA, 19 nt, Artificial Sequence
  Synthetic
auucuucccaugaacgaaa

SEQ ID NO: 174723 - RNA, 20 nt, Artificial Sequence
  Synthetic
cauucuucccaugaacgaaa

SEQ ID NO: 174724 - RNA, 21 nt, Artificial Sequence
  Synthetic
ucauucuucccaugaacgaaa

SEQ ID NO: 174725 - RNA, 22 nt, Artificial Sequence
  Synthetic
uucauucuucccaugaacgaaa

SEQ ID NO: 174726 - RNA, 23 nt, Artificial Sequence
  Synthetic
uuucauucuucccaugaacgaaa

SEQ ID NO: 174727 - RNA, 24 nt, Artificial Sequence
  Synthetic
cuuucauucuucccaugaacgaaa

SEQ ID NO: 174728 - RNA, 18 nt, Artificial Sequence
  Synthetic
uaauuaagacuaacgaaa

SEQ ID NO: 174729 - RNA, 19 nt, Artificial Sequence
  Synthetic
guaauuaagacuaacgaaa

SEQ ID NO: 174730 - RNA, 20 nt, Artificial Sequence
  Synthetic
aguaauuaagacuaacgaaa

SEQ ID NO: 174731 - RNA, 21 nt, Artificial Sequence
  Synthetic
uaguaauuaagacuaacgaaa

SEQ ID NO: 174732 - RNA, 22 nt, Artificial Sequence
  Synthetic
uuaguaauuaagacuaacgaaa

SEQ ID NO: 174733 - RNA, 23 nt, Artificial Sequence
  Synthetic
guuaguaauuaagacuaacgaaa

SEQ ID NO: 174734 - RNA, 24 nt, Artificial Sequence
  Synthetic
uguuaguaauuaagacuaacgaaa

SEQ ID NO: 174735 - RNA, 18 nt, Artificial Sequence
  Synthetic
aguuauacuggcccgaaa

SEQ ID NO: 174736 - RNA, 19 nt, Artificial Sequence
  Synthetic
aaguuauacuggcccgaaa

SEQ ID NO: 174737 - RNA, 20 nt, Artificial Sequence
  Synthetic
uaaguuauacuggcccgaaa

SEQ ID NO: 174738 - RNA, 21 nt, Artificial Sequence
  Synthetic
uuaaguuauacuggcccgaaa

SEQ ID NO: 174739 - RNA, 22 nt, Artificial Sequence
  Synthetic
auuaaguuauacuggcccgaaa

SEQ ID NO: 174740 - RNA, 23 nt, Artificial Sequence
  Synthetic
uauuaaguuauacuggcccgaaa

SEQ ID NO: 174741 - RNA, 24 nt, Artificial Sequence
  Synthetic
cuauuaaguuauacuggcccgaaa

SEQ ID NO: 174742 - RNA, 18 nt, Artificial Sequence
  Synthetic
acuauaaaaagagcgaaa

SEQ ID NO: 174743 - RNA, 19 nt, Artificial Sequence
  Synthetic
gacuauaaaaagagcgaaa

SEQ ID NO: 174744 - RNA, 20 nt, Artificial Sequence
  Synthetic
ugacuauaaaaagagcgaaa

SEQ ID NO: 174745 - RNA, 21 nt, Artificial Sequence
  Synthetic
uugacuauaaaaagagcgaaa

SEQ ID NO: 174746 - RNA, 22 nt, Artificial Sequence
  Synthetic
auugacuauaaaaagagcgaaa

SEQ ID NO: 174747 - RNA, 23 nt, Artificial Sequence
  Synthetic
aauugacuauaaaaagagcgaaa

SEQ ID NO: 174748 - RNA, 24 nt, Artificial Sequence
  Synthetic
gaauugacuauaaaaagagcgaaa

SEQ ID NO: 174749 - RNA, 18 nt, Artificial Sequence
  Synthetic
cuuccuuucaaggcgaaa

SEQ ID NO: 174750 - RNA, 19 nt, Artificial Sequence
  Synthetic
ccuuccuuucaaggcgaaa

SEQ ID NO: 174751 - RNA, 20 nt, Artificial Sequence
  Synthetic
accuuccuuucaaggcgaaa

SEQ ID NO: 174752 - RNA, 21 nt, Artificial Sequence
  Synthetic
aaccuuccuuucaaggcgaaa

SEQ ID NO: 174753 - RNA, 22 nt, Artificial Sequence
  Synthetic
aaaccuuccuuucaaggcgaaa

SEQ ID NO: 174754 - RNA, 23 nt, Artificial Sequence
  Synthetic
aaaaccuuccuuucaaggcgaaa

SEQ ID NO: 174755 - RNA, 24 nt, Artificial Sequence
  Synthetic
uaaaaccuuccuuucaaggcgaaa

SEQ ID NO: 174756 - RNA, 18 nt, Artificial Sequence
  Synthetic
aaagauuaaaaugcgaaa

SEQ ID NO: 174757 - RNA, 19 nt, Artificial Sequence
  Synthetic
caaagauuaaaaugcgaaa

SEQ ID NO: 174758 - RNA, 20 nt, Artificial Sequence
  Synthetic
ucaaagauuaaaaugcgaaa

SEQ ID NO: 174759 - RNA, 21 nt, Artificial Sequence
  Synthetic
uucaaagauuaaaaugcgaaa

SEQ ID NO: 174760 - RNA, 22 nt, Artificial Sequence
  Synthetic
uuucaaagauuaaaaugcgaaa

SEQ ID NO: 174761 - RNA, 23 nt, Artificial Sequence
  Synthetic
uuuucaaagauuaaaaugcgaaa

SEQ ID NO: 174762 - RNA, 24 nt, Artificial Sequence
  Synthetic
auuuucaaagauuaaaaugcgaaa

SEQ ID NO: 174763 - RNA, 18 nt, Artificial Sequence
  Synthetic
uugacuggcuuaucgaaa

SEQ ID NO: 174764 - RNA, 19 nt, Artificial Sequence
  Synthetic
uuugacuggcuuaucgaaa

SEQ ID NO: 174765 - RNA, 20 nt, Artificial Sequence
  Synthetic
cuuugacuggcuuaucgaaa

SEQ ID NO: 174766 - RNA, 21 nt, Artificial Sequence
  Synthetic
acuuugacuggcuuaucgaaa

SEQ ID NO: 174767 - RNA, 22 nt, Artificial Sequence
  Synthetic
cacuuugacuggcuuaucgaaa

SEQ ID NO: 174768 - RNA, 23 nt, Artificial Sequence
  Synthetic
ucacuuugacuggcuuaucgaaa

SEQ ID NO: 174769 - RNA, 24 nt, Artificial Sequence
  Synthetic
uucacuuugacuggcuuaucgaaa

SEQ ID NO: 174770 - RNA, 18 nt, Artificial Sequence
  Synthetic
gauaaaagaaaaaggaaa

SEQ ID NO: 174771 - RNA, 19 nt, Artificial Sequence
  Synthetic
ggauaaaagaaaaaggaaa

SEQ ID NO: 174772 - RNA, 20 nt, Artificial Sequence
  Synthetic
aggauaaaagaaaaaggaaa

SEQ ID NO: 174773 - RNA, 21 nt, Artificial Sequence
  Synthetic
caggauaaaagaaaaaggaaa

SEQ ID NO: 174774 - RNA, 22 nt, Artificial Sequence
  Synthetic
ucaggauaaaagaaaaaggaaa

SEQ ID NO: 174775 - RNA, 23 nt, Artificial Sequence
  Synthetic
cucaggauaaaagaaaaaggaaa

SEQ ID NO: 174776 - RNA, 24 nt, Artificial Sequence
  Synthetic
ccucaggauaaaagaaaaaggaaa

SEQ ID NO: 174777 - RNA, 18 nt, Artificial Sequence
  Synthetic
acaaagguaaaaaggaaa

SEQ ID NO: 174778 - RNA, 19 nt, Artificial Sequence
  Synthetic
aacaaagguaaaaaggaaa

SEQ ID NO: 174779 - RNA, 20 nt, Artificial Sequence
  Synthetic
uaacaaagguaaaaaggaaa

SEQ ID NO: 174780 - RNA, 21 nt, Artificial Sequence
  Synthetic
cuaacaaagguaaaaaggaaa

SEQ ID NO: 174781 - RNA, 22 nt, Artificial Sequence
  Synthetic
ucuaacaaagguaaaaaggaaa

SEQ ID NO: 174782 - RNA, 23 nt, Artificial Sequence
  Synthetic
aucuaacaaagguaaaaaggaaa

SEQ ID NO: 174783 - RNA, 24 nt, Artificial Sequence
  Synthetic
caucuaacaaagguaaaaaggaaa

SEQ ID NO: 174784 - RNA, 18 nt, Artificial Sequence
  Synthetic
ggaagaaagaaaaggaaa

SEQ ID NO: 174785 - RNA, 19 nt, Artificial Sequence
  Synthetic
uggaagaaagaaaaggaaa

SEQ ID NO: 174786 - RNA, 20 nt, Artificial Sequence
  Synthetic
cuggaagaaagaaaaggaaa

SEQ ID NO: 174787 - RNA, 21 nt, Artificial Sequence
  Synthetic
gcuggaagaaagaaaaggaaa

SEQ ID NO: 174788 - RNA, 22 nt, Artificial Sequence
  Synthetic
cgcuggaagaaagaaaaggaaa

SEQ ID NO: 174789 - RNA, 23 nt, Artificial Sequence
  Synthetic
gcgcuggaagaaagaaaaggaaa

SEQ ID NO: 174790 - RNA, 24 nt, Artificial Sequence
  Synthetic
agcgcuggaagaaagaaaaggaaa

SEQ ID NO: 174791 - RNA, 18 nt, Artificial Sequence
  Synthetic
cuagugaaacaaaggaaa

SEQ ID NO: 174792 - RNA, 19 nt, Artificial Sequence
  Synthetic
ccuagugaaacaaaggaaa

SEQ ID NO: 174793 - RNA, 20 nt, Artificial Sequence
  Synthetic
gccuagugaaacaaaggaaa

SEQ ID NO: 174794 - RNA, 21 nt, Artificial Sequence
  Synthetic
ggccuagugaaacaaaggaaa

SEQ ID NO: 174795 - RNA, 22 nt, Artificial Sequence
  Synthetic
uggccuagugaaacaaaggaaa

SEQ ID NO: 174796 - RNA, 23 nt, Artificial Sequence
  Synthetic
cuggccuagugaaacaaaggaaa

SEQ ID NO: 174797 - RNA, 24 nt, Artificial Sequence
  Synthetic
ucuggccuagugaaacaaaggaaa

SEQ ID NO: 174798 - RNA, 18 nt, Artificial Sequence
  Synthetic
guuaaaaagcaaaggaaa

SEQ ID NO: 174799 - RNA, 19 nt, Artificial Sequence
  Synthetic
aguuaaaaagcaaaggaaa

SEQ ID NO: 174800 - RNA, 20 nt, Artificial Sequence
  Synthetic
aaguuaaaaagcaaaggaaa

SEQ ID NO: 174801 - RNA, 21 nt, Artificial Sequence
  Synthetic
caaguuaaaaagcaaaggaaa

SEQ ID NO: 174802 - RNA, 22 nt, Artificial Sequence
  Synthetic
acaaguuaaaaagcaaaggaaa

SEQ ID NO: 174803 - RNA, 23 nt, Artificial Sequence
  Synthetic
cacaaguuaaaaagcaaaggaaa

SEQ ID NO: 174804 - RNA, 24 nt, Artificial Sequence
  Synthetic
acacaaguuaaaaagcaaaggaaa

SEQ ID NO: 174805 - RNA, 18 nt, Artificial Sequence
  Synthetic
uaucugcagcaaaggaaa

SEQ ID NO: 174806 - RNA, 19 nt, Artificial Sequence
  Synthetic
uuaucugcagcaaaggaaa

SEQ ID NO: 174807 - RNA, 20 nt, Artificial Sequence
  Synthetic
uuuaucugcagcaaaggaaa

SEQ ID NO: 174808 - RNA, 21 nt, Artificial Sequence
  Synthetic
guuuaucugcagcaaaggaaa

SEQ ID NO: 174809 - RNA, 22 nt, Artificial Sequence
  Synthetic
cguuuaucugcagcaaaggaaa

SEQ ID NO: 174810 - RNA, 23 nt, Artificial Sequence
  Synthetic
ucguuuaucugcagcaaaggaaa

SEQ ID NO: 174811 - RNA, 24 nt, Artificial Sequence
  Synthetic
uucguuuaucugcagcaaaggaaa

SEQ ID NO: 174812 - RNA, 18 nt, Artificial Sequence
  Synthetic
ugagcggaggaaaggaaa

SEQ ID NO: 174813 - RNA, 19 nt, Artificial Sequence
  Synthetic
gugagcggaggaaaggaaa

SEQ ID NO: 174814 - RNA, 20 nt, Artificial Sequence
  Synthetic
ugugagcggaggaaaggaaa

SEQ ID NO: 174815 - RNA, 21 nt, Artificial Sequence
  Synthetic
cugugagcggaggaaaggaaa

SEQ ID NO: 174816 - RNA, 22 nt, Artificial Sequence
  Synthetic
ccugugagcggaggaaaggaaa

SEQ ID NO: 174817 - RNA, 23 nt, Artificial Sequence
  Synthetic
accugugagcggaggaaaggaaa

SEQ ID NO: 174818 - RNA, 24 nt, Artificial Sequence
  Synthetic
caccugugagcggaggaaaggaaa

SEQ ID NO: 174819 - RNA, 18 nt, Artificial Sequence
  Synthetic
auagaaggggaaaggaaa

SEQ ID NO: 174820 - RNA, 19 nt, Artificial Sequence
  Synthetic
aauagaaggggaaaggaaa

SEQ ID NO: 174821 - RNA, 20 nt, Artificial Sequence
  Synthetic
uaauagaaggggaaaggaaa

SEQ ID NO: 174822 - RNA, 21 nt, Artificial Sequence
  Synthetic
cuaauagaaggggaaaggaaa

SEQ ID NO: 174823 - RNA, 22 nt, Artificial Sequence
  Synthetic
acuaauagaaggggaaaggaaa

SEQ ID NO: 174824 - RNA, 23 nt, Artificial Sequence
  Synthetic
gacuaauagaaggggaaaggaaa

SEQ ID NO: 174825 - RNA, 24 nt, Artificial Sequence
  Synthetic
ggacuaauagaaggggaaaggaaa

SEQ ID NO: 174826 - RNA, 18 nt, Artificial Sequence
  Synthetic
uaacagugggaaaggaaa

SEQ ID NO: 174827 - RNA, 19 nt, Artificial Sequence
  Synthetic
uuaacagugggaaaggaaa

SEQ ID NO: 174828 - RNA, 20 nt, Artificial Sequence
  Synthetic
uuuaacagugggaaaggaaa

SEQ ID NO: 174829 - RNA, 21 nt, Artificial Sequence
  Synthetic
uuuuaacagugggaaaggaaa

SEQ ID NO: 174830 - RNA, 22 nt, Artificial Sequence
  Synthetic
uuuuuaacagugggaaaggaaa

SEQ ID NO: 174831 - RNA, 23 nt, Artificial Sequence
  Synthetic
auuuuuaacagugggaaaggaaa

SEQ ID NO: 174832 - RNA, 24 nt, Artificial Sequence
  Synthetic
gauuuuuaacagugggaaaggaaa

SEQ ID NO: 174833 - RNA, 18 nt, Artificial Sequence
  Synthetic
ccaaaaucauaaaggaaa

SEQ ID NO: 174834 - RNA, 19 nt, Artificial Sequence
  Synthetic
accaaaaucauaaaggaaa

SEQ ID NO: 174835 - RNA, 20 nt, Artificial Sequence
  Synthetic
uaccaaaaucauaaaggaaa

SEQ ID NO: 174836 - RNA, 21 nt, Artificial Sequence
  Synthetic
uuaccaaaaucauaaaggaaa

SEQ ID NO: 174837 - RNA, 22 nt, Artificial Sequence
  Synthetic
auuaccaaaaucauaaaggaaa

SEQ ID NO: 174838 - RNA, 23 nt, Artificial Sequence
  Synthetic
aauuaccaaaaucauaaaggaaa

SEQ ID NO: 174839 - RNA, 24 nt, Artificial Sequence
  Synthetic
gaauuaccaaaaucauaaaggaaa

SEQ ID NO: 174840 - RNA, 18 nt, Artificial Sequence
  Synthetic
ucaucaggguaaaggaaa

SEQ ID NO: 174841 - RNA, 19 nt, Artificial Sequence
  Synthetic
aucaucaggguaaaggaaa

SEQ ID NO: 174842 - RNA, 20 nt, Artificial Sequence
  Synthetic
aaucaucaggguaaaggaaa

SEQ ID NO: 174843 - RNA, 21 nt, Artificial Sequence
  Synthetic
aaaucaucaggguaaaggaaa

SEQ ID NO: 174844 - RNA, 22 nt, Artificial Sequence
  Synthetic
aaaaucaucaggguaaaggaaa

SEQ ID NO: 174845 - RNA, 23 nt, Artificial Sequence
  Synthetic
aaaaaucaucaggguaaaggaaa

SEQ ID NO: 174846 - RNA, 24 nt, Artificial Sequence
  Synthetic
aaaaaaucaucaggguaaaggaaa

SEQ ID NO: 174847 - RNA, 18 nt, Artificial Sequence
  Synthetic
uguugagagucaaggaaa

SEQ ID NO: 174848 - RNA, 19 nt, Artificial Sequence
  Synthetic
guguugagagucaaggaaa

SEQ ID NO: 174849 - RNA, 20 nt, Artificial Sequence
  Synthetic
gguguugagagucaaggaaa

SEQ ID NO: 174850 - RNA, 21 nt, Artificial Sequence
  Synthetic
ggguguugagagucaaggaaa

SEQ ID NO: 174851 - RNA, 22 nt, Artificial Sequence
  Synthetic
aggguguugagagucaaggaaa

SEQ ID NO: 174852 - RNA, 23 nt, Artificial Sequence
  Synthetic
uaggguguugagagucaaggaaa

SEQ ID NO: 174853 - RNA, 24 nt, Artificial Sequence
  Synthetic
auaggguguugagagucaaggaaa

SEQ ID NO: 174854 - RNA, 18 nt, Artificial Sequence
  Synthetic
gauucagaaagaaggaaa

SEQ ID NO: 174855 - RNA, 19 nt, Artificial Sequence
  Synthetic
agauucagaaagaaggaaa

SEQ ID NO: 174856 - RNA, 20 nt, Artificial Sequence
  Synthetic
cagauucagaaagaaggaaa

SEQ ID NO: 174857 - RNA, 21 nt, Artificial Sequence
  Synthetic
acagauucagaaagaaggaaa

SEQ ID NO: 174858 - RNA, 22 nt, Artificial Sequence
  Synthetic
aacagauucagaaagaaggaaa

SEQ ID NO: 174859 - RNA, 23 nt, Artificial Sequence
  Synthetic
caacagauucagaaagaaggaaa

SEQ ID NO: 174860 - RNA, 24 nt, Artificial Sequence
  Synthetic
acaacagauucagaaagaaggaaa

SEQ ID NO: 174861 - RNA, 18 nt, Artificial Sequence
  Synthetic
aagauuuagagaaggaaa

SEQ ID NO: 174862 - RNA, 19 nt, Artificial Sequence
  Synthetic
aaagauuuagagaaggaaa

SEQ ID NO: 174863 - RNA, 20 nt, Artificial Sequence
  Synthetic
aaaagauuuagagaaggaaa

SEQ ID NO: 174864 - RNA, 21 nt, Artificial Sequence
  Synthetic
aaaaagauuuagagaaggaaa

SEQ ID NO: 174865 - RNA, 22 nt, Artificial Sequence
  Synthetic
aaaaaagauuuagagaaggaaa

SEQ ID NO: 174866 - RNA, 23 nt, Artificial Sequence
  Synthetic
uaaaaaagauuuagagaaggaaa

SEQ ID NO: 174867 - RNA, 24 nt, Artificial Sequence
  Synthetic
uuaaaaaagauuuagagaaggaaa

SEQ ID NO: 174868 - RNA, 18 nt, Artificial Sequence
  Synthetic
aagagcccuagaaggaaa

SEQ ID NO: 174869 - RNA, 19 nt, Artificial Sequence
  Synthetic
caagagcccuagaaggaaa

SEQ ID NO: 174870 - RNA, 20 nt, Artificial Sequence
  Synthetic
ccaagagcccuagaaggaaa

SEQ ID NO: 174871 - RNA, 21 nt, Artificial Sequence
  Synthetic
cccaagagcccuagaaggaaa

SEQ ID NO: 174872 - RNA, 22 nt, Artificial Sequence
  Synthetic
acccaagagcccuagaaggaaa

SEQ ID NO: 174873 - RNA, 23 nt, Artificial Sequence
  Synthetic
cacccaagagcccuagaaggaaa

SEQ ID NO: 174874 - RNA, 24 nt, Artificial Sequence
  Synthetic
gcacccaagagcccuagaaggaaa

SEQ ID NO: 174875 - RNA, 18 nt, Artificial Sequence
  Synthetic
cuauagauucgaaggaaa

SEQ ID NO: 174876 - RNA, 19 nt, Artificial Sequence
  Synthetic
ccuauagauucgaaggaaa

SEQ ID NO: 174877 - RNA, 20 nt, Artificial Sequence
  Synthetic
gccuauagauucgaaggaaa

SEQ ID NO: 174878 - RNA, 21 nt, Artificial Sequence
  Synthetic
ggccuauagauucgaaggaaa

SEQ ID NO: 174879 - RNA, 22 nt, Artificial Sequence
  Synthetic
uggccuauagauucgaaggaaa

SEQ ID NO: 174880 - RNA, 23 nt, Artificial Sequence
  Synthetic
uuggccuauagauucgaaggaaa

SEQ ID NO: 174881 - RNA, 24 nt, Artificial Sequence
  Synthetic
cuuggccuauagauucgaaggaaa

SEQ ID NO: 174882 - RNA, 18 nt, Artificial Sequence
  Synthetic
ggaaaauaaggaaggaaa

SEQ ID NO: 174883 - RNA, 19 nt, Artificial Sequence
  Synthetic
aggaaaauaaggaaggaaa

SEQ ID NO: 174884 - RNA, 20 nt, Artificial Sequence
  Synthetic
gaggaaaauaaggaaggaaa

SEQ ID NO: 174885 - RNA, 21 nt, Artificial Sequence
  Synthetic
agaggaaaauaaggaaggaaa

SEQ ID NO: 174886 - RNA, 22 nt, Artificial Sequence
  Synthetic
aagaggaaaauaaggaaggaaa

SEQ ID NO: 174887 - RNA, 23 nt, Artificial Sequence
  Synthetic
uaagaggaaaauaaggaaggaaa

SEQ ID NO: 174888 - RNA, 24 nt, Artificial Sequence
  Synthetic
auaagaggaaaauaaggaaggaaa

SEQ ID NO: 174889 - RNA, 18 nt, Artificial Sequence
  Synthetic
uagagcaaaauaaggaaa

SEQ ID NO: 174890 - RNA, 19 nt, Artificial Sequence
  Synthetic
auagagcaaaauaaggaaa

SEQ ID NO: 174891 - RNA, 20 nt, Artificial Sequence
  Synthetic
gauagagcaaaauaaggaaa

SEQ ID NO: 174892 - RNA, 21 nt, Artificial Sequence
  Synthetic
ugauagagcaaaauaaggaaa

SEQ ID NO: 174893 - RNA, 22 nt, Artificial Sequence
  Synthetic
cugauagagcaaaauaaggaaa

SEQ ID NO: 174894 - RNA, 23 nt, Artificial Sequence
  Synthetic
acugauagagcaaaauaaggaaa

SEQ ID NO: 174895 - RNA, 24 nt, Artificial Sequence
  Synthetic
aacugauagagcaaaauaaggaaa

SEQ ID NO: 174896 - RNA, 18 nt, Artificial Sequence
  Synthetic
uauuuauucauaaggaaa

SEQ ID NO: 174897 - RNA, 19 nt, Artificial Sequence
  Synthetic
guauuuauucauaaggaaa

SEQ ID NO: 174898 - RNA, 20 nt, Artificial Sequence
  Synthetic
uguauuuauucauaaggaaa

SEQ ID NO: 174899 - RNA, 21 nt, Artificial Sequence
  Synthetic
auguauuuauucauaaggaaa

SEQ ID NO: 174900 - RNA, 22 nt, Artificial Sequence
  Synthetic
cauguauuuauucauaaggaaa

SEQ ID NO: 174901 - RNA, 23 nt, Artificial Sequence
  Synthetic
ccauguauuuauucauaaggaaa

SEQ ID NO: 174902 - RNA, 24 nt, Artificial Sequence
  Synthetic
uccauguauuuauucauaaggaaa

SEQ ID NO: 174903 - RNA, 18 nt, Artificial Sequence
  Synthetic
gguuaaugaaacaggaaa

SEQ ID NO: 174904 - RNA, 19 nt, Artificial Sequence
  Synthetic
ggguuaaugaaacaggaaa

SEQ ID NO: 174905 - RNA, 20 nt, Artificial Sequence
  Synthetic
aggguuaaugaaacaggaaa

SEQ ID NO: 174906 - RNA, 21 nt, Artificial Sequence
  Synthetic
uaggguuaaugaaacaggaaa

SEQ ID NO: 174907 - RNA, 22 nt, Artificial Sequence
  Synthetic
auaggguuaaugaaacaggaaa

SEQ ID NO: 174908 - RNA, 23 nt, Artificial Sequence
  Synthetic
aauaggguuaaugaaacaggaaa

SEQ ID NO: 174909 - RNA, 24 nt, Artificial Sequence
  Synthetic
gaauaggguuaaugaaacaggaaa

SEQ ID NO: 174910 - RNA, 18 nt, Artificial Sequence
  Synthetic
uaaucagguaacaggaaa

SEQ ID NO: 174911 - RNA, 19 nt, Artificial Sequence
  Synthetic
guaaucagguaacaggaaa

SEQ ID NO: 174912 - RNA, 20 nt, Artificial Sequence
  Synthetic
aguaaucagguaacaggaaa

SEQ ID NO: 174913 - RNA, 21 nt, Artificial Sequence
  Synthetic
caguaaucagguaacaggaaa

SEQ ID NO: 174914 - RNA, 22 nt, Artificial Sequence
  Synthetic
acaguaaucagguaacaggaaa

SEQ ID NO: 174915 - RNA, 23 nt, Artificial Sequence
  Synthetic
aacaguaaucagguaacaggaaa

SEQ ID NO: 174916 - RNA, 24 nt, Artificial Sequence
  Synthetic
gaacaguaaucagguaacaggaaa

SEQ ID NO: 174917 - RNA, 18 nt, Artificial Sequence
  Synthetic
auuauaccucacaggaaa

SEQ ID NO: 174918 - RNA, 19 nt, Artificial Sequence
  Synthetic
uauuauaccucacaggaaa

SEQ ID NO: 174919 - RNA, 20 nt, Artificial Sequence
  Synthetic
cuauuauaccucacaggaaa

SEQ ID NO: 174920 - RNA, 21 nt, Artificial Sequence
  Synthetic
acuauuauaccucacaggaaa

SEQ ID NO: 174921 - RNA, 22 nt, Artificial Sequence
  Synthetic
uacuauuauaccucacaggaaa

SEQ ID NO: 174922 - RNA, 23 nt, Artificial Sequence
  Synthetic
cuacuauuauaccucacaggaaa

SEQ ID NO: 174923 - RNA, 24 nt, Artificial Sequence
  Synthetic
ucuacuauuauaccucacaggaaa

SEQ ID NO: 174924 - RNA, 18 nt, Artificial Sequence
  Synthetic
gauaauuuauacaggaaa

SEQ ID NO: 174925 - RNA, 19 nt, Artificial Sequence
  Synthetic
ggauaauuuauacaggaaa

SEQ ID NO: 174926 - RNA, 20 nt, Artificial Sequence
  Synthetic
uggauaauuuauacaggaaa

SEQ ID NO: 174927 - RNA, 21 nt, Artificial Sequence
  Synthetic
cuggauaauuuauacaggaaa

SEQ ID NO: 174928 - RNA, 22 nt, Artificial Sequence
  Synthetic
acuggauaauuuauacaggaaa

SEQ ID NO: 174929 - RNA, 23 nt, Artificial Sequence
  Synthetic
gacuggauaauuuauacaggaaa

SEQ ID NO: 174930 - RNA, 24 nt, Artificial Sequence
  Synthetic
agacuggauaauuuauacaggaaa

SEQ ID NO: 174931 - RNA, 18 nt, Artificial Sequence
  Synthetic
guucuuuuccccaggaaa

SEQ ID NO: 174932 - RNA, 19 nt, Artificial Sequence
  Synthetic
gguucuuuuccccaggaaa

SEQ ID NO: 174933 - RNA, 20 nt, Artificial Sequence
  Synthetic
ggguucuuuuccccaggaaa

SEQ ID NO: 174934 - RNA, 21 nt, Artificial Sequence
  Synthetic
uggguucuuuuccccaggaaa

SEQ ID NO: 174935 - RNA, 22 nt, Artificial Sequence
  Synthetic
auggguucuuuuccccaggaaa

SEQ ID NO: 174936 - RNA, 23 nt, Artificial Sequence
  Synthetic
uauggguucuuuuccccaggaaa

SEQ ID NO: 174937 - RNA, 24 nt, Artificial Sequence
  Synthetic
auauggguucuuuuccccaggaaa

SEQ ID NO: 174938 - RNA, 18 nt, Artificial Sequence
  Synthetic
aggaaggaaagcaggaaa

SEQ ID NO: 174939 - RNA, 19 nt, Artificial Sequence
  Synthetic
gaggaaggaaagcaggaaa

SEQ ID NO: 174940 - RNA, 20 nt, Artificial Sequence
  Synthetic
agaggaaggaaagcaggaaa

SEQ ID NO: 174941 - RNA, 21 nt, Artificial Sequence
  Synthetic
gagaggaaggaaagcaggaaa

SEQ ID NO: 174942 - RNA, 22 nt, Artificial Sequence
  Synthetic
agagaggaaggaaagcaggaaa

SEQ ID NO: 174943 - RNA, 23 nt, Artificial Sequence
  Synthetic
aagagaggaaggaaagcaggaaa

SEQ ID NO: 174944 - RNA, 24 nt, Artificial Sequence
  Synthetic
gaagagaggaaggaaagcaggaaa

SEQ ID NO: 174945 - RNA, 18 nt, Artificial Sequence
  Synthetic
ucacauaagagcaggaaa

SEQ ID NO: 174946 - RNA, 19 nt, Artificial Sequence
  Synthetic
uucacauaagagcaggaaa

SEQ ID NO: 174947 - RNA, 20 nt, Artificial Sequence
  Synthetic
auucacauaagagcaggaaa

SEQ ID NO: 174948 - RNA, 21 nt, Artificial Sequence
  Synthetic
uauucacauaagagcaggaaa

SEQ ID NO: 174949 - RNA, 22 nt, Artificial Sequence
  Synthetic
auauucacauaagagcaggaaa

SEQ ID NO: 174950 - RNA, 23 nt, Artificial Sequence
  Synthetic
uauauucacauaagagcaggaaa

SEQ ID NO: 174951 - RNA, 24 nt, Artificial Sequence
  Synthetic
guauauucacauaagagcaggaaa

SEQ ID NO: 174952 - RNA, 18 nt, Artificial Sequence
  Synthetic
ugugagaaaugcaggaaa

SEQ ID NO: 174953 - RNA, 19 nt, Artificial Sequence
  Synthetic
gugugagaaaugcaggaaa

SEQ ID NO: 174954 - RNA, 20 nt, Artificial Sequence
  Synthetic
ugugugagaaaugcaggaaa

SEQ ID NO: 174955 - RNA, 21 nt, Artificial Sequence
  Synthetic
uugugugagaaaugcaggaaa

SEQ ID NO: 174956 - RNA, 22 nt, Artificial Sequence
  Synthetic
auugugugagaaaugcaggaaa

SEQ ID NO: 174957 - RNA, 23 nt, Artificial Sequence
  Synthetic
cauugugugagaaaugcaggaaa

SEQ ID NO: 174958 - RNA, 24 nt, Artificial Sequence
  Synthetic
ccauugugugagaaaugcaggaaa

SEQ ID NO: 174959 - RNA, 18 nt, Artificial Sequence
  Synthetic
gaaacuuuagucaggaaa

SEQ ID NO: 174960 - RNA, 19 nt, Artificial Sequence
  Synthetic
agaaacuuuagucaggaaa

SEQ ID NO: 174961 - RNA, 20 nt, Artificial Sequence
  Synthetic
aagaaacuuuagucaggaaa

SEQ ID NO: 174962 - RNA, 21 nt, Artificial Sequence
  Synthetic
caagaaacuuuagucaggaaa

SEQ ID NO: 174963 - RNA, 22 nt, Artificial Sequence
  Synthetic
gcaagaaacuuuagucaggaaa

SEQ ID NO: 174964 - RNA, 23 nt, Artificial Sequence
  Synthetic
ugcaagaaacuuuagucaggaaa

SEQ ID NO: 174965 - RNA, 24 nt, Artificial Sequence
  Synthetic
augcaagaaacuuuagucaggaaa

SEQ ID NO: 174966 - RNA, 18 nt, Artificial Sequence
  Synthetic
gaucaugaggucaggaaa

SEQ ID NO: 174967 - RNA, 19 nt, Artificial Sequence
  Synthetic
agaucaugaggucaggaaa

SEQ ID NO: 174968 - RNA, 20 nt, Artificial Sequence
  Synthetic
cagaucaugaggucaggaaa

SEQ ID NO: 174969 - RNA, 21 nt, Artificial Sequence
  Synthetic
gcagaucaugaggucaggaaa

SEQ ID NO: 174970 - RNA, 22 nt, Artificial Sequence
  Synthetic
ggcagaucaugaggucaggaaa

SEQ ID NO: 174971 - RNA, 23 nt, Artificial Sequence
  Synthetic
gggcagaucaugaggucaggaaa

SEQ ID NO: 174972 - RNA, 24 nt, Artificial Sequence
  Synthetic
ugggcagaucaugaggucaggaaa

SEQ ID NO: 174973 - RNA, 18 nt, Artificial Sequence
  Synthetic
agaaaaaaaaagaggaaa

SEQ ID NO: 174974 - RNA, 19 nt, Artificial Sequence
  Synthetic
aagaaaaaaaaagaggaaa

SEQ ID NO: 174975 - RNA, 20 nt, Artificial Sequence
  Synthetic
aaagaaaaaaaaagaggaaa

SEQ ID NO: 174976 - RNA, 21 nt, Artificial Sequence
  Synthetic
aaaagaaaaaaaaagaggaaa

SEQ ID NO: 174977 - RNA, 22 nt, Artificial Sequence
  Synthetic
aaaaagaaaaaaaaagaggaaa

SEQ ID NO: 174978 - RNA, 23 nt, Artificial Sequence
  Synthetic
uaaaaagaaaaaaaaagaggaaa

SEQ ID NO: 174979 - RNA, 24 nt, Artificial Sequence
  Synthetic
uuaaaaagaaaaaaaaagaggaaa

SEQ ID NO: 174980 - RNA, 18 nt, Artificial Sequence
  Synthetic
gugaaagaauagaggaaa

SEQ ID NO: 174981 - RNA, 19 nt, Artificial Sequence
  Synthetic
agugaaagaauagaggaaa

SEQ ID NO: 174982 - RNA, 20 nt, Artificial Sequence
  Synthetic
uagugaaagaauagaggaaa

SEQ ID NO: 174983 - RNA, 21 nt, Artificial Sequence
  Synthetic
cuagugaaagaauagaggaaa

SEQ ID NO: 174984 - RNA, 22 nt, Artificial Sequence
  Synthetic
acuagugaaagaauagaggaaa

SEQ ID NO: 174985 - RNA, 23 nt, Artificial Sequence
  Synthetic
aacuagugaaagaauagaggaaa

SEQ ID NO: 174986 - RNA, 24 nt, Artificial Sequence
  Synthetic
uaacuagugaaagaauagaggaaa

SEQ ID NO: 174987 - RNA, 18 nt, Artificial Sequence
  Synthetic
uuuuaaacauagaggaaa

SEQ ID NO: 174988 - RNA, 19 nt, Artificial Sequence
  Synthetic
uuuuuaaacauagaggaaa

SEQ ID NO: 174989 - RNA, 20 nt, Artificial Sequence
  Synthetic
auuuuuaaacauagaggaaa

SEQ ID NO: 174990 - RNA, 21 nt, Artificial Sequence
  Synthetic
cauuuuuaaacauagaggaaa

SEQ ID NO: 174991 - RNA, 22 nt, Artificial Sequence
  Synthetic
ucauuuuuaaacauagaggaaa

SEQ ID NO: 174992 - RNA, 23 nt, Artificial Sequence
  Synthetic
uucauuuuuaaacauagaggaaa

SEQ ID NO: 174993 - RNA, 24 nt, Artificial Sequence
  Synthetic
uuucauuuuuaaacauagaggaaa

SEQ ID NO: 174994 - RNA, 18 nt, Artificial Sequence
  Synthetic
aauuuuaagacgaggaaa

SEQ ID NO: 174995 - RNA, 19 nt, Artificial Sequence
  Synthetic
uaauuuuaagacgaggaaa

SEQ ID NO: 174996 - RNA, 20 nt, Artificial Sequence
  Synthetic
cuaauuuuaagacgaggaaa

SEQ ID NO: 174997 - RNA, 21 nt, Artificial Sequence
  Synthetic
ucuaauuuuaagacgaggaaa

SEQ ID NO: 174998 - RNA, 22 nt, Artificial Sequence
  Synthetic
uucuaauuuuaagacgaggaaa

SEQ ID NO: 174999 - RNA, 23 nt, Artificial Sequence
  Synthetic
guucuaauuuuaagacgaggaaa

SEQ ID NO: 175000 - RNA, 24 nt, Artificial Sequence
  Synthetic
uguucuaauuuuaagacgaggaaa

SEQ ID NO: 175001 - RNA, 18 nt, Artificial Sequence
  Synthetic
auuuagcaaaggaggaaa

SEQ ID NO: 175002 - RNA, 19 nt, Artificial Sequence
  Synthetic
cauuuagcaaaggaggaaa

SEQ ID NO: 175003 - RNA, 20 nt, Artificial Sequence
  Synthetic
ccauuuagcaaaggaggaaa

SEQ ID NO: 175004 - RNA, 21 nt, Artificial Sequence
  Synthetic
cccauuuagcaaaggaggaaa

SEQ ID NO: 175005 - RNA, 22 nt, Artificial Sequence
  Synthetic
ucccauuuagcaaaggaggaaa

SEQ ID NO: 175006 - RNA, 23 nt, Artificial Sequence
  Synthetic
uucccauuuagcaaaggaggaaa

SEQ ID NO: 175007 - RNA, 24 nt, Artificial Sequence
  Synthetic
auucccauuuagcaaaggaggaaa

SEQ ID NO: 175008 - RNA, 18 nt, Artificial Sequence
  Synthetic
agugaggaaaggaggaaa

SEQ ID NO: 175009 - RNA, 19 nt, Artificial Sequence
  Synthetic
gagugaggaaaggaggaaa

SEQ ID NO: 175010 - RNA, 20 nt, Artificial Sequence
  Synthetic
ggagugaggaaaggaggaaa

SEQ ID NO: 175011 - RNA, 21 nt, Artificial Sequence
  Synthetic
aggagugaggaaaggaggaaa

SEQ ID NO: 175012 - RNA, 22 nt, Artificial Sequence
  Synthetic
gaggagugaggaaaggaggaaa

SEQ ID NO: 175013 - RNA, 23 nt, Artificial Sequence
  Synthetic
agaggagugaggaaaggaggaaa

SEQ ID NO: 175014 - RNA, 24 nt, Artificial Sequence
  Synthetic
aagaggagugaggaaaggaggaaa

SEQ ID NO: 175015 - RNA, 18 nt, Artificial Sequence
  Synthetic
gaaggaaggaggaggaaa

SEQ ID NO: 175016 - RNA, 19 nt, Artificial Sequence
  Synthetic
ggaaggaaggaggaggaaa

SEQ ID NO: 175017 - RNA, 20 nt, Artificial Sequence
  Synthetic
gggaaggaaggaggaggaaa

SEQ ID NO: 175018 - RNA, 21 nt, Artificial Sequence
  Synthetic
agggaaggaaggaggaggaaa

SEQ ID NO: 175019 - RNA, 22 nt, Artificial Sequence
  Synthetic
aagggaaggaaggaggaggaaa

SEQ ID NO: 175020 - RNA, 23 nt, Artificial Sequence
  Synthetic
aaagggaaggaaggaggaggaaa

SEQ ID NO: 175021 - RNA, 24 nt, Artificial Sequence
  Synthetic
gaaagggaaggaaggaggaggaaa

SEQ ID NO: 175022 - RNA, 18 nt, Artificial Sequence
  Synthetic
agcagggagcggaggaaa

SEQ ID NO: 175023 - RNA, 19 nt, Artificial Sequence
  Synthetic
gagcagggagcggaggaaa

SEQ ID NO: 175024 - RNA, 20 nt, Artificial Sequence
  Synthetic
ggagcagggagcggaggaaa

SEQ ID NO: 175025 - RNA, 21 nt, Artificial Sequence
  Synthetic
uggagcagggagcggaggaaa

SEQ ID NO: 175026 - RNA, 22 nt, Artificial Sequence
  Synthetic
cuggagcagggagcggaggaaa

SEQ ID NO: 175027 - RNA, 23 nt, Artificial Sequence
  Synthetic
gcuggagcagggagcggaggaaa

SEQ ID NO: 175028 - RNA, 24 nt, Artificial Sequence
  Synthetic
agcuggagcagggagcggaggaaa

SEQ ID NO: 175029 - RNA, 18 nt, Artificial Sequence
  Synthetic
auggaaaagaugaggaaa

SEQ ID NO: 175030 - RNA, 19 nt, Artificial Sequence
  Synthetic
uauggaaaagaugaggaaa

SEQ ID NO: 175031 - RNA, 20 nt, Artificial Sequence
  Synthetic
guauggaaaagaugaggaaa

SEQ ID NO: 175032 - RNA, 21 nt, Artificial Sequence
  Synthetic
aguauggaaaagaugaggaaa

SEQ ID NO: 175033 - RNA, 22 nt, Artificial Sequence
  Synthetic
uaguauggaaaagaugaggaaa

SEQ ID NO: 175034 - RNA, 23 nt, Artificial Sequence
  Synthetic
uuaguauggaaaagaugaggaaa

SEQ ID NO: 175035 - RNA, 24 nt, Artificial Sequence
  Synthetic
uuuaguauggaaaagaugaggaaa

SEQ ID NO: 175036 - RNA, 18 nt, Artificial Sequence
  Synthetic
ggagaaguacugaggaaa

SEQ ID NO: 175037 - RNA, 19 nt, Artificial Sequence
  Synthetic
aggagaaguacugaggaaa

SEQ ID NO: 175038 - RNA, 20 nt, Artificial Sequence
  Synthetic
aaggagaaguacugaggaaa

SEQ ID NO: 175039 - RNA, 21 nt, Artificial Sequence
  Synthetic
gaaggagaaguacugaggaaa

SEQ ID NO: 175040 - RNA, 22 nt, Artificial Sequence
  Synthetic
ggaaggagaaguacugaggaaa

SEQ ID NO: 175041 - RNA, 23 nt, Artificial Sequence
  Synthetic
aggaaggagaaguacugaggaaa

SEQ ID NO: 175042 - RNA, 24 nt, Artificial Sequence
  Synthetic
caggaaggagaaguacugaggaaa

SEQ ID NO: 175043 - RNA, 18 nt, Artificial Sequence
  Synthetic
guugaggaugugaggaaa

SEQ ID NO: 175044 - RNA, 19 nt, Artificial Sequence
  Synthetic
uguugaggaugugaggaaa

SEQ ID NO: 175045 - RNA, 20 nt, Artificial Sequence
  Synthetic
uuguugaggaugugaggaaa

SEQ ID NO: 175046 - RNA, 21 nt, Artificial Sequence
  Synthetic
guuguugaggaugugaggaaa

SEQ ID NO: 175047 - RNA, 22 nt, Artificial Sequence
  Synthetic
uguuguugaggaugugaggaaa

SEQ ID NO: 175048 - RNA, 23 nt, Artificial Sequence
  Synthetic
auguuguugaggaugugaggaaa

SEQ ID NO: 175049 - RNA, 24 nt, Artificial Sequence
  Synthetic
aauguuguugaggaugugaggaaa

SEQ ID NO: 175050 - RNA, 18 nt, Artificial Sequence
  Synthetic
aggguaguugugaggaaa

SEQ ID NO: 175051 - RNA, 19 nt, Artificial Sequence
  Synthetic
caggguaguugugaggaaa

SEQ ID NO: 175052 - RNA, 20 nt, Artificial Sequence
  Synthetic
ucaggguaguugugaggaaa

SEQ ID NO: 175053 - RNA, 21 nt, Artificial Sequence
  Synthetic
gucaggguaguugugaggaaa

SEQ ID NO: 175054 - RNA, 22 nt, Artificial Sequence
  Synthetic
ggucaggguaguugugaggaaa

SEQ ID NO: 175055 - RNA, 23 nt, Artificial Sequence
  Synthetic
gggucaggguaguugugaggaaa

SEQ ID NO: 175056 - RNA, 24 nt, Artificial Sequence
  Synthetic
agggucaggguaguugugaggaaa

SEQ ID NO: 175057 - RNA, 18 nt, Artificial Sequence
  Synthetic
guuugggaguugaggaaa

SEQ ID NO: 175058 - RNA, 19 nt, Artificial Sequence
  Synthetic
aguuugggaguugaggaaa

SEQ ID NO: 175059 - RNA, 20 nt, Artificial Sequence
  Synthetic
caguuugggaguugaggaaa

SEQ ID NO: 175060 - RNA, 21 nt, Artificial Sequence
  Synthetic
ucaguuugggaguugaggaaa

SEQ ID NO: 175061 - RNA, 22 nt, Artificial Sequence
  Synthetic
uucaguuugggaguugaggaaa

SEQ ID NO: 175062 - RNA, 23 nt, Artificial Sequence
  Synthetic
uuucaguuugggaguugaggaaa

SEQ ID NO: 175063 - RNA, 24 nt, Artificial Sequence
  Synthetic
auuucaguuugggaguugaggaaa

SEQ ID NO: 175064 - RNA, 18 nt, Artificial Sequence
  Synthetic
aaagcuagguugaggaaa

SEQ ID NO: 175065 - RNA, 19 nt, Artificial Sequence
  Synthetic
uaaagcuagguugaggaaa

SEQ ID NO: 175066 - RNA, 20 nt, Artificial Sequence
  Synthetic
cuaaagcuagguugaggaaa

SEQ ID NO: 175067 - RNA, 21 nt, Artificial Sequence
  Synthetic
acuaaagcuagguugaggaaa

SEQ ID NO: 175068 - RNA, 22 nt, Artificial Sequence
  Synthetic
gacuaaagcuagguugaggaaa

SEQ ID NO: 175069 - RNA, 23 nt, Artificial Sequence
  Synthetic
ugacuaaagcuagguugaggaaa

SEQ ID NO: 175070 - RNA, 24 nt, Artificial Sequence
  Synthetic
augacuaaagcuagguugaggaaa

SEQ ID NO: 175071 - RNA, 18 nt, Artificial Sequence
  Synthetic
uauaguauucauaggaaa

SEQ ID NO: 175072 - RNA, 19 nt, Artificial Sequence
  Synthetic
auauaguauucauaggaaa

SEQ ID NO: 175073 - RNA, 20 nt, Artificial Sequence
  Synthetic
aauauaguauucauaggaaa

SEQ ID NO: 175074 - RNA, 21 nt, Artificial Sequence
  Synthetic
aaauauaguauucauaggaaa

SEQ ID NO: 175075 - RNA, 22 nt, Artificial Sequence
  Synthetic
aaaauauaguauucauaggaaa

SEQ ID NO: 175076 - RNA, 23 nt, Artificial Sequence
  Synthetic
aaaaauauaguauucauaggaaa

SEQ ID NO: 175077 - RNA, 24 nt, Artificial Sequence
  Synthetic
aaaaaauauaguauucauaggaaa

SEQ ID NO: 175078 - RNA, 18 nt, Artificial Sequence
  Synthetic
acuuggugauauaggaaa

SEQ ID NO: 175079 - RNA, 19 nt, Artificial Sequence
  Synthetic
uacuuggugauauaggaaa

SEQ ID NO: 175080 - RNA, 20 nt, Artificial Sequence
  Synthetic
guacuuggugauauaggaaa

SEQ ID NO: 175081 - RNA, 21 nt, Artificial Sequence
  Synthetic
uguacuuggugauauaggaaa

SEQ ID NO: 175082 - RNA, 22 nt, Artificial Sequence
  Synthetic
cuguacuuggugauauaggaaa

SEQ ID NO: 175083 - RNA, 23 nt, Artificial Sequence
  Synthetic
gcuguacuuggugauauaggaaa

SEQ ID NO: 175084 - RNA, 24 nt, Artificial Sequence
  Synthetic
cgcuguacuuggugauauaggaaa

SEQ ID NO: 175085 - RNA, 18 nt, Artificial Sequence
  Synthetic
uucaucauuucuaggaaa

SEQ ID NO: 175086 - RNA, 19 nt, Artificial Sequence
  Synthetic
guucaucauuucuaggaaa

SEQ ID NO: 175087 - RNA, 20 nt, Artificial Sequence
  Synthetic
aguucaucauuucuaggaaa

SEQ ID NO: 175088 - RNA, 21 nt, Artificial Sequence
  Synthetic
uaguucaucauuucuaggaaa

SEQ ID NO: 175089 - RNA, 22 nt, Artificial Sequence
  Synthetic
cuaguucaucauuucuaggaaa

SEQ ID NO: 175090 - RNA, 23 nt, Artificial Sequence
  Synthetic
ucuaguucaucauuucuaggaaa

SEQ ID NO: 175091 - RNA, 24 nt, Artificial Sequence
  Synthetic
cucuaguucaucauuucuaggaaa

SEQ ID NO: 175092 - RNA, 18 nt, Artificial Sequence
  Synthetic
uaguacaaaaguaggaaa

SEQ ID NO: 175093 - RNA, 19 nt, Artificial Sequence
  Synthetic
uuaguacaaaaguaggaaa

SEQ ID NO: 175094 - RNA, 20 nt, Artificial Sequence
  Synthetic
auuaguacaaaaguaggaaa

SEQ ID NO: 175095 - RNA, 21 nt, Artificial Sequence
  Synthetic
aauuaguacaaaaguaggaaa

SEQ ID NO: 175096 - RNA, 22 nt, Artificial Sequence
  Synthetic
gaauuaguacaaaaguaggaaa

SEQ ID NO: 175097 - RNA, 23 nt, Artificial Sequence
  Synthetic
ugaauuaguacaaaaguaggaaa

SEQ ID NO: 175098 - RNA, 24 nt, Artificial Sequence
  Synthetic
uugaauuaguacaaaaguaggaaa

SEQ ID NO: 175099 - RNA, 18 nt, Artificial Sequence
  Synthetic
uuuucaguaagccggaaa

SEQ ID NO: 175100 - RNA, 19 nt, Artificial Sequence
  Synthetic
auuuucaguaagccggaaa

SEQ ID NO: 175101 - RNA, 20 nt, Artificial Sequence
  Synthetic
cauuuucaguaagccggaaa

SEQ ID NO: 175102 - RNA, 21 nt, Artificial Sequence
  Synthetic
ucauuuucaguaagccggaaa

SEQ ID NO: 175103 - RNA, 22 nt, Artificial Sequence
  Synthetic
aucauuuucaguaagccggaaa

SEQ ID NO: 175104 - RNA, 23 nt, Artificial Sequence
  Synthetic
aaucauuuucaguaagccggaaa

SEQ ID NO: 175105 - RNA, 24 nt, Artificial Sequence
  Synthetic
uaaucauuuucaguaagccggaaa

SEQ ID NO: 175106 - RNA, 18 nt, Artificial Sequence
  Synthetic
acugagagcaaagggaaa

SEQ ID NO: 175107 - RNA, 19 nt, Artificial Sequence
  Synthetic
aacugagagcaaagggaaa

SEQ ID NO: 175108 - RNA, 20 nt, Artificial Sequence
  Synthetic
gaacugagagcaaagggaaa

SEQ ID NO: 175109 - RNA, 21 nt, Artificial Sequence
  Synthetic
ggaacugagagcaaagggaaa

SEQ ID NO: 175110 - RNA, 22 nt, Artificial Sequence
  Synthetic
uggaacugagagcaaagggaaa

SEQ ID NO: 175111 - RNA, 23 nt, Artificial Sequence
  Synthetic
cuggaacugagagcaaagggaaa

SEQ ID NO: 175112 - RNA, 24 nt, Artificial Sequence
  Synthetic
gcuggaacugagagcaaagggaaa

SEQ ID NO: 175113 - RNA, 18 nt, Artificial Sequence
  Synthetic
aaaauggaagaagggaaa

SEQ ID NO: 175114 - RNA, 19 nt, Artificial Sequence
  Synthetic
uaaaauggaagaagggaaa

SEQ ID NO: 175115 - RNA, 20 nt, Artificial Sequence
  Synthetic
uuaaaauggaagaagggaaa

SEQ ID NO: 175116 - RNA, 21 nt, Artificial Sequence
  Synthetic
uuuaaaauggaagaagggaaa

SEQ ID NO: 175117 - RNA, 22 nt, Artificial Sequence
  Synthetic
cuuuaaaauggaagaagggaaa

SEQ ID NO: 175118 - RNA, 23 nt, Artificial Sequence
  Synthetic
acuuuaaaauggaagaagggaaa

SEQ ID NO: 175119 - RNA, 24 nt, Artificial Sequence
  Synthetic
uacuuuaaaauggaagaagggaaa

SEQ ID NO: 175120 - RNA, 18 nt, Artificial Sequence
  Synthetic
uguggcuaauaagggaaa

SEQ ID NO: 175121 - RNA, 19 nt, Artificial Sequence
  Synthetic
auguggcuaauaagggaaa

SEQ ID NO: 175122 - RNA, 20 nt, Artificial Sequence
  Synthetic
uauguggcuaauaagggaaa

SEQ ID NO: 175123 - RNA, 21 nt, Artificial Sequence
  Synthetic
uuauguggcuaauaagggaaa

SEQ ID NO: 175124 - RNA, 22 nt, Artificial Sequence
  Synthetic
auuauguggcuaauaagggaaa

SEQ ID NO: 175125 - RNA, 23 nt, Artificial Sequence
  Synthetic
cauuauguggcuaauaagggaaa

SEQ ID NO: 175126 - RNA, 24 nt, Artificial Sequence
  Synthetic
ucauuauguggcuaauaagggaaa

SEQ ID NO: 175127 - RNA, 18 nt, Artificial Sequence
  Synthetic
aaaaagaauuaagggaaa

SEQ ID NO: 175128 - RNA, 19 nt, Artificial Sequence
  Synthetic
aaaaaagaauuaagggaaa

SEQ ID NO: 175129 - RNA, 20 nt, Artificial Sequence
  Synthetic
uaaaaaagaauuaagggaaa

SEQ ID NO: 175130 - RNA, 21 nt, Artificial Sequence
  Synthetic
cuaaaaaagaauuaagggaaa

SEQ ID NO: 175131 - RNA, 22 nt, Artificial Sequence
  Synthetic
gcuaaaaaagaauuaagggaaa

SEQ ID NO: 175132 - RNA, 23 nt, Artificial Sequence
  Synthetic
agcuaaaaaagaauuaagggaaa

SEQ ID NO: 175133 - RNA, 24 nt, Artificial Sequence
  Synthetic
uagcuaaaaaagaauuaagggaaa

SEQ ID NO: 175134 - RNA, 18 nt, Artificial Sequence
  Synthetic
ggaaaaaagacagggaaa

SEQ ID NO: 175135 - RNA, 19 nt, Artificial Sequence
  Synthetic
uggaaaaaagacagggaaa

SEQ ID NO: 175136 - RNA, 20 nt, Artificial Sequence
  Synthetic
auggaaaaaagacagggaaa

SEQ ID NO: 175137 - RNA, 21 nt, Artificial Sequence
  Synthetic
cauggaaaaaagacagggaaa

SEQ ID NO: 175138 - RNA, 22 nt, Artificial Sequence
  Synthetic
ccauggaaaaaagacagggaaa

SEQ ID NO: 175139 - RNA, 23 nt, Artificial Sequence
  Synthetic
uccauggaaaaaagacagggaaa

SEQ ID NO: 175140 - RNA, 24 nt, Artificial Sequence
  Synthetic
cuccauggaaaaaagacagggaaa

SEQ ID NO: 175141 - RNA, 18 nt, Artificial Sequence
  Synthetic
aaaugauacucagggaaa

SEQ ID NO: 175142 - RNA, 19 nt, Artificial Sequence
  Synthetic
gaaaugauacucagggaaa

SEQ ID NO: 175143 - RNA, 20 nt, Artificial Sequence
  Synthetic
cgaaaugauacucagggaaa

SEQ ID NO: 175144 - RNA, 21 nt, Artificial Sequence
  Synthetic
ucgaaaugauacucagggaaa

SEQ ID NO: 175145 - RNA, 22 nt, Artificial Sequence
  Synthetic
cucgaaaugauacucagggaaa

SEQ ID NO: 175146 - RNA, 23 nt, Artificial Sequence
  Synthetic
ccucgaaaugauacucagggaaa

SEQ ID NO: 175147 - RNA, 24 nt, Artificial Sequence
  Synthetic
gccucgaaaugauacucagggaaa

SEQ ID NO: 175148 - RNA, 18 nt, Artificial Sequence
  Synthetic
uggggaaaaggagggaaa

SEQ ID NO: 175149 - RNA, 19 nt, Artificial Sequence
  Synthetic
uuggggaaaaggagggaaa

SEQ ID NO: 175150 - RNA, 20 nt, Artificial Sequence
  Synthetic
auuggggaaaaggagggaaa

SEQ ID NO: 175151 - RNA, 21 nt, Artificial Sequence
  Synthetic
cauuggggaaaaggagggaaa

SEQ ID NO: 175152 - RNA, 22 nt, Artificial Sequence
  Synthetic
acauuggggaaaaggagggaaa

SEQ ID NO: 175153 - RNA, 23 nt, Artificial Sequence
  Synthetic
uacauuggggaaaaggagggaaa

SEQ ID NO: 175154 - RNA, 24 nt, Artificial Sequence
  Synthetic
cuacauuggggaaaaggagggaaa

SEQ ID NO: 175155 - RNA, 18 nt, Artificial Sequence
  Synthetic
ccggaagcaggagggaaa

SEQ ID NO: 175156 - RNA, 19 nt, Artificial Sequence
  Synthetic
cccggaagcaggagggaaa

SEQ ID NO: 175157 - RNA, 20 nt, Artificial Sequence
  Synthetic
acccggaagcaggagggaaa

SEQ ID NO: 175158 - RNA, 21 nt, Artificial Sequence
  Synthetic
gacccggaagcaggagggaaa

SEQ ID NO: 175159 - RNA, 22 nt, Artificial Sequence
  Synthetic
ugacccggaagcaggagggaaa

SEQ ID NO: 175160 - RNA, 23 nt, Artificial Sequence
  Synthetic
gugacccggaagcaggagggaaa

SEQ ID NO: 175161 - RNA, 24 nt, Artificial Sequence
  Synthetic
ggugacccggaagcaggagggaaa

SEQ ID NO: 175162 - RNA, 18 nt, Artificial Sequence
  Synthetic
uuaagaaaguuagggaaa

SEQ ID NO: 175163 - RNA, 19 nt, Artificial Sequence
  Synthetic
uuuaagaaaguuagggaaa

SEQ ID NO: 175164 - RNA, 20 nt, Artificial Sequence
  Synthetic
uuuuaagaaaguuagggaaa

SEQ ID NO: 175165 - RNA, 21 nt, Artificial Sequence
  Synthetic
auuuuaagaaaguuagggaaa

SEQ ID NO: 175166 - RNA, 22 nt, Artificial Sequence
  Synthetic
uauuuuaagaaaguuagggaaa

SEQ ID NO: 175167 - RNA, 23 nt, Artificial Sequence
  Synthetic
uuauuuuaagaaaguuagggaaa

SEQ ID NO: 175168 - RNA, 24 nt, Artificial Sequence
  Synthetic
guuauuuuaagaaaguuagggaaa

SEQ ID NO: 175169 - RNA, 18 nt, Artificial Sequence
  Synthetic
acacaaacuuuagggaaa

SEQ ID NO: 175170 - RNA, 19 nt, Artificial Sequence
  Synthetic
gacacaaacuuuagggaaa

SEQ ID NO: 175171 - RNA, 20 nt, Artificial Sequence
  Synthetic
agacacaaacuuuagggaaa

SEQ ID NO: 175172 - RNA, 21 nt, Artificial Sequence
  Synthetic
aagacacaaacuuuagggaaa

SEQ ID NO: 175173 - RNA, 22 nt, Artificial Sequence
  Synthetic
caagacacaaacuuuagggaaa

SEQ ID NO: 175174 - RNA, 23 nt, Artificial Sequence
  Synthetic
acaagacacaaacuuuagggaaa

SEQ ID NO: 175175 - RNA, 24 nt, Artificial Sequence
  Synthetic
gacaagacacaaacuuuagggaaa

SEQ ID NO: 175176 - RNA, 18 nt, Artificial Sequence
  Synthetic
ccgggacaacaggggaaa

SEQ ID NO: 175177 - RNA, 19 nt, Artificial Sequence
  Synthetic
uccgggacaacaggggaaa

SEQ ID NO: 175178 - RNA, 20 nt, Artificial Sequence
  Synthetic
guccgggacaacaggggaaa

SEQ ID NO: 175179 - RNA, 21 nt, Artificial Sequence
  Synthetic
aguccgggacaacaggggaaa

SEQ ID NO: 175180 - RNA, 22 nt, Artificial Sequence
  Synthetic
gaguccgggacaacaggggaaa

SEQ ID NO: 175181 - RNA, 23 nt, Artificial Sequence
  Synthetic
ggaguccgggacaacaggggaaa

SEQ ID NO: 175182 - RNA, 24 nt, Artificial Sequence
  Synthetic
aggaguccgggacaacaggggaaa

SEQ ID NO: 175183 - RNA, 18 nt, Artificial Sequence
  Synthetic
aucacuacauuggggaaa

SEQ ID NO: 175184 - RNA, 19 nt, Artificial Sequence
  Synthetic
aaucacuacauuggggaaa

SEQ ID NO: 175185 - RNA, 20 nt, Artificial Sequence
  Synthetic
aaaucacuacauuggggaaa

SEQ ID NO: 175186 - RNA, 21 nt, Artificial Sequence
  Synthetic
caaaucacuacauuggggaaa

SEQ ID NO: 175187 - RNA, 22 nt, Artificial Sequence
  Synthetic
acaaaucacuacauuggggaaa

SEQ ID NO: 175188 - RNA, 23 nt, Artificial Sequence
  Synthetic
cacaaaucacuacauuggggaaa

SEQ ID NO: 175189 - RNA, 24 nt, Artificial Sequence
  Synthetic
acacaaaucacuacauuggggaaa

SEQ ID NO: 175190 - RNA, 18 nt, Artificial Sequence
  Synthetic
gucaauauguuggggaaa

SEQ ID NO: 175191 - RNA, 19 nt, Artificial Sequence
  Synthetic
ugucaauauguuggggaaa

SEQ ID NO: 175192 - RNA, 20 nt, Artificial Sequence
  Synthetic
uugucaauauguuggggaaa

SEQ ID NO: 175193 - RNA, 21 nt, Artificial Sequence
  Synthetic
guugucaauauguuggggaaa

SEQ ID NO: 175194 - RNA, 22 nt, Artificial Sequence
  Synthetic
aguugucaauauguuggggaaa

SEQ ID NO: 175195 - RNA, 23 nt, Artificial Sequence
  Synthetic
uaguugucaauauguuggggaaa

SEQ ID NO: 175196 - RNA, 24 nt, Artificial Sequence
  Synthetic
cuaguugucaauauguuggggaaa

SEQ ID NO: 175197 - RNA, 18 nt, Artificial Sequence
  Synthetic
cagccguccagugggaaa

SEQ ID NO: 175198 - RNA, 19 nt, Artificial Sequence
  Synthetic
gcagccguccagugggaaa

SEQ ID NO: 175199 - RNA, 20 nt, Artificial Sequence
  Synthetic
agcagccguccagugggaaa

SEQ ID NO: 175200 - RNA, 21 nt, Artificial Sequence
  Synthetic
gagcagccguccagugggaaa

SEQ ID NO: 175201 - RNA, 22 nt, Artificial Sequence
  Synthetic
ggagcagccguccagugggaaa

SEQ ID NO: 175202 - RNA, 23 nt, Artificial Sequence
  Synthetic
gggagcagccguccagugggaaa

SEQ ID NO: 175203 - RNA, 24 nt, Artificial Sequence
  Synthetic
agggagcagccguccagugggaaa

SEQ ID NO: 175204 - RNA, 18 nt, Artificial Sequence
  Synthetic
auaaugugaggugggaaa

SEQ ID NO: 175205 - RNA, 19 nt, Artificial Sequence
  Synthetic
cauaaugugaggugggaaa

SEQ ID NO: 175206 - RNA, 20 nt, Artificial Sequence
  Synthetic
ucauaaugugaggugggaaa

SEQ ID NO: 175207 - RNA, 21 nt, Artificial Sequence
  Synthetic
uucauaaugugaggugggaaa

SEQ ID NO: 175208 - RNA, 22 nt, Artificial Sequence
  Synthetic
guucauaaugugaggugggaaa

SEQ ID NO: 175209 - RNA, 23 nt, Artificial Sequence
  Synthetic
uguucauaaugugaggugggaaa

SEQ ID NO: 175210 - RNA, 24 nt, Artificial Sequence
  Synthetic
cuguucauaaugugaggugggaaa

SEQ ID NO: 175211 - RNA, 18 nt, Artificial Sequence
  Synthetic
aauacuccgauugggaaa

SEQ ID NO: 175212 - RNA, 19 nt, Artificial Sequence
  Synthetic
caauacuccgauugggaaa

SEQ ID NO: 175213 - RNA, 20 nt, Artificial Sequence
  Synthetic
ccaauacuccgauugggaaa

SEQ ID NO: 175214 - RNA, 21 nt, Artificial Sequence
  Synthetic
uccaauacuccgauugggaaa

SEQ ID NO: 175215 - RNA, 22 nt, Artificial Sequence
  Synthetic
uuccaauacuccgauugggaaa

SEQ ID NO: 175216 - RNA, 23 nt, Artificial Sequence
  Synthetic
auuccaauacuccgauugggaaa

SEQ ID NO: 175217 - RNA, 24 nt, Artificial Sequence
  Synthetic
aauuccaauacuccgauugggaaa

SEQ ID NO: 175218 - RNA, 18 nt, Artificial Sequence
  Synthetic
gauggcauauuugggaaa

SEQ ID NO: 175219 - RNA, 19 nt, Artificial Sequence
  Synthetic
ugauggcauauuugggaaa

SEQ ID NO: 175220 - RNA, 20 nt, Artificial Sequence
  Synthetic
gugauggcauauuugggaaa

SEQ ID NO: 175221 - RNA, 21 nt, Artificial Sequence
  Synthetic
ugugauggcauauuugggaaa

SEQ ID NO: 175222 - RNA, 22 nt, Artificial Sequence
  Synthetic
augugauggcauauuugggaaa

SEQ ID NO: 175223 - RNA, 23 nt, Artificial Sequence
  Synthetic
uaugugauggcauauuugggaaa

SEQ ID NO: 175224 - RNA, 24 nt, Artificial Sequence
  Synthetic
auaugugauggcauauuugggaaa

SEQ ID NO: 175225 - RNA, 18 nt, Artificial Sequence
  Synthetic
uaucucuuauuugggaaa

SEQ ID NO: 175226 - RNA, 19 nt, Artificial Sequence
  Synthetic
cuaucucuuauuugggaaa

SEQ ID NO: 175227 - RNA, 20 nt, Artificial Sequence
  Synthetic
ucuaucucuuauuugggaaa

SEQ ID NO: 175228 - RNA, 21 nt, Artificial Sequence
  Synthetic
uucuaucucuuauuugggaaa

SEQ ID NO: 175229 - RNA, 22 nt, Artificial Sequence
  Synthetic
auucuaucucuuauuugggaaa

SEQ ID NO: 175230 - RNA, 23 nt, Artificial Sequence
  Synthetic
aauucuaucucuuauuugggaaa

SEQ ID NO: 175231 - RNA, 24 nt, Artificial Sequence
  Synthetic
caauucuaucucuuauuugggaaa

SEQ ID NO: 175232 - RNA, 18 nt, Artificial Sequence
  Synthetic
agguuuuuguuugggaaa

SEQ ID NO: 175233 - RNA, 19 nt, Artificial Sequence
  Synthetic
gagguuuuuguuugggaaa

SEQ ID NO: 175234 - RNA, 20 nt, Artificial Sequence
  Synthetic
ugagguuuuuguuugggaaa

SEQ ID NO: 175235 - RNA, 21 nt, Artificial Sequence
  Synthetic
cugagguuuuuguuugggaaa

SEQ ID NO: 175236 - RNA, 22 nt, Artificial Sequence
  Synthetic
ucugagguuuuuguuugggaaa

SEQ ID NO: 175237 - RNA, 23 nt, Artificial Sequence
  Synthetic
uucugagguuuuuguuugggaaa

SEQ ID NO: 175238 - RNA, 24 nt, Artificial Sequence
  Synthetic
cuucugagguuuuuguuugggaaa

SEQ ID NO: 175239 - RNA, 18 nt, Artificial Sequence
  Synthetic
uguuuucuccaauggaaa

SEQ ID NO: 175240 - RNA, 19 nt, Artificial Sequence
  Synthetic
cuguuuucuccaauggaaa

SEQ ID NO: 175241 - RNA, 20 nt, Artificial Sequence
  Synthetic
ucuguuuucuccaauggaaa

SEQ ID NO: 175242 - RNA, 21 nt, Artificial Sequence
  Synthetic
cucuguuuucuccaauggaaa

SEQ ID NO: 175243 - RNA, 22 nt, Artificial Sequence
  Synthetic
ccucuguuuucuccaauggaaa

SEQ ID NO: 175244 - RNA, 23 nt, Artificial Sequence
  Synthetic
gccucuguuuucuccaauggaaa

SEQ ID NO: 175245 - RNA, 24 nt, Artificial Sequence
  Synthetic
ggccucuguuuucuccaauggaaa

SEQ ID NO: 175246 - RNA, 18 nt, Artificial Sequence
  Synthetic
auuaauguucaauggaaa

SEQ ID NO: 175247 - RNA, 19 nt, Artificial Sequence
  Synthetic
gauuaauguucaauggaaa

SEQ ID NO: 175248 - RNA, 20 nt, Artificial Sequence
  Synthetic
ugauuaauguucaauggaaa

SEQ ID NO: 175249 - RNA, 21 nt, Artificial Sequence
  Synthetic
uugauuaauguucaauggaaa

SEQ ID NO: 175250 - RNA, 22 nt, Artificial Sequence
  Synthetic
uuugauuaauguucaauggaaa

SEQ ID NO: 175251 - RNA, 23 nt, Artificial Sequence
  Synthetic
auuugauuaauguucaauggaaa

SEQ ID NO: 175252 - RNA, 24 nt, Artificial Sequence
  Synthetic
aauuugauuaauguucaauggaaa

SEQ ID NO: 175253 - RNA, 18 nt, Artificial Sequence
  Synthetic
agaguaacugaauggaaa

SEQ ID NO: 175254 - RNA, 19 nt, Artificial Sequence
  Synthetic
gagaguaacugaauggaaa

SEQ ID NO: 175255 - RNA, 20 nt, Artificial Sequence
  Synthetic
ggagaguaacugaauggaaa

SEQ ID NO: 175256 - RNA, 21 nt, Artificial Sequence
  Synthetic
aggagaguaacugaauggaaa

SEQ ID NO: 175257 - RNA, 22 nt, Artificial Sequence
  Synthetic
aaggagaguaacugaauggaaa

SEQ ID NO: 175258 - RNA, 23 nt, Artificial Sequence
  Synthetic
aaaggagaguaacugaauggaaa

SEQ ID NO: 175259 - RNA, 24 nt, Artificial Sequence
  Synthetic
caaaggagaguaacugaauggaaa

SEQ ID NO: 175260 - RNA, 18 nt, Artificial Sequence
  Synthetic
cacacaacuacauggaaa

SEQ ID NO: 175261 - RNA, 19 nt, Artificial Sequence
  Synthetic
ccacacaacuacauggaaa

SEQ ID NO: 175262 - RNA, 20 nt, Artificial Sequence
  Synthetic
accacacaacuacauggaaa

SEQ ID NO: 175263 - RNA, 21 nt, Artificial Sequence
  Synthetic
aaccacacaacuacauggaaa

SEQ ID NO: 175264 - RNA, 22 nt, Artificial Sequence
  Synthetic
aaaccacacaacuacauggaaa

SEQ ID NO: 175265 - RNA, 23 nt, Artificial Sequence
  Synthetic
aaaaccacacaacuacauggaaa

SEQ ID NO: 175266 - RNA, 24 nt, Artificial Sequence
  Synthetic
caaaaccacacaacuacauggaaa

SEQ ID NO: 175267 - RNA, 18 nt, Artificial Sequence
  Synthetic
uagccaaaagcauggaaa

SEQ ID NO: 175268 - RNA, 19 nt, Artificial Sequence
  Synthetic
auagccaaaagcauggaaa

SEQ ID NO: 175269 - RNA, 20 nt, Artificial Sequence
  Synthetic
aauagccaaaagcauggaaa

SEQ ID NO: 175270 - RNA, 21 nt, Artificial Sequence
  Synthetic
aaauagccaaaagcauggaaa

SEQ ID NO: 175271 - RNA, 22 nt, Artificial Sequence
  Synthetic
uaaauagccaaaagcauggaaa

SEQ ID NO: 175272 - RNA, 23 nt, Artificial Sequence
  Synthetic
auaaauagccaaaagcauggaaa

SEQ ID NO: 175273 - RNA, 24 nt, Artificial Sequence
  Synthetic
uauaaauagccaaaagcauggaaa

SEQ ID NO: 175274 - RNA, 18 nt, Artificial Sequence
  Synthetic
augcaaguaucauggaaa

SEQ ID NO: 175275 - RNA, 19 nt, Artificial Sequence
  Synthetic
caugcaaguaucauggaaa

SEQ ID NO: 175276 - RNA, 20 nt, Artificial Sequence
  Synthetic
gcaugcaaguaucauggaaa

SEQ ID NO: 175277 - RNA, 21 nt, Artificial Sequence
  Synthetic
ggcaugcaaguaucauggaaa

SEQ ID NO: 175278 - RNA, 22 nt, Artificial Sequence
  Synthetic
aggcaugcaaguaucauggaaa

SEQ ID NO: 175279 - RNA, 23 nt, Artificial Sequence
  Synthetic
uaggcaugcaaguaucauggaaa

SEQ ID NO: 175280 - RNA, 24 nt, Artificial Sequence
  Synthetic
auaggcaugcaaguaucauggaaa

SEQ ID NO: 175281 - RNA, 18 nt, Artificial Sequence
  Synthetic
agcaaacuuauauggaaa

SEQ ID NO: 175282 - RNA, 19 nt, Artificial Sequence
  Synthetic
uagcaaacuuauauggaaa

SEQ ID NO: 175283 - RNA, 20 nt, Artificial Sequence
  Synthetic
uuagcaaacuuauauggaaa

SEQ ID NO: 175284 - RNA, 21 nt, Artificial Sequence
  Synthetic
cuuagcaaacuuauauggaaa

SEQ ID NO: 175285 - RNA, 22 nt, Artificial Sequence
  Synthetic
ccuuagcaaacuuauauggaaa

SEQ ID NO: 175286 - RNA, 23 nt, Artificial Sequence
  Synthetic
uccuuagcaaacuuauauggaaa

SEQ ID NO: 175287 - RNA, 24 nt, Artificial Sequence
  Synthetic
auccuuagcaaacuuauauggaaa

SEQ ID NO: 175288 - RNA, 18 nt, Artificial Sequence
  Synthetic
cauuaucuuauauggaaa

SEQ ID NO: 175289 - RNA, 19 nt, Artificial Sequence
  Synthetic
ucauuaucuuauauggaaa

SEQ ID NO: 175290 - RNA, 20 nt, Artificial Sequence
  Synthetic
uucauuaucuuauauggaaa

SEQ ID NO: 175291 - RNA, 21 nt, Artificial Sequence
  Synthetic
uuucauuaucuuauauggaaa

SEQ ID NO: 175292 - RNA, 22 nt, Artificial Sequence
  Synthetic
guuucauuaucuuauauggaaa

SEQ ID NO: 175293 - RNA, 23 nt, Artificial Sequence
  Synthetic
aguuucauuaucuuauauggaaa

SEQ ID NO: 175294 - RNA, 24 nt, Artificial Sequence
  Synthetic
uaguuucauuaucuuauauggaaa

SEQ ID NO: 175295 - RNA, 18 nt, Artificial Sequence
  Synthetic
agagaaaaacacuggaaa

SEQ ID NO: 175296 - RNA, 19 nt, Artificial Sequence
  Synthetic
aagagaaaaacacuggaaa

SEQ ID NO: 175297 - RNA, 20 nt, Artificial Sequence
  Synthetic
aaagagaaaaacacuggaaa

SEQ ID NO: 175298 - RNA, 21 nt, Artificial Sequence
  Synthetic
aaaagagaaaaacacuggaaa

SEQ ID NO: 175299 - RNA, 22 nt, Artificial Sequence
  Synthetic
uaaaagagaaaaacacuggaaa

SEQ ID NO: 175300 - RNA, 23 nt, Artificial Sequence
  Synthetic
guaaaagagaaaaacacuggaaa

SEQ ID NO: 175301 - RNA, 24 nt, Artificial Sequence
  Synthetic
uguaaaagagaaaaacacuggaaa

SEQ ID NO: 175302 - RNA, 18 nt, Artificial Sequence
  Synthetic
cuuuuaaaccacuggaaa

SEQ ID NO: 175303 - RNA, 19 nt, Artificial Sequence
  Synthetic
ucuuuuaaaccacuggaaa

SEQ ID NO: 175304 - RNA, 20 nt, Artificial Sequence
  Synthetic
aucuuuuaaaccacuggaaa

SEQ ID NO: 175305 - RNA, 21 nt, Artificial Sequence
  Synthetic
aaucuuuuaaaccacuggaaa

SEQ ID NO: 175306 - RNA, 22 nt, Artificial Sequence
  Synthetic
aaaucuuuuaaaccacuggaaa

SEQ ID NO: 175307 - RNA, 23 nt, Artificial Sequence
  Synthetic
gaaaucuuuuaaaccacuggaaa

SEQ ID NO: 175308 - RNA, 24 nt, Artificial Sequence
  Synthetic
agaaaucuuuuaaaccacuggaaa

SEQ ID NO: 175309 - RNA, 18 nt, Artificial Sequence
  Synthetic
aguuuucucaccuggaaa

SEQ ID NO: 175310 - RNA, 19 nt, Artificial Sequence
  Synthetic
caguuuucucaccuggaaa

SEQ ID NO: 175311 - RNA, 20 nt, Artificial Sequence
  Synthetic
ucaguuuucucaccuggaaa

SEQ ID NO: 175312 - RNA, 21 nt, Artificial Sequence
  Synthetic
cucaguuuucucaccuggaaa

SEQ ID NO: 175313 - RNA, 22 nt, Artificial Sequence
  Synthetic
ucucaguuuucucaccuggaaa

SEQ ID NO: 175314 - RNA, 23 nt, Artificial Sequence
  Synthetic
gucucaguuuucucaccuggaaa

SEQ ID NO: 175315 - RNA, 24 nt, Artificial Sequence
  Synthetic
ggucucaguuuucucaccuggaaa

SEQ ID NO: 175316 - RNA, 18 nt, Artificial Sequence
  Synthetic
cauucacuccccuggaaa

SEQ ID NO: 175317 - RNA, 19 nt, Artificial Sequence
  Synthetic
ccauucacuccccuggaaa

SEQ ID NO: 175318 - RNA, 20 nt, Artificial Sequence
  Synthetic
accauucacuccccuggaaa

SEQ ID NO: 175319 - RNA, 21 nt, Artificial Sequence
  Synthetic
aaccauucacuccccuggaaa

SEQ ID NO: 175320 - RNA, 22 nt, Artificial Sequence
  Synthetic
gaaccauucacuccccuggaaa

SEQ ID NO: 175321 - RNA, 23 nt, Artificial Sequence
  Synthetic
agaaccauucacuccccuggaaa

SEQ ID NO: 175322 - RNA, 24 nt, Artificial Sequence
  Synthetic
uagaaccauucacuccccuggaaa

SEQ ID NO: 175323 - RNA, 18 nt, Artificial Sequence
  Synthetic
cacucuugucccuggaaa

SEQ ID NO: 175324 - RNA, 19 nt, Artificial Sequence
  Synthetic
ccacucuugucccuggaaa

SEQ ID NO: 175325 - RNA, 20 nt, Artificial Sequence
  Synthetic
cccacucuugucccuggaaa

SEQ ID NO: 175326 - RNA, 21 nt, Artificial Sequence
  Synthetic
acccacucuugucccuggaaa

SEQ ID NO: 175327 - RNA, 22 nt, Artificial Sequence
  Synthetic
aacccacucuugucccuggaaa

SEQ ID NO: 175328 - RNA, 23 nt, Artificial Sequence
  Synthetic
aaacccacucuugucccuggaaa

SEQ ID NO: 175329 - RNA, 24 nt, Artificial Sequence
  Synthetic
uaaacccacucuugucccuggaaa

SEQ ID NO: 175330 - RNA, 18 nt, Artificial Sequence
  Synthetic
cacucuguugccuggaaa

SEQ ID NO: 175331 - RNA, 19 nt, Artificial Sequence
  Synthetic
acacucuguugccuggaaa

SEQ ID NO: 175332 - RNA, 20 nt, Artificial Sequence
  Synthetic
gacacucuguugccuggaaa

SEQ ID NO: 175333 - RNA, 21 nt, Artificial Sequence
  Synthetic
ggacacucuguugccuggaaa

SEQ ID NO: 175334 - RNA, 22 nt, Artificial Sequence
  Synthetic
aggacacucuguugccuggaaa

SEQ ID NO: 175335 - RNA, 23 nt, Artificial Sequence
  Synthetic
aaggacacucuguugccuggaaa

SEQ ID NO: 175336 - RNA, 24 nt, Artificial Sequence
  Synthetic
gaaggacacucuguugccuggaaa

SEQ ID NO: 175337 - RNA, 18 nt, Artificial Sequence
  Synthetic
cagcagaggggcuggaaa

SEQ ID NO: 175338 - RNA, 19 nt, Artificial Sequence
  Synthetic
acagcagaggggcuggaaa

SEQ ID NO: 175339 - RNA, 20 nt, Artificial Sequence
  Synthetic
aacagcagaggggcuggaaa

SEQ ID NO: 175340 - RNA, 21 nt, Artificial Sequence
  Synthetic
uaacagcagaggggcuggaaa

SEQ ID NO: 175341 - RNA, 22 nt, Artificial Sequence
  Synthetic
guaacagcagaggggcuggaaa

SEQ ID NO: 175342 - RNA, 23 nt, Artificial Sequence
  Synthetic
uguaacagcagaggggcuggaaa

SEQ ID NO: 175343 - RNA, 24 nt, Artificial Sequence
  Synthetic
auguaacagcagaggggcuggaaa

SEQ ID NO: 175344 - RNA, 18 nt, Artificial Sequence
  Synthetic
gagauuuuugucuggaaa

SEQ ID NO: 175345 - RNA, 19 nt, Artificial Sequence
  Synthetic
ugagauuuuugucuggaaa

SEQ ID NO: 175346 - RNA, 20 nt, Artificial Sequence
  Synthetic
augagauuuuugucuggaaa

SEQ ID NO: 175347 - RNA, 21 nt, Artificial Sequence
  Synthetic
aaugagauuuuugucuggaaa

SEQ ID NO: 175348 - RNA, 22 nt, Artificial Sequence
  Synthetic
aaaugagauuuuugucuggaaa

SEQ ID NO: 175349 - RNA, 23 nt, Artificial Sequence
  Synthetic
aaaaugagauuuuugucuggaaa

SEQ ID NO: 175350 - RNA, 24 nt, Artificial Sequence
  Synthetic
gaaaaugagauuuuugucuggaaa

SEQ ID NO: 175351 - RNA, 18 nt, Artificial Sequence
  Synthetic
gaucuucagaaguggaaa

SEQ ID NO: 175352 - RNA, 19 nt, Artificial Sequence
  Synthetic
agaucuucagaaguggaaa

SEQ ID NO: 175353 - RNA, 20 nt, Artificial Sequence
  Synthetic
cagaucuucagaaguggaaa

SEQ ID NO: 175354 - RNA, 21 nt, Artificial Sequence
  Synthetic
acagaucuucagaaguggaaa

SEQ ID NO: 175355 - RNA, 22 nt, Artificial Sequence
  Synthetic
aacagaucuucagaaguggaaa

SEQ ID NO: 175356 - RNA, 23 nt, Artificial Sequence
  Synthetic
aaacagaucuucagaaguggaaa

SEQ ID NO: 175357 - RNA, 24 nt, Artificial Sequence
  Synthetic
gaaacagaucuucagaaguggaaa

SEQ ID NO: 175358 - RNA, 18 nt, Artificial Sequence
  Synthetic
cccccuggaagguggaaa

SEQ ID NO: 175359 - RNA, 19 nt, Artificial Sequence
  Synthetic
gcccccuggaagguggaaa

SEQ ID NO: 175360 - RNA, 20 nt, Artificial Sequence
  Synthetic
agcccccuggaagguggaaa

SEQ ID NO: 175361 - RNA, 21 nt, Artificial Sequence
  Synthetic
cagcccccuggaagguggaaa

SEQ ID NO: 175362 - RNA, 22 nt, Artificial Sequence
  Synthetic
ucagcccccuggaagguggaaa

SEQ ID NO: 175363 - RNA, 23 nt, Artificial Sequence
  Synthetic
gucagcccccuggaagguggaaa

SEQ ID NO: 175364 - RNA, 24 nt, Artificial Sequence
  Synthetic
agucagcccccuggaagguggaaa

SEQ ID NO: 175365 - RNA, 18 nt, Artificial Sequence
  Synthetic
uggauuuagggguggaaa

SEQ ID NO: 175366 - RNA, 19 nt, Artificial Sequence
  Synthetic
guggauuuagggguggaaa

SEQ ID NO: 175367 - RNA, 20 nt, Artificial Sequence
  Synthetic
uguggauuuagggguggaaa

SEQ ID NO: 175368 - RNA, 21 nt, Artificial Sequence
  Synthetic
cuguggauuuagggguggaaa

SEQ ID NO: 175369 - RNA, 22 nt, Artificial Sequence
  Synthetic
gcuguggauuuagggguggaaa

SEQ ID NO: 175370 - RNA, 23 nt, Artificial Sequence
  Synthetic
ggcuguggauuuagggguggaaa

SEQ ID NO: 175371 - RNA, 24 nt, Artificial Sequence
  Synthetic
aggcuguggauuuagggguggaaa

SEQ ID NO: 175372 - RNA, 18 nt, Artificial Sequence
  Synthetic
ugccagagucauuggaaa

SEQ ID NO: 175373 - RNA, 19 nt, Artificial Sequence
  Synthetic
gugccagagucauuggaaa

SEQ ID NO: 175374 - RNA, 20 nt, Artificial Sequence
  Synthetic
cgugccagagucauuggaaa

SEQ ID NO: 175375 - RNA, 21 nt, Artificial Sequence
  Synthetic
acgugccagagucauuggaaa

SEQ ID NO: 175376 - RNA, 22 nt, Artificial Sequence
  Synthetic
aacgugccagagucauuggaaa

SEQ ID NO: 175377 - RNA, 23 nt, Artificial Sequence
  Synthetic
aaacgugccagagucauuggaaa

SEQ ID NO: 175378 - RNA, 24 nt, Artificial Sequence
  Synthetic
uaaacgugccagagucauuggaaa

SEQ ID NO: 175379 - RNA, 18 nt, Artificial Sequence
  Synthetic
uugggagcuuauuggaaa

SEQ ID NO: 175380 - RNA, 19 nt, Artificial Sequence
  Synthetic
cuugggagcuuauuggaaa

SEQ ID NO: 175381 - RNA, 20 nt, Artificial Sequence
  Synthetic
acuugggagcuuauuggaaa

SEQ ID NO: 175382 - RNA, 21 nt, Artificial Sequence
  Synthetic
cacuugggagcuuauuggaaa

SEQ ID NO: 175383 - RNA, 22 nt, Artificial Sequence
  Synthetic
ccacuugggagcuuauuggaaa

SEQ ID NO: 175384 - RNA, 23 nt, Artificial Sequence
  Synthetic
accacuugggagcuuauuggaaa

SEQ ID NO: 175385 - RNA, 24 nt, Artificial Sequence
  Synthetic
uaccacuugggagcuuauuggaaa

SEQ ID NO: 175386 - RNA, 18 nt, Artificial Sequence
  Synthetic
cuuuagaacaguuggaaa

SEQ ID NO: 175387 - RNA, 19 nt, Artificial Sequence
  Synthetic
gcuuuagaacaguuggaaa

SEQ ID NO: 175388 - RNA, 20 nt, Artificial Sequence
  Synthetic
ggcuuuagaacaguuggaaa

SEQ ID NO: 175389 - RNA, 21 nt, Artificial Sequence
  Synthetic
aggcuuuagaacaguuggaaa

SEQ ID NO: 175390 - RNA, 22 nt, Artificial Sequence
  Synthetic
aaggcuuuagaacaguuggaaa

SEQ ID NO: 175391 - RNA, 23 nt, Artificial Sequence
  Synthetic
aaaggcuuuagaacaguuggaaa

SEQ ID NO: 175392 - RNA, 24 nt, Artificial Sequence
  Synthetic
aaaaggcuuuagaacaguuggaaa

SEQ ID NO: 175393 - RNA, 18 nt, Artificial Sequence
  Synthetic
ccaauaucauguuggaaa

SEQ ID NO: 175394 - RNA, 19 nt, Artificial Sequence
  Synthetic
cccaauaucauguuggaaa

SEQ ID NO: 175395 - RNA, 20 nt, Artificial Sequence
  Synthetic
gcccaauaucauguuggaaa

SEQ ID NO: 175396 - RNA, 21 nt, Artificial Sequence
  Synthetic
ugcccaauaucauguuggaaa

SEQ ID NO: 175397 - RNA, 22 nt, Artificial Sequence
  Synthetic
cugcccaauaucauguuggaaa

SEQ ID NO: 175398 - RNA, 23 nt, Artificial Sequence
  Synthetic
ccugcccaauaucauguuggaaa

SEQ ID NO: 175399 - RNA, 24 nt, Artificial Sequence
  Synthetic
gccugcccaauaucauguuggaaa

SEQ ID NO: 175400 - RNA, 18 nt, Artificial Sequence
  Synthetic
ggacuucucauuuggaaa

SEQ ID NO: 175401 - RNA, 19 nt, Artificial Sequence
  Synthetic
gggacuucucauuuggaaa

SEQ ID NO: 175402 - RNA, 20 nt, Artificial Sequence
  Synthetic
agggacuucucauuuggaaa

SEQ ID NO: 175403 - RNA, 21 nt, Artificial Sequence
  Synthetic
gagggacuucucauuuggaaa

SEQ ID NO: 175404 - RNA, 22 nt, Artificial Sequence
  Synthetic
agagggacuucucauuuggaaa

SEQ ID NO: 175405 - RNA, 23 nt, Artificial Sequence
  Synthetic
gagagggacuucucauuuggaaa

SEQ ID NO: 175406 - RNA, 24 nt, Artificial Sequence
  Synthetic
agagagggacuucucauuuggaaa

SEQ ID NO: 175407 - RNA, 18 nt, Artificial Sequence
  Synthetic
ugaaguuuaaaaaugaaa

SEQ ID NO: 175408 - RNA, 19 nt, Artificial Sequence
  Synthetic
augaaguuuaaaaaugaaa

SEQ ID NO: 175409 - RNA, 20 nt, Artificial Sequence
  Synthetic
gaugaaguuuaaaaaugaaa

SEQ ID NO: 175410 - RNA, 21 nt, Artificial Sequence
  Synthetic
agaugaaguuuaaaaaugaaa

SEQ ID NO: 175411 - RNA, 22 nt, Artificial Sequence
  Synthetic
uagaugaaguuuaaaaaugaaa

SEQ ID NO: 175412 - RNA, 23 nt, Artificial Sequence
  Synthetic
guagaugaaguuuaaaaaugaaa

SEQ ID NO: 175413 - RNA, 24 nt, Artificial Sequence
  Synthetic
aguagaugaaguuuaaaaaugaaa

SEQ ID NO: 175414 - RNA, 18 nt, Artificial Sequence
  Synthetic
auagccacauaaaugaaa

SEQ ID NO: 175415 - RNA, 19 nt, Artificial Sequence
  Synthetic
aauagccacauaaaugaaa

SEQ ID NO: 175416 - RNA, 20 nt, Artificial Sequence
  Synthetic
caauagccacauaaaugaaa

SEQ ID NO: 175417 - RNA, 21 nt, Artificial Sequence
  Synthetic
acaauagccacauaaaugaaa

SEQ ID NO: 175418 - RNA, 22 nt, Artificial Sequence
  Synthetic
aacaauagccacauaaaugaaa

SEQ ID NO: 175419 - RNA, 23 nt, Artificial Sequence
  Synthetic
aaacaauagccacauaaaugaaa

SEQ ID NO: 175420 - RNA, 24 nt, Artificial Sequence
  Synthetic
aaaacaauagccacauaaaugaaa

SEQ ID NO: 175421 - RNA, 18 nt, Artificial Sequence
  Synthetic
auuguuuucuaaaugaaa

SEQ ID NO: 175422 - RNA, 19 nt, Artificial Sequence
  Synthetic
aauuguuuucuaaaugaaa

SEQ ID NO: 175423 - RNA, 20 nt, Artificial Sequence
  Synthetic
caauuguuuucuaaaugaaa

SEQ ID NO: 175424 - RNA, 21 nt, Artificial Sequence
  Synthetic
acaauuguuuucuaaaugaaa

SEQ ID NO: 175425 - RNA, 22 nt, Artificial Sequence
  Synthetic
uacaauuguuuucuaaaugaaa

SEQ ID NO: 175426 - RNA, 23 nt, Artificial Sequence
  Synthetic
guacaauuguuuucuaaaugaaa

SEQ ID NO: 175427 - RNA, 24 nt, Artificial Sequence
  Synthetic
aguacaauuguuuucuaaaugaaa

SEQ ID NO: 175428 - RNA, 18 nt, Artificial Sequence
  Synthetic
uguuuggcaacaaugaaa

SEQ ID NO: 175429 - RNA, 19 nt, Artificial Sequence
  Synthetic
uuguuuggcaacaaugaaa

SEQ ID NO: 175430 - RNA, 20 nt, Artificial Sequence
  Synthetic
auuguuuggcaacaaugaaa

SEQ ID NO: 175431 - RNA, 21 nt, Artificial Sequence
  Synthetic
cauuguuuggcaacaaugaaa

SEQ ID NO: 175432 - RNA, 22 nt, Artificial Sequence
  Synthetic
ucauuguuuggcaacaaugaaa

SEQ ID NO: 175433 - RNA, 23 nt, Artificial Sequence
  Synthetic
aucauuguuuggcaacaaugaaa

SEQ ID NO: 175434 - RNA, 24 nt, Artificial Sequence
  Synthetic
uaucauuguuuggcaacaaugaaa

SEQ ID NO: 175435 - RNA, 18 nt, Artificial Sequence
  Synthetic
cauuaaaaggcaaugaaa

SEQ ID NO: 175436 - RNA, 19 nt, Artificial Sequence
  Synthetic
acauuaaaaggcaaugaaa

SEQ ID NO: 175437 - RNA, 20 nt, Artificial Sequence
  Synthetic
aacauuaaaaggcaaugaaa

SEQ ID NO: 175438 - RNA, 21 nt, Artificial Sequence
  Synthetic
gaacauuaaaaggcaaugaaa

SEQ ID NO: 175439 - RNA, 22 nt, Artificial Sequence
  Synthetic
ggaacauuaaaaggcaaugaaa

SEQ ID NO: 175440 - RNA, 23 nt, Artificial Sequence
  Synthetic
aggaacauuaaaaggcaaugaaa

SEQ ID NO: 175441 - RNA, 24 nt, Artificial Sequence
  Synthetic
aaggaacauuaaaaggcaaugaaa

SEQ ID NO: 175442 - RNA, 18 nt, Artificial Sequence
  Synthetic
acugaaaaaagaaugaaa

SEQ ID NO: 175443 - RNA, 19 nt, Artificial Sequence
  Synthetic
uacugaaaaaagaaugaaa

SEQ ID NO: 175444 - RNA, 20 nt, Artificial Sequence
  Synthetic
uuacugaaaaaagaaugaaa

SEQ ID NO: 175445 - RNA, 21 nt, Artificial Sequence
  Synthetic
auuacugaaaaaagaaugaaa

SEQ ID NO: 175446 - RNA, 22 nt, Artificial Sequence
  Synthetic
gauuacugaaaaaagaaugaaa

SEQ ID NO: 175447 - RNA, 23 nt, Artificial Sequence
  Synthetic
agauuacugaaaaaagaaugaaa

SEQ ID NO: 175448 - RNA, 24 nt, Artificial Sequence
  Synthetic
aagauuacugaaaaaagaaugaaa

SEQ ID NO: 175449 - RNA, 18 nt, Artificial Sequence
  Synthetic
cccacuggaagaaugaaa

SEQ ID NO: 175450 - RNA, 19 nt, Artificial Sequence
  Synthetic
ucccacuggaagaaugaaa

SEQ ID NO: 175451 - RNA, 20 nt, Artificial Sequence
  Synthetic
uucccacuggaagaaugaaa

SEQ ID NO: 175452 - RNA, 21 nt, Artificial Sequence
  Synthetic
cuucccacuggaagaaugaaa

SEQ ID NO: 175453 - RNA, 22 nt, Artificial Sequence
  Synthetic
acuucccacuggaagaaugaaa

SEQ ID NO: 175454 - RNA, 23 nt, Artificial Sequence
  Synthetic
uacuucccacuggaagaaugaaa

SEQ ID NO: 175455 - RNA, 24 nt, Artificial Sequence
  Synthetic
uuacuucccacuggaagaaugaaa

SEQ ID NO: 175456 - RNA, 18 nt, Artificial Sequence
  Synthetic
uuguacauaagaaugaaa

SEQ ID NO: 175457 - RNA, 19 nt, Artificial Sequence
  Synthetic
cuuguacauaagaaugaaa

SEQ ID NO: 175458 - RNA, 20 nt, Artificial Sequence
  Synthetic
ucuuguacauaagaaugaaa

SEQ ID NO: 175459 - RNA, 21 nt, Artificial Sequence
  Synthetic
cucuuguacauaagaaugaaa

SEQ ID NO: 175460 - RNA, 22 nt, Artificial Sequence
  Synthetic
gcucuuguacauaagaaugaaa

SEQ ID NO: 175461 - RNA, 23 nt, Artificial Sequence
  Synthetic
ugcucuuguacauaagaaugaaa

SEQ ID NO: 175462 - RNA, 24 nt, Artificial Sequence
  Synthetic
gugcucuuguacauaagaaugaaa

SEQ ID NO: 175463 - RNA, 18 nt, Artificial Sequence
  Synthetic
uuucaaaggagaaugaaa

SEQ ID NO: 175464 - RNA, 19 nt, Artificial Sequence
  Synthetic
uuuucaaaggagaaugaaa

SEQ ID NO: 175465 - RNA, 20 nt, Artificial Sequence
  Synthetic
auuuucaaaggagaaugaaa

SEQ ID NO: 175466 - RNA, 21 nt, Artificial Sequence
  Synthetic
gauuuucaaaggagaaugaaa

SEQ ID NO: 175467 - RNA, 22 nt, Artificial Sequence
  Synthetic
ggauuuucaaaggagaaugaaa

SEQ ID NO: 175468 - RNA, 23 nt, Artificial Sequence
  Synthetic
uggauuuucaaaggagaaugaaa

SEQ ID NO: 175469 - RNA, 24 nt, Artificial Sequence
  Synthetic
uuggauuuucaaaggagaaugaaa

SEQ ID NO: 175470 - RNA, 18 nt, Artificial Sequence
  Synthetic
accuaucauagaaugaaa

SEQ ID NO: 175471 - RNA, 19 nt, Artificial Sequence
  Synthetic
uaccuaucauagaaugaaa

SEQ ID NO: 175472 - RNA, 20 nt, Artificial Sequence
  Synthetic
cuaccuaucauagaaugaaa

SEQ ID NO: 175473 - RNA, 21 nt, Artificial Sequence
  Synthetic
gcuaccuaucauagaaugaaa

SEQ ID NO: 175474 - RNA, 22 nt, Artificial Sequence
  Synthetic
cgcuaccuaucauagaaugaaa

SEQ ID NO: 175475 - RNA, 23 nt, Artificial Sequence
  Synthetic
acgcuaccuaucauagaaugaaa

SEQ ID NO: 175476 - RNA, 24 nt, Artificial Sequence
  Synthetic
aacgcuaccuaucauagaaugaaa

SEQ ID NO: 175477 - RNA, 18 nt, Artificial Sequence
  Synthetic
guauccagaggaaugaaa

SEQ ID NO: 175478 - RNA, 19 nt, Artificial Sequence
  Synthetic
cguauccagaggaaugaaa

SEQ ID NO: 175479 - RNA, 20 nt, Artificial Sequence
  Synthetic
ccguauccagaggaaugaaa

SEQ ID NO: 175480 - RNA, 21 nt, Artificial Sequence
  Synthetic
accguauccagaggaaugaaa

SEQ ID NO: 175481 - RNA, 22 nt, Artificial Sequence
  Synthetic
aaccguauccagaggaaugaaa

SEQ ID NO: 175482 - RNA, 23 nt, Artificial Sequence
  Synthetic
uaaccguauccagaggaaugaaa

SEQ ID NO: 175483 - RNA, 24 nt, Artificial Sequence
  Synthetic
cuaaccguauccagaggaaugaaa

SEQ ID NO: 175484 - RNA, 18 nt, Artificial Sequence
  Synthetic
ucaugaaaacuaaugaaa

SEQ ID NO: 175485 - RNA, 19 nt, Artificial Sequence
  Synthetic
aucaugaaaacuaaugaaa

SEQ ID NO: 175486 - RNA, 20 nt, Artificial Sequence
  Synthetic
uaucaugaaaacuaaugaaa

SEQ ID NO: 175487 - RNA, 21 nt, Artificial Sequence
  Synthetic
auaucaugaaaacuaaugaaa

SEQ ID NO: 175488 - RNA, 22 nt, Artificial Sequence
  Synthetic
aauaucaugaaaacuaaugaaa

SEQ ID NO: 175489 - RNA, 23 nt, Artificial Sequence
  Synthetic
aaauaucaugaaaacuaaugaaa

SEQ ID NO: 175490 - RNA, 24 nt, Artificial Sequence
  Synthetic
uaaauaucaugaaaacuaaugaaa

SEQ ID NO: 175491 - RNA, 18 nt, Artificial Sequence
  Synthetic
agaauaggguuaaugaaa

SEQ ID NO: 175492 - RNA, 19 nt, Artificial Sequence
  Synthetic
aagaauaggguuaaugaaa

SEQ ID NO: 175493 - RNA, 20 nt, Artificial Sequence
  Synthetic
aaagaauaggguuaaugaaa

SEQ ID NO: 175494 - RNA, 21 nt, Artificial Sequence
  Synthetic
gaaagaauaggguuaaugaaa

SEQ ID NO: 175495 - RNA, 22 nt, Artificial Sequence
  Synthetic
ugaaagaauaggguuaaugaaa

SEQ ID NO: 175496 - RNA, 23 nt, Artificial Sequence
  Synthetic
gugaaagaauaggguuaaugaaa

SEQ ID NO: 175497 - RNA, 24 nt, Artificial Sequence
  Synthetic
agugaaagaauaggguuaaugaaa

SEQ ID NO: 175498 - RNA, 18 nt, Artificial Sequence
  Synthetic
agagcccauaacaugaaa

SEQ ID NO: 175499 - RNA, 19 nt, Artificial Sequence
  Synthetic
cagagcccauaacaugaaa

SEQ ID NO: 175500 - RNA, 20 nt, Artificial Sequence
  Synthetic
acagagcccauaacaugaaa

SEQ ID NO: 175501 - RNA, 21 nt, Artificial Sequence
  Synthetic
uacagagcccauaacaugaaa

SEQ ID NO: 175502 - RNA, 22 nt, Artificial Sequence
  Synthetic
cuacagagcccauaacaugaaa

SEQ ID NO: 175503 - RNA, 23 nt, Artificial Sequence
  Synthetic
gcuacagagcccauaacaugaaa

SEQ ID NO: 175504 - RNA, 24 nt, Artificial Sequence
  Synthetic
agcuacagagcccauaacaugaaa

SEQ ID NO: 175505 - RNA, 18 nt, Artificial Sequence
  Synthetic
auaaagaggcacaugaaa

SEQ ID NO: 175506 - RNA, 19 nt, Artificial Sequence
  Synthetic
uauaaagaggcacaugaaa

SEQ ID NO: 175507 - RNA, 20 nt, Artificial Sequence
  Synthetic
auauaaagaggcacaugaaa

SEQ ID NO: 175508 - RNA, 21 nt, Artificial Sequence
  Synthetic
cauauaaagaggcacaugaaa

SEQ ID NO: 175509 - RNA, 22 nt, Artificial Sequence
  Synthetic
gcauauaaagaggcacaugaaa

SEQ ID NO: 175510 - RNA, 23 nt, Artificial Sequence
  Synthetic
agcauauaaagaggcacaugaaa

SEQ ID NO: 175511 - RNA, 24 nt, Artificial Sequence
  Synthetic
aagcauauaaagaggcacaugaaa

SEQ ID NO: 175512 - RNA, 18 nt, Artificial Sequence
  Synthetic
agcaugagucacaugaaa

SEQ ID NO: 175513 - RNA, 19 nt, Artificial Sequence
  Synthetic
uagcaugagucacaugaaa

SEQ ID NO: 175514 - RNA, 20 nt, Artificial Sequence
  Synthetic
cuagcaugagucacaugaaa

SEQ ID NO: 175515 - RNA, 21 nt, Artificial Sequence
  Synthetic
acuagcaugagucacaugaaa

SEQ ID NO: 175516 - RNA, 22 nt, Artificial Sequence
  Synthetic
uacuagcaugagucacaugaaa

SEQ ID NO: 175517 - RNA, 23 nt, Artificial Sequence
  Synthetic
guacuagcaugagucacaugaaa

SEQ ID NO: 175518 - RNA, 24 nt, Artificial Sequence
  Synthetic
aguacuagcaugagucacaugaaa

SEQ ID NO: 175519 - RNA, 18 nt, Artificial Sequence
  Synthetic
ugaccuuucuacaugaaa

SEQ ID NO: 175520 - RNA, 19 nt, Artificial Sequence
  Synthetic
gugaccuuucuacaugaaa

SEQ ID NO: 175521 - RNA, 20 nt, Artificial Sequence
  Synthetic
ugugaccuuucuacaugaaa

SEQ ID NO: 175522 - RNA, 21 nt, Artificial Sequence
  Synthetic
uugugaccuuucuacaugaaa

SEQ ID NO: 175523 - RNA, 22 nt, Artificial Sequence
  Synthetic
auugugaccuuucuacaugaaa

SEQ ID NO: 175524 - RNA, 23 nt, Artificial Sequence
  Synthetic
gauugugaccuuucuacaugaaa

SEQ ID NO: 175525 - RNA, 24 nt, Artificial Sequence
  Synthetic
agauugugaccuuucuacaugaaa

SEQ ID NO: 175526 - RNA, 18 nt, Artificial Sequence
  Synthetic
uaauuuauagccaugaaa

SEQ ID NO: 175527 - RNA, 19 nt, Artificial Sequence
  Synthetic
guaauuuauagccaugaaa

SEQ ID NO: 175528 - RNA, 20 nt, Artificial Sequence
  Synthetic
uguaauuuauagccaugaaa

SEQ ID NO: 175529 - RNA, 21 nt, Artificial Sequence
  Synthetic
auguaauuuauagccaugaaa

SEQ ID NO: 175530 - RNA, 22 nt, Artificial Sequence
  Synthetic
aauguaauuuauagccaugaaa

SEQ ID NO: 175531 - RNA, 23 nt, Artificial Sequence
  Synthetic
aaauguaauuuauagccaugaaa

SEQ ID NO: 175532 - RNA, 24 nt, Artificial Sequence
  Synthetic
gaaauguaauuuauagccaugaaa

SEQ ID NO: 175533 - RNA, 18 nt, Artificial Sequence
  Synthetic
aauuguaaauccaugaaa

SEQ ID NO: 175534 - RNA, 19 nt, Artificial Sequence
  Synthetic
gaauuguaaauccaugaaa

SEQ ID NO: 175535 - RNA, 20 nt, Artificial Sequence
  Synthetic
agaauuguaaauccaugaaa

SEQ ID NO: 175536 - RNA, 21 nt, Artificial Sequence
  Synthetic
gagaauuguaaauccaugaaa

SEQ ID NO: 175537 - RNA, 22 nt, Artificial Sequence
  Synthetic
agagaauuguaaauccaugaaa

SEQ ID NO: 175538 - RNA, 23 nt, Artificial Sequence
  Synthetic
gagagaauuguaaauccaugaaa

SEQ ID NO: 175539 - RNA, 24 nt, Artificial Sequence
  Synthetic
ggagagaauuguaaauccaugaaa

SEQ ID NO: 175540 - RNA, 18 nt, Artificial Sequence
  Synthetic
cuuuaucacagcaugaaa

SEQ ID NO: 175541 - RNA, 19 nt, Artificial Sequence
  Synthetic
ucuuuaucacagcaugaaa

SEQ ID NO: 175542 - RNA, 20 nt, Artificial Sequence
  Synthetic
gucuuuaucacagcaugaaa

SEQ ID NO: 175543 - RNA, 21 nt, Artificial Sequence
  Synthetic
ugucuuuaucacagcaugaaa

SEQ ID NO: 175544 - RNA, 22 nt, Artificial Sequence
  Synthetic
augucuuuaucacagcaugaaa

SEQ ID NO: 175545 - RNA, 23 nt, Artificial Sequence
  Synthetic
uaugucuuuaucacagcaugaaa

SEQ ID NO: 175546 - RNA, 24 nt, Artificial Sequence
  Synthetic
guaugucuuuaucacagcaugaaa

SEQ ID NO: 175547 - RNA, 18 nt, Artificial Sequence
  Synthetic
ccuauccaaaucaugaaa

SEQ ID NO: 175548 - RNA, 19 nt, Artificial Sequence
  Synthetic
gccuauccaaaucaugaaa

SEQ ID NO: 175549 - RNA, 20 nt, Artificial Sequence
  Synthetic
agccuauccaaaucaugaaa

SEQ ID NO: 175550 - RNA, 21 nt, Artificial Sequence
  Synthetic
cagccuauccaaaucaugaaa

SEQ ID NO: 175551 - RNA, 22 nt, Artificial Sequence
  Synthetic
gcagccuauccaaaucaugaaa

SEQ ID NO: 175552 - RNA, 23 nt, Artificial Sequence
  Synthetic
ggcagccuauccaaaucaugaaa

SEQ ID NO: 175553 - RNA, 24 nt, Artificial Sequence
  Synthetic
aggcagccuauccaaaucaugaaa

SEQ ID NO: 175554 - RNA, 18 nt, Artificial Sequence
  Synthetic
caguuaucacucaugaaa

SEQ ID NO: 175555 - RNA, 19 nt, Artificial Sequence
  Synthetic
gcaguuaucacucaugaaa

SEQ ID NO: 175556 - RNA, 20 nt, Artificial Sequence
  Synthetic
ugcaguuaucacucaugaaa

SEQ ID NO: 175557 - RNA, 21 nt, Artificial Sequence
  Synthetic
uugcaguuaucacucaugaaa

SEQ ID NO: 175558 - RNA, 22 nt, Artificial Sequence
  Synthetic
uuugcaguuaucacucaugaaa

SEQ ID NO: 175559 - RNA, 23 nt, Artificial Sequence
  Synthetic
guuugcaguuaucacucaugaaa

SEQ ID NO: 175560 - RNA, 24 nt, Artificial Sequence
  Synthetic
gguuugcaguuaucacucaugaaa

SEQ ID NO: 175561 - RNA, 18 nt, Artificial Sequence
  Synthetic
aaggagggaaagaugaaa

SEQ ID NO: 175562 - RNA, 19 nt, Artificial Sequence
  Synthetic
caaggagggaaagaugaaa

SEQ ID NO: 175563 - RNA, 20 nt, Artificial Sequence
  Synthetic
ccaaggagggaaagaugaaa

SEQ ID NO: 175564 - RNA, 21 nt, Artificial Sequence
  Synthetic
gccaaggagggaaagaugaaa

SEQ ID NO: 175565 - RNA, 22 nt, Artificial Sequence
  Synthetic
ugccaaggagggaaagaugaaa

SEQ ID NO: 175566 - RNA, 23 nt, Artificial Sequence
  Synthetic
cugccaaggagggaaagaugaaa

SEQ ID NO: 175567 - RNA, 24 nt, Artificial Sequence
  Synthetic
ccugccaaggagggaaagaugaaa

SEQ ID NO: 175568 - RNA, 18 nt, Artificial Sequence
  Synthetic
ucauaguggaagaugaaa

SEQ ID NO: 175569 - RNA, 19 nt, Artificial Sequence
  Synthetic
cucauaguggaagaugaaa

SEQ ID NO: 175570 - RNA, 20 nt, Artificial Sequence
  Synthetic
acucauaguggaagaugaaa

SEQ ID NO: 175571 - RNA, 21 nt, Artificial Sequence
  Synthetic
uacucauaguggaagaugaaa

SEQ ID NO: 175572 - RNA, 22 nt, Artificial Sequence
  Synthetic
uuacucauaguggaagaugaaa

SEQ ID NO: 175573 - RNA, 23 nt, Artificial Sequence
  Synthetic
uuuacucauaguggaagaugaaa

SEQ ID NO: 175574 - RNA, 24 nt, Artificial Sequence
  Synthetic
uuuuacucauaguggaagaugaaa

SEQ ID NO: 175575 - RNA, 18 nt, Artificial Sequence
  Synthetic
ggugaaauagagaugaaa

SEQ ID NO: 175576 - RNA, 19 nt, Artificial Sequence
  Synthetic
aggugaaauagagaugaaa

SEQ ID NO: 175577 - RNA, 20 nt, Artificial Sequence
  Synthetic
gaggugaaauagagaugaaa

SEQ ID NO: 175578 - RNA, 21 nt, Artificial Sequence
  Synthetic
ugaggugaaauagagaugaaa

SEQ ID NO: 175579 - RNA, 22 nt, Artificial Sequence
  Synthetic
augaggugaaauagagaugaaa

SEQ ID NO: 175580 - RNA, 23 nt, Artificial Sequence
  Synthetic
gaugaggugaaauagagaugaaa

SEQ ID NO: 175581 - RNA, 24 nt, Artificial Sequence
  Synthetic
agaugaggugaaauagagaugaaa

SEQ ID NO: 175582 - RNA, 18 nt, Artificial Sequence
  Synthetic
ggggaaauguagaugaaa

SEQ ID NO: 175583 - RNA, 19 nt, Artificial Sequence
  Synthetic
uggggaaauguagaugaaa

SEQ ID NO: 175584 - RNA, 20 nt, Artificial Sequence
  Synthetic
uuggggaaauguagaugaaa

SEQ ID NO: 175585 - RNA, 21 nt, Artificial Sequence
  Synthetic
uuuggggaaauguagaugaaa

SEQ ID NO: 175586 - RNA, 22 nt, Artificial Sequence
  Synthetic
guuuggggaaauguagaugaaa

SEQ ID NO: 175587 - RNA, 23 nt, Artificial Sequence
  Synthetic
aguuuggggaaauguagaugaaa

SEQ ID NO: 175588 - RNA, 24 nt, Artificial Sequence
  Synthetic
uaguuuggggaaauguagaugaaa

SEQ ID NO: 175589 - RNA, 18 nt, Artificial Sequence
  Synthetic
cuaauugaaaggaugaaa

SEQ ID NO: 175590 - RNA, 19 nt, Artificial Sequence
  Synthetic
acuaauugaaaggaugaaa

SEQ ID NO: 175591 - RNA, 20 nt, Artificial Sequence
  Synthetic
uacuaauugaaaggaugaaa

SEQ ID NO: 175592 - RNA, 21 nt, Artificial Sequence
  Synthetic
auacuaauugaaaggaugaaa

SEQ ID NO: 175593 - RNA, 22 nt, Artificial Sequence
  Synthetic
cauacuaauugaaaggaugaaa

SEQ ID NO: 175594 - RNA, 23 nt, Artificial Sequence
  Synthetic
gcauacuaauugaaaggaugaaa

SEQ ID NO: 175595 - RNA, 24 nt, Artificial Sequence
  Synthetic
ugcauacuaauugaaaggaugaaa

SEQ ID NO: 175596 - RNA, 21 nt, Artificial Sequence
  Synthetic
guuguagggacauggaugaaa

SEQ ID NO: 175597 - RNA, 22 nt, Artificial Sequence
  Synthetic
cguuguagggacauggaugaaa

SEQ ID NO: 175598 - RNA, 23 nt, Artificial Sequence
  Synthetic
ccguuguagggacauggaugaaa

SEQ ID NO: 175599 - RNA, 24 nt, Artificial Sequence
  Synthetic
uccguuguagggacauggaugaaa

SEQ ID NO: 175600 - RNA, 18 nt, Artificial Sequence
  Synthetic
guugugaaugugaugaaa

SEQ ID NO: 175601 - RNA, 19 nt, Artificial Sequence
  Synthetic
uguugugaaugugaugaaa

SEQ ID NO: 175602 - RNA, 20 nt, Artificial Sequence
  Synthetic
uuguugugaaugugaugaaa

SEQ ID NO: 175603 - RNA, 21 nt, Artificial Sequence
  Synthetic
uuuguugugaaugugaugaaa

SEQ ID NO: 175604 - RNA, 22 nt, Artificial Sequence
  Synthetic
uuuuguugugaaugugaugaaa

SEQ ID NO: 175605 - RNA, 23 nt, Artificial Sequence
  Synthetic
auuuuguugugaaugugaugaaa

SEQ ID NO: 175606 - RNA, 24 nt, Artificial Sequence
  Synthetic
gauuuuguugugaaugugaugaaa

SEQ ID NO: 175607 - RNA, 18 nt, Artificial Sequence
  Synthetic
aagaaauacuugaugaaa

SEQ ID NO: 175608 - RNA, 19 nt, Artificial Sequence
  Synthetic
caagaaauacuugaugaaa

SEQ ID NO: 175609 - RNA, 20 nt, Artificial Sequence
  Synthetic
ucaagaaauacuugaugaaa

SEQ ID NO: 175610 - RNA, 21 nt, Artificial Sequence
  Synthetic
uucaagaaauacuugaugaaa

SEQ ID NO: 175611 - RNA, 22 nt, Artificial Sequence
  Synthetic
auucaagaaauacuugaugaaa

SEQ ID NO: 175612 - RNA, 23 nt, Artificial Sequence
  Synthetic
gauucaagaaauacuugaugaaa

SEQ ID NO: 175613 - RNA, 24 nt, Artificial Sequence
  Synthetic
agauucaagaaauacuugaugaaa

SEQ ID NO: 175614 - RNA, 18 nt, Artificial Sequence
  Synthetic
augucucaguugaugaaa

SEQ ID NO: 175615 - RNA, 19 nt, Artificial Sequence
  Synthetic
aaugucucaguugaugaaa

SEQ ID NO: 175616 - RNA, 20 nt, Artificial Sequence
  Synthetic
aaaugucucaguugaugaaa

SEQ ID NO: 175617 - RNA, 21 nt, Artificial Sequence
  Synthetic
uaaaugucucaguugaugaaa

SEQ ID NO: 175618 - RNA, 22 nt, Artificial Sequence
  Synthetic
auaaaugucucaguugaugaaa

SEQ ID NO: 175619 - RNA, 23 nt, Artificial Sequence
  Synthetic
aauaaaugucucaguugaugaaa

SEQ ID NO: 175620 - RNA, 24 nt, Artificial Sequence
  Synthetic
aaauaaaugucucaguugaugaaa

SEQ ID NO: 175621 - RNA, 18 nt, Artificial Sequence
  Synthetic
ucuacuaaaaauaugaaa

SEQ ID NO: 175622 - RNA, 19 nt, Artificial Sequence
  Synthetic
cucuacuaaaaauaugaaa

SEQ ID NO: 175623 - RNA, 20 nt, Artificial Sequence
  Synthetic
ucucuacuaaaaauaugaaa

SEQ ID NO: 175624 - RNA, 21 nt, Artificial Sequence
  Synthetic
gucucuacuaaaaauaugaaa

SEQ ID NO: 175625 - RNA, 22 nt, Artificial Sequence
  Synthetic
ugucucuacuaaaaauaugaaa

SEQ ID NO: 175626 - RNA, 23 nt, Artificial Sequence
  Synthetic
cugucucuacuaaaaauaugaaa

SEQ ID NO: 175627 - RNA, 24 nt, Artificial Sequence
  Synthetic
ccugucucuacuaaaaauaugaaa

SEQ ID NO: 175628 - RNA, 18 nt, Artificial Sequence
  Synthetic
uccaaggagaauaugaaa

SEQ ID NO: 175629 - RNA, 19 nt, Artificial Sequence
  Synthetic
uuccaaggagaauaugaaa

SEQ ID NO: 175630 - RNA, 20 nt, Artificial Sequence
  Synthetic
guuccaaggagaauaugaaa

SEQ ID NO: 175631 - RNA, 21 nt, Artificial Sequence
  Synthetic
aguuccaaggagaauaugaaa

SEQ ID NO: 175632 - RNA, 22 nt, Artificial Sequence
  Synthetic
caguuccaaggagaauaugaaa

SEQ ID NO: 175633 - RNA, 23 nt, Artificial Sequence
  Synthetic
ucaguuccaaggagaauaugaaa

SEQ ID NO: 175634 - RNA, 24 nt, Artificial Sequence
  Synthetic
uucaguuccaaggagaauaugaaa

SEQ ID NO: 175635 - RNA, 18 nt, Artificial Sequence
  Synthetic
auuguucuuacuaugaaa

SEQ ID NO: 175636 - RNA, 19 nt, Artificial Sequence
  Synthetic
uauuguucuuacuaugaaa

SEQ ID NO: 175637 - RNA, 20 nt, Artificial Sequence
  Synthetic
uuauuguucuuacuaugaaa

SEQ ID NO: 175638 - RNA, 21 nt, Artificial Sequence
  Synthetic
uuuauuguucuuacuaugaaa

SEQ ID NO: 175639 - RNA, 22 nt, Artificial Sequence
  Synthetic
uuuuauuguucuuacuaugaaa

SEQ ID NO: 175640 - RNA, 23 nt, Artificial Sequence
  Synthetic
cuuuuauuguucuuacuaugaaa

SEQ ID NO: 175641 - RNA, 24 nt, Artificial Sequence
  Synthetic
acuuuuauuguucuuacuaugaaa

SEQ ID NO: 175642 - RNA, 18 nt, Artificial Sequence
  Synthetic
cuuuauagcaguaugaaa

SEQ ID NO: 175643 - RNA, 19 nt, Artificial Sequence
  Synthetic
ucuuuauagcaguaugaaa

SEQ ID NO: 175644 - RNA, 20 nt, Artificial Sequence
  Synthetic
uucuuuauagcaguaugaaa

SEQ ID NO: 175645 - RNA, 21 nt, Artificial Sequence
  Synthetic
guucuuuauagcaguaugaaa

SEQ ID NO: 175646 - RNA, 22 nt, Artificial Sequence
  Synthetic
aguucuuuauagcaguaugaaa

SEQ ID NO: 175647 - RNA, 23 nt, Artificial Sequence
  Synthetic
caguucuuuauagcaguaugaaa

SEQ ID NO: 175648 - RNA, 24 nt, Artificial Sequence
  Synthetic
gcaguucuuuauagcaguaugaaa

SEQ ID NO: 175649 - RNA, 18 nt, Artificial Sequence
  Synthetic
agaaaaugugguaugaaa

SEQ ID NO: 175650 - RNA, 19 nt, Artificial Sequence
  Synthetic
aagaaaaugugguaugaaa

SEQ ID NO: 175651 - RNA, 20 nt, Artificial Sequence
  Synthetic
aaagaaaaugugguaugaaa

SEQ ID NO: 175652 - RNA, 21 nt, Artificial Sequence
  Synthetic
aaaagaaaaugugguaugaaa

SEQ ID NO: 175653 - RNA, 22 nt, Artificial Sequence
  Synthetic
gaaaagaaaaugugguaugaaa

SEQ ID NO: 175654 - RNA, 23 nt, Artificial Sequence
  Synthetic
ugaaaagaaaaugugguaugaaa

SEQ ID NO: 175655 - RNA, 24 nt, Artificial Sequence
  Synthetic
uugaaaagaaaaugugguaugaaa

SEQ ID NO: 175656 - RNA, 18 nt, Artificial Sequence
  Synthetic
aacucagagauuaugaaa

SEQ ID NO: 175657 - RNA, 19 nt, Artificial Sequence
  Synthetic
aaacucagagauuaugaaa

SEQ ID NO: 175658 - RNA, 20 nt, Artificial Sequence
  Synthetic
uaaacucagagauuaugaaa

SEQ ID NO: 175659 - RNA, 21 nt, Artificial Sequence
  Synthetic
auaaacucagagauuaugaaa

SEQ ID NO: 175660 - RNA, 22 nt, Artificial Sequence
  Synthetic
gauaaacucagagauuaugaaa

SEQ ID NO: 175661 - RNA, 23 nt, Artificial Sequence
  Synthetic
ugauaaacucagagauuaugaaa

SEQ ID NO: 175662 - RNA, 24 nt, Artificial Sequence
  Synthetic
uugauaaacucagagauuaugaaa

SEQ ID NO: 175663 - RNA, 18 nt, Artificial Sequence
  Synthetic
aucuacagaaaacugaaa

SEQ ID NO: 175664 - RNA, 19 nt, Artificial Sequence
  Synthetic
caucuacagaaaacugaaa

SEQ ID NO: 175665 - RNA, 20 nt, Artificial Sequence
  Synthetic
ccaucuacagaaaacugaaa

SEQ ID NO: 175666 - RNA, 21 nt, Artificial Sequence
  Synthetic
gccaucuacagaaaacugaaa

SEQ ID NO: 175667 - RNA, 22 nt, Artificial Sequence
  Synthetic
agccaucuacagaaaacugaaa

SEQ ID NO: 175668 - RNA, 23 nt, Artificial Sequence
  Synthetic
uagccaucuacagaaaacugaaa

SEQ ID NO: 175669 - RNA, 24 nt, Artificial Sequence
  Synthetic
cuagccaucuacagaaaacugaaa

SEQ ID NO: 175670 - RNA, 18 nt, Artificial Sequence
  Synthetic
ggauaaaguaaacugaaa

SEQ ID NO: 175671 - RNA, 19 nt, Artificial Sequence
  Synthetic
uggauaaaguaaacugaaa

SEQ ID NO: 175672 - RNA, 20 nt, Artificial Sequence
  Synthetic
cuggauaaaguaaacugaaa

SEQ ID NO: 175673 - RNA, 21 nt, Artificial Sequence
  Synthetic
ucuggauaaaguaaacugaaa

SEQ ID NO: 175674 - RNA, 22 nt, Artificial Sequence
  Synthetic
aucuggauaaaguaaacugaaa

SEQ ID NO: 175675 - RNA, 23 nt, Artificial Sequence
  Synthetic
gaucuggauaaaguaaacugaaa

SEQ ID NO: 175676 - RNA, 24 nt, Artificial Sequence
  Synthetic
ggaucuggauaaaguaaacugaaa

SEQ ID NO: 175677 - RNA, 18 nt, Artificial Sequence
  Synthetic
agaaaaauggaacugaaa

SEQ ID NO: 175678 - RNA, 19 nt, Artificial Sequence
  Synthetic
aagaaaaauggaacugaaa

SEQ ID NO: 175679 - RNA, 20 nt, Artificial Sequence
  Synthetic
uaagaaaaauggaacugaaa

SEQ ID NO: 175680 - RNA, 21 nt, Artificial Sequence
  Synthetic
auaagaaaaauggaacugaaa

SEQ ID NO: 175681 - RNA, 22 nt, Artificial Sequence
  Synthetic
aauaagaaaaauggaacugaaa

SEQ ID NO: 175682 - RNA, 23 nt, Artificial Sequence
  Synthetic
caauaagaaaaauggaacugaaa

SEQ ID NO: 175683 - RNA, 24 nt, Artificial Sequence
  Synthetic
acaauaagaaaaauggaacugaaa

SEQ ID NO: 175684 - RNA, 18 nt, Artificial Sequence
  Synthetic
cuggguaacuaacugaaa

SEQ ID NO: 175685 - RNA, 19 nt, Artificial Sequence
  Synthetic
ccuggguaacuaacugaaa

SEQ ID NO: 175686 - RNA, 20 nt, Artificial Sequence
  Synthetic
cccuggguaacuaacugaaa

SEQ ID NO: 175687 - RNA, 21 nt, Artificial Sequence
  Synthetic
acccuggguaacuaacugaaa

SEQ ID NO: 175688 - RNA, 22 nt, Artificial Sequence
  Synthetic
aacccuggguaacuaacugaaa

SEQ ID NO: 175689 - RNA, 23 nt, Artificial Sequence
  Synthetic
aaacccuggguaacuaacugaaa

SEQ ID NO: 175690 - RNA, 24 nt, Artificial Sequence
  Synthetic
aaaacccuggguaacuaacugaaa

SEQ ID NO: 175691 - RNA, 18 nt, Artificial Sequence
  Synthetic
guuuucaucccacugaaa

SEQ ID NO: 175692 - RNA, 19 nt, Artificial Sequence
  Synthetic
uguuuucaucccacugaaa

SEQ ID NO: 175693 - RNA, 20 nt, Artificial Sequence
  Synthetic
cuguuuucaucccacugaaa

SEQ ID NO: 175694 - RNA, 21 nt, Artificial Sequence
  Synthetic
gcuguuuucaucccacugaaa

SEQ ID NO: 175695 - RNA, 22 nt, Artificial Sequence
  Synthetic
agcuguuuucaucccacugaaa

SEQ ID NO: 175696 - RNA, 23 nt, Artificial Sequence
  Synthetic
aagcuguuuucaucccacugaaa

SEQ ID NO: 175697 - RNA, 24 nt, Artificial Sequence
  Synthetic
caagcuguuuucaucccacugaaa

SEQ ID NO: 175698 - RNA, 18 nt, Artificial Sequence
  Synthetic
guagagguuagacugaaa

SEQ ID NO: 175699 - RNA, 19 nt, Artificial Sequence
  Synthetic
aguagagguuagacugaaa

SEQ ID NO: 175700 - RNA, 20 nt, Artificial Sequence
  Synthetic
gaguagagguuagacugaaa

SEQ ID NO: 175701 - RNA, 21 nt, Artificial Sequence
  Synthetic
ugaguagagguuagacugaaa

SEQ ID NO: 175702 - RNA, 22 nt, Artificial Sequence
  Synthetic
cugaguagagguuagacugaaa

SEQ ID NO: 175703 - RNA, 23 nt, Artificial Sequence
  Synthetic
gcugaguagagguuagacugaaa

SEQ ID NO: 175704 - RNA, 24 nt, Artificial Sequence
  Synthetic
ugcugaguagagguuagacugaaa

SEQ ID NO: 175705 - RNA, 18 nt, Artificial Sequence
  Synthetic
aggaauaaaugacugaaa

SEQ ID NO: 175706 - RNA, 19 nt, Artificial Sequence
  Synthetic
aaggaauaaaugacugaaa

SEQ ID NO: 175707 - RNA, 20 nt, Artificial Sequence
  Synthetic
gaaggaauaaaugacugaaa

SEQ ID NO: 175708 - RNA, 21 nt, Artificial Sequence
  Synthetic
agaaggaauaaaugacugaaa

SEQ ID NO: 175709 - RNA, 22 nt, Artificial Sequence
  Synthetic
cagaaggaauaaaugacugaaa

SEQ ID NO: 175710 - RNA, 23 nt, Artificial Sequence
  Synthetic
acagaaggaauaaaugacugaaa

SEQ ID NO: 175711 - RNA, 24 nt, Artificial Sequence
  Synthetic
gacagaaggaauaaaugacugaaa

SEQ ID NO: 175712 - RNA, 18 nt, Artificial Sequence
  Synthetic
gacacauguugacugaaa

SEQ ID NO: 175713 - RNA, 19 nt, Artificial Sequence
  Synthetic
ggacacauguugacugaaa

SEQ ID NO: 175714 - RNA, 20 nt, Artificial Sequence
  Synthetic
aggacacauguugacugaaa

SEQ ID NO: 175715 - RNA, 21 nt, Artificial Sequence
  Synthetic
uaggacacauguugacugaaa

SEQ ID NO: 175716 - RNA, 22 nt, Artificial Sequence
  Synthetic
uuaggacacauguugacugaaa

SEQ ID NO: 175717 - RNA, 23 nt, Artificial Sequence
  Synthetic
uuuaggacacauguugacugaaa

SEQ ID NO: 175718 - RNA, 24 nt, Artificial Sequence
  Synthetic
uuuuaggacacauguugacugaaa

SEQ ID NO: 175719 - RNA, 18 nt, Artificial Sequence
  Synthetic
acaacagaccuacugaaa

SEQ ID NO: 175720 - RNA, 19 nt, Artificial Sequence
  Synthetic
cacaacagaccuacugaaa

SEQ ID NO: 175721 - RNA, 20 nt, Artificial Sequence
  Synthetic
ucacaacagaccuacugaaa

SEQ ID NO: 175722 - RNA, 21 nt, Artificial Sequence
  Synthetic
cucacaacagaccuacugaaa

SEQ ID NO: 175723 - RNA, 22 nt, Artificial Sequence
  Synthetic
ccucacaacagaccuacugaaa

SEQ ID NO: 175724 - RNA, 23 nt, Artificial Sequence
  Synthetic
gccucacaacagaccuacugaaa

SEQ ID NO: 175725 - RNA, 24 nt, Artificial Sequence
  Synthetic
agccucacaacagaccuacugaaa

SEQ ID NO: 175726 - RNA, 18 nt, Artificial Sequence
  Synthetic
uucucugcgguacugaaa

SEQ ID NO: 175727 - RNA, 19 nt, Artificial Sequence
  Synthetic
uuucucugcgguacugaaa

SEQ ID NO: 175728 - RNA, 20 nt, Artificial Sequence
  Synthetic
uuuucucugcgguacugaaa

SEQ ID NO: 175729 - RNA, 21 nt, Artificial Sequence
  Synthetic
uuuuucucugcgguacugaaa

SEQ ID NO: 175730 - RNA, 22 nt, Artificial Sequence
  Synthetic
cuuuuucucugcgguacugaaa

SEQ ID NO: 175731 - RNA, 23 nt, Artificial Sequence
  Synthetic
ucuuuuucucugcgguacugaaa

SEQ ID NO: 175732 - RNA, 24 nt, Artificial Sequence
  Synthetic
aucuuuuucucugcgguacugaaa

SEQ ID NO: 175733 - RNA, 18 nt, Artificial Sequence
  Synthetic
auugaugacuuacugaaa

SEQ ID NO: 175734 - RNA, 19 nt, Artificial Sequence
  Synthetic
aauugaugacuuacugaaa

SEQ ID NO: 175735 - RNA, 20 nt, Artificial Sequence
  Synthetic
uaauugaugacuuacugaaa

SEQ ID NO: 175736 - RNA, 21 nt, Artificial Sequence
  Synthetic
uuaauugaugacuuacugaaa

SEQ ID NO: 175737 - RNA, 22 nt, Artificial Sequence
  Synthetic
auuaauugaugacuuacugaaa

SEQ ID NO: 175738 - RNA, 23 nt, Artificial Sequence
  Synthetic
cauuaauugaugacuuacugaaa

SEQ ID NO: 175739 - RNA, 24 nt, Artificial Sequence
  Synthetic
acauuaauugaugacuuacugaaa

SEQ ID NO: 175740 - RNA, 18 nt, Artificial Sequence
  Synthetic
cauauucauuuacugaaa

SEQ ID NO: 175741 - RNA, 19 nt, Artificial Sequence
  Synthetic
ucauauucauuuacugaaa

SEQ ID NO: 175742 - RNA, 20 nt, Artificial Sequence
  Synthetic
uucauauucauuuacugaaa

SEQ ID NO: 175743 - RNA, 21 nt, Artificial Sequence
  Synthetic
auucauauucauuuacugaaa

SEQ ID NO: 175744 - RNA, 22 nt, Artificial Sequence
  Synthetic
aauucauauucauuuacugaaa

SEQ ID NO: 175745 - RNA, 23 nt, Artificial Sequence
  Synthetic
uaauucauauucauuuacugaaa

SEQ ID NO: 175746 - RNA, 24 nt, Artificial Sequence
  Synthetic
uuaauucauauucauuuacugaaa

SEQ ID NO: 175747 - RNA, 18 nt, Artificial Sequence
  Synthetic
aauaaauguuuacugaaa

SEQ ID NO: 175748 - RNA, 19 nt, Artificial Sequence
  Synthetic
caauaaauguuuacugaaa

SEQ ID NO: 175749 - RNA, 20 nt, Artificial Sequence
  Synthetic
acaauaaauguuuacugaaa

SEQ ID NO: 175750 - RNA, 21 nt, Artificial Sequence
  Synthetic
uacaauaaauguuuacugaaa

SEQ ID NO: 175751 - RNA, 22 nt, Artificial Sequence
  Synthetic
guacaauaaauguuuacugaaa

SEQ ID NO: 175752 - RNA, 23 nt, Artificial Sequence
  Synthetic
gguacaauaaauguuuacugaaa

SEQ ID NO: 175753 - RNA, 24 nt, Artificial Sequence
  Synthetic
agguacaauaaauguuuacugaaa

SEQ ID NO: 175754 - RNA, 18 nt, Artificial Sequence
  Synthetic
uaagacauggaccugaaa

SEQ ID NO: 175755 - RNA, 19 nt, Artificial Sequence
  Synthetic
uuaagacauggaccugaaa

SEQ ID NO: 175756 - RNA, 20 nt, Artificial Sequence
  Synthetic
uuuaagacauggaccugaaa

SEQ ID NO: 175757 - RNA, 21 nt, Artificial Sequence
  Synthetic
auuuaagacauggaccugaaa

SEQ ID NO: 175758 - RNA, 22 nt, Artificial Sequence
  Synthetic
cauuuaagacauggaccugaaa

SEQ ID NO: 175759 - RNA, 23 nt, Artificial Sequence
  Synthetic
acauuuaagacauggaccugaaa

SEQ ID NO: 175760 - RNA, 24 nt, Artificial Sequence
  Synthetic
uacauuuaagacauggaccugaaa

SEQ ID NO: 175761 - RNA, 18 nt, Artificial Sequence
  Synthetic
uaaggaauaacccugaaa

SEQ ID NO: 175762 - RNA, 19 nt, Artificial Sequence
  Synthetic
guaaggaauaacccugaaa

SEQ ID NO: 175763 - RNA, 20 nt, Artificial Sequence
  Synthetic
gguaaggaauaacccugaaa

SEQ ID NO: 175764 - RNA, 21 nt, Artificial Sequence
  Synthetic
ggguaaggaauaacccugaaa

SEQ ID NO: 175765 - RNA, 22 nt, Artificial Sequence
  Synthetic
uggguaaggaauaacccugaaa

SEQ ID NO: 175766 - RNA, 23 nt, Artificial Sequence
  Synthetic
cuggguaaggaauaacccugaaa

SEQ ID NO: 175767 - RNA, 24 nt, Artificial Sequence
  Synthetic
acuggguaaggaauaacccugaaa

SEQ ID NO: 175768 - RNA, 18 nt, Artificial Sequence
  Synthetic
cuggauuggauccugaaa

SEQ ID NO: 175769 - RNA, 19 nt, Artificial Sequence
  Synthetic
ucuggauuggauccugaaa

SEQ ID NO: 175770 - RNA, 20 nt, Artificial Sequence
  Synthetic
uucuggauuggauccugaaa

SEQ ID NO: 175771 - RNA, 21 nt, Artificial Sequence
  Synthetic
auucuggauuggauccugaaa

SEQ ID NO: 175772 - RNA, 22 nt, Artificial Sequence
  Synthetic
gauucuggauuggauccugaaa

SEQ ID NO: 175773 - RNA, 23 nt, Artificial Sequence
  Synthetic
agauucuggauuggauccugaaa

SEQ ID NO: 175774 - RNA, 24 nt, Artificial Sequence
  Synthetic
gagauucuggauuggauccugaaa

SEQ ID NO: 175775 - RNA, 18 nt, Artificial Sequence
  Synthetic
gagagagaugaucugaaa

SEQ ID NO: 175776 - RNA, 19 nt, Artificial Sequence
  Synthetic
ugagagagaugaucugaaa

SEQ ID NO: 175777 - RNA, 20 nt, Artificial Sequence
  Synthetic
uugagagagaugaucugaaa

SEQ ID NO: 175778 - RNA, 21 nt, Artificial Sequence
  Synthetic
cuugagagagaugaucugaaa

SEQ ID NO: 175779 - RNA, 22 nt, Artificial Sequence
  Synthetic
acuugagagagaugaucugaaa

SEQ ID NO: 175780 - RNA, 23 nt, Artificial Sequence
  Synthetic
aacuugagagagaugaucugaaa

SEQ ID NO: 175781 - RNA, 24 nt, Artificial Sequence
  Synthetic
gaacuugagagagaugaucugaaa

SEQ ID NO: 175782 - RNA, 18 nt, Artificial Sequence
  Synthetic
aaucaaaaauaucugaaa

SEQ ID NO: 175783 - RNA, 19 nt, Artificial Sequence
  Synthetic
caaucaaaaauaucugaaa

SEQ ID NO: 175784 - RNA, 20 nt, Artificial Sequence
  Synthetic
acaaucaaaaauaucugaaa

SEQ ID NO: 175785 - RNA, 21 nt, Artificial Sequence
  Synthetic
aacaaucaaaaauaucugaaa

SEQ ID NO: 175786 - RNA, 22 nt, Artificial Sequence
  Synthetic
aaacaaucaaaaauaucugaaa

SEQ ID NO: 175787 - RNA, 23 nt, Artificial Sequence
  Synthetic
uaaacaaucaaaaauaucugaaa

SEQ ID NO: 175788 - RNA, 24 nt, Artificial Sequence
  Synthetic
uuaaacaaucaaaaauaucugaaa

SEQ ID NO: 175789 - RNA, 18 nt, Artificial Sequence
  Synthetic
gaaauugcgccucugaaa

SEQ ID NO: 175790 - RNA, 19 nt, Artificial Sequence
  Synthetic
agaaauugcgccucugaaa

SEQ ID NO: 175791 - RNA, 20 nt, Artificial Sequence
  Synthetic
gagaaauugcgccucugaaa

SEQ ID NO: 175792 - RNA, 21 nt, Artificial Sequence
  Synthetic
ggagaaauugcgccucugaaa

SEQ ID NO: 175793 - RNA, 22 nt, Artificial Sequence
  Synthetic
aggagaaauugcgccucugaaa

SEQ ID NO: 175794 - RNA, 23 nt, Artificial Sequence
  Synthetic
gaggagaaauugcgccucugaaa

SEQ ID NO: 175795 - RNA, 24 nt, Artificial Sequence
  Synthetic
cgaggagaaauugcgccucugaaa

SEQ ID NO: 175796 - RNA, 18 nt, Artificial Sequence
  Synthetic
ugcucauggggucugaaa

SEQ ID NO: 175797 - RNA, 19 nt, Artificial Sequence
  Synthetic
augcucauggggucugaaa

SEQ ID NO: 175798 - RNA, 20 nt, Artificial Sequence
  Synthetic
uaugcucauggggucugaaa

SEQ ID NO: 175799 - RNA, 21 nt, Artificial Sequence
  Synthetic
auaugcucauggggucugaaa

SEQ ID NO: 175800 - RNA, 22 nt, Artificial Sequence
  Synthetic
aauaugcucauggggucugaaa

SEQ ID NO: 175801 - RNA, 23 nt, Artificial Sequence
  Synthetic
caauaugcucauggggucugaaa

SEQ ID NO: 175802 - RNA, 24 nt, Artificial Sequence
  Synthetic
acaauaugcucauggggucugaaa

SEQ ID NO: 175803 - RNA, 18 nt, Artificial Sequence
  Synthetic
ccuaugaaaguucugaaa

SEQ ID NO: 175804 - RNA, 19 nt, Artificial Sequence
  Synthetic
accuaugaaaguucugaaa

SEQ ID NO: 175805 - RNA, 20 nt, Artificial Sequence
  Synthetic
uaccuaugaaaguucugaaa

SEQ ID NO: 175806 - RNA, 21 nt, Artificial Sequence
  Synthetic
auaccuaugaaaguucugaaa

SEQ ID NO: 175807 - RNA, 22 nt, Artificial Sequence
  Synthetic
cauaccuaugaaaguucugaaa

SEQ ID NO: 175808 - RNA, 23 nt, Artificial Sequence
  Synthetic
acauaccuaugaaaguucugaaa

SEQ ID NO: 175809 - RNA, 24 nt, Artificial Sequence
  Synthetic
aacauaccuaugaaaguucugaaa

SEQ ID NO: 175810 - RNA, 18 nt, Artificial Sequence
  Synthetic
caauaacgaguucugaaa

SEQ ID NO: 175811 - RNA, 19 nt, Artificial Sequence
  Synthetic
ccaauaacgaguucugaaa

SEQ ID NO: 175812 - RNA, 20 nt, Artificial Sequence
  Synthetic
accaauaacgaguucugaaa

SEQ ID NO: 175813 - RNA, 21 nt, Artificial Sequence
  Synthetic
gaccaauaacgaguucugaaa

SEQ ID NO: 175814 - RNA, 22 nt, Artificial Sequence
  Synthetic
agaccaauaacgaguucugaaa

SEQ ID NO: 175815 - RNA, 23 nt, Artificial Sequence
  Synthetic
uagaccaauaacgaguucugaaa

SEQ ID NO: 175816 - RNA, 24 nt, Artificial Sequence
  Synthetic
auagaccaauaacgaguucugaaa

SEQ ID NO: 175817 - RNA, 18 nt, Artificial Sequence
  Synthetic
acucaguucaaagugaaa

SEQ ID NO: 175818 - RNA, 19 nt, Artificial Sequence
  Synthetic
gacucaguucaaagugaaa

SEQ ID NO: 175819 - RNA, 20 nt, Artificial Sequence
  Synthetic
ggacucaguucaaagugaaa

SEQ ID NO: 175820 - RNA, 21 nt, Artificial Sequence
  Synthetic
uggacucaguucaaagugaaa

SEQ ID NO: 175821 - RNA, 22 nt, Artificial Sequence
  Synthetic
auggacucaguucaaagugaaa

SEQ ID NO: 175822 - RNA, 23 nt, Artificial Sequence
  Synthetic
cauggacucaguucaaagugaaa

SEQ ID NO: 175823 - RNA, 24 nt, Artificial Sequence
  Synthetic
gcauggacucaguucaaagugaaa

SEQ ID NO: 175824 - RNA, 18 nt, Artificial Sequence
  Synthetic
ccauuauauaaagugaaa

SEQ ID NO: 175825 - RNA, 19 nt, Artificial Sequence
  Synthetic
gccauuauauaaagugaaa

SEQ ID NO: 175826 - RNA, 20 nt, Artificial Sequence
  Synthetic
ggccauuauauaaagugaaa

SEQ ID NO: 175827 - RNA, 21 nt, Artificial Sequence
  Synthetic
aggccauuauauaaagugaaa

SEQ ID NO: 175828 - RNA, 22 nt, Artificial Sequence
  Synthetic
uaggccauuauauaaagugaaa

SEQ ID NO: 175829 - RNA, 23 nt, Artificial Sequence
  Synthetic
auaggccauuauauaaagugaaa

SEQ ID NO: 175830 - RNA, 24 nt, Artificial Sequence
  Synthetic
aauaggccauuauauaaagugaaa

SEQ ID NO: 175831 - RNA, 18 nt, Artificial Sequence
  Synthetic
aaaaagaaagaagugaaa

SEQ ID NO: 175832 - RNA, 19 nt, Artificial Sequence
  Synthetic
uaaaaagaaagaagugaaa

SEQ ID NO: 175833 - RNA, 20 nt, Artificial Sequence
  Synthetic
guaaaaagaaagaagugaaa

SEQ ID NO: 175834 - RNA, 21 nt, Artificial Sequence
  Synthetic
aguaaaaagaaagaagugaaa

SEQ ID NO: 175835 - RNA, 22 nt, Artificial Sequence
  Synthetic
gaguaaaaagaaagaagugaaa

SEQ ID NO: 175836 - RNA, 23 nt, Artificial Sequence
  Synthetic
ggaguaaaaagaaagaagugaaa

SEQ ID NO: 175837 - RNA, 24 nt, Artificial Sequence
  Synthetic
uggaguaaaaagaaagaagugaaa

SEQ ID NO: 175838 - RNA, 18 nt, Artificial Sequence
  Synthetic
gaguuuaaauaagugaaa

SEQ ID NO: 175839 - RNA, 19 nt, Artificial Sequence
  Synthetic
agaguuuaaauaagugaaa

SEQ ID NO: 175840 - RNA, 20 nt, Artificial Sequence
  Synthetic
cagaguuuaaauaagugaaa

SEQ ID NO: 175841 - RNA, 21 nt, Artificial Sequence
  Synthetic
gcagaguuuaaauaagugaaa

SEQ ID NO: 175842 - RNA, 22 nt, Artificial Sequence
  Synthetic
ugcagaguuuaaauaagugaaa

SEQ ID NO: 175843 - RNA, 23 nt, Artificial Sequence
  Synthetic
gugcagaguuuaaauaagugaaa

SEQ ID NO: 175844 - RNA, 24 nt, Artificial Sequence
  Synthetic
ugugcagaguuuaaauaagugaaa

SEQ ID NO: 175845 - RNA, 18 nt, Artificial Sequence
  Synthetic
ggguucauauaagugaaa

SEQ ID NO: 175846 - RNA, 19 nt, Artificial Sequence
  Synthetic
aggguucauauaagugaaa

SEQ ID NO: 175847 - RNA, 20 nt, Artificial Sequence
  Synthetic
caggguucauauaagugaaa

SEQ ID NO: 175848 - RNA, 21 nt, Artificial Sequence
  Synthetic
acaggguucauauaagugaaa

SEQ ID NO: 175849 - RNA, 22 nt, Artificial Sequence
  Synthetic
cacaggguucauauaagugaaa

SEQ ID NO: 175850 - RNA, 23 nt, Artificial Sequence
  Synthetic
ccacaggguucauauaagugaaa

SEQ ID NO: 175851 - RNA, 24 nt, Artificial Sequence
  Synthetic
accacaggguucauauaagugaaa

SEQ ID NO: 175852 - RNA, 18 nt, Artificial Sequence
  Synthetic
aaugaugaugcagugaaa

SEQ ID NO: 175853 - RNA, 19 nt, Artificial Sequence
  Synthetic
gaaugaugaugcagugaaa

SEQ ID NO: 175854 - RNA, 20 nt, Artificial Sequence
  Synthetic
ugaaugaugaugcagugaaa

SEQ ID NO: 175855 - RNA, 21 nt, Artificial Sequence
  Synthetic
uugaaugaugaugcagugaaa

SEQ ID NO: 175856 - RNA, 22 nt, Artificial Sequence
  Synthetic
guugaaugaugaugcagugaaa

SEQ ID NO: 175857 - RNA, 23 nt, Artificial Sequence
  Synthetic
aguugaaugaugaugcagugaaa

SEQ ID NO: 175858 - RNA, 24 nt, Artificial Sequence
  Synthetic
gaguugaaugaugaugcagugaaa

SEQ ID NO: 175859 - RNA, 18 nt, Artificial Sequence
  Synthetic
aaucuuaucagagugaaa

SEQ ID NO: 175860 - RNA, 19 nt, Artificial Sequence
  Synthetic
gaaucuuaucagagugaaa

SEQ ID NO: 175861 - RNA, 20 nt, Artificial Sequence
  Synthetic
ggaaucuuaucagagugaaa

SEQ ID NO: 175862 - RNA, 21 nt, Artificial Sequence
  Synthetic
uggaaucuuaucagagugaaa

SEQ ID NO: 175863 - RNA, 22 nt, Artificial Sequence
  Synthetic
auggaaucuuaucagagugaaa

SEQ ID NO: 175864 - RNA, 23 nt, Artificial Sequence
  Synthetic
cauggaaucuuaucagagugaaa

SEQ ID NO: 175865 - RNA, 24 nt, Artificial Sequence
  Synthetic
ccauggaaucuuaucagagugaaa

SEQ ID NO: 175866 - RNA, 18 nt, Artificial Sequence
  Synthetic
aaauuccagagagugaaa

SEQ ID NO: 175867 - RNA, 19 nt, Artificial Sequence
  Synthetic
caaauuccagagagugaaa

SEQ ID NO: 175868 - RNA, 20 nt, Artificial Sequence
  Synthetic
acaaauuccagagagugaaa

SEQ ID NO: 175869 - RNA, 21 nt, Artificial Sequence
  Synthetic
gacaaauuccagagagugaaa

SEQ ID NO: 175870 - RNA, 22 nt, Artificial Sequence
  Synthetic
agacaaauuccagagagugaaa

SEQ ID NO: 175871 - RNA, 23 nt, Artificial Sequence
  Synthetic
aagacaaauuccagagagugaaa

SEQ ID NO: 175872 - RNA, 24 nt, Artificial Sequence
  Synthetic
aaagacaaauuccagagagugaaa

SEQ ID NO: 175873 - RNA, 18 nt, Artificial Sequence
  Synthetic
uaccaaaggggagugaaa

SEQ ID NO: 175874 - RNA, 19 nt, Artificial Sequence
  Synthetic
guaccaaaggggagugaaa

SEQ ID NO: 175875 - RNA, 20 nt, Artificial Sequence
  Synthetic
aguaccaaaggggagugaaa

SEQ ID NO: 175876 - RNA, 21 nt, Artificial Sequence
  Synthetic
gaguaccaaaggggagugaaa

SEQ ID NO: 175877 - RNA, 22 nt, Artificial Sequence
  Synthetic
ggaguaccaaaggggagugaaa

SEQ ID NO: 175878 - RNA, 23 nt, Artificial Sequence
  Synthetic
aggaguaccaaaggggagugaaa

SEQ ID NO: 175879 - RNA, 24 nt, Artificial Sequence
  Synthetic
aaggaguaccaaaggggagugaaa

SEQ ID NO: 175880 - RNA, 18 nt, Artificial Sequence
  Synthetic
uaugcucgaugagugaaa

SEQ ID NO: 175881 - RNA, 19 nt, Artificial Sequence
  Synthetic
cuaugcucgaugagugaaa

SEQ ID NO: 175882 - RNA, 20 nt, Artificial Sequence
  Synthetic
ccuaugcucgaugagugaaa

SEQ ID NO: 175883 - RNA, 21 nt, Artificial Sequence
  Synthetic
uccuaugcucgaugagugaaa

SEQ ID NO: 175884 - RNA, 22 nt, Artificial Sequence
  Synthetic
uuccuaugcucgaugagugaaa

SEQ ID NO: 175885 - RNA, 23 nt, Artificial Sequence
  Synthetic
cuuccuaugcucgaugagugaaa

SEQ ID NO: 175886 - RNA, 24 nt, Artificial Sequence
  Synthetic
acuuccuaugcucgaugagugaaa

SEQ ID NO: 175887 - RNA, 18 nt, Artificial Sequence
  Synthetic
caugcaguuauagugaaa

SEQ ID NO: 175888 - RNA, 19 nt, Artificial Sequence
  Synthetic
gcaugcaguuauagugaaa

SEQ ID NO: 175889 - RNA, 20 nt, Artificial Sequence
  Synthetic
agcaugcaguuauagugaaa

SEQ ID NO: 175890 - RNA, 21 nt, Artificial Sequence
  Synthetic
cagcaugcaguuauagugaaa

SEQ ID NO: 175891 - RNA, 22 nt, Artificial Sequence
  Synthetic
acagcaugcaguuauagugaaa

SEQ ID NO: 175892 - RNA, 23 nt, Artificial Sequence
  Synthetic
gacagcaugcaguuauagugaaa

SEQ ID NO: 175893 - RNA, 24 nt, Artificial Sequence
  Synthetic
ugacagcaugcaguuauagugaaa

SEQ ID NO: 175894 - RNA, 18 nt, Artificial Sequence
  Synthetic
aaaucaucuuacgugaaa

SEQ ID NO: 175895 - RNA, 19 nt, Artificial Sequence
  Synthetic
caaaucaucuuacgugaaa

SEQ ID NO: 175896 - RNA, 20 nt, Artificial Sequence
  Synthetic
ucaaaucaucuuacgugaaa

SEQ ID NO: 175897 - RNA, 21 nt, Artificial Sequence
  Synthetic
aucaaaucaucuuacgugaaa

SEQ ID NO: 175898 - RNA, 22 nt, Artificial Sequence
  Synthetic
gaucaaaucaucuuacgugaaa

SEQ ID NO: 175899 - RNA, 23 nt, Artificial Sequence
  Synthetic
ugaucaaaucaucuuacgugaaa

SEQ ID NO: 175900 - RNA, 24 nt, Artificial Sequence
  Synthetic
augaucaaaucaucuuacgugaaa

SEQ ID NO: 175901 - RNA, 18 nt, Artificial Sequence
  Synthetic
aggaccuccaaggugaaa

SEQ ID NO: 175902 - RNA, 19 nt, Artificial Sequence
  Synthetic
uaggaccuccaaggugaaa

SEQ ID NO: 175903 - RNA, 20 nt, Artificial Sequence
  Synthetic
guaggaccuccaaggugaaa

SEQ ID NO: 175904 - RNA, 21 nt, Artificial Sequence
  Synthetic
uguaggaccuccaaggugaaa

SEQ ID NO: 175905 - RNA, 22 nt, Artificial Sequence
  Synthetic
cuguaggaccuccaaggugaaa

SEQ ID NO: 175906 - RNA, 23 nt, Artificial Sequence
  Synthetic
ccuguaggaccuccaaggugaaa

SEQ ID NO: 175907 - RNA, 24 nt, Artificial Sequence
  Synthetic
uccuguaggaccuccaaggugaaa

SEQ ID NO: 175908 - RNA, 18 nt, Artificial Sequence
  Synthetic
gucaauaagaaggugaaa

SEQ ID NO: 175909 - RNA, 19 nt, Artificial Sequence
  Synthetic
ugucaauaagaaggugaaa

SEQ ID NO: 175910 - RNA, 20 nt, Artificial Sequence
  Synthetic
uugucaauaagaaggugaaa

SEQ ID NO: 175911 - RNA, 21 nt, Artificial Sequence
  Synthetic
guugucaauaagaaggugaaa

SEQ ID NO: 175912 - RNA, 22 nt, Artificial Sequence
  Synthetic
uguugucaauaagaaggugaaa

SEQ ID NO: 175913 - RNA, 23 nt, Artificial Sequence
  Synthetic
auguugucaauaagaaggugaaa

SEQ ID NO: 175914 - RNA, 24 nt, Artificial Sequence
  Synthetic
aauguugucaauaagaaggugaaa

SEQ ID NO: 175915 - RNA, 18 nt, Artificial Sequence
  Synthetic
gucaagcagaaggugaaa

SEQ ID NO: 175916 - RNA, 19 nt, Artificial Sequence
  Synthetic
ugucaagcagaaggugaaa

SEQ ID NO: 175917 - RNA, 20 nt, Artificial Sequence
  Synthetic
uugucaagcagaaggugaaa

SEQ ID NO: 175918 - RNA, 21 nt, Artificial Sequence
  Synthetic
guugucaagcagaaggugaaa

SEQ ID NO: 175919 - RNA, 22 nt, Artificial Sequence
  Synthetic
aguugucaagcagaaggugaaa

SEQ ID NO: 175920 - RNA, 23 nt, Artificial Sequence
  Synthetic
uaguugucaagcagaaggugaaa

SEQ ID NO: 175921 - RNA, 24 nt, Artificial Sequence
  Synthetic
uuaguugucaagcagaaggugaaa

SEQ ID NO: 175922 - RNA, 18 nt, Artificial Sequence
  Synthetic
gccucgaguaaggugaaa

SEQ ID NO: 175923 - RNA, 19 nt, Artificial Sequence
  Synthetic
agccucgaguaaggugaaa

SEQ ID NO: 175924 - RNA, 20 nt, Artificial Sequence
  Synthetic
cagccucgaguaaggugaaa

SEQ ID NO: 175925 - RNA, 21 nt, Artificial Sequence
  Synthetic
gcagccucgaguaaggugaaa

SEQ ID NO: 175926 - RNA, 22 nt, Artificial Sequence
  Synthetic
ugcagccucgaguaaggugaaa

SEQ ID NO: 175927 - RNA, 23 nt, Artificial Sequence
  Synthetic
cugcagccucgaguaaggugaaa

SEQ ID NO: 175928 - RNA, 24 nt, Artificial Sequence
  Synthetic
gcugcagccucgaguaaggugaaa

SEQ ID NO: 175929 - RNA, 18 nt, Artificial Sequence
  Synthetic
aauagagaugaggugaaa

SEQ ID NO: 175930 - RNA, 19 nt, Artificial Sequence
  Synthetic
aaauagagaugaggugaaa

SEQ ID NO: 175931 - RNA, 20 nt, Artificial Sequence
  Synthetic
gaaauagagaugaggugaaa

SEQ ID NO: 175932 - RNA, 21 nt, Artificial Sequence
  Synthetic
agaaauagagaugaggugaaa

SEQ ID NO: 175933 - RNA, 22 nt, Artificial Sequence
  Synthetic
uagaaauagagaugaggugaaa

SEQ ID NO: 175934 - RNA, 23 nt, Artificial Sequence
  Synthetic
auagaaauagagaugaggugaaa

SEQ ID NO: 175935 - RNA, 24 nt, Artificial Sequence
  Synthetic
uauagaaauagagaugaggugaaa

SEQ ID NO: 175936 - RNA, 18 nt, Artificial Sequence
  Synthetic
ggaauguagggggugaaa

SEQ ID NO: 175937 - RNA, 19 nt, Artificial Sequence
  Synthetic
cggaauguagggggugaaa

SEQ ID NO: 175938 - RNA, 20 nt, Artificial Sequence
  Synthetic
acggaauguagggggugaaa

SEQ ID NO: 175939 - RNA, 21 nt, Artificial Sequence
  Synthetic
aacggaauguagggggugaaa

SEQ ID NO: 175940 - RNA, 22 nt, Artificial Sequence
  Synthetic
aaacggaauguagggggugaaa

SEQ ID NO: 175941 - RNA, 23 nt, Artificial Sequence
  Synthetic
aaaacggaauguagggggugaaa

SEQ ID NO: 175942 - RNA, 24 nt, Artificial Sequence
  Synthetic
gaaaacggaauguagggggugaaa

SEQ ID NO: 175943 - RNA, 18 nt, Artificial Sequence
  Synthetic
guaggcacaugggugaaa

SEQ ID NO: 175944 - RNA, 19 nt, Artificial Sequence
  Synthetic
uguaggcacaugggugaaa

SEQ ID NO: 175945 - RNA, 20 nt, Artificial Sequence
  Synthetic
uuguaggcacaugggugaaa

SEQ ID NO: 175946 - RNA, 21 nt, Artificial Sequence
  Synthetic
uuuguaggcacaugggugaaa

SEQ ID NO: 175947 - RNA, 22 nt, Artificial Sequence
  Synthetic
cuuuguaggcacaugggugaaa

SEQ ID NO: 175948 - RNA, 23 nt, Artificial Sequence
  Synthetic
ccuuuguaggcacaugggugaaa

SEQ ID NO: 175949 - RNA, 24 nt, Artificial Sequence
  Synthetic
uccuuuguaggcacaugggugaaa

SEQ ID NO: 175950 - RNA, 18 nt, Artificial Sequence
  Synthetic
gucaggugacuggugaaa

SEQ ID NO: 175951 - RNA, 19 nt, Artificial Sequence
  Synthetic
ggucaggugacuggugaaa

SEQ ID NO: 175952 - RNA, 20 nt, Artificial Sequence
  Synthetic
uggucaggugacuggugaaa

SEQ ID NO: 175953 - RNA, 21 nt, Artificial Sequence
  Synthetic
uuggucaggugacuggugaaa

SEQ ID NO: 175954 - RNA, 22 nt, Artificial Sequence
  Synthetic
uuuggucaggugacuggugaaa

SEQ ID NO: 175955 - RNA, 23 nt, Artificial Sequence
  Synthetic
auuuggucaggugacuggugaaa

SEQ ID NO: 175956 - RNA, 24 nt, Artificial Sequence
  Synthetic
gauuuggucaggugacuggugaaa

SEQ ID NO: 175957 - RNA, 18 nt, Artificial Sequence
  Synthetic
aaaaaugaaaaugugaaa

SEQ ID NO: 175958 - RNA, 19 nt, Artificial Sequence
  Synthetic
uaaaaaugaaaaugugaaa

SEQ ID NO: 175959 - RNA, 20 nt, Artificial Sequence
  Synthetic
cuaaaaaugaaaaugugaaa

SEQ ID NO: 175960 - RNA, 21 nt, Artificial Sequence
  Synthetic
ucuaaaaaugaaaaugugaaa

SEQ ID NO: 175961 - RNA, 22 nt, Artificial Sequence
  Synthetic
cucuaaaaaugaaaaugugaaa

SEQ ID NO: 175962 - RNA, 23 nt, Artificial Sequence
  Synthetic
acucuaaaaaugaaaaugugaaa

SEQ ID NO: 175963 - RNA, 24 nt, Artificial Sequence
  Synthetic
uacucuaaaaaugaaaaugugaaa

SEQ ID NO: 175964 - RNA, 18 nt, Artificial Sequence
  Synthetic
guuuuauccaaugugaaa

SEQ ID NO: 175965 - RNA, 19 nt, Artificial Sequence
  Synthetic
aguuuuauccaaugugaaa

SEQ ID NO: 175966 - RNA, 20 nt, Artificial Sequence
  Synthetic
caguuuuauccaaugugaaa

SEQ ID NO: 175967 - RNA, 21 nt, Artificial Sequence
  Synthetic
ucaguuuuauccaaugugaaa

SEQ ID NO: 175968 - RNA, 22 nt, Artificial Sequence
  Synthetic
cucaguuuuauccaaugugaaa

SEQ ID NO: 175969 - RNA, 23 nt, Artificial Sequence
  Synthetic
ccucaguuuuauccaaugugaaa

SEQ ID NO: 175970 - RNA, 24 nt, Artificial Sequence
  Synthetic
gccucaguuuuauccaaugugaaa

SEQ ID NO: 175971 - RNA, 18 nt, Artificial Sequence
  Synthetic
cugcaugcguaugugaaa

SEQ ID NO: 175972 - RNA, 19 nt, Artificial Sequence
  Synthetic
gcugcaugcguaugugaaa

SEQ ID NO: 175973 - RNA, 20 nt, Artificial Sequence
  Synthetic
ugcugcaugcguaugugaaa

SEQ ID NO: 175974 - RNA, 21 nt, Artificial Sequence
  Synthetic
augcugcaugcguaugugaaa

SEQ ID NO: 175975 - RNA, 22 nt, Artificial Sequence
  Synthetic
aaugcugcaugcguaugugaaa

SEQ ID NO: 175976 - RNA, 23 nt, Artificial Sequence
  Synthetic
aaaugcugcaugcguaugugaaa

SEQ ID NO: 175977 - RNA, 24 nt, Artificial Sequence
  Synthetic
aaaaugcugcaugcguaugugaaa

SEQ ID NO: 175978 - RNA, 18 nt, Artificial Sequence
  Synthetic
gauggugauagugugaaa

SEQ ID NO: 175979 - RNA, 19 nt, Artificial Sequence
  Synthetic
ugauggugauagugugaaa

SEQ ID NO: 175980 - RNA, 20 nt, Artificial Sequence
  Synthetic
gugauggugauagugugaaa

SEQ ID NO: 175981 - RNA, 21 nt, Artificial Sequence
  Synthetic
ugugauggugauagugugaaa

SEQ ID NO: 175982 - RNA, 22 nt, Artificial Sequence
  Synthetic
cugugauggugauagugugaaa

SEQ ID NO: 175983 - RNA, 23 nt, Artificial Sequence
  Synthetic
ucugugauggugauagugugaaa

SEQ ID NO: 175984 - RNA, 24 nt, Artificial Sequence
  Synthetic
aucugugauggugauagugugaaa

SEQ ID NO: 175985 - RNA, 18 nt, Artificial Sequence
  Synthetic
uggaacgaacgugugaaa

SEQ ID NO: 175986 - RNA, 19 nt, Artificial Sequence
  Synthetic
uuggaacgaacgugugaaa

SEQ ID NO: 175987 - RNA, 20 nt, Artificial Sequence
  Synthetic
uuuggaacgaacgugugaaa

SEQ ID NO: 175988 - RNA, 21 nt, Artificial Sequence
  Synthetic
uuuuggaacgaacgugugaaa

SEQ ID NO: 175989 - RNA, 22 nt, Artificial Sequence
  Synthetic
uuuuuggaacgaacgugugaaa

SEQ ID NO: 175990 - RNA, 23 nt, Artificial Sequence
  Synthetic
auuuuuggaacgaacgugugaaa

SEQ ID NO: 175991 - RNA, 24 nt, Artificial Sequence
  Synthetic
uauuuuuggaacgaacgugugaaa

SEQ ID NO: 175992 - RNA, 18 nt, Artificial Sequence
  Synthetic
gccaaaacaauugugaaa

SEQ ID NO: 175993 - RNA, 19 nt, Artificial Sequence
  Synthetic
agccaaaacaauugugaaa

SEQ ID NO: 175994 - RNA, 20 nt, Artificial Sequence
  Synthetic
uagccaaaacaauugugaaa

SEQ ID NO: 175995 - RNA, 21 nt, Artificial Sequence
  Synthetic
auagccaaaacaauugugaaa

SEQ ID NO: 175996 - RNA, 22 nt, Artificial Sequence
  Synthetic
aauagccaaaacaauugugaaa

SEQ ID NO: 175997 - RNA, 23 nt, Artificial Sequence
  Synthetic
aaauagccaaaacaauugugaaa

SEQ ID NO: 175998 - RNA, 24 nt, Artificial Sequence
  Synthetic
caaauagccaaaacaauugugaaa

SEQ ID NO: 175999 - RNA, 18 nt, Artificial Sequence
  Synthetic
acuuacuggcuugugaaa

SEQ ID NO: 176000 - RNA, 19 nt, Artificial Sequence
  Synthetic
uacuuacuggcuugugaaa

SEQ ID NO: 176001 - RNA, 20 nt, Artificial Sequence
  Synthetic
uuacuuacuggcuugugaaa

SEQ ID NO: 176002 - RNA, 21 nt, Artificial Sequence
  Synthetic
uuuacuuacuggcuugugaaa

SEQ ID NO: 176003 - RNA, 22 nt, Artificial Sequence
  Synthetic
auuuacuuacuggcuugugaaa

SEQ ID NO: 176004 - RNA, 23 nt, Artificial Sequence
  Synthetic
uauuuacuuacuggcuugugaaa

SEQ ID NO: 176005 - RNA, 24 nt, Artificial Sequence
  Synthetic
uuauuuacuuacuggcuugugaaa

SEQ ID NO: 176006 - RNA, 18 nt, Artificial Sequence
  Synthetic
caggaguugcuugugaaa

SEQ ID NO: 176007 - RNA, 19 nt, Artificial Sequence
  Synthetic
ucaggaguugcuugugaaa

SEQ ID NO: 176008 - RNA, 20 nt, Artificial Sequence
  Synthetic
gucaggaguugcuugugaaa

SEQ ID NO: 176009 - RNA, 21 nt, Artificial Sequence
  Synthetic
cgucaggaguugcuugugaaa

SEQ ID NO: 176010 - RNA, 22 nt, Artificial Sequence
  Synthetic
ucgucaggaguugcuugugaaa

SEQ ID NO: 176011 - RNA, 23 nt, Artificial Sequence
  Synthetic
aucgucaggaguugcuugugaaa

SEQ ID NO: 176012 - RNA, 24 nt, Artificial Sequence
  Synthetic
aaucgucaggaguugcuugugaaa

SEQ ID NO: 176013 - RNA, 18 nt, Artificial Sequence
  Synthetic
ugauaaggauaauugaaa

SEQ ID NO: 176014 - RNA, 19 nt, Artificial Sequence
  Synthetic
augauaaggauaauugaaa

SEQ ID NO: 176015 - RNA, 20 nt, Artificial Sequence
  Synthetic
aaugauaaggauaauugaaa

SEQ ID NO: 176016 - RNA, 21 nt, Artificial Sequence
  Synthetic
caaugauaaggauaauugaaa

SEQ ID NO: 176017 - RNA, 22 nt, Artificial Sequence
  Synthetic
ccaaugauaaggauaauugaaa

SEQ ID NO: 176018 - RNA, 23 nt, Artificial Sequence
  Synthetic
uccaaugauaaggauaauugaaa

SEQ ID NO: 176019 - RNA, 24 nt, Artificial Sequence
  Synthetic
cuccaaugauaaggauaauugaaa

SEQ ID NO: 176020 - RNA, 18 nt, Artificial Sequence
  Synthetic
cauauauuguaauugaaa

SEQ ID NO: 176021 - RNA, 19 nt, Artificial Sequence
  Synthetic
acauauauuguaauugaaa

SEQ ID NO: 176022 - RNA, 20 nt, Artificial Sequence
  Synthetic
aacauauauuguaauugaaa

SEQ ID NO: 176023 - RNA, 21 nt, Artificial Sequence
  Synthetic
aaacauauauuguaauugaaa

SEQ ID NO: 176024 - RNA, 22 nt, Artificial Sequence
  Synthetic
aaaacauauauuguaauugaaa

SEQ ID NO: 176025 - RNA, 23 nt, Artificial Sequence
  Synthetic
uaaaacauauauuguaauugaaa

SEQ ID NO: 176026 - RNA, 24 nt, Artificial Sequence
  Synthetic
auaaaacauauauuguaauugaaa

SEQ ID NO: 176027 - RNA, 18 nt, Artificial Sequence
  Synthetic
uuuucaguuggauugaaa

SEQ ID NO: 176028 - RNA, 19 nt, Artificial Sequence
  Synthetic
uuuuucaguuggauugaaa

SEQ ID NO: 176029 - RNA, 20 nt, Artificial Sequence
  Synthetic
auuuuucaguuggauugaaa

SEQ ID NO: 176030 - RNA, 21 nt, Artificial Sequence
  Synthetic
aauuuuucaguuggauugaaa

SEQ ID NO: 176031 - RNA, 22 nt, Artificial Sequence
  Synthetic
aaauuuuucaguuggauugaaa

SEQ ID NO: 176032 - RNA, 23 nt, Artificial Sequence
  Synthetic
caaauuuuucaguuggauugaaa

SEQ ID NO: 176033 - RNA, 24 nt, Artificial Sequence
  Synthetic
ucaaauuuuucaguuggauugaaa

SEQ ID NO: 176034 - RNA, 18 nt, Artificial Sequence
  Synthetic
gaguaaagauacuugaaa

SEQ ID NO: 176035 - RNA, 19 nt, Artificial Sequence
  Synthetic
ugaguaaagauacuugaaa

SEQ ID NO: 176036 - RNA, 20 nt, Artificial Sequence
  Synthetic
uugaguaaagauacuugaaa

SEQ ID NO: 176037 - RNA, 21 nt, Artificial Sequence
  Synthetic
cuugaguaaagauacuugaaa

SEQ ID NO: 176038 - RNA, 22 nt, Artificial Sequence
  Synthetic
gcuugaguaaagauacuugaaa

SEQ ID NO: 176039 - RNA, 23 nt, Artificial Sequence
  Synthetic
agcuugaguaaagauacuugaaa

SEQ ID NO: 176040 - RNA, 24 nt, Artificial Sequence
  Synthetic
uagcuugaguaaagauacuugaaa

SEQ ID NO: 176041 - RNA, 18 nt, Artificial Sequence
  Synthetic
caugcacaagccuugaaa

SEQ ID NO: 176042 - RNA, 19 nt, Artificial Sequence
  Synthetic
gcaugcacaagccuugaaa

SEQ ID NO: 176043 - RNA, 20 nt, Artificial Sequence
  Synthetic
ugcaugcacaagccuugaaa

SEQ ID NO: 176044 - RNA, 21 nt, Artificial Sequence
  Synthetic
cugcaugcacaagccuugaaa

SEQ ID NO: 176045 - RNA, 22 nt, Artificial Sequence
  Synthetic
ucugcaugcacaagccuugaaa

SEQ ID NO: 176046 - RNA, 23 nt, Artificial Sequence
  Synthetic
aucugcaugcacaagccuugaaa

SEQ ID NO: 176047 - RNA, 24 nt, Artificial Sequence
  Synthetic
gaucugcaugcacaagccuugaaa

SEQ ID NO: 176048 - RNA, 18 nt, Artificial Sequence
  Synthetic
ucuaaaggagccuugaaa

SEQ ID NO: 176049 - RNA, 19 nt, Artificial Sequence
  Synthetic
gucuaaaggagccuugaaa

SEQ ID NO: 176050 - RNA, 20 nt, Artificial Sequence
  Synthetic
ugucuaaaggagccuugaaa

SEQ ID NO: 176051 - RNA, 21 nt, Artificial Sequence
  Synthetic
augucuaaaggagccuugaaa

SEQ ID NO: 176052 - RNA, 22 nt, Artificial Sequence
  Synthetic
aaugucuaaaggagccuugaaa

SEQ ID NO: 176053 - RNA, 23 nt, Artificial Sequence
  Synthetic
gaaugucuaaaggagccuugaaa

SEQ ID NO: 176054 - RNA, 24 nt, Artificial Sequence
  Synthetic
agaaugucuaaaggagccuugaaa

SEQ ID NO: 176055 - RNA, 18 nt, Artificial Sequence
  Synthetic
uuggagcuaagcuugaaa

SEQ ID NO: 176056 - RNA, 19 nt, Artificial Sequence
  Synthetic
auuggagcuaagcuugaaa

SEQ ID NO: 176057 - RNA, 20 nt, Artificial Sequence
  Synthetic
cauuggagcuaagcuugaaa

SEQ ID NO: 176058 - RNA, 21 nt, Artificial Sequence
  Synthetic
gcauuggagcuaagcuugaaa

SEQ ID NO: 176059 - RNA, 22 nt, Artificial Sequence
  Synthetic
ggcauuggagcuaagcuugaaa

SEQ ID NO: 176060 - RNA, 23 nt, Artificial Sequence
  Synthetic
gggcauuggagcuaagcuugaaa

SEQ ID NO: 176061 - RNA, 24 nt, Artificial Sequence
  Synthetic
ugggcauuggagcuaagcuugaaa

SEQ ID NO: 176062 - RNA, 18 nt, Artificial Sequence
  Synthetic
uugaaucucugcuugaaa

SEQ ID NO: 176063 - RNA, 19 nt, Artificial Sequence
  Synthetic
auugaaucucugcuugaaa

SEQ ID NO: 176064 - RNA, 20 nt, Artificial Sequence
  Synthetic
uauugaaucucugcuugaaa

SEQ ID NO: 176065 - RNA, 21 nt, Artificial Sequence
  Synthetic
guauugaaucucugcuugaaa

SEQ ID NO: 176066 - RNA, 22 nt, Artificial Sequence
  Synthetic
uguauugaaucucugcuugaaa

SEQ ID NO: 176067 - RNA, 23 nt, Artificial Sequence
  Synthetic
cuguauugaaucucugcuugaaa

SEQ ID NO: 176068 - RNA, 24 nt, Artificial Sequence
  Synthetic
acuguauugaaucucugcuugaaa

SEQ ID NO: 176069 - RNA, 18 nt, Artificial Sequence
  Synthetic
caugagaauugcuugaaa

SEQ ID NO: 176070 - RNA, 19 nt, Artificial Sequence
  Synthetic
gcaugagaauugcuugaaa

SEQ ID NO: 176071 - RNA, 20 nt, Artificial Sequence
  Synthetic
ggcaugagaauugcuugaaa

SEQ ID NO: 176072 - RNA, 21 nt, Artificial Sequence
  Synthetic
aggcaugagaauugcuugaaa

SEQ ID NO: 176073 - RNA, 22 nt, Artificial Sequence
  Synthetic
gaggcaugagaauugcuugaaa

SEQ ID NO: 176074 - RNA, 23 nt, Artificial Sequence
  Synthetic
ugaggcaugagaauugcuugaaa

SEQ ID NO: 176075 - RNA, 24 nt, Artificial Sequence
  Synthetic
cugaggcaugagaauugcuugaaa

SEQ ID NO: 176076 - RNA, 18 nt, Artificial Sequence
  Synthetic
uucuguucuugcuugaaa

SEQ ID NO: 176077 - RNA, 19 nt, Artificial Sequence
  Synthetic
cuucuguucuugcuugaaa

SEQ ID NO: 176078 - RNA, 20 nt, Artificial Sequence
  Synthetic
gcuucuguucuugcuugaaa

SEQ ID NO: 176079 - RNA, 21 nt, Artificial Sequence
  Synthetic
ugcuucuguucuugcuugaaa

SEQ ID NO: 176080 - RNA, 22 nt, Artificial Sequence
  Synthetic
cugcuucuguucuugcuugaaa

SEQ ID NO: 176081 - RNA, 23 nt, Artificial Sequence
  Synthetic
ucugcuucuguucuugcuugaaa

SEQ ID NO: 176082 - RNA, 24 nt, Artificial Sequence
  Synthetic
uucugcuucuguucuugcuugaaa

SEQ ID NO: 176083 - RNA, 18 nt, Artificial Sequence
  Synthetic
aaucaacaagaguugaaa

SEQ ID NO: 176084 - RNA, 19 nt, Artificial Sequence
  Synthetic
gaaucaacaagaguugaaa

SEQ ID NO: 176085 - RNA, 20 nt, Artificial Sequence
  Synthetic
agaaucaacaagaguugaaa

SEQ ID NO: 176086 - RNA, 21 nt, Artificial Sequence
  Synthetic
uagaaucaacaagaguugaaa

SEQ ID NO: 176087 - RNA, 22 nt, Artificial Sequence
  Synthetic
auagaaucaacaagaguugaaa

SEQ ID NO: 176088 - RNA, 23 nt, Artificial Sequence
  Synthetic
aauagaaucaacaagaguugaaa

SEQ ID NO: 176089 - RNA, 24 nt, Artificial Sequence
  Synthetic
uaauagaaucaacaagaguugaaa

SEQ ID NO: 176090 - RNA, 18 nt, Artificial Sequence
  Synthetic
auuuuuuaaucguugaaa

SEQ ID NO: 176091 - RNA, 19 nt, Artificial Sequence
  Synthetic
cauuuuuuaaucguugaaa

SEQ ID NO: 176092 - RNA, 20 nt, Artificial Sequence
  Synthetic
acauuuuuuaaucguugaaa

SEQ ID NO: 176093 - RNA, 21 nt, Artificial Sequence
  Synthetic
uacauuuuuuaaucguugaaa

SEQ ID NO: 176094 - RNA, 22 nt, Artificial Sequence
  Synthetic
auacauuuuuuaaucguugaaa

SEQ ID NO: 176095 - RNA, 23 nt, Artificial Sequence
  Synthetic
gauacauuuuuuaaucguugaaa

SEQ ID NO: 176096 - RNA, 24 nt, Artificial Sequence
  Synthetic
agauacauuuuuuaaucguugaaa

SEQ ID NO: 176097 - RNA, 18 nt, Artificial Sequence
  Synthetic
aucugcccaauguugaaa

SEQ ID NO: 176098 - RNA, 19 nt, Artificial Sequence
  Synthetic
gaucugcccaauguugaaa

SEQ ID NO: 176099 - RNA, 20 nt, Artificial Sequence
  Synthetic
agaucugcccaauguugaaa

SEQ ID NO: 176100 - RNA, 21 nt, Artificial Sequence
  Synthetic
gagaucugcccaauguugaaa

SEQ ID NO: 176101 - RNA, 22 nt, Artificial Sequence
  Synthetic
ggagaucugcccaauguugaaa

SEQ ID NO: 176102 - RNA, 23 nt, Artificial Sequence
  Synthetic
gggagaucugcccaauguugaaa

SEQ ID NO: 176103 - RNA, 24 nt, Artificial Sequence
  Synthetic
ugggagaucugcccaauguugaaa

SEQ ID NO: 176104 - RNA, 18 nt, Artificial Sequence
  Synthetic
uuaauaagcaauuugaaa

SEQ ID NO: 176105 - RNA, 19 nt, Artificial Sequence
  Synthetic
uuuaauaagcaauuugaaa

SEQ ID NO: 176106 - RNA, 20 nt, Artificial Sequence
  Synthetic
uuuuaauaagcaauuugaaa

SEQ ID NO: 176107 - RNA, 21 nt, Artificial Sequence
  Synthetic
auuuuaauaagcaauuugaaa

SEQ ID NO: 176108 - RNA, 22 nt, Artificial Sequence
  Synthetic
uauuuuaauaagcaauuugaaa

SEQ ID NO: 176109 - RNA, 23 nt, Artificial Sequence
  Synthetic
auauuuuaauaagcaauuugaaa

SEQ ID NO: 176110 - RNA, 24 nt, Artificial Sequence
  Synthetic
uauauuuuaauaagcaauuugaaa

SEQ ID NO: 176111 - RNA, 18 nt, Artificial Sequence
  Synthetic
aggaaaugacauuugaaa

SEQ ID NO: 176112 - RNA, 19 nt, Artificial Sequence
  Synthetic
gaggaaaugacauuugaaa

SEQ ID NO: 176113 - RNA, 20 nt, Artificial Sequence
  Synthetic
ugaggaaaugacauuugaaa

SEQ ID NO: 176114 - RNA, 21 nt, Artificial Sequence
  Synthetic
uugaggaaaugacauuugaaa

SEQ ID NO: 176115 - RNA, 22 nt, Artificial Sequence
  Synthetic
uuugaggaaaugacauuugaaa

SEQ ID NO: 176116 - RNA, 23 nt, Artificial Sequence
  Synthetic
guuugaggaaaugacauuugaaa

SEQ ID NO: 176117 - RNA, 24 nt, Artificial Sequence
  Synthetic
uguuugaggaaaugacauuugaaa

SEQ ID NO: 176118 - RNA, 18 nt, Artificial Sequence
  Synthetic
cuuuugacagauuugaaa

SEQ ID NO: 176119 - RNA, 19 nt, Artificial Sequence
  Synthetic
acuuuugacagauuugaaa

SEQ ID NO: 176120 - RNA, 20 nt, Artificial Sequence
  Synthetic
aacuuuugacagauuugaaa

SEQ ID NO: 176121 - RNA, 21 nt, Artificial Sequence
  Synthetic
caacuuuugacagauuugaaa

SEQ ID NO: 176122 - RNA, 22 nt, Artificial Sequence
  Synthetic
gcaacuuuugacagauuugaaa

SEQ ID NO: 176123 - RNA, 23 nt, Artificial Sequence
  Synthetic
agcaacuuuugacagauuugaaa

SEQ ID NO: 176124 - RNA, 24 nt, Artificial Sequence
  Synthetic
uagcaacuuuugacagauuugaaa

SEQ ID NO: 176125 - RNA, 18 nt, Artificial Sequence
  Synthetic
caggucuuuuauuugaaa

SEQ ID NO: 176126 - RNA, 19 nt, Artificial Sequence
  Synthetic
ucaggucuuuuauuugaaa

SEQ ID NO: 176127 - RNA, 20 nt, Artificial Sequence
  Synthetic
uucaggucuuuuauuugaaa

SEQ ID NO: 176128 - RNA, 21 nt, Artificial Sequence
  Synthetic
cuucaggucuuuuauuugaaa

SEQ ID NO: 176129 - RNA, 22 nt, Artificial Sequence
  Synthetic
acuucaggucuuuuauuugaaa

SEQ ID NO: 176130 - RNA, 23 nt, Artificial Sequence
  Synthetic
cacuucaggucuuuuauuugaaa

SEQ ID NO: 176131 - RNA, 24 nt, Artificial Sequence
  Synthetic
ucacuucaggucuuuuauuugaaa

SEQ ID NO: 176132 - RNA, 18 nt, Artificial Sequence
  Synthetic
ugagugguaacuuugaaa

SEQ ID NO: 176133 - RNA, 19 nt, Artificial Sequence
  Synthetic
cugagugguaacuuugaaa

SEQ ID NO: 176134 - RNA, 20 nt, Artificial Sequence
  Synthetic
ucugagugguaacuuugaaa

SEQ ID NO: 176135 - RNA, 21 nt, Artificial Sequence
  Synthetic
uucugagugguaacuuugaaa

SEQ ID NO: 176136 - RNA, 22 nt, Artificial Sequence
  Synthetic
uuucugagugguaacuuugaaa

SEQ ID NO: 176137 - RNA, 23 nt, Artificial Sequence
  Synthetic
cuuucugagugguaacuuugaaa

SEQ ID NO: 176138 - RNA, 24 nt, Artificial Sequence
  Synthetic
ucuuucugagugguaacuuugaaa

SEQ ID NO: 176139 - RNA, 18 nt, Artificial Sequence
  Synthetic
aauuuccugacuuugaaa

SEQ ID NO: 176140 - RNA, 19 nt, Artificial Sequence
  Synthetic
aaauuuccugacuuugaaa

SEQ ID NO: 176141 - RNA, 20 nt, Artificial Sequence
  Synthetic
uaaauuuccugacuuugaaa

SEQ ID NO: 176142 - RNA, 21 nt, Artificial Sequence
  Synthetic
cuaaauuuccugacuuugaaa

SEQ ID NO: 176143 - RNA, 22 nt, Artificial Sequence
  Synthetic
gcuaaauuuccugacuuugaaa

SEQ ID NO: 176144 - RNA, 23 nt, Artificial Sequence
  Synthetic
cgcuaaauuuccugacuuugaaa

SEQ ID NO: 176145 - RNA, 24 nt, Artificial Sequence
  Synthetic
acgcuaaauuuccugacuuugaaa

SEQ ID NO: 176146 - RNA, 18 nt, Artificial Sequence
  Synthetic
agcauagguccuuugaaa

SEQ ID NO: 176147 - RNA, 19 nt, Artificial Sequence
  Synthetic
cagcauagguccuuugaaa

SEQ ID NO: 176148 - RNA, 20 nt, Artificial Sequence
  Synthetic
acagcauagguccuuugaaa

SEQ ID NO: 176149 - RNA, 21 nt, Artificial Sequence
  Synthetic
aacagcauagguccuuugaaa

SEQ ID NO: 176150 - RNA, 22 nt, Artificial Sequence
  Synthetic
aaacagcauagguccuuugaaa

SEQ ID NO: 176151 - RNA, 23 nt, Artificial Sequence
  Synthetic
aaaacagcauagguccuuugaaa

SEQ ID NO: 176152 - RNA, 24 nt, Artificial Sequence
  Synthetic
aaaaacagcauagguccuuugaaa

SEQ ID NO: 176153 - RNA, 18 nt, Artificial Sequence
  Synthetic
ugugcaacagguuugaaa

SEQ ID NO: 176154 - RNA, 19 nt, Artificial Sequence
  Synthetic
cugugcaacagguuugaaa

SEQ ID NO: 176155 - RNA, 20 nt, Artificial Sequence
  Synthetic
ucugugcaacagguuugaaa

SEQ ID NO: 176156 - RNA, 21 nt, Artificial Sequence
  Synthetic
gucugugcaacagguuugaaa

SEQ ID NO: 176157 - RNA, 22 nt, Artificial Sequence
  Synthetic
agucugugcaacagguuugaaa

SEQ ID NO: 176158 - RNA, 23 nt, Artificial Sequence
  Synthetic
aagucugugcaacagguuugaaa

SEQ ID NO: 176159 - RNA, 24 nt, Artificial Sequence
  Synthetic
caagucugugcaacagguuugaaa

SEQ ID NO: 176160 - RNA, 18 nt, Artificial Sequence
  Synthetic
uuuaaauuuuguuugaaa

SEQ ID NO: 176161 - RNA, 19 nt, Artificial Sequence
  Synthetic
uuuuaaauuuuguuugaaa

SEQ ID NO: 176162 - RNA, 20 nt, Artificial Sequence
  Synthetic
uuuuuaaauuuuguuugaaa

SEQ ID NO: 176163 - RNA, 21 nt, Artificial Sequence
  Synthetic
auuuuuaaauuuuguuugaaa

SEQ ID NO: 176164 - RNA, 22 nt, Artificial Sequence
  Synthetic
uauuuuuaaauuuuguuugaaa

SEQ ID NO: 176165 - RNA, 23 nt, Artificial Sequence
  Synthetic
auauuuuuaaauuuuguuugaaa

SEQ ID NO: 176166 - RNA, 24 nt, Artificial Sequence
  Synthetic
cauauuuuuaaauuuuguuugaaa

SEQ ID NO: 176167 - RNA, 18 nt, Artificial Sequence
  Synthetic
gccaacuaaauuuugaaa

SEQ ID NO: 176168 - RNA, 19 nt, Artificial Sequence
  Synthetic
ggccaacuaaauuuugaaa

SEQ ID NO: 176169 - RNA, 20 nt, Artificial Sequence
  Synthetic
cggccaacuaaauuuugaaa

SEQ ID NO: 176170 - RNA, 21 nt, Artificial Sequence
  Synthetic
gcggccaacuaaauuuugaaa

SEQ ID NO: 176171 - RNA, 22 nt, Artificial Sequence
  Synthetic
agcggccaacuaaauuuugaaa

SEQ ID NO: 176172 - RNA, 23 nt, Artificial Sequence
  Synthetic
aagcggccaacuaaauuuugaaa

SEQ ID NO: 176173 - RNA, 24 nt, Artificial Sequence
  Synthetic
uaagcggccaacuaaauuuugaaa

SEQ ID NO: 176174 - RNA, 18 nt, Artificial Sequence
  Synthetic
aaacuuuuaauuuugaaa

SEQ ID NO: 176175 - RNA, 19 nt, Artificial Sequence
  Synthetic
aaaacuuuuaauuuugaaa

SEQ ID NO: 176176 - RNA, 20 nt, Artificial Sequence
  Synthetic
aaaaacuuuuaauuuugaaa

SEQ ID NO: 176177 - RNA, 21 nt, Artificial Sequence
  Synthetic
aaaaaacuuuuaauuuugaaa

SEQ ID NO: 176178 - RNA, 22 nt, Artificial Sequence
  Synthetic
aaaaaaacuuuuaauuuugaaa

SEQ ID NO: 176179 - RNA, 23 nt, Artificial Sequence
  Synthetic
aaaaaaaacuuuuaauuuugaaa

SEQ ID NO: 176180 - RNA, 24 nt, Artificial Sequence
  Synthetic
uaaaaaaaacuuuuaauuuugaaa

SEQ ID NO: 176181 - RNA, 18 nt, Artificial Sequence
  Synthetic
cugacauauauuuugaaa

SEQ ID NO: 176182 - RNA, 19 nt, Artificial Sequence
  Synthetic
ucugacauauauuuugaaa

SEQ ID NO: 176183 - RNA, 20 nt, Artificial Sequence
  Synthetic
aucugacauauauuuugaaa

SEQ ID NO: 176184 - RNA, 21 nt, Artificial Sequence
  Synthetic
uaucugacauauauuuugaaa

SEQ ID NO: 176185 - RNA, 22 nt, Artificial Sequence
  Synthetic
auaucugacauauauuuugaaa

SEQ ID NO: 176186 - RNA, 23 nt, Artificial Sequence
  Synthetic
uauaucugacauauauuuugaaa

SEQ ID NO: 176187 - RNA, 24 nt, Artificial Sequence
  Synthetic
auauaucugacauauauuuugaaa

SEQ ID NO: 176188 - RNA, 18 nt, Artificial Sequence
  Synthetic
cauacuccuauuuugaaa

SEQ ID NO: 176189 - RNA, 19 nt, Artificial Sequence
  Synthetic
ucauacuccuauuuugaaa

SEQ ID NO: 176190 - RNA, 20 nt, Artificial Sequence
  Synthetic
aucauacuccuauuuugaaa

SEQ ID NO: 176191 - RNA, 21 nt, Artificial Sequence
  Synthetic
aaucauacuccuauuuugaaa

SEQ ID NO: 176192 - RNA, 22 nt, Artificial Sequence
  Synthetic
aaaucauacuccuauuuugaaa

SEQ ID NO: 176193 - RNA, 23 nt, Artificial Sequence
  Synthetic
uaaaucauacuccuauuuugaaa

SEQ ID NO: 176194 - RNA, 24 nt, Artificial Sequence
  Synthetic
cuaaaucauacuccuauuuugaaa

SEQ ID NO: 176195 - RNA, 18 nt, Artificial Sequence
  Synthetic
aaccaguguauuuugaaa

SEQ ID NO: 176196 - RNA, 19 nt, Artificial Sequence
  Synthetic
aaaccaguguauuuugaaa

SEQ ID NO: 176197 - RNA, 20 nt, Artificial Sequence
  Synthetic
caaaccaguguauuuugaaa

SEQ ID NO: 176198 - RNA, 21 nt, Artificial Sequence
  Synthetic
ucaaaccaguguauuuugaaa

SEQ ID NO: 176199 - RNA, 22 nt, Artificial Sequence
  Synthetic
gucaaaccaguguauuuugaaa

SEQ ID NO: 176200 - RNA, 23 nt, Artificial Sequence
  Synthetic
agucaaaccaguguauuuugaaa

SEQ ID NO: 176201 - RNA, 24 nt, Artificial Sequence
  Synthetic
aagucaaaccaguguauuuugaaa

SEQ ID NO: 176202 - RNA, 18 nt, Artificial Sequence
  Synthetic
gcaugccagcuuuugaaa

SEQ ID NO: 176203 - RNA, 19 nt, Artificial Sequence
  Synthetic
agcaugccagcuuuugaaa

SEQ ID NO: 176204 - RNA, 20 nt, Artificial Sequence
  Synthetic
cagcaugccagcuuuugaaa

SEQ ID NO: 176205 - RNA, 21 nt, Artificial Sequence
  Synthetic
acagcaugccagcuuuugaaa

SEQ ID NO: 176206 - RNA, 22 nt, Artificial Sequence
  Synthetic
uacagcaugccagcuuuugaaa

SEQ ID NO: 176207 - RNA, 23 nt, Artificial Sequence
  Synthetic
cuacagcaugccagcuuuugaaa

SEQ ID NO: 176208 - RNA, 24 nt, Artificial Sequence
  Synthetic
acuacagcaugccagcuuuugaaa

SEQ ID NO: 176209 - RNA, 18 nt, Artificial Sequence
  Synthetic
cugccauuucuuuugaaa

SEQ ID NO: 176210 - RNA, 19 nt, Artificial Sequence
  Synthetic
acugccauuucuuuugaaa

SEQ ID NO: 176211 - RNA, 20 nt, Artificial Sequence
  Synthetic
cacugccauuucuuuugaaa

SEQ ID NO: 176212 - RNA, 21 nt, Artificial Sequence
  Synthetic
acacugccauuucuuuugaaa

SEQ ID NO: 176213 - RNA, 22 nt, Artificial Sequence
  Synthetic
aacacugccauuucuuuugaaa

SEQ ID NO: 176214 - RNA, 23 nt, Artificial Sequence
  Synthetic
uaacacugccauuucuuuugaaa

SEQ ID NO: 176215 - RNA, 24 nt, Artificial Sequence
  Synthetic
auaacacugccauuucuuuugaaa

SEQ ID NO: 176216 - RNA, 18 nt, Artificial Sequence
  Synthetic
guuuuucuuguuuugaaa

SEQ ID NO: 176217 - RNA, 19 nt, Artificial Sequence
  Synthetic
cguuuuucuuguuuugaaa

SEQ ID NO: 176218 - RNA, 20 nt, Artificial Sequence
  Synthetic
gcguuuuucuuguuuugaaa

SEQ ID NO: 176219 - RNA, 21 nt, Artificial Sequence
  Synthetic
ggcguuuuucuuguuuugaaa

SEQ ID NO: 176220 - RNA, 22 nt, Artificial Sequence
  Synthetic
uggcguuuuucuuguuuugaaa

SEQ ID NO: 176221 - RNA, 23 nt, Artificial Sequence
  Synthetic
cuggcguuuuucuuguuuugaaa

SEQ ID NO: 176222 - RNA, 24 nt, Artificial Sequence
  Synthetic
acuggcguuuuucuuguuuugaaa

SEQ ID NO: 176223 - RNA, 18 nt, Artificial Sequence
  Synthetic
cccugucaguuuuugaaa

SEQ ID NO: 176224 - RNA, 19 nt, Artificial Sequence
  Synthetic
ccccugucaguuuuugaaa

SEQ ID NO: 176225 - RNA, 20 nt, Artificial Sequence
  Synthetic
uccccugucaguuuuugaaa

SEQ ID NO: 176226 - RNA, 21 nt, Artificial Sequence
  Synthetic
uuccccugucaguuuuugaaa

SEQ ID NO: 176227 - RNA, 22 nt, Artificial Sequence
  Synthetic
uuuccccugucaguuuuugaaa

SEQ ID NO: 176228 - RNA, 23 nt, Artificial Sequence
  Synthetic
uuuuccccugucaguuuuugaaa

SEQ ID NO: 176229 - RNA, 24 nt, Artificial Sequence
  Synthetic
uuuuuccccugucaguuuuugaaa

SEQ ID NO: 176230 - RNA, 18 nt, Artificial Sequence
  Synthetic
cuggcaaaaaaaaauaaa

SEQ ID NO: 176231 - RNA, 19 nt, Artificial Sequence
  Synthetic
ucuggcaaaaaaaaauaaa

SEQ ID NO: 176232 - RNA, 20 nt, Artificial Sequence
  Synthetic
cucuggcaaaaaaaaauaaa

SEQ ID NO: 176233 - RNA, 21 nt, Artificial Sequence
  Synthetic
ucucuggcaaaaaaaaauaaa

SEQ ID NO: 176234 - RNA, 22 nt, Artificial Sequence
  Synthetic
uucucuggcaaaaaaaaauaaa

SEQ ID NO: 176235 - RNA, 23 nt, Artificial Sequence
  Synthetic
uuucucuggcaaaaaaaaauaaa

SEQ ID NO: 176236 - RNA, 24 nt, Artificial Sequence
  Synthetic
uuuucucuggcaaaaaaaaauaaa

SEQ ID NO: 176237 - RNA, 18 nt, Artificial Sequence
  Synthetic
uccgucucaaaaaauaaa

SEQ ID NO: 176238 - RNA, 19 nt, Artificial Sequence
  Synthetic
cuccgucucaaaaaauaaa

SEQ ID NO: 176239 - RNA, 20 nt, Artificial Sequence
  Synthetic
acuccgucucaaaaaauaaa

SEQ ID NO: 176240 - RNA, 21 nt, Artificial Sequence
  Synthetic
aacuccgucucaaaaaauaaa

SEQ ID NO: 176241 - RNA, 22 nt, Artificial Sequence
  Synthetic
aaacuccgucucaaaaaauaaa

SEQ ID NO: 176242 - RNA, 23 nt, Artificial Sequence
  Synthetic
gaaacuccgucucaaaaaauaaa

SEQ ID NO: 176243 - RNA, 24 nt, Artificial Sequence
  Synthetic
ugaaacuccgucucaaaaaauaaa

SEQ ID NO: 176244 - RNA, 18 nt, Artificial Sequence
  Synthetic
ugaacuugauaaaauaaa

SEQ ID NO: 176245 - RNA, 19 nt, Artificial Sequence
  Synthetic
gugaacuugauaaaauaaa

SEQ ID NO: 176246 - RNA, 20 nt, Artificial Sequence
  Synthetic
ugugaacuugauaaaauaaa

SEQ ID NO: 176247 - RNA, 21 nt, Artificial Sequence
  Synthetic
augugaacuugauaaaauaaa

SEQ ID NO: 176248 - RNA, 22 nt, Artificial Sequence
  Synthetic
caugugaacuugauaaaauaaa

SEQ ID NO: 176249 - RNA, 23 nt, Artificial Sequence
  Synthetic
ucaugugaacuugauaaaauaaa

SEQ ID NO: 176250 - RNA, 24 nt, Artificial Sequence
  Synthetic
cucaugugaacuugauaaaauaaa

SEQ ID NO: 176251 - RNA, 18 nt, Artificial Sequence
  Synthetic
aaauuucuguaaaauaaa

SEQ ID NO: 176252 - RNA, 19 nt, Artificial Sequence
  Synthetic
aaaauuucuguaaaauaaa

SEQ ID NO: 176253 - RNA, 20 nt, Artificial Sequence
  Synthetic
uaaaauuucuguaaaauaaa

SEQ ID NO: 176254 - RNA, 21 nt, Artificial Sequence
  Synthetic
auaaaauuucuguaaaauaaa

SEQ ID NO: 176255 - RNA, 22 nt, Artificial Sequence
  Synthetic
aauaaaauuucuguaaaauaaa

SEQ ID NO: 176256 - RNA, 23 nt, Artificial Sequence
  Synthetic
uaauaaaauuucuguaaaauaaa

SEQ ID NO: 176257 - RNA, 24 nt, Artificial Sequence
  Synthetic
auaauaaaauuucuguaaaauaaa

SEQ ID NO: 176258 - RNA, 18 nt, Artificial Sequence
  Synthetic
auauuuguguaaaauaaa

SEQ ID NO: 176259 - RNA, 19 nt, Artificial Sequence
  Synthetic
uauauuuguguaaaauaaa

SEQ ID NO: 176260 - RNA, 20 nt, Artificial Sequence
  Synthetic
auauauuuguguaaaauaaa

SEQ ID NO: 176261 - RNA, 21 nt, Artificial Sequence
  Synthetic
aauauauuuguguaaaauaaa

SEQ ID NO: 176262 - RNA, 22 nt, Artificial Sequence
  Synthetic
caauauauuuguguaaaauaaa

SEQ ID NO: 176263 - RNA, 23 nt, Artificial Sequence
  Synthetic
gcaauauauuuguguaaaauaaa

SEQ ID NO: 176264 - RNA, 24 nt, Artificial Sequence
  Synthetic
agcaauauauuuguguaaaauaaa

SEQ ID NO: 176265 - RNA, 18 nt, Artificial Sequence
  Synthetic
uguacauuuuaaaauaaa

SEQ ID NO: 176266 - RNA, 19 nt, Artificial Sequence
  Synthetic
auguacauuuuaaaauaaa

SEQ ID NO: 176267 - RNA, 20 nt, Artificial Sequence
  Synthetic
aauguacauuuuaaaauaaa

SEQ ID NO: 176268 - RNA, 21 nt, Artificial Sequence
  Synthetic
aaauguacauuuuaaaauaaa

SEQ ID NO: 176269 - RNA, 22 nt, Artificial Sequence
  Synthetic
aaaauguacauuuuaaaauaaa

SEQ ID NO: 176270 - RNA, 23 nt, Artificial Sequence
  Synthetic
uaaaauguacauuuuaaaauaaa

SEQ ID NO: 176271 - RNA, 24 nt, Artificial Sequence
  Synthetic
auaaaauguacauuuuaaaauaaa

SEQ ID NO: 176272 - RNA, 18 nt, Artificial Sequence
  Synthetic
cauaaaaugacaaauaaa

SEQ ID NO: 176273 - RNA, 19 nt, Artificial Sequence
  Synthetic
ucauaaaaugacaaauaaa

SEQ ID NO: 176274 - RNA, 20 nt, Artificial Sequence
  Synthetic
gucauaaaaugacaaauaaa

SEQ ID NO: 176275 - RNA, 21 nt, Artificial Sequence
  Synthetic
agucauaaaaugacaaauaaa

SEQ ID NO: 176276 - RNA, 22 nt, Artificial Sequence
  Synthetic
cagucauaaaaugacaaauaaa

SEQ ID NO: 176277 - RNA, 23 nt, Artificial Sequence
  Synthetic
acagucauaaaaugacaaauaaa

SEQ ID NO: 176278 - RNA, 24 nt, Artificial Sequence
  Synthetic
uacagucauaaaaugacaaauaaa

SEQ ID NO: 176279 - RNA, 18 nt, Artificial Sequence
  Synthetic
uccugacagccaaauaaa

SEQ ID NO: 176280 - RNA, 19 nt, Artificial Sequence
  Synthetic
cuccugacagccaaauaaa

SEQ ID NO: 176281 - RNA, 20 nt, Artificial Sequence
  Synthetic
acuccugacagccaaauaaa

SEQ ID NO: 176282 - RNA, 21 nt, Artificial Sequence
  Synthetic
aacuccugacagccaaauaaa

SEQ ID NO: 176283 - RNA, 22 nt, Artificial Sequence
  Synthetic
caacuccugacagccaaauaaa

SEQ ID NO: 176284 - RNA, 23 nt, Artificial Sequence
  Synthetic
acaacuccugacagccaaauaaa

SEQ ID NO: 176285 - RNA, 24 nt, Artificial Sequence
  Synthetic
cacaacuccugacagccaaauaaa

SEQ ID NO: 176286 - RNA, 18 nt, Artificial Sequence
  Synthetic
cuauguggggcaaauaaa

SEQ ID NO: 176287 - RNA, 19 nt, Artificial Sequence
  Synthetic
acuauguggggcaaauaaa

SEQ ID NO: 176288 - RNA, 20 nt, Artificial Sequence
  Synthetic
cacuauguggggcaaauaaa

SEQ ID NO: 176289 - RNA, 21 nt, Artificial Sequence
  Synthetic
acacuauguggggcaaauaaa

SEQ ID NO: 176290 - RNA, 22 nt, Artificial Sequence
  Synthetic
aacacuauguggggcaaauaaa

SEQ ID NO: 176291 - RNA, 23 nt, Artificial Sequence
  Synthetic
aaacacuauguggggcaaauaaa

SEQ ID NO: 176292 - RNA, 24 nt, Artificial Sequence
  Synthetic
uaaacacuauguggggcaaauaaa

SEQ ID NO: 176293 - RNA, 18 nt, Artificial Sequence
  Synthetic
caacauuacagaaauaaa

SEQ ID NO: 176294 - RNA, 19 nt, Artificial Sequence
  Synthetic
ccaacauuacagaaauaaa

SEQ ID NO: 176295 - RNA, 20 nt, Artificial Sequence
  Synthetic
accaacauuacagaaauaaa

SEQ ID NO: 176296 - RNA, 21 nt, Artificial Sequence
  Synthetic
uaccaacauuacagaaauaaa

SEQ ID NO: 176297 - RNA, 22 nt, Artificial Sequence
  Synthetic
cuaccaacauuacagaaauaaa

SEQ ID NO: 176298 - RNA, 23 nt, Artificial Sequence
  Synthetic
acuaccaacauuacagaaauaaa

SEQ ID NO: 176299 - RNA, 24 nt, Artificial Sequence
  Synthetic
uacuaccaacauuacagaaauaaa

SEQ ID NO: 176300 - RNA, 18 nt, Artificial Sequence
  Synthetic
caggaggguagaaauaaa

SEQ ID NO: 176301 - RNA, 19 nt, Artificial Sequence
  Synthetic
acaggaggguagaaauaaa

SEQ ID NO: 176302 - RNA, 20 nt, Artificial Sequence
  Synthetic
uacaggaggguagaaauaaa

SEQ ID NO: 176303 - RNA, 21 nt, Artificial Sequence
  Synthetic
uuacaggaggguagaaauaaa

SEQ ID NO: 176304 - RNA, 22 nt, Artificial Sequence
  Synthetic
auuacaggaggguagaaauaaa

SEQ ID NO: 176305 - RNA, 23 nt, Artificial Sequence
  Synthetic
uauuacaggaggguagaaauaaa

SEQ ID NO: 176306 - RNA, 24 nt, Artificial Sequence
  Synthetic
uuauuacaggaggguagaaauaaa

SEQ ID NO: 176307 - RNA, 18 nt, Artificial Sequence
  Synthetic
gauuguaaaggaaauaaa

SEQ ID NO: 176308 - RNA, 19 nt, Artificial Sequence
  Synthetic
agauuguaaaggaaauaaa

SEQ ID NO: 176309 - RNA, 20 nt, Artificial Sequence
  Synthetic
cagauuguaaaggaaauaaa

SEQ ID NO: 176310 - RNA, 21 nt, Artificial Sequence
  Synthetic
ccagauuguaaaggaaauaaa

SEQ ID NO: 176311 - RNA, 22 nt, Artificial Sequence
  Synthetic
gccagauuguaaaggaaauaaa

SEQ ID NO: 176312 - RNA, 23 nt, Artificial Sequence
  Synthetic
agccagauuguaaaggaaauaaa

SEQ ID NO: 176313 - RNA, 24 nt, Artificial Sequence
  Synthetic
cagccagauuguaaaggaaauaaa

SEQ ID NO: 176314 - RNA, 18 nt, Artificial Sequence
  Synthetic
agaaaucaaggaaauaaa

SEQ ID NO: 176315 - RNA, 19 nt, Artificial Sequence
  Synthetic
cagaaaucaaggaaauaaa

SEQ ID NO: 176316 - RNA, 20 nt, Artificial Sequence
  Synthetic
ucagaaaucaaggaaauaaa

SEQ ID NO: 176317 - RNA, 21 nt, Artificial Sequence
  Synthetic
uucagaaaucaaggaaauaaa

SEQ ID NO: 176318 - RNA, 22 nt, Artificial Sequence
  Synthetic
uuucagaaaucaaggaaauaaa

SEQ ID NO: 176319 - RNA, 23 nt, Artificial Sequence
  Synthetic
guuucagaaaucaaggaaauaaa

SEQ ID NO: 176320 - RNA, 24 nt, Artificial Sequence
  Synthetic
uguuucagaaaucaaggaaauaaa

SEQ ID NO: 176321 - RNA, 18 nt, Artificial Sequence
  Synthetic
aaacaaggaggaaauaaa

SEQ ID NO: 176322 - RNA, 19 nt, Artificial Sequence
  Synthetic
gaaacaaggaggaaauaaa

SEQ ID NO: 176323 - RNA, 20 nt, Artificial Sequence
  Synthetic
agaaacaaggaggaaauaaa

SEQ ID NO: 176324 - RNA, 21 nt, Artificial Sequence
  Synthetic
gagaaacaaggaggaaauaaa

SEQ ID NO: 176325 - RNA, 22 nt, Artificial Sequence
  Synthetic
agagaaacaaggaggaaauaaa

SEQ ID NO: 176326 - RNA, 23 nt, Artificial Sequence
  Synthetic
gagagaaacaaggaggaaauaaa

SEQ ID NO: 176327 - RNA, 24 nt, Artificial Sequence
  Synthetic
ggagagaaacaaggaggaaauaaa

SEQ ID NO: 176328 - RNA, 18 nt, Artificial Sequence
  Synthetic
uaaccaugaggaaauaaa

SEQ ID NO: 176329 - RNA, 19 nt, Artificial Sequence
  Synthetic
auaaccaugaggaaauaaa

SEQ ID NO: 176330 - RNA, 20 nt, Artificial Sequence
  Synthetic
uauaaccaugaggaaauaaa

SEQ ID NO: 176331 - RNA, 21 nt, Artificial Sequence
  Synthetic
auauaaccaugaggaaauaaa

SEQ ID NO: 176332 - RNA, 22 nt, Artificial Sequence
  Synthetic
aauauaaccaugaggaaauaaa

SEQ ID NO: 176333 - RNA, 23 nt, Artificial Sequence
  Synthetic
aaauauaaccaugaggaaauaaa

SEQ ID NO: 176334 - RNA, 24 nt, Artificial Sequence
  Synthetic
caaauauaaccaugaggaaauaaa

SEQ ID NO: 176335 - RNA, 18 nt, Artificial Sequence
  Synthetic
cuaacaaucugaaauaaa

SEQ ID NO: 176336 - RNA, 19 nt, Artificial Sequence
  Synthetic
acuaacaaucugaaauaaa

SEQ ID NO: 176337 - RNA, 20 nt, Artificial Sequence
  Synthetic
uacuaacaaucugaaauaaa

SEQ ID NO: 176338 - RNA, 21 nt, Artificial Sequence
  Synthetic
uuacuaacaaucugaaauaaa

SEQ ID NO: 176339 - RNA, 22 nt, Artificial Sequence
  Synthetic
uuuacuaacaaucugaaauaaa

SEQ ID NO: 176340 - RNA, 23 nt, Artificial Sequence
  Synthetic
guuuacuaacaaucugaaauaaa

SEQ ID NO: 176341 - RNA, 24 nt, Artificial Sequence
  Synthetic
aguuuacuaacaaucugaaauaaa

SEQ ID NO: 176342 - RNA, 18 nt, Artificial Sequence
  Synthetic
uuacuuuucugaaauaaa

SEQ ID NO: 176343 - RNA, 19 nt, Artificial Sequence
  Synthetic
auuacuuuucugaaauaaa

SEQ ID NO: 176344 - RNA, 20 nt, Artificial Sequence
  Synthetic
aauuacuuuucugaaauaaa

SEQ ID NO: 176345 - RNA, 21 nt, Artificial Sequence
  Synthetic
gaauuacuuuucugaaauaaa

SEQ ID NO: 176346 - RNA, 22 nt, Artificial Sequence
  Synthetic
agaauuacuuuucugaaauaaa

SEQ ID NO: 176347 - RNA, 23 nt, Artificial Sequence
  Synthetic
gagaauuacuuuucugaaauaaa

SEQ ID NO: 176348 - RNA, 24 nt, Artificial Sequence
  Synthetic
ggagaauuacuuuucugaaauaaa

SEQ ID NO: 176349 - RNA, 18 nt, Artificial Sequence
  Synthetic
ugucucaaaauaaauaaa

SEQ ID NO: 176350 - RNA, 19 nt, Artificial Sequence
  Synthetic
cugucucaaaauaaauaaa

SEQ ID NO: 176351 - RNA, 20 nt, Artificial Sequence
  Synthetic
ccugucucaaaauaaauaaa

SEQ ID NO: 176352 - RNA, 21 nt, Artificial Sequence
  Synthetic
cccugucucaaaauaaauaaa

SEQ ID NO: 176353 - RNA, 22 nt, Artificial Sequence
  Synthetic
acccugucucaaaauaaauaaa

SEQ ID NO: 176354 - RNA, 23 nt, Artificial Sequence
  Synthetic
gacccugucucaaaauaaauaaa

SEQ ID NO: 176355 - RNA, 24 nt, Artificial Sequence
  Synthetic
agacccugucucaaaauaaauaaa

SEQ ID NO: 176356 - RNA, 18 nt, Artificial Sequence
  Synthetic
uacagagcuauaaauaaa

SEQ ID NO: 176357 - RNA, 19 nt, Artificial Sequence
  Synthetic
cuacagagcuauaaauaaa

SEQ ID NO: 176358 - RNA, 20 nt, Artificial Sequence
  Synthetic
ccuacagagcuauaaauaaa

SEQ ID NO: 176359 - RNA, 21 nt, Artificial Sequence
  Synthetic
uccuacagagcuauaaauaaa

SEQ ID NO: 176360 - RNA, 22 nt, Artificial Sequence
  Synthetic
uuccuacagagcuauaaauaaa

SEQ ID NO: 176361 - RNA, 23 nt, Artificial Sequence
  Synthetic
uuuccuacagagcuauaaauaaa

SEQ ID NO: 176362 - RNA, 24 nt, Artificial Sequence
  Synthetic
uuuuccuacagagcuauaaauaaa

SEQ ID NO: 176363 - RNA, 18 nt, Artificial Sequence
  Synthetic
cacaaagaacuaaauaaa

SEQ ID NO: 176364 - RNA, 19 nt, Artificial Sequence
  Synthetic
acacaaagaacuaaauaaa

SEQ ID NO: 176365 - RNA, 20 nt, Artificial Sequence
  Synthetic
aacacaaagaacuaaauaaa

SEQ ID NO: 176366 - RNA, 21 nt, Artificial Sequence
  Synthetic
aaacacaaagaacuaaauaaa

SEQ ID NO: 176367 - RNA, 22 nt, Artificial Sequence
  Synthetic
uaaacacaaagaacuaaauaaa

SEQ ID NO: 176368 - RNA, 23 nt, Artificial Sequence
  Synthetic
uuaaacacaaagaacuaaauaaa

SEQ ID NO: 176369 - RNA, 24 nt, Artificial Sequence
  Synthetic
uuuaaacacaaagaacuaaauaaa

SEQ ID NO: 176370 - RNA, 18 nt, Artificial Sequence
  Synthetic
auuaaaaaucuaaauaaa

SEQ ID NO: 176371 - RNA, 19 nt, Artificial Sequence
  Synthetic
aauuaaaaaucuaaauaaa

SEQ ID NO: 176372 - RNA, 20 nt, Artificial Sequence
  Synthetic
aaauuaaaaaucuaaauaaa

SEQ ID NO: 176373 - RNA, 21 nt, Artificial Sequence
  Synthetic
gaaauuaaaaaucuaaauaaa

SEQ ID NO: 176374 - RNA, 22 nt, Artificial Sequence
  Synthetic
agaaauuaaaaaucuaaauaaa

SEQ ID NO: 176375 - RNA, 23 nt, Artificial Sequence
  Synthetic
gagaaauuaaaaaucuaaauaaa

SEQ ID NO: 176376 - RNA, 24 nt, Artificial Sequence
  Synthetic
agagaaauuaaaaaucuaaauaaa

SEQ ID NO: 176377 - RNA, 18 nt, Artificial Sequence
  Synthetic
uuuaaaaagguaaauaaa

SEQ ID NO: 176378 - RNA, 19 nt, Artificial Sequence
  Synthetic
uuuuaaaaagguaaauaaa

SEQ ID NO: 176379 - RNA, 20 nt, Artificial Sequence
  Synthetic
cuuuuaaaaagguaaauaaa

SEQ ID NO: 176380 - RNA, 21 nt, Artificial Sequence
  Synthetic
ucuuuuaaaaagguaaauaaa

SEQ ID NO: 176381 - RNA, 22 nt, Artificial Sequence
  Synthetic
gucuuuuaaaaagguaaauaaa

SEQ ID NO: 176382 - RNA, 23 nt, Artificial Sequence
  Synthetic
agucuuuuaaaaagguaaauaaa

SEQ ID NO: 176383 - RNA, 24 nt, Artificial Sequence
  Synthetic
cagucuuuuaaaaagguaaauaaa

SEQ ID NO: 176384 - RNA, 18 nt, Artificial Sequence
  Synthetic
aaucucgguaccaauaaa

SEQ ID NO: 176385 - RNA, 19 nt, Artificial Sequence
  Synthetic
aaaucucgguaccaauaaa

SEQ ID NO: 176386 - RNA, 20 nt, Artificial Sequence
  Synthetic
aaaaucucgguaccaauaaa

SEQ ID NO: 176387 - RNA, 21 nt, Artificial Sequence
  Synthetic
gaaaaucucgguaccaauaaa

SEQ ID NO: 176388 - RNA, 22 nt, Artificial Sequence
  Synthetic
ggaaaaucucgguaccaauaaa

SEQ ID NO: 176389 - RNA, 23 nt, Artificial Sequence
  Synthetic
uggaaaaucucgguaccaauaaa

SEQ ID NO: 176390 - RNA, 24 nt, Artificial Sequence
  Synthetic
guggaaaaucucgguaccaauaaa

SEQ ID NO: 176391 - RNA, 18 nt, Artificial Sequence
  Synthetic
auacuauucagcaauaaa

SEQ ID NO: 176392 - RNA, 19 nt, Artificial Sequence
  Synthetic
aauacuauucagcaauaaa

SEQ ID NO: 176393 - RNA, 20 nt, Artificial Sequence
  Synthetic
caauacuauucagcaauaaa

SEQ ID NO: 176394 - RNA, 21 nt, Artificial Sequence
  Synthetic
gcaauacuauucagcaauaaa

SEQ ID NO: 176395 - RNA, 22 nt, Artificial Sequence
  Synthetic
ggcaauacuauucagcaauaaa

SEQ ID NO: 176396 - RNA, 23 nt, Artificial Sequence
  Synthetic
aggcaauacuauucagcaauaaa

SEQ ID NO: 176397 - RNA, 24 nt, Artificial Sequence
  Synthetic
caggcaauacuauucagcaauaaa

SEQ ID NO: 176398 - RNA, 18 nt, Artificial Sequence
  Synthetic
auauuauuuagcaauaaa

SEQ ID NO: 176399 - RNA, 19 nt, Artificial Sequence
  Synthetic
aauauuauuuagcaauaaa

SEQ ID NO: 176400 - RNA, 20 nt, Artificial Sequence
  Synthetic
gaauauuauuuagcaauaaa

SEQ ID NO: 176401 - RNA, 21 nt, Artificial Sequence
  Synthetic
ggaauauuauuuagcaauaaa

SEQ ID NO: 176402 - RNA, 22 nt, Artificial Sequence
  Synthetic
uggaauauuauuuagcaauaaa

SEQ ID NO: 176403 - RNA, 23 nt, Artificial Sequence
  Synthetic
auggaauauuauuuagcaauaaa

SEQ ID NO: 176404 - RNA, 24 nt, Artificial Sequence
  Synthetic
aauggaauauuauuuagcaauaaa

SEQ ID NO: 176405 - RNA, 18 nt, Artificial Sequence
  Synthetic
ugcuaacuaaucaauaaa

SEQ ID NO: 176406 - RNA, 19 nt, Artificial Sequence
  Synthetic
augcuaacuaaucaauaaa

SEQ ID NO: 176407 - RNA, 20 nt, Artificial Sequence
  Synthetic
uaugcuaacuaaucaauaaa

SEQ ID NO: 176408 - RNA, 21 nt, Artificial Sequence
  Synthetic
guaugcuaacuaaucaauaaa

SEQ ID NO: 176409 - RNA, 22 nt, Artificial Sequence
  Synthetic
uguaugcuaacuaaucaauaaa

SEQ ID NO: 176410 - RNA, 23 nt, Artificial Sequence
  Synthetic
uuguaugcuaacuaaucaauaaa

SEQ ID NO: 176411 - RNA, 24 nt, Artificial Sequence
  Synthetic
guuguaugcuaacuaaucaauaaa

SEQ ID NO: 176412 - RNA, 18 nt, Artificial Sequence
  Synthetic
auaaauaaggagaauaaa

SEQ ID NO: 176413 - RNA, 19 nt, Artificial Sequence
  Synthetic
cauaaauaaggagaauaaa

SEQ ID NO: 176414 - RNA, 20 nt, Artificial Sequence
  Synthetic
acauaaauaaggagaauaaa

SEQ ID NO: 176415 - RNA, 21 nt, Artificial Sequence
  Synthetic
uacauaaauaaggagaauaaa

SEQ ID NO: 176416 - RNA, 22 nt, Artificial Sequence
  Synthetic
auacauaaauaaggagaauaaa

SEQ ID NO: 176417 - RNA, 23 nt, Artificial Sequence
  Synthetic
aauacauaaauaaggagaauaaa

SEQ ID NO: 176418 - RNA, 24 nt, Artificial Sequence
  Synthetic
aaauacauaaauaaggagaauaaa

SEQ ID NO: 176419 - RNA, 18 nt, Artificial Sequence
  Synthetic
gcacacucaaggaauaaa

SEQ ID NO: 176420 - RNA, 19 nt, Artificial Sequence
  Synthetic
ugcacacucaaggaauaaa

SEQ ID NO: 176421 - RNA, 20 nt, Artificial Sequence
  Synthetic
augcacacucaaggaauaaa

SEQ ID NO: 176422 - RNA, 21 nt, Artificial Sequence
  Synthetic
gaugcacacucaaggaauaaa

SEQ ID NO: 176423 - RNA, 22 nt, Artificial Sequence
  Synthetic
ggaugcacacucaaggaauaaa

SEQ ID NO: 176424 - RNA, 23 nt, Artificial Sequence
  Synthetic
gggaugcacacucaaggaauaaa

SEQ ID NO: 176425 - RNA, 24 nt, Artificial Sequence
  Synthetic
agggaugcacacucaaggaauaaa

SEQ ID NO: 176426 - RNA, 18 nt, Artificial Sequence
  Synthetic
acuuuauagcugaauaaa

SEQ ID NO: 176427 - RNA, 19 nt, Artificial Sequence
  Synthetic
cacuuuauagcugaauaaa

SEQ ID NO: 176428 - RNA, 20 nt, Artificial Sequence
  Synthetic
ccacuuuauagcugaauaaa

SEQ ID NO: 176429 - RNA, 21 nt, Artificial Sequence
  Synthetic
uccacuuuauagcugaauaaa

SEQ ID NO: 176430 - RNA, 22 nt, Artificial Sequence
  Synthetic
cuccacuuuauagcugaauaaa

SEQ ID NO: 176431 - RNA, 23 nt, Artificial Sequence
  Synthetic
ucuccacuuuauagcugaauaaa

SEQ ID NO: 176432 - RNA, 24 nt, Artificial Sequence
  Synthetic
aucuccacuuuauagcugaauaaa

SEQ ID NO: 176433 - RNA, 18 nt, Artificial Sequence
  Synthetic
cagcugucagugaauaaa

SEQ ID NO: 176434 - RNA, 19 nt, Artificial Sequence
  Synthetic
ccagcugucagugaauaaa

SEQ ID NO: 176435 - RNA, 20 nt, Artificial Sequence
  Synthetic
cccagcugucagugaauaaa

SEQ ID NO: 176436 - RNA, 21 nt, Artificial Sequence
  Synthetic
ucccagcugucagugaauaaa

SEQ ID NO: 176437 - RNA, 22 nt, Artificial Sequence
  Synthetic
gucccagcugucagugaauaaa

SEQ ID NO: 176438 - RNA, 23 nt, Artificial Sequence
  Synthetic
agucccagcugucagugaauaaa

SEQ ID NO: 176439 - RNA, 24 nt, Artificial Sequence
  Synthetic
aagucccagcugucagugaauaaa

SEQ ID NO: 176440 - RNA, 18 nt, Artificial Sequence
  Synthetic
auuaguaccuugaauaaa

SEQ ID NO: 176441 - RNA, 19 nt, Artificial Sequence
  Synthetic
aauuaguaccuugaauaaa

SEQ ID NO: 176442 - RNA, 20 nt, Artificial Sequence
  Synthetic
caauuaguaccuugaauaaa

SEQ ID NO: 176443 - RNA, 21 nt, Artificial Sequence
  Synthetic
acaauuaguaccuugaauaaa

SEQ ID NO: 176444 - RNA, 22 nt, Artificial Sequence
  Synthetic
cacaauuaguaccuugaauaaa

SEQ ID NO: 176445 - RNA, 23 nt, Artificial Sequence
  Synthetic
gcacaauuaguaccuugaauaaa

SEQ ID NO: 176446 - RNA, 24 nt, Artificial Sequence
  Synthetic
agcacaauuaguaccuugaauaaa

SEQ ID NO: 176447 - RNA, 18 nt, Artificial Sequence
  Synthetic
augaauaaaaauaauaaa

SEQ ID NO: 176448 - RNA, 19 nt, Artificial Sequence
  Synthetic
caugaauaaaaauaauaaa

SEQ ID NO: 176449 - RNA, 20 nt, Artificial Sequence
  Synthetic
ucaugaauaaaaauaauaaa

SEQ ID NO: 176450 - RNA, 21 nt, Artificial Sequence
  Synthetic
aucaugaauaaaaauaauaaa

SEQ ID NO: 176451 - RNA, 22 nt, Artificial Sequence
  Synthetic
aaucaugaauaaaaauaauaaa

SEQ ID NO: 176452 - RNA, 23 nt, Artificial Sequence
  Synthetic
uaaucaugaauaaaaauaauaaa

SEQ ID NO: 176453 - RNA, 24 nt, Artificial Sequence
  Synthetic
cuaaucaugaauaaaaauaauaaa

SEQ ID NO: 176454 - RNA, 18 nt, Artificial Sequence
  Synthetic
aguaacaacaauaauaaa

SEQ ID NO: 176455 - RNA, 19 nt, Artificial Sequence
  Synthetic
caguaacaacaauaauaaa

SEQ ID NO: 176456 - RNA, 20 nt, Artificial Sequence
  Synthetic
ccaguaacaacaauaauaaa

SEQ ID NO: 176457 - RNA, 21 nt, Artificial Sequence
  Synthetic
accaguaacaacaauaauaaa

SEQ ID NO: 176458 - RNA, 22 nt, Artificial Sequence
  Synthetic
caccaguaacaacaauaauaaa

SEQ ID NO: 176459 - RNA, 23 nt, Artificial Sequence
  Synthetic
ccaccaguaacaacaauaauaaa

SEQ ID NO: 176460 - RNA, 24 nt, Artificial Sequence
  Synthetic
accaccaguaacaacaauaauaaa

SEQ ID NO: 176461 - RNA, 18 nt, Artificial Sequence
  Synthetic
aaaaacaauaauaauaaa

SEQ ID NO: 176462 - RNA, 19 nt, Artificial Sequence
  Synthetic
aaaaaacaauaauaauaaa

SEQ ID NO: 176463 - RNA, 20 nt, Artificial Sequence
  Synthetic
uaaaaaacaauaauaauaaa

SEQ ID NO: 176464 - RNA, 21 nt, Artificial Sequence
  Synthetic
uuaaaaaacaauaauaauaaa

SEQ ID NO: 176465 - RNA, 22 nt, Artificial Sequence
  Synthetic
guuaaaaaacaauaauaauaaa

SEQ ID NO: 176466 - RNA, 23 nt, Artificial Sequence
  Synthetic
gguuaaaaaacaauaauaauaaa

SEQ ID NO: 176467 - RNA, 24 nt, Artificial Sequence
  Synthetic
ugguuaaaaaacaauaauaauaaa

SEQ ID NO: 176468 - RNA, 18 nt, Artificial Sequence
  Synthetic
aaaaugguuaauaauaaa

SEQ ID NO: 176469 - RNA, 19 nt, Artificial Sequence
  Synthetic
uaaaaugguuaauaauaaa

SEQ ID NO: 176470 - RNA, 20 nt, Artificial Sequence
  Synthetic
auaaaaugguuaauaauaaa

SEQ ID NO: 176471 - RNA, 21 nt, Artificial Sequence
  Synthetic
aauaaaaugguuaauaauaaa

SEQ ID NO: 176472 - RNA, 22 nt, Artificial Sequence
  Synthetic
uaauaaaaugguuaauaauaaa

SEQ ID NO: 176473 - RNA, 23 nt, Artificial Sequence
  Synthetic
uuaauaaaaugguuaauaauaaa

SEQ ID NO: 176474 - RNA, 24 nt, Artificial Sequence
  Synthetic
guuaauaaaaugguuaauaauaaa

SEQ ID NO: 176475 - RNA, 18 nt, Artificial Sequence
  Synthetic
aagaaaugacauaauaaa

SEQ ID NO: 176476 - RNA, 19 nt, Artificial Sequence
  Synthetic
gaagaaaugacauaauaaa

SEQ ID NO: 176477 - RNA, 20 nt, Artificial Sequence
  Synthetic
agaagaaaugacauaauaaa

SEQ ID NO: 176478 - RNA, 21 nt, Artificial Sequence
  Synthetic
gagaagaaaugacauaauaaa

SEQ ID NO: 176479 - RNA, 22 nt, Artificial Sequence
  Synthetic
ggagaagaaaugacauaauaaa

SEQ ID NO: 176480 - RNA, 23 nt, Artificial Sequence
  Synthetic
aggagaagaaaugacauaauaaa

SEQ ID NO: 176481 - RNA, 24 nt, Artificial Sequence
  Synthetic
aaggagaagaaaugacauaauaaa

SEQ ID NO: 176482 - RNA, 18 nt, Artificial Sequence
  Synthetic
uaaauuuaauauaauaaa

SEQ ID NO: 176483 - RNA, 19 nt, Artificial Sequence
  Synthetic
auaaauuuaauauaauaaa

SEQ ID NO: 176484 - RNA, 20 nt, Artificial Sequence
  Synthetic
aauaaauuuaauauaauaaa

SEQ ID NO: 176485 - RNA, 21 nt, Artificial Sequence
  Synthetic
caauaaauuuaauauaauaaa

SEQ ID NO: 176486 - RNA, 22 nt, Artificial Sequence
  Synthetic
gcaauaaauuuaauauaauaaa

SEQ ID NO: 176487 - RNA, 23 nt, Artificial Sequence
  Synthetic
ugcaauaaauuuaauauaauaaa

SEQ ID NO: 176488 - RNA, 24 nt, Artificial Sequence
  Synthetic
uugcaauaaauuuaauauaauaaa

SEQ ID NO: 176489 - RNA, 18 nt, Artificial Sequence
  Synthetic
uucugcagaccuaauaaa

SEQ ID NO: 176490 - RNA, 19 nt, Artificial Sequence
  Synthetic
uuucugcagaccuaauaaa

SEQ ID NO: 176491 - RNA, 20 nt, Artificial Sequence
  Synthetic
guuucugcagaccuaauaaa

SEQ ID NO: 176492 - RNA, 21 nt, Artificial Sequence
  Synthetic
gguuucugcagaccuaauaaa

SEQ ID NO: 176493 - RNA, 22 nt, Artificial Sequence
  Synthetic
ugguuucugcagaccuaauaaa

SEQ ID NO: 176494 - RNA, 23 nt, Artificial Sequence
  Synthetic
uugguuucugcagaccuaauaaa

SEQ ID NO: 176495 - RNA, 24 nt, Artificial Sequence
  Synthetic
cuugguuucugcagaccuaauaaa

SEQ ID NO: 176496 - RNA, 18 nt, Artificial Sequence
  Synthetic
aaggggaaugguaauaaa

SEQ ID NO: 176497 - RNA, 19 nt, Artificial Sequence
  Synthetic
aaaggggaaugguaauaaa

SEQ ID NO: 176498 - RNA, 20 nt, Artificial Sequence
  Synthetic
caaaggggaaugguaauaaa

SEQ ID NO: 176499 - RNA, 21 nt, Artificial Sequence
  Synthetic
acaaaggggaaugguaauaaa

SEQ ID NO: 176500 - RNA, 22 nt, Artificial Sequence
  Synthetic
gacaaaggggaaugguaauaaa

SEQ ID NO: 176501 - RNA, 23 nt, Artificial Sequence
  Synthetic
ggacaaaggggaaugguaauaaa

SEQ ID NO: 176502 - RNA, 24 nt, Artificial Sequence
  Synthetic
uggacaaaggggaaugguaauaaa

SEQ ID NO: 176503 - RNA, 18 nt, Artificial Sequence
  Synthetic
acaugguaaauuaauaaa

SEQ ID NO: 176504 - RNA, 19 nt, Artificial Sequence
  Synthetic
aacaugguaaauuaauaaa

SEQ ID NO: 176505 - RNA, 20 nt, Artificial Sequence
  Synthetic
gaacaugguaaauuaauaaa

SEQ ID NO: 176506 - RNA, 21 nt, Artificial Sequence
  Synthetic
ugaacaugguaaauuaauaaa

SEQ ID NO: 176507 - RNA, 22 nt, Artificial Sequence
  Synthetic
gugaacaugguaaauuaauaaa

SEQ ID NO: 176508 - RNA, 23 nt, Artificial Sequence
  Synthetic
ggugaacaugguaaauuaauaaa

SEQ ID NO: 176509 - RNA, 24 nt, Artificial Sequence
  Synthetic
uggugaacaugguaaauuaauaaa

SEQ ID NO: 176510 - RNA, 18 nt, Artificial Sequence
  Synthetic
uuaaugaaauuuaauaaa

SEQ ID NO: 176511 - RNA, 19 nt, Artificial Sequence
  Synthetic
auuaaugaaauuuaauaaa

SEQ ID NO: 176512 - RNA, 20 nt, Artificial Sequence
  Synthetic
uauuaaugaaauuuaauaaa

SEQ ID NO: 176513 - RNA, 21 nt, Artificial Sequence
  Synthetic
auauuaaugaaauuuaauaaa

SEQ ID NO: 176514 - RNA, 22 nt, Artificial Sequence
  Synthetic
cauauuaaugaaauuuaauaaa

SEQ ID NO: 176515 - RNA, 23 nt, Artificial Sequence
  Synthetic
ucauauuaaugaaauuuaauaaa

SEQ ID NO: 176516 - RNA, 24 nt, Artificial Sequence
  Synthetic
uucauauuaaugaaauuuaauaaa

SEQ ID NO: 176517 - RNA, 18 nt, Artificial Sequence
  Synthetic
auauuuaaauuuaauaaa

SEQ ID NO: 176518 - RNA, 19 nt, Artificial Sequence
  Synthetic
uauauuuaaauuuaauaaa

SEQ ID NO: 176519 - RNA, 20 nt, Artificial Sequence
  Synthetic
uuauauuuaaauuuaauaaa

SEQ ID NO: 176520 - RNA, 21 nt, Artificial Sequence
  Synthetic
uuuauauuuaaauuuaauaaa

SEQ ID NO: 176521 - RNA, 22 nt, Artificial Sequence
  Synthetic
auuuauauuuaaauuuaauaaa

SEQ ID NO: 176522 - RNA, 23 nt, Artificial Sequence
  Synthetic
aauuuauauuuaaauuuaauaaa

SEQ ID NO: 176523 - RNA, 24 nt, Artificial Sequence
  Synthetic
aaauuuauauuuaaauuuaauaaa

SEQ ID NO: 176524 - RNA, 18 nt, Artificial Sequence
  Synthetic
aagcucauauuuaauaaa

SEQ ID NO: 176525 - RNA, 19 nt, Artificial Sequence
  Synthetic
aaagcucauauuuaauaaa

SEQ ID NO: 176526 - RNA, 20 nt, Artificial Sequence
  Synthetic
aaaagcucauauuuaauaaa

SEQ ID NO: 176527 - RNA, 21 nt, Artificial Sequence
  Synthetic
aaaaagcucauauuuaauaaa

SEQ ID NO: 176528 - RNA, 22 nt, Artificial Sequence
  Synthetic
gaaaaagcucauauuuaauaaa

SEQ ID NO: 176529 - RNA, 23 nt, Artificial Sequence
  Synthetic
ugaaaaagcucauauuuaauaaa

SEQ ID NO: 176530 - RNA, 24 nt, Artificial Sequence
  Synthetic
augaaaaagcucauauuuaauaaa

SEQ ID NO: 176531 - RNA, 18 nt, Artificial Sequence
  Synthetic
augcuguguuuuaauaaa

SEQ ID NO: 176532 - RNA, 19 nt, Artificial Sequence
  Synthetic
uaugcuguguuuuaauaaa

SEQ ID NO: 176533 - RNA, 20 nt, Artificial Sequence
  Synthetic
guaugcuguguuuuaauaaa

SEQ ID NO: 176534 - RNA, 21 nt, Artificial Sequence
  Synthetic
uguaugcuguguuuuaauaaa

SEQ ID NO: 176535 - RNA, 22 nt, Artificial Sequence
  Synthetic
guguaugcuguguuuuaauaaa

SEQ ID NO: 176536 - RNA, 23 nt, Artificial Sequence
  Synthetic
gguguaugcuguguuuuaauaaa

SEQ ID NO: 176537 - RNA, 24 nt, Artificial Sequence
  Synthetic
ugguguaugcuguguuuuaauaaa

SEQ ID NO: 176538 - RNA, 18 nt, Artificial Sequence
  Synthetic
agcucaugaaaacauaaa

SEQ ID NO: 176539 - RNA, 19 nt, Artificial Sequence
  Synthetic
aagcucaugaaaacauaaa

SEQ ID NO: 176540 - RNA, 20 nt, Artificial Sequence
  Synthetic
aaagcucaugaaaacauaaa

SEQ ID NO: 176541 - RNA, 21 nt, Artificial Sequence
  Synthetic
caaagcucaugaaaacauaaa

SEQ ID NO: 176542 - RNA, 22 nt, Artificial Sequence
  Synthetic
ccaaagcucaugaaaacauaaa

SEQ ID NO: 176543 - RNA, 23 nt, Artificial Sequence
  Synthetic
cccaaagcucaugaaaacauaaa

SEQ ID NO: 176544 - RNA, 24 nt, Artificial Sequence
  Synthetic
ucccaaagcucaugaaaacauaaa

SEQ ID NO: 176545 - RNA, 18 nt, Artificial Sequence
  Synthetic
aggguaugcacacauaaa

SEQ ID NO: 176546 - RNA, 19 nt, Artificial Sequence
  Synthetic
uaggguaugcacacauaaa

SEQ ID NO: 176547 - RNA, 20 nt, Artificial Sequence
  Synthetic
auaggguaugcacacauaaa

SEQ ID NO: 176548 - RNA, 21 nt, Artificial Sequence
  Synthetic
cauaggguaugcacacauaaa

SEQ ID NO: 176549 - RNA, 22 nt, Artificial Sequence
  Synthetic
ucauaggguaugcacacauaaa

SEQ ID NO: 176550 - RNA, 23 nt, Artificial Sequence
  Synthetic
gucauaggguaugcacacauaaa

SEQ ID NO: 176551 - RNA, 24 nt, Artificial Sequence
  Synthetic
ggucauaggguaugcacacauaaa

SEQ ID NO: 176552 - RNA, 18 nt, Artificial Sequence
  Synthetic
aggaacuggccacauaaa

SEQ ID NO: 176553 - RNA, 19 nt, Artificial Sequence
  Synthetic
aaggaacuggccacauaaa

SEQ ID NO: 176554 - RNA, 20 nt, Artificial Sequence
  Synthetic
uaaggaacuggccacauaaa

SEQ ID NO: 176555 - RNA, 21 nt, Artificial Sequence
  Synthetic
guaaggaacuggccacauaaa

SEQ ID NO: 176556 - RNA, 22 nt, Artificial Sequence
  Synthetic
uguaaggaacuggccacauaaa

SEQ ID NO: 176557 - RNA, 23 nt, Artificial Sequence
  Synthetic
uuguaaggaacuggccacauaaa

SEQ ID NO: 176558 - RNA, 24 nt, Artificial Sequence
  Synthetic
guuguaaggaacuggccacauaaa

SEQ ID NO: 176559 - RNA, 18 nt, Artificial Sequence
  Synthetic
uaacugauuggacauaaa

SEQ ID NO: 176560 - RNA, 19 nt, Artificial Sequence
  Synthetic
guaacugauuggacauaaa

SEQ ID NO: 176561 - RNA, 20 nt, Artificial Sequence
  Synthetic
gguaacugauuggacauaaa

SEQ ID NO: 176562 - RNA, 21 nt, Artificial Sequence
  Synthetic
ugguaacugauuggacauaaa

SEQ ID NO: 176563 - RNA, 22 nt, Artificial Sequence
  Synthetic
cugguaacugauuggacauaaa

SEQ ID NO: 176564 - RNA, 23 nt, Artificial Sequence
  Synthetic
ccugguaacugauuggacauaaa

SEQ ID NO: 176565 - RNA, 24 nt, Artificial Sequence
  Synthetic
cccugguaacugauuggacauaaa

SEQ ID NO: 176566 - RNA, 18 nt, Artificial Sequence
  Synthetic
uaggaacuuguacauaaa

SEQ ID NO: 176567 - RNA, 19 nt, Artificial Sequence
  Synthetic
cuaggaacuuguacauaaa

SEQ ID NO: 176568 - RNA, 20 nt, Artificial Sequence
  Synthetic
ucuaggaacuuguacauaaa

SEQ ID NO: 176569 - RNA, 21 nt, Artificial Sequence
  Synthetic
cucuaggaacuuguacauaaa

SEQ ID NO: 176570 - RNA, 22 nt, Artificial Sequence
  Synthetic
ccucuaggaacuuguacauaaa

SEQ ID NO: 176571 - RNA, 23 nt, Artificial Sequence
  Synthetic
gccucuaggaacuuguacauaaa

SEQ ID NO: 176572 - RNA, 24 nt, Artificial Sequence
  Synthetic
agccucuaggaacuuguacauaaa

SEQ ID NO: 176573 - RNA, 18 nt, Artificial Sequence
  Synthetic
gaagaagcauagcauaaa

SEQ ID NO: 176574 - RNA, 19 nt, Artificial Sequence
  Synthetic
agaagaagcauagcauaaa

SEQ ID NO: 176575 - RNA, 20 nt, Artificial Sequence
  Synthetic
gagaagaagcauagcauaaa

SEQ ID NO: 176576 - RNA, 21 nt, Artificial Sequence
  Synthetic
agagaagaagcauagcauaaa

SEQ ID NO: 176577 - RNA, 22 nt, Artificial Sequence
  Synthetic
cagagaagaagcauagcauaaa

SEQ ID NO: 176578 - RNA, 23 nt, Artificial Sequence
  Synthetic
acagagaagaagcauagcauaaa

SEQ ID NO: 176579 - RNA, 24 nt, Artificial Sequence
  Synthetic
aacagagaagaagcauagcauaaa

SEQ ID NO: 176580 - RNA, 18 nt, Artificial Sequence
  Synthetic
ugaaaugaagggcauaaa

SEQ ID NO: 176581 - RNA, 19 nt, Artificial Sequence
  Synthetic
uugaaaugaagggcauaaa

SEQ ID NO: 176582 - RNA, 20 nt, Artificial Sequence
  Synthetic
auugaaaugaagggcauaaa

SEQ ID NO: 176583 - RNA, 21 nt, Artificial Sequence
  Synthetic
gauugaaaugaagggcauaaa

SEQ ID NO: 176584 - RNA, 22 nt, Artificial Sequence
  Synthetic
ggauugaaaugaagggcauaaa

SEQ ID NO: 176585 - RNA, 23 nt, Artificial Sequence
  Synthetic
uggauugaaaugaagggcauaaa

SEQ ID NO: 176586 - RNA, 24 nt, Artificial Sequence
  Synthetic
uuggauugaaaugaagggcauaaa

SEQ ID NO: 176587 - RNA, 18 nt, Artificial Sequence
  Synthetic
gguaccugugggcauaaa

SEQ ID NO: 176588 - RNA, 19 nt, Artificial Sequence
  Synthetic
ugguaccugugggcauaaa

SEQ ID NO: 176589 - RNA, 20 nt, Artificial Sequence
  Synthetic
uugguaccugugggcauaaa

SEQ ID NO: 176590 - RNA, 21 nt, Artificial Sequence
  Synthetic
uuugguaccugugggcauaaa

SEQ ID NO: 176591 - RNA, 22 nt, Artificial Sequence
  Synthetic
uuuugguaccugugggcauaaa

SEQ ID NO: 176592 - RNA, 23 nt, Artificial Sequence
  Synthetic
auuuugguaccugugggcauaaa

SEQ ID NO: 176593 - RNA, 24 nt, Artificial Sequence
  Synthetic
uauuuugguaccugugggcauaaa

SEQ ID NO: 176594 - RNA, 18 nt, Artificial Sequence
  Synthetic
uugcauaaaaugcauaaa

SEQ ID NO: 176595 - RNA, 19 nt, Artificial Sequence
  Synthetic
cuugcauaaaaugcauaaa

SEQ ID NO: 176596 - RNA, 20 nt, Artificial Sequence
  Synthetic
ccuugcauaaaaugcauaaa

SEQ ID NO: 176597 - RNA, 21 nt, Artificial Sequence
  Synthetic
accuugcauaaaaugcauaaa

SEQ ID NO: 176598 - RNA, 22 nt, Artificial Sequence
  Synthetic
aaccuugcauaaaaugcauaaa

SEQ ID NO: 176599 - RNA, 23 nt, Artificial Sequence
  Synthetic
caaccuugcauaaaaugcauaaa

SEQ ID NO: 176600 - RNA, 24 nt, Artificial Sequence
  Synthetic
gcaaccuugcauaaaaugcauaaa

SEQ ID NO: 176601 - RNA, 18 nt, Artificial Sequence
  Synthetic
ugauaaacccaucauaaa

SEQ ID NO: 176602 - RNA, 19 nt, Artificial Sequence
  Synthetic
cugauaaacccaucauaaa

SEQ ID NO: 176603 - RNA, 20 nt, Artificial Sequence
  Synthetic
ccugauaaacccaucauaaa

SEQ ID NO: 176604 - RNA, 21 nt, Artificial Sequence
  Synthetic
uccugauaaacccaucauaaa

SEQ ID NO: 176605 - RNA, 22 nt, Artificial Sequence
  Synthetic
guccugauaaacccaucauaaa

SEQ ID NO: 176606 - RNA, 23 nt, Artificial Sequence
  Synthetic
uguccugauaaacccaucauaaa

SEQ ID NO: 176607 - RNA, 24 nt, Artificial Sequence
  Synthetic
guguccugauaaacccaucauaaa

SEQ ID NO: 176608 - RNA, 18 nt, Artificial Sequence
  Synthetic
gaaaucaucccucauaaa

SEQ ID NO: 176609 - RNA, 19 nt, Artificial Sequence
  Synthetic
ugaaaucaucccucauaaa

SEQ ID NO: 176610 - RNA, 20 nt, Artificial Sequence
  Synthetic
augaaaucaucccucauaaa

SEQ ID NO: 176611 - RNA, 21 nt, Artificial Sequence
  Synthetic
aaugaaaucaucccucauaaa

SEQ ID NO: 176612 - RNA, 22 nt, Artificial Sequence
  Synthetic
aaaugaaaucaucccucauaaa

SEQ ID NO: 176613 - RNA, 23 nt, Artificial Sequence
  Synthetic
caaaugaaaucaucccucauaaa

SEQ ID NO: 176614 - RNA, 24 nt, Artificial Sequence
  Synthetic
acaaaugaaaucaucccucauaaa

SEQ ID NO: 176615 - RNA, 18 nt, Artificial Sequence
  Synthetic
cacaugaucccucauaaa

SEQ ID NO: 176616 - RNA, 19 nt, Artificial Sequence
  Synthetic
acacaugaucccucauaaa

SEQ ID NO: 176617 - RNA, 20 nt, Artificial Sequence
  Synthetic
gacacaugaucccucauaaa

SEQ ID NO: 176618 - RNA, 21 nt, Artificial Sequence
  Synthetic
ggacacaugaucccucauaaa

SEQ ID NO: 176619 - RNA, 22 nt, Artificial Sequence
  Synthetic
uggacacaugaucccucauaaa

SEQ ID NO: 176620 - RNA, 23 nt, Artificial Sequence
  Synthetic
uuggacacaugaucccucauaaa

SEQ ID NO: 176621 - RNA, 24 nt, Artificial Sequence
  Synthetic
cuuggacacaugaucccucauaaa

SEQ ID NO: 176622 - RNA, 18 nt, Artificial Sequence
  Synthetic
augauuaaaauucauaaa

SEQ ID NO: 176623 - RNA, 19 nt, Artificial Sequence
  Synthetic
aaugauuaaaauucauaaa

SEQ ID NO: 176624 - RNA, 20 nt, Artificial Sequence
  Synthetic
caaugauuaaaauucauaaa

SEQ ID NO: 176625 - RNA, 21 nt, Artificial Sequence
  Synthetic
ucaaugauuaaaauucauaaa

SEQ ID NO: 176626 - RNA, 22 nt, Artificial Sequence
  Synthetic
gucaaugauuaaaauucauaaa

SEQ ID NO: 176627 - RNA, 23 nt, Artificial Sequence
  Synthetic
ugucaaugauuaaaauucauaaa

SEQ ID NO: 176628 - RNA, 24 nt, Artificial Sequence
  Synthetic
uugucaaugauuaaaauucauaaa

SEQ ID NO: 176629 - RNA, 18 nt, Artificial Sequence
  Synthetic
cugauuaguuuucauaaa

SEQ ID NO: 176630 - RNA, 19 nt, Artificial Sequence
  Synthetic
acugauuaguuuucauaaa

SEQ ID NO: 176631 - RNA, 20 nt, Artificial Sequence
  Synthetic
cacugauuaguuuucauaaa

SEQ ID NO: 176632 - RNA, 21 nt, Artificial Sequence
  Synthetic
acacugauuaguuuucauaaa

SEQ ID NO: 176633 - RNA, 22 nt, Artificial Sequence
  Synthetic
cacacugauuaguuuucauaaa

SEQ ID NO: 176634 - RNA, 23 nt, Artificial Sequence
  Synthetic
ucacacugauuaguuuucauaaa

SEQ ID NO: 176635 - RNA, 24 nt, Artificial Sequence
  Synthetic
aucacacugauuaguuuucauaaa

SEQ ID NO: 176636 - RNA, 18 nt, Artificial Sequence
  Synthetic
auuucaugaucagauaaa

SEQ ID NO: 176637 - RNA, 19 nt, Artificial Sequence
  Synthetic
aauuucaugaucagauaaa

SEQ ID NO: 176638 - RNA, 20 nt, Artificial Sequence
  Synthetic
caauuucaugaucagauaaa

SEQ ID NO: 176639 - RNA, 21 nt, Artificial Sequence
  Synthetic
acaauuucaugaucagauaaa

SEQ ID NO: 176640 - RNA, 22 nt, Artificial Sequence
  Synthetic
aacaauuucaugaucagauaaa

SEQ ID NO: 176641 - RNA, 23 nt, Artificial Sequence
  Synthetic
gaacaauuucaugaucagauaaa

SEQ ID NO: 176642 - RNA, 24 nt, Artificial Sequence
  Synthetic
ugaacaauuucaugaucagauaaa

SEQ ID NO: 176643 - RNA, 18 nt, Artificial Sequence
  Synthetic
aaaauaucuugagauaaa

SEQ ID NO: 176644 - RNA, 19 nt, Artificial Sequence
  Synthetic
aaaaauaucuugagauaaa

SEQ ID NO: 176645 - RNA, 20 nt, Artificial Sequence
  Synthetic
caaaaauaucuugagauaaa

SEQ ID NO: 176646 - RNA, 21 nt, Artificial Sequence
  Synthetic
acaaaaauaucuugagauaaa

SEQ ID NO: 176647 - RNA, 22 nt, Artificial Sequence
  Synthetic
uacaaaaauaucuugagauaaa

SEQ ID NO: 176648 - RNA, 23 nt, Artificial Sequence
  Synthetic
auacaaaaauaucuugagauaaa

SEQ ID NO: 176649 - RNA, 24 nt, Artificial Sequence
  Synthetic
aauacaaaaauaucuugagauaaa

SEQ ID NO: 176650 - RNA, 18 nt, Artificial Sequence
  Synthetic
uuaucaaaaauagauaaa

SEQ ID NO: 176651 - RNA, 19 nt, Artificial Sequence
  Synthetic
uuuaucaaaaauagauaaa

SEQ ID NO: 176652 - RNA, 20 nt, Artificial Sequence
  Synthetic
auuuaucaaaaauagauaaa

SEQ ID NO: 176653 - RNA, 21 nt, Artificial Sequence
  Synthetic
aauuuaucaaaaauagauaaa

SEQ ID NO: 176654 - RNA, 22 nt, Artificial Sequence
  Synthetic
aaauuuaucaaaaauagauaaa

SEQ ID NO: 176655 - RNA, 23 nt, Artificial Sequence
  Synthetic
caaauuuaucaaaaauagauaaa

SEQ ID NO: 176656 - RNA, 24 nt, Artificial Sequence
  Synthetic
acaaauuuaucaaaaauagauaaa

SEQ ID NO: 176657 - RNA, 18 nt, Artificial Sequence
  Synthetic
aguuacuuccuagauaaa

SEQ ID NO: 176658 - RNA, 19 nt, Artificial Sequence
  Synthetic
uaguuacuuccuagauaaa

SEQ ID NO: 176659 - RNA, 20 nt, Artificial Sequence
  Synthetic
uuaguuacuuccuagauaaa

SEQ ID NO: 176660 - RNA, 21 nt, Artificial Sequence
  Synthetic
guuaguuacuuccuagauaaa

SEQ ID NO: 176661 - RNA, 22 nt, Artificial Sequence
  Synthetic
aguuaguuacuuccuagauaaa

SEQ ID NO: 176662 - RNA, 23 nt, Artificial Sequence
  Synthetic
aaguuaguuacuuccuagauaaa

SEQ ID NO: 176663 - RNA, 24 nt, Artificial Sequence
  Synthetic
caaguuaguuacuuccuagauaaa

SEQ ID NO: 176664 - RNA, 18 nt, Artificial Sequence
  Synthetic
auuaccuagcuagauaaa

SEQ ID NO: 176665 - RNA, 19 nt, Artificial Sequence
  Synthetic
aauuaccuagcuagauaaa

SEQ ID NO: 176666 - RNA, 20 nt, Artificial Sequence
  Synthetic
gaauuaccuagcuagauaaa

SEQ ID NO: 176667 - RNA, 21 nt, Artificial Sequence
  Synthetic
ggaauuaccuagcuagauaaa

SEQ ID NO: 176668 - RNA, 22 nt, Artificial Sequence
  Synthetic
uggaauuaccuagcuagauaaa

SEQ ID NO: 176669 - RNA, 23 nt, Artificial Sequence
  Synthetic
uuggaauuaccuagcuagauaaa

SEQ ID NO: 176670 - RNA, 24 nt, Artificial Sequence
  Synthetic
guuggaauuaccuagcuagauaaa

SEQ ID NO: 176671 - RNA, 18 nt, Artificial Sequence
  Synthetic
uauagacuuuuagauaaa

SEQ ID NO: 176672 - RNA, 19 nt, Artificial Sequence
  Synthetic
auauagacuuuuagauaaa

SEQ ID NO: 176673 - RNA, 20 nt, Artificial Sequence
  Synthetic
uauauagacuuuuagauaaa

SEQ ID NO: 176674 - RNA, 21 nt, Artificial Sequence
  Synthetic
cuauauagacuuuuagauaaa

SEQ ID NO: 176675 - RNA, 22 nt, Artificial Sequence
  Synthetic
ucuauauagacuuuuagauaaa

SEQ ID NO: 176676 - RNA, 23 nt, Artificial Sequence
  Synthetic
gucuauauagacuuuuagauaaa

SEQ ID NO: 176677 - RNA, 24 nt, Artificial Sequence
  Synthetic
ugucuauauagacuuuuagauaaa

SEQ ID NO: 176678 - RNA, 18 nt, Artificial Sequence
  Synthetic
aggaaggagaaggauaaa

SEQ ID NO: 176679 - RNA, 19 nt, Artificial Sequence
  Synthetic
aaggaaggagaaggauaaa

SEQ ID NO: 176680 - RNA, 20 nt, Artificial Sequence
  Synthetic
aaaggaaggagaaggauaaa

SEQ ID NO: 176681 - RNA, 21 nt, Artificial Sequence
  Synthetic
aaaaggaaggagaaggauaaa

SEQ ID NO: 176682 - RNA, 22 nt, Artificial Sequence
  Synthetic
uaaaaggaaggagaaggauaaa

SEQ ID NO: 176683 - RNA, 23 nt, Artificial Sequence
  Synthetic
guaaaaggaaggagaaggauaaa

SEQ ID NO: 176684 - RNA, 24 nt, Artificial Sequence
  Synthetic
aguaaaaggaaggagaaggauaaa

SEQ ID NO: 176685 - RNA, 18 nt, Artificial Sequence
  Synthetic
auguuggagaaggauaaa

SEQ ID NO: 176686 - RNA, 19 nt, Artificial Sequence
  Synthetic
uauguuggagaaggauaaa

SEQ ID NO: 176687 - RNA, 20 nt, Artificial Sequence
  Synthetic
guauguuggagaaggauaaa

SEQ ID NO: 176688 - RNA, 21 nt, Artificial Sequence
  Synthetic
uguauguuggagaaggauaaa

SEQ ID NO: 176689 - RNA, 22 nt, Artificial Sequence
  Synthetic
uuguauguuggagaaggauaaa

SEQ ID NO: 176690 - RNA, 23 nt, Artificial Sequence
  Synthetic
uuuguauguuggagaaggauaaa

SEQ ID NO: 176691 - RNA, 24 nt, Artificial Sequence
  Synthetic
cuuuguauguuggagaaggauaaa

SEQ ID NO: 176692 - RNA, 18 nt, Artificial Sequence
  Synthetic
guacccagacaggauaaa

SEQ ID NO: 176693 - RNA, 19 nt, Artificial Sequence
  Synthetic
uguacccagacaggauaaa

SEQ ID NO: 176694 - RNA, 20 nt, Artificial Sequence
  Synthetic
auguacccagacaggauaaa

SEQ ID NO: 176695 - RNA, 21 nt, Artificial Sequence
  Synthetic
uauguacccagacaggauaaa

SEQ ID NO: 176696 - RNA, 22 nt, Artificial Sequence
  Synthetic
auauguacccagacaggauaaa

SEQ ID NO: 176697 - RNA, 23 nt, Artificial Sequence
  Synthetic
uauauguacccagacaggauaaa

SEQ ID NO: 176698 - RNA, 24 nt, Artificial Sequence
  Synthetic
uuauauguacccagacaggauaaa

SEQ ID NO: 176699 - RNA, 18 nt, Artificial Sequence
  Synthetic
uuaaaauggcaggauaaa

SEQ ID NO: 176700 - RNA, 19 nt, Artificial Sequence
  Synthetic
cuuaaaauggcaggauaaa

SEQ ID NO: 176701 - RNA, 20 nt, Artificial Sequence
  Synthetic
ccuuaaaauggcaggauaaa

SEQ ID NO: 176702 - RNA, 21 nt, Artificial Sequence
  Synthetic
uccuuaaaauggcaggauaaa

SEQ ID NO: 176703 - RNA, 22 nt, Artificial Sequence
  Synthetic
auccuuaaaauggcaggauaaa

SEQ ID NO: 176704 - RNA, 23 nt, Artificial Sequence
  Synthetic
aauccuuaaaauggcaggauaaa

SEQ ID NO: 176705 - RNA, 24 nt, Artificial Sequence
  Synthetic
uaauccuuaaaauggcaggauaaa

SEQ ID NO: 176706 - RNA, 18 nt, Artificial Sequence
  Synthetic
gauaaaaaugaggauaaa

SEQ ID NO: 176707 - RNA, 19 nt, Artificial Sequence
  Synthetic
ugauaaaaaugaggauaaa

SEQ ID NO: 176708 - RNA, 20 nt, Artificial Sequence
  Synthetic
gugauaaaaaugaggauaaa

SEQ ID NO: 176709 - RNA, 21 nt, Artificial Sequence
  Synthetic
ggugauaaaaaugaggauaaa

SEQ ID NO: 176710 - RNA, 22 nt, Artificial Sequence
  Synthetic
uggugauaaaaaugaggauaaa

SEQ ID NO: 176711 - RNA, 23 nt, Artificial Sequence
  Synthetic
auggugauaaaaaugaggauaaa

SEQ ID NO: 176712 - RNA, 24 nt, Artificial Sequence
  Synthetic
cauggugauaaaaaugaggauaaa

SEQ ID NO: 176713 - RNA, 18 nt, Artificial Sequence
  Synthetic
aaacuucuauaggauaaa

SEQ ID NO: 176714 - RNA, 19 nt, Artificial Sequence
  Synthetic
gaaacuucuauaggauaaa

SEQ ID NO: 176715 - RNA, 20 nt, Artificial Sequence
  Synthetic
ggaaacuucuauaggauaaa

SEQ ID NO: 176716 - RNA, 21 nt, Artificial Sequence
  Synthetic
aggaaacuucuauaggauaaa

SEQ ID NO: 176717 - RNA, 22 nt, Artificial Sequence
  Synthetic
caggaaacuucuauaggauaaa

SEQ ID NO: 176718 - RNA, 23 nt, Artificial Sequence
  Synthetic
acaggaaacuucuauaggauaaa

SEQ ID NO: 176719 - RNA, 24 nt, Artificial Sequence
  Synthetic
cacaggaaacuucuauaggauaaa

SEQ ID NO: 176720 - RNA, 18 nt, Artificial Sequence
  Synthetic
acaggaccaaaugauaaa

SEQ ID NO: 176721 - RNA, 19 nt, Artificial Sequence
  Synthetic
uacaggaccaaaugauaaa

SEQ ID NO: 176722 - RNA, 20 nt, Artificial Sequence
  Synthetic
cuacaggaccaaaugauaaa

SEQ ID NO: 176723 - RNA, 21 nt, Artificial Sequence
  Synthetic
acuacaggaccaaaugauaaa

SEQ ID NO: 176724 - RNA, 22 nt, Artificial Sequence
  Synthetic
uacuacaggaccaaaugauaaa

SEQ ID NO: 176725 - RNA, 23 nt, Artificial Sequence
  Synthetic
cuacuacaggaccaaaugauaaa

SEQ ID NO: 176726 - RNA, 24 nt, Artificial Sequence
  Synthetic
acuacuacaggaccaaaugauaaa

SEQ ID NO: 176727 - RNA, 18 nt, Artificial Sequence
  Synthetic
gaacuaauaaaugauaaa

SEQ ID NO: 176728 - RNA, 19 nt, Artificial Sequence
  Synthetic
agaacuaauaaaugauaaa

SEQ ID NO: 176729 - RNA, 20 nt, Artificial Sequence
  Synthetic
gagaacuaauaaaugauaaa

SEQ ID NO: 176730 - RNA, 21 nt, Artificial Sequence
  Synthetic
agagaacuaauaaaugauaaa

SEQ ID NO: 176731 - RNA, 22 nt, Artificial Sequence
  Synthetic
uagagaacuaauaaaugauaaa

SEQ ID NO: 176732 - RNA, 23 nt, Artificial Sequence
  Synthetic
uuagagaacuaauaaaugauaaa

SEQ ID NO: 176733 - RNA, 24 nt, Artificial Sequence
  Synthetic
guuagagaacuaauaaaugauaaa

SEQ ID NO: 176734 - RNA, 18 nt, Artificial Sequence
  Synthetic
gugaccuaagaugauaaa

SEQ ID NO: 176735 - RNA, 19 nt, Artificial Sequence
  Synthetic
agugaccuaagaugauaaa

SEQ ID NO: 176736 - RNA, 20 nt, Artificial Sequence
  Synthetic
aagugaccuaagaugauaaa

SEQ ID NO: 176737 - RNA, 21 nt, Artificial Sequence
  Synthetic
uaagugaccuaagaugauaaa

SEQ ID NO: 176738 - RNA, 22 nt, Artificial Sequence
  Synthetic
guaagugaccuaagaugauaaa

SEQ ID NO: 176739 - RNA, 23 nt, Artificial Sequence
  Synthetic
uguaagugaccuaagaugauaaa

SEQ ID NO: 176740 - RNA, 24 nt, Artificial Sequence
  Synthetic
uuguaagugaccuaagaugauaaa

SEQ ID NO: 176741 - RNA, 18 nt, Artificial Sequence
  Synthetic
aauuguuuaacugauaaa

SEQ ID NO: 176742 - RNA, 19 nt, Artificial Sequence
  Synthetic
uaauuguuuaacugauaaa

SEQ ID NO: 176743 - RNA, 20 nt, Artificial Sequence
  Synthetic
uuaauuguuuaacugauaaa

SEQ ID NO: 176744 - RNA, 21 nt, Artificial Sequence
  Synthetic
uuuaauuguuuaacugauaaa

SEQ ID NO: 176745 - RNA, 22 nt, Artificial Sequence
  Synthetic
uuuuaauuguuuaacugauaaa

SEQ ID NO: 176746 - RNA, 23 nt, Artificial Sequence
  Synthetic
cuuuuaauuguuuaacugauaaa

SEQ ID NO: 176747 - RNA, 24 nt, Artificial Sequence
  Synthetic
acuuuuaauuguuuaacugauaaa

SEQ ID NO: 176748 - RNA, 18 nt, Artificial Sequence
  Synthetic
auuuugaucacugauaaa

SEQ ID NO: 176749 - RNA, 19 nt, Artificial Sequence
  Synthetic
gauuuugaucacugauaaa

SEQ ID NO: 176750 - RNA, 20 nt, Artificial Sequence
  Synthetic
ggauuuugaucacugauaaa

SEQ ID NO: 176751 - RNA, 21 nt, Artificial Sequence
  Synthetic
aggauuuugaucacugauaaa

SEQ ID NO: 176752 - RNA, 22 nt, Artificial Sequence
  Synthetic
aaggauuuugaucacugauaaa

SEQ ID NO: 176753 - RNA, 23 nt, Artificial Sequence
  Synthetic
caaggauuuugaucacugauaaa

SEQ ID NO: 176754 - RNA, 24 nt, Artificial Sequence
  Synthetic
gcaaggauuuugaucacugauaaa

SEQ ID NO: 176755 - RNA, 18 nt, Artificial Sequence
  Synthetic
caaauauaaagugauaaa

SEQ ID NO: 176756 - RNA, 19 nt, Artificial Sequence
  Synthetic
gcaaauauaaagugauaaa

SEQ ID NO: 176757 - RNA, 20 nt, Artificial Sequence
  Synthetic
agcaaauauaaagugauaaa

SEQ ID NO: 176758 - RNA, 21 nt, Artificial Sequence
  Synthetic
aagcaaauauaaagugauaaa

SEQ ID NO: 176759 - RNA, 22 nt, Artificial Sequence
  Synthetic
aaagcaaauauaaagugauaaa

SEQ ID NO: 176760 - RNA, 23 nt, Artificial Sequence
  Synthetic
uaaagcaaauauaaagugauaaa

SEQ ID NO: 176761 - RNA, 24 nt, Artificial Sequence
  Synthetic
auaaagcaaauauaaagugauaaa

SEQ ID NO: 176762 - RNA, 18 nt, Artificial Sequence
  Synthetic
acuuucuaaagugauaaa

SEQ ID NO: 176763 - RNA, 19 nt, Artificial Sequence
  Synthetic
uacuuucuaaagugauaaa

SEQ ID NO: 176764 - RNA, 20 nt, Artificial Sequence
  Synthetic
uuacuuucuaaagugauaaa

SEQ ID NO: 176765 - RNA, 21 nt, Artificial Sequence
  Synthetic
guuacuuucuaaagugauaaa

SEQ ID NO: 176766 - RNA, 22 nt, Artificial Sequence
  Synthetic
gguuacuuucuaaagugauaaa

SEQ ID NO: 176767 - RNA, 23 nt, Artificial Sequence
  Synthetic
ugguuacuuucuaaagugauaaa

SEQ ID NO: 176768 - RNA, 24 nt, Artificial Sequence
  Synthetic
uugguuacuuucuaaagugauaaa

SEQ ID NO: 176769 - RNA, 18 nt, Artificial Sequence
  Synthetic
acucuuuguguugauaaa

SEQ ID NO: 176770 - RNA, 19 nt, Artificial Sequence
  Synthetic
aacucuuuguguugauaaa

SEQ ID NO: 176771 - RNA, 20 nt, Artificial Sequence
  Synthetic
aaacucuuuguguugauaaa

SEQ ID NO: 176772 - RNA, 21 nt, Artificial Sequence
  Synthetic
aaaacucuuuguguugauaaa

SEQ ID NO: 176773 - RNA, 22 nt, Artificial Sequence
  Synthetic
gaaaacucuuuguguugauaaa

SEQ ID NO: 176774 - RNA, 23 nt, Artificial Sequence
  Synthetic
agaaaacucuuuguguugauaaa

SEQ ID NO: 176775 - RNA, 24 nt, Artificial Sequence
  Synthetic
aagaaaacucuuuguguugauaaa

SEQ ID NO: 176776 - RNA, 18 nt, Artificial Sequence
  Synthetic
caagauuuccaauauaaa

SEQ ID NO: 176777 - RNA, 19 nt, Artificial Sequence
  Synthetic
ccaagauuuccaauauaaa

SEQ ID NO: 176778 - RNA, 20 nt, Artificial Sequence
  Synthetic
gccaagauuuccaauauaaa

SEQ ID NO: 176779 - RNA, 21 nt, Artificial Sequence
  Synthetic
ggccaagauuuccaauauaaa

SEQ ID NO: 176780 - RNA, 22 nt, Artificial Sequence
  Synthetic
uggccaagauuuccaauauaaa

SEQ ID NO: 176781 - RNA, 23 nt, Artificial Sequence
  Synthetic
cuggccaagauuuccaauauaaa

SEQ ID NO: 176782 - RNA, 24 nt, Artificial Sequence
  Synthetic
acuggccaagauuuccaauauaaa

SEQ ID NO: 176783 - RNA, 18 nt, Artificial Sequence
  Synthetic
ugcuaucaagaauauaaa

SEQ ID NO: 176784 - RNA, 19 nt, Artificial Sequence
  Synthetic
cugcuaucaagaauauaaa

SEQ ID NO: 176785 - RNA, 20 nt, Artificial Sequence
  Synthetic
ucugcuaucaagaauauaaa

SEQ ID NO: 176786 - RNA, 21 nt, Artificial Sequence
  Synthetic
uucugcuaucaagaauauaaa

SEQ ID NO: 176787 - RNA, 22 nt, Artificial Sequence
  Synthetic
auucugcuaucaagaauauaaa

SEQ ID NO: 176788 - RNA, 23 nt, Artificial Sequence
  Synthetic
uauucugcuaucaagaauauaaa

SEQ ID NO: 176789 - RNA, 24 nt, Artificial Sequence
  Synthetic
cuauucugcuaucaagaauauaaa

SEQ ID NO: 176790 - RNA, 18 nt, Artificial Sequence
  Synthetic
aguuuccuuccauauaaa

SEQ ID NO: 176791 - RNA, 19 nt, Artificial Sequence
  Synthetic
caguuuccuuccauauaaa

SEQ ID NO: 176792 - RNA, 20 nt, Artificial Sequence
  Synthetic
ucaguuuccuuccauauaaa

SEQ ID NO: 176793 - RNA, 21 nt, Artificial Sequence
  Synthetic
cucaguuuccuuccauauaaa

SEQ ID NO: 176794 - RNA, 22 nt, Artificial Sequence
  Synthetic
ucucaguuuccuuccauauaaa

SEQ ID NO: 176795 - RNA, 23 nt, Artificial Sequence
  Synthetic
gucucaguuuccuuccauauaaa

SEQ ID NO: 176796 - RNA, 24 nt, Artificial Sequence
  Synthetic
ugucucaguuuccuuccauauaaa

SEQ ID NO: 176797 - RNA, 18 nt, Artificial Sequence
  Synthetic
uguaauccagcauauaaa

SEQ ID NO: 176798 - RNA, 19 nt, Artificial Sequence
  Synthetic
auguaauccagcauauaaa

SEQ ID NO: 176799 - RNA, 20 nt, Artificial Sequence
  Synthetic
aauguaauccagcauauaaa

SEQ ID NO: 176800 - RNA, 21 nt, Artificial Sequence
  Synthetic
aaauguaauccagcauauaaa

SEQ ID NO: 176801 - RNA, 22 nt, Artificial Sequence
  Synthetic
uaaauguaauccagcauauaaa

SEQ ID NO: 176802 - RNA, 23 nt, Artificial Sequence
  Synthetic
auaaauguaauccagcauauaaa

SEQ ID NO: 176803 - RNA, 24 nt, Artificial Sequence
  Synthetic
aauaaauguaauccagcauauaaa

SEQ ID NO: 176804 - RNA, 18 nt, Artificial Sequence
  Synthetic
uuagauacaucauauaaa

SEQ ID NO: 176805 - RNA, 19 nt, Artificial Sequence
  Synthetic
uuuagauacaucauauaaa

SEQ ID NO: 176806 - RNA, 20 nt, Artificial Sequence
  Synthetic
cuuuagauacaucauauaaa

SEQ ID NO: 176807 - RNA, 21 nt, Artificial Sequence
  Synthetic
acuuuagauacaucauauaaa

SEQ ID NO: 176808 - RNA, 22 nt, Artificial Sequence
  Synthetic
uacuuuagauacaucauauaaa

SEQ ID NO: 176809 - RNA, 23 nt, Artificial Sequence
  Synthetic
cuacuuuagauacaucauauaaa

SEQ ID NO: 176810 - RNA, 24 nt, Artificial Sequence
  Synthetic
acuacuuuagauacaucauauaaa

SEQ ID NO: 176811 - RNA, 18 nt, Artificial Sequence
  Synthetic
guauuaguuauauauaaa

SEQ ID NO: 176812 - RNA, 19 nt, Artificial Sequence
  Synthetic
aguauuaguuauauauaaa

SEQ ID NO: 176813 - RNA, 20 nt, Artificial Sequence
  Synthetic
aaguauuaguuauauauaaa

SEQ ID NO: 176814 - RNA, 21 nt, Artificial Sequence
  Synthetic
gaaguauuaguuauauauaaa

SEQ ID NO: 176815 - RNA, 22 nt, Artificial Sequence
  Synthetic
agaaguauuaguuauauauaaa

SEQ ID NO: 176816 - RNA, 23 nt, Artificial Sequence
  Synthetic
cagaaguauuaguuauauauaaa

SEQ ID NO: 176817 - RNA, 24 nt, Artificial Sequence
  Synthetic
ucagaaguauuaguuauauauaaa

SEQ ID NO: 176818 - RNA, 18 nt, Artificial Sequence
  Synthetic
uauauaugacuauauaaa

SEQ ID NO: 176819 - RNA, 19 nt, Artificial Sequence
  Synthetic
guauauaugacuauauaaa

SEQ ID NO: 176820 - RNA, 20 nt, Artificial Sequence
  Synthetic
aguauauaugacuauauaaa

SEQ ID NO: 176821 - RNA, 21 nt, Artificial Sequence
  Synthetic
aaguauauaugacuauauaaa

SEQ ID NO: 176822 - RNA, 22 nt, Artificial Sequence
  Synthetic
aaaguauauaugacuauauaaa

SEQ ID NO: 176823 - RNA, 23 nt, Artificial Sequence
  Synthetic
aaaaguauauaugacuauauaaa

SEQ ID NO: 176824 - RNA, 24 nt, Artificial Sequence
  Synthetic
caaaaguauauaugacuauauaaa

SEQ ID NO: 176825 - RNA, 18 nt, Artificial Sequence
  Synthetic
aauaggccauuauauaaa

SEQ ID NO: 176826 - RNA, 19 nt, Artificial Sequence
  Synthetic
gaauaggccauuauauaaa

SEQ ID NO: 176827 - RNA, 20 nt, Artificial Sequence
  Synthetic
agaauaggccauuauauaaa

SEQ ID NO: 176828 - RNA, 21 nt, Artificial Sequence
  Synthetic
aagaauaggccauuauauaaa

SEQ ID NO: 176829 - RNA, 22 nt, Artificial Sequence
  Synthetic
uaagaauaggccauuauauaaa

SEQ ID NO: 176830 - RNA, 23 nt, Artificial Sequence
  Synthetic
guaagaauaggccauuauauaaa

SEQ ID NO: 176831 - RNA, 24 nt, Artificial Sequence
  Synthetic
aguaagaauaggccauuauauaaa

SEQ ID NO: 176832 - RNA, 18 nt, Artificial Sequence
  Synthetic
uacuacaaguuauauaaa

SEQ ID NO: 176833 - RNA, 19 nt, Artificial Sequence
  Synthetic
guacuacaaguuauauaaa

SEQ ID NO: 176834 - RNA, 20 nt, Artificial Sequence
  Synthetic
gguacuacaaguuauauaaa

SEQ ID NO: 176835 - RNA, 21 nt, Artificial Sequence
  Synthetic
ugguacuacaaguuauauaaa

SEQ ID NO: 176836 - RNA, 22 nt, Artificial Sequence
  Synthetic
augguacuacaaguuauauaaa

SEQ ID NO: 176837 - RNA, 23 nt, Artificial Sequence
  Synthetic
gaugguacuacaaguuauauaaa

SEQ ID NO: 176838 - RNA, 24 nt, Artificial Sequence
  Synthetic
ugaugguacuacaaguuauauaaa

SEQ ID NO: 176839 - RNA, 18 nt, Artificial Sequence
  Synthetic
uggagaauugacuauaaa

SEQ ID NO: 176840 - RNA, 19 nt, Artificial Sequence
  Synthetic
auggagaauugacuauaaa

SEQ ID NO: 176841 - RNA, 20 nt, Artificial Sequence
  Synthetic
uauggagaauugacuauaaa

SEQ ID NO: 176842 - RNA, 21 nt, Artificial Sequence
  Synthetic
cuauggagaauugacuauaaa

SEQ ID NO: 176843 - RNA, 22 nt, Artificial Sequence
  Synthetic
gcuauggagaauugacuauaaa

SEQ ID NO: 176844 - RNA, 23 nt, Artificial Sequence
  Synthetic
ugcuauggagaauugacuauaaa

SEQ ID NO: 176845 - RNA, 24 nt, Artificial Sequence
  Synthetic
cugcuauggagaauugacuauaaa

SEQ ID NO: 176846 - RNA, 18 nt, Artificial Sequence
  Synthetic
gguccagugaccuauaaa

SEQ ID NO: 176847 - RNA, 19 nt, Artificial Sequence
  Synthetic
ugguccagugaccuauaaa

SEQ ID NO: 176848 - RNA, 20 nt, Artificial Sequence
  Synthetic
augguccagugaccuauaaa

SEQ ID NO: 176849 - RNA, 21 nt, Artificial Sequence
  Synthetic
caugguccagugaccuauaaa

SEQ ID NO: 176850 - RNA, 22 nt, Artificial Sequence
  Synthetic
ucaugguccagugaccuauaaa

SEQ ID NO: 176851 - RNA, 23 nt, Artificial Sequence
  Synthetic
cucaugguccagugaccuauaaa

SEQ ID NO: 176852 - RNA, 24 nt, Artificial Sequence
  Synthetic
ccucaugguccagugaccuauaaa

SEQ ID NO: 176853 - RNA, 18 nt, Artificial Sequence
  Synthetic
aguuuaucuagcuauaaa

SEQ ID NO: 176854 - RNA, 19 nt, Artificial Sequence
  Synthetic
aaguuuaucuagcuauaaa

SEQ ID NO: 176855 - RNA, 20 nt, Artificial Sequence
  Synthetic
caaguuuaucuagcuauaaa

SEQ ID NO: 176856 - RNA, 21 nt, Artificial Sequence
  Synthetic
ccaaguuuaucuagcuauaaa

SEQ ID NO: 176857 - RNA, 22 nt, Artificial Sequence
  Synthetic
cccaaguuuaucuagcuauaaa

SEQ ID NO: 176858 - RNA, 23 nt, Artificial Sequence
  Synthetic
gcccaaguuuaucuagcuauaaa

SEQ ID NO: 176859 - RNA, 24 nt, Artificial Sequence
  Synthetic
agcccaaguuuaucuagcuauaaa

SEQ ID NO: 176860 - RNA, 18 nt, Artificial Sequence
  Synthetic
auuuugcuucgcuauaaa

SEQ ID NO: 176861 - RNA, 19 nt, Artificial Sequence
  Synthetic
uauuuugcuucgcuauaaa

SEQ ID NO: 176862 - RNA, 20 nt, Artificial Sequence
  Synthetic
cuauuuugcuucgcuauaaa

SEQ ID NO: 176863 - RNA, 21 nt, Artificial Sequence
  Synthetic
acuauuuugcuucgcuauaaa

SEQ ID NO: 176864 - RNA, 22 nt, Artificial Sequence
  Synthetic
aacuauuuugcuucgcuauaaa

SEQ ID NO: 176865 - RNA, 23 nt, Artificial Sequence
  Synthetic
uaacuauuuugcuucgcuauaaa

SEQ ID NO: 176866 - RNA, 24 nt, Artificial Sequence
  Synthetic
uuaacuauuuugcuucgcuauaaa

SEQ ID NO: 176867 - RNA, 18 nt, Artificial Sequence
  Synthetic
cccuuugaaaucuauaaa

SEQ ID NO: 176868 - RNA, 19 nt, Artificial Sequence
  Synthetic
ucccuuugaaaucuauaaa

SEQ ID NO: 176869 - RNA, 20 nt, Artificial Sequence
  Synthetic
cucccuuugaaaucuauaaa

SEQ ID NO: 176870 - RNA, 21 nt, Artificial Sequence
  Synthetic
ucucccuuugaaaucuauaaa

SEQ ID NO: 176871 - RNA, 22 nt, Artificial Sequence
  Synthetic
cucucccuuugaaaucuauaaa

SEQ ID NO: 176872 - RNA, 23 nt, Artificial Sequence
  Synthetic
ucucucccuuugaaaucuauaaa

SEQ ID NO: 176873 - RNA, 24 nt, Artificial Sequence
  Synthetic
aucucucccuuugaaaucuauaaa

SEQ ID NO: 176874 - RNA, 18 nt, Artificial Sequence
  Synthetic
uuguuuuuugucuauaaa

SEQ ID NO: 176875 - RNA, 19 nt, Artificial Sequence
  Synthetic
cuuguuuuuugucuauaaa

SEQ ID NO: 176876 - RNA, 20 nt, Artificial Sequence
  Synthetic
gcuuguuuuuugucuauaaa

SEQ ID NO: 176877 - RNA, 21 nt, Artificial Sequence
  Synthetic
ugcuuguuuuuugucuauaaa

SEQ ID NO: 176878 - RNA, 22 nt, Artificial Sequence
  Synthetic
uugcuuguuuuuugucuauaaa

SEQ ID NO: 176879 - RNA, 23 nt, Artificial Sequence
  Synthetic
uuugcuuguuuuuugucuauaaa

SEQ ID NO: 176880 - RNA, 24 nt, Artificial Sequence
  Synthetic
uuuugcuuguuuuuugucuauaaa

SEQ ID NO: 176881 - RNA, 18 nt, Artificial Sequence
  Synthetic
uauccaagccaguauaaa

SEQ ID NO: 176882 - RNA, 19 nt, Artificial Sequence
  Synthetic
auauccaagccaguauaaa

SEQ ID NO: 176883 - RNA, 20 nt, Artificial Sequence
  Synthetic
aauauccaagccaguauaaa

SEQ ID NO: 176884 - RNA, 21 nt, Artificial Sequence
  Synthetic
caauauccaagccaguauaaa

SEQ ID NO: 176885 - RNA, 22 nt, Artificial Sequence
  Synthetic
ucaauauccaagccaguauaaa

SEQ ID NO: 176886 - RNA, 23 nt, Artificial Sequence
  Synthetic
aucaauauccaagccaguauaaa

SEQ ID NO: 176887 - RNA, 24 nt, Artificial Sequence
  Synthetic
uaucaauauccaagccaguauaaa

SEQ ID NO: 176888 - RNA, 18 nt, Artificial Sequence
  Synthetic
uguauguguguguauaaa

SEQ ID NO: 176889 - RNA, 19 nt, Artificial Sequence
  Synthetic
guguauguguguguauaaa

SEQ ID NO: 176890 - RNA, 20 nt, Artificial Sequence
  Synthetic
cguguauguguguguauaaa

SEQ ID NO: 176891 - RNA, 21 nt, Artificial Sequence
  Synthetic
gcguguauguguguguauaaa

SEQ ID NO: 176892 - RNA, 22 nt, Artificial Sequence
  Synthetic
ugcguguauguguguguauaaa

SEQ ID NO: 176893 - RNA, 23 nt, Artificial Sequence
  Synthetic
gugcguguauguguguguauaaa

SEQ ID NO: 176894 - RNA, 24 nt, Artificial Sequence
  Synthetic
ugugcguguauguguguguauaaa

SEQ ID NO: 176895 - RNA, 18 nt, Artificial Sequence
  Synthetic
gauauaggaaauuauaaa

SEQ ID NO: 176896 - RNA, 19 nt, Artificial Sequence
  Synthetic
ggauauaggaaauuauaaa

SEQ ID NO: 176897 - RNA, 20 nt, Artificial Sequence
  Synthetic
aggauauaggaaauuauaaa

SEQ ID NO: 176898 - RNA, 21 nt, Artificial Sequence
  Synthetic
gaggauauaggaaauuauaaa

SEQ ID NO: 176899 - RNA, 22 nt, Artificial Sequence
  Synthetic
agaggauauaggaaauuauaaa

SEQ ID NO: 176900 - RNA, 23 nt, Artificial Sequence
  Synthetic
aagaggauauaggaaauuauaaa

SEQ ID NO: 176901 - RNA, 24 nt, Artificial Sequence
  Synthetic
gaagaggauauaggaaauuauaaa

SEQ ID NO: 176902 - RNA, 18 nt, Artificial Sequence
  Synthetic
uaaagauugcauuauaaa

SEQ ID NO: 176903 - RNA, 19 nt, Artificial Sequence
  Synthetic
auaaagauugcauuauaaa

SEQ ID NO: 176904 - RNA, 20 nt, Artificial Sequence
  Synthetic
aauaaagauugcauuauaaa

SEQ ID NO: 176905 - RNA, 21 nt, Artificial Sequence
  Synthetic
caauaaagauugcauuauaaa

SEQ ID NO: 176906 - RNA, 22 nt, Artificial Sequence
  Synthetic
acaauaaagauugcauuauaaa

SEQ ID NO: 176907 - RNA, 23 nt, Artificial Sequence
  Synthetic
gacaauaaagauugcauuauaaa

SEQ ID NO: 176908 - RNA, 24 nt, Artificial Sequence
  Synthetic
ugacaauaaagauugcauuauaaa

SEQ ID NO: 176909 - RNA, 18 nt, Artificial Sequence
  Synthetic
uuuuuauaucauuauaaa

SEQ ID NO: 176910 - RNA, 19 nt, Artificial Sequence
  Synthetic
auuuuuauaucauuauaaa

SEQ ID NO: 176911 - RNA, 20 nt, Artificial Sequence
  Synthetic
cauuuuuauaucauuauaaa

SEQ ID NO: 176912 - RNA, 21 nt, Artificial Sequence
  Synthetic
gcauuuuuauaucauuauaaa

SEQ ID NO: 176913 - RNA, 22 nt, Artificial Sequence
  Synthetic
ggcauuuuuauaucauuauaaa

SEQ ID NO: 176914 - RNA, 23 nt, Artificial Sequence
  Synthetic
uggcauuuuuauaucauuauaaa

SEQ ID NO: 176915 - RNA, 24 nt, Artificial Sequence
  Synthetic
auggcauuuuuauaucauuauaaa

SEQ ID NO: 176916 - RNA, 18 nt, Artificial Sequence
  Synthetic
cuauuucuauauuauaaa

SEQ ID NO: 176917 - RNA, 19 nt, Artificial Sequence
  Synthetic
ucuauuucuauauuauaaa

SEQ ID NO: 176918 - RNA, 20 nt, Artificial Sequence
  Synthetic
aucuauuucuauauuauaaa

SEQ ID NO: 176919 - RNA, 21 nt, Artificial Sequence
  Synthetic
caucuauuucuauauuauaaa

SEQ ID NO: 176920 - RNA, 22 nt, Artificial Sequence
  Synthetic
gcaucuauuucuauauuauaaa

SEQ ID NO: 176921 - RNA, 23 nt, Artificial Sequence
  Synthetic
agcaucuauuucuauauuauaaa

SEQ ID NO: 176922 - RNA, 24 nt, Artificial Sequence
  Synthetic
aagcaucuauuucuauauuauaaa

SEQ ID NO: 176923 - RNA, 18 nt, Artificial Sequence
  Synthetic
auuugcauuuauuauaaa

SEQ ID NO: 176924 - RNA, 19 nt, Artificial Sequence
  Synthetic
gauuugcauuuauuauaaa

SEQ ID NO: 176925 - RNA, 20 nt, Artificial Sequence
  Synthetic
cgauuugcauuuauuauaaa

SEQ ID NO: 176926 - RNA, 21 nt, Artificial Sequence
  Synthetic
acgauuugcauuuauuauaaa

SEQ ID NO: 176927 - RNA, 22 nt, Artificial Sequence
  Synthetic
uacgauuugcauuuauuauaaa

SEQ ID NO: 176928 - RNA, 23 nt, Artificial Sequence
  Synthetic
guacgauuugcauuuauuauaaa

SEQ ID NO: 176929 - RNA, 24 nt, Artificial Sequence
  Synthetic
aguacgauuugcauuuauuauaaa

SEQ ID NO: 176930 - RNA, 18 nt, Artificial Sequence
  Synthetic
cguguucucacuuauaaa

SEQ ID NO: 176931 - RNA, 19 nt, Artificial Sequence
  Synthetic
gcguguucucacuuauaaa

SEQ ID NO: 176932 - RNA, 20 nt, Artificial Sequence
  Synthetic
ugcguguucucacuuauaaa

SEQ ID NO: 176933 - RNA, 21 nt, Artificial Sequence
  Synthetic
cugcguguucucacuuauaaa

SEQ ID NO: 176934 - RNA, 22 nt, Artificial Sequence
  Synthetic
acugcguguucucacuuauaaa

SEQ ID NO: 176935 - RNA, 23 nt, Artificial Sequence
  Synthetic
uacugcguguucucacuuauaaa

SEQ ID NO: 176936 - RNA, 24 nt, Artificial Sequence
  Synthetic
auacugcguguucucacuuauaaa

SEQ ID NO: 176937 - RNA, 18 nt, Artificial Sequence
  Synthetic
uaauuaguugcuuauaaa

SEQ ID NO: 176938 - RNA, 19 nt, Artificial Sequence
  Synthetic
uuaauuaguugcuuauaaa

SEQ ID NO: 176939 - RNA, 20 nt, Artificial Sequence
  Synthetic
uuuaauuaguugcuuauaaa

SEQ ID NO: 176940 - RNA, 21 nt, Artificial Sequence
  Synthetic
auuuaauuaguugcuuauaaa

SEQ ID NO: 176941 - RNA, 22 nt, Artificial Sequence
  Synthetic
uauuuaauuaguugcuuauaaa

SEQ ID NO: 176942 - RNA, 23 nt, Artificial Sequence
  Synthetic
uuauuuaauuaguugcuuauaaa

SEQ ID NO: 176943 - RNA, 24 nt, Artificial Sequence
  Synthetic
cuuauuuaauuaguugcuuauaaa

SEQ ID NO: 176944 - RNA, 18 nt, Artificial Sequence
  Synthetic
uccagucuuaguuauaaa

SEQ ID NO: 176945 - RNA, 19 nt, Artificial Sequence
  Synthetic
auccagucuuaguuauaaa

SEQ ID NO: 176946 - RNA, 20 nt, Artificial Sequence
  Synthetic
gauccagucuuaguuauaaa

SEQ ID NO: 176947 - RNA, 21 nt, Artificial Sequence
  Synthetic
agauccagucuuaguuauaaa

SEQ ID NO: 176948 - RNA, 22 nt, Artificial Sequence
  Synthetic
aagauccagucuuaguuauaaa

SEQ ID NO: 176949 - RNA, 23 nt, Artificial Sequence
  Synthetic
caagauccagucuuaguuauaaa

SEQ ID NO: 176950 - RNA, 24 nt, Artificial Sequence
  Synthetic
acaagauccagucuuaguuauaaa

SEQ ID NO: 176951 - RNA, 18 nt, Artificial Sequence
  Synthetic
uagaauggcuguuauaaa

SEQ ID NO: 176952 - RNA, 19 nt, Artificial Sequence
  Synthetic
uuagaauggcuguuauaaa

SEQ ID NO: 176953 - RNA, 20 nt, Artificial Sequence
  Synthetic
guuagaauggcuguuauaaa

SEQ ID NO: 176954 - RNA, 21 nt, Artificial Sequence
  Synthetic
uguuagaauggcuguuauaaa

SEQ ID NO: 176955 - RNA, 22 nt, Artificial Sequence
  Synthetic
cuguuagaauggcuguuauaaa

SEQ ID NO: 176956 - RNA, 23 nt, Artificial Sequence
  Synthetic
ccuguuagaauggcuguuauaaa

SEQ ID NO: 176957 - RNA, 24 nt, Artificial Sequence
  Synthetic
accuguuagaauggcuguuauaaa

SEQ ID NO: 176958 - RNA, 18 nt, Artificial Sequence
  Synthetic
uagaaagaaauuuauaaa

SEQ ID NO: 176959 - RNA, 19 nt, Artificial Sequence
  Synthetic
uuagaaagaaauuuauaaa

SEQ ID NO: 176960 - RNA, 20 nt, Artificial Sequence
  Synthetic
uuuagaaagaaauuuauaaa

SEQ ID NO: 176961 - RNA, 21 nt, Artificial Sequence
  Synthetic
uuuuagaaagaaauuuauaaa

SEQ ID NO: 176962 - RNA, 22 nt, Artificial Sequence
  Synthetic
cuuuuagaaagaaauuuauaaa

SEQ ID NO: 176963 - RNA, 23 nt, Artificial Sequence
  Synthetic
acuuuuagaaagaaauuuauaaa

SEQ ID NO: 176964 - RNA, 24 nt, Artificial Sequence
  Synthetic
aacuuuuagaaagaaauuuauaaa

SEQ ID NO: 176965 - RNA, 18 nt, Artificial Sequence
  Synthetic
uuuuuucuuauuuauaaa

SEQ ID NO: 176966 - RNA, 19 nt, Artificial Sequence
  Synthetic
uuuuuuucuuauuuauaaa

SEQ ID NO: 176967 - RNA, 20 nt, Artificial Sequence
  Synthetic
auuuuuuucuuauuuauaaa

SEQ ID NO: 176968 - RNA, 21 nt, Artificial Sequence
  Synthetic
uauuuuuuucuuauuuauaaa

SEQ ID NO: 176969 - RNA, 22 nt, Artificial Sequence
  Synthetic
uuauuuuuuucuuauuuauaaa

SEQ ID NO: 176970 - RNA, 23 nt, Artificial Sequence
  Synthetic
auuauuuuuuucuuauuuauaaa

SEQ ID NO: 176971 - RNA, 24 nt, Artificial Sequence
  Synthetic
gauuauuuuuuucuuauuuauaaa

SEQ ID NO: 176972 - RNA, 18 nt, Artificial Sequence
  Synthetic
cauccaugacuuuauaaa

SEQ ID NO: 176973 - RNA, 19 nt, Artificial Sequence
  Synthetic
ucauccaugacuuuauaaa

SEQ ID NO: 176974 - RNA, 20 nt, Artificial Sequence
  Synthetic
uucauccaugacuuuauaaa

SEQ ID NO: 176975 - RNA, 21 nt, Artificial Sequence
  Synthetic
cuucauccaugacuuuauaaa

SEQ ID NO: 176976 - RNA, 22 nt, Artificial Sequence
  Synthetic
ucuucauccaugacuuuauaaa

SEQ ID NO: 176977 - RNA, 23 nt, Artificial Sequence
  Synthetic
uucuucauccaugacuuuauaaa

SEQ ID NO: 176978 - RNA, 24 nt, Artificial Sequence
  Synthetic
guucuucauccaugacuuuauaaa

SEQ ID NO: 176979 - RNA, 18 nt, Artificial Sequence
  Synthetic
ccaaaagggcuuuauaaa

SEQ ID NO: 176980 - RNA, 19 nt, Artificial Sequence
  Synthetic
uccaaaagggcuuuauaaa

SEQ ID NO: 176981 - RNA, 20 nt, Artificial Sequence
  Synthetic
uuccaaaagggcuuuauaaa

SEQ ID NO: 176982 - RNA, 21 nt, Artificial Sequence
  Synthetic
auuccaaaagggcuuuauaaa

SEQ ID NO: 176983 - RNA, 22 nt, Artificial Sequence
  Synthetic
aauuccaaaagggcuuuauaaa

SEQ ID NO: 176984 - RNA, 23 nt, Artificial Sequence
  Synthetic
aaauuccaaaagggcuuuauaaa

SEQ ID NO: 176985 - RNA, 24 nt, Artificial Sequence
  Synthetic
aaaauuccaaaagggcuuuauaaa

SEQ ID NO: 176986 - RNA, 18 nt, Artificial Sequence
  Synthetic
augcaaauuaaaacuaaa

SEQ ID NO: 176987 - RNA, 19 nt, Artificial Sequence
  Synthetic
caugcaaauuaaaacuaaa

SEQ ID NO: 176988 - RNA, 20 nt, Artificial Sequence
  Synthetic
ccaugcaaauuaaaacuaaa

SEQ ID NO: 176989 - RNA, 21 nt, Artificial Sequence
  Synthetic
gccaugcaaauuaaaacuaaa

SEQ ID NO: 176990 - RNA, 22 nt, Artificial Sequence
  Synthetic
ggccaugcaaauuaaaacuaaa

SEQ ID NO: 176991 - RNA, 23 nt, Artificial Sequence
  Synthetic
aggccaugcaaauuaaaacuaaa

SEQ ID NO: 176992 - RNA, 24 nt, Artificial Sequence
  Synthetic
caggccaugcaaauuaaaacuaaa

SEQ ID NO: 176993 - RNA, 18 nt, Artificial Sequence
  Synthetic
acagccaagagaacuaaa

SEQ ID NO: 176994 - RNA, 19 nt, Artificial Sequence
  Synthetic
aacagccaagagaacuaaa

SEQ ID NO: 176995 - RNA, 20 nt, Artificial Sequence
  Synthetic
uaacagccaagagaacuaaa

SEQ ID NO: 176996 - RNA, 21 nt, Artificial Sequence
  Synthetic
guaacagccaagagaacuaaa

SEQ ID NO: 176997 - RNA, 22 nt, Artificial Sequence
  Synthetic
aguaacagccaagagaacuaaa

SEQ ID NO: 176998 - RNA, 23 nt, Artificial Sequence
  Synthetic
uaguaacagccaagagaacuaaa

SEQ ID NO: 176999 - RNA, 24 nt, Artificial Sequence
  Synthetic
uuaguaacagccaagagaacuaaa

SEQ ID NO: 177000 - RNA, 18 nt, Artificial Sequence
  Synthetic
uaaguuagaauaacuaaa

SEQ ID NO: 177001 - RNA, 19 nt, Artificial Sequence
  Synthetic
auaaguuagaauaacuaaa

SEQ ID NO: 177002 - RNA, 20 nt, Artificial Sequence
  Synthetic
cauaaguuagaauaacuaaa

SEQ ID NO: 177003 - RNA, 21 nt, Artificial Sequence
  Synthetic
acauaaguuagaauaacuaaa

SEQ ID NO: 177004 - RNA, 22 nt, Artificial Sequence
  Synthetic
uacauaaguuagaauaacuaaa

SEQ ID NO: 177005 - RNA, 23 nt, Artificial Sequence
  Synthetic
uuacauaaguuagaauaacuaaa

SEQ ID NO: 177006 - RNA, 24 nt, Artificial Sequence
  Synthetic
auuacauaaguuagaauaacuaaa

SEQ ID NO: 177007 - RNA, 18 nt, Artificial Sequence
  Synthetic
ugccuuaauguaacuaaa

SEQ ID NO: 177008 - RNA, 19 nt, Artificial Sequence
  Synthetic
uugccuuaauguaacuaaa

SEQ ID NO: 177009 - RNA, 20 nt, Artificial Sequence
  Synthetic
uuugccuuaauguaacuaaa

SEQ ID NO: 177010 - RNA, 21 nt, Artificial Sequence
  Synthetic
uuuugccuuaauguaacuaaa

SEQ ID NO: 177011 - RNA, 22 nt, Artificial Sequence
  Synthetic
uuuuugccuuaauguaacuaaa

SEQ ID NO: 177012 - RNA, 23 nt, Artificial Sequence
  Synthetic
cuuuuugccuuaauguaacuaaa

SEQ ID NO: 177013 - RNA, 24 nt, Artificial Sequence
  Synthetic
gcuuuuugccuuaauguaacuaaa

SEQ ID NO: 177014 - RNA, 18 nt, Artificial Sequence
  Synthetic
aaauuauugaacacuaaa

SEQ ID NO: 177015 - RNA, 19 nt, Artificial Sequence
  Synthetic
uaaauuauugaacacuaaa

SEQ ID NO: 177016 - RNA, 20 nt, Artificial Sequence
  Synthetic
auaaauuauugaacacuaaa

SEQ ID NO: 177017 - RNA, 21 nt, Artificial Sequence
  Synthetic
uauaaauuauugaacacuaaa

SEQ ID NO: 177018 - RNA, 22 nt, Artificial Sequence
  Synthetic
auauaaauuauugaacacuaaa

SEQ ID NO: 177019 - RNA, 23 nt, Artificial Sequence
  Synthetic
uauauaaauuauugaacacuaaa

SEQ ID NO: 177020 - RNA, 24 nt, Artificial Sequence
  Synthetic
auauauaaauuauugaacacuaaa

SEQ ID NO: 177021 - RNA, 18 nt, Artificial Sequence
  Synthetic
ggagucagucacacuaaa

SEQ ID NO: 177022 - RNA, 19 nt, Artificial Sequence
  Synthetic
uggagucagucacacuaaa

SEQ ID NO: 177023 - RNA, 20 nt, Artificial Sequence
  Synthetic
uuggagucagucacacuaaa

SEQ ID NO: 177024 - RNA, 21 nt, Artificial Sequence
  Synthetic
guuggagucagucacacuaaa

SEQ ID NO: 177025 - RNA, 22 nt, Artificial Sequence
  Synthetic
uguuggagucagucacacuaaa

SEQ ID NO: 177026 - RNA, 23 nt, Artificial Sequence
  Synthetic
uuguuggagucagucacacuaaa

SEQ ID NO: 177027 - RNA, 24 nt, Artificial Sequence
  Synthetic
uuuguuggagucagucacacuaaa

SEQ ID NO: 177028 - RNA, 18 nt, Artificial Sequence
  Synthetic
ucuuuaaccuucacuaaa

SEQ ID NO: 177029 - RNA, 19 nt, Artificial Sequence
  Synthetic
cucuuuaaccuucacuaaa

SEQ ID NO: 177030 - RNA, 20 nt, Artificial Sequence
  Synthetic
ucucuuuaaccuucacuaaa

SEQ ID NO: 177031 - RNA, 21 nt, Artificial Sequence
  Synthetic
gucucuuuaaccuucacuaaa

SEQ ID NO: 177032 - RNA, 22 nt, Artificial Sequence
  Synthetic
ugucucuuuaaccuucacuaaa

SEQ ID NO: 177033 - RNA, 23 nt, Artificial Sequence
  Synthetic
augucucuuuaaccuucacuaaa

SEQ ID NO: 177034 - RNA, 24 nt, Artificial Sequence
  Synthetic
gaugucucuuuaaccuucacuaaa

SEQ ID NO: 177035 - RNA, 18 nt, Artificial Sequence
  Synthetic
cuguuacaauagacuaaa

SEQ ID NO: 177036 - RNA, 19 nt, Artificial Sequence
  Synthetic
ucuguuacaauagacuaaa

SEQ ID NO: 177037 - RNA, 20 nt, Artificial Sequence
  Synthetic
cucuguuacaauagacuaaa

SEQ ID NO: 177038 - RNA, 21 nt, Artificial Sequence
  Synthetic
ccucuguuacaauagacuaaa

SEQ ID NO: 177039 - RNA, 22 nt, Artificial Sequence
  Synthetic
uccucuguuacaauagacuaaa

SEQ ID NO: 177040 - RNA, 23 nt, Artificial Sequence
  Synthetic
cuccucuguuacaauagacuaaa

SEQ ID NO: 177041 - RNA, 24 nt, Artificial Sequence
  Synthetic
gcuccucuguuacaauagacuaaa

SEQ ID NO: 177042 - RNA, 18 nt, Artificial Sequence
  Synthetic
guugauagaacuacuaaa

SEQ ID NO: 177043 - RNA, 19 nt, Artificial Sequence
  Synthetic
aguugauagaacuacuaaa

SEQ ID NO: 177044 - RNA, 20 nt, Artificial Sequence
  Synthetic
caguugauagaacuacuaaa

SEQ ID NO: 177045 - RNA, 21 nt, Artificial Sequence
  Synthetic
ucaguugauagaacuacuaaa

SEQ ID NO: 177046 - RNA, 22 nt, Artificial Sequence
  Synthetic
uucaguugauagaacuacuaaa

SEQ ID NO: 177047 - RNA, 23 nt, Artificial Sequence
  Synthetic
cuucaguugauagaacuacuaaa

SEQ ID NO: 177048 - RNA, 24 nt, Artificial Sequence
  Synthetic
ucuucaguugauagaacuacuaaa

SEQ ID NO: 177049 - RNA, 18 nt, Artificial Sequence
  Synthetic
ccuucaacuccuacuaaa

SEQ ID NO: 177050 - RNA, 19 nt, Artificial Sequence
  Synthetic
accuucaacuccuacuaaa

SEQ ID NO: 177051 - RNA, 20 nt, Artificial Sequence
  Synthetic
caccuucaacuccuacuaaa

SEQ ID NO: 177052 - RNA, 21 nt, Artificial Sequence
  Synthetic
gcaccuucaacuccuacuaaa

SEQ ID NO: 177053 - RNA, 22 nt, Artificial Sequence
  Synthetic
ugcaccuucaacuccuacuaaa

SEQ ID NO: 177054 - RNA, 23 nt, Artificial Sequence
  Synthetic
augcaccuucaacuccuacuaaa

SEQ ID NO: 177055 - RNA, 24 nt, Artificial Sequence
  Synthetic
aaugcaccuucaacuccuacuaaa

SEQ ID NO: 177056 - RNA, 18 nt, Artificial Sequence
  Synthetic
ugugugaucucuacuaaa

SEQ ID NO: 177057 - RNA, 19 nt, Artificial Sequence
  Synthetic
uugugugaucucuacuaaa

SEQ ID NO: 177058 - RNA, 20 nt, Artificial Sequence
  Synthetic
uuugugugaucucuacuaaa

SEQ ID NO: 177059 - RNA, 21 nt, Artificial Sequence
  Synthetic
auuugugugaucucuacuaaa

SEQ ID NO: 177060 - RNA, 22 nt, Artificial Sequence
  Synthetic
aauuugugugaucucuacuaaa

SEQ ID NO: 177061 - RNA, 23 nt, Artificial Sequence
  Synthetic
aaauuugugugaucucuacuaaa

SEQ ID NO: 177062 - RNA, 24 nt, Artificial Sequence
  Synthetic
aaaauuugugugaucucuacuaaa

SEQ ID NO: 177063 - RNA, 18 nt, Artificial Sequence
  Synthetic
ucaaauuauuuuacuaaa

SEQ ID NO: 177064 - RNA, 19 nt, Artificial Sequence
  Synthetic
cucaaauuauuuuacuaaa

SEQ ID NO: 177065 - RNA, 20 nt, Artificial Sequence
  Synthetic
ucucaaauuauuuuacuaaa

SEQ ID NO: 177066 - RNA, 21 nt, Artificial Sequence
  Synthetic
gucucaaauuauuuuacuaaa

SEQ ID NO: 177067 - RNA, 22 nt, Artificial Sequence
  Synthetic
ugucucaaauuauuuuacuaaa

SEQ ID NO: 177068 - RNA, 23 nt, Artificial Sequence
  Synthetic
gugucucaaauuauuuuacuaaa

SEQ ID NO: 177069 - RNA, 24 nt, Artificial Sequence
  Synthetic
agugucucaaauuauuuuacuaaa

SEQ ID NO: 177070 - RNA, 18 nt, Artificial Sequence
  Synthetic
ugggugcaauaaccuaaa

SEQ ID NO: 177071 - RNA, 19 nt, Artificial Sequence
  Synthetic
gugggugcaauaaccuaaa

SEQ ID NO: 177072 - RNA, 20 nt, Artificial Sequence
  Synthetic
agugggugcaauaaccuaaa

SEQ ID NO: 177073 - RNA, 21 nt, Artificial Sequence
  Synthetic
gagugggugcaauaaccuaaa

SEQ ID NO: 177074 - RNA, 22 nt, Artificial Sequence
  Synthetic
ugagugggugcaauaaccuaaa

SEQ ID NO: 177075 - RNA, 23 nt, Artificial Sequence
  Synthetic
gugagugggugcaauaaccuaaa

SEQ ID NO: 177076 - RNA, 24 nt, Artificial Sequence
  Synthetic
ugugagugggugcaauaaccuaaa

SEQ ID NO: 177077 - RNA, 18 nt, Artificial Sequence
  Synthetic
cuacaucaggcaccuaaa

SEQ ID NO: 177078 - RNA, 19 nt, Artificial Sequence
  Synthetic
acuacaucaggcaccuaaa

SEQ ID NO: 177079 - RNA, 20 nt, Artificial Sequence
  Synthetic
uacuacaucaggcaccuaaa

SEQ ID NO: 177080 - RNA, 21 nt, Artificial Sequence
  Synthetic
uuacuacaucaggcaccuaaa

SEQ ID NO: 177081 - RNA, 22 nt, Artificial Sequence
  Synthetic
uuuacuacaucaggcaccuaaa

SEQ ID NO: 177082 - RNA, 23 nt, Artificial Sequence
  Synthetic
guuuacuacaucaggcaccuaaa

SEQ ID NO: 177083 - RNA, 24 nt, Artificial Sequence
  Synthetic
gguuuacuacaucaggcaccuaaa

SEQ ID NO: 177084 - RNA, 18 nt, Artificial Sequence
  Synthetic
uacauugugucaccuaaa

SEQ ID NO: 177085 - RNA, 19 nt, Artificial Sequence
  Synthetic
guacauugugucaccuaaa

SEQ ID NO: 177086 - RNA, 20 nt, Artificial Sequence
  Synthetic
uguacauugugucaccuaaa

SEQ ID NO: 177087 - RNA, 21 nt, Artificial Sequence
  Synthetic
auguacauugugucaccuaaa

SEQ ID NO: 177088 - RNA, 22 nt, Artificial Sequence
  Synthetic
aauguacauugugucaccuaaa

SEQ ID NO: 177089 - RNA, 23 nt, Artificial Sequence
  Synthetic
aaauguacauugugucaccuaaa

SEQ ID NO: 177090 - RNA, 24 nt, Artificial Sequence
  Synthetic
aaaauguacauugugucaccuaaa

SEQ ID NO: 177091 - RNA, 18 nt, Artificial Sequence
  Synthetic
ucuagcuagauaccuaaa

SEQ ID NO: 177092 - RNA, 19 nt, Artificial Sequence
  Synthetic
gucuagcuagauaccuaaa

SEQ ID NO: 177093 - RNA, 20 nt, Artificial Sequence
  Synthetic
agucuagcuagauaccuaaa

SEQ ID NO: 177094 - RNA, 21 nt, Artificial Sequence
  Synthetic
aagucuagcuagauaccuaaa

SEQ ID NO: 177095 - RNA, 22 nt, Artificial Sequence
  Synthetic
gaagucuagcuagauaccuaaa

SEQ ID NO: 177096 - RNA, 23 nt, Artificial Sequence
  Synthetic
ugaagucuagcuagauaccuaaa

SEQ ID NO: 177097 - RNA, 24 nt, Artificial Sequence
  Synthetic
augaagucuagcuagauaccuaaa

SEQ ID NO: 177098 - RNA, 18 nt, Artificial Sequence
  Synthetic
uuccaauuucccccuaaa

SEQ ID NO: 177099 - RNA, 19 nt, Artificial Sequence
  Synthetic
uuuccaauuucccccuaaa

SEQ ID NO: 177100 - RNA, 20 nt, Artificial Sequence
  Synthetic
cuuuccaauuucccccuaaa

SEQ ID NO: 177101 - RNA, 21 nt, Artificial Sequence
  Synthetic
ucuuuccaauuucccccuaaa

SEQ ID NO: 177102 - RNA, 22 nt, Artificial Sequence
  Synthetic
aucuuuccaauuucccccuaaa

SEQ ID NO: 177103 - RNA, 23 nt, Artificial Sequence
  Synthetic
aaucuuuccaauuucccccuaaa

SEQ ID NO: 177104 - RNA, 24 nt, Artificial Sequence
  Synthetic
uaaucuuuccaauuucccccuaaa

SEQ ID NO: 177105 - RNA, 18 nt, Artificial Sequence
  Synthetic
aaucucuccagcccuaaa

SEQ ID NO: 177106 - RNA, 19 nt, Artificial Sequence
  Synthetic
caaucucuccagcccuaaa

SEQ ID NO: 177107 - RNA, 20 nt, Artificial Sequence
  Synthetic
ucaaucucuccagcccuaaa

SEQ ID NO: 177108 - RNA, 21 nt, Artificial Sequence
  Synthetic
aucaaucucuccagcccuaaa

SEQ ID NO: 177109 - RNA, 22 nt, Artificial Sequence
  Synthetic
aaucaaucucuccagcccuaaa

SEQ ID NO: 177110 - RNA, 23 nt, Artificial Sequence
  Synthetic
gaaucaaucucuccagcccuaaa

SEQ ID NO: 177111 - RNA, 24 nt, Artificial Sequence
  Synthetic
agaaucaaucucuccagcccuaaa

SEQ ID NO: 177112 - RNA, 18 nt, Artificial Sequence
  Synthetic
ggauaaaguugcccuaaa

SEQ ID NO: 177113 - RNA, 19 nt, Artificial Sequence
  Synthetic
gggauaaaguugcccuaaa

SEQ ID NO: 177114 - RNA, 20 nt, Artificial Sequence
  Synthetic
agggauaaaguugcccuaaa

SEQ ID NO: 177115 - RNA, 21 nt, Artificial Sequence
  Synthetic
aagggauaaaguugcccuaaa

SEQ ID NO: 177116 - RNA, 22 nt, Artificial Sequence
  Synthetic
gaagggauaaaguugcccuaaa

SEQ ID NO: 177117 - RNA, 23 nt, Artificial Sequence
  Synthetic
ggaagggauaaaguugcccuaaa

SEQ ID NO: 177118 - RNA, 24 nt, Artificial Sequence
  Synthetic
uggaagggauaaaguugcccuaaa

SEQ ID NO: 177119 - RNA, 18 nt, Artificial Sequence
  Synthetic
gagaugaaaaagccuaaa

SEQ ID NO: 177120 - RNA, 19 nt, Artificial Sequence
  Synthetic
ggagaugaaaaagccuaaa

SEQ ID NO: 177121 - RNA, 20 nt, Artificial Sequence
  Synthetic
aggagaugaaaaagccuaaa

SEQ ID NO: 177122 - RNA, 21 nt, Artificial Sequence
  Synthetic
uaggagaugaaaaagccuaaa

SEQ ID NO: 177123 - RNA, 22 nt, Artificial Sequence
  Synthetic
cuaggagaugaaaaagccuaaa

SEQ ID NO: 177124 - RNA, 23 nt, Artificial Sequence
  Synthetic
ccuaggagaugaaaaagccuaaa

SEQ ID NO: 177125 - RNA, 24 nt, Artificial Sequence
  Synthetic
accuaggagaugaaaaagccuaaa

SEQ ID NO: 177126 - RNA, 18 nt, Artificial Sequence
  Synthetic
agagaguaauagccuaaa

SEQ ID NO: 177127 - RNA, 19 nt, Artificial Sequence
  Synthetic
gagagaguaauagccuaaa

SEQ ID NO: 177128 - RNA, 20 nt, Artificial Sequence
  Synthetic
agagagaguaauagccuaaa

SEQ ID NO: 177129 - RNA, 21 nt, Artificial Sequence
  Synthetic
aagagagaguaauagccuaaa

SEQ ID NO: 177130 - RNA, 22 nt, Artificial Sequence
  Synthetic
aaagagagaguaauagccuaaa

SEQ ID NO: 177131 - RNA, 23 nt, Artificial Sequence
  Synthetic
gaaagagagaguaauagccuaaa

SEQ ID NO: 177132 - RNA, 24 nt, Artificial Sequence
  Synthetic
agaaagagagaguaauagccuaaa

SEQ ID NO: 177133 - RNA, 18 nt, Artificial Sequence
  Synthetic
auucacacauagccuaaa

SEQ ID NO: 177134 - RNA, 19 nt, Artificial Sequence
  Synthetic
uauucacacauagccuaaa

SEQ ID NO: 177135 - RNA, 20 nt, Artificial Sequence
  Synthetic
auauucacacauagccuaaa

SEQ ID NO: 177136 - RNA, 21 nt, Artificial Sequence
  Synthetic
gauauucacacauagccuaaa

SEQ ID NO: 177137 - RNA, 22 nt, Artificial Sequence
  Synthetic
ggauauucacacauagccuaaa

SEQ ID NO: 177138 - RNA, 23 nt, Artificial Sequence
  Synthetic
uggauauucacacauagccuaaa

SEQ ID NO: 177139 - RNA, 24 nt, Artificial Sequence
  Synthetic
uuggauauucacacauagccuaaa

SEQ ID NO: 177140 - RNA, 18 nt, Artificial Sequence
  Synthetic
caagcccagaggccuaaa

SEQ ID NO: 177141 - RNA, 19 nt, Artificial Sequence
  Synthetic
acaagcccagaggccuaaa

SEQ ID NO: 177142 - RNA, 20 nt, Artificial Sequence
  Synthetic
cacaagcccagaggccuaaa

SEQ ID NO: 177143 - RNA, 21 nt, Artificial Sequence
  Synthetic
ucacaagcccagaggccuaaa

SEQ ID NO: 177144 - RNA, 22 nt, Artificial Sequence
  Synthetic
aucacaagcccagaggccuaaa

SEQ ID NO: 177145 - RNA, 23 nt, Artificial Sequence
  Synthetic
caucacaagcccagaggccuaaa

SEQ ID NO: 177146 - RNA, 24 nt, Artificial Sequence
  Synthetic
ccaucacaagcccagaggccuaaa

SEQ ID NO: 177147 - RNA, 18 nt, Artificial Sequence
  Synthetic
auguguagauggccuaaa

SEQ ID NO: 177148 - RNA, 19 nt, Artificial Sequence
  Synthetic
uauguguagauggccuaaa

SEQ ID NO: 177149 - RNA, 20 nt, Artificial Sequence
  Synthetic
uuauguguagauggccuaaa

SEQ ID NO: 177150 - RNA, 21 nt, Artificial Sequence
  Synthetic
uuuauguguagauggccuaaa

SEQ ID NO: 177151 - RNA, 22 nt, Artificial Sequence
  Synthetic
uuuuauguguagauggccuaaa

SEQ ID NO: 177152 - RNA, 23 nt, Artificial Sequence
  Synthetic
cuuuuauguguagauggccuaaa

SEQ ID NO: 177153 - RNA, 24 nt, Artificial Sequence
  Synthetic
gcuuuuauguguagauggccuaaa

SEQ ID NO: 177154 - RNA, 18 nt, Artificial Sequence
  Synthetic
cuucguaguaauccuaaa

SEQ ID NO: 177155 - RNA, 19 nt, Artificial Sequence
  Synthetic
ucuucguaguaauccuaaa

SEQ ID NO: 177156 - RNA, 20 nt, Artificial Sequence
  Synthetic
uucuucguaguaauccuaaa

SEQ ID NO: 177157 - RNA, 21 nt, Artificial Sequence
  Synthetic
cuucuucguaguaauccuaaa

SEQ ID NO: 177158 - RNA, 22 nt, Artificial Sequence
  Synthetic
gcuucuucguaguaauccuaaa

SEQ ID NO: 177159 - RNA, 23 nt, Artificial Sequence
  Synthetic
agcuucuucguaguaauccuaaa

SEQ ID NO: 177160 - RNA, 24 nt, Artificial Sequence
  Synthetic
gagcuucuucguaguaauccuaaa

SEQ ID NO: 177161 - RNA, 18 nt, Artificial Sequence
  Synthetic
uuugagagacauccuaaa

SEQ ID NO: 177162 - RNA, 19 nt, Artificial Sequence
  Synthetic
cuuugagagacauccuaaa

SEQ ID NO: 177163 - RNA, 20 nt, Artificial Sequence
  Synthetic
gcuuugagagacauccuaaa

SEQ ID NO: 177164 - RNA, 21 nt, Artificial Sequence
  Synthetic
agcuuugagagacauccuaaa

SEQ ID NO: 177165 - RNA, 22 nt, Artificial Sequence
  Synthetic
uagcuuugagagacauccuaaa

SEQ ID NO: 177166 - RNA, 23 nt, Artificial Sequence
  Synthetic
uuagcuuugagagacauccuaaa

SEQ ID NO: 177167 - RNA, 24 nt, Artificial Sequence
  Synthetic
uuuagcuuugagagacauccuaaa

SEQ ID NO: 177168 - RNA, 18 nt, Artificial Sequence
  Synthetic
ucaagcuaauauccuaaa

SEQ ID NO: 177169 - RNA, 19 nt, Artificial Sequence
  Synthetic
cucaagcuaauauccuaaa

SEQ ID NO: 177170 - RNA, 20 nt, Artificial Sequence
  Synthetic
acucaagcuaauauccuaaa

SEQ ID NO: 177171 - RNA, 21 nt, Artificial Sequence
  Synthetic
uacucaagcuaauauccuaaa

SEQ ID NO: 177172 - RNA, 22 nt, Artificial Sequence
  Synthetic
cuacucaagcuaauauccuaaa

SEQ ID NO: 177173 - RNA, 23 nt, Artificial Sequence
  Synthetic
ucuacucaagcuaauauccuaaa

SEQ ID NO: 177174 - RNA, 24 nt, Artificial Sequence
  Synthetic
uucuacucaagcuaauauccuaaa

SEQ ID NO: 177175 - RNA, 18 nt, Artificial Sequence
  Synthetic
ugaaagagauguccuaaa

SEQ ID NO: 177176 - RNA, 19 nt, Artificial Sequence
  Synthetic
augaaagagauguccuaaa

SEQ ID NO: 177177 - RNA, 20 nt, Artificial Sequence
  Synthetic
uaugaaagagauguccuaaa

SEQ ID NO: 177178 - RNA, 21 nt, Artificial Sequence
  Synthetic
auaugaaagagauguccuaaa

SEQ ID NO: 177179 - RNA, 22 nt, Artificial Sequence
  Synthetic
cauaugaaagagauguccuaaa

SEQ ID NO: 177180 - RNA, 23 nt, Artificial Sequence
  Synthetic
acauaugaaagagauguccuaaa

SEQ ID NO: 177181 - RNA, 24 nt, Artificial Sequence
  Synthetic
cacauaugaaagagauguccuaaa

SEQ ID NO: 177182 - RNA, 18 nt, Artificial Sequence
  Synthetic
ggaaguggaauuccuaaa

SEQ ID NO: 177183 - RNA, 19 nt, Artificial Sequence
  Synthetic
gggaaguggaauuccuaaa

SEQ ID NO: 177184 - RNA, 20 nt, Artificial Sequence
  Synthetic
ugggaaguggaauuccuaaa

SEQ ID NO: 177185 - RNA, 21 nt, Artificial Sequence
  Synthetic
gugggaaguggaauuccuaaa

SEQ ID NO: 177186 - RNA, 22 nt, Artificial Sequence
  Synthetic
agugggaaguggaauuccuaaa

SEQ ID NO: 177187 - RNA, 23 nt, Artificial Sequence
  Synthetic
cagugggaaguggaauuccuaaa

SEQ ID NO: 177188 - RNA, 24 nt, Artificial Sequence
  Synthetic
gcagugggaaguggaauuccuaaa

SEQ ID NO: 177189 - RNA, 18 nt, Artificial Sequence
  Synthetic
auguuaaauauuccuaaa

SEQ ID NO: 177190 - RNA, 19 nt, Artificial Sequence
  Synthetic
uauguuaaauauuccuaaa

SEQ ID NO: 177191 - RNA, 20 nt, Artificial Sequence
  Synthetic
auauguuaaauauuccuaaa

SEQ ID NO: 177192 - RNA, 21 nt, Artificial Sequence
  Synthetic
uauauguuaaauauuccuaaa

SEQ ID NO: 177193 - RNA, 22 nt, Artificial Sequence
  Synthetic
uuauauguuaaauauuccuaaa

SEQ ID NO: 177194 - RNA, 23 nt, Artificial Sequence
  Synthetic
auuauauguuaaauauuccuaaa

SEQ ID NO: 177195 - RNA, 24 nt, Artificial Sequence
  Synthetic
uauuauauguuaaauauuccuaaa

SEQ ID NO: 177196 - RNA, 18 nt, Artificial Sequence
  Synthetic
gcuucauugaaagcuaaa

SEQ ID NO: 177197 - RNA, 19 nt, Artificial Sequence
  Synthetic
ugcuucauugaaagcuaaa

SEQ ID NO: 177198 - RNA, 20 nt, Artificial Sequence
  Synthetic
gugcuucauugaaagcuaaa

SEQ ID NO: 177199 - RNA, 21 nt, Artificial Sequence
  Synthetic
ugugcuucauugaaagcuaaa

SEQ ID NO: 177200 - RNA, 22 nt, Artificial Sequence
  Synthetic
uugugcuucauugaaagcuaaa

SEQ ID NO: 177201 - RNA, 23 nt, Artificial Sequence
  Synthetic
auugugcuucauugaaagcuaaa

SEQ ID NO: 177202 - RNA, 24 nt, Artificial Sequence
  Synthetic
gauugugcuucauugaaagcuaaa

SEQ ID NO: 177203 - RNA, 18 nt, Artificial Sequence
  Synthetic
ucaagagaccaagcuaaa

SEQ ID NO: 177204 - RNA, 19 nt, Artificial Sequence
  Synthetic
uucaagagaccaagcuaaa

SEQ ID NO: 177205 - RNA, 20 nt, Artificial Sequence
  Synthetic
guucaagagaccaagcuaaa

SEQ ID NO: 177206 - RNA, 21 nt, Artificial Sequence
  Synthetic
uguucaagagaccaagcuaaa

SEQ ID NO: 177207 - RNA, 22 nt, Artificial Sequence
  Synthetic
auguucaagagaccaagcuaaa

SEQ ID NO: 177208 - RNA, 23 nt, Artificial Sequence
  Synthetic
gauguucaagagaccaagcuaaa

SEQ ID NO: 177209 - RNA, 24 nt, Artificial Sequence
  Synthetic
agauguucaagagaccaagcuaaa

SEQ ID NO: 177210 - RNA, 18 nt, Artificial Sequence
  Synthetic
cucucgauagaagcuaaa

SEQ ID NO: 177211 - RNA, 19 nt, Artificial Sequence
  Synthetic
ucucucgauagaagcuaaa

SEQ ID NO: 177212 - RNA, 20 nt, Artificial Sequence
  Synthetic
gucucucgauagaagcuaaa

SEQ ID NO: 177213 - RNA, 21 nt, Artificial Sequence
  Synthetic
agucucucgauagaagcuaaa

SEQ ID NO: 177214 - RNA, 22 nt, Artificial Sequence
  Synthetic
cagucucucgauagaagcuaaa

SEQ ID NO: 177215 - RNA, 23 nt, Artificial Sequence
  Synthetic
acagucucucgauagaagcuaaa

SEQ ID NO: 177216 - RNA, 24 nt, Artificial Sequence
  Synthetic
cacagucucucgauagaagcuaaa

SEQ ID NO: 177217 - RNA, 18 nt, Artificial Sequence
  Synthetic
uaauaugugacagcuaaa

SEQ ID NO: 177218 - RNA, 19 nt, Artificial Sequence
  Synthetic
auaauaugugacagcuaaa

SEQ ID NO: 177219 - RNA, 20 nt, Artificial Sequence
  Synthetic
cauaauaugugacagcuaaa

SEQ ID NO: 177220 - RNA, 21 nt, Artificial Sequence
  Synthetic
ucauaauaugugacagcuaaa

SEQ ID NO: 177221 - RNA, 22 nt, Artificial Sequence
  Synthetic
gucauaauaugugacagcuaaa

SEQ ID NO: 177222 - RNA, 23 nt, Artificial Sequence
  Synthetic
ggucauaauaugugacagcuaaa

SEQ ID NO: 177223 - RNA, 24 nt, Artificial Sequence
  Synthetic
aggucauaauaugugacagcuaaa

SEQ ID NO: 177224 - RNA, 18 nt, Artificial Sequence
  Synthetic
uuuuccaauccagcuaaa

SEQ ID NO: 177225 - RNA, 19 nt, Artificial Sequence
  Synthetic
uuuuuccaauccagcuaaa

SEQ ID NO: 177226 - RNA, 20 nt, Artificial Sequence
  Synthetic
guuuuuccaauccagcuaaa

SEQ ID NO: 177227 - RNA, 21 nt, Artificial Sequence
  Synthetic
uguuuuuccaauccagcuaaa

SEQ ID NO: 177228 - RNA, 22 nt, Artificial Sequence
  Synthetic
uuguuuuuccaauccagcuaaa

SEQ ID NO: 177229 - RNA, 23 nt, Artificial Sequence
  Synthetic
uuuguuuuuccaauccagcuaaa

SEQ ID NO: 177230 - RNA, 24 nt, Artificial Sequence
  Synthetic
auuuguuuuuccaauccagcuaaa

SEQ ID NO: 177231 - RNA, 18 nt, Artificial Sequence
  Synthetic
uucaguauuucagcuaaa

SEQ ID NO: 177232 - RNA, 19 nt, Artificial Sequence
  Synthetic
uuucaguauuucagcuaaa

SEQ ID NO: 177233 - RNA, 20 nt, Artificial Sequence
  Synthetic
auuucaguauuucagcuaaa

SEQ ID NO: 177234 - RNA, 21 nt, Artificial Sequence
  Synthetic
aauuucaguauuucagcuaaa

SEQ ID NO: 177235 - RNA, 22 nt, Artificial Sequence
  Synthetic
caauuucaguauuucagcuaaa

SEQ ID NO: 177236 - RNA, 23 nt, Artificial Sequence
  Synthetic
gcaauuucaguauuucagcuaaa

SEQ ID NO: 177237 - RNA, 24 nt, Artificial Sequence
  Synthetic
ugcaauuucaguauuucagcuaaa

SEQ ID NO: 177238 - RNA, 18 nt, Artificial Sequence
  Synthetic
ggauuuaagggagcuaaa

SEQ ID NO: 177239 - RNA, 19 nt, Artificial Sequence
  Synthetic
aggauuuaagggagcuaaa

SEQ ID NO: 177240 - RNA, 20 nt, Artificial Sequence
  Synthetic
aaggauuuaagggagcuaaa

SEQ ID NO: 177241 - RNA, 21 nt, Artificial Sequence
  Synthetic
gaaggauuuaagggagcuaaa

SEQ ID NO: 177242 - RNA, 22 nt, Artificial Sequence
  Synthetic
ugaaggauuuaagggagcuaaa

SEQ ID NO: 177243 - RNA, 23 nt, Artificial Sequence
  Synthetic
cugaaggauuuaagggagcuaaa

SEQ ID NO: 177244 - RNA, 24 nt, Artificial Sequence
  Synthetic
gcugaaggauuuaagggagcuaaa

SEQ ID NO: 177245 - RNA, 18 nt, Artificial Sequence
  Synthetic
gaucaccgcauagcuaaa

SEQ ID NO: 177246 - RNA, 19 nt, Artificial Sequence
  Synthetic
agaucaccgcauagcuaaa

SEQ ID NO: 177247 - RNA, 20 nt, Artificial Sequence
  Synthetic
uagaucaccgcauagcuaaa

SEQ ID NO: 177248 - RNA, 21 nt, Artificial Sequence
  Synthetic
auagaucaccgcauagcuaaa

SEQ ID NO: 177249 - RNA, 22 nt, Artificial Sequence
  Synthetic
aauagaucaccgcauagcuaaa

SEQ ID NO: 177250 - RNA, 23 nt, Artificial Sequence
  Synthetic
aaauagaucaccgcauagcuaaa

SEQ ID NO: 177251 - RNA, 24 nt, Artificial Sequence
  Synthetic
gaaauagaucaccgcauagcuaaa

SEQ ID NO: 177252 - RNA, 18 nt, Artificial Sequence
  Synthetic
gccacaauauuagcuaaa

SEQ ID NO: 177253 - RNA, 19 nt, Artificial Sequence
  Synthetic
ugccacaauauuagcuaaa

SEQ ID NO: 177254 - RNA, 20 nt, Artificial Sequence
  Synthetic
uugccacaauauuagcuaaa

SEQ ID NO: 177255 - RNA, 21 nt, Artificial Sequence
  Synthetic
uuugccacaauauuagcuaaa

SEQ ID NO: 177256 - RNA, 22 nt, Artificial Sequence
  Synthetic
auuugccacaauauuagcuaaa

SEQ ID NO: 177257 - RNA, 23 nt, Artificial Sequence
  Synthetic
cauuugccacaauauuagcuaaa

SEQ ID NO: 177258 - RNA, 24 nt, Artificial Sequence
  Synthetic
acauuugccacaauauuagcuaaa

SEQ ID NO: 177259 - RNA, 18 nt, Artificial Sequence
  Synthetic
guggcauacuuagcuaaa

SEQ ID NO: 177260 - RNA, 19 nt, Artificial Sequence
  Synthetic
uguggcauacuuagcuaaa

SEQ ID NO: 177261 - RNA, 20 nt, Artificial Sequence
  Synthetic
uuguggcauacuuagcuaaa

SEQ ID NO: 177262 - RNA, 21 nt, Artificial Sequence
  Synthetic
cuuguggcauacuuagcuaaa

SEQ ID NO: 177263 - RNA, 22 nt, Artificial Sequence
  Synthetic
acuuguggcauacuuagcuaaa

SEQ ID NO: 177264 - RNA, 23 nt, Artificial Sequence
  Synthetic
aacuuguggcauacuuagcuaaa

SEQ ID NO: 177265 - RNA, 24 nt, Artificial Sequence
  Synthetic
gaacuuguggcauacuuagcuaaa

SEQ ID NO: 177266 - RNA, 18 nt, Artificial Sequence
  Synthetic
agugcugugaaugcuaaa

SEQ ID NO: 177267 - RNA, 19 nt, Artificial Sequence
  Synthetic
cagugcugugaaugcuaaa

SEQ ID NO: 177268 - RNA, 20 nt, Artificial Sequence
  Synthetic
ccagugcugugaaugcuaaa

SEQ ID NO: 177269 - RNA, 21 nt, Artificial Sequence
  Synthetic
uccagugcugugaaugcuaaa

SEQ ID NO: 177270 - RNA, 22 nt, Artificial Sequence
  Synthetic
auccagugcugugaaugcuaaa

SEQ ID NO: 177271 - RNA, 23 nt, Artificial Sequence
  Synthetic
gauccagugcugugaaugcuaaa

SEQ ID NO: 177272 - RNA, 24 nt, Artificial Sequence
  Synthetic
agauccagugcugugaaugcuaaa

SEQ ID NO: 177273 - RNA, 18 nt, Artificial Sequence
  Synthetic
aaucauuccuaugcuaaa

SEQ ID NO: 177274 - RNA, 19 nt, Artificial Sequence
  Synthetic
aaaucauuccuaugcuaaa

SEQ ID NO: 177275 - RNA, 20 nt, Artificial Sequence
  Synthetic
caaaucauuccuaugcuaaa

SEQ ID NO: 177276 - RNA, 21 nt, Artificial Sequence
  Synthetic
ucaaaucauuccuaugcuaaa

SEQ ID NO: 177277 - RNA, 22 nt, Artificial Sequence
  Synthetic
uucaaaucauuccuaugcuaaa

SEQ ID NO: 177278 - RNA, 23 nt, Artificial Sequence
  Synthetic
guucaaaucauuccuaugcuaaa

SEQ ID NO: 177279 - RNA, 24 nt, Artificial Sequence
  Synthetic
gguucaaaucauuccuaugcuaaa

SEQ ID NO: 177280 - RNA, 18 nt, Artificial Sequence
  Synthetic
cuauuuuaguaugcuaaa

SEQ ID NO: 177281 - RNA, 19 nt, Artificial Sequence
  Synthetic
ucuauuuuaguaugcuaaa

SEQ ID NO: 177282 - RNA, 20 nt, Artificial Sequence
  Synthetic
uucuauuuuaguaugcuaaa

SEQ ID NO: 177283 - RNA, 21 nt, Artificial Sequence
  Synthetic
auucuauuuuaguaugcuaaa

SEQ ID NO: 177284 - RNA, 22 nt, Artificial Sequence
  Synthetic
uauucuauuuuaguaugcuaaa

SEQ ID NO: 177285 - RNA, 23 nt, Artificial Sequence
  Synthetic
uuauucuauuuuaguaugcuaaa

SEQ ID NO: 177286 - RNA, 24 nt, Artificial Sequence
  Synthetic
guuauucuauuuuaguaugcuaaa

SEQ ID NO: 177287 - RNA, 18 nt, Artificial Sequence
  Synthetic
auaaaaucuaaaucuaaa

SEQ ID NO: 177288 - RNA, 19 nt, Artificial Sequence
  Synthetic
cauaaaaucuaaaucuaaa

SEQ ID NO: 177289 - RNA, 20 nt, Artificial Sequence
  Synthetic
ucauaaaaucuaaaucuaaa

SEQ ID NO: 177290 - RNA, 21 nt, Artificial Sequence
  Synthetic
aucauaaaaucuaaaucuaaa

SEQ ID NO: 177291 - RNA, 22 nt, Artificial Sequence
  Synthetic
aaucauaaaaucuaaaucuaaa

SEQ ID NO: 177292 - RNA, 23 nt, Artificial Sequence
  Synthetic
gaaucauaaaaucuaaaucuaaa

SEQ ID NO: 177293 - RNA, 24 nt, Artificial Sequence
  Synthetic
ggaaucauaaaaucuaaaucuaaa

SEQ ID NO: 177294 - RNA, 18 nt, Artificial Sequence
  Synthetic
cuccuccugacaucuaaa

SEQ ID NO: 177295 - RNA, 19 nt, Artificial Sequence
  Synthetic
gcuccuccugacaucuaaa

SEQ ID NO: 177296 - RNA, 20 nt, Artificial Sequence
  Synthetic
ggcuccuccugacaucuaaa

SEQ ID NO: 177297 - RNA, 21 nt, Artificial Sequence
  Synthetic
aggcuccuccugacaucuaaa

SEQ ID NO: 177298 - RNA, 22 nt, Artificial Sequence
  Synthetic
aaggcuccuccugacaucuaaa

SEQ ID NO: 177299 - RNA, 23 nt, Artificial Sequence
  Synthetic
aaaggcuccuccugacaucuaaa

SEQ ID NO: 177300 - RNA, 24 nt, Artificial Sequence
  Synthetic
gaaaggcuccuccugacaucuaaa

SEQ ID NO: 177301 - RNA, 18 nt, Artificial Sequence
  Synthetic
caaaauauaugaucuaaa

SEQ ID NO: 177302 - RNA, 19 nt, Artificial Sequence
  Synthetic
ucaaaauauaugaucuaaa

SEQ ID NO: 177303 - RNA, 20 nt, Artificial Sequence
  Synthetic
uucaaaauauaugaucuaaa

SEQ ID NO: 177304 - RNA, 21 nt, Artificial Sequence
  Synthetic
uuucaaaauauaugaucuaaa

SEQ ID NO: 177305 - RNA, 22 nt, Artificial Sequence
  Synthetic
uuuucaaaauauaugaucuaaa

SEQ ID NO: 177306 - RNA, 23 nt, Artificial Sequence
  Synthetic
cuuuucaaaauauaugaucuaaa

SEQ ID NO: 177307 - RNA, 24 nt, Artificial Sequence
  Synthetic
ccuuuucaaaauauaugaucuaaa

SEQ ID NO: 177308 - RNA, 18 nt, Artificial Sequence
  Synthetic
uauauuuaaauaucuaaa

SEQ ID NO: 177309 - RNA, 19 nt, Artificial Sequence
  Synthetic
guauauuuaaauaucuaaa

SEQ ID NO: 177310 - RNA, 20 nt, Artificial Sequence
  Synthetic
uguauauuuaaauaucuaaa

SEQ ID NO: 177311 - RNA, 21 nt, Artificial Sequence
  Synthetic
cuguauauuuaaauaucuaaa

SEQ ID NO: 177312 - RNA, 22 nt, Artificial Sequence
  Synthetic
ucuguauauuuaaauaucuaaa

SEQ ID NO: 177313 - RNA, 23 nt, Artificial Sequence
  Synthetic
uucuguauauuuaaauaucuaaa

SEQ ID NO: 177314 - RNA, 24 nt, Artificial Sequence
  Synthetic
cuucuguauauuuaaauaucuaaa

SEQ ID NO: 177315 - RNA, 18 nt, Artificial Sequence
  Synthetic
cuauuucccauaucuaaa

SEQ ID NO: 177316 - RNA, 19 nt, Artificial Sequence
  Synthetic
ucuauuucccauaucuaaa

SEQ ID NO: 177317 - RNA, 20 nt, Artificial Sequence
  Synthetic
uucuauuucccauaucuaaa

SEQ ID NO: 177318 - RNA, 21 nt, Artificial Sequence
  Synthetic
uuucuauuucccauaucuaaa

SEQ ID NO: 177319 - RNA, 22 nt, Artificial Sequence
  Synthetic
auuucuauuucccauaucuaaa

SEQ ID NO: 177320 - RNA, 23 nt, Artificial Sequence
  Synthetic
aauuucuauuucccauaucuaaa

SEQ ID NO: 177321 - RNA, 24 nt, Artificial Sequence
  Synthetic
uaauuucuauuucccauaucuaaa

SEQ ID NO: 177322 - RNA, 18 nt, Artificial Sequence
  Synthetic
auuuaauagaccucuaaa

SEQ ID NO: 177323 - RNA, 19 nt, Artificial Sequence
  Synthetic
cauuuaauagaccucuaaa

SEQ ID NO: 177324 - RNA, 20 nt, Artificial Sequence
  Synthetic
ucauuuaauagaccucuaaa

SEQ ID NO: 177325 - RNA, 21 nt, Artificial Sequence
  Synthetic
gucauuuaauagaccucuaaa

SEQ ID NO: 177326 - RNA, 22 nt, Artificial Sequence
  Synthetic
ggucauuuaauagaccucuaaa

SEQ ID NO: 177327 - RNA, 23 nt, Artificial Sequence
  Synthetic
aggucauuuaauagaccucuaaa

SEQ ID NO: 177328 - RNA, 24 nt, Artificial Sequence
  Synthetic
aaggucauuuaauagaccucuaaa

SEQ ID NO: 177329 - RNA, 18 nt, Artificial Sequence
  Synthetic
cguagucucugcucuaaa

SEQ ID NO: 177330 - RNA, 19 nt, Artificial Sequence
  Synthetic
acguagucucugcucuaaa

SEQ ID NO: 177331 - RNA, 20 nt, Artificial Sequence
  Synthetic
uacguagucucugcucuaaa

SEQ ID NO: 177332 - RNA, 21 nt, Artificial Sequence
  Synthetic
guacguagucucugcucuaaa

SEQ ID NO: 177333 - RNA, 22 nt, Artificial Sequence
  Synthetic
gguacguagucucugcucuaaa

SEQ ID NO: 177334 - RNA, 23 nt, Artificial Sequence
  Synthetic
agguacguagucucugcucuaaa

SEQ ID NO: 177335 - RNA, 24 nt, Artificial Sequence
  Synthetic
uagguacguagucucugcucuaaa

SEQ ID NO: 177336 - RNA, 18 nt, Artificial Sequence
  Synthetic
uuaaauuugugcucuaaa

SEQ ID NO: 177337 - RNA, 19 nt, Artificial Sequence
  Synthetic
auuaaauuugugcucuaaa

SEQ ID NO: 177338 - RNA, 20 nt, Artificial Sequence
  Synthetic
aauuaaauuugugcucuaaa

SEQ ID NO: 177339 - RNA, 21 nt, Artificial Sequence
  Synthetic
aaauuaaauuugugcucuaaa

SEQ ID NO: 177340 - RNA, 22 nt, Artificial Sequence
  Synthetic
aaaauuaaauuugugcucuaaa

SEQ ID NO: 177341 - RNA, 23 nt, Artificial Sequence
  Synthetic
gaaaauuaaauuugugcucuaaa

SEQ ID NO: 177342 - RNA, 24 nt, Artificial Sequence
  Synthetic
agaaaauuaaauuugugcucuaaa

SEQ ID NO: 177343 - RNA, 18 nt, Artificial Sequence
  Synthetic
aaaaagacauucucuaaa

SEQ ID NO: 177344 - RNA, 19 nt, Artificial Sequence
  Synthetic
caaaaagacauucucuaaa

SEQ ID NO: 177345 - RNA, 20 nt, Artificial Sequence
  Synthetic
acaaaaagacauucucuaaa

SEQ ID NO: 177346 - RNA, 21 nt, Artificial Sequence
  Synthetic
gacaaaaagacauucucuaaa

SEQ ID NO: 177347 - RNA, 22 nt, Artificial Sequence
  Synthetic
ugacaaaaagacauucucuaaa

SEQ ID NO: 177348 - RNA, 23 nt, Artificial Sequence
  Synthetic
augacaaaaagacauucucuaaa

SEQ ID NO: 177349 - RNA, 24 nt, Artificial Sequence
  Synthetic
aaugacaaaaagacauucucuaaa

SEQ ID NO: 177350 - RNA, 18 nt, Artificial Sequence
  Synthetic
ugauuucucuucucuaaa

SEQ ID NO: 177351 - RNA, 19 nt, Artificial Sequence
  Synthetic
cugauuucucuucucuaaa

SEQ ID NO: 177352 - RNA, 20 nt, Artificial Sequence
  Synthetic
ucugauuucucuucucuaaa

SEQ ID NO: 177353 - RNA, 21 nt, Artificial Sequence
  Synthetic
cucugauuucucuucucuaaa

SEQ ID NO: 177354 - RNA, 22 nt, Artificial Sequence
  Synthetic
ucucugauuucucuucucuaaa

SEQ ID NO: 177355 - RNA, 23 nt, Artificial Sequence
  Synthetic
gucucugauuucucuucucuaaa

SEQ ID NO: 177356 - RNA, 24 nt, Artificial Sequence
  Synthetic
ugucucugauuucucuucucuaaa

SEQ ID NO: 177357 - RNA, 18 nt, Artificial Sequence
  Synthetic
caguauuucaugucuaaa

SEQ ID NO: 177358 - RNA, 19 nt, Artificial Sequence
  Synthetic
acaguauuucaugucuaaa

SEQ ID NO: 177359 - RNA, 20 nt, Artificial Sequence
  Synthetic
aacaguauuucaugucuaaa

SEQ ID NO: 177360 - RNA, 21 nt, Artificial Sequence
  Synthetic
aaacaguauuucaugucuaaa

SEQ ID NO: 177361 - RNA, 22 nt, Artificial Sequence
  Synthetic
gaaacaguauuucaugucuaaa

SEQ ID NO: 177362 - RNA, 23 nt, Artificial Sequence
  Synthetic
ugaaacaguauuucaugucuaaa

SEQ ID NO: 177363 - RNA, 24 nt, Artificial Sequence
  Synthetic
uugaaacaguauuucaugucuaaa

SEQ ID NO: 177364 - RNA, 18 nt, Artificial Sequence
  Synthetic
cauuucaaaaauucuaaa

SEQ ID NO: 177365 - RNA, 19 nt, Artificial Sequence
  Synthetic
ucauuucaaaaauucuaaa

SEQ ID NO: 177366 - RNA, 20 nt, Artificial Sequence
  Synthetic
aucauuucaaaaauucuaaa

SEQ ID NO: 177367 - RNA, 21 nt, Artificial Sequence
  Synthetic
uaucauuucaaaaauucuaaa

SEQ ID NO: 177368 - RNA, 22 nt, Artificial Sequence
  Synthetic
uuaucauuucaaaaauucuaaa

SEQ ID NO: 177369 - RNA, 23 nt, Artificial Sequence
  Synthetic
guuaucauuucaaaaauucuaaa

SEQ ID NO: 177370 - RNA, 24 nt, Artificial Sequence
  Synthetic
aguuaucauuucaaaaauucuaaa

SEQ ID NO: 177371 - RNA, 18 nt, Artificial Sequence
  Synthetic
cuaaauguugguucuaaa

SEQ ID NO: 177372 - RNA, 19 nt, Artificial Sequence
  Synthetic
acuaaauguugguucuaaa

SEQ ID NO: 177373 - RNA, 20 nt, Artificial Sequence
  Synthetic
uacuaaauguugguucuaaa

SEQ ID NO: 177374 - RNA, 21 nt, Artificial Sequence
  Synthetic
uuacuaaauguugguucuaaa

SEQ ID NO: 177375 - RNA, 22 nt, Artificial Sequence
  Synthetic
guuacuaaauguugguucuaaa

SEQ ID NO: 177376 - RNA, 23 nt, Artificial Sequence
  Synthetic
uguuacuaaauguugguucuaaa

SEQ ID NO: 177377 - RNA, 24 nt, Artificial Sequence
  Synthetic
guguuacuaaauguugguucuaaa

SEQ ID NO: 177378 - RNA, 18 nt, Artificial Sequence
  Synthetic
accuuagugauuucuaaa

SEQ ID NO: 177379 - RNA, 19 nt, Artificial Sequence
  Synthetic
uaccuuagugauuucuaaa

SEQ ID NO: 177380 - RNA, 20 nt, Artificial Sequence
  Synthetic
cuaccuuagugauuucuaaa

SEQ ID NO: 177381 - RNA, 21 nt, Artificial Sequence
  Synthetic
ccuaccuuagugauuucuaaa

SEQ ID NO: 177382 - RNA, 22 nt, Artificial Sequence
  Synthetic
cccuaccuuagugauuucuaaa

SEQ ID NO: 177383 - RNA, 23 nt, Artificial Sequence
  Synthetic
acccuaccuuagugauuucuaaa

SEQ ID NO: 177384 - RNA, 24 nt, Artificial Sequence
  Synthetic
cacccuaccuuagugauuucuaaa

SEQ ID NO: 177385 - RNA, 18 nt, Artificial Sequence
  Synthetic
gcacguugacuuucuaaa

SEQ ID NO: 177386 - RNA, 19 nt, Artificial Sequence
  Synthetic
agcacguugacuuucuaaa

SEQ ID NO: 177387 - RNA, 20 nt, Artificial Sequence
  Synthetic
aagcacguugacuuucuaaa

SEQ ID NO: 177388 - RNA, 21 nt, Artificial Sequence
  Synthetic
aaagcacguugacuuucuaaa

SEQ ID NO: 177389 - RNA, 22 nt, Artificial Sequence
  Synthetic
aaaagcacguugacuuucuaaa

SEQ ID NO: 177390 - RNA, 23 nt, Artificial Sequence
  Synthetic
uaaaagcacguugacuuucuaaa

SEQ ID NO: 177391 - RNA, 24 nt, Artificial Sequence
  Synthetic
guaaaagcacguugacuuucuaaa

SEQ ID NO: 177392 - RNA, 18 nt, Artificial Sequence
  Synthetic
ccaggucugguuucuaaa

SEQ ID NO: 177393 - RNA, 19 nt, Artificial Sequence
  Synthetic
uccaggucugguuucuaaa

SEQ ID NO: 177394 - RNA, 20 nt, Artificial Sequence
  Synthetic
cuccaggucugguuucuaaa

SEQ ID NO: 177395 - RNA, 21 nt, Artificial Sequence
  Synthetic
acuccaggucugguuucuaaa

SEQ ID NO: 177396 - RNA, 22 nt, Artificial Sequence
  Synthetic
cacuccaggucugguuucuaaa

SEQ ID NO: 177397 - RNA, 23 nt, Artificial Sequence
  Synthetic
ucacuccaggucugguuucuaaa

SEQ ID NO: 177398 - RNA, 24 nt, Artificial Sequence
  Synthetic
aucacuccaggucugguuucuaaa

SEQ ID NO: 177399 - RNA, 18 nt, Artificial Sequence
  Synthetic
uuuaucaaauuuucuaaa

SEQ ID NO: 177400 - RNA, 19 nt, Artificial Sequence
  Synthetic
uuuuaucaaauuuucuaaa

SEQ ID NO: 177401 - RNA, 20 nt, Artificial Sequence
  Synthetic
guuuuaucaaauuuucuaaa

SEQ ID NO: 177402 - RNA, 21 nt, Artificial Sequence
  Synthetic
aguuuuaucaaauuuucuaaa

SEQ ID NO: 177403 - RNA, 22 nt, Artificial Sequence
  Synthetic
uaguuuuaucaaauuuucuaaa

SEQ ID NO: 177404 - RNA, 23 nt, Artificial Sequence
  Synthetic
guaguuuuaucaaauuuucuaaa

SEQ ID NO: 177405 - RNA, 24 nt, Artificial Sequence
  Synthetic
aguaguuuuaucaaauuuucuaaa

SEQ ID NO: 177406 - RNA, 18 nt, Artificial Sequence
  Synthetic
agcauuuauuuuucuaaa

SEQ ID NO: 177407 - RNA, 19 nt, Artificial Sequence
  Synthetic
aagcauuuauuuuucuaaa

SEQ ID NO: 177408 - RNA, 20 nt, Artificial Sequence
  Synthetic
caagcauuuauuuuucuaaa

SEQ ID NO: 177409 - RNA, 21 nt, Artificial Sequence
  Synthetic
acaagcauuuauuuuucuaaa

SEQ ID NO: 177410 - RNA, 22 nt, Artificial Sequence
  Synthetic
uacaagcauuuauuuuucuaaa

SEQ ID NO: 177411 - RNA, 23 nt, Artificial Sequence
  Synthetic
guacaagcauuuauuuuucuaaa

SEQ ID NO: 177412 - RNA, 24 nt, Artificial Sequence
  Synthetic
aguacaagcauuuauuuuucuaaa

SEQ ID NO: 177413 - RNA, 18 nt, Artificial Sequence
  Synthetic
guuuaccuuuuuucuaaa

SEQ ID NO: 177414 - RNA, 19 nt, Artificial Sequence
  Synthetic
uguuuaccuuuuuucuaaa

SEQ ID NO: 177415 - RNA, 20 nt, Artificial Sequence
  Synthetic
auguuuaccuuuuuucuaaa

SEQ ID NO: 177416 - RNA, 21 nt, Artificial Sequence
  Synthetic
aauguuuaccuuuuuucuaaa

SEQ ID NO: 177417 - RNA, 22 nt, Artificial Sequence
  Synthetic
gaauguuuaccuuuuuucuaaa

SEQ ID NO: 177418 - RNA, 23 nt, Artificial Sequence
  Synthetic
ugaauguuuaccuuuuuucuaaa

SEQ ID NO: 177419 - RNA, 24 nt, Artificial Sequence
  Synthetic
cugaauguuuaccuuuuuucuaaa

SEQ ID NO: 177420 - RNA, 18 nt, Artificial Sequence
  Synthetic
aaacaaggaaaaaguaaa

SEQ ID NO: 177421 - RNA, 19 nt, Artificial Sequence
  Synthetic
caaacaaggaaaaaguaaa

SEQ ID NO: 177422 - RNA, 20 nt, Artificial Sequence
  Synthetic
acaaacaaggaaaaaguaaa

SEQ ID NO: 177423 - RNA, 21 nt, Artificial Sequence
  Synthetic
uacaaacaaggaaaaaguaaa

SEQ ID NO: 177424 - RNA, 22 nt, Artificial Sequence
  Synthetic
uuacaaacaaggaaaaaguaaa

SEQ ID NO: 177425 - RNA, 23 nt, Artificial Sequence
  Synthetic
uuuacaaacaaggaaaaaguaaa

SEQ ID NO: 177426 - RNA, 24 nt, Artificial Sequence
  Synthetic
cuuuacaaacaaggaaaaaguaaa

SEQ ID NO: 177427 - RNA, 18 nt, Artificial Sequence
  Synthetic
cagcagguaaaaaguaaa

SEQ ID NO: 177428 - RNA, 19 nt, Artificial Sequence
  Synthetic
gcagcagguaaaaaguaaa

SEQ ID NO: 177429 - RNA, 20 nt, Artificial Sequence
  Synthetic
ggcagcagguaaaaaguaaa

SEQ ID NO: 177430 - RNA, 21 nt, Artificial Sequence
  Synthetic
aggcagcagguaaaaaguaaa

SEQ ID NO: 177431 - RNA, 22 nt, Artificial Sequence
  Synthetic
aaggcagcagguaaaaaguaaa

SEQ ID NO: 177432 - RNA, 23 nt, Artificial Sequence
  Synthetic
gaaggcagcagguaaaaaguaaa

SEQ ID NO: 177433 - RNA, 24 nt, Artificial Sequence
  Synthetic
agaaggcagcagguaaaaaguaaa

SEQ ID NO: 177434 - RNA, 18 nt, Artificial Sequence
  Synthetic
gauuuauauaaaaguaaa

SEQ ID NO: 177435 - RNA, 19 nt, Artificial Sequence
  Synthetic
ugauuuauauaaaaguaaa

SEQ ID NO: 177436 - RNA, 20 nt, Artificial Sequence
  Synthetic
gugauuuauauaaaaguaaa

SEQ ID NO: 177437 - RNA, 21 nt, Artificial Sequence
  Synthetic
agugauuuauauaaaaguaaa

SEQ ID NO: 177438 - RNA, 22 nt, Artificial Sequence
  Synthetic
cagugauuuauauaaaaguaaa

SEQ ID NO: 177439 - RNA, 23 nt, Artificial Sequence
  Synthetic
acagugauuuauauaaaaguaaa

SEQ ID NO: 177440 - RNA, 24 nt, Artificial Sequence
  Synthetic
uacagugauuuauauaaaaguaaa

SEQ ID NO: 177441 - RNA, 18 nt, Artificial Sequence
  Synthetic
aagaacuuacaaaguaaa

SEQ ID NO: 177442 - RNA, 19 nt, Artificial Sequence
  Synthetic
aaagaacuuacaaaguaaa

SEQ ID NO: 177443 - RNA, 20 nt, Artificial Sequence
  Synthetic
aaaagaacuuacaaaguaaa

SEQ ID NO: 177444 - RNA, 21 nt, Artificial Sequence
  Synthetic
uaaaagaacuuacaaaguaaa

SEQ ID NO: 177445 - RNA, 22 nt, Artificial Sequence
  Synthetic
auaaaagaacuuacaaaguaaa

SEQ ID NO: 177446 - RNA, 23 nt, Artificial Sequence
  Synthetic
uauaaaagaacuuacaaaguaaa

SEQ ID NO: 177447 - RNA, 24 nt, Artificial Sequence
  Synthetic
uuauaaaagaacuuacaaaguaaa

SEQ ID NO: 177448 - RNA, 18 nt, Artificial Sequence
  Synthetic
uaguauuuacaaaguaaa

SEQ ID NO: 177449 - RNA, 19 nt, Artificial Sequence
  Synthetic
cuaguauuuacaaaguaaa

SEQ ID NO: 177450 - RNA, 20 nt, Artificial Sequence
  Synthetic
gcuaguauuuacaaaguaaa

SEQ ID NO: 177451 - RNA, 21 nt, Artificial Sequence
  Synthetic
agcuaguauuuacaaaguaaa

SEQ ID NO: 177452 - RNA, 22 nt, Artificial Sequence
  Synthetic
gagcuaguauuuacaaaguaaa

SEQ ID NO: 177453 - RNA, 23 nt, Artificial Sequence
  Synthetic
cgagcuaguauuuacaaaguaaa

SEQ ID NO: 177454 - RNA, 24 nt, Artificial Sequence
  Synthetic
acgagcuaguauuuacaaaguaaa

SEQ ID NO: 177455 - RNA, 18 nt, Artificial Sequence
  Synthetic
caucccccucaaaguaaa

SEQ ID NO: 177456 - RNA, 19 nt, Artificial Sequence
  Synthetic
ccaucccccucaaaguaaa

SEQ ID NO: 177457 - RNA, 20 nt, Artificial Sequence
  Synthetic
cccaucccccucaaaguaaa

SEQ ID NO: 177458 - RNA, 21 nt, Artificial Sequence
  Synthetic
ccccaucccccucaaaguaaa

SEQ ID NO: 177459 - RNA, 22 nt, Artificial Sequence
  Synthetic
uccccaucccccucaaaguaaa

SEQ ID NO: 177460 - RNA, 23 nt, Artificial Sequence
  Synthetic
cuccccaucccccucaaaguaaa

SEQ ID NO: 177461 - RNA, 24 nt, Artificial Sequence
  Synthetic
gcuccccaucccccucaaaguaaa

SEQ ID NO: 177462 - RNA, 18 nt, Artificial Sequence
  Synthetic
auggggccugaaaguaaa

SEQ ID NO: 177463 - RNA, 19 nt, Artificial Sequence
  Synthetic
aauggggccugaaaguaaa

SEQ ID NO: 177464 - RNA, 20 nt, Artificial Sequence
  Synthetic
aaauggggccugaaaguaaa

SEQ ID NO: 177465 - RNA, 21 nt, Artificial Sequence
  Synthetic
gaaauggggccugaaaguaaa

SEQ ID NO: 177466 - RNA, 22 nt, Artificial Sequence
  Synthetic
agaaauggggccugaaaguaaa

SEQ ID NO: 177467 - RNA, 23 nt, Artificial Sequence
  Synthetic
gagaaauggggccugaaaguaaa

SEQ ID NO: 177468 - RNA, 24 nt, Artificial Sequence
  Synthetic
agagaaauggggccugaaaguaaa

SEQ ID NO: 177469 - RNA, 18 nt, Artificial Sequence
  Synthetic
ggaucuggauaaaguaaa

SEQ ID NO: 177470 - RNA, 19 nt, Artificial Sequence
  Synthetic
uggaucuggauaaaguaaa

SEQ ID NO: 177471 - RNA, 20 nt, Artificial Sequence
  Synthetic
auggaucuggauaaaguaaa

SEQ ID NO: 177472 - RNA, 21 nt, Artificial Sequence
  Synthetic
gauggaucuggauaaaguaaa

SEQ ID NO: 177473 - RNA, 22 nt, Artificial Sequence
  Synthetic
ugauggaucuggauaaaguaaa

SEQ ID NO: 177474 - RNA, 23 nt, Artificial Sequence
  Synthetic
cugauggaucuggauaaaguaaa

SEQ ID NO: 177475 - RNA, 24 nt, Artificial Sequence
  Synthetic
acugauggaucuggauaaaguaaa

SEQ ID NO: 177476 - RNA, 18 nt, Artificial Sequence
  Synthetic
auaaguguauaaaguaaa

SEQ ID NO: 177477 - RNA, 19 nt, Artificial Sequence
  Synthetic
aauaaguguauaaaguaaa

SEQ ID NO: 177478 - RNA, 20 nt, Artificial Sequence
  Synthetic
caauaaguguauaaaguaaa

SEQ ID NO: 177479 - RNA, 21 nt, Artificial Sequence
  Synthetic
acaauaaguguauaaaguaaa

SEQ ID NO: 177480 - RNA, 22 nt, Artificial Sequence
  Synthetic
aacaauaaguguauaaaguaaa

SEQ ID NO: 177481 - RNA, 23 nt, Artificial Sequence
  Synthetic
aaacaauaaguguauaaaguaaa

SEQ ID NO: 177482 - RNA, 24 nt, Artificial Sequence
  Synthetic
aaaacaauaaguguauaaaguaaa

SEQ ID NO: 177483 - RNA, 18 nt, Artificial Sequence
  Synthetic
uuugaugucccaaguaaa

SEQ ID NO: 177484 - RNA, 19 nt, Artificial Sequence
  Synthetic
uuuugaugucccaaguaaa

SEQ ID NO: 177485 - RNA, 20 nt, Artificial Sequence
  Synthetic
uuuuugaugucccaaguaaa

SEQ ID NO: 177486 - RNA, 21 nt, Artificial Sequence
  Synthetic
auuuuugaugucccaaguaaa

SEQ ID NO: 177487 - RNA, 22 nt, Artificial Sequence
  Synthetic
aauuuuugaugucccaaguaaa

SEQ ID NO: 177488 - RNA, 23 nt, Artificial Sequence
  Synthetic
uaauuuuugaugucccaaguaaa

SEQ ID NO: 177489 - RNA, 24 nt, Artificial Sequence
  Synthetic
guaauuuuugaugucccaaguaaa

SEQ ID NO: 177490 - RNA, 18 nt, Artificial Sequence
  Synthetic
ggguaauuuauaaguaaa

SEQ ID NO: 177491 - RNA, 19 nt, Artificial Sequence
  Synthetic
uggguaauuuauaaguaaa

SEQ ID NO: 177492 - RNA, 20 nt, Artificial Sequence
  Synthetic
cuggguaauuuauaaguaaa

SEQ ID NO: 177493 - RNA, 21 nt, Artificial Sequence
  Synthetic
acuggguaauuuauaaguaaa

SEQ ID NO: 177494 - RNA, 22 nt, Artificial Sequence
  Synthetic
gacuggguaauuuauaaguaaa

SEQ ID NO: 177495 - RNA, 23 nt, Artificial Sequence
  Synthetic
agacuggguaauuuauaaguaaa

SEQ ID NO: 177496 - RNA, 24 nt, Artificial Sequence
  Synthetic
aagacuggguaauuuauaaguaaa

SEQ ID NO: 177497 - RNA, 18 nt, Artificial Sequence
  Synthetic
uuugcaaaucuaaguaaa

SEQ ID NO: 177498 - RNA, 19 nt, Artificial Sequence
  Synthetic
cuuugcaaaucuaaguaaa

SEQ ID NO: 177499 - RNA, 20 nt, Artificial Sequence
  Synthetic
ucuuugcaaaucuaaguaaa

SEQ ID NO: 177500 - RNA, 21 nt, Artificial Sequence
  Synthetic
uucuuugcaaaucuaaguaaa

SEQ ID NO: 177501 - RNA, 22 nt, Artificial Sequence
  Synthetic
uuucuuugcaaaucuaaguaaa

SEQ ID NO: 177502 - RNA, 23 nt, Artificial Sequence
  Synthetic
uuuucuuugcaaaucuaaguaaa

SEQ ID NO: 177503 - RNA, 24 nt, Artificial Sequence
  Synthetic
guuuucuuugcaaaucuaaguaaa

SEQ ID NO: 177504 - RNA, 18 nt, Artificial Sequence
  Synthetic
ugaaaaaugguaaguaaa

SEQ ID NO: 177505 - RNA, 19 nt, Artificial Sequence
  Synthetic
uugaaaaaugguaaguaaa

SEQ ID NO: 177506 - RNA, 20 nt, Artificial Sequence
  Synthetic
auugaaaaaugguaaguaaa

SEQ ID NO: 177507 - RNA, 21 nt, Artificial Sequence
  Synthetic
cauugaaaaaugguaaguaaa

SEQ ID NO: 177508 - RNA, 22 nt, Artificial Sequence
  Synthetic
ucauugaaaaaugguaaguaaa

SEQ ID NO: 177509 - RNA, 23 nt, Artificial Sequence
  Synthetic
cucauugaaaaaugguaaguaaa

SEQ ID NO: 177510 - RNA, 24 nt, Artificial Sequence
  Synthetic
ucucauugaaaaaugguaaguaaa

SEQ ID NO: 177511 - RNA, 18 nt, Artificial Sequence
  Synthetic
ucacuuucuguaaguaaa

SEQ ID NO: 177512 - RNA, 19 nt, Artificial Sequence
  Synthetic
aucacuuucuguaaguaaa

SEQ ID NO: 177513 - RNA, 20 nt, Artificial Sequence
  Synthetic
aaucacuuucuguaaguaaa

SEQ ID NO: 177514 - RNA, 21 nt, Artificial Sequence
  Synthetic
aaaucacuuucuguaaguaaa

SEQ ID NO: 177515 - RNA, 22 nt, Artificial Sequence
  Synthetic
gaaaucacuuucuguaaguaaa

SEQ ID NO: 177516 - RNA, 23 nt, Artificial Sequence
  Synthetic
ggaaaucacuuucuguaaguaaa

SEQ ID NO: 177517 - RNA, 24 nt, Artificial Sequence
  Synthetic
gggaaaucacuuucuguaaguaaa

SEQ ID NO: 177518 - RNA, 18 nt, Artificial Sequence
  Synthetic
aaacaaucauacaguaaa

SEQ ID NO: 177519 - RNA, 19 nt, Artificial Sequence
  Synthetic
aaaacaaucauacaguaaa

SEQ ID NO: 177520 - RNA, 20 nt, Artificial Sequence
  Synthetic
uaaaacaaucauacaguaaa

SEQ ID NO: 177521 - RNA, 21 nt, Artificial Sequence
  Synthetic
cuaaaacaaucauacaguaaa

SEQ ID NO: 177522 - RNA, 22 nt, Artificial Sequence
  Synthetic
gcuaaaacaaucauacaguaaa

SEQ ID NO: 177523 - RNA, 23 nt, Artificial Sequence
  Synthetic
ggcuaaaacaaucauacaguaaa

SEQ ID NO: 177524 - RNA, 24 nt, Artificial Sequence
  Synthetic
uggcuaaaacaaucauacaguaaa

SEQ ID NO: 177525 - RNA, 18 nt, Artificial Sequence
  Synthetic
uccccaagaaucaguaaa

SEQ ID NO: 177526 - RNA, 19 nt, Artificial Sequence
  Synthetic
cuccccaagaaucaguaaa

SEQ ID NO: 177527 - RNA, 20 nt, Artificial Sequence
  Synthetic
ucuccccaagaaucaguaaa

SEQ ID NO: 177528 - RNA, 21 nt, Artificial Sequence
  Synthetic
aucuccccaagaaucaguaaa

SEQ ID NO: 177529 - RNA, 22 nt, Artificial Sequence
  Synthetic
aaucuccccaagaaucaguaaa

SEQ ID NO: 177530 - RNA, 23 nt, Artificial Sequence
  Synthetic
aaaucuccccaagaaucaguaaa

SEQ ID NO: 177531 - RNA, 24 nt, Artificial Sequence
  Synthetic
uaaaucuccccaagaaucaguaaa

SEQ ID NO: 177532 - RNA, 18 nt, Artificial Sequence
  Synthetic
aaggcaaaacucaguaaa

SEQ ID NO: 177533 - RNA, 19 nt, Artificial Sequence
  Synthetic
uaaggcaaaacucaguaaa

SEQ ID NO: 177534 - RNA, 20 nt, Artificial Sequence
  Synthetic
auaaggcaaaacucaguaaa

SEQ ID NO: 177535 - RNA, 21 nt, Artificial Sequence
  Synthetic
aauaaggcaaaacucaguaaa

SEQ ID NO: 177536 - RNA, 22 nt, Artificial Sequence
  Synthetic
caauaaggcaaaacucaguaaa

SEQ ID NO: 177537 - RNA, 23 nt, Artificial Sequence
  Synthetic
ccaauaaggcaaaacucaguaaa

SEQ ID NO: 177538 - RNA, 24 nt, Artificial Sequence
  Synthetic
gccaauaaggcaaaacucaguaaa

SEQ ID NO: 177539 - RNA, 18 nt, Artificial Sequence
  Synthetic
cauaauuaaacgaguaaa

SEQ ID NO: 177540 - RNA, 19 nt, Artificial Sequence
  Synthetic
gcauaauuaaacgaguaaa

SEQ ID NO: 177541 - RNA, 20 nt, Artificial Sequence
  Synthetic
ugcauaauuaaacgaguaaa

SEQ ID NO: 177542 - RNA, 21 nt, Artificial Sequence
  Synthetic
uugcauaauuaaacgaguaaa

SEQ ID NO: 177543 - RNA, 22 nt, Artificial Sequence
  Synthetic
auugcauaauuaaacgaguaaa

SEQ ID NO: 177544 - RNA, 23 nt, Artificial Sequence
  Synthetic
gauugcauaauuaaacgaguaaa

SEQ ID NO: 177545 - RNA, 24 nt, Artificial Sequence
  Synthetic
cgauugcauaauuaaacgaguaaa

SEQ ID NO: 177546 - RNA, 18 nt, Artificial Sequence
  Synthetic
ucaccgucaacgaguaaa

SEQ ID NO: 177547 - RNA, 19 nt, Artificial Sequence
  Synthetic
uucaccgucaacgaguaaa

SEQ ID NO: 177548 - RNA, 20 nt, Artificial Sequence
  Synthetic
uuucaccgucaacgaguaaa

SEQ ID NO: 177549 - RNA, 21 nt, Artificial Sequence
  Synthetic
auuucaccgucaacgaguaaa

SEQ ID NO: 177550 - RNA, 22 nt, Artificial Sequence
  Synthetic
cauuucaccgucaacgaguaaa

SEQ ID NO: 177551 - RNA, 23 nt, Artificial Sequence
  Synthetic
gcauuucaccgucaacgaguaaa

SEQ ID NO: 177552 - RNA, 24 nt, Artificial Sequence
  Synthetic
agcauuucaccgucaacgaguaaa

SEQ ID NO: 177553 - RNA, 18 nt, Artificial Sequence
  Synthetic
acuuuacagaggaguaaa

SEQ ID NO: 177554 - RNA, 19 nt, Artificial Sequence
  Synthetic
cacuuuacagaggaguaaa

SEQ ID NO: 177555 - RNA, 20 nt, Artificial Sequence
  Synthetic
ccacuuuacagaggaguaaa

SEQ ID NO: 177556 - RNA, 21 nt, Artificial Sequence
  Synthetic
gccacuuuacagaggaguaaa

SEQ ID NO: 177557 - RNA, 22 nt, Artificial Sequence
  Synthetic
cgccacuuuacagaggaguaaa

SEQ ID NO: 177558 - RNA, 23 nt, Artificial Sequence
  Synthetic
ucgccacuuuacagaggaguaaa

SEQ ID NO: 177559 - RNA, 24 nt, Artificial Sequence
  Synthetic
aucgccacuuuacagaggaguaaa

SEQ ID NO: 177560 - RNA, 18 nt, Artificial Sequence
  Synthetic
cagugaccauggaguaaa

SEQ ID NO: 177561 - RNA, 19 nt, Artificial Sequence
  Synthetic
gcagugaccauggaguaaa

SEQ ID NO: 177562 - RNA, 20 nt, Artificial Sequence
  Synthetic
agcagugaccauggaguaaa

SEQ ID NO: 177563 - RNA, 21 nt, Artificial Sequence
  Synthetic
gagcagugaccauggaguaaa

SEQ ID NO: 177564 - RNA, 22 nt, Artificial Sequence
  Synthetic
ggagcagugaccauggaguaaa

SEQ ID NO: 177565 - RNA, 23 nt, Artificial Sequence
  Synthetic
uggagcagugaccauggaguaaa

SEQ ID NO: 177566 - RNA, 24 nt, Artificial Sequence
  Synthetic
cuggagcagugaccauggaguaaa

SEQ ID NO: 177567 - RNA, 18 nt, Artificial Sequence
  Synthetic
agguggguacugaguaaa

SEQ ID NO: 177568 - RNA, 19 nt, Artificial Sequence
  Synthetic
cagguggguacugaguaaa

SEQ ID NO: 177569 - RNA, 20 nt, Artificial Sequence
  Synthetic
ucagguggguacugaguaaa

SEQ ID NO: 177570 - RNA, 21 nt, Artificial Sequence
  Synthetic
uucagguggguacugaguaaa

SEQ ID NO: 177571 - RNA, 22 nt, Artificial Sequence
  Synthetic
auucagguggguacugaguaaa

SEQ ID NO: 177572 - RNA, 23 nt, Artificial Sequence
  Synthetic
cauucagguggguacugaguaaa

SEQ ID NO: 177573 - RNA, 24 nt, Artificial Sequence
  Synthetic
ucauucagguggguacugaguaaa

SEQ ID NO: 177574 - RNA, 18 nt, Artificial Sequence
  Synthetic
aguuguugucugaguaaa

SEQ ID NO: 177575 - RNA, 19 nt, Artificial Sequence
  Synthetic
aaguuguugucugaguaaa

SEQ ID NO: 177576 - RNA, 20 nt, Artificial Sequence
  Synthetic
aaaguuguugucugaguaaa

SEQ ID NO: 177577 - RNA, 21 nt, Artificial Sequence
  Synthetic
aaaaguuguugucugaguaaa

SEQ ID NO: 177578 - RNA, 22 nt, Artificial Sequence
  Synthetic
uaaaaguuguugucugaguaaa

SEQ ID NO: 177579 - RNA, 23 nt, Artificial Sequence
  Synthetic
guaaaaguuguugucugaguaaa

SEQ ID NO: 177580 - RNA, 24 nt, Artificial Sequence
  Synthetic
uguaaaaguuguugucugaguaaa

SEQ ID NO: 177581 - RNA, 18 nt, Artificial Sequence
  Synthetic
uaauugccauugaguaaa

SEQ ID NO: 177582 - RNA, 19 nt, Artificial Sequence
  Synthetic
cuaauugccauugaguaaa

SEQ ID NO: 177583 - RNA, 20 nt, Artificial Sequence
  Synthetic
acuaauugccauugaguaaa

SEQ ID NO: 177584 - RNA, 21 nt, Artificial Sequence
  Synthetic
uacuaauugccauugaguaaa

SEQ ID NO: 177585 - RNA, 22 nt, Artificial Sequence
  Synthetic
auacuaauugccauugaguaaa

SEQ ID NO: 177586 - RNA, 23 nt, Artificial Sequence
  Synthetic
cauacuaauugccauugaguaaa

SEQ ID NO: 177587 - RNA, 24 nt, Artificial Sequence
  Synthetic
gcauacuaauugccauugaguaaa

SEQ ID NO: 177588 - RNA, 18 nt, Artificial Sequence
  Synthetic
gauaguaacaauaguaaa

SEQ ID NO: 177589 - RNA, 19 nt, Artificial Sequence
  Synthetic
ugauaguaacaauaguaaa

SEQ ID NO: 177590 - RNA, 20 nt, Artificial Sequence
  Synthetic
uugauaguaacaauaguaaa

SEQ ID NO: 177591 - RNA, 21 nt, Artificial Sequence
  Synthetic
cuugauaguaacaauaguaaa

SEQ ID NO: 177592 - RNA, 22 nt, Artificial Sequence
  Synthetic
ucuugauaguaacaauaguaaa

SEQ ID NO: 177593 - RNA, 23 nt, Artificial Sequence
  Synthetic
uucuugauaguaacaauaguaaa

SEQ ID NO: 177594 - RNA, 24 nt, Artificial Sequence
  Synthetic
guucuugauaguaacaauaguaaa

SEQ ID NO: 177595 - RNA, 18 nt, Artificial Sequence
  Synthetic
uuuaauuaagauaguaaa

SEQ ID NO: 177596 - RNA, 19 nt, Artificial Sequence
  Synthetic
auuuaauuaagauaguaaa

SEQ ID NO: 177597 - RNA, 20 nt, Artificial Sequence
  Synthetic
gauuuaauuaagauaguaaa

SEQ ID NO: 177598 - RNA, 21 nt, Artificial Sequence
  Synthetic
ugauuuaauuaagauaguaaa

SEQ ID NO: 177599 - RNA, 22 nt, Artificial Sequence
  Synthetic
cugauuuaauuaagauaguaaa

SEQ ID NO: 177600 - RNA, 23 nt, Artificial Sequence
  Synthetic
ucugauuuaauuaagauaguaaa

SEQ ID NO: 177601 - RNA, 24 nt, Artificial Sequence
  Synthetic
aucugauuuaauuaagauaguaaa

SEQ ID NO: 177602 - RNA, 18 nt, Artificial Sequence
  Synthetic
aucaauaguuauaguaaa

SEQ ID NO: 177603 - RNA, 19 nt, Artificial Sequence
  Synthetic
uaucaauaguuauaguaaa

SEQ ID NO: 177604 - RNA, 20 nt, Artificial Sequence
  Synthetic
auaucaauaguuauaguaaa

SEQ ID NO: 177605 - RNA, 21 nt, Artificial Sequence
  Synthetic
cauaucaauaguuauaguaaa

SEQ ID NO: 177606 - RNA, 22 nt, Artificial Sequence
  Synthetic
acauaucaauaguuauaguaaa

SEQ ID NO: 177607 - RNA, 23 nt, Artificial Sequence
  Synthetic
uacauaucaauaguuauaguaaa

SEQ ID NO: 177608 - RNA, 24 nt, Artificial Sequence
  Synthetic
cuacauaucaauaguuauaguaaa

SEQ ID NO: 177609 - RNA, 18 nt, Artificial Sequence
  Synthetic
auccauauuccuaguaaa

SEQ ID NO: 177610 - RNA, 19 nt, Artificial Sequence
  Synthetic
gauccauauuccuaguaaa

SEQ ID NO: 177611 - RNA, 20 nt, Artificial Sequence
  Synthetic
ugauccauauuccuaguaaa

SEQ ID NO: 177612 - RNA, 21 nt, Artificial Sequence
  Synthetic
augauccauauuccuaguaaa

SEQ ID NO: 177613 - RNA, 22 nt, Artificial Sequence
  Synthetic
uaugauccauauuccuaguaaa

SEQ ID NO: 177614 - RNA, 23 nt, Artificial Sequence
  Synthetic
cuaugauccauauuccuaguaaa

SEQ ID NO: 177615 - RNA, 24 nt, Artificial Sequence
  Synthetic
ucuaugauccauauuccuaguaaa

SEQ ID NO: 177616 - RNA, 18 nt, Artificial Sequence
  Synthetic
cucugaauuucuaguaaa

SEQ ID NO: 177617 - RNA, 19 nt, Artificial Sequence
  Synthetic
ucucugaauuucuaguaaa

SEQ ID NO: 177618 - RNA, 20 nt, Artificial Sequence
  Synthetic
gucucugaauuucuaguaaa

SEQ ID NO: 177619 - RNA, 21 nt, Artificial Sequence
  Synthetic
agucucugaauuucuaguaaa

SEQ ID NO: 177620 - RNA, 22 nt, Artificial Sequence
  Synthetic
uagucucugaauuucuaguaaa

SEQ ID NO: 177621 - RNA, 23 nt, Artificial Sequence
  Synthetic
guagucucugaauuucuaguaaa

SEQ ID NO: 177622 - RNA, 24 nt, Artificial Sequence
  Synthetic
uguagucucugaauuucuaguaaa

SEQ ID NO: 177623 - RNA, 18 nt, Artificial Sequence
  Synthetic
ugccugcugcguaguaaa

SEQ ID NO: 177624 - RNA, 19 nt, Artificial Sequence
  Synthetic
augccugcugcguaguaaa

SEQ ID NO: 177625 - RNA, 20 nt, Artificial Sequence
  Synthetic
uaugccugcugcguaguaaa

SEQ ID NO: 177626 - RNA, 21 nt, Artificial Sequence
  Synthetic
guaugccugcugcguaguaaa

SEQ ID NO: 177627 - RNA, 22 nt, Artificial Sequence
  Synthetic
aguaugccugcugcguaguaaa

SEQ ID NO: 177628 - RNA, 23 nt, Artificial Sequence
  Synthetic
aaguaugccugcugcguaguaaa

SEQ ID NO: 177629 - RNA, 24 nt, Artificial Sequence
  Synthetic
gaaguaugccugcugcguaguaaa

SEQ ID NO: 177630 - RNA, 18 nt, Artificial Sequence
  Synthetic
auucaaugagguaguaaa

SEQ ID NO: 177631 - RNA, 19 nt, Artificial Sequence
  Synthetic
aauucaaugagguaguaaa

SEQ ID NO: 177632 - RNA, 20 nt, Artificial Sequence
  Synthetic
aaauucaaugagguaguaaa

SEQ ID NO: 177633 - RNA, 21 nt, Artificial Sequence
  Synthetic
aaaauucaaugagguaguaaa

SEQ ID NO: 177634 - RNA, 22 nt, Artificial Sequence
  Synthetic
gaaaauucaaugagguaguaaa

SEQ ID NO: 177635 - RNA, 23 nt, Artificial Sequence
  Synthetic
ugaaaauucaaugagguaguaaa

SEQ ID NO: 177636 - RNA, 24 nt, Artificial Sequence
  Synthetic
gugaaaauucaaugagguaguaaa

SEQ ID NO: 177637 - RNA, 18 nt, Artificial Sequence
  Synthetic
gucauucucuguaguaaa

SEQ ID NO: 177638 - RNA, 19 nt, Artificial Sequence
  Synthetic
ugucauucucuguaguaaa

SEQ ID NO: 177639 - RNA, 20 nt, Artificial Sequence
  Synthetic
gugucauucucuguaguaaa

SEQ ID NO: 177640 - RNA, 21 nt, Artificial Sequence
  Synthetic
ugugucauucucuguaguaaa

SEQ ID NO: 177641 - RNA, 22 nt, Artificial Sequence
  Synthetic
augugucauucucuguaguaaa

SEQ ID NO: 177642 - RNA, 23 nt, Artificial Sequence
  Synthetic
uaugugucauucucuguaguaaa

SEQ ID NO: 177643 - RNA, 24 nt, Artificial Sequence
  Synthetic
auaugugucauucucuguaguaaa

SEQ ID NO: 177644 - RNA, 18 nt, Artificial Sequence
  Synthetic
auuuagccauuuaguaaa

SEQ ID NO: 177645 - RNA, 19 nt, Artificial Sequence
  Synthetic
cauuuagccauuuaguaaa

SEQ ID NO: 177646 - RNA, 20 nt, Artificial Sequence
  Synthetic
ucauuuagccauuuaguaaa

SEQ ID NO: 177647 - RNA, 21 nt, Artificial Sequence
  Synthetic
cucauuuagccauuuaguaaa

SEQ ID NO: 177648 - RNA, 22 nt, Artificial Sequence
  Synthetic
acucauuuagccauuuaguaaa

SEQ ID NO: 177649 - RNA, 23 nt, Artificial Sequence
  Synthetic
cacucauuuagccauuuaguaaa

SEQ ID NO: 177650 - RNA, 24 nt, Artificial Sequence
  Synthetic
ucacucauuuagccauuuaguaaa

SEQ ID NO: 177651 - RNA, 18 nt, Artificial Sequence
  Synthetic
accauaccugaacguaaa

SEQ ID NO: 177652 - RNA, 19 nt, Artificial Sequence
  Synthetic
caccauaccugaacguaaa

SEQ ID NO: 177653 - RNA, 20 nt, Artificial Sequence
  Synthetic
ucaccauaccugaacguaaa

SEQ ID NO: 177654 - RNA, 21 nt, Artificial Sequence
  Synthetic
gucaccauaccugaacguaaa

SEQ ID NO: 177655 - RNA, 22 nt, Artificial Sequence
  Synthetic
agucaccauaccugaacguaaa

SEQ ID NO: 177656 - RNA, 23 nt, Artificial Sequence
  Synthetic
cagucaccauaccugaacguaaa

SEQ ID NO: 177657 - RNA, 24 nt, Artificial Sequence
  Synthetic
ccagucaccauaccugaacguaaa

SEQ ID NO: 177658 - RNA, 18 nt, Artificial Sequence
  Synthetic
uacagauuacuacguaaa

SEQ ID NO: 177659 - RNA, 19 nt, Artificial Sequence
  Synthetic
cuacagauuacuacguaaa

SEQ ID NO: 177660 - RNA, 20 nt, Artificial Sequence
  Synthetic
ucuacagauuacuacguaaa

SEQ ID NO: 177661 - RNA, 21 nt, Artificial Sequence
  Synthetic
cucuacagauuacuacguaaa

SEQ ID NO: 177662 - RNA, 22 nt, Artificial Sequence
  Synthetic
acucuacagauuacuacguaaa

SEQ ID NO: 177663 - RNA, 23 nt, Artificial Sequence
  Synthetic
aacucuacagauuacuacguaaa

SEQ ID NO: 177664 - RNA, 24 nt, Artificial Sequence
  Synthetic
uaacucuacagauuacuacguaaa

SEQ ID NO: 177665 - RNA, 18 nt, Artificial Sequence
  Synthetic
aaccaaucaaaagguaaa

SEQ ID NO: 177666 - RNA, 19 nt, Artificial Sequence
  Synthetic
uaaccaaucaaaagguaaa

SEQ ID NO: 177667 - RNA, 20 nt, Artificial Sequence
  Synthetic
auaaccaaucaaaagguaaa

SEQ ID NO: 177668 - RNA, 21 nt, Artificial Sequence
  Synthetic
aauaaccaaucaaaagguaaa

SEQ ID NO: 177669 - RNA, 22 nt, Artificial Sequence
  Synthetic
caauaaccaaucaaaagguaaa

SEQ ID NO: 177670 - RNA, 23 nt, Artificial Sequence
  Synthetic
acaauaaccaaucaaaagguaaa

SEQ ID NO: 177671 - RNA, 24 nt, Artificial Sequence
  Synthetic
aacaauaaccaaucaaaagguaaa

SEQ ID NO: 177672 - RNA, 18 nt, Artificial Sequence
  Synthetic
gcaucuaacaaagguaaa

SEQ ID NO: 177673 - RNA, 19 nt, Artificial Sequence
  Synthetic
ggcaucuaacaaagguaaa

SEQ ID NO: 177674 - RNA, 20 nt, Artificial Sequence
  Synthetic
gggcaucuaacaaagguaaa

SEQ ID NO: 177675 - RNA, 21 nt, Artificial Sequence
  Synthetic
ugggcaucuaacaaagguaaa

SEQ ID NO: 177676 - RNA, 22 nt, Artificial Sequence
  Synthetic
cugggcaucuaacaaagguaaa

SEQ ID NO: 177677 - RNA, 23 nt, Artificial Sequence
  Synthetic
ccugggcaucuaacaaagguaaa

SEQ ID NO: 177678 - RNA, 24 nt, Artificial Sequence
  Synthetic
gccugggcaucuaacaaagguaaa

SEQ ID NO: 177679 - RNA, 18 nt, Artificial Sequence
  Synthetic
uaaugggaggaagguaaa

SEQ ID NO: 177680 - RNA, 19 nt, Artificial Sequence
  Synthetic
guaaugggaggaagguaaa

SEQ ID NO: 177681 - RNA, 20 nt, Artificial Sequence
  Synthetic
gguaaugggaggaagguaaa

SEQ ID NO: 177682 - RNA, 21 nt, Artificial Sequence
  Synthetic
agguaaugggaggaagguaaa

SEQ ID NO: 177683 - RNA, 22 nt, Artificial Sequence
  Synthetic
aagguaaugggaggaagguaaa

SEQ ID NO: 177684 - RNA, 23 nt, Artificial Sequence
  Synthetic
gaagguaaugggaggaagguaaa

SEQ ID NO: 177685 - RNA, 24 nt, Artificial Sequence
  Synthetic
agaagguaaugggaggaagguaaa

SEQ ID NO: 177686 - RNA, 18 nt, Artificial Sequence
  Synthetic
aauuggccauaagguaaa

SEQ ID NO: 177687 - RNA, 19 nt, Artificial Sequence
  Synthetic
gaauuggccauaagguaaa

SEQ ID NO: 177688 - RNA, 20 nt, Artificial Sequence
  Synthetic
ugaauuggccauaagguaaa

SEQ ID NO: 177689 - RNA, 21 nt, Artificial Sequence
  Synthetic
uugaauuggccauaagguaaa

SEQ ID NO: 177690 - RNA, 22 nt, Artificial Sequence
  Synthetic
cuugaauuggccauaagguaaa

SEQ ID NO: 177691 - RNA, 23 nt, Artificial Sequence
  Synthetic
acuugaauuggccauaagguaaa

SEQ ID NO: 177692 - RNA, 24 nt, Artificial Sequence
  Synthetic
uacuugaauuggccauaagguaaa

SEQ ID NO: 177693 - RNA, 18 nt, Artificial Sequence
  Synthetic
uugaagacaggagguaaa

SEQ ID NO: 177694 - RNA, 19 nt, Artificial Sequence
  Synthetic
auugaagacaggagguaaa

SEQ ID NO: 177695 - RNA, 20 nt, Artificial Sequence
  Synthetic
aauugaagacaggagguaaa

SEQ ID NO: 177696 - RNA, 21 nt, Artificial Sequence
  Synthetic
aaauugaagacaggagguaaa

SEQ ID NO: 177697 - RNA, 22 nt, Artificial Sequence
  Synthetic
gaaauugaagacaggagguaaa

SEQ ID NO: 177698 - RNA, 23 nt, Artificial Sequence
  Synthetic
ggaaauugaagacaggagguaaa

SEQ ID NO: 177699 - RNA, 24 nt, Artificial Sequence
  Synthetic
aggaaauugaagacaggagguaaa

SEQ ID NO: 177700 - RNA, 18 nt, Artificial Sequence
  Synthetic
cagaaaaugugagguaaa

SEQ ID NO: 177701 - RNA, 19 nt, Artificial Sequence
  Synthetic
gcagaaaaugugagguaaa

SEQ ID NO: 177702 - RNA, 20 nt, Artificial Sequence
  Synthetic
agcagaaaaugugagguaaa

SEQ ID NO: 177703 - RNA, 21 nt, Artificial Sequence
  Synthetic
gagcagaaaaugugagguaaa

SEQ ID NO: 177704 - RNA, 22 nt, Artificial Sequence
  Synthetic
ugagcagaaaaugugagguaaa

SEQ ID NO: 177705 - RNA, 23 nt, Artificial Sequence
  Synthetic
gugagcagaaaaugugagguaaa

SEQ ID NO: 177706 - RNA, 24 nt, Artificial Sequence
  Synthetic
ggugagcagaaaaugugagguaaa

SEQ ID NO: 177707 - RNA, 18 nt, Artificial Sequence
  Synthetic
agguuauuaguagguaaa

SEQ ID NO: 177708 - RNA, 19 nt, Artificial Sequence
  Synthetic
aagguuauuaguagguaaa

SEQ ID NO: 177709 - RNA, 20 nt, Artificial Sequence
  Synthetic
uaagguuauuaguagguaaa

SEQ ID NO: 177710 - RNA, 21 nt, Artificial Sequence
  Synthetic
cuaagguuauuaguagguaaa

SEQ ID NO: 177711 - RNA, 22 nt, Artificial Sequence
  Synthetic
ucuaagguuauuaguagguaaa

SEQ ID NO: 177712 - RNA, 23 nt, Artificial Sequence
  Synthetic
uucuaagguuauuaguagguaaa

SEQ ID NO: 177713 - RNA, 24 nt, Artificial Sequence
  Synthetic
auucuaagguuauuaguagguaaa

SEQ ID NO: 177714 - RNA, 18 nt, Artificial Sequence
  Synthetic
aaugagaagaccgguaaa

SEQ ID NO: 177715 - RNA, 19 nt, Artificial Sequence
  Synthetic
caaugagaagaccgguaaa

SEQ ID NO: 177716 - RNA, 20 nt, Artificial Sequence
  Synthetic
acaaugagaagaccgguaaa

SEQ ID NO: 177717 - RNA, 21 nt, Artificial Sequence
  Synthetic
uacaaugagaagaccgguaaa

SEQ ID NO: 177718 - RNA, 22 nt, Artificial Sequence
  Synthetic
auacaaugagaagaccgguaaa

SEQ ID NO: 177719 - RNA, 23 nt, Artificial Sequence
  Synthetic
cauacaaugagaagaccgguaaa

SEQ ID NO: 177720 - RNA, 24 nt, Artificial Sequence
  Synthetic
acauacaaugagaagaccgguaaa

SEQ ID NO: 177721 - RNA, 18 nt, Artificial Sequence
  Synthetic
aaaauaagcaaggguaaa

SEQ ID NO: 177722 - RNA, 19 nt, Artificial Sequence
  Synthetic
gaaaauaagcaaggguaaa

SEQ ID NO: 177723 - RNA, 20 nt, Artificial Sequence
  Synthetic
ggaaaauaagcaaggguaaa

SEQ ID NO: 177724 - RNA, 21 nt, Artificial Sequence
  Synthetic
uggaaaauaagcaaggguaaa

SEQ ID NO: 177725 - RNA, 22 nt, Artificial Sequence
  Synthetic
auggaaaauaagcaaggguaaa

SEQ ID NO: 177726 - RNA, 23 nt, Artificial Sequence
  Synthetic
aauggaaaauaagcaaggguaaa

SEQ ID NO: 177727 - RNA, 24 nt, Artificial Sequence
  Synthetic
aaauggaaaauaagcaaggguaaa

SEQ ID NO: 177728 - RNA, 18 nt, Artificial Sequence
  Synthetic
agguuuuuaggggguaaa

SEQ ID NO: 177729 - RNA, 19 nt, Artificial Sequence
  Synthetic
gagguuuuuaggggguaaa

SEQ ID NO: 177730 - RNA, 20 nt, Artificial Sequence
  Synthetic
ugagguuuuuaggggguaaa

SEQ ID NO: 177731 - RNA, 21 nt, Artificial Sequence
  Synthetic
uugagguuuuuaggggguaaa

SEQ ID NO: 177732 - RNA, 22 nt, Artificial Sequence
  Synthetic
uuugagguuuuuaggggguaaa

SEQ ID NO: 177733 - RNA, 23 nt, Artificial Sequence
  Synthetic
uuuugagguuuuuaggggguaaa

SEQ ID NO: 177734 - RNA, 24 nt, Artificial Sequence
  Synthetic
auuuugagguuuuuaggggguaaa

SEQ ID NO: 177735 - RNA, 18 nt, Artificial Sequence
  Synthetic
acauuacauaaugguaaa

SEQ ID NO: 177736 - RNA, 19 nt, Artificial Sequence
  Synthetic
uacauuacauaaugguaaa

SEQ ID NO: 177737 - RNA, 20 nt, Artificial Sequence
  Synthetic
uuacauuacauaaugguaaa

SEQ ID NO: 177738 - RNA, 21 nt, Artificial Sequence
  Synthetic
auuacauuacauaaugguaaa

SEQ ID NO: 177739 - RNA, 22 nt, Artificial Sequence
  Synthetic
uauuacauuacauaaugguaaa

SEQ ID NO: 177740 - RNA, 23 nt, Artificial Sequence
  Synthetic
guauuacauuacauaaugguaaa

SEQ ID NO: 177741 - RNA, 24 nt, Artificial Sequence
  Synthetic
gguauuacauuacauaaugguaaa

SEQ ID NO: 177742 - RNA, 18 nt, Artificial Sequence
  Synthetic
uuucguuaccuugguaaa

SEQ ID NO: 177743 - RNA, 19 nt, Artificial Sequence
  Synthetic
guuucguuaccuugguaaa

SEQ ID NO: 177744 - RNA, 20 nt, Artificial Sequence
  Synthetic
aguuucguuaccuugguaaa

SEQ ID NO: 177745 - RNA, 21 nt, Artificial Sequence
  Synthetic
aaguuucguuaccuugguaaa

SEQ ID NO: 177746 - RNA, 22 nt, Artificial Sequence
  Synthetic
caaguuucguuaccuugguaaa

SEQ ID NO: 177747 - RNA, 23 nt, Artificial Sequence
  Synthetic
acaaguuucguuaccuugguaaa

SEQ ID NO: 177748 - RNA, 24 nt, Artificial Sequence
  Synthetic
aacaaguuucguuaccuugguaaa

SEQ ID NO: 177749 - RNA, 18 nt, Artificial Sequence
  Synthetic
uuaauuuuaaaauguaaa

SEQ ID NO: 177750 - RNA, 19 nt, Artificial Sequence
  Synthetic
auuaauuuuaaaauguaaa

SEQ ID NO: 177751 - RNA, 20 nt, Artificial Sequence
  Synthetic
uauuaauuuuaaaauguaaa

SEQ ID NO: 177752 - RNA, 21 nt, Artificial Sequence
  Synthetic
auauuaauuuuaaaauguaaa

SEQ ID NO: 177753 - RNA, 22 nt, Artificial Sequence
  Synthetic
uauauuaauuuuaaaauguaaa

SEQ ID NO: 177754 - RNA, 23 nt, Artificial Sequence
  Synthetic
cuauauuaauuuuaaaauguaaa

SEQ ID NO: 177755 - RNA, 24 nt, Artificial Sequence
  Synthetic
ccuauauuaauuuuaaaauguaaa

SEQ ID NO: 177756 - RNA, 18 nt, Artificial Sequence
  Synthetic
gagaaggagcaauguaaa

SEQ ID NO: 177757 - RNA, 19 nt, Artificial Sequence
  Synthetic
ugagaaggagcaauguaaa

SEQ ID NO: 177758 - RNA, 20 nt, Artificial Sequence
  Synthetic
gugagaaggagcaauguaaa

SEQ ID NO: 177759 - RNA, 21 nt, Artificial Sequence
  Synthetic
agugagaaggagcaauguaaa

SEQ ID NO: 177760 - RNA, 22 nt, Artificial Sequence
  Synthetic
cagugagaaggagcaauguaaa

SEQ ID NO: 177761 - RNA, 23 nt, Artificial Sequence
  Synthetic
ucagugagaaggagcaauguaaa

SEQ ID NO: 177762 - RNA, 24 nt, Artificial Sequence
  Synthetic
gucagugagaaggagcaauguaaa

SEQ ID NO: 177763 - RNA, 18 nt, Artificial Sequence
  Synthetic
aaaugagucccauguaaa

SEQ ID NO: 177764 - RNA, 19 nt, Artificial Sequence
  Synthetic
aaaaugagucccauguaaa

SEQ ID NO: 177765 - RNA, 20 nt, Artificial Sequence
  Synthetic
gaaaaugagucccauguaaa

SEQ ID NO: 177766 - RNA, 21 nt, Artificial Sequence
  Synthetic
agaaaaugagucccauguaaa

SEQ ID NO: 177767 - RNA, 22 nt, Artificial Sequence
  Synthetic
aagaaaaugagucccauguaaa

SEQ ID NO: 177768 - RNA, 23 nt, Artificial Sequence
  Synthetic
aaagaaaaugagucccauguaaa

SEQ ID NO: 177769 - RNA, 24 nt, Artificial Sequence
  Synthetic
caaagaaaaugagucccauguaaa

SEQ ID NO: 177770 - RNA, 18 nt, Artificial Sequence
  Synthetic
guaagcacaucauguaaa

SEQ ID NO: 177771 - RNA, 19 nt, Artificial Sequence
  Synthetic
aguaagcacaucauguaaa

SEQ ID NO: 177772 - RNA, 20 nt, Artificial Sequence
  Synthetic
uaguaagcacaucauguaaa

SEQ ID NO: 177773 - RNA, 21 nt, Artificial Sequence
  Synthetic
guaguaagcacaucauguaaa

SEQ ID NO: 177774 - RNA, 22 nt, Artificial Sequence
  Synthetic
uguaguaagcacaucauguaaa

SEQ ID NO: 177775 - RNA, 23 nt, Artificial Sequence
  Synthetic
guguaguaagcacaucauguaaa

SEQ ID NO: 177776 - RNA, 24 nt, Artificial Sequence
  Synthetic
uguguaguaagcacaucauguaaa

SEQ ID NO: 177777 - RNA, 18 nt, Artificial Sequence
  Synthetic
guccuuuugggauguaaa

SEQ ID NO: 177778 - RNA, 19 nt, Artificial Sequence
  Synthetic
aguccuuuugggauguaaa

SEQ ID NO: 177779 - RNA, 20 nt, Artificial Sequence
  Synthetic
caguccuuuugggauguaaa

SEQ ID NO: 177780 - RNA, 21 nt, Artificial Sequence
  Synthetic
acaguccuuuugggauguaaa

SEQ ID NO: 177781 - RNA, 22 nt, Artificial Sequence
  Synthetic
cacaguccuuuugggauguaaa

SEQ ID NO: 177782 - RNA, 23 nt, Artificial Sequence
  Synthetic
gcacaguccuuuugggauguaaa

SEQ ID NO: 177783 - RNA, 24 nt, Artificial Sequence
  Synthetic
ggcacaguccuuuugggauguaaa

SEQ ID NO: 177784 - RNA, 18 nt, Artificial Sequence
  Synthetic
augcauuagugauguaaa

SEQ ID NO: 177785 - RNA, 19 nt, Artificial Sequence
  Synthetic
gaugcauuagugauguaaa

SEQ ID NO: 177786 - RNA, 20 nt, Artificial Sequence
  Synthetic
ugaugcauuagugauguaaa

SEQ ID NO: 177787 - RNA, 21 nt, Artificial Sequence
  Synthetic
cugaugcauuagugauguaaa

SEQ ID NO: 177788 - RNA, 22 nt, Artificial Sequence
  Synthetic
gcugaugcauuagugauguaaa

SEQ ID NO: 177789 - RNA, 23 nt, Artificial Sequence
  Synthetic
ugcugaugcauuagugauguaaa

SEQ ID NO: 177790 - RNA, 24 nt, Artificial Sequence
  Synthetic
cugcugaugcauuagugauguaaa

SEQ ID NO: 177791 - RNA, 18 nt, Artificial Sequence
  Synthetic
ccagagagaauauguaaa

SEQ ID NO: 177792 - RNA, 19 nt, Artificial Sequence
  Synthetic
accagagagaauauguaaa

SEQ ID NO: 177793 - RNA, 20 nt, Artificial Sequence
  Synthetic
caccagagagaauauguaaa

SEQ ID NO: 177794 - RNA, 21 nt, Artificial Sequence
  Synthetic
ucaccagagagaauauguaaa

SEQ ID NO: 177795 - RNA, 22 nt, Artificial Sequence
  Synthetic
cucaccagagagaauauguaaa

SEQ ID NO: 177796 - RNA, 23 nt, Artificial Sequence
  Synthetic
acucaccagagagaauauguaaa

SEQ ID NO: 177797 - RNA, 24 nt, Artificial Sequence
  Synthetic
aacucaccagagagaauauguaaa

SEQ ID NO: 177798 - RNA, 18 nt, Artificial Sequence
  Synthetic
uuacauaugcuauguaaa

SEQ ID NO: 177799 - RNA, 19 nt, Artificial Sequence
  Synthetic
auuacauaugcuauguaaa

SEQ ID NO: 177800 - RNA, 20 nt, Artificial Sequence
  Synthetic
uauuacauaugcuauguaaa

SEQ ID NO: 177801 - RNA, 21 nt, Artificial Sequence
  Synthetic
auauuacauaugcuauguaaa

SEQ ID NO: 177802 - RNA, 22 nt, Artificial Sequence
  Synthetic
cauauuacauaugcuauguaaa

SEQ ID NO: 177803 - RNA, 23 nt, Artificial Sequence
  Synthetic
gcauauuacauaugcuauguaaa

SEQ ID NO: 177804 - RNA, 24 nt, Artificial Sequence
  Synthetic
ugcauauuacauaugcuauguaaa

SEQ ID NO: 177805 - RNA, 18 nt, Artificial Sequence
  Synthetic
uauuucgucaacuguaaa

SEQ ID NO: 177806 - RNA, 19 nt, Artificial Sequence
  Synthetic
cuauuucgucaacuguaaa

SEQ ID NO: 177807 - RNA, 20 nt, Artificial Sequence
  Synthetic
ucuauuucgucaacuguaaa

SEQ ID NO: 177808 - RNA, 21 nt, Artificial Sequence
  Synthetic
uucuauuucgucaacuguaaa

SEQ ID NO: 177809 - RNA, 22 nt, Artificial Sequence
  Synthetic
cuucuauuucgucaacuguaaa

SEQ ID NO: 177810 - RNA, 23 nt, Artificial Sequence
  Synthetic
ucuucuauuucgucaacuguaaa

SEQ ID NO: 177811 - RNA, 24 nt, Artificial Sequence
  Synthetic
cucuucuauuucgucaacuguaaa

SEQ ID NO: 177812 - RNA, 18 nt, Artificial Sequence
  Synthetic
ccaagcacggacuguaaa

SEQ ID NO: 177813 - RNA, 19 nt, Artificial Sequence
  Synthetic
accaagcacggacuguaaa

SEQ ID NO: 177814 - RNA, 20 nt, Artificial Sequence
  Synthetic
gaccaagcacggacuguaaa

SEQ ID NO: 177815 - RNA, 21 nt, Artificial Sequence
  Synthetic
agaccaagcacggacuguaaa

SEQ ID NO: 177816 - RNA, 22 nt, Artificial Sequence
  Synthetic
aagaccaagcacggacuguaaa

SEQ ID NO: 177817 - RNA, 23 nt, Artificial Sequence
  Synthetic
uaagaccaagcacggacuguaaa

SEQ ID NO: 177818 - RNA, 24 nt, Artificial Sequence
  Synthetic
uuaagaccaagcacggacuguaaa

SEQ ID NO: 177819 - RNA, 18 nt, Artificial Sequence
  Synthetic
ugugcccucgccuguaaa

SEQ ID NO: 177820 - RNA, 19 nt, Artificial Sequence
  Synthetic
uugugcccucgccuguaaa

SEQ ID NO: 177821 - RNA, 20 nt, Artificial Sequence
  Synthetic
uuugugcccucgccuguaaa

SEQ ID NO: 177822 - RNA, 21 nt, Artificial Sequence
  Synthetic
cuuugugcccucgccuguaaa

SEQ ID NO: 177823 - RNA, 22 nt, Artificial Sequence
  Synthetic
ucuuugugcccucgccuguaaa

SEQ ID NO: 177824 - RNA, 23 nt, Artificial Sequence
  Synthetic
cucuuugugcccucgccuguaaa

SEQ ID NO: 177825 - RNA, 24 nt, Artificial Sequence
  Synthetic
ucucuuugugcccucgccuguaaa

SEQ ID NO: 177826 - RNA, 18 nt, Artificial Sequence
  Synthetic
uuuauagucuccuguaaa

SEQ ID NO: 177827 - RNA, 19 nt, Artificial Sequence
  Synthetic
uuuuauagucuccuguaaa

SEQ ID NO: 177828 - RNA, 20 nt, Artificial Sequence
  Synthetic
guuuuauagucuccuguaaa

SEQ ID NO: 177829 - RNA, 21 nt, Artificial Sequence
  Synthetic
gguuuuauagucuccuguaaa

SEQ ID NO: 177830 - RNA, 22 nt, Artificial Sequence
  Synthetic
agguuuuauagucuccuguaaa

SEQ ID NO: 177831 - RNA, 23 nt, Artificial Sequence
  Synthetic
aagguuuuauagucuccuguaaa

SEQ ID NO: 177832 - RNA, 24 nt, Artificial Sequence
  Synthetic
aaagguuuuauagucuccuguaaa

SEQ ID NO: 177833 - RNA, 18 nt, Artificial Sequence
  Synthetic
gcuucccucagcuguaaa

SEQ ID NO: 177834 - RNA, 19 nt, Artificial Sequence
  Synthetic
ggcuucccucagcuguaaa

SEQ ID NO: 177835 - RNA, 20 nt, Artificial Sequence
  Synthetic
gggcuucccucagcuguaaa

SEQ ID NO: 177836 - RNA, 21 nt, Artificial Sequence
  Synthetic
agggcuucccucagcuguaaa

SEQ ID NO: 177837 - RNA, 22 nt, Artificial Sequence
  Synthetic
aagggcuucccucagcuguaaa

SEQ ID NO: 177838 - RNA, 23 nt, Artificial Sequence
  Synthetic
caagggcuucccucagcuguaaa

SEQ ID NO: 177839 - RNA, 24 nt, Artificial Sequence
  Synthetic
ucaagggcuucccucagcuguaaa

SEQ ID NO: 177840 - RNA, 18 nt, Artificial Sequence
  Synthetic
gguugucucaucuguaaa

SEQ ID NO: 177841 - RNA, 19 nt, Artificial Sequence
  Synthetic
ugguugucucaucuguaaa

SEQ ID NO: 177842 - RNA, 20 nt, Artificial Sequence
  Synthetic
uugguugucucaucuguaaa

SEQ ID NO: 177843 - RNA, 21 nt, Artificial Sequence
  Synthetic
cuugguugucucaucuguaaa

SEQ ID NO: 177844 - RNA, 22 nt, Artificial Sequence
  Synthetic
ucuugguugucucaucuguaaa

SEQ ID NO: 177845 - RNA, 23 nt, Artificial Sequence
  Synthetic
gucuugguugucucaucuguaaa

SEQ ID NO: 177846 - RNA, 24 nt, Artificial Sequence
  Synthetic
agucuugguugucucaucuguaaa

SEQ ID NO: 177847 - RNA, 18 nt, Artificial Sequence
  Synthetic
cccaccucucucuguaaa

SEQ ID NO: 177848 - RNA, 19 nt, Artificial Sequence
  Synthetic
gcccaccucucucuguaaa

SEQ ID NO: 177849 - RNA, 20 nt, Artificial Sequence
  Synthetic
agcccaccucucucuguaaa

SEQ ID NO: 177850 - RNA, 21 nt, Artificial Sequence
  Synthetic
aagcccaccucucucuguaaa

SEQ ID NO: 177851 - RNA, 22 nt, Artificial Sequence
  Synthetic
caagcccaccucucucuguaaa

SEQ ID NO: 177852 - RNA, 23 nt, Artificial Sequence
  Synthetic
ccaagcccaccucucucuguaaa

SEQ ID NO: 177853 - RNA, 24 nt, Artificial Sequence
  Synthetic
uccaagcccaccucucucuguaaa

SEQ ID NO: 177854 - RNA, 18 nt, Artificial Sequence
  Synthetic
aaauucucaaaguguaaa

SEQ ID NO: 177855 - RNA, 19 nt, Artificial Sequence
  Synthetic
aaaauucucaaaguguaaa

SEQ ID NO: 177856 - RNA, 20 nt, Artificial Sequence
  Synthetic
gaaaauucucaaaguguaaa

SEQ ID NO: 177857 - RNA, 21 nt, Artificial Sequence
  Synthetic
ggaaaauucucaaaguguaaa

SEQ ID NO: 177858 - RNA, 22 nt, Artificial Sequence
  Synthetic
uggaaaauucucaaaguguaaa

SEQ ID NO: 177859 - RNA, 23 nt, Artificial Sequence
  Synthetic
cuggaaaauucucaaaguguaaa

SEQ ID NO: 177860 - RNA, 24 nt, Artificial Sequence
  Synthetic
acuggaaaauucucaaaguguaaa

SEQ ID NO: 177861 - RNA, 18 nt, Artificial Sequence
  Synthetic
cccuaagaagaguguaaa

SEQ ID NO: 177862 - RNA, 19 nt, Artificial Sequence
  Synthetic
gcccuaagaagaguguaaa

SEQ ID NO: 177863 - RNA, 20 nt, Artificial Sequence
  Synthetic
agcccuaagaagaguguaaa

SEQ ID NO: 177864 - RNA, 21 nt, Artificial Sequence
  Synthetic
gagcccuaagaagaguguaaa

SEQ ID NO: 177865 - RNA, 22 nt, Artificial Sequence
  Synthetic
ggagcccuaagaagaguguaaa

SEQ ID NO: 177866 - RNA, 23 nt, Artificial Sequence
  Synthetic
aggagcccuaagaagaguguaaa

SEQ ID NO: 177867 - RNA, 24 nt, Artificial Sequence
  Synthetic
aaggagcccuaagaagaguguaaa

SEQ ID NO: 177868 - RNA, 18 nt, Artificial Sequence
  Synthetic
ccacaaauaucguguaaa

SEQ ID NO: 177869 - RNA, 19 nt, Artificial Sequence
  Synthetic
uccacaaauaucguguaaa

SEQ ID NO: 177870 - RNA, 20 nt, Artificial Sequence
  Synthetic
uuccacaaauaucguguaaa

SEQ ID NO: 177871 - RNA, 21 nt, Artificial Sequence
  Synthetic
uuuccacaaauaucguguaaa

SEQ ID NO: 177872 - RNA, 22 nt, Artificial Sequence
  Synthetic
uuuuccacaaauaucguguaaa

SEQ ID NO: 177873 - RNA, 23 nt, Artificial Sequence
  Synthetic
guuuuccacaaauaucguguaaa

SEQ ID NO: 177874 - RNA, 24 nt, Artificial Sequence
  Synthetic
aguuuuccacaaauaucguguaaa

SEQ ID NO: 177875 - RNA, 18 nt, Artificial Sequence
  Synthetic
aaaaagugaauguguaaa

SEQ ID NO: 177876 - RNA, 19 nt, Artificial Sequence
  Synthetic
caaaaagugaauguguaaa

SEQ ID NO: 177877 - RNA, 20 nt, Artificial Sequence
  Synthetic
ucaaaaagugaauguguaaa

SEQ ID NO: 177878 - RNA, 21 nt, Artificial Sequence
  Synthetic
aucaaaaagugaauguguaaa

SEQ ID NO: 177879 - RNA, 22 nt, Artificial Sequence
  Synthetic
caucaaaaagugaauguguaaa

SEQ ID NO: 177880 - RNA, 23 nt, Artificial Sequence
  Synthetic
acaucaaaaagugaauguguaaa

SEQ ID NO: 177881 - RNA, 24 nt, Artificial Sequence
  Synthetic
aacaucaaaaagugaauguguaaa

SEQ ID NO: 177882 - RNA, 18 nt, Artificial Sequence
  Synthetic
ugacugauccuguguaaa

SEQ ID NO: 177883 - RNA, 19 nt, Artificial Sequence
  Synthetic
uugacugauccuguguaaa

SEQ ID NO: 177884 - RNA, 20 nt, Artificial Sequence
  Synthetic
uuugacugauccuguguaaa

SEQ ID NO: 177885 - RNA, 21 nt, Artificial Sequence
  Synthetic
guuugacugauccuguguaaa

SEQ ID NO: 177886 - RNA, 22 nt, Artificial Sequence
  Synthetic
uguuugacugauccuguguaaa

SEQ ID NO: 177887 - RNA, 23 nt, Artificial Sequence
  Synthetic
guguuugacugauccuguguaaa

SEQ ID NO: 177888 - RNA, 24 nt, Artificial Sequence
  Synthetic
aguguuugacugauccuguguaaa

SEQ ID NO: 177889 - RNA, 18 nt, Artificial Sequence
  Synthetic
cuauuuggucuguguaaa

SEQ ID NO: 177890 - RNA, 19 nt, Artificial Sequence
  Synthetic
ccuauuuggucuguguaaa

SEQ ID NO: 177891 - RNA, 20 nt, Artificial Sequence
  Synthetic
gccuauuuggucuguguaaa

SEQ ID NO: 177892 - RNA, 21 nt, Artificial Sequence
  Synthetic
agccuauuuggucuguguaaa

SEQ ID NO: 177893 - RNA, 22 nt, Artificial Sequence
  Synthetic
gagccuauuuggucuguguaaa

SEQ ID NO: 177894 - RNA, 23 nt, Artificial Sequence
  Synthetic
agagccuauuuggucuguguaaa

SEQ ID NO: 177895 - RNA, 24 nt, Artificial Sequence
  Synthetic
cagagccuauuuggucuguguaaa

SEQ ID NO: 177896 - RNA, 18 nt, Artificial Sequence
  Synthetic
uagauugugguguguaaa

SEQ ID NO: 177897 - RNA, 19 nt, Artificial Sequence
  Synthetic
auagauugugguguguaaa

SEQ ID NO: 177898 - RNA, 20 nt, Artificial Sequence
  Synthetic
aauagauugugguguguaaa

SEQ ID NO: 177899 - RNA, 21 nt, Artificial Sequence
  Synthetic
aaauagauugugguguguaaa

SEQ ID NO: 177900 - RNA, 22 nt, Artificial Sequence
  Synthetic
gaaauagauugugguguguaaa

SEQ ID NO: 177901 - RNA, 23 nt, Artificial Sequence
  Synthetic
ugaaauagauugugguguguaaa

SEQ ID NO: 177902 - RNA, 24 nt, Artificial Sequence
  Synthetic
cugaaauagauugugguguguaaa

SEQ ID NO: 177903 - RNA, 18 nt, Artificial Sequence
  Synthetic
aaaugacgauuguguaaa

SEQ ID NO: 177904 - RNA, 19 nt, Artificial Sequence
  Synthetic
aaaaugacgauuguguaaa

SEQ ID NO: 177905 - RNA, 20 nt, Artificial Sequence
  Synthetic
aaaaaugacgauuguguaaa

SEQ ID NO: 177906 - RNA, 21 nt, Artificial Sequence
  Synthetic
gaaaaaugacgauuguguaaa

SEQ ID NO: 177907 - RNA, 22 nt, Artificial Sequence
  Synthetic
ggaaaaaugacgauuguguaaa

SEQ ID NO: 177908 - RNA, 23 nt, Artificial Sequence
  Synthetic
aggaaaaaugacgauuguguaaa

SEQ ID NO: 177909 - RNA, 24 nt, Artificial Sequence
  Synthetic
aaggaaaaaugacgauuguguaaa

SEQ ID NO: 177910 - RNA, 18 nt, Artificial Sequence
  Synthetic
uggucugugaauuguaaa

SEQ ID NO: 177911 - RNA, 19 nt, Artificial Sequence
  Synthetic
uuggucugugaauuguaaa

SEQ ID NO: 177912 - RNA, 20 nt, Artificial Sequence
  Synthetic
cuuggucugugaauuguaaa

SEQ ID NO: 177913 - RNA, 21 nt, Artificial Sequence
  Synthetic
acuuggucugugaauuguaaa

SEQ ID NO: 177914 - RNA, 22 nt, Artificial Sequence
  Synthetic
uacuuggucugugaauuguaaa

SEQ ID NO: 177915 - RNA, 23 nt, Artificial Sequence
  Synthetic
uuacuuggucugugaauuguaaa

SEQ ID NO: 177916 - RNA, 24 nt, Artificial Sequence
  Synthetic
guuacuuggucugugaauuguaaa

SEQ ID NO: 177917 - RNA, 18 nt, Artificial Sequence
  Synthetic
uuggaaagccauuguaaa

SEQ ID NO: 177918 - RNA, 19 nt, Artificial Sequence
  Synthetic
cuuggaaagccauuguaaa

SEQ ID NO: 177919 - RNA, 20 nt, Artificial Sequence
  Synthetic
ucuuggaaagccauuguaaa

SEQ ID NO: 177920 - RNA, 21 nt, Artificial Sequence
  Synthetic
uucuuggaaagccauuguaaa

SEQ ID NO: 177921 - RNA, 22 nt, Artificial Sequence
  Synthetic
uuucuuggaaagccauuguaaa

SEQ ID NO: 177922 - RNA, 23 nt, Artificial Sequence
  Synthetic
guuucuuggaaagccauuguaaa

SEQ ID NO: 177923 - RNA, 24 nt, Artificial Sequence
  Synthetic
gguuucuuggaaagccauuguaaa

SEQ ID NO: 177924 - RNA, 18 nt, Artificial Sequence
  Synthetic
cucugaaaggauuguaaa

SEQ ID NO: 177925 - RNA, 19 nt, Artificial Sequence
  Synthetic
acucugaaaggauuguaaa

SEQ ID NO: 177926 - RNA, 20 nt, Artificial Sequence
  Synthetic
aacucugaaaggauuguaaa

SEQ ID NO: 177927 - RNA, 21 nt, Artificial Sequence
  Synthetic
caacucugaaaggauuguaaa

SEQ ID NO: 177928 - RNA, 22 nt, Artificial Sequence
  Synthetic
gcaacucugaaaggauuguaaa

SEQ ID NO: 177929 - RNA, 23 nt, Artificial Sequence
  Synthetic
ggcaacucugaaaggauuguaaa

SEQ ID NO: 177930 - RNA, 24 nt, Artificial Sequence
  Synthetic
uggcaacucugaaaggauuguaaa

SEQ ID NO: 177931 - RNA, 18 nt, Artificial Sequence
  Synthetic
auauauucauauuguaaa

SEQ ID NO: 177932 - RNA, 19 nt, Artificial Sequence
  Synthetic
cauauauucauauuguaaa

SEQ ID NO: 177933 - RNA, 20 nt, Artificial Sequence
  Synthetic
acauauauucauauuguaaa

SEQ ID NO: 177934 - RNA, 21 nt, Artificial Sequence
  Synthetic
cacauauauucauauuguaaa

SEQ ID NO: 177935 - RNA, 22 nt, Artificial Sequence
  Synthetic
acacauauauucauauuguaaa

SEQ ID NO: 177936 - RNA, 23 nt, Artificial Sequence
  Synthetic
cacacauauauucauauuguaaa

SEQ ID NO: 177937 - RNA, 24 nt, Artificial Sequence
  Synthetic
acacacauauauucauauuguaaa

SEQ ID NO: 177938 - RNA, 18 nt, Artificial Sequence
  Synthetic
cuuuuucgauauuguaaa

SEQ ID NO: 177939 - RNA, 19 nt, Artificial Sequence
  Synthetic
ucuuuuucgauauuguaaa

SEQ ID NO: 177940 - RNA, 20 nt, Artificial Sequence
  Synthetic
uucuuuuucgauauuguaaa

SEQ ID NO: 177941 - RNA, 21 nt, Artificial Sequence
  Synthetic
auucuuuuucgauauuguaaa

SEQ ID NO: 177942 - RNA, 22 nt, Artificial Sequence
  Synthetic
uauucuuuuucgauauuguaaa

SEQ ID NO: 177943 - RNA, 23 nt, Artificial Sequence
  Synthetic
auauucuuuuucgauauuguaaa

SEQ ID NO: 177944 - RNA, 24 nt, Artificial Sequence
  Synthetic
uauauucuuuuucgauauuguaaa

SEQ ID NO: 177945 - RNA, 18 nt, Artificial Sequence
  Synthetic
uuguagauaacuuguaaa

SEQ ID NO: 177946 - RNA, 19 nt, Artificial Sequence
  Synthetic
cuuguagauaacuuguaaa

SEQ ID NO: 177947 - RNA, 20 nt, Artificial Sequence
  Synthetic
acuuguagauaacuuguaaa

SEQ ID NO: 177948 - RNA, 21 nt, Artificial Sequence
  Synthetic
aacuuguagauaacuuguaaa

SEQ ID NO: 177949 - RNA, 22 nt, Artificial Sequence
  Synthetic
aaacuuguagauaacuuguaaa

SEQ ID NO: 177950 - RNA, 23 nt, Artificial Sequence
  Synthetic
gaaacuuguagauaacuuguaaa

SEQ ID NO: 177951 - RNA, 24 nt, Artificial Sequence
  Synthetic
agaaacuuguagauaacuuguaaa

SEQ ID NO: 177952 - RNA, 18 nt, Artificial Sequence
  Synthetic
gagagucuugcuuguaaa

SEQ ID NO: 177953 - RNA, 19 nt, Artificial Sequence
  Synthetic
ugagagucuugcuuguaaa

SEQ ID NO: 177954 - RNA, 20 nt, Artificial Sequence
  Synthetic
uugagagucuugcuuguaaa

SEQ ID NO: 177955 - RNA, 21 nt, Artificial Sequence
  Synthetic
cuugagagucuugcuuguaaa

SEQ ID NO: 177956 - RNA, 22 nt, Artificial Sequence
  Synthetic
gcuugagagucuugcuuguaaa

SEQ ID NO: 177957 - RNA, 23 nt, Artificial Sequence
  Synthetic
ggcuugagagucuugcuuguaaa

SEQ ID NO: 177958 - RNA, 24 nt, Artificial Sequence
  Synthetic
uggcuugagagucuugcuuguaaa

SEQ ID NO: 177959 - RNA, 18 nt, Artificial Sequence
  Synthetic
gcguggcauuguuguaaa

SEQ ID NO: 177960 - RNA, 19 nt, Artificial Sequence
  Synthetic
ggcguggcauuguuguaaa

SEQ ID NO: 177961 - RNA, 20 nt, Artificial Sequence
  Synthetic
uggcguggcauuguuguaaa

SEQ ID NO: 177962 - RNA, 21 nt, Artificial Sequence
  Synthetic
uuggcguggcauuguuguaaa

SEQ ID NO: 177963 - RNA, 22 nt, Artificial Sequence
  Synthetic
cuuggcguggcauuguuguaaa

SEQ ID NO: 177964 - RNA, 23 nt, Artificial Sequence
  Synthetic
gcuuggcguggcauuguuguaaa

SEQ ID NO: 177965 - RNA, 24 nt, Artificial Sequence
  Synthetic
ugcuuggcguggcauuguuguaaa

SEQ ID NO: 177966 - RNA, 18 nt, Artificial Sequence
  Synthetic
uguuucuccauuuguaaa

SEQ ID NO: 177967 - RNA, 19 nt, Artificial Sequence
  Synthetic
uuguuucuccauuuguaaa

SEQ ID NO: 177968 - RNA, 20 nt, Artificial Sequence
  Synthetic
uuuguuucuccauuuguaaa

SEQ ID NO: 177969 - RNA, 21 nt, Artificial Sequence
  Synthetic
uuuuguuucuccauuuguaaa

SEQ ID NO: 177970 - RNA, 22 nt, Artificial Sequence
  Synthetic
cuuuuguuucuccauuuguaaa

SEQ ID NO: 177971 - RNA, 23 nt, Artificial Sequence
  Synthetic
acuuuuguuucuccauuuguaaa

SEQ ID NO: 177972 - RNA, 24 nt, Artificial Sequence
  Synthetic
aacuuuuguuucuccauuuguaaa

SEQ ID NO: 177973 - RNA, 18 nt, Artificial Sequence
  Synthetic
aagaacauacuuuguaaa

SEQ ID NO: 177974 - RNA, 19 nt, Artificial Sequence
  Synthetic
caagaacauacuuuguaaa

SEQ ID NO: 177975 - RNA, 20 nt, Artificial Sequence
  Synthetic
ucaagaacauacuuuguaaa

SEQ ID NO: 177976 - RNA, 21 nt, Artificial Sequence
  Synthetic
uucaagaacauacuuuguaaa

SEQ ID NO: 177977 - RNA, 22 nt, Artificial Sequence
  Synthetic
uuucaagaacauacuuuguaaa

SEQ ID NO: 177978 - RNA, 23 nt, Artificial Sequence
  Synthetic
auuucaagaacauacuuuguaaa

SEQ ID NO: 177979 - RNA, 24 nt, Artificial Sequence
  Synthetic
gauuucaagaacauacuuuguaaa

SEQ ID NO: 177980 - RNA, 18 nt, Artificial Sequence
  Synthetic
ucauagcaucuuuguaaa

SEQ ID NO: 177981 - RNA, 19 nt, Artificial Sequence
  Synthetic
aucauagcaucuuuguaaa

SEQ ID NO: 177982 - RNA, 20 nt, Artificial Sequence
  Synthetic
caucauagcaucuuuguaaa

SEQ ID NO: 177983 - RNA, 21 nt, Artificial Sequence
  Synthetic
gcaucauagcaucuuuguaaa

SEQ ID NO: 177984 - RNA, 22 nt, Artificial Sequence
  Synthetic
ugcaucauagcaucuuuguaaa

SEQ ID NO: 177985 - RNA, 23 nt, Artificial Sequence
  Synthetic
augcaucauagcaucuuuguaaa

SEQ ID NO: 177986 - RNA, 24 nt, Artificial Sequence
  Synthetic
gaugcaucauagcaucuuuguaaa

SEQ ID NO: 177987 - RNA, 18 nt, Artificial Sequence
  Synthetic
uuaaaaaucguuuguaaa

SEQ ID NO: 177988 - RNA, 19 nt, Artificial Sequence
  Synthetic
uuuaaaaaucguuuguaaa

SEQ ID NO: 177989 - RNA, 20 nt, Artificial Sequence
  Synthetic
uuuuaaaaaucguuuguaaa

SEQ ID NO: 177990 - RNA, 21 nt, Artificial Sequence
  Synthetic
uuuuuaaaaaucguuuguaaa

SEQ ID NO: 177991 - RNA, 22 nt, Artificial Sequence
  Synthetic
guuuuuaaaaaucguuuguaaa

SEQ ID NO: 177992 - RNA, 23 nt, Artificial Sequence
  Synthetic
uguuuuuaaaaaucguuuguaaa

SEQ ID NO: 177993 - RNA, 24 nt, Artificial Sequence
  Synthetic
auguuuuuaaaaaucguuuguaaa

SEQ ID NO: 177994 - RNA, 18 nt, Artificial Sequence
  Synthetic
gugcuuuuauuuuguaaa

SEQ ID NO: 177995 - RNA, 19 nt, Artificial Sequence
  Synthetic
ugugcuuuuauuuuguaaa

SEQ ID NO: 177996 - RNA, 20 nt, Artificial Sequence
  Synthetic
gugugcuuuuauuuuguaaa

SEQ ID NO: 177997 - RNA, 21 nt, Artificial Sequence
  Synthetic
ggugugcuuuuauuuuguaaa

SEQ ID NO: 177998 - RNA, 22 nt, Artificial Sequence
  Synthetic
aggugugcuuuuauuuuguaaa

SEQ ID NO: 177999 - RNA, 23 nt, Artificial Sequence
  Synthetic
gaggugugcuuuuauuuuguaaa

SEQ ID NO: 178000 - RNA, 24 nt, Artificial Sequence
  Synthetic
agaggugugcuuuuauuuuguaaa

SEQ ID NO: 178001 - RNA, 18 nt, Artificial Sequence
  Synthetic
uauuucacuuuuuguaaa

SEQ ID NO: 178002 - RNA, 19 nt, Artificial Sequence
  Synthetic
auauuucacuuuuuguaaa

SEQ ID NO: 178003 - RNA, 20 nt, Artificial Sequence
  Synthetic
gauauuucacuuuuuguaaa

SEQ ID NO: 178004 - RNA, 21 nt, Artificial Sequence
  Synthetic
agauauuucacuuuuuguaaa

SEQ ID NO: 178005 - RNA, 22 nt, Artificial Sequence
  Synthetic
cagauauuucacuuuuuguaaa

SEQ ID NO: 178006 - RNA, 23 nt, Artificial Sequence
  Synthetic
gcagauauuucacuuuuuguaaa

SEQ ID NO: 178007 - RNA, 24 nt, Artificial Sequence
  Synthetic
ugcagauauuucacuuuuuguaaa

SEQ ID NO: 178008 - RNA, 18 nt, Artificial Sequence
  Synthetic
uuuaccuaaaaaauuaaa

SEQ ID NO: 178009 - RNA, 19 nt, Artificial Sequence
  Synthetic
uuuuaccuaaaaaauuaaa

SEQ ID NO: 178010 - RNA, 20 nt, Artificial Sequence
  Synthetic
guuuuaccuaaaaaauuaaa

SEQ ID NO: 178011 - RNA, 21 nt, Artificial Sequence
  Synthetic
uguuuuaccuaaaaaauuaaa

SEQ ID NO: 178012 - RNA, 22 nt, Artificial Sequence
  Synthetic
auguuuuaccuaaaaaauuaaa

SEQ ID NO: 178013 - RNA, 23 nt, Artificial Sequence
  Synthetic
cauguuuuaccuaaaaaauuaaa

SEQ ID NO: 178014 - RNA, 24 nt, Artificial Sequence
  Synthetic
acauguuuuaccuaaaaaauuaaa

SEQ ID NO: 178015 - RNA, 18 nt, Artificial Sequence
  Synthetic
uagggaacaaaaauuaaa

SEQ ID NO: 178016 - RNA, 19 nt, Artificial Sequence
  Synthetic
uuagggaacaaaaauuaaa

SEQ ID NO: 178017 - RNA, 20 nt, Artificial Sequence
  Synthetic
cuuagggaacaaaaauuaaa

SEQ ID NO: 178018 - RNA, 21 nt, Artificial Sequence
  Synthetic
ucuuagggaacaaaaauuaaa

SEQ ID NO: 178019 - RNA, 22 nt, Artificial Sequence
  Synthetic
cucuuagggaacaaaaauuaaa

SEQ ID NO: 178020 - RNA, 23 nt, Artificial Sequence
  Synthetic
gcucuuagggaacaaaaauuaaa

SEQ ID NO: 178021 - RNA, 24 nt, Artificial Sequence
  Synthetic
ugcucuuagggaacaaaaauuaaa

SEQ ID NO: 178022 - RNA, 18 nt, Artificial Sequence
  Synthetic
uaaagucagcaaauuaaa

SEQ ID NO: 178023 - RNA, 19 nt, Artificial Sequence
  Synthetic
auaaagucagcaaauuaaa

SEQ ID NO: 178024 - RNA, 20 nt, Artificial Sequence
  Synthetic
aauaaagucagcaaauuaaa

SEQ ID NO: 178025 - RNA, 21 nt, Artificial Sequence
  Synthetic
uaauaaagucagcaaauuaaa

SEQ ID NO: 178026 - RNA, 22 nt, Artificial Sequence
  Synthetic
uuaauaaagucagcaaauuaaa

SEQ ID NO: 178027 - RNA, 23 nt, Artificial Sequence
  Synthetic
uuuaauaaagucagcaaauuaaa

SEQ ID NO: 178028 - RNA, 24 nt, Artificial Sequence
  Synthetic
uuuuaauaaagucagcaaauuaaa

SEQ ID NO: 178029 - RNA, 18 nt, Artificial Sequence
  Synthetic
augaaagucacaauuaaa

SEQ ID NO: 178030 - RNA, 19 nt, Artificial Sequence
  Synthetic
uaugaaagucacaauuaaa

SEQ ID NO: 178031 - RNA, 20 nt, Artificial Sequence
  Synthetic
guaugaaagucacaauuaaa

SEQ ID NO: 178032 - RNA, 21 nt, Artificial Sequence
  Synthetic
uguaugaaagucacaauuaaa

SEQ ID NO: 178033 - RNA, 22 nt, Artificial Sequence
  Synthetic
auguaugaaagucacaauuaaa

SEQ ID NO: 178034 - RNA, 23 nt, Artificial Sequence
  Synthetic
aauguaugaaagucacaauuaaa

SEQ ID NO: 178035 - RNA, 24 nt, Artificial Sequence
  Synthetic
uaauguaugaaagucacaauuaaa

SEQ ID NO: 178036 - RNA, 18 nt, Artificial Sequence
  Synthetic
uauauguguucaauuaaa

SEQ ID NO: 178037 - RNA, 19 nt, Artificial Sequence
  Synthetic
uuauauguguucaauuaaa

SEQ ID NO: 178038 - RNA, 20 nt, Artificial Sequence
  Synthetic
cuuauauguguucaauuaaa

SEQ ID NO: 178039 - RNA, 21 nt, Artificial Sequence
  Synthetic
ucuuauauguguucaauuaaa

SEQ ID NO: 178040 - RNA, 22 nt, Artificial Sequence
  Synthetic
aucuuauauguguucaauuaaa

SEQ ID NO: 178041 - RNA, 23 nt, Artificial Sequence
  Synthetic
gaucuuauauguguucaauuaaa

SEQ ID NO: 178042 - RNA, 24 nt, Artificial Sequence
  Synthetic
agaucuuauauguguucaauuaaa

SEQ ID NO: 178043 - RNA, 18 nt, Artificial Sequence
  Synthetic
uaauaugucagaauuaaa

SEQ ID NO: 178044 - RNA, 19 nt, Artificial Sequence
  Synthetic
uuaauaugucagaauuaaa

SEQ ID NO: 178045 - RNA, 20 nt, Artificial Sequence
  Synthetic
cuuaauaugucagaauuaaa

SEQ ID NO: 178046 - RNA, 21 nt, Artificial Sequence
  Synthetic
ucuuaauaugucagaauuaaa

SEQ ID NO: 178047 - RNA, 22 nt, Artificial Sequence
  Synthetic
cucuuaauaugucagaauuaaa

SEQ ID NO: 178048 - RNA, 23 nt, Artificial Sequence
  Synthetic
ucucuuaauaugucagaauuaaa

SEQ ID NO: 178049 - RNA, 24 nt, Artificial Sequence
  Synthetic
uucucuuaauaugucagaauuaaa

SEQ ID NO: 178050 - RNA, 18 nt, Artificial Sequence
  Synthetic
cuuccacauagaauuaaa

SEQ ID NO: 178051 - RNA, 19 nt, Artificial Sequence
  Synthetic
ccuuccacauagaauuaaa

SEQ ID NO: 178052 - RNA, 20 nt, Artificial Sequence
  Synthetic
uccuuccacauagaauuaaa

SEQ ID NO: 178053 - RNA, 21 nt, Artificial Sequence
  Synthetic
uuccuuccacauagaauuaaa

SEQ ID NO: 178054 - RNA, 22 nt, Artificial Sequence
  Synthetic
uuuccuuccacauagaauuaaa

SEQ ID NO: 178055 - RNA, 23 nt, Artificial Sequence
  Synthetic
uuuuccuuccacauagaauuaaa

SEQ ID NO: 178056 - RNA, 24 nt, Artificial Sequence
  Synthetic
cuuuuccuuccacauagaauuaaa

SEQ ID NO: 178057 - RNA, 18 nt, Artificial Sequence
  Synthetic
uuuuccuaaggaauuaaa

SEQ ID NO: 178058 - RNA, 19 nt, Artificial Sequence
  Synthetic
guuuuccuaaggaauuaaa

SEQ ID NO: 178059 - RNA, 20 nt, Artificial Sequence
  Synthetic
gguuuuccuaaggaauuaaa

SEQ ID NO: 178060 - RNA, 21 nt, Artificial Sequence
  Synthetic
agguuuuccuaaggaauuaaa

SEQ ID NO: 178061 - RNA, 22 nt, Artificial Sequence
  Synthetic
aagguuuuccuaaggaauuaaa

SEQ ID NO: 178062 - RNA, 23 nt, Artificial Sequence
  Synthetic
uaagguuuuccuaaggaauuaaa

SEQ ID NO: 178063 - RNA, 24 nt, Artificial Sequence
  Synthetic
cuaagguuuuccuaaggaauuaaa

SEQ ID NO: 178064 - RNA, 18 nt, Artificial Sequence
  Synthetic
uugguacugugaauuaaa

SEQ ID NO: 178065 - RNA, 19 nt, Artificial Sequence
  Synthetic
uuugguacugugaauuaaa

SEQ ID NO: 178066 - RNA, 20 nt, Artificial Sequence
  Synthetic
uuuugguacugugaauuaaa

SEQ ID NO: 178067 - RNA, 21 nt, Artificial Sequence
  Synthetic
uuuuugguacugugaauuaaa

SEQ ID NO: 178068 - RNA, 22 nt, Artificial Sequence
  Synthetic
uuuuuugguacugugaauuaaa

SEQ ID NO: 178069 - RNA, 23 nt, Artificial Sequence
  Synthetic
cuuuuuugguacugugaauuaaa

SEQ ID NO: 178070 - RNA, 24 nt, Artificial Sequence
  Synthetic
ucuuuuuugguacugugaauuaaa

SEQ ID NO: 178071 - RNA, 18 nt, Artificial Sequence
  Synthetic
ccuuucucuguaauuaaa

SEQ ID NO: 178072 - RNA, 19 nt, Artificial Sequence
  Synthetic
accuuucucuguaauuaaa

SEQ ID NO: 178073 - RNA, 20 nt, Artificial Sequence
  Synthetic
caccuuucucuguaauuaaa

SEQ ID NO: 178074 - RNA, 21 nt, Artificial Sequence
  Synthetic
acaccuuucucuguaauuaaa

SEQ ID NO: 178075 - RNA, 22 nt, Artificial Sequence
  Synthetic
aacaccuuucucuguaauuaaa

SEQ ID NO: 178076 - RNA, 23 nt, Artificial Sequence
  Synthetic
aaacaccuuucucuguaauuaaa

SEQ ID NO: 178077 - RNA, 24 nt, Artificial Sequence
  Synthetic
aaaacaccuuucucuguaauuaaa

SEQ ID NO: 178078 - RNA, 18 nt, Artificial Sequence
  Synthetic
gcaacaggguuaauuaaa

SEQ ID NO: 178079 - RNA, 19 nt, Artificial Sequence
  Synthetic
ggcaacaggguuaauuaaa

SEQ ID NO: 178080 - RNA, 20 nt, Artificial Sequence
  Synthetic
aggcaacaggguuaauuaaa

SEQ ID NO: 178081 - RNA, 21 nt, Artificial Sequence
  Synthetic
gaggcaacaggguuaauuaaa

SEQ ID NO: 178082 - RNA, 22 nt, Artificial Sequence
  Synthetic
ggaggcaacaggguuaauuaaa

SEQ ID NO: 178083 - RNA, 23 nt, Artificial Sequence
  Synthetic
uggaggcaacaggguuaauuaaa

SEQ ID NO: 178084 - RNA, 24 nt, Artificial Sequence
  Synthetic
guggaggcaacaggguuaauuaaa

SEQ ID NO: 178085 - RNA, 18 nt, Artificial Sequence
  Synthetic
aggcgagggaacauuaaa

SEQ ID NO: 178086 - RNA, 19 nt, Artificial Sequence
  Synthetic
aaggcgagggaacauuaaa

SEQ ID NO: 178087 - RNA, 20 nt, Artificial Sequence
  Synthetic
aaaggcgagggaacauuaaa

SEQ ID NO: 178088 - RNA, 21 nt, Artificial Sequence
  Synthetic
gaaaggcgagggaacauuaaa

SEQ ID NO: 178089 - RNA, 22 nt, Artificial Sequence
  Synthetic
ugaaaggcgagggaacauuaaa

SEQ ID NO: 178090 - RNA, 23 nt, Artificial Sequence
  Synthetic
cugaaaggcgagggaacauuaaa

SEQ ID NO: 178091 - RNA, 24 nt, Artificial Sequence
  Synthetic
ucugaaaggcgagggaacauuaaa

SEQ ID NO: 178092 - RNA, 18 nt, Artificial Sequence
  Synthetic
cuauggagucacauuaaa

SEQ ID NO: 178093 - RNA, 19 nt, Artificial Sequence
  Synthetic
acuauggagucacauuaaa

SEQ ID NO: 178094 - RNA, 20 nt, Artificial Sequence
  Synthetic
cacuauggagucacauuaaa

SEQ ID NO: 178095 - RNA, 21 nt, Artificial Sequence
  Synthetic
ucacuauggagucacauuaaa

SEQ ID NO: 178096 - RNA, 22 nt, Artificial Sequence
  Synthetic
aucacuauggagucacauuaaa

SEQ ID NO: 178097 - RNA, 23 nt, Artificial Sequence
  Synthetic
gaucacuauggagucacauuaaa

SEQ ID NO: 178098 - RNA, 24 nt, Artificial Sequence
  Synthetic
ugaucacuauggagucacauuaaa

SEQ ID NO: 178099 - RNA, 18 nt, Artificial Sequence
  Synthetic
aaguagccauacauuaaa

SEQ ID NO: 178100 - RNA, 19 nt, Artificial Sequence
  Synthetic
aaaguagccauacauuaaa

SEQ ID NO: 178101 - RNA, 20 nt, Artificial Sequence
  Synthetic
aaaaguagccauacauuaaa

SEQ ID NO: 178102 - RNA, 21 nt, Artificial Sequence
  Synthetic
caaaaguagccauacauuaaa

SEQ ID NO: 178103 - RNA, 22 nt, Artificial Sequence
  Synthetic
acaaaaguagccauacauuaaa

SEQ ID NO: 178104 - RNA, 23 nt, Artificial Sequence
  Synthetic
aacaaaaguagccauacauuaaa

SEQ ID NO: 178105 - RNA, 24 nt, Artificial Sequence
  Synthetic
uaacaaaaguagccauacauuaaa

SEQ ID NO: 178106 - RNA, 18 nt, Artificial Sequence
  Synthetic
auuuccauauacauuaaa

SEQ ID NO: 178107 - RNA, 19 nt, Artificial Sequence
  Synthetic
gauuuccauauacauuaaa

SEQ ID NO: 178108 - RNA, 20 nt, Artificial Sequence
  Synthetic
ugauuuccauauacauuaaa

SEQ ID NO: 178109 - RNA, 21 nt, Artificial Sequence
  Synthetic
augauuuccauauacauuaaa

SEQ ID NO: 178110 - RNA, 22 nt, Artificial Sequence
  Synthetic
uaugauuuccauauacauuaaa

SEQ ID NO: 178111 - RNA, 23 nt, Artificial Sequence
  Synthetic
cuaugauuuccauauacauuaaa

SEQ ID NO: 178112 - RNA, 24 nt, Artificial Sequence
  Synthetic
acuaugauuuccauauacauuaaa

SEQ ID NO: 178113 - RNA, 18 nt, Artificial Sequence
  Synthetic
uugucacuuuacauuaaa

SEQ ID NO: 178114 - RNA, 19 nt, Artificial Sequence
  Synthetic
guugucacuuuacauuaaa

SEQ ID NO: 178115 - RNA, 20 nt, Artificial Sequence
  Synthetic
aguugucacuuuacauuaaa

SEQ ID NO: 178116 - RNA, 21 nt, Artificial Sequence
  Synthetic
uaguugucacuuuacauuaaa

SEQ ID NO: 178117 - RNA, 22 nt, Artificial Sequence
  Synthetic
guaguugucacuuuacauuaaa

SEQ ID NO: 178118 - RNA, 23 nt, Artificial Sequence
  Synthetic
aguaguugucacuuuacauuaaa

SEQ ID NO: 178119 - RNA, 24 nt, Artificial Sequence
  Synthetic
gaguaguugucacuuuacauuaaa

SEQ ID NO: 178120 - RNA, 18 nt, Artificial Sequence
  Synthetic
uuucaguguggcauuaaa

SEQ ID NO: 178121 - RNA, 19 nt, Artificial Sequence
  Synthetic
cuuucaguguggcauuaaa

SEQ ID NO: 178122 - RNA, 20 nt, Artificial Sequence
  Synthetic
acuuucaguguggcauuaaa

SEQ ID NO: 178123 - RNA, 21 nt, Artificial Sequence
  Synthetic
uacuuucaguguggcauuaaa

SEQ ID NO: 178124 - RNA, 22 nt, Artificial Sequence
  Synthetic
guacuuucaguguggcauuaaa

SEQ ID NO: 178125 - RNA, 23 nt, Artificial Sequence
  Synthetic
aguacuuucaguguggcauuaaa

SEQ ID NO: 178126 - RNA, 24 nt, Artificial Sequence
  Synthetic
uaguacuuucaguguggcauuaaa

SEQ ID NO: 178127 - RNA, 18 nt, Artificial Sequence
  Synthetic
uuuuugaaaugcauuaaa

SEQ ID NO: 178128 - RNA, 19 nt, Artificial Sequence
  Synthetic
cuuuuugaaaugcauuaaa

SEQ ID NO: 178129 - RNA, 20 nt, Artificial Sequence
  Synthetic
gcuuuuugaaaugcauuaaa

SEQ ID NO: 178130 - RNA, 21 nt, Artificial Sequence
  Synthetic
agcuuuuugaaaugcauuaaa

SEQ ID NO: 178131 - RNA, 22 nt, Artificial Sequence
  Synthetic
gagcuuuuugaaaugcauuaaa

SEQ ID NO: 178132 - RNA, 23 nt, Artificial Sequence
  Synthetic
agagcuuuuugaaaugcauuaaa

SEQ ID NO: 178133 - RNA, 24 nt, Artificial Sequence
  Synthetic
aagagcuuuuugaaaugcauuaaa

SEQ ID NO: 178134 - RNA, 18 nt, Artificial Sequence
  Synthetic
guuggcacaaucauuaaa

SEQ ID NO: 178135 - RNA, 19 nt, Artificial Sequence
  Synthetic
uguuggcacaaucauuaaa

SEQ ID NO: 178136 - RNA, 20 nt, Artificial Sequence
  Synthetic
uuguuggcacaaucauuaaa

SEQ ID NO: 178137 - RNA, 21 nt, Artificial Sequence
  Synthetic
uuuguuggcacaaucauuaaa

SEQ ID NO: 178138 - RNA, 22 nt, Artificial Sequence
  Synthetic
auuuguuggcacaaucauuaaa

SEQ ID NO: 178139 - RNA, 23 nt, Artificial Sequence
  Synthetic
cauuuguuggcacaaucauuaaa

SEQ ID NO: 178140 - RNA, 24 nt, Artificial Sequence
  Synthetic
ucauuuguuggcacaaucauuaaa

SEQ ID NO: 178141 - RNA, 18 nt, Artificial Sequence
  Synthetic
agcuucugaaucauuaaa

SEQ ID NO: 178142 - RNA, 19 nt, Artificial Sequence
  Synthetic
aagcuucugaaucauuaaa

SEQ ID NO: 178143 - RNA, 20 nt, Artificial Sequence
  Synthetic
caagcuucugaaucauuaaa

SEQ ID NO: 178144 - RNA, 21 nt, Artificial Sequence
  Synthetic
gcaagcuucugaaucauuaaa

SEQ ID NO: 178145 - RNA, 22 nt, Artificial Sequence
  Synthetic
ugcaagcuucugaaucauuaaa

SEQ ID NO: 178146 - RNA, 23 nt, Artificial Sequence
  Synthetic
cugcaagcuucugaaucauuaaa

SEQ ID NO: 178147 - RNA, 24 nt, Artificial Sequence
  Synthetic
acugcaagcuucugaaucauuaaa

SEQ ID NO: 178148 - RNA, 18 nt, Artificial Sequence
  Synthetic
agaaucaauaucauuaaa

SEQ ID NO: 178149 - RNA, 19 nt, Artificial Sequence
  Synthetic
aagaaucaauaucauuaaa

SEQ ID NO: 178150 - RNA, 20 nt, Artificial Sequence
  Synthetic
gaagaaucaauaucauuaaa

SEQ ID NO: 178151 - RNA, 21 nt, Artificial Sequence
  Synthetic
ggaagaaucaauaucauuaaa

SEQ ID NO: 178152 - RNA, 22 nt, Artificial Sequence
  Synthetic
aggaagaaucaauaucauuaaa

SEQ ID NO: 178153 - RNA, 23 nt, Artificial Sequence
  Synthetic
aaggaagaaucaauaucauuaaa

SEQ ID NO: 178154 - RNA, 24 nt, Artificial Sequence
  Synthetic
aaaggaagaaucaauaucauuaaa

SEQ ID NO: 178155 - RNA, 18 nt, Artificial Sequence
  Synthetic
gcuaucagacucauuaaa

SEQ ID NO: 178156 - RNA, 19 nt, Artificial Sequence
  Synthetic
ggcuaucagacucauuaaa

SEQ ID NO: 178157 - RNA, 20 nt, Artificial Sequence
  Synthetic
uggcuaucagacucauuaaa

SEQ ID NO: 178158 - RNA, 21 nt, Artificial Sequence
  Synthetic
guggcuaucagacucauuaaa

SEQ ID NO: 178159 - RNA, 22 nt, Artificial Sequence
  Synthetic
gguggcuaucagacucauuaaa

SEQ ID NO: 178160 - RNA, 23 nt, Artificial Sequence
  Synthetic
agguggcuaucagacucauuaaa

SEQ ID NO: 178161 - RNA, 24 nt, Artificial Sequence
  Synthetic
cagguggcuaucagacucauuaaa

SEQ ID NO: 178162 - RNA, 18 nt, Artificial Sequence
  Synthetic
uucaggggagucauuaaa

SEQ ID NO: 178163 - RNA, 19 nt, Artificial Sequence
  Synthetic
auucaggggagucauuaaa

SEQ ID NO: 178164 - RNA, 20 nt, Artificial Sequence
  Synthetic
uauucaggggagucauuaaa

SEQ ID NO: 178165 - RNA, 21 nt, Artificial Sequence
  Synthetic
uuauucaggggagucauuaaa

SEQ ID NO: 178166 - RNA, 22 nt, Artificial Sequence
  Synthetic
uuuauucaggggagucauuaaa

SEQ ID NO: 178167 - RNA, 23 nt, Artificial Sequence
  Synthetic
cuuuauucaggggagucauuaaa

SEQ ID NO: 178168 - RNA, 24 nt, Artificial Sequence
  Synthetic
acuuuauucaggggagucauuaaa

SEQ ID NO: 178169 - RNA, 18 nt, Artificial Sequence
  Synthetic
aacaugcuggucauuaaa

SEQ ID NO: 178170 - RNA, 19 nt, Artificial Sequence
  Synthetic
uaacaugcuggucauuaaa

SEQ ID NO: 178171 - RNA, 20 nt, Artificial Sequence
  Synthetic
guaacaugcuggucauuaaa

SEQ ID NO: 178172 - RNA, 21 nt, Artificial Sequence
  Synthetic
uguaacaugcuggucauuaaa

SEQ ID NO: 178173 - RNA, 22 nt, Artificial Sequence
  Synthetic
auguaacaugcuggucauuaaa

SEQ ID NO: 178174 - RNA, 23 nt, Artificial Sequence
  Synthetic
uauguaacaugcuggucauuaaa

SEQ ID NO: 178175 - RNA, 24 nt, Artificial Sequence
  Synthetic
uuauguaacaugcuggucauuaaa

SEQ ID NO: 178176 - RNA, 18 nt, Artificial Sequence
  Synthetic
auucacauucagauuaaa

SEQ ID NO: 178177 - RNA, 19 nt, Artificial Sequence
  Synthetic
uauucacauucagauuaaa

SEQ ID NO: 178178 - RNA, 20 nt, Artificial Sequence
  Synthetic
uuauucacauucagauuaaa

SEQ ID NO: 178179 - RNA, 21 nt, Artificial Sequence
  Synthetic
uuuauucacauucagauuaaa

SEQ ID NO: 178180 - RNA, 22 nt, Artificial Sequence
  Synthetic
uuuuauucacauucagauuaaa

SEQ ID NO: 178181 - RNA, 23 nt, Artificial Sequence
  Synthetic
auuuuauucacauucagauuaaa

SEQ ID NO: 178182 - RNA, 24 nt, Artificial Sequence
  Synthetic
aauuuuauucacauucagauuaaa

SEQ ID NO: 178183 - RNA, 18 nt, Artificial Sequence
  Synthetic
ucaaaaagccugauuaaa

SEQ ID NO: 178184 - RNA, 19 nt, Artificial Sequence
  Synthetic
aucaaaaagccugauuaaa

SEQ ID NO: 178185 - RNA, 20 nt, Artificial Sequence
  Synthetic
aaucaaaaagccugauuaaa

SEQ ID NO: 178186 - RNA, 21 nt, Artificial Sequence
  Synthetic
uaaucaaaaagccugauuaaa

SEQ ID NO: 178187 - RNA, 22 nt, Artificial Sequence
  Synthetic
cuaaucaaaaagccugauuaaa

SEQ ID NO: 178188 - RNA, 23 nt, Artificial Sequence
  Synthetic
ccuaaucaaaaagccugauuaaa

SEQ ID NO: 178189 - RNA, 24 nt, Artificial Sequence
  Synthetic
accuaaucaaaaagccugauuaaa

SEQ ID NO: 178190 - RNA, 18 nt, Artificial Sequence
  Synthetic
acaaauaaucugauuaaa

SEQ ID NO: 178191 - RNA, 19 nt, Artificial Sequence
  Synthetic
aacaaauaaucugauuaaa

SEQ ID NO: 178192 - RNA, 20 nt, Artificial Sequence
  Synthetic
aaacaaauaaucugauuaaa

SEQ ID NO: 178193 - RNA, 21 nt, Artificial Sequence
  Synthetic
aaaacaaauaaucugauuaaa

SEQ ID NO: 178194 - RNA, 22 nt, Artificial Sequence
  Synthetic
gaaaacaaauaaucugauuaaa

SEQ ID NO: 178195 - RNA, 23 nt, Artificial Sequence
  Synthetic
agaaaacaaauaaucugauuaaa

SEQ ID NO: 178196 - RNA, 24 nt, Artificial Sequence
  Synthetic
aagaaaacaaauaaucugauuaaa

SEQ ID NO: 178197 - RNA, 18 nt, Artificial Sequence
  Synthetic
cuuaugaaugugauuaaa

SEQ ID NO: 178198 - RNA, 19 nt, Artificial Sequence
  Synthetic
acuuaugaaugugauuaaa

SEQ ID NO: 178199 - RNA, 20 nt, Artificial Sequence
  Synthetic
gacuuaugaaugugauuaaa

SEQ ID NO: 178200 - RNA, 21 nt, Artificial Sequence
  Synthetic
ugacuuaugaaugugauuaaa

SEQ ID NO: 178201 - RNA, 22 nt, Artificial Sequence
  Synthetic
uugacuuaugaaugugauuaaa

SEQ ID NO: 178202 - RNA, 23 nt, Artificial Sequence
  Synthetic
auugacuuaugaaugugauuaaa

SEQ ID NO: 178203 - RNA, 24 nt, Artificial Sequence
  Synthetic
uauugacuuaugaaugugauuaaa

SEQ ID NO: 178204 - RNA, 18 nt, Artificial Sequence
  Synthetic
agcuucuaugugauuaaa

SEQ ID NO: 178205 - RNA, 19 nt, Artificial Sequence
  Synthetic
aagcuucuaugugauuaaa

SEQ ID NO: 178206 - RNA, 20 nt, Artificial Sequence
  Synthetic
aaagcuucuaugugauuaaa

SEQ ID NO: 178207 - RNA, 21 nt, Artificial Sequence
  Synthetic
uaaagcuucuaugugauuaaa

SEQ ID NO: 178208 - RNA, 22 nt, Artificial Sequence
  Synthetic
cuaaagcuucuaugugauuaaa

SEQ ID NO: 178209 - RNA, 23 nt, Artificial Sequence
  Synthetic
ccuaaagcuucuaugugauuaaa

SEQ ID NO: 178210 - RNA, 24 nt, Artificial Sequence
  Synthetic
cccuaaagcuucuaugugauuaaa

SEQ ID NO: 178211 - RNA, 18 nt, Artificial Sequence
  Synthetic
aacugaaguuugauuaaa

SEQ ID NO: 178212 - RNA, 19 nt, Artificial Sequence
  Synthetic
uaacugaaguuugauuaaa

SEQ ID NO: 178213 - RNA, 20 nt, Artificial Sequence
  Synthetic
auaacugaaguuugauuaaa

SEQ ID NO: 178214 - RNA, 21 nt, Artificial Sequence
  Synthetic
gauaacugaaguuugauuaaa

SEQ ID NO: 178215 - RNA, 22 nt, Artificial Sequence
  Synthetic
agauaacugaaguuugauuaaa

SEQ ID NO: 178216 - RNA, 23 nt, Artificial Sequence
  Synthetic
cagauaacugaaguuugauuaaa

SEQ ID NO: 178217 - RNA, 24 nt, Artificial Sequence
  Synthetic
acagauaacugaaguuugauuaaa

SEQ ID NO: 178218 - RNA, 18 nt, Artificial Sequence
  Synthetic
caagaaaggaauauuaaa

SEQ ID NO: 178219 - RNA, 19 nt, Artificial Sequence
  Synthetic
acaagaaaggaauauuaaa

SEQ ID NO: 178220 - RNA, 20 nt, Artificial Sequence
  Synthetic
gacaagaaaggaauauuaaa

SEQ ID NO: 178221 - RNA, 21 nt, Artificial Sequence
  Synthetic
agacaagaaaggaauauuaaa

SEQ ID NO: 178222 - RNA, 22 nt, Artificial Sequence
  Synthetic
aagacaagaaaggaauauuaaa

SEQ ID NO: 178223 - RNA, 23 nt, Artificial Sequence
  Synthetic
aaagacaagaaaggaauauuaaa

SEQ ID NO: 178224 - RNA, 24 nt, Artificial Sequence
  Synthetic
aaaagacaagaaaggaauauuaaa

SEQ ID NO: 178225 - RNA, 18 nt, Artificial Sequence
  Synthetic
uaauauccuaauauuaaa

SEQ ID NO: 178226 - RNA, 19 nt, Artificial Sequence
  Synthetic
auaauauccuaauauuaaa

SEQ ID NO: 178227 - RNA, 20 nt, Artificial Sequence
  Synthetic
gauaauauccuaauauuaaa

SEQ ID NO: 178228 - RNA, 21 nt, Artificial Sequence
  Synthetic
ggauaauauccuaauauuaaa

SEQ ID NO: 178229 - RNA, 22 nt, Artificial Sequence
  Synthetic
uggauaauauccuaauauuaaa

SEQ ID NO: 178230 - RNA, 23 nt, Artificial Sequence
  Synthetic
guggauaauauccuaauauuaaa

SEQ ID NO: 178231 - RNA, 24 nt, Artificial Sequence
  Synthetic
uguggauaauauccuaauauuaaa

SEQ ID NO: 178232 - RNA, 18 nt, Artificial Sequence
  Synthetic
uuccuguggcauauuaaa

SEQ ID NO: 178233 - RNA, 19 nt, Artificial Sequence
  Synthetic
cuuccuguggcauauuaaa

SEQ ID NO: 178234 - RNA, 20 nt, Artificial Sequence
  Synthetic
ccuuccuguggcauauuaaa

SEQ ID NO: 178235 - RNA, 21 nt, Artificial Sequence
  Synthetic
cccuuccuguggcauauuaaa

SEQ ID NO: 178236 - RNA, 22 nt, Artificial Sequence
  Synthetic
ucccuuccuguggcauauuaaa

SEQ ID NO: 178237 - RNA, 23 nt, Artificial Sequence
  Synthetic
gucccuuccuguggcauauuaaa

SEQ ID NO: 178238 - RNA, 24 nt, Artificial Sequence
  Synthetic
cgucccuuccuguggcauauuaaa

SEQ ID NO: 178239 - RNA, 18 nt, Artificial Sequence
  Synthetic
ucgugaaaugauauuaaa

SEQ ID NO: 178240 - RNA, 19 nt, Artificial Sequence
  Synthetic
aucgugaaaugauauuaaa

SEQ ID NO: 178241 - RNA, 20 nt, Artificial Sequence
  Synthetic
aaucgugaaaugauauuaaa

SEQ ID NO: 178242 - RNA, 21 nt, Artificial Sequence
  Synthetic
uaaucgugaaaugauauuaaa

SEQ ID NO: 178243 - RNA, 22 nt, Artificial Sequence
  Synthetic
auaaucgugaaaugauauuaaa

SEQ ID NO: 178244 - RNA, 23 nt, Artificial Sequence
  Synthetic
aauaaucgugaaaugauauuaaa

SEQ ID NO: 178245 - RNA, 24 nt, Artificial Sequence
  Synthetic
uaauaaucgugaaaugauauuaaa

SEQ ID NO: 178246 - RNA, 18 nt, Artificial Sequence
  Synthetic
cuucucagcuauauuaaa

SEQ ID NO: 178247 - RNA, 19 nt, Artificial Sequence
  Synthetic
acuucucagcuauauuaaa

SEQ ID NO: 178248 - RNA, 20 nt, Artificial Sequence
  Synthetic
uacuucucagcuauauuaaa

SEQ ID NO: 178249 - RNA, 21 nt, Artificial Sequence
  Synthetic
uuacuucucagcuauauuaaa

SEQ ID NO: 178250 - RNA, 22 nt, Artificial Sequence
  Synthetic
cuuacuucucagcuauauuaaa

SEQ ID NO: 178251 - RNA, 23 nt, Artificial Sequence
  Synthetic
ccuuacuucucagcuauauuaaa

SEQ ID NO: 178252 - RNA, 24 nt, Artificial Sequence
  Synthetic
uccuuacuucucagcuauauuaaa

SEQ ID NO: 178253 - RNA, 18 nt, Artificial Sequence
  Synthetic
ucguuaagauguauuaaa

SEQ ID NO: 178254 - RNA, 19 nt, Artificial Sequence
  Synthetic
uucguuaagauguauuaaa

SEQ ID NO: 178255 - RNA, 20 nt, Artificial Sequence
  Synthetic
uuucguuaagauguauuaaa

SEQ ID NO: 178256 - RNA, 21 nt, Artificial Sequence
  Synthetic
cuuucguuaagauguauuaaa

SEQ ID NO: 178257 - RNA, 22 nt, Artificial Sequence
  Synthetic
ucuuucguuaagauguauuaaa

SEQ ID NO: 178258 - RNA, 23 nt, Artificial Sequence
  Synthetic
aucuuucguuaagauguauuaaa

SEQ ID NO: 178259 - RNA, 24 nt, Artificial Sequence
  Synthetic
uaucuuucguuaagauguauuaaa

SEQ ID NO: 178260 - RNA, 18 nt, Artificial Sequence
  Synthetic
cuaaaaauguguauuaaa

SEQ ID NO: 178261 - RNA, 19 nt, Artificial Sequence
  Synthetic
ccuaaaaauguguauuaaa

SEQ ID NO: 178262 - RNA, 20 nt, Artificial Sequence
  Synthetic
gccuaaaaauguguauuaaa

SEQ ID NO: 178263 - RNA, 21 nt, Artificial Sequence
  Synthetic
agccuaaaaauguguauuaaa

SEQ ID NO: 178264 - RNA, 22 nt, Artificial Sequence
  Synthetic
aagccuaaaaauguguauuaaa

SEQ ID NO: 178265 - RNA, 23 nt, Artificial Sequence
  Synthetic
caagccuaaaaauguguauuaaa

SEQ ID NO: 178266 - RNA, 24 nt, Artificial Sequence
  Synthetic
ucaagccuaaaaauguguauuaaa

SEQ ID NO: 178267 - RNA, 18 nt, Artificial Sequence
  Synthetic
aaaaagaguguuauuaaa

SEQ ID NO: 178268 - RNA, 19 nt, Artificial Sequence
  Synthetic
uaaaaagaguguuauuaaa

SEQ ID NO: 178269 - RNA, 20 nt, Artificial Sequence
  Synthetic
auaaaaagaguguuauuaaa

SEQ ID NO: 178270 - RNA, 21 nt, Artificial Sequence
  Synthetic
aauaaaaagaguguuauuaaa

SEQ ID NO: 178271 - RNA, 22 nt, Artificial Sequence
  Synthetic
uaauaaaaagaguguuauuaaa

SEQ ID NO: 178272 - RNA, 23 nt, Artificial Sequence
  Synthetic
cuaauaaaaagaguguuauuaaa

SEQ ID NO: 178273 - RNA, 24 nt, Artificial Sequence
  Synthetic
ccuaauaaaaagaguguuauuaaa

SEQ ID NO: 178274 - RNA, 18 nt, Artificial Sequence
  Synthetic
ccaacaccauuuauuaaa

SEQ ID NO: 178275 - RNA, 19 nt, Artificial Sequence
  Synthetic
cccaacaccauuuauuaaa

SEQ ID NO: 178276 - RNA, 20 nt, Artificial Sequence
  Synthetic
ucccaacaccauuuauuaaa

SEQ ID NO: 178277 - RNA, 21 nt, Artificial Sequence
  Synthetic
uucccaacaccauuuauuaaa

SEQ ID NO: 178278 - RNA, 22 nt, Artificial Sequence
  Synthetic
uuucccaacaccauuuauuaaa

SEQ ID NO: 178279 - RNA, 23 nt, Artificial Sequence
  Synthetic
uuuucccaacaccauuuauuaaa

SEQ ID NO: 178280 - RNA, 24 nt, Artificial Sequence
  Synthetic
guuuucccaacaccauuuauuaaa

SEQ ID NO: 178281 - RNA, 18 nt, Artificial Sequence
  Synthetic
ccgacaccauuuauuaaa

SEQ ID NO: 178282 - RNA, 19 nt, Artificial Sequence
  Synthetic
cccgacaccauuuauuaaa

SEQ ID NO: 178283 - RNA, 20 nt, Artificial Sequence
  Synthetic
ucccgacaccauuuauuaaa

SEQ ID NO: 178284 - RNA, 21 nt, Artificial Sequence
  Synthetic
uucccgacaccauuuauuaaa

SEQ ID NO: 178285 - RNA, 22 nt, Artificial Sequence
  Synthetic
uuucccgacaccauuuauuaaa

SEQ ID NO: 178286 - RNA, 23 nt, Artificial Sequence
  Synthetic
uuuucccgacaccauuuauuaaa

SEQ ID NO: 178287 - RNA, 24 nt, Artificial Sequence
  Synthetic
guuuucccgacaccauuuauuaaa

SEQ ID NO: 178288 - RNA, 18 nt, Artificial Sequence
  Synthetic
ccagcaccauuuauuaaa

SEQ ID NO: 178289 - RNA, 19 nt, Artificial Sequence
  Synthetic
cccagcaccauuuauuaaa

SEQ ID NO: 178290 - RNA, 20 nt, Artificial Sequence
  Synthetic
ucccagcaccauuuauuaaa

SEQ ID NO: 178291 - RNA, 18 nt, Artificial Sequence
  Synthetic
ccagcaccguuuauuaaa

SEQ ID NO: 178292 - RNA, 19 nt, Artificial Sequence
  Synthetic
cccagcaccguuuauuaaa

SEQ ID NO: 178293 - RNA, 20 nt, Artificial Sequence
  Synthetic
ucccagcaccguuuauuaaa

SEQ ID NO: 178294 - RNA, 21 nt, Artificial Sequence
  Synthetic
uucccagcaccguuuauuaaa

SEQ ID NO: 178295 - RNA, 22 nt, Artificial Sequence
  Synthetic
uuucccagcaccguuuauuaaa

SEQ ID NO: 178296 - RNA, 23 nt, Artificial Sequence
  Synthetic
uuuucccagcaccguuuauuaaa

SEQ ID NO: 178297 - RNA, 24 nt, Artificial Sequence
  Synthetic
auuuucccagcaccguuuauuaaa

SEQ ID NO: 178298 - RNA, 18 nt, Artificial Sequence
  Synthetic
uacagggcaaaacuuaaa

SEQ ID NO: 178299 - RNA, 19 nt, Artificial Sequence
  Synthetic
auacagggcaaaacuuaaa

SEQ ID NO: 178300 - RNA, 20 nt, Artificial Sequence
  Synthetic
gauacagggcaaaacuuaaa

SEQ ID NO: 178301 - RNA, 21 nt, Artificial Sequence
  Synthetic
agauacagggcaaaacuuaaa

SEQ ID NO: 178302 - RNA, 22 nt, Artificial Sequence
  Synthetic
aagauacagggcaaaacuuaaa

SEQ ID NO: 178303 - RNA, 23 nt, Artificial Sequence
  Synthetic
aaagauacagggcaaaacuuaaa

SEQ ID NO: 178304 - RNA, 24 nt, Artificial Sequence
  Synthetic
aaaagauacagggcaaaacuuaaa

SEQ ID NO: 178305 - RNA, 18 nt, Artificial Sequence
  Synthetic
agagagcuauaacuuaaa

SEQ ID NO: 178306 - RNA, 19 nt, Artificial Sequence
  Synthetic
aagagagcuauaacuuaaa

SEQ ID NO: 178307 - RNA, 20 nt, Artificial Sequence
  Synthetic
aaagagagcuauaacuuaaa

SEQ ID NO: 178308 - RNA, 21 nt, Artificial Sequence
  Synthetic
gaaagagagcuauaacuuaaa

SEQ ID NO: 178309 - RNA, 22 nt, Artificial Sequence
  Synthetic
ugaaagagagcuauaacuuaaa

SEQ ID NO: 178310 - RNA, 23 nt, Artificial Sequence
  Synthetic
uugaaagagagcuauaacuuaaa

SEQ ID NO: 178311 - RNA, 24 nt, Artificial Sequence
  Synthetic
auugaaagagagcuauaacuuaaa

SEQ ID NO: 178312 - RNA, 18 nt, Artificial Sequence
  Synthetic
guauuaguuacacuuaaa

SEQ ID NO: 178313 - RNA, 19 nt, Artificial Sequence
  Synthetic
uguauuaguuacacuuaaa

SEQ ID NO: 178314 - RNA, 20 nt, Artificial Sequence
  Synthetic
uuguauuaguuacacuuaaa

SEQ ID NO: 178315 - RNA, 21 nt, Artificial Sequence
  Synthetic
guuguauuaguuacacuuaaa

SEQ ID NO: 178316 - RNA, 22 nt, Artificial Sequence
  Synthetic
aguuguauuaguuacacuuaaa

SEQ ID NO: 178317 - RNA, 23 nt, Artificial Sequence
  Synthetic
caguuguauuaguuacacuuaaa

SEQ ID NO: 178318 - RNA, 24 nt, Artificial Sequence
  Synthetic
ucaguuguauuaguuacacuuaaa

SEQ ID NO: 178319 - RNA, 18 nt, Artificial Sequence
  Synthetic
cauaauccaucacuuaaa

SEQ ID NO: 178320 - RNA, 19 nt, Artificial Sequence
  Synthetic
acauaauccaucacuuaaa

SEQ ID NO: 178321 - RNA, 20 nt, Artificial Sequence
  Synthetic
aacauaauccaucacuuaaa

SEQ ID NO: 178322 - RNA, 21 nt, Artificial Sequence
  Synthetic
aaacauaauccaucacuuaaa

SEQ ID NO: 178323 - RNA, 22 nt, Artificial Sequence
  Synthetic
uaaacauaauccaucacuuaaa

SEQ ID NO: 178324 - RNA, 23 nt, Artificial Sequence
  Synthetic
auaaacauaauccaucacuuaaa

SEQ ID NO: 178325 - RNA, 24 nt, Artificial Sequence
  Synthetic
aauaaacauaauccaucacuuaaa

SEQ ID NO: 178326 - RNA, 18 nt, Artificial Sequence
  Synthetic
uagggauuaucacuuaaa

SEQ ID NO: 178327 - RNA, 19 nt, Artificial Sequence
  Synthetic
uuagggauuaucacuuaaa

SEQ ID NO: 178328 - RNA, 20 nt, Artificial Sequence
  Synthetic
uuuagggauuaucacuuaaa

SEQ ID NO: 178329 - RNA, 21 nt, Artificial Sequence
  Synthetic
uuuuagggauuaucacuuaaa

SEQ ID NO: 178330 - RNA, 22 nt, Artificial Sequence
  Synthetic
uuuuuagggauuaucacuuaaa

SEQ ID NO: 178331 - RNA, 23 nt, Artificial Sequence
  Synthetic
cuuuuuagggauuaucacuuaaa

SEQ ID NO: 178332 - RNA, 24 nt, Artificial Sequence
  Synthetic
ccuuuuuagggauuaucacuuaaa

SEQ ID NO: 178333 - RNA, 18 nt, Artificial Sequence
  Synthetic
cuucaccuuagacuuaaa

SEQ ID NO: 178334 - RNA, 19 nt, Artificial Sequence
  Synthetic
ccuucaccuuagacuuaaa

SEQ ID NO: 178335 - RNA, 20 nt, Artificial Sequence
  Synthetic
accuucaccuuagacuuaaa

SEQ ID NO: 178336 - RNA, 21 nt, Artificial Sequence
  Synthetic
uaccuucaccuuagacuuaaa

SEQ ID NO: 178337 - RNA, 22 nt, Artificial Sequence
  Synthetic
uuaccuucaccuuagacuuaaa

SEQ ID NO: 178338 - RNA, 23 nt, Artificial Sequence
  Synthetic
uuuaccuucaccuuagacuuaaa

SEQ ID NO: 178339 - RNA, 24 nt, Artificial Sequence
  Synthetic
guuuaccuucaccuuagacuuaaa

SEQ ID NO: 178340 - RNA, 18 nt, Artificial Sequence
  Synthetic
aucaaagaucuacuuaaa

SEQ ID NO: 178341 - RNA, 19 nt, Artificial Sequence
  Synthetic
uaucaaagaucuacuuaaa

SEQ ID NO: 178342 - RNA, 20 nt, Artificial Sequence
  Synthetic
uuaucaaagaucuacuuaaa

SEQ ID NO: 178343 - RNA, 21 nt, Artificial Sequence
  Synthetic
guuaucaaagaucuacuuaaa

SEQ ID NO: 178344 - RNA, 22 nt, Artificial Sequence
  Synthetic
cguuaucaaagaucuacuuaaa

SEQ ID NO: 178345 - RNA, 23 nt, Artificial Sequence
  Synthetic
ccguuaucaaagaucuacuuaaa

SEQ ID NO: 178346 - RNA, 24 nt, Artificial Sequence
  Synthetic
uccguuaucaaagaucuacuuaaa

SEQ ID NO: 178347 - RNA, 18 nt, Artificial Sequence
  Synthetic
uguugaaggaaccuuaaa

SEQ ID NO: 178348 - RNA, 19 nt, Artificial Sequence
  Synthetic
auguugaaggaaccuuaaa

SEQ ID NO: 178349 - RNA, 20 nt, Artificial Sequence
  Synthetic
cauguugaaggaaccuuaaa

SEQ ID NO: 178350 - RNA, 21 nt, Artificial Sequence
  Synthetic
gcauguugaaggaaccuuaaa

SEQ ID NO: 178351 - RNA, 22 nt, Artificial Sequence
  Synthetic
ggcauguugaaggaaccuuaaa

SEQ ID NO: 178352 - RNA, 23 nt, Artificial Sequence
  Synthetic
uggcauguugaaggaaccuuaaa

SEQ ID NO: 178353 - RNA, 24 nt, Artificial Sequence
  Synthetic
uuggcauguugaaggaaccuuaaa

SEQ ID NO: 178354 - RNA, 18 nt, Artificial Sequence
  Synthetic
aaauagaauacccuuaaa

SEQ ID NO: 178355 - RNA, 19 nt, Artificial Sequence
  Synthetic
uaaauagaauacccuuaaa

SEQ ID NO: 178356 - RNA, 20 nt, Artificial Sequence
  Synthetic
auaaauagaauacccuuaaa

SEQ ID NO: 178357 - RNA, 21 nt, Artificial Sequence
  Synthetic
aauaaauagaauacccuuaaa

SEQ ID NO: 178358 - RNA, 22 nt, Artificial Sequence
  Synthetic
aaauaaauagaauacccuuaaa

SEQ ID NO: 178359 - RNA, 23 nt, Artificial Sequence
  Synthetic
caaauaaauagaauacccuuaaa

SEQ ID NO: 178360 - RNA, 24 nt, Artificial Sequence
  Synthetic
gcaaauaaauagaauacccuuaaa

SEQ ID NO: 178361 - RNA, 18 nt, Artificial Sequence
  Synthetic
uguuuugaaucccuuaaa

SEQ ID NO: 178362 - RNA, 19 nt, Artificial Sequence
  Synthetic
uuguuuugaaucccuuaaa

SEQ ID NO: 178363 - RNA, 20 nt, Artificial Sequence
  Synthetic
guuguuuugaaucccuuaaa

SEQ ID NO: 178364 - RNA, 21 nt, Artificial Sequence
  Synthetic
gguuguuuugaaucccuuaaa

SEQ ID NO: 178365 - RNA, 22 nt, Artificial Sequence
  Synthetic
ggguuguuuugaaucccuuaaa

SEQ ID NO: 178366 - RNA, 23 nt, Artificial Sequence
  Synthetic
gggguuguuuugaaucccuuaaa

SEQ ID NO: 178367 - RNA, 24 nt, Artificial Sequence
  Synthetic
agggguuguuuugaaucccuuaaa

SEQ ID NO: 178368 - RNA, 18 nt, Artificial Sequence
  Synthetic
auauuuuucagccuuaaa

SEQ ID NO: 178369 - RNA, 19 nt, Artificial Sequence
  Synthetic
aauauuuuucagccuuaaa

SEQ ID NO: 178370 - RNA, 20 nt, Artificial Sequence
  Synthetic
gaauauuuuucagccuuaaa

SEQ ID NO: 178371 - RNA, 21 nt, Artificial Sequence
  Synthetic
ggaauauuuuucagccuuaaa

SEQ ID NO: 178372 - RNA, 22 nt, Artificial Sequence
  Synthetic
uggaauauuuuucagccuuaaa

SEQ ID NO: 178373 - RNA, 23 nt, Artificial Sequence
  Synthetic
cuggaauauuuuucagccuuaaa

SEQ ID NO: 178374 - RNA, 24 nt, Artificial Sequence
  Synthetic
ccuggaauauuuuucagccuuaaa

SEQ ID NO: 178375 - RNA, 18 nt, Artificial Sequence
  Synthetic
agaguuauuggccuuaaa

SEQ ID NO: 178376 - RNA, 19 nt, Artificial Sequence
  Synthetic
aagaguuauuggccuuaaa

SEQ ID NO: 178377 - RNA, 20 nt, Artificial Sequence
  Synthetic
uaagaguuauuggccuuaaa

SEQ ID NO: 178378 - RNA, 21 nt, Artificial Sequence
  Synthetic
cuaagaguuauuggccuuaaa

SEQ ID NO: 178379 - RNA, 22 nt, Artificial Sequence
  Synthetic
ucuaagaguuauuggccuuaaa

SEQ ID NO: 178380 - RNA, 23 nt, Artificial Sequence
  Synthetic
aucuaagaguuauuggccuuaaa

SEQ ID NO: 178381 - RNA, 24 nt, Artificial Sequence
  Synthetic
aaucuaagaguuauuggccuuaaa

SEQ ID NO: 178382 - RNA, 18 nt, Artificial Sequence
  Synthetic
auauuauuuggccuuaaa

SEQ ID NO: 178383 - RNA, 19 nt, Artificial Sequence
  Synthetic
aauauuauuuggccuuaaa

SEQ ID NO: 178384 - RNA, 20 nt, Artificial Sequence
  Synthetic
gaauauuauuuggccuuaaa

SEQ ID NO: 178385 - RNA, 21 nt, Artificial Sequence
  Synthetic
ggaauauuauuuggccuuaaa

SEQ ID NO: 178386 - RNA, 22 nt, Artificial Sequence
  Synthetic
gggaauauuauuuggccuuaaa

SEQ ID NO: 178387 - RNA, 23 nt, Artificial Sequence
  Synthetic
agggaauauuauuuggccuuaaa

SEQ ID NO: 178388 - RNA, 24 nt, Artificial Sequence
  Synthetic
cagggaauauuauuuggccuuaaa

SEQ ID NO: 178389 - RNA, 18 nt, Artificial Sequence
  Synthetic
auaugccaacuccuuaaa

SEQ ID NO: 178390 - RNA, 19 nt, Artificial Sequence
  Synthetic
cauaugccaacuccuuaaa

SEQ ID NO: 178391 - RNA, 20 nt, Artificial Sequence
  Synthetic
ucauaugccaacuccuuaaa

SEQ ID NO: 178392 - RNA, 21 nt, Artificial Sequence
  Synthetic
uucauaugccaacuccuuaaa

SEQ ID NO: 178393 - RNA, 22 nt, Artificial Sequence
  Synthetic
uuucauaugccaacuccuuaaa

SEQ ID NO: 178394 - RNA, 23 nt, Artificial Sequence
  Synthetic
uuuucauaugccaacuccuuaaa

SEQ ID NO: 178395 - RNA, 24 nt, Artificial Sequence
  Synthetic
guuuucauaugccaacuccuuaaa

SEQ ID NO: 178396 - RNA, 18 nt, Artificial Sequence
  Synthetic
gcuuaugacuagcuuaaa

SEQ ID NO: 178397 - RNA, 19 nt, Artificial Sequence
  Synthetic
ugcuuaugacuagcuuaaa

SEQ ID NO: 178398 - RNA, 20 nt, Artificial Sequence
  Synthetic
uugcuuaugacuagcuuaaa

SEQ ID NO: 178399 - RNA, 21 nt, Artificial Sequence
  Synthetic
uuugcuuaugacuagcuuaaa

SEQ ID NO: 178400 - RNA, 22 nt, Artificial Sequence
  Synthetic
cuuugcuuaugacuagcuuaaa

SEQ ID NO: 178401 - RNA, 23 nt, Artificial Sequence
  Synthetic
acuuugcuuaugacuagcuuaaa

SEQ ID NO: 178402 - RNA, 24 nt, Artificial Sequence
  Synthetic
aacuuugcuuaugacuagcuuaaa

SEQ ID NO: 178403 - RNA, 18 nt, Artificial Sequence
  Synthetic
acacacugguggcuuaaa

SEQ ID NO: 178404 - RNA, 19 nt, Artificial Sequence
  Synthetic
aacacacugguggcuuaaa

SEQ ID NO: 178405 - RNA, 20 nt, Artificial Sequence
  Synthetic
gaacacacugguggcuuaaa

SEQ ID NO: 178406 - RNA, 21 nt, Artificial Sequence
  Synthetic
ugaacacacugguggcuuaaa

SEQ ID NO: 178407 - RNA, 22 nt, Artificial Sequence
  Synthetic
uugaacacacugguggcuuaaa

SEQ ID NO: 178408 - RNA, 23 nt, Artificial Sequence
  Synthetic
guugaacacacugguggcuuaaa

SEQ ID NO: 178409 - RNA, 24 nt, Artificial Sequence
  Synthetic
aguugaacacacugguggcuuaaa

SEQ ID NO: 178410 - RNA, 18 nt, Artificial Sequence
  Synthetic
guccauaauaugcuuaaa

SEQ ID NO: 178411 - RNA, 19 nt, Artificial Sequence
  Synthetic
uguccauaauaugcuuaaa

SEQ ID NO: 178412 - RNA, 20 nt, Artificial Sequence
  Synthetic
guguccauaauaugcuuaaa

SEQ ID NO: 178413 - RNA, 21 nt, Artificial Sequence
  Synthetic
aguguccauaauaugcuuaaa

SEQ ID NO: 178414 - RNA, 22 nt, Artificial Sequence
  Synthetic
gaguguccauaauaugcuuaaa

SEQ ID NO: 178415 - RNA, 23 nt, Artificial Sequence
  Synthetic
ggaguguccauaauaugcuuaaa

SEQ ID NO: 178416 - RNA, 24 nt, Artificial Sequence
  Synthetic
uggaguguccauaauaugcuuaaa

SEQ ID NO: 178417 - RNA, 18 nt, Artificial Sequence
  Synthetic
uaggcauuuaugcuuaaa

SEQ ID NO: 178418 - RNA, 19 nt, Artificial Sequence
  Synthetic
auaggcauuuaugcuuaaa

SEQ ID NO: 178419 - RNA, 20 nt, Artificial Sequence
  Synthetic
aauaggcauuuaugcuuaaa

SEQ ID NO: 178420 - RNA, 21 nt, Artificial Sequence
  Synthetic
aaauaggcauuuaugcuuaaa

SEQ ID NO: 178421 - RNA, 22 nt, Artificial Sequence
  Synthetic
uaaauaggcauuuaugcuuaaa

SEQ ID NO: 178422 - RNA, 23 nt, Artificial Sequence
  Synthetic
auaaauaggcauuuaugcuuaaa

SEQ ID NO: 178423 - RNA, 24 nt, Artificial Sequence
  Synthetic
uauaaauaggcauuuaugcuuaaa

SEQ ID NO: 178424 - RNA, 18 nt, Artificial Sequence
  Synthetic
uuuugaccucugcuuaaa

SEQ ID NO: 178425 - RNA, 19 nt, Artificial Sequence
  Synthetic
cuuuugaccucugcuuaaa

SEQ ID NO: 178426 - RNA, 20 nt, Artificial Sequence
  Synthetic
gcuuuugaccucugcuuaaa

SEQ ID NO: 178427 - RNA, 21 nt, Artificial Sequence
  Synthetic
agcuuuugaccucugcuuaaa

SEQ ID NO: 178428 - RNA, 22 nt, Artificial Sequence
  Synthetic
uagcuuuugaccucugcuuaaa

SEQ ID NO: 178429 - RNA, 23 nt, Artificial Sequence
  Synthetic
cuagcuuuugaccucugcuuaaa

SEQ ID NO: 178430 - RNA, 24 nt, Artificial Sequence
  Synthetic
ucuagcuuuugaccucugcuuaaa

SEQ ID NO: 178431 - RNA, 18 nt, Artificial Sequence
  Synthetic
uucugucuauugcuuaaa

SEQ ID NO: 178432 - RNA, 19 nt, Artificial Sequence
  Synthetic
uuucugucuauugcuuaaa

SEQ ID NO: 178433 - RNA, 20 nt, Artificial Sequence
  Synthetic
uuuucugucuauugcuuaaa

SEQ ID NO: 178434 - RNA, 21 nt, Artificial Sequence
  Synthetic
uuuuucugucuauugcuuaaa

SEQ ID NO: 178435 - RNA, 22 nt, Artificial Sequence
  Synthetic
auuuuucugucuauugcuuaaa

SEQ ID NO: 178436 - RNA, 23 nt, Artificial Sequence
  Synthetic
aauuuuucugucuauugcuuaaa

SEQ ID NO: 178437 - RNA, 24 nt, Artificial Sequence
  Synthetic
gaauuuuucugucuauugcuuaaa

SEQ ID NO: 178438 - RNA, 18 nt, Artificial Sequence
  Synthetic
gcaaacaaaaaucuuaaa

SEQ ID NO: 178439 - RNA, 19 nt, Artificial Sequence
  Synthetic
agcaaacaaaaaucuuaaa

SEQ ID NO: 178440 - RNA, 20 nt, Artificial Sequence
  Synthetic
gagcaaacaaaaaucuuaaa

SEQ ID NO: 178441 - RNA, 21 nt, Artificial Sequence
  Synthetic
ugagcaaacaaaaaucuuaaa

SEQ ID NO: 178442 - RNA, 22 nt, Artificial Sequence
  Synthetic
augagcaaacaaaaaucuuaaa

SEQ ID NO: 178443 - RNA, 23 nt, Artificial Sequence
  Synthetic
aaugagcaaacaaaaaucuuaaa

SEQ ID NO: 178444 - RNA, 24 nt, Artificial Sequence
  Synthetic
caaugagcaaacaaaaaucuuaaa

SEQ ID NO: 178445 - RNA, 18 nt, Artificial Sequence
  Synthetic
uauuaaacucaucuuaaa

SEQ ID NO: 178446 - RNA, 19 nt, Artificial Sequence
  Synthetic
auauuaaacucaucuuaaa

SEQ ID NO: 178447 - RNA, 20 nt, Artificial Sequence
  Synthetic
uauauuaaacucaucuuaaa

SEQ ID NO: 178448 - RNA, 21 nt, Artificial Sequence
  Synthetic
uuauauuaaacucaucuuaaa

SEQ ID NO: 178449 - RNA, 22 nt, Artificial Sequence
  Synthetic
guuauauuaaacucaucuuaaa

SEQ ID NO: 178450 - RNA, 23 nt, Artificial Sequence
  Synthetic
uguuauauuaaacucaucuuaaa

SEQ ID NO: 178451 - RNA, 24 nt, Artificial Sequence
  Synthetic
uuguuauauuaaacucaucuuaaa

SEQ ID NO: 178452 - RNA, 18 nt, Artificial Sequence
  Synthetic
gcauucauggcucuuaaa

SEQ ID NO: 178453 - RNA, 19 nt, Artificial Sequence
  Synthetic
agcauucauggcucuuaaa

SEQ ID NO: 178454 - RNA, 20 nt, Artificial Sequence
  Synthetic
aagcauucauggcucuuaaa

SEQ ID NO: 178455 - RNA, 21 nt, Artificial Sequence
  Synthetic
caagcauucauggcucuuaaa

SEQ ID NO: 178456 - RNA, 22 nt, Artificial Sequence
  Synthetic
ccaagcauucauggcucuuaaa

SEQ ID NO: 178457 - RNA, 23 nt, Artificial Sequence
  Synthetic
uccaagcauucauggcucuuaaa

SEQ ID NO: 178458 - RNA, 24 nt, Artificial Sequence
  Synthetic
auccaagcauucauggcucuuaaa

SEQ ID NO: 178459 - RNA, 18 nt, Artificial Sequence
  Synthetic
ugauaaucaggucuuaaa

SEQ ID NO: 178460 - RNA, 19 nt, Artificial Sequence
  Synthetic
uugauaaucaggucuuaaa

SEQ ID NO: 178461 - RNA, 20 nt, Artificial Sequence
  Synthetic
auugauaaucaggucuuaaa

SEQ ID NO: 178462 - RNA, 21 nt, Artificial Sequence
  Synthetic
cauugauaaucaggucuuaaa

SEQ ID NO: 178463 - RNA, 22 nt, Artificial Sequence
  Synthetic
ucauugauaaucaggucuuaaa

SEQ ID NO: 178464 - RNA, 23 nt, Artificial Sequence
  Synthetic
uucauugauaaucaggucuuaaa

SEQ ID NO: 178465 - RNA, 24 nt, Artificial Sequence
  Synthetic
cuucauugauaaucaggucuuaaa

SEQ ID NO: 178466 - RNA, 18 nt, Artificial Sequence
  Synthetic
caguguuucauucuuaaa

SEQ ID NO: 178467 - RNA, 19 nt, Artificial Sequence
  Synthetic
acaguguuucauucuuaaa

SEQ ID NO: 178468 - RNA, 20 nt, Artificial Sequence
  Synthetic
aacaguguuucauucuuaaa

SEQ ID NO: 178469 - RNA, 21 nt, Artificial Sequence
  Synthetic
gaacaguguuucauucuuaaa

SEQ ID NO: 178470 - RNA, 22 nt, Artificial Sequence
  Synthetic
agaacaguguuucauucuuaaa

SEQ ID NO: 178471 - RNA, 23 nt, Artificial Sequence
  Synthetic
uagaacaguguuucauucuuaaa

SEQ ID NO: 178472 - RNA, 24 nt, Artificial Sequence
  Synthetic
cuagaacaguguuucauucuuaaa

SEQ ID NO: 178473 - RNA, 18 nt, Artificial Sequence
  Synthetic
agaaacaugguucuuaaa

SEQ ID NO: 178474 - RNA, 19 nt, Artificial Sequence
  Synthetic
aagaaacaugguucuuaaa

SEQ ID NO: 178475 - RNA, 20 nt, Artificial Sequence
  Synthetic
aaagaaacaugguucuuaaa

SEQ ID NO: 178476 - RNA, 21 nt, Artificial Sequence
  Synthetic
gaaagaaacaugguucuuaaa

SEQ ID NO: 178477 - RNA, 22 nt, Artificial Sequence
  Synthetic
agaaagaaacaugguucuuaaa

SEQ ID NO: 178478 - RNA, 23 nt, Artificial Sequence
  Synthetic
gagaaagaaacaugguucuuaaa

SEQ ID NO: 178479 - RNA, 24 nt, Artificial Sequence
  Synthetic
ugagaaagaaacaugguucuuaaa

SEQ ID NO: 178480 - RNA, 18 nt, Artificial Sequence
  Synthetic
cuuuuuuaaaaaguuaaa

SEQ ID NO: 178481 - RNA, 19 nt, Artificial Sequence
  Synthetic
ucuuuuuuaaaaaguuaaa

SEQ ID NO: 178482 - RNA, 20 nt, Artificial Sequence
  Synthetic
aucuuuuuuaaaaaguuaaa

SEQ ID NO: 178483 - RNA, 21 nt, Artificial Sequence
  Synthetic
uaucuuuuuuaaaaaguuaaa

SEQ ID NO: 178484 - RNA, 22 nt, Artificial Sequence
  Synthetic
uuaucuuuuuuaaaaaguuaaa

SEQ ID NO: 178485 - RNA, 23 nt, Artificial Sequence
  Synthetic
auuaucuuuuuuaaaaaguuaaa

SEQ ID NO: 178486 - RNA, 24 nt, Artificial Sequence
  Synthetic
gauuaucuuuuuuaaaaaguuaaa

SEQ ID NO: 178487 - RNA, 18 nt, Artificial Sequence
  Synthetic
uuuaucuuccaaguuaaa

SEQ ID NO: 178488 - RNA, 19 nt, Artificial Sequence
  Synthetic
uuuuaucuuccaaguuaaa

SEQ ID NO: 178489 - RNA, 20 nt, Artificial Sequence
  Synthetic
cuuuuaucuuccaaguuaaa

SEQ ID NO: 178490 - RNA, 21 nt, Artificial Sequence
  Synthetic
gcuuuuaucuuccaaguuaaa

SEQ ID NO: 178491 - RNA, 22 nt, Artificial Sequence
  Synthetic
ugcuuuuaucuuccaaguuaaa

SEQ ID NO: 178492 - RNA, 23 nt, Artificial Sequence
  Synthetic
uugcuuuuaucuuccaaguuaaa

SEQ ID NO: 178493 - RNA, 24 nt, Artificial Sequence
  Synthetic
cuugcuuuuaucuuccaaguuaaa

SEQ ID NO: 178494 - RNA, 18 nt, Artificial Sequence
  Synthetic
ccuguuugcuaaguuaaa

SEQ ID NO: 178495 - RNA, 19 nt, Artificial Sequence
  Synthetic
gccuguuugcuaaguuaaa

SEQ ID NO: 178496 - RNA, 20 nt, Artificial Sequence
  Synthetic
ugccuguuugcuaaguuaaa

SEQ ID NO: 178497 - RNA, 21 nt, Artificial Sequence
  Synthetic
gugccuguuugcuaaguuaaa

SEQ ID NO: 178498 - RNA, 22 nt, Artificial Sequence
  Synthetic
agugccuguuugcuaaguuaaa

SEQ ID NO: 178499 - RNA, 23 nt, Artificial Sequence
  Synthetic
cagugccuguuugcuaaguuaaa

SEQ ID NO: 178500 - RNA, 24 nt, Artificial Sequence
  Synthetic
acagugccuguuugcuaaguuaaa

SEQ ID NO: 178501 - RNA, 18 nt, Artificial Sequence
  Synthetic
auagcuccuacaguuaaa

SEQ ID NO: 178502 - RNA, 19 nt, Artificial Sequence
  Synthetic
gauagcuccuacaguuaaa

SEQ ID NO: 178503 - RNA, 20 nt, Artificial Sequence
  Synthetic
agauagcuccuacaguuaaa

SEQ ID NO: 178504 - RNA, 21 nt, Artificial Sequence
  Synthetic
gagauagcuccuacaguuaaa

SEQ ID NO: 178505 - RNA, 22 nt, Artificial Sequence
  Synthetic
ggagauagcuccuacaguuaaa

SEQ ID NO: 178506 - RNA, 23 nt, Artificial Sequence
  Synthetic
aggagauagcuccuacaguuaaa

SEQ ID NO: 178507 - RNA, 24 nt, Artificial Sequence
  Synthetic
gaggagauagcuccuacaguuaaa

SEQ ID NO: 178508 - RNA, 18 nt, Artificial Sequence
  Synthetic
uuuuuccacagaguuaaa

SEQ ID NO: 178509 - RNA, 19 nt, Artificial Sequence
  Synthetic
cuuuuuccacagaguuaaa

SEQ ID NO: 178510 - RNA, 20 nt, Artificial Sequence
  Synthetic
acuuuuuccacagaguuaaa

SEQ ID NO: 178511 - RNA, 21 nt, Artificial Sequence
  Synthetic
uacuuuuuccacagaguuaaa

SEQ ID NO: 178512 - RNA, 22 nt, Artificial Sequence
  Synthetic
guacuuuuuccacagaguuaaa

SEQ ID NO: 178513 - RNA, 23 nt, Artificial Sequence
  Synthetic
aguacuuuuuccacagaguuaaa

SEQ ID NO: 178514 - RNA, 24 nt, Artificial Sequence
  Synthetic
aaguacuuuuuccacagaguuaaa

SEQ ID NO: 178515 - RNA, 18 nt, Artificial Sequence
  Synthetic
agcaauaaucuaguuaaa

SEQ ID NO: 178516 - RNA, 19 nt, Artificial Sequence
  Synthetic
uagcaauaaucuaguuaaa

SEQ ID NO: 178517 - RNA, 20 nt, Artificial Sequence
  Synthetic
uuagcaauaaucuaguuaaa

SEQ ID NO: 178518 - RNA, 21 nt, Artificial Sequence
  Synthetic
uuuagcaauaaucuaguuaaa

SEQ ID NO: 178519 - RNA, 22 nt, Artificial Sequence
  Synthetic
auuuagcaauaaucuaguuaaa

SEQ ID NO: 178520 - RNA, 23 nt, Artificial Sequence
  Synthetic
aauuuagcaauaaucuaguuaaa

SEQ ID NO: 178521 - RNA, 24 nt, Artificial Sequence
  Synthetic
uaauuuagcaauaaucuaguuaaa

SEQ ID NO: 178522 - RNA, 18 nt, Artificial Sequence
  Synthetic
cucaacgaguuaguuaaa

SEQ ID NO: 178523 - RNA, 19 nt, Artificial Sequence
  Synthetic
gcucaacgaguuaguuaaa

SEQ ID NO: 178524 - RNA, 20 nt, Artificial Sequence
  Synthetic
agcucaacgaguuaguuaaa

SEQ ID NO: 178525 - RNA, 21 nt, Artificial Sequence
  Synthetic
aagcucaacgaguuaguuaaa

SEQ ID NO: 178526 - RNA, 22 nt, Artificial Sequence
  Synthetic
caagcucaacgaguuaguuaaa

SEQ ID NO: 178527 - RNA, 23 nt, Artificial Sequence
  Synthetic
acaagcucaacgaguuaguuaaa

SEQ ID NO: 178528 - RNA, 24 nt, Artificial Sequence
  Synthetic
gacaagcucaacgaguuaguuaaa

SEQ ID NO: 178529 - RNA, 18 nt, Artificial Sequence
  Synthetic
cagaugccaaacguuaaa

SEQ ID NO: 178530 - RNA, 19 nt, Artificial Sequence
  Synthetic
ucagaugccaaacguuaaa

SEQ ID NO: 178531 - RNA, 20 nt, Artificial Sequence
  Synthetic
aucagaugccaaacguuaaa

SEQ ID NO: 178532 - RNA, 21 nt, Artificial Sequence
  Synthetic
uaucagaugccaaacguuaaa

SEQ ID NO: 178533 - RNA, 22 nt, Artificial Sequence
  Synthetic
uuaucagaugccaaacguuaaa

SEQ ID NO: 178534 - RNA, 23 nt, Artificial Sequence
  Synthetic
guuaucagaugccaaacguuaaa

SEQ ID NO: 178535 - RNA, 24 nt, Artificial Sequence
  Synthetic
uguuaucagaugccaaacguuaaa

SEQ ID NO: 178536 - RNA, 18 nt, Artificial Sequence
  Synthetic
cuguuuugugccguuaaa

SEQ ID NO: 178537 - RNA, 19 nt, Artificial Sequence
  Synthetic
gcuguuuugugccguuaaa

SEQ ID NO: 178538 - RNA, 20 nt, Artificial Sequence
  Synthetic
agcuguuuugugccguuaaa

SEQ ID NO: 178539 - RNA, 21 nt, Artificial Sequence
  Synthetic
cagcuguuuugugccguuaaa

SEQ ID NO: 178540 - RNA, 22 nt, Artificial Sequence
  Synthetic
ucagcuguuuugugccguuaaa

SEQ ID NO: 178541 - RNA, 23 nt, Artificial Sequence
  Synthetic
cucagcuguuuugugccguuaaa

SEQ ID NO: 178542 - RNA, 24 nt, Artificial Sequence
  Synthetic
ucucagcuguuuugugccguuaaa

SEQ ID NO: 178543 - RNA, 18 nt, Artificial Sequence
  Synthetic
agugaauggcagguuaaa

SEQ ID NO: 178544 - RNA, 19 nt, Artificial Sequence
  Synthetic
aagugaauggcagguuaaa

SEQ ID NO: 178545 - RNA, 20 nt, Artificial Sequence
  Synthetic
caagugaauggcagguuaaa

SEQ ID NO: 178546 - RNA, 21 nt, Artificial Sequence
  Synthetic
ccaagugaauggcagguuaaa

SEQ ID NO: 178547 - RNA, 22 nt, Artificial Sequence
  Synthetic
cccaagugaauggcagguuaaa

SEQ ID NO: 178548 - RNA, 23 nt, Artificial Sequence
  Synthetic
ucccaagugaauggcagguuaaa

SEQ ID NO: 178549 - RNA, 24 nt, Artificial Sequence
  Synthetic
uucccaagugaauggcagguuaaa

SEQ ID NO: 178550 - RNA, 18 nt, Artificial Sequence
  Synthetic
gagagacuuacgguuaaa

SEQ ID NO: 178551 - RNA, 19 nt, Artificial Sequence
  Synthetic
agagagacuuacgguuaaa

SEQ ID NO: 178552 - RNA, 20 nt, Artificial Sequence
  Synthetic
gagagagacuuacgguuaaa

SEQ ID NO: 178553 - RNA, 21 nt, Artificial Sequence
  Synthetic
agagagagacuuacgguuaaa

SEQ ID NO: 178554 - RNA, 22 nt, Artificial Sequence
  Synthetic
uagagagagacuuacgguuaaa

SEQ ID NO: 178555 - RNA, 23 nt, Artificial Sequence
  Synthetic
uuagagagagacuuacgguuaaa

SEQ ID NO: 178556 - RNA, 24 nt, Artificial Sequence
  Synthetic
auuagagagagacuuacgguuaaa

SEQ ID NO: 178557 - RNA, 18 nt, Artificial Sequence
  Synthetic
ugagaacaaaauguuaaa

SEQ ID NO: 178558 - RNA, 19 nt, Artificial Sequence
  Synthetic
augagaacaaaauguuaaa

SEQ ID NO: 178559 - RNA, 20 nt, Artificial Sequence
  Synthetic
aaugagaacaaaauguuaaa

SEQ ID NO: 178560 - RNA, 21 nt, Artificial Sequence
  Synthetic
gaaugagaacaaaauguuaaa

SEQ ID NO: 178561 - RNA, 22 nt, Artificial Sequence
  Synthetic
agaaugagaacaaaauguuaaa

SEQ ID NO: 178562 - RNA, 23 nt, Artificial Sequence
  Synthetic
gagaaugagaacaaaauguuaaa

SEQ ID NO: 178563 - RNA, 24 nt, Artificial Sequence
  Synthetic
ugagaaugagaacaaaauguuaaa

SEQ ID NO: 178564 - RNA, 18 nt, Artificial Sequence
  Synthetic
caaagagaaaauguuaaa

SEQ ID NO: 178565 - RNA, 19 nt, Artificial Sequence
  Synthetic
gcaaagagaaaauguuaaa

SEQ ID NO: 178566 - RNA, 20 nt, Artificial Sequence
  Synthetic
ugcaaagagaaaauguuaaa

SEQ ID NO: 178567 - RNA, 21 nt, Artificial Sequence
  Synthetic
gugcaaagagaaaauguuaaa

SEQ ID NO: 178568 - RNA, 22 nt, Artificial Sequence
  Synthetic
agugcaaagagaaaauguuaaa

SEQ ID NO: 178569 - RNA, 23 nt, Artificial Sequence
  Synthetic
cagugcaaagagaaaauguuaaa

SEQ ID NO: 178570 - RNA, 24 nt, Artificial Sequence
  Synthetic
ucagugcaaagagaaaauguuaaa

SEQ ID NO: 178571 - RNA, 18 nt, Artificial Sequence
  Synthetic
ugaggaaaaacuguuaaa

SEQ ID NO: 178572 - RNA, 19 nt, Artificial Sequence
  Synthetic
cugaggaaaaacuguuaaa

SEQ ID NO: 178573 - RNA, 20 nt, Artificial Sequence
  Synthetic
acugaggaaaaacuguuaaa

SEQ ID NO: 178574 - RNA, 21 nt, Artificial Sequence
  Synthetic
uacugaggaaaaacuguuaaa

SEQ ID NO: 178575 - RNA, 22 nt, Artificial Sequence
  Synthetic
uuacugaggaaaaacuguuaaa

SEQ ID NO: 178576 - RNA, 23 nt, Artificial Sequence
  Synthetic
auuacugaggaaaaacuguuaaa

SEQ ID NO: 178577 - RNA, 24 nt, Artificial Sequence
  Synthetic
uauuacugaggaaaaacuguuaaa

SEQ ID NO: 178578 - RNA, 18 nt, Artificial Sequence
  Synthetic
guaugcuuuucuguuaaa

SEQ ID NO: 178579 - RNA, 19 nt, Artificial Sequence
  Synthetic
uguaugcuuuucuguuaaa

SEQ ID NO: 178580 - RNA, 20 nt, Artificial Sequence
  Synthetic
guguaugcuuuucuguuaaa

SEQ ID NO: 178581 - RNA, 21 nt, Artificial Sequence
  Synthetic
uguguaugcuuuucuguuaaa

SEQ ID NO: 178582 - RNA, 22 nt, Artificial Sequence
  Synthetic
auguguaugcuuuucuguuaaa

SEQ ID NO: 178583 - RNA, 23 nt, Artificial Sequence
  Synthetic
aauguguaugcuuuucuguuaaa

SEQ ID NO: 178584 - RNA, 24 nt, Artificial Sequence
  Synthetic
uaauguguaugcuuuucuguuaaa

SEQ ID NO: 178585 - RNA, 18 nt, Artificial Sequence
  Synthetic
ugaugguacaaauuuaaa

SEQ ID NO: 178586 - RNA, 19 nt, Artificial Sequence
  Synthetic
uugaugguacaaauuuaaa

SEQ ID NO: 178587 - RNA, 20 nt, Artificial Sequence
  Synthetic
auugaugguacaaauuuaaa

SEQ ID NO: 178588 - RNA, 21 nt, Artificial Sequence
  Synthetic
aauugaugguacaaauuuaaa

SEQ ID NO: 178589 - RNA, 22 nt, Artificial Sequence
  Synthetic
caauugaugguacaaauuuaaa

SEQ ID NO: 178590 - RNA, 23 nt, Artificial Sequence
  Synthetic
ccaauugaugguacaaauuuaaa

SEQ ID NO: 178591 - RNA, 24 nt, Artificial Sequence
  Synthetic
uccaauugaugguacaaauuuaaa

SEQ ID NO: 178592 - RNA, 18 nt, Artificial Sequence
  Synthetic
agagguccuaaauuuaaa

SEQ ID NO: 178593 - RNA, 19 nt, Artificial Sequence
  Synthetic
cagagguccuaaauuuaaa

SEQ ID NO: 178594 - RNA, 20 nt, Artificial Sequence
  Synthetic
ucagagguccuaaauuuaaa

SEQ ID NO: 178595 - RNA, 21 nt, Artificial Sequence
  Synthetic
uucagagguccuaaauuuaaa

SEQ ID NO: 178596 - RNA, 22 nt, Artificial Sequence
  Synthetic
guucagagguccuaaauuuaaa

SEQ ID NO: 178597 - RNA, 23 nt, Artificial Sequence
  Synthetic
uguucagagguccuaaauuuaaa

SEQ ID NO: 178598 - RNA, 24 nt, Artificial Sequence
  Synthetic
guguucagagguccuaaauuuaaa

SEQ ID NO: 178599 - RNA, 18 nt, Artificial Sequence
  Synthetic
guaagacugcaauuuaaa

SEQ ID NO: 178600 - RNA, 19 nt, Artificial Sequence
  Synthetic
uguaagacugcaauuuaaa

SEQ ID NO: 178601 - RNA, 20 nt, Artificial Sequence
  Synthetic
cuguaagacugcaauuuaaa

SEQ ID NO: 178602 - RNA, 21 nt, Artificial Sequence
  Synthetic
ucuguaagacugcaauuuaaa

SEQ ID NO: 178603 - RNA, 22 nt, Artificial Sequence
  Synthetic
aucuguaagacugcaauuuaaa

SEQ ID NO: 178604 - RNA, 23 nt, Artificial Sequence
  Synthetic
gaucuguaagacugcaauuuaaa

SEQ ID NO: 178605 - RNA, 24 nt, Artificial Sequence
  Synthetic
agaucuguaagacugcaauuuaaa

SEQ ID NO: 178606 - RNA, 18 nt, Artificial Sequence
  Synthetic
uugccuuuuuaauuuaaa

SEQ ID NO: 178607 - RNA, 19 nt, Artificial Sequence
  Synthetic
uuugccuuuuuaauuuaaa

SEQ ID NO: 178608 - RNA, 20 nt, Artificial Sequence
  Synthetic
uuuugccuuuuuaauuuaaa

SEQ ID NO: 178609 - RNA, 21 nt, Artificial Sequence
  Synthetic
guuuugccuuuuuaauuuaaa

SEQ ID NO: 178610 - RNA, 22 nt, Artificial Sequence
  Synthetic
gguuuugccuuuuuaauuuaaa

SEQ ID NO: 178611 - RNA, 23 nt, Artificial Sequence
  Synthetic
ugguuuugccuuuuuaauuuaaa

SEQ ID NO: 178612 - RNA, 24 nt, Artificial Sequence
  Synthetic
uugguuuugccuuuuuaauuuaaa

SEQ ID NO: 178613 - RNA, 18 nt, Artificial Sequence
  Synthetic
uuuaggaaaacauuuaaa

SEQ ID NO: 178614 - RNA, 19 nt, Artificial Sequence
  Synthetic
guuuaggaaaacauuuaaa

SEQ ID NO: 178615 - RNA, 20 nt, Artificial Sequence
  Synthetic
uguuuaggaaaacauuuaaa

SEQ ID NO: 178616 - RNA, 21 nt, Artificial Sequence
  Synthetic
auguuuaggaaaacauuuaaa

SEQ ID NO: 178617 - RNA, 22 nt, Artificial Sequence
  Synthetic
uauguuuaggaaaacauuuaaa

SEQ ID NO: 178618 - RNA, 23 nt, Artificial Sequence
  Synthetic
guauguuuaggaaaacauuuaaa

SEQ ID NO: 178619 - RNA, 24 nt, Artificial Sequence
  Synthetic
uguauguuuaggaaaacauuuaaa

SEQ ID NO: 178620 - RNA, 18 nt, Artificial Sequence
  Synthetic
cuagaguugacauuuaaa

SEQ ID NO: 178621 - RNA, 19 nt, Artificial Sequence
  Synthetic
ucuagaguugacauuuaaa

SEQ ID NO: 178622 - RNA, 20 nt, Artificial Sequence
  Synthetic
aucuagaguugacauuuaaa

SEQ ID NO: 178623 - RNA, 21 nt, Artificial Sequence
  Synthetic
aaucuagaguugacauuuaaa

SEQ ID NO: 178624 - RNA, 22 nt, Artificial Sequence
  Synthetic
aaaucuagaguugacauuuaaa

SEQ ID NO: 178625 - RNA, 23 nt, Artificial Sequence
  Synthetic
gaaaucuagaguugacauuuaaa

SEQ ID NO: 178626 - RNA, 24 nt, Artificial Sequence
  Synthetic
agaaaucuagaguugacauuuaaa

SEQ ID NO: 178627 - RNA, 18 nt, Artificial Sequence
  Synthetic
ccauuaaacucauuuaaa

SEQ ID NO: 178628 - RNA, 19 nt, Artificial Sequence
  Synthetic
accauuaaacucauuuaaa

SEQ ID NO: 178629 - RNA, 20 nt, Artificial Sequence
  Synthetic
uaccauuaaacucauuuaaa

SEQ ID NO: 178630 - RNA, 21 nt, Artificial Sequence
  Synthetic
auaccauuaaacucauuuaaa

SEQ ID NO: 178631 - RNA, 22 nt, Artificial Sequence
  Synthetic
cauaccauuaaacucauuuaaa

SEQ ID NO: 178632 - RNA, 23 nt, Artificial Sequence
  Synthetic
acauaccauuaaacucauuuaaa

SEQ ID NO: 178633 - RNA, 24 nt, Artificial Sequence
  Synthetic
cacauaccauuaaacucauuuaaa

SEQ ID NO: 178634 - RNA, 18 nt, Artificial Sequence
  Synthetic
uacuugaacagauuuaaa

SEQ ID NO: 178635 - RNA, 19 nt, Artificial Sequence
  Synthetic
cuacuugaacagauuuaaa

SEQ ID NO: 178636 - RNA, 20 nt, Artificial Sequence
  Synthetic
ccuacuugaacagauuuaaa

SEQ ID NO: 178637 - RNA, 21 nt, Artificial Sequence
  Synthetic
accuacuugaacagauuuaaa

SEQ ID NO: 178638 - RNA, 22 nt, Artificial Sequence
  Synthetic
aaccuacuugaacagauuuaaa

SEQ ID NO: 178639 - RNA, 23 nt, Artificial Sequence
  Synthetic
caaccuacuugaacagauuuaaa

SEQ ID NO: 178640 - RNA, 24 nt, Artificial Sequence
  Synthetic
acaaccuacuugaacagauuuaaa

SEQ ID NO: 178641 - RNA, 18 nt, Artificial Sequence
  Synthetic
ucuagcuuuugauuuaaa

SEQ ID NO: 178642 - RNA, 19 nt, Artificial Sequence
  Synthetic
uucuagcuuuugauuuaaa

SEQ ID NO: 178643 - RNA, 20 nt, Artificial Sequence
  Synthetic
uuucuagcuuuugauuuaaa

SEQ ID NO: 178644 - RNA, 21 nt, Artificial Sequence
  Synthetic
auuucuagcuuuugauuuaaa

SEQ ID NO: 178645 - RNA, 22 nt, Artificial Sequence
  Synthetic
cauuucuagcuuuugauuuaaa

SEQ ID NO: 178646 - RNA, 23 nt, Artificial Sequence
  Synthetic
ucauuucuagcuuuugauuuaaa

SEQ ID NO: 178647 - RNA, 24 nt, Artificial Sequence
  Synthetic
aucauuucuagcuuuugauuuaaa

SEQ ID NO: 178648 - RNA, 18 nt, Artificial Sequence
  Synthetic
uaaauaccuauauuuaaa

SEQ ID NO: 178649 - RNA, 19 nt, Artificial Sequence
  Synthetic
auaaauaccuauauuuaaa

SEQ ID NO: 178650 - RNA, 20 nt, Artificial Sequence
  Synthetic
uauaaauaccuauauuuaaa

SEQ ID NO: 178651 - RNA, 21 nt, Artificial Sequence
  Synthetic
cuauaaauaccuauauuuaaa

SEQ ID NO: 178652 - RNA, 22 nt, Artificial Sequence
  Synthetic
acuauaaauaccuauauuuaaa

SEQ ID NO: 178653 - RNA, 23 nt, Artificial Sequence
  Synthetic
aacuauaaauaccuauauuuaaa

SEQ ID NO: 178654 - RNA, 24 nt, Artificial Sequence
  Synthetic
uaacuauaaauaccuauauuuaaa

SEQ ID NO: 178655 - RNA, 18 nt, Artificial Sequence
  Synthetic
ucaacauguauauuuaaa

SEQ ID NO: 178656 - RNA, 19 nt, Artificial Sequence
  Synthetic
uucaacauguauauuuaaa

SEQ ID NO: 178657 - RNA, 20 nt, Artificial Sequence
  Synthetic
cuucaacauguauauuuaaa

SEQ ID NO: 178658 - RNA, 21 nt, Artificial Sequence
  Synthetic
ucuucaacauguauauuuaaa

SEQ ID NO: 178659 - RNA, 22 nt, Artificial Sequence
  Synthetic
gucuucaacauguauauuuaaa

SEQ ID NO: 178660 - RNA, 23 nt, Artificial Sequence
  Synthetic
agucuucaacauguauauuuaaa

SEQ ID NO: 178661 - RNA, 24 nt, Artificial Sequence
  Synthetic
cagucuucaacauguauauuuaaa

SEQ ID NO: 178662 - RNA, 18 nt, Artificial Sequence
  Synthetic
guauaguguauauuuaaa

SEQ ID NO: 178663 - RNA, 19 nt, Artificial Sequence
  Synthetic
gguauaguguauauuuaaa

SEQ ID NO: 178664 - RNA, 20 nt, Artificial Sequence
  Synthetic
ggguauaguguauauuuaaa

SEQ ID NO: 178665 - RNA, 21 nt, Artificial Sequence
  Synthetic
uggguauaguguauauuuaaa

SEQ ID NO: 178666 - RNA, 22 nt, Artificial Sequence
  Synthetic
guggguauaguguauauuuaaa

SEQ ID NO: 178667 - RNA, 23 nt, Artificial Sequence
  Synthetic
aguggguauaguguauauuuaaa

SEQ ID NO: 178668 - RNA, 24 nt, Artificial Sequence
  Synthetic
uaguggguauaguguauauuuaaa

SEQ ID NO: 178669 - RNA, 18 nt, Artificial Sequence
  Synthetic
cagagauaccuauuuaaa

SEQ ID NO: 178670 - RNA, 19 nt, Artificial Sequence
  Synthetic
ccagagauaccuauuuaaa

SEQ ID NO: 178671 - RNA, 20 nt, Artificial Sequence
  Synthetic
gccagagauaccuauuuaaa

SEQ ID NO: 178672 - RNA, 21 nt, Artificial Sequence
  Synthetic
agccagagauaccuauuuaaa

SEQ ID NO: 178673 - RNA, 22 nt, Artificial Sequence
  Synthetic
uagccagagauaccuauuuaaa

SEQ ID NO: 178674 - RNA, 23 nt, Artificial Sequence
  Synthetic
cuagccagagauaccuauuuaaa

SEQ ID NO: 178675 - RNA, 24 nt, Artificial Sequence
  Synthetic
acuagccagagauaccuauuuaaa

SEQ ID NO: 178676 - RNA, 18 nt, Artificial Sequence
  Synthetic
auuguccugcuauuuaaa

SEQ ID NO: 178677 - RNA, 19 nt, Artificial Sequence
  Synthetic
aauuguccugcuauuuaaa

SEQ ID NO: 178678 - RNA, 20 nt, Artificial Sequence
  Synthetic
aaauuguccugcuauuuaaa

SEQ ID NO: 178679 - RNA, 21 nt, Artificial Sequence
  Synthetic
gaaauuguccugcuauuuaaa

SEQ ID NO: 178680 - RNA, 22 nt, Artificial Sequence
  Synthetic
ggaaauuguccugcuauuuaaa

SEQ ID NO: 178681 - RNA, 23 nt, Artificial Sequence
  Synthetic
uggaaauuguccugcuauuuaaa

SEQ ID NO: 178682 - RNA, 24 nt, Artificial Sequence
  Synthetic
uuggaaauuguccugcuauuuaaa

SEQ ID NO: 178683 - RNA, 18 nt, Artificial Sequence
  Synthetic
uagauugugcuauuuaaa

SEQ ID NO: 178684 - RNA, 19 nt, Artificial Sequence
  Synthetic
auagauugugcuauuuaaa

SEQ ID NO: 178685 - RNA, 20 nt, Artificial Sequence
  Synthetic
aauagauugugcuauuuaaa

SEQ ID NO: 178686 - RNA, 21 nt, Artificial Sequence
  Synthetic
uaauagauugugcuauuuaaa

SEQ ID NO: 178687 - RNA, 22 nt, Artificial Sequence
  Synthetic
auaauagauugugcuauuuaaa

SEQ ID NO: 178688 - RNA, 23 nt, Artificial Sequence
  Synthetic
uauaauagauugugcuauuuaaa

SEQ ID NO: 178689 - RNA, 24 nt, Artificial Sequence
  Synthetic
cuauaauagauugugcuauuuaaa

SEQ ID NO: 178690 - RNA, 18 nt, Artificial Sequence
  Synthetic
uauaguacaguauuuaaa

SEQ ID NO: 178691 - RNA, 19 nt, Artificial Sequence
  Synthetic
uuauaguacaguauuuaaa

SEQ ID NO: 178692 - RNA, 20 nt, Artificial Sequence
  Synthetic
uuuauaguacaguauuuaaa

SEQ ID NO: 178693 - RNA, 21 nt, Artificial Sequence
  Synthetic
uuuuauaguacaguauuuaaa

SEQ ID NO: 178694 - RNA, 22 nt, Artificial Sequence
  Synthetic
uuuuuauaguacaguauuuaaa

SEQ ID NO: 178695 - RNA, 23 nt, Artificial Sequence
  Synthetic
uuuuuuauaguacaguauuuaaa

SEQ ID NO: 178696 - RNA, 24 nt, Artificial Sequence
  Synthetic
auuuuuuauaguacaguauuuaaa

SEQ ID NO: 178697 - RNA, 18 nt, Artificial Sequence
  Synthetic
ugagccauguuauuuaaa

SEQ ID NO: 178698 - RNA, 19 nt, Artificial Sequence
  Synthetic
cugagccauguuauuuaaa

SEQ ID NO: 178699 - RNA, 20 nt, Artificial Sequence
  Synthetic
ucugagccauguuauuuaaa

SEQ ID NO: 178700 - RNA, 21 nt, Artificial Sequence
  Synthetic
uucugagccauguuauuuaaa

SEQ ID NO: 178701 - RNA, 22 nt, Artificial Sequence
  Synthetic
uuucugagccauguuauuuaaa

SEQ ID NO: 178702 - RNA, 23 nt, Artificial Sequence
  Synthetic
uuuucugagccauguuauuuaaa

SEQ ID NO: 178703 - RNA, 24 nt, Artificial Sequence
  Synthetic
uuuuucugagccauguuauuuaaa

SEQ ID NO: 178704 - RNA, 18 nt, Artificial Sequence
  Synthetic
acauaaagagacuuuaaa

SEQ ID NO: 178705 - RNA, 19 nt, Artificial Sequence
  Synthetic
uacauaaagagacuuuaaa

SEQ ID NO: 178706 - RNA, 20 nt, Artificial Sequence
  Synthetic
auacauaaagagacuuuaaa

SEQ ID NO: 178707 - RNA, 21 nt, Artificial Sequence
  Synthetic
uauacauaaagagacuuuaaa

SEQ ID NO: 178708 - RNA, 22 nt, Artificial Sequence
  Synthetic
auauacauaaagagacuuuaaa

SEQ ID NO: 178709 - RNA, 23 nt, Artificial Sequence
  Synthetic
aauauacauaaagagacuuuaaa

SEQ ID NO: 178710 - RNA, 24 nt, Artificial Sequence
  Synthetic
aaauauacauaaagagacuuuaaa

SEQ ID NO: 178711 - RNA, 18 nt, Artificial Sequence
  Synthetic
cuaugucuguacuuuaaa

SEQ ID NO: 178712 - RNA, 19 nt, Artificial Sequence
  Synthetic
acuaugucuguacuuuaaa

SEQ ID NO: 178713 - RNA, 20 nt, Artificial Sequence
  Synthetic
cacuaugucuguacuuuaaa

SEQ ID NO: 178714 - RNA, 21 nt, Artificial Sequence
  Synthetic
gcacuaugucuguacuuuaaa

SEQ ID NO: 178715 - RNA, 22 nt, Artificial Sequence
  Synthetic
ggcacuaugucuguacuuuaaa

SEQ ID NO: 178716 - RNA, 23 nt, Artificial Sequence
  Synthetic
aggcacuaugucuguacuuuaaa

SEQ ID NO: 178717 - RNA, 24 nt, Artificial Sequence
  Synthetic
caggcacuaugucuguacuuuaaa

SEQ ID NO: 178718 - RNA, 18 nt, Artificial Sequence
  Synthetic
auaaacaguuacuuuaaa

SEQ ID NO: 178719 - RNA, 19 nt, Artificial Sequence
  Synthetic
aauaaacaguuacuuuaaa

SEQ ID NO: 178720 - RNA, 20 nt, Artificial Sequence
  Synthetic
uaauaaacaguuacuuuaaa

SEQ ID NO: 178721 - RNA, 21 nt, Artificial Sequence
  Synthetic
uuaauaaacaguuacuuuaaa

SEQ ID NO: 178722 - RNA, 22 nt, Artificial Sequence
  Synthetic
auuaauaaacaguuacuuuaaa

SEQ ID NO: 178723 - RNA, 23 nt, Artificial Sequence
  Synthetic
aauuaauaaacaguuacuuuaaa

SEQ ID NO: 178724 - RNA, 24 nt, Artificial Sequence
  Synthetic
caauuaauaaacaguuacuuuaaa

SEQ ID NO: 178725 - RNA, 18 nt, Artificial Sequence
  Synthetic
guuccucaaaccuuuaaa

SEQ ID NO: 178726 - RNA, 19 nt, Artificial Sequence
  Synthetic
aguuccucaaaccuuuaaa

SEQ ID NO: 178727 - RNA, 20 nt, Artificial Sequence
  Synthetic
gaguuccucaaaccuuuaaa

SEQ ID NO: 178728 - RNA, 21 nt, Artificial Sequence
  Synthetic
ugaguuccucaaaccuuuaaa

SEQ ID NO: 178729 - RNA, 22 nt, Artificial Sequence
  Synthetic
uugaguuccucaaaccuuuaaa

SEQ ID NO: 178730 - RNA, 23 nt, Artificial Sequence
  Synthetic
guugaguuccucaaaccuuuaaa

SEQ ID NO: 178731 - RNA, 24 nt, Artificial Sequence
  Synthetic
uguugaguuccucaaaccuuuaaa

SEQ ID NO: 178732 - RNA, 18 nt, Artificial Sequence
  Synthetic
aaggcaaaauccuuuaaa

SEQ ID NO: 178733 - RNA, 19 nt, Artificial Sequence
  Synthetic
aaaggcaaaauccuuuaaa

SEQ ID NO: 178734 - RNA, 20 nt, Artificial Sequence
  Synthetic
caaaggcaaaauccuuuaaa

SEQ ID NO: 178735 - RNA, 21 nt, Artificial Sequence
  Synthetic
ucaaaggcaaaauccuuuaaa

SEQ ID NO: 178736 - RNA, 22 nt, Artificial Sequence
  Synthetic
aucaaaggcaaaauccuuuaaa

SEQ ID NO: 178737 - RNA, 23 nt, Artificial Sequence
  Synthetic
aaucaaaggcaaaauccuuuaaa

SEQ ID NO: 178738 - RNA, 24 nt, Artificial Sequence
  Synthetic
caaucaaaggcaaaauccuuuaaa

SEQ ID NO: 178739 - RNA, 18 nt, Artificial Sequence
  Synthetic
aagccuuuauccuuuaaa

SEQ ID NO: 178740 - RNA, 19 nt, Artificial Sequence
  Synthetic
gaagccuuuauccuuuaaa

SEQ ID NO: 178741 - RNA, 20 nt, Artificial Sequence
  Synthetic
ugaagccuuuauccuuuaaa

SEQ ID NO: 178742 - RNA, 21 nt, Artificial Sequence
  Synthetic
uugaagccuuuauccuuuaaa

SEQ ID NO: 178743 - RNA, 22 nt, Artificial Sequence
  Synthetic
uuugaagccuuuauccuuuaaa

SEQ ID NO: 178744 - RNA, 23 nt, Artificial Sequence
  Synthetic
uuuugaagccuuuauccuuuaaa

SEQ ID NO: 178745 - RNA, 24 nt, Artificial Sequence
  Synthetic
auuuugaagccuuuauccuuuaaa

SEQ ID NO: 178746 - RNA, 18 nt, Artificial Sequence
  Synthetic
aaauccacaugcuuuaaa

SEQ ID NO: 178747 - RNA, 19 nt, Artificial Sequence
  Synthetic
aaaauccacaugcuuuaaa

SEQ ID NO: 178748 - RNA, 20 nt, Artificial Sequence
  Synthetic
uaaaauccacaugcuuuaaa

SEQ ID NO: 178749 - RNA, 21 nt, Artificial Sequence
  Synthetic
guaaaauccacaugcuuuaaa

SEQ ID NO: 178750 - RNA, 22 nt, Artificial Sequence
  Synthetic
aguaaaauccacaugcuuuaaa

SEQ ID NO: 178751 - RNA, 23 nt, Artificial Sequence
  Synthetic
aaguaaaauccacaugcuuuaaa

SEQ ID NO: 178752 - RNA, 24 nt, Artificial Sequence
  Synthetic
uaaguaaaauccacaugcuuuaaa

SEQ ID NO: 178753 - RNA, 18 nt, Artificial Sequence
  Synthetic
acaguauucugcuuuaaa

SEQ ID NO: 178754 - RNA, 19 nt, Artificial Sequence
  Synthetic
aacaguauucugcuuuaaa

SEQ ID NO: 178755 - RNA, 20 nt, Artificial Sequence
  Synthetic
gaacaguauucugcuuuaaa

SEQ ID NO: 178756 - RNA, 21 nt, Artificial Sequence
  Synthetic
agaacaguauucugcuuuaaa

SEQ ID NO: 178757 - RNA, 22 nt, Artificial Sequence
  Synthetic
cagaacaguauucugcuuuaaa

SEQ ID NO: 178758 - RNA, 23 nt, Artificial Sequence
  Synthetic
gcagaacaguauucugcuuuaaa

SEQ ID NO: 178759 - RNA, 24 nt, Artificial Sequence
  Synthetic
agcagaacaguauucugcuuuaaa

SEQ ID NO: 178760 - RNA, 18 nt, Artificial Sequence
  Synthetic
uguaaaagagucuuuaaa

SEQ ID NO: 178761 - RNA, 19 nt, Artificial Sequence
  Synthetic
auguaaaagagucuuuaaa

SEQ ID NO: 178762 - RNA, 20 nt, Artificial Sequence
  Synthetic
aauguaaaagagucuuuaaa

SEQ ID NO: 178763 - RNA, 21 nt, Artificial Sequence
  Synthetic
aaauguaaaagagucuuuaaa

SEQ ID NO: 178764 - RNA, 22 nt, Artificial Sequence
  Synthetic
uaaauguaaaagagucuuuaaa

SEQ ID NO: 178765 - RNA, 23 nt, Artificial Sequence
  Synthetic
uuaaauguaaaagagucuuuaaa

SEQ ID NO: 178766 - RNA, 24 nt, Artificial Sequence
  Synthetic
auuaaauguaaaagagucuuuaaa

SEQ ID NO: 178767 - RNA, 18 nt, Artificial Sequence
  Synthetic
uugagaagagucuuuaaa

SEQ ID NO: 178768 - RNA, 19 nt, Artificial Sequence
  Synthetic
uuugagaagagucuuuaaa

SEQ ID NO: 178769 - RNA, 20 nt, Artificial Sequence
  Synthetic
auuugagaagagucuuuaaa

SEQ ID NO: 178770 - RNA, 21 nt, Artificial Sequence
  Synthetic
gauuugagaagagucuuuaaa

SEQ ID NO: 178771 - RNA, 22 nt, Artificial Sequence
  Synthetic
agauuugagaagagucuuuaaa

SEQ ID NO: 178772 - RNA, 23 nt, Artificial Sequence
  Synthetic
gagauuugagaagagucuuuaaa

SEQ ID NO: 178773 - RNA, 24 nt, Artificial Sequence
  Synthetic
ggagauuugagaagagucuuuaaa

SEQ ID NO: 178774 - RNA, 18 nt, Artificial Sequence
  Synthetic
aaaaugauauucuuuaaa

SEQ ID NO: 178775 - RNA, 19 nt, Artificial Sequence
  Synthetic
gaaaaugauauucuuuaaa

SEQ ID NO: 178776 - RNA, 20 nt, Artificial Sequence
  Synthetic
agaaaaugauauucuuuaaa

SEQ ID NO: 178777 - RNA, 21 nt, Artificial Sequence
  Synthetic
aagaaaaugauauucuuuaaa

SEQ ID NO: 178778 - RNA, 22 nt, Artificial Sequence
  Synthetic
gaagaaaaugauauucuuuaaa

SEQ ID NO: 178779 - RNA, 23 nt, Artificial Sequence
  Synthetic
ugaagaaaaugauauucuuuaaa

SEQ ID NO: 178780 - RNA, 24 nt, Artificial Sequence
  Synthetic
augaagaaaaugauauucuuuaaa

SEQ ID NO: 178781 - RNA, 18 nt, Artificial Sequence
  Synthetic
cagaaguuuuucuuuaaa

SEQ ID NO: 178782 - RNA, 19 nt, Artificial Sequence
  Synthetic
gcagaaguuuuucuuuaaa

SEQ ID NO: 178783 - RNA, 20 nt, Artificial Sequence
  Synthetic
ggcagaaguuuuucuuuaaa

SEQ ID NO: 178784 - RNA, 21 nt, Artificial Sequence
  Synthetic
uggcagaaguuuuucuuuaaa

SEQ ID NO: 178785 - RNA, 22 nt, Artificial Sequence
  Synthetic
uuggcagaaguuuuucuuuaaa

SEQ ID NO: 178786 - RNA, 23 nt, Artificial Sequence
  Synthetic
guuggcagaaguuuuucuuuaaa

SEQ ID NO: 178787 - RNA, 24 nt, Artificial Sequence
  Synthetic
aguuggcagaaguuuuucuuuaaa

SEQ ID NO: 178788 - RNA, 18 nt, Artificial Sequence
  Synthetic
gagcugagugaguuuaaa

SEQ ID NO: 178789 - RNA, 19 nt, Artificial Sequence
  Synthetic
agagcugagugaguuuaaa

SEQ ID NO: 178790 - RNA, 20 nt, Artificial Sequence
  Synthetic
gagagcugagugaguuuaaa

SEQ ID NO: 178791 - RNA, 21 nt, Artificial Sequence
  Synthetic
ugagagcugagugaguuuaaa

SEQ ID NO: 178792 - RNA, 22 nt, Artificial Sequence
  Synthetic
gugagagcugagugaguuuaaa

SEQ ID NO: 178793 - RNA, 23 nt, Artificial Sequence
  Synthetic
ugugagagcugagugaguuuaaa

SEQ ID NO: 178794 - RNA, 24 nt, Artificial Sequence
  Synthetic
augugagagcugagugaguuuaaa

SEQ ID NO: 178795 - RNA, 18 nt, Artificial Sequence
  Synthetic
uuugccauuguguuuaaa

SEQ ID NO: 178796 - RNA, 19 nt, Artificial Sequence
  Synthetic
guuugccauuguguuuaaa

SEQ ID NO: 178797 - RNA, 20 nt, Artificial Sequence
  Synthetic
uguuugccauuguguuuaaa

SEQ ID NO: 178798 - RNA, 21 nt, Artificial Sequence
  Synthetic
auguuugccauuguguuuaaa

SEQ ID NO: 178799 - RNA, 22 nt, Artificial Sequence
  Synthetic
uauguuugccauuguguuuaaa

SEQ ID NO: 178800 - RNA, 23 nt, Artificial Sequence
  Synthetic
uuauguuugccauuguguuuaaa

SEQ ID NO: 178801 - RNA, 24 nt, Artificial Sequence
  Synthetic
uuuauguuugccauuguguuuaaa

SEQ ID NO: 178802 - RNA, 18 nt, Artificial Sequence
  Synthetic
auuuacugauuguuuaaa

SEQ ID NO: 178803 - RNA, 19 nt, Artificial Sequence
  Synthetic
gauuuacugauuguuuaaa

SEQ ID NO: 178804 - RNA, 20 nt, Artificial Sequence
  Synthetic
ugauuuacugauuguuuaaa

SEQ ID NO: 178805 - RNA, 21 nt, Artificial Sequence
  Synthetic
augauuuacugauuguuuaaa

SEQ ID NO: 178806 - RNA, 22 nt, Artificial Sequence
  Synthetic
uaugauuuacugauuguuuaaa

SEQ ID NO: 178807 - RNA, 23 nt, Artificial Sequence
  Synthetic
auaugauuuacugauuguuuaaa

SEQ ID NO: 178808 - RNA, 24 nt, Artificial Sequence
  Synthetic
aauaugauuuacugauuguuuaaa

SEQ ID NO: 178809 - RNA, 18 nt, Artificial Sequence
  Synthetic
uaccauagaaauuuuaaa

SEQ ID NO: 178810 - RNA, 19 nt, Artificial Sequence
  Synthetic
guaccauagaaauuuuaaa

SEQ ID NO: 178811 - RNA, 20 nt, Artificial Sequence
  Synthetic
aguaccauagaaauuuuaaa

SEQ ID NO: 178812 - RNA, 21 nt, Artificial Sequence
  Synthetic
aaguaccauagaaauuuuaaa

SEQ ID NO: 178813 - RNA, 22 nt, Artificial Sequence
  Synthetic
aaaguaccauagaaauuuuaaa

SEQ ID NO: 178814 - RNA, 23 nt, Artificial Sequence
  Synthetic
aaaaguaccauagaaauuuuaaa

SEQ ID NO: 178815 - RNA, 24 nt, Artificial Sequence
  Synthetic
caaaaguaccauagaaauuuuaaa

SEQ ID NO: 178816 - RNA, 18 nt, Artificial Sequence
  Synthetic
agaaaaguaaauuuuaaa

SEQ ID NO: 178817 - RNA, 19 nt, Artificial Sequence
  Synthetic
aagaaaaguaaauuuuaaa

SEQ ID NO: 178818 - RNA, 20 nt, Artificial Sequence
  Synthetic
gaagaaaaguaaauuuuaaa

SEQ ID NO: 178819 - RNA, 21 nt, Artificial Sequence
  Synthetic
agaagaaaaguaaauuuuaaa

SEQ ID NO: 178820 - RNA, 22 nt, Artificial Sequence
  Synthetic
aagaagaaaaguaaauuuuaaa

SEQ ID NO: 178821 - RNA, 23 nt, Artificial Sequence
  Synthetic
aaagaagaaaaguaaauuuuaaa

SEQ ID NO: 178822 - RNA, 24 nt, Artificial Sequence
  Synthetic
uaaagaagaaaaguaaauuuuaaa

SEQ ID NO: 178823 - RNA, 18 nt, Artificial Sequence
  Synthetic
uccauuuuaaauuuuaaa

SEQ ID NO: 178824 - RNA, 19 nt, Artificial Sequence
  Synthetic
auccauuuuaaauuuuaaa

SEQ ID NO: 178825 - RNA, 20 nt, Artificial Sequence
  Synthetic
uauccauuuuaaauuuuaaa

SEQ ID NO: 178826 - RNA, 21 nt, Artificial Sequence
  Synthetic
uuauccauuuuaaauuuuaaa

SEQ ID NO: 178827 - RNA, 22 nt, Artificial Sequence
  Synthetic
uuuauccauuuuaaauuuuaaa

SEQ ID NO: 178828 - RNA, 23 nt, Artificial Sequence
  Synthetic
auuuauccauuuuaaauuuuaaa

SEQ ID NO: 178829 - RNA, 24 nt, Artificial Sequence
  Synthetic
uauuuauccauuuuaaauuuuaaa

SEQ ID NO: 178830 - RNA, 18 nt, Artificial Sequence
  Synthetic
cacaaaacacauuuuaaa

SEQ ID NO: 178831 - RNA, 19 nt, Artificial Sequence
  Synthetic
ucacaaaacacauuuuaaa

SEQ ID NO: 178832 - RNA, 20 nt, Artificial Sequence
  Synthetic
aucacaaaacacauuuuaaa

SEQ ID NO: 178833 - RNA, 21 nt, Artificial Sequence
  Synthetic
uaucacaaaacacauuuuaaa

SEQ ID NO: 178834 - RNA, 22 nt, Artificial Sequence
  Synthetic
auaucacaaaacacauuuuaaa

SEQ ID NO: 178835 - RNA, 23 nt, Artificial Sequence
  Synthetic
aauaucacaaaacacauuuuaaa

SEQ ID NO: 178836 - RNA, 24 nt, Artificial Sequence
  Synthetic
gaauaucacaaaacacauuuuaaa

SEQ ID NO: 178837 - RNA, 18 nt, Artificial Sequence
  Synthetic
gugggaauacauuuuaaa

SEQ ID NO: 178838 - RNA, 19 nt, Artificial Sequence
  Synthetic
ugugggaauacauuuuaaa

SEQ ID NO: 178839 - RNA, 20 nt, Artificial Sequence
  Synthetic
gugugggaauacauuuuaaa

SEQ ID NO: 178840 - RNA, 21 nt, Artificial Sequence
  Synthetic
agugugggaauacauuuuaaa

SEQ ID NO: 178841 - RNA, 22 nt, Artificial Sequence
  Synthetic
aagugugggaauacauuuuaaa

SEQ ID NO: 178842 - RNA, 23 nt, Artificial Sequence
  Synthetic
uaagugugggaauacauuuuaaa

SEQ ID NO: 178843 - RNA, 24 nt, Artificial Sequence
  Synthetic
guaagugugggaauacauuuuaaa

SEQ ID NO: 178844 - RNA, 18 nt, Artificial Sequence
  Synthetic
aaauauauucauuuuaaa

SEQ ID NO: 178845 - RNA, 19 nt, Artificial Sequence
  Synthetic
uaaauauauucauuuuaaa

SEQ ID NO: 178846 - RNA, 20 nt, Artificial Sequence
  Synthetic
auaaauauauucauuuuaaa

SEQ ID NO: 178847 - RNA, 21 nt, Artificial Sequence
  Synthetic
aauaaauauauucauuuuaaa

SEQ ID NO: 178848 - RNA, 22 nt, Artificial Sequence
  Synthetic
caauaaauauauucauuuuaaa

SEQ ID NO: 178849 - RNA, 23 nt, Artificial Sequence
  Synthetic
ucaauaaauauauucauuuuaaa

SEQ ID NO: 178850 - RNA, 24 nt, Artificial Sequence
  Synthetic
aucaauaaauauauucauuuuaaa

SEQ ID NO: 178851 - RNA, 18 nt, Artificial Sequence
  Synthetic
ccguaacucuauuuuaaa

SEQ ID NO: 178852 - RNA, 19 nt, Artificial Sequence
  Synthetic
gccguaacucuauuuuaaa

SEQ ID NO: 178853 - RNA, 20 nt, Artificial Sequence
  Synthetic
ugccguaacucuauuuuaaa

SEQ ID NO: 178854 - RNA, 21 nt, Artificial Sequence
  Synthetic
augccguaacucuauuuuaaa

SEQ ID NO: 178855 - RNA, 22 nt, Artificial Sequence
  Synthetic
gaugccguaacucuauuuuaaa

SEQ ID NO: 178856 - RNA, 23 nt, Artificial Sequence
  Synthetic
ugaugccguaacucuauuuuaaa

SEQ ID NO: 178857 - RNA, 24 nt, Artificial Sequence
  Synthetic
augaugccguaacucuauuuuaaa

SEQ ID NO: 178858 - RNA, 18 nt, Artificial Sequence
  Synthetic
cauggggguuauuuuaaa

SEQ ID NO: 178859 - RNA, 19 nt, Artificial Sequence
  Synthetic
ccauggggguuauuuuaaa

SEQ ID NO: 178860 - RNA, 20 nt, Artificial Sequence
  Synthetic
uccauggggguuauuuuaaa

SEQ ID NO: 178861 - RNA, 21 nt, Artificial Sequence
  Synthetic
uuccauggggguuauuuuaaa

SEQ ID NO: 178862 - RNA, 22 nt, Artificial Sequence
  Synthetic
cuuccauggggguuauuuuaaa

SEQ ID NO: 178863 - RNA, 23 nt, Artificial Sequence
  Synthetic
ucuuccauggggguuauuuuaaa

SEQ ID NO: 178864 - RNA, 24 nt, Artificial Sequence
  Synthetic
uucuuccauggggguuauuuuaaa

SEQ ID NO: 178865 - RNA, 18 nt, Artificial Sequence
  Synthetic
agaauuuuaucuuuuaaa

SEQ ID NO: 178866 - RNA, 19 nt, Artificial Sequence
  Synthetic
uagaauuuuaucuuuuaaa

SEQ ID NO: 178867 - RNA, 20 nt, Artificial Sequence
  Synthetic
auagaauuuuaucuuuuaaa

SEQ ID NO: 178868 - RNA, 21 nt, Artificial Sequence
  Synthetic
uauagaauuuuaucuuuuaaa

SEQ ID NO: 178869 - RNA, 22 nt, Artificial Sequence
  Synthetic
cuauagaauuuuaucuuuuaaa

SEQ ID NO: 178870 - RNA, 23 nt, Artificial Sequence
  Synthetic
acuauagaauuuuaucuuuuaaa

SEQ ID NO: 178871 - RNA, 24 nt, Artificial Sequence
  Synthetic
cacuauagaauuuuaucuuuuaaa

SEQ ID NO: 178872 - RNA, 18 nt, Artificial Sequence
  Synthetic
uuuuaaaaggguuuuaaa

SEQ ID NO: 178873 - RNA, 19 nt, Artificial Sequence
  Synthetic
auuuuaaaaggguuuuaaa

SEQ ID NO: 178874 - RNA, 20 nt, Artificial Sequence
  Synthetic
uauuuuaaaaggguuuuaaa

SEQ ID NO: 178875 - RNA, 21 nt, Artificial Sequence
  Synthetic
cuauuuuaaaaggguuuuaaa

SEQ ID NO: 178876 - RNA, 22 nt, Artificial Sequence
  Synthetic
ucuauuuuaaaaggguuuuaaa

SEQ ID NO: 178877 - RNA, 23 nt, Artificial Sequence
  Synthetic
aucuauuuuaaaaggguuuuaaa

SEQ ID NO: 178878 - RNA, 24 nt, Artificial Sequence
  Synthetic
aaucuauuuuaaaaggguuuuaaa

SEQ ID NO: 178879 - RNA, 18 nt, Artificial Sequence
  Synthetic
uuggaacuuuguuuuaaa

SEQ ID NO: 178880 - RNA, 19 nt, Artificial Sequence
  Synthetic
auuggaacuuuguuuuaaa

SEQ ID NO: 178881 - RNA, 20 nt, Artificial Sequence
  Synthetic
aauuggaacuuuguuuuaaa

SEQ ID NO: 178882 - RNA, 21 nt, Artificial Sequence
  Synthetic
aaauuggaacuuuguuuuaaa

SEQ ID NO: 178883 - RNA, 22 nt, Artificial Sequence
  Synthetic
gaaauuggaacuuuguuuuaaa

SEQ ID NO: 178884 - RNA, 23 nt, Artificial Sequence
  Synthetic
ugaaauuggaacuuuguuuuaaa

SEQ ID NO: 178885 - RNA, 24 nt, Artificial Sequence
  Synthetic
cugaaauuggaacuuuguuuuaaa

SEQ ID NO: 178886 - RNA, 18 nt, Artificial Sequence
  Synthetic
guagguaaaauuuuuaaa

SEQ ID NO: 178887 - RNA, 19 nt, Artificial Sequence
  Synthetic
aguagguaaaauuuuuaaa

SEQ ID NO: 178888 - RNA, 20 nt, Artificial Sequence
  Synthetic
uaguagguaaaauuuuuaaa

SEQ ID NO: 178889 - RNA, 21 nt, Artificial Sequence
  Synthetic
auaguagguaaaauuuuuaaa

SEQ ID NO: 178890 - RNA, 22 nt, Artificial Sequence
  Synthetic
aauaguagguaaaauuuuuaaa

SEQ ID NO: 178891 - RNA, 23 nt, Artificial Sequence
  Synthetic
aaauaguagguaaaauuuuuaaa

SEQ ID NO: 178892 - RNA, 24 nt, Artificial Sequence
  Synthetic
aaaauaguagguaaaauuuuuaaa

SEQ ID NO: 178893 - RNA, 18 nt, Artificial Sequence
  Synthetic
uaagaaauaauuuuuaaa

SEQ ID NO: 178894 - RNA, 19 nt, Artificial Sequence
  Synthetic
cuaagaaauaauuuuuaaa

SEQ ID NO: 178895 - RNA, 20 nt, Artificial Sequence
  Synthetic
acuaagaaauaauuuuuaaa

SEQ ID NO: 178896 - RNA, 21 nt, Artificial Sequence
  Synthetic
uacuaagaaauaauuuuuaaa

SEQ ID NO: 178897 - RNA, 22 nt, Artificial Sequence
  Synthetic
auacuaagaaauaauuuuuaaa

SEQ ID NO: 178898 - RNA, 23 nt, Artificial Sequence
  Synthetic
uauacuaagaaauaauuuuuaaa

SEQ ID NO: 178899 - RNA, 24 nt, Artificial Sequence
  Synthetic
auauacuaagaaauaauuuuuaaa

SEQ ID NO: 178900 - RNA, 18 nt, Artificial Sequence
  Synthetic
ggguaauguauuuuuaaa

SEQ ID NO: 178901 - RNA, 19 nt, Artificial Sequence
  Synthetic
uggguaauguauuuuuaaa

SEQ ID NO: 178902 - RNA, 20 nt, Artificial Sequence
  Synthetic
cuggguaauguauuuuuaaa

SEQ ID NO: 178903 - RNA, 21 nt, Artificial Sequence
  Synthetic
acuggguaauguauuuuuaaa

SEQ ID NO: 178904 - RNA, 22 nt, Artificial Sequence
  Synthetic
gacuggguaauguauuuuuaaa

SEQ ID NO: 178905 - RNA, 23 nt, Artificial Sequence
  Synthetic
agacuggguaauguauuuuuaaa

SEQ ID NO: 178906 - RNA, 24 nt, Artificial Sequence
  Synthetic
gagacuggguaauguauuuuuaaa

SEQ ID NO: 178907 - RNA, 18 nt, Artificial Sequence
  Synthetic
uucgaaucugaaaaacaa

SEQ ID NO: 178908 - RNA, 19 nt, Artificial Sequence
  Synthetic
uuucgaaucugaaaaacaa

SEQ ID NO: 178909 - RNA, 20 nt, Artificial Sequence
  Synthetic
guuucgaaucugaaaaacaa

SEQ ID NO: 178910 - RNA, 21 nt, Artificial Sequence
  Synthetic
aguuucgaaucugaaaaacaa

SEQ ID NO: 178911 - RNA, 22 nt, Artificial Sequence
  Synthetic
gaguuucgaaucugaaaaacaa

SEQ ID NO: 178912 - RNA, 23 nt, Artificial Sequence
  Synthetic
agaguuucgaaucugaaaaacaa

SEQ ID NO: 178913 - RNA, 24 nt, Artificial Sequence
  Synthetic
uagaguuucgaaucugaaaaacaa

SEQ ID NO: 178914 - RNA, 18 nt, Artificial Sequence
  Synthetic
uucugaaaguaaaaacaa

SEQ ID NO: 178915 - RNA, 19 nt, Artificial Sequence
  Synthetic
uuucugaaaguaaaaacaa

SEQ ID NO: 178916 - RNA, 20 nt, Artificial Sequence
  Synthetic
uuuucugaaaguaaaaacaa

SEQ ID NO: 178917 - RNA, 21 nt, Artificial Sequence
  Synthetic
uuuuucugaaaguaaaaacaa

SEQ ID NO: 178918 - RNA, 22 nt, Artificial Sequence
  Synthetic
auuuuucugaaaguaaaaacaa

SEQ ID NO: 178919 - RNA, 23 nt, Artificial Sequence
  Synthetic
aauuuuucugaaaguaaaaacaa

SEQ ID NO: 178920 - RNA, 24 nt, Artificial Sequence
  Synthetic
aaauuuuucugaaaguaaaaacaa

SEQ ID NO: 178921 - RNA, 18 nt, Artificial Sequence
  Synthetic
caagaaaagagaaaacaa

SEQ ID NO: 178922 - RNA, 19 nt, Artificial Sequence
  Synthetic
acaagaaaagagaaaacaa

SEQ ID NO: 178923 - RNA, 20 nt, Artificial Sequence
  Synthetic
aacaagaaaagagaaaacaa

SEQ ID NO: 178924 - RNA, 21 nt, Artificial Sequence
  Synthetic
caacaagaaaagagaaaacaa

SEQ ID NO: 178925 - RNA, 22 nt, Artificial Sequence
  Synthetic
gcaacaagaaaagagaaaacaa

SEQ ID NO: 178926 - RNA, 23 nt, Artificial Sequence
  Synthetic
ugcaacaagaaaagagaaaacaa

SEQ ID NO: 178927 - RNA, 24 nt, Artificial Sequence
  Synthetic
uugcaacaagaaaagagaaaacaa

SEQ ID NO: 178928 - RNA, 18 nt, Artificial Sequence
  Synthetic
gaacaaagaggaaaacaa

SEQ ID NO: 178929 - RNA, 19 nt, Artificial Sequence
  Synthetic
agaacaaagaggaaaacaa

SEQ ID NO: 178930 - RNA, 20 nt, Artificial Sequence
  Synthetic
aagaacaaagaggaaaacaa

SEQ ID NO: 178931 - RNA, 21 nt, Artificial Sequence
  Synthetic
gaagaacaaagaggaaaacaa

SEQ ID NO: 178932 - RNA, 22 nt, Artificial Sequence
  Synthetic
ggaagaacaaagaggaaaacaa

SEQ ID NO: 178933 - RNA, 23 nt, Artificial Sequence
  Synthetic
uggaagaacaaagaggaaaacaa

SEQ ID NO: 178934 - RNA, 24 nt, Artificial Sequence
  Synthetic
guggaagaacaaagaggaaaacaa

SEQ ID NO: 178935 - RNA, 18 nt, Artificial Sequence
  Synthetic
agauaugacugaaaacaa

SEQ ID NO: 178936 - RNA, 19 nt, Artificial Sequence
  Synthetic
uagauaugacugaaaacaa

SEQ ID NO: 178937 - RNA, 20 nt, Artificial Sequence
  Synthetic
guagauaugacugaaaacaa

SEQ ID NO: 178938 - RNA, 21 nt, Artificial Sequence
  Synthetic
uguagauaugacugaaaacaa

SEQ ID NO: 178939 - RNA, 22 nt, Artificial Sequence
  Synthetic
cuguagauaugacugaaaacaa

SEQ ID NO: 178940 - RNA, 23 nt, Artificial Sequence
  Synthetic
ccuguagauaugacugaaaacaa

SEQ ID NO: 178941 - RNA, 24 nt, Artificial Sequence
  Synthetic
accuguagauaugacugaaaacaa

SEQ ID NO: 178942 - RNA, 18 nt, Artificial Sequence
  Synthetic
uguuuggacaacaaacaa

SEQ ID NO: 178943 - RNA, 19 nt, Artificial Sequence
  Synthetic
uuguuuggacaacaaacaa

SEQ ID NO: 178944 - RNA, 20 nt, Artificial Sequence
  Synthetic
uuuguuuggacaacaaacaa

SEQ ID NO: 178945 - RNA, 21 nt, Artificial Sequence
  Synthetic
auuuguuuggacaacaaacaa

SEQ ID NO: 178946 - RNA, 22 nt, Artificial Sequence
  Synthetic
uauuuguuuggacaacaaacaa

SEQ ID NO: 178947 - RNA, 23 nt, Artificial Sequence
  Synthetic
auauuuguuuggacaacaaacaa

SEQ ID NO: 178948 - RNA, 24 nt, Artificial Sequence
  Synthetic
cauauuuguuuggacaacaaacaa

SEQ ID NO: 178949 - RNA, 18 nt, Artificial Sequence
  Synthetic
cauagauaacacaaacaa

SEQ ID NO: 178950 - RNA, 19 nt, Artificial Sequence
  Synthetic
ccauagauaacacaaacaa

SEQ ID NO: 178951 - RNA, 20 nt, Artificial Sequence
  Synthetic
accauagauaacacaaacaa

SEQ ID NO: 178952 - RNA, 21 nt, Artificial Sequence
  Synthetic
aaccauagauaacacaaacaa

SEQ ID NO: 178953 - RNA, 22 nt, Artificial Sequence
  Synthetic
aaaccauagauaacacaaacaa

SEQ ID NO: 178954 - RNA, 23 nt, Artificial Sequence
  Synthetic
gaaaccauagauaacacaaacaa

SEQ ID NO: 178955 - RNA, 24 nt, Artificial Sequence
  Synthetic
agaaaccauagauaacacaaacaa

SEQ ID NO: 178956 - RNA, 18 nt, Artificial Sequence
  Synthetic
aaaagaggacacaaacaa

SEQ ID NO: 178957 - RNA, 19 nt, Artificial Sequence
  Synthetic
uaaaagaggacacaaacaa

SEQ ID NO: 178958 - RNA, 20 nt, Artificial Sequence
  Synthetic
auaaaagaggacacaaacaa

SEQ ID NO: 178959 - RNA, 18 nt, Artificial Sequence
  Synthetic
agaggacaccacaaacaa

SEQ ID NO: 178960 - RNA, 19 nt, Artificial Sequence
  Synthetic
gagaggacaccacaaacaa

SEQ ID NO: 178961 - RNA, 20 nt, Artificial Sequence
  Synthetic
agagaggacaccacaaacaa

SEQ ID NO: 178962 - RNA, 21 nt, Artificial Sequence
  Synthetic
gagagaggacaccacaaacaa

SEQ ID NO: 178963 - RNA, 22 nt, Artificial Sequence
  Synthetic
ugagagaggacaccacaaacaa

SEQ ID NO: 178964 - RNA, 23 nt, Artificial Sequence
  Synthetic
augagagaggacaccacaaacaa

SEQ ID NO: 178965 - RNA, 24 nt, Artificial Sequence
  Synthetic
aaugagagaggacaccacaaacaa

SEQ ID NO: 178966 - RNA, 18 nt, Artificial Sequence
  Synthetic
aaaagaggauacaaacaa

SEQ ID NO: 178967 - RNA, 19 nt, Artificial Sequence
  Synthetic
uaaaagaggauacaaacaa

SEQ ID NO: 178968 - RNA, 20 nt, Artificial Sequence
  Synthetic
auaaaagaggauacaaacaa

SEQ ID NO: 178969 - RNA, 21 nt, Artificial Sequence
  Synthetic
aauaaaagaggauacaaacaa

SEQ ID NO: 178970 - RNA, 22 nt, Artificial Sequence
  Synthetic
aaauaaaagaggauacaaacaa

SEQ ID NO: 178971 - RNA, 23 nt, Artificial Sequence
  Synthetic
gaaauaaaagaggauacaaacaa

SEQ ID NO: 178972 - RNA, 24 nt, Artificial Sequence
  Synthetic
ggaaauaaaagaggauacaaacaa

SEQ ID NO: 178973 - RNA, 18 nt, Artificial Sequence
  Synthetic
cucuugaucaccaaacaa

SEQ ID NO: 178974 - RNA, 19 nt, Artificial Sequence
  Synthetic
gcucuugaucaccaaacaa

SEQ ID NO: 178975 - RNA, 20 nt, Artificial Sequence
  Synthetic
agcucuugaucaccaaacaa

SEQ ID NO: 178976 - RNA, 21 nt, Artificial Sequence
  Synthetic
uagcucuugaucaccaaacaa

SEQ ID NO: 178977 - RNA, 22 nt, Artificial Sequence
  Synthetic
guagcucuugaucaccaaacaa

SEQ ID NO: 178978 - RNA, 23 nt, Artificial Sequence
  Synthetic
aguagcucuugaucaccaaacaa

SEQ ID NO: 178979 - RNA, 24 nt, Artificial Sequence
  Synthetic
caguagcucuugaucaccaaacaa

SEQ ID NO: 178980 - RNA, 18 nt, Artificial Sequence
  Synthetic
ugguguuugaccaaacaa

SEQ ID NO: 178981 - RNA, 19 nt, Artificial Sequence
  Synthetic
uugguguuugaccaaacaa

SEQ ID NO: 178982 - RNA, 20 nt, Artificial Sequence
  Synthetic
auugguguuugaccaaacaa

SEQ ID NO: 178983 - RNA, 21 nt, Artificial Sequence
  Synthetic
gauugguguuugaccaaacaa

SEQ ID NO: 178984 - RNA, 22 nt, Artificial Sequence
  Synthetic
agauugguguuugaccaaacaa

SEQ ID NO: 178985 - RNA, 23 nt, Artificial Sequence
  Synthetic
uagauugguguuugaccaaacaa

SEQ ID NO: 178986 - RNA, 24 nt, Artificial Sequence
  Synthetic
cuagauugguguuugaccaaacaa

SEQ ID NO: 178987 - RNA, 18 nt, Artificial Sequence
  Synthetic
agaaauuggcccaaacaa

SEQ ID NO: 178988 - RNA, 19 nt, Artificial Sequence
  Synthetic
gagaaauuggcccaaacaa

SEQ ID NO: 178989 - RNA, 20 nt, Artificial Sequence
  Synthetic
ggagaaauuggcccaaacaa

SEQ ID NO: 178990 - RNA, 21 nt, Artificial Sequence
  Synthetic
gggagaaauuggcccaaacaa

SEQ ID NO: 178991 - RNA, 22 nt, Artificial Sequence
  Synthetic
ugggagaaauuggcccaaacaa

SEQ ID NO: 178992 - RNA, 23 nt, Artificial Sequence
  Synthetic
augggagaaauuggcccaaacaa

SEQ ID NO: 178993 - RNA, 24 nt, Artificial Sequence
  Synthetic
gaugggagaaauuggcccaaacaa

SEQ ID NO: 178994 - RNA, 18 nt, Artificial Sequence
  Synthetic
cuauuuuauuccaaacaa

SEQ ID NO: 178995 - RNA, 19 nt, Artificial Sequence
  Synthetic
acuauuuuauuccaaacaa

SEQ ID NO: 178996 - RNA, 20 nt, Artificial Sequence
  Synthetic
gacuauuuuauuccaaacaa

SEQ ID NO: 178997 - RNA, 21 nt, Artificial Sequence
  Synthetic
ugacuauuuuauuccaaacaa

SEQ ID NO: 178998 - RNA, 22 nt, Artificial Sequence
  Synthetic
cugacuauuuuauuccaaacaa

SEQ ID NO: 178999 - RNA, 23 nt, Artificial Sequence
  Synthetic
gcugacuauuuuauuccaaacaa

SEQ ID NO: 179000 - RNA, 24 nt, Artificial Sequence
  Synthetic
ugcugacuauuuuauuccaaacaa

SEQ ID NO: 179001 - RNA, 18 nt, Artificial Sequence
  Synthetic
ugaauuuuuaucaaacaa

SEQ ID NO: 179002 - RNA, 19 nt, Artificial Sequence
  Synthetic
uugaauuuuuaucaaacaa

SEQ ID NO: 179003 - RNA, 20 nt, Artificial Sequence
  Synthetic
cuugaauuuuuaucaaacaa

SEQ ID NO: 179004 - RNA, 21 nt, Artificial Sequence
  Synthetic
ccuugaauuuuuaucaaacaa

SEQ ID NO: 179005 - RNA, 22 nt, Artificial Sequence
  Synthetic
uccuugaauuuuuaucaaacaa

SEQ ID NO: 179006 - RNA, 23 nt, Artificial Sequence
  Synthetic
uuccuugaauuuuuaucaaacaa

SEQ ID NO: 179007 - RNA, 24 nt, Artificial Sequence
  Synthetic
uuuccuugaauuuuuaucaaacaa

SEQ ID NO: 179008 - RNA, 18 nt, Artificial Sequence
  Synthetic
cugacaauauucaaacaa

SEQ ID NO: 179009 - RNA, 19 nt, Artificial Sequence
  Synthetic
ucugacaauauucaaacaa

SEQ ID NO: 179010 - RNA, 20 nt, Artificial Sequence
  Synthetic
uucugacaauauucaaacaa

SEQ ID NO: 179011 - RNA, 21 nt, Artificial Sequence
  Synthetic
cuucugacaauauucaaacaa

SEQ ID NO: 179012 - RNA, 22 nt, Artificial Sequence
  Synthetic
ucuucugacaauauucaaacaa

SEQ ID NO: 179013 - RNA, 23 nt, Artificial Sequence
  Synthetic
gucuucugacaauauucaaacaa

SEQ ID NO: 179014 - RNA, 24 nt, Artificial Sequence
  Synthetic
agucuucugacaauauucaaacaa

SEQ ID NO: 179015 - RNA, 18 nt, Artificial Sequence
  Synthetic
auaaauaccuucaaacaa

SEQ ID NO: 179016 - RNA, 19 nt, Artificial Sequence
  Synthetic
uauaaauaccuucaaacaa

SEQ ID NO: 179017 - RNA, 20 nt, Artificial Sequence
  Synthetic
cuauaaauaccuucaaacaa

SEQ ID NO: 179018 - RNA, 21 nt, Artificial Sequence
  Synthetic
acuauaaauaccuucaaacaa

SEQ ID NO: 179019 - RNA, 22 nt, Artificial Sequence
  Synthetic
uacuauaaauaccuucaaacaa

SEQ ID NO: 179020 - RNA, 23 nt, Artificial Sequence
  Synthetic
cuacuauaaauaccuucaaacaa

SEQ ID NO: 179021 - RNA, 24 nt, Artificial Sequence
  Synthetic
ccuacuauaaauaccuucaaacaa

SEQ ID NO: 179022 - RNA, 18 nt, Artificial Sequence
  Synthetic
uacuaaggcuucaaacaa

SEQ ID NO: 179023 - RNA, 19 nt, Artificial Sequence
  Synthetic
uuacuaaggcuucaaacaa

SEQ ID NO: 179024 - RNA, 20 nt, Artificial Sequence
  Synthetic
cuuacuaaggcuucaaacaa

SEQ ID NO: 179025 - RNA, 21 nt, Artificial Sequence
  Synthetic
ucuuacuaaggcuucaaacaa

SEQ ID NO: 179026 - RNA, 22 nt, Artificial Sequence
  Synthetic
aucuuacuaaggcuucaaacaa

SEQ ID NO: 179027 - RNA, 23 nt, Artificial Sequence
  Synthetic
gaucuuacuaaggcuucaaacaa

SEQ ID NO: 179028 - RNA, 24 nt, Artificial Sequence
  Synthetic
ugaucuuacuaaggcuucaaacaa

SEQ ID NO: 179029 - RNA, 18 nt, Artificial Sequence
  Synthetic
gcauuaaauaagaaacaa

SEQ ID NO: 179030 - RNA, 19 nt, Artificial Sequence
  Synthetic
ggcauuaaauaagaaacaa

SEQ ID NO: 179031 - RNA, 20 nt, Artificial Sequence
  Synthetic
aggcauuaaauaagaaacaa

SEQ ID NO: 179032 - RNA, 21 nt, Artificial Sequence
  Synthetic
aaggcauuaaauaagaaacaa

SEQ ID NO: 179033 - RNA, 22 nt, Artificial Sequence
  Synthetic
aaaggcauuaaauaagaaacaa

SEQ ID NO: 179034 - RNA, 23 nt, Artificial Sequence
  Synthetic
caaaggcauuaaauaagaaacaa

SEQ ID NO: 179035 - RNA, 24 nt, Artificial Sequence
  Synthetic
acaaaggcauuaaauaagaaacaa

SEQ ID NO: 179036 - RNA, 18 nt, Artificial Sequence
  Synthetic
ggguaaaugcagaaacaa

SEQ ID NO: 179037 - RNA, 19 nt, Artificial Sequence
  Synthetic
cggguaaaugcagaaacaa

SEQ ID NO: 179038 - RNA, 20 nt, Artificial Sequence
  Synthetic
ccggguaaaugcagaaacaa

SEQ ID NO: 179039 - RNA, 21 nt, Artificial Sequence
  Synthetic
gccggguaaaugcagaaacaa

SEQ ID NO: 179040 - RNA, 22 nt, Artificial Sequence
  Synthetic
agccggguaaaugcagaaacaa

SEQ ID NO: 179041 - RNA, 23 nt, Artificial Sequence
  Synthetic
cagccggguaaaugcagaaacaa

SEQ ID NO: 179042 - RNA, 24 nt, Artificial Sequence
  Synthetic
gcagccggguaaaugcagaaacaa

SEQ ID NO: 179043 - RNA, 18 nt, Artificial Sequence
  Synthetic
aacgcggugcagaaacaa

SEQ ID NO: 179044 - RNA, 19 nt, Artificial Sequence
  Synthetic
gaacgcggugcagaaacaa

SEQ ID NO: 179045 - RNA, 20 nt, Artificial Sequence
  Synthetic
agaacgcggugcagaaacaa

SEQ ID NO: 179046 - RNA, 21 nt, Artificial Sequence
  Synthetic
cagaacgcggugcagaaacaa

SEQ ID NO: 179047 - RNA, 22 nt, Artificial Sequence
  Synthetic
acagaacgcggugcagaaacaa

SEQ ID NO: 179048 - RNA, 23 nt, Artificial Sequence
  Synthetic
gacagaacgcggugcagaaacaa

SEQ ID NO: 179049 - RNA, 24 nt, Artificial Sequence
  Synthetic
agacagaacgcggugcagaaacaa

SEQ ID NO: 179050 - RNA, 18 nt, Artificial Sequence
  Synthetic
uaagaugcugagaaacaa

SEQ ID NO: 179051 - RNA, 19 nt, Artificial Sequence
  Synthetic
uuaagaugcugagaaacaa

SEQ ID NO: 179052 - RNA, 20 nt, Artificial Sequence
  Synthetic
uuuaagaugcugagaaacaa

SEQ ID NO: 179053 - RNA, 21 nt, Artificial Sequence
  Synthetic
cuuuaagaugcugagaaacaa

SEQ ID NO: 179054 - RNA, 22 nt, Artificial Sequence
  Synthetic
ccuuuaagaugcugagaaacaa

SEQ ID NO: 179055 - RNA, 23 nt, Artificial Sequence
  Synthetic
uccuuuaagaugcugagaaacaa

SEQ ID NO: 179056 - RNA, 24 nt, Artificial Sequence
  Synthetic
auccuuuaagaugcugagaaacaa

SEQ ID NO: 179057 - RNA, 18 nt, Artificial Sequence
  Synthetic
aauugaggugcgaaacaa

SEQ ID NO: 179058 - RNA, 19 nt, Artificial Sequence
  Synthetic
aaauugaggugcgaaacaa

SEQ ID NO: 179059 - RNA, 20 nt, Artificial Sequence
  Synthetic
uaaauugaggugcgaaacaa

SEQ ID NO: 179060 - RNA, 21 nt, Artificial Sequence
  Synthetic
uuaaauugaggugcgaaacaa

SEQ ID NO: 179061 - RNA, 22 nt, Artificial Sequence
  Synthetic
guuaaauugaggugcgaaacaa

SEQ ID NO: 179062 - RNA, 23 nt, Artificial Sequence
  Synthetic
aguuaaauugaggugcgaaacaa

SEQ ID NO: 179063 - RNA, 24 nt, Artificial Sequence
  Synthetic
gaguuaaauugaggugcgaaacaa

SEQ ID NO: 179064 - RNA, 18 nt, Artificial Sequence
  Synthetic
ucuggccuagugaaacaa

SEQ ID NO: 179065 - RNA, 19 nt, Artificial Sequence
  Synthetic
cucuggccuagugaaacaa

SEQ ID NO: 179066 - RNA, 20 nt, Artificial Sequence
  Synthetic
acucuggccuagugaaacaa

SEQ ID NO: 179067 - RNA, 21 nt, Artificial Sequence
  Synthetic
uacucuggccuagugaaacaa

SEQ ID NO: 179068 - RNA, 22 nt, Artificial Sequence
  Synthetic
cuacucuggccuagugaaacaa

SEQ ID NO: 179069 - RNA, 23 nt, Artificial Sequence
  Synthetic
acuacucuggccuagugaaacaa

SEQ ID NO: 179070 - RNA, 24 nt, Artificial Sequence
  Synthetic
gacuacucuggccuagugaaacaa

SEQ ID NO: 179071 - RNA, 18 nt, Artificial Sequence
  Synthetic
uuagaaaauaauaaacaa

SEQ ID NO: 179072 - RNA, 19 nt, Artificial Sequence
  Synthetic
uuuagaaaauaauaaacaa

SEQ ID NO: 179073 - RNA, 20 nt, Artificial Sequence
  Synthetic
auuuagaaaauaauaaacaa

SEQ ID NO: 179074 - RNA, 21 nt, Artificial Sequence
  Synthetic
cauuuagaaaauaauaaacaa

SEQ ID NO: 179075 - RNA, 22 nt, Artificial Sequence
  Synthetic
acauuuagaaaauaauaaacaa

SEQ ID NO: 179076 - RNA, 23 nt, Artificial Sequence
  Synthetic
aacauuuagaaaauaauaaacaa

SEQ ID NO: 179077 - RNA, 24 nt, Artificial Sequence
  Synthetic
gaacauuuagaaaauaauaaacaa

SEQ ID NO: 179078 - RNA, 18 nt, Artificial Sequence
  Synthetic
guuagagagcauaaacaa

SEQ ID NO: 179079 - RNA, 19 nt, Artificial Sequence
  Synthetic
gguuagagagcauaaacaa

SEQ ID NO: 179080 - RNA, 20 nt, Artificial Sequence
  Synthetic
ugguuagagagcauaaacaa

SEQ ID NO: 179081 - RNA, 21 nt, Artificial Sequence
  Synthetic
augguuagagagcauaaacaa

SEQ ID NO: 179082 - RNA, 22 nt, Artificial Sequence
  Synthetic
caugguuagagagcauaaacaa

SEQ ID NO: 179083 - RNA, 23 nt, Artificial Sequence
  Synthetic
acaugguuagagagcauaaacaa

SEQ ID NO: 179084 - RNA, 24 nt, Artificial Sequence
  Synthetic
cacaugguuagagagcauaaacaa

SEQ ID NO: 179085 - RNA, 18 nt, Artificial Sequence
  Synthetic
auuucucaucauaaacaa

SEQ ID NO: 179086 - RNA, 19 nt, Artificial Sequence
  Synthetic
aauuucucaucauaaacaa

SEQ ID NO: 179087 - RNA, 20 nt, Artificial Sequence
  Synthetic
uaauuucucaucauaaacaa

SEQ ID NO: 179088 - RNA, 21 nt, Artificial Sequence
  Synthetic
uuaauuucucaucauaaacaa

SEQ ID NO: 179089 - RNA, 22 nt, Artificial Sequence
  Synthetic
guuaauuucucaucauaaacaa

SEQ ID NO: 179090 - RNA, 23 nt, Artificial Sequence
  Synthetic
aguuaauuucucaucauaaacaa

SEQ ID NO: 179091 - RNA, 24 nt, Artificial Sequence
  Synthetic
uaguuaauuucucaucauaaacaa

SEQ ID NO: 179092 - RNA, 18 nt, Artificial Sequence
  Synthetic
agacauuguacuaaacaa

SEQ ID NO: 179093 - RNA, 19 nt, Artificial Sequence
  Synthetic
cagacauuguacuaaacaa

SEQ ID NO: 179094 - RNA, 20 nt, Artificial Sequence
  Synthetic
ucagacauuguacuaaacaa

SEQ ID NO: 179095 - RNA, 21 nt, Artificial Sequence
  Synthetic
aucagacauuguacuaaacaa

SEQ ID NO: 179096 - RNA, 22 nt, Artificial Sequence
  Synthetic
caucagacauuguacuaaacaa

SEQ ID NO: 179097 - RNA, 23 nt, Artificial Sequence
  Synthetic
gcaucagacauuguacuaaacaa

SEQ ID NO: 179098 - RNA, 24 nt, Artificial Sequence
  Synthetic
ugcaucagacauuguacuaaacaa

SEQ ID NO: 179099 - RNA, 18 nt, Artificial Sequence
  Synthetic
uaugaggaaccuaaacaa

SEQ ID NO: 179100 - RNA, 19 nt, Artificial Sequence
  Synthetic
cuaugaggaaccuaaacaa

SEQ ID NO: 179101 - RNA, 20 nt, Artificial Sequence
  Synthetic
ucuaugaggaaccuaaacaa

SEQ ID NO: 179102 - RNA, 21 nt, Artificial Sequence
  Synthetic
aucuaugaggaaccuaaacaa

SEQ ID NO: 179103 - RNA, 22 nt, Artificial Sequence
  Synthetic
aaucuaugaggaaccuaaacaa

SEQ ID NO: 179104 - RNA, 23 nt, Artificial Sequence
  Synthetic
gaaucuaugaggaaccuaaacaa

SEQ ID NO: 179105 - RNA, 24 nt, Artificial Sequence
  Synthetic
agaaucuaugaggaaccuaaacaa

SEQ ID NO: 179106 - RNA, 18 nt, Artificial Sequence
  Synthetic
gaaauacaggcuaaacaa

SEQ ID NO: 179107 - RNA, 19 nt, Artificial Sequence
  Synthetic
agaaauacaggcuaaacaa

SEQ ID NO: 179108 - RNA, 20 nt, Artificial Sequence
  Synthetic
aagaaauacaggcuaaacaa

SEQ ID NO: 179109 - RNA, 21 nt, Artificial Sequence
  Synthetic
aaagaaauacaggcuaaacaa

SEQ ID NO: 179110 - RNA, 22 nt, Artificial Sequence
  Synthetic
aaaagaaauacaggcuaaacaa

SEQ ID NO: 179111 - RNA, 23 nt, Artificial Sequence
  Synthetic
uaaaagaaauacaggcuaaacaa

SEQ ID NO: 179112 - RNA, 24 nt, Artificial Sequence
  Synthetic
uuaaaagaaauacaggcuaaacaa

SEQ ID NO: 179113 - RNA, 18 nt, Artificial Sequence
  Synthetic
ugaaacuauucuaaacaa

SEQ ID NO: 179114 - RNA, 19 nt, Artificial Sequence
  Synthetic
cugaaacuauucuaaacaa

SEQ ID NO: 179115 - RNA, 20 nt, Artificial Sequence
  Synthetic
ucugaaacuauucuaaacaa

SEQ ID NO: 179116 - RNA, 21 nt, Artificial Sequence
  Synthetic
uucugaaacuauucuaaacaa

SEQ ID NO: 179117 - RNA, 22 nt, Artificial Sequence
  Synthetic
cuucugaaacuauucuaaacaa

SEQ ID NO: 179118 - RNA, 23 nt, Artificial Sequence
  Synthetic
ccuucugaaacuauucuaaacaa

SEQ ID NO: 179119 - RNA, 24 nt, Artificial Sequence
  Synthetic
uccuucugaaacuauucuaaacaa

SEQ ID NO: 179120 - RNA, 18 nt, Artificial Sequence
  Synthetic
ugauggacauuuaaacaa

SEQ ID NO: 179121 - RNA, 19 nt, Artificial Sequence
  Synthetic
uugauggacauuuaaacaa

SEQ ID NO: 179122 - RNA, 20 nt, Artificial Sequence
  Synthetic
auugauggacauuuaaacaa

SEQ ID NO: 179123 - RNA, 21 nt, Artificial Sequence
  Synthetic
aauugauggacauuuaaacaa

SEQ ID NO: 179124 - RNA, 22 nt, Artificial Sequence
  Synthetic
aaauugauggacauuuaaacaa

SEQ ID NO: 179125 - RNA, 23 nt, Artificial Sequence
  Synthetic
gaaauugauggacauuuaaacaa

SEQ ID NO: 179126 - RNA, 24 nt, Artificial Sequence
  Synthetic
ugaaauugauggacauuuaaacaa

SEQ ID NO: 179127 - RNA, 18 nt, Artificial Sequence
  Synthetic
cagaaugccuuuaaacaa

SEQ ID NO: 179128 - RNA, 19 nt, Artificial Sequence
  Synthetic
gcagaaugccuuuaaacaa

SEQ ID NO: 179129 - RNA, 20 nt, Artificial Sequence
  Synthetic
agcagaaugccuuuaaacaa

SEQ ID NO: 179130 - RNA, 21 nt, Artificial Sequence
  Synthetic
uagcagaaugccuuuaaacaa

SEQ ID NO: 179131 - RNA, 22 nt, Artificial Sequence
  Synthetic
cuagcagaaugccuuuaaacaa

SEQ ID NO: 179132 - RNA, 23 nt, Artificial Sequence
  Synthetic
ucuagcagaaugccuuuaaacaa

SEQ ID NO: 179133 - RNA, 24 nt, Artificial Sequence
  Synthetic
aucuagcagaaugccuuuaaacaa

SEQ ID NO: 179134 - RNA, 18 nt, Artificial Sequence
  Synthetic
uuuauucuuuuuaaacaa

SEQ ID NO: 179135 - RNA, 19 nt, Artificial Sequence
  Synthetic
uuuuauucuuuuuaaacaa

SEQ ID NO: 179136 - RNA, 20 nt, Artificial Sequence
  Synthetic
guuuuauucuuuuuaaacaa

SEQ ID NO: 179137 - RNA, 21 nt, Artificial Sequence
  Synthetic
aguuuuauucuuuuuaaacaa

SEQ ID NO: 179138 - RNA, 22 nt, Artificial Sequence
  Synthetic
gaguuuuauucuuuuuaaacaa

SEQ ID NO: 179139 - RNA, 23 nt, Artificial Sequence
  Synthetic
ugaguuuuauucuuuuuaaacaa

SEQ ID NO: 179140 - RNA, 24 nt, Artificial Sequence
  Synthetic
gugaguuuuauucuuuuuaaacaa

SEQ ID NO: 179141 - RNA, 18 nt, Artificial Sequence
  Synthetic
aacacaagaauacaacaa

SEQ ID NO: 179142 - RNA, 19 nt, Artificial Sequence
  Synthetic
aaacacaagaauacaacaa

SEQ ID NO: 179143 - RNA, 20 nt, Artificial Sequence
  Synthetic
aaaacacaagaauacaacaa

SEQ ID NO: 179144 - RNA, 21 nt, Artificial Sequence
  Synthetic
aaaaacacaagaauacaacaa

SEQ ID NO: 179145 - RNA, 22 nt, Artificial Sequence
  Synthetic
aaaaaacacaagaauacaacaa

SEQ ID NO: 179146 - RNA, 23 nt, Artificial Sequence
  Synthetic
aaaaaaacacaagaauacaacaa

SEQ ID NO: 179147 - RNA, 24 nt, Artificial Sequence
  Synthetic
aaaaaaaacacaagaauacaacaa

SEQ ID NO: 179148 - RNA, 18 nt, Artificial Sequence
  Synthetic
agucuuauuucccaacaa

SEQ ID NO: 179149 - RNA, 19 nt, Artificial Sequence
  Synthetic
gagucuuauuucccaacaa

SEQ ID NO: 179150 - RNA, 20 nt, Artificial Sequence
  Synthetic
ugagucuuauuucccaacaa

SEQ ID NO: 179151 - RNA, 21 nt, Artificial Sequence
  Synthetic
cugagucuuauuucccaacaa

SEQ ID NO: 179152 - RNA, 22 nt, Artificial Sequence
  Synthetic
ucugagucuuauuucccaacaa

SEQ ID NO: 179153 - RNA, 23 nt, Artificial Sequence
  Synthetic
uucugagucuuauuucccaacaa

SEQ ID NO: 179154 - RNA, 24 nt, Artificial Sequence
  Synthetic
auucugagucuuauuucccaacaa

SEQ ID NO: 179155 - RNA, 18 nt, Artificial Sequence
  Synthetic
auccccucuagccaacaa

SEQ ID NO: 179156 - RNA, 19 nt, Artificial Sequence
  Synthetic
uauccccucuagccaacaa

SEQ ID NO: 179157 - RNA, 20 nt, Artificial Sequence
  Synthetic
auauccccucuagccaacaa

SEQ ID NO: 179158 - RNA, 21 nt, Artificial Sequence
  Synthetic
aauauccccucuagccaacaa

SEQ ID NO: 179159 - RNA, 22 nt, Artificial Sequence
  Synthetic
aaauauccccucuagccaacaa

SEQ ID NO: 179160 - RNA, 23 nt, Artificial Sequence
  Synthetic
caaauauccccucuagccaacaa

SEQ ID NO: 179161 - RNA, 24 nt, Artificial Sequence
  Synthetic
ucaaauauccccucuagccaacaa

SEQ ID NO: 179162 - RNA, 18 nt, Artificial Sequence
  Synthetic
gguguugaagagcaacaa

SEQ ID NO: 179163 - RNA, 19 nt, Artificial Sequence
  Synthetic
ugguguugaagagcaacaa

SEQ ID NO: 179164 - RNA, 20 nt, Artificial Sequence
  Synthetic
cugguguugaagagcaacaa

SEQ ID NO: 179165 - RNA, 21 nt, Artificial Sequence
  Synthetic
acugguguugaagagcaacaa

SEQ ID NO: 179166 - RNA, 22 nt, Artificial Sequence
  Synthetic
aacugguguugaagagcaacaa

SEQ ID NO: 179167 - RNA, 23 nt, Artificial Sequence
  Synthetic
aaacugguguugaagagcaacaa

SEQ ID NO: 179168 - RNA, 24 nt, Artificial Sequence
  Synthetic
gaaacugguguugaagagcaacaa

SEQ ID NO: 179169 - RNA, 18 nt, Artificial Sequence
  Synthetic
gcagauggcaaucaacaa

SEQ ID NO: 179170 - RNA, 19 nt, Artificial Sequence
  Synthetic
agcagauggcaaucaacaa

SEQ ID NO: 179171 - RNA, 20 nt, Artificial Sequence
  Synthetic
uagcagauggcaaucaacaa

SEQ ID NO: 179172 - RNA, 21 nt, Artificial Sequence
  Synthetic
uuagcagauggcaaucaacaa

SEQ ID NO: 179173 - RNA, 22 nt, Artificial Sequence
  Synthetic
uuuagcagauggcaaucaacaa

SEQ ID NO: 179174 - RNA, 23 nt, Artificial Sequence
  Synthetic
uuuuagcagauggcaaucaacaa

SEQ ID NO: 179175 - RNA, 24 nt, Artificial Sequence
  Synthetic
auuuuagcagauggcaaucaacaa

SEQ ID NO: 179176 - RNA, 18 nt, Artificial Sequence
  Synthetic
ggcgugcccagucaacaa

SEQ ID NO: 179177 - RNA, 19 nt, Artificial Sequence
  Synthetic
gggcgugcccagucaacaa

SEQ ID NO: 179178 - RNA, 20 nt, Artificial Sequence
  Synthetic
agggcgugcccagucaacaa

SEQ ID NO: 179179 - RNA, 21 nt, Artificial Sequence
  Synthetic
gagggcgugcccagucaacaa

SEQ ID NO: 179180 - RNA, 22 nt, Artificial Sequence
  Synthetic
agagggcgugcccagucaacaa

SEQ ID NO: 179181 - RNA, 23 nt, Artificial Sequence
  Synthetic
cagagggcgugcccagucaacaa

SEQ ID NO: 179182 - RNA, 24 nt, Artificial Sequence
  Synthetic
gcagagggcgugcccagucaacaa

SEQ ID NO: 179183 - RNA, 18 nt, Artificial Sequence
  Synthetic
guuucccuuauucaacaa

SEQ ID NO: 179184 - RNA, 19 nt, Artificial Sequence
  Synthetic
aguuucccuuauucaacaa

SEQ ID NO: 179185 - RNA, 20 nt, Artificial Sequence
  Synthetic
uaguuucccuuauucaacaa

SEQ ID NO: 179186 - RNA, 21 nt, Artificial Sequence
  Synthetic
auaguuucccuuauucaacaa

SEQ ID NO: 179187 - RNA, 22 nt, Artificial Sequence
  Synthetic
aauaguuucccuuauucaacaa

SEQ ID NO: 179188 - RNA, 23 nt, Artificial Sequence
  Synthetic
caauaguuucccuuauucaacaa

SEQ ID NO: 179189 - RNA, 24 nt, Artificial Sequence
  Synthetic
acaauaguuucccuuauucaacaa

SEQ ID NO: 179190 - RNA, 18 nt, Artificial Sequence
  Synthetic
cuaugggcaaaagaacaa

SEQ ID NO: 179191 - RNA, 19 nt, Artificial Sequence
  Synthetic
ccuaugggcaaaagaacaa

SEQ ID NO: 179192 - RNA, 20 nt, Artificial Sequence
  Synthetic
gccuaugggcaaaagaacaa

SEQ ID NO: 179193 - RNA, 21 nt, Artificial Sequence
  Synthetic
agccuaugggcaaaagaacaa

SEQ ID NO: 179194 - RNA, 22 nt, Artificial Sequence
  Synthetic
aagccuaugggcaaaagaacaa

SEQ ID NO: 179195 - RNA, 23 nt, Artificial Sequence
  Synthetic
gaagccuaugggcaaaagaacaa

SEQ ID NO: 179196 - RNA, 24 nt, Artificial Sequence
  Synthetic
ugaagccuaugggcaaaagaacaa

SEQ ID NO: 179197 - RNA, 18 nt, Artificial Sequence
  Synthetic
ccaaucaaacaagaacaa

SEQ ID NO: 179198 - RNA, 19 nt, Artificial Sequence
  Synthetic
gccaaucaaacaagaacaa

SEQ ID NO: 179199 - RNA, 20 nt, Artificial Sequence
  Synthetic
agccaaucaaacaagaacaa

SEQ ID NO: 179200 - RNA, 21 nt, Artificial Sequence
  Synthetic
cagccaaucaaacaagaacaa

SEQ ID NO: 179201 - RNA, 22 nt, Artificial Sequence
  Synthetic
acagccaaucaaacaagaacaa

SEQ ID NO: 179202 - RNA, 23 nt, Artificial Sequence
  Synthetic
gacagccaaucaaacaagaacaa

SEQ ID NO: 179203 - RNA, 24 nt, Artificial Sequence
  Synthetic
cgacagccaaucaaacaagaacaa

SEQ ID NO: 179204 - RNA, 18 nt, Artificial Sequence
  Synthetic
ggccugugugaagaacaa

SEQ ID NO: 179205 - RNA, 19 nt, Artificial Sequence
  Synthetic
aggccugugugaagaacaa

SEQ ID NO: 179206 - RNA, 20 nt, Artificial Sequence
  Synthetic
aaggccugugugaagaacaa

SEQ ID NO: 179207 - RNA, 21 nt, Artificial Sequence
  Synthetic
aaaggccugugugaagaacaa

SEQ ID NO: 179208 - RNA, 22 nt, Artificial Sequence
  Synthetic
aaaaggccugugugaagaacaa

SEQ ID NO: 179209 - RNA, 23 nt, Artificial Sequence
  Synthetic
aaaaaggccugugugaagaacaa

SEQ ID NO: 179210 - RNA, 24 nt, Artificial Sequence
  Synthetic
gaaaaaggccugugugaagaacaa

SEQ ID NO: 179211 - RNA, 18 nt, Artificial Sequence
  Synthetic
gauggaagauaagaacaa

SEQ ID NO: 179212 - RNA, 19 nt, Artificial Sequence
  Synthetic
ugauggaagauaagaacaa

SEQ ID NO: 179213 - RNA, 20 nt, Artificial Sequence
  Synthetic
augauggaagauaagaacaa

SEQ ID NO: 179214 - RNA, 21 nt, Artificial Sequence
  Synthetic
caugauggaagauaagaacaa

SEQ ID NO: 179215 - RNA, 22 nt, Artificial Sequence
  Synthetic
ucaugauggaagauaagaacaa

SEQ ID NO: 179216 - RNA, 23 nt, Artificial Sequence
  Synthetic
cucaugauggaagauaagaacaa

SEQ ID NO: 179217 - RNA, 24 nt, Artificial Sequence
  Synthetic
ucucaugauggaagauaagaacaa

SEQ ID NO: 179218 - RNA, 18 nt, Artificial Sequence
  Synthetic
uuguauaauggagaacaa

SEQ ID NO: 179219 - RNA, 19 nt, Artificial Sequence
  Synthetic
uuuguauaauggagaacaa

SEQ ID NO: 179220 - RNA, 20 nt, Artificial Sequence
  Synthetic
cuuuguauaauggagaacaa

SEQ ID NO: 179221 - RNA, 21 nt, Artificial Sequence
  Synthetic
ucuuuguauaauggagaacaa

SEQ ID NO: 179222 - RNA, 22 nt, Artificial Sequence
  Synthetic
gucuuuguauaauggagaacaa

SEQ ID NO: 179223 - RNA, 23 nt, Artificial Sequence
  Synthetic
ugucuuuguauaauggagaacaa

SEQ ID NO: 179224 - RNA, 24 nt, Artificial Sequence
  Synthetic
gugucuuuguauaauggagaacaa

SEQ ID NO: 179225 - RNA, 18 nt, Artificial Sequence
  Synthetic
uuaaaauuaugagaacaa

SEQ ID NO: 179226 - RNA, 19 nt, Artificial Sequence
  Synthetic
uuuaaaauuaugagaacaa

SEQ ID NO: 179227 - RNA, 20 nt, Artificial Sequence
  Synthetic
auuuaaaauuaugagaacaa

SEQ ID NO: 179228 - RNA, 21 nt, Artificial Sequence
  Synthetic
uauuuaaaauuaugagaacaa

SEQ ID NO: 179229 - RNA, 22 nt, Artificial Sequence
  Synthetic
auauuuaaaauuaugagaacaa

SEQ ID NO: 179230 - RNA, 23 nt, Artificial Sequence
  Synthetic
gauauuuaaaauuaugagaacaa

SEQ ID NO: 179231 - RNA, 24 nt, Artificial Sequence
  Synthetic
agauauuuaaaauuaugagaacaa

SEQ ID NO: 179232 - RNA, 18 nt, Artificial Sequence
  Synthetic
auguacucacuagaacaa

SEQ ID NO: 179233 - RNA, 19 nt, Artificial Sequence
  Synthetic
uauguacucacuagaacaa

SEQ ID NO: 179234 - RNA, 20 nt, Artificial Sequence
  Synthetic
auauguacucacuagaacaa

SEQ ID NO: 179235 - RNA, 21 nt, Artificial Sequence
  Synthetic
aauauguacucacuagaacaa

SEQ ID NO: 179236 - RNA, 22 nt, Artificial Sequence
  Synthetic
uaauauguacucacuagaacaa

SEQ ID NO: 179237 - RNA, 23 nt, Artificial Sequence
  Synthetic
guaauauguacucacuagaacaa

SEQ ID NO: 179238 - RNA, 24 nt, Artificial Sequence
  Synthetic
aguaauauguacucacuagaacaa

SEQ ID NO: 179239 - RNA, 18 nt, Artificial Sequence
  Synthetic
cucucagaugaggaacaa

SEQ ID NO: 179240 - RNA, 19 nt, Artificial Sequence
  Synthetic
ucucucagaugaggaacaa

SEQ ID NO: 179241 - RNA, 20 nt, Artificial Sequence
  Synthetic
aucucucagaugaggaacaa

SEQ ID NO: 179242 - RNA, 21 nt, Artificial Sequence
  Synthetic
gaucucucagaugaggaacaa

SEQ ID NO: 179243 - RNA, 22 nt, Artificial Sequence
  Synthetic
ugaucucucagaugaggaacaa

SEQ ID NO: 179244 - RNA, 23 nt, Artificial Sequence
  Synthetic
gugaucucucagaugaggaacaa

SEQ ID NO: 179245 - RNA, 24 nt, Artificial Sequence
  Synthetic
ugugaucucucagaugaggaacaa

SEQ ID NO: 179246 - RNA, 18 nt, Artificial Sequence
  Synthetic
gagagcacaccugaacaa

SEQ ID NO: 179247 - RNA, 19 nt, Artificial Sequence
  Synthetic
ugagagcacaccugaacaa

SEQ ID NO: 179248 - RNA, 20 nt, Artificial Sequence
  Synthetic
augagagcacaccugaacaa

SEQ ID NO: 179249 - RNA, 21 nt, Artificial Sequence
  Synthetic
caugagagcacaccugaacaa

SEQ ID NO: 179250 - RNA, 22 nt, Artificial Sequence
  Synthetic
ccaugagagcacaccugaacaa

SEQ ID NO: 179251 - RNA, 23 nt, Artificial Sequence
  Synthetic
gccaugagagcacaccugaacaa

SEQ ID NO: 179252 - RNA, 24 nt, Artificial Sequence
  Synthetic
ugccaugagagcacaccugaacaa

SEQ ID NO: 179253 - RNA, 18 nt, Artificial Sequence
  Synthetic
agagggagaggugaacaa

SEQ ID NO: 179254 - RNA, 19 nt, Artificial Sequence
  Synthetic
uagagggagaggugaacaa

SEQ ID NO: 179255 - RNA, 20 nt, Artificial Sequence
  Synthetic
cuagagggagaggugaacaa

SEQ ID NO: 179256 - RNA, 21 nt, Artificial Sequence
  Synthetic
gcuagagggagaggugaacaa

SEQ ID NO: 179257 - RNA, 22 nt, Artificial Sequence
  Synthetic
agcuagagggagaggugaacaa

SEQ ID NO: 179258 - RNA, 23 nt, Artificial Sequence
  Synthetic
aagcuagagggagaggugaacaa

SEQ ID NO: 179259 - RNA, 24 nt, Artificial Sequence
  Synthetic
aaagcuagagggagaggugaacaa

SEQ ID NO: 179260 - RNA, 18 nt, Artificial Sequence
  Synthetic
ucucucugaauugaacaa

SEQ ID NO: 179261 - RNA, 19 nt, Artificial Sequence
  Synthetic
gucucucugaauugaacaa

SEQ ID NO: 179262 - RNA, 20 nt, Artificial Sequence
  Synthetic
ggucucucugaauugaacaa

SEQ ID NO: 179263 - RNA, 21 nt, Artificial Sequence
  Synthetic
uggucucucugaauugaacaa

SEQ ID NO: 179264 - RNA, 22 nt, Artificial Sequence
  Synthetic
auggucucucugaauugaacaa

SEQ ID NO: 179265 - RNA, 23 nt, Artificial Sequence
  Synthetic
uauggucucucugaauugaacaa

SEQ ID NO: 179266 - RNA, 24 nt, Artificial Sequence
  Synthetic
auauggucucucugaauugaacaa

SEQ ID NO: 179267 - RNA, 18 nt, Artificial Sequence
  Synthetic
aauuuuuauuuugaacaa

SEQ ID NO: 179268 - RNA, 19 nt, Artificial Sequence
  Synthetic
gaauuuuuauuuugaacaa

SEQ ID NO: 179269 - RNA, 20 nt, Artificial Sequence
  Synthetic
ugaauuuuuauuuugaacaa

SEQ ID NO: 179270 - RNA, 21 nt, Artificial Sequence
  Synthetic
augaauuuuuauuuugaacaa

SEQ ID NO: 179271 - RNA, 22 nt, Artificial Sequence
  Synthetic
uaugaauuuuuauuuugaacaa

SEQ ID NO: 179272 - RNA, 23 nt, Artificial Sequence
  Synthetic
cuaugaauuuuuauuuugaacaa

SEQ ID NO: 179273 - RNA, 24 nt, Artificial Sequence
  Synthetic
ucuaugaauuuuuauuuugaacaa

SEQ ID NO: 179274 - RNA, 18 nt, Artificial Sequence
  Synthetic
cacauuuuaaaauaacaa

SEQ ID NO: 179275 - RNA, 19 nt, Artificial Sequence
  Synthetic
ccacauuuuaaaauaacaa

SEQ ID NO: 179276 - RNA, 20 nt, Artificial Sequence
  Synthetic
gccacauuuuaaaauaacaa

SEQ ID NO: 179277 - RNA, 21 nt, Artificial Sequence
  Synthetic
ugccacauuuuaaaauaacaa

SEQ ID NO: 179278 - RNA, 22 nt, Artificial Sequence
  Synthetic
augccacauuuuaaaauaacaa

SEQ ID NO: 179279 - RNA, 23 nt, Artificial Sequence
  Synthetic
caugccacauuuuaaaauaacaa

SEQ ID NO: 179280 - RNA, 24 nt, Artificial Sequence
  Synthetic
ccaugccacauuuuaaaauaacaa

SEQ ID NO: 179281 - RNA, 18 nt, Artificial Sequence
  Synthetic
agcuacaggaaauaacaa

SEQ ID NO: 179282 - RNA, 19 nt, Artificial Sequence
  Synthetic
cagcuacaggaaauaacaa

SEQ ID NO: 179283 - RNA, 20 nt, Artificial Sequence
  Synthetic
acagcuacaggaaauaacaa

SEQ ID NO: 179284 - RNA, 21 nt, Artificial Sequence
  Synthetic
gacagcuacaggaaauaacaa

SEQ ID NO: 179285 - RNA, 22 nt, Artificial Sequence
  Synthetic
agacagcuacaggaaauaacaa

SEQ ID NO: 179286 - RNA, 23 nt, Artificial Sequence
  Synthetic
cagacagcuacaggaaauaacaa

SEQ ID NO: 179287 - RNA, 24 nt, Artificial Sequence
  Synthetic
ccagacagcuacaggaaauaacaa

SEQ ID NO: 179288 - RNA, 18 nt, Artificial Sequence
  Synthetic
aaugaguggaaauaacaa

SEQ ID NO: 179289 - RNA, 19 nt, Artificial Sequence
  Synthetic
aaaugaguggaaauaacaa

SEQ ID NO: 179290 - RNA, 20 nt, Artificial Sequence
  Synthetic
caaaugaguggaaauaacaa

SEQ ID NO: 179291 - RNA, 21 nt, Artificial Sequence
  Synthetic
acaaaugaguggaaauaacaa

SEQ ID NO: 179292 - RNA, 22 nt, Artificial Sequence
  Synthetic
aacaaaugaguggaaauaacaa

SEQ ID NO: 179293 - RNA, 23 nt, Artificial Sequence
  Synthetic
aaacaaaugaguggaaauaacaa

SEQ ID NO: 179294 - RNA, 24 nt, Artificial Sequence
  Synthetic
aaaacaaaugaguggaaauaacaa

SEQ ID NO: 179295 - RNA, 18 nt, Artificial Sequence
  Synthetic
gaaaaguaggaauaacaa

SEQ ID NO: 179296 - RNA, 19 nt, Artificial Sequence
  Synthetic
ggaaaaguaggaauaacaa

SEQ ID NO: 179297 - RNA, 20 nt, Artificial Sequence
  Synthetic
uggaaaaguaggaauaacaa

SEQ ID NO: 179298 - RNA, 21 nt, Artificial Sequence
  Synthetic
auggaaaaguaggaauaacaa

SEQ ID NO: 179299 - RNA, 22 nt, Artificial Sequence
  Synthetic
uauggaaaaguaggaauaacaa

SEQ ID NO: 179300 - RNA, 23 nt, Artificial Sequence
  Synthetic
auauggaaaaguaggaauaacaa

SEQ ID NO: 179301 - RNA, 24 nt, Artificial Sequence
  Synthetic
aauauggaaaaguaggaauaacaa

SEQ ID NO: 179302 - RNA, 18 nt, Artificial Sequence
  Synthetic
caguagagaaacuaacaa

SEQ ID NO: 179303 - RNA, 19 nt, Artificial Sequence
  Synthetic
gcaguagagaaacuaacaa

SEQ ID NO: 179304 - RNA, 20 nt, Artificial Sequence
  Synthetic
agcaguagagaaacuaacaa

SEQ ID NO: 179305 - RNA, 21 nt, Artificial Sequence
  Synthetic
gagcaguagagaaacuaacaa

SEQ ID NO: 179306 - RNA, 22 nt, Artificial Sequence
  Synthetic
agagcaguagagaaacuaacaa

SEQ ID NO: 179307 - RNA, 23 nt, Artificial Sequence
  Synthetic
aagagcaguagagaaacuaacaa

SEQ ID NO: 179308 - RNA, 24 nt, Artificial Sequence
  Synthetic
gaagagcaguagagaaacuaacaa

SEQ ID NO: 179309 - RNA, 18 nt, Artificial Sequence
  Synthetic
uguguuugcaccuaacaa

SEQ ID NO: 179310 - RNA, 19 nt, Artificial Sequence
  Synthetic
auguguuugcaccuaacaa

SEQ ID NO: 179311 - RNA, 20 nt, Artificial Sequence
  Synthetic
aauguguuugcaccuaacaa

SEQ ID NO: 179312 - RNA, 21 nt, Artificial Sequence
  Synthetic
aaauguguuugcaccuaacaa

SEQ ID NO: 179313 - RNA, 22 nt, Artificial Sequence
  Synthetic
uaaauguguuugcaccuaacaa

SEQ ID NO: 179314 - RNA, 23 nt, Artificial Sequence
  Synthetic
cuaaauguguuugcaccuaacaa

SEQ ID NO: 179315 - RNA, 24 nt, Artificial Sequence
  Synthetic
ccuaaauguguuugcaccuaacaa

SEQ ID NO: 179316 - RNA, 18 nt, Artificial Sequence
  Synthetic
ccacuguauggguaacaa

SEQ ID NO: 179317 - RNA, 19 nt, Artificial Sequence
  Synthetic
accacuguauggguaacaa

SEQ ID NO: 179318 - RNA, 20 nt, Artificial Sequence
  Synthetic
gaccacuguauggguaacaa

SEQ ID NO: 179319 - RNA, 21 nt, Artificial Sequence
  Synthetic
agaccacuguauggguaacaa

SEQ ID NO: 179320 - RNA, 22 nt, Artificial Sequence
  Synthetic
aagaccacuguauggguaacaa

SEQ ID NO: 179321 - RNA, 23 nt, Artificial Sequence
  Synthetic
caagaccacuguauggguaacaa

SEQ ID NO: 179322 - RNA, 24 nt, Artificial Sequence
  Synthetic
gcaagaccacuguauggguaacaa

SEQ ID NO: 179323 - RNA, 18 nt, Artificial Sequence
  Synthetic
cccucuccaugguaacaa

SEQ ID NO: 179324 - RNA, 19 nt, Artificial Sequence
  Synthetic
gcccucuccaugguaacaa

SEQ ID NO: 179325 - RNA, 20 nt, Artificial Sequence
  Synthetic
ugcccucuccaugguaacaa

SEQ ID NO: 179326 - RNA, 21 nt, Artificial Sequence
  Synthetic
uugcccucuccaugguaacaa

SEQ ID NO: 179327 - RNA, 22 nt, Artificial Sequence
  Synthetic
auugcccucuccaugguaacaa

SEQ ID NO: 179328 - RNA, 23 nt, Artificial Sequence
  Synthetic
aauugcccucuccaugguaacaa

SEQ ID NO: 179329 - RNA, 24 nt, Artificial Sequence
  Synthetic
aaauugcccucuccaugguaacaa

SEQ ID NO: 179330 - RNA, 18 nt, Artificial Sequence
  Synthetic
ugacaaaauauguaacaa

SEQ ID NO: 179331 - RNA, 19 nt, Artificial Sequence
  Synthetic
augacaaaauauguaacaa

SEQ ID NO: 179332 - RNA, 20 nt, Artificial Sequence
  Synthetic
uaugacaaaauauguaacaa

SEQ ID NO: 179333 - RNA, 21 nt, Artificial Sequence
  Synthetic
uuaugacaaaauauguaacaa

SEQ ID NO: 179334 - RNA, 22 nt, Artificial Sequence
  Synthetic
uuuaugacaaaauauguaacaa

SEQ ID NO: 179335 - RNA, 23 nt, Artificial Sequence
  Synthetic
cuuuaugacaaaauauguaacaa

SEQ ID NO: 179336 - RNA, 24 nt, Artificial Sequence
  Synthetic
acuuuaugacaaaauauguaacaa

SEQ ID NO: 179337 - RNA, 18 nt, Artificial Sequence
  Synthetic
cucuaguuccuguaacaa

SEQ ID NO: 179338 - RNA, 19 nt, Artificial Sequence
  Synthetic
acucuaguuccuguaacaa

SEQ ID NO: 179339 - RNA, 20 nt, Artificial Sequence
  Synthetic
gacucuaguuccuguaacaa

SEQ ID NO: 179340 - RNA, 21 nt, Artificial Sequence
  Synthetic
ugacucuaguuccuguaacaa

SEQ ID NO: 179341 - RNA, 22 nt, Artificial Sequence
  Synthetic
cugacucuaguuccuguaacaa

SEQ ID NO: 179342 - RNA, 23 nt, Artificial Sequence
  Synthetic
ccugacucuaguuccuguaacaa

SEQ ID NO: 179343 - RNA, 24 nt, Artificial Sequence
  Synthetic
uccugacucuaguuccuguaacaa

SEQ ID NO: 179344 - RNA, 18 nt, Artificial Sequence
  Synthetic
aaaaccaaaaauuaacaa

SEQ ID NO: 179345 - RNA, 19 nt, Artificial Sequence
  Synthetic
caaaaccaaaaauuaacaa

SEQ ID NO: 179346 - RNA, 20 nt, Artificial Sequence
  Synthetic
acaaaaccaaaaauuaacaa

SEQ ID NO: 179347 - RNA, 21 nt, Artificial Sequence
  Synthetic
aacaaaaccaaaaauuaacaa

SEQ ID NO: 179348 - RNA, 22 nt, Artificial Sequence
  Synthetic
uaacaaaaccaaaaauuaacaa

SEQ ID NO: 179349 - RNA, 23 nt, Artificial Sequence
  Synthetic
guaacaaaaccaaaaauuaacaa

SEQ ID NO: 179350 - RNA, 24 nt, Artificial Sequence
  Synthetic
uguaacaaaaccaaaaauuaacaa

SEQ ID NO: 179351 - RNA, 18 nt, Artificial Sequence
  Synthetic
ugugccuaagauuaacaa

SEQ ID NO: 179352 - RNA, 19 nt, Artificial Sequence
  Synthetic
gugugccuaagauuaacaa

SEQ ID NO: 179353 - RNA, 20 nt, Artificial Sequence
  Synthetic
ugugugccuaagauuaacaa

SEQ ID NO: 179354 - RNA, 21 nt, Artificial Sequence
  Synthetic
cugugugccuaagauuaacaa

SEQ ID NO: 179355 - RNA, 22 nt, Artificial Sequence
  Synthetic
ucugugugccuaagauuaacaa

SEQ ID NO: 179356 - RNA, 23 nt, Artificial Sequence
  Synthetic
gucugugugccuaagauuaacaa

SEQ ID NO: 179357 - RNA, 24 nt, Artificial Sequence
  Synthetic
agucugugugccuaagauuaacaa

SEQ ID NO: 179358 - RNA, 18 nt, Artificial Sequence
  Synthetic
caaaagacagauuaacaa

SEQ ID NO: 179359 - RNA, 19 nt, Artificial Sequence
  Synthetic
acaaaagacagauuaacaa

SEQ ID NO: 179360 - RNA, 20 nt, Artificial Sequence
  Synthetic
gacaaaagacagauuaacaa

SEQ ID NO: 179361 - RNA, 21 nt, Artificial Sequence
  Synthetic
ugacaaaagacagauuaacaa

SEQ ID NO: 179362 - RNA, 22 nt, Artificial Sequence
  Synthetic
gugacaaaagacagauuaacaa

SEQ ID NO: 179363 - RNA, 23 nt, Artificial Sequence
  Synthetic
agugacaaaagacagauuaacaa

SEQ ID NO: 179364 - RNA, 24 nt, Artificial Sequence
  Synthetic
gagugacaaaagacagauuaacaa

SEQ ID NO: 179365 - RNA, 18 nt, Artificial Sequence
  Synthetic
auaaagaacacuuaacaa

SEQ ID NO: 179366 - RNA, 19 nt, Artificial Sequence
  Synthetic
aauaaagaacacuuaacaa

SEQ ID NO: 179367 - RNA, 20 nt, Artificial Sequence
  Synthetic
aaauaaagaacacuuaacaa

SEQ ID NO: 179368 - RNA, 21 nt, Artificial Sequence
  Synthetic
aaaauaaagaacacuuaacaa

SEQ ID NO: 179369 - RNA, 22 nt, Artificial Sequence
  Synthetic
aaaaauaaagaacacuuaacaa

SEQ ID NO: 179370 - RNA, 23 nt, Artificial Sequence
  Synthetic
gaaaaauaaagaacacuuaacaa

SEQ ID NO: 179371 - RNA, 24 nt, Artificial Sequence
  Synthetic
ugaaaaauaaagaacacuuaacaa

SEQ ID NO: 179372 - RNA, 18 nt, Artificial Sequence
  Synthetic
ucaugcauuucuuaacaa

SEQ ID NO: 179373 - RNA, 19 nt, Artificial Sequence
  Synthetic
gucaugcauuucuuaacaa

SEQ ID NO: 179374 - RNA, 20 nt, Artificial Sequence
  Synthetic
agucaugcauuucuuaacaa

SEQ ID NO: 179375 - RNA, 21 nt, Artificial Sequence
  Synthetic
uagucaugcauuucuuaacaa

SEQ ID NO: 179376 - RNA, 22 nt, Artificial Sequence
  Synthetic
auagucaugcauuucuuaacaa

SEQ ID NO: 179377 - RNA, 23 nt, Artificial Sequence
  Synthetic
uauagucaugcauuucuuaacaa

SEQ ID NO: 179378 - RNA, 24 nt, Artificial Sequence
  Synthetic
auauagucaugcauuucuuaacaa

SEQ ID NO: 179379 - RNA, 18 nt, Artificial Sequence
  Synthetic
guuguucuuuuuuaacaa

SEQ ID NO: 179380 - RNA, 19 nt, Artificial Sequence
  Synthetic
gguuguucuuuuuuaacaa

SEQ ID NO: 179381 - RNA, 20 nt, Artificial Sequence
  Synthetic
ugguuguucuuuuuuaacaa

SEQ ID NO: 179382 - RNA, 21 nt, Artificial Sequence
  Synthetic
uugguuguucuuuuuuaacaa

SEQ ID NO: 179383 - RNA, 22 nt, Artificial Sequence
  Synthetic
uuugguuguucuuuuuuaacaa

SEQ ID NO: 179384 - RNA, 23 nt, Artificial Sequence
  Synthetic
auuugguuguucuuuuuuaacaa

SEQ ID NO: 179385 - RNA, 24 nt, Artificial Sequence
  Synthetic
uauuugguuguucuuuuuuaacaa

SEQ ID NO: 179386 - RNA, 18 nt, Artificial Sequence
  Synthetic
gaucacacuggaacacaa

SEQ ID NO: 179387 - RNA, 19 nt, Artificial Sequence
  Synthetic
ggaucacacuggaacacaa

SEQ ID NO: 179388 - RNA, 20 nt, Artificial Sequence
  Synthetic
aggaucacacuggaacacaa

SEQ ID NO: 179389 - RNA, 21 nt, Artificial Sequence
  Synthetic
caggaucacacuggaacacaa

SEQ ID NO: 179390 - RNA, 22 nt, Artificial Sequence
  Synthetic
gcaggaucacacuggaacacaa

SEQ ID NO: 179391 - RNA, 23 nt, Artificial Sequence
  Synthetic
ggcaggaucacacuggaacacaa

SEQ ID NO: 179392 - RNA, 24 nt, Artificial Sequence
  Synthetic
aggcaggaucacacuggaacacaa

SEQ ID NO: 179393 - RNA, 18 nt, Artificial Sequence
  Synthetic
cuggaggguggaacacaa

SEQ ID NO: 179394 - RNA, 19 nt, Artificial Sequence
  Synthetic
acuggaggguggaacacaa

SEQ ID NO: 179395 - RNA, 20 nt, Artificial Sequence
  Synthetic
uacuggaggguggaacacaa

SEQ ID NO: 179396 - RNA, 21 nt, Artificial Sequence
  Synthetic
cuacuggaggguggaacacaa

SEQ ID NO: 179397 - RNA, 22 nt, Artificial Sequence
  Synthetic
ccuacuggaggguggaacacaa

SEQ ID NO: 179398 - RNA, 23 nt, Artificial Sequence
  Synthetic
gccuacuggaggguggaacacaa

SEQ ID NO: 179399 - RNA, 24 nt, Artificial Sequence
  Synthetic
ggccuacuggaggguggaacacaa

SEQ ID NO: 179400 - RNA, 18 nt, Artificial Sequence
  Synthetic
cagaaaguuggaacacaa

SEQ ID NO: 179401 - RNA, 19 nt, Artificial Sequence
  Synthetic
gcagaaaguuggaacacaa

SEQ ID NO: 179402 - RNA, 20 nt, Artificial Sequence
  Synthetic
agcagaaaguuggaacacaa

SEQ ID NO: 179403 - RNA, 21 nt, Artificial Sequence
  Synthetic
aagcagaaaguuggaacacaa

SEQ ID NO: 179404 - RNA, 22 nt, Artificial Sequence
  Synthetic
caagcagaaaguuggaacacaa

SEQ ID NO: 179405 - RNA, 23 nt, Artificial Sequence
  Synthetic
ucaagcagaaaguuggaacacaa

SEQ ID NO: 179406 - RNA, 24 nt, Artificial Sequence
  Synthetic
gucaagcagaaaguuggaacacaa

SEQ ID NO: 179407 - RNA, 18 nt, Artificial Sequence
  Synthetic
ggauuguuuguaacacaa

SEQ ID NO: 179408 - RNA, 19 nt, Artificial Sequence
  Synthetic
uggauuguuuguaacacaa

SEQ ID NO: 179409 - RNA, 20 nt, Artificial Sequence
  Synthetic
uuggauuguuuguaacacaa

SEQ ID NO: 179410 - RNA, 21 nt, Artificial Sequence
  Synthetic
auuggauuguuuguaacacaa

SEQ ID NO: 179411 - RNA, 22 nt, Artificial Sequence
  Synthetic
gauuggauuguuuguaacacaa

SEQ ID NO: 179412 - RNA, 23 nt, Artificial Sequence
  Synthetic
ugauuggauuguuuguaacacaa

SEQ ID NO: 179413 - RNA, 24 nt, Artificial Sequence
  Synthetic
gugauuggauuguuuguaacacaa

SEQ ID NO: 179414 - RNA, 18 nt, Artificial Sequence
  Synthetic
uucaguggcuuaacacaa

SEQ ID NO: 179415 - RNA, 19 nt, Artificial Sequence
  Synthetic
uuucaguggcuuaacacaa

SEQ ID NO: 179416 - RNA, 20 nt, Artificial Sequence
  Synthetic
auuucaguggcuuaacacaa

SEQ ID NO: 179417 - RNA, 21 nt, Artificial Sequence
  Synthetic
uauuucaguggcuuaacacaa

SEQ ID NO: 179418 - RNA, 22 nt, Artificial Sequence
  Synthetic
auauuucaguggcuuaacacaa

SEQ ID NO: 179419 - RNA, 23 nt, Artificial Sequence
  Synthetic
aauauuucaguggcuuaacacaa

SEQ ID NO: 179420 - RNA, 24 nt, Artificial Sequence
  Synthetic
aaauauuucaguggcuuaacacaa

SEQ ID NO: 179421 - RNA, 18 nt, Artificial Sequence
  Synthetic
caggggaacaacacacaa

SEQ ID NO: 179422 - RNA, 19 nt, Artificial Sequence
  Synthetic
acaggggaacaacacacaa

SEQ ID NO: 179423 - RNA, 20 nt, Artificial Sequence
  Synthetic
uacaggggaacaacacacaa

SEQ ID NO: 179424 - RNA, 21 nt, Artificial Sequence
  Synthetic
auacaggggaacaacacacaa

SEQ ID NO: 179425 - RNA, 22 nt, Artificial Sequence
  Synthetic
cauacaggggaacaacacacaa

SEQ ID NO: 179426 - RNA, 23 nt, Artificial Sequence
  Synthetic
acauacaggggaacaacacacaa

SEQ ID NO: 179427 - RNA, 24 nt, Artificial Sequence
  Synthetic
cacauacaggggaacaacacacaa

SEQ ID NO: 179428 - RNA, 18 nt, Artificial Sequence
  Synthetic
ugcagggauugcacacaa

SEQ ID NO: 179429 - RNA, 19 nt, Artificial Sequence
  Synthetic
uugcagggauugcacacaa

SEQ ID NO: 179430 - RNA, 20 nt, Artificial Sequence
  Synthetic
cuugcagggauugcacacaa

SEQ ID NO: 179431 - RNA, 21 nt, Artificial Sequence
  Synthetic
gcuugcagggauugcacacaa

SEQ ID NO: 179432 - RNA, 22 nt, Artificial Sequence
  Synthetic
agcuugcagggauugcacacaa

SEQ ID NO: 179433 - RNA, 23 nt, Artificial Sequence
  Synthetic
uagcuugcagggauugcacacaa

SEQ ID NO: 179434 - RNA, 24 nt, Artificial Sequence
  Synthetic
cuagcuugcagggauugcacacaa

SEQ ID NO: 179435 - RNA, 18 nt, Artificial Sequence
  Synthetic
uaaggcugacagacacaa

SEQ ID NO: 179436 - RNA, 19 nt, Artificial Sequence
  Synthetic
auaaggcugacagacacaa

SEQ ID NO: 179437 - RNA, 20 nt, Artificial Sequence
  Synthetic
aauaaggcugacagacacaa

SEQ ID NO: 179438 - RNA, 21 nt, Artificial Sequence
  Synthetic
aaauaaggcugacagacacaa

SEQ ID NO: 179439 - RNA, 22 nt, Artificial Sequence
  Synthetic
gaaauaaggcugacagacacaa

SEQ ID NO: 179440 - RNA, 23 nt, Artificial Sequence
  Synthetic
ugaaauaaggcugacagacacaa

SEQ ID NO: 179441 - RNA, 24 nt, Artificial Sequence
  Synthetic
cugaaauaaggcugacagacacaa

SEQ ID NO: 179442 - RNA, 18 nt, Artificial Sequence
  Synthetic
cauaugagaaugacacaa

SEQ ID NO: 179443 - RNA, 19 nt, Artificial Sequence
  Synthetic
acauaugagaaugacacaa

SEQ ID NO: 179444 - RNA, 20 nt, Artificial Sequence
  Synthetic
aacauaugagaaugacacaa

SEQ ID NO: 179445 - RNA, 21 nt, Artificial Sequence
  Synthetic
aaacauaugagaaugacacaa

SEQ ID NO: 179446 - RNA, 22 nt, Artificial Sequence
  Synthetic
aaaacauaugagaaugacacaa

SEQ ID NO: 179447 - RNA, 23 nt, Artificial Sequence
  Synthetic
caaaacauaugagaaugacacaa

SEQ ID NO: 179448 - RNA, 24 nt, Artificial Sequence
  Synthetic
ccaaaacauaugagaaugacacaa

SEQ ID NO: 179449 - RNA, 18 nt, Artificial Sequence
  Synthetic
gcucaaugagugacacaa

SEQ ID NO: 179450 - RNA, 19 nt, Artificial Sequence
  Synthetic
agcucaaugagugacacaa

SEQ ID NO: 179451 - RNA, 20 nt, Artificial Sequence
  Synthetic
uagcucaaugagugacacaa

SEQ ID NO: 179452 - RNA, 21 nt, Artificial Sequence
  Synthetic
cuagcucaaugagugacacaa

SEQ ID NO: 179453 - RNA, 22 nt, Artificial Sequence
  Synthetic
ccuagcucaaugagugacacaa

SEQ ID NO: 179454 - RNA, 23 nt, Artificial Sequence
  Synthetic
accuagcucaaugagugacacaa

SEQ ID NO: 179455 - RNA, 24 nt, Artificial Sequence
  Synthetic
caccuagcucaaugagugacacaa

SEQ ID NO: 179456 - RNA, 18 nt, Artificial Sequence
  Synthetic
cccuaagugcauacacaa

SEQ ID NO: 179457 - RNA, 19 nt, Artificial Sequence
  Synthetic
ccccuaagugcauacacaa

SEQ ID NO: 179458 - RNA, 20 nt, Artificial Sequence
  Synthetic
uccccuaagugcauacacaa

SEQ ID NO: 179459 - RNA, 21 nt, Artificial Sequence
  Synthetic
auccccuaagugcauacacaa

SEQ ID NO: 179460 - RNA, 22 nt, Artificial Sequence
  Synthetic
aauccccuaagugcauacacaa

SEQ ID NO: 179461 - RNA, 23 nt, Artificial Sequence
  Synthetic
uaauccccuaagugcauacacaa

SEQ ID NO: 179462 - RNA, 24 nt, Artificial Sequence
  Synthetic
uuaauccccuaagugcauacacaa

SEQ ID NO: 179463 - RNA, 18 nt, Artificial Sequence
  Synthetic
auuguccaagauacacaa

SEQ ID NO: 179464 - RNA, 19 nt, Artificial Sequence
  Synthetic
gauuguccaagauacacaa

SEQ ID NO: 179465 - RNA, 20 nt, Artificial Sequence
  Synthetic
ggauuguccaagauacacaa

SEQ ID NO: 179466 - RNA, 21 nt, Artificial Sequence
  Synthetic
uggauuguccaagauacacaa

SEQ ID NO: 179467 - RNA, 22 nt, Artificial Sequence
  Synthetic
auggauuguccaagauacacaa

SEQ ID NO: 179468 - RNA, 23 nt, Artificial Sequence
  Synthetic
cauggauuguccaagauacacaa

SEQ ID NO: 179469 - RNA, 24 nt, Artificial Sequence
  Synthetic
gcauggauuguccaagauacacaa

SEQ ID NO: 179470 - RNA, 18 nt, Artificial Sequence
  Synthetic
uuuuccaaaccuacacaa

SEQ ID NO: 179471 - RNA, 19 nt, Artificial Sequence
  Synthetic
uuuuuccaaaccuacacaa

SEQ ID NO: 179472 - RNA, 20 nt, Artificial Sequence
  Synthetic
auuuuuccaaaccuacacaa

SEQ ID NO: 179473 - RNA, 21 nt, Artificial Sequence
  Synthetic
aauuuuuccaaaccuacacaa

SEQ ID NO: 179474 - RNA, 22 nt, Artificial Sequence
  Synthetic
aaauuuuuccaaaccuacacaa

SEQ ID NO: 179475 - RNA, 23 nt, Artificial Sequence
  Synthetic
uaaauuuuuccaaaccuacacaa

SEQ ID NO: 179476 - RNA, 24 nt, Artificial Sequence
  Synthetic
auaaauuuuuccaaaccuacacaa

SEQ ID NO: 179477 - RNA, 18 nt, Artificial Sequence
  Synthetic
uaucccuuuucuacacaa

SEQ ID NO: 179478 - RNA, 19 nt, Artificial Sequence
  Synthetic
cuaucccuuuucuacacaa

SEQ ID NO: 179479 - RNA, 20 nt, Artificial Sequence
  Synthetic
acuaucccuuuucuacacaa

SEQ ID NO: 179480 - RNA, 21 nt, Artificial Sequence
  Synthetic
uacuaucccuuuucuacacaa

SEQ ID NO: 179481 - RNA, 22 nt, Artificial Sequence
  Synthetic
uuacuaucccuuuucuacacaa

SEQ ID NO: 179482 - RNA, 23 nt, Artificial Sequence
  Synthetic
guuacuaucccuuuucuacacaa

SEQ ID NO: 179483 - RNA, 24 nt, Artificial Sequence
  Synthetic
uguuacuaucccuuuucuacacaa

SEQ ID NO: 179484 - RNA, 18 nt, Artificial Sequence
  Synthetic
uuaguacuuuuuacacaa

SEQ ID NO: 179485 - RNA, 19 nt, Artificial Sequence
  Synthetic
cuuaguacuuuuuacacaa

SEQ ID NO: 179486 - RNA, 20 nt, Artificial Sequence
  Synthetic
ucuuaguacuuuuuacacaa

SEQ ID NO: 179487 - RNA, 21 nt, Artificial Sequence
  Synthetic
gucuuaguacuuuuuacacaa

SEQ ID NO: 179488 - RNA, 22 nt, Artificial Sequence
  Synthetic
ugucuuaguacuuuuuacacaa

SEQ ID NO: 179489 - RNA, 23 nt, Artificial Sequence
  Synthetic
uugucuuaguacuuuuuacacaa

SEQ ID NO: 179490 - RNA, 24 nt, Artificial Sequence
  Synthetic
guugucuuaguacuuuuuacacaa

SEQ ID NO: 179491 - RNA, 18 nt, Artificial Sequence
  Synthetic
ucaaguucgagaccacaa

SEQ ID NO: 179492 - RNA, 19 nt, Artificial Sequence
  Synthetic
uucaaguucgagaccacaa

SEQ ID NO: 179493 - RNA, 20 nt, Artificial Sequence
  Synthetic
guucaaguucgagaccacaa

SEQ ID NO: 179494 - RNA, 21 nt, Artificial Sequence
  Synthetic
uguucaaguucgagaccacaa

SEQ ID NO: 179495 - RNA, 22 nt, Artificial Sequence
  Synthetic
uuguucaaguucgagaccacaa

SEQ ID NO: 179496 - RNA, 23 nt, Artificial Sequence
  Synthetic
cuuguucaaguucgagaccacaa

SEQ ID NO: 179497 - RNA, 24 nt, Artificial Sequence
  Synthetic
ccuuguucaaguucgagaccacaa

SEQ ID NO: 179498 - RNA, 18 nt, Artificial Sequence
  Synthetic
aauggccuuggaccacaa

SEQ ID NO: 179499 - RNA, 19 nt, Artificial Sequence
  Synthetic
aaauggccuuggaccacaa

SEQ ID NO: 179500 - RNA, 20 nt, Artificial Sequence
  Synthetic
aaaauggccuuggaccacaa

SEQ ID NO: 179501 - RNA, 21 nt, Artificial Sequence
  Synthetic
caaaauggccuuggaccacaa

SEQ ID NO: 179502 - RNA, 22 nt, Artificial Sequence
  Synthetic
gcaaaauggccuuggaccacaa

SEQ ID NO: 179503 - RNA, 23 nt, Artificial Sequence
  Synthetic
agcaaaauggccuuggaccacaa

SEQ ID NO: 179504 - RNA, 24 nt, Artificial Sequence
  Synthetic
aagcaaaauggccuuggaccacaa

SEQ ID NO: 179505 - RNA, 18 nt, Artificial Sequence
  Synthetic
guugauauaauaccacaa

SEQ ID NO: 179506 - RNA, 19 nt, Artificial Sequence
  Synthetic
gguugauauaauaccacaa

SEQ ID NO: 179507 - RNA, 20 nt, Artificial Sequence
  Synthetic
agguugauauaauaccacaa

SEQ ID NO: 179508 - RNA, 21 nt, Artificial Sequence
  Synthetic
aagguugauauaauaccacaa

SEQ ID NO: 179509 - RNA, 22 nt, Artificial Sequence
  Synthetic
gaagguugauauaauaccacaa

SEQ ID NO: 179510 - RNA, 23 nt, Artificial Sequence
  Synthetic
ugaagguugauauaauaccacaa

SEQ ID NO: 179511 - RNA, 24 nt, Artificial Sequence
  Synthetic
cugaagguugauauaauaccacaa

SEQ ID NO: 179512 - RNA, 18 nt, Artificial Sequence
  Synthetic
aauaaauccuacccacaa

SEQ ID NO: 179513 - RNA, 19 nt, Artificial Sequence
  Synthetic
aaauaaauccuacccacaa

SEQ ID NO: 179514 - RNA, 20 nt, Artificial Sequence
  Synthetic
uaaauaaauccuacccacaa

SEQ ID NO: 179515 - RNA, 21 nt, Artificial Sequence
  Synthetic
auaaauaaauccuacccacaa

SEQ ID NO: 179516 - RNA, 22 nt, Artificial Sequence
  Synthetic
aauaaauaaauccuacccacaa

SEQ ID NO: 179517 - RNA, 23 nt, Artificial Sequence
  Synthetic
gaauaaauaaauccuacccacaa

SEQ ID NO: 179518 - RNA, 24 nt, Artificial Sequence
  Synthetic
ggaauaaauaaauccuacccacaa

SEQ ID NO: 179519 - RNA, 18 nt, Artificial Sequence
  Synthetic
aggcuggguuacccacaa

SEQ ID NO: 179520 - RNA, 19 nt, Artificial Sequence
  Synthetic
aaggcuggguuacccacaa

SEQ ID NO: 179521 - RNA, 20 nt, Artificial Sequence
  Synthetic
aaaggcuggguuacccacaa

SEQ ID NO: 179522 - RNA, 21 nt, Artificial Sequence
  Synthetic
gaaaggcuggguuacccacaa

SEQ ID NO: 179523 - RNA, 22 nt, Artificial Sequence
  Synthetic
agaaaggcuggguuacccacaa

SEQ ID NO: 179524 - RNA, 23 nt, Artificial Sequence
  Synthetic
gagaaaggcuggguuacccacaa

SEQ ID NO: 179525 - RNA, 24 nt, Artificial Sequence
  Synthetic
agagaaaggcuggguuacccacaa

SEQ ID NO: 179526 - RNA, 18 nt, Artificial Sequence
  Synthetic
cuuucugccagcccacaa

SEQ ID NO: 179527 - RNA, 19 nt, Artificial Sequence
  Synthetic
ucuuucugccagcccacaa

SEQ ID NO: 179528 - RNA, 20 nt, Artificial Sequence
  Synthetic
aucuuucugccagcccacaa

SEQ ID NO: 179529 - RNA, 21 nt, Artificial Sequence
  Synthetic
caucuuucugccagcccacaa

SEQ ID NO: 179530 - RNA, 22 nt, Artificial Sequence
  Synthetic
ccaucuuucugccagcccacaa

SEQ ID NO: 179531 - RNA, 23 nt, Artificial Sequence
  Synthetic
cccaucuuucugccagcccacaa

SEQ ID NO: 179532 - RNA, 24 nt, Artificial Sequence
  Synthetic
ccccaucuuucugccagcccacaa

SEQ ID NO: 179533 - RNA, 18 nt, Artificial Sequence
  Synthetic
ccucaucauaucccacaa

SEQ ID NO: 179534 - RNA, 19 nt, Artificial Sequence
  Synthetic
accucaucauaucccacaa

SEQ ID NO: 179535 - RNA, 20 nt, Artificial Sequence
  Synthetic
aaccucaucauaucccacaa

SEQ ID NO: 179536 - RNA, 21 nt, Artificial Sequence
  Synthetic
aaaccucaucauaucccacaa

SEQ ID NO: 179537 - RNA, 22 nt, Artificial Sequence
  Synthetic
gaaaccucaucauaucccacaa

SEQ ID NO: 179538 - RNA, 23 nt, Artificial Sequence
  Synthetic
agaaaccucaucauaucccacaa

SEQ ID NO: 179539 - RNA, 24 nt, Artificial Sequence
  Synthetic
gagaaaccucaucauaucccacaa

SEQ ID NO: 179540 - RNA, 18 nt, Artificial Sequence
  Synthetic
uaagccacucucccacaa

SEQ ID NO: 179541 - RNA, 19 nt, Artificial Sequence
  Synthetic
guaagccacucucccacaa

SEQ ID NO: 179542 - RNA, 20 nt, Artificial Sequence
  Synthetic
uguaagccacucucccacaa

SEQ ID NO: 179543 - RNA, 21 nt, Artificial Sequence
  Synthetic
guguaagccacucucccacaa

SEQ ID NO: 179544 - RNA, 22 nt, Artificial Sequence
  Synthetic
gguguaagccacucucccacaa

SEQ ID NO: 179545 - RNA, 23 nt, Artificial Sequence
  Synthetic
ugguguaagccacucucccacaa

SEQ ID NO: 179546 - RNA, 24 nt, Artificial Sequence
  Synthetic
cugguguaagccacucucccacaa

SEQ ID NO: 179547 - RNA, 18 nt, Artificial Sequence
  Synthetic
gggcagucauggccacaa

SEQ ID NO: 179548 - RNA, 19 nt, Artificial Sequence
  Synthetic
agggcagucauggccacaa

SEQ ID NO: 179549 - RNA, 20 nt, Artificial Sequence
  Synthetic
uagggcagucauggccacaa

SEQ ID NO: 179550 - RNA, 21 nt, Artificial Sequence
  Synthetic
auagggcagucauggccacaa

SEQ ID NO: 179551 - RNA, 22 nt, Artificial Sequence
  Synthetic
gauagggcagucauggccacaa

SEQ ID NO: 179552 - RNA, 23 nt, Artificial Sequence
  Synthetic
agauagggcagucauggccacaa

SEQ ID NO: 179553 - RNA, 24 nt, Artificial Sequence
  Synthetic
aagauagggcagucauggccacaa

SEQ ID NO: 179554 - RNA, 18 nt, Artificial Sequence
  Synthetic
aauccaacaaauccacaa

SEQ ID NO: 179555 - RNA, 19 nt, Artificial Sequence
  Synthetic
caauccaacaaauccacaa

SEQ ID NO: 179556 - RNA, 20 nt, Artificial Sequence
  Synthetic
gcaauccaacaaauccacaa

SEQ ID NO: 179557 - RNA, 21 nt, Artificial Sequence
  Synthetic
agcaauccaacaaauccacaa

SEQ ID NO: 179558 - RNA, 22 nt, Artificial Sequence
  Synthetic
aagcaauccaacaaauccacaa

SEQ ID NO: 179559 - RNA, 23 nt, Artificial Sequence
  Synthetic
aaagcaauccaacaaauccacaa

SEQ ID NO: 179560 - RNA, 24 nt, Artificial Sequence
  Synthetic
aaaagcaauccaacaaauccacaa

SEQ ID NO: 179561 - RNA, 18 nt, Artificial Sequence
  Synthetic
ucagauugaguuccacaa

SEQ ID NO: 179562 - RNA, 19 nt, Artificial Sequence
  Synthetic
gucagauugaguuccacaa

SEQ ID NO: 179563 - RNA, 20 nt, Artificial Sequence
  Synthetic
ggucagauugaguuccacaa

SEQ ID NO: 179564 - RNA, 21 nt, Artificial Sequence
  Synthetic
uggucagauugaguuccacaa

SEQ ID NO: 179565 - RNA, 22 nt, Artificial Sequence
  Synthetic
auggucagauugaguuccacaa

SEQ ID NO: 179566 - RNA, 23 nt, Artificial Sequence
  Synthetic
uauggucagauugaguuccacaa

SEQ ID NO: 179567 - RNA, 24 nt, Artificial Sequence
  Synthetic
guauggucagauugaguuccacaa

SEQ ID NO: 179568 - RNA, 18 nt, Artificial Sequence
  Synthetic
aggaagagaagagcacaa

SEQ ID NO: 179569 - RNA, 19 nt, Artificial Sequence
  Synthetic
aaggaagagaagagcacaa

SEQ ID NO: 179570 - RNA, 20 nt, Artificial Sequence
  Synthetic
caaggaagagaagagcacaa

SEQ ID NO: 179571 - RNA, 21 nt, Artificial Sequence
  Synthetic
acaaggaagagaagagcacaa

SEQ ID NO: 179572 - RNA, 22 nt, Artificial Sequence
  Synthetic
cacaaggaagagaagagcacaa

SEQ ID NO: 179573 - RNA, 23 nt, Artificial Sequence
  Synthetic
ccacaaggaagagaagagcacaa

SEQ ID NO: 179574 - RNA, 24 nt, Artificial Sequence
  Synthetic
cccacaaggaagagaagagcacaa

SEQ ID NO: 179575 - RNA, 18 nt, Artificial Sequence
  Synthetic
auguaagauuuggcacaa

SEQ ID NO: 179576 - RNA, 19 nt, Artificial Sequence
  Synthetic
cauguaagauuuggcacaa

SEQ ID NO: 179577 - RNA, 20 nt, Artificial Sequence
  Synthetic
acauguaagauuuggcacaa

SEQ ID NO: 179578 - RNA, 21 nt, Artificial Sequence
  Synthetic
uacauguaagauuuggcacaa

SEQ ID NO: 179579 - RNA, 22 nt, Artificial Sequence
  Synthetic
guacauguaagauuuggcacaa

SEQ ID NO: 179580 - RNA, 23 nt, Artificial Sequence
  Synthetic
aguacauguaagauuuggcacaa

SEQ ID NO: 179581 - RNA, 24 nt, Artificial Sequence
  Synthetic
aaguacauguaagauuuggcacaa

SEQ ID NO: 179582 - RNA, 18 nt, Artificial Sequence
  Synthetic
ugugggaaaacugcacaa

SEQ ID NO: 179583 - RNA, 19 nt, Artificial Sequence
  Synthetic
uugugggaaaacugcacaa

SEQ ID NO: 179584 - RNA, 20 nt, Artificial Sequence
  Synthetic
auugugggaaaacugcacaa

SEQ ID NO: 179585 - RNA, 21 nt, Artificial Sequence
  Synthetic
uauugugggaaaacugcacaa

SEQ ID NO: 179586 - RNA, 22 nt, Artificial Sequence
  Synthetic
cuauugugggaaaacugcacaa

SEQ ID NO: 179587 - RNA, 23 nt, Artificial Sequence
  Synthetic
ucuauugugggaaaacugcacaa

SEQ ID NO: 179588 - RNA, 24 nt, Artificial Sequence
  Synthetic
gucuauugugggaaaacugcacaa

SEQ ID NO: 179589 - RNA, 18 nt, Artificial Sequence
  Synthetic
guagaaaauucugcacaa

SEQ ID NO: 179590 - RNA, 19 nt, Artificial Sequence
  Synthetic
aguagaaaauucugcacaa

SEQ ID NO: 179591 - RNA, 20 nt, Artificial Sequence
  Synthetic
gaguagaaaauucugcacaa

SEQ ID NO: 179592 - RNA, 21 nt, Artificial Sequence
  Synthetic
ugaguagaaaauucugcacaa

SEQ ID NO: 179593 - RNA, 22 nt, Artificial Sequence
  Synthetic
uugaguagaaaauucugcacaa

SEQ ID NO: 179594 - RNA, 23 nt, Artificial Sequence
  Synthetic
uuugaguagaaaauucugcacaa

SEQ ID NO: 179595 - RNA, 24 nt, Artificial Sequence
  Synthetic
auuugaguagaaaauucugcacaa

SEQ ID NO: 179596 - RNA, 18 nt, Artificial Sequence
  Synthetic
uuauucuuuucugcacaa

SEQ ID NO: 179597 - RNA, 19 nt, Artificial Sequence
  Synthetic
guuauucuuuucugcacaa

SEQ ID NO: 179598 - RNA, 20 nt, Artificial Sequence
  Synthetic
aguuauucuuuucugcacaa

SEQ ID NO: 179599 - RNA, 21 nt, Artificial Sequence
  Synthetic
aaguuauucuuuucugcacaa

SEQ ID NO: 179600 - RNA, 22 nt, Artificial Sequence
  Synthetic
uaaguuauucuuuucugcacaa

SEQ ID NO: 179601 - RNA, 23 nt, Artificial Sequence
  Synthetic
uuaaguuauucuuuucugcacaa

SEQ ID NO: 179602 - RNA, 24 nt, Artificial Sequence
  Synthetic
guuaaguuauucuuuucugcacaa

SEQ ID NO: 179603 - RNA, 18 nt, Artificial Sequence
  Synthetic
aagccaugcagugcacaa

SEQ ID NO: 179604 - RNA, 19 nt, Artificial Sequence
  Synthetic
caagccaugcagugcacaa

SEQ ID NO: 179605 - RNA, 20 nt, Artificial Sequence
  Synthetic
gcaagccaugcagugcacaa

SEQ ID NO: 179606 - RNA, 21 nt, Artificial Sequence
  Synthetic
agcaagccaugcagugcacaa

SEQ ID NO: 179607 - RNA, 22 nt, Artificial Sequence
  Synthetic
uagcaagccaugcagugcacaa

SEQ ID NO: 179608 - RNA, 23 nt, Artificial Sequence
  Synthetic
guagcaagccaugcagugcacaa

SEQ ID NO: 179609 - RNA, 24 nt, Artificial Sequence
  Synthetic
uguagcaagccaugcagugcacaa

SEQ ID NO: 179610 - RNA, 18 nt, Artificial Sequence
  Synthetic
gcugacaugacaucacaa

SEQ ID NO: 179611 - RNA, 19 nt, Artificial Sequence
  Synthetic
ugcugacaugacaucacaa

SEQ ID NO: 179612 - RNA, 20 nt, Artificial Sequence
  Synthetic
augcugacaugacaucacaa

SEQ ID NO: 179613 - RNA, 21 nt, Artificial Sequence
  Synthetic
aaugcugacaugacaucacaa

SEQ ID NO: 179614 - RNA, 22 nt, Artificial Sequence
  Synthetic
gaaugcugacaugacaucacaa

SEQ ID NO: 179615 - RNA, 23 nt, Artificial Sequence
  Synthetic
ugaaugcugacaugacaucacaa

SEQ ID NO: 179616 - RNA, 24 nt, Artificial Sequence
  Synthetic
uugaaugcugacaugacaucacaa

SEQ ID NO: 179617 - RNA, 18 nt, Artificial Sequence
  Synthetic
ugugcuuucucaucacaa

SEQ ID NO: 179618 - RNA, 19 nt, Artificial Sequence
  Synthetic
augugcuuucucaucacaa

SEQ ID NO: 179619 - RNA, 20 nt, Artificial Sequence
  Synthetic
uaugugcuuucucaucacaa

SEQ ID NO: 179620 - RNA, 21 nt, Artificial Sequence
  Synthetic
guaugugcuuucucaucacaa

SEQ ID NO: 179621 - RNA, 22 nt, Artificial Sequence
  Synthetic
uguaugugcuuucucaucacaa

SEQ ID NO: 179622 - RNA, 23 nt, Artificial Sequence
  Synthetic
uuguaugugcuuucucaucacaa

SEQ ID NO: 179623 - RNA, 24 nt, Artificial Sequence
  Synthetic
uuuguaugugcuuucucaucacaa

SEQ ID NO: 179624 - RNA, 18 nt, Artificial Sequence
  Synthetic
agccaaaccauaucacaa

SEQ ID NO: 179625 - RNA, 19 nt, Artificial Sequence
  Synthetic
aagccaaaccauaucacaa

SEQ ID NO: 179626 - RNA, 20 nt, Artificial Sequence
  Synthetic
aaagccaaaccauaucacaa

SEQ ID NO: 179627 - RNA, 21 nt, Artificial Sequence
  Synthetic
caaagccaaaccauaucacaa

SEQ ID NO: 179628 - RNA, 22 nt, Artificial Sequence
  Synthetic
acaaagccaaaccauaucacaa

SEQ ID NO: 179629 - RNA, 23 nt, Artificial Sequence
  Synthetic
cacaaagccaaaccauaucacaa

SEQ ID NO: 179630 - RNA, 24 nt, Artificial Sequence
  Synthetic
acacaaagccaaaccauaucacaa

SEQ ID NO: 179631 - RNA, 18 nt, Artificial Sequence
  Synthetic
auaguuccagcgucacaa

SEQ ID NO: 179632 - RNA, 19 nt, Artificial Sequence
  Synthetic
aauaguuccagcgucacaa

SEQ ID NO: 179633 - RNA, 20 nt, Artificial Sequence
  Synthetic
gaauaguuccagcgucacaa

SEQ ID NO: 179634 - RNA, 21 nt, Artificial Sequence
  Synthetic
ugaauaguuccagcgucacaa

SEQ ID NO: 179635 - RNA, 22 nt, Artificial Sequence
  Synthetic
cugaauaguuccagcgucacaa

SEQ ID NO: 179636 - RNA, 23 nt, Artificial Sequence
  Synthetic
acugaauaguuccagcgucacaa

SEQ ID NO: 179637 - RNA, 24 nt, Artificial Sequence
  Synthetic
uacugaauaguuccagcgucacaa

SEQ ID NO: 179638 - RNA, 18 nt, Artificial Sequence
  Synthetic
auguuucaaaggucacaa

SEQ ID NO: 179639 - RNA, 19 nt, Artificial Sequence
  Synthetic
gauguuucaaaggucacaa

SEQ ID NO: 179640 - RNA, 20 nt, Artificial Sequence
  Synthetic
ugauguuucaaaggucacaa

SEQ ID NO: 179641 - RNA, 21 nt, Artificial Sequence
  Synthetic
gugauguuucaaaggucacaa

SEQ ID NO: 179642 - RNA, 22 nt, Artificial Sequence
  Synthetic
agugauguuucaaaggucacaa

SEQ ID NO: 179643 - RNA, 23 nt, Artificial Sequence
  Synthetic
cagugauguuucaaaggucacaa

SEQ ID NO: 179644 - RNA, 24 nt, Artificial Sequence
  Synthetic
acagugauguuucaaaggucacaa

SEQ ID NO: 179645 - RNA, 18 nt, Artificial Sequence
  Synthetic
uauuucucacugucacaa

SEQ ID NO: 179646 - RNA, 19 nt, Artificial Sequence
  Synthetic
guauuucucacugucacaa

SEQ ID NO: 179647 - RNA, 20 nt, Artificial Sequence
  Synthetic
uguauuucucacugucacaa

SEQ ID NO: 179648 - RNA, 21 nt, Artificial Sequence
  Synthetic
cuguauuucucacugucacaa

SEQ ID NO: 179649 - RNA, 22 nt, Artificial Sequence
  Synthetic
ucuguauuucucacugucacaa

SEQ ID NO: 179650 - RNA, 23 nt, Artificial Sequence
  Synthetic
uucuguauuucucacugucacaa

SEQ ID NO: 179651 - RNA, 24 nt, Artificial Sequence
  Synthetic
guucuguauuucucacugucacaa

SEQ ID NO: 179652 - RNA, 18 nt, Artificial Sequence
  Synthetic
cugcagcacuauucacaa

SEQ ID NO: 179653 - RNA, 19 nt, Artificial Sequence
  Synthetic
acugcagcacuauucacaa

SEQ ID NO: 179654 - RNA, 20 nt, Artificial Sequence
  Synthetic
cacugcagcacuauucacaa

SEQ ID NO: 179655 - RNA, 21 nt, Artificial Sequence
  Synthetic
ucacugcagcacuauucacaa

SEQ ID NO: 179656 - RNA, 22 nt, Artificial Sequence
  Synthetic
uucacugcagcacuauucacaa

SEQ ID NO: 179657 - RNA, 23 nt, Artificial Sequence
  Synthetic
guucacugcagcacuauucacaa

SEQ ID NO: 179658 - RNA, 24 nt, Artificial Sequence
  Synthetic
uguucacugcagcacuauucacaa

SEQ ID NO: 179659 - RNA, 18 nt, Artificial Sequence
  Synthetic
ggaaaaauaauuucacaa

SEQ ID NO: 179660 - RNA, 19 nt, Artificial Sequence
  Synthetic
uggaaaaauaauuucacaa

SEQ ID NO: 179661 - RNA, 20 nt, Artificial Sequence
  Synthetic
uuggaaaaauaauuucacaa

SEQ ID NO: 179662 - RNA, 21 nt, Artificial Sequence
  Synthetic
cuuggaaaaauaauuucacaa

SEQ ID NO: 179663 - RNA, 22 nt, Artificial Sequence
  Synthetic
ucuuggaaaaauaauuucacaa

SEQ ID NO: 179664 - RNA, 23 nt, Artificial Sequence
  Synthetic
aucuuggaaaaauaauuucacaa

SEQ ID NO: 179665 - RNA, 24 nt, Artificial Sequence
  Synthetic
caucuuggaaaaauaauuucacaa

SEQ ID NO: 179666 - RNA, 18 nt, Artificial Sequence
  Synthetic
auuaugccuauuucacaa

SEQ ID NO: 179667 - RNA, 19 nt, Artificial Sequence
  Synthetic
uauuaugccuauuucacaa

SEQ ID NO: 179668 - RNA, 20 nt, Artificial Sequence
  Synthetic
auauuaugccuauuucacaa

SEQ ID NO: 179669 - RNA, 21 nt, Artificial Sequence
  Synthetic
uauauuaugccuauuucacaa

SEQ ID NO: 179670 - RNA, 22 nt, Artificial Sequence
  Synthetic
auauauuaugccuauuucacaa

SEQ ID NO: 179671 - RNA, 23 nt, Artificial Sequence
  Synthetic
uauauauuaugccuauuucacaa

SEQ ID NO: 179672 - RNA, 24 nt, Artificial Sequence
  Synthetic
auauauauuaugccuauuucacaa

SEQ ID NO: 179673 - RNA, 18 nt, Artificial Sequence
  Synthetic
ucuaauagacuuucacaa

SEQ ID NO: 179674 - RNA, 19 nt, Artificial Sequence
  Synthetic
gucuaauagacuuucacaa

SEQ ID NO: 179675 - RNA, 20 nt, Artificial Sequence
  Synthetic
ugucuaauagacuuucacaa

SEQ ID NO: 179676 - RNA, 21 nt, Artificial Sequence
  Synthetic
uugucuaauagacuuucacaa

SEQ ID NO: 179677 - RNA, 22 nt, Artificial Sequence
  Synthetic
cuugucuaauagacuuucacaa

SEQ ID NO: 179678 - RNA, 23 nt, Artificial Sequence
  Synthetic
acuugucuaauagacuuucacaa

SEQ ID NO: 179679 - RNA, 24 nt, Artificial Sequence
  Synthetic
uacuugucuaauagacuuucacaa

SEQ ID NO: 179680 - RNA, 18 nt, Artificial Sequence
  Synthetic
aggagagagaaaagacaa

SEQ ID NO: 179681 - RNA, 19 nt, Artificial Sequence
  Synthetic
aaggagagagaaaagacaa

SEQ ID NO: 179682 - RNA, 20 nt, Artificial Sequence
  Synthetic
gaaggagagagaaaagacaa

SEQ ID NO: 179683 - RNA, 21 nt, Artificial Sequence
  Synthetic
ggaaggagagagaaaagacaa

SEQ ID NO: 179684 - RNA, 22 nt, Artificial Sequence
  Synthetic
gggaaggagagagaaaagacaa

SEQ ID NO: 179685 - RNA, 23 nt, Artificial Sequence
  Synthetic
ggggaaggagagagaaaagacaa

SEQ ID NO: 179686 - RNA, 24 nt, Artificial Sequence
  Synthetic
aggggaaggagagagaaaagacaa

SEQ ID NO: 179687 - RNA, 18 nt, Artificial Sequence
  Synthetic
aaguaaaguaaaagacaa

SEQ ID NO: 179688 - RNA, 19 nt, Artificial Sequence
  Synthetic
gaaguaaaguaaaagacaa

SEQ ID NO: 179689 - RNA, 20 nt, Artificial Sequence
  Synthetic
agaaguaaaguaaaagacaa

SEQ ID NO: 179690 - RNA, 21 nt, Artificial Sequence
  Synthetic
aagaaguaaaguaaaagacaa

SEQ ID NO: 179691 - RNA, 22 nt, Artificial Sequence
  Synthetic
gaagaaguaaaguaaaagacaa

SEQ ID NO: 179692 - RNA, 23 nt, Artificial Sequence
  Synthetic
agaagaaguaaaguaaaagacaa

SEQ ID NO: 179693 - RNA, 24 nt, Artificial Sequence
  Synthetic
cagaagaaguaaaguaaaagacaa

SEQ ID NO: 179694 - RNA, 18 nt, Artificial Sequence
  Synthetic
ucaauaagagaaagacaa

SEQ ID NO: 179695 - RNA, 19 nt, Artificial Sequence
  Synthetic
aucaauaagagaaagacaa

SEQ ID NO: 179696 - RNA, 20 nt, Artificial Sequence
  Synthetic
aaucaauaagagaaagacaa

SEQ ID NO: 179697 - RNA, 21 nt, Artificial Sequence
  Synthetic
aaaucaauaagagaaagacaa

SEQ ID NO: 179698 - RNA, 22 nt, Artificial Sequence
  Synthetic
gaaaucaauaagagaaagacaa

SEQ ID NO: 179699 - RNA, 23 nt, Artificial Sequence
  Synthetic
agaaaucaauaagagaaagacaa

SEQ ID NO: 179700 - RNA, 24 nt, Artificial Sequence
  Synthetic
uagaaaucaauaagagaaagacaa

SEQ ID NO: 179701 - RNA, 18 nt, Artificial Sequence
  Synthetic
gaaauuauugaaagacaa

SEQ ID NO: 179702 - RNA, 19 nt, Artificial Sequence
  Synthetic
ugaaauuauugaaagacaa

SEQ ID NO: 179703 - RNA, 20 nt, Artificial Sequence
  Synthetic
uugaaauuauugaaagacaa

SEQ ID NO: 179704 - RNA, 21 nt, Artificial Sequence
  Synthetic
uuugaaauuauugaaagacaa

SEQ ID NO: 179705 - RNA, 22 nt, Artificial Sequence
  Synthetic
auuugaaauuauugaaagacaa

SEQ ID NO: 179706 - RNA, 23 nt, Artificial Sequence
  Synthetic
cauuugaaauuauugaaagacaa

SEQ ID NO: 179707 - RNA, 24 nt, Artificial Sequence
  Synthetic
ucauuugaaauuauugaaagacaa

SEQ ID NO: 179708 - RNA, 18 nt, Artificial Sequence
  Synthetic
uguuaagcgccaagacaa

SEQ ID NO: 179709 - RNA, 19 nt, Artificial Sequence
  Synthetic
auguuaagcgccaagacaa

SEQ ID NO: 179710 - RNA, 20 nt, Artificial Sequence
  Synthetic
aauguuaagcgccaagacaa

SEQ ID NO: 179711 - RNA, 21 nt, Artificial Sequence
  Synthetic
aaauguuaagcgccaagacaa

SEQ ID NO: 179712 - RNA, 22 nt, Artificial Sequence
  Synthetic
caaauguuaagcgccaagacaa

SEQ ID NO: 179713 - RNA, 23 nt, Artificial Sequence
  Synthetic
ccaaauguuaagcgccaagacaa

SEQ ID NO: 179714 - RNA, 24 nt, Artificial Sequence
  Synthetic
gccaaauguuaagcgccaagacaa

SEQ ID NO: 179715 - RNA, 18 nt, Artificial Sequence
  Synthetic
gauucaaguccaagacaa

SEQ ID NO: 179716 - RNA, 19 nt, Artificial Sequence
  Synthetic
agauucaaguccaagacaa

SEQ ID NO: 179717 - RNA, 20 nt, Artificial Sequence
  Synthetic
gagauucaaguccaagacaa

SEQ ID NO: 179718 - RNA, 21 nt, Artificial Sequence
  Synthetic
ugagauucaaguccaagacaa

SEQ ID NO: 179719 - RNA, 22 nt, Artificial Sequence
  Synthetic
augagauucaaguccaagacaa

SEQ ID NO: 179720 - RNA, 23 nt, Artificial Sequence
  Synthetic
aaugagauucaaguccaagacaa

SEQ ID NO: 179721 - RNA, 24 nt, Artificial Sequence
  Synthetic
caaugagauucaaguccaagacaa

SEQ ID NO: 179722 - RNA, 18 nt, Artificial Sequence
  Synthetic
uuaugcuaaugaagacaa

SEQ ID NO: 179723 - RNA, 19 nt, Artificial Sequence
  Synthetic
guuaugcuaaugaagacaa

SEQ ID NO: 179724 - RNA, 20 nt, Artificial Sequence
  Synthetic
aguuaugcuaaugaagacaa

SEQ ID NO: 179725 - RNA, 21 nt, Artificial Sequence
  Synthetic
aaguuaugcuaaugaagacaa

SEQ ID NO: 179726 - RNA, 22 nt, Artificial Sequence
  Synthetic
aaaguuaugcuaaugaagacaa

SEQ ID NO: 179727 - RNA, 23 nt, Artificial Sequence
  Synthetic
gaaaguuaugcuaaugaagacaa

SEQ ID NO: 179728 - RNA, 24 nt, Artificial Sequence
  Synthetic
ggaaaguuaugcuaaugaagacaa

SEQ ID NO: 179729 - RNA, 18 nt, Artificial Sequence
  Synthetic
guagaaacuugaagacaa

SEQ ID NO: 179730 - RNA, 19 nt, Artificial Sequence
  Synthetic
cguagaaacuugaagacaa

SEQ ID NO: 179731 - RNA, 20 nt, Artificial Sequence
  Synthetic
ccguagaaacuugaagacaa

SEQ ID NO: 179732 - RNA, 21 nt, Artificial Sequence
  Synthetic
uccguagaaacuugaagacaa

SEQ ID NO: 179733 - RNA, 22 nt, Artificial Sequence
  Synthetic
uuccguagaaacuugaagacaa

SEQ ID NO: 179734 - RNA, 23 nt, Artificial Sequence
  Synthetic
auuccguagaaacuugaagacaa

SEQ ID NO: 179735 - RNA, 24 nt, Artificial Sequence
  Synthetic
gauuccguagaaacuugaagacaa

SEQ ID NO: 179736 - RNA, 18 nt, Artificial Sequence
  Synthetic
aaggguuacuuaagacaa

SEQ ID NO: 179737 - RNA, 19 nt, Artificial Sequence
  Synthetic
uaaggguuacuuaagacaa

SEQ ID NO: 179738 - RNA, 20 nt, Artificial Sequence
  Synthetic
uuaaggguuacuuaagacaa

SEQ ID NO: 179739 - RNA, 21 nt, Artificial Sequence
  Synthetic
auuaaggguuacuuaagacaa

SEQ ID NO: 179740 - RNA, 22 nt, Artificial Sequence
  Synthetic
cauuaaggguuacuuaagacaa

SEQ ID NO: 179741 - RNA, 23 nt, Artificial Sequence
  Synthetic
ucauuaaggguuacuuaagacaa

SEQ ID NO: 179742 - RNA, 24 nt, Artificial Sequence
  Synthetic
aucauuaaggguuacuuaagacaa

SEQ ID NO: 179743 - RNA, 18 nt, Artificial Sequence
  Synthetic
agaauauguuccagacaa

SEQ ID NO: 179744 - RNA, 19 nt, Artificial Sequence
  Synthetic
aagaauauguuccagacaa

SEQ ID NO: 179745 - RNA, 20 nt, Artificial Sequence
  Synthetic
aaagaauauguuccagacaa

SEQ ID NO: 179746 - RNA, 21 nt, Artificial Sequence
  Synthetic
uaaagaauauguuccagacaa

SEQ ID NO: 179747 - RNA, 22 nt, Artificial Sequence
  Synthetic
cuaaagaauauguuccagacaa

SEQ ID NO: 179748 - RNA, 23 nt, Artificial Sequence
  Synthetic
ccuaaagaauauguuccagacaa

SEQ ID NO: 179749 - RNA, 24 nt, Artificial Sequence
  Synthetic
accuaaagaauauguuccagacaa

SEQ ID NO: 179750 - RNA, 18 nt, Artificial Sequence
  Synthetic
gaugaacaauucagacaa

SEQ ID NO: 179751 - RNA, 19 nt, Artificial Sequence
  Synthetic
ugaugaacaauucagacaa

SEQ ID NO: 179752 - RNA, 20 nt, Artificial Sequence
  Synthetic
augaugaacaauucagacaa

SEQ ID NO: 179753 - RNA, 21 nt, Artificial Sequence
  Synthetic
aaugaugaacaauucagacaa

SEQ ID NO: 179754 - RNA, 22 nt, Artificial Sequence
  Synthetic
uaaugaugaacaauucagacaa

SEQ ID NO: 179755 - RNA, 23 nt, Artificial Sequence
  Synthetic
auaaugaugaacaauucagacaa

SEQ ID NO: 179756 - RNA, 24 nt, Artificial Sequence
  Synthetic
aauaaugaugaacaauucagacaa

SEQ ID NO: 179757 - RNA, 18 nt, Artificial Sequence
  Synthetic
cuaagcuugaagagacaa

SEQ ID NO: 179758 - RNA, 19 nt, Artificial Sequence
  Synthetic
ccuaagcuugaagagacaa

SEQ ID NO: 179759 - RNA, 20 nt, Artificial Sequence
  Synthetic
cccuaagcuugaagagacaa

SEQ ID NO: 179760 - RNA, 21 nt, Artificial Sequence
  Synthetic
ccccuaagcuugaagagacaa

SEQ ID NO: 179761 - RNA, 22 nt, Artificial Sequence
  Synthetic
uccccuaagcuugaagagacaa

SEQ ID NO: 179762 - RNA, 23 nt, Artificial Sequence
  Synthetic
cuccccuaagcuugaagagacaa

SEQ ID NO: 179763 - RNA, 24 nt, Artificial Sequence
  Synthetic
gcuccccuaagcuugaagagacaa

SEQ ID NO: 179764 - RNA, 18 nt, Artificial Sequence
  Synthetic
gcuuuuggggagagacaa

SEQ ID NO: 179765 - RNA, 19 nt, Artificial Sequence
  Synthetic
agcuuuuggggagagacaa

SEQ ID NO: 179766 - RNA, 20 nt, Artificial Sequence
  Synthetic
uagcuuuuggggagagacaa

SEQ ID NO: 179767 - RNA, 21 nt, Artificial Sequence
  Synthetic
cuagcuuuuggggagagacaa

SEQ ID NO: 179768 - RNA, 22 nt, Artificial Sequence
  Synthetic
ucuagcuuuuggggagagacaa

SEQ ID NO: 179769 - RNA, 23 nt, Artificial Sequence
  Synthetic
uucuagcuuuuggggagagacaa

SEQ ID NO: 179770 - RNA, 24 nt, Artificial Sequence
  Synthetic
auucuagcuuuuggggagagacaa

SEQ ID NO: 179771 - RNA, 18 nt, Artificial Sequence
  Synthetic
agugggaaacggagacaa

SEQ ID NO: 179772 - RNA, 19 nt, Artificial Sequence
  Synthetic
cagugggaaacggagacaa

SEQ ID NO: 179773 - RNA, 20 nt, Artificial Sequence
  Synthetic
ccagugggaaacggagacaa

SEQ ID NO: 179774 - RNA, 21 nt, Artificial Sequence
  Synthetic
uccagugggaaacggagacaa

SEQ ID NO: 179775 - RNA, 22 nt, Artificial Sequence
  Synthetic
guccagugggaaacggagacaa

SEQ ID NO: 179776 - RNA, 23 nt, Artificial Sequence
  Synthetic
cguccagugggaaacggagacaa

SEQ ID NO: 179777 - RNA, 24 nt, Artificial Sequence
  Synthetic
ccguccagugggaaacggagacaa

SEQ ID NO: 179778 - RNA, 18 nt, Artificial Sequence
  Synthetic
guguaguuggggagacaa

SEQ ID NO: 179779 - RNA, 19 nt, Artificial Sequence
  Synthetic
aguguaguuggggagacaa

SEQ ID NO: 179780 - RNA, 20 nt, Artificial Sequence
  Synthetic
gaguguaguuggggagacaa

SEQ ID NO: 179781 - RNA, 21 nt, Artificial Sequence
  Synthetic
agaguguaguuggggagacaa

SEQ ID NO: 179782 - RNA, 22 nt, Artificial Sequence
  Synthetic
uagaguguaguuggggagacaa

SEQ ID NO: 179783 - RNA, 23 nt, Artificial Sequence
  Synthetic
cuagaguguaguuggggagacaa

SEQ ID NO: 179784 - RNA, 24 nt, Artificial Sequence
  Synthetic
ccuagaguguaguuggggagacaa

SEQ ID NO: 179785 - RNA, 18 nt, Artificial Sequence
  Synthetic
gaggaggagaauagacaa

SEQ ID NO: 179786 - RNA, 19 nt, Artificial Sequence
  Synthetic
ggaggaggagaauagacaa

SEQ ID NO: 179787 - RNA, 20 nt, Artificial Sequence
  Synthetic
aggaggaggagaauagacaa

SEQ ID NO: 179788 - RNA, 21 nt, Artificial Sequence
  Synthetic
aaggaggaggagaauagacaa

SEQ ID NO: 179789 - RNA, 22 nt, Artificial Sequence
  Synthetic
gaaggaggaggagaauagacaa

SEQ ID NO: 179790 - RNA, 23 nt, Artificial Sequence
  Synthetic
ugaaggaggaggagaauagacaa

SEQ ID NO: 179791 - RNA, 24 nt, Artificial Sequence
  Synthetic
cugaaggaggaggagaauagacaa

SEQ ID NO: 179792 - RNA, 18 nt, Artificial Sequence
  Synthetic
uggugugggaauagacaa

SEQ ID NO: 179793 - RNA, 19 nt, Artificial Sequence
  Synthetic
guggugugggaauagacaa

SEQ ID NO: 179794 - RNA, 20 nt, Artificial Sequence
  Synthetic
aguggugugggaauagacaa

SEQ ID NO: 179795 - RNA, 21 nt, Artificial Sequence
  Synthetic
caguggugugggaauagacaa

SEQ ID NO: 179796 - RNA, 22 nt, Artificial Sequence
  Synthetic
gcaguggugugggaauagacaa

SEQ ID NO: 179797 - RNA, 23 nt, Artificial Sequence
  Synthetic
agcaguggugugggaauagacaa

SEQ ID NO: 179798 - RNA, 24 nt, Artificial Sequence
  Synthetic
uagcaguggugugggaauagacaa

SEQ ID NO: 179799 - RNA, 18 nt, Artificial Sequence
  Synthetic
ugaagcagucauagacaa

SEQ ID NO: 179800 - RNA, 19 nt, Artificial Sequence
  Synthetic
uugaagcagucauagacaa

SEQ ID NO: 179801 - RNA, 20 nt, Artificial Sequence
  Synthetic
guugaagcagucauagacaa

SEQ ID NO: 179802 - RNA, 21 nt, Artificial Sequence
  Synthetic
uguugaagcagucauagacaa

SEQ ID NO: 179803 - RNA, 22 nt, Artificial Sequence
  Synthetic
auguugaagcagucauagacaa

SEQ ID NO: 179804 - RNA, 23 nt, Artificial Sequence
  Synthetic
aauguugaagcagucauagacaa

SEQ ID NO: 179805 - RNA, 24 nt, Artificial Sequence
  Synthetic
gaauguugaagcagucauagacaa

SEQ ID NO: 179806 - RNA, 18 nt, Artificial Sequence
  Synthetic
gaggugacuccuagacaa

SEQ ID NO: 179807 - RNA, 19 nt, Artificial Sequence
  Synthetic
ugaggugacuccuagacaa

SEQ ID NO: 179808 - RNA, 20 nt, Artificial Sequence
  Synthetic
uugaggugacuccuagacaa

SEQ ID NO: 179809 - RNA, 21 nt, Artificial Sequence
  Synthetic
auugaggugacuccuagacaa

SEQ ID NO: 179810 - RNA, 22 nt, Artificial Sequence
  Synthetic
uauugaggugacuccuagacaa

SEQ ID NO: 179811 - RNA, 23 nt, Artificial Sequence
  Synthetic
cuauugaggugacuccuagacaa

SEQ ID NO: 179812 - RNA, 24 nt, Artificial Sequence
  Synthetic
ccuauugaggugacuccuagacaa

SEQ ID NO: 179813 - RNA, 18 nt, Artificial Sequence
  Synthetic
cugcuuuuauuuagacaa

SEQ ID NO: 179814 - RNA, 19 nt, Artificial Sequence
  Synthetic
ucugcuuuuauuuagacaa

SEQ ID NO: 179815 - RNA, 20 nt, Artificial Sequence
  Synthetic
uucugcuuuuauuuagacaa

SEQ ID NO: 179816 - RNA, 21 nt, Artificial Sequence
  Synthetic
uuucugcuuuuauuuagacaa

SEQ ID NO: 179817 - RNA, 22 nt, Artificial Sequence
  Synthetic
guuucugcuuuuauuuagacaa

SEQ ID NO: 179818 - RNA, 23 nt, Artificial Sequence
  Synthetic
aguuucugcuuuuauuuagacaa

SEQ ID NO: 179819 - RNA, 24 nt, Artificial Sequence
  Synthetic
aaguuucugcuuuuauuuagacaa

SEQ ID NO: 179820 - RNA, 18 nt, Artificial Sequence
  Synthetic
auaaccuugaaaggacaa

SEQ ID NO: 179821 - RNA, 19 nt, Artificial Sequence
  Synthetic
aauaaccuugaaaggacaa

SEQ ID NO: 179822 - RNA, 20 nt, Artificial Sequence
  Synthetic
gaauaaccuugaaaggacaa

SEQ ID NO: 179823 - RNA, 21 nt, Artificial Sequence
  Synthetic
ugaauaaccuugaaaggacaa

SEQ ID NO: 179824 - RNA, 22 nt, Artificial Sequence
  Synthetic
uugaauaaccuugaaaggacaa

SEQ ID NO: 179825 - RNA, 23 nt, Artificial Sequence
  Synthetic
cuugaauaaccuugaaaggacaa

SEQ ID NO: 179826 - RNA, 24 nt, Artificial Sequence
  Synthetic
gcuugaauaaccuugaaaggacaa

SEQ ID NO: 179827 - RNA, 18 nt, Artificial Sequence
  Synthetic
uucuuuaaagcaggacaa

SEQ ID NO: 179828 - RNA, 19 nt, Artificial Sequence
  Synthetic
auucuuuaaagcaggacaa

SEQ ID NO: 179829 - RNA, 20 nt, Artificial Sequence
  Synthetic
aauucuuuaaagcaggacaa

SEQ ID NO: 179830 - RNA, 21 nt, Artificial Sequence
  Synthetic
aaauucuuuaaagcaggacaa

SEQ ID NO: 179831 - RNA, 22 nt, Artificial Sequence
  Synthetic
uaaauucuuuaaagcaggacaa

SEQ ID NO: 179832 - RNA, 23 nt, Artificial Sequence
  Synthetic
auaaauucuuuaaagcaggacaa

SEQ ID NO: 179833 - RNA, 24 nt, Artificial Sequence
  Synthetic
aauaaauucuuuaaagcaggacaa

SEQ ID NO: 179834 - RNA, 18 nt, Artificial Sequence
  Synthetic
cuucacauuucaggacaa

SEQ ID NO: 179835 - RNA, 19 nt, Artificial Sequence
  Synthetic
ucuucacauuucaggacaa

SEQ ID NO: 179836 - RNA, 20 nt, Artificial Sequence
  Synthetic
uucuucacauuucaggacaa

SEQ ID NO: 179837 - RNA, 21 nt, Artificial Sequence
  Synthetic
uuucuucacauuucaggacaa

SEQ ID NO: 179838 - RNA, 22 nt, Artificial Sequence
  Synthetic
auuucuucacauuucaggacaa

SEQ ID NO: 179839 - RNA, 23 nt, Artificial Sequence
  Synthetic
cauuucuucacauuucaggacaa

SEQ ID NO: 179840 - RNA, 24 nt, Artificial Sequence
  Synthetic
acauuucuucacauuucaggacaa

SEQ ID NO: 179841 - RNA, 18 nt, Artificial Sequence
  Synthetic
gaauauuaaagaggacaa

SEQ ID NO: 179842 - RNA, 19 nt, Artificial Sequence
  Synthetic
ggaauauuaaagaggacaa

SEQ ID NO: 179843 - RNA, 20 nt, Artificial Sequence
  Synthetic
aggaauauuaaagaggacaa

SEQ ID NO: 179844 - RNA, 21 nt, Artificial Sequence
  Synthetic
aaggaauauuaaagaggacaa

SEQ ID NO: 179845 - RNA, 22 nt, Artificial Sequence
  Synthetic
aaaggaauauuaaagaggacaa

SEQ ID NO: 179846 - RNA, 23 nt, Artificial Sequence
  Synthetic
gaaaggaauauuaaagaggacaa

SEQ ID NO: 179847 - RNA, 24 nt, Artificial Sequence
  Synthetic
agaaaggaauauuaaagaggacaa

SEQ ID NO: 179848 - RNA, 18 nt, Artificial Sequence
  Synthetic
cuuccaaagguaggacaa

SEQ ID NO: 179849 - RNA, 19 nt, Artificial Sequence
  Synthetic
ccuuccaaagguaggacaa

SEQ ID NO: 179850 - RNA, 20 nt, Artificial Sequence
  Synthetic
accuuccaaagguaggacaa

SEQ ID NO: 179851 - RNA, 21 nt, Artificial Sequence
  Synthetic
uaccuuccaaagguaggacaa

SEQ ID NO: 179852 - RNA, 22 nt, Artificial Sequence
  Synthetic
cuaccuuccaaagguaggacaa

SEQ ID NO: 179853 - RNA, 23 nt, Artificial Sequence
  Synthetic
ucuaccuuccaaagguaggacaa

SEQ ID NO: 179854 - RNA, 24 nt, Artificial Sequence
  Synthetic
uucuaccuuccaaagguaggacaa

SEQ ID NO: 179855 - RNA, 18 nt, Artificial Sequence
  Synthetic
ucuagauaugagggacaa

SEQ ID NO: 179856 - RNA, 19 nt, Artificial Sequence
  Synthetic
aucuagauaugagggacaa

SEQ ID NO: 179857 - RNA, 20 nt, Artificial Sequence
  Synthetic
caucuagauaugagggacaa

SEQ ID NO: 179858 - RNA, 21 nt, Artificial Sequence
  Synthetic
acaucuagauaugagggacaa

SEQ ID NO: 179859 - RNA, 22 nt, Artificial Sequence
  Synthetic
gacaucuagauaugagggacaa

SEQ ID NO: 179860 - RNA, 23 nt, Artificial Sequence
  Synthetic
ugacaucuagauaugagggacaa

SEQ ID NO: 179861 - RNA, 24 nt, Artificial Sequence
  Synthetic
uugacaucuagauaugagggacaa

SEQ ID NO: 179862 - RNA, 18 nt, Artificial Sequence
  Synthetic
gcccauguugagggacaa

SEQ ID NO: 179863 - RNA, 19 nt, Artificial Sequence
  Synthetic
ggcccauguugagggacaa

SEQ ID NO: 179864 - RNA, 20 nt, Artificial Sequence
  Synthetic
aggcccauguugagggacaa

SEQ ID NO: 179865 - RNA, 21 nt, Artificial Sequence
  Synthetic
caggcccauguugagggacaa

SEQ ID NO: 179866 - RNA, 22 nt, Artificial Sequence
  Synthetic
gcaggcccauguugagggacaa

SEQ ID NO: 179867 - RNA, 23 nt, Artificial Sequence
  Synthetic
ggcaggcccauguugagggacaa

SEQ ID NO: 179868 - RNA, 24 nt, Artificial Sequence
  Synthetic
uggcaggcccauguugagggacaa

SEQ ID NO: 179869 - RNA, 18 nt, Artificial Sequence
  Synthetic
gcaaggaguccgggacaa

SEQ ID NO: 179870 - RNA, 19 nt, Artificial Sequence
  Synthetic
ugcaaggaguccgggacaa

SEQ ID NO: 179871 - RNA, 20 nt, Artificial Sequence
  Synthetic
uugcaaggaguccgggacaa

SEQ ID NO: 179872 - RNA, 21 nt, Artificial Sequence
  Synthetic
auugcaaggaguccgggacaa

SEQ ID NO: 179873 - RNA, 22 nt, Artificial Sequence
  Synthetic
gauugcaaggaguccgggacaa

SEQ ID NO: 179874 - RNA, 23 nt, Artificial Sequence
  Synthetic
ugauugcaaggaguccgggacaa

SEQ ID NO: 179875 - RNA, 24 nt, Artificial Sequence
  Synthetic
gugauugcaaggaguccgggacaa

SEQ ID NO: 179876 - RNA, 18 nt, Artificial Sequence
  Synthetic
caauaauaaaggggacaa

SEQ ID NO: 179877 - RNA, 19 nt, Artificial Sequence
  Synthetic
acaauaauaaaggggacaa

SEQ ID NO: 179878 - RNA, 20 nt, Artificial Sequence
  Synthetic
aacaauaauaaaggggacaa

SEQ ID NO: 179879 - RNA, 21 nt, Artificial Sequence
  Synthetic
caacaauaauaaaggggacaa

SEQ ID NO: 179880 - RNA, 22 nt, Artificial Sequence
  Synthetic
acaacaauaauaaaggggacaa

SEQ ID NO: 179881 - RNA, 23 nt, Artificial Sequence
  Synthetic
aacaacaauaauaaaggggacaa

SEQ ID NO: 179882 - RNA, 24 nt, Artificial Sequence
  Synthetic
uaacaacaauaauaaaggggacaa

SEQ ID NO: 179883 - RNA, 18 nt, Artificial Sequence
  Synthetic
gcaaaucugaauggacaa

SEQ ID NO: 179884 - RNA, 19 nt, Artificial Sequence
  Synthetic
agcaaaucugaauggacaa

SEQ ID NO: 179885 - RNA, 20 nt, Artificial Sequence
  Synthetic
aagcaaaucugaauggacaa

SEQ ID NO: 179886 - RNA, 21 nt, Artificial Sequence
  Synthetic
gaagcaaaucugaauggacaa

SEQ ID NO: 179887 - RNA, 22 nt, Artificial Sequence
  Synthetic
agaagcaaaucugaauggacaa

SEQ ID NO: 179888 - RNA, 23 nt, Artificial Sequence
  Synthetic
gagaagcaaaucugaauggacaa

SEQ ID NO: 179889 - RNA, 24 nt, Artificial Sequence
  Synthetic
agagaagcaaaucugaauggacaa

SEQ ID NO: 179890 - RNA, 18 nt, Artificial Sequence
  Synthetic
uccaguaugacuggacaa

SEQ ID NO: 179891 - RNA, 19 nt, Artificial Sequence
  Synthetic
guccaguaugacuggacaa

SEQ ID NO: 179892 - RNA, 20 nt, Artificial Sequence
  Synthetic
uguccaguaugacuggacaa

SEQ ID NO: 179893 - RNA, 21 nt, Artificial Sequence
  Synthetic
auguccaguaugacuggacaa

SEQ ID NO: 179894 - RNA, 22 nt, Artificial Sequence
  Synthetic
gauguccaguaugacuggacaa

SEQ ID NO: 179895 - RNA, 23 nt, Artificial Sequence
  Synthetic
agauguccaguaugacuggacaa

SEQ ID NO: 179896 - RNA, 24 nt, Artificial Sequence
  Synthetic
uagauguccaguaugacuggacaa

SEQ ID NO: 179897 - RNA, 18 nt, Artificial Sequence
  Synthetic
cuccaauagaaaugacaa

SEQ ID NO: 179898 - RNA, 19 nt, Artificial Sequence
  Synthetic
ccuccaauagaaaugacaa

SEQ ID NO: 179899 - RNA, 20 nt, Artificial Sequence
  Synthetic
accuccaauagaaaugacaa

SEQ ID NO: 179900 - RNA, 21 nt, Artificial Sequence
  Synthetic
gaccuccaauagaaaugacaa

SEQ ID NO: 179901 - RNA, 22 nt, Artificial Sequence
  Synthetic
ggaccuccaauagaaaugacaa

SEQ ID NO: 179902 - RNA, 23 nt, Artificial Sequence
  Synthetic
uggaccuccaauagaaaugacaa

SEQ ID NO: 179903 - RNA, 24 nt, Artificial Sequence
  Synthetic
auggaccuccaauagaaaugacaa

SEQ ID NO: 179904 - RNA, 18 nt, Artificial Sequence
  Synthetic
aaaaugacgccaugacaa

SEQ ID NO: 179905 - RNA, 19 nt, Artificial Sequence
  Synthetic
aaaaaugacgccaugacaa

SEQ ID NO: 179906 - RNA, 20 nt, Artificial Sequence
  Synthetic
gaaaaaugacgccaugacaa

SEQ ID NO: 179907 - RNA, 21 nt, Artificial Sequence
  Synthetic
ugaaaaaugacgccaugacaa

SEQ ID NO: 179908 - RNA, 22 nt, Artificial Sequence
  Synthetic
cugaaaaaugacgccaugacaa

SEQ ID NO: 179909 - RNA, 23 nt, Artificial Sequence
  Synthetic
gcugaaaaaugacgccaugacaa

SEQ ID NO: 179910 - RNA, 24 nt, Artificial Sequence
  Synthetic
ggcugaaaaaugacgccaugacaa

SEQ ID NO: 179911 - RNA, 18 nt, Artificial Sequence
  Synthetic
gucuuaggaagaugacaa

SEQ ID NO: 179912 - RNA, 19 nt, Artificial Sequence
  Synthetic
ggucuuaggaagaugacaa

SEQ ID NO: 179913 - RNA, 20 nt, Artificial Sequence
  Synthetic
gggucuuaggaagaugacaa

SEQ ID NO: 179914 - RNA, 21 nt, Artificial Sequence
  Synthetic
agggucuuaggaagaugacaa

SEQ ID NO: 179915 - RNA, 22 nt, Artificial Sequence
  Synthetic
uagggucuuaggaagaugacaa

SEQ ID NO: 179916 - RNA, 23 nt, Artificial Sequence
  Synthetic
cuagggucuuaggaagaugacaa

SEQ ID NO: 179917 - RNA, 24 nt, Artificial Sequence
  Synthetic
ucuagggucuuaggaagaugacaa

SEQ ID NO: 179918 - RNA, 18 nt, Artificial Sequence
  Synthetic
gcuccuuagggaugacaa

SEQ ID NO: 179919 - RNA, 19 nt, Artificial Sequence
  Synthetic
ugcuccuuagggaugacaa

SEQ ID NO: 179920 - RNA, 20 nt, Artificial Sequence
  Synthetic
augcuccuuagggaugacaa

SEQ ID NO: 179921 - RNA, 21 nt, Artificial Sequence
  Synthetic
caugcuccuuagggaugacaa

SEQ ID NO: 179922 - RNA, 22 nt, Artificial Sequence
  Synthetic
ccaugcuccuuagggaugacaa

SEQ ID NO: 179923 - RNA, 23 nt, Artificial Sequence
  Synthetic
cccaugcuccuuagggaugacaa

SEQ ID NO: 179924 - RNA, 24 nt, Artificial Sequence
  Synthetic
ucccaugcuccuuagggaugacaa

SEQ ID NO: 179925 - RNA, 18 nt, Artificial Sequence
  Synthetic
auacaauaagccugacaa

SEQ ID NO: 179926 - RNA, 19 nt, Artificial Sequence
  Synthetic
gauacaauaagccugacaa

SEQ ID NO: 179927 - RNA, 20 nt, Artificial Sequence
  Synthetic
agauacaauaagccugacaa

SEQ ID NO: 179928 - RNA, 21 nt, Artificial Sequence
  Synthetic
uagauacaauaagccugacaa

SEQ ID NO: 179929 - RNA, 22 nt, Artificial Sequence
  Synthetic
guagauacaauaagccugacaa

SEQ ID NO: 179930 - RNA, 23 nt, Artificial Sequence
  Synthetic
gguagauacaauaagccugacaa

SEQ ID NO: 179931 - RNA, 24 nt, Artificial Sequence
  Synthetic
ugguagauacaauaagccugacaa

SEQ ID NO: 179932 - RNA, 18 nt, Artificial Sequence
  Synthetic
ugcacuucagccugacaa

SEQ ID NO: 179933 - RNA, 19 nt, Artificial Sequence
  Synthetic
cugcacuucagccugacaa

SEQ ID NO: 179934 - RNA, 20 nt, Artificial Sequence
  Synthetic
acugcacuucagccugacaa

SEQ ID NO: 179935 - RNA, 21 nt, Artificial Sequence
  Synthetic
cacugcacuucagccugacaa

SEQ ID NO: 179936 - RNA, 22 nt, Artificial Sequence
  Synthetic
ccacugcacuucagccugacaa

SEQ ID NO: 179937 - RNA, 23 nt, Artificial Sequence
  Synthetic
gccacugcacuucagccugacaa

SEQ ID NO: 179938 - RNA, 24 nt, Artificial Sequence
  Synthetic
cgccacugcacuucagccugacaa

SEQ ID NO: 179939 - RNA, 18 nt, Artificial Sequence
  Synthetic
uagaaaggggagugacaa

SEQ ID NO: 179940 - RNA, 19 nt, Artificial Sequence
  Synthetic
guagaaaggggagugacaa

SEQ ID NO: 179941 - RNA, 20 nt, Artificial Sequence
  Synthetic
uguagaaaggggagugacaa

SEQ ID NO: 179942 - RNA, 21 nt, Artificial Sequence
  Synthetic
cuguagaaaggggagugacaa

SEQ ID NO: 179943 - RNA, 22 nt, Artificial Sequence
  Synthetic
acuguagaaaggggagugacaa

SEQ ID NO: 179944 - RNA, 23 nt, Artificial Sequence
  Synthetic
cacuguagaaaggggagugacaa

SEQ ID NO: 179945 - RNA, 24 nt, Artificial Sequence
  Synthetic
acacuguagaaaggggagugacaa

SEQ ID NO: 179946 - RNA, 18 nt, Artificial Sequence
  Synthetic
gagcacuaguggugacaa

SEQ ID NO: 179947 - RNA, 19 nt, Artificial Sequence
  Synthetic
ugagcacuaguggugacaa

SEQ ID NO: 179948 - RNA, 20 nt, Artificial Sequence
  Synthetic
augagcacuaguggugacaa

SEQ ID NO: 179949 - RNA, 21 nt, Artificial Sequence
  Synthetic
gaugagcacuaguggugacaa

SEQ ID NO: 179950 - RNA, 22 nt, Artificial Sequence
  Synthetic
agaugagcacuaguggugacaa

SEQ ID NO: 179951 - RNA, 23 nt, Artificial Sequence
  Synthetic
cagaugagcacuaguggugacaa

SEQ ID NO: 179952 - RNA, 24 nt, Artificial Sequence
  Synthetic
gcagaugagcacuaguggugacaa

SEQ ID NO: 179953 - RNA, 18 nt, Artificial Sequence
  Synthetic
aaaagccagaauugacaa

SEQ ID NO: 179954 - RNA, 19 nt, Artificial Sequence
  Synthetic
caaaagccagaauugacaa

SEQ ID NO: 179955 - RNA, 20 nt, Artificial Sequence
  Synthetic
acaaaagccagaauugacaa

SEQ ID NO: 179956 - RNA, 21 nt, Artificial Sequence
  Synthetic
aacaaaagccagaauugacaa

SEQ ID NO: 179957 - RNA, 22 nt, Artificial Sequence
  Synthetic
caacaaaagccagaauugacaa

SEQ ID NO: 179958 - RNA, 23 nt, Artificial Sequence
  Synthetic
gcaacaaaagccagaauugacaa

SEQ ID NO: 179959 - RNA, 24 nt, Artificial Sequence
  Synthetic
ggcaacaaaagccagaauugacaa

SEQ ID NO: 179960 - RNA, 18 nt, Artificial Sequence
  Synthetic
caguuuaugaauugacaa

SEQ ID NO: 179961 - RNA, 19 nt, Artificial Sequence
  Synthetic
ccaguuuaugaauugacaa

SEQ ID NO: 179962 - RNA, 20 nt, Artificial Sequence
  Synthetic
accaguuuaugaauugacaa

SEQ ID NO: 179963 - RNA, 21 nt, Artificial Sequence
  Synthetic
gaccaguuuaugaauugacaa

SEQ ID NO: 179964 - RNA, 22 nt, Artificial Sequence
  Synthetic
agaccaguuuaugaauugacaa

SEQ ID NO: 179965 - RNA, 23 nt, Artificial Sequence
  Synthetic
aagaccaguuuaugaauugacaa

SEQ ID NO: 179966 - RNA, 24 nt, Artificial Sequence
  Synthetic
aaagaccaguuuaugaauugacaa

SEQ ID NO: 179967 - RNA, 18 nt, Artificial Sequence
  Synthetic
uaagagguggauugacaa

SEQ ID NO: 179968 - RNA, 19 nt, Artificial Sequence
  Synthetic
uuaagagguggauugacaa

SEQ ID NO: 179969 - RNA, 20 nt, Artificial Sequence
  Synthetic
auuaagagguggauugacaa

SEQ ID NO: 179970 - RNA, 21 nt, Artificial Sequence
  Synthetic
cauuaagagguggauugacaa

SEQ ID NO: 179971 - RNA, 22 nt, Artificial Sequence
  Synthetic
acauuaagagguggauugacaa

SEQ ID NO: 179972 - RNA, 23 nt, Artificial Sequence
  Synthetic
aacauuaagagguggauugacaa

SEQ ID NO: 179973 - RNA, 24 nt, Artificial Sequence
  Synthetic
uaacauuaagagguggauugacaa

SEQ ID NO: 179974 - RNA, 18 nt, Artificial Sequence
  Synthetic
acuggguucuauugacaa

SEQ ID NO: 179975 - RNA, 19 nt, Artificial Sequence
  Synthetic
aacuggguucuauugacaa

SEQ ID NO: 179976 - RNA, 20 nt, Artificial Sequence
  Synthetic
aaacuggguucuauugacaa

SEQ ID NO: 179977 - RNA, 21 nt, Artificial Sequence
  Synthetic
gaaacuggguucuauugacaa

SEQ ID NO: 179978 - RNA, 22 nt, Artificial Sequence
  Synthetic
agaaacuggguucuauugacaa

SEQ ID NO: 179979 - RNA, 23 nt, Artificial Sequence
  Synthetic
uagaaacuggguucuauugacaa

SEQ ID NO: 179980 - RNA, 24 nt, Artificial Sequence
  Synthetic
auagaaacuggguucuauugacaa

SEQ ID NO: 179981 - RNA, 18 nt, Artificial Sequence
  Synthetic
cuucagagguauugacaa

SEQ ID NO: 179982 - RNA, 19 nt, Artificial Sequence
  Synthetic
acuucagagguauugacaa

SEQ ID NO: 179983 - RNA, 20 nt, Artificial Sequence
  Synthetic
aacuucagagguauugacaa

SEQ ID NO: 179984 - RNA, 21 nt, Artificial Sequence
  Synthetic
aaacuucagagguauugacaa

SEQ ID NO: 179985 - RNA, 22 nt, Artificial Sequence
  Synthetic
gaaacuucagagguauugacaa

SEQ ID NO: 179986 - RNA, 23 nt, Artificial Sequence
  Synthetic
ugaaacuucagagguauugacaa

SEQ ID NO: 179987 - RNA, 24 nt, Artificial Sequence
  Synthetic
uugaaacuucagagguauugacaa

SEQ ID NO: 179988 - RNA, 18 nt, Artificial Sequence
  Synthetic
aauauaagugcuugacaa

SEQ ID NO: 179989 - RNA, 19 nt, Artificial Sequence
  Synthetic
aaauauaagugcuugacaa

SEQ ID NO: 179990 - RNA, 20 nt, Artificial Sequence
  Synthetic
aaaauauaagugcuugacaa

SEQ ID NO: 179991 - RNA, 21 nt, Artificial Sequence
  Synthetic
caaaauauaagugcuugacaa

SEQ ID NO: 179992 - RNA, 22 nt, Artificial Sequence
  Synthetic
acaaaauauaagugcuugacaa

SEQ ID NO: 179993 - RNA, 23 nt, Artificial Sequence
  Synthetic
aacaaaauauaagugcuugacaa

SEQ ID NO: 179994 - RNA, 24 nt, Artificial Sequence
  Synthetic
aaacaaaauauaagugcuugacaa

SEQ ID NO: 179995 - RNA, 18 nt, Artificial Sequence
  Synthetic
cacuccuaauguugacaa

SEQ ID NO: 179996 - RNA, 19 nt, Artificial Sequence
  Synthetic
gcacuccuaauguugacaa

SEQ ID NO: 179997 - RNA, 20 nt, Artificial Sequence
  Synthetic
ugcacuccuaauguugacaa

SEQ ID NO: 179998 - RNA, 21 nt, Artificial Sequence
  Synthetic
cugcacuccuaauguugacaa

SEQ ID NO: 179999 - RNA, 22 nt, Artificial Sequence
  Synthetic
acugcacuccuaauguugacaa

SEQ ID NO: 180000 - RNA, 23 nt, Artificial Sequence
  Synthetic
aacugcacuccuaauguugacaa

SEQ ID NO: 180001 - RNA, 24 nt, Artificial Sequence
  Synthetic
uaacugcacuccuaauguugacaa

SEQ ID NO: 180002 - RNA, 18 nt, Artificial Sequence
  Synthetic
cuuggaugcuguugacaa

SEQ ID NO: 180003 - RNA, 19 nt, Artificial Sequence
  Synthetic
gcuuggaugcuguugacaa

SEQ ID NO: 180004 - RNA, 20 nt, Artificial Sequence
  Synthetic
ugcuuggaugcuguugacaa

SEQ ID NO: 180005 - RNA, 21 nt, Artificial Sequence
  Synthetic
uugcuuggaugcuguugacaa

SEQ ID NO: 180006 - RNA, 22 nt, Artificial Sequence
  Synthetic
auugcuuggaugcuguugacaa

SEQ ID NO: 180007 - RNA, 23 nt, Artificial Sequence
  Synthetic
uauugcuuggaugcuguugacaa

SEQ ID NO: 180008 - RNA, 24 nt, Artificial Sequence
  Synthetic
uuauugcuuggaugcuguugacaa

SEQ ID NO: 180009 - RNA, 18 nt, Artificial Sequence
  Synthetic
gcaauuucuauuugacaa

SEQ ID NO: 180010 - RNA, 19 nt, Artificial Sequence
  Synthetic
ugcaauuucuauuugacaa

SEQ ID NO: 180011 - RNA, 20 nt, Artificial Sequence
  Synthetic
gugcaauuucuauuugacaa

SEQ ID NO: 180012 - RNA, 21 nt, Artificial Sequence
  Synthetic
ugugcaauuucuauuugacaa

SEQ ID NO: 180013 - RNA, 22 nt, Artificial Sequence
  Synthetic
augugcaauuucuauuugacaa

SEQ ID NO: 180014 - RNA, 23 nt, Artificial Sequence
  Synthetic
gaugugcaauuucuauuugacaa

SEQ ID NO: 180015 - RNA, 24 nt, Artificial Sequence
  Synthetic
ugaugugcaauuucuauuugacaa

SEQ ID NO: 180016 - RNA, 18 nt, Artificial Sequence
  Synthetic
ucaggauaggaaauacaa

SEQ ID NO: 180017 - RNA, 19 nt, Artificial Sequence
  Synthetic
gucaggauaggaaauacaa

SEQ ID NO: 180018 - RNA, 20 nt, Artificial Sequence
  Synthetic
agucaggauaggaaauacaa

SEQ ID NO: 180019 - RNA, 21 nt, Artificial Sequence
  Synthetic
uagucaggauaggaaauacaa

SEQ ID NO: 180020 - RNA, 22 nt, Artificial Sequence
  Synthetic
uuagucaggauaggaaauacaa

SEQ ID NO: 180021 - RNA, 23 nt, Artificial Sequence
  Synthetic
guuagucaggauaggaaauacaa

SEQ ID NO: 180022 - RNA, 24 nt, Artificial Sequence
  Synthetic
uguuagucaggauaggaaauacaa

SEQ ID NO: 180023 - RNA, 18 nt, Artificial Sequence
  Synthetic
agcuacauaacaauacaa

SEQ ID NO: 180024 - RNA, 19 nt, Artificial Sequence
  Synthetic
uagcuacauaacaauacaa

SEQ ID NO: 180025 - RNA, 20 nt, Artificial Sequence
  Synthetic
auagcuacauaacaauacaa

SEQ ID NO: 180026 - RNA, 21 nt, Artificial Sequence
  Synthetic
uauagcuacauaacaauacaa

SEQ ID NO: 180027 - RNA, 22 nt, Artificial Sequence
  Synthetic
uuauagcuacauaacaauacaa

SEQ ID NO: 180028 - RNA, 23 nt, Artificial Sequence
  Synthetic
uuuauagcuacauaacaauacaa

SEQ ID NO: 180029 - RNA, 24 nt, Artificial Sequence
  Synthetic
uuuuauagcuacauaacaauacaa

SEQ ID NO: 180030 - RNA, 18 nt, Artificial Sequence
  Synthetic
uuguuauaaugaauacaa

SEQ ID NO: 180031 - RNA, 19 nt, Artificial Sequence
  Synthetic
guuguuauaaugaauacaa

SEQ ID NO: 180032 - RNA, 20 nt, Artificial Sequence
  Synthetic
uguuguuauaaugaauacaa

SEQ ID NO: 180033 - RNA, 21 nt, Artificial Sequence
  Synthetic
auguuguuauaaugaauacaa

SEQ ID NO: 180034 - RNA, 22 nt, Artificial Sequence
  Synthetic
gauguuguuauaaugaauacaa

SEQ ID NO: 180035 - RNA, 23 nt, Artificial Sequence
  Synthetic
ugauguuguuauaaugaauacaa

SEQ ID NO: 180036 - RNA, 24 nt, Artificial Sequence
  Synthetic
uugauguuguuauaaugaauacaa

SEQ ID NO: 180037 - RNA, 18 nt, Artificial Sequence
  Synthetic
uuuaaacugcacauacaa

SEQ ID NO: 180038 - RNA, 19 nt, Artificial Sequence
  Synthetic
uuuuaaacugcacauacaa

SEQ ID NO: 180039 - RNA, 20 nt, Artificial Sequence
  Synthetic
uuuuuaaacugcacauacaa

SEQ ID NO: 180040 - RNA, 21 nt, Artificial Sequence
  Synthetic
uuuuuuaaacugcacauacaa

SEQ ID NO: 180041 - RNA, 22 nt, Artificial Sequence
  Synthetic
uuuuuuuaaacugcacauacaa

SEQ ID NO: 180042 - RNA, 23 nt, Artificial Sequence
  Synthetic
cuuuuuuuaaacugcacauacaa

SEQ ID NO: 180043 - RNA, 24 nt, Artificial Sequence
  Synthetic
acuuuuuuuaaacugcacauacaa

SEQ ID NO: 180044 - RNA, 18 nt, Artificial Sequence
  Synthetic
cucucagcauucauacaa

SEQ ID NO: 180045 - RNA, 19 nt, Artificial Sequence
  Synthetic
ucucucagcauucauacaa

SEQ ID NO: 180046 - RNA, 20 nt, Artificial Sequence
  Synthetic
cucucucagcauucauacaa

SEQ ID NO: 180047 - RNA, 21 nt, Artificial Sequence
  Synthetic
ccucucucagcauucauacaa

SEQ ID NO: 180048 - RNA, 22 nt, Artificial Sequence
  Synthetic
accucucucagcauucauacaa

SEQ ID NO: 180049 - RNA, 23 nt, Artificial Sequence
  Synthetic
caccucucucagcauucauacaa

SEQ ID NO: 180050 - RNA, 24 nt, Artificial Sequence
  Synthetic
ucaccucucucagcauucauacaa

SEQ ID NO: 180051 - RNA, 18 nt, Artificial Sequence
  Synthetic
acuguuuugaagauacaa

SEQ ID NO: 180052 - RNA, 19 nt, Artificial Sequence
  Synthetic
cacuguuuugaagauacaa

SEQ ID NO: 180053 - RNA, 20 nt, Artificial Sequence
  Synthetic
ccacuguuuugaagauacaa

SEQ ID NO: 180054 - RNA, 21 nt, Artificial Sequence
  Synthetic
cccacuguuuugaagauacaa

SEQ ID NO: 180055 - RNA, 22 nt, Artificial Sequence
  Synthetic
ucccacuguuuugaagauacaa

SEQ ID NO: 180056 - RNA, 23 nt, Artificial Sequence
  Synthetic
uucccacuguuuugaagauacaa

SEQ ID NO: 180057 - RNA, 24 nt, Artificial Sequence
  Synthetic
cuucccacuguuuugaagauacaa

SEQ ID NO: 180058 - RNA, 18 nt, Artificial Sequence
  Synthetic
acuggauuggagauacaa

SEQ ID NO: 180059 - RNA, 19 nt, Artificial Sequence
  Synthetic
uacuggauuggagauacaa

SEQ ID NO: 180060 - RNA, 20 nt, Artificial Sequence
  Synthetic
uuacuggauuggagauacaa

SEQ ID NO: 180061 - RNA, 21 nt, Artificial Sequence
  Synthetic
auuacuggauuggagauacaa

SEQ ID NO: 180062 - RNA, 22 nt, Artificial Sequence
  Synthetic
uauuacuggauuggagauacaa

SEQ ID NO: 180063 - RNA, 23 nt, Artificial Sequence
  Synthetic
uuauuacuggauuggagauacaa

SEQ ID NO: 180064 - RNA, 24 nt, Artificial Sequence
  Synthetic
auuauuacuggauuggagauacaa

SEQ ID NO: 180065 - RNA, 18 nt, Artificial Sequence
  Synthetic
aacaaagaguagauacaa

SEQ ID NO: 180066 - RNA, 19 nt, Artificial Sequence
  Synthetic
aaacaaagaguagauacaa

SEQ ID NO: 180067 - RNA, 20 nt, Artificial Sequence
  Synthetic
caaacaaagaguagauacaa

SEQ ID NO: 180068 - RNA, 21 nt, Artificial Sequence
  Synthetic
ucaaacaaagaguagauacaa

SEQ ID NO: 180069 - RNA, 22 nt, Artificial Sequence
  Synthetic
aucaaacaaagaguagauacaa

SEQ ID NO: 180070 - RNA, 23 nt, Artificial Sequence
  Synthetic
caucaaacaaagaguagauacaa

SEQ ID NO: 180071 - RNA, 24 nt, Artificial Sequence
  Synthetic
acaucaaacaaagaguagauacaa

SEQ ID NO: 180072 - RNA, 18 nt, Artificial Sequence
  Synthetic
uaaaaucaaaggauacaa

SEQ ID NO: 180073 - RNA, 19 nt, Artificial Sequence
  Synthetic
uuaaaaucaaaggauacaa

SEQ ID NO: 180074 - RNA, 20 nt, Artificial Sequence
  Synthetic
uuuaaaaucaaaggauacaa

SEQ ID NO: 180075 - RNA, 21 nt, Artificial Sequence
  Synthetic
uuuuaaaaucaaaggauacaa

SEQ ID NO: 180076 - RNA, 22 nt, Artificial Sequence
  Synthetic
uuuuuaaaaucaaaggauacaa

SEQ ID NO: 180077 - RNA, 23 nt, Artificial Sequence
  Synthetic
uuuuuuaaaaucaaaggauacaa

SEQ ID NO: 180078 - RNA, 24 nt, Artificial Sequence
  Synthetic
cuuuuuuaaaaucaaaggauacaa

SEQ ID NO: 180079 - RNA, 18 nt, Artificial Sequence
  Synthetic
gauagaaaguugauacaa

SEQ ID NO: 180080 - RNA, 19 nt, Artificial Sequence
  Synthetic
ggauagaaaguugauacaa

SEQ ID NO: 180081 - RNA, 20 nt, Artificial Sequence
  Synthetic
gggauagaaaguugauacaa

SEQ ID NO: 180082 - RNA, 21 nt, Artificial Sequence
  Synthetic
agggauagaaaguugauacaa

SEQ ID NO: 180083 - RNA, 22 nt, Artificial Sequence
  Synthetic
uagggauagaaaguugauacaa

SEQ ID NO: 180084 - RNA, 23 nt, Artificial Sequence
  Synthetic
auagggauagaaaguugauacaa

SEQ ID NO: 180085 - RNA, 24 nt, Artificial Sequence
  Synthetic
gauagggauagaaaguugauacaa

SEQ ID NO: 180086 - RNA, 18 nt, Artificial Sequence
  Synthetic
uaauggauuaauauacaa

SEQ ID NO: 180087 - RNA, 19 nt, Artificial Sequence
  Synthetic
guaauggauuaauauacaa

SEQ ID NO: 180088 - RNA, 20 nt, Artificial Sequence
  Synthetic
aguaauggauuaauauacaa

SEQ ID NO: 180089 - RNA, 21 nt, Artificial Sequence
  Synthetic
uaguaauggauuaauauacaa

SEQ ID NO: 180090 - RNA, 22 nt, Artificial Sequence
  Synthetic
cuaguaauggauuaauauacaa

SEQ ID NO: 180091 - RNA, 23 nt, Artificial Sequence
  Synthetic
ucuaguaauggauuaauauacaa

SEQ ID NO: 180092 - RNA, 24 nt, Artificial Sequence
  Synthetic
aucuaguaauggauuaauauacaa

SEQ ID NO: 180093 - RNA, 18 nt, Artificial Sequence
  Synthetic
caagcaaaguauauacaa

SEQ ID NO: 180094 - RNA, 19 nt, Artificial Sequence
  Synthetic
ucaagcaaaguauauacaa

SEQ ID NO: 180095 - RNA, 20 nt, Artificial Sequence
  Synthetic
uucaagcaaaguauauacaa

SEQ ID NO: 180096 - RNA, 21 nt, Artificial Sequence
  Synthetic
uuucaagcaaaguauauacaa

SEQ ID NO: 180097 - RNA, 22 nt, Artificial Sequence
  Synthetic
uuuucaagcaaaguauauacaa

SEQ ID NO: 180098 - RNA, 23 nt, Artificial Sequence
  Synthetic
auuuucaagcaaaguauauacaa

SEQ ID NO: 180099 - RNA, 24 nt, Artificial Sequence
  Synthetic
uauuuucaagcaaaguauauacaa

SEQ ID NO: 180100 - RNA, 18 nt, Artificial Sequence
  Synthetic
uuauaaauaccuauacaa

SEQ ID NO: 180101 - RNA, 19 nt, Artificial Sequence
  Synthetic
uuuauaaauaccuauacaa

SEQ ID NO: 180102 - RNA, 20 nt, Artificial Sequence
  Synthetic
uuuuauaaauaccuauacaa

SEQ ID NO: 180103 - RNA, 21 nt, Artificial Sequence
  Synthetic
auuuuauaaauaccuauacaa

SEQ ID NO: 180104 - RNA, 22 nt, Artificial Sequence
  Synthetic
cauuuuauaaauaccuauacaa

SEQ ID NO: 180105 - RNA, 23 nt, Artificial Sequence
  Synthetic
acauuuuauaaauaccuauacaa

SEQ ID NO: 180106 - RNA, 24 nt, Artificial Sequence
  Synthetic
aacauuuuauaaauaccuauacaa

SEQ ID NO: 180107 - RNA, 18 nt, Artificial Sequence
  Synthetic
auuugcgauucuauacaa

SEQ ID NO: 180108 - RNA, 19 nt, Artificial Sequence
  Synthetic
gauuugcgauucuauacaa

SEQ ID NO: 180109 - RNA, 20 nt, Artificial Sequence
  Synthetic
ugauuugcgauucuauacaa

SEQ ID NO: 180110 - RNA, 21 nt, Artificial Sequence
  Synthetic
cugauuugcgauucuauacaa

SEQ ID NO: 180111 - RNA, 22 nt, Artificial Sequence
  Synthetic
ccugauuugcgauucuauacaa

SEQ ID NO: 180112 - RNA, 23 nt, Artificial Sequence
  Synthetic
cccugauuugcgauucuauacaa

SEQ ID NO: 180113 - RNA, 24 nt, Artificial Sequence
  Synthetic
gcccugauuugcgauucuauacaa

SEQ ID NO: 180114 - RNA, 18 nt, Artificial Sequence
  Synthetic
ugaucuguguguauacaa

SEQ ID NO: 180115 - RNA, 19 nt, Artificial Sequence
  Synthetic
uugaucuguguguauacaa

SEQ ID NO: 180116 - RNA, 20 nt, Artificial Sequence
  Synthetic
cuugaucuguguguauacaa

SEQ ID NO: 180117 - RNA, 21 nt, Artificial Sequence
  Synthetic
ucuugaucuguguguauacaa

SEQ ID NO: 180118 - RNA, 22 nt, Artificial Sequence
  Synthetic
uucuugaucuguguguauacaa

SEQ ID NO: 180119 - RNA, 23 nt, Artificial Sequence
  Synthetic
uuucuugaucuguguguauacaa

SEQ ID NO: 180120 - RNA, 24 nt, Artificial Sequence
  Synthetic
uuuucuugaucuguguguauacaa

SEQ ID NO: 180121 - RNA, 18 nt, Artificial Sequence
  Synthetic
caacaauauaaacuacaa

SEQ ID NO: 180122 - RNA, 19 nt, Artificial Sequence
  Synthetic
acaacaauauaaacuacaa

SEQ ID NO: 180123 - RNA, 20 nt, Artificial Sequence
  Synthetic
aacaacaauauaaacuacaa

SEQ ID NO: 180124 - RNA, 21 nt, Artificial Sequence
  Synthetic
uaacaacaauauaaacuacaa

SEQ ID NO: 180125 - RNA, 22 nt, Artificial Sequence
  Synthetic
guaacaacaauauaaacuacaa

SEQ ID NO: 180126 - RNA, 23 nt, Artificial Sequence
  Synthetic
aguaacaacaauauaaacuacaa

SEQ ID NO: 180127 - RNA, 24 nt, Artificial Sequence
  Synthetic
caguaacaacaauauaaacuacaa

SEQ ID NO: 180128 - RNA, 18 nt, Artificial Sequence
  Synthetic
ugcaauauaaaccuacaa

SEQ ID NO: 180129 - RNA, 19 nt, Artificial Sequence
  Synthetic
uugcaauauaaaccuacaa

SEQ ID NO: 180130 - RNA, 20 nt, Artificial Sequence
  Synthetic
auugcaauauaaaccuacaa

SEQ ID NO: 180131 - RNA, 21 nt, Artificial Sequence
  Synthetic
aauugcaauauaaaccuacaa

SEQ ID NO: 180132 - RNA, 22 nt, Artificial Sequence
  Synthetic
aaauugcaauauaaaccuacaa

SEQ ID NO: 180133 - RNA, 23 nt, Artificial Sequence
  Synthetic
uaaauugcaauauaaaccuacaa

SEQ ID NO: 180134 - RNA, 24 nt, Artificial Sequence
  Synthetic
uuaaauugcaauauaaaccuacaa

SEQ ID NO: 180135 - RNA, 18 nt, Artificial Sequence
  Synthetic
ugccuaucccuccuacaa

SEQ ID NO: 180136 - RNA, 19 nt, Artificial Sequence
  Synthetic
cugccuaucccuccuacaa

SEQ ID NO: 180137 - RNA, 20 nt, Artificial Sequence
  Synthetic
ccugccuaucccuccuacaa

SEQ ID NO: 180138 - RNA, 21 nt, Artificial Sequence
  Synthetic
cccugccuaucccuccuacaa

SEQ ID NO: 180139 - RNA, 22 nt, Artificial Sequence
  Synthetic
acccugccuaucccuccuacaa

SEQ ID NO: 180140 - RNA, 23 nt, Artificial Sequence
  Synthetic
uacccugccuaucccuccuacaa

SEQ ID NO: 180141 - RNA, 24 nt, Artificial Sequence
  Synthetic
uuacccugccuaucccuccuacaa

SEQ ID NO: 180142 - RNA, 18 nt, Artificial Sequence
  Synthetic
gaaaauggcaggcuacaa

SEQ ID NO: 180143 - RNA, 19 nt, Artificial Sequence
  Synthetic
agaaaauggcaggcuacaa

SEQ ID NO: 180144 - RNA, 20 nt, Artificial Sequence
  Synthetic
cagaaaauggcaggcuacaa

SEQ ID NO: 180145 - RNA, 21 nt, Artificial Sequence
  Synthetic
ccagaaaauggcaggcuacaa

SEQ ID NO: 180146 - RNA, 22 nt, Artificial Sequence
  Synthetic
gccagaaaauggcaggcuacaa

SEQ ID NO: 180147 - RNA, 23 nt, Artificial Sequence
  Synthetic
ggccagaaaauggcaggcuacaa

SEQ ID NO: 180148 - RNA, 24 nt, Artificial Sequence
  Synthetic
uggccagaaaauggcaggcuacaa

SEQ ID NO: 180149 - RNA, 18 nt, Artificial Sequence
  Synthetic
auaauuuagucucuacaa

SEQ ID NO: 180150 - RNA, 19 nt, Artificial Sequence
  Synthetic
aauaauuuagucucuacaa

SEQ ID NO: 180151 - RNA, 20 nt, Artificial Sequence
  Synthetic
aaauaauuuagucucuacaa

SEQ ID NO: 180152 - RNA, 21 nt, Artificial Sequence
  Synthetic
aaaauaauuuagucucuacaa

SEQ ID NO: 180153 - RNA, 22 nt, Artificial Sequence
  Synthetic
gaaaauaauuuagucucuacaa

SEQ ID NO: 180154 - RNA, 23 nt, Artificial Sequence
  Synthetic
ggaaaauaauuuagucucuacaa

SEQ ID NO: 180155 - RNA, 24 nt, Artificial Sequence
  Synthetic
aggaaaauaauuuagucucuacaa

SEQ ID NO: 180156 - RNA, 18 nt, Artificial Sequence
  Synthetic
aaagauuuaauucuacaa

SEQ ID NO: 180157 - RNA, 19 nt, Artificial Sequence
  Synthetic
caaagauuuaauucuacaa

SEQ ID NO: 180158 - RNA, 20 nt, Artificial Sequence
  Synthetic
ucaaagauuuaauucuacaa

SEQ ID NO: 180159 - RNA, 21 nt, Artificial Sequence
  Synthetic
gucaaagauuuaauucuacaa

SEQ ID NO: 180160 - RNA, 22 nt, Artificial Sequence
  Synthetic
ugucaaagauuuaauucuacaa

SEQ ID NO: 180161 - RNA, 23 nt, Artificial Sequence
  Synthetic
cugucaaagauuuaauucuacaa

SEQ ID NO: 180162 - RNA, 24 nt, Artificial Sequence
  Synthetic
acugucaaagauuuaauucuacaa

SEQ ID NO: 180163 - RNA, 18 nt, Artificial Sequence
  Synthetic
aauuucuguauucuacaa

SEQ ID NO: 180164 - RNA, 19 nt, Artificial Sequence
  Synthetic
uaauuucuguauucuacaa

SEQ ID NO: 180165 - RNA, 20 nt, Artificial Sequence
  Synthetic
auaauuucuguauucuacaa

SEQ ID NO: 180166 - RNA, 21 nt, Artificial Sequence
  Synthetic
uauaauuucuguauucuacaa

SEQ ID NO: 180167 - RNA, 22 nt, Artificial Sequence
  Synthetic
auauaauuucuguauucuacaa

SEQ ID NO: 180168 - RNA, 23 nt, Artificial Sequence
  Synthetic
aauauaauuucuguauucuacaa

SEQ ID NO: 180169 - RNA, 24 nt, Artificial Sequence
  Synthetic
gaauauaauuucuguauucuacaa

SEQ ID NO: 180170 - RNA, 18 nt, Artificial Sequence
  Synthetic
aaacuaucucuucuacaa

SEQ ID NO: 180171 - RNA, 19 nt, Artificial Sequence
  Synthetic
uaaacuaucucuucuacaa

SEQ ID NO: 180172 - RNA, 20 nt, Artificial Sequence
  Synthetic
uuaaacuaucucuucuacaa

SEQ ID NO: 180173 - RNA, 21 nt, Artificial Sequence
  Synthetic
uuuaaacuaucucuucuacaa

SEQ ID NO: 180174 - RNA, 22 nt, Artificial Sequence
  Synthetic
uuuuaaacuaucucuucuacaa

SEQ ID NO: 180175 - RNA, 23 nt, Artificial Sequence
  Synthetic
uuuuuaaacuaucucuucuacaa

SEQ ID NO: 180176 - RNA, 24 nt, Artificial Sequence
  Synthetic
guuuuuaaacuaucucuucuacaa

SEQ ID NO: 180177 - RNA, 18 nt, Artificial Sequence
  Synthetic
uaacucucuguucuacaa

SEQ ID NO: 180178 - RNA, 19 nt, Artificial Sequence
  Synthetic
uuaacucucuguucuacaa

SEQ ID NO: 180179 - RNA, 20 nt, Artificial Sequence
  Synthetic
auuaacucucuguucuacaa

SEQ ID NO: 180180 - RNA, 21 nt, Artificial Sequence
  Synthetic
aauuaacucucuguucuacaa

SEQ ID NO: 180181 - RNA, 22 nt, Artificial Sequence
  Synthetic
gaauuaacucucuguucuacaa

SEQ ID NO: 180182 - RNA, 23 nt, Artificial Sequence
  Synthetic
agaauuaacucucuguucuacaa

SEQ ID NO: 180183 - RNA, 24 nt, Artificial Sequence
  Synthetic
gagaauuaacucucuguucuacaa

SEQ ID NO: 180184 - RNA, 18 nt, Artificial Sequence
  Synthetic
uccacacagaaaguacaa

SEQ ID NO: 180185 - RNA, 19 nt, Artificial Sequence
  Synthetic
uuccacacagaaaguacaa

SEQ ID NO: 180186 - RNA, 20 nt, Artificial Sequence
  Synthetic
uuuccacacagaaaguacaa

SEQ ID NO: 180187 - RNA, 21 nt, Artificial Sequence
  Synthetic
cuuuccacacagaaaguacaa

SEQ ID NO: 180188 - RNA, 22 nt, Artificial Sequence
  Synthetic
acuuuccacacagaaaguacaa

SEQ ID NO: 180189 - RNA, 23 nt, Artificial Sequence
  Synthetic
aacuuuccacacagaaaguacaa

SEQ ID NO: 180190 - RNA, 24 nt, Artificial Sequence
  Synthetic
uaacuuuccacacagaaaguacaa

SEQ ID NO: 180191 - RNA, 18 nt, Artificial Sequence
  Synthetic
agaaaaaugaaaguacaa

SEQ ID NO: 180192 - RNA, 19 nt, Artificial Sequence
  Synthetic
aagaaaaaugaaaguacaa

SEQ ID NO: 180193 - RNA, 20 nt, Artificial Sequence
  Synthetic
aaagaaaaaugaaaguacaa

SEQ ID NO: 180194 - RNA, 21 nt, Artificial Sequence
  Synthetic
caaagaaaaaugaaaguacaa

SEQ ID NO: 180195 - RNA, 22 nt, Artificial Sequence
  Synthetic
gcaaagaaaaaugaaaguacaa

SEQ ID NO: 180196 - RNA, 23 nt, Artificial Sequence
  Synthetic
agcaaagaaaaaugaaaguacaa

SEQ ID NO: 180197 - RNA, 24 nt, Artificial Sequence
  Synthetic
aagcaaagaaaaaugaaaguacaa

SEQ ID NO: 180198 - RNA, 18 nt, Artificial Sequence
  Synthetic
uguacaaaucaaguacaa

SEQ ID NO: 180199 - RNA, 19 nt, Artificial Sequence
  Synthetic
cuguacaaaucaaguacaa

SEQ ID NO: 180200 - RNA, 20 nt, Artificial Sequence
  Synthetic
acuguacaaaucaaguacaa

SEQ ID NO: 180201 - RNA, 21 nt, Artificial Sequence
  Synthetic
uacuguacaaaucaaguacaa

SEQ ID NO: 180202 - RNA, 22 nt, Artificial Sequence
  Synthetic
guacuguacaaaucaaguacaa

SEQ ID NO: 180203 - RNA, 23 nt, Artificial Sequence
  Synthetic
aguacuguacaaaucaaguacaa

SEQ ID NO: 180204 - RNA, 24 nt, Artificial Sequence
  Synthetic
aaguacuguacaaaucaaguacaa

SEQ ID NO: 180205 - RNA, 18 nt, Artificial Sequence
  Synthetic
agucaagaguuaguacaa

SEQ ID NO: 180206 - RNA, 19 nt, Artificial Sequence
  Synthetic
gagucaagaguuaguacaa

SEQ ID NO: 180207 - RNA, 20 nt, Artificial Sequence
  Synthetic
ugagucaagaguuaguacaa

SEQ ID NO: 180208 - RNA, 21 nt, Artificial Sequence
  Synthetic
augagucaagaguuaguacaa

SEQ ID NO: 180209 - RNA, 22 nt, Artificial Sequence
  Synthetic
uaugagucaagaguuaguacaa

SEQ ID NO: 180210 - RNA, 23 nt, Artificial Sequence
  Synthetic
guaugagucaagaguuaguacaa

SEQ ID NO: 180211 - RNA, 24 nt, Artificial Sequence
  Synthetic
aguaugagucaagaguuaguacaa

SEQ ID NO: 180212 - RNA, 18 nt, Artificial Sequence
  Synthetic
uuuagcugugagguacaa

SEQ ID NO: 180213 - RNA, 19 nt, Artificial Sequence
  Synthetic
auuuagcugugagguacaa

SEQ ID NO: 180214 - RNA, 20 nt, Artificial Sequence
  Synthetic
uauuuagcugugagguacaa

SEQ ID NO: 180215 - RNA, 21 nt, Artificial Sequence
  Synthetic
cuauuuagcugugagguacaa

SEQ ID NO: 180216 - RNA, 22 nt, Artificial Sequence
  Synthetic
acuauuuagcugugagguacaa

SEQ ID NO: 180217 - RNA, 23 nt, Artificial Sequence
  Synthetic
aacuauuuagcugugagguacaa

SEQ ID NO: 180218 - RNA, 24 nt, Artificial Sequence
  Synthetic
uaacuauuuagcugugagguacaa

SEQ ID NO: 180219 - RNA, 18 nt, Artificial Sequence
  Synthetic
guuacuuucuagguacaa

SEQ ID NO: 180220 - RNA, 19 nt, Artificial Sequence
  Synthetic
aguuacuuucuagguacaa

SEQ ID NO: 180221 - RNA, 20 nt, Artificial Sequence
  Synthetic
uaguuacuuucuagguacaa

SEQ ID NO: 180222 - RNA, 21 nt, Artificial Sequence
  Synthetic
uuaguuacuuucuagguacaa

SEQ ID NO: 180223 - RNA, 22 nt, Artificial Sequence
  Synthetic
guuaguuacuuucuagguacaa

SEQ ID NO: 180224 - RNA, 23 nt, Artificial Sequence
  Synthetic
aguuaguuacuuucuagguacaa

SEQ ID NO: 180225 - RNA, 24 nt, Artificial Sequence
  Synthetic
aaguuaguuacuuucuagguacaa

SEQ ID NO: 180226 - RNA, 18 nt, Artificial Sequence
  Synthetic
aaaccaccagggguacaa

SEQ ID NO: 180227 - RNA, 19 nt, Artificial Sequence
  Synthetic
aaaaccaccagggguacaa

SEQ ID NO: 180228 - RNA, 20 nt, Artificial Sequence
  Synthetic
uaaaaccaccagggguacaa

SEQ ID NO: 180229 - RNA, 21 nt, Artificial Sequence
  Synthetic
uuaaaaccaccagggguacaa

SEQ ID NO: 180230 - RNA, 22 nt, Artificial Sequence
  Synthetic
cuuaaaaccaccagggguacaa

SEQ ID NO: 180231 - RNA, 23 nt, Artificial Sequence
  Synthetic
ucuuaaaaccaccagggguacaa

SEQ ID NO: 180232 - RNA, 24 nt, Artificial Sequence
  Synthetic
cucuuaaaaccaccagggguacaa

SEQ ID NO: 180233 - RNA, 18 nt, Artificial Sequence
  Synthetic
uauauugaugggguacaa

SEQ ID NO: 180234 - RNA, 19 nt, Artificial Sequence
  Synthetic
auauauugaugggguacaa

SEQ ID NO: 180235 - RNA, 20 nt, Artificial Sequence
  Synthetic
uauauauugaugggguacaa

SEQ ID NO: 180236 - RNA, 21 nt, Artificial Sequence
  Synthetic
guauauauugaugggguacaa

SEQ ID NO: 180237 - RNA, 22 nt, Artificial Sequence
  Synthetic
uguauauauugaugggguacaa

SEQ ID NO: 180238 - RNA, 23 nt, Artificial Sequence
  Synthetic
guguauauauugaugggguacaa

SEQ ID NO: 180239 - RNA, 24 nt, Artificial Sequence
  Synthetic
gguguauauauugaugggguacaa

SEQ ID NO: 180240 - RNA, 18 nt, Artificial Sequence
  Synthetic
uagacuggagcuguacaa

SEQ ID NO: 180241 - RNA, 19 nt, Artificial Sequence
  Synthetic
auagacuggagcuguacaa

SEQ ID NO: 180242 - RNA, 20 nt, Artificial Sequence
  Synthetic
gauagacuggagcuguacaa

SEQ ID NO: 180243 - RNA, 21 nt, Artificial Sequence
  Synthetic
ugauagacuggagcuguacaa

SEQ ID NO: 180244 - RNA, 22 nt, Artificial Sequence
  Synthetic
uugauagacuggagcuguacaa

SEQ ID NO: 180245 - RNA, 23 nt, Artificial Sequence
  Synthetic
guugauagacuggagcuguacaa

SEQ ID NO: 180246 - RNA, 24 nt, Artificial Sequence
  Synthetic
gguugauagacuggagcuguacaa

SEQ ID NO: 180247 - RNA, 18 nt, Artificial Sequence
  Synthetic
uuuacuucaucuguacaa

SEQ ID NO: 180248 - RNA, 19 nt, Artificial Sequence
  Synthetic
auuuacuucaucuguacaa

SEQ ID NO: 180249 - RNA, 20 nt, Artificial Sequence
  Synthetic
cauuuacuucaucuguacaa

SEQ ID NO: 180250 - RNA, 21 nt, Artificial Sequence
  Synthetic
ucauuuacuucaucuguacaa

SEQ ID NO: 180251 - RNA, 22 nt, Artificial Sequence
  Synthetic
cucauuuacuucaucuguacaa

SEQ ID NO: 180252 - RNA, 23 nt, Artificial Sequence
  Synthetic
ucucauuuacuucaucuguacaa

SEQ ID NO: 180253 - RNA, 24 nt, Artificial Sequence
  Synthetic
gucucauuuacuucaucuguacaa

SEQ ID NO: 180254 - RNA, 18 nt, Artificial Sequence
  Synthetic
uuguuccuuucuguacaa

SEQ ID NO: 180255 - RNA, 19 nt, Artificial Sequence
  Synthetic
uuuguuccuuucuguacaa

SEQ ID NO: 180256 - RNA, 20 nt, Artificial Sequence
  Synthetic
guuuguuccuuucuguacaa

SEQ ID NO: 180257 - RNA, 21 nt, Artificial Sequence
  Synthetic
uguuuguuccuuucuguacaa

SEQ ID NO: 180258 - RNA, 22 nt, Artificial Sequence
  Synthetic
uuguuuguuccuuucuguacaa

SEQ ID NO: 180259 - RNA, 23 nt, Artificial Sequence
  Synthetic
cuuguuuguuccuuucuguacaa

SEQ ID NO: 180260 - RNA, 24 nt, Artificial Sequence
  Synthetic
acuuguuuguuccuuucuguacaa

SEQ ID NO: 180261 - RNA, 18 nt, Artificial Sequence
  Synthetic
uugccucuaaguguacaa

SEQ ID NO: 180262 - RNA, 19 nt, Artificial Sequence
  Synthetic
cuugccucuaaguguacaa

SEQ ID NO: 180263 - RNA, 20 nt, Artificial Sequence
  Synthetic
ccuugccucuaaguguacaa

SEQ ID NO: 180264 - RNA, 21 nt, Artificial Sequence
  Synthetic
gccuugccucuaaguguacaa

SEQ ID NO: 180265 - RNA, 22 nt, Artificial Sequence
  Synthetic
ggccuugccucuaaguguacaa

SEQ ID NO: 180266 - RNA, 23 nt, Artificial Sequence
  Synthetic
aggccuugccucuaaguguacaa

SEQ ID NO: 180267 - RNA, 24 nt, Artificial Sequence
  Synthetic
caggccuugccucuaaguguacaa

SEQ ID NO: 180268 - RNA, 18 nt, Artificial Sequence
  Synthetic
augcugcuccuuguacaa

SEQ ID NO: 180269 - RNA, 19 nt, Artificial Sequence
  Synthetic
caugcugcuccuuguacaa

SEQ ID NO: 180270 - RNA, 20 nt, Artificial Sequence
  Synthetic
ucaugcugcuccuuguacaa

SEQ ID NO: 180271 - RNA, 21 nt, Artificial Sequence
  Synthetic
gucaugcugcuccuuguacaa

SEQ ID NO: 180272 - RNA, 22 nt, Artificial Sequence
  Synthetic
ugucaugcugcuccuuguacaa

SEQ ID NO: 180273 - RNA, 23 nt, Artificial Sequence
  Synthetic
augucaugcugcuccuuguacaa

SEQ ID NO: 180274 - RNA, 24 nt, Artificial Sequence
  Synthetic
gaugucaugcugcuccuuguacaa

SEQ ID NO: 180275 - RNA, 18 nt, Artificial Sequence
  Synthetic
auucaaaagcaauuacaa

SEQ ID NO: 180276 - RNA, 19 nt, Artificial Sequence
  Synthetic
aauucaaaagcaauuacaa

SEQ ID NO: 180277 - RNA, 20 nt, Artificial Sequence
  Synthetic
gaauucaaaagcaauuacaa

SEQ ID NO: 180278 - RNA, 21 nt, Artificial Sequence
  Synthetic
ugaauucaaaagcaauuacaa

SEQ ID NO: 180279 - RNA, 22 nt, Artificial Sequence
  Synthetic
cugaauucaaaagcaauuacaa

SEQ ID NO: 180280 - RNA, 23 nt, Artificial Sequence
  Synthetic
ucugaauucaaaagcaauuacaa

SEQ ID NO: 180281 - RNA, 24 nt, Artificial Sequence
  Synthetic
cucugaauucaaaagcaauuacaa

SEQ ID NO: 180282 - RNA, 18 nt, Artificial Sequence
  Synthetic
uaaaugacuuaauuacaa

SEQ ID NO: 180283 - RNA, 19 nt, Artificial Sequence
  Synthetic
auaaaugacuuaauuacaa

SEQ ID NO: 180284 - RNA, 20 nt, Artificial Sequence
  Synthetic
gauaaaugacuuaauuacaa

SEQ ID NO: 180285 - RNA, 21 nt, Artificial Sequence
  Synthetic
ggauaaaugacuuaauuacaa

SEQ ID NO: 180286 - RNA, 22 nt, Artificial Sequence
  Synthetic
aggauaaaugacuuaauuacaa

SEQ ID NO: 180287 - RNA, 23 nt, Artificial Sequence
  Synthetic
aaggauaaaugacuuaauuacaa

SEQ ID NO: 180288 - RNA, 24 nt, Artificial Sequence
  Synthetic
aaaggauaaaugacuuaauuacaa

SEQ ID NO: 180289 - RNA, 18 nt, Artificial Sequence
  Synthetic
uaaauauacccauuacaa

SEQ ID NO: 180290 - RNA, 19 nt, Artificial Sequence
  Synthetic
guaaauauacccauuacaa

SEQ ID NO: 180291 - RNA, 20 nt, Artificial Sequence
  Synthetic
gguaaauauacccauuacaa

SEQ ID NO: 180292 - RNA, 21 nt, Artificial Sequence
  Synthetic
ggguaaauauacccauuacaa

SEQ ID NO: 180293 - RNA, 22 nt, Artificial Sequence
  Synthetic
uggguaaauauacccauuacaa

SEQ ID NO: 180294 - RNA, 23 nt, Artificial Sequence
  Synthetic
cuggguaaauauacccauuacaa

SEQ ID NO: 180295 - RNA, 24 nt, Artificial Sequence
  Synthetic
acuggguaaauauacccauuacaa

SEQ ID NO: 180296 - RNA, 18 nt, Artificial Sequence
  Synthetic
uuggaacaaaacuuacaa

SEQ ID NO: 180297 - RNA, 19 nt, Artificial Sequence
  Synthetic
auuggaacaaaacuuacaa

SEQ ID NO: 180298 - RNA, 20 nt, Artificial Sequence
  Synthetic
cauuggaacaaaacuuacaa

SEQ ID NO: 180299 - RNA, 21 nt, Artificial Sequence
  Synthetic
gcauuggaacaaaacuuacaa

SEQ ID NO: 180300 - RNA, 22 nt, Artificial Sequence
  Synthetic
ggcauuggaacaaaacuuacaa

SEQ ID NO: 180301 - RNA, 23 nt, Artificial Sequence
  Synthetic
aggcauuggaacaaaacuuacaa

SEQ ID NO: 180302 - RNA, 24 nt, Artificial Sequence
  Synthetic
aaggcauuggaacaaaacuuacaa

SEQ ID NO: 180303 - RNA, 18 nt, Artificial Sequence
  Synthetic
ugaaaagaaaacuuacaa

SEQ ID NO: 180304 - RNA, 19 nt, Artificial Sequence
  Synthetic
gugaaaagaaaacuuacaa

SEQ ID NO: 180305 - RNA, 20 nt, Artificial Sequence
  Synthetic
ugugaaaagaaaacuuacaa

SEQ ID NO: 180306 - RNA, 21 nt, Artificial Sequence
  Synthetic
augugaaaagaaaacuuacaa

SEQ ID NO: 180307 - RNA, 22 nt, Artificial Sequence
  Synthetic
uaugugaaaagaaaacuuacaa

SEQ ID NO: 180308 - RNA, 23 nt, Artificial Sequence
  Synthetic
uuaugugaaaagaaaacuuacaa

SEQ ID NO: 180309 - RNA, 24 nt, Artificial Sequence
  Synthetic
guuaugugaaaagaaaacuuacaa

SEQ ID NO: 180310 - RNA, 18 nt, Artificial Sequence
  Synthetic
agaaaauauugcuuacaa

SEQ ID NO: 180311 - RNA, 19 nt, Artificial Sequence
  Synthetic
gagaaaauauugcuuacaa

SEQ ID NO: 180312 - RNA, 20 nt, Artificial Sequence
  Synthetic
agagaaaauauugcuuacaa

SEQ ID NO: 180313 - RNA, 21 nt, Artificial Sequence
  Synthetic
gagagaaaauauugcuuacaa

SEQ ID NO: 180314 - RNA, 22 nt, Artificial Sequence
  Synthetic
agagagaaaauauugcuuacaa

SEQ ID NO: 180315 - RNA, 23 nt, Artificial Sequence
  Synthetic
aagagagaaaauauugcuuacaa

SEQ ID NO: 180316 - RNA, 24 nt, Artificial Sequence
  Synthetic
aaagagagaaaauauugcuuacaa

SEQ ID NO: 180317 - RNA, 18 nt, Artificial Sequence
  Synthetic
agcauuauuuucuuacaa

SEQ ID NO: 180318 - RNA, 19 nt, Artificial Sequence
  Synthetic
aagcauuauuuucuuacaa

SEQ ID NO: 180319 - RNA, 20 nt, Artificial Sequence
  Synthetic
aaagcauuauuuucuuacaa

SEQ ID NO: 180320 - RNA, 21 nt, Artificial Sequence
  Synthetic
gaaagcauuauuuucuuacaa

SEQ ID NO: 180321 - RNA, 22 nt, Artificial Sequence
  Synthetic
ggaaagcauuauuuucuuacaa

SEQ ID NO: 180322 - RNA, 23 nt, Artificial Sequence
  Synthetic
aggaaagcauuauuuucuuacaa

SEQ ID NO: 180323 - RNA, 24 nt, Artificial Sequence
  Synthetic
aaggaaagcauuauuuucuuacaa

SEQ ID NO: 180324 - RNA, 18 nt, Artificial Sequence
  Synthetic
agacugggcaauuuacaa

SEQ ID NO: 180325 - RNA, 19 nt, Artificial Sequence
  Synthetic
gagacugggcaauuuacaa

SEQ ID NO: 180326 - RNA, 20 nt, Artificial Sequence
  Synthetic
cgagacugggcaauuuacaa

SEQ ID NO: 180327 - RNA, 21 nt, Artificial Sequence
  Synthetic
ccgagacugggcaauuuacaa

SEQ ID NO: 180328 - RNA, 22 nt, Artificial Sequence
  Synthetic
cccgagacugggcaauuuacaa

SEQ ID NO: 180329 - RNA, 23 nt, Artificial Sequence
  Synthetic
acccgagacugggcaauuuacaa

SEQ ID NO: 180330 - RNA, 24 nt, Artificial Sequence
  Synthetic
uacccgagacugggcaauuuacaa

SEQ ID NO: 180331 - RNA, 18 nt, Artificial Sequence
  Synthetic
uguuguauguauuuacaa

SEQ ID NO: 180332 - RNA, 19 nt, Artificial Sequence
  Synthetic
cuguuguauguauuuacaa

SEQ ID NO: 180333 - RNA, 20 nt, Artificial Sequence
  Synthetic
gcuguuguauguauuuacaa

SEQ ID NO: 180334 - RNA, 21 nt, Artificial Sequence
  Synthetic
ggcuguuguauguauuuacaa

SEQ ID NO: 180335 - RNA, 22 nt, Artificial Sequence
  Synthetic
uggcuguuguauguauuuacaa

SEQ ID NO: 180336 - RNA, 23 nt, Artificial Sequence
  Synthetic
auggcuguuguauguauuuacaa

SEQ ID NO: 180337 - RNA, 24 nt, Artificial Sequence
  Synthetic
uauggcuguuguauguauuuacaa

SEQ ID NO: 180338 - RNA, 18 nt, Artificial Sequence
  Synthetic
uacaaguuugcuuuacaa

SEQ ID NO: 180339 - RNA, 19 nt, Artificial Sequence
  Synthetic
auacaaguuugcuuuacaa

SEQ ID NO: 180340 - RNA, 20 nt, Artificial Sequence
  Synthetic
aauacaaguuugcuuuacaa

SEQ ID NO: 180341 - RNA, 21 nt, Artificial Sequence
  Synthetic
aaauacaaguuugcuuuacaa

SEQ ID NO: 180342 - RNA, 22 nt, Artificial Sequence
  Synthetic
uaaauacaaguuugcuuuacaa

SEQ ID NO: 180343 - RNA, 23 nt, Artificial Sequence
  Synthetic
auaaauacaaguuugcuuuacaa

SEQ ID NO: 180344 - RNA, 24 nt, Artificial Sequence
  Synthetic
aauaaauacaaguuugcuuuacaa

SEQ ID NO: 180345 - RNA, 18 nt, Artificial Sequence
  Synthetic
uggguuagugguuuacaa

SEQ ID NO: 180346 - RNA, 19 nt, Artificial Sequence
  Synthetic
auggguuagugguuuacaa

SEQ ID NO: 180347 - RNA, 20 nt, Artificial Sequence
  Synthetic
aauggguuagugguuuacaa

SEQ ID NO: 180348 - RNA, 21 nt, Artificial Sequence
  Synthetic
aaauggguuagugguuuacaa

SEQ ID NO: 180349 - RNA, 22 nt, Artificial Sequence
  Synthetic
gaaauggguuagugguuuacaa

SEQ ID NO: 180350 - RNA, 23 nt, Artificial Sequence
  Synthetic
agaaauggguuagugguuuacaa

SEQ ID NO: 180351 - RNA, 24 nt, Artificial Sequence
  Synthetic
gagaaauggguuagugguuuacaa

SEQ ID NO: 180352 - RNA, 18 nt, Artificial Sequence
  Synthetic
uccuaccuuuguuuacaa

SEQ ID NO: 180353 - RNA, 19 nt, Artificial Sequence
  Synthetic
guccuaccuuuguuuacaa

SEQ ID NO: 180354 - RNA, 20 nt, Artificial Sequence
  Synthetic
uguccuaccuuuguuuacaa

SEQ ID NO: 180355 - RNA, 21 nt, Artificial Sequence
  Synthetic
guguccuaccuuuguuuacaa

SEQ ID NO: 180356 - RNA, 22 nt, Artificial Sequence
  Synthetic
aguguccuaccuuuguuuacaa

SEQ ID NO: 180357 - RNA, 23 nt, Artificial Sequence
  Synthetic
gaguguccuaccuuuguuuacaa

SEQ ID NO: 180358 - RNA, 24 nt, Artificial Sequence
  Synthetic
ugaguguccuaccuuuguuuacaa

SEQ ID NO: 180359 - RNA, 18 nt, Artificial Sequence
  Synthetic
aauuguagaauuuuacaa

SEQ ID NO: 180360 - RNA, 19 nt, Artificial Sequence
  Synthetic
caauuguagaauuuuacaa

SEQ ID NO: 180361 - RNA, 20 nt, Artificial Sequence
  Synthetic
ccaauuguagaauuuuacaa

SEQ ID NO: 180362 - RNA, 21 nt, Artificial Sequence
  Synthetic
uccaauuguagaauuuuacaa

SEQ ID NO: 180363 - RNA, 22 nt, Artificial Sequence
  Synthetic
uuccaauuguagaauuuuacaa

SEQ ID NO: 180364 - RNA, 23 nt, Artificial Sequence
  Synthetic
cuuccaauuguagaauuuuacaa

SEQ ID NO: 180365 - RNA, 24 nt, Artificial Sequence
  Synthetic
ccuuccaauuguagaauuuuacaa

SEQ ID NO: 180366 - RNA, 18 nt, Artificial Sequence
  Synthetic
aaugcccacauuuuacaa

SEQ ID NO: 180367 - RNA, 19 nt, Artificial Sequence
  Synthetic
aaaugcccacauuuuacaa

SEQ ID NO: 180368 - RNA, 20 nt, Artificial Sequence
  Synthetic
caaaugcccacauuuuacaa

SEQ ID NO: 180369 - RNA, 21 nt, Artificial Sequence
  Synthetic
gcaaaugcccacauuuuacaa

SEQ ID NO: 180370 - RNA, 22 nt, Artificial Sequence
  Synthetic
agcaaaugcccacauuuuacaa

SEQ ID NO: 180371 - RNA, 23 nt, Artificial Sequence
  Synthetic
uagcaaaugcccacauuuuacaa

SEQ ID NO: 180372 - RNA, 24 nt, Artificial Sequence
  Synthetic
uuagcaaaugcccacauuuuacaa

SEQ ID NO: 180373 - RNA, 18 nt, Artificial Sequence
  Synthetic
ccccucuuucuuuuacaa

SEQ ID NO: 180374 - RNA, 19 nt, Artificial Sequence
  Synthetic
uccccucuuucuuuuacaa

SEQ ID NO: 180375 - RNA, 20 nt, Artificial Sequence
  Synthetic
uuccccucuuucuuuuacaa

SEQ ID NO: 180376 - RNA, 21 nt, Artificial Sequence
  Synthetic
uuuccccucuuucuuuuacaa

SEQ ID NO: 180377 - RNA, 22 nt, Artificial Sequence
  Synthetic
auuuccccucuuucuuuuacaa

SEQ ID NO: 180378 - RNA, 23 nt, Artificial Sequence
  Synthetic
uauuuccccucuuucuuuuacaa

SEQ ID NO: 180379 - RNA, 24 nt, Artificial Sequence
  Synthetic
auauuuccccucuuucuuuuacaa

SEQ ID NO: 180380 - RNA, 18 nt, Artificial Sequence
  Synthetic
cccuuaaaaggaaaccaa

SEQ ID NO: 180381 - RNA, 19 nt, Artificial Sequence
  Synthetic
acccuuaaaaggaaaccaa

SEQ ID NO: 180382 - RNA, 20 nt, Artificial Sequence
  Synthetic
uacccuuaaaaggaaaccaa

SEQ ID NO: 180383 - RNA, 21 nt, Artificial Sequence
  Synthetic
auacccuuaaaaggaaaccaa

SEQ ID NO: 180384 - RNA, 22 nt, Artificial Sequence
  Synthetic
aauacccuuaaaaggaaaccaa

SEQ ID NO: 180385 - RNA, 23 nt, Artificial Sequence
  Synthetic
gaauacccuuaaaaggaaaccaa

SEQ ID NO: 180386 - RNA, 24 nt, Artificial Sequence
  Synthetic
agaauacccuuaaaaggaaaccaa

SEQ ID NO: 180387 - RNA, 18 nt, Artificial Sequence
  Synthetic
caugcaaauggaaaccaa

SEQ ID NO: 180388 - RNA, 19 nt, Artificial Sequence
  Synthetic
ccaugcaaauggaaaccaa

SEQ ID NO: 180389 - RNA, 20 nt, Artificial Sequence
  Synthetic
uccaugcaaauggaaaccaa

SEQ ID NO: 180390 - RNA, 21 nt, Artificial Sequence
  Synthetic
uuccaugcaaauggaaaccaa

SEQ ID NO: 180391 - RNA, 22 nt, Artificial Sequence
  Synthetic
uuuccaugcaaauggaaaccaa

SEQ ID NO: 180392 - RNA, 23 nt, Artificial Sequence
  Synthetic
guuuccaugcaaauggaaaccaa

SEQ ID NO: 180393 - RNA, 24 nt, Artificial Sequence
  Synthetic
gguuuccaugcaaauggaaaccaa

SEQ ID NO: 180394 - RNA, 18 nt, Artificial Sequence
  Synthetic
uuuauaucuauaaaccaa

SEQ ID NO: 180395 - RNA, 19 nt, Artificial Sequence
  Synthetic
uuuuauaucuauaaaccaa

SEQ ID NO: 180396 - RNA, 20 nt, Artificial Sequence
  Synthetic
auuuuauaucuauaaaccaa

SEQ ID NO: 180397 - RNA, 21 nt, Artificial Sequence
  Synthetic
aauuuuauaucuauaaaccaa

SEQ ID NO: 180398 - RNA, 22 nt, Artificial Sequence
  Synthetic
uaauuuuauaucuauaaaccaa

SEQ ID NO: 180399 - RNA, 23 nt, Artificial Sequence
  Synthetic
guaauuuuauaucuauaaaccaa

SEQ ID NO: 180400 - RNA, 24 nt, Artificial Sequence
  Synthetic
uguaauuuuauaucuauaaaccaa

SEQ ID NO: 180401 - RNA, 18 nt, Artificial Sequence
  Synthetic
uuuuauuagcuaaaccaa

SEQ ID NO: 180402 - RNA, 19 nt, Artificial Sequence
  Synthetic
cuuuuauuagcuaaaccaa

SEQ ID NO: 180403 - RNA, 20 nt, Artificial Sequence
  Synthetic
ccuuuuauuagcuaaaccaa

SEQ ID NO: 180404 - RNA, 21 nt, Artificial Sequence
  Synthetic
gccuuuuauuagcuaaaccaa

SEQ ID NO: 180405 - RNA, 22 nt, Artificial Sequence
  Synthetic
ggccuuuuauuagcuaaaccaa

SEQ ID NO: 180406 - RNA, 23 nt, Artificial Sequence
  Synthetic
uggccuuuuauuagcuaaaccaa

SEQ ID NO: 180407 - RNA, 24 nt, Artificial Sequence
  Synthetic
guggccuuuuauuagcuaaaccaa

SEQ ID NO: 180408 - RNA, 18 nt, Artificial Sequence
  Synthetic
agauccacauuaaaccaa

SEQ ID NO: 180409 - RNA, 19 nt, Artificial Sequence
  Synthetic
gagauccacauuaaaccaa

SEQ ID NO: 180410 - RNA, 20 nt, Artificial Sequence
  Synthetic
agagauccacauuaaaccaa

SEQ ID NO: 180411 - RNA, 21 nt, Artificial Sequence
  Synthetic
gagagauccacauuaaaccaa

SEQ ID NO: 180412 - RNA, 22 nt, Artificial Sequence
  Synthetic
ugagagauccacauuaaaccaa

SEQ ID NO: 180413 - RNA, 23 nt, Artificial Sequence
  Synthetic
uugagagauccacauuaaaccaa

SEQ ID NO: 180414 - RNA, 24 nt, Artificial Sequence
  Synthetic
uuugagagauccacauuaaaccaa

SEQ ID NO: 180415 - RNA, 18 nt, Artificial Sequence
  Synthetic
uuuacguagggcaaccaa

SEQ ID NO: 180416 - RNA, 19 nt, Artificial Sequence
  Synthetic
cuuuacguagggcaaccaa

SEQ ID NO: 180417 - RNA, 20 nt, Artificial Sequence
  Synthetic
acuuuacguagggcaaccaa

SEQ ID NO: 180418 - RNA, 21 nt, Artificial Sequence
  Synthetic
cacuuuacguagggcaaccaa

SEQ ID NO: 180419 - RNA, 22 nt, Artificial Sequence
  Synthetic
acacuuuacguagggcaaccaa

SEQ ID NO: 180420 - RNA, 23 nt, Artificial Sequence
  Synthetic
gacacuuuacguagggcaaccaa

SEQ ID NO: 180421 - RNA, 24 nt, Artificial Sequence
  Synthetic
agacacuuuacguagggcaaccaa

SEQ ID NO: 180422 - RNA, 18 nt, Artificial Sequence
  Synthetic
ugcuuucuuaucaaccaa

SEQ ID NO: 180423 - RNA, 19 nt, Artificial Sequence
  Synthetic
uugcuuucuuaucaaccaa

SEQ ID NO: 180424 - RNA, 20 nt, Artificial Sequence
  Synthetic
cuugcuuucuuaucaaccaa

SEQ ID NO: 180425 - RNA, 21 nt, Artificial Sequence
  Synthetic
ucuugcuuucuuaucaaccaa

SEQ ID NO: 180426 - RNA, 22 nt, Artificial Sequence
  Synthetic
uucuugcuuucuuaucaaccaa

SEQ ID NO: 180427 - RNA, 23 nt, Artificial Sequence
  Synthetic
cuucuugcuuucuuaucaaccaa

SEQ ID NO: 180428 - RNA, 24 nt, Artificial Sequence
  Synthetic
gcuucuugcuuucuuaucaaccaa

SEQ ID NO: 180429 - RNA, 18 nt, Artificial Sequence
  Synthetic
ugagcaaccuucaaccaa

SEQ ID NO: 180430 - RNA, 19 nt, Artificial Sequence
  Synthetic
gugagcaaccuucaaccaa

SEQ ID NO: 180431 - RNA, 20 nt, Artificial Sequence
  Synthetic
agugagcaaccuucaaccaa

SEQ ID NO: 180432 - RNA, 21 nt, Artificial Sequence
  Synthetic
gagugagcaaccuucaaccaa

SEQ ID NO: 180433 - RNA, 22 nt, Artificial Sequence
  Synthetic
ugagugagcaaccuucaaccaa

SEQ ID NO: 180434 - RNA, 23 nt, Artificial Sequence
  Synthetic
gugagugagcaaccuucaaccaa

SEQ ID NO: 180435 - RNA, 24 nt, Artificial Sequence
  Synthetic
agugagugagcaaccuucaaccaa

SEQ ID NO: 180436 - RNA, 18 nt, Artificial Sequence
  Synthetic
acuauauaaaagaaccaa

SEQ ID NO: 180437 - RNA, 19 nt, Artificial Sequence
  Synthetic
cacuauauaaaagaaccaa

SEQ ID NO: 180438 - RNA, 20 nt, Artificial Sequence
  Synthetic
acacuauauaaaagaaccaa

SEQ ID NO: 180439 - RNA, 21 nt, Artificial Sequence
  Synthetic
cacacuauauaaaagaaccaa

SEQ ID NO: 180440 - RNA, 22 nt, Artificial Sequence
  Synthetic
acacacuauauaaaagaaccaa

SEQ ID NO: 180441 - RNA, 23 nt, Artificial Sequence
  Synthetic
uacacacuauauaaaagaaccaa

SEQ ID NO: 180442 - RNA, 24 nt, Artificial Sequence
  Synthetic
auacacacuauauaaaagaaccaa

SEQ ID NO: 180443 - RNA, 18 nt, Artificial Sequence
  Synthetic
aaucugaaguugaaccaa

SEQ ID NO: 180444 - RNA, 19 nt, Artificial Sequence
  Synthetic
aaaucugaaguugaaccaa

SEQ ID NO: 180445 - RNA, 20 nt, Artificial Sequence
  Synthetic
aaaaucugaaguugaaccaa

SEQ ID NO: 180446 - RNA, 21 nt, Artificial Sequence
  Synthetic
gaaaaucugaaguugaaccaa

SEQ ID NO: 180447 - RNA, 22 nt, Artificial Sequence
  Synthetic
ugaaaaucugaaguugaaccaa

SEQ ID NO: 180448 - RNA, 23 nt, Artificial Sequence
  Synthetic
cugaaaaucugaaguugaaccaa

SEQ ID NO: 180449 - RNA, 24 nt, Artificial Sequence
  Synthetic
acugaaaaucugaaguugaaccaa

SEQ ID NO: 180450 - RNA, 18 nt, Artificial Sequence
  Synthetic
uucuagcuauauaaccaa

SEQ ID NO: 180451 - RNA, 19 nt, Artificial Sequence
  Synthetic
uuucuagcuauauaaccaa

SEQ ID NO: 180452 - RNA, 20 nt, Artificial Sequence
  Synthetic
cuuucuagcuauauaaccaa

SEQ ID NO: 180453 - RNA, 21 nt, Artificial Sequence
  Synthetic
acuuucuagcuauauaaccaa

SEQ ID NO: 180454 - RNA, 22 nt, Artificial Sequence
  Synthetic
gacuuucuagcuauauaaccaa

SEQ ID NO: 180455 - RNA, 23 nt, Artificial Sequence
  Synthetic
ugacuuucuagcuauauaaccaa

SEQ ID NO: 180456 - RNA, 24 nt, Artificial Sequence
  Synthetic
cugacuuucuagcuauauaaccaa

SEQ ID NO: 180457 - RNA, 18 nt, Artificial Sequence
  Synthetic
uggauuuacuguaaccaa

SEQ ID NO: 180458 - RNA, 19 nt, Artificial Sequence
  Synthetic
uuggauuuacuguaaccaa

SEQ ID NO: 180459 - RNA, 20 nt, Artificial Sequence
  Synthetic
uuuggauuuacuguaaccaa

SEQ ID NO: 180460 - RNA, 21 nt, Artificial Sequence
  Synthetic
guuuggauuuacuguaaccaa

SEQ ID NO: 180461 - RNA, 22 nt, Artificial Sequence
  Synthetic
uguuuggauuuacuguaaccaa

SEQ ID NO: 180462 - RNA, 23 nt, Artificial Sequence
  Synthetic
uuguuuggauuuacuguaaccaa

SEQ ID NO: 180463 - RNA, 24 nt, Artificial Sequence
  Synthetic
auuguuuggauuuacuguaaccaa

SEQ ID NO: 180464 - RNA, 18 nt, Artificial Sequence
  Synthetic
acuggaugacuuaaccaa

SEQ ID NO: 180465 - RNA, 19 nt, Artificial Sequence
  Synthetic
aacuggaugacuuaaccaa

SEQ ID NO: 180466 - RNA, 20 nt, Artificial Sequence
  Synthetic
aaacuggaugacuuaaccaa

SEQ ID NO: 180467 - RNA, 21 nt, Artificial Sequence
  Synthetic
caaacuggaugacuuaaccaa

SEQ ID NO: 180468 - RNA, 22 nt, Artificial Sequence
  Synthetic
acaaacuggaugacuuaaccaa

SEQ ID NO: 180469 - RNA, 23 nt, Artificial Sequence
  Synthetic
cacaaacuggaugacuuaaccaa

SEQ ID NO: 180470 - RNA, 24 nt, Artificial Sequence
  Synthetic
ccacaaacuggaugacuuaaccaa

SEQ ID NO: 180471 - RNA, 18 nt, Artificial Sequence
  Synthetic
uaaacagacaaacaccaa

SEQ ID NO: 180472 - RNA, 19 nt, Artificial Sequence
  Synthetic
guaaacagacaaacaccaa

SEQ ID NO: 180473 - RNA, 20 nt, Artificial Sequence
  Synthetic
aguaaacagacaaacaccaa

SEQ ID NO: 180474 - RNA, 21 nt, Artificial Sequence
  Synthetic
gaguaaacagacaaacaccaa

SEQ ID NO: 180475 - RNA, 22 nt, Artificial Sequence
  Synthetic
agaguaaacagacaaacaccaa

SEQ ID NO: 180476 - RNA, 23 nt, Artificial Sequence
  Synthetic
cagaguaaacagacaaacaccaa

SEQ ID NO: 180477 - RNA, 24 nt, Artificial Sequence
  Synthetic
acagaguaaacagacaaacaccaa

SEQ ID NO: 180478 - RNA, 18 nt, Artificial Sequence
  Synthetic
uauaggagacgccaccaa

SEQ ID NO: 180479 - RNA, 19 nt, Artificial Sequence
  Synthetic
uuauaggagacgccaccaa

SEQ ID NO: 180480 - RNA, 20 nt, Artificial Sequence
  Synthetic
uuuauaggagacgccaccaa

SEQ ID NO: 180481 - RNA, 21 nt, Artificial Sequence
  Synthetic
auuuauaggagacgccaccaa

SEQ ID NO: 180482 - RNA, 22 nt, Artificial Sequence
  Synthetic
cauuuauaggagacgccaccaa

SEQ ID NO: 180483 - RNA, 23 nt, Artificial Sequence
  Synthetic
acauuuauaggagacgccaccaa

SEQ ID NO: 180484 - RNA, 24 nt, Artificial Sequence
  Synthetic
aacauuuauaggagacgccaccaa

SEQ ID NO: 180485 - RNA, 18 nt, Artificial Sequence
  Synthetic
auauuaaacauccaccaa

SEQ ID NO: 180486 - RNA, 19 nt, Artificial Sequence
  Synthetic
uauauuaaacauccaccaa

SEQ ID NO: 180487 - RNA, 20 nt, Artificial Sequence
  Synthetic
auauauuaaacauccaccaa

SEQ ID NO: 180488 - RNA, 21 nt, Artificial Sequence
  Synthetic
aauauauuaaacauccaccaa

SEQ ID NO: 180489 - RNA, 22 nt, Artificial Sequence
  Synthetic
uaauauauuaaacauccaccaa

SEQ ID NO: 180490 - RNA, 23 nt, Artificial Sequence
  Synthetic
auaauauauuaaacauccaccaa

SEQ ID NO: 180491 - RNA, 24 nt, Artificial Sequence
  Synthetic
uauaauauauuaaacauccaccaa

SEQ ID NO: 180492 - RNA, 18 nt, Artificial Sequence
  Synthetic
uauuuuuaccuccaccaa

SEQ ID NO: 180493 - RNA, 19 nt, Artificial Sequence
  Synthetic
auauuuuuaccuccaccaa

SEQ ID NO: 180494 - RNA, 20 nt, Artificial Sequence
  Synthetic
gauauuuuuaccuccaccaa

SEQ ID NO: 180495 - RNA, 21 nt, Artificial Sequence
  Synthetic
ggauauuuuuaccuccaccaa

SEQ ID NO: 180496 - RNA, 22 nt, Artificial Sequence
  Synthetic
gggauauuuuuaccuccaccaa

SEQ ID NO: 180497 - RNA, 23 nt, Artificial Sequence
  Synthetic
ggggauauuuuuaccuccaccaa

SEQ ID NO: 180498 - RNA, 24 nt, Artificial Sequence
  Synthetic
gggggauauuuuuaccuccaccaa

SEQ ID NO: 180499 - RNA, 18 nt, Artificial Sequence
  Synthetic
gggcaaaauuaucaccaa

SEQ ID NO: 180500 - RNA, 19 nt, Artificial Sequence
  Synthetic
ugggcaaaauuaucaccaa

SEQ ID NO: 180501 - RNA, 20 nt, Artificial Sequence
  Synthetic
augggcaaaauuaucaccaa

SEQ ID NO: 180502 - RNA, 21 nt, Artificial Sequence
  Synthetic
uaugggcaaaauuaucaccaa

SEQ ID NO: 180503 - RNA, 22 nt, Artificial Sequence
  Synthetic
uuaugggcaaaauuaucaccaa

SEQ ID NO: 180504 - RNA, 23 nt, Artificial Sequence
  Synthetic
cuuaugggcaaaauuaucaccaa

SEQ ID NO: 180505 - RNA, 24 nt, Artificial Sequence
  Synthetic
ucuuaugggcaaaauuaucaccaa

SEQ ID NO: 180506 - RNA, 18 nt, Artificial Sequence
  Synthetic
ugaucuggcacucaccaa

SEQ ID NO: 180507 - RNA, 19 nt, Artificial Sequence
  Synthetic
gugaucuggcacucaccaa

SEQ ID NO: 180508 - RNA, 20 nt, Artificial Sequence
  Synthetic
agugaucuggcacucaccaa

SEQ ID NO: 180509 - RNA, 21 nt, Artificial Sequence
  Synthetic
uagugaucuggcacucaccaa

SEQ ID NO: 180510 - RNA, 22 nt, Artificial Sequence
  Synthetic
auagugaucuggcacucaccaa

SEQ ID NO: 180511 - RNA, 23 nt, Artificial Sequence
  Synthetic
aauagugaucuggcacucaccaa

SEQ ID NO: 180512 - RNA, 24 nt, Artificial Sequence
  Synthetic
uaauagugaucuggcacucaccaa

SEQ ID NO: 180513 - RNA, 18 nt, Artificial Sequence
  Synthetic
uuauuaagagaagaccaa

SEQ ID NO: 180514 - RNA, 19 nt, Artificial Sequence
  Synthetic
cuuauuaagagaagaccaa

SEQ ID NO: 180515 - RNA, 20 nt, Artificial Sequence
  Synthetic
ucuuauuaagagaagaccaa

SEQ ID NO: 180516 - RNA, 21 nt, Artificial Sequence
  Synthetic
cucuuauuaagagaagaccaa

SEQ ID NO: 180517 - RNA, 22 nt, Artificial Sequence
  Synthetic
ucucuuauuaagagaagaccaa

SEQ ID NO: 180518 - RNA, 23 nt, Artificial Sequence
  Synthetic
aucucuuauuaagagaagaccaa

SEQ ID NO: 180519 - RNA, 24 nt, Artificial Sequence
  Synthetic
aaucucuuauuaagagaagaccaa

SEQ ID NO: 180520 - RNA, 18 nt, Artificial Sequence
  Synthetic
uggaagguggaagaccaa

SEQ ID NO: 180521 - RNA, 19 nt, Artificial Sequence
  Synthetic
auggaagguggaagaccaa

SEQ ID NO: 180522 - RNA, 20 nt, Artificial Sequence
  Synthetic
gauggaagguggaagaccaa

SEQ ID NO: 180523 - RNA, 21 nt, Artificial Sequence
  Synthetic
ugauggaagguggaagaccaa

SEQ ID NO: 180524 - RNA, 22 nt, Artificial Sequence
  Synthetic
augauggaagguggaagaccaa

SEQ ID NO: 180525 - RNA, 23 nt, Artificial Sequence
  Synthetic
caugauggaagguggaagaccaa

SEQ ID NO: 180526 - RNA, 24 nt, Artificial Sequence
  Synthetic
ccaugauggaagguggaagaccaa

SEQ ID NO: 180527 - RNA, 18 nt, Artificial Sequence
  Synthetic
gucagaggaacagaccaa

SEQ ID NO: 180528 - RNA, 19 nt, Artificial Sequence
  Synthetic
ugucagaggaacagaccaa

SEQ ID NO: 180529 - RNA, 20 nt, Artificial Sequence
  Synthetic
augucagaggaacagaccaa

SEQ ID NO: 180530 - RNA, 21 nt, Artificial Sequence
  Synthetic
aaugucagaggaacagaccaa

SEQ ID NO: 180531 - RNA, 22 nt, Artificial Sequence
  Synthetic
caaugucagaggaacagaccaa

SEQ ID NO: 180532 - RNA, 23 nt, Artificial Sequence
  Synthetic
acaaugucagaggaacagaccaa

SEQ ID NO: 180533 - RNA, 24 nt, Artificial Sequence
  Synthetic
cacaaugucagaggaacagaccaa

SEQ ID NO: 180534 - RNA, 18 nt, Artificial Sequence
  Synthetic
uggcaggauggagaccaa

SEQ ID NO: 180535 - RNA, 19 nt, Artificial Sequence
  Synthetic
cuggcaggauggagaccaa

SEQ ID NO: 180536 - RNA, 20 nt, Artificial Sequence
  Synthetic
ccuggcaggauggagaccaa

SEQ ID NO: 180537 - RNA, 21 nt, Artificial Sequence
  Synthetic
gccuggcaggauggagaccaa

SEQ ID NO: 180538 - RNA, 22 nt, Artificial Sequence
  Synthetic
agccuggcaggauggagaccaa

SEQ ID NO: 180539 - RNA, 23 nt, Artificial Sequence
  Synthetic
aagccuggcaggauggagaccaa

SEQ ID NO: 180540 - RNA, 24 nt, Artificial Sequence
  Synthetic
aaagccuggcaggauggagaccaa

SEQ ID NO: 180541 - RNA, 18 nt, Artificial Sequence
  Synthetic
cauguacacauagaccaa

SEQ ID NO: 180542 - RNA, 19 nt, Artificial Sequence
  Synthetic
ucauguacacauagaccaa

SEQ ID NO: 180543 - RNA, 20 nt, Artificial Sequence
  Synthetic
gucauguacacauagaccaa

SEQ ID NO: 180544 - RNA, 21 nt, Artificial Sequence
  Synthetic
ugucauguacacauagaccaa

SEQ ID NO: 180545 - RNA, 22 nt, Artificial Sequence
  Synthetic
augucauguacacauagaccaa

SEQ ID NO: 180546 - RNA, 23 nt, Artificial Sequence
  Synthetic
gaugucauguacacauagaccaa

SEQ ID NO: 180547 - RNA, 24 nt, Artificial Sequence
  Synthetic
agaugucauguacacauagaccaa

SEQ ID NO: 180548 - RNA, 18 nt, Artificial Sequence
  Synthetic
gauagacucauagaccaa

SEQ ID NO: 180549 - RNA, 19 nt, Artificial Sequence
  Synthetic
ggauagacucauagaccaa

SEQ ID NO: 180550 - RNA, 20 nt, Artificial Sequence
  Synthetic
gggauagacucauagaccaa

SEQ ID NO: 180551 - RNA, 21 nt, Artificial Sequence
  Synthetic
agggauagacucauagaccaa

SEQ ID NO: 180552 - RNA, 22 nt, Artificial Sequence
  Synthetic
gagggauagacucauagaccaa

SEQ ID NO: 180553 - RNA, 23 nt, Artificial Sequence
  Synthetic
ggagggauagacucauagaccaa

SEQ ID NO: 180554 - RNA, 24 nt, Artificial Sequence
  Synthetic
uggagggauagacucauagaccaa

SEQ ID NO: 180555 - RNA, 18 nt, Artificial Sequence
  Synthetic
aacagauauauagaccaa

SEQ ID NO: 180556 - RNA, 19 nt, Artificial Sequence
  Synthetic
aaacagauauauagaccaa

SEQ ID NO: 180557 - RNA, 20 nt, Artificial Sequence
  Synthetic
aaaacagauauauagaccaa

SEQ ID NO: 180558 - RNA, 21 nt, Artificial Sequence
  Synthetic
caaaacagauauauagaccaa

SEQ ID NO: 180559 - RNA, 22 nt, Artificial Sequence
  Synthetic
ccaaaacagauauauagaccaa

SEQ ID NO: 180560 - RNA, 23 nt, Artificial Sequence
  Synthetic
accaaaacagauauauagaccaa

SEQ ID NO: 180561 - RNA, 24 nt, Artificial Sequence
  Synthetic
uaccaaaacagauauauagaccaa

SEQ ID NO: 180562 - RNA, 18 nt, Artificial Sequence
  Synthetic
ggugggguguaggaccaa

SEQ ID NO: 180563 - RNA, 19 nt, Artificial Sequence
  Synthetic
aggugggguguaggaccaa

SEQ ID NO: 180564 - RNA, 20 nt, Artificial Sequence
  Synthetic
caggugggguguaggaccaa

SEQ ID NO: 180565 - RNA, 21 nt, Artificial Sequence
  Synthetic
gcaggugggguguaggaccaa

SEQ ID NO: 180566 - RNA, 22 nt, Artificial Sequence
  Synthetic
cgcaggugggguguaggaccaa

SEQ ID NO: 180567 - RNA, 23 nt, Artificial Sequence
  Synthetic
acgcaggugggguguaggaccaa

SEQ ID NO: 180568 - RNA, 24 nt, Artificial Sequence
  Synthetic
gacgcaggugggguguaggaccaa

SEQ ID NO: 180569 - RNA, 18 nt, Artificial Sequence
  Synthetic
aacucagcucuggaccaa

SEQ ID NO: 180570 - RNA, 19 nt, Artificial Sequence
  Synthetic
aaacucagcucuggaccaa

SEQ ID NO: 180571 - RNA, 20 nt, Artificial Sequence
  Synthetic
uaaacucagcucuggaccaa

SEQ ID NO: 180572 - RNA, 21 nt, Artificial Sequence
  Synthetic
uuaaacucagcucuggaccaa

SEQ ID NO: 180573 - RNA, 22 nt, Artificial Sequence
  Synthetic
cuuaaacucagcucuggaccaa

SEQ ID NO: 180574 - RNA, 23 nt, Artificial Sequence
  Synthetic
acuuaaacucagcucuggaccaa

SEQ ID NO: 180575 - RNA, 24 nt, Artificial Sequence
  Synthetic
gacuuaaacucagcucuggaccaa

SEQ ID NO: 180576 - RNA, 18 nt, Artificial Sequence
  Synthetic
gagguagaagaugaccaa

SEQ ID NO: 180577 - RNA, 19 nt, Artificial Sequence
  Synthetic
ggagguagaagaugaccaa

SEQ ID NO: 180578 - RNA, 20 nt, Artificial Sequence
  Synthetic
gggagguagaagaugaccaa

SEQ ID NO: 180579 - RNA, 21 nt, Artificial Sequence
  Synthetic
agggagguagaagaugaccaa

SEQ ID NO: 180580 - RNA, 22 nt, Artificial Sequence
  Synthetic
aagggagguagaagaugaccaa

SEQ ID NO: 180581 - RNA, 23 nt, Artificial Sequence
  Synthetic
gaagggagguagaagaugaccaa

SEQ ID NO: 180582 - RNA, 24 nt, Artificial Sequence
  Synthetic
ugaagggagguagaagaugaccaa

SEQ ID NO: 180583 - RNA, 18 nt, Artificial Sequence
  Synthetic
ugcaacucaacauaccaa

SEQ ID NO: 180584 - RNA, 19 nt, Artificial Sequence
  Synthetic
augcaacucaacauaccaa

SEQ ID NO: 180585 - RNA, 20 nt, Artificial Sequence
  Synthetic
uaugcaacucaacauaccaa

SEQ ID NO: 180586 - RNA, 21 nt, Artificial Sequence
  Synthetic
uuaugcaacucaacauaccaa

SEQ ID NO: 180587 - RNA, 22 nt, Artificial Sequence
  Synthetic
uuuaugcaacucaacauaccaa

SEQ ID NO: 180588 - RNA, 23 nt, Artificial Sequence
  Synthetic
uuuuaugcaacucaacauaccaa

SEQ ID NO: 180589 - RNA, 24 nt, Artificial Sequence
  Synthetic
uuuuuaugcaacucaacauaccaa

SEQ ID NO: 180590 - RNA, 18 nt, Artificial Sequence
  Synthetic
ucucggaccccauaccaa

SEQ ID NO: 180591 - RNA, 19 nt, Artificial Sequence
  Synthetic
gucucggaccccauaccaa

SEQ ID NO: 180592 - RNA, 20 nt, Artificial Sequence
  Synthetic
agucucggaccccauaccaa

SEQ ID NO: 180593 - RNA, 21 nt, Artificial Sequence
  Synthetic
aagucucggaccccauaccaa

SEQ ID NO: 180594 - RNA, 22 nt, Artificial Sequence
  Synthetic
aaagucucggaccccauaccaa

SEQ ID NO: 180595 - RNA, 23 nt, Artificial Sequence
  Synthetic
aaaagucucggaccccauaccaa

SEQ ID NO: 180596 - RNA, 24 nt, Artificial Sequence
  Synthetic
gaaaagucucggaccccauaccaa

SEQ ID NO: 180597 - RNA, 18 nt, Artificial Sequence
  Synthetic
ucaaugccaucauaccaa

SEQ ID NO: 180598 - RNA, 19 nt, Artificial Sequence
  Synthetic
uucaaugccaucauaccaa

SEQ ID NO: 180599 - RNA, 20 nt, Artificial Sequence
  Synthetic
uuucaaugccaucauaccaa

SEQ ID NO: 180600 - RNA, 21 nt, Artificial Sequence
  Synthetic
uuuucaaugccaucauaccaa

SEQ ID NO: 180601 - RNA, 22 nt, Artificial Sequence
  Synthetic
cuuuucaaugccaucauaccaa

SEQ ID NO: 180602 - RNA, 23 nt, Artificial Sequence
  Synthetic
ucuuuucaaugccaucauaccaa

SEQ ID NO: 180603 - RNA, 24 nt, Artificial Sequence
  Synthetic
uucuuuucaaugccaucauaccaa

SEQ ID NO: 180604 - RNA, 18 nt, Artificial Sequence
  Synthetic
uauuguaauuacuaccaa

SEQ ID NO: 180605 - RNA, 19 nt, Artificial Sequence
  Synthetic
auauuguaauuacuaccaa

SEQ ID NO: 180606 - RNA, 20 nt, Artificial Sequence
  Synthetic
gauauuguaauuacuaccaa

SEQ ID NO: 180607 - RNA, 21 nt, Artificial Sequence
  Synthetic
ugauauuguaauuacuaccaa

SEQ ID NO: 180608 - RNA, 22 nt, Artificial Sequence
  Synthetic
gugauauuguaauuacuaccaa

SEQ ID NO: 180609 - RNA, 23 nt, Artificial Sequence
  Synthetic
ugugauauuguaauuacuaccaa

SEQ ID NO: 180610 - RNA, 24 nt, Artificial Sequence
  Synthetic
augugauauuguaauuacuaccaa

SEQ ID NO: 180611 - RNA, 18 nt, Artificial Sequence
  Synthetic
agugccagaaccuaccaa

SEQ ID NO: 180612 - RNA, 19 nt, Artificial Sequence
  Synthetic
gagugccagaaccuaccaa

SEQ ID NO: 180613 - RNA, 20 nt, Artificial Sequence
  Synthetic
ugagugccagaaccuaccaa

SEQ ID NO: 180614 - RNA, 21 nt, Artificial Sequence
  Synthetic
uugagugccagaaccuaccaa

SEQ ID NO: 180615 - RNA, 22 nt, Artificial Sequence
  Synthetic
cuugagugccagaaccuaccaa

SEQ ID NO: 180616 - RNA, 23 nt, Artificial Sequence
  Synthetic
ucuugagugccagaaccuaccaa

SEQ ID NO: 180617 - RNA, 24 nt, Artificial Sequence
  Synthetic
gucuugagugccagaaccuaccaa

SEQ ID NO: 180618 - RNA, 18 nt, Artificial Sequence
  Synthetic
aaaaauauacucuaccaa

SEQ ID NO: 180619 - RNA, 19 nt, Artificial Sequence
  Synthetic
caaaaauauacucuaccaa

SEQ ID NO: 180620 - RNA, 20 nt, Artificial Sequence
  Synthetic
ucaaaaauauacucuaccaa

SEQ ID NO: 180621 - RNA, 21 nt, Artificial Sequence
  Synthetic
uucaaaaauauacucuaccaa

SEQ ID NO: 180622 - RNA, 22 nt, Artificial Sequence
  Synthetic
uuucaaaaauauacucuaccaa

SEQ ID NO: 180623 - RNA, 23 nt, Artificial Sequence
  Synthetic
uuuucaaaaauauacucuaccaa

SEQ ID NO: 180624 - RNA, 24 nt, Artificial Sequence
  Synthetic
auuuucaaaaauauacucuaccaa

SEQ ID NO: 180625 - RNA, 18 nt, Artificial Sequence
  Synthetic
ccauaaaauuucuaccaa

SEQ ID NO: 180626 - RNA, 19 nt, Artificial Sequence
  Synthetic
accauaaaauuucuaccaa

SEQ ID NO: 180627 - RNA, 20 nt, Artificial Sequence
  Synthetic
caccauaaaauuucuaccaa

SEQ ID NO: 180628 - RNA, 21 nt, Artificial Sequence
  Synthetic
acaccauaaaauuucuaccaa

SEQ ID NO: 180629 - RNA, 22 nt, Artificial Sequence
  Synthetic
uacaccauaaaauuucuaccaa

SEQ ID NO: 180630 - RNA, 23 nt, Artificial Sequence
  Synthetic
uuacaccauaaaauuucuaccaa

SEQ ID NO: 180631 - RNA, 24 nt, Artificial Sequence
  Synthetic
auuacaccauaaaauuucuaccaa

SEQ ID NO: 180632 - RNA, 18 nt, Artificial Sequence
  Synthetic
uauaugguacaguaccaa

SEQ ID NO: 180633 - RNA, 19 nt, Artificial Sequence
  Synthetic
uuauaugguacaguaccaa

SEQ ID NO: 180634 - RNA, 20 nt, Artificial Sequence
  Synthetic
auuauaugguacaguaccaa

SEQ ID NO: 180635 - RNA, 21 nt, Artificial Sequence
  Synthetic
uauuauaugguacaguaccaa

SEQ ID NO: 180636 - RNA, 22 nt, Artificial Sequence
  Synthetic
auauuauaugguacaguaccaa

SEQ ID NO: 180637 - RNA, 23 nt, Artificial Sequence
  Synthetic
cauauuauaugguacaguaccaa

SEQ ID NO: 180638 - RNA, 24 nt, Artificial Sequence
  Synthetic
ccauauuauaugguacaguaccaa

SEQ ID NO: 180639 - RNA, 18 nt, Artificial Sequence
  Synthetic
ggaaacaaggaguaccaa

SEQ ID NO: 180640 - RNA, 19 nt, Artificial Sequence
  Synthetic
uggaaacaaggaguaccaa

SEQ ID NO: 180641 - RNA, 20 nt, Artificial Sequence
  Synthetic
cuggaaacaaggaguaccaa

SEQ ID NO: 180642 - RNA, 21 nt, Artificial Sequence
  Synthetic
ucuggaaacaaggaguaccaa

SEQ ID NO: 180643 - RNA, 22 nt, Artificial Sequence
  Synthetic
uucuggaaacaaggaguaccaa

SEQ ID NO: 180644 - RNA, 23 nt, Artificial Sequence
  Synthetic
cuucuggaaacaaggaguaccaa

SEQ ID NO: 180645 - RNA, 24 nt, Artificial Sequence
  Synthetic
ucuucuggaaacaaggaguaccaa

SEQ ID NO: 180646 - RNA, 18 nt, Artificial Sequence
  Synthetic
uccuccaaauaguaccaa

SEQ ID NO: 180647 - RNA, 19 nt, Artificial Sequence
  Synthetic
cuccuccaaauaguaccaa

SEQ ID NO: 180648 - RNA, 20 nt, Artificial Sequence
  Synthetic
acuccuccaaauaguaccaa

SEQ ID NO: 180649 - RNA, 21 nt, Artificial Sequence
  Synthetic
aacuccuccaaauaguaccaa

SEQ ID NO: 180650 - RNA, 22 nt, Artificial Sequence
  Synthetic
gaacuccuccaaauaguaccaa

SEQ ID NO: 180651 - RNA, 23 nt, Artificial Sequence
  Synthetic
agaacuccuccaaauaguaccaa

SEQ ID NO: 180652 - RNA, 24 nt, Artificial Sequence
  Synthetic
gagaacuccuccaaauaguaccaa

SEQ ID NO: 180653 - RNA, 18 nt, Artificial Sequence
  Synthetic
uuggccuuuauuuaccaa

SEQ ID NO: 180654 - RNA, 19 nt, Artificial Sequence
  Synthetic
cuuggccuuuauuuaccaa

SEQ ID NO: 180655 - RNA, 20 nt, Artificial Sequence
  Synthetic
acuuggccuuuauuuaccaa

SEQ ID NO: 180656 - RNA, 21 nt, Artificial Sequence
  Synthetic
gacuuggccuuuauuuaccaa

SEQ ID NO: 180657 - RNA, 22 nt, Artificial Sequence
  Synthetic
agacuuggccuuuauuuaccaa

SEQ ID NO: 180658 - RNA, 23 nt, Artificial Sequence
  Synthetic
aagacuuggccuuuauuuaccaa

SEQ ID NO: 180659 - RNA, 24 nt, Artificial Sequence
  Synthetic
gaagacuuggccuuuauuuaccaa

SEQ ID NO: 180660 - RNA, 18 nt, Artificial Sequence
  Synthetic
aggacuuuuauuuaccaa

SEQ ID NO: 180661 - RNA, 19 nt, Artificial Sequence
  Synthetic
caggacuuuuauuuaccaa

SEQ ID NO: 180662 - RNA, 20 nt, Artificial Sequence
  Synthetic
ccaggacuuuuauuuaccaa

SEQ ID NO: 180663 - RNA, 21 nt, Artificial Sequence
  Synthetic
cccaggacuuuuauuuaccaa

SEQ ID NO: 180664 - RNA, 22 nt, Artificial Sequence
  Synthetic
ucccaggacuuuuauuuaccaa

SEQ ID NO: 180665 - RNA, 23 nt, Artificial Sequence
  Synthetic
cucccaggacuuuuauuuaccaa

SEQ ID NO: 180666 - RNA, 24 nt, Artificial Sequence
  Synthetic
acucccaggacuuuuauuuaccaa

SEQ ID NO: 180667 - RNA, 18 nt, Artificial Sequence
  Synthetic
uacaagaaacaaacccaa

SEQ ID NO: 180668 - RNA, 19 nt, Artificial Sequence
  Synthetic
auacaagaaacaaacccaa

SEQ ID NO: 180669 - RNA, 20 nt, Artificial Sequence
  Synthetic
cauacaagaaacaaacccaa

SEQ ID NO: 180670 - RNA, 21 nt, Artificial Sequence
  Synthetic
acauacaagaaacaaacccaa

SEQ ID NO: 180671 - RNA, 22 nt, Artificial Sequence
  Synthetic
gacauacaagaaacaaacccaa

SEQ ID NO: 180672 - RNA, 23 nt, Artificial Sequence
  Synthetic
ugacauacaagaaacaaacccaa

SEQ ID NO: 180673 - RNA, 24 nt, Artificial Sequence
  Synthetic
uugacauacaagaaacaaacccaa

SEQ ID NO: 180674 - RNA, 18 nt, Artificial Sequence
  Synthetic
aggagcugacaaacccaa

SEQ ID NO: 180675 - RNA, 19 nt, Artificial Sequence
  Synthetic
aaggagcugacaaacccaa

SEQ ID NO: 180676 - RNA, 20 nt, Artificial Sequence
  Synthetic
gaaggagcugacaaacccaa

SEQ ID NO: 180677 - RNA, 21 nt, Artificial Sequence
  Synthetic
ugaaggagcugacaaacccaa

SEQ ID NO: 180678 - RNA, 22 nt, Artificial Sequence
  Synthetic
augaaggagcugacaaacccaa

SEQ ID NO: 180679 - RNA, 23 nt, Artificial Sequence
  Synthetic
aaugaaggagcugacaaacccaa

SEQ ID NO: 180680 - RNA, 24 nt, Artificial Sequence
  Synthetic
gaaugaaggagcugacaaacccaa

SEQ ID NO: 180681 - RNA, 18 nt, Artificial Sequence
  Synthetic
ucaguaacucgaacccaa

SEQ ID NO: 180682 - RNA, 19 nt, Artificial Sequence
  Synthetic
uucaguaacucgaacccaa

SEQ ID NO: 180683 - RNA, 20 nt, Artificial Sequence
  Synthetic
auucaguaacucgaacccaa

SEQ ID NO: 180684 - RNA, 21 nt, Artificial Sequence
  Synthetic
uauucaguaacucgaacccaa

SEQ ID NO: 180685 - RNA, 22 nt, Artificial Sequence
  Synthetic
auauucaguaacucgaacccaa

SEQ ID NO: 180686 - RNA, 23 nt, Artificial Sequence
  Synthetic
gauauucaguaacucgaacccaa

SEQ ID NO: 180687 - RNA, 24 nt, Artificial Sequence
  Synthetic
ugauauucaguaacucgaacccaa

SEQ ID NO: 180688 - RNA, 18 nt, Artificial Sequence
  Synthetic
uaaagucugauaacccaa

SEQ ID NO: 180689 - RNA, 19 nt, Artificial Sequence
  Synthetic
guaaagucugauaacccaa

SEQ ID NO: 180690 - RNA, 20 nt, Artificial Sequence
  Synthetic
uguaaagucugauaacccaa

SEQ ID NO: 180691 - RNA, 21 nt, Artificial Sequence
  Synthetic
guguaaagucugauaacccaa

SEQ ID NO: 180692 - RNA, 22 nt, Artificial Sequence
  Synthetic
uguguaaagucugauaacccaa

SEQ ID NO: 180693 - RNA, 23 nt, Artificial Sequence
  Synthetic
guguguaaagucugauaacccaa

SEQ ID NO: 180694 - RNA, 24 nt, Artificial Sequence
  Synthetic
aguguguaaagucugauaacccaa

SEQ ID NO: 180695 - RNA, 18 nt, Artificial Sequence
  Synthetic
cucacuccacacacccaa

SEQ ID NO: 180696 - RNA, 19 nt, Artificial Sequence
  Synthetic
ucucacuccacacacccaa

SEQ ID NO: 180697 - RNA, 20 nt, Artificial Sequence
  Synthetic
aucucacuccacacacccaa

SEQ ID NO: 180698 - RNA, 21 nt, Artificial Sequence
  Synthetic
uaucucacuccacacacccaa

SEQ ID NO: 180699 - RNA, 22 nt, Artificial Sequence
  Synthetic
guaucucacuccacacacccaa

SEQ ID NO: 180700 - RNA, 23 nt, Artificial Sequence
  Synthetic
aguaucucacuccacacacccaa

SEQ ID NO: 180701 - RNA, 24 nt, Artificial Sequence
  Synthetic
uaguaucucacuccacacacccaa

SEQ ID NO: 180702 - RNA, 18 nt, Artificial Sequence
  Synthetic
uauaaagagcucacccaa

SEQ ID NO: 180703 - RNA, 19 nt, Artificial Sequence
  Synthetic
auauaaagagcucacccaa

SEQ ID NO: 180704 - RNA, 20 nt, Artificial Sequence
  Synthetic
aauauaaagagcucacccaa

SEQ ID NO: 180705 - RNA, 21 nt, Artificial Sequence
  Synthetic
uaauauaaagagcucacccaa

SEQ ID NO: 180706 - RNA, 22 nt, Artificial Sequence
  Synthetic
auaauauaaagagcucacccaa

SEQ ID NO: 180707 - RNA, 23 nt, Artificial Sequence
  Synthetic
aauaauauaaagagcucacccaa

SEQ ID NO: 180708 - RNA, 24 nt, Artificial Sequence
  Synthetic
aaauaauauaaagagcucacccaa

SEQ ID NO: 180709 - RNA, 18 nt, Artificial Sequence
  Synthetic
gaagaucauaagacccaa

SEQ ID NO: 180710 - RNA, 19 nt, Artificial Sequence
  Synthetic
cgaagaucauaagacccaa

SEQ ID NO: 180711 - RNA, 20 nt, Artificial Sequence
  Synthetic
acgaagaucauaagacccaa

SEQ ID NO: 180712 - RNA, 21 nt, Artificial Sequence
  Synthetic
gacgaagaucauaagacccaa

SEQ ID NO: 180713 - RNA, 22 nt, Artificial Sequence
  Synthetic
agacgaagaucauaagacccaa

SEQ ID NO: 180714 - RNA, 23 nt, Artificial Sequence
  Synthetic
uagacgaagaucauaagacccaa

SEQ ID NO: 180715 - RNA, 24 nt, Artificial Sequence
  Synthetic
auagacgaagaucauaagacccaa

SEQ ID NO: 180716 - RNA, 18 nt, Artificial Sequence
  Synthetic
cauguguugcaaccccaa

SEQ ID NO: 180717 - RNA, 19 nt, Artificial Sequence
  Synthetic
gcauguguugcaaccccaa

SEQ ID NO: 180718 - RNA, 20 nt, Artificial Sequence
  Synthetic
agcauguguugcaaccccaa

SEQ ID NO: 180719 - RNA, 21 nt, Artificial Sequence
  Synthetic
cagcauguguugcaaccccaa

SEQ ID NO: 180720 - RNA, 22 nt, Artificial Sequence
  Synthetic
acagcauguguugcaaccccaa

SEQ ID NO: 180721 - RNA, 23 nt, Artificial Sequence
  Synthetic
cacagcauguguugcaaccccaa

SEQ ID NO: 180722 - RNA, 24 nt, Artificial Sequence
  Synthetic
ucacagcauguguugcaaccccaa

SEQ ID NO: 180723 - RNA, 18 nt, Artificial Sequence
  Synthetic
cccccaccaccaccccaa

SEQ ID NO: 180724 - RNA, 19 nt, Artificial Sequence
  Synthetic
ccccccaccaccaccccaa

SEQ ID NO: 180725 - RNA, 20 nt, Artificial Sequence
  Synthetic
gccccccaccaccaccccaa

SEQ ID NO: 180726 - RNA, 21 nt, Artificial Sequence
  Synthetic
cgccccccaccaccaccccaa

SEQ ID NO: 180727 - RNA, 22 nt, Artificial Sequence
  Synthetic
ucgccccccaccaccaccccaa

SEQ ID NO: 180728 - RNA, 23 nt, Artificial Sequence
  Synthetic
uucgccccccaccaccaccccaa

SEQ ID NO: 180729 - RNA, 24 nt, Artificial Sequence
  Synthetic
uuucgccccccaccaccaccccaa

SEQ ID NO: 180730 - RNA, 18 nt, Artificial Sequence
  Synthetic
gugacaagcauaccccaa

SEQ ID NO: 180731 - RNA, 19 nt, Artificial Sequence
  Synthetic
ugugacaagcauaccccaa

SEQ ID NO: 180732 - RNA, 20 nt, Artificial Sequence
  Synthetic
gugugacaagcauaccccaa

SEQ ID NO: 180733 - RNA, 21 nt, Artificial Sequence
  Synthetic
ugugugacaagcauaccccaa

SEQ ID NO: 180734 - RNA, 22 nt, Artificial Sequence
  Synthetic
cugugugacaagcauaccccaa

SEQ ID NO: 180735 - RNA, 23 nt, Artificial Sequence
  Synthetic
gcugugugacaagcauaccccaa

SEQ ID NO: 180736 - RNA, 24 nt, Artificial Sequence
  Synthetic
ugcugugugacaagcauaccccaa

SEQ ID NO: 180737 - RNA, 18 nt, Artificial Sequence
  Synthetic
gauauggaacuaccccaa

SEQ ID NO: 180738 - RNA, 19 nt, Artificial Sequence
  Synthetic
agauauggaacuaccccaa

SEQ ID NO: 180739 - RNA, 20 nt, Artificial Sequence
  Synthetic
aagauauggaacuaccccaa

SEQ ID NO: 180740 - RNA, 21 nt, Artificial Sequence
  Synthetic
uaagauauggaacuaccccaa

SEQ ID NO: 180741 - RNA, 22 nt, Artificial Sequence
  Synthetic
auaagauauggaacuaccccaa

SEQ ID NO: 180742 - RNA, 23 nt, Artificial Sequence
  Synthetic
gauaagauauggaacuaccccaa

SEQ ID NO: 180743 - RNA, 24 nt, Artificial Sequence
  Synthetic
ugauaagauauggaacuaccccaa

SEQ ID NO: 180744 - RNA, 18 nt, Artificial Sequence
  Synthetic
aaggucaggcuaccccaa

SEQ ID NO: 180745 - RNA, 19 nt, Artificial Sequence
  Synthetic
aaaggucaggcuaccccaa

SEQ ID NO: 180746 - RNA, 20 nt, Artificial Sequence
  Synthetic
gaaaggucaggcuaccccaa

SEQ ID NO: 180747 - RNA, 21 nt, Artificial Sequence
  Synthetic
agaaaggucaggcuaccccaa

SEQ ID NO: 180748 - RNA, 22 nt, Artificial Sequence
  Synthetic
gagaaaggucaggcuaccccaa

SEQ ID NO: 180749 - RNA, 23 nt, Artificial Sequence
  Synthetic
agagaaaggucaggcuaccccaa

SEQ ID NO: 180750 - RNA, 24 nt, Artificial Sequence
  Synthetic
gagagaaaggucaggcuaccccaa

SEQ ID NO: 180751 - RNA, 18 nt, Artificial Sequence
  Synthetic
aguuuccaacacccccaa

SEQ ID NO: 180752 - RNA, 19 nt, Artificial Sequence
  Synthetic
uaguuuccaacacccccaa

SEQ ID NO: 180753 - RNA, 20 nt, Artificial Sequence
  Synthetic
auaguuuccaacacccccaa

SEQ ID NO: 180754 - RNA, 21 nt, Artificial Sequence
  Synthetic
aauaguuuccaacacccccaa

SEQ ID NO: 180755 - RNA, 22 nt, Artificial Sequence
  Synthetic
caauaguuuccaacacccccaa

SEQ ID NO: 180756 - RNA, 23 nt, Artificial Sequence
  Synthetic
gcaauaguuuccaacacccccaa

SEQ ID NO: 180757 - RNA, 24 nt, Artificial Sequence
  Synthetic
agcaauaguuuccaacacccccaa

SEQ ID NO: 180758 - RNA, 18 nt, Artificial Sequence
  Synthetic
aguggaucccacccccaa

SEQ ID NO: 180759 - RNA, 19 nt, Artificial Sequence
  Synthetic
caguggaucccacccccaa

SEQ ID NO: 180760 - RNA, 20 nt, Artificial Sequence
  Synthetic
ucaguggaucccacccccaa

SEQ ID NO: 180761 - RNA, 21 nt, Artificial Sequence
  Synthetic
cucaguggaucccacccccaa

SEQ ID NO: 180762 - RNA, 22 nt, Artificial Sequence
  Synthetic
gcucaguggaucccacccccaa

SEQ ID NO: 180763 - RNA, 23 nt, Artificial Sequence
  Synthetic
agcucaguggaucccacccccaa

SEQ ID NO: 180764 - RNA, 24 nt, Artificial Sequence
  Synthetic
uagcucaguggaucccacccccaa

SEQ ID NO: 180765 - RNA, 18 nt, Artificial Sequence
  Synthetic
aaauggcguuagccccaa

SEQ ID NO: 180766 - RNA, 19 nt, Artificial Sequence
  Synthetic
aaaauggcguuagccccaa

SEQ ID NO: 180767 - RNA, 20 nt, Artificial Sequence
  Synthetic
uaaaauggcguuagccccaa

SEQ ID NO: 180768 - RNA, 21 nt, Artificial Sequence
  Synthetic
cuaaaauggcguuagccccaa

SEQ ID NO: 180769 - RNA, 22 nt, Artificial Sequence
  Synthetic
ccuaaaauggcguuagccccaa

SEQ ID NO: 180770 - RNA, 23 nt, Artificial Sequence
  Synthetic
gccuaaaauggcguuagccccaa

SEQ ID NO: 180771 - RNA, 24 nt, Artificial Sequence
  Synthetic
ggccuaaaauggcguuagccccaa

SEQ ID NO: 180772 - RNA, 18 nt, Artificial Sequence
  Synthetic
gcucaaucguugccccaa

SEQ ID NO: 180773 - RNA, 19 nt, Artificial Sequence
  Synthetic
agcucaaucguugccccaa

SEQ ID NO: 180774 - RNA, 20 nt, Artificial Sequence
  Synthetic
cagcucaaucguugccccaa

SEQ ID NO: 180775 - RNA, 21 nt, Artificial Sequence
  Synthetic
ccagcucaaucguugccccaa

SEQ ID NO: 180776 - RNA, 22 nt, Artificial Sequence
  Synthetic
uccagcucaaucguugccccaa

SEQ ID NO: 180777 - RNA, 23 nt, Artificial Sequence
  Synthetic
auccagcucaaucguugccccaa

SEQ ID NO: 180778 - RNA, 24 nt, Artificial Sequence
  Synthetic
uauccagcucaaucguugccccaa

SEQ ID NO: 180779 - RNA, 18 nt, Artificial Sequence
  Synthetic
uguagauaaaauccccaa

SEQ ID NO: 180780 - RNA, 19 nt, Artificial Sequence
  Synthetic
guguagauaaaauccccaa

SEQ ID NO: 180781 - RNA, 20 nt, Artificial Sequence
  Synthetic
aguguagauaaaauccccaa

SEQ ID NO: 180782 - RNA, 21 nt, Artificial Sequence
  Synthetic
uaguguagauaaaauccccaa

SEQ ID NO: 180783 - RNA, 22 nt, Artificial Sequence
  Synthetic
auaguguagauaaaauccccaa

SEQ ID NO: 180784 - RNA, 23 nt, Artificial Sequence
  Synthetic
gauaguguagauaaaauccccaa

SEQ ID NO: 180785 - RNA, 24 nt, Artificial Sequence
  Synthetic
ggauaguguagauaaaauccccaa

SEQ ID NO: 180786 - RNA, 18 nt, Artificial Sequence
  Synthetic
uuuauucagcauccccaa

SEQ ID NO: 180787 - RNA, 19 nt, Artificial Sequence
  Synthetic
guuuauucagcauccccaa

SEQ ID NO: 180788 - RNA, 20 nt, Artificial Sequence
  Synthetic
aguuuauucagcauccccaa

SEQ ID NO: 180789 - RNA, 21 nt, Artificial Sequence
  Synthetic
gaguuuauucagcauccccaa

SEQ ID NO: 180790 - RNA, 22 nt, Artificial Sequence
  Synthetic
agaguuuauucagcauccccaa

SEQ ID NO: 180791 - RNA, 23 nt, Artificial Sequence
  Synthetic
uagaguuuauucagcauccccaa

SEQ ID NO: 180792 - RNA, 24 nt, Artificial Sequence
  Synthetic
auagaguuuauucagcauccccaa

SEQ ID NO: 180793 - RNA, 18 nt, Artificial Sequence
  Synthetic
gauauucagccagcccaa

SEQ ID NO: 180794 - RNA, 19 nt, Artificial Sequence
  Synthetic
agauauucagccagcccaa

SEQ ID NO: 180795 - RNA, 20 nt, Artificial Sequence
  Synthetic
aagauauucagccagcccaa

SEQ ID NO: 180796 - RNA, 21 nt, Artificial Sequence
  Synthetic
gaagauauucagccagcccaa

SEQ ID NO: 180797 - RNA, 22 nt, Artificial Sequence
  Synthetic
ugaagauauucagccagcccaa

SEQ ID NO: 180798 - RNA, 23 nt, Artificial Sequence
  Synthetic
cugaagauauucagccagcccaa

SEQ ID NO: 180799 - RNA, 24 nt, Artificial Sequence
  Synthetic
ccugaagauauucagccagcccaa

SEQ ID NO: 180800 - RNA, 18 nt, Artificial Sequence
  Synthetic
uuuucaguuucagcccaa

SEQ ID NO: 180801 - RNA, 19 nt, Artificial Sequence
  Synthetic
uuuuucaguuucagcccaa

SEQ ID NO: 180802 - RNA, 20 nt, Artificial Sequence
  Synthetic
cuuuuucaguuucagcccaa

SEQ ID NO: 180803 - RNA, 21 nt, Artificial Sequence
  Synthetic
gcuuuuucaguuucagcccaa

SEQ ID NO: 180804 - RNA, 22 nt, Artificial Sequence
  Synthetic
ugcuuuuucaguuucagcccaa

SEQ ID NO: 180805 - RNA, 23 nt, Artificial Sequence
  Synthetic
uugcuuuuucaguuucagcccaa

SEQ ID NO: 180806 - RNA, 24 nt, Artificial Sequence
  Synthetic
uuugcuuuuucaguuucagcccaa

SEQ ID NO: 180807 - RNA, 18 nt, Artificial Sequence
  Synthetic
uuuaauccuaaugcccaa

SEQ ID NO: 180808 - RNA, 19 nt, Artificial Sequence
  Synthetic
cuuuaauccuaaugcccaa

SEQ ID NO: 180809 - RNA, 20 nt, Artificial Sequence
  Synthetic
ucuuuaauccuaaugcccaa

SEQ ID NO: 180810 - RNA, 21 nt, Artificial Sequence
  Synthetic
aucuuuaauccuaaugcccaa

SEQ ID NO: 180811 - RNA, 22 nt, Artificial Sequence
  Synthetic
uaucuuuaauccuaaugcccaa

SEQ ID NO: 180812 - RNA, 23 nt, Artificial Sequence
  Synthetic
auaucuuuaauccuaaugcccaa

SEQ ID NO: 180813 - RNA, 24 nt, Artificial Sequence
  Synthetic
uauaucuuuaauccuaaugcccaa

SEQ ID NO: 180814 - RNA, 18 nt, Artificial Sequence
  Synthetic
caguggauaacugcccaa

SEQ ID NO: 180815 - RNA, 19 nt, Artificial Sequence
  Synthetic
gcaguggauaacugcccaa

SEQ ID NO: 180816 - RNA, 20 nt, Artificial Sequence
  Synthetic
ugcaguggauaacugcccaa

SEQ ID NO: 180817 - RNA, 21 nt, Artificial Sequence
  Synthetic
augcaguggauaacugcccaa

SEQ ID NO: 180818 - RNA, 22 nt, Artificial Sequence
  Synthetic
uaugcaguggauaacugcccaa

SEQ ID NO: 180819 - RNA, 23 nt, Artificial Sequence
  Synthetic
auaugcaguggauaacugcccaa

SEQ ID NO: 180820 - RNA, 24 nt, Artificial Sequence
  Synthetic
aauaugcaguggauaacugcccaa

SEQ ID NO: 180821 - RNA, 18 nt, Artificial Sequence
  Synthetic
accagccugccaucccaa

SEQ ID NO: 180822 - RNA, 19 nt, Artificial Sequence
  Synthetic
uaccagccugccaucccaa

SEQ ID NO: 180823 - RNA, 20 nt, Artificial Sequence
  Synthetic
cuaccagccugccaucccaa

SEQ ID NO: 180824 - RNA, 21 nt, Artificial Sequence
  Synthetic
ccuaccagccugccaucccaa

SEQ ID NO: 180825 - RNA, 22 nt, Artificial Sequence
  Synthetic
uccuaccagccugccaucccaa

SEQ ID NO: 180826 - RNA, 23 nt, Artificial Sequence
  Synthetic
uuccuaccagccugccaucccaa

SEQ ID NO: 180827 - RNA, 24 nt, Artificial Sequence
  Synthetic
uuuccuaccagccugccaucccaa

SEQ ID NO: 180828 - RNA, 18 nt, Artificial Sequence
  Synthetic
ugaaaagacauaucccaa

SEQ ID NO: 180829 - RNA, 19 nt, Artificial Sequence
  Synthetic
uugaaaagacauaucccaa

SEQ ID NO: 180830 - RNA, 20 nt, Artificial Sequence
  Synthetic
guugaaaagacauaucccaa

SEQ ID NO: 180831 - RNA, 21 nt, Artificial Sequence
  Synthetic
aguugaaaagacauaucccaa

SEQ ID NO: 180832 - RNA, 22 nt, Artificial Sequence
  Synthetic
aaguugaaaagacauaucccaa

SEQ ID NO: 180833 - RNA, 23 nt, Artificial Sequence
  Synthetic
gaaguugaaaagacauaucccaa

SEQ ID NO: 180834 - RNA, 24 nt, Artificial Sequence
  Synthetic
agaaguugaaaagacauaucccaa

SEQ ID NO: 180835 - RNA, 18 nt, Artificial Sequence
  Synthetic
uguucauccuuaucccaa

SEQ ID NO: 180836 - RNA, 19 nt, Artificial Sequence
  Synthetic
auguucauccuuaucccaa

SEQ ID NO: 180837 - RNA, 20 nt, Artificial Sequence
  Synthetic
cauguucauccuuaucccaa

SEQ ID NO: 180838 - RNA, 21 nt, Artificial Sequence
  Synthetic
acauguucauccuuaucccaa

SEQ ID NO: 180839 - RNA, 22 nt, Artificial Sequence
  Synthetic
gacauguucauccuuaucccaa

SEQ ID NO: 180840 - RNA, 23 nt, Artificial Sequence
  Synthetic
ggacauguucauccuuaucccaa

SEQ ID NO: 180841 - RNA, 24 nt, Artificial Sequence
  Synthetic
uggacauguucauccuuaucccaa

SEQ ID NO: 180842 - RNA, 18 nt, Artificial Sequence
  Synthetic
ucuacaucugccucccaa

SEQ ID NO: 180843 - RNA, 19 nt, Artificial Sequence
  Synthetic
uucuacaucugccucccaa

SEQ ID NO: 180844 - RNA, 20 nt, Artificial Sequence
  Synthetic
uuucuacaucugccucccaa

SEQ ID NO: 180845 - RNA, 21 nt, Artificial Sequence
  Synthetic
guuucuacaucugccucccaa

SEQ ID NO: 180846 - RNA, 22 nt, Artificial Sequence
  Synthetic
aguuucuacaucugccucccaa

SEQ ID NO: 180847 - RNA, 23 nt, Artificial Sequence
  Synthetic
aaguuucuacaucugccucccaa

SEQ ID NO: 180848 - RNA, 24 nt, Artificial Sequence
  Synthetic
caaguuucuacaucugccucccaa

SEQ ID NO: 180849 - RNA, 18 nt, Artificial Sequence
  Synthetic
agauuccuauccucccaa

SEQ ID NO: 180850 - RNA, 19 nt, Artificial Sequence
  Synthetic
uagauuccuauccucccaa

SEQ ID NO: 180851 - RNA, 20 nt, Artificial Sequence
  Synthetic
uuagauuccuauccucccaa

SEQ ID NO: 180852 - RNA, 21 nt, Artificial Sequence
  Synthetic
guuagauuccuauccucccaa

SEQ ID NO: 180853 - RNA, 22 nt, Artificial Sequence
  Synthetic
aguuagauuccuauccucccaa

SEQ ID NO: 180854 - RNA, 23 nt, Artificial Sequence
  Synthetic
aaguuagauuccuauccucccaa

SEQ ID NO: 180855 - RNA, 24 nt, Artificial Sequence
  Synthetic
aaaguuagauuccuauccucccaa

SEQ ID NO: 180856 - RNA, 18 nt, Artificial Sequence
  Synthetic
ucuggcaagcagucccaa

SEQ ID NO: 180857 - RNA, 19 nt, Artificial Sequence
  Synthetic
uucuggcaagcagucccaa

SEQ ID NO: 180858 - RNA, 20 nt, Artificial Sequence
  Synthetic
uuucuggcaagcagucccaa

SEQ ID NO: 180859 - RNA, 21 nt, Artificial Sequence
  Synthetic
cuuucuggcaagcagucccaa

SEQ ID NO: 180860 - RNA, 22 nt, Artificial Sequence
  Synthetic
ccuuucuggcaagcagucccaa

SEQ ID NO: 180861 - RNA, 23 nt, Artificial Sequence
  Synthetic
accuuucuggcaagcagucccaa

SEQ ID NO: 180862 - RNA, 24 nt, Artificial Sequence
  Synthetic
caccuuucuggcaagcagucccaa

SEQ ID NO: 180863 - RNA, 18 nt, Artificial Sequence
  Synthetic
cacacagugccuucccaa

SEQ ID NO: 180864 - RNA, 19 nt, Artificial Sequence
  Synthetic
acacacagugccuucccaa

SEQ ID NO: 180865 - RNA, 20 nt, Artificial Sequence
  Synthetic
aacacacagugccuucccaa

SEQ ID NO: 180866 - RNA, 21 nt, Artificial Sequence
  Synthetic
gaacacacagugccuucccaa

SEQ ID NO: 180867 - RNA, 22 nt, Artificial Sequence
  Synthetic
agaacacacagugccuucccaa

SEQ ID NO: 180868 - RNA, 23 nt, Artificial Sequence
  Synthetic
gagaacacacagugccuucccaa

SEQ ID NO: 180869 - RNA, 24 nt, Artificial Sequence
  Synthetic
agagaacacacagugccuucccaa

SEQ ID NO: 180870 - RNA, 18 nt, Artificial Sequence
  Synthetic
gagcuuucuuguucccaa

SEQ ID NO: 180871 - RNA, 19 nt, Artificial Sequence
  Synthetic
ugagcuuucuuguucccaa

SEQ ID NO: 180872 - RNA, 20 nt, Artificial Sequence
  Synthetic
gugagcuuucuuguucccaa

SEQ ID NO: 180873 - RNA, 21 nt, Artificial Sequence
  Synthetic
cgugagcuuucuuguucccaa

SEQ ID NO: 180874 - RNA, 22 nt, Artificial Sequence
  Synthetic
acgugagcuuucuuguucccaa

SEQ ID NO: 180875 - RNA, 23 nt, Artificial Sequence
  Synthetic
uacgugagcuuucuuguucccaa

SEQ ID NO: 180876 - RNA, 24 nt, Artificial Sequence
  Synthetic
auacgugagcuuucuuguucccaa

SEQ ID NO: 180877 - RNA, 18 nt, Artificial Sequence
  Synthetic
uguuacuuuauuucccaa

SEQ ID NO: 180878 - RNA, 19 nt, Artificial Sequence
  Synthetic
uuguuacuuuauuucccaa

SEQ ID NO: 180879 - RNA, 20 nt, Artificial Sequence
  Synthetic
uuuguuacuuuauuucccaa

SEQ ID NO: 180880 - RNA, 21 nt, Artificial Sequence
  Synthetic
cuuuguuacuuuauuucccaa

SEQ ID NO: 180881 - RNA, 22 nt, Artificial Sequence
  Synthetic
ucuuuguuacuuuauuucccaa

SEQ ID NO: 180882 - RNA, 23 nt, Artificial Sequence
  Synthetic
aucuuuguuacuuuauuucccaa

SEQ ID NO: 180883 - RNA, 24 nt, Artificial Sequence
  Synthetic
aaucuuuguuacuuuauuucccaa

SEQ ID NO: 180884 - RNA, 18 nt, Artificial Sequence
  Synthetic
ccgggacaguuuucccaa

SEQ ID NO: 180885 - RNA, 19 nt, Artificial Sequence
  Synthetic
accgggacaguuuucccaa

SEQ ID NO: 180886 - RNA, 20 nt, Artificial Sequence
  Synthetic
uaccgggacaguuuucccaa

SEQ ID NO: 180887 - RNA, 21 nt, Artificial Sequence
  Synthetic
guaccgggacaguuuucccaa

SEQ ID NO: 180888 - RNA, 22 nt, Artificial Sequence
  Synthetic
gguaccgggacaguuuucccaa

SEQ ID NO: 180889 - RNA, 23 nt, Artificial Sequence
  Synthetic
agguaccgggacaguuuucccaa

SEQ ID NO: 180890 - RNA, 24 nt, Artificial Sequence
  Synthetic
cagguaccgggacaguuuucccaa

SEQ ID NO: 180891 - RNA, 18 nt, Artificial Sequence
  Synthetic
gugggaaaggaaagccaa

SEQ ID NO: 180892 - RNA, 19 nt, Artificial Sequence
  Synthetic
agugggaaaggaaagccaa

SEQ ID NO: 180893 - RNA, 20 nt, Artificial Sequence
  Synthetic
cagugggaaaggaaagccaa

SEQ ID NO: 180894 - RNA, 21 nt, Artificial Sequence
  Synthetic
acagugggaaaggaaagccaa

SEQ ID NO: 180895 - RNA, 22 nt, Artificial Sequence
  Synthetic
aacagugggaaaggaaagccaa

SEQ ID NO: 180896 - RNA, 23 nt, Artificial Sequence
  Synthetic
gaacagugggaaaggaaagccaa

SEQ ID NO: 180897 - RNA, 24 nt, Artificial Sequence
  Synthetic
agaacagugggaaaggaaagccaa

SEQ ID NO: 180898 - RNA, 18 nt, Artificial Sequence
  Synthetic
ucaggauacagaagccaa

SEQ ID NO: 180899 - RNA, 19 nt, Artificial Sequence
  Synthetic
gucaggauacagaagccaa

SEQ ID NO: 180900 - RNA, 20 nt, Artificial Sequence
  Synthetic
ggucaggauacagaagccaa

SEQ ID NO: 180901 - RNA, 21 nt, Artificial Sequence
  Synthetic
aggucaggauacagaagccaa

SEQ ID NO: 180902 - RNA, 22 nt, Artificial Sequence
  Synthetic
gaggucaggauacagaagccaa

SEQ ID NO: 180903 - RNA, 23 nt, Artificial Sequence
  Synthetic
agaggucaggauacagaagccaa

SEQ ID NO: 180904 - RNA, 24 nt, Artificial Sequence
  Synthetic
aagaggucaggauacagaagccaa

SEQ ID NO: 180905 - RNA, 18 nt, Artificial Sequence
  Synthetic
agaguccugagaagccaa

SEQ ID NO: 180906 - RNA, 19 nt, Artificial Sequence
  Synthetic
gagaguccugagaagccaa

SEQ ID NO: 180907 - RNA, 20 nt, Artificial Sequence
  Synthetic
ugagaguccugagaagccaa

SEQ ID NO: 180908 - RNA, 21 nt, Artificial Sequence
  Synthetic
augagaguccugagaagccaa

SEQ ID NO: 180909 - RNA, 22 nt, Artificial Sequence
  Synthetic
gaugagaguccugagaagccaa

SEQ ID NO: 180910 - RNA, 23 nt, Artificial Sequence
  Synthetic
ugaugagaguccugagaagccaa

SEQ ID NO: 180911 - RNA, 24 nt, Artificial Sequence
  Synthetic
gugaugagaguccugagaagccaa

SEQ ID NO: 180912 - RNA, 18 nt, Artificial Sequence
  Synthetic
aagucaauccuaagccaa

SEQ ID NO: 180913 - RNA, 19 nt, Artificial Sequence
  Synthetic
caagucaauccuaagccaa

SEQ ID NO: 180914 - RNA, 20 nt, Artificial Sequence
  Synthetic
ccaagucaauccuaagccaa

SEQ ID NO: 180915 - RNA, 18 nt, Artificial Sequence
  Synthetic
ccauuuaguaacagccaa

SEQ ID NO: 180916 - RNA, 19 nt, Artificial Sequence
  Synthetic
cccauuuaguaacagccaa

SEQ ID NO: 180917 - RNA, 20 nt, Artificial Sequence
  Synthetic
acccauuuaguaacagccaa

SEQ ID NO: 180918 - RNA, 21 nt, Artificial Sequence
  Synthetic
cacccauuuaguaacagccaa

SEQ ID NO: 180919 - RNA, 22 nt, Artificial Sequence
  Synthetic
gcacccauuuaguaacagccaa

SEQ ID NO: 180920 - RNA, 23 nt, Artificial Sequence
  Synthetic
agcacccauuuaguaacagccaa

SEQ ID NO: 180921 - RNA, 24 nt, Artificial Sequence
  Synthetic
uagcacccauuuaguaacagccaa

SEQ ID NO: 180922 - RNA, 18 nt, Artificial Sequence
  Synthetic
caacugcuugccagccaa

SEQ ID NO: 180923 - RNA, 19 nt, Artificial Sequence
  Synthetic
gcaacugcuugccagccaa

SEQ ID NO: 180924 - RNA, 20 nt, Artificial Sequence
  Synthetic
agcaacugcuugccagccaa

SEQ ID NO: 180925 - RNA, 21 nt, Artificial Sequence
  Synthetic
uagcaacugcuugccagccaa

SEQ ID NO: 180926 - RNA, 22 nt, Artificial Sequence
  Synthetic
auagcaacugcuugccagccaa

SEQ ID NO: 180927 - RNA, 23 nt, Artificial Sequence
  Synthetic
uauagcaacugcuugccagccaa

SEQ ID NO: 180928 - RNA, 24 nt, Artificial Sequence
  Synthetic
auauagcaacugcuugccagccaa

SEQ ID NO: 180929 - RNA, 18 nt, Artificial Sequence
  Synthetic
agaaccucccucagccaa

SEQ ID NO: 180930 - RNA, 19 nt, Artificial Sequence
  Synthetic
gagaaccucccucagccaa

SEQ ID NO: 180931 - RNA, 20 nt, Artificial Sequence
  Synthetic
agagaaccucccucagccaa

SEQ ID NO: 180932 - RNA, 21 nt, Artificial Sequence
  Synthetic
cagagaaccucccucagccaa

SEQ ID NO: 180933 - RNA, 22 nt, Artificial Sequence
  Synthetic
ccagagaaccucccucagccaa

SEQ ID NO: 180934 - RNA, 23 nt, Artificial Sequence
  Synthetic
uccagagaaccucccucagccaa

SEQ ID NO: 180935 - RNA, 24 nt, Artificial Sequence
  Synthetic
uuccagagaaccucccucagccaa

SEQ ID NO: 180936 - RNA, 18 nt, Artificial Sequence
  Synthetic
ugaagaucgcagagccaa

SEQ ID NO: 180937 - RNA, 19 nt, Artificial Sequence
  Synthetic
cugaagaucgcagagccaa

SEQ ID NO: 180938 - RNA, 20 nt, Artificial Sequence
  Synthetic
gcugaagaucgcagagccaa

SEQ ID NO: 180939 - RNA, 21 nt, Artificial Sequence
  Synthetic
ugcugaagaucgcagagccaa

SEQ ID NO: 180940 - RNA, 22 nt, Artificial Sequence
  Synthetic
uugcugaagaucgcagagccaa

SEQ ID NO: 180941 - RNA, 23 nt, Artificial Sequence
  Synthetic
uuugcugaagaucgcagagccaa

SEQ ID NO: 180942 - RNA, 24 nt, Artificial Sequence
  Synthetic
auuugcugaagaucgcagagccaa

SEQ ID NO: 180943 - RNA, 18 nt, Artificial Sequence
  Synthetic
aagucaauccugagccaa

SEQ ID NO: 180944 - RNA, 19 nt, Artificial Sequence
  Synthetic
caagucaauccugagccaa

SEQ ID NO: 180945 - RNA, 20 nt, Artificial Sequence
  Synthetic
ccaagucaauccugagccaa

SEQ ID NO: 180946 - RNA, 18 nt, Artificial Sequence
  Synthetic
gccaacagaaauagccaa

SEQ ID NO: 180947 - RNA, 19 nt, Artificial Sequence
  Synthetic
cgccaacagaaauagccaa

SEQ ID NO: 180948 - RNA, 20 nt, Artificial Sequence
  Synthetic
ucgccaacagaaauagccaa

SEQ ID NO: 180949 - RNA, 21 nt, Artificial Sequence
  Synthetic
cucgccaacagaaauagccaa

SEQ ID NO: 180950 - RNA, 22 nt, Artificial Sequence
  Synthetic
gcucgccaacagaaauagccaa

SEQ ID NO: 180951 - RNA, 23 nt, Artificial Sequence
  Synthetic
agcucgccaacagaaauagccaa

SEQ ID NO: 180952 - RNA, 24 nt, Artificial Sequence
  Synthetic
aagcucgccaacagaaauagccaa

SEQ ID NO: 180953 - RNA, 18 nt, Artificial Sequence
  Synthetic
acacucuuaaauagccaa

SEQ ID NO: 180954 - RNA, 19 nt, Artificial Sequence
  Synthetic
cacacucuuaaauagccaa

SEQ ID NO: 180955 - RNA, 20 nt, Artificial Sequence
  Synthetic
acacacucuuaaauagccaa

SEQ ID NO: 180956 - RNA, 21 nt, Artificial Sequence
  Synthetic
aacacacucuuaaauagccaa

SEQ ID NO: 180957 - RNA, 22 nt, Artificial Sequence
  Synthetic
caacacacucuuaaauagccaa

SEQ ID NO: 180958 - RNA, 23 nt, Artificial Sequence
  Synthetic
acaacacacucuuaaauagccaa

SEQ ID NO: 180959 - RNA, 24 nt, Artificial Sequence
  Synthetic
uacaacacacucuuaaauagccaa

SEQ ID NO: 180960 - RNA, 18 nt, Artificial Sequence
  Synthetic
caaacauacaauagccaa

SEQ ID NO: 180961 - RNA, 19 nt, Artificial Sequence
  Synthetic
ucaaacauacaauagccaa

SEQ ID NO: 180962 - RNA, 20 nt, Artificial Sequence
  Synthetic
cucaaacauacaauagccaa

SEQ ID NO: 180963 - RNA, 21 nt, Artificial Sequence
  Synthetic
ucucaaacauacaauagccaa

SEQ ID NO: 180964 - RNA, 22 nt, Artificial Sequence
  Synthetic
aucucaaacauacaauagccaa

SEQ ID NO: 180965 - RNA, 23 nt, Artificial Sequence
  Synthetic
caucucaaacauacaauagccaa

SEQ ID NO: 180966 - RNA, 24 nt, Artificial Sequence
  Synthetic
gcaucucaaacauacaauagccaa

SEQ ID NO: 180967 - RNA, 18 nt, Artificial Sequence
  Synthetic
auucccuccccuagccaa

SEQ ID NO: 180968 - RNA, 19 nt, Artificial Sequence
  Synthetic
aauucccuccccuagccaa

SEQ ID NO: 180969 - RNA, 20 nt, Artificial Sequence
  Synthetic
gaauucccuccccuagccaa

SEQ ID NO: 180970 - RNA, 21 nt, Artificial Sequence
  Synthetic
ggaauucccuccccuagccaa

SEQ ID NO: 180971 - RNA, 22 nt, Artificial Sequence
  Synthetic
gggaauucccuccccuagccaa

SEQ ID NO: 180972 - RNA, 23 nt, Artificial Sequence
  Synthetic
agggaauucccuccccuagccaa

SEQ ID NO: 180973 - RNA, 24 nt, Artificial Sequence
  Synthetic
cagggaauucccuccccuagccaa

SEQ ID NO: 180974 - RNA, 18 nt, Artificial Sequence
  Synthetic
uguaaagacaguagccaa

SEQ ID NO: 180975 - RNA, 19 nt, Artificial Sequence
  Synthetic
guguaaagacaguagccaa

SEQ ID NO: 180976 - RNA, 20 nt, Artificial Sequence
  Synthetic
aguguaaagacaguagccaa

SEQ ID NO: 180977 - RNA, 21 nt, Artificial Sequence
  Synthetic
caguguaaagacaguagccaa

SEQ ID NO: 180978 - RNA, 22 nt, Artificial Sequence
  Synthetic
ucaguguaaagacaguagccaa

SEQ ID NO: 180979 - RNA, 23 nt, Artificial Sequence
  Synthetic
uucaguguaaagacaguagccaa

SEQ ID NO: 180980 - RNA, 24 nt, Artificial Sequence
  Synthetic
auucaguguaaagacaguagccaa

SEQ ID NO: 180981 - RNA, 18 nt, Artificial Sequence
  Synthetic
uuugacuaagcucgccaa

SEQ ID NO: 180982 - RNA, 19 nt, Artificial Sequence
  Synthetic
cuuugacuaagcucgccaa

SEQ ID NO: 180983 - RNA, 20 nt, Artificial Sequence
  Synthetic
ucuuugacuaagcucgccaa

SEQ ID NO: 180984 - RNA, 21 nt, Artificial Sequence
  Synthetic
uucuuugacuaagcucgccaa

SEQ ID NO: 180985 - RNA, 22 nt, Artificial Sequence
  Synthetic
uuucuuugacuaagcucgccaa

SEQ ID NO: 180986 - RNA, 23 nt, Artificial Sequence
  Synthetic
guuucuuugacuaagcucgccaa

SEQ ID NO: 180987 - RNA, 24 nt, Artificial Sequence
  Synthetic
uguuucuuugacuaagcucgccaa

SEQ ID NO: 180988 - RNA, 18 nt, Artificial Sequence
  Synthetic
cauuaauuccaaggccaa

SEQ ID NO: 180989 - RNA, 19 nt, Artificial Sequence
  Synthetic
ucauuaauuccaaggccaa

SEQ ID NO: 180990 - RNA, 20 nt, Artificial Sequence
  Synthetic
uucauuaauuccaaggccaa

SEQ ID NO: 180991 - RNA, 21 nt, Artificial Sequence
  Synthetic
auucauuaauuccaaggccaa

SEQ ID NO: 180992 - RNA, 22 nt, Artificial Sequence
  Synthetic
aauucauuaauuccaaggccaa

SEQ ID NO: 180993 - RNA, 23 nt, Artificial Sequence
  Synthetic
aaauucauuaauuccaaggccaa

SEQ ID NO: 180994 - RNA, 24 nt, Artificial Sequence
  Synthetic
aaaauucauuaauuccaaggccaa

SEQ ID NO: 180995 - RNA, 18 nt, Artificial Sequence
  Synthetic
cuguuugacuaaggccaa

SEQ ID NO: 180996 - RNA, 19 nt, Artificial Sequence
  Synthetic
ucuguuugacuaaggccaa

SEQ ID NO: 180997 - RNA, 20 nt, Artificial Sequence
  Synthetic
uucuguuugacuaaggccaa

SEQ ID NO: 180998 - RNA, 21 nt, Artificial Sequence
  Synthetic
auucuguuugacuaaggccaa

SEQ ID NO: 180999 - RNA, 22 nt, Artificial Sequence
  Synthetic
gauucuguuugacuaaggccaa

SEQ ID NO: 181000 - RNA, 23 nt, Artificial Sequence
  Synthetic
ugauucuguuugacuaaggccaa

SEQ ID NO: 181001 - RNA, 24 nt, Artificial Sequence
  Synthetic
gugauucuguuugacuaaggccaa

SEQ ID NO: 181002 - RNA, 18 nt, Artificial Sequence
  Synthetic
aggugccucagaggccaa

SEQ ID NO: 181003 - RNA, 19 nt, Artificial Sequence
  Synthetic
aaggugccucagaggccaa

SEQ ID NO: 181004 - RNA, 20 nt, Artificial Sequence
  Synthetic
caaggugccucagaggccaa

SEQ ID NO: 181005 - RNA, 21 nt, Artificial Sequence
  Synthetic
gcaaggugccucagaggccaa

SEQ ID NO: 181006 - RNA, 22 nt, Artificial Sequence
  Synthetic
ugcaaggugccucagaggccaa

SEQ ID NO: 181007 - RNA, 23 nt, Artificial Sequence
  Synthetic
cugcaaggugccucagaggccaa

SEQ ID NO: 181008 - RNA, 24 nt, Artificial Sequence
  Synthetic
ucugcaaggugccucagaggccaa

SEQ ID NO: 181009 - RNA, 18 nt, Artificial Sequence
  Synthetic
caucuggaagggggccaa

SEQ ID NO: 181010 - RNA, 19 nt, Artificial Sequence
  Synthetic
acaucuggaagggggccaa

SEQ ID NO: 181011 - RNA, 20 nt, Artificial Sequence
  Synthetic
uacaucuggaagggggccaa

SEQ ID NO: 181012 - RNA, 21 nt, Artificial Sequence
  Synthetic
guacaucuggaagggggccaa

SEQ ID NO: 181013 - RNA, 22 nt, Artificial Sequence
  Synthetic
aguacaucuggaagggggccaa

SEQ ID NO: 181014 - RNA, 23 nt, Artificial Sequence
  Synthetic
aaguacaucuggaagggggccaa

SEQ ID NO: 181015 - RNA, 24 nt, Artificial Sequence
  Synthetic
aaaguacaucuggaagggggccaa

SEQ ID NO: 181016 - RNA, 18 nt, Artificial Sequence
  Synthetic
uucagacaauccugccaa

SEQ ID NO: 181017 - RNA, 19 nt, Artificial Sequence
  Synthetic
cuucagacaauccugccaa

SEQ ID NO: 181018 - RNA, 20 nt, Artificial Sequence
  Synthetic
gcuucagacaauccugccaa

SEQ ID NO: 181019 - RNA, 21 nt, Artificial Sequence
  Synthetic
ggcuucagacaauccugccaa

SEQ ID NO: 181020 - RNA, 22 nt, Artificial Sequence
  Synthetic
aggcuucagacaauccugccaa

SEQ ID NO: 181021 - RNA, 23 nt, Artificial Sequence
  Synthetic
aaggcuucagacaauccugccaa

SEQ ID NO: 181022 - RNA, 24 nt, Artificial Sequence
  Synthetic
uaaggcuucagacaauccugccaa

SEQ ID NO: 181023 - RNA, 18 nt, Artificial Sequence
  Synthetic
uuaagcucuugcugccaa

SEQ ID NO: 181024 - RNA, 19 nt, Artificial Sequence
  Synthetic
auuaagcucuugcugccaa

SEQ ID NO: 181025 - RNA, 20 nt, Artificial Sequence
  Synthetic
uauuaagcucuugcugccaa

SEQ ID NO: 181026 - RNA, 21 nt, Artificial Sequence
  Synthetic
auauuaagcucuugcugccaa

SEQ ID NO: 181027 - RNA, 22 nt, Artificial Sequence
  Synthetic
gauauuaagcucuugcugccaa

SEQ ID NO: 181028 - RNA, 23 nt, Artificial Sequence
  Synthetic
agauauuaagcucuugcugccaa

SEQ ID NO: 181029 - RNA, 24 nt, Artificial Sequence
  Synthetic
cagauauuaagcucuugcugccaa

SEQ ID NO: 181030 - RNA, 18 nt, Artificial Sequence
  Synthetic
agagguuugcagugccaa

SEQ ID NO: 181031 - RNA, 19 nt, Artificial Sequence
  Synthetic
uagagguuugcagugccaa

SEQ ID NO: 181032 - RNA, 20 nt, Artificial Sequence
  Synthetic
auagagguuugcagugccaa

SEQ ID NO: 181033 - RNA, 21 nt, Artificial Sequence
  Synthetic
gauagagguuugcagugccaa

SEQ ID NO: 181034 - RNA, 22 nt, Artificial Sequence
  Synthetic
ugauagagguuugcagugccaa

SEQ ID NO: 181035 - RNA, 23 nt, Artificial Sequence
  Synthetic
augauagagguuugcagugccaa

SEQ ID NO: 181036 - RNA, 24 nt, Artificial Sequence
  Synthetic
aaugauagagguuugcagugccaa

SEQ ID NO: 181037 - RNA, 18 nt, Artificial Sequence
  Synthetic
uaccuuugaaaaauccaa

SEQ ID NO: 181038 - RNA, 19 nt, Artificial Sequence
  Synthetic
auaccuuugaaaaauccaa

SEQ ID NO: 181039 - RNA, 20 nt, Artificial Sequence
  Synthetic
gauaccuuugaaaaauccaa

SEQ ID NO: 181040 - RNA, 21 nt, Artificial Sequence
  Synthetic
agauaccuuugaaaaauccaa

SEQ ID NO: 181041 - RNA, 22 nt, Artificial Sequence
  Synthetic
gagauaccuuugaaaaauccaa

SEQ ID NO: 181042 - RNA, 23 nt, Artificial Sequence
  Synthetic
ugagauaccuuugaaaaauccaa

SEQ ID NO: 181043 - RNA, 24 nt, Artificial Sequence
  Synthetic
uugagauaccuuugaaaaauccaa

SEQ ID NO: 181044 - RNA, 18 nt, Artificial Sequence
  Synthetic
cuccuaccccaaauccaa

SEQ ID NO: 181045 - RNA, 19 nt, Artificial Sequence
  Synthetic
ccuccuaccccaaauccaa

SEQ ID NO: 181046 - RNA, 20 nt, Artificial Sequence
  Synthetic
uccuccuaccccaaauccaa

SEQ ID NO: 181047 - RNA, 21 nt, Artificial Sequence
  Synthetic
uuccuccuaccccaaauccaa

SEQ ID NO: 181048 - RNA, 22 nt, Artificial Sequence
  Synthetic
cuuccuccuaccccaaauccaa

SEQ ID NO: 181049 - RNA, 23 nt, Artificial Sequence
  Synthetic
ccuuccuccuaccccaaauccaa

SEQ ID NO: 181050 - RNA, 24 nt, Artificial Sequence
  Synthetic
cccuuccuccuaccccaaauccaa

SEQ ID NO: 181051 - RNA, 18 nt, Artificial Sequence
  Synthetic
acaguagaugcaauccaa

SEQ ID NO: 181052 - RNA, 19 nt, Artificial Sequence
  Synthetic
uacaguagaugcaauccaa

SEQ ID NO: 181053 - RNA, 20 nt, Artificial Sequence
  Synthetic
auacaguagaugcaauccaa

SEQ ID NO: 181054 - RNA, 21 nt, Artificial Sequence
  Synthetic
uauacaguagaugcaauccaa

SEQ ID NO: 181055 - RNA, 22 nt, Artificial Sequence
  Synthetic
cuauacaguagaugcaauccaa

SEQ ID NO: 181056 - RNA, 23 nt, Artificial Sequence
  Synthetic
ccuauacaguagaugcaauccaa

SEQ ID NO: 181057 - RNA, 24 nt, Artificial Sequence
  Synthetic
cccuauacaguagaugcaauccaa

SEQ ID NO: 181058 - RNA, 18 nt, Artificial Sequence
  Synthetic
ugaugucacagaauccaa

SEQ ID NO: 181059 - RNA, 19 nt, Artificial Sequence
  Synthetic
gugaugucacagaauccaa

SEQ ID NO: 181060 - RNA, 20 nt, Artificial Sequence
  Synthetic
ugugaugucacagaauccaa

SEQ ID NO: 181061 - RNA, 21 nt, Artificial Sequence
  Synthetic
gugugaugucacagaauccaa

SEQ ID NO: 181062 - RNA, 22 nt, Artificial Sequence
  Synthetic
cgugugaugucacagaauccaa

SEQ ID NO: 181063 - RNA, 23 nt, Artificial Sequence
  Synthetic
ucgugugaugucacagaauccaa

SEQ ID NO: 181064 - RNA, 24 nt, Artificial Sequence
  Synthetic
uucgugugaugucacagaauccaa

SEQ ID NO: 181065 - RNA, 18 nt, Artificial Sequence
  Synthetic
ggugacaagauaauccaa

SEQ ID NO: 181066 - RNA, 19 nt, Artificial Sequence
  Synthetic
aggugacaagauaauccaa

SEQ ID NO: 181067 - RNA, 20 nt, Artificial Sequence
  Synthetic
aaggugacaagauaauccaa

SEQ ID NO: 181068 - RNA, 21 nt, Artificial Sequence
  Synthetic
aaaggugacaagauaauccaa

SEQ ID NO: 181069 - RNA, 22 nt, Artificial Sequence
  Synthetic
caaaggugacaagauaauccaa

SEQ ID NO: 181070 - RNA, 23 nt, Artificial Sequence
  Synthetic
acaaaggugacaagauaauccaa

SEQ ID NO: 181071 - RNA, 24 nt, Artificial Sequence
  Synthetic
gacaaaggugacaagauaauccaa

SEQ ID NO: 181072 - RNA, 18 nt, Artificial Sequence
  Synthetic
aaagaacagauaauccaa

SEQ ID NO: 181073 - RNA, 19 nt, Artificial Sequence
  Synthetic
aaaagaacagauaauccaa

SEQ ID NO: 181074 - RNA, 20 nt, Artificial Sequence
  Synthetic
gaaaagaacagauaauccaa

SEQ ID NO: 181075 - RNA, 21 nt, Artificial Sequence
  Synthetic
agaaaagaacagauaauccaa

SEQ ID NO: 181076 - RNA, 22 nt, Artificial Sequence
  Synthetic
cagaaaagaacagauaauccaa

SEQ ID NO: 181077 - RNA, 23 nt, Artificial Sequence
  Synthetic
ucagaaaagaacagauaauccaa

SEQ ID NO: 181078 - RNA, 24 nt, Artificial Sequence
  Synthetic
uucagaaaagaacagauaauccaa

SEQ ID NO: 181079 - RNA, 18 nt, Artificial Sequence
  Synthetic
uuucacuucaucauccaa

SEQ ID NO: 181080 - RNA, 19 nt, Artificial Sequence
  Synthetic
auuucacuucaucauccaa

SEQ ID NO: 181081 - RNA, 20 nt, Artificial Sequence
  Synthetic
cauuucacuucaucauccaa

SEQ ID NO: 181082 - RNA, 21 nt, Artificial Sequence
  Synthetic
ucauuucacuucaucauccaa

SEQ ID NO: 181083 - RNA, 22 nt, Artificial Sequence
  Synthetic
uucauuucacuucaucauccaa

SEQ ID NO: 181084 - RNA, 23 nt, Artificial Sequence
  Synthetic
uuucauuucacuucaucauccaa

SEQ ID NO: 181085 - RNA, 24 nt, Artificial Sequence
  Synthetic
uuuucauuucacuucaucauccaa

SEQ ID NO: 181086 - RNA, 18 nt, Artificial Sequence
  Synthetic
aguccuuuagucauccaa

SEQ ID NO: 181087 - RNA, 19 nt, Artificial Sequence
  Synthetic
aaguccuuuagucauccaa

SEQ ID NO: 181088 - RNA, 20 nt, Artificial Sequence
  Synthetic
aaaguccuuuagucauccaa

SEQ ID NO: 181089 - RNA, 21 nt, Artificial Sequence
  Synthetic
caaaguccuuuagucauccaa

SEQ ID NO: 181090 - RNA, 22 nt, Artificial Sequence
  Synthetic
acaaaguccuuuagucauccaa

SEQ ID NO: 181091 - RNA, 23 nt, Artificial Sequence
  Synthetic
uacaaaguccuuuagucauccaa

SEQ ID NO: 181092 - RNA, 24 nt, Artificial Sequence
  Synthetic
guacaaaguccuuuagucauccaa

SEQ ID NO: 181093 - RNA, 18 nt, Artificial Sequence
  Synthetic
gcacucuuguggauccaa

SEQ ID NO: 181094 - RNA, 19 nt, Artificial Sequence
  Synthetic
agcacucuuguggauccaa

SEQ ID NO: 181095 - RNA, 20 nt, Artificial Sequence
  Synthetic
uagcacucuuguggauccaa

SEQ ID NO: 181096 - RNA, 21 nt, Artificial Sequence
  Synthetic
uuagcacucuuguggauccaa

SEQ ID NO: 181097 - RNA, 22 nt, Artificial Sequence
  Synthetic
uuuagcacucuuguggauccaa

SEQ ID NO: 181098 - RNA, 23 nt, Artificial Sequence
  Synthetic
cuuuagcacucuuguggauccaa

SEQ ID NO: 181099 - RNA, 24 nt, Artificial Sequence
  Synthetic
gcuuuagcacucuuguggauccaa

SEQ ID NO: 181100 - RNA, 18 nt, Artificial Sequence
  Synthetic
uacugaguagauauccaa

SEQ ID NO: 181101 - RNA, 19 nt, Artificial Sequence
  Synthetic
uuacugaguagauauccaa

SEQ ID NO: 181102 - RNA, 20 nt, Artificial Sequence
  Synthetic
auuacugaguagauauccaa

SEQ ID NO: 181103 - RNA, 21 nt, Artificial Sequence
  Synthetic
cauuacugaguagauauccaa

SEQ ID NO: 181104 - RNA, 22 nt, Artificial Sequence
  Synthetic
ccauuacugaguagauauccaa

SEQ ID NO: 181105 - RNA, 23 nt, Artificial Sequence
  Synthetic
cccauuacugaguagauauccaa

SEQ ID NO: 181106 - RNA, 24 nt, Artificial Sequence
  Synthetic
ucccauuacugaguagauauccaa

SEQ ID NO: 181107 - RNA, 18 nt, Artificial Sequence
  Synthetic
gucucauuagauauccaa

SEQ ID NO: 181108 - RNA, 19 nt, Artificial Sequence
  Synthetic
agucucauuagauauccaa

SEQ ID NO: 181109 - RNA, 20 nt, Artificial Sequence
  Synthetic
gagucucauuagauauccaa

SEQ ID NO: 181110 - RNA, 21 nt, Artificial Sequence
  Synthetic
agagucucauuagauauccaa

SEQ ID NO: 181111 - RNA, 22 nt, Artificial Sequence
  Synthetic
cagagucucauuagauauccaa

SEQ ID NO: 181112 - RNA, 23 nt, Artificial Sequence
  Synthetic
ucagagucucauuagauauccaa

SEQ ID NO: 181113 - RNA, 24 nt, Artificial Sequence
  Synthetic
aucagagucucauuagauauccaa

SEQ ID NO: 181114 - RNA, 18 nt, Artificial Sequence
  Synthetic
uacgugcauuuuauccaa

SEQ ID NO: 181115 - RNA, 19 nt, Artificial Sequence
  Synthetic
cuacgugcauuuuauccaa

SEQ ID NO: 181116 - RNA, 20 nt, Artificial Sequence
  Synthetic
acuacgugcauuuuauccaa

SEQ ID NO: 181117 - RNA, 21 nt, Artificial Sequence
  Synthetic
uacuacgugcauuuuauccaa

SEQ ID NO: 181118 - RNA, 22 nt, Artificial Sequence
  Synthetic
auacuacgugcauuuuauccaa

SEQ ID NO: 181119 - RNA, 23 nt, Artificial Sequence
  Synthetic
cauacuacgugcauuuuauccaa

SEQ ID NO: 181120 - RNA, 24 nt, Artificial Sequence
  Synthetic
ucauacuacgugcauuuuauccaa

SEQ ID NO: 181121 - RNA, 18 nt, Artificial Sequence
  Synthetic
auuacugggaaacuccaa

SEQ ID NO: 181122 - RNA, 19 nt, Artificial Sequence
  Synthetic
uauuacugggaaacuccaa

SEQ ID NO: 181123 - RNA, 20 nt, Artificial Sequence
  Synthetic
guauuacugggaaacuccaa

SEQ ID NO: 181124 - RNA, 21 nt, Artificial Sequence
  Synthetic
uguauuacugggaaacuccaa

SEQ ID NO: 181125 - RNA, 22 nt, Artificial Sequence
  Synthetic
auguauuacugggaaacuccaa

SEQ ID NO: 181126 - RNA, 23 nt, Artificial Sequence
  Synthetic
gauguauuacugggaaacuccaa

SEQ ID NO: 181127 - RNA, 24 nt, Artificial Sequence
  Synthetic
agauguauuacugggaaacuccaa

SEQ ID NO: 181128 - RNA, 18 nt, Artificial Sequence
  Synthetic
caaauuucugaacuccaa

SEQ ID NO: 181129 - RNA, 19 nt, Artificial Sequence
  Synthetic
gcaaauuucugaacuccaa

SEQ ID NO: 181130 - RNA, 20 nt, Artificial Sequence
  Synthetic
ggcaaauuucugaacuccaa

SEQ ID NO: 181131 - RNA, 21 nt, Artificial Sequence
  Synthetic
uggcaaauuucugaacuccaa

SEQ ID NO: 181132 - RNA, 22 nt, Artificial Sequence
  Synthetic
uuggcaaauuucugaacuccaa

SEQ ID NO: 181133 - RNA, 23 nt, Artificial Sequence
  Synthetic
auuggcaaauuucugaacuccaa

SEQ ID NO: 181134 - RNA, 24 nt, Artificial Sequence
  Synthetic
cauuggcaaauuucugaacuccaa

SEQ ID NO: 181135 - RNA, 18 nt, Artificial Sequence
  Synthetic
ccagcaccaucacuccaa

SEQ ID NO: 181136 - RNA, 19 nt, Artificial Sequence
  Synthetic
cccagcaccaucacuccaa

SEQ ID NO: 181137 - RNA, 20 nt, Artificial Sequence
  Synthetic
gcccagcaccaucacuccaa

SEQ ID NO: 181138 - RNA, 21 nt, Artificial Sequence
  Synthetic
agcccagcaccaucacuccaa

SEQ ID NO: 181139 - RNA, 22 nt, Artificial Sequence
  Synthetic
cagcccagcaccaucacuccaa

SEQ ID NO: 181140 - RNA, 23 nt, Artificial Sequence
  Synthetic
gcagcccagcaccaucacuccaa

SEQ ID NO: 181141 - RNA, 24 nt, Artificial Sequence
  Synthetic
agcagcccagcaccaucacuccaa

SEQ ID NO: 181142 - RNA, 18 nt, Artificial Sequence
  Synthetic
agauggaugugacuccaa

SEQ ID NO: 181143 - RNA, 19 nt, Artificial Sequence
  Synthetic
gagauggaugugacuccaa

SEQ ID NO: 181144 - RNA, 20 nt, Artificial Sequence
  Synthetic
agagauggaugugacuccaa

SEQ ID NO: 181145 - RNA, 21 nt, Artificial Sequence
  Synthetic
gagagauggaugugacuccaa

SEQ ID NO: 181146 - RNA, 22 nt, Artificial Sequence
  Synthetic
agagagauggaugugacuccaa

SEQ ID NO: 181147 - RNA, 23 nt, Artificial Sequence
  Synthetic
gagagagauggaugugacuccaa

SEQ ID NO: 181148 - RNA, 24 nt, Artificial Sequence
  Synthetic
agagagagauggaugugacuccaa

SEQ ID NO: 181149 - RNA, 18 nt, Artificial Sequence
  Synthetic
gaugaauaaauacuccaa

SEQ ID NO: 181150 - RNA, 19 nt, Artificial Sequence
  Synthetic
agaugaauaaauacuccaa

SEQ ID NO: 181151 - RNA, 20 nt, Artificial Sequence
  Synthetic
aagaugaauaaauacuccaa

SEQ ID NO: 181152 - RNA, 21 nt, Artificial Sequence
  Synthetic
uaagaugaauaaauacuccaa

SEQ ID NO: 181153 - RNA, 22 nt, Artificial Sequence
  Synthetic
auaagaugaauaaauacuccaa

SEQ ID NO: 181154 - RNA, 23 nt, Artificial Sequence
  Synthetic
uauaagaugaauaaauacuccaa

SEQ ID NO: 181155 - RNA, 24 nt, Artificial Sequence
  Synthetic
uuauaagaugaauaaauacuccaa

SEQ ID NO: 181156 - RNA, 18 nt, Artificial Sequence
  Synthetic
gugaacauggaccuccaa

SEQ ID NO: 181157 - RNA, 19 nt, Artificial Sequence
  Synthetic
cgugaacauggaccuccaa

SEQ ID NO: 181158 - RNA, 20 nt, Artificial Sequence
  Synthetic
acgugaacauggaccuccaa

SEQ ID NO: 181159 - RNA, 21 nt, Artificial Sequence
  Synthetic
aacgugaacauggaccuccaa

SEQ ID NO: 181160 - RNA, 22 nt, Artificial Sequence
  Synthetic
aaacgugaacauggaccuccaa

SEQ ID NO: 181161 - RNA, 23 nt, Artificial Sequence
  Synthetic
caaacgugaacauggaccuccaa

SEQ ID NO: 181162 - RNA, 24 nt, Artificial Sequence
  Synthetic
acaaacgugaacauggaccuccaa

SEQ ID NO: 181163 - RNA, 18 nt, Artificial Sequence
  Synthetic
ugguucuucuuccuccaa

SEQ ID NO: 181164 - RNA, 19 nt, Artificial Sequence
  Synthetic
cugguucuucuuccuccaa

SEQ ID NO: 181165 - RNA, 20 nt, Artificial Sequence
  Synthetic
ucugguucuucuuccuccaa

SEQ ID NO: 181166 - RNA, 21 nt, Artificial Sequence
  Synthetic
uucugguucuucuuccuccaa

SEQ ID NO: 181167 - RNA, 22 nt, Artificial Sequence
  Synthetic
uuucugguucuucuuccuccaa

SEQ ID NO: 181168 - RNA, 23 nt, Artificial Sequence
  Synthetic
cuuucugguucuucuuccuccaa

SEQ ID NO: 181169 - RNA, 24 nt, Artificial Sequence
  Synthetic
ucuuucugguucuucuuccuccaa

SEQ ID NO: 181170 - RNA, 18 nt, Artificial Sequence
  Synthetic
cacccauaaaaucuccaa

SEQ ID NO: 181171 - RNA, 19 nt, Artificial Sequence
  Synthetic
acacccauaaaaucuccaa

SEQ ID NO: 181172 - RNA, 20 nt, Artificial Sequence
  Synthetic
gacacccauaaaaucuccaa

SEQ ID NO: 181173 - RNA, 21 nt, Artificial Sequence
  Synthetic
agacacccauaaaaucuccaa

SEQ ID NO: 181174 - RNA, 22 nt, Artificial Sequence
  Synthetic
uagacacccauaaaaucuccaa

SEQ ID NO: 181175 - RNA, 23 nt, Artificial Sequence
  Synthetic
uuagacacccauaaaaucuccaa

SEQ ID NO: 181176 - RNA, 24 nt, Artificial Sequence
  Synthetic
uuuagacacccauaaaaucuccaa

SEQ ID NO: 181177 - RNA, 18 nt, Artificial Sequence
  Synthetic
uucugcucuugucuccaa

SEQ ID NO: 181178 - RNA, 19 nt, Artificial Sequence
  Synthetic
uuucugcucuugucuccaa

SEQ ID NO: 181179 - RNA, 20 nt, Artificial Sequence
  Synthetic
auuucugcucuugucuccaa

SEQ ID NO: 181180 - RNA, 21 nt, Artificial Sequence
  Synthetic
aauuucugcucuugucuccaa

SEQ ID NO: 181181 - RNA, 22 nt, Artificial Sequence
  Synthetic
aaauuucugcucuugucuccaa

SEQ ID NO: 181182 - RNA, 23 nt, Artificial Sequence
  Synthetic
aaaauuucugcucuugucuccaa

SEQ ID NO: 181183 - RNA, 24 nt, Artificial Sequence
  Synthetic
caaaauuucugcucuugucuccaa

SEQ ID NO: 181184 - RNA, 18 nt, Artificial Sequence
  Synthetic
gaguagucucuucuccaa

SEQ ID NO: 181185 - RNA, 19 nt, Artificial Sequence
  Synthetic
agaguagucucuucuccaa

SEQ ID NO: 181186 - RNA, 20 nt, Artificial Sequence
  Synthetic
cagaguagucucuucuccaa

SEQ ID NO: 181187 - RNA, 21 nt, Artificial Sequence
  Synthetic
ucagaguagucucuucuccaa

SEQ ID NO: 181188 - RNA, 22 nt, Artificial Sequence
  Synthetic
aucagaguagucucuucuccaa

SEQ ID NO: 181189 - RNA, 23 nt, Artificial Sequence
  Synthetic
aaucagaguagucucuucuccaa

SEQ ID NO: 181190 - RNA, 24 nt, Artificial Sequence
  Synthetic
gaaucagaguagucucuucuccaa

SEQ ID NO: 181191 - RNA, 18 nt, Artificial Sequence
  Synthetic
cuugggugcuuucuccaa

SEQ ID NO: 181192 - RNA, 19 nt, Artificial Sequence
  Synthetic
gcuugggugcuuucuccaa

SEQ ID NO: 181193 - RNA, 20 nt, Artificial Sequence
  Synthetic
ggcuugggugcuuucuccaa

SEQ ID NO: 181194 - RNA, 21 nt, Artificial Sequence
  Synthetic
aggcuugggugcuuucuccaa

SEQ ID NO: 181195 - RNA, 22 nt, Artificial Sequence
  Synthetic
uaggcuugggugcuuucuccaa

SEQ ID NO: 181196 - RNA, 23 nt, Artificial Sequence
  Synthetic
guaggcuugggugcuuucuccaa

SEQ ID NO: 181197 - RNA, 24 nt, Artificial Sequence
  Synthetic
uguaggcuugggugcuuucuccaa

SEQ ID NO: 181198 - RNA, 18 nt, Artificial Sequence
  Synthetic
acaugguauuuucuccaa

SEQ ID NO: 181199 - RNA, 19 nt, Artificial Sequence
  Synthetic
cacaugguauuuucuccaa

SEQ ID NO: 181200 - RNA, 20 nt, Artificial Sequence
  Synthetic
ucacaugguauuuucuccaa

SEQ ID NO: 181201 - RNA, 21 nt, Artificial Sequence
  Synthetic
uucacaugguauuuucuccaa

SEQ ID NO: 181202 - RNA, 22 nt, Artificial Sequence
  Synthetic
auucacaugguauuuucuccaa

SEQ ID NO: 181203 - RNA, 23 nt, Artificial Sequence
  Synthetic
cauucacaugguauuuucuccaa

SEQ ID NO: 181204 - RNA, 24 nt, Artificial Sequence
  Synthetic
ucauucacaugguauuuucuccaa

SEQ ID NO: 181205 - RNA, 18 nt, Artificial Sequence
  Synthetic
ggccucuguuuucuccaa

SEQ ID NO: 181206 - RNA, 19 nt, Artificial Sequence
  Synthetic
uggccucuguuuucuccaa

SEQ ID NO: 181207 - RNA, 20 nt, Artificial Sequence
  Synthetic
uuggccucuguuuucuccaa

SEQ ID NO: 181208 - RNA, 21 nt, Artificial Sequence
  Synthetic
cuuggccucuguuuucuccaa

SEQ ID NO: 181209 - RNA, 22 nt, Artificial Sequence
  Synthetic
acuuggccucuguuuucuccaa

SEQ ID NO: 181210 - RNA, 23 nt, Artificial Sequence
  Synthetic
uacuuggccucuguuuucuccaa

SEQ ID NO: 181211 - RNA, 24 nt, Artificial Sequence
  Synthetic
uuacuuggccucuguuuucuccaa

SEQ ID NO: 181212 - RNA, 18 nt, Artificial Sequence
  Synthetic
auuuucguuaucguccaa

SEQ ID NO: 181213 - RNA, 19 nt, Artificial Sequence
  Synthetic
cauuuucguuaucguccaa

SEQ ID NO: 181214 - RNA, 20 nt, Artificial Sequence
  Synthetic
acauuuucguuaucguccaa

SEQ ID NO: 181215 - RNA, 21 nt, Artificial Sequence
  Synthetic
aacauuuucguuaucguccaa

SEQ ID NO: 181216 - RNA, 22 nt, Artificial Sequence
  Synthetic
gaacauuuucguuaucguccaa

SEQ ID NO: 181217 - RNA, 23 nt, Artificial Sequence
  Synthetic
agaacauuuucguuaucguccaa

SEQ ID NO: 181218 - RNA, 24 nt, Artificial Sequence
  Synthetic
cagaacauuuucguuaucguccaa

SEQ ID NO: 181219 - RNA, 18 nt, Artificial Sequence
  Synthetic
acaaggcagcagguccaa

SEQ ID NO: 181220 - RNA, 19 nt, Artificial Sequence
  Synthetic
cacaaggcagcagguccaa

SEQ ID NO: 181221 - RNA, 20 nt, Artificial Sequence
  Synthetic
ucacaaggcagcagguccaa

SEQ ID NO: 181222 - RNA, 21 nt, Artificial Sequence
  Synthetic
cucacaaggcagcagguccaa

SEQ ID NO: 181223 - RNA, 22 nt, Artificial Sequence
  Synthetic
ccucacaaggcagcagguccaa

SEQ ID NO: 181224 - RNA, 23 nt, Artificial Sequence
  Synthetic
accucacaaggcagcagguccaa

SEQ ID NO: 181225 - RNA, 24 nt, Artificial Sequence
  Synthetic
aaccucacaaggcagcagguccaa

SEQ ID NO: 181226 - RNA, 18 nt, Artificial Sequence
  Synthetic
aauuuccaaccuguccaa

SEQ ID NO: 181227 - RNA, 19 nt, Artificial Sequence
  Synthetic
uaauuuccaaccuguccaa

SEQ ID NO: 181228 - RNA, 20 nt, Artificial Sequence
  Synthetic
uuaauuuccaaccuguccaa

SEQ ID NO: 181229 - RNA, 21 nt, Artificial Sequence
  Synthetic
uuuaauuuccaaccuguccaa

SEQ ID NO: 181230 - RNA, 22 nt, Artificial Sequence
  Synthetic
uuuuaauuuccaaccuguccaa

SEQ ID NO: 181231 - RNA, 23 nt, Artificial Sequence
  Synthetic
uuuuuaauuuccaaccuguccaa

SEQ ID NO: 181232 - RNA, 24 nt, Artificial Sequence
  Synthetic
guuuuuaauuuccaaccuguccaa

SEQ ID NO: 181233 - RNA, 18 nt, Artificial Sequence
  Synthetic
uaaagugguguuguccaa

SEQ ID NO: 181234 - RNA, 19 nt, Artificial Sequence
  Synthetic
uuaaagugguguuguccaa

SEQ ID NO: 181235 - RNA, 20 nt, Artificial Sequence
  Synthetic
uuuaaagugguguuguccaa

SEQ ID NO: 181236 - RNA, 21 nt, Artificial Sequence
  Synthetic
guuuaaagugguguuguccaa

SEQ ID NO: 181237 - RNA, 22 nt, Artificial Sequence
  Synthetic
uguuuaaagugguguuguccaa

SEQ ID NO: 181238 - RNA, 23 nt, Artificial Sequence
  Synthetic
guguuuaaagugguguuguccaa

SEQ ID NO: 181239 - RNA, 24 nt, Artificial Sequence
  Synthetic
aguguuuaaagugguguuguccaa

SEQ ID NO: 181240 - RNA, 18 nt, Artificial Sequence
  Synthetic
aauuaggcaaaauuccaa

SEQ ID NO: 181241 - RNA, 19 nt, Artificial Sequence
  Synthetic
aaauuaggcaaaauuccaa

SEQ ID NO: 181242 - RNA, 20 nt, Artificial Sequence
  Synthetic
aaaauuaggcaaaauuccaa

SEQ ID NO: 181243 - RNA, 21 nt, Artificial Sequence
  Synthetic
aaaaauuaggcaaaauuccaa

SEQ ID NO: 181244 - RNA, 22 nt, Artificial Sequence
  Synthetic
gaaaaauuaggcaaaauuccaa

SEQ ID NO: 181245 - RNA, 23 nt, Artificial Sequence
  Synthetic
ugaaaaauuaggcaaaauuccaa

SEQ ID NO: 181246 - RNA, 24 nt, Artificial Sequence
  Synthetic
gugaaaaauuaggcaaaauuccaa

SEQ ID NO: 181247 - RNA, 18 nt, Artificial Sequence
  Synthetic
ugaaguaacuaauuccaa

SEQ ID NO: 181248 - RNA, 19 nt, Artificial Sequence
  Synthetic
augaaguaacuaauuccaa

SEQ ID NO: 181249 - RNA, 20 nt, Artificial Sequence
  Synthetic
uaugaaguaacuaauuccaa

SEQ ID NO: 181250 - RNA, 21 nt, Artificial Sequence
  Synthetic
uuaugaaguaacuaauuccaa

SEQ ID NO: 181251 - RNA, 22 nt, Artificial Sequence
  Synthetic
cuuaugaaguaacuaauuccaa

SEQ ID NO: 181252 - RNA, 23 nt, Artificial Sequence
  Synthetic
ucuuaugaaguaacuaauuccaa

SEQ ID NO: 181253 - RNA, 24 nt, Artificial Sequence
  Synthetic
gucuuaugaaguaacuaauuccaa

SEQ ID NO: 181254 - RNA, 18 nt, Artificial Sequence
  Synthetic
uggaggauucacuuccaa

SEQ ID NO: 181255 - RNA, 19 nt, Artificial Sequence
  Synthetic
cuggaggauucacuuccaa

SEQ ID NO: 181256 - RNA, 20 nt, Artificial Sequence
  Synthetic
gcuggaggauucacuuccaa

SEQ ID NO: 181257 - RNA, 21 nt, Artificial Sequence
  Synthetic
ugcuggaggauucacuuccaa

SEQ ID NO: 181258 - RNA, 22 nt, Artificial Sequence
  Synthetic
augcuggaggauucacuuccaa

SEQ ID NO: 181259 - RNA, 23 nt, Artificial Sequence
  Synthetic
gaugcuggaggauucacuuccaa

SEQ ID NO: 181260 - RNA, 24 nt, Artificial Sequence
  Synthetic
ugaugcuggaggauucacuuccaa

SEQ ID NO: 181261 - RNA, 18 nt, Artificial Sequence
  Synthetic
ugugaagaagccuuccaa

SEQ ID NO: 181262 - RNA, 19 nt, Artificial Sequence
  Synthetic
cugugaagaagccuuccaa

SEQ ID NO: 181263 - RNA, 20 nt, Artificial Sequence
  Synthetic
ucugugaagaagccuuccaa

SEQ ID NO: 181264 - RNA, 21 nt, Artificial Sequence
  Synthetic
uucugugaagaagccuuccaa

SEQ ID NO: 181265 - RNA, 22 nt, Artificial Sequence
  Synthetic
guucugugaagaagccuuccaa

SEQ ID NO: 181266 - RNA, 23 nt, Artificial Sequence
  Synthetic
aguucugugaagaagccuuccaa

SEQ ID NO: 181267 - RNA, 24 nt, Artificial Sequence
  Synthetic
gaguucugugaagaagccuuccaa

SEQ ID NO: 181268 - RNA, 18 nt, Artificial Sequence
  Synthetic
cuagggaucagcuuccaa

SEQ ID NO: 181269 - RNA, 19 nt, Artificial Sequence
  Synthetic
ccuagggaucagcuuccaa

SEQ ID NO: 181270 - RNA, 20 nt, Artificial Sequence
  Synthetic
uccuagggaucagcuuccaa

SEQ ID NO: 181271 - RNA, 21 nt, Artificial Sequence
  Synthetic
uuccuagggaucagcuuccaa

SEQ ID NO: 181272 - RNA, 22 nt, Artificial Sequence
  Synthetic
cuuccuagggaucagcuuccaa

SEQ ID NO: 181273 - RNA, 23 nt, Artificial Sequence
  Synthetic
gcuuccuagggaucagcuuccaa

SEQ ID NO: 181274 - RNA, 24 nt, Artificial Sequence
  Synthetic
ugcuuccuagggaucagcuuccaa

SEQ ID NO: 181275 - RNA, 18 nt, Artificial Sequence
  Synthetic
guuuaggacugcuuccaa

SEQ ID NO: 181276 - RNA, 19 nt, Artificial Sequence
  Synthetic
gguuuaggacugcuuccaa

SEQ ID NO: 181277 - RNA, 20 nt, Artificial Sequence
  Synthetic
ugguuuaggacugcuuccaa

SEQ ID NO: 181278 - RNA, 21 nt, Artificial Sequence
  Synthetic
uugguuuaggacugcuuccaa

SEQ ID NO: 181279 - RNA, 22 nt, Artificial Sequence
  Synthetic
auugguuuaggacugcuuccaa

SEQ ID NO: 181280 - RNA, 23 nt, Artificial Sequence
  Synthetic
cauugguuuaggacugcuuccaa

SEQ ID NO: 181281 - RNA, 24 nt, Artificial Sequence
  Synthetic
ucauugguuuaggacugcuuccaa

SEQ ID NO: 181282 - RNA, 18 nt, Artificial Sequence
  Synthetic
cugcuuaaacucuuccaa

SEQ ID NO: 181283 - RNA, 19 nt, Artificial Sequence
  Synthetic
acugcuuaaacucuuccaa

SEQ ID NO: 181284 - RNA, 20 nt, Artificial Sequence
  Synthetic
aacugcuuaaacucuuccaa

SEQ ID NO: 181285 - RNA, 21 nt, Artificial Sequence
  Synthetic
aaacugcuuaaacucuuccaa

SEQ ID NO: 181286 - RNA, 22 nt, Artificial Sequence
  Synthetic
aaaacugcuuaaacucuuccaa

SEQ ID NO: 181287 - RNA, 23 nt, Artificial Sequence
  Synthetic
gaaaacugcuuaaacucuuccaa

SEQ ID NO: 181288 - RNA, 24 nt, Artificial Sequence
  Synthetic
ugaaaacugcuuaaacucuuccaa

SEQ ID NO: 181289 - RNA, 18 nt, Artificial Sequence
  Synthetic
uaaguccuucauuuccaa

SEQ ID NO: 181290 - RNA, 19 nt, Artificial Sequence
  Synthetic
cuaaguccuucauuuccaa

SEQ ID NO: 181291 - RNA, 20 nt, Artificial Sequence
  Synthetic
acuaaguccuucauuuccaa

SEQ ID NO: 181292 - RNA, 21 nt, Artificial Sequence
  Synthetic
aacuaaguccuucauuuccaa

SEQ ID NO: 181293 - RNA, 22 nt, Artificial Sequence
  Synthetic
gaacuaaguccuucauuuccaa

SEQ ID NO: 181294 - RNA, 23 nt, Artificial Sequence
  Synthetic
ggaacuaaguccuucauuuccaa

SEQ ID NO: 181295 - RNA, 24 nt, Artificial Sequence
  Synthetic
gggaacuaaguccuucauuuccaa

SEQ ID NO: 181296 - RNA, 18 nt, Artificial Sequence
  Synthetic
uaggagucagauuuccaa

SEQ ID NO: 181297 - RNA, 19 nt, Artificial Sequence
  Synthetic
auaggagucagauuuccaa

SEQ ID NO: 181298 - RNA, 20 nt, Artificial Sequence
  Synthetic
uauaggagucagauuuccaa

SEQ ID NO: 181299 - RNA, 21 nt, Artificial Sequence
  Synthetic
guauaggagucagauuuccaa

SEQ ID NO: 181300 - RNA, 22 nt, Artificial Sequence
  Synthetic
aguauaggagucagauuuccaa

SEQ ID NO: 181301 - RNA, 23 nt, Artificial Sequence
  Synthetic
gaguauaggagucagauuuccaa

SEQ ID NO: 181302 - RNA, 24 nt, Artificial Sequence
  Synthetic
ugaguauaggagucagauuuccaa

SEQ ID NO: 181303 - RNA, 18 nt, Artificial Sequence
  Synthetic
aaacaaagccguuuccaa

SEQ ID NO: 181304 - RNA, 19 nt, Artificial Sequence
  Synthetic
caaacaaagccguuuccaa

SEQ ID NO: 181305 - RNA, 20 nt, Artificial Sequence
  Synthetic
ucaaacaaagccguuuccaa

SEQ ID NO: 181306 - RNA, 21 nt, Artificial Sequence
  Synthetic
uucaaacaaagccguuuccaa

SEQ ID NO: 181307 - RNA, 22 nt, Artificial Sequence
  Synthetic
auucaaacaaagccguuuccaa

SEQ ID NO: 181308 - RNA, 23 nt, Artificial Sequence
  Synthetic
aauucaaacaaagccguuuccaa

SEQ ID NO: 181309 - RNA, 24 nt, Artificial Sequence
  Synthetic
gaauucaaacaaagccguuuccaa

SEQ ID NO: 181310 - RNA, 18 nt, Artificial Sequence
  Synthetic
uuuguacauauuuuccaa

SEQ ID NO: 181311 - RNA, 19 nt, Artificial Sequence
  Synthetic
uuuuguacauauuuuccaa

SEQ ID NO: 181312 - RNA, 20 nt, Artificial Sequence
  Synthetic
cuuuuguacauauuuuccaa

SEQ ID NO: 181313 - RNA, 21 nt, Artificial Sequence
  Synthetic
gcuuuuguacauauuuuccaa

SEQ ID NO: 181314 - RNA, 22 nt, Artificial Sequence
  Synthetic
ugcuuuuguacauauuuuccaa

SEQ ID NO: 181315 - RNA, 23 nt, Artificial Sequence
  Synthetic
augcuuuuguacauauuuuccaa

SEQ ID NO: 181316 - RNA, 24 nt, Artificial Sequence
  Synthetic
caugcuuuuguacauauuuuccaa

SEQ ID NO: 181317 - RNA, 18 nt, Artificial Sequence
  Synthetic
cucagggcaguuuuccaa

SEQ ID NO: 181318 - RNA, 19 nt, Artificial Sequence
  Synthetic
ucucagggcaguuuuccaa

SEQ ID NO: 181319 - RNA, 20 nt, Artificial Sequence
  Synthetic
uucucagggcaguuuuccaa

SEQ ID NO: 181320 - RNA, 21 nt, Artificial Sequence
  Synthetic
auucucagggcaguuuuccaa

SEQ ID NO: 181321 - RNA, 22 nt, Artificial Sequence
  Synthetic
uauucucagggcaguuuuccaa

SEQ ID NO: 181322 - RNA, 23 nt, Artificial Sequence
  Synthetic
guauucucagggcaguuuuccaa

SEQ ID NO: 181323 - RNA, 24 nt, Artificial Sequence
  Synthetic
gguauucucagggcaguuuuccaa

SEQ ID NO: 181324 - RNA, 18 nt, Artificial Sequence
  Synthetic
gauggcaucuuuuuccaa

SEQ ID NO: 181325 - RNA, 19 nt, Artificial Sequence
  Synthetic
agauggcaucuuuuuccaa

SEQ ID NO: 181326 - RNA, 20 nt, Artificial Sequence
  Synthetic
uagauggcaucuuuuuccaa

SEQ ID NO: 181327 - RNA, 21 nt, Artificial Sequence
  Synthetic
cuagauggcaucuuuuuccaa

SEQ ID NO: 181328 - RNA, 22 nt, Artificial Sequence
  Synthetic
ccuagauggcaucuuuuuccaa

SEQ ID NO: 181329 - RNA, 23 nt, Artificial Sequence
  Synthetic
uccuagauggcaucuuuuuccaa

SEQ ID NO: 181330 - RNA, 24 nt, Artificial Sequence
  Synthetic
guccuagauggcaucuuuuuccaa

SEQ ID NO: 181331 - RNA, 18 nt, Artificial Sequence
  Synthetic
ggaguuuucuuuuuccaa

SEQ ID NO: 181332 - RNA, 19 nt, Artificial Sequence
  Synthetic
gggaguuuucuuuuuccaa

SEQ ID NO: 181333 - RNA, 20 nt, Artificial Sequence
  Synthetic
ugggaguuuucuuuuuccaa

SEQ ID NO: 181334 - RNA, 21 nt, Artificial Sequence
  Synthetic
gugggaguuuucuuuuuccaa

SEQ ID NO: 181335 - RNA, 22 nt, Artificial Sequence
  Synthetic
agugggaguuuucuuuuuccaa

SEQ ID NO: 181336 - RNA, 23 nt, Artificial Sequence
  Synthetic
gagugggaguuuucuuuuuccaa

SEQ ID NO: 181337 - RNA, 24 nt, Artificial Sequence
  Synthetic
agagugggaguuuucuuuuuccaa

SEQ ID NO: 181338 - RNA, 18 nt, Artificial Sequence
  Synthetic
acacaaguuaaaaagcaa

SEQ ID NO: 181339 - RNA, 19 nt, Artificial Sequence
  Synthetic
aacacaaguuaaaaagcaa

SEQ ID NO: 181340 - RNA, 20 nt, Artificial Sequence
  Synthetic
uaacacaaguuaaaaagcaa

SEQ ID NO: 181341 - RNA, 21 nt, Artificial Sequence
  Synthetic
cuaacacaaguuaaaaagcaa

SEQ ID NO: 181342 - RNA, 22 nt, Artificial Sequence
  Synthetic
ccuaacacaaguuaaaaagcaa

SEQ ID NO: 181343 - RNA, 23 nt, Artificial Sequence
  Synthetic
gccuaacacaaguuaaaaagcaa

SEQ ID NO: 181344 - RNA, 24 nt, Artificial Sequence
  Synthetic
ugccuaacacaaguuaaaaagcaa

SEQ ID NO: 181345 - RNA, 18 nt, Artificial Sequence
  Synthetic
aacugauuugcaaagcaa

SEQ ID NO: 181346 - RNA, 19 nt, Artificial Sequence
  Synthetic
aaacugauuugcaaagcaa

SEQ ID NO: 181347 - RNA, 20 nt, Artificial Sequence
  Synthetic
uaaacugauuugcaaagcaa

SEQ ID NO: 181348 - RNA, 21 nt, Artificial Sequence
  Synthetic
uuaaacugauuugcaaagcaa

SEQ ID NO: 181349 - RNA, 22 nt, Artificial Sequence
  Synthetic
uuuaaacugauuugcaaagcaa

SEQ ID NO: 181350 - RNA, 23 nt, Artificial Sequence
  Synthetic
guuuaaacugauuugcaaagcaa

SEQ ID NO: 181351 - RNA, 24 nt, Artificial Sequence
  Synthetic
uguuuaaacugauuugcaaagcaa

SEQ ID NO: 181352 - RNA, 18 nt, Artificial Sequence
  Synthetic
aaaaacacuucaaagcaa

SEQ ID NO: 181353 - RNA, 19 nt, Artificial Sequence
  Synthetic
aaaaaacacuucaaagcaa

SEQ ID NO: 181354 - RNA, 20 nt, Artificial Sequence
  Synthetic
uaaaaaacacuucaaagcaa

SEQ ID NO: 181355 - RNA, 21 nt, Artificial Sequence
  Synthetic
auaaaaaacacuucaaagcaa

SEQ ID NO: 181356 - RNA, 22 nt, Artificial Sequence
  Synthetic
aauaaaaaacacuucaaagcaa

SEQ ID NO: 181357 - RNA, 23 nt, Artificial Sequence
  Synthetic
aaauaaaaaacacuucaaagcaa

SEQ ID NO: 181358 - RNA, 24 nt, Artificial Sequence
  Synthetic
aaaauaaaaaacacuucaaagcaa

SEQ ID NO: 181359 - RNA, 18 nt, Artificial Sequence
  Synthetic
ugcaaacaaggaaagcaa

SEQ ID NO: 181360 - RNA, 19 nt, Artificial Sequence
  Synthetic
augcaaacaaggaaagcaa

SEQ ID NO: 181361 - RNA, 20 nt, Artificial Sequence
  Synthetic
gaugcaaacaaggaaagcaa

SEQ ID NO: 181362 - RNA, 21 nt, Artificial Sequence
  Synthetic
ugaugcaaacaaggaaagcaa

SEQ ID NO: 181363 - RNA, 22 nt, Artificial Sequence
  Synthetic
gugaugcaaacaaggaaagcaa

SEQ ID NO: 181364 - RNA, 23 nt, Artificial Sequence
  Synthetic
ggugaugcaaacaaggaaagcaa

SEQ ID NO: 181365 - RNA, 24 nt, Artificial Sequence
  Synthetic
uggugaugcaaacaaggaaagcaa

SEQ ID NO: 181366 - RNA, 18 nt, Artificial Sequence
  Synthetic
aaucaugguggaaagcaa

SEQ ID NO: 181367 - RNA, 19 nt, Artificial Sequence
  Synthetic
uaaucaugguggaaagcaa

SEQ ID NO: 181368 - RNA, 20 nt, Artificial Sequence
  Synthetic
auaaucaugguggaaagcaa

SEQ ID NO: 181369 - RNA, 21 nt, Artificial Sequence
  Synthetic
uauaaucaugguggaaagcaa

SEQ ID NO: 181370 - RNA, 22 nt, Artificial Sequence
  Synthetic
uuauaaucaugguggaaagcaa

SEQ ID NO: 181371 - RNA, 23 nt, Artificial Sequence
  Synthetic
cuuauaaucaugguggaaagcaa

SEQ ID NO: 181372 - RNA, 24 nt, Artificial Sequence
  Synthetic
acuuauaaucaugguggaaagcaa

SEQ ID NO: 181373 - RNA, 18 nt, Artificial Sequence
  Synthetic
uugaagcuuugaaagcaa

SEQ ID NO: 181374 - RNA, 19 nt, Artificial Sequence
  Synthetic
guugaagcuuugaaagcaa

SEQ ID NO: 181375 - RNA, 20 nt, Artificial Sequence
  Synthetic
aguugaagcuuugaaagcaa

SEQ ID NO: 181376 - RNA, 21 nt, Artificial Sequence
  Synthetic
uaguugaagcuuugaaagcaa

SEQ ID NO: 181377 - RNA, 22 nt, Artificial Sequence
  Synthetic
uuaguugaagcuuugaaagcaa

SEQ ID NO: 181378 - RNA, 23 nt, Artificial Sequence
  Synthetic
guuaguugaagcuuugaaagcaa

SEQ ID NO: 181379 - RNA, 24 nt, Artificial Sequence
  Synthetic
uguuaguugaagcuuugaaagcaa

SEQ ID NO: 181380 - RNA, 18 nt, Artificial Sequence
  Synthetic
gggauggggcuaaagcaa

SEQ ID NO: 181381 - RNA, 19 nt, Artificial Sequence
  Synthetic
agggauggggcuaaagcaa

SEQ ID NO: 181382 - RNA, 20 nt, Artificial Sequence
  Synthetic
cagggauggggcuaaagcaa

SEQ ID NO: 181383 - RNA, 21 nt, Artificial Sequence
  Synthetic
gcagggauggggcuaaagcaa

SEQ ID NO: 181384 - RNA, 22 nt, Artificial Sequence
  Synthetic
agcagggauggggcuaaagcaa

SEQ ID NO: 181385 - RNA, 23 nt, Artificial Sequence
  Synthetic
uagcagggauggggcuaaagcaa

SEQ ID NO: 181386 - RNA, 24 nt, Artificial Sequence
  Synthetic
cuagcagggauggggcuaaagcaa

SEQ ID NO: 181387 - RNA, 18 nt, Artificial Sequence
  Synthetic
ggguuuacucuaaagcaa

SEQ ID NO: 181388 - RNA, 19 nt, Artificial Sequence
  Synthetic
aggguuuacucuaaagcaa

SEQ ID NO: 181389 - RNA, 20 nt, Artificial Sequence
  Synthetic
uaggguuuacucuaaagcaa

SEQ ID NO: 181390 - RNA, 21 nt, Artificial Sequence
  Synthetic
auaggguuuacucuaaagcaa

SEQ ID NO: 181391 - RNA, 22 nt, Artificial Sequence
  Synthetic
cauaggguuuacucuaaagcaa

SEQ ID NO: 181392 - RNA, 23 nt, Artificial Sequence
  Synthetic
ccauaggguuuacucuaaagcaa

SEQ ID NO: 181393 - RNA, 24 nt, Artificial Sequence
  Synthetic
cccauaggguuuacucuaaagcaa

SEQ ID NO: 181394 - RNA, 18 nt, Artificial Sequence
  Synthetic
uaucaaauauuaaagcaa

SEQ ID NO: 181395 - RNA, 19 nt, Artificial Sequence
  Synthetic
guaucaaauauuaaagcaa

SEQ ID NO: 181396 - RNA, 20 nt, Artificial Sequence
  Synthetic
aguaucaaauauuaaagcaa

SEQ ID NO: 181397 - RNA, 21 nt, Artificial Sequence
  Synthetic
caguaucaaauauuaaagcaa

SEQ ID NO: 181398 - RNA, 22 nt, Artificial Sequence
  Synthetic
acaguaucaaauauuaaagcaa

SEQ ID NO: 181399 - RNA, 23 nt, Artificial Sequence
  Synthetic
uacaguaucaaauauuaaagcaa

SEQ ID NO: 181400 - RNA, 24 nt, Artificial Sequence
  Synthetic
uuacaguaucaaauauuaaagcaa

SEQ ID NO: 181401 - RNA, 18 nt, Artificial Sequence
  Synthetic
ccugacaaaaacaagcaa

SEQ ID NO: 181402 - RNA, 19 nt, Artificial Sequence
  Synthetic
accugacaaaaacaagcaa

SEQ ID NO: 181403 - RNA, 20 nt, Artificial Sequence
  Synthetic
aaccugacaaaaacaagcaa

SEQ ID NO: 181404 - RNA, 21 nt, Artificial Sequence
  Synthetic
aaaccugacaaaaacaagcaa

SEQ ID NO: 181405 - RNA, 22 nt, Artificial Sequence
  Synthetic
caaaccugacaaaaacaagcaa

SEQ ID NO: 181406 - RNA, 23 nt, Artificial Sequence
  Synthetic
acaaaccugacaaaaacaagcaa

SEQ ID NO: 181407 - RNA, 24 nt, Artificial Sequence
  Synthetic
gacaaaccugacaaaaacaagcaa

SEQ ID NO: 181408 - RNA, 18 nt, Artificial Sequence
  Synthetic
ccugagaaaaacaagcaa

SEQ ID NO: 181409 - RNA, 19 nt, Artificial Sequence
  Synthetic
accugagaaaaacaagcaa

SEQ ID NO: 181410 - RNA, 20 nt, Artificial Sequence
  Synthetic
aaccugagaaaaacaagcaa

SEQ ID NO: 181411 - RNA, 24 nt, Artificial Sequence
  Synthetic
aacaaaccugagaaaaacaagcaa

SEQ ID NO: 181412 - RNA, 18 nt, Artificial Sequence
  Synthetic
ccugaggaaaacaagcaa

SEQ ID NO: 181413 - RNA, 19 nt, Artificial Sequence
  Synthetic
accugaggaaaacaagcaa

SEQ ID NO: 181414 - RNA, 20 nt, Artificial Sequence
  Synthetic
aaccugaggaaaacaagcaa

SEQ ID NO: 181415 - RNA, 21 nt, Artificial Sequence
  Synthetic
aaaccugaggaaaacaagcaa

SEQ ID NO: 181416 - RNA, 22 nt, Artificial Sequence
  Synthetic
caaaccugaggaaaacaagcaa

SEQ ID NO: 181417 - RNA, 23 nt, Artificial Sequence
  Synthetic
acaaaccugaggaaaacaagcaa

SEQ ID NO: 181418 - RNA, 24 nt, Artificial Sequence
  Synthetic
gacaaaccugaggaaaacaagcaa

SEQ ID NO: 181419 - RNA, 18 nt, Artificial Sequence
  Synthetic
gacagagcagacaagcaa

SEQ ID NO: 181420 - RNA, 19 nt, Artificial Sequence
  Synthetic
ugacagagcagacaagcaa

SEQ ID NO: 181421 - RNA, 20 nt, Artificial Sequence
  Synthetic
uugacagagcagacaagcaa

SEQ ID NO: 181422 - RNA, 21 nt, Artificial Sequence
  Synthetic
cuugacagagcagacaagcaa

SEQ ID NO: 181423 - RNA, 22 nt, Artificial Sequence
  Synthetic
ccuugacagagcagacaagcaa

SEQ ID NO: 181424 - RNA, 23 nt, Artificial Sequence
  Synthetic
uccuugacagagcagacaagcaa

SEQ ID NO: 181425 - RNA, 24 nt, Artificial Sequence
  Synthetic
cuccuugacagagcagacaagcaa

SEQ ID NO: 181426 - RNA, 18 nt, Artificial Sequence
  Synthetic
gccaaaucgaccaagcaa

SEQ ID NO: 181427 - RNA, 19 nt, Artificial Sequence
  Synthetic
agccaaaucgaccaagcaa

SEQ ID NO: 181428 - RNA, 20 nt, Artificial Sequence
  Synthetic
uagccaaaucgaccaagcaa

SEQ ID NO: 181429 - RNA, 21 nt, Artificial Sequence
  Synthetic
auagccaaaucgaccaagcaa

SEQ ID NO: 181430 - RNA, 22 nt, Artificial Sequence
  Synthetic
aauagccaaaucgaccaagcaa

SEQ ID NO: 181431 - RNA, 23 nt, Artificial Sequence
  Synthetic
caauagccaaaucgaccaagcaa

SEQ ID NO: 181432 - RNA, 24 nt, Artificial Sequence
  Synthetic
ucaauagccaaaucgaccaagcaa

SEQ ID NO: 181433 - RNA, 18 nt, Artificial Sequence
  Synthetic
ggaauauuuuccaagcaa

SEQ ID NO: 181434 - RNA, 19 nt, Artificial Sequence
  Synthetic
cggaauauuuuccaagcaa

SEQ ID NO: 181435 - RNA, 20 nt, Artificial Sequence
  Synthetic
gcggaauauuuuccaagcaa

SEQ ID NO: 181436 - RNA, 21 nt, Artificial Sequence
  Synthetic
ggcggaauauuuuccaagcaa

SEQ ID NO: 181437 - RNA, 22 nt, Artificial Sequence
  Synthetic
uggcggaauauuuuccaagcaa

SEQ ID NO: 181438 - RNA, 23 nt, Artificial Sequence
  Synthetic
auggcggaauauuuuccaagcaa

SEQ ID NO: 181439 - RNA, 24 nt, Artificial Sequence
  Synthetic
gauggcggaauauuuuccaagcaa

SEQ ID NO: 181440 - RNA, 18 nt, Artificial Sequence
  Synthetic
gcucuucagagcaagcaa

SEQ ID NO: 181441 - RNA, 19 nt, Artificial Sequence
  Synthetic
ugcucuucagagcaagcaa

SEQ ID NO: 181442 - RNA, 20 nt, Artificial Sequence
  Synthetic
gugcucuucagagcaagcaa

SEQ ID NO: 181443 - RNA, 21 nt, Artificial Sequence
  Synthetic
ugugcucuucagagcaagcaa

SEQ ID NO: 181444 - RNA, 22 nt, Artificial Sequence
  Synthetic
uugugcucuucagagcaagcaa

SEQ ID NO: 181445 - RNA, 23 nt, Artificial Sequence
  Synthetic
auugugcucuucagagcaagcaa

SEQ ID NO: 181446 - RNA, 24 nt, Artificial Sequence
  Synthetic
cauugugcucuucagagcaagcaa

SEQ ID NO: 181447 - RNA, 18 nt, Artificial Sequence
  Synthetic
uguguucauagcaagcaa

SEQ ID NO: 181448 - RNA, 19 nt, Artificial Sequence
  Synthetic
uuguguucauagcaagcaa

SEQ ID NO: 181449 - RNA, 20 nt, Artificial Sequence
  Synthetic
cuuguguucauagcaagcaa

SEQ ID NO: 181450 - RNA, 21 nt, Artificial Sequence
  Synthetic
acuuguguucauagcaagcaa

SEQ ID NO: 181451 - RNA, 22 nt, Artificial Sequence
  Synthetic
aacuuguguucauagcaagcaa

SEQ ID NO: 181452 - RNA, 23 nt, Artificial Sequence
  Synthetic
aaacuuguguucauagcaagcaa

SEQ ID NO: 181453 - RNA, 24 nt, Artificial Sequence
  Synthetic
caaacuuguguucauagcaagcaa

SEQ ID NO: 181454 - RNA, 18 nt, Artificial Sequence
  Synthetic
cucucuggaugcaagcaa

SEQ ID NO: 181455 - RNA, 19 nt, Artificial Sequence
  Synthetic
gcucucuggaugcaagcaa

SEQ ID NO: 181456 - RNA, 20 nt, Artificial Sequence
  Synthetic
agcucucuggaugcaagcaa

SEQ ID NO: 181457 - RNA, 21 nt, Artificial Sequence
  Synthetic
gagcucucuggaugcaagcaa

SEQ ID NO: 181458 - RNA, 22 nt, Artificial Sequence
  Synthetic
agagcucucuggaugcaagcaa

SEQ ID NO: 181459 - RNA, 23 nt, Artificial Sequence
  Synthetic
uagagcucucuggaugcaagcaa

SEQ ID NO: 181460 - RNA, 24 nt, Artificial Sequence
  Synthetic
uuagagcucucuggaugcaagcaa

SEQ ID NO: 181461 - RNA, 18 nt, Artificial Sequence
  Synthetic
aaauugucacagaagcaa

SEQ ID NO: 181462 - RNA, 19 nt, Artificial Sequence
  Synthetic
aaaauugucacagaagcaa

SEQ ID NO: 181463 - RNA, 20 nt, Artificial Sequence
  Synthetic
gaaaauugucacagaagcaa

SEQ ID NO: 181464 - RNA, 21 nt, Artificial Sequence
  Synthetic
ggaaaauugucacagaagcaa

SEQ ID NO: 181465 - RNA, 22 nt, Artificial Sequence
  Synthetic
uggaaaauugucacagaagcaa

SEQ ID NO: 181466 - RNA, 23 nt, Artificial Sequence
  Synthetic
auggaaaauugucacagaagcaa

SEQ ID NO: 181467 - RNA, 24 nt, Artificial Sequence
  Synthetic
uauggaaaauugucacagaagcaa

SEQ ID NO: 181468 - RNA, 18 nt, Artificial Sequence
  Synthetic
cuucaugaucagaagcaa

SEQ ID NO: 181469 - RNA, 19 nt, Artificial Sequence
  Synthetic
acuucaugaucagaagcaa

SEQ ID NO: 181470 - RNA, 20 nt, Artificial Sequence
  Synthetic
gacuucaugaucagaagcaa

SEQ ID NO: 181471 - RNA, 21 nt, Artificial Sequence
  Synthetic
ggacuucaugaucagaagcaa

SEQ ID NO: 181472 - RNA, 22 nt, Artificial Sequence
  Synthetic
cggacuucaugaucagaagcaa

SEQ ID NO: 181473 - RNA, 23 nt, Artificial Sequence
  Synthetic
acggacuucaugaucagaagcaa

SEQ ID NO: 181474 - RNA, 24 nt, Artificial Sequence
  Synthetic
aacggacuucaugaucagaagcaa

SEQ ID NO: 181475 - RNA, 18 nt, Artificial Sequence
  Synthetic
aaucacagugagaagcaa

SEQ ID NO: 181476 - RNA, 19 nt, Artificial Sequence
  Synthetic
aaaucacagugagaagcaa

SEQ ID NO: 181477 - RNA, 20 nt, Artificial Sequence
  Synthetic
aaaaucacagugagaagcaa

SEQ ID NO: 181478 - RNA, 21 nt, Artificial Sequence
  Synthetic
uaaaaucacagugagaagcaa

SEQ ID NO: 181479 - RNA, 22 nt, Artificial Sequence
  Synthetic
uuaaaaucacagugagaagcaa

SEQ ID NO: 181480 - RNA, 23 nt, Artificial Sequence
  Synthetic
auuaaaaucacagugagaagcaa

SEQ ID NO: 181481 - RNA, 24 nt, Artificial Sequence
  Synthetic
uauuaaaaucacagugagaagcaa

SEQ ID NO: 181482 - RNA, 18 nt, Artificial Sequence
  Synthetic
aauauaagcaggaagcaa

SEQ ID NO: 181483 - RNA, 19 nt, Artificial Sequence
  Synthetic
uaauauaagcaggaagcaa

SEQ ID NO: 181484 - RNA, 20 nt, Artificial Sequence
  Synthetic
auaauauaagcaggaagcaa

SEQ ID NO: 181485 - RNA, 21 nt, Artificial Sequence
  Synthetic
uauaauauaagcaggaagcaa

SEQ ID NO: 181486 - RNA, 22 nt, Artificial Sequence
  Synthetic
uuauaauauaagcaggaagcaa

SEQ ID NO: 181487 - RNA, 23 nt, Artificial Sequence
  Synthetic
uuuauaauauaagcaggaagcaa

SEQ ID NO: 181488 - RNA, 24 nt, Artificial Sequence
  Synthetic
uuuuauaauauaagcaggaagcaa

SEQ ID NO: 181489 - RNA, 18 nt, Artificial Sequence
  Synthetic
gggaaagagcggaagcaa

SEQ ID NO: 181490 - RNA, 19 nt, Artificial Sequence
  Synthetic
ggggaaagagcggaagcaa

SEQ ID NO: 181491 - RNA, 20 nt, Artificial Sequence
  Synthetic
gggggaaagagcggaagcaa

SEQ ID NO: 181492 - RNA, 21 nt, Artificial Sequence
  Synthetic
ggggggaaagagcggaagcaa

SEQ ID NO: 181493 - RNA, 22 nt, Artificial Sequence
  Synthetic
aggggggaaagagcggaagcaa

SEQ ID NO: 181494 - RNA, 23 nt, Artificial Sequence
  Synthetic
uaggggggaaagagcggaagcaa

SEQ ID NO: 181495 - RNA, 24 nt, Artificial Sequence
  Synthetic
guaggggggaaagagcggaagcaa

SEQ ID NO: 181496 - RNA, 18 nt, Artificial Sequence
  Synthetic
agucuauguuggaagcaa

SEQ ID NO: 181497 - RNA, 19 nt, Artificial Sequence
  Synthetic
uagucuauguuggaagcaa

SEQ ID NO: 181498 - RNA, 20 nt, Artificial Sequence
  Synthetic
uuagucuauguuggaagcaa

SEQ ID NO: 181499 - RNA, 21 nt, Artificial Sequence
  Synthetic
guuagucuauguuggaagcaa

SEQ ID NO: 181500 - RNA, 22 nt, Artificial Sequence
  Synthetic
gguuagucuauguuggaagcaa

SEQ ID NO: 181501 - RNA, 23 nt, Artificial Sequence
  Synthetic
agguuagucuauguuggaagcaa

SEQ ID NO: 181502 - RNA, 24 nt, Artificial Sequence
  Synthetic
aagguuagucuauguuggaagcaa

SEQ ID NO: 181503 - RNA, 18 nt, Artificial Sequence
  Synthetic
cuucuaaaauugaagcaa

SEQ ID NO: 181504 - RNA, 19 nt, Artificial Sequence
  Synthetic
ucuucuaaaauugaagcaa

SEQ ID NO: 181505 - RNA, 20 nt, Artificial Sequence
  Synthetic
aucuucuaaaauugaagcaa

SEQ ID NO: 181506 - RNA, 21 nt, Artificial Sequence
  Synthetic
uaucuucuaaaauugaagcaa

SEQ ID NO: 181507 - RNA, 22 nt, Artificial Sequence
  Synthetic
auaucuucuaaaauugaagcaa

SEQ ID NO: 181508 - RNA, 23 nt, Artificial Sequence
  Synthetic
uauaucuucuaaaauugaagcaa

SEQ ID NO: 181509 - RNA, 24 nt, Artificial Sequence
  Synthetic
uuauaucuucuaaaauugaagcaa

SEQ ID NO: 181510 - RNA, 18 nt, Artificial Sequence
  Synthetic
ggaguggguaauaagcaa

SEQ ID NO: 181511 - RNA, 19 nt, Artificial Sequence
  Synthetic
uggaguggguaauaagcaa

SEQ ID NO: 181512 - RNA, 20 nt, Artificial Sequence
  Synthetic
auggaguggguaauaagcaa

SEQ ID NO: 181513 - RNA, 21 nt, Artificial Sequence
  Synthetic
aauggaguggguaauaagcaa

SEQ ID NO: 181514 - RNA, 22 nt, Artificial Sequence
  Synthetic
gaauggaguggguaauaagcaa

SEQ ID NO: 181515 - RNA, 23 nt, Artificial Sequence
  Synthetic
ggaauggaguggguaauaagcaa

SEQ ID NO: 181516 - RNA, 24 nt, Artificial Sequence
  Synthetic
aggaauggaguggguaauaagcaa

SEQ ID NO: 181517 - RNA, 18 nt, Artificial Sequence
  Synthetic
acuaaguuucauaagcaa

SEQ ID NO: 181518 - RNA, 19 nt, Artificial Sequence
  Synthetic
aacuaaguuucauaagcaa

SEQ ID NO: 181519 - RNA, 20 nt, Artificial Sequence
  Synthetic
aaacuaaguuucauaagcaa

SEQ ID NO: 181520 - RNA, 21 nt, Artificial Sequence
  Synthetic
caaacuaaguuucauaagcaa

SEQ ID NO: 181521 - RNA, 22 nt, Artificial Sequence
  Synthetic
ccaaacuaaguuucauaagcaa

SEQ ID NO: 181522 - RNA, 23 nt, Artificial Sequence
  Synthetic
gccaaacuaaguuucauaagcaa

SEQ ID NO: 181523 - RNA, 24 nt, Artificial Sequence
  Synthetic
agccaaacuaaguuucauaagcaa

SEQ ID NO: 181524 - RNA, 18 nt, Artificial Sequence
  Synthetic
cguuauuguucuaagcaa

SEQ ID NO: 181525 - RNA, 19 nt, Artificial Sequence
  Synthetic
gcguuauuguucuaagcaa

SEQ ID NO: 181526 - RNA, 20 nt, Artificial Sequence
  Synthetic
ugcguuauuguucuaagcaa

SEQ ID NO: 181527 - RNA, 21 nt, Artificial Sequence
  Synthetic
cugcguuauuguucuaagcaa

SEQ ID NO: 181528 - RNA, 22 nt, Artificial Sequence
  Synthetic
gcugcguuauuguucuaagcaa

SEQ ID NO: 181529 - RNA, 23 nt, Artificial Sequence
  Synthetic
ugcugcguuauuguucuaagcaa

SEQ ID NO: 181530 - RNA, 24 nt, Artificial Sequence
  Synthetic
cugcugcguuauuguucuaagcaa

SEQ ID NO: 181531 - RNA, 18 nt, Artificial Sequence
  Synthetic
agagugagauguaagcaa

SEQ ID NO: 181532 - RNA, 19 nt, Artificial Sequence
  Synthetic
aagagugagauguaagcaa

SEQ ID NO: 181533 - RNA, 20 nt, Artificial Sequence
  Synthetic
aaagagugagauguaagcaa

SEQ ID NO: 181534 - RNA, 21 nt, Artificial Sequence
  Synthetic
uaaagagugagauguaagcaa

SEQ ID NO: 181535 - RNA, 22 nt, Artificial Sequence
  Synthetic
guaaagagugagauguaagcaa

SEQ ID NO: 181536 - RNA, 23 nt, Artificial Sequence
  Synthetic
gguaaagagugagauguaagcaa

SEQ ID NO: 181537 - RNA, 24 nt, Artificial Sequence
  Synthetic
ugguaaagagugagauguaagcaa

SEQ ID NO: 181538 - RNA, 18 nt, Artificial Sequence
  Synthetic
ucggggauauguaagcaa

SEQ ID NO: 181539 - RNA, 19 nt, Artificial Sequence
  Synthetic
cucggggauauguaagcaa

SEQ ID NO: 181540 - RNA, 20 nt, Artificial Sequence
  Synthetic
ccucggggauauguaagcaa

SEQ ID NO: 181541 - RNA, 21 nt, Artificial Sequence
  Synthetic
gccucggggauauguaagcaa

SEQ ID NO: 181542 - RNA, 22 nt, Artificial Sequence
  Synthetic
ugccucggggauauguaagcaa

SEQ ID NO: 181543 - RNA, 23 nt, Artificial Sequence
  Synthetic
gugccucggggauauguaagcaa

SEQ ID NO: 181544 - RNA, 24 nt, Artificial Sequence
  Synthetic
ggugccucggggauauguaagcaa

SEQ ID NO: 181545 - RNA, 18 nt, Artificial Sequence
  Synthetic
auauacucaauuaagcaa

SEQ ID NO: 181546 - RNA, 19 nt, Artificial Sequence
  Synthetic
uauauacucaauuaagcaa

SEQ ID NO: 181547 - RNA, 20 nt, Artificial Sequence
  Synthetic
auauauacucaauuaagcaa

SEQ ID NO: 181548 - RNA, 21 nt, Artificial Sequence
  Synthetic
aauauauacucaauuaagcaa

SEQ ID NO: 181549 - RNA, 22 nt, Artificial Sequence
  Synthetic
caauauauacucaauuaagcaa

SEQ ID NO: 181550 - RNA, 23 nt, Artificial Sequence
  Synthetic
ucaauauauacucaauuaagcaa

SEQ ID NO: 181551 - RNA, 24 nt, Artificial Sequence
  Synthetic
cucaauauauacucaauuaagcaa

SEQ ID NO: 181552 - RNA, 18 nt, Artificial Sequence
  Synthetic
gucuuuccacuuaagcaa

SEQ ID NO: 181553 - RNA, 19 nt, Artificial Sequence
  Synthetic
ugucuuuccacuuaagcaa

SEQ ID NO: 181554 - RNA, 20 nt, Artificial Sequence
  Synthetic
augucuuuccacuuaagcaa

SEQ ID NO: 181555 - RNA, 21 nt, Artificial Sequence
  Synthetic
aaugucuuuccacuuaagcaa

SEQ ID NO: 181556 - RNA, 22 nt, Artificial Sequence
  Synthetic
uaaugucuuuccacuuaagcaa

SEQ ID NO: 181557 - RNA, 23 nt, Artificial Sequence
  Synthetic
auaaugucuuuccacuuaagcaa

SEQ ID NO: 181558 - RNA, 24 nt, Artificial Sequence
  Synthetic
aauaaugucuuuccacuuaagcaa

SEQ ID NO: 181559 - RNA, 18 nt, Artificial Sequence
  Synthetic
acuggguggcuuaagcaa

SEQ ID NO: 181560 - RNA, 19 nt, Artificial Sequence
  Synthetic
cacuggguggcuuaagcaa

SEQ ID NO: 181561 - RNA, 20 nt, Artificial Sequence
  Synthetic
ccacuggguggcuuaagcaa

SEQ ID NO: 181562 - RNA, 21 nt, Artificial Sequence
  Synthetic
cccacuggguggcuuaagcaa

SEQ ID NO: 181563 - RNA, 22 nt, Artificial Sequence
  Synthetic
acccacuggguggcuuaagcaa

SEQ ID NO: 181564 - RNA, 23 nt, Artificial Sequence
  Synthetic
cacccacuggguggcuuaagcaa

SEQ ID NO: 181565 - RNA, 24 nt, Artificial Sequence
  Synthetic
acacccacuggguggcuuaagcaa

SEQ ID NO: 181566 - RNA, 18 nt, Artificial Sequence
  Synthetic
gaagaucucuuuaagcaa

SEQ ID NO: 181567 - RNA, 19 nt, Artificial Sequence
  Synthetic
ugaagaucucuuuaagcaa

SEQ ID NO: 181568 - RNA, 20 nt, Artificial Sequence
  Synthetic
uugaagaucucuuuaagcaa

SEQ ID NO: 181569 - RNA, 21 nt, Artificial Sequence
  Synthetic
uuugaagaucucuuuaagcaa

SEQ ID NO: 181570 - RNA, 22 nt, Artificial Sequence
  Synthetic
cuuugaagaucucuuuaagcaa

SEQ ID NO: 181571 - RNA, 23 nt, Artificial Sequence
  Synthetic
acuuugaagaucucuuuaagcaa

SEQ ID NO: 181572 - RNA, 24 nt, Artificial Sequence
  Synthetic
gacuuugaagaucucuuuaagcaa

SEQ ID NO: 181573 - RNA, 18 nt, Artificial Sequence
  Synthetic
aguggaaagaaacagcaa

SEQ ID NO: 181574 - RNA, 19 nt, Artificial Sequence
  Synthetic
gaguggaaagaaacagcaa

SEQ ID NO: 181575 - RNA, 20 nt, Artificial Sequence
  Synthetic
agaguggaaagaaacagcaa

SEQ ID NO: 181576 - RNA, 21 nt, Artificial Sequence
  Synthetic
cagaguggaaagaaacagcaa

SEQ ID NO: 181577 - RNA, 22 nt, Artificial Sequence
  Synthetic
ucagaguggaaagaaacagcaa

SEQ ID NO: 181578 - RNA, 23 nt, Artificial Sequence
  Synthetic
gucagaguggaaagaaacagcaa

SEQ ID NO: 181579 - RNA, 24 nt, Artificial Sequence
  Synthetic
ggucagaguggaaagaaacagcaa

SEQ ID NO: 181580 - RNA, 18 nt, Artificial Sequence
  Synthetic
agagcuucuacacagcaa

SEQ ID NO: 181581 - RNA, 19 nt, Artificial Sequence
  Synthetic
aagagcuucuacacagcaa

SEQ ID NO: 181582 - RNA, 20 nt, Artificial Sequence
  Synthetic
aaagagcuucuacacagcaa

SEQ ID NO: 181583 - RNA, 21 nt, Artificial Sequence
  Synthetic
uaaagagcuucuacacagcaa

SEQ ID NO: 181584 - RNA, 22 nt, Artificial Sequence
  Synthetic
cuaaagagcuucuacacagcaa

SEQ ID NO: 181585 - RNA, 23 nt, Artificial Sequence
  Synthetic
acuaaagagcuucuacacagcaa

SEQ ID NO: 181586 - RNA, 24 nt, Artificial Sequence
  Synthetic
aacuaaagagcuucuacacagcaa

SEQ ID NO: 181587 - RNA, 18 nt, Artificial Sequence
  Synthetic
aaaugcccagcacagcaa

SEQ ID NO: 181588 - RNA, 19 nt, Artificial Sequence
  Synthetic
uaaaugcccagcacagcaa

SEQ ID NO: 181589 - RNA, 20 nt, Artificial Sequence
  Synthetic
cuaaaugcccagcacagcaa

SEQ ID NO: 181590 - RNA, 21 nt, Artificial Sequence
  Synthetic
acuaaaugcccagcacagcaa

SEQ ID NO: 181591 - RNA, 22 nt, Artificial Sequence
  Synthetic
uacuaaaugcccagcacagcaa

SEQ ID NO: 181592 - RNA, 23 nt, Artificial Sequence
  Synthetic
uuacuaaaugcccagcacagcaa

SEQ ID NO: 181593 - RNA, 24 nt, Artificial Sequence
  Synthetic
cuuacuaaaugcccagcacagcaa

SEQ ID NO: 181594 - RNA, 18 nt, Artificial Sequence
  Synthetic
agagcuucugcacagcaa

SEQ ID NO: 181595 - RNA, 19 nt, Artificial Sequence
  Synthetic
aagagcuucugcacagcaa

SEQ ID NO: 181596 - RNA, 20 nt, Artificial Sequence
  Synthetic
aaagagcuucugcacagcaa

SEQ ID NO: 181597 - RNA, 21 nt, Artificial Sequence
  Synthetic
uaaagagcuucugcacagcaa

SEQ ID NO: 181598 - RNA, 22 nt, Artificial Sequence
  Synthetic
cuaaagagcuucugcacagcaa

SEQ ID NO: 181599 - RNA, 23 nt, Artificial Sequence
  Synthetic
acuaaagagcuucugcacagcaa

SEQ ID NO: 181600 - RNA, 24 nt, Artificial Sequence
  Synthetic
aacuaaagagcuucugcacagcaa

SEQ ID NO: 181601 - RNA, 20 nt, Artificial Sequence
  Synthetic
caagagcuucugcacagcaa

SEQ ID NO: 181602 - RNA, 21 nt, Artificial Sequence
  Synthetic
ucaagagcuucugcacagcaa

SEQ ID NO: 181603 - RNA, 22 nt, Artificial Sequence
  Synthetic
cucaagagcuucugcacagcaa

SEQ ID NO: 181604 - RNA, 23 nt, Artificial Sequence
  Synthetic
acucaagagcuucugcacagcaa

SEQ ID NO: 181605 - RNA, 24 nt, Artificial Sequence
  Synthetic
aacucaagagcuucugcacagcaa

SEQ ID NO: 181606 - RNA, 18 nt, Artificial Sequence
  Synthetic
ggagcuucugcacagcaa

SEQ ID NO: 181607 - RNA, 19 nt, Artificial Sequence
  Synthetic
aggagcuucugcacagcaa

SEQ ID NO: 181608 - RNA, 20 nt, Artificial Sequence
  Synthetic
aaggagcuucugcacagcaa

SEQ ID NO: 181609 - RNA, 21 nt, Artificial Sequence
  Synthetic
uaaggagcuucugcacagcaa

SEQ ID NO: 181610 - RNA, 22 nt, Artificial Sequence
  Synthetic
cuaaggagcuucugcacagcaa

SEQ ID NO: 181611 - RNA, 23 nt, Artificial Sequence
  Synthetic
acuaaggagcuucugcacagcaa

SEQ ID NO: 181612 - RNA, 24 nt, Artificial Sequence
  Synthetic
aacuaaggagcuucugcacagcaa

SEQ ID NO: 181613 - RNA, 18 nt, Artificial Sequence
  Synthetic
aacagagaaaaccagcaa

SEQ ID NO: 181614 - RNA, 19 nt, Artificial Sequence
  Synthetic
aaacagagaaaaccagcaa

SEQ ID NO: 181615 - RNA, 20 nt, Artificial Sequence
  Synthetic
aaaacagagaaaaccagcaa

SEQ ID NO: 181616 - RNA, 21 nt, Artificial Sequence
  Synthetic
aaaaacagagaaaaccagcaa

SEQ ID NO: 181617 - RNA, 22 nt, Artificial Sequence
  Synthetic
aaaaaacagagaaaaccagcaa

SEQ ID NO: 181618 - RNA, 23 nt, Artificial Sequence
  Synthetic
uaaaaaacagagaaaaccagcaa

SEQ ID NO: 181619 - RNA, 24 nt, Artificial Sequence
  Synthetic
guaaaaaacagagaaaaccagcaa

SEQ ID NO: 181620 - RNA, 18 nt, Artificial Sequence
  Synthetic
aaagagauggaccagcaa

SEQ ID NO: 181621 - RNA, 19 nt, Artificial Sequence
  Synthetic
aaaagagauggaccagcaa

SEQ ID NO: 181622 - RNA, 20 nt, Artificial Sequence
  Synthetic
gaaaagagauggaccagcaa

SEQ ID NO: 181623 - RNA, 21 nt, Artificial Sequence
  Synthetic
ggaaaagagauggaccagcaa

SEQ ID NO: 181624 - RNA, 22 nt, Artificial Sequence
  Synthetic
gggaaaagagauggaccagcaa

SEQ ID NO: 181625 - RNA, 23 nt, Artificial Sequence
  Synthetic
ugggaaaagagauggaccagcaa

SEQ ID NO: 181626 - RNA, 24 nt, Artificial Sequence
  Synthetic
gugggaaaagagauggaccagcaa

SEQ ID NO: 181627 - RNA, 18 nt, Artificial Sequence
  Synthetic
gauccagcaacccagcaa

SEQ ID NO: 181628 - RNA, 19 nt, Artificial Sequence
  Synthetic
agauccagcaacccagcaa

SEQ ID NO: 181629 - RNA, 20 nt, Artificial Sequence
  Synthetic
cagauccagcaacccagcaa

SEQ ID NO: 181630 - RNA, 21 nt, Artificial Sequence
  Synthetic
acagauccagcaacccagcaa

SEQ ID NO: 181631 - RNA, 22 nt, Artificial Sequence
  Synthetic
cacagauccagcaacccagcaa

SEQ ID NO: 181632 - RNA, 23 nt, Artificial Sequence
  Synthetic
acacagauccagcaacccagcaa

SEQ ID NO: 181633 - RNA, 24 nt, Artificial Sequence
  Synthetic
uacacagauccagcaacccagcaa

SEQ ID NO: 181634 - RNA, 18 nt, Artificial Sequence
  Synthetic
agauaacaaucccagcaa

SEQ ID NO: 181635 - RNA, 19 nt, Artificial Sequence
  Synthetic
uagauaacaaucccagcaa

SEQ ID NO: 181636 - RNA, 20 nt, Artificial Sequence
  Synthetic
guagauaacaaucccagcaa

SEQ ID NO: 181637 - RNA, 21 nt, Artificial Sequence
  Synthetic
aguagauaacaaucccagcaa

SEQ ID NO: 181638 - RNA, 22 nt, Artificial Sequence
  Synthetic
uaguagauaacaaucccagcaa

SEQ ID NO: 181639 - RNA, 23 nt, Artificial Sequence
  Synthetic
uuaguagauaacaaucccagcaa

SEQ ID NO: 181640 - RNA, 24 nt, Artificial Sequence
  Synthetic
guuaguagauaacaaucccagcaa

SEQ ID NO: 181641 - RNA, 18 nt, Artificial Sequence
  Synthetic
aaaacaaacugccagcaa

SEQ ID NO: 181642 - RNA, 19 nt, Artificial Sequence
  Synthetic
uaaaacaaacugccagcaa

SEQ ID NO: 181643 - RNA, 20 nt, Artificial Sequence
  Synthetic
cuaaaacaaacugccagcaa

SEQ ID NO: 181644 - RNA, 21 nt, Artificial Sequence
  Synthetic
ucuaaaacaaacugccagcaa

SEQ ID NO: 181645 - RNA, 22 nt, Artificial Sequence
  Synthetic
uucuaaaacaaacugccagcaa

SEQ ID NO: 181646 - RNA, 23 nt, Artificial Sequence
  Synthetic
auucuaaaacaaacugccagcaa

SEQ ID NO: 181647 - RNA, 24 nt, Artificial Sequence
  Synthetic
cauucuaaaacaaacugccagcaa

SEQ ID NO: 181648 - RNA, 18 nt, Artificial Sequence
  Synthetic
uaaucucucugccagcaa

SEQ ID NO: 181649 - RNA, 19 nt, Artificial Sequence
  Synthetic
uuaaucucucugccagcaa

SEQ ID NO: 181650 - RNA, 20 nt, Artificial Sequence
  Synthetic
auuaaucucucugccagcaa

SEQ ID NO: 181651 - RNA, 21 nt, Artificial Sequence
  Synthetic
uauuaaucucucugccagcaa

SEQ ID NO: 181652 - RNA, 22 nt, Artificial Sequence
  Synthetic
auauuaaucucucugccagcaa

SEQ ID NO: 181653 - RNA, 23 nt, Artificial Sequence
  Synthetic
gauauuaaucucucugccagcaa

SEQ ID NO: 181654 - RNA, 24 nt, Artificial Sequence
  Synthetic
ugauauuaaucucucugccagcaa

SEQ ID NO: 181655 - RNA, 18 nt, Artificial Sequence
  Synthetic
augagaaggauccagcaa

SEQ ID NO: 181656 - RNA, 19 nt, Artificial Sequence
  Synthetic
gaugagaaggauccagcaa

SEQ ID NO: 181657 - RNA, 20 nt, Artificial Sequence
  Synthetic
ggaugagaaggauccagcaa

SEQ ID NO: 181658 - RNA, 21 nt, Artificial Sequence
  Synthetic
aggaugagaaggauccagcaa

SEQ ID NO: 181659 - RNA, 22 nt, Artificial Sequence
  Synthetic
caggaugagaaggauccagcaa

SEQ ID NO: 181660 - RNA, 23 nt, Artificial Sequence
  Synthetic
ucaggaugagaaggauccagcaa

SEQ ID NO: 181661 - RNA, 24 nt, Artificial Sequence
  Synthetic
aucaggaugagaaggauccagcaa

SEQ ID NO: 181662 - RNA, 18 nt, Artificial Sequence
  Synthetic
acaacuccucuccagcaa

SEQ ID NO: 181663 - RNA, 19 nt, Artificial Sequence
  Synthetic
cacaacuccucuccagcaa

SEQ ID NO: 181664 - RNA, 20 nt, Artificial Sequence
  Synthetic
ucacaacuccucuccagcaa

SEQ ID NO: 181665 - RNA, 21 nt, Artificial Sequence
  Synthetic
aucacaacuccucuccagcaa

SEQ ID NO: 181666 - RNA, 22 nt, Artificial Sequence
  Synthetic
gaucacaacuccucuccagcaa

SEQ ID NO: 181667 - RNA, 23 nt, Artificial Sequence
  Synthetic
ugaucacaacuccucuccagcaa

SEQ ID NO: 181668 - RNA, 24 nt, Artificial Sequence
  Synthetic
augaucacaacuccucuccagcaa

SEQ ID NO: 181669 - RNA, 18 nt, Artificial Sequence
  Synthetic
gucuucugcuuccagcaa

SEQ ID NO: 181670 - RNA, 19 nt, Artificial Sequence
  Synthetic
agucuucugcuuccagcaa

SEQ ID NO: 181671 - RNA, 20 nt, Artificial Sequence
  Synthetic
gagucuucugcuuccagcaa

SEQ ID NO: 181672 - RNA, 21 nt, Artificial Sequence
  Synthetic
agagucuucugcuuccagcaa

SEQ ID NO: 181673 - RNA, 22 nt, Artificial Sequence
  Synthetic
aagagucuucugcuuccagcaa

SEQ ID NO: 181674 - RNA, 23 nt, Artificial Sequence
  Synthetic
uaagagucuucugcuuccagcaa

SEQ ID NO: 181675 - RNA, 24 nt, Artificial Sequence
  Synthetic
cuaagagucuucugcuuccagcaa

SEQ ID NO: 181676 - RNA, 18 nt, Artificial Sequence
  Synthetic
gaauccuaaaagcagcaa

SEQ ID NO: 181677 - RNA, 19 nt, Artificial Sequence
  Synthetic
agaauccuaaaagcagcaa

SEQ ID NO: 181678 - RNA, 20 nt, Artificial Sequence
  Synthetic
aagaauccuaaaagcagcaa

SEQ ID NO: 181679 - RNA, 21 nt, Artificial Sequence
  Synthetic
aaagaauccuaaaagcagcaa

SEQ ID NO: 181680 - RNA, 22 nt, Artificial Sequence
  Synthetic
gaaagaauccuaaaagcagcaa

SEQ ID NO: 181681 - RNA, 23 nt, Artificial Sequence
  Synthetic
agaaagaauccuaaaagcagcaa

SEQ ID NO: 181682 - RNA, 24 nt, Artificial Sequence
  Synthetic
aagaaagaauccuaaaagcagcaa

SEQ ID NO: 181683 - RNA, 18 nt, Artificial Sequence
  Synthetic
auauuuaccaagcagcaa

SEQ ID NO: 181684 - RNA, 19 nt, Artificial Sequence
  Synthetic
aauauuuaccaagcagcaa

SEQ ID NO: 181685 - RNA, 20 nt, Artificial Sequence
  Synthetic
gaauauuuaccaagcagcaa

SEQ ID NO: 181686 - RNA, 21 nt, Artificial Sequence
  Synthetic
ugaauauuuaccaagcagcaa

SEQ ID NO: 181687 - RNA, 22 nt, Artificial Sequence
  Synthetic
augaauauuuaccaagcagcaa

SEQ ID NO: 181688 - RNA, 23 nt, Artificial Sequence
  Synthetic
gaugaauauuuaccaagcagcaa

SEQ ID NO: 181689 - RNA, 24 nt, Artificial Sequence
  Synthetic
cgaugaauauuuaccaagcagcaa

SEQ ID NO: 181690 - RNA, 18 nt, Artificial Sequence
  Synthetic
ugguauuccaagcagcaa

SEQ ID NO: 181691 - RNA, 19 nt, Artificial Sequence
  Synthetic
uugguauuccaagcagcaa

SEQ ID NO: 181692 - RNA, 20 nt, Artificial Sequence
  Synthetic
cuugguauuccaagcagcaa

SEQ ID NO: 181693 - RNA, 21 nt, Artificial Sequence
  Synthetic
acuugguauuccaagcagcaa

SEQ ID NO: 181694 - RNA, 22 nt, Artificial Sequence
  Synthetic
aacuugguauuccaagcagcaa

SEQ ID NO: 181695 - RNA, 23 nt, Artificial Sequence
  Synthetic
uaacuugguauuccaagcagcaa

SEQ ID NO: 181696 - RNA, 24 nt, Artificial Sequence
  Synthetic
uuaacuugguauuccaagcagcaa

SEQ ID NO: 181697 - RNA, 18 nt, Artificial Sequence
  Synthetic
uuguauuauaagcagcaa

SEQ ID NO: 181698 - RNA, 19 nt, Artificial Sequence
  Synthetic
auuguauuauaagcagcaa

SEQ ID NO: 181699 - RNA, 20 nt, Artificial Sequence
  Synthetic
aauuguauuauaagcagcaa

SEQ ID NO: 181700 - RNA, 21 nt, Artificial Sequence
  Synthetic
caauuguauuauaagcagcaa

SEQ ID NO: 181701 - RNA, 22 nt, Artificial Sequence
  Synthetic
acaauuguauuauaagcagcaa

SEQ ID NO: 181702 - RNA, 23 nt, Artificial Sequence
  Synthetic
gacaauuguauuauaagcagcaa

SEQ ID NO: 181703 - RNA, 24 nt, Artificial Sequence
  Synthetic
ggacaauuguauuauaagcagcaa

SEQ ID NO: 181704 - RNA, 18 nt, Artificial Sequence
  Synthetic
uucguuuaucugcagcaa

SEQ ID NO: 181705 - RNA, 19 nt, Artificial Sequence
  Synthetic
cuucguuuaucugcagcaa

SEQ ID NO: 181706 - RNA, 20 nt, Artificial Sequence
  Synthetic
ccuucguuuaucugcagcaa

SEQ ID NO: 181707 - RNA, 21 nt, Artificial Sequence
  Synthetic
gccuucguuuaucugcagcaa

SEQ ID NO: 181708 - RNA, 22 nt, Artificial Sequence
  Synthetic
ggccuucguuuaucugcagcaa

SEQ ID NO: 181709 - RNA, 23 nt, Artificial Sequence
  Synthetic
uggccuucguuuaucugcagcaa

SEQ ID NO: 181710 - RNA, 24 nt, Artificial Sequence
  Synthetic
auggccuucguuuaucugcagcaa

SEQ ID NO: 181711 - RNA, 18 nt, Artificial Sequence
  Synthetic
ugaggauaauugcagcaa

SEQ ID NO: 181712 - RNA, 19 nt, Artificial Sequence
  Synthetic
augaggauaauugcagcaa

SEQ ID NO: 181713 - RNA, 20 nt, Artificial Sequence
  Synthetic
aaugaggauaauugcagcaa

SEQ ID NO: 181714 - RNA, 21 nt, Artificial Sequence
  Synthetic
aaaugaggauaauugcagcaa

SEQ ID NO: 181715 - RNA, 22 nt, Artificial Sequence
  Synthetic
uaaaugaggauaauugcagcaa

SEQ ID NO: 181716 - RNA, 23 nt, Artificial Sequence
  Synthetic
uuaaaugaggauaauugcagcaa

SEQ ID NO: 181717 - RNA, 24 nt, Artificial Sequence
  Synthetic
guuaaaugaggauaauugcagcaa

SEQ ID NO: 181718 - RNA, 18 nt, Artificial Sequence
  Synthetic
cauauuuauuaucagcaa

SEQ ID NO: 181719 - RNA, 19 nt, Artificial Sequence
  Synthetic
acauauuuauuaucagcaa

SEQ ID NO: 181720 - RNA, 20 nt, Artificial Sequence
  Synthetic
cacauauuuauuaucagcaa

SEQ ID NO: 181721 - RNA, 21 nt, Artificial Sequence
  Synthetic
ccacauauuuauuaucagcaa

SEQ ID NO: 181722 - RNA, 22 nt, Artificial Sequence
  Synthetic
uccacauauuuauuaucagcaa

SEQ ID NO: 181723 - RNA, 23 nt, Artificial Sequence
  Synthetic
auccacauauuuauuaucagcaa

SEQ ID NO: 181724 - RNA, 24 nt, Artificial Sequence
  Synthetic
cauccacauauuuauuaucagcaa

SEQ ID NO: 181725 - RNA, 18 nt, Artificial Sequence
  Synthetic
uucucuauuucucagcaa

SEQ ID NO: 181726 - RNA, 19 nt, Artificial Sequence
  Synthetic
uuucucuauuucucagcaa

SEQ ID NO: 181727 - RNA, 20 nt, Artificial Sequence
  Synthetic
auuucucuauuucucagcaa

SEQ ID NO: 181728 - RNA, 21 nt, Artificial Sequence
  Synthetic
uauuucucuauuucucagcaa

SEQ ID NO: 181729 - RNA, 22 nt, Artificial Sequence
  Synthetic
guauuucucuauuucucagcaa

SEQ ID NO: 181730 - RNA, 23 nt, Artificial Sequence
  Synthetic
uguauuucucuauuucucagcaa

SEQ ID NO: 181731 - RNA, 24 nt, Artificial Sequence
  Synthetic
auguauuucucuauuucucagcaa

SEQ ID NO: 181732 - RNA, 18 nt, Artificial Sequence
  Synthetic
gagagaauauuucagcaa

SEQ ID NO: 181733 - RNA, 19 nt, Artificial Sequence
  Synthetic
ugagagaauauuucagcaa

SEQ ID NO: 181734 - RNA, 20 nt, Artificial Sequence
  Synthetic
augagagaauauuucagcaa

SEQ ID NO: 181735 - RNA, 21 nt, Artificial Sequence
  Synthetic
caugagagaauauuucagcaa

SEQ ID NO: 181736 - RNA, 22 nt, Artificial Sequence
  Synthetic
ucaugagagaauauuucagcaa

SEQ ID NO: 181737 - RNA, 23 nt, Artificial Sequence
  Synthetic
cucaugagagaauauuucagcaa

SEQ ID NO: 181738 - RNA, 24 nt, Artificial Sequence
  Synthetic
ucucaugagagaauauuucagcaa

SEQ ID NO: 181739 - RNA, 18 nt, Artificial Sequence
  Synthetic
uuuuaauauaaagagcaa

SEQ ID NO: 181740 - RNA, 19 nt, Artificial Sequence
  Synthetic
uuuuuaauauaaagagcaa

SEQ ID NO: 181741 - RNA, 20 nt, Artificial Sequence
  Synthetic
auuuuuaauauaaagagcaa

SEQ ID NO: 181742 - RNA, 21 nt, Artificial Sequence
  Synthetic
uauuuuuaauauaaagagcaa

SEQ ID NO: 181743 - RNA, 22 nt, Artificial Sequence
  Synthetic
uuauuuuuaauauaaagagcaa

SEQ ID NO: 181744 - RNA, 23 nt, Artificial Sequence
  Synthetic
auuauuuuuaauauaaagagcaa

SEQ ID NO: 181745 - RNA, 24 nt, Artificial Sequence
  Synthetic
aauuauuuuuaauauaaagagcaa

SEQ ID NO: 181746 - RNA, 18 nt, Artificial Sequence
  Synthetic
auuuauugugaagagcaa

SEQ ID NO: 181747 - RNA, 19 nt, Artificial Sequence
  Synthetic
gauuuauugugaagagcaa

SEQ ID NO: 181748 - RNA, 20 nt, Artificial Sequence
  Synthetic
agauuuauugugaagagcaa

SEQ ID NO: 181749 - RNA, 21 nt, Artificial Sequence
  Synthetic
aagauuuauugugaagagcaa

SEQ ID NO: 181750 - RNA, 22 nt, Artificial Sequence
  Synthetic
caagauuuauugugaagagcaa

SEQ ID NO: 181751 - RNA, 23 nt, Artificial Sequence
  Synthetic
gcaagauuuauugugaagagcaa

SEQ ID NO: 181752 - RNA, 24 nt, Artificial Sequence
  Synthetic
agcaagauuuauugugaagagcaa

SEQ ID NO: 181753 - RNA, 18 nt, Artificial Sequence
  Synthetic
aggaggcacagagagcaa

SEQ ID NO: 181754 - RNA, 19 nt, Artificial Sequence
  Synthetic
uaggaggcacagagagcaa

SEQ ID NO: 181755 - RNA, 20 nt, Artificial Sequence
  Synthetic
uuaggaggcacagagagcaa

SEQ ID NO: 181756 - RNA, 21 nt, Artificial Sequence
  Synthetic
uuuaggaggcacagagagcaa

SEQ ID NO: 181757 - RNA, 22 nt, Artificial Sequence
  Synthetic
uuuuaggaggcacagagagcaa

SEQ ID NO: 181758 - RNA, 23 nt, Artificial Sequence
  Synthetic
guuuuaggaggcacagagagcaa

SEQ ID NO: 181759 - RNA, 24 nt, Artificial Sequence
  Synthetic
uguuuuaggaggcacagagagcaa

SEQ ID NO: 181760 - RNA, 18 nt, Artificial Sequence
  Synthetic
ugcuggaacugagagcaa

SEQ ID NO: 181761 - RNA, 19 nt, Artificial Sequence
  Synthetic
uugcuggaacugagagcaa

SEQ ID NO: 181762 - RNA, 20 nt, Artificial Sequence
  Synthetic
uuugcuggaacugagagcaa

SEQ ID NO: 181763 - RNA, 21 nt, Artificial Sequence
  Synthetic
uuuugcuggaacugagagcaa

SEQ ID NO: 181764 - RNA, 22 nt, Artificial Sequence
  Synthetic
guuuugcuggaacugagagcaa

SEQ ID NO: 181765 - RNA, 23 nt, Artificial Sequence
  Synthetic
uguuuugcuggaacugagagcaa

SEQ ID NO: 181766 - RNA, 24 nt, Artificial Sequence
  Synthetic
uuguuuugcuggaacugagagcaa

SEQ ID NO: 181767 - RNA, 18 nt, Artificial Sequence
  Synthetic
aggagaagugccgagcaa

SEQ ID NO: 181768 - RNA, 19 nt, Artificial Sequence
  Synthetic
aaggagaagugccgagcaa

SEQ ID NO: 181769 - RNA, 20 nt, Artificial Sequence
  Synthetic
gaaggagaagugccgagcaa

SEQ ID NO: 181770 - RNA, 21 nt, Artificial Sequence
  Synthetic
agaaggagaagugccgagcaa

SEQ ID NO: 181771 - RNA, 22 nt, Artificial Sequence
  Synthetic
aagaaggagaagugccgagcaa

SEQ ID NO: 181772 - RNA, 23 nt, Artificial Sequence
  Synthetic
caagaaggagaagugccgagcaa

SEQ ID NO: 181773 - RNA, 24 nt, Artificial Sequence
  Synthetic
gcaagaaggagaagugccgagcaa

SEQ ID NO: 181774 - RNA, 18 nt, Artificial Sequence
  Synthetic
uacuugauaaaggagcaa

SEQ ID NO: 181775 - RNA, 19 nt, Artificial Sequence
  Synthetic
guacuugauaaaggagcaa

SEQ ID NO: 181776 - RNA, 20 nt, Artificial Sequence
  Synthetic
aguacuugauaaaggagcaa

SEQ ID NO: 181777 - RNA, 21 nt, Artificial Sequence
  Synthetic
aaguacuugauaaaggagcaa

SEQ ID NO: 181778 - RNA, 22 nt, Artificial Sequence
  Synthetic
caaguacuugauaaaggagcaa

SEQ ID NO: 181779 - RNA, 23 nt, Artificial Sequence
  Synthetic
ccaaguacuugauaaaggagcaa

SEQ ID NO: 181780 - RNA, 24 nt, Artificial Sequence
  Synthetic
cccaaguacuugauaaaggagcaa

SEQ ID NO: 181781 - RNA, 18 nt, Artificial Sequence
  Synthetic
uggcuagagcaggagcaa

SEQ ID NO: 181782 - RNA, 19 nt, Artificial Sequence
  Synthetic
cuggcuagagcaggagcaa

SEQ ID NO: 181783 - RNA, 20 nt, Artificial Sequence
  Synthetic
ccuggcuagagcaggagcaa

SEQ ID NO: 181784 - RNA, 21 nt, Artificial Sequence
  Synthetic
accuggcuagagcaggagcaa

SEQ ID NO: 181785 - RNA, 22 nt, Artificial Sequence
  Synthetic
caccuggcuagagcaggagcaa

SEQ ID NO: 181786 - RNA, 23 nt, Artificial Sequence
  Synthetic
ucaccuggcuagagcaggagcaa

SEQ ID NO: 181787 - RNA, 24 nt, Artificial Sequence
  Synthetic
uucaccuggcuagagcaggagcaa

SEQ ID NO: 181788 - RNA, 18 nt, Artificial Sequence
  Synthetic
aacaauaacagggagcaa

SEQ ID NO: 181789 - RNA, 19 nt, Artificial Sequence
  Synthetic
gaacaauaacagggagcaa

SEQ ID NO: 181790 - RNA, 20 nt, Artificial Sequence
  Synthetic
ggaacaauaacagggagcaa

SEQ ID NO: 181791 - RNA, 21 nt, Artificial Sequence
  Synthetic
aggaacaauaacagggagcaa

SEQ ID NO: 181792 - RNA, 22 nt, Artificial Sequence
  Synthetic
aaggaacaauaacagggagcaa

SEQ ID NO: 181793 - RNA, 23 nt, Artificial Sequence
  Synthetic
aaaggaacaauaacagggagcaa

SEQ ID NO: 181794 - RNA, 24 nt, Artificial Sequence
  Synthetic
gaaaggaacaauaacagggagcaa

SEQ ID NO: 181795 - RNA, 18 nt, Artificial Sequence
  Synthetic
aaggaggagaaugagcaa

SEQ ID NO: 181796 - RNA, 19 nt, Artificial Sequence
  Synthetic
gaaggaggagaaugagcaa

SEQ ID NO: 181797 - RNA, 20 nt, Artificial Sequence
  Synthetic
ggaaggaggagaaugagcaa

SEQ ID NO: 181798 - RNA, 21 nt, Artificial Sequence
  Synthetic
aggaaggaggagaaugagcaa

SEQ ID NO: 181799 - RNA, 22 nt, Artificial Sequence
  Synthetic
caggaaggaggagaaugagcaa

SEQ ID NO: 181800 - RNA, 23 nt, Artificial Sequence
  Synthetic
gcaggaaggaggagaaugagcaa

SEQ ID NO: 181801 - RNA, 24 nt, Artificial Sequence
  Synthetic
agcaggaaggaggagaaugagcaa

SEQ ID NO: 181802 - RNA, 18 nt, Artificial Sequence
  Synthetic
cauauggcuacugagcaa

SEQ ID NO: 181803 - RNA, 19 nt, Artificial Sequence
  Synthetic
gcauauggcuacugagcaa

SEQ ID NO: 181804 - RNA, 20 nt, Artificial Sequence
  Synthetic
agcauauggcuacugagcaa

SEQ ID NO: 181805 - RNA, 21 nt, Artificial Sequence
  Synthetic
uagcauauggcuacugagcaa

SEQ ID NO: 181806 - RNA, 22 nt, Artificial Sequence
  Synthetic
guagcauauggcuacugagcaa

SEQ ID NO: 181807 - RNA, 23 nt, Artificial Sequence
  Synthetic
uguagcauauggcuacugagcaa

SEQ ID NO: 181808 - RNA, 24 nt, Artificial Sequence
  Synthetic
cuguagcauauggcuacugagcaa

SEQ ID NO: 181809 - RNA, 18 nt, Artificial Sequence
  Synthetic
ugacccuccccugagcaa

SEQ ID NO: 181810 - RNA, 19 nt, Artificial Sequence
  Synthetic
cugacccuccccugagcaa

SEQ ID NO: 181811 - RNA, 20 nt, Artificial Sequence
  Synthetic
acugacccuccccugagcaa

SEQ ID NO: 181812 - RNA, 21 nt, Artificial Sequence
  Synthetic
cacugacccuccccugagcaa

SEQ ID NO: 181813 - RNA, 22 nt, Artificial Sequence
  Synthetic
acacugacccuccccugagcaa

SEQ ID NO: 181814 - RNA, 23 nt, Artificial Sequence
  Synthetic
aacacugacccuccccugagcaa

SEQ ID NO: 181815 - RNA, 24 nt, Artificial Sequence
  Synthetic
aaacacugacccuccccugagcaa

SEQ ID NO: 181816 - RNA, 18 nt, Artificial Sequence
  Synthetic
aauuuuuagccugagcaa

SEQ ID NO: 181817 - RNA, 19 nt, Artificial Sequence
  Synthetic
gaauuuuuagccugagcaa

SEQ ID NO: 181818 - RNA, 20 nt, Artificial Sequence
  Synthetic
agaauuuuuagccugagcaa

SEQ ID NO: 181819 - RNA, 21 nt, Artificial Sequence
  Synthetic
aagaauuuuuagccugagcaa

SEQ ID NO: 181820 - RNA, 22 nt, Artificial Sequence
  Synthetic
caagaauuuuuagccugagcaa

SEQ ID NO: 181821 - RNA, 23 nt, Artificial Sequence
  Synthetic
ucaagaauuuuuagccugagcaa

SEQ ID NO: 181822 - RNA, 24 nt, Artificial Sequence
  Synthetic
cucaagaauuuuuagccugagcaa

SEQ ID NO: 181823 - RNA, 18 nt, Artificial Sequence
  Synthetic
aggagaagugcugagcaa

SEQ ID NO: 181824 - RNA, 19 nt, Artificial Sequence
  Synthetic
aaggagaagugcugagcaa

SEQ ID NO: 181825 - RNA, 20 nt, Artificial Sequence
  Synthetic
aaaggagaagugcugagcaa

SEQ ID NO: 181826 - RNA, 21 nt, Artificial Sequence
  Synthetic
gaaaggagaagugcugagcaa

SEQ ID NO: 181827 - RNA, 22 nt, Artificial Sequence
  Synthetic
agaaaggagaagugcugagcaa

SEQ ID NO: 181828 - RNA, 23 nt, Artificial Sequence
  Synthetic
cagaaaggagaagugcugagcaa

SEQ ID NO: 181829 - RNA, 24 nt, Artificial Sequence
  Synthetic
gcagaaaggagaagugcugagcaa

SEQ ID NO: 181830 - RNA, 18 nt, Artificial Sequence
  Synthetic
gugaauuauucugagcaa

SEQ ID NO: 181831 - RNA, 19 nt, Artificial Sequence
  Synthetic
ggugaauuauucugagcaa

SEQ ID NO: 181832 - RNA, 20 nt, Artificial Sequence
  Synthetic
aggugaauuauucugagcaa

SEQ ID NO: 181833 - RNA, 21 nt, Artificial Sequence
  Synthetic
caggugaauuauucugagcaa

SEQ ID NO: 181834 - RNA, 22 nt, Artificial Sequence
  Synthetic
gcaggugaauuauucugagcaa

SEQ ID NO: 181835 - RNA, 23 nt, Artificial Sequence
  Synthetic
agcaggugaauuauucugagcaa

SEQ ID NO: 181836 - RNA, 24 nt, Artificial Sequence
  Synthetic
uagcaggugaauuauucugagcaa

SEQ ID NO: 181837 - RNA, 18 nt, Artificial Sequence
  Synthetic
uagaauauaaaauagcaa

SEQ ID NO: 181838 - RNA, 19 nt, Artificial Sequence
  Synthetic
auagaauauaaaauagcaa

SEQ ID NO: 181839 - RNA, 20 nt, Artificial Sequence
  Synthetic
gauagaauauaaaauagcaa

SEQ ID NO: 181840 - RNA, 21 nt, Artificial Sequence
  Synthetic
agauagaauauaaaauagcaa

SEQ ID NO: 181841 - RNA, 22 nt, Artificial Sequence
  Synthetic
aagauagaauauaaaauagcaa

SEQ ID NO: 181842 - RNA, 23 nt, Artificial Sequence
  Synthetic
uaagauagaauauaaaauagcaa

SEQ ID NO: 181843 - RNA, 24 nt, Artificial Sequence
  Synthetic
auaagauagaauauaaaauagcaa

SEQ ID NO: 181844 - RNA, 18 nt, Artificial Sequence
  Synthetic
uauucacauuaauagcaa

SEQ ID NO: 181845 - RNA, 19 nt, Artificial Sequence
  Synthetic
auauucacauuaauagcaa

SEQ ID NO: 181846 - RNA, 20 nt, Artificial Sequence
  Synthetic
uauauucacauuaauagcaa

SEQ ID NO: 181847 - RNA, 21 nt, Artificial Sequence
  Synthetic
uuauauucacauuaauagcaa

SEQ ID NO: 181848 - RNA, 22 nt, Artificial Sequence
  Synthetic
guuauauucacauuaauagcaa

SEQ ID NO: 181849 - RNA, 23 nt, Artificial Sequence
  Synthetic
uguuauauucacauuaauagcaa

SEQ ID NO: 181850 - RNA, 24 nt, Artificial Sequence
  Synthetic
cuguuauauucacauuaauagcaa

SEQ ID NO: 181851 - RNA, 18 nt, Artificial Sequence
  Synthetic
gaugcaguuaucuagcaa

SEQ ID NO: 181852 - RNA, 19 nt, Artificial Sequence
  Synthetic
ggaugcaguuaucuagcaa

SEQ ID NO: 181853 - RNA, 20 nt, Artificial Sequence
  Synthetic
uggaugcaguuaucuagcaa

SEQ ID NO: 181854 - RNA, 21 nt, Artificial Sequence
  Synthetic
guggaugcaguuaucuagcaa

SEQ ID NO: 181855 - RNA, 22 nt, Artificial Sequence
  Synthetic
uguggaugcaguuaucuagcaa

SEQ ID NO: 181856 - RNA, 23 nt, Artificial Sequence
  Synthetic
auguggaugcaguuaucuagcaa

SEQ ID NO: 181857 - RNA, 24 nt, Artificial Sequence
  Synthetic
uauguggaugcaguuaucuagcaa

SEQ ID NO: 181858 - RNA, 18 nt, Artificial Sequence
  Synthetic
aacagcaaacaguagcaa

SEQ ID NO: 181859 - RNA, 19 nt, Artificial Sequence
  Synthetic
uaacagcaaacaguagcaa

SEQ ID NO: 181860 - RNA, 20 nt, Artificial Sequence
  Synthetic
guaacagcaaacaguagcaa

SEQ ID NO: 181861 - RNA, 21 nt, Artificial Sequence
  Synthetic
uguaacagcaaacaguagcaa

SEQ ID NO: 181862 - RNA, 22 nt, Artificial Sequence
  Synthetic
uuguaacagcaaacaguagcaa

SEQ ID NO: 181863 - RNA, 23 nt, Artificial Sequence
  Synthetic
auuguaacagcaaacaguagcaa

SEQ ID NO: 181864 - RNA, 24 nt, Artificial Sequence
  Synthetic
gauuguaacagcaaacaguagcaa

SEQ ID NO: 181865 - RNA, 18 nt, Artificial Sequence
  Synthetic
uaacuucacuuguagcaa

SEQ ID NO: 181866 - RNA, 19 nt, Artificial Sequence
  Synthetic
guaacuucacuuguagcaa

SEQ ID NO: 181867 - RNA, 20 nt, Artificial Sequence
  Synthetic
uguaacuucacuuguagcaa

SEQ ID NO: 181868 - RNA, 21 nt, Artificial Sequence
  Synthetic
guguaacuucacuuguagcaa

SEQ ID NO: 181869 - RNA, 22 nt, Artificial Sequence
  Synthetic
gguguaacuucacuuguagcaa

SEQ ID NO: 181870 - RNA, 23 nt, Artificial Sequence
  Synthetic
ugguguaacuucacuuguagcaa

SEQ ID NO: 181871 - RNA, 24 nt, Artificial Sequence
  Synthetic
cugguguaacuucacuuguagcaa

SEQ ID NO: 181872 - RNA, 18 nt, Artificial Sequence
  Synthetic
caauuaaaaaauuagcaa

SEQ ID NO: 181873 - RNA, 19 nt, Artificial Sequence
  Synthetic
ucaauuaaaaaauuagcaa

SEQ ID NO: 181874 - RNA, 20 nt, Artificial Sequence
  Synthetic
gucaauuaaaaaauuagcaa

SEQ ID NO: 181875 - RNA, 21 nt, Artificial Sequence
  Synthetic
agucaauuaaaaaauuagcaa

SEQ ID NO: 181876 - RNA, 22 nt, Artificial Sequence
  Synthetic
aagucaauuaaaaaauuagcaa

SEQ ID NO: 181877 - RNA, 23 nt, Artificial Sequence
  Synthetic
aaagucaauuaaaaaauuagcaa

SEQ ID NO: 181878 - RNA, 24 nt, Artificial Sequence
  Synthetic
caaagucaauuaaaaaauuagcaa

SEQ ID NO: 181879 - RNA, 18 nt, Artificial Sequence
  Synthetic
aagugguauaauuagcaa

SEQ ID NO: 181880 - RNA, 19 nt, Artificial Sequence
  Synthetic
uaagugguauaauuagcaa

SEQ ID NO: 181881 - RNA, 20 nt, Artificial Sequence
  Synthetic
uuaagugguauaauuagcaa

SEQ ID NO: 181882 - RNA, 21 nt, Artificial Sequence
  Synthetic
uuuaagugguauaauuagcaa

SEQ ID NO: 181883 - RNA, 22 nt, Artificial Sequence
  Synthetic
auuuaagugguauaauuagcaa

SEQ ID NO: 181884 - RNA, 23 nt, Artificial Sequence
  Synthetic
cauuuaagugguauaauuagcaa

SEQ ID NO: 181885 - RNA, 24 nt, Artificial Sequence
  Synthetic
acauuuaagugguauaauuagcaa

SEQ ID NO: 181886 - RNA, 18 nt, Artificial Sequence
  Synthetic
cuuagggucacuuagcaa

SEQ ID NO: 181887 - RNA, 19 nt, Artificial Sequence
  Synthetic
ccuuagggucacuuagcaa

SEQ ID NO: 181888 - RNA, 20 nt, Artificial Sequence
  Synthetic
uccuuagggucacuuagcaa

SEQ ID NO: 181889 - RNA, 21 nt, Artificial Sequence
  Synthetic
uuccuuagggucacuuagcaa

SEQ ID NO: 181890 - RNA, 22 nt, Artificial Sequence
  Synthetic
uuuccuuagggucacuuagcaa

SEQ ID NO: 181891 - RNA, 23 nt, Artificial Sequence
  Synthetic
auuuccuuagggucacuuagcaa

SEQ ID NO: 181892 - RNA, 24 nt, Artificial Sequence
  Synthetic
aauuuccuuagggucacuuagcaa

SEQ ID NO: 181893 - RNA, 18 nt, Artificial Sequence
  Synthetic
gacucugguaguuagcaa

SEQ ID NO: 181894 - RNA, 19 nt, Artificial Sequence
  Synthetic
ggacucugguaguuagcaa

SEQ ID NO: 181895 - RNA, 20 nt, Artificial Sequence
  Synthetic
aggacucugguaguuagcaa

SEQ ID NO: 181896 - RNA, 21 nt, Artificial Sequence
  Synthetic
gaggacucugguaguuagcaa

SEQ ID NO: 181897 - RNA, 22 nt, Artificial Sequence
  Synthetic
agaggacucugguaguuagcaa

SEQ ID NO: 181898 - RNA, 23 nt, Artificial Sequence
  Synthetic
aagaggacucugguaguuagcaa

SEQ ID NO: 181899 - RNA, 24 nt, Artificial Sequence
  Synthetic
caagaggacucugguaguuagcaa

SEQ ID NO: 181900 - RNA, 18 nt, Artificial Sequence
  Synthetic
aauauucccauuuagcaa

SEQ ID NO: 181901 - RNA, 19 nt, Artificial Sequence
  Synthetic
uaauauucccauuuagcaa

SEQ ID NO: 181902 - RNA, 20 nt, Artificial Sequence
  Synthetic
uuaauauucccauuuagcaa

SEQ ID NO: 181903 - RNA, 21 nt, Artificial Sequence
  Synthetic
guuaauauucccauuuagcaa

SEQ ID NO: 181904 - RNA, 22 nt, Artificial Sequence
  Synthetic
uguuaauauucccauuuagcaa

SEQ ID NO: 181905 - RNA, 23 nt, Artificial Sequence
  Synthetic
cuguuaauauucccauuuagcaa

SEQ ID NO: 181906 - RNA, 24 nt, Artificial Sequence
  Synthetic
acuguuaauauucccauuuagcaa

SEQ ID NO: 181907 - RNA, 18 nt, Artificial Sequence
  Synthetic
cagaauguucuuuagcaa

SEQ ID NO: 181908 - RNA, 19 nt, Artificial Sequence
  Synthetic
acagaauguucuuuagcaa

SEQ ID NO: 181909 - RNA, 20 nt, Artificial Sequence
  Synthetic
gacagaauguucuuuagcaa

SEQ ID NO: 181910 - RNA, 21 nt, Artificial Sequence
  Synthetic
agacagaauguucuuuagcaa

SEQ ID NO: 181911 - RNA, 22 nt, Artificial Sequence
  Synthetic
gagacagaauguucuuuagcaa

SEQ ID NO: 181912 - RNA, 23 nt, Artificial Sequence
  Synthetic
agagacagaauguucuuuagcaa

SEQ ID NO: 181913 - RNA, 24 nt, Artificial Sequence
  Synthetic
uagagacagaauguucuuuagcaa

SEQ ID NO: 181914 - RNA, 18 nt, Artificial Sequence
  Synthetic
aauaucauacuaacgcaa

SEQ ID NO: 181915 - RNA, 19 nt, Artificial Sequence
  Synthetic
aaauaucauacuaacgcaa

SEQ ID NO: 181916 - RNA, 20 nt, Artificial Sequence
  Synthetic
uaaauaucauacuaacgcaa

SEQ ID NO: 181917 - RNA, 21 nt, Artificial Sequence
  Synthetic
guaaauaucauacuaacgcaa

SEQ ID NO: 181918 - RNA, 22 nt, Artificial Sequence
  Synthetic
uguaaauaucauacuaacgcaa

SEQ ID NO: 181919 - RNA, 23 nt, Artificial Sequence
  Synthetic
cuguaaauaucauacuaacgcaa

SEQ ID NO: 181920 - RNA, 24 nt, Artificial Sequence
  Synthetic
ucuguaaauaucauacuaacgcaa

SEQ ID NO: 181921 - RNA, 18 nt, Artificial Sequence
  Synthetic
uugugaagagugacgcaa

SEQ ID NO: 181922 - RNA, 19 nt, Artificial Sequence
  Synthetic
cuugugaagagugacgcaa

SEQ ID NO: 181923 - RNA, 20 nt, Artificial Sequence
  Synthetic
ucuugugaagagugacgcaa

SEQ ID NO: 181924 - RNA, 21 nt, Artificial Sequence
  Synthetic
cucuugugaagagugacgcaa

SEQ ID NO: 181925 - RNA, 22 nt, Artificial Sequence
  Synthetic
ccucuugugaagagugacgcaa

SEQ ID NO: 181926 - RNA, 23 nt, Artificial Sequence
  Synthetic
gccucuugugaagagugacgcaa

SEQ ID NO: 181927 - RNA, 24 nt, Artificial Sequence
  Synthetic
ggccucuugugaagagugacgcaa

SEQ ID NO: 181928 - RNA, 18 nt, Artificial Sequence
  Synthetic
uugugaauagugccgcaa

SEQ ID NO: 181929 - RNA, 19 nt, Artificial Sequence
  Synthetic
auugugaauagugccgcaa

SEQ ID NO: 181930 - RNA, 20 nt, Artificial Sequence
  Synthetic
uauugugaauagugccgcaa

SEQ ID NO: 181931 - RNA, 18 nt, Artificial Sequence
  Synthetic
gaacuaccaucuucgcaa

SEQ ID NO: 181932 - RNA, 19 nt, Artificial Sequence
  Synthetic
agaacuaccaucuucgcaa

SEQ ID NO: 181933 - RNA, 20 nt, Artificial Sequence
  Synthetic
aagaacuaccaucuucgcaa

SEQ ID NO: 181934 - RNA, 21 nt, Artificial Sequence
  Synthetic
uaagaacuaccaucuucgcaa

SEQ ID NO: 181935 - RNA, 22 nt, Artificial Sequence
  Synthetic
uuaagaacuaccaucuucgcaa

SEQ ID NO: 181936 - RNA, 23 nt, Artificial Sequence
  Synthetic
guuaagaacuaccaucuucgcaa

SEQ ID NO: 181937 - RNA, 24 nt, Artificial Sequence
  Synthetic
uguuaagaacuaccaucuucgcaa

SEQ ID NO: 181938 - RNA, 18 nt, Artificial Sequence
  Synthetic
uuugaaauggaaaggcaa

SEQ ID NO: 181939 - RNA, 19 nt, Artificial Sequence
  Synthetic
uuuugaaauggaaaggcaa

SEQ ID NO: 181940 - RNA, 20 nt, Artificial Sequence
  Synthetic
auuuugaaauggaaaggcaa

SEQ ID NO: 181941 - RNA, 21 nt, Artificial Sequence
  Synthetic
uauuuugaaauggaaaggcaa

SEQ ID NO: 181942 - RNA, 22 nt, Artificial Sequence
  Synthetic
guauuuugaaauggaaaggcaa

SEQ ID NO: 181943 - RNA, 23 nt, Artificial Sequence
  Synthetic
uguauuuugaaauggaaaggcaa

SEQ ID NO: 181944 - RNA, 24 nt, Artificial Sequence
  Synthetic
guguauuuugaaauggaaaggcaa

SEQ ID NO: 181945 - RNA, 18 nt, Artificial Sequence
  Synthetic
gacagauccacaaggcaa

SEQ ID NO: 181946 - RNA, 19 nt, Artificial Sequence
  Synthetic
ugacagauccacaaggcaa

SEQ ID NO: 181947 - RNA, 20 nt, Artificial Sequence
  Synthetic
uugacagauccacaaggcaa

SEQ ID NO: 181948 - RNA, 21 nt, Artificial Sequence
  Synthetic
guugacagauccacaaggcaa

SEQ ID NO: 181949 - RNA, 22 nt, Artificial Sequence
  Synthetic
aguugacagauccacaaggcaa

SEQ ID NO: 181950 - RNA, 23 nt, Artificial Sequence
  Synthetic
aaguugacagauccacaaggcaa

SEQ ID NO: 181951 - RNA, 24 nt, Artificial Sequence
  Synthetic
caaguugacagauccacaaggcaa

SEQ ID NO: 181952 - RNA, 18 nt, Artificial Sequence
  Synthetic
auaacauggacaaggcaa

SEQ ID NO: 181953 - RNA, 19 nt, Artificial Sequence
  Synthetic
uauaacauggacaaggcaa

SEQ ID NO: 181954 - RNA, 20 nt, Artificial Sequence
  Synthetic
auauaacauggacaaggcaa

SEQ ID NO: 181955 - RNA, 21 nt, Artificial Sequence
  Synthetic
cauauaacauggacaaggcaa

SEQ ID NO: 181956 - RNA, 22 nt, Artificial Sequence
  Synthetic
ccauauaacauggacaaggcaa

SEQ ID NO: 181957 - RNA, 23 nt, Artificial Sequence
  Synthetic
accauauaacauggacaaggcaa

SEQ ID NO: 181958 - RNA, 24 nt, Artificial Sequence
  Synthetic
aaccauauaacauggacaaggcaa

SEQ ID NO: 181959 - RNA, 18 nt, Artificial Sequence
  Synthetic
ucacaguggacaaggcaa

SEQ ID NO: 181960 - RNA, 19 nt, Artificial Sequence
  Synthetic
aucacaguggacaaggcaa

SEQ ID NO: 181961 - RNA, 20 nt, Artificial Sequence
  Synthetic
caucacaguggacaaggcaa

SEQ ID NO: 181962 - RNA, 21 nt, Artificial Sequence
  Synthetic
acaucacaguggacaaggcaa

SEQ ID NO: 181963 - RNA, 22 nt, Artificial Sequence
  Synthetic
cacaucacaguggacaaggcaa

SEQ ID NO: 181964 - RNA, 23 nt, Artificial Sequence
  Synthetic
ccacaucacaguggacaaggcaa

SEQ ID NO: 181965 - RNA, 24 nt, Artificial Sequence
  Synthetic
gccacaucacaguggacaaggcaa

SEQ ID NO: 181966 - RNA, 18 nt, Artificial Sequence
  Synthetic
agaccaguuagaaggcaa

SEQ ID NO: 181967 - RNA, 19 nt, Artificial Sequence
  Synthetic
aagaccaguuagaaggcaa

SEQ ID NO: 181968 - RNA, 20 nt, Artificial Sequence
  Synthetic
uaagaccaguuagaaggcaa

SEQ ID NO: 181969 - RNA, 21 nt, Artificial Sequence
  Synthetic
guaagaccaguuagaaggcaa

SEQ ID NO: 181970 - RNA, 22 nt, Artificial Sequence
  Synthetic
aguaagaccaguuagaaggcaa

SEQ ID NO: 181971 - RNA, 23 nt, Artificial Sequence
  Synthetic
caguaagaccaguuagaaggcaa

SEQ ID NO: 181972 - RNA, 24 nt, Artificial Sequence
  Synthetic
ucaguaagaccaguuagaaggcaa

SEQ ID NO: 181973 - RNA, 18 nt, Artificial Sequence
  Synthetic
aaaccucaucuaaggcaa

SEQ ID NO: 181974 - RNA, 19 nt, Artificial Sequence
  Synthetic
uaaaccucaucuaaggcaa

SEQ ID NO: 181975 - RNA, 20 nt, Artificial Sequence
  Synthetic
guaaaccucaucuaaggcaa

SEQ ID NO: 181976 - RNA, 21 nt, Artificial Sequence
  Synthetic
uguaaaccucaucuaaggcaa

SEQ ID NO: 181977 - RNA, 22 nt, Artificial Sequence
  Synthetic
guguaaaccucaucuaaggcaa

SEQ ID NO: 181978 - RNA, 23 nt, Artificial Sequence
  Synthetic
uguguaaaccucaucuaaggcaa

SEQ ID NO: 181979 - RNA, 24 nt, Artificial Sequence
  Synthetic
auguguaaaccucaucuaaggcaa

SEQ ID NO: 181980 - RNA, 18 nt, Artificial Sequence
  Synthetic
acuuucuuuuuaaggcaa

SEQ ID NO: 181981 - RNA, 19 nt, Artificial Sequence
  Synthetic
uacuuucuuuuuaaggcaa

SEQ ID NO: 181982 - RNA, 20 nt, Artificial Sequence
  Synthetic
auacuuucuuuuuaaggcaa

SEQ ID NO: 181983 - RNA, 21 nt, Artificial Sequence
  Synthetic
aauacuuucuuuuuaaggcaa

SEQ ID NO: 181984 - RNA, 22 nt, Artificial Sequence
  Synthetic
gaauacuuucuuuuuaaggcaa

SEQ ID NO: 181985 - RNA, 23 nt, Artificial Sequence
  Synthetic
agaauacuuucuuuuuaaggcaa

SEQ ID NO: 181986 - RNA, 24 nt, Artificial Sequence
  Synthetic
uagaauacuuucuuuuuaaggcaa

SEQ ID NO: 181987 - RNA, 18 nt, Artificial Sequence
  Synthetic
auagagaaaaccaggcaa

SEQ ID NO: 181988 - RNA, 19 nt, Artificial Sequence
  Synthetic
uauagagaaaaccaggcaa

SEQ ID NO: 181989 - RNA, 20 nt, Artificial Sequence
  Synthetic
uuauagagaaaaccaggcaa

SEQ ID NO: 181990 - RNA, 21 nt, Artificial Sequence
  Synthetic
uuuauagagaaaaccaggcaa

SEQ ID NO: 181991 - RNA, 22 nt, Artificial Sequence
  Synthetic
auuuauagagaaaaccaggcaa

SEQ ID NO: 181992 - RNA, 23 nt, Artificial Sequence
  Synthetic
gauuuauagagaaaaccaggcaa

SEQ ID NO: 181993 - RNA, 24 nt, Artificial Sequence
  Synthetic
ugauuuauagagaaaaccaggcaa

SEQ ID NO: 181994 - RNA, 18 nt, Artificial Sequence
  Synthetic
ggagaguguuccaggcaa

SEQ ID NO: 181995 - RNA, 19 nt, Artificial Sequence
  Synthetic
gggagaguguuccaggcaa

SEQ ID NO: 181996 - RNA, 20 nt, Artificial Sequence
  Synthetic
ggggagaguguuccaggcaa

SEQ ID NO: 181997 - RNA, 21 nt, Artificial Sequence
  Synthetic
aggggagaguguuccaggcaa

SEQ ID NO: 181998 - RNA, 22 nt, Artificial Sequence
  Synthetic
uaggggagaguguuccaggcaa

SEQ ID NO: 181999 - RNA, 23 nt, Artificial Sequence
  Synthetic
guaggggagaguguuccaggcaa

SEQ ID NO: 182000 - RNA, 24 nt, Artificial Sequence
  Synthetic
aguaggggagaguguuccaggcaa

SEQ ID NO: 182001 - RNA, 18 nt, Artificial Sequence
  Synthetic
uuacaugacagcaggcaa

SEQ ID NO: 182002 - RNA, 19 nt, Artificial Sequence
  Synthetic
cuuacaugacagcaggcaa

SEQ ID NO: 182003 - RNA, 20 nt, Artificial Sequence
  Synthetic
ucuuacaugacagcaggcaa

SEQ ID NO: 182004 - RNA, 21 nt, Artificial Sequence
  Synthetic
uucuuacaugacagcaggcaa

SEQ ID NO: 182005 - RNA, 22 nt, Artificial Sequence
  Synthetic
cuucuuacaugacagcaggcaa

SEQ ID NO: 182006 - RNA, 23 nt, Artificial Sequence
  Synthetic
acuucuuacaugacagcaggcaa

SEQ ID NO: 182007 - RNA, 24 nt, Artificial Sequence
  Synthetic
cacuucuuacaugacagcaggcaa

SEQ ID NO: 182008 - RNA, 18 nt, Artificial Sequence
  Synthetic
ugaaucuugagcaggcaa

SEQ ID NO: 182009 - RNA, 19 nt, Artificial Sequence
  Synthetic
augaaucuugagcaggcaa

SEQ ID NO: 182010 - RNA, 20 nt, Artificial Sequence
  Synthetic
uaugaaucuugagcaggcaa

SEQ ID NO: 182011 - RNA, 21 nt, Artificial Sequence
  Synthetic
auaugaaucuugagcaggcaa

SEQ ID NO: 182012 - RNA, 22 nt, Artificial Sequence
  Synthetic
aauaugaaucuugagcaggcaa

SEQ ID NO: 182013 - RNA, 23 nt, Artificial Sequence
  Synthetic
gaauaugaaucuugagcaggcaa

SEQ ID NO: 182014 - RNA, 24 nt, Artificial Sequence
  Synthetic
agaauaugaaucuugagcaggcaa

SEQ ID NO: 182015 - RNA, 18 nt, Artificial Sequence
  Synthetic
gccaggacaaucaggcaa

SEQ ID NO: 182016 - RNA, 19 nt, Artificial Sequence
  Synthetic
ggccaggacaaucaggcaa

SEQ ID NO: 182017 - RNA, 20 nt, Artificial Sequence
  Synthetic
uggccaggacaaucaggcaa

SEQ ID NO: 182018 - RNA, 21 nt, Artificial Sequence
  Synthetic
uuggccaggacaaucaggcaa

SEQ ID NO: 182019 - RNA, 22 nt, Artificial Sequence
  Synthetic
uuuggccaggacaaucaggcaa

SEQ ID NO: 182020 - RNA, 23 nt, Artificial Sequence
  Synthetic
uuuuggccaggacaaucaggcaa

SEQ ID NO: 182021 - RNA, 24 nt, Artificial Sequence
  Synthetic
guuuuggccaggacaaucaggcaa

SEQ ID NO: 182022 - RNA, 18 nt, Artificial Sequence
  Synthetic
acugaauacuucaggcaa

SEQ ID NO: 182023 - RNA, 19 nt, Artificial Sequence
  Synthetic
uacugaauacuucaggcaa

SEQ ID NO: 182024 - RNA, 20 nt, Artificial Sequence
  Synthetic
guacugaauacuucaggcaa

SEQ ID NO: 182025 - RNA, 21 nt, Artificial Sequence
  Synthetic
uguacugaauacuucaggcaa

SEQ ID NO: 182026 - RNA, 22 nt, Artificial Sequence
  Synthetic
cuguacugaauacuucaggcaa

SEQ ID NO: 182027 - RNA, 23 nt, Artificial Sequence
  Synthetic
acuguacugaauacuucaggcaa

SEQ ID NO: 182028 - RNA, 24 nt, Artificial Sequence
  Synthetic
gacuguacugaauacuucaggcaa

SEQ ID NO: 182029 - RNA, 18 nt, Artificial Sequence
  Synthetic
aaggaugagaagaggcaa

SEQ ID NO: 182030 - RNA, 19 nt, Artificial Sequence
  Synthetic
aaaggaugagaagaggcaa

SEQ ID NO: 182031 - RNA, 20 nt, Artificial Sequence
  Synthetic
uaaaggaugagaagaggcaa

SEQ ID NO: 182032 - RNA, 21 nt, Artificial Sequence
  Synthetic
uuaaaggaugagaagaggcaa

SEQ ID NO: 182033 - RNA, 22 nt, Artificial Sequence
  Synthetic
cuuaaaggaugagaagaggcaa

SEQ ID NO: 182034 - RNA, 23 nt, Artificial Sequence
  Synthetic
ucuuaaaggaugagaagaggcaa

SEQ ID NO: 182035 - RNA, 24 nt, Artificial Sequence
  Synthetic
gucuuaaaggaugagaagaggcaa

SEQ ID NO: 182036 - RNA, 18 nt, Artificial Sequence
  Synthetic
cuaaggggacagaggcaa

SEQ ID NO: 182037 - RNA, 19 nt, Artificial Sequence
  Synthetic
acuaaggggacagaggcaa

SEQ ID NO: 182038 - RNA, 20 nt, Artificial Sequence
  Synthetic
uacuaaggggacagaggcaa

SEQ ID NO: 182039 - RNA, 21 nt, Artificial Sequence
  Synthetic
cuacuaaggggacagaggcaa

SEQ ID NO: 182040 - RNA, 22 nt, Artificial Sequence
  Synthetic
acuacuaaggggacagaggcaa

SEQ ID NO: 182041 - RNA, 23 nt, Artificial Sequence
  Synthetic
uacuacuaaggggacagaggcaa

SEQ ID NO: 182042 - RNA, 24 nt, Artificial Sequence
  Synthetic
uuacuacuaaggggacagaggcaa

SEQ ID NO: 182043 - RNA, 18 nt, Artificial Sequence
  Synthetic
ucuaccaaauugaggcaa

SEQ ID NO: 182044 - RNA, 19 nt, Artificial Sequence
  Synthetic
uucuaccaaauugaggcaa

SEQ ID NO: 182045 - RNA, 20 nt, Artificial Sequence
  Synthetic
guucuaccaaauugaggcaa

SEQ ID NO: 182046 - RNA, 21 nt, Artificial Sequence
  Synthetic
aguucuaccaaauugaggcaa

SEQ ID NO: 182047 - RNA, 22 nt, Artificial Sequence
  Synthetic
gaguucuaccaaauugaggcaa

SEQ ID NO: 182048 - RNA, 23 nt, Artificial Sequence
  Synthetic
agaguucuaccaaauugaggcaa

SEQ ID NO: 182049 - RNA, 24 nt, Artificial Sequence
  Synthetic
cagaguucuaccaaauugaggcaa

SEQ ID NO: 182050 - RNA, 18 nt, Artificial Sequence
  Synthetic
guuauuccacguaggcaa

SEQ ID NO: 182051 - RNA, 19 nt, Artificial Sequence
  Synthetic
uguuauuccacguaggcaa

SEQ ID NO: 182052 - RNA, 20 nt, Artificial Sequence
  Synthetic
auguuauuccacguaggcaa

SEQ ID NO: 182053 - RNA, 21 nt, Artificial Sequence
  Synthetic
cauguuauuccacguaggcaa

SEQ ID NO: 182054 - RNA, 22 nt, Artificial Sequence
  Synthetic
gcauguuauuccacguaggcaa

SEQ ID NO: 182055 - RNA, 23 nt, Artificial Sequence
  Synthetic
ggcauguuauuccacguaggcaa

SEQ ID NO: 182056 - RNA, 24 nt, Artificial Sequence
  Synthetic
aggcauguuauuccacguaggcaa

SEQ ID NO: 182057 - RNA, 18 nt, Artificial Sequence
  Synthetic
auucauggugaagggcaa

SEQ ID NO: 182058 - RNA, 19 nt, Artificial Sequence
  Synthetic
cauucauggugaagggcaa

SEQ ID NO: 182059 - RNA, 20 nt, Artificial Sequence
  Synthetic
ccauucauggugaagggcaa

SEQ ID NO: 182060 - RNA, 21 nt, Artificial Sequence
  Synthetic
uccauucauggugaagggcaa

SEQ ID NO: 182061 - RNA, 22 nt, Artificial Sequence
  Synthetic
uuccauucauggugaagggcaa

SEQ ID NO: 182062 - RNA, 23 nt, Artificial Sequence
  Synthetic
cuuccauucauggugaagggcaa

SEQ ID NO: 182063 - RNA, 24 nt, Artificial Sequence
  Synthetic
ucuuccauucauggugaagggcaa

SEQ ID NO: 182064 - RNA, 18 nt, Artificial Sequence
  Synthetic
ugucuaagaacagggcaa

SEQ ID NO: 182065 - RNA, 19 nt, Artificial Sequence
  Synthetic
gugucuaagaacagggcaa

SEQ ID NO: 182066 - RNA, 20 nt, Artificial Sequence
  Synthetic
cgugucuaagaacagggcaa

SEQ ID NO: 182067 - RNA, 21 nt, Artificial Sequence
  Synthetic
ccgugucuaagaacagggcaa

SEQ ID NO: 182068 - RNA, 22 nt, Artificial Sequence
  Synthetic
gccgugucuaagaacagggcaa

SEQ ID NO: 182069 - RNA, 23 nt, Artificial Sequence
  Synthetic
ggccgugucuaagaacagggcaa

SEQ ID NO: 182070 - RNA, 24 nt, Artificial Sequence
  Synthetic
gggccgugucuaagaacagggcaa

SEQ ID NO: 182071 - RNA, 18 nt, Artificial Sequence
  Synthetic
uagauuugacuagggcaa

SEQ ID NO: 182072 - RNA, 19 nt, Artificial Sequence
  Synthetic
auagauuugacuagggcaa

SEQ ID NO: 182073 - RNA, 20 nt, Artificial Sequence
  Synthetic
gauagauuugacuagggcaa

SEQ ID NO: 182074 - RNA, 21 nt, Artificial Sequence
  Synthetic
ugauagauuugacuagggcaa

SEQ ID NO: 182075 - RNA, 22 nt, Artificial Sequence
  Synthetic
gugauagauuugacuagggcaa

SEQ ID NO: 182076 - RNA, 23 nt, Artificial Sequence
  Synthetic
agugauagauuugacuagggcaa

SEQ ID NO: 182077 - RNA, 24 nt, Artificial Sequence
  Synthetic
cagugauagauuugacuagggcaa

SEQ ID NO: 182078 - RNA, 18 nt, Artificial Sequence
  Synthetic
uuggggcauguagggcaa

SEQ ID NO: 182079 - RNA, 19 nt, Artificial Sequence
  Synthetic
uuuggggcauguagggcaa

SEQ ID NO: 182080 - RNA, 20 nt, Artificial Sequence
  Synthetic
uuuuggggcauguagggcaa

SEQ ID NO: 182081 - RNA, 21 nt, Artificial Sequence
  Synthetic
auuuuggggcauguagggcaa

SEQ ID NO: 182082 - RNA, 22 nt, Artificial Sequence
  Synthetic
uauuuuggggcauguagggcaa

SEQ ID NO: 182083 - RNA, 23 nt, Artificial Sequence
  Synthetic
auauuuuggggcauguagggcaa

SEQ ID NO: 182084 - RNA, 24 nt, Artificial Sequence
  Synthetic
aauauuuuggggcauguagggcaa

SEQ ID NO: 182085 - RNA, 18 nt, Artificial Sequence
  Synthetic
gcacuccagcccgggcaa

SEQ ID NO: 182086 - RNA, 19 nt, Artificial Sequence
  Synthetic
ugcacuccagcccgggcaa

SEQ ID NO: 182087 - RNA, 20 nt, Artificial Sequence
  Synthetic
cugcacuccagcccgggcaa

SEQ ID NO: 182088 - RNA, 21 nt, Artificial Sequence
  Synthetic
acugcacuccagcccgggcaa

SEQ ID NO: 182089 - RNA, 22 nt, Artificial Sequence
  Synthetic
cacugcacuccagcccgggcaa

SEQ ID NO: 182090 - RNA, 23 nt, Artificial Sequence
  Synthetic
ucacugcacuccagcccgggcaa

SEQ ID NO: 182091 - RNA, 24 nt, Artificial Sequence
  Synthetic
gucacugcacuccagcccgggcaa

SEQ ID NO: 182092 - RNA, 18 nt, Artificial Sequence
  Synthetic
auucuuucaaaggggcaa

SEQ ID NO: 182093 - RNA, 19 nt, Artificial Sequence
  Synthetic
uauucuuucaaaggggcaa

SEQ ID NO: 182094 - RNA, 20 nt, Artificial Sequence
  Synthetic
uuauucuuucaaaggggcaa

SEQ ID NO: 182095 - RNA, 21 nt, Artificial Sequence
  Synthetic
guuauucuuucaaaggggcaa

SEQ ID NO: 182096 - RNA, 22 nt, Artificial Sequence
  Synthetic
aguuauucuuucaaaggggcaa

SEQ ID NO: 182097 - RNA, 23 nt, Artificial Sequence
  Synthetic
uaguuauucuuucaaaggggcaa

SEQ ID NO: 182098 - RNA, 24 nt, Artificial Sequence
  Synthetic
uuaguuauucuuucaaaggggcaa

SEQ ID NO: 182099 - RNA, 18 nt, Artificial Sequence
  Synthetic
uauuccuuccgggggcaa

SEQ ID NO: 182100 - RNA, 19 nt, Artificial Sequence
  Synthetic
cuauuccuuccgggggcaa

SEQ ID NO: 182101 - RNA, 20 nt, Artificial Sequence
  Synthetic
acuauuccuuccgggggcaa

SEQ ID NO: 182102 - RNA, 21 nt, Artificial Sequence
  Synthetic
cacuauuccuuccgggggcaa

SEQ ID NO: 182103 - RNA, 22 nt, Artificial Sequence
  Synthetic
ccacuauuccuuccgggggcaa

SEQ ID NO: 182104 - RNA, 23 nt, Artificial Sequence
  Synthetic
accacuauuccuuccgggggcaa

SEQ ID NO: 182105 - RNA, 24 nt, Artificial Sequence
  Synthetic
aaccacuauuccuuccgggggcaa

SEQ ID NO: 182106 - RNA, 18 nt, Artificial Sequence
  Synthetic
ucgcgagguggggggcaa

SEQ ID NO: 182107 - RNA, 19 nt, Artificial Sequence
  Synthetic
gucgcgagguggggggcaa

SEQ ID NO: 182108 - RNA, 20 nt, Artificial Sequence
  Synthetic
ugucgcgagguggggggcaa

SEQ ID NO: 182109 - RNA, 21 nt, Artificial Sequence
  Synthetic
cugucgcgagguggggggcaa

SEQ ID NO: 182110 - RNA, 22 nt, Artificial Sequence
  Synthetic
ccugucgcgagguggggggcaa

SEQ ID NO: 182111 - RNA, 23 nt, Artificial Sequence
  Synthetic
gccugucgcgagguggggggcaa

SEQ ID NO: 182112 - RNA, 24 nt, Artificial Sequence
  Synthetic
ggccugucgcgagguggggggcaa

SEQ ID NO: 182113 - RNA, 18 nt, Artificial Sequence
  Synthetic
cuugaagccuaugggcaa

SEQ ID NO: 182114 - RNA, 19 nt, Artificial Sequence
  Synthetic
ucuugaagccuaugggcaa

SEQ ID NO: 182115 - RNA, 20 nt, Artificial Sequence
  Synthetic
cucuugaagccuaugggcaa

SEQ ID NO: 182116 - RNA, 21 nt, Artificial Sequence
  Synthetic
gcucuugaagccuaugggcaa

SEQ ID NO: 182117 - RNA, 22 nt, Artificial Sequence
  Synthetic
ugcucuugaagccuaugggcaa

SEQ ID NO: 182118 - RNA, 23 nt, Artificial Sequence
  Synthetic
augcucuugaagccuaugggcaa

SEQ ID NO: 182119 - RNA, 24 nt, Artificial Sequence
  Synthetic
gaugcucuugaagccuaugggcaa

SEQ ID NO: 182120 - RNA, 18 nt, Artificial Sequence
  Synthetic
ggauuccaaccugggcaa

SEQ ID NO: 182121 - RNA, 19 nt, Artificial Sequence
  Synthetic
uggauuccaaccugggcaa

SEQ ID NO: 182122 - RNA, 20 nt, Artificial Sequence
  Synthetic
cuggauuccaaccugggcaa

SEQ ID NO: 182123 - RNA, 21 nt, Artificial Sequence
  Synthetic
acuggauuccaaccugggcaa

SEQ ID NO: 182124 - RNA, 22 nt, Artificial Sequence
  Synthetic
cacuggauuccaaccugggcaa

SEQ ID NO: 182125 - RNA, 23 nt, Artificial Sequence
  Synthetic
ccacuggauuccaaccugggcaa

SEQ ID NO: 182126 - RNA, 24 nt, Artificial Sequence
  Synthetic
gccacuggauuccaaccugggcaa

SEQ ID NO: 182127 - RNA, 18 nt, Artificial Sequence
  Synthetic
gcacuccagccugggcaa

SEQ ID NO: 182128 - RNA, 19 nt, Artificial Sequence
  Synthetic
ugcacuccagccugggcaa

SEQ ID NO: 182129 - RNA, 20 nt, Artificial Sequence
  Synthetic
cugcacuccagccugggcaa

SEQ ID NO: 182130 - RNA, 21 nt, Artificial Sequence
  Synthetic
acugcacuccagccugggcaa

SEQ ID NO: 182131 - RNA, 22 nt, Artificial Sequence
  Synthetic
cacugcacuccagccugggcaa

SEQ ID NO: 182132 - RNA, 23 nt, Artificial Sequence
  Synthetic
ccacugcacuccagccugggcaa

SEQ ID NO: 182133 - RNA, 24 nt, Artificial Sequence
  Synthetic
accacugcacuccagccugggcaa

SEQ ID NO: 182134 - RNA, 24 nt, Artificial Sequence
  Synthetic
gccacugcacuccagccugggcaa

SEQ ID NO: 182135 - RNA, 18 nt, Artificial Sequence
  Synthetic
gcccuccagccugggcaa

SEQ ID NO: 182136 - RNA, 19 nt, Artificial Sequence
  Synthetic
ugcccuccagccugggcaa

SEQ ID NO: 182137 - RNA, 20 nt, Artificial Sequence
  Synthetic
cugcccuccagccugggcaa

SEQ ID NO: 182138 - RNA, 21 nt, Artificial Sequence
  Synthetic
acugcccuccagccugggcaa

SEQ ID NO: 182139 - RNA, 22 nt, Artificial Sequence
  Synthetic
cacugcccuccagccugggcaa

SEQ ID NO: 182140 - RNA, 23 nt, Artificial Sequence
  Synthetic
ccacugcccuccagccugggcaa

SEQ ID NO: 182141 - RNA, 24 nt, Artificial Sequence
  Synthetic
gccacugcccuccagccugggcaa

SEQ ID NO: 182142 - RNA, 18 nt, Artificial Sequence
  Synthetic
uccaaaaucagugggcaa

SEQ ID NO: 182143 - RNA, 19 nt, Artificial Sequence
  Synthetic
uuccaaaaucagugggcaa

SEQ ID NO: 182144 - RNA, 20 nt, Artificial Sequence
  Synthetic
auuccaaaaucagugggcaa

SEQ ID NO: 182145 - RNA, 21 nt, Artificial Sequence
  Synthetic
uauuccaaaaucagugggcaa

SEQ ID NO: 182146 - RNA, 22 nt, Artificial Sequence
  Synthetic
cuauuccaaaaucagugggcaa

SEQ ID NO: 182147 - RNA, 23 nt, Artificial Sequence
  Synthetic
gcuauuccaaaaucagugggcaa

SEQ ID NO: 182148 - RNA, 24 nt, Artificial Sequence
  Synthetic
agcuauuccaaaaucagugggcaa

SEQ ID NO: 182149 - RNA, 18 nt, Artificial Sequence
  Synthetic
accaaauaaaaauggcaa

SEQ ID NO: 182150 - RNA, 19 nt, Artificial Sequence
  Synthetic
caccaaauaaaaauggcaa

SEQ ID NO: 182151 - RNA, 20 nt, Artificial Sequence
  Synthetic
gcaccaaauaaaaauggcaa

SEQ ID NO: 182152 - RNA, 21 nt, Artificial Sequence
  Synthetic
ugcaccaaauaaaaauggcaa

SEQ ID NO: 182153 - RNA, 22 nt, Artificial Sequence
  Synthetic
augcaccaaauaaaaauggcaa

SEQ ID NO: 182154 - RNA, 23 nt, Artificial Sequence
  Synthetic
caugcaccaaauaaaaauggcaa

SEQ ID NO: 182155 - RNA, 24 nt, Artificial Sequence
  Synthetic
acaugcaccaaauaaaaauggcaa

SEQ ID NO: 182156 - RNA, 18 nt, Artificial Sequence
  Synthetic
uccagucccaaauggcaa

SEQ ID NO: 182157 - RNA, 19 nt, Artificial Sequence
  Synthetic
auccagucccaaauggcaa

SEQ ID NO: 182158 - RNA, 20 nt, Artificial Sequence
  Synthetic
uauccagucccaaauggcaa

SEQ ID NO: 182159 - RNA, 21 nt, Artificial Sequence
  Synthetic
uuauccagucccaaauggcaa

SEQ ID NO: 182160 - RNA, 22 nt, Artificial Sequence
  Synthetic
auuauccagucccaaauggcaa

SEQ ID NO: 182161 - RNA, 23 nt, Artificial Sequence
  Synthetic
aauuauccagucccaaauggcaa

SEQ ID NO: 182162 - RNA, 24 nt, Artificial Sequence
  Synthetic
uaauuauccagucccaaauggcaa

SEQ ID NO: 182163 - RNA, 18 nt, Artificial Sequence
  Synthetic
uagccaaacuaauggcaa

SEQ ID NO: 182164 - RNA, 19 nt, Artificial Sequence
  Synthetic
guagccaaacuaauggcaa

SEQ ID NO: 182165 - RNA, 20 nt, Artificial Sequence
  Synthetic
uguagccaaacuaauggcaa

SEQ ID NO: 182166 - RNA, 21 nt, Artificial Sequence
  Synthetic
auguagccaaacuaauggcaa

SEQ ID NO: 182167 - RNA, 22 nt, Artificial Sequence
  Synthetic
cauguagccaaacuaauggcaa

SEQ ID NO: 182168 - RNA, 23 nt, Artificial Sequence
  Synthetic
ucauguagccaaacuaauggcaa

SEQ ID NO: 182169 - RNA, 24 nt, Artificial Sequence
  Synthetic
gucauguagccaaacuaauggcaa

SEQ ID NO: 182170 - RNA, 18 nt, Artificial Sequence
  Synthetic
auaaucccaccauggcaa

SEQ ID NO: 182171 - RNA, 19 nt, Artificial Sequence
  Synthetic
uauaaucccaccauggcaa

SEQ ID NO: 182172 - RNA, 20 nt, Artificial Sequence
  Synthetic
auauaaucccaccauggcaa

SEQ ID NO: 182173 - RNA, 21 nt, Artificial Sequence
  Synthetic
uauauaaucccaccauggcaa

SEQ ID NO: 182174 - RNA, 22 nt, Artificial Sequence
  Synthetic
guauauaaucccaccauggcaa

SEQ ID NO: 182175 - RNA, 23 nt, Artificial Sequence
  Synthetic
uguauauaaucccaccauggcaa

SEQ ID NO: 182176 - RNA, 24 nt, Artificial Sequence
  Synthetic
guguauauaaucccaccauggcaa

SEQ ID NO: 182177 - RNA, 18 nt, Artificial Sequence
  Synthetic
uuguggauuccauggcaa

SEQ ID NO: 182178 - RNA, 19 nt, Artificial Sequence
  Synthetic
auuguggauuccauggcaa

SEQ ID NO: 182179 - RNA, 20 nt, Artificial Sequence
  Synthetic
cauuguggauuccauggcaa

SEQ ID NO: 182180 - RNA, 21 nt, Artificial Sequence
  Synthetic
ccauuguggauuccauggcaa

SEQ ID NO: 182181 - RNA, 22 nt, Artificial Sequence
  Synthetic
uccauuguggauuccauggcaa

SEQ ID NO: 182182 - RNA, 23 nt, Artificial Sequence
  Synthetic
uuccauuguggauuccauggcaa

SEQ ID NO: 182183 - RNA, 24 nt, Artificial Sequence
  Synthetic
uuuccauuguggauuccauggcaa

SEQ ID NO: 182184 - RNA, 18 nt, Artificial Sequence
  Synthetic
caagccuugagauggcaa

SEQ ID NO: 182185 - RNA, 19 nt, Artificial Sequence
  Synthetic
ccaagccuugagauggcaa

SEQ ID NO: 182186 - RNA, 20 nt, Artificial Sequence
  Synthetic
accaagccuugagauggcaa

SEQ ID NO: 182187 - RNA, 21 nt, Artificial Sequence
  Synthetic
gaccaagccuugagauggcaa

SEQ ID NO: 182188 - RNA, 22 nt, Artificial Sequence
  Synthetic
agaccaagccuugagauggcaa

SEQ ID NO: 182189 - RNA, 23 nt, Artificial Sequence
  Synthetic
uagaccaagccuugagauggcaa

SEQ ID NO: 182190 - RNA, 24 nt, Artificial Sequence
  Synthetic
auagaccaagccuugagauggcaa

SEQ ID NO: 182191 - RNA, 18 nt, Artificial Sequence
  Synthetic
gagaugauucuauggcaa

SEQ ID NO: 182192 - RNA, 19 nt, Artificial Sequence
  Synthetic
ugagaugauucuauggcaa

SEQ ID NO: 182193 - RNA, 20 nt, Artificial Sequence
  Synthetic
uugagaugauucuauggcaa

SEQ ID NO: 182194 - RNA, 21 nt, Artificial Sequence
  Synthetic
uuugagaugauucuauggcaa

SEQ ID NO: 182195 - RNA, 22 nt, Artificial Sequence
  Synthetic
auuugagaugauucuauggcaa

SEQ ID NO: 182196 - RNA, 23 nt, Artificial Sequence
  Synthetic
gauuugagaugauucuauggcaa

SEQ ID NO: 182197 - RNA, 24 nt, Artificial Sequence
  Synthetic
agauuugagaugauucuauggcaa

SEQ ID NO: 182198 - RNA, 18 nt, Artificial Sequence
  Synthetic
ggacaaaaguacuggcaa

SEQ ID NO: 182199 - RNA, 19 nt, Artificial Sequence
  Synthetic
gggacaaaaguacuggcaa

SEQ ID NO: 182200 - RNA, 20 nt, Artificial Sequence
  Synthetic
agggacaaaaguacuggcaa

SEQ ID NO: 182201 - RNA, 21 nt, Artificial Sequence
  Synthetic
uagggacaaaaguacuggcaa

SEQ ID NO: 182202 - RNA, 22 nt, Artificial Sequence
  Synthetic
guagggacaaaaguacuggcaa

SEQ ID NO: 182203 - RNA, 23 nt, Artificial Sequence
  Synthetic
aguagggacaaaaguacuggcaa

SEQ ID NO: 182204 - RNA, 24 nt, Artificial Sequence
  Synthetic
aaguagggacaaaaguacuggcaa

SEQ ID NO: 182205 - RNA, 18 nt, Artificial Sequence
  Synthetic
ugcacuccagccuggcaa

SEQ ID NO: 182206 - RNA, 19 nt, Artificial Sequence
  Synthetic
cugcacuccagccuggcaa

SEQ ID NO: 182207 - RNA, 20 nt, Artificial Sequence
  Synthetic
acugcacuccagccuggcaa

SEQ ID NO: 182208 - RNA, 21 nt, Artificial Sequence
  Synthetic
cacugcacuccagccuggcaa

SEQ ID NO: 182209 - RNA, 22 nt, Artificial Sequence
  Synthetic
ccacugcacuccagccuggcaa

SEQ ID NO: 182210 - RNA, 23 nt, Artificial Sequence
  Synthetic
gccacugcacuccagccuggcaa

SEQ ID NO: 182211 - RNA, 24 nt, Artificial Sequence
  Synthetic
cgccacugcacuccagccuggcaa

SEQ ID NO: 182212 - RNA, 18 nt, Artificial Sequence
  Synthetic
uccuugcuugccuggcaa

SEQ ID NO: 182213 - RNA, 19 nt, Artificial Sequence
  Synthetic
uuccuugcuugccuggcaa

SEQ ID NO: 182214 - RNA, 20 nt, Artificial Sequence
  Synthetic
auuccuugcuugccuggcaa

SEQ ID NO: 182215 - RNA, 21 nt, Artificial Sequence
  Synthetic
aauuccuugcuugccuggcaa

SEQ ID NO: 182216 - RNA, 22 nt, Artificial Sequence
  Synthetic
gaauuccuugcuugccuggcaa

SEQ ID NO: 182217 - RNA, 23 nt, Artificial Sequence
  Synthetic
ugaauuccuugcuugccuggcaa

SEQ ID NO: 182218 - RNA, 24 nt, Artificial Sequence
  Synthetic
cugaauuccuugcuugccuggcaa

SEQ ID NO: 182219 - RNA, 18 nt, Artificial Sequence
  Synthetic
gaauuucuguucuggcaa

SEQ ID NO: 182220 - RNA, 19 nt, Artificial Sequence
  Synthetic
agaauuucuguucuggcaa

SEQ ID NO: 182221 - RNA, 20 nt, Artificial Sequence
  Synthetic
cagaauuucuguucuggcaa

SEQ ID NO: 182222 - RNA, 21 nt, Artificial Sequence
  Synthetic
gcagaauuucuguucuggcaa

SEQ ID NO: 182223 - RNA, 22 nt, Artificial Sequence
  Synthetic
ggcagaauuucuguucuggcaa

SEQ ID NO: 182224 - RNA, 23 nt, Artificial Sequence
  Synthetic
uggcagaauuucuguucuggcaa

SEQ ID NO: 182225 - RNA, 24 nt, Artificial Sequence
  Synthetic
auggcagaauuucuguucuggcaa

SEQ ID NO: 182226 - RNA, 18 nt, Artificial Sequence
  Synthetic
agcaaacuccuguggcaa

SEQ ID NO: 182227 - RNA, 19 nt, Artificial Sequence
  Synthetic
aagcaaacuccuguggcaa

SEQ ID NO: 182228 - RNA, 20 nt, Artificial Sequence
  Synthetic
aaagcaaacuccuguggcaa

SEQ ID NO: 182229 - RNA, 21 nt, Artificial Sequence
  Synthetic
caaagcaaacuccuguggcaa

SEQ ID NO: 182230 - RNA, 22 nt, Artificial Sequence
  Synthetic
gcaaagcaaacuccuguggcaa

SEQ ID NO: 182231 - RNA, 23 nt, Artificial Sequence
  Synthetic
ggcaaagcaaacuccuguggcaa

SEQ ID NO: 182232 - RNA, 24 nt, Artificial Sequence
  Synthetic
uggcaaagcaaacuccuguggcaa

SEQ ID NO: 182233 - RNA, 18 nt, Artificial Sequence
  Synthetic
cggcaguguaauuggcaa

SEQ ID NO: 182234 - RNA, 19 nt, Artificial Sequence
  Synthetic
ucggcaguguaauuggcaa

SEQ ID NO: 182235 - RNA, 20 nt, Artificial Sequence
  Synthetic
gucggcaguguaauuggcaa

SEQ ID NO: 182236 - RNA, 21 nt, Artificial Sequence
  Synthetic
agucggcaguguaauuggcaa

SEQ ID NO: 182237 - RNA, 22 nt, Artificial Sequence
  Synthetic
gagucggcaguguaauuggcaa

SEQ ID NO: 182238 - RNA, 23 nt, Artificial Sequence
  Synthetic
agagucggcaguguaauuggcaa

SEQ ID NO: 182239 - RNA, 24 nt, Artificial Sequence
  Synthetic
uagagucggcaguguaauuggcaa

SEQ ID NO: 182240 - RNA, 18 nt, Artificial Sequence
  Synthetic
cgacagauagauuggcaa

SEQ ID NO: 182241 - RNA, 19 nt, Artificial Sequence
  Synthetic
acgacagauagauuggcaa

SEQ ID NO: 182242 - RNA, 20 nt, Artificial Sequence
  Synthetic
gacgacagauagauuggcaa

SEQ ID NO: 182243 - RNA, 21 nt, Artificial Sequence
  Synthetic
ugacgacagauagauuggcaa

SEQ ID NO: 182244 - RNA, 22 nt, Artificial Sequence
  Synthetic
cugacgacagauagauuggcaa

SEQ ID NO: 182245 - RNA, 23 nt, Artificial Sequence
  Synthetic
acugacgacagauagauuggcaa

SEQ ID NO: 182246 - RNA, 24 nt, Artificial Sequence
  Synthetic
aacugacgacagauagauuggcaa

SEQ ID NO: 182247 - RNA, 18 nt, Artificial Sequence
  Synthetic
guguuauaauauuggcaa

SEQ ID NO: 182248 - RNA, 19 nt, Artificial Sequence
  Synthetic
uguguuauaauauuggcaa

SEQ ID NO: 182249 - RNA, 20 nt, Artificial Sequence
  Synthetic
cuguguuauaauauuggcaa

SEQ ID NO: 182250 - RNA, 21 nt, Artificial Sequence
  Synthetic
acuguguuauaauauuggcaa

SEQ ID NO: 182251 - RNA, 22 nt, Artificial Sequence
  Synthetic
cacuguguuauaauauuggcaa

SEQ ID NO: 182252 - RNA, 23 nt, Artificial Sequence
  Synthetic
ucacuguguuauaauauuggcaa

SEQ ID NO: 182253 - RNA, 24 nt, Artificial Sequence
  Synthetic
aucacuguguuauaauauuggcaa

SEQ ID NO: 182254 - RNA, 18 nt, Artificial Sequence
  Synthetic
gccuguauaacuuggcaa

SEQ ID NO: 182255 - RNA, 19 nt, Artificial Sequence
  Synthetic
ugccuguauaacuuggcaa

SEQ ID NO: 182256 - RNA, 20 nt, Artificial Sequence
  Synthetic
augccuguauaacuuggcaa

SEQ ID NO: 182257 - RNA, 21 nt, Artificial Sequence
  Synthetic
aaugccuguauaacuuggcaa

SEQ ID NO: 182258 - RNA, 22 nt, Artificial Sequence
  Synthetic
uaaugccuguauaacuuggcaa

SEQ ID NO: 182259 - RNA, 23 nt, Artificial Sequence
  Synthetic
uuaaugccuguauaacuuggcaa

SEQ ID NO: 182260 - RNA, 24 nt, Artificial Sequence
  Synthetic
uuuaaugccuguauaacuuggcaa

SEQ ID NO: 182261 - RNA, 18 nt, Artificial Sequence
  Synthetic
cucaccgccuuuuggcaa

SEQ ID NO: 182262 - RNA, 19 nt, Artificial Sequence
  Synthetic
ccucaccgccuuuuggcaa

SEQ ID NO: 182263 - RNA, 20 nt, Artificial Sequence
  Synthetic
uccucaccgccuuuuggcaa

SEQ ID NO: 182264 - RNA, 21 nt, Artificial Sequence
  Synthetic
cuccucaccgccuuuuggcaa

SEQ ID NO: 182265 - RNA, 22 nt, Artificial Sequence
  Synthetic
acuccucaccgccuuuuggcaa

SEQ ID NO: 182266 - RNA, 23 nt, Artificial Sequence
  Synthetic
aacuccucaccgccuuuuggcaa

SEQ ID NO: 182267 - RNA, 24 nt, Artificial Sequence
  Synthetic
aaacuccucaccgccuuuuggcaa

SEQ ID NO: 182268 - RNA, 18 nt, Artificial Sequence
  Synthetic
auuguuuaaaaaaugcaa

SEQ ID NO: 182269 - RNA, 19 nt, Artificial Sequence
  Synthetic
gauuguuuaaaaaaugcaa

SEQ ID NO: 182270 - RNA, 20 nt, Artificial Sequence
  Synthetic
ugauuguuuaaaaaaugcaa

SEQ ID NO: 182271 - RNA, 21 nt, Artificial Sequence
  Synthetic
uugauuguuuaaaaaaugcaa

SEQ ID NO: 182272 - RNA, 22 nt, Artificial Sequence
  Synthetic
auugauuguuuaaaaaaugcaa

SEQ ID NO: 182273 - RNA, 23 nt, Artificial Sequence
  Synthetic
cauugauuguuuaaaaaaugcaa

SEQ ID NO: 182274 - RNA, 24 nt, Artificial Sequence
  Synthetic
ucauugauuguuuaaaaaaugcaa

SEQ ID NO: 182275 - RNA, 18 nt, Artificial Sequence
  Synthetic
uaaugacuauaaaugcaa

SEQ ID NO: 182276 - RNA, 19 nt, Artificial Sequence
  Synthetic
uuaaugacuauaaaugcaa

SEQ ID NO: 182277 - RNA, 20 nt, Artificial Sequence
  Synthetic
auuaaugacuauaaaugcaa

SEQ ID NO: 182278 - RNA, 21 nt, Artificial Sequence
  Synthetic
uauuaaugacuauaaaugcaa

SEQ ID NO: 182279 - RNA, 22 nt, Artificial Sequence
  Synthetic
auauuaaugacuauaaaugcaa

SEQ ID NO: 182280 - RNA, 23 nt, Artificial Sequence
  Synthetic
cauauuaaugacuauaaaugcaa

SEQ ID NO: 182281 - RNA, 24 nt, Artificial Sequence
  Synthetic
ucauauuaaugacuauaaaugcaa

SEQ ID NO: 182282 - RNA, 18 nt, Artificial Sequence
  Synthetic
gccaaguugugaaugcaa

SEQ ID NO: 182283 - RNA, 19 nt, Artificial Sequence
  Synthetic
ggccaaguugugaaugcaa

SEQ ID NO: 182284 - RNA, 20 nt, Artificial Sequence
  Synthetic
uggccaaguugugaaugcaa

SEQ ID NO: 182285 - RNA, 21 nt, Artificial Sequence
  Synthetic
uuggccaaguugugaaugcaa

SEQ ID NO: 182286 - RNA, 22 nt, Artificial Sequence
  Synthetic
guuggccaaguugugaaugcaa

SEQ ID NO: 182287 - RNA, 23 nt, Artificial Sequence
  Synthetic
aguuggccaaguugugaaugcaa

SEQ ID NO: 182288 - RNA, 24 nt, Artificial Sequence
  Synthetic
caguuggccaaguugugaaugcaa

SEQ ID NO: 182289 - RNA, 18 nt, Artificial Sequence
  Synthetic
aagaaagaguuaaugcaa

SEQ ID NO: 182290 - RNA, 19 nt, Artificial Sequence
  Synthetic
uaagaaagaguuaaugcaa

SEQ ID NO: 182291 - RNA, 20 nt, Artificial Sequence
  Synthetic
uuaagaaagaguuaaugcaa

SEQ ID NO: 182292 - RNA, 21 nt, Artificial Sequence
  Synthetic
cuuaagaaagaguuaaugcaa

SEQ ID NO: 182293 - RNA, 22 nt, Artificial Sequence
  Synthetic
ucuuaagaaagaguuaaugcaa

SEQ ID NO: 182294 - RNA, 23 nt, Artificial Sequence
  Synthetic
aucuuaagaaagaguuaaugcaa

SEQ ID NO: 182295 - RNA, 24 nt, Artificial Sequence
  Synthetic
aaucuuaagaaagaguuaaugcaa

SEQ ID NO: 182296 - RNA, 18 nt, Artificial Sequence
  Synthetic
uucccuuuuaccaugcaa

SEQ ID NO: 182297 - RNA, 19 nt, Artificial Sequence
  Synthetic
auucccuuuuaccaugcaa

SEQ ID NO: 182298 - RNA, 20 nt, Artificial Sequence
  Synthetic
uauucccuuuuaccaugcaa

SEQ ID NO: 182299 - RNA, 21 nt, Artificial Sequence
  Synthetic
uuauucccuuuuaccaugcaa

SEQ ID NO: 182300 - RNA, 22 nt, Artificial Sequence
  Synthetic
auuauucccuuuuaccaugcaa

SEQ ID NO: 182301 - RNA, 23 nt, Artificial Sequence
  Synthetic
aauuauucccuuuuaccaugcaa

SEQ ID NO: 182302 - RNA, 24 nt, Artificial Sequence
  Synthetic
aaauuauucccuuuuaccaugcaa

SEQ ID NO: 182303 - RNA, 18 nt, Artificial Sequence
  Synthetic
auuuugguuuccaugcaa

SEQ ID NO: 182304 - RNA, 19 nt, Artificial Sequence
  Synthetic
uauuuugguuuccaugcaa

SEQ ID NO: 182305 - RNA, 20 nt, Artificial Sequence
  Synthetic
auauuuugguuuccaugcaa

SEQ ID NO: 182306 - RNA, 21 nt, Artificial Sequence
  Synthetic
gauauuuugguuuccaugcaa

SEQ ID NO: 182307 - RNA, 22 nt, Artificial Sequence
  Synthetic
agauauuuugguuuccaugcaa

SEQ ID NO: 182308 - RNA, 23 nt, Artificial Sequence
  Synthetic
aagauauuuugguuuccaugcaa

SEQ ID NO: 182309 - RNA, 24 nt, Artificial Sequence
  Synthetic
aaagauauuuugguuuccaugcaa

SEQ ID NO: 182310 - RNA, 18 nt, Artificial Sequence
  Synthetic
guagcaacaugcaugcaa

SEQ ID NO: 182311 - RNA, 19 nt, Artificial Sequence
  Synthetic
uguagcaacaugcaugcaa

SEQ ID NO: 182312 - RNA, 20 nt, Artificial Sequence
  Synthetic
uuguagcaacaugcaugcaa

SEQ ID NO: 182313 - RNA, 21 nt, Artificial Sequence
  Synthetic
uuuguagcaacaugcaugcaa

SEQ ID NO: 182314 - RNA, 22 nt, Artificial Sequence
  Synthetic
cuuuguagcaacaugcaugcaa

SEQ ID NO: 182315 - RNA, 23 nt, Artificial Sequence
  Synthetic
ccuuuguagcaacaugcaugcaa

SEQ ID NO: 182316 - RNA, 24 nt, Artificial Sequence
  Synthetic
uccuuuguagcaacaugcaugcaa

SEQ ID NO: 182317 - RNA, 18 nt, Artificial Sequence
  Synthetic
ucaugcacaaagaugcaa

SEQ ID NO: 182318 - RNA, 19 nt, Artificial Sequence
  Synthetic
uucaugcacaaagaugcaa

SEQ ID NO: 182319 - RNA, 20 nt, Artificial Sequence
  Synthetic
cuucaugcacaaagaugcaa

SEQ ID NO: 182320 - RNA, 21 nt, Artificial Sequence
  Synthetic
ccuucaugcacaaagaugcaa

SEQ ID NO: 182321 - RNA, 22 nt, Artificial Sequence
  Synthetic
cccuucaugcacaaagaugcaa

SEQ ID NO: 182322 - RNA, 23 nt, Artificial Sequence
  Synthetic
ucccuucaugcacaaagaugcaa

SEQ ID NO: 182323 - RNA, 24 nt, Artificial Sequence
  Synthetic
aucccuucaugcacaaagaugcaa

SEQ ID NO: 182324 - RNA, 18 nt, Artificial Sequence
  Synthetic
acaaaaguguagaugcaa

SEQ ID NO: 182325 - RNA, 19 nt, Artificial Sequence
  Synthetic
gacaaaaguguagaugcaa

SEQ ID NO: 182326 - RNA, 20 nt, Artificial Sequence
  Synthetic
ugacaaaaguguagaugcaa

SEQ ID NO: 182327 - RNA, 21 nt, Artificial Sequence
  Synthetic
uugacaaaaguguagaugcaa

SEQ ID NO: 182328 - RNA, 22 nt, Artificial Sequence
  Synthetic
cuugacaaaaguguagaugcaa

SEQ ID NO: 182329 - RNA, 23 nt, Artificial Sequence
  Synthetic
ucuugacaaaaguguagaugcaa

SEQ ID NO: 182330 - RNA, 24 nt, Artificial Sequence
  Synthetic
cucuugacaaaaguguagaugcaa

SEQ ID NO: 182331 - RNA, 18 nt, Artificial Sequence
  Synthetic
auuuuuuagaugaugcaa

SEQ ID NO: 182332 - RNA, 19 nt, Artificial Sequence
  Synthetic
aauuuuuuagaugaugcaa

SEQ ID NO: 182333 - RNA, 20 nt, Artificial Sequence
  Synthetic
caauuuuuuagaugaugcaa

SEQ ID NO: 182334 - RNA, 21 nt, Artificial Sequence
  Synthetic
gcaauuuuuuagaugaugcaa

SEQ ID NO: 182335 - RNA, 22 nt, Artificial Sequence
  Synthetic
agcaauuuuuuagaugaugcaa

SEQ ID NO: 182336 - RNA, 23 nt, Artificial Sequence
  Synthetic
aagcaauuuuuuagaugaugcaa

SEQ ID NO: 182337 - RNA, 24 nt, Artificial Sequence
  Synthetic
uaagcaauuuuuuagaugaugcaa

SEQ ID NO: 182338 - RNA, 18 nt, Artificial Sequence
  Synthetic
guucauauuacuaugcaa

SEQ ID NO: 182339 - RNA, 19 nt, Artificial Sequence
  Synthetic
uguucauauuacuaugcaa

SEQ ID NO: 182340 - RNA, 20 nt, Artificial Sequence
  Synthetic
uuguucauauuacuaugcaa

SEQ ID NO: 182341 - RNA, 21 nt, Artificial Sequence
  Synthetic
uuuguucauauuacuaugcaa

SEQ ID NO: 182342 - RNA, 22 nt, Artificial Sequence
  Synthetic
cuuuguucauauuacuaugcaa

SEQ ID NO: 182343 - RNA, 23 nt, Artificial Sequence
  Synthetic
acuuuguucauauuacuaugcaa

SEQ ID NO: 182344 - RNA, 24 nt, Artificial Sequence
  Synthetic
aacuuuguucauauuacuaugcaa

SEQ ID NO: 182345 - RNA, 18 nt, Artificial Sequence
  Synthetic
guugauuguuguaugcaa

SEQ ID NO: 182346 - RNA, 19 nt, Artificial Sequence
  Synthetic
gguugauuguuguaugcaa

SEQ ID NO: 182347 - RNA, 20 nt, Artificial Sequence
  Synthetic
ggguugauuguuguaugcaa

SEQ ID NO: 182348 - RNA, 21 nt, Artificial Sequence
  Synthetic
gggguugauuguuguaugcaa

SEQ ID NO: 182349 - RNA, 22 nt, Artificial Sequence
  Synthetic
ugggguugauuguuguaugcaa

SEQ ID NO: 182350 - RNA, 23 nt, Artificial Sequence
  Synthetic
uugggguugauuguuguaugcaa

SEQ ID NO: 182351 - RNA, 24 nt, Artificial Sequence
  Synthetic
uuugggguugauuguuguaugcaa

SEQ ID NO: 182352 - RNA, 18 nt, Artificial Sequence
  Synthetic
uuucaaagccuuaugcaa

SEQ ID NO: 182353 - RNA, 19 nt, Artificial Sequence
  Synthetic
auuucaaagccuuaugcaa

SEQ ID NO: 182354 - RNA, 20 nt, Artificial Sequence
  Synthetic
aauuucaaagccuuaugcaa

SEQ ID NO: 182355 - RNA, 21 nt, Artificial Sequence
  Synthetic
gaauuucaaagccuuaugcaa

SEQ ID NO: 182356 - RNA, 22 nt, Artificial Sequence
  Synthetic
ugaauuucaaagccuuaugcaa

SEQ ID NO: 182357 - RNA, 23 nt, Artificial Sequence
  Synthetic
gugaauuucaaagccuuaugcaa

SEQ ID NO: 182358 - RNA, 24 nt, Artificial Sequence
  Synthetic
agugaauuucaaagccuuaugcaa

SEQ ID NO: 182359 - RNA, 18 nt, Artificial Sequence
  Synthetic
uuuuaauuauuuaugcaa

SEQ ID NO: 182360 - RNA, 19 nt, Artificial Sequence
  Synthetic
auuuuaauuauuuaugcaa

SEQ ID NO: 182361 - RNA, 20 nt, Artificial Sequence
  Synthetic
uauuuuaauuauuuaugcaa

SEQ ID NO: 182362 - RNA, 21 nt, Artificial Sequence
  Synthetic
cuauuuuaauuauuuaugcaa

SEQ ID NO: 182363 - RNA, 22 nt, Artificial Sequence
  Synthetic
ucuauuuuaauuauuuaugcaa

SEQ ID NO: 182364 - RNA, 23 nt, Artificial Sequence
  Synthetic
uucuauuuuaauuauuuaugcaa

SEQ ID NO: 182365 - RNA, 24 nt, Artificial Sequence
  Synthetic
uuucuauuuuaauuauuuaugcaa

SEQ ID NO: 182366 - RNA, 18 nt, Artificial Sequence
  Synthetic
cggcaccggcaacugcaa

SEQ ID NO: 182367 - RNA, 19 nt, Artificial Sequence
  Synthetic
gcggcaccggcaacugcaa

SEQ ID NO: 182368 - RNA, 20 nt, Artificial Sequence
  Synthetic
agcggcaccggcaacugcaa

SEQ ID NO: 182369 - RNA, 21 nt, Artificial Sequence
  Synthetic
cagcggcaccggcaacugcaa

SEQ ID NO: 182370 - RNA, 22 nt, Artificial Sequence
  Synthetic
ccagcggcaccggcaacugcaa

SEQ ID NO: 182371 - RNA, 23 nt, Artificial Sequence
  Synthetic
accagcggcaccggcaacugcaa

SEQ ID NO: 182372 - RNA, 24 nt, Artificial Sequence
  Synthetic
caccagcggcaccggcaacugcaa

SEQ ID NO: 182373 - RNA, 18 nt, Artificial Sequence
  Synthetic
ucauuuuuauaacugcaa

SEQ ID NO: 182374 - RNA, 19 nt, Artificial Sequence
  Synthetic
uucauuuuuauaacugcaa

SEQ ID NO: 182375 - RNA, 20 nt, Artificial Sequence
  Synthetic
auucauuuuuauaacugcaa

SEQ ID NO: 182376 - RNA, 21 nt, Artificial Sequence
  Synthetic
uauucauuuuuauaacugcaa

SEQ ID NO: 182377 - RNA, 22 nt, Artificial Sequence
  Synthetic
uuauucauuuuuauaacugcaa

SEQ ID NO: 182378 - RNA, 23 nt, Artificial Sequence
  Synthetic
cuuauucauuuuuauaacugcaa

SEQ ID NO: 182379 - RNA, 24 nt, Artificial Sequence
  Synthetic
gcuuauucauuuuuauaacugcaa

SEQ ID NO: 182380 - RNA, 18 nt, Artificial Sequence
  Synthetic
ucuuugucuuaacugcaa

SEQ ID NO: 182381 - RNA, 19 nt, Artificial Sequence
  Synthetic
aucuuugucuuaacugcaa

SEQ ID NO: 182382 - RNA, 20 nt, Artificial Sequence
  Synthetic
aaucuuugucuuaacugcaa

SEQ ID NO: 182383 - RNA, 21 nt, Artificial Sequence
  Synthetic
aaaucuuugucuuaacugcaa

SEQ ID NO: 182384 - RNA, 22 nt, Artificial Sequence
  Synthetic
gaaaucuuugucuuaacugcaa

SEQ ID NO: 182385 - RNA, 23 nt, Artificial Sequence
  Synthetic
agaaaucuuugucuuaacugcaa

SEQ ID NO: 182386 - RNA, 24 nt, Artificial Sequence
  Synthetic
uagaaaucuuugucuuaacugcaa

SEQ ID NO: 182387 - RNA, 18 nt, Artificial Sequence
  Synthetic
aaacacaaaauacugcaa

SEQ ID NO: 182388 - RNA, 19 nt, Artificial Sequence
  Synthetic
aaaacacaaaauacugcaa

SEQ ID NO: 182389 - RNA, 20 nt, Artificial Sequence
  Synthetic
gaaaacacaaaauacugcaa

SEQ ID NO: 182390 - RNA, 21 nt, Artificial Sequence
  Synthetic
ugaaaacacaaaauacugcaa

SEQ ID NO: 182391 - RNA, 22 nt, Artificial Sequence
  Synthetic
augaaaacacaaaauacugcaa

SEQ ID NO: 182392 - RNA, 23 nt, Artificial Sequence
  Synthetic
gaugaaaacacaaaauacugcaa

SEQ ID NO: 182393 - RNA, 24 nt, Artificial Sequence
  Synthetic
ugaugaaaacacaaaauacugcaa

SEQ ID NO: 182394 - RNA, 18 nt, Artificial Sequence
  Synthetic
ucaauuuucauacugcaa

SEQ ID NO: 182395 - RNA, 19 nt, Artificial Sequence
  Synthetic
uucaauuuucauacugcaa

SEQ ID NO: 182396 - RNA, 20 nt, Artificial Sequence
  Synthetic
auucaauuuucauacugcaa

SEQ ID NO: 182397 - RNA, 21 nt, Artificial Sequence
  Synthetic
aauucaauuuucauacugcaa

SEQ ID NO: 182398 - RNA, 22 nt, Artificial Sequence
  Synthetic
aaauucaauuuucauacugcaa

SEQ ID NO: 182399 - RNA, 23 nt, Artificial Sequence
  Synthetic
gaaauucaauuuucauacugcaa

SEQ ID NO: 182400 - RNA, 24 nt, Artificial Sequence
  Synthetic
ugaaauucaauuuucauacugcaa

SEQ ID NO: 182401 - RNA, 18 nt, Artificial Sequence
  Synthetic
auauucuacuuccugcaa

SEQ ID NO: 182402 - RNA, 19 nt, Artificial Sequence
  Synthetic
aauauucuacuuccugcaa

SEQ ID NO: 182403 - RNA, 20 nt, Artificial Sequence
  Synthetic
gaauauucuacuuccugcaa

SEQ ID NO: 182404 - RNA, 21 nt, Artificial Sequence
  Synthetic
ggaauauucuacuuccugcaa

SEQ ID NO: 182405 - RNA, 22 nt, Artificial Sequence
  Synthetic
gggaauauucuacuuccugcaa

SEQ ID NO: 182406 - RNA, 23 nt, Artificial Sequence
  Synthetic
agggaauauucuacuuccugcaa

SEQ ID NO: 182407 - RNA, 24 nt, Artificial Sequence
  Synthetic
cagggaauauucuacuuccugcaa

SEQ ID NO: 182408 - RNA, 18 nt, Artificial Sequence
  Synthetic
uucaucuuuuuccugcaa

SEQ ID NO: 182409 - RNA, 19 nt, Artificial Sequence
  Synthetic
uuucaucuuuuuccugcaa

SEQ ID NO: 182410 - RNA, 20 nt, Artificial Sequence
  Synthetic
guuucaucuuuuuccugcaa

SEQ ID NO: 182411 - RNA, 21 nt, Artificial Sequence
  Synthetic
aguuucaucuuuuuccugcaa

SEQ ID NO: 182412 - RNA, 22 nt, Artificial Sequence
  Synthetic
uaguuucaucuuuuuccugcaa

SEQ ID NO: 182413 - RNA, 23 nt, Artificial Sequence
  Synthetic
uuaguuucaucuuuuuccugcaa

SEQ ID NO: 182414 - RNA, 24 nt, Artificial Sequence
  Synthetic
auuaguuucaucuuuuuccugcaa

SEQ ID NO: 182415 - RNA, 18 nt, Artificial Sequence
  Synthetic
gucagauucaagcugcaa

SEQ ID NO: 182416 - RNA, 19 nt, Artificial Sequence
  Synthetic
cgucagauucaagcugcaa

SEQ ID NO: 182417 - RNA, 20 nt, Artificial Sequence
  Synthetic
acgucagauucaagcugcaa

SEQ ID NO: 182418 - RNA, 21 nt, Artificial Sequence
  Synthetic
gacgucagauucaagcugcaa

SEQ ID NO: 182419 - RNA, 22 nt, Artificial Sequence
  Synthetic
ugacgucagauucaagcugcaa

SEQ ID NO: 182420 - RNA, 23 nt, Artificial Sequence
  Synthetic
uugacgucagauucaagcugcaa

SEQ ID NO: 182421 - RNA, 24 nt, Artificial Sequence
  Synthetic
cuugacgucagauucaagcugcaa

SEQ ID NO: 182422 - RNA, 18 nt, Artificial Sequence
  Synthetic
gccacaucuaagcugcaa

SEQ ID NO: 182423 - RNA, 19 nt, Artificial Sequence
  Synthetic
ggccacaucuaagcugcaa

SEQ ID NO: 182424 - RNA, 20 nt, Artificial Sequence
  Synthetic
uggccacaucuaagcugcaa

SEQ ID NO: 182425 - RNA, 21 nt, Artificial Sequence
  Synthetic
auggccacaucuaagcugcaa

SEQ ID NO: 182426 - RNA, 22 nt, Artificial Sequence
  Synthetic
cauggccacaucuaagcugcaa

SEQ ID NO: 182427 - RNA, 23 nt, Artificial Sequence
  Synthetic
acauggccacaucuaagcugcaa

SEQ ID NO: 182428 - RNA, 24 nt, Artificial Sequence
  Synthetic
cacauggccacaucuaagcugcaa

SEQ ID NO: 182429 - RNA, 18 nt, Artificial Sequence
  Synthetic
ggaagauuuaagcugcaa

SEQ ID NO: 182430 - RNA, 19 nt, Artificial Sequence
  Synthetic
uggaagauuuaagcugcaa

SEQ ID NO: 182431 - RNA, 20 nt, Artificial Sequence
  Synthetic
auggaagauuuaagcugcaa

SEQ ID NO: 182432 - RNA, 21 nt, Artificial Sequence
  Synthetic
gauggaagauuuaagcugcaa

SEQ ID NO: 182433 - RNA, 22 nt, Artificial Sequence
  Synthetic
agauggaagauuuaagcugcaa

SEQ ID NO: 182434 - RNA, 23 nt, Artificial Sequence
  Synthetic
aagauggaagauuuaagcugcaa

SEQ ID NO: 182435 - RNA, 24 nt, Artificial Sequence
  Synthetic
caagauggaagauuuaagcugcaa

SEQ ID NO: 182436 - RNA, 18 nt, Artificial Sequence
  Synthetic
ccauucaaguugcugcaa

SEQ ID NO: 182437 - RNA, 19 nt, Artificial Sequence
  Synthetic
uccauucaaguugcugcaa

SEQ ID NO: 182438 - RNA, 20 nt, Artificial Sequence
  Synthetic
cuccauucaaguugcugcaa

SEQ ID NO: 182439 - RNA, 21 nt, Artificial Sequence
  Synthetic
gcuccauucaaguugcugcaa

SEQ ID NO: 182440 - RNA, 22 nt, Artificial Sequence
  Synthetic
agcuccauucaaguugcugcaa

SEQ ID NO: 182441 - RNA, 23 nt, Artificial Sequence
  Synthetic
cagcuccauucaaguugcugcaa

SEQ ID NO: 182442 - RNA, 24 nt, Artificial Sequence
  Synthetic
ccagcuccauucaaguugcugcaa

SEQ ID NO: 182443 - RNA, 18 nt, Artificial Sequence
  Synthetic
ugcugagaggcucugcaa

SEQ ID NO: 182444 - RNA, 19 nt, Artificial Sequence
  Synthetic
uugcugagaggcucugcaa

SEQ ID NO: 182445 - RNA, 20 nt, Artificial Sequence
  Synthetic
auugcugagaggcucugcaa

SEQ ID NO: 182446 - RNA, 21 nt, Artificial Sequence
  Synthetic
uauugcugagaggcucugcaa

SEQ ID NO: 182447 - RNA, 22 nt, Artificial Sequence
  Synthetic
guauugcugagaggcucugcaa

SEQ ID NO: 182448 - RNA, 23 nt, Artificial Sequence
  Synthetic
aguauugcugagaggcucugcaa

SEQ ID NO: 182449 - RNA, 24 nt, Artificial Sequence
  Synthetic
uaguauugcugagaggcucugcaa

SEQ ID NO: 182450 - RNA, 18 nt, Artificial Sequence
  Synthetic
ggccauuuucuucugcaa

SEQ ID NO: 182451 - RNA, 19 nt, Artificial Sequence
  Synthetic
uggccauuuucuucugcaa

SEQ ID NO: 182452 - RNA, 20 nt, Artificial Sequence
  Synthetic
cuggccauuuucuucugcaa

SEQ ID NO: 182453 - RNA, 21 nt, Artificial Sequence
  Synthetic
ccuggccauuuucuucugcaa

SEQ ID NO: 182454 - RNA, 22 nt, Artificial Sequence
  Synthetic
uccuggccauuuucuucugcaa

SEQ ID NO: 182455 - RNA, 23 nt, Artificial Sequence
  Synthetic
uuccuggccauuuucuucugcaa

SEQ ID NO: 182456 - RNA, 24 nt, Artificial Sequence
  Synthetic
auuccuggccauuuucuucugcaa

SEQ ID NO: 182457 - RNA, 18 nt, Artificial Sequence
  Synthetic
gguaauggugaagugcaa

SEQ ID NO: 182458 - RNA, 19 nt, Artificial Sequence
  Synthetic
agguaauggugaagugcaa

SEQ ID NO: 182459 - RNA, 20 nt, Artificial Sequence
  Synthetic
aagguaauggugaagugcaa

SEQ ID NO: 182460 - RNA, 21 nt, Artificial Sequence
  Synthetic
uaagguaauggugaagugcaa

SEQ ID NO: 182461 - RNA, 22 nt, Artificial Sequence
  Synthetic
uuaagguaauggugaagugcaa

SEQ ID NO: 182462 - RNA, 23 nt, Artificial Sequence
  Synthetic
cuuaagguaauggugaagugcaa

SEQ ID NO: 182463 - RNA, 24 nt, Artificial Sequence
  Synthetic
ucuuaagguaauggugaagugcaa

SEQ ID NO: 182464 - RNA, 18 nt, Artificial Sequence
  Synthetic
gauuuuaucuaagugcaa

SEQ ID NO: 182465 - RNA, 19 nt, Artificial Sequence
  Synthetic
agauuuuaucuaagugcaa

SEQ ID NO: 182466 - RNA, 20 nt, Artificial Sequence
  Synthetic
uagauuuuaucuaagugcaa

SEQ ID NO: 182467 - RNA, 21 nt, Artificial Sequence
  Synthetic
auagauuuuaucuaagugcaa

SEQ ID NO: 182468 - RNA, 22 nt, Artificial Sequence
  Synthetic
uauagauuuuaucuaagugcaa

SEQ ID NO: 182469 - RNA, 23 nt, Artificial Sequence
  Synthetic
guauagauuuuaucuaagugcaa

SEQ ID NO: 182470 - RNA, 24 nt, Artificial Sequence
  Synthetic
aguauagauuuuaucuaagugcaa

SEQ ID NO: 182471 - RNA, 18 nt, Artificial Sequence
  Synthetic
aguucucucacagugcaa

SEQ ID NO: 182472 - RNA, 19 nt, Artificial Sequence
  Synthetic
uaguucucucacagugcaa

SEQ ID NO: 182473 - RNA, 20 nt, Artificial Sequence
  Synthetic
auaguucucucacagugcaa

SEQ ID NO: 182474 - RNA, 21 nt, Artificial Sequence
  Synthetic
uauaguucucucacagugcaa

SEQ ID NO: 182475 - RNA, 22 nt, Artificial Sequence
  Synthetic
auauaguucucucacagugcaa

SEQ ID NO: 182476 - RNA, 23 nt, Artificial Sequence
  Synthetic
aauauaguucucucacagugcaa

SEQ ID NO: 182477 - RNA, 24 nt, Artificial Sequence
  Synthetic
uaauauaguucucucacagugcaa

SEQ ID NO: 182478 - RNA, 18 nt, Artificial Sequence
  Synthetic
agaaaaguguaggugcaa

SEQ ID NO: 182479 - RNA, 19 nt, Artificial Sequence
  Synthetic
cagaaaaguguaggugcaa

SEQ ID NO: 182480 - RNA, 20 nt, Artificial Sequence
  Synthetic
ucagaaaaguguaggugcaa

SEQ ID NO: 182481 - RNA, 21 nt, Artificial Sequence
  Synthetic
gucagaaaaguguaggugcaa

SEQ ID NO: 182482 - RNA, 22 nt, Artificial Sequence
  Synthetic
agucagaaaaguguaggugcaa

SEQ ID NO: 182483 - RNA, 23 nt, Artificial Sequence
  Synthetic
cagucagaaaaguguaggugcaa

SEQ ID NO: 182484 - RNA, 24 nt, Artificial Sequence
  Synthetic
ccagucagaaaaguguaggugcaa

SEQ ID NO: 182485 - RNA, 18 nt, Artificial Sequence
  Synthetic
uucuuugauuaggugcaa

SEQ ID NO: 182486 - RNA, 19 nt, Artificial Sequence
  Synthetic
cuucuuugauuaggugcaa

SEQ ID NO: 182487 - RNA, 20 nt, Artificial Sequence
  Synthetic
ucuucuuugauuaggugcaa

SEQ ID NO: 182488 - RNA, 21 nt, Artificial Sequence
  Synthetic
gucuucuuugauuaggugcaa

SEQ ID NO: 182489 - RNA, 22 nt, Artificial Sequence
  Synthetic
agucuucuuugauuaggugcaa

SEQ ID NO: 182490 - RNA, 23 nt, Artificial Sequence
  Synthetic
aagucuucuuugauuaggugcaa

SEQ ID NO: 182491 - RNA, 24 nt, Artificial Sequence
  Synthetic
uaagucuucuuugauuaggugcaa

SEQ ID NO: 182492 - RNA, 18 nt, Artificial Sequence
  Synthetic
uauauuagguuggugcaa

SEQ ID NO: 182493 - RNA, 19 nt, Artificial Sequence
  Synthetic
auauauuagguuggugcaa

SEQ ID NO: 182494 - RNA, 20 nt, Artificial Sequence
  Synthetic
gauauauuagguuggugcaa

SEQ ID NO: 182495 - RNA, 21 nt, Artificial Sequence
  Synthetic
agauauauuagguuggugcaa

SEQ ID NO: 182496 - RNA, 22 nt, Artificial Sequence
  Synthetic
gagauauauuagguuggugcaa

SEQ ID NO: 182497 - RNA, 23 nt, Artificial Sequence
  Synthetic
ugagauauauuagguuggugcaa

SEQ ID NO: 182498 - RNA, 24 nt, Artificial Sequence
  Synthetic
cugagauauauuagguuggugcaa

SEQ ID NO: 182499 - RNA, 18 nt, Artificial Sequence
  Synthetic
aguuccugugcugugcaa

SEQ ID NO: 182500 - RNA, 19 nt, Artificial Sequence
  Synthetic
uaguuccugugcugugcaa

SEQ ID NO: 182501 - RNA, 20 nt, Artificial Sequence
  Synthetic
auaguuccugugcugugcaa

SEQ ID NO: 182502 - RNA, 21 nt, Artificial Sequence
  Synthetic
uauaguuccugugcugugcaa

SEQ ID NO: 182503 - RNA, 22 nt, Artificial Sequence
  Synthetic
cuauaguuccugugcugugcaa

SEQ ID NO: 182504 - RNA, 23 nt, Artificial Sequence
  Synthetic
gcuauaguuccugugcugugcaa

SEQ ID NO: 182505 - RNA, 24 nt, Artificial Sequence
  Synthetic
agcuauaguuccugugcugugcaa

SEQ ID NO: 182506 - RNA, 18 nt, Artificial Sequence
  Synthetic
agucaugaccuugugcaa

SEQ ID NO: 182507 - RNA, 19 nt, Artificial Sequence
  Synthetic
aagucaugaccuugugcaa

SEQ ID NO: 182508 - RNA, 20 nt, Artificial Sequence
  Synthetic
uaagucaugaccuugugcaa

SEQ ID NO: 182509 - RNA, 21 nt, Artificial Sequence
  Synthetic
auaagucaugaccuugugcaa

SEQ ID NO: 182510 - RNA, 22 nt, Artificial Sequence
  Synthetic
aauaagucaugaccuugugcaa

SEQ ID NO: 182511 - RNA, 23 nt, Artificial Sequence
  Synthetic
aaauaagucaugaccuugugcaa

SEQ ID NO: 182512 - RNA, 24 nt, Artificial Sequence
  Synthetic
gaaauaagucaugaccuugugcaa

SEQ ID NO: 182513 - RNA, 18 nt, Artificial Sequence
  Synthetic
ucagugcagaaauugcaa

SEQ ID NO: 182514 - RNA, 19 nt, Artificial Sequence
  Synthetic
gucagugcagaaauugcaa

SEQ ID NO: 182515 - RNA, 20 nt, Artificial Sequence
  Synthetic
agucagugcagaaauugcaa

SEQ ID NO: 182516 - RNA, 21 nt, Artificial Sequence
  Synthetic
cagucagugcagaaauugcaa

SEQ ID NO: 182517 - RNA, 22 nt, Artificial Sequence
  Synthetic
acagucagugcagaaauugcaa

SEQ ID NO: 182518 - RNA, 23 nt, Artificial Sequence
  Synthetic
uacagucagugcagaaauugcaa

SEQ ID NO: 182519 - RNA, 24 nt, Artificial Sequence
  Synthetic
guacagucagugcagaaauugcaa

SEQ ID NO: 182520 - RNA, 18 nt, Artificial Sequence
  Synthetic
ucugggaaccaauugcaa

SEQ ID NO: 182521 - RNA, 19 nt, Artificial Sequence
  Synthetic
uucugggaaccaauugcaa

SEQ ID NO: 182522 - RNA, 20 nt, Artificial Sequence
  Synthetic
auucugggaaccaauugcaa

SEQ ID NO: 182523 - RNA, 21 nt, Artificial Sequence
  Synthetic
aauucugggaaccaauugcaa

SEQ ID NO: 182524 - RNA, 22 nt, Artificial Sequence
  Synthetic
aaauucugggaaccaauugcaa

SEQ ID NO: 182525 - RNA, 23 nt, Artificial Sequence
  Synthetic
gaaauucugggaaccaauugcaa

SEQ ID NO: 182526 - RNA, 24 nt, Artificial Sequence
  Synthetic
ugaaauucugggaaccaauugcaa

SEQ ID NO: 182527 - RNA, 18 nt, Artificial Sequence
  Synthetic
ccauggauaccauugcaa

SEQ ID NO: 182528 - RNA, 19 nt, Artificial Sequence
  Synthetic
accauggauaccauugcaa

SEQ ID NO: 182529 - RNA, 20 nt, Artificial Sequence
  Synthetic
uaccauggauaccauugcaa

SEQ ID NO: 182530 - RNA, 21 nt, Artificial Sequence
  Synthetic
cuaccauggauaccauugcaa

SEQ ID NO: 182531 - RNA, 22 nt, Artificial Sequence
  Synthetic
ucuaccauggauaccauugcaa

SEQ ID NO: 182532 - RNA, 23 nt, Artificial Sequence
  Synthetic
aucuaccauggauaccauugcaa

SEQ ID NO: 182533 - RNA, 24 nt, Artificial Sequence
  Synthetic
uaucuaccauggauaccauugcaa

SEQ ID NO: 182534 - RNA, 18 nt, Artificial Sequence
  Synthetic
auuuuaaaaauauugcaa

SEQ ID NO: 182535 - RNA, 19 nt, Artificial Sequence
  Synthetic
uauuuuaaaaauauugcaa

SEQ ID NO: 182536 - RNA, 20 nt, Artificial Sequence
  Synthetic
auauuuuaaaaauauugcaa

SEQ ID NO: 182537 - RNA, 21 nt, Artificial Sequence
  Synthetic
aauauuuuaaaaauauugcaa

SEQ ID NO: 182538 - RNA, 22 nt, Artificial Sequence
  Synthetic
caauauuuuaaaaauauugcaa

SEQ ID NO: 182539 - RNA, 23 nt, Artificial Sequence
  Synthetic
acaauauuuuaaaaauauugcaa

SEQ ID NO: 182540 - RNA, 24 nt, Artificial Sequence
  Synthetic
uacaauauuuuaaaaauauugcaa

SEQ ID NO: 182541 - RNA, 18 nt, Artificial Sequence
  Synthetic
cagucuggaguauugcaa

SEQ ID NO: 182542 - RNA, 19 nt, Artificial Sequence
  Synthetic
ccagucuggaguauugcaa

SEQ ID NO: 182543 - RNA, 20 nt, Artificial Sequence
  Synthetic
cccagucuggaguauugcaa

SEQ ID NO: 182544 - RNA, 21 nt, Artificial Sequence
  Synthetic
acccagucuggaguauugcaa

SEQ ID NO: 182545 - RNA, 22 nt, Artificial Sequence
  Synthetic
cacccagucuggaguauugcaa

SEQ ID NO: 182546 - RNA, 23 nt, Artificial Sequence
  Synthetic
ucacccagucuggaguauugcaa

SEQ ID NO: 182547 - RNA, 24 nt, Artificial Sequence
  Synthetic
cucacccagucuggaguauugcaa

SEQ ID NO: 182548 - RNA, 18 nt, Artificial Sequence
  Synthetic
gccucaaucagguugcaa

SEQ ID NO: 182549 - RNA, 19 nt, Artificial Sequence
  Synthetic
ugccucaaucagguugcaa

SEQ ID NO: 182550 - RNA, 20 nt, Artificial Sequence
  Synthetic
augccucaaucagguugcaa

SEQ ID NO: 182551 - RNA, 21 nt, Artificial Sequence
  Synthetic
aaugccucaaucagguugcaa

SEQ ID NO: 182552 - RNA, 22 nt, Artificial Sequence
  Synthetic
uaaugccucaaucagguugcaa

SEQ ID NO: 182553 - RNA, 23 nt, Artificial Sequence
  Synthetic
auaaugccucaaucagguugcaa

SEQ ID NO: 182554 - RNA, 24 nt, Artificial Sequence
  Synthetic
aauaaugccucaaucagguugcaa

SEQ ID NO: 182555 - RNA, 18 nt, Artificial Sequence
  Synthetic
ccauccaugauguugcaa

SEQ ID NO: 182556 - RNA, 19 nt, Artificial Sequence
  Synthetic
uccauccaugauguugcaa

SEQ ID NO: 182557 - RNA, 20 nt, Artificial Sequence
  Synthetic
uuccauccaugauguugcaa

SEQ ID NO: 182558 - RNA, 21 nt, Artificial Sequence
  Synthetic
guuccauccaugauguugcaa

SEQ ID NO: 182559 - RNA, 22 nt, Artificial Sequence
  Synthetic
aguuccauccaugauguugcaa

SEQ ID NO: 182560 - RNA, 23 nt, Artificial Sequence
  Synthetic
caguuccauccaugauguugcaa

SEQ ID NO: 182561 - RNA, 24 nt, Artificial Sequence
  Synthetic
ccaguuccauccaugauguugcaa

SEQ ID NO: 182562 - RNA, 18 nt, Artificial Sequence
  Synthetic
cuuccccaaaauuugcaa

SEQ ID NO: 182563 - RNA, 19 nt, Artificial Sequence
  Synthetic
ccuuccccaaaauuugcaa

SEQ ID NO: 182564 - RNA, 20 nt, Artificial Sequence
  Synthetic
cccuuccccaaaauuugcaa

SEQ ID NO: 182565 - RNA, 21 nt, Artificial Sequence
  Synthetic
ccccuuccccaaaauuugcaa

SEQ ID NO: 182566 - RNA, 22 nt, Artificial Sequence
  Synthetic
cccccuuccccaaaauuugcaa

SEQ ID NO: 182567 - RNA, 23 nt, Artificial Sequence
  Synthetic
ucccccuuccccaaaauuugcaa

SEQ ID NO: 182568 - RNA, 24 nt, Artificial Sequence
  Synthetic
cucccccuuccccaaaauuugcaa

SEQ ID NO: 182569 - RNA, 18 nt, Artificial Sequence
  Synthetic
aauggcuuccauuugcaa

SEQ ID NO: 182570 - RNA, 19 nt, Artificial Sequence
  Synthetic
caauggcuuccauuugcaa

SEQ ID NO: 182571 - RNA, 20 nt, Artificial Sequence
  Synthetic
ucaauggcuuccauuugcaa

SEQ ID NO: 182572 - RNA, 21 nt, Artificial Sequence
  Synthetic
aucaauggcuuccauuugcaa

SEQ ID NO: 182573 - RNA, 22 nt, Artificial Sequence
  Synthetic
aaucaauggcuuccauuugcaa

SEQ ID NO: 182574 - RNA, 23 nt, Artificial Sequence
  Synthetic
uaaucaauggcuuccauuugcaa

SEQ ID NO: 182575 - RNA, 24 nt, Artificial Sequence
  Synthetic
cuaaucaauggcuuccauuugcaa

SEQ ID NO: 182576 - RNA, 18 nt, Artificial Sequence
  Synthetic
aacccauucauuuugcaa

SEQ ID NO: 182577 - RNA, 19 nt, Artificial Sequence
  Synthetic
uaacccauucauuuugcaa

SEQ ID NO: 182578 - RNA, 20 nt, Artificial Sequence
  Synthetic
uuaacccauucauuuugcaa

SEQ ID NO: 182579 - RNA, 21 nt, Artificial Sequence
  Synthetic
auuaacccauucauuuugcaa

SEQ ID NO: 182580 - RNA, 22 nt, Artificial Sequence
  Synthetic
aauuaacccauucauuuugcaa

SEQ ID NO: 182581 - RNA, 23 nt, Artificial Sequence
  Synthetic
caauuaacccauucauuuugcaa

SEQ ID NO: 182582 - RNA, 24 nt, Artificial Sequence
  Synthetic
acaauuaacccauucauuuugcaa

SEQ ID NO: 182583 - RNA, 18 nt, Artificial Sequence
  Synthetic
uguucaaaacuuuugcaa

SEQ ID NO: 182584 - RNA, 19 nt, Artificial Sequence
  Synthetic
guguucaaaacuuuugcaa

SEQ ID NO: 182585 - RNA, 20 nt, Artificial Sequence
  Synthetic
uguguucaaaacuuuugcaa

SEQ ID NO: 182586 - RNA, 21 nt, Artificial Sequence
  Synthetic
cuguguucaaaacuuuugcaa

SEQ ID NO: 182587 - RNA, 22 nt, Artificial Sequence
  Synthetic
acuguguucaaaacuuuugcaa

SEQ ID NO: 182588 - RNA, 23 nt, Artificial Sequence
  Synthetic
gacuguguucaaaacuuuugcaa

SEQ ID NO: 182589 - RNA, 24 nt, Artificial Sequence
  Synthetic
agacuguguucaaaacuuuugcaa

SEQ ID NO: 182590 - RNA, 18 nt, Artificial Sequence
  Synthetic
guuaaaauguuuuugcaa

SEQ ID NO: 182591 - RNA, 19 nt, Artificial Sequence
  Synthetic
gguuaaaauguuuuugcaa

SEQ ID NO: 182592 - RNA, 20 nt, Artificial Sequence
  Synthetic
agguuaaaauguuuuugcaa

SEQ ID NO: 182593 - RNA, 21 nt, Artificial Sequence
  Synthetic
gagguuaaaauguuuuugcaa

SEQ ID NO: 182594 - RNA, 22 nt, Artificial Sequence
  Synthetic
agagguuaaaauguuuuugcaa

SEQ ID NO: 182595 - RNA, 23 nt, Artificial Sequence
  Synthetic
cagagguuaaaauguuuuugcaa

SEQ ID NO: 182596 - RNA, 24 nt, Artificial Sequence
  Synthetic
acagagguuaaaauguuuuugcaa

SEQ ID NO: 182597 - RNA, 18 nt, Artificial Sequence
  Synthetic
auguuucugaaaaaucaa

SEQ ID NO: 182598 - RNA, 19 nt, Artificial Sequence
  Synthetic
gauguuucugaaaaaucaa

SEQ ID NO: 182599 - RNA, 20 nt, Artificial Sequence
  Synthetic
ggauguuucugaaaaaucaa

SEQ ID NO: 182600 - RNA, 21 nt, Artificial Sequence
  Synthetic
aggauguuucugaaaaaucaa

SEQ ID NO: 182601 - RNA, 22 nt, Artificial Sequence
  Synthetic
aaggauguuucugaaaaaucaa

SEQ ID NO: 182602 - RNA, 23 nt, Artificial Sequence
  Synthetic
caaggauguuucugaaaaaucaa

SEQ ID NO: 182603 - RNA, 24 nt, Artificial Sequence
  Synthetic
ccaaggauguuucugaaaaaucaa

SEQ ID NO: 182604 - RNA, 18 nt, Artificial Sequence
  Synthetic
guauucauugaaaaucaa

SEQ ID NO: 182605 - RNA, 19 nt, Artificial Sequence
  Synthetic
uguauucauugaaaaucaa

SEQ ID NO: 182606 - RNA, 20 nt, Artificial Sequence
  Synthetic
auguauucauugaaaaucaa

SEQ ID NO: 182607 - RNA, 21 nt, Artificial Sequence
  Synthetic
uauguauucauugaaaaucaa

SEQ ID NO: 182608 - RNA, 22 nt, Artificial Sequence
  Synthetic
auauguauucauugaaaaucaa

SEQ ID NO: 182609 - RNA, 23 nt, Artificial Sequence
  Synthetic
aauauguauucauugaaaaucaa

SEQ ID NO: 182610 - RNA, 24 nt, Artificial Sequence
  Synthetic
aaauauguauucauugaaaaucaa

SEQ ID NO: 182611 - RNA, 18 nt, Artificial Sequence
  Synthetic
gugggcacguaaaaucaa

SEQ ID NO: 182612 - RNA, 19 nt, Artificial Sequence
  Synthetic
ggugggcacguaaaaucaa

SEQ ID NO: 182613 - RNA, 20 nt, Artificial Sequence
  Synthetic
gggugggcacguaaaaucaa

SEQ ID NO: 182614 - RNA, 21 nt, Artificial Sequence
  Synthetic
agggugggcacguaaaaucaa

SEQ ID NO: 182615 - RNA, 22 nt, Artificial Sequence
  Synthetic
uagggugggcacguaaaaucaa

SEQ ID NO: 182616 - RNA, 23 nt, Artificial Sequence
  Synthetic
auagggugggcacguaaaaucaa

SEQ ID NO: 182617 - RNA, 24 nt, Artificial Sequence
  Synthetic
gauagggugggcacguaaaaucaa

SEQ ID NO: 182618 - RNA, 18 nt, Artificial Sequence
  Synthetic
aguugaaauacaaaucaa

SEQ ID NO: 182619 - RNA, 19 nt, Artificial Sequence
  Synthetic
gaguugaaauacaaaucaa

SEQ ID NO: 182620 - RNA, 20 nt, Artificial Sequence
  Synthetic
ugaguugaaauacaaaucaa

SEQ ID NO: 182621 - RNA, 21 nt, Artificial Sequence
  Synthetic
augaguugaaauacaaaucaa

SEQ ID NO: 182622 - RNA, 22 nt, Artificial Sequence
  Synthetic
uaugaguugaaauacaaaucaa

SEQ ID NO: 182623 - RNA, 23 nt, Artificial Sequence
  Synthetic
uuaugaguugaaauacaaaucaa

SEQ ID NO: 182624 - RNA, 24 nt, Artificial Sequence
  Synthetic
uuuaugaguugaaauacaaaucaa

SEQ ID NO: 182625 - RNA, 18 nt, Artificial Sequence
  Synthetic
uguacauguucaaaucaa

SEQ ID NO: 182626 - RNA, 19 nt, Artificial Sequence
  Synthetic
auguacauguucaaaucaa

SEQ ID NO: 182627 - RNA, 20 nt, Artificial Sequence
  Synthetic
aauguacauguucaaaucaa

SEQ ID NO: 182628 - RNA, 21 nt, Artificial Sequence
  Synthetic
uaauguacauguucaaaucaa

SEQ ID NO: 182629 - RNA, 22 nt, Artificial Sequence
  Synthetic
auaauguacauguucaaaucaa

SEQ ID NO: 182630 - RNA, 23 nt, Artificial Sequence
  Synthetic
aauaauguacauguucaaaucaa

SEQ ID NO: 182631 - RNA, 24 nt, Artificial Sequence
  Synthetic
aaauaauguacauguucaaaucaa

SEQ ID NO: 182632 - RNA, 18 nt, Artificial Sequence
  Synthetic
uguagcaacagaaaucaa

SEQ ID NO: 182633 - RNA, 19 nt, Artificial Sequence
  Synthetic
uuguagcaacagaaaucaa

SEQ ID NO: 182634 - RNA, 20 nt, Artificial Sequence
  Synthetic
cuuguagcaacagaaaucaa

SEQ ID NO: 182635 - RNA, 21 nt, Artificial Sequence
  Synthetic
acuuguagcaacagaaaucaa

SEQ ID NO: 182636 - RNA, 22 nt, Artificial Sequence
  Synthetic
cacuuguagcaacagaaaucaa

SEQ ID NO: 182637 - RNA, 23 nt, Artificial Sequence
  Synthetic
ucacuuguagcaacagaaaucaa

SEQ ID NO: 182638 - RNA, 24 nt, Artificial Sequence
  Synthetic
uucacuuguagcaacagaaaucaa

SEQ ID NO: 182639 - RNA, 18 nt, Artificial Sequence
  Synthetic
aucuuugucauaaaucaa

SEQ ID NO: 182640 - RNA, 19 nt, Artificial Sequence
  Synthetic
caucuuugucauaaaucaa

SEQ ID NO: 182641 - RNA, 20 nt, Artificial Sequence
  Synthetic
gcaucuuugucauaaaucaa

SEQ ID NO: 182642 - RNA, 21 nt, Artificial Sequence
  Synthetic
ggcaucuuugucauaaaucaa

SEQ ID NO: 182643 - RNA, 22 nt, Artificial Sequence
  Synthetic
uggcaucuuugucauaaaucaa

SEQ ID NO: 182644 - RNA, 23 nt, Artificial Sequence
  Synthetic
auggcaucuuugucauaaaucaa

SEQ ID NO: 182645 - RNA, 24 nt, Artificial Sequence
  Synthetic
cauggcaucuuugucauaaaucaa

SEQ ID NO: 182646 - RNA, 18 nt, Artificial Sequence
  Synthetic
uccuauaauaacaaucaa

SEQ ID NO: 182647 - RNA, 19 nt, Artificial Sequence
  Synthetic
cuccuauaauaacaaucaa

SEQ ID NO: 182648 - RNA, 20 nt, Artificial Sequence
  Synthetic
ucuccuauaauaacaaucaa

SEQ ID NO: 182649 - RNA, 21 nt, Artificial Sequence
  Synthetic
aucuccuauaauaacaaucaa

SEQ ID NO: 182650 - RNA, 22 nt, Artificial Sequence
  Synthetic
gaucuccuauaauaacaaucaa

SEQ ID NO: 182651 - RNA, 23 nt, Artificial Sequence
  Synthetic
ugaucuccuauaauaacaaucaa

SEQ ID NO: 182652 - RNA, 24 nt, Artificial Sequence
  Synthetic
uugaucuccuauaauaacaaucaa

SEQ ID NO: 182653 - RNA, 18 nt, Artificial Sequence
  Synthetic
ugggucugauccaaucaa

SEQ ID NO: 182654 - RNA, 19 nt, Artificial Sequence
  Synthetic
gugggucugauccaaucaa

SEQ ID NO: 182655 - RNA, 20 nt, Artificial Sequence
  Synthetic
ggugggucugauccaaucaa

SEQ ID NO: 182656 - RNA, 21 nt, Artificial Sequence
  Synthetic
gggugggucugauccaaucaa

SEQ ID NO: 182657 - RNA, 22 nt, Artificial Sequence
  Synthetic
ugggugggucugauccaaucaa

SEQ ID NO: 182658 - RNA, 23 nt, Artificial Sequence
  Synthetic
gugggugggucugauccaaucaa

SEQ ID NO: 182659 - RNA, 24 nt, Artificial Sequence
  Synthetic
ugugggugggucugauccaaucaa

SEQ ID NO: 182660 - RNA, 18 nt, Artificial Sequence
  Synthetic
ugaaacuauuccaaucaa

SEQ ID NO: 182661 - RNA, 19 nt, Artificial Sequence
  Synthetic
cugaaacuauuccaaucaa

SEQ ID NO: 182662 - RNA, 20 nt, Artificial Sequence
  Synthetic
ucugaaacuauuccaaucaa

SEQ ID NO: 182663 - RNA, 18 nt, Artificial Sequence
  Synthetic
auuucaacaugcaaucaa

SEQ ID NO: 182664 - RNA, 19 nt, Artificial Sequence
  Synthetic
cauuucaacaugcaaucaa

SEQ ID NO: 182665 - RNA, 20 nt, Artificial Sequence
  Synthetic
ucauuucaacaugcaaucaa

SEQ ID NO: 182666 - RNA, 21 nt, Artificial Sequence
  Synthetic
gucauuucaacaugcaaucaa

SEQ ID NO: 182667 - RNA, 22 nt, Artificial Sequence
  Synthetic
ugucauuucaacaugcaaucaa

SEQ ID NO: 182668 - RNA, 23 nt, Artificial Sequence
  Synthetic
uugucauuucaacaugcaaucaa

SEQ ID NO: 182669 - RNA, 24 nt, Artificial Sequence
  Synthetic
auugucauuucaacaugcaaucaa

SEQ ID NO: 182670 - RNA, 18 nt, Artificial Sequence
  Synthetic
ugguucguauucaaucaa

SEQ ID NO: 182671 - RNA, 19 nt, Artificial Sequence
  Synthetic
uugguucguauucaaucaa

SEQ ID NO: 182672 - RNA, 20 nt, Artificial Sequence
  Synthetic
auugguucguauucaaucaa

SEQ ID NO: 182673 - RNA, 21 nt, Artificial Sequence
  Synthetic
gauugguucguauucaaucaa

SEQ ID NO: 182674 - RNA, 22 nt, Artificial Sequence
  Synthetic
agauugguucguauucaaucaa

SEQ ID NO: 182675 - RNA, 23 nt, Artificial Sequence
  Synthetic
aagauugguucguauucaaucaa

SEQ ID NO: 182676 - RNA, 24 nt, Artificial Sequence
  Synthetic
aaagauugguucguauucaaucaa

SEQ ID NO: 182677 - RNA, 18 nt, Artificial Sequence
  Synthetic
uauaaaagguucaaucaa

SEQ ID NO: 182678 - RNA, 19 nt, Artificial Sequence
  Synthetic
guauaaaagguucaaucaa

SEQ ID NO: 182679 - RNA, 20 nt, Artificial Sequence
  Synthetic
cguauaaaagguucaaucaa

SEQ ID NO: 182680 - RNA, 21 nt, Artificial Sequence
  Synthetic
ccguauaaaagguucaaucaa

SEQ ID NO: 182681 - RNA, 22 nt, Artificial Sequence
  Synthetic
uccguauaaaagguucaaucaa

SEQ ID NO: 182682 - RNA, 23 nt, Artificial Sequence
  Synthetic
cuccguauaaaagguucaaucaa

SEQ ID NO: 182683 - RNA, 24 nt, Artificial Sequence
  Synthetic
acuccguauaaaagguucaaucaa

SEQ ID NO: 182684 - RNA, 18 nt, Artificial Sequence
  Synthetic
augcaacaaaggaaucaa

SEQ ID NO: 182685 - RNA, 19 nt, Artificial Sequence
  Synthetic
aaugcaacaaaggaaucaa

SEQ ID NO: 182686 - RNA, 20 nt, Artificial Sequence
  Synthetic
caaugcaacaaaggaaucaa

SEQ ID NO: 182687 - RNA, 21 nt, Artificial Sequence
  Synthetic
acaaugcaacaaaggaaucaa

SEQ ID NO: 182688 - RNA, 22 nt, Artificial Sequence
  Synthetic
aacaaugcaacaaaggaaucaa

SEQ ID NO: 182689 - RNA, 23 nt, Artificial Sequence
  Synthetic
aaacaaugcaacaaaggaaucaa

SEQ ID NO: 182690 - RNA, 24 nt, Artificial Sequence
  Synthetic
uaaacaaugcaacaaaggaaucaa

SEQ ID NO: 182691 - RNA, 18 nt, Artificial Sequence
  Synthetic
agauucaaagggaaucaa

SEQ ID NO: 182692 - RNA, 19 nt, Artificial Sequence
  Synthetic
uagauucaaagggaaucaa

SEQ ID NO: 182693 - RNA, 20 nt, Artificial Sequence
  Synthetic
uuagauucaaagggaaucaa

SEQ ID NO: 182694 - RNA, 21 nt, Artificial Sequence
  Synthetic
uuuagauucaaagggaaucaa

SEQ ID NO: 182695 - RNA, 22 nt, Artificial Sequence
  Synthetic
cuuuagauucaaagggaaucaa

SEQ ID NO: 182696 - RNA, 23 nt, Artificial Sequence
  Synthetic
ucuuuagauucaaagggaaucaa

SEQ ID NO: 182697 - RNA, 24 nt, Artificial Sequence
  Synthetic
uucuuuagauucaaagggaaucaa

SEQ ID NO: 182698 - RNA, 18 nt, Artificial Sequence
  Synthetic
uucuagaaagggaaucaa

SEQ ID NO: 182699 - RNA, 19 nt, Artificial Sequence
  Synthetic
uuucuagaaagggaaucaa

SEQ ID NO: 182700 - RNA, 20 nt, Artificial Sequence
  Synthetic
auuucuagaaagggaaucaa

SEQ ID NO: 182701 - RNA, 21 nt, Artificial Sequence
  Synthetic
uauuucuagaaagggaaucaa

SEQ ID NO: 182702 - RNA, 22 nt, Artificial Sequence
  Synthetic
uuauuucuagaaagggaaucaa

SEQ ID NO: 182703 - RNA, 23 nt, Artificial Sequence
  Synthetic
uuuauuucuagaaagggaaucaa

SEQ ID NO: 182704 - RNA, 24 nt, Artificial Sequence
  Synthetic
cuuuauuucuagaaagggaaucaa

SEQ ID NO: 182705 - RNA, 18 nt, Artificial Sequence
  Synthetic
aauuugagagggaaucaa

SEQ ID NO: 182706 - RNA, 19 nt, Artificial Sequence
  Synthetic
aaauuugagagggaaucaa

SEQ ID NO: 182707 - RNA, 20 nt, Artificial Sequence
  Synthetic
caaauuugagagggaaucaa

SEQ ID NO: 182708 - RNA, 21 nt, Artificial Sequence
  Synthetic
ucaaauuugagagggaaucaa

SEQ ID NO: 182709 - RNA, 22 nt, Artificial Sequence
  Synthetic
uucaaauuugagagggaaucaa

SEQ ID NO: 182710 - RNA, 23 nt, Artificial Sequence
  Synthetic
uuucaaauuugagagggaaucaa

SEQ ID NO: 182711 - RNA, 24 nt, Artificial Sequence
  Synthetic
cuuucaaauuugagagggaaucaa

SEQ ID NO: 182712 - RNA, 18 nt, Artificial Sequence
  Synthetic
gauaccucauggaaucaa

SEQ ID NO: 182713 - RNA, 19 nt, Artificial Sequence
  Synthetic
agauaccucauggaaucaa

SEQ ID NO: 182714 - RNA, 20 nt, Artificial Sequence
  Synthetic
cagauaccucauggaaucaa

SEQ ID NO: 182715 - RNA, 21 nt, Artificial Sequence
  Synthetic
ucagauaccucauggaaucaa

SEQ ID NO: 182716 - RNA, 22 nt, Artificial Sequence
  Synthetic
aucagauaccucauggaaucaa

SEQ ID NO: 182717 - RNA, 23 nt, Artificial Sequence
  Synthetic
uaucagauaccucauggaaucaa

SEQ ID NO: 182718 - RNA, 24 nt, Artificial Sequence
  Synthetic
auaucagauaccucauggaaucaa

SEQ ID NO: 182719 - RNA, 18 nt, Artificial Sequence
  Synthetic
caauaacgauggaaucaa

SEQ ID NO: 182720 - RNA, 19 nt, Artificial Sequence
  Synthetic
gcaauaacgauggaaucaa

SEQ ID NO: 182721 - RNA, 20 nt, Artificial Sequence
  Synthetic
agcaauaacgauggaaucaa

SEQ ID NO: 182722 - RNA, 21 nt, Artificial Sequence
  Synthetic
aagcaauaacgauggaaucaa

SEQ ID NO: 182723 - RNA, 22 nt, Artificial Sequence
  Synthetic
aaagcaauaacgauggaaucaa

SEQ ID NO: 182724 - RNA, 23 nt, Artificial Sequence
  Synthetic
aaaagcaauaacgauggaaucaa

SEQ ID NO: 182725 - RNA, 24 nt, Artificial Sequence
  Synthetic
gaaaagcaauaacgauggaaucaa

SEQ ID NO: 182726 - RNA, 18 nt, Artificial Sequence
  Synthetic
ucugggugauggaaucaa

SEQ ID NO: 182727 - RNA, 19 nt, Artificial Sequence
  Synthetic
aucugggugauggaaucaa

SEQ ID NO: 182728 - RNA, 20 nt, Artificial Sequence
  Synthetic
uaucugggugauggaaucaa

SEQ ID NO: 182729 - RNA, 21 nt, Artificial Sequence
  Synthetic
cuaucugggugauggaaucaa

SEQ ID NO: 182730 - RNA, 22 nt, Artificial Sequence
  Synthetic
acuaucugggugauggaaucaa

SEQ ID NO: 182731 - RNA, 23 nt, Artificial Sequence
  Synthetic
cacuaucugggugauggaaucaa

SEQ ID NO: 182732 - RNA, 24 nt, Artificial Sequence
  Synthetic
ucacuaucugggugauggaaucaa

SEQ ID NO: 182733 - RNA, 18 nt, Artificial Sequence
  Synthetic
uuuacuggcaugaaucaa

SEQ ID NO: 182734 - RNA, 19 nt, Artificial Sequence
  Synthetic
auuuacuggcaugaaucaa

SEQ ID NO: 182735 - RNA, 20 nt, Artificial Sequence
  Synthetic
uauuuacuggcaugaaucaa

SEQ ID NO: 182736 - RNA, 21 nt, Artificial Sequence
  Synthetic
auauuuacuggcaugaaucaa

SEQ ID NO: 182737 - RNA, 22 nt, Artificial Sequence
  Synthetic
aauauuuacuggcaugaaucaa

SEQ ID NO: 182738 - RNA, 23 nt, Artificial Sequence
  Synthetic
aaauauuuacuggcaugaaucaa

SEQ ID NO: 182739 - RNA, 24 nt, Artificial Sequence
  Synthetic
aaaauauuuacuggcaugaaucaa

SEQ ID NO: 182740 - RNA, 18 nt, Artificial Sequence
  Synthetic
gucuuucguuugaaucaa

SEQ ID NO: 182741 - RNA, 19 nt, Artificial Sequence
  Synthetic
ugucuuucguuugaaucaa

SEQ ID NO: 182742 - RNA, 20 nt, Artificial Sequence
  Synthetic
gugucuuucguuugaaucaa

SEQ ID NO: 182743 - RNA, 21 nt, Artificial Sequence
  Synthetic
ugugucuuucguuugaaucaa

SEQ ID NO: 182744 - RNA, 22 nt, Artificial Sequence
  Synthetic
gugugucuuucguuugaaucaa

SEQ ID NO: 182745 - RNA, 23 nt, Artificial Sequence
  Synthetic
ugugugucuuucguuugaaucaa

SEQ ID NO: 182746 - RNA, 24 nt, Artificial Sequence
  Synthetic
uugugugucuuucguuugaaucaa

SEQ ID NO: 182747 - RNA, 18 nt, Artificial Sequence
  Synthetic
acacggucacauaaucaa

SEQ ID NO: 182748 - RNA, 19 nt, Artificial Sequence
  Synthetic
uacacggucacauaaucaa

SEQ ID NO: 182749 - RNA, 20 nt, Artificial Sequence
  Synthetic
uuacacggucacauaaucaa

SEQ ID NO: 182750 - RNA, 21 nt, Artificial Sequence
  Synthetic
uuuacacggucacauaaucaa

SEQ ID NO: 182751 - RNA, 22 nt, Artificial Sequence
  Synthetic
uuuuacacggucacauaaucaa

SEQ ID NO: 182752 - RNA, 23 nt, Artificial Sequence
  Synthetic
auuuuacacggucacauaaucaa

SEQ ID NO: 182753 - RNA, 24 nt, Artificial Sequence
  Synthetic
cauuuuacacggucacauaaucaa

SEQ ID NO: 182754 - RNA, 18 nt, Artificial Sequence
  Synthetic
uuuugauagacuaaucaa

SEQ ID NO: 182755 - RNA, 19 nt, Artificial Sequence
  Synthetic
auuuugauagacuaaucaa

SEQ ID NO: 182756 - RNA, 20 nt, Artificial Sequence
  Synthetic
cauuuugauagacuaaucaa

SEQ ID NO: 182757 - RNA, 21 nt, Artificial Sequence
  Synthetic
ucauuuugauagacuaaucaa

SEQ ID NO: 182758 - RNA, 22 nt, Artificial Sequence
  Synthetic
uucauuuugauagacuaaucaa

SEQ ID NO: 182759 - RNA, 23 nt, Artificial Sequence
  Synthetic
cuucauuuugauagacuaaucaa

SEQ ID NO: 182760 - RNA, 24 nt, Artificial Sequence
  Synthetic
gcuucauuuugauagacuaaucaa

SEQ ID NO: 182761 - RNA, 18 nt, Artificial Sequence
  Synthetic
uaugcaacaauuaaucaa

SEQ ID NO: 182762 - RNA, 19 nt, Artificial Sequence
  Synthetic
uuaugcaacaauuaaucaa

SEQ ID NO: 182763 - RNA, 20 nt, Artificial Sequence
  Synthetic
auuaugcaacaauuaaucaa

SEQ ID NO: 182764 - RNA, 21 nt, Artificial Sequence
  Synthetic
cauuaugcaacaauuaaucaa

SEQ ID NO: 182765 - RNA, 22 nt, Artificial Sequence
  Synthetic
acauuaugcaacaauuaaucaa

SEQ ID NO: 182766 - RNA, 23 nt, Artificial Sequence
  Synthetic
uacauuaugcaacaauuaaucaa

SEQ ID NO: 182767 - RNA, 24 nt, Artificial Sequence
  Synthetic
uuacauuaugcaacaauuaaucaa

SEQ ID NO: 182768 - RNA, 18 nt, Artificial Sequence
  Synthetic
aucuuccauauuaaucaa

SEQ ID NO: 182769 - RNA, 19 nt, Artificial Sequence
  Synthetic
aaucuuccauauuaaucaa

SEQ ID NO: 182770 - RNA, 20 nt, Artificial Sequence
  Synthetic
gaaucuuccauauuaaucaa

SEQ ID NO: 182771 - RNA, 21 nt, Artificial Sequence
  Synthetic
ggaaucuuccauauuaaucaa

SEQ ID NO: 182772 - RNA, 22 nt, Artificial Sequence
  Synthetic
aggaaucuuccauauuaaucaa

SEQ ID NO: 182773 - RNA, 23 nt, Artificial Sequence
  Synthetic
aaggaaucuuccauauuaaucaa

SEQ ID NO: 182774 - RNA, 24 nt, Artificial Sequence
  Synthetic
gaaggaaucuuccauauuaaucaa

SEQ ID NO: 182775 - RNA, 18 nt, Artificial Sequence
  Synthetic
aaaaguaaaguuaaucaa

SEQ ID NO: 182776 - RNA, 19 nt, Artificial Sequence
  Synthetic
caaaaguaaaguuaaucaa

SEQ ID NO: 182777 - RNA, 20 nt, Artificial Sequence
  Synthetic
ucaaaaguaaaguuaaucaa

SEQ ID NO: 182778 - RNA, 21 nt, Artificial Sequence
  Synthetic
cucaaaaguaaaguuaaucaa

SEQ ID NO: 182779 - RNA, 22 nt, Artificial Sequence
  Synthetic
ucucaaaaguaaaguuaaucaa

SEQ ID NO: 182780 - RNA, 23 nt, Artificial Sequence
  Synthetic
uucucaaaaguaaaguuaaucaa

SEQ ID NO: 182781 - RNA, 24 nt, Artificial Sequence
  Synthetic
uuucucaaaaguaaaguuaaucaa

SEQ ID NO: 182782 - RNA, 18 nt, Artificial Sequence
  Synthetic
cuuuuuuuuuuuaaucaa

SEQ ID NO: 182783 - RNA, 19 nt, Artificial Sequence
  Synthetic
ucuuuuuuuuuuuaaucaa

SEQ ID NO: 182784 - RNA, 20 nt, Artificial Sequence
  Synthetic
aucuuuuuuuuuuuaaucaa

SEQ ID NO: 182785 - RNA, 21 nt, Artificial Sequence
  Synthetic
aaucuuuuuuuuuuuaaucaa

SEQ ID NO: 182786 - RNA, 22 nt, Artificial Sequence
  Synthetic
uaaucuuuuuuuuuuuaaucaa

SEQ ID NO: 182787 - RNA, 23 nt, Artificial Sequence
  Synthetic
auaaucuuuuuuuuuuuaaucaa

SEQ ID NO: 182788 - RNA, 24 nt, Artificial Sequence
  Synthetic
aauaaucuuuuuuuuuuuaaucaa

SEQ ID NO: 182789 - RNA, 18 nt, Artificial Sequence
  Synthetic
ugcaugagaaaacaucaa

SEQ ID NO: 182790 - RNA, 19 nt, Artificial Sequence
  Synthetic
augcaugagaaaacaucaa

SEQ ID NO: 182791 - RNA, 20 nt, Artificial Sequence
  Synthetic
caugcaugagaaaacaucaa

SEQ ID NO: 182792 - RNA, 21 nt, Artificial Sequence
  Synthetic
ucaugcaugagaaaacaucaa

SEQ ID NO: 182793 - RNA, 22 nt, Artificial Sequence
  Synthetic
uucaugcaugagaaaacaucaa

SEQ ID NO: 182794 - RNA, 23 nt, Artificial Sequence
  Synthetic
auucaugcaugagaaaacaucaa

SEQ ID NO: 182795 - RNA, 24 nt, Artificial Sequence
  Synthetic
uauucaugcaugagaaaacaucaa

SEQ ID NO: 182796 - RNA, 18 nt, Artificial Sequence
  Synthetic
uucauaaauaaacaucaa

SEQ ID NO: 182797 - RNA, 19 nt, Artificial Sequence
  Synthetic
auucauaaauaaacaucaa

SEQ ID NO: 182798 - RNA, 20 nt, Artificial Sequence
  Synthetic
cauucauaaauaaacaucaa

SEQ ID NO: 182799 - RNA, 21 nt, Artificial Sequence
  Synthetic
gcauucauaaauaaacaucaa

SEQ ID NO: 182800 - RNA, 22 nt, Artificial Sequence
  Synthetic
ugcauucauaaauaaacaucaa

SEQ ID NO: 182801 - RNA, 23 nt, Artificial Sequence
  Synthetic
gugcauucauaaauaaacaucaa

SEQ ID NO: 182802 - RNA, 24 nt, Artificial Sequence
  Synthetic
ugugcauucauaaauaaacaucaa

SEQ ID NO: 182803 - RNA, 18 nt, Artificial Sequence
  Synthetic
auaaaaugauaacaucaa

SEQ ID NO: 182804 - RNA, 19 nt, Artificial Sequence
  Synthetic
aauaaaaugauaacaucaa

SEQ ID NO: 182805 - RNA, 20 nt, Artificial Sequence
  Synthetic
aaauaaaaugauaacaucaa

SEQ ID NO: 182806 - RNA, 21 nt, Artificial Sequence
  Synthetic
caaauaaaaugauaacaucaa

SEQ ID NO: 182807 - RNA, 22 nt, Artificial Sequence
  Synthetic
acaaauaaaaugauaacaucaa

SEQ ID NO: 182808 - RNA, 23 nt, Artificial Sequence
  Synthetic
uacaaauaaaaugauaacaucaa

SEQ ID NO: 182809 - RNA, 24 nt, Artificial Sequence
  Synthetic
uuacaaauaaaaugauaacaucaa

SEQ ID NO: 182810 - RNA, 18 nt, Artificial Sequence
  Synthetic
auugugcgaacacaucaa

SEQ ID NO: 182811 - RNA, 19 nt, Artificial Sequence
  Synthetic
aauugugcgaacacaucaa

SEQ ID NO: 182812 - RNA, 20 nt, Artificial Sequence
  Synthetic
uaauugugcgaacacaucaa

SEQ ID NO: 182813 - RNA, 21 nt, Artificial Sequence
  Synthetic
uuaauugugcgaacacaucaa

SEQ ID NO: 182814 - RNA, 22 nt, Artificial Sequence
  Synthetic
cuuaauugugcgaacacaucaa

SEQ ID NO: 182815 - RNA, 23 nt, Artificial Sequence
  Synthetic
ucuuaauugugcgaacacaucaa

SEQ ID NO: 182816 - RNA, 24 nt, Artificial Sequence
  Synthetic
uucuuaauugugcgaacacaucaa

SEQ ID NO: 182817 - RNA, 18 nt, Artificial Sequence
  Synthetic
aagcccgaggcacaucaa

SEQ ID NO: 182818 - RNA, 19 nt, Artificial Sequence
  Synthetic
aaagcccgaggcacaucaa

SEQ ID NO: 182819 - RNA, 20 nt, Artificial Sequence
  Synthetic
uaaagcccgaggcacaucaa

SEQ ID NO: 182820 - RNA, 21 nt, Artificial Sequence
  Synthetic
uuaaagcccgaggcacaucaa

SEQ ID NO: 182821 - RNA, 22 nt, Artificial Sequence
  Synthetic
uuuaaagcccgaggcacaucaa

SEQ ID NO: 182822 - RNA, 23 nt, Artificial Sequence
  Synthetic
uuuuaaagcccgaggcacaucaa

SEQ ID NO: 182823 - RNA, 24 nt, Artificial Sequence
  Synthetic
auuuuaaagcccgaggcacaucaa

SEQ ID NO: 182824 - RNA, 18 nt, Artificial Sequence
  Synthetic
gucuccaucagacaucaa

SEQ ID NO: 182825 - RNA, 19 nt, Artificial Sequence
  Synthetic
agucuccaucagacaucaa

SEQ ID NO: 182826 - RNA, 20 nt, Artificial Sequence
  Synthetic
uagucuccaucagacaucaa

SEQ ID NO: 182827 - RNA, 21 nt, Artificial Sequence
  Synthetic
uuagucuccaucagacaucaa

SEQ ID NO: 182828 - RNA, 22 nt, Artificial Sequence
  Synthetic
cuuagucuccaucagacaucaa

SEQ ID NO: 182829 - RNA, 23 nt, Artificial Sequence
  Synthetic
acuuagucuccaucagacaucaa

SEQ ID NO: 182830 - RNA, 24 nt, Artificial Sequence
  Synthetic
cacuuagucuccaucagacaucaa

SEQ ID NO: 182831 - RNA, 18 nt, Artificial Sequence
  Synthetic
auaagauaaauacaucaa

SEQ ID NO: 182832 - RNA, 19 nt, Artificial Sequence
  Synthetic
aauaagauaaauacaucaa

SEQ ID NO: 182833 - RNA, 20 nt, Artificial Sequence
  Synthetic
gaauaagauaaauacaucaa

SEQ ID NO: 182834 - RNA, 21 nt, Artificial Sequence
  Synthetic
ugaauaagauaaauacaucaa

SEQ ID NO: 182835 - RNA, 22 nt, Artificial Sequence
  Synthetic
augaauaagauaaauacaucaa

SEQ ID NO: 182836 - RNA, 23 nt, Artificial Sequence
  Synthetic
uaugaauaagauaaauacaucaa

SEQ ID NO: 182837 - RNA, 24 nt, Artificial Sequence
  Synthetic
auaugaauaagauaaauacaucaa

SEQ ID NO: 182838 - RNA, 18 nt, Artificial Sequence
  Synthetic
uauuuccccuagcaucaa

SEQ ID NO: 182839 - RNA, 19 nt, Artificial Sequence
  Synthetic
uuauuuccccuagcaucaa

SEQ ID NO: 182840 - RNA, 20 nt, Artificial Sequence
  Synthetic
guuauuuccccuagcaucaa

SEQ ID NO: 182841 - RNA, 21 nt, Artificial Sequence
  Synthetic
aguuauuuccccuagcaucaa

SEQ ID NO: 182842 - RNA, 22 nt, Artificial Sequence
  Synthetic
gaguuauuuccccuagcaucaa

SEQ ID NO: 182843 - RNA, 23 nt, Artificial Sequence
  Synthetic
agaguuauuuccccuagcaucaa

SEQ ID NO: 182844 - RNA, 24 nt, Artificial Sequence
  Synthetic
cagaguuauuuccccuagcaucaa

SEQ ID NO: 182845 - RNA, 18 nt, Artificial Sequence
  Synthetic
ucucuuucuuaucaucaa

SEQ ID NO: 182846 - RNA, 19 nt, Artificial Sequence
  Synthetic
cucucuuucuuaucaucaa

SEQ ID NO: 182847 - RNA, 20 nt, Artificial Sequence
  Synthetic
acucucuuucuuaucaucaa

SEQ ID NO: 182848 - RNA, 21 nt, Artificial Sequence
  Synthetic
cacucucuuucuuaucaucaa

SEQ ID NO: 182849 - RNA, 22 nt, Artificial Sequence
  Synthetic
gcacucucuuucuuaucaucaa

SEQ ID NO: 182850 - RNA, 23 nt, Artificial Sequence
  Synthetic
ugcacucucuuucuuaucaucaa

SEQ ID NO: 182851 - RNA, 24 nt, Artificial Sequence
  Synthetic
augcacucucuuucuuaucaucaa

SEQ ID NO: 182852 - RNA, 18 nt, Artificial Sequence
  Synthetic
cuuuugucgucucaucaa

SEQ ID NO: 182853 - RNA, 19 nt, Artificial Sequence
  Synthetic
ucuuuugucgucucaucaa

SEQ ID NO: 182854 - RNA, 20 nt, Artificial Sequence
  Synthetic
uucuuuugucgucucaucaa

SEQ ID NO: 182855 - RNA, 21 nt, Artificial Sequence
  Synthetic
auucuuuugucgucucaucaa

SEQ ID NO: 182856 - RNA, 22 nt, Artificial Sequence
  Synthetic
aauucuuuugucgucucaucaa

SEQ ID NO: 182857 - RNA, 23 nt, Artificial Sequence
  Synthetic
caauucuuuugucgucucaucaa

SEQ ID NO: 182858 - RNA, 24 nt, Artificial Sequence
  Synthetic
acaauucuuuugucgucucaucaa

SEQ ID NO: 182859 - RNA, 18 nt, Artificial Sequence
  Synthetic
ggauacugcugucaucaa

SEQ ID NO: 182860 - RNA, 19 nt, Artificial Sequence
  Synthetic
gggauacugcugucaucaa

SEQ ID NO: 182861 - RNA, 20 nt, Artificial Sequence
  Synthetic
ggggauacugcugucaucaa

SEQ ID NO: 182862 - RNA, 21 nt, Artificial Sequence
  Synthetic
cggggauacugcugucaucaa

SEQ ID NO: 182863 - RNA, 22 nt, Artificial Sequence
  Synthetic
gcggggauacugcugucaucaa

SEQ ID NO: 182864 - RNA, 23 nt, Artificial Sequence
  Synthetic
ggcggggauacugcugucaucaa

SEQ ID NO: 182865 - RNA, 24 nt, Artificial Sequence
  Synthetic
gggcggggauacugcugucaucaa

SEQ ID NO: 182866 - RNA, 18 nt, Artificial Sequence
  Synthetic
ugaaaacaaaaagaucaa

SEQ ID NO: 182867 - RNA, 19 nt, Artificial Sequence
  Synthetic
gugaaaacaaaaagaucaa

SEQ ID NO: 182868 - RNA, 20 nt, Artificial Sequence
  Synthetic
agugaaaacaaaaagaucaa

SEQ ID NO: 182869 - RNA, 21 nt, Artificial Sequence
  Synthetic
aagugaaaacaaaaagaucaa

SEQ ID NO: 182870 - RNA, 22 nt, Artificial Sequence
  Synthetic
aaagugaaaacaaaaagaucaa

SEQ ID NO: 182871 - RNA, 23 nt, Artificial Sequence
  Synthetic
uaaagugaaaacaaaaagaucaa

SEQ ID NO: 182872 - RNA, 24 nt, Artificial Sequence
  Synthetic
guaaagugaaaacaaaaagaucaa

SEQ ID NO: 182873 - RNA, 18 nt, Artificial Sequence
  Synthetic
gagggcaagaaagaucaa

SEQ ID NO: 182874 - RNA, 19 nt, Artificial Sequence
  Synthetic
agagggcaagaaagaucaa

SEQ ID NO: 182875 - RNA, 20 nt, Artificial Sequence
  Synthetic
uagagggcaagaaagaucaa

SEQ ID NO: 182876 - RNA, 21 nt, Artificial Sequence
  Synthetic
uuagagggcaagaaagaucaa

SEQ ID NO: 182877 - RNA, 22 nt, Artificial Sequence
  Synthetic
auuagagggcaagaaagaucaa

SEQ ID NO: 182878 - RNA, 23 nt, Artificial Sequence
  Synthetic
gauuagagggcaagaaagaucaa

SEQ ID NO: 182879 - RNA, 24 nt, Artificial Sequence
  Synthetic
cgauuagagggcaagaaagaucaa

SEQ ID NO: 182880 - RNA, 18 nt, Artificial Sequence
  Synthetic
auauauuuagaagaucaa

SEQ ID NO: 182881 - RNA, 19 nt, Artificial Sequence
  Synthetic
uauauauuuagaagaucaa

SEQ ID NO: 182882 - RNA, 20 nt, Artificial Sequence
  Synthetic
auauauauuuagaagaucaa

SEQ ID NO: 182883 - RNA, 21 nt, Artificial Sequence
  Synthetic
cauauauauuuagaagaucaa

SEQ ID NO: 182884 - RNA, 22 nt, Artificial Sequence
  Synthetic
ucauauauauuuagaagaucaa

SEQ ID NO: 182885 - RNA, 23 nt, Artificial Sequence
  Synthetic
uucauauauauuuagaagaucaa

SEQ ID NO: 182886 - RNA, 24 nt, Artificial Sequence
  Synthetic
auucauauauauuuagaagaucaa

SEQ ID NO: 182887 - RNA, 18 nt, Artificial Sequence
  Synthetic
uugucuaaaucagaucaa

SEQ ID NO: 182888 - RNA, 19 nt, Artificial Sequence
  Synthetic
uuugucuaaaucagaucaa

SEQ ID NO: 182889 - RNA, 20 nt, Artificial Sequence
  Synthetic
uuuugucuaaaucagaucaa

SEQ ID NO: 182890 - RNA, 21 nt, Artificial Sequence
  Synthetic
auuuugucuaaaucagaucaa

SEQ ID NO: 182891 - RNA, 22 nt, Artificial Sequence
  Synthetic
aauuuugucuaaaucagaucaa

SEQ ID NO: 182892 - RNA, 23 nt, Artificial Sequence
  Synthetic
aaauuuugucuaaaucagaucaa

SEQ ID NO: 182893 - RNA, 24 nt, Artificial Sequence
  Synthetic
uaaauuuugucuaaaucagaucaa

SEQ ID NO: 182894 - RNA, 18 nt, Artificial Sequence
  Synthetic
uugcaaugaagagaucaa

SEQ ID NO: 182895 - RNA, 19 nt, Artificial Sequence
  Synthetic
auugcaaugaagagaucaa

SEQ ID NO: 182896 - RNA, 20 nt, Artificial Sequence
  Synthetic
gauugcaaugaagagaucaa

SEQ ID NO: 182897 - RNA, 21 nt, Artificial Sequence
  Synthetic
agauugcaaugaagagaucaa

SEQ ID NO: 182898 - RNA, 22 nt, Artificial Sequence
  Synthetic
aagauugcaaugaagagaucaa

SEQ ID NO: 182899 - RNA, 23 nt, Artificial Sequence
  Synthetic
caagauugcaaugaagagaucaa

SEQ ID NO: 182900 - RNA, 24 nt, Artificial Sequence
  Synthetic
acaagauugcaaugaagagaucaa

SEQ ID NO: 182901 - RNA, 18 nt, Artificial Sequence
  Synthetic
aacuaggagugagaucaa

SEQ ID NO: 182902 - RNA, 19 nt, Artificial Sequence
  Synthetic
caacuaggagugagaucaa

SEQ ID NO: 182903 - RNA, 20 nt, Artificial Sequence
  Synthetic
ccaacuaggagugagaucaa

SEQ ID NO: 182904 - RNA, 21 nt, Artificial Sequence
  Synthetic
cccaacuaggagugagaucaa

SEQ ID NO: 182905 - RNA, 22 nt, Artificial Sequence
  Synthetic
ucccaacuaggagugagaucaa

SEQ ID NO: 182906 - RNA, 23 nt, Artificial Sequence
  Synthetic
cucccaacuaggagugagaucaa

SEQ ID NO: 182907 - RNA, 24 nt, Artificial Sequence
  Synthetic
acucccaacuaggagugagaucaa

SEQ ID NO: 182908 - RNA, 18 nt, Artificial Sequence
  Synthetic
aacagacauauagaucaa

SEQ ID NO: 182909 - RNA, 19 nt, Artificial Sequence
  Synthetic
aaacagacauauagaucaa

SEQ ID NO: 182910 - RNA, 20 nt, Artificial Sequence
  Synthetic
aaaacagacauauagaucaa

SEQ ID NO: 182911 - RNA, 21 nt, Artificial Sequence
  Synthetic
caaaacagacauauagaucaa

SEQ ID NO: 182912 - RNA, 22 nt, Artificial Sequence
  Synthetic
ccaaaacagacauauagaucaa

SEQ ID NO: 182913 - RNA, 23 nt, Artificial Sequence
  Synthetic
accaaaacagacauauagaucaa

SEQ ID NO: 182914 - RNA, 24 nt, Artificial Sequence
  Synthetic
uaccaaaacagacauauagaucaa

SEQ ID NO: 182915 - RNA, 18 nt, Artificial Sequence
  Synthetic
aacagagauauagaucaa

SEQ ID NO: 182916 - RNA, 19 nt, Artificial Sequence
  Synthetic
aaacagagauauagaucaa

SEQ ID NO: 182917 - RNA, 20 nt, Artificial Sequence
  Synthetic
aaaacagagauauagaucaa

SEQ ID NO: 182918 - RNA, 21 nt, Artificial Sequence
  Synthetic
caaaacagagauauagaucaa

SEQ ID NO: 182919 - RNA, 22 nt, Artificial Sequence
  Synthetic
ccaaaacagagauauagaucaa

SEQ ID NO: 182920 - RNA, 23 nt, Artificial Sequence
  Synthetic
accaaaacagagauauagaucaa

SEQ ID NO: 182921 - RNA, 24 nt, Artificial Sequence
  Synthetic
uaccaaaacagagauauagaucaa

SEQ ID NO: 182922 - RNA, 18 nt, Artificial Sequence
  Synthetic
gaaaugaaauuagaucaa

SEQ ID NO: 182923 - RNA, 19 nt, Artificial Sequence
  Synthetic
agaaaugaaauuagaucaa

SEQ ID NO: 182924 - RNA, 20 nt, Artificial Sequence
  Synthetic
aagaaaugaaauuagaucaa

SEQ ID NO: 182925 - RNA, 21 nt, Artificial Sequence
  Synthetic
caagaaaugaaauuagaucaa

SEQ ID NO: 182926 - RNA, 22 nt, Artificial Sequence
  Synthetic
acaagaaaugaaauuagaucaa

SEQ ID NO: 182927 - RNA, 23 nt, Artificial Sequence
  Synthetic
uacaagaaaugaaauuagaucaa

SEQ ID NO: 182928 - RNA, 24 nt, Artificial Sequence
  Synthetic
cuacaagaaaugaaauuagaucaa

SEQ ID NO: 182929 - RNA, 18 nt, Artificial Sequence
  Synthetic
uaggcagaaaaggaucaa

SEQ ID NO: 182930 - RNA, 19 nt, Artificial Sequence
  Synthetic
uuaggcagaaaaggaucaa

SEQ ID NO: 182931 - RNA, 20 nt, Artificial Sequence
  Synthetic
guuaggcagaaaaggaucaa

SEQ ID NO: 182932 - RNA, 21 nt, Artificial Sequence
  Synthetic
aguuaggcagaaaaggaucaa

SEQ ID NO: 182933 - RNA, 22 nt, Artificial Sequence
  Synthetic
caguuaggcagaaaaggaucaa

SEQ ID NO: 182934 - RNA, 23 nt, Artificial Sequence
  Synthetic
ucaguuaggcagaaaaggaucaa

SEQ ID NO: 182935 - RNA, 24 nt, Artificial Sequence
  Synthetic
aucaguuaggcagaaaaggaucaa

SEQ ID NO: 182936 - RNA, 18 nt, Artificial Sequence
  Synthetic
gagaugaugugggaucaa

SEQ ID NO: 182937 - RNA, 19 nt, Artificial Sequence
  Synthetic
agagaugaugugggaucaa

SEQ ID NO: 182938 - RNA, 20 nt, Artificial Sequence
  Synthetic
uagagaugaugugggaucaa

SEQ ID NO: 182939 - RNA, 21 nt, Artificial Sequence
  Synthetic
auagagaugaugugggaucaa

SEQ ID NO: 182940 - RNA, 22 nt, Artificial Sequence
  Synthetic
aauagagaugaugugggaucaa

SEQ ID NO: 182941 - RNA, 23 nt, Artificial Sequence
  Synthetic
aaauagagaugaugugggaucaa

SEQ ID NO: 182942 - RNA, 24 nt, Artificial Sequence
  Synthetic
gaaauagagaugaugugggaucaa

SEQ ID NO: 182943 - RNA, 18 nt, Artificial Sequence
  Synthetic
cuuauccaccaugaucaa

SEQ ID NO: 182944 - RNA, 19 nt, Artificial Sequence
  Synthetic
gcuuauccaccaugaucaa

SEQ ID NO: 182945 - RNA, 20 nt, Artificial Sequence
  Synthetic
agcuuauccaccaugaucaa

SEQ ID NO: 182946 - RNA, 18 nt, Artificial Sequence
  Synthetic
aauugugggugugaucaa

SEQ ID NO: 182947 - RNA, 19 nt, Artificial Sequence
  Synthetic
uaauugugggugugaucaa

SEQ ID NO: 182948 - RNA, 20 nt, Artificial Sequence
  Synthetic
guaauugugggugugaucaa

SEQ ID NO: 182949 - RNA, 21 nt, Artificial Sequence
  Synthetic
aguaauugugggugugaucaa

SEQ ID NO: 182950 - RNA, 22 nt, Artificial Sequence
  Synthetic
caguaauugugggugugaucaa

SEQ ID NO: 182951 - RNA, 23 nt, Artificial Sequence
  Synthetic
ucaguaauugugggugugaucaa

SEQ ID NO: 182952 - RNA, 24 nt, Artificial Sequence
  Synthetic
aucaguaauugugggugugaucaa

SEQ ID NO: 182953 - RNA, 18 nt, Artificial Sequence
  Synthetic
uggggagauguugaucaa

SEQ ID NO: 182954 - RNA, 19 nt, Artificial Sequence
  Synthetic
auggggagauguugaucaa

SEQ ID NO: 182955 - RNA, 20 nt, Artificial Sequence
  Synthetic
aauggggagauguugaucaa

SEQ ID NO: 182956 - RNA, 21 nt, Artificial Sequence
  Synthetic
aaauggggagauguugaucaa

SEQ ID NO: 182957 - RNA, 22 nt, Artificial Sequence
  Synthetic
aaaauggggagauguugaucaa

SEQ ID NO: 182958 - RNA, 23 nt, Artificial Sequence
  Synthetic
gaaaauggggagauguugaucaa

SEQ ID NO: 182959 - RNA, 24 nt, Artificial Sequence
  Synthetic
ggaaaauggggagauguugaucaa

SEQ ID NO: 182960 - RNA, 18 nt, Artificial Sequence
  Synthetic
cugucacaugaauaucaa

SEQ ID NO: 182961 - RNA, 19 nt, Artificial Sequence
  Synthetic
acugucacaugaauaucaa

SEQ ID NO: 182962 - RNA, 20 nt, Artificial Sequence
  Synthetic
gacugucacaugaauaucaa

SEQ ID NO: 182963 - RNA, 21 nt, Artificial Sequence
  Synthetic
agacugucacaugaauaucaa

SEQ ID NO: 182964 - RNA, 22 nt, Artificial Sequence
  Synthetic
cagacugucacaugaauaucaa

SEQ ID NO: 182965 - RNA, 23 nt, Artificial Sequence
  Synthetic
ucagacugucacaugaauaucaa

SEQ ID NO: 182966 - RNA, 24 nt, Artificial Sequence
  Synthetic
aucagacugucacaugaauaucaa

SEQ ID NO: 182967 - RNA, 18 nt, Artificial Sequence
  Synthetic
cugaacuuugcauaucaa

SEQ ID NO: 182968 - RNA, 19 nt, Artificial Sequence
  Synthetic
acugaacuuugcauaucaa

SEQ ID NO: 182969 - RNA, 20 nt, Artificial Sequence
  Synthetic
cacugaacuuugcauaucaa

SEQ ID NO: 182970 - RNA, 21 nt, Artificial Sequence
  Synthetic
ucacugaacuuugcauaucaa

SEQ ID NO: 182971 - RNA, 22 nt, Artificial Sequence
  Synthetic
cucacugaacuuugcauaucaa

SEQ ID NO: 182972 - RNA, 23 nt, Artificial Sequence
  Synthetic
ucucacugaacuuugcauaucaa

SEQ ID NO: 182973 - RNA, 24 nt, Artificial Sequence
  Synthetic
uucucacugaacuuugcauaucaa

SEQ ID NO: 182974 - RNA, 18 nt, Artificial Sequence
  Synthetic
auuugaaccugauaucaa

SEQ ID NO: 182975 - RNA, 19 nt, Artificial Sequence
  Synthetic
aauuugaaccugauaucaa

SEQ ID NO: 182976 - RNA, 20 nt, Artificial Sequence
  Synthetic
uaauuugaaccugauaucaa

SEQ ID NO: 182977 - RNA, 21 nt, Artificial Sequence
  Synthetic
cuaauuugaaccugauaucaa

SEQ ID NO: 182978 - RNA, 22 nt, Artificial Sequence
  Synthetic
ucuaauuugaaccugauaucaa

SEQ ID NO: 182979 - RNA, 23 nt, Artificial Sequence
  Synthetic
uucuaauuugaaccugauaucaa

SEQ ID NO: 182980 - RNA, 24 nt, Artificial Sequence
  Synthetic
auucuaauuugaaccugauaucaa

SEQ ID NO: 182981 - RNA, 18 nt, Artificial Sequence
  Synthetic
aaaauauuuaccuaucaa

SEQ ID NO: 182982 - RNA, 19 nt, Artificial Sequence
  Synthetic
aaaaauauuuaccuaucaa

SEQ ID NO: 182983 - RNA, 20 nt, Artificial Sequence
  Synthetic
gaaaaauauuuaccuaucaa

SEQ ID NO: 182984 - RNA, 21 nt, Artificial Sequence
  Synthetic
agaaaaauauuuaccuaucaa

SEQ ID NO: 182985 - RNA, 22 nt, Artificial Sequence
  Synthetic
aagaaaaauauuuaccuaucaa

SEQ ID NO: 182986 - RNA, 23 nt, Artificial Sequence
  Synthetic
uaagaaaaauauuuaccuaucaa

SEQ ID NO: 182987 - RNA, 24 nt, Artificial Sequence
  Synthetic
uuaagaaaaauauuuaccuaucaa

SEQ ID NO: 182988 - RNA, 18 nt, Artificial Sequence
  Synthetic
aaacugggcugcuaucaa

SEQ ID NO: 182989 - RNA, 19 nt, Artificial Sequence
  Synthetic
uaaacugggcugcuaucaa

SEQ ID NO: 182990 - RNA, 20 nt, Artificial Sequence
  Synthetic
guaaacugggcugcuaucaa

SEQ ID NO: 182991 - RNA, 21 nt, Artificial Sequence
  Synthetic
aguaaacugggcugcuaucaa

SEQ ID NO: 182992 - RNA, 22 nt, Artificial Sequence
  Synthetic
caguaaacugggcugcuaucaa

SEQ ID NO: 182993 - RNA, 23 nt, Artificial Sequence
  Synthetic
acaguaaacugggcugcuaucaa

SEQ ID NO: 182994 - RNA, 24 nt, Artificial Sequence
  Synthetic
uacaguaaacugggcugcuaucaa

SEQ ID NO: 182995 - RNA, 18 nt, Artificial Sequence
  Synthetic
uuugacauaaucuaucaa

SEQ ID NO: 182996 - RNA, 19 nt, Artificial Sequence
  Synthetic
uuuugacauaaucuaucaa

SEQ ID NO: 182997 - RNA, 20 nt, Artificial Sequence
  Synthetic
uuuuugacauaaucuaucaa

SEQ ID NO: 182998 - RNA, 21 nt, Artificial Sequence
  Synthetic
uuuuuugacauaaucuaucaa

SEQ ID NO: 182999 - RNA, 22 nt, Artificial Sequence
  Synthetic
cuuuuuugacauaaucuaucaa

SEQ ID NO: 183000 - RNA, 23 nt, Artificial Sequence
  Synthetic
ucuuuuuugacauaaucuaucaa

SEQ ID NO: 183001 - RNA, 24 nt, Artificial Sequence
  Synthetic
uucuuuuuugacauaaucuaucaa

SEQ ID NO: 183002 - RNA, 18 nt, Artificial Sequence
  Synthetic
guuauugcagucuaucaa

SEQ ID NO: 183003 - RNA, 19 nt, Artificial Sequence
  Synthetic
aguuauugcagucuaucaa

SEQ ID NO: 183004 - RNA, 20 nt, Artificial Sequence
  Synthetic
uaguuauugcagucuaucaa

SEQ ID NO: 183005 - RNA, 21 nt, Artificial Sequence
  Synthetic
auaguuauugcagucuaucaa

SEQ ID NO: 183006 - RNA, 22 nt, Artificial Sequence
  Synthetic
cauaguuauugcagucuaucaa

SEQ ID NO: 183007 - RNA, 23 nt, Artificial Sequence
  Synthetic
acauaguuauugcagucuaucaa

SEQ ID NO: 183008 - RNA, 24 nt, Artificial Sequence
  Synthetic
uacauaguuauugcagucuaucaa

SEQ ID NO: 183009 - RNA, 18 nt, Artificial Sequence
  Synthetic
gucaaauuuuucuaucaa

SEQ ID NO: 183010 - RNA, 19 nt, Artificial Sequence
  Synthetic
ugucaaauuuuucuaucaa

SEQ ID NO: 183011 - RNA, 20 nt, Artificial Sequence
  Synthetic
gugucaaauuuuucuaucaa

SEQ ID NO: 183012 - RNA, 21 nt, Artificial Sequence
  Synthetic
ugugucaaauuuuucuaucaa

SEQ ID NO: 183013 - RNA, 22 nt, Artificial Sequence
  Synthetic
cugugucaaauuuuucuaucaa

SEQ ID NO: 183014 - RNA, 23 nt, Artificial Sequence
  Synthetic
acugugucaaauuuuucuaucaa

SEQ ID NO: 183015 - RNA, 24 nt, Artificial Sequence
  Synthetic
uacugugucaaauuuuucuaucaa

SEQ ID NO: 183016 - RNA, 18 nt, Artificial Sequence
  Synthetic
uucaccuucguguaucaa

SEQ ID NO: 183017 - RNA, 19 nt, Artificial Sequence
  Synthetic
auucaccuucguguaucaa

SEQ ID NO: 183018 - RNA, 20 nt, Artificial Sequence
  Synthetic
cauucaccuucguguaucaa

SEQ ID NO: 183019 - RNA, 21 nt, Artificial Sequence
  Synthetic
ucauucaccuucguguaucaa

SEQ ID NO: 183020 - RNA, 22 nt, Artificial Sequence
  Synthetic
aucauucaccuucguguaucaa

SEQ ID NO: 183021 - RNA, 23 nt, Artificial Sequence
  Synthetic
caucauucaccuucguguaucaa

SEQ ID NO: 183022 - RNA, 24 nt, Artificial Sequence
  Synthetic
gcaucauucaccuucguguaucaa

SEQ ID NO: 183023 - RNA, 18 nt, Artificial Sequence
  Synthetic
aaccuuugcuuguaucaa

SEQ ID NO: 183024 - RNA, 19 nt, Artificial Sequence
  Synthetic
uaaccuuugcuuguaucaa

SEQ ID NO: 183025 - RNA, 20 nt, Artificial Sequence
  Synthetic
auaaccuuugcuuguaucaa

SEQ ID NO: 183026 - RNA, 21 nt, Artificial Sequence
  Synthetic
aauaaccuuugcuuguaucaa

SEQ ID NO: 183027 - RNA, 22 nt, Artificial Sequence
  Synthetic
caauaaccuuugcuuguaucaa

SEQ ID NO: 183028 - RNA, 23 nt, Artificial Sequence
  Synthetic
acaauaaccuuugcuuguaucaa

SEQ ID NO: 183029 - RNA, 24 nt, Artificial Sequence
  Synthetic
aacaauaaccuuugcuuguaucaa

SEQ ID NO: 183030 - RNA, 18 nt, Artificial Sequence
  Synthetic
aaagacaaagaaacucaa

SEQ ID NO: 183031 - RNA, 19 nt, Artificial Sequence
  Synthetic
gaaagacaaagaaacucaa

SEQ ID NO: 183032 - RNA, 20 nt, Artificial Sequence
  Synthetic
ggaaagacaaagaaacucaa

SEQ ID NO: 183033 - RNA, 21 nt, Artificial Sequence
  Synthetic
aggaaagacaaagaaacucaa

SEQ ID NO: 183034 - RNA, 22 nt, Artificial Sequence
  Synthetic
gaggaaagacaaagaaacucaa

SEQ ID NO: 183035 - RNA, 23 nt, Artificial Sequence
  Synthetic
agaggaaagacaaagaaacucaa

SEQ ID NO: 183036 - RNA, 24 nt, Artificial Sequence
  Synthetic
gagaggaaagacaaagaaacucaa

SEQ ID NO: 183037 - RNA, 18 nt, Artificial Sequence
  Synthetic
auuguuaauacaacucaa

SEQ ID NO: 183038 - RNA, 19 nt, Artificial Sequence
  Synthetic
gauuguuaauacaacucaa

SEQ ID NO: 183039 - RNA, 20 nt, Artificial Sequence
  Synthetic
ugauuguuaauacaacucaa

SEQ ID NO: 183040 - RNA, 21 nt, Artificial Sequence
  Synthetic
cugauuguuaauacaacucaa

SEQ ID NO: 183041 - RNA, 22 nt, Artificial Sequence
  Synthetic
gcugauuguuaauacaacucaa

SEQ ID NO: 183042 - RNA, 23 nt, Artificial Sequence
  Synthetic
agcugauuguuaauacaacucaa

SEQ ID NO: 183043 - RNA, 24 nt, Artificial Sequence
  Synthetic
gagcugauuguuaauacaacucaa

SEQ ID NO: 183044 - RNA, 18 nt, Artificial Sequence
  Synthetic
ccagauggaagaacucaa

SEQ ID NO: 183045 - RNA, 19 nt, Artificial Sequence
  Synthetic
gccagauggaagaacucaa

SEQ ID NO: 183046 - RNA, 20 nt, Artificial Sequence
  Synthetic
cgccagauggaagaacucaa

SEQ ID NO: 183047 - RNA, 21 nt, Artificial Sequence
  Synthetic
acgccagauggaagaacucaa

SEQ ID NO: 183048 - RNA, 22 nt, Artificial Sequence
  Synthetic
gacgccagauggaagaacucaa

SEQ ID NO: 183049 - RNA, 23 nt, Artificial Sequence
  Synthetic
agacgccagauggaagaacucaa

SEQ ID NO: 183050 - RNA, 24 nt, Artificial Sequence
  Synthetic
cagacgccagauggaagaacucaa

SEQ ID NO: 183051 - RNA, 18 nt, Artificial Sequence
  Synthetic
accaaauaagucacucaa

SEQ ID NO: 183052 - RNA, 19 nt, Artificial Sequence
  Synthetic
uaccaaauaagucacucaa

SEQ ID NO: 183053 - RNA, 20 nt, Artificial Sequence
  Synthetic
auaccaaauaagucacucaa

SEQ ID NO: 183054 - RNA, 21 nt, Artificial Sequence
  Synthetic
uauaccaaauaagucacucaa

SEQ ID NO: 183055 - RNA, 22 nt, Artificial Sequence
  Synthetic
uuauaccaaauaagucacucaa

SEQ ID NO: 183056 - RNA, 23 nt, Artificial Sequence
  Synthetic
uuuauaccaaauaagucacucaa

SEQ ID NO: 183057 - RNA, 24 nt, Artificial Sequence
  Synthetic
uuuuauaccaaauaagucacucaa

SEQ ID NO: 183058 - RNA, 18 nt, Artificial Sequence
  Synthetic
gcccuuugagagacucaa

SEQ ID NO: 183059 - RNA, 19 nt, Artificial Sequence
  Synthetic
ggcccuuugagagacucaa

SEQ ID NO: 183060 - RNA, 20 nt, Artificial Sequence
  Synthetic
gggcccuuugagagacucaa

SEQ ID NO: 183061 - RNA, 21 nt, Artificial Sequence
  Synthetic
agggcccuuugagagacucaa

SEQ ID NO: 183062 - RNA, 22 nt, Artificial Sequence
  Synthetic
cagggcccuuugagagacucaa

SEQ ID NO: 183063 - RNA, 23 nt, Artificial Sequence
  Synthetic
ucagggcccuuugagagacucaa

SEQ ID NO: 183064 - RNA, 24 nt, Artificial Sequence
  Synthetic
uucagggcccuuugagagacucaa

SEQ ID NO: 183065 - RNA, 18 nt, Artificial Sequence
  Synthetic
aagaaaaaaaauacucaa

SEQ ID NO: 183066 - RNA, 19 nt, Artificial Sequence
  Synthetic
gaagaaaaaaaauacucaa

SEQ ID NO: 183067 - RNA, 20 nt, Artificial Sequence
  Synthetic
ggaagaaaaaaaauacucaa

SEQ ID NO: 183068 - RNA, 21 nt, Artificial Sequence
  Synthetic
aggaagaaaaaaaauacucaa

SEQ ID NO: 183069 - RNA, 22 nt, Artificial Sequence
  Synthetic
gaggaagaaaaaaaauacucaa

SEQ ID NO: 183070 - RNA, 23 nt, Artificial Sequence
  Synthetic
ggaggaagaaaaaaaauacucaa

SEQ ID NO: 183071 - RNA, 24 nt, Artificial Sequence
  Synthetic
aggaggaagaaaaaaaauacucaa

SEQ ID NO: 183072 - RNA, 18 nt, Artificial Sequence
  Synthetic
agaauuugcaguacucaa

SEQ ID NO: 183073 - RNA, 19 nt, Artificial Sequence
  Synthetic
uagaauuugcaguacucaa

SEQ ID NO: 183074 - RNA, 20 nt, Artificial Sequence
  Synthetic
guagaauuugcaguacucaa

SEQ ID NO: 183075 - RNA, 21 nt, Artificial Sequence
  Synthetic
aguagaauuugcaguacucaa

SEQ ID NO: 183076 - RNA, 22 nt, Artificial Sequence
  Synthetic
aaguagaauuugcaguacucaa

SEQ ID NO: 183077 - RNA, 23 nt, Artificial Sequence
  Synthetic
gaaguagaauuugcaguacucaa

SEQ ID NO: 183078 - RNA, 24 nt, Artificial Sequence
  Synthetic
ugaaguagaauuugcaguacucaa

SEQ ID NO: 183079 - RNA, 18 nt, Artificial Sequence
  Synthetic
guugauugcauuacucaa

SEQ ID NO: 183080 - RNA, 19 nt, Artificial Sequence
  Synthetic
aguugauugcauuacucaa

SEQ ID NO: 183081 - RNA, 20 nt, Artificial Sequence
  Synthetic
caguugauugcauuacucaa

SEQ ID NO: 183082 - RNA, 21 nt, Artificial Sequence
  Synthetic
ccaguugauugcauuacucaa

SEQ ID NO: 183083 - RNA, 22 nt, Artificial Sequence
  Synthetic
gccaguugauugcauuacucaa

SEQ ID NO: 183084 - RNA, 23 nt, Artificial Sequence
  Synthetic
ugccaguugauugcauuacucaa

SEQ ID NO: 183085 - RNA, 24 nt, Artificial Sequence
  Synthetic
cugccaguugauugcauuacucaa

SEQ ID NO: 183086 - RNA, 18 nt, Artificial Sequence
  Synthetic
gcacucacgaaaccucaa

SEQ ID NO: 183087 - RNA, 19 nt, Artificial Sequence
  Synthetic
ugcacucacgaaaccucaa

SEQ ID NO: 183088 - RNA, 20 nt, Artificial Sequence
  Synthetic
uugcacucacgaaaccucaa

SEQ ID NO: 183089 - RNA, 21 nt, Artificial Sequence
  Synthetic
auugcacucacgaaaccucaa

SEQ ID NO: 183090 - RNA, 22 nt, Artificial Sequence
  Synthetic
aauugcacucacgaaaccucaa

SEQ ID NO: 183091 - RNA, 23 nt, Artificial Sequence
  Synthetic
caauugcacucacgaaaccucaa

SEQ ID NO: 183092 - RNA, 24 nt, Artificial Sequence
  Synthetic
acaauugcacucacgaaaccucaa

SEQ ID NO: 183093 - RNA, 18 nt, Artificial Sequence
  Synthetic
uaguaaugauaaccucaa

SEQ ID NO: 183094 - RNA, 19 nt, Artificial Sequence
  Synthetic
auaguaaugauaaccucaa

SEQ ID NO: 183095 - RNA, 20 nt, Artificial Sequence
  Synthetic
aauaguaaugauaaccucaa

SEQ ID NO: 183096 - RNA, 21 nt, Artificial Sequence
  Synthetic
uaauaguaaugauaaccucaa

SEQ ID NO: 183097 - RNA, 22 nt, Artificial Sequence
  Synthetic
auaauaguaaugauaaccucaa

SEQ ID NO: 183098 - RNA, 23 nt, Artificial Sequence
  Synthetic
aauaauaguaaugauaaccucaa

SEQ ID NO: 183099 - RNA, 24 nt, Artificial Sequence
  Synthetic
uaauaauaguaaugauaaccucaa

SEQ ID NO: 183100 - RNA, 18 nt, Artificial Sequence
  Synthetic
uuuaguaccagaccucaa

SEQ ID NO: 183101 - RNA, 19 nt, Artificial Sequence
  Synthetic
auuuaguaccagaccucaa

SEQ ID NO: 183102 - RNA, 20 nt, Artificial Sequence
  Synthetic
aauuuaguaccagaccucaa

SEQ ID NO: 183103 - RNA, 21 nt, Artificial Sequence
  Synthetic
uaauuuaguaccagaccucaa

SEQ ID NO: 183104 - RNA, 22 nt, Artificial Sequence
  Synthetic
guaauuuaguaccagaccucaa

SEQ ID NO: 183105 - RNA, 23 nt, Artificial Sequence
  Synthetic
aguaauuuaguaccagaccucaa

SEQ ID NO: 183106 - RNA, 24 nt, Artificial Sequence
  Synthetic
gaguaauuuaguaccagaccucaa

SEQ ID NO: 183107 - RNA, 18 nt, Artificial Sequence
  Synthetic
auuguaacaauaccucaa

SEQ ID NO: 183108 - RNA, 19 nt, Artificial Sequence
  Synthetic
aauuguaacaauaccucaa

SEQ ID NO: 183109 - RNA, 20 nt, Artificial Sequence
  Synthetic
uaauuguaacaauaccucaa

SEQ ID NO: 183110 - RNA, 21 nt, Artificial Sequence
  Synthetic
auaauuguaacaauaccucaa

SEQ ID NO: 183111 - RNA, 22 nt, Artificial Sequence
  Synthetic
aauaauuguaacaauaccucaa

SEQ ID NO: 183112 - RNA, 23 nt, Artificial Sequence
  Synthetic
uaauaauuguaacaauaccucaa

SEQ ID NO: 183113 - RNA, 24 nt, Artificial Sequence
  Synthetic
uuaauaauuguaacaauaccucaa

SEQ ID NO: 183114 - RNA, 18 nt, Artificial Sequence
  Synthetic
cuuucagaauacccucaa

SEQ ID NO: 183115 - RNA, 19 nt, Artificial Sequence
  Synthetic
ccuuucagaauacccucaa

SEQ ID NO: 183116 - RNA, 20 nt, Artificial Sequence
  Synthetic
cccuuucagaauacccucaa

SEQ ID NO: 183117 - RNA, 21 nt, Artificial Sequence
  Synthetic
ucccuuucagaauacccucaa

SEQ ID NO: 183118 - RNA, 22 nt, Artificial Sequence
  Synthetic
cucccuuucagaauacccucaa

SEQ ID NO: 183119 - RNA, 23 nt, Artificial Sequence
  Synthetic
ccucccuuucagaauacccucaa

SEQ ID NO: 183120 - RNA, 24 nt, Artificial Sequence
  Synthetic
gccucccuuucagaauacccucaa

SEQ ID NO: 183121 - RNA, 18 nt, Artificial Sequence
  Synthetic
auugcauuagccccucaa

SEQ ID NO: 183122 - RNA, 19 nt, Artificial Sequence
  Synthetic
aauugcauuagccccucaa

SEQ ID NO: 183123 - RNA, 20 nt, Artificial Sequence
  Synthetic
caauugcauuagccccucaa

SEQ ID NO: 183124 - RNA, 21 nt, Artificial Sequence
  Synthetic
ucaauugcauuagccccucaa

SEQ ID NO: 183125 - RNA, 22 nt, Artificial Sequence
  Synthetic
aucaauugcauuagccccucaa

SEQ ID NO: 183126 - RNA, 23 nt, Artificial Sequence
  Synthetic
caucaauugcauuagccccucaa

SEQ ID NO: 183127 - RNA, 24 nt, Artificial Sequence
  Synthetic
ucaucaauugcauuagccccucaa

SEQ ID NO: 183128 - RNA, 18 nt, Artificial Sequence
  Synthetic
uuauuucaaagcccucaa

SEQ ID NO: 183129 - RNA, 19 nt, Artificial Sequence
  Synthetic
guuauuucaaagcccucaa

SEQ ID NO: 183130 - RNA, 20 nt, Artificial Sequence
  Synthetic
uguuauuucaaagcccucaa

SEQ ID NO: 183131 - RNA, 21 nt, Artificial Sequence
  Synthetic
guguuauuucaaagcccucaa

SEQ ID NO: 183132 - RNA, 22 nt, Artificial Sequence
  Synthetic
gguguuauuucaaagcccucaa

SEQ ID NO: 183133 - RNA, 23 nt, Artificial Sequence
  Synthetic
ugguguuauuucaaagcccucaa

SEQ ID NO: 183134 - RNA, 24 nt, Artificial Sequence
  Synthetic
augguguuauuucaaagcccucaa

SEQ ID NO: 183135 - RNA, 18 nt, Artificial Sequence
  Synthetic
augcaaauuaugccucaa

SEQ ID NO: 183136 - RNA, 19 nt, Artificial Sequence
  Synthetic
uaugcaaauuaugccucaa

SEQ ID NO: 183137 - RNA, 20 nt, Artificial Sequence
  Synthetic
auaugcaaauuaugccucaa

SEQ ID NO: 183138 - RNA, 21 nt, Artificial Sequence
  Synthetic
uauaugcaaauuaugccucaa

SEQ ID NO: 183139 - RNA, 22 nt, Artificial Sequence
  Synthetic
uuauaugcaaauuaugccucaa

SEQ ID NO: 183140 - RNA, 23 nt, Artificial Sequence
  Synthetic
auuauaugcaaauuaugccucaa

SEQ ID NO: 183141 - RNA, 24 nt, Artificial Sequence
  Synthetic
uauuauaugcaaauuaugccucaa

SEQ ID NO: 183142 - RNA, 18 nt, Artificial Sequence
  Synthetic
guugaaccucauccucaa

SEQ ID NO: 183143 - RNA, 19 nt, Artificial Sequence
  Synthetic
uguugaaccucauccucaa

SEQ ID NO: 183144 - RNA, 20 nt, Artificial Sequence
  Synthetic
auguugaaccucauccucaa

SEQ ID NO: 183145 - RNA, 21 nt, Artificial Sequence
  Synthetic
aauguugaaccucauccucaa

SEQ ID NO: 183146 - RNA, 22 nt, Artificial Sequence
  Synthetic
aaauguugaaccucauccucaa

SEQ ID NO: 183147 - RNA, 23 nt, Artificial Sequence
  Synthetic
aaaauguugaaccucauccucaa

SEQ ID NO: 183148 - RNA, 24 nt, Artificial Sequence
  Synthetic
aaaaauguugaaccucauccucaa

SEQ ID NO: 183149 - RNA, 18 nt, Artificial Sequence
  Synthetic
acucgcauuauuccucaa

SEQ ID NO: 183150 - RNA, 19 nt, Artificial Sequence
  Synthetic
cacucgcauuauuccucaa

SEQ ID NO: 183151 - RNA, 20 nt, Artificial Sequence
  Synthetic
gcacucgcauuauuccucaa

SEQ ID NO: 183152 - RNA, 21 nt, Artificial Sequence
  Synthetic
agcacucgcauuauuccucaa

SEQ ID NO: 183153 - RNA, 22 nt, Artificial Sequence
  Synthetic
cagcacucgcauuauuccucaa

SEQ ID NO: 183154 - RNA, 23 nt, Artificial Sequence
  Synthetic
acagcacucgcauuauuccucaa

SEQ ID NO: 183155 - RNA, 24 nt, Artificial Sequence
  Synthetic
gacagcacucgcauuauuccucaa

SEQ ID NO: 183156 - RNA, 18 nt, Artificial Sequence
  Synthetic
aggugcaaaguuccucaa

SEQ ID NO: 183157 - RNA, 19 nt, Artificial Sequence
  Synthetic
uaggugcaaaguuccucaa

SEQ ID NO: 183158 - RNA, 20 nt, Artificial Sequence
  Synthetic
guaggugcaaaguuccucaa

SEQ ID NO: 183159 - RNA, 21 nt, Artificial Sequence
  Synthetic
aguaggugcaaaguuccucaa

SEQ ID NO: 183160 - RNA, 22 nt, Artificial Sequence
  Synthetic
aaguaggugcaaaguuccucaa

SEQ ID NO: 183161 - RNA, 23 nt, Artificial Sequence
  Synthetic
gaaguaggugcaaaguuccucaa

SEQ ID NO: 183162 - RNA, 24 nt, Artificial Sequence
  Synthetic
agaaguaggugcaaaguuccucaa

SEQ ID NO: 183163 - RNA, 18 nt, Artificial Sequence
  Synthetic
uggucucagugggcucaa

SEQ ID NO: 183164 - RNA, 19 nt, Artificial Sequence
  Synthetic
guggucucagugggcucaa

SEQ ID NO: 183165 - RNA, 20 nt, Artificial Sequence
  Synthetic
cguggucucagugggcucaa

SEQ ID NO: 183166 - RNA, 21 nt, Artificial Sequence
  Synthetic
gcguggucucagugggcucaa

SEQ ID NO: 183167 - RNA, 22 nt, Artificial Sequence
  Synthetic
cgcguggucucagugggcucaa

SEQ ID NO: 183168 - RNA, 23 nt, Artificial Sequence
  Synthetic
ccgcguggucucagugggcucaa

SEQ ID NO: 183169 - RNA, 24 nt, Artificial Sequence
  Synthetic
cccgcguggucucagugggcucaa

SEQ ID NO: 183170 - RNA, 18 nt, Artificial Sequence
  Synthetic
uuguacuuccuggcucaa

SEQ ID NO: 183171 - RNA, 19 nt, Artificial Sequence
  Synthetic
auuguacuuccuggcucaa

SEQ ID NO: 183172 - RNA, 20 nt, Artificial Sequence
  Synthetic
aauuguacuuccuggcucaa

SEQ ID NO: 183173 - RNA, 21 nt, Artificial Sequence
  Synthetic
aaauuguacuuccuggcucaa

SEQ ID NO: 183174 - RNA, 22 nt, Artificial Sequence
  Synthetic
caaauuguacuuccuggcucaa

SEQ ID NO: 183175 - RNA, 23 nt, Artificial Sequence
  Synthetic
acaaauuguacuuccuggcucaa

SEQ ID NO: 183176 - RNA, 24 nt, Artificial Sequence
  Synthetic
uacaaauuguacuuccuggcucaa

SEQ ID NO: 183177 - RNA, 18 nt, Artificial Sequence
  Synthetic
aagauuuacaaugcucaa

SEQ ID NO: 183178 - RNA, 19 nt, Artificial Sequence
  Synthetic
uaagauuuacaaugcucaa

SEQ ID NO: 183179 - RNA, 20 nt, Artificial Sequence
  Synthetic
cuaagauuuacaaugcucaa

SEQ ID NO: 183180 - RNA, 21 nt, Artificial Sequence
  Synthetic
ucuaagauuuacaaugcucaa

SEQ ID NO: 183181 - RNA, 22 nt, Artificial Sequence
  Synthetic
gucuaagauuuacaaugcucaa

SEQ ID NO: 183182 - RNA, 23 nt, Artificial Sequence
  Synthetic
agucuaagauuuacaaugcucaa

SEQ ID NO: 183183 - RNA, 24 nt, Artificial Sequence
  Synthetic
cagucuaagauuuacaaugcucaa

SEQ ID NO: 183184 - RNA, 18 nt, Artificial Sequence
  Synthetic
uaaagcagaacugcucaa

SEQ ID NO: 183185 - RNA, 19 nt, Artificial Sequence
  Synthetic
auaaagcagaacugcucaa

SEQ ID NO: 183186 - RNA, 20 nt, Artificial Sequence
  Synthetic
cauaaagcagaacugcucaa

SEQ ID NO: 183187 - RNA, 21 nt, Artificial Sequence
  Synthetic
acauaaagcagaacugcucaa

SEQ ID NO: 183188 - RNA, 22 nt, Artificial Sequence
  Synthetic
cacauaaagcagaacugcucaa

SEQ ID NO: 183189 - RNA, 23 nt, Artificial Sequence
  Synthetic
ccacauaaagcagaacugcucaa

SEQ ID NO: 183190 - RNA, 24 nt, Artificial Sequence
  Synthetic
gccacauaaagcagaacugcucaa

SEQ ID NO: 183191 - RNA, 18 nt, Artificial Sequence
  Synthetic
uaaaggaccacugcucaa

SEQ ID NO: 183192 - RNA, 19 nt, Artificial Sequence
  Synthetic
auaaaggaccacugcucaa

SEQ ID NO: 183193 - RNA, 20 nt, Artificial Sequence
  Synthetic
gauaaaggaccacugcucaa

SEQ ID NO: 183194 - RNA, 21 nt, Artificial Sequence
  Synthetic
ugauaaaggaccacugcucaa

SEQ ID NO: 183195 - RNA, 22 nt, Artificial Sequence
  Synthetic
augauaaaggaccacugcucaa

SEQ ID NO: 183196 - RNA, 23 nt, Artificial Sequence
  Synthetic
gaugauaaaggaccacugcucaa

SEQ ID NO: 183197 - RNA, 24 nt, Artificial Sequence
  Synthetic
ugaugauaaaggaccacugcucaa

SEQ ID NO: 183198 - RNA, 18 nt, Artificial Sequence
  Synthetic
uguauugguuuugcucaa

SEQ ID NO: 183199 - RNA, 19 nt, Artificial Sequence
  Synthetic
cuguauugguuuugcucaa

SEQ ID NO: 183200 - RNA, 20 nt, Artificial Sequence
  Synthetic
ccuguauugguuuugcucaa

SEQ ID NO: 183201 - RNA, 21 nt, Artificial Sequence
  Synthetic
cccuguauugguuuugcucaa

SEQ ID NO: 183202 - RNA, 22 nt, Artificial Sequence
  Synthetic
gcccuguauugguuuugcucaa

SEQ ID NO: 183203 - RNA, 23 nt, Artificial Sequence
  Synthetic
ggcccuguauugguuuugcucaa

SEQ ID NO: 183204 - RNA, 24 nt, Artificial Sequence
  Synthetic
gggcccuguauugguuuugcucaa

SEQ ID NO: 183205 - RNA, 18 nt, Artificial Sequence
  Synthetic
acaauuuuaaaaucucaa

SEQ ID NO: 183206 - RNA, 19 nt, Artificial Sequence
  Synthetic
aacaauuuuaaaaucucaa

SEQ ID NO: 183207 - RNA, 20 nt, Artificial Sequence
  Synthetic
uaacaauuuuaaaaucucaa

SEQ ID NO: 183208 - RNA, 21 nt, Artificial Sequence
  Synthetic
auaacaauuuuaaaaucucaa

SEQ ID NO: 183209 - RNA, 22 nt, Artificial Sequence
  Synthetic
aauaacaauuuuaaaaucucaa

SEQ ID NO: 183210 - RNA, 23 nt, Artificial Sequence
  Synthetic
aaauaacaauuuuaaaaucucaa

SEQ ID NO: 183211 - RNA, 24 nt, Artificial Sequence
  Synthetic
uaaauaacaauuuuaaaaucucaa

SEQ ID NO: 183212 - RNA, 18 nt, Artificial Sequence
  Synthetic
uuugaacagaaaucucaa

SEQ ID NO: 183213 - RNA, 19 nt, Artificial Sequence
  Synthetic
auuugaacagaaaucucaa

SEQ ID NO: 183214 - RNA, 20 nt, Artificial Sequence
  Synthetic
uauuugaacagaaaucucaa

SEQ ID NO: 183215 - RNA, 21 nt, Artificial Sequence
  Synthetic
auauuugaacagaaaucucaa

SEQ ID NO: 183216 - RNA, 22 nt, Artificial Sequence
  Synthetic
gauauuugaacagaaaucucaa

SEQ ID NO: 183217 - RNA, 23 nt, Artificial Sequence
  Synthetic
ugauauuugaacagaaaucucaa

SEQ ID NO: 183218 - RNA, 24 nt, Artificial Sequence
  Synthetic
gugauauuugaacagaaaucucaa

SEQ ID NO: 183219 - RNA, 18 nt, Artificial Sequence
  Synthetic
agcgagacuccaucucaa

SEQ ID NO: 183220 - RNA, 19 nt, Artificial Sequence
  Synthetic
gagcgagacuccaucucaa

SEQ ID NO: 183221 - RNA, 20 nt, Artificial Sequence
  Synthetic
agagcgagacuccaucucaa

SEQ ID NO: 183222 - RNA, 21 nt, Artificial Sequence
  Synthetic
cagagcgagacuccaucucaa

SEQ ID NO: 183223 - RNA, 22 nt, Artificial Sequence
  Synthetic
acagagcgagacuccaucucaa

SEQ ID NO: 183224 - RNA, 23 nt, Artificial Sequence
  Synthetic
aacagagcgagacuccaucucaa

SEQ ID NO: 183225 - RNA, 24 nt, Artificial Sequence
  Synthetic
caacagagcgagacuccaucucaa

SEQ ID NO: 183226 - RNA, 18 nt, Artificial Sequence
  Synthetic
uagcugagagcaucucaa

SEQ ID NO: 183227 - RNA, 19 nt, Artificial Sequence
  Synthetic
auagcugagagcaucucaa

SEQ ID NO: 183228 - RNA, 20 nt, Artificial Sequence
  Synthetic
gauagcugagagcaucucaa

SEQ ID NO: 183229 - RNA, 21 nt, Artificial Sequence
  Synthetic
agauagcugagagcaucucaa

SEQ ID NO: 183230 - RNA, 22 nt, Artificial Sequence
  Synthetic
aagauagcugagagcaucucaa

SEQ ID NO: 183231 - RNA, 23 nt, Artificial Sequence
  Synthetic
uaagauagcugagagcaucucaa

SEQ ID NO: 183232 - RNA, 24 nt, Artificial Sequence
  Synthetic
uuaagauagcugagagcaucucaa

SEQ ID NO: 183233 - RNA, 18 nt, Artificial Sequence
  Synthetic
acuucacguggaucucaa

SEQ ID NO: 183234 - RNA, 19 nt, Artificial Sequence
  Synthetic
uacuucacguggaucucaa

SEQ ID NO: 183235 - RNA, 20 nt, Artificial Sequence
  Synthetic
auacuucacguggaucucaa

SEQ ID NO: 183236 - RNA, 21 nt, Artificial Sequence
  Synthetic
cauacuucacguggaucucaa

SEQ ID NO: 183237 - RNA, 22 nt, Artificial Sequence
  Synthetic
ucauacuucacguggaucucaa

SEQ ID NO: 183238 - RNA, 23 nt, Artificial Sequence
  Synthetic
cucauacuucacguggaucucaa

SEQ ID NO: 183239 - RNA, 24 nt, Artificial Sequence
  Synthetic
ccucauacuucacguggaucucaa

SEQ ID NO: 183240 - RNA, 18 nt, Artificial Sequence
  Synthetic
augagcuguguaucucaa

SEQ ID NO: 183241 - RNA, 19 nt, Artificial Sequence
  Synthetic
gaugagcuguguaucucaa

SEQ ID NO: 183242 - RNA, 20 nt, Artificial Sequence
  Synthetic
agaugagcuguguaucucaa

SEQ ID NO: 183243 - RNA, 21 nt, Artificial Sequence
  Synthetic
aagaugagcuguguaucucaa

SEQ ID NO: 183244 - RNA, 22 nt, Artificial Sequence
  Synthetic
caagaugagcuguguaucucaa

SEQ ID NO: 183245 - RNA, 23 nt, Artificial Sequence
  Synthetic
gcaagaugagcuguguaucucaa

SEQ ID NO: 183246 - RNA, 24 nt, Artificial Sequence
  Synthetic
agcaagaugagcuguguaucucaa

SEQ ID NO: 183247 - RNA, 18 nt, Artificial Sequence
  Synthetic
accacaugauuaucucaa

SEQ ID NO: 183248 - RNA, 19 nt, Artificial Sequence
  Synthetic
aaccacaugauuaucucaa

SEQ ID NO: 183249 - RNA, 20 nt, Artificial Sequence
  Synthetic
aaaccacaugauuaucucaa

SEQ ID NO: 183250 - RNA, 21 nt, Artificial Sequence
  Synthetic
aaaaccacaugauuaucucaa

SEQ ID NO: 183251 - RNA, 22 nt, Artificial Sequence
  Synthetic
aaaaaccacaugauuaucucaa

SEQ ID NO: 183252 - RNA, 23 nt, Artificial Sequence
  Synthetic
caaaaaccacaugauuaucucaa

SEQ ID NO: 183253 - RNA, 24 nt, Artificial Sequence
  Synthetic
acaaaaaccacaugauuaucucaa

SEQ ID NO: 183254 - RNA, 18 nt, Artificial Sequence
  Synthetic
uuucucccacacucucaa

SEQ ID NO: 183255 - RNA, 19 nt, Artificial Sequence
  Synthetic
uuuucucccacacucucaa

SEQ ID NO: 183256 - RNA, 20 nt, Artificial Sequence
  Synthetic
auuuucucccacacucucaa

SEQ ID NO: 183257 - RNA, 21 nt, Artificial Sequence
  Synthetic
cauuuucucccacacucucaa

SEQ ID NO: 183258 - RNA, 22 nt, Artificial Sequence
  Synthetic
ccauuuucucccacacucucaa

SEQ ID NO: 183259 - RNA, 23 nt, Artificial Sequence
  Synthetic
cccauuuucucccacacucucaa

SEQ ID NO: 183260 - RNA, 24 nt, Artificial Sequence
  Synthetic
acccauuuucucccacacucucaa

SEQ ID NO: 183261 - RNA, 18 nt, Artificial Sequence
  Synthetic
agucuugaccacucucaa

SEQ ID NO: 183262 - RNA, 19 nt, Artificial Sequence
  Synthetic
aagucuugaccacucucaa

SEQ ID NO: 183263 - RNA, 20 nt, Artificial Sequence
  Synthetic
aaagucuugaccacucucaa

SEQ ID NO: 183264 - RNA, 21 nt, Artificial Sequence
  Synthetic
aaaagucuugaccacucucaa

SEQ ID NO: 183265 - RNA, 22 nt, Artificial Sequence
  Synthetic
caaaagucuugaccacucucaa

SEQ ID NO: 183266 - RNA, 23 nt, Artificial Sequence
  Synthetic
ucaaaagucuugaccacucucaa

SEQ ID NO: 183267 - RNA, 24 nt, Artificial Sequence
  Synthetic
gucaaaagucuugaccacucucaa

SEQ ID NO: 183268 - RNA, 18 nt, Artificial Sequence
  Synthetic
gccucuuuucacucucaa

SEQ ID NO: 183269 - RNA, 19 nt, Artificial Sequence
  Synthetic
agccucuuuucacucucaa

SEQ ID NO: 183270 - RNA, 20 nt, Artificial Sequence
  Synthetic
cagccucuuuucacucucaa

SEQ ID NO: 183271 - RNA, 21 nt, Artificial Sequence
  Synthetic
acagccucuuuucacucucaa

SEQ ID NO: 183272 - RNA, 22 nt, Artificial Sequence
  Synthetic
gacagccucuuuucacucucaa

SEQ ID NO: 183273 - RNA, 23 nt, Artificial Sequence
  Synthetic
ugacagccucuuuucacucucaa

SEQ ID NO: 183274 - RNA, 24 nt, Artificial Sequence
  Synthetic
uugacagccucuuuucacucucaa

SEQ ID NO: 183275 - RNA, 18 nt, Artificial Sequence
  Synthetic
guccccuuauacucucaa

SEQ ID NO: 183276 - RNA, 19 nt, Artificial Sequence
  Synthetic
uguccccuuauacucucaa

SEQ ID NO: 183277 - RNA, 20 nt, Artificial Sequence
  Synthetic
cuguccccuuauacucucaa

SEQ ID NO: 183278 - RNA, 21 nt, Artificial Sequence
  Synthetic
acuguccccuuauacucucaa

SEQ ID NO: 183279 - RNA, 22 nt, Artificial Sequence
  Synthetic
cacuguccccuuauacucucaa

SEQ ID NO: 183280 - RNA, 23 nt, Artificial Sequence
  Synthetic
ccacuguccccuuauacucucaa

SEQ ID NO: 183281 - RNA, 24 nt, Artificial Sequence
  Synthetic
cccacuguccccuuauacucucaa

SEQ ID NO: 183282 - RNA, 18 nt, Artificial Sequence
  Synthetic
agugagacccugucucaa

SEQ ID NO: 183283 - RNA, 19 nt, Artificial Sequence
  Synthetic
gagugagacccugucucaa

SEQ ID NO: 183284 - RNA, 20 nt, Artificial Sequence
  Synthetic
agagugagacccugucucaa

SEQ ID NO: 183285 - RNA, 21 nt, Artificial Sequence
  Synthetic
cagagugagacccugucucaa

SEQ ID NO: 183286 - RNA, 22 nt, Artificial Sequence
  Synthetic
acagagugagacccugucucaa

SEQ ID NO: 183287 - RNA, 23 nt, Artificial Sequence
  Synthetic
gacagagugagacccugucucaa

SEQ ID NO: 183288 - RNA, 24 nt, Artificial Sequence
  Synthetic
ugacagagugagacccugucucaa

SEQ ID NO: 183289 - RNA, 18 nt, Artificial Sequence
  Synthetic
agugagacucugucucaa

SEQ ID NO: 183290 - RNA, 19 nt, Artificial Sequence
  Synthetic
gagugagacucugucucaa

SEQ ID NO: 183291 - RNA, 20 nt, Artificial Sequence
  Synthetic
agagugagacucugucucaa

SEQ ID NO: 183292 - RNA, 21 nt, Artificial Sequence
  Synthetic
cagagugagacucugucucaa

SEQ ID NO: 183293 - RNA, 22 nt, Artificial Sequence
  Synthetic
acagagugagacucugucucaa

SEQ ID NO: 183294 - RNA, 23 nt, Artificial Sequence
  Synthetic
gacagagugagacucugucucaa

SEQ ID NO: 183295 - RNA, 24 nt, Artificial Sequence
  Synthetic
cgacagagugagacucugucucaa

SEQ ID NO: 183296 - RNA, 24 nt, Artificial Sequence
  Synthetic
ggacagagugagacucugucucaa

SEQ ID NO: 183297 - RNA, 18 nt, Artificial Sequence
  Synthetic
auaucauuucauucucaa

SEQ ID NO: 183298 - RNA, 19 nt, Artificial Sequence
  Synthetic
uauaucauuucauucucaa

SEQ ID NO: 183299 - RNA, 20 nt, Artificial Sequence
  Synthetic
auauaucauuucauucucaa

SEQ ID NO: 183300 - RNA, 21 nt, Artificial Sequence
  Synthetic
cauauaucauuucauucucaa

SEQ ID NO: 183301 - RNA, 22 nt, Artificial Sequence
  Synthetic
acauauaucauuucauucucaa

SEQ ID NO: 183302 - RNA, 23 nt, Artificial Sequence
  Synthetic
uacauauaucauuucauucucaa

SEQ ID NO: 183303 - RNA, 24 nt, Artificial Sequence
  Synthetic
uuacauauaucauuucauucucaa

SEQ ID NO: 183304 - RNA, 20 nt, Artificial Sequence
  Synthetic
aaugaacagacacuucucaa

SEQ ID NO: 183305 - RNA, 21 nt, Artificial Sequence
  Synthetic
caaugaacagacacuucucaa

SEQ ID NO: 183306 - RNA, 22 nt, Artificial Sequence
  Synthetic
acaaugaacagacacuucucaa

SEQ ID NO: 183307 - RNA, 23 nt, Artificial Sequence
  Synthetic
cacaaugaacagacacuucucaa

SEQ ID NO: 183308 - RNA, 24 nt, Artificial Sequence
  Synthetic
ccacaaugaacagacacuucucaa

SEQ ID NO: 183309 - RNA, 20 nt, Artificial Sequence
  Synthetic
caugaacagacacuucucaa

SEQ ID NO: 183310 - RNA, 21 nt, Artificial Sequence
  Synthetic
acaugaacagacacuucucaa

SEQ ID NO: 183311 - RNA, 22 nt, Artificial Sequence
  Synthetic
gacaugaacagacacuucucaa

SEQ ID NO: 183312 - RNA, 23 nt, Artificial Sequence
  Synthetic
ggacaugaacagacacuucucaa

SEQ ID NO: 183313 - RNA, 24 nt, Artificial Sequence
  Synthetic
aggacaugaacagacacuucucaa

SEQ ID NO: 183314 - RNA, 18 nt, Artificial Sequence
  Synthetic
uauauagauacuucucaa

SEQ ID NO: 183315 - RNA, 19 nt, Artificial Sequence
  Synthetic
auauauagauacuucucaa

SEQ ID NO: 183316 - RNA, 20 nt, Artificial Sequence
  Synthetic
aauauauagauacuucucaa

SEQ ID NO: 183317 - RNA, 21 nt, Artificial Sequence
  Synthetic
gaauauauagauacuucucaa

SEQ ID NO: 183318 - RNA, 22 nt, Artificial Sequence
  Synthetic
ugaauauauagauacuucucaa

SEQ ID NO: 183319 - RNA, 23 nt, Artificial Sequence
  Synthetic
augaauauauagauacuucucaa

SEQ ID NO: 183320 - RNA, 24 nt, Artificial Sequence
  Synthetic
caugaauauauagauacuucucaa

SEQ ID NO: 183321 - RNA, 18 nt, Artificial Sequence
  Synthetic
gacagacugccuucucaa

SEQ ID NO: 183322 - RNA, 19 nt, Artificial Sequence
  Synthetic
ggacagacugccuucucaa

SEQ ID NO: 183323 - RNA, 20 nt, Artificial Sequence
  Synthetic
gggacagacugccuucucaa

SEQ ID NO: 183324 - RNA, 21 nt, Artificial Sequence
  Synthetic
agggacagacugccuucucaa

SEQ ID NO: 183325 - RNA, 22 nt, Artificial Sequence
  Synthetic
aagggacagacugccuucucaa

SEQ ID NO: 183326 - RNA, 23 nt, Artificial Sequence
  Synthetic
uaagggacagacugccuucucaa

SEQ ID NO: 183327 - RNA, 24 nt, Artificial Sequence
  Synthetic
cuaagggacagacugccuucucaa

SEQ ID NO: 183328 - RNA, 18 nt, Artificial Sequence
  Synthetic
agaaaguuuccuucucaa

SEQ ID NO: 183329 - RNA, 19 nt, Artificial Sequence
  Synthetic
gagaaaguuuccuucucaa

SEQ ID NO: 183330 - RNA, 20 nt, Artificial Sequence
  Synthetic
ugagaaaguuuccuucucaa

SEQ ID NO: 183331 - RNA, 21 nt, Artificial Sequence
  Synthetic
cugagaaaguuuccuucucaa

SEQ ID NO: 183332 - RNA, 22 nt, Artificial Sequence
  Synthetic
ccugagaaaguuuccuucucaa

SEQ ID NO: 183333 - RNA, 23 nt, Artificial Sequence
  Synthetic
accugagaaaguuuccuucucaa

SEQ ID NO: 183334 - RNA, 24 nt, Artificial Sequence
  Synthetic
gaccugagaaaguuuccuucucaa

SEQ ID NO: 183335 - RNA, 18 nt, Artificial Sequence
  Synthetic
caggagaaagcuucucaa

SEQ ID NO: 183336 - RNA, 19 nt, Artificial Sequence
  Synthetic
ucaggagaaagcuucucaa

SEQ ID NO: 183337 - RNA, 20 nt, Artificial Sequence
  Synthetic
cucaggagaaagcuucucaa

SEQ ID NO: 183338 - RNA, 21 nt, Artificial Sequence
  Synthetic
ccucaggagaaagcuucucaa

SEQ ID NO: 183339 - RNA, 22 nt, Artificial Sequence
  Synthetic
gccucaggagaaagcuucucaa

SEQ ID NO: 183340 - RNA, 23 nt, Artificial Sequence
  Synthetic
ugccucaggagaaagcuucucaa

SEQ ID NO: 183341 - RNA, 24 nt, Artificial Sequence
  Synthetic
gugccucaggagaaagcuucucaa

SEQ ID NO: 183342 - RNA, 18 nt, Artificial Sequence
  Synthetic
uaaacagacucuucucaa

SEQ ID NO: 183343 - RNA, 19 nt, Artificial Sequence
  Synthetic
auaaacagacucuucucaa

SEQ ID NO: 183344 - RNA, 20 nt, Artificial Sequence
  Synthetic
uauaaacagacucuucucaa

SEQ ID NO: 183345 - RNA, 21 nt, Artificial Sequence
  Synthetic
auauaaacagacucuucucaa

SEQ ID NO: 183346 - RNA, 22 nt, Artificial Sequence
  Synthetic
gauauaaacagacucuucucaa

SEQ ID NO: 183347 - RNA, 23 nt, Artificial Sequence
  Synthetic
ggauauaaacagacucuucucaa

SEQ ID NO: 183348 - RNA, 24 nt, Artificial Sequence
  Synthetic
aggauauaaacagacucuucucaa

SEQ ID NO: 183349 - RNA, 18 nt, Artificial Sequence
  Synthetic
uuucaaaagucuucucaa

SEQ ID NO: 183350 - RNA, 19 nt, Artificial Sequence
  Synthetic
auuucaaaagucuucucaa

SEQ ID NO: 183351 - RNA, 20 nt, Artificial Sequence
  Synthetic
gauuucaaaagucuucucaa

SEQ ID NO: 183352 - RNA, 21 nt, Artificial Sequence
  Synthetic
ugauuucaaaagucuucucaa

SEQ ID NO: 183353 - RNA, 22 nt, Artificial Sequence
  Synthetic
uugauuucaaaagucuucucaa

SEQ ID NO: 183354 - RNA, 23 nt, Artificial Sequence
  Synthetic
uuugauuucaaaagucuucucaa

SEQ ID NO: 183355 - RNA, 24 nt, Artificial Sequence
  Synthetic
guuugauuucaaaagucuucucaa

SEQ ID NO: 183356 - RNA, 18 nt, Artificial Sequence
  Synthetic
auuacucacaguucucaa

SEQ ID NO: 183357 - RNA, 19 nt, Artificial Sequence
  Synthetic
gauuacucacaguucucaa

SEQ ID NO: 183358 - RNA, 20 nt, Artificial Sequence
  Synthetic
ugauuacucacaguucucaa

SEQ ID NO: 183359 - RNA, 21 nt, Artificial Sequence
  Synthetic
uugauuacucacaguucucaa

SEQ ID NO: 183360 - RNA, 22 nt, Artificial Sequence
  Synthetic
uuugauuacucacaguucucaa

SEQ ID NO: 183361 - RNA, 23 nt, Artificial Sequence
  Synthetic
guuugauuacucacaguucucaa

SEQ ID NO: 183362 - RNA, 24 nt, Artificial Sequence
  Synthetic
aguuugauuacucacaguucucaa

SEQ ID NO: 183363 - RNA, 18 nt, Artificial Sequence
  Synthetic
uagaguaguaguucucaa

SEQ ID NO: 183364 - RNA, 19 nt, Artificial Sequence
  Synthetic
cuagaguaguaguucucaa

SEQ ID NO: 183365 - RNA, 20 nt, Artificial Sequence
  Synthetic
ucuagaguaguaguucucaa

SEQ ID NO: 183366 - RNA, 21 nt, Artificial Sequence
  Synthetic
aucuagaguaguaguucucaa

SEQ ID NO: 183367 - RNA, 22 nt, Artificial Sequence
  Synthetic
uaucuagaguaguaguucucaa

SEQ ID NO: 183368 - RNA, 23 nt, Artificial Sequence
  Synthetic
uuaucuagaguaguaguucucaa

SEQ ID NO: 183369 - RNA, 24 nt, Artificial Sequence
  Synthetic
uuuaucuagaguaguaguucucaa

SEQ ID NO: 183370 - RNA, 18 nt, Artificial Sequence
  Synthetic
aaauaucaguguucucaa

SEQ ID NO: 183371 - RNA, 19 nt, Artificial Sequence
  Synthetic
aaaauaucaguguucucaa

SEQ ID NO: 183372 - RNA, 20 nt, Artificial Sequence
  Synthetic
gaaaauaucaguguucucaa

SEQ ID NO: 183373 - RNA, 21 nt, Artificial Sequence
  Synthetic
ugaaaauaucaguguucucaa

SEQ ID NO: 183374 - RNA, 22 nt, Artificial Sequence
  Synthetic
uugaaaauaucaguguucucaa

SEQ ID NO: 183375 - RNA, 23 nt, Artificial Sequence
  Synthetic
cuugaaaauaucaguguucucaa

SEQ ID NO: 183376 - RNA, 24 nt, Artificial Sequence
  Synthetic
ucuugaaaauaucaguguucucaa

SEQ ID NO: 183377 - RNA, 18 nt, Artificial Sequence
  Synthetic
guuuucccuuguucucaa

SEQ ID NO: 183378 - RNA, 19 nt, Artificial Sequence
  Synthetic
uguuuucccuuguucucaa

SEQ ID NO: 183379 - RNA, 20 nt, Artificial Sequence
  Synthetic
auguuuucccuuguucucaa

SEQ ID NO: 183380 - RNA, 21 nt, Artificial Sequence
  Synthetic
uauguuuucccuuguucucaa

SEQ ID NO: 183381 - RNA, 22 nt, Artificial Sequence
  Synthetic
uuauguuuucccuuguucucaa

SEQ ID NO: 183382 - RNA, 23 nt, Artificial Sequence
  Synthetic
cuuauguuuucccuuguucucaa

SEQ ID NO: 183383 - RNA, 24 nt, Artificial Sequence
  Synthetic
ucuuauguuuucccuuguucucaa

SEQ ID NO: 183384 - RNA, 18 nt, Artificial Sequence
  Synthetic
cacuuaaacauuucucaa

SEQ ID NO: 183385 - RNA, 19 nt, Artificial Sequence
  Synthetic
acacuuaaacauuucucaa

SEQ ID NO: 183386 - RNA, 20 nt, Artificial Sequence
  Synthetic
aacacuuaaacauuucucaa

SEQ ID NO: 183387 - RNA, 21 nt, Artificial Sequence
  Synthetic
aaacacuuaaacauuucucaa

SEQ ID NO: 183388 - RNA, 22 nt, Artificial Sequence
  Synthetic
aaaacacuuaaacauuucucaa

SEQ ID NO: 183389 - RNA, 23 nt, Artificial Sequence
  Synthetic
caaaacacuuaaacauuucucaa

SEQ ID NO: 183390 - RNA, 24 nt, Artificial Sequence
  Synthetic
gcaaaacacuuaaacauuucucaa

SEQ ID NO: 183391 - RNA, 18 nt, Artificial Sequence
  Synthetic
ugaacagacauuucucaa

SEQ ID NO: 183392 - RNA, 19 nt, Artificial Sequence
  Synthetic
augaacagacauuucucaa

SEQ ID NO: 183393 - RNA, 20 nt, Artificial Sequence
  Synthetic
caugaacagacauuucucaa

SEQ ID NO: 183394 - RNA, 21 nt, Artificial Sequence
  Synthetic
acaugaacagacauuucucaa

SEQ ID NO: 183395 - RNA, 22 nt, Artificial Sequence
  Synthetic
gacaugaacagacauuucucaa

SEQ ID NO: 183396 - RNA, 23 nt, Artificial Sequence
  Synthetic
agacaugaacagacauuucucaa

SEQ ID NO: 183397 - RNA, 24 nt, Artificial Sequence
  Synthetic
aagacaugaacagacauuucucaa

SEQ ID NO: 183398 - RNA, 18 nt, Artificial Sequence
  Synthetic
ucaagagagauuucucaa

SEQ ID NO: 183399 - RNA, 19 nt, Artificial Sequence
  Synthetic
uucaagagagauuucucaa

SEQ ID NO: 183400 - RNA, 20 nt, Artificial Sequence
  Synthetic
auucaagagagauuucucaa

SEQ ID NO: 183401 - RNA, 21 nt, Artificial Sequence
  Synthetic
gauucaagagagauuucucaa

SEQ ID NO: 183402 - RNA, 22 nt, Artificial Sequence
  Synthetic
agauucaagagagauuucucaa

SEQ ID NO: 183403 - RNA, 23 nt, Artificial Sequence
  Synthetic
cagauucaagagagauuucucaa

SEQ ID NO: 183404 - RNA, 24 nt, Artificial Sequence
  Synthetic
gcagauucaagagagauuucucaa

SEQ ID NO: 183405 - RNA, 18 nt, Artificial Sequence
  Synthetic
agcuuuuggaaaagucaa

SEQ ID NO: 183406 - RNA, 19 nt, Artificial Sequence
  Synthetic
aagcuuuuggaaaagucaa

SEQ ID NO: 183407 - RNA, 20 nt, Artificial Sequence
  Synthetic
caagcuuuuggaaaagucaa

SEQ ID NO: 183408 - RNA, 21 nt, Artificial Sequence
  Synthetic
ucaagcuuuuggaaaagucaa

SEQ ID NO: 183409 - RNA, 22 nt, Artificial Sequence
  Synthetic
aucaagcuuuuggaaaagucaa

SEQ ID NO: 183410 - RNA, 23 nt, Artificial Sequence
  Synthetic
aaucaagcuuuuggaaaagucaa

SEQ ID NO: 183411 - RNA, 24 nt, Artificial Sequence
  Synthetic
aaaucaagcuuuuggaaaagucaa

SEQ ID NO: 183412 - RNA, 18 nt, Artificial Sequence
  Synthetic
aacagaagacaaagucaa

SEQ ID NO: 183413 - RNA, 19 nt, Artificial Sequence
  Synthetic
uaacagaagacaaagucaa

SEQ ID NO: 183414 - RNA, 20 nt, Artificial Sequence
  Synthetic
auaacagaagacaaagucaa

SEQ ID NO: 183415 - RNA, 21 nt, Artificial Sequence
  Synthetic
aauaacagaagacaaagucaa

SEQ ID NO: 183416 - RNA, 22 nt, Artificial Sequence
  Synthetic
aaauaacagaagacaaagucaa

SEQ ID NO: 183417 - RNA, 23 nt, Artificial Sequence
  Synthetic
aaaauaacagaagacaaagucaa

SEQ ID NO: 183418 - RNA, 24 nt, Artificial Sequence
  Synthetic
uaaaauaacagaagacaaagucaa

SEQ ID NO: 183419 - RNA, 18 nt, Artificial Sequence
  Synthetic
agucaagcccaaagucaa

SEQ ID NO: 183420 - RNA, 19 nt, Artificial Sequence
  Synthetic
cagucaagcccaaagucaa

SEQ ID NO: 183421 - RNA, 20 nt, Artificial Sequence
  Synthetic
acagucaagcccaaagucaa

SEQ ID NO: 183422 - RNA, 21 nt, Artificial Sequence
  Synthetic
cacagucaagcccaaagucaa

SEQ ID NO: 183423 - RNA, 22 nt, Artificial Sequence
  Synthetic
acacagucaagcccaaagucaa

SEQ ID NO: 183424 - RNA, 23 nt, Artificial Sequence
  Synthetic
uacacagucaagcccaaagucaa

SEQ ID NO: 183425 - RNA, 24 nt, Artificial Sequence
  Synthetic
guacacagucaagcccaaagucaa

SEQ ID NO: 183426 - RNA, 18 nt, Artificial Sequence
  Synthetic
uauugucuuuaaagucaa

SEQ ID NO: 183427 - RNA, 19 nt, Artificial Sequence
  Synthetic
uuauugucuuuaaagucaa

SEQ ID NO: 183428 - RNA, 20 nt, Artificial Sequence
  Synthetic
auuauugucuuuaaagucaa

SEQ ID NO: 183429 - RNA, 21 nt, Artificial Sequence
  Synthetic
aauuauugucuuuaaagucaa

SEQ ID NO: 183430 - RNA, 22 nt, Artificial Sequence
  Synthetic
aaauuauugucuuuaaagucaa

SEQ ID NO: 183431 - RNA, 23 nt, Artificial Sequence
  Synthetic
caaauuauugucuuuaaagucaa

SEQ ID NO: 183432 - RNA, 24 nt, Artificial Sequence
  Synthetic
ucaaauuauugucuuuaaagucaa

SEQ ID NO: 183433 - RNA, 18 nt, Artificial Sequence
  Synthetic
ugcagaaccguaagucaa

SEQ ID NO: 183434 - RNA, 19 nt, Artificial Sequence
  Synthetic
cugcagaaccguaagucaa

SEQ ID NO: 183435 - RNA, 20 nt, Artificial Sequence
  Synthetic
ccugcagaaccguaagucaa

SEQ ID NO: 183436 - RNA, 21 nt, Artificial Sequence
  Synthetic
gccugcagaaccguaagucaa

SEQ ID NO: 183437 - RNA, 22 nt, Artificial Sequence
  Synthetic
agccugcagaaccguaagucaa

SEQ ID NO: 183438 - RNA, 23 nt, Artificial Sequence
  Synthetic
cagccugcagaaccguaagucaa

SEQ ID NO: 183439 - RNA, 24 nt, Artificial Sequence
  Synthetic
acagccugcagaaccguaagucaa

SEQ ID NO: 183440 - RNA, 18 nt, Artificial Sequence
  Synthetic
agucauuaucccagucaa

SEQ ID NO: 183441 - RNA, 19 nt, Artificial Sequence
  Synthetic
uagucauuaucccagucaa

SEQ ID NO: 183442 - RNA, 20 nt, Artificial Sequence
  Synthetic
guagucauuaucccagucaa

SEQ ID NO: 183443 - RNA, 21 nt, Artificial Sequence
  Synthetic
aguagucauuaucccagucaa

SEQ ID NO: 183444 - RNA, 22 nt, Artificial Sequence
  Synthetic
aaguagucauuaucccagucaa

SEQ ID NO: 183445 - RNA, 23 nt, Artificial Sequence
  Synthetic
caaguagucauuaucccagucaa

SEQ ID NO: 183446 - RNA, 24 nt, Artificial Sequence
  Synthetic
gcaaguagucauuaucccagucaa

SEQ ID NO: 183447 - RNA, 18 nt, Artificial Sequence
  Synthetic
cuuugagguuucagucaa

SEQ ID NO: 183448 - RNA, 19 nt, Artificial Sequence
  Synthetic
ccuuugagguuucagucaa

SEQ ID NO: 183449 - RNA, 20 nt, Artificial Sequence
  Synthetic
uccuuugagguuucagucaa

SEQ ID NO: 183450 - RNA, 21 nt, Artificial Sequence
  Synthetic
uuccuuugagguuucagucaa

SEQ ID NO: 183451 - RNA, 22 nt, Artificial Sequence
  Synthetic
uuuccuuugagguuucagucaa

SEQ ID NO: 183452 - RNA, 23 nt, Artificial Sequence
  Synthetic
auuuccuuugagguuucagucaa

SEQ ID NO: 183453 - RNA, 24 nt, Artificial Sequence
  Synthetic
uauuuccuuugagguuucagucaa

SEQ ID NO: 183454 - RNA, 18 nt, Artificial Sequence
  Synthetic
uuuagaaaagggagucaa

SEQ ID NO: 183455 - RNA, 19 nt, Artificial Sequence
  Synthetic
guuuagaaaagggagucaa

SEQ ID NO: 183456 - RNA, 20 nt, Artificial Sequence
  Synthetic
aguuuagaaaagggagucaa

SEQ ID NO: 183457 - RNA, 21 nt, Artificial Sequence
  Synthetic
aaguuuagaaaagggagucaa

SEQ ID NO: 183458 - RNA, 22 nt, Artificial Sequence
  Synthetic
aaaguuuagaaaagggagucaa

SEQ ID NO: 183459 - RNA, 23 nt, Artificial Sequence
  Synthetic
aaaaguuuagaaaagggagucaa

SEQ ID NO: 183460 - RNA, 24 nt, Artificial Sequence
  Synthetic
uaaaaguuuagaaaagggagucaa

SEQ ID NO: 183461 - RNA, 18 nt, Artificial Sequence
  Synthetic
gugagauuauugagucaa

SEQ ID NO: 183462 - RNA, 19 nt, Artificial Sequence
  Synthetic
agugagauuauugagucaa

SEQ ID NO: 183463 - RNA, 20 nt, Artificial Sequence
  Synthetic
aagugagauuauugagucaa

SEQ ID NO: 183464 - RNA, 21 nt, Artificial Sequence
  Synthetic
aaagugagauuauugagucaa

SEQ ID NO: 183465 - RNA, 22 nt, Artificial Sequence
  Synthetic
aaaagugagauuauugagucaa

SEQ ID NO: 183466 - RNA, 23 nt, Artificial Sequence
  Synthetic
caaaagugagauuauugagucaa

SEQ ID NO: 183467 - RNA, 24 nt, Artificial Sequence
  Synthetic
ccaaaagugagauuauugagucaa

SEQ ID NO: 183468 - RNA, 18 nt, Artificial Sequence
  Synthetic
auaaacaggaauagucaa

SEQ ID NO: 183469 - RNA, 19 nt, Artificial Sequence
  Synthetic
uauaaacaggaauagucaa

SEQ ID NO: 183470 - RNA, 20 nt, Artificial Sequence
  Synthetic
auauaaacaggaauagucaa

SEQ ID NO: 183471 - RNA, 21 nt, Artificial Sequence
  Synthetic
aauauaaacaggaauagucaa

SEQ ID NO: 183472 - RNA, 22 nt, Artificial Sequence
  Synthetic
gaauauaaacaggaauagucaa

SEQ ID NO: 183473 - RNA, 23 nt, Artificial Sequence
  Synthetic
agaauauaaacaggaauagucaa

SEQ ID NO: 183474 - RNA, 24 nt, Artificial Sequence
  Synthetic
aagaauauaaacaggaauagucaa

SEQ ID NO: 183475 - RNA, 18 nt, Artificial Sequence
  Synthetic
aucucauggucuagucaa

SEQ ID NO: 183476 - RNA, 19 nt, Artificial Sequence
  Synthetic
gaucucauggucuagucaa

SEQ ID NO: 183477 - RNA, 20 nt, Artificial Sequence
  Synthetic
ggaucucauggucuagucaa

SEQ ID NO: 183478 - RNA, 21 nt, Artificial Sequence
  Synthetic
uggaucucauggucuagucaa

SEQ ID NO: 183479 - RNA, 22 nt, Artificial Sequence
  Synthetic
auggaucucauggucuagucaa

SEQ ID NO: 183480 - RNA, 23 nt, Artificial Sequence
  Synthetic
cauggaucucauggucuagucaa

SEQ ID NO: 183481 - RNA, 24 nt, Artificial Sequence
  Synthetic
ucauggaucucauggucuagucaa

SEQ ID NO: 183482 - RNA, 18 nt, Artificial Sequence
  Synthetic
aagaucaaaaguagucaa

SEQ ID NO: 183483 - RNA, 19 nt, Artificial Sequence
  Synthetic
gaagaucaaaaguagucaa

SEQ ID NO: 183484 - RNA, 20 nt, Artificial Sequence
  Synthetic
ggaagaucaaaaguagucaa

SEQ ID NO: 183485 - RNA, 21 nt, Artificial Sequence
  Synthetic
gggaagaucaaaaguagucaa

SEQ ID NO: 183486 - RNA, 22 nt, Artificial Sequence
  Synthetic
agggaagaucaaaaguagucaa

SEQ ID NO: 183487 - RNA, 23 nt, Artificial Sequence
  Synthetic
aagggaagaucaaaaguagucaa

SEQ ID NO: 183488 - RNA, 24 nt, Artificial Sequence
  Synthetic
aaagggaagaucaaaaguagucaa

SEQ ID NO: 183489 - RNA, 18 nt, Artificial Sequence
  Synthetic
ugugagacauguagucaa

SEQ ID NO: 183490 - RNA, 19 nt, Artificial Sequence
  Synthetic
augugagacauguagucaa

SEQ ID NO: 183491 - RNA, 20 nt, Artificial Sequence
  Synthetic
gaugugagacauguagucaa

SEQ ID NO: 183492 - RNA, 21 nt, Artificial Sequence
  Synthetic
ggaugugagacauguagucaa

SEQ ID NO: 183493 - RNA, 22 nt, Artificial Sequence
  Synthetic
uggaugugagacauguagucaa

SEQ ID NO: 183494 - RNA, 23 nt, Artificial Sequence
  Synthetic
cuggaugugagacauguagucaa

SEQ ID NO: 183495 - RNA, 24 nt, Artificial Sequence
  Synthetic
ccuggaugugagacauguagucaa

SEQ ID NO: 183496 - RNA, 18 nt, Artificial Sequence
  Synthetic
gaccacaccauuagucaa

SEQ ID NO: 183497 - RNA, 19 nt, Artificial Sequence
  Synthetic
agaccacaccauuagucaa

SEQ ID NO: 183498 - RNA, 20 nt, Artificial Sequence
  Synthetic
cagaccacaccauuagucaa

SEQ ID NO: 183499 - RNA, 21 nt, Artificial Sequence
  Synthetic
gcagaccacaccauuagucaa

SEQ ID NO: 183500 - RNA, 22 nt, Artificial Sequence
  Synthetic
ugcagaccacaccauuagucaa

SEQ ID NO: 183501 - RNA, 23 nt, Artificial Sequence
  Synthetic
augcagaccacaccauuagucaa

SEQ ID NO: 183502 - RNA, 24 nt, Artificial Sequence
  Synthetic
gaugcagaccacaccauuagucaa

SEQ ID NO: 183503 - RNA, 18 nt, Artificial Sequence
  Synthetic
cuguagacaaauggucaa

SEQ ID NO: 183504 - RNA, 19 nt, Artificial Sequence
  Synthetic
gcuguagacaaauggucaa

SEQ ID NO: 183505 - RNA, 20 nt, Artificial Sequence
  Synthetic
ugcuguagacaaauggucaa

SEQ ID NO: 183506 - RNA, 21 nt, Artificial Sequence
  Synthetic
uugcuguagacaaauggucaa

SEQ ID NO: 183507 - RNA, 22 nt, Artificial Sequence
  Synthetic
auugcuguagacaaauggucaa

SEQ ID NO: 183508 - RNA, 23 nt, Artificial Sequence
  Synthetic
aauugcuguagacaaauggucaa

SEQ ID NO: 183509 - RNA, 24 nt, Artificial Sequence
  Synthetic
uaauugcuguagacaaauggucaa

SEQ ID NO: 183510 - RNA, 18 nt, Artificial Sequence
  Synthetic
cuaauauuuuuuggucaa

SEQ ID NO: 183511 - RNA, 19 nt, Artificial Sequence
  Synthetic
acuaauauuuuuuggucaa

SEQ ID NO: 183512 - RNA, 20 nt, Artificial Sequence
  Synthetic
cacuaauauuuuuuggucaa

SEQ ID NO: 183513 - RNA, 21 nt, Artificial Sequence
  Synthetic
gcacuaauauuuuuuggucaa

SEQ ID NO: 183514 - RNA, 22 nt, Artificial Sequence
  Synthetic
ugcacuaauauuuuuuggucaa

SEQ ID NO: 183515 - RNA, 23 nt, Artificial Sequence
  Synthetic
uugcacuaauauuuuuuggucaa

SEQ ID NO: 183516 - RNA, 24 nt, Artificial Sequence
  Synthetic
auugcacuaauauuuuuuggucaa

SEQ ID NO: 183517 - RNA, 18 nt, Artificial Sequence
  Synthetic
acaauccccacaugucaa

SEQ ID NO: 183518 - RNA, 19 nt, Artificial Sequence
  Synthetic
cacaauccccacaugucaa

SEQ ID NO: 183519 - RNA, 20 nt, Artificial Sequence
  Synthetic
ccacaauccccacaugucaa

SEQ ID NO: 183520 - RNA, 21 nt, Artificial Sequence
  Synthetic
cccacaauccccacaugucaa

SEQ ID NO: 183521 - RNA, 22 nt, Artificial Sequence
  Synthetic
ccccacaauccccacaugucaa

SEQ ID NO: 183522 - RNA, 23 nt, Artificial Sequence
  Synthetic
uccccacaauccccacaugucaa

SEQ ID NO: 183523 - RNA, 24 nt, Artificial Sequence
  Synthetic
auccccacaauccccacaugucaa

SEQ ID NO: 183524 - RNA, 18 nt, Artificial Sequence
  Synthetic
uguauuuauucaugucaa

SEQ ID NO: 183525 - RNA, 19 nt, Artificial Sequence
  Synthetic
uuguauuuauucaugucaa

SEQ ID NO: 183526 - RNA, 20 nt, Artificial Sequence
  Synthetic
uuuguauuuauucaugucaa

SEQ ID NO: 183527 - RNA, 21 nt, Artificial Sequence
  Synthetic
cuuuguauuuauucaugucaa

SEQ ID NO: 183528 - RNA, 22 nt, Artificial Sequence
  Synthetic
ccuuuguauuuauucaugucaa

SEQ ID NO: 183529 - RNA, 23 nt, Artificial Sequence
  Synthetic
gccuuuguauuuauucaugucaa

SEQ ID NO: 183530 - RNA, 24 nt, Artificial Sequence
  Synthetic
ugccuuuguauuuauucaugucaa

SEQ ID NO: 183531 - RNA, 18 nt, Artificial Sequence
  Synthetic
uugaaucuuuacugucaa

SEQ ID NO: 183532 - RNA, 19 nt, Artificial Sequence
  Synthetic
uuugaaucuuuacugucaa

SEQ ID NO: 183533 - RNA, 20 nt, Artificial Sequence
  Synthetic
uuuugaaucuuuacugucaa

SEQ ID NO: 183534 - RNA, 21 nt, Artificial Sequence
  Synthetic
auuuugaaucuuuacugucaa

SEQ ID NO: 183535 - RNA, 22 nt, Artificial Sequence
  Synthetic
aauuuugaaucuuuacugucaa

SEQ ID NO: 183536 - RNA, 23 nt, Artificial Sequence
  Synthetic
uaauuuugaaucuuuacugucaa

SEQ ID NO: 183537 - RNA, 24 nt, Artificial Sequence
  Synthetic
cuaauuuugaaucuuuacugucaa

SEQ ID NO: 183538 - RNA, 18 nt, Artificial Sequence
  Synthetic
aucuguggauccugucaa

SEQ ID NO: 183539 - RNA, 19 nt, Artificial Sequence
  Synthetic
uaucuguggauccugucaa

SEQ ID NO: 183540 - RNA, 20 nt, Artificial Sequence
  Synthetic
cuaucuguggauccugucaa

SEQ ID NO: 183541 - RNA, 21 nt, Artificial Sequence
  Synthetic
gcuaucuguggauccugucaa

SEQ ID NO: 183542 - RNA, 22 nt, Artificial Sequence
  Synthetic
ugcuaucuguggauccugucaa

SEQ ID NO: 183543 - RNA, 23 nt, Artificial Sequence
  Synthetic
gugcuaucuguggauccugucaa

SEQ ID NO: 183544 - RNA, 24 nt, Artificial Sequence
  Synthetic
ggugcuaucuguggauccugucaa

SEQ ID NO: 183545 - RNA, 18 nt, Artificial Sequence
  Synthetic
uuagcaagcggcugucaa

SEQ ID NO: 183546 - RNA, 19 nt, Artificial Sequence
  Synthetic
uuuagcaagcggcugucaa

SEQ ID NO: 183547 - RNA, 20 nt, Artificial Sequence
  Synthetic
auuuagcaagcggcugucaa

SEQ ID NO: 183548 - RNA, 21 nt, Artificial Sequence
  Synthetic
aauuuagcaagcggcugucaa

SEQ ID NO: 183549 - RNA, 22 nt, Artificial Sequence
  Synthetic
gaauuuagcaagcggcugucaa

SEQ ID NO: 183550 - RNA, 23 nt, Artificial Sequence
  Synthetic
ggaauuuagcaagcggcugucaa

SEQ ID NO: 183551 - RNA, 24 nt, Artificial Sequence
  Synthetic
aggaauuuagcaagcggcugucaa

SEQ ID NO: 183552 - RNA, 18 nt, Artificial Sequence
  Synthetic
uuucuuuuccagugucaa

SEQ ID NO: 183553 - RNA, 19 nt, Artificial Sequence
  Synthetic
cuuucuuuuccagugucaa

SEQ ID NO: 183554 - RNA, 20 nt, Artificial Sequence
  Synthetic
acuuucuuuuccagugucaa

SEQ ID NO: 183555 - RNA, 21 nt, Artificial Sequence
  Synthetic
aacuuucuuuuccagugucaa

SEQ ID NO: 183556 - RNA, 22 nt, Artificial Sequence
  Synthetic
aaacuuucuuuuccagugucaa

SEQ ID NO: 183557 - RNA, 23 nt, Artificial Sequence
  Synthetic
uaaacuuucuuuuccagugucaa

SEQ ID NO: 183558 - RNA, 24 nt, Artificial Sequence
  Synthetic
uuaaacuuucuuuuccagugucaa

SEQ ID NO: 183559 - RNA, 18 nt, Artificial Sequence
  Synthetic
uauaaaacucagugucaa

SEQ ID NO: 183560 - RNA, 19 nt, Artificial Sequence
  Synthetic
auauaaaacucagugucaa

SEQ ID NO: 183561 - RNA, 20 nt, Artificial Sequence
  Synthetic
uauauaaaacucagugucaa

SEQ ID NO: 183562 - RNA, 21 nt, Artificial Sequence
  Synthetic
auauauaaaacucagugucaa

SEQ ID NO: 183563 - RNA, 22 nt, Artificial Sequence
  Synthetic
uauauauaaaacucagugucaa

SEQ ID NO: 183564 - RNA, 23 nt, Artificial Sequence
  Synthetic
auauauauaaaacucagugucaa

SEQ ID NO: 183565 - RNA, 24 nt, Artificial Sequence
  Synthetic
uauauauauaaaacucagugucaa

SEQ ID NO: 183566 - RNA, 18 nt, Artificial Sequence
  Synthetic
aaauuaagguagugucaa

SEQ ID NO: 183567 - RNA, 19 nt, Artificial Sequence
  Synthetic
uaaauuaagguagugucaa

SEQ ID NO: 183568 - RNA, 20 nt, Artificial Sequence
  Synthetic
guaaauuaagguagugucaa

SEQ ID NO: 183569 - RNA, 21 nt, Artificial Sequence
  Synthetic
cguaaauuaagguagugucaa

SEQ ID NO: 183570 - RNA, 22 nt, Artificial Sequence
  Synthetic
acguaaauuaagguagugucaa

SEQ ID NO: 183571 - RNA, 23 nt, Artificial Sequence
  Synthetic
gacguaaauuaagguagugucaa

SEQ ID NO: 183572 - RNA, 24 nt, Artificial Sequence
  Synthetic
ggacguaaauuaagguagugucaa

SEQ ID NO: 183573 - RNA, 18 nt, Artificial Sequence
  Synthetic
auuauucacaggugucaa

SEQ ID NO: 183574 - RNA, 19 nt, Artificial Sequence
  Synthetic
uauuauucacaggugucaa

SEQ ID NO: 183575 - RNA, 20 nt, Artificial Sequence
  Synthetic
uuauuauucacaggugucaa

SEQ ID NO: 183576 - RNA, 21 nt, Artificial Sequence
  Synthetic
auuauuauucacaggugucaa

SEQ ID NO: 183577 - RNA, 22 nt, Artificial Sequence
  Synthetic
uauuauuauucacaggugucaa

SEQ ID NO: 183578 - RNA, 23 nt, Artificial Sequence
  Synthetic
auauuauuauucacaggugucaa

SEQ ID NO: 183579 - RNA, 24 nt, Artificial Sequence
  Synthetic
gauauuauuauucacaggugucaa

SEQ ID NO: 183580 - RNA, 18 nt, Artificial Sequence
  Synthetic
ccuuaugauaugugucaa

SEQ ID NO: 183581 - RNA, 19 nt, Artificial Sequence
  Synthetic
accuuaugauaugugucaa

SEQ ID NO: 183582 - RNA, 20 nt, Artificial Sequence
  Synthetic
aaccuuaugauaugugucaa

SEQ ID NO: 183583 - RNA, 21 nt, Artificial Sequence
  Synthetic
aaaccuuaugauaugugucaa

SEQ ID NO: 183584 - RNA, 22 nt, Artificial Sequence
  Synthetic
gaaaccuuaugauaugugucaa

SEQ ID NO: 183585 - RNA, 23 nt, Artificial Sequence
  Synthetic
agaaaccuuaugauaugugucaa

SEQ ID NO: 183586 - RNA, 24 nt, Artificial Sequence
  Synthetic
aagaaaccuuaugauaugugucaa

SEQ ID NO: 183587 - RNA, 18 nt, Artificial Sequence
  Synthetic
uucgcaugacugugucaa

SEQ ID NO: 183588 - RNA, 19 nt, Artificial Sequence
  Synthetic
auucgcaugacugugucaa

SEQ ID NO: 183589 - RNA, 20 nt, Artificial Sequence
  Synthetic
gauucgcaugacugugucaa

SEQ ID NO: 183590 - RNA, 21 nt, Artificial Sequence
  Synthetic
agauucgcaugacugugucaa

SEQ ID NO: 183591 - RNA, 22 nt, Artificial Sequence
  Synthetic
uagauucgcaugacugugucaa

SEQ ID NO: 183592 - RNA, 23 nt, Artificial Sequence
  Synthetic
auagauucgcaugacugugucaa

SEQ ID NO: 183593 - RNA, 24 nt, Artificial Sequence
  Synthetic
uauagauucgcaugacugugucaa

SEQ ID NO: 183594 - RNA, 18 nt, Artificial Sequence
  Synthetic
auaauccccgugugucaa

SEQ ID NO: 183595 - RNA, 19 nt, Artificial Sequence
  Synthetic
uauaauccccgugugucaa

SEQ ID NO: 183596 - RNA, 20 nt, Artificial Sequence
  Synthetic
uuauaauccccgugugucaa

SEQ ID NO: 183597 - RNA, 21 nt, Artificial Sequence
  Synthetic
auuauaauccccgugugucaa

SEQ ID NO: 183598 - RNA, 22 nt, Artificial Sequence
  Synthetic
aauuauaauccccgugugucaa

SEQ ID NO: 183599 - RNA, 23 nt, Artificial Sequence
  Synthetic
gaauuauaauccccgugugucaa

SEQ ID NO: 183600 - RNA, 24 nt, Artificial Sequence
  Synthetic
ugaauuauaauccccgugugucaa

SEQ ID NO: 183601 - RNA, 18 nt, Artificial Sequence
  Synthetic
acaggcccccauugucaa

SEQ ID NO: 183602 - RNA, 19 nt, Artificial Sequence
  Synthetic
cacaggcccccauugucaa

SEQ ID NO: 183603 - RNA, 20 nt, Artificial Sequence
  Synthetic
ccacaggcccccauugucaa

SEQ ID NO: 183604 - RNA, 21 nt, Artificial Sequence
  Synthetic
gccacaggcccccauugucaa

SEQ ID NO: 183605 - RNA, 22 nt, Artificial Sequence
  Synthetic
agccacaggcccccauugucaa

SEQ ID NO: 183606 - RNA, 23 nt, Artificial Sequence
  Synthetic
uagccacaggcccccauugucaa

SEQ ID NO: 183607 - RNA, 24 nt, Artificial Sequence
  Synthetic
guagccacaggcccccauugucaa

SEQ ID NO: 183608 - RNA, 18 nt, Artificial Sequence
  Synthetic
cauuuuuauuauugucaa

SEQ ID NO: 183609 - RNA, 19 nt, Artificial Sequence
  Synthetic
acauuuuuauuauugucaa

SEQ ID NO: 183610 - RNA, 20 nt, Artificial Sequence
  Synthetic
aacauuuuuauuauugucaa

SEQ ID NO: 183611 - RNA, 21 nt, Artificial Sequence
  Synthetic
aaacauuuuuauuauugucaa

SEQ ID NO: 183612 - RNA, 22 nt, Artificial Sequence
  Synthetic
uaaacauuuuuauuauugucaa

SEQ ID NO: 183613 - RNA, 23 nt, Artificial Sequence
  Synthetic
auaaacauuuuuauuauugucaa

SEQ ID NO: 183614 - RNA, 24 nt, Artificial Sequence
  Synthetic
aauaaacauuuuuauuauugucaa

SEQ ID NO: 183615 - RNA, 18 nt, Artificial Sequence
  Synthetic
guuuucucuuuuugucaa

SEQ ID NO: 183616 - RNA, 19 nt, Artificial Sequence
  Synthetic
aguuuucucuuuuugucaa

SEQ ID NO: 183617 - RNA, 20 nt, Artificial Sequence
  Synthetic
uaguuuucucuuuuugucaa

SEQ ID NO: 183618 - RNA, 21 nt, Artificial Sequence
  Synthetic
guaguuuucucuuuuugucaa

SEQ ID NO: 183619 - RNA, 22 nt, Artificial Sequence
  Synthetic
aguaguuuucucuuuuugucaa

SEQ ID NO: 183620 - RNA, 23 nt, Artificial Sequence
  Synthetic
aaguaguuuucucuuuuugucaa

SEQ ID NO: 183621 - RNA, 24 nt, Artificial Sequence
  Synthetic
caaguaguuuucucuuuuugucaa

SEQ ID NO: 183622 - RNA, 18 nt, Artificial Sequence
  Synthetic
aauuaacagaaaauucaa

SEQ ID NO: 183623 - RNA, 19 nt, Artificial Sequence
  Synthetic
uaauuaacagaaaauucaa

SEQ ID NO: 183624 - RNA, 20 nt, Artificial Sequence
  Synthetic
uuaauuaacagaaaauucaa

SEQ ID NO: 183625 - RNA, 21 nt, Artificial Sequence
  Synthetic
auuaauuaacagaaaauucaa

SEQ ID NO: 183626 - RNA, 22 nt, Artificial Sequence
  Synthetic
cauuaauuaacagaaaauucaa

SEQ ID NO: 183627 - RNA, 23 nt, Artificial Sequence
  Synthetic
ccauuaauuaacagaaaauucaa

SEQ ID NO: 183628 - RNA, 24 nt, Artificial Sequence
  Synthetic
cccauuaauuaacagaaaauucaa

SEQ ID NO: 183629 - RNA, 18 nt, Artificial Sequence
  Synthetic
gaugagaggaaaauucaa

SEQ ID NO: 183630 - RNA, 19 nt, Artificial Sequence
  Synthetic
agaugagaggaaaauucaa

SEQ ID NO: 183631 - RNA, 20 nt, Artificial Sequence
  Synthetic
aagaugagaggaaaauucaa

SEQ ID NO: 183632 - RNA, 21 nt, Artificial Sequence
  Synthetic
gaagaugagaggaaaauucaa

SEQ ID NO: 183633 - RNA, 22 nt, Artificial Sequence
  Synthetic
ggaagaugagaggaaaauucaa

SEQ ID NO: 183634 - RNA, 23 nt, Artificial Sequence
  Synthetic
aggaagaugagaggaaaauucaa

SEQ ID NO: 183635 - RNA, 24 nt, Artificial Sequence
  Synthetic
aaggaagaugagaggaaaauucaa

SEQ ID NO: 183636 - RNA, 18 nt, Artificial Sequence
  Synthetic
uccuagauuaaaauucaa

SEQ ID NO: 183637 - RNA, 19 nt, Artificial Sequence
  Synthetic
cuccuagauuaaaauucaa

SEQ ID NO: 183638 - RNA, 20 nt, Artificial Sequence
  Synthetic
ccuccuagauuaaaauucaa

SEQ ID NO: 183639 - RNA, 21 nt, Artificial Sequence
  Synthetic
uccuccuagauuaaaauucaa

SEQ ID NO: 183640 - RNA, 22 nt, Artificial Sequence
  Synthetic
auccuccuagauuaaaauucaa

SEQ ID NO: 183641 - RNA, 23 nt, Artificial Sequence
  Synthetic
aauccuccuagauuaaaauucaa

SEQ ID NO: 183642 - RNA, 24 nt, Artificial Sequence
  Synthetic
aaauccuccuagauuaaaauucaa

SEQ ID NO: 183643 - RNA, 18 nt, Artificial Sequence
  Synthetic
agaguuaaugaaauucaa

SEQ ID NO: 183644 - RNA, 19 nt, Artificial Sequence
  Synthetic
cagaguuaaugaaauucaa

SEQ ID NO: 183645 - RNA, 20 nt, Artificial Sequence
  Synthetic
gcagaguuaaugaaauucaa

SEQ ID NO: 183646 - RNA, 21 nt, Artificial Sequence
  Synthetic
ggcagaguuaaugaaauucaa

SEQ ID NO: 183647 - RNA, 22 nt, Artificial Sequence
  Synthetic
aggcagaguuaaugaaauucaa

SEQ ID NO: 183648 - RNA, 23 nt, Artificial Sequence
  Synthetic
aaggcagaguuaaugaaauucaa

SEQ ID NO: 183649 - RNA, 24 nt, Artificial Sequence
  Synthetic
caaggcagaguuaaugaaauucaa

SEQ ID NO: 183650 - RNA, 18 nt, Artificial Sequence
  Synthetic
uacaauuucacaauucaa

SEQ ID NO: 183651 - RNA, 19 nt, Artificial Sequence
  Synthetic
guacaauuucacaauucaa

SEQ ID NO: 183652 - RNA, 20 nt, Artificial Sequence
  Synthetic
uguacaauuucacaauucaa

SEQ ID NO: 183653 - RNA, 21 nt, Artificial Sequence
  Synthetic
guguacaauuucacaauucaa

SEQ ID NO: 183654 - RNA, 22 nt, Artificial Sequence
  Synthetic
aguguacaauuucacaauucaa

SEQ ID NO: 183655 - RNA, 23 nt, Artificial Sequence
  Synthetic
aaguguacaauuucacaauucaa

SEQ ID NO: 183656 - RNA, 24 nt, Artificial Sequence
  Synthetic
aaaguguacaauuucacaauucaa

SEQ ID NO: 183657 - RNA, 18 nt, Artificial Sequence
  Synthetic
guugcaaaagcaauucaa

SEQ ID NO: 183658 - RNA, 19 nt, Artificial Sequence
  Synthetic
aguugcaaaagcaauucaa

SEQ ID NO: 183659 - RNA, 20 nt, Artificial Sequence
  Synthetic
aaguugcaaaagcaauucaa

SEQ ID NO: 183660 - RNA, 21 nt, Artificial Sequence
  Synthetic
aaaguugcaaaagcaauucaa

SEQ ID NO: 183661 - RNA, 22 nt, Artificial Sequence
  Synthetic
uaaaguugcaaaagcaauucaa

SEQ ID NO: 183662 - RNA, 23 nt, Artificial Sequence
  Synthetic
auaaaguugcaaaagcaauucaa

SEQ ID NO: 183663 - RNA, 24 nt, Artificial Sequence
  Synthetic
gauaaaguugcaaaagcaauucaa

SEQ ID NO: 183664 - RNA, 18 nt, Artificial Sequence
  Synthetic
gaaauugacagaauucaa

SEQ ID NO: 183665 - RNA, 19 nt, Artificial Sequence
  Synthetic
agaaauugacagaauucaa

SEQ ID NO: 183666 - RNA, 20 nt, Artificial Sequence
  Synthetic
cagaaauugacagaauucaa

SEQ ID NO: 183667 - RNA, 21 nt, Artificial Sequence
  Synthetic
gcagaaauugacagaauucaa

SEQ ID NO: 183668 - RNA, 22 nt, Artificial Sequence
  Synthetic
ugcagaaauugacagaauucaa

SEQ ID NO: 183669 - RNA, 23 nt, Artificial Sequence
  Synthetic
augcagaaauugacagaauucaa

SEQ ID NO: 183670 - RNA, 24 nt, Artificial Sequence
  Synthetic
gaugcagaaauugacagaauucaa

SEQ ID NO: 183671 - RNA, 18 nt, Artificial Sequence
  Synthetic
gguaccaagagaauucaa

SEQ ID NO: 183672 - RNA, 19 nt, Artificial Sequence
  Synthetic
ggguaccaagagaauucaa

SEQ ID NO: 183673 - RNA, 20 nt, Artificial Sequence
  Synthetic
aggguaccaagagaauucaa

SEQ ID NO: 183674 - RNA, 21 nt, Artificial Sequence
  Synthetic
aaggguaccaagagaauucaa

SEQ ID NO: 183675 - RNA, 22 nt, Artificial Sequence
  Synthetic
caaggguaccaagagaauucaa

SEQ ID NO: 183676 - RNA, 23 nt, Artificial Sequence
  Synthetic
acaaggguaccaagagaauucaa

SEQ ID NO: 183677 - RNA, 24 nt, Artificial Sequence
  Synthetic
gacaaggguaccaagagaauucaa

SEQ ID NO: 183678 - RNA, 18 nt, Artificial Sequence
  Synthetic
aauuaaauuggaauucaa

SEQ ID NO: 183679 - RNA, 19 nt, Artificial Sequence
  Synthetic
gaauuaaauuggaauucaa

SEQ ID NO: 183680 - RNA, 20 nt, Artificial Sequence
  Synthetic
agaauuaaauuggaauucaa

SEQ ID NO: 183681 - RNA, 21 nt, Artificial Sequence
  Synthetic
cagaauuaaauuggaauucaa

SEQ ID NO: 183682 - RNA, 22 nt, Artificial Sequence
  Synthetic
ucagaauuaaauuggaauucaa

SEQ ID NO: 183683 - RNA, 23 nt, Artificial Sequence
  Synthetic
gucagaauuaaauuggaauucaa

SEQ ID NO: 183684 - RNA, 24 nt, Artificial Sequence
  Synthetic
ugucagaauuaaauuggaauucaa

SEQ ID NO: 183685 - RNA, 18 nt, Artificial Sequence
  Synthetic
aagaguacaugaauucaa

SEQ ID NO: 183686 - RNA, 19 nt, Artificial Sequence
  Synthetic
uaagaguacaugaauucaa

SEQ ID NO: 183687 - RNA, 20 nt, Artificial Sequence
  Synthetic
cuaagaguacaugaauucaa

SEQ ID NO: 183688 - RNA, 21 nt, Artificial Sequence
  Synthetic
gcuaagaguacaugaauucaa

SEQ ID NO: 183689 - RNA, 22 nt, Artificial Sequence
  Synthetic
agcuaagaguacaugaauucaa

SEQ ID NO: 183690 - RNA, 23 nt, Artificial Sequence
  Synthetic
gagcuaagaguacaugaauucaa

SEQ ID NO: 183691 - RNA, 24 nt, Artificial Sequence
  Synthetic
ugagcuaagaguacaugaauucaa

SEQ ID NO: 183692 - RNA, 18 nt, Artificial Sequence
  Synthetic
gucauugcaauaauucaa

SEQ ID NO: 183693 - RNA, 19 nt, Artificial Sequence
  Synthetic
agucauugcaauaauucaa

SEQ ID NO: 183694 - RNA, 20 nt, Artificial Sequence
  Synthetic
gagucauugcaauaauucaa

SEQ ID NO: 183695 - RNA, 21 nt, Artificial Sequence
  Synthetic
ggagucauugcaauaauucaa

SEQ ID NO: 183696 - RNA, 22 nt, Artificial Sequence
  Synthetic
gggagucauugcaauaauucaa

SEQ ID NO: 183697 - RNA, 23 nt, Artificial Sequence
  Synthetic
agggagucauugcaauaauucaa

SEQ ID NO: 183698 - RNA, 24 nt, Artificial Sequence
  Synthetic
gagggagucauugcaauaauucaa

SEQ ID NO: 183699 - RNA, 18 nt, Artificial Sequence
  Synthetic
ugaauuacuauaauucaa

SEQ ID NO: 183700 - RNA, 19 nt, Artificial Sequence
  Synthetic
uugaauuacuauaauucaa

SEQ ID NO: 183701 - RNA, 20 nt, Artificial Sequence
  Synthetic
auugaauuacuauaauucaa

SEQ ID NO: 183702 - RNA, 21 nt, Artificial Sequence
  Synthetic
aauugaauuacuauaauucaa

SEQ ID NO: 183703 - RNA, 22 nt, Artificial Sequence
  Synthetic
uaauugaauuacuauaauucaa

SEQ ID NO: 183704 - RNA, 23 nt, Artificial Sequence
  Synthetic
uuaauugaauuacuauaauucaa

SEQ ID NO: 183705 - RNA, 24 nt, Artificial Sequence
  Synthetic
guuaauugaauuacuauaauucaa

SEQ ID NO: 183706 - RNA, 18 nt, Artificial Sequence
  Synthetic
auuuaauagaucauucaa

SEQ ID NO: 183707 - RNA, 19 nt, Artificial Sequence
  Synthetic
aauuuaauagaucauucaa

SEQ ID NO: 183708 - RNA, 20 nt, Artificial Sequence
  Synthetic
caauuuaauagaucauucaa

SEQ ID NO: 183709 - RNA, 21 nt, Artificial Sequence
  Synthetic
ucaauuuaauagaucauucaa

SEQ ID NO: 183710 - RNA, 22 nt, Artificial Sequence
  Synthetic
cucaauuuaauagaucauucaa

SEQ ID NO: 183711 - RNA, 23 nt, Artificial Sequence
  Synthetic
ccucaauuuaauagaucauucaa

SEQ ID NO: 183712 - RNA, 24 nt, Artificial Sequence
  Synthetic
accucaauuuaauagaucauucaa

SEQ ID NO: 183713 - RNA, 18 nt, Artificial Sequence
  Synthetic
acacauuggcucauucaa

SEQ ID NO: 183714 - RNA, 19 nt, Artificial Sequence
  Synthetic
cacacauuggcucauucaa

SEQ ID NO: 183715 - RNA, 20 nt, Artificial Sequence
  Synthetic
acacacauuggcucauucaa

SEQ ID NO: 183716 - RNA, 21 nt, Artificial Sequence
  Synthetic
aacacacauuggcucauucaa

SEQ ID NO: 183717 - RNA, 22 nt, Artificial Sequence
  Synthetic
gaacacacauuggcucauucaa

SEQ ID NO: 183718 - RNA, 23 nt, Artificial Sequence
  Synthetic
ggaacacacauuggcucauucaa

SEQ ID NO: 183719 - RNA, 24 nt, Artificial Sequence
  Synthetic
gggaacacacauuggcucauucaa

SEQ ID NO: 183720 - RNA, 18 nt, Artificial Sequence
  Synthetic
agaagugggcagauucaa

SEQ ID NO: 183721 - RNA, 19 nt, Artificial Sequence
  Synthetic
gagaagugggcagauucaa

SEQ ID NO: 183722 - RNA, 20 nt, Artificial Sequence
  Synthetic
agagaagugggcagauucaa

SEQ ID NO: 183723 - RNA, 21 nt, Artificial Sequence
  Synthetic
gagagaagugggcagauucaa

SEQ ID NO: 183724 - RNA, 22 nt, Artificial Sequence
  Synthetic
ggagagaagugggcagauucaa

SEQ ID NO: 183725 - RNA, 23 nt, Artificial Sequence
  Synthetic
uggagagaagugggcagauucaa

SEQ ID NO: 183726 - RNA, 24 nt, Artificial Sequence
  Synthetic
auggagagaagugggcagauucaa

SEQ ID NO: 183727 - RNA, 18 nt, Artificial Sequence
  Synthetic
gggagaccauagauucaa

SEQ ID NO: 183728 - RNA, 19 nt, Artificial Sequence
  Synthetic
ugggagaccauagauucaa

SEQ ID NO: 183729 - RNA, 20 nt, Artificial Sequence
  Synthetic
augggagaccauagauucaa

SEQ ID NO: 183730 - RNA, 21 nt, Artificial Sequence
  Synthetic
aaugggagaccauagauucaa

SEQ ID NO: 183731 - RNA, 22 nt, Artificial Sequence
  Synthetic
aaaugggagaccauagauucaa

SEQ ID NO: 183732 - RNA, 23 nt, Artificial Sequence
  Synthetic
caaaugggagaccauagauucaa

SEQ ID NO: 183733 - RNA, 24 nt, Artificial Sequence
  Synthetic
acaaaugggagaccauagauucaa

SEQ ID NO: 183734 - RNA, 18 nt, Artificial Sequence
  Synthetic
acuuuucuuuagauucaa

SEQ ID NO: 183735 - RNA, 19 nt, Artificial Sequence
  Synthetic
gacuuuucuuuagauucaa

SEQ ID NO: 183736 - RNA, 20 nt, Artificial Sequence
  Synthetic
ugacuuuucuuuagauucaa

SEQ ID NO: 183737 - RNA, 21 nt, Artificial Sequence
  Synthetic
uugacuuuucuuuagauucaa

SEQ ID NO: 183738 - RNA, 22 nt, Artificial Sequence
  Synthetic
auugacuuuucuuuagauucaa

SEQ ID NO: 183739 - RNA, 23 nt, Artificial Sequence
  Synthetic
cauugacuuuucuuuagauucaa

SEQ ID NO: 183740 - RNA, 24 nt, Artificial Sequence
  Synthetic
acauugacuuuucuuuagauucaa

SEQ ID NO: 183741 - RNA, 18 nt, Artificial Sequence
  Synthetic
cgcagcaucuggauucaa

SEQ ID NO: 183742 - RNA, 19 nt, Artificial Sequence
  Synthetic
acgcagcaucuggauucaa

SEQ ID NO: 183743 - RNA, 20 nt, Artificial Sequence
  Synthetic
cacgcagcaucuggauucaa

SEQ ID NO: 183744 - RNA, 21 nt, Artificial Sequence
  Synthetic
ccacgcagcaucuggauucaa

SEQ ID NO: 183745 - RNA, 22 nt, Artificial Sequence
  Synthetic
cccacgcagcaucuggauucaa

SEQ ID NO: 183746 - RNA, 23 nt, Artificial Sequence
  Synthetic
ccccacgcagcaucuggauucaa

SEQ ID NO: 183747 - RNA, 24 nt, Artificial Sequence
  Synthetic
cccccacgcagcaucuggauucaa

SEQ ID NO: 183748 - RNA, 18 nt, Artificial Sequence
  Synthetic
uuuaaagauuugauucaa

SEQ ID NO: 183749 - RNA, 19 nt, Artificial Sequence
  Synthetic
uuuuaaagauuugauucaa

SEQ ID NO: 183750 - RNA, 20 nt, Artificial Sequence
  Synthetic
cuuuuaaagauuugauucaa

SEQ ID NO: 183751 - RNA, 21 nt, Artificial Sequence
  Synthetic
ucuuuuaaagauuugauucaa

SEQ ID NO: 183752 - RNA, 22 nt, Artificial Sequence
  Synthetic
uucuuuuaaagauuugauucaa

SEQ ID NO: 183753 - RNA, 23 nt, Artificial Sequence
  Synthetic
auucuuuuaaagauuugauucaa

SEQ ID NO: 183754 - RNA, 24 nt, Artificial Sequence
  Synthetic
aauucuuuuaaagauuugauucaa

SEQ ID NO: 183755 - RNA, 18 nt, Artificial Sequence
  Synthetic
uacacaacaaauauucaa

SEQ ID NO: 183756 - RNA, 19 nt, Artificial Sequence
  Synthetic
guacacaacaaauauucaa

SEQ ID NO: 183757 - RNA, 20 nt, Artificial Sequence
  Synthetic
uguacacaacaaauauucaa

SEQ ID NO: 183758 - RNA, 21 nt, Artificial Sequence
  Synthetic
uuguacacaacaaauauucaa

SEQ ID NO: 183759 - RNA, 22 nt, Artificial Sequence
  Synthetic
auuguacacaacaaauauucaa

SEQ ID NO: 183760 - RNA, 23 nt, Artificial Sequence
  Synthetic
aauuguacacaacaaauauucaa

SEQ ID NO: 183761 - RNA, 24 nt, Artificial Sequence
  Synthetic
uaauuguacacaacaaauauucaa

SEQ ID NO: 183762 - RNA, 18 nt, Artificial Sequence
  Synthetic
ggaccaauacauauucaa

SEQ ID NO: 183763 - RNA, 19 nt, Artificial Sequence
  Synthetic
uggaccaauacauauucaa

SEQ ID NO: 183764 - RNA, 20 nt, Artificial Sequence
  Synthetic
cuggaccaauacauauucaa

SEQ ID NO: 183765 - RNA, 21 nt, Artificial Sequence
  Synthetic
acuggaccaauacauauucaa

SEQ ID NO: 183766 - RNA, 22 nt, Artificial Sequence
  Synthetic
cacuggaccaauacauauucaa

SEQ ID NO: 183767 - RNA, 23 nt, Artificial Sequence
  Synthetic
ccacuggaccaauacauauucaa

SEQ ID NO: 183768 - RNA, 24 nt, Artificial Sequence
  Synthetic
cccacuggaccaauacauauucaa

SEQ ID NO: 183769 - RNA, 18 nt, Artificial Sequence
  Synthetic
caugugugaauacuucaa

SEQ ID NO: 183770 - RNA, 19 nt, Artificial Sequence
  Synthetic
ccaugugugaauacuucaa

SEQ ID NO: 183771 - RNA, 20 nt, Artificial Sequence
  Synthetic
accaugugugaauacuucaa

SEQ ID NO: 183772 - RNA, 21 nt, Artificial Sequence
  Synthetic
aaccaugugugaauacuucaa

SEQ ID NO: 183773 - RNA, 22 nt, Artificial Sequence
  Synthetic
aaaccaugugugaauacuucaa

SEQ ID NO: 183774 - RNA, 23 nt, Artificial Sequence
  Synthetic
aaaaccaugugugaauacuucaa

SEQ ID NO: 183775 - RNA, 24 nt, Artificial Sequence
  Synthetic
gaaaaccaugugugaauacuucaa

SEQ ID NO: 183776 - RNA, 18 nt, Artificial Sequence
  Synthetic
cacagaacuuuacuucaa

SEQ ID NO: 183777 - RNA, 19 nt, Artificial Sequence
  Synthetic
ucacagaacuuuacuucaa

SEQ ID NO: 183778 - RNA, 20 nt, Artificial Sequence
  Synthetic
cucacagaacuuuacuucaa

SEQ ID NO: 183779 - RNA, 21 nt, Artificial Sequence
  Synthetic
acucacagaacuuuacuucaa

SEQ ID NO: 183780 - RNA, 22 nt, Artificial Sequence
  Synthetic
aacucacagaacuuuacuucaa

SEQ ID NO: 183781 - RNA, 23 nt, Artificial Sequence
  Synthetic
gaacucacagaacuuuacuucaa

SEQ ID NO: 183782 - RNA, 24 nt, Artificial Sequence
  Synthetic
agaacucacagaacuuuacuucaa

SEQ ID NO: 183783 - RNA, 18 nt, Artificial Sequence
  Synthetic
ugugcaggucaccuucaa

SEQ ID NO: 183784 - RNA, 19 nt, Artificial Sequence
  Synthetic
gugugcaggucaccuucaa

SEQ ID NO: 183785 - RNA, 20 nt, Artificial Sequence
  Synthetic
agugugcaggucaccuucaa

SEQ ID NO: 183786 - RNA, 21 nt, Artificial Sequence
  Synthetic
aagugugcaggucaccuucaa

SEQ ID NO: 183787 - RNA, 22 nt, Artificial Sequence
  Synthetic
gaagugugcaggucaccuucaa

SEQ ID NO: 183788 - RNA, 23 nt, Artificial Sequence
  Synthetic
agaagugugcaggucaccuucaa

SEQ ID NO: 183789 - RNA, 24 nt, Artificial Sequence
  Synthetic
aagaagugugcaggucaccuucaa

SEQ ID NO: 183790 - RNA, 18 nt, Artificial Sequence
  Synthetic
cauuucacaggccuucaa

SEQ ID NO: 183791 - RNA, 19 nt, Artificial Sequence
  Synthetic
ucauuucacaggccuucaa

SEQ ID NO: 183792 - RNA, 20 nt, Artificial Sequence
  Synthetic
cucauuucacaggccuucaa

SEQ ID NO: 183793 - RNA, 21 nt, Artificial Sequence
  Synthetic
ucucauuucacaggccuucaa

SEQ ID NO: 183794 - RNA, 22 nt, Artificial Sequence
  Synthetic
aucucauuucacaggccuucaa

SEQ ID NO: 183795 - RNA, 23 nt, Artificial Sequence
  Synthetic
caucucauuucacaggccuucaa

SEQ ID NO: 183796 - RNA, 24 nt, Artificial Sequence
  Synthetic
ucaucucauuucacaggccuucaa

SEQ ID NO: 183797 - RNA, 18 nt, Artificial Sequence
  Synthetic
cuacauauguagcuucaa

SEQ ID NO: 183798 - RNA, 19 nt, Artificial Sequence
  Synthetic
ccuacauauguagcuucaa

SEQ ID NO: 183799 - RNA, 20 nt, Artificial Sequence
  Synthetic
accuacauauguagcuucaa

SEQ ID NO: 183800 - RNA, 21 nt, Artificial Sequence
  Synthetic
gaccuacauauguagcuucaa

SEQ ID NO: 183801 - RNA, 22 nt, Artificial Sequence
  Synthetic
agaccuacauauguagcuucaa

SEQ ID NO: 183802 - RNA, 23 nt, Artificial Sequence
  Synthetic
uagaccuacauauguagcuucaa

SEQ ID NO: 183803 - RNA, 24 nt, Artificial Sequence
  Synthetic
uuagaccuacauauguagcuucaa

SEQ ID NO: 183804 - RNA, 18 nt, Artificial Sequence
  Synthetic
uuucuuuuacugcuucaa

SEQ ID NO: 183805 - RNA, 19 nt, Artificial Sequence
  Synthetic
auuucuuuuacugcuucaa

SEQ ID NO: 183806 - RNA, 20 nt, Artificial Sequence
  Synthetic
aauuucuuuuacugcuucaa

SEQ ID NO: 183807 - RNA, 21 nt, Artificial Sequence
  Synthetic
aaauuucuuuuacugcuucaa

SEQ ID NO: 183808 - RNA, 22 nt, Artificial Sequence
  Synthetic
gaaauuucuuuuacugcuucaa

SEQ ID NO: 183809 - RNA, 23 nt, Artificial Sequence
  Synthetic
ugaaauuucuuuuacugcuucaa

SEQ ID NO: 183810 - RNA, 24 nt, Artificial Sequence
  Synthetic
uugaaauuucuuuuacugcuucaa

SEQ ID NO: 183811 - RNA, 18 nt, Artificial Sequence
  Synthetic
ccaagccaacaucuucaa

SEQ ID NO: 183812 - RNA, 19 nt, Artificial Sequence
  Synthetic
uccaagccaacaucuucaa

SEQ ID NO: 183813 - RNA, 20 nt, Artificial Sequence
  Synthetic
auccaagccaacaucuucaa

SEQ ID NO: 183814 - RNA, 21 nt, Artificial Sequence
  Synthetic
aauccaagccaacaucuucaa

SEQ ID NO: 183815 - RNA, 22 nt, Artificial Sequence
  Synthetic
uaauccaagccaacaucuucaa

SEQ ID NO: 183816 - RNA, 23 nt, Artificial Sequence
  Synthetic
cuaauccaagccaacaucuucaa

SEQ ID NO: 183817 - RNA, 24 nt, Artificial Sequence
  Synthetic
ucuaauccaagccaacaucuucaa

SEQ ID NO: 183818 - RNA, 18 nt, Artificial Sequence
  Synthetic
uuagcuucucaucuucaa

SEQ ID NO: 183819 - RNA, 19 nt, Artificial Sequence
  Synthetic
uuuagcuucucaucuucaa

SEQ ID NO: 183820 - RNA, 20 nt, Artificial Sequence
  Synthetic
auuuagcuucucaucuucaa

SEQ ID NO: 183821 - RNA, 21 nt, Artificial Sequence
  Synthetic
aauuuagcuucucaucuucaa

SEQ ID NO: 183822 - RNA, 22 nt, Artificial Sequence
  Synthetic
uaauuuagcuucucaucuucaa

SEQ ID NO: 183823 - RNA, 23 nt, Artificial Sequence
  Synthetic
uuaauuuagcuucucaucuucaa

SEQ ID NO: 183824 - RNA, 24 nt, Artificial Sequence
  Synthetic
auuaauuuagcuucucaucuucaa

SEQ ID NO: 183825 - RNA, 18 nt, Artificial Sequence
  Synthetic
aaugagcauugucuucaa

SEQ ID NO: 183826 - RNA, 19 nt, Artificial Sequence
  Synthetic
aaaugagcauugucuucaa

SEQ ID NO: 183827 - RNA, 20 nt, Artificial Sequence
  Synthetic
uaaaugagcauugucuucaa

SEQ ID NO: 183828 - RNA, 21 nt, Artificial Sequence
  Synthetic
guaaaugagcauugucuucaa

SEQ ID NO: 183829 - RNA, 22 nt, Artificial Sequence
  Synthetic
aguaaaugagcauugucuucaa

SEQ ID NO: 183830 - RNA, 23 nt, Artificial Sequence
  Synthetic
uaguaaaugagcauugucuucaa

SEQ ID NO: 183831 - RNA, 24 nt, Artificial Sequence
  Synthetic
auaguaaaugagcauugucuucaa

SEQ ID NO: 183832 - RNA, 18 nt, Artificial Sequence
  Synthetic
cucucugcuuuucuucaa

SEQ ID NO: 183833 - RNA, 19 nt, Artificial Sequence
  Synthetic
ucucucugcuuuucuucaa

SEQ ID NO: 183834 - RNA, 20 nt, Artificial Sequence
  Synthetic
uucucucugcuuuucuucaa

SEQ ID NO: 183835 - RNA, 21 nt, Artificial Sequence
  Synthetic
cuucucucugcuuuucuucaa

SEQ ID NO: 183836 - RNA, 22 nt, Artificial Sequence
  Synthetic
ucuucucucugcuuuucuucaa

SEQ ID NO: 183837 - RNA, 23 nt, Artificial Sequence
  Synthetic
gucuucucucugcuuuucuucaa

SEQ ID NO: 183838 - RNA, 24 nt, Artificial Sequence
  Synthetic
ugucuucucucugcuuuucuucaa

SEQ ID NO: 183839 - RNA, 18 nt, Artificial Sequence
  Synthetic
cgauagauaccaguucaa

SEQ ID NO: 183840 - RNA, 19 nt, Artificial Sequence
  Synthetic
ucgauagauaccaguucaa

SEQ ID NO: 183841 - RNA, 20 nt, Artificial Sequence
  Synthetic
cucgauagauaccaguucaa

SEQ ID NO: 183842 - RNA, 21 nt, Artificial Sequence
  Synthetic
ccucgauagauaccaguucaa

SEQ ID NO: 183843 - RNA, 22 nt, Artificial Sequence
  Synthetic
cccucgauagauaccaguucaa

SEQ ID NO: 183844 - RNA, 23 nt, Artificial Sequence
  Synthetic
acccucgauagauaccaguucaa

SEQ ID NO: 183845 - RNA, 24 nt, Artificial Sequence
  Synthetic
uacccucgauagauaccaguucaa

SEQ ID NO: 183846 - RNA, 18 nt, Artificial Sequence
  Synthetic
uuguaucaaugaguucaa

SEQ ID NO: 183847 - RNA, 19 nt, Artificial Sequence
  Synthetic
auuguaucaaugaguucaa

SEQ ID NO: 183848 - RNA, 20 nt, Artificial Sequence
  Synthetic
cauuguaucaaugaguucaa

SEQ ID NO: 183849 - RNA, 21 nt, Artificial Sequence
  Synthetic
acauuguaucaaugaguucaa

SEQ ID NO: 183850 - RNA, 22 nt, Artificial Sequence
  Synthetic
uacauuguaucaaugaguucaa

SEQ ID NO: 183851 - RNA, 23 nt, Artificial Sequence
  Synthetic
auacauuguaucaaugaguucaa

SEQ ID NO: 183852 - RNA, 24 nt, Artificial Sequence
  Synthetic
uauacauuguaucaaugaguucaa

SEQ ID NO: 183853 - RNA, 18 nt, Artificial Sequence
  Synthetic
uaaacccacugaguucaa

SEQ ID NO: 183854 - RNA, 19 nt, Artificial Sequence
  Synthetic
auaaacccacugaguucaa

SEQ ID NO: 183855 - RNA, 20 nt, Artificial Sequence
  Synthetic
aauaaacccacugaguucaa

SEQ ID NO: 183856 - RNA, 21 nt, Artificial Sequence
  Synthetic
aaauaaacccacugaguucaa

SEQ ID NO: 183857 - RNA, 22 nt, Artificial Sequence
  Synthetic
caaauaaacccacugaguucaa

SEQ ID NO: 183858 - RNA, 23 nt, Artificial Sequence
  Synthetic
ccaaauaaacccacugaguucaa

SEQ ID NO: 183859 - RNA, 24 nt, Artificial Sequence
  Synthetic
cccaaauaaacccacugaguucaa

SEQ ID NO: 183860 - RNA, 18 nt, Artificial Sequence
  Synthetic
caagggcacugaguucaa

SEQ ID NO: 183861 - RNA, 19 nt, Artificial Sequence
  Synthetic
gcaagggcacugaguucaa

SEQ ID NO: 183862 - RNA, 20 nt, Artificial Sequence
  Synthetic
ggcaagggcacugaguucaa

SEQ ID NO: 183863 - RNA, 21 nt, Artificial Sequence
  Synthetic
gggcaagggcacugaguucaa

SEQ ID NO: 183864 - RNA, 22 nt, Artificial Sequence
  Synthetic
agggcaagggcacugaguucaa

SEQ ID NO: 183865 - RNA, 23 nt, Artificial Sequence
  Synthetic
aagggcaagggcacugaguucaa

SEQ ID NO: 183866 - RNA, 24 nt, Artificial Sequence
  Synthetic
caagggcaagggcacugaguucaa

SEQ ID NO: 183867 - RNA, 18 nt, Artificial Sequence
  Synthetic
ggccauuccugaguucaa

SEQ ID NO: 183868 - RNA, 19 nt, Artificial Sequence
  Synthetic
uggccauuccugaguucaa

SEQ ID NO: 183869 - RNA, 20 nt, Artificial Sequence
  Synthetic
auggccauuccugaguucaa

SEQ ID NO: 183870 - RNA, 21 nt, Artificial Sequence
  Synthetic
cauggccauuccugaguucaa

SEQ ID NO: 183871 - RNA, 22 nt, Artificial Sequence
  Synthetic
acauggccauuccugaguucaa

SEQ ID NO: 183872 - RNA, 23 nt, Artificial Sequence
  Synthetic
cacauggccauuccugaguucaa

SEQ ID NO: 183873 - RNA, 24 nt, Artificial Sequence
  Synthetic
ucacauggccauuccugaguucaa

SEQ ID NO: 183874 - RNA, 18 nt, Artificial Sequence
  Synthetic
gaauguauuugaguucaa

SEQ ID NO: 183875 - RNA, 19 nt, Artificial Sequence
  Synthetic
agaauguauuugaguucaa

SEQ ID NO: 183876 - RNA, 20 nt, Artificial Sequence
  Synthetic
uagaauguauuugaguucaa

SEQ ID NO: 183877 - RNA, 21 nt, Artificial Sequence
  Synthetic
guagaauguauuugaguucaa

SEQ ID NO: 183878 - RNA, 22 nt, Artificial Sequence
  Synthetic
uguagaauguauuugaguucaa

SEQ ID NO: 183879 - RNA, 23 nt, Artificial Sequence
  Synthetic
uuguagaauguauuugaguucaa

SEQ ID NO: 183880 - RNA, 24 nt, Artificial Sequence
  Synthetic
auuguagaauguauuugaguucaa

SEQ ID NO: 183881 - RNA, 18 nt, Artificial Sequence
  Synthetic
ugacacaugguaguucaa

SEQ ID NO: 183882 - RNA, 19 nt, Artificial Sequence
  Synthetic
cugacacaugguaguucaa

SEQ ID NO: 183883 - RNA, 20 nt, Artificial Sequence
  Synthetic
acugacacaugguaguucaa

SEQ ID NO: 183884 - RNA, 21 nt, Artificial Sequence
  Synthetic
cacugacacaugguaguucaa

SEQ ID NO: 183885 - RNA, 22 nt, Artificial Sequence
  Synthetic
ccacugacacaugguaguucaa

SEQ ID NO: 183886 - RNA, 23 nt, Artificial Sequence
  Synthetic
accacugacacaugguaguucaa

SEQ ID NO: 183887 - RNA, 24 nt, Artificial Sequence
  Synthetic
aaccacugacacaugguaguucaa

SEQ ID NO: 183888 - RNA, 18 nt, Artificial Sequence
  Synthetic
aguuugcucaagguucaa

SEQ ID NO: 183889 - RNA, 19 nt, Artificial Sequence
  Synthetic
caguuugcucaagguucaa

SEQ ID NO: 183890 - RNA, 20 nt, Artificial Sequence
  Synthetic
acaguuugcucaagguucaa

SEQ ID NO: 183891 - RNA, 21 nt, Artificial Sequence
  Synthetic
uacaguuugcucaagguucaa

SEQ ID NO: 183892 - RNA, 22 nt, Artificial Sequence
  Synthetic
cuacaguuugcucaagguucaa

SEQ ID NO: 183893 - RNA, 23 nt, Artificial Sequence
  Synthetic
ucuacaguuugcucaagguucaa

SEQ ID NO: 183894 - RNA, 24 nt, Artificial Sequence
  Synthetic
aucuacaguuugcucaagguucaa

SEQ ID NO: 183895 - RNA, 18 nt, Artificial Sequence
  Synthetic
aauuauuaugagguucaa

SEQ ID NO: 183896 - RNA, 19 nt, Artificial Sequence
  Synthetic
aaauuauuaugagguucaa

SEQ ID NO: 183897 - RNA, 20 nt, Artificial Sequence
  Synthetic
caaauuauuaugagguucaa

SEQ ID NO: 183898 - RNA, 21 nt, Artificial Sequence
  Synthetic
ucaaauuauuaugagguucaa

SEQ ID NO: 183899 - RNA, 22 nt, Artificial Sequence
  Synthetic
uucaaauuauuaugagguucaa

SEQ ID NO: 183900 - RNA, 23 nt, Artificial Sequence
  Synthetic
uuucaaauuauuaugagguucaa

SEQ ID NO: 183901 - RNA, 24 nt, Artificial Sequence
  Synthetic
uuuucaaauuauuaugagguucaa

SEQ ID NO: 183902 - RNA, 18 nt, Artificial Sequence
  Synthetic
gcaaauggcaggguucaa

SEQ ID NO: 183903 - RNA, 19 nt, Artificial Sequence
  Synthetic
agcaaauggcaggguucaa

SEQ ID NO: 183904 - RNA, 20 nt, Artificial Sequence
  Synthetic
cagcaaauggcaggguucaa

SEQ ID NO: 183905 - RNA, 21 nt, Artificial Sequence
  Synthetic
acagcaaauggcaggguucaa

SEQ ID NO: 183906 - RNA, 22 nt, Artificial Sequence
  Synthetic
uacagcaaauggcaggguucaa

SEQ ID NO: 183907 - RNA, 23 nt, Artificial Sequence
  Synthetic
cuacagcaaauggcaggguucaa

SEQ ID NO: 183908 - RNA, 24 nt, Artificial Sequence
  Synthetic
ucuacagcaaauggcaggguucaa

SEQ ID NO: 183909 - RNA, 18 nt, Artificial Sequence
  Synthetic
ugcuacauguggguucaa

SEQ ID NO: 183910 - RNA, 19 nt, Artificial Sequence
  Synthetic
gugcuacauguggguucaa

SEQ ID NO: 183911 - RNA, 20 nt, Artificial Sequence
  Synthetic
ggugcuacauguggguucaa

SEQ ID NO: 183912 - RNA, 21 nt, Artificial Sequence
  Synthetic
aggugcuacauguggguucaa

SEQ ID NO: 183913 - RNA, 22 nt, Artificial Sequence
  Synthetic
aaggugcuacauguggguucaa

SEQ ID NO: 183914 - RNA, 23 nt, Artificial Sequence
  Synthetic
caaggugcuacauguggguucaa

SEQ ID NO: 183915 - RNA, 24 nt, Artificial Sequence
  Synthetic
gcaaggugcuacauguggguucaa

SEQ ID NO: 183916 - RNA, 18 nt, Artificial Sequence
  Synthetic
aagacaaaacugguucaa

SEQ ID NO: 183917 - RNA, 19 nt, Artificial Sequence
  Synthetic
gaagacaaaacugguucaa

SEQ ID NO: 183918 - RNA, 20 nt, Artificial Sequence
  Synthetic
ggaagacaaaacugguucaa

SEQ ID NO: 183919 - RNA, 21 nt, Artificial Sequence
  Synthetic
aggaagacaaaacugguucaa

SEQ ID NO: 183920 - RNA, 22 nt, Artificial Sequence
  Synthetic
uaggaagacaaaacugguucaa

SEQ ID NO: 183921 - RNA, 23 nt, Artificial Sequence
  Synthetic
guaggaagacaaaacugguucaa

SEQ ID NO: 183922 - RNA, 24 nt, Artificial Sequence
  Synthetic
gguaggaagacaaaacugguucaa

SEQ ID NO: 183923 - RNA, 18 nt, Artificial Sequence
  Synthetic
gcgauuuaggugguucaa

SEQ ID NO: 183924 - RNA, 19 nt, Artificial Sequence
  Synthetic
agcgauuuaggugguucaa

SEQ ID NO: 183925 - RNA, 20 nt, Artificial Sequence
  Synthetic
cagcgauuuaggugguucaa

SEQ ID NO: 183926 - RNA, 21 nt, Artificial Sequence
  Synthetic
acagcgauuuaggugguucaa

SEQ ID NO: 183927 - RNA, 22 nt, Artificial Sequence
  Synthetic
aacagcgauuuaggugguucaa

SEQ ID NO: 183928 - RNA, 23 nt, Artificial Sequence
  Synthetic
aaacagcgauuuaggugguucaa

SEQ ID NO: 183929 - RNA, 24 nt, Artificial Sequence
  Synthetic
gaaacagcgauuuaggugguucaa

SEQ ID NO: 183930 - RNA, 18 nt, Artificial Sequence
  Synthetic
uaguuacaguugguucaa

SEQ ID NO: 183931 - RNA, 19 nt, Artificial Sequence
  Synthetic
uuaguuacaguugguucaa

SEQ ID NO: 183932 - RNA, 20 nt, Artificial Sequence
  Synthetic
guuaguuacaguugguucaa

SEQ ID NO: 183933 - RNA, 21 nt, Artificial Sequence
  Synthetic
uguuaguuacaguugguucaa

SEQ ID NO: 183934 - RNA, 22 nt, Artificial Sequence
  Synthetic
auguuaguuacaguugguucaa

SEQ ID NO: 183935 - RNA, 23 nt, Artificial Sequence
  Synthetic
gauguuaguuacaguugguucaa

SEQ ID NO: 183936 - RNA, 24 nt, Artificial Sequence
  Synthetic
agauguuaguuacaguugguucaa

SEQ ID NO: 183937 - RNA, 18 nt, Artificial Sequence
  Synthetic
aauuugauuaauguucaa

SEQ ID NO: 183938 - RNA, 19 nt, Artificial Sequence
  Synthetic
caauuugauuaauguucaa

SEQ ID NO: 183939 - RNA, 20 nt, Artificial Sequence
  Synthetic
gcaauuugauuaauguucaa

SEQ ID NO: 183940 - RNA, 21 nt, Artificial Sequence
  Synthetic
agcaauuugauuaauguucaa

SEQ ID NO: 183941 - RNA, 22 nt, Artificial Sequence
  Synthetic
aagcaauuugauuaauguucaa

SEQ ID NO: 183942 - RNA, 23 nt, Artificial Sequence
  Synthetic
gaagcaauuugauuaauguucaa

SEQ ID NO: 183943 - RNA, 24 nt, Artificial Sequence
  Synthetic
agaagcaauuugauuaauguucaa

SEQ ID NO: 183944 - RNA, 18 nt, Artificial Sequence
  Synthetic
augcaaugccauguucaa

SEQ ID NO: 183945 - RNA, 19 nt, Artificial Sequence
  Synthetic
uaugcaaugccauguucaa

SEQ ID NO: 183946 - RNA, 20 nt, Artificial Sequence
  Synthetic
uuaugcaaugccauguucaa

SEQ ID NO: 183947 - RNA, 21 nt, Artificial Sequence
  Synthetic
uuuaugcaaugccauguucaa

SEQ ID NO: 183948 - RNA, 22 nt, Artificial Sequence
  Synthetic
auuuaugcaaugccauguucaa

SEQ ID NO: 183949 - RNA, 23 nt, Artificial Sequence
  Synthetic
cauuuaugcaaugccauguucaa

SEQ ID NO: 183950 - RNA, 24 nt, Artificial Sequence
  Synthetic
gcauuuaugcaaugccauguucaa

SEQ ID NO: 183951 - RNA, 18 nt, Artificial Sequence
  Synthetic
uugagaaaagauguucaa

SEQ ID NO: 183952 - RNA, 19 nt, Artificial Sequence
  Synthetic
uuugagaaaagauguucaa

SEQ ID NO: 183953 - RNA, 20 nt, Artificial Sequence
  Synthetic
uuuugagaaaagauguucaa

SEQ ID NO: 183954 - RNA, 21 nt, Artificial Sequence
  Synthetic
auuuugagaaaagauguucaa

SEQ ID NO: 183955 - RNA, 22 nt, Artificial Sequence
  Synthetic
uauuuugagaaaagauguucaa

SEQ ID NO: 183956 - RNA, 23 nt, Artificial Sequence
  Synthetic
cuauuuugagaaaagauguucaa

SEQ ID NO: 183957 - RNA, 24 nt, Artificial Sequence
  Synthetic
ucuauuuugagaaaagauguucaa

SEQ ID NO: 183958 - RNA, 18 nt, Artificial Sequence
  Synthetic
uagauuguauauguucaa

SEQ ID NO: 183959 - RNA, 19 nt, Artificial Sequence
  Synthetic
auagauuguauauguucaa

SEQ ID NO: 183960 - RNA, 20 nt, Artificial Sequence
  Synthetic
uauagauuguauauguucaa

SEQ ID NO: 183961 - RNA, 21 nt, Artificial Sequence
  Synthetic
auauagauuguauauguucaa

SEQ ID NO: 183962 - RNA, 22 nt, Artificial Sequence
  Synthetic
uauauagauuguauauguucaa

SEQ ID NO: 183963 - RNA, 23 nt, Artificial Sequence
  Synthetic
auauauagauuguauauguucaa

SEQ ID NO: 183964 - RNA, 24 nt, Artificial Sequence
  Synthetic
uauauauagauuguauauguucaa

SEQ ID NO: 183965 - RNA, 18 nt, Artificial Sequence
  Synthetic
gauguauuuucuguucaa

SEQ ID NO: 183966 - RNA, 19 nt, Artificial Sequence
  Synthetic
agauguauuuucuguucaa

SEQ ID NO: 183967 - RNA, 20 nt, Artificial Sequence
  Synthetic
gagauguauuuucuguucaa

SEQ ID NO: 183968 - RNA, 21 nt, Artificial Sequence
  Synthetic
agagauguauuuucuguucaa

SEQ ID NO: 183969 - RNA, 22 nt, Artificial Sequence
  Synthetic
uagagauguauuuucuguucaa

SEQ ID NO: 183970 - RNA, 23 nt, Artificial Sequence
  Synthetic
uuagagauguauuuucuguucaa

SEQ ID NO: 183971 - RNA, 24 nt, Artificial Sequence
  Synthetic
uuuagagauguauuuucuguucaa

SEQ ID NO: 183972 - RNA, 18 nt, Artificial Sequence
  Synthetic
acccuccauuuuguucaa

SEQ ID NO: 183973 - RNA, 19 nt, Artificial Sequence
  Synthetic
aacccuccauuuuguucaa

SEQ ID NO: 183974 - RNA, 20 nt, Artificial Sequence
  Synthetic
caacccuccauuuuguucaa

SEQ ID NO: 183975 - RNA, 21 nt, Artificial Sequence
  Synthetic
ucaacccuccauuuuguucaa

SEQ ID NO: 183976 - RNA, 22 nt, Artificial Sequence
  Synthetic
gucaacccuccauuuuguucaa

SEQ ID NO: 183977 - RNA, 23 nt, Artificial Sequence
  Synthetic
ugucaacccuccauuuuguucaa

SEQ ID NO: 183978 - RNA, 24 nt, Artificial Sequence
  Synthetic
uugucaacccuccauuuuguucaa

SEQ ID NO: 183979 - RNA, 18 nt, Artificial Sequence
  Synthetic
ggggcaauauaauuucaa

SEQ ID NO: 183980 - RNA, 19 nt, Artificial Sequence
  Synthetic
gggggcaauauaauuucaa

SEQ ID NO: 183981 - RNA, 20 nt, Artificial Sequence
  Synthetic
ugggggcaauauaauuucaa

SEQ ID NO: 183982 - RNA, 21 nt, Artificial Sequence
  Synthetic
uugggggcaauauaauuucaa

SEQ ID NO: 183983 - RNA, 22 nt, Artificial Sequence
  Synthetic
uuugggggcaauauaauuucaa

SEQ ID NO: 183984 - RNA, 23 nt, Artificial Sequence
  Synthetic
guuugggggcaauauaauuucaa

SEQ ID NO: 183985 - RNA, 24 nt, Artificial Sequence
  Synthetic
uguuugggggcaauauaauuucaa

SEQ ID NO: 183986 - RNA, 18 nt, Artificial Sequence
  Synthetic
uaauaggaaacauuucaa

SEQ ID NO: 183987 - RNA, 19 nt, Artificial Sequence
  Synthetic
guaauaggaaacauuucaa

SEQ ID NO: 183988 - RNA, 20 nt, Artificial Sequence
  Synthetic
gguaauaggaaacauuucaa

SEQ ID NO: 183989 - RNA, 21 nt, Artificial Sequence
  Synthetic
cgguaauaggaaacauuucaa

SEQ ID NO: 183990 - RNA, 22 nt, Artificial Sequence
  Synthetic
acgguaauaggaaacauuucaa

SEQ ID NO: 183991 - RNA, 23 nt, Artificial Sequence
  Synthetic
cacgguaauaggaaacauuucaa

SEQ ID NO: 183992 - RNA, 24 nt, Artificial Sequence
  Synthetic
acacgguaauaggaaacauuucaa

SEQ ID NO: 183993 - RNA, 18 nt, Artificial Sequence
  Synthetic
caaacauggagauuucaa

SEQ ID NO: 183994 - RNA, 19 nt, Artificial Sequence
  Synthetic
acaaacauggagauuucaa

SEQ ID NO: 183995 - RNA, 20 nt, Artificial Sequence
  Synthetic
cacaaacauggagauuucaa

SEQ ID NO: 183996 - RNA, 21 nt, Artificial Sequence
  Synthetic
acacaaacauggagauuucaa

SEQ ID NO: 183997 - RNA, 22 nt, Artificial Sequence
  Synthetic
cacacaaacauggagauuucaa

SEQ ID NO: 183998 - RNA, 23 nt, Artificial Sequence
  Synthetic
acacacaaacauggagauuucaa

SEQ ID NO: 183999 - RNA, 24 nt, Artificial Sequence
  Synthetic
cacacacaaacauggagauuucaa

SEQ ID NO: 184000 - RNA, 18 nt, Artificial Sequence
  Synthetic
uaagguuacauauuucaa

SEQ ID NO: 184001 - RNA, 19 nt, Artificial Sequence
  Synthetic
uuaagguuacauauuucaa

SEQ ID NO: 184002 - RNA, 20 nt, Artificial Sequence
  Synthetic
guuaagguuacauauuucaa

SEQ ID NO: 184003 - RNA, 21 nt, Artificial Sequence
  Synthetic
gguuaagguuacauauuucaa

SEQ ID NO: 184004 - RNA, 22 nt, Artificial Sequence
  Synthetic
ugguuaagguuacauauuucaa

SEQ ID NO: 184005 - RNA, 23 nt, Artificial Sequence
  Synthetic
cugguuaagguuacauauuucaa

SEQ ID NO: 184006 - RNA, 24 nt, Artificial Sequence
  Synthetic
ucugguuaagguuacauauuucaa

SEQ ID NO: 184007 - RNA, 18 nt, Artificial Sequence
  Synthetic
aaauaugugguauuucaa

SEQ ID NO: 184008 - RNA, 19 nt, Artificial Sequence
  Synthetic
uaaauaugugguauuucaa

SEQ ID NO: 184009 - RNA, 20 nt, Artificial Sequence
  Synthetic
auaaauaugugguauuucaa

SEQ ID NO: 184010 - RNA, 21 nt, Artificial Sequence
  Synthetic
aauaaauaugugguauuucaa

SEQ ID NO: 184011 - RNA, 22 nt, Artificial Sequence
  Synthetic
aaauaaauaugugguauuucaa

SEQ ID NO: 184012 - RNA, 23 nt, Artificial Sequence
  Synthetic
aaaauaaauaugugguauuucaa

SEQ ID NO: 184013 - RNA, 24 nt, Artificial Sequence
  Synthetic
gaaaauaaauaugugguauuucaa

SEQ ID NO: 184014 - RNA, 18 nt, Artificial Sequence
  Synthetic
aggugggauguauuucaa

SEQ ID NO: 184015 - RNA, 19 nt, Artificial Sequence
  Synthetic
aaggugggauguauuucaa

SEQ ID NO: 184016 - RNA, 20 nt, Artificial Sequence
  Synthetic
aaaggugggauguauuucaa

SEQ ID NO: 184017 - RNA, 21 nt, Artificial Sequence
  Synthetic
gaaaggugggauguauuucaa

SEQ ID NO: 184018 - RNA, 22 nt, Artificial Sequence
  Synthetic
ggaaaggugggauguauuucaa

SEQ ID NO: 184019 - RNA, 23 nt, Artificial Sequence
  Synthetic
aggaaaggugggauguauuucaa

SEQ ID NO: 184020 - RNA, 24 nt, Artificial Sequence
  Synthetic
uaggaaaggugggauguauuucaa

SEQ ID NO: 184021 - RNA, 18 nt, Artificial Sequence
  Synthetic
uauucaauuuuauuucaa

SEQ ID NO: 184022 - RNA, 19 nt, Artificial Sequence
  Synthetic
auauucaauuuuauuucaa

SEQ ID NO: 184023 - RNA, 20 nt, Artificial Sequence
  Synthetic
uauauucaauuuuauuucaa

SEQ ID NO: 184024 - RNA, 21 nt, Artificial Sequence
  Synthetic
guauauucaauuuuauuucaa

SEQ ID NO: 184025 - RNA, 22 nt, Artificial Sequence
  Synthetic
aguauauucaauuuuauuucaa

SEQ ID NO: 184026 - RNA, 23 nt, Artificial Sequence
  Synthetic
aaguauauucaauuuuauuucaa

SEQ ID NO: 184027 - RNA, 24 nt, Artificial Sequence
  Synthetic
uaaguauauucaauuuuauuucaa

SEQ ID NO: 184028 - RNA, 18 nt, Artificial Sequence
  Synthetic
cuuugaaaaagcuuucaa

SEQ ID NO: 184029 - RNA, 19 nt, Artificial Sequence
  Synthetic
acuuugaaaaagcuuucaa

SEQ ID NO: 184030 - RNA, 20 nt, Artificial Sequence
  Synthetic
cacuuugaaaaagcuuucaa

SEQ ID NO: 184031 - RNA, 21 nt, Artificial Sequence
  Synthetic
gcacuuugaaaaagcuuucaa

SEQ ID NO: 184032 - RNA, 22 nt, Artificial Sequence
  Synthetic
agcacuuugaaaaagcuuucaa

SEQ ID NO: 184033 - RNA, 23 nt, Artificial Sequence
  Synthetic
aagcacuuugaaaaagcuuucaa

SEQ ID NO: 184034 - RNA, 24 nt, Artificial Sequence
  Synthetic
aaagcacuuugaaaaagcuuucaa

SEQ ID NO: 184035 - RNA, 18 nt, Artificial Sequence
  Synthetic
auaaguuagugcuuucaa

SEQ ID NO: 184036 - RNA, 19 nt, Artificial Sequence
  Synthetic
aauaaguuagugcuuucaa

SEQ ID NO: 184037 - RNA, 20 nt, Artificial Sequence
  Synthetic
uaauaaguuagugcuuucaa

SEQ ID NO: 184038 - RNA, 21 nt, Artificial Sequence
  Synthetic
guaauaaguuagugcuuucaa

SEQ ID NO: 184039 - RNA, 22 nt, Artificial Sequence
  Synthetic
uguaauaaguuagugcuuucaa

SEQ ID NO: 184040 - RNA, 23 nt, Artificial Sequence
  Synthetic
auguaauaaguuagugcuuucaa

SEQ ID NO: 184041 - RNA, 24 nt, Artificial Sequence
  Synthetic
cauguaauaaguuagugcuuucaa

SEQ ID NO: 184042 - RNA, 18 nt, Artificial Sequence
  Synthetic
cuaacucuuugcuuucaa

SEQ ID NO: 184043 - RNA, 19 nt, Artificial Sequence
  Synthetic
gcuaacucuuugcuuucaa

SEQ ID NO: 184044 - RNA, 20 nt, Artificial Sequence
  Synthetic
ugcuaacucuuugcuuucaa

SEQ ID NO: 184045 - RNA, 21 nt, Artificial Sequence
  Synthetic
uugcuaacucuuugcuuucaa

SEQ ID NO: 184046 - RNA, 22 nt, Artificial Sequence
  Synthetic
guugcuaacucuuugcuuucaa

SEQ ID NO: 184047 - RNA, 23 nt, Artificial Sequence
  Synthetic
gguugcuaacucuuugcuuucaa

SEQ ID NO: 184048 - RNA, 24 nt, Artificial Sequence
  Synthetic
ugguugcuaacucuuugcuuucaa

SEQ ID NO: 184049 - RNA, 18 nt, Artificial Sequence
  Synthetic
aguuaguuauucuuucaa

SEQ ID NO: 184050 - RNA, 19 nt, Artificial Sequence
  Synthetic
gaguuaguuauucuuucaa

SEQ ID NO: 184051 - RNA, 20 nt, Artificial Sequence
  Synthetic
agaguuaguuauucuuucaa

SEQ ID NO: 184052 - RNA, 21 nt, Artificial Sequence
  Synthetic
aagaguuaguuauucuuucaa

SEQ ID NO: 184053 - RNA, 22 nt, Artificial Sequence
  Synthetic
uaagaguuaguuauucuuucaa

SEQ ID NO: 184054 - RNA, 23 nt, Artificial Sequence
  Synthetic
uuaagaguuaguuauucuuucaa

SEQ ID NO: 184055 - RNA, 24 nt, Artificial Sequence
  Synthetic
uuuaagaguuaguuauucuuucaa

SEQ ID NO: 184056 - RNA, 18 nt, Artificial Sequence
  Synthetic
aucuuuucaaaguuucaa

SEQ ID NO: 184057 - RNA, 19 nt, Artificial Sequence
  Synthetic
aaucuuuucaaaguuucaa

SEQ ID NO: 184058 - RNA, 20 nt, Artificial Sequence
  Synthetic
aaaucuuuucaaaguuucaa

SEQ ID NO: 184059 - RNA, 21 nt, Artificial Sequence
  Synthetic
uaaaucuuuucaaaguuucaa

SEQ ID NO: 184060 - RNA, 22 nt, Artificial Sequence
  Synthetic
auaaaucuuuucaaaguuucaa

SEQ ID NO: 184061 - RNA, 23 nt, Artificial Sequence
  Synthetic
aauaaaucuuuucaaaguuucaa

SEQ ID NO: 184062 - RNA, 24 nt, Artificial Sequence
  Synthetic
aaauaaaucuuuucaaaguuucaa

SEQ ID NO: 184063 - RNA, 18 nt, Artificial Sequence
  Synthetic
ucuuaacauguguuucaa

SEQ ID NO: 184064 - RNA, 19 nt, Artificial Sequence
  Synthetic
uucuuaacauguguuucaa

SEQ ID NO: 184065 - RNA, 20 nt, Artificial Sequence
  Synthetic
auucuuaacauguguuucaa

SEQ ID NO: 184066 - RNA, 21 nt, Artificial Sequence
  Synthetic
cauucuuaacauguguuucaa

SEQ ID NO: 184067 - RNA, 22 nt, Artificial Sequence
  Synthetic
ucauucuuaacauguguuucaa

SEQ ID NO: 184068 - RNA, 23 nt, Artificial Sequence
  Synthetic
gucauucuuaacauguguuucaa

SEQ ID NO: 184069 - RNA, 24 nt, Artificial Sequence
  Synthetic
ggucauucuuaacauguguuucaa

SEQ ID NO: 184070 - RNA, 18 nt, Artificial Sequence
  Synthetic
guuaccuuggauuuucaa

SEQ ID NO: 184071 - RNA, 19 nt, Artificial Sequence
  Synthetic
uguuaccuuggauuuucaa

SEQ ID NO: 184072 - RNA, 20 nt, Artificial Sequence
  Synthetic
uuguuaccuuggauuuucaa

SEQ ID NO: 184073 - RNA, 21 nt, Artificial Sequence
  Synthetic
uuuguuaccuuggauuuucaa

SEQ ID NO: 184074 - RNA, 22 nt, Artificial Sequence
  Synthetic
auuuguuaccuuggauuuucaa

SEQ ID NO: 184075 - RNA, 23 nt, Artificial Sequence
  Synthetic
uauuuguuaccuuggauuuucaa

SEQ ID NO: 184076 - RNA, 24 nt, Artificial Sequence
  Synthetic
guauuuguuaccuuggauuuucaa

SEQ ID NO: 184077 - RNA, 18 nt, Artificial Sequence
  Synthetic
ugauguucauauuuucaa

SEQ ID NO: 184078 - RNA, 19 nt, Artificial Sequence
  Synthetic
augauguucauauuuucaa

SEQ ID NO: 184079 - RNA, 20 nt, Artificial Sequence
  Synthetic
gaugauguucauauuuucaa

SEQ ID NO: 184080 - RNA, 21 nt, Artificial Sequence
  Synthetic
ggaugauguucauauuuucaa

SEQ ID NO: 184081 - RNA, 22 nt, Artificial Sequence
  Synthetic
uggaugauguucauauuuucaa

SEQ ID NO: 184082 - RNA, 23 nt, Artificial Sequence
  Synthetic
auggaugauguucauauuuucaa

SEQ ID NO: 184083 - RNA, 24 nt, Artificial Sequence
  Synthetic
aauggaugauguucauauuuucaa

SEQ ID NO: 184084 - RNA, 18 nt, Artificial Sequence
  Synthetic
uaauauucuccuuuucaa

SEQ ID NO: 184085 - RNA, 19 nt, Artificial Sequence
  Synthetic
guaauauucuccuuuucaa

SEQ ID NO: 184086 - RNA, 20 nt, Artificial Sequence
  Synthetic
uguaauauucuccuuuucaa

SEQ ID NO: 184087 - RNA, 21 nt, Artificial Sequence
  Synthetic
uuguaauauucuccuuuucaa

SEQ ID NO: 184088 - RNA, 22 nt, Artificial Sequence
  Synthetic
guuguaauauucuccuuuucaa

SEQ ID NO: 184089 - RNA, 23 nt, Artificial Sequence
  Synthetic
gguuguaauauucuccuuuucaa

SEQ ID NO: 184090 - RNA, 24 nt, Artificial Sequence
  Synthetic
ugguuguaauauucuccuuuucaa

SEQ ID NO: 184091 - RNA, 18 nt, Artificial Sequence
  Synthetic
ucuugugccaguuuucaa

SEQ ID NO: 184092 - RNA, 19 nt, Artificial Sequence
  Synthetic
gucuugugccaguuuucaa

SEQ ID NO: 184093 - RNA, 20 nt, Artificial Sequence
  Synthetic
ugucuugugccaguuuucaa

SEQ ID NO: 184094 - RNA, 21 nt, Artificial Sequence
  Synthetic
uugucuugugccaguuuucaa

SEQ ID NO: 184095 - RNA, 22 nt, Artificial Sequence
  Synthetic
cuugucuugugccaguuuucaa

SEQ ID NO: 184096 - RNA, 23 nt, Artificial Sequence
  Synthetic
ccuugucuugugccaguuuucaa

SEQ ID NO: 184097 - RNA, 24 nt, Artificial Sequence
  Synthetic
uccuugucuugugccaguuuucaa

SEQ ID NO: 184098 - RNA, 18 nt, Artificial Sequence
  Synthetic
guuaaugggaguuuucaa

SEQ ID NO: 184099 - RNA, 19 nt, Artificial Sequence
  Synthetic
uguuaaugggaguuuucaa

SEQ ID NO: 184100 - RNA, 20 nt, Artificial Sequence
  Synthetic
auguuaaugggaguuuucaa

SEQ ID NO: 184101 - RNA, 21 nt, Artificial Sequence
  Synthetic
aauguuaaugggaguuuucaa

SEQ ID NO: 184102 - RNA, 22 nt, Artificial Sequence
  Synthetic
aaauguuaaugggaguuuucaa

SEQ ID NO: 184103 - RNA, 23 nt, Artificial Sequence
  Synthetic
gaaauguuaaugggaguuuucaa

SEQ ID NO: 184104 - RNA, 24 nt, Artificial Sequence
  Synthetic
agaaauguuaaugggaguuuucaa

SEQ ID NO: 184105 - RNA, 18 nt, Artificial Sequence
  Synthetic
ugaaacacauuuuuucaa

SEQ ID NO: 184106 - RNA, 19 nt, Artificial Sequence
  Synthetic
cugaaacacauuuuuucaa

SEQ ID NO: 184107 - RNA, 20 nt, Artificial Sequence
  Synthetic
ccugaaacacauuuuuucaa

SEQ ID NO: 184108 - RNA, 21 nt, Artificial Sequence
  Synthetic
accugaaacacauuuuuucaa

SEQ ID NO: 184109 - RNA, 22 nt, Artificial Sequence
  Synthetic
aaccugaaacacauuuuuucaa

SEQ ID NO: 184110 - RNA, 23 nt, Artificial Sequence
  Synthetic
gaaccugaaacacauuuuuucaa

SEQ ID NO: 184111 - RNA, 24 nt, Artificial Sequence
  Synthetic
agaaccugaaacacauuuuuucaa

SEQ ID NO: 184112 - RNA, 21 nt, Artificial Sequence
  Synthetic
aaaaaaaaaaaaaaaaaagaa

SEQ ID NO: 184113 - RNA, 22 nt, Artificial Sequence
  Synthetic
aaaaaaaaaaaaaaaaaaagaa

SEQ ID NO: 184114 - RNA, 23 nt, Artificial Sequence
  Synthetic
aaaaaaaaaaaaaaaaaaaagaa

SEQ ID NO: 184115 - RNA, 24 nt, Artificial Sequence
  Synthetic
aaaaaaaaaaaaaaaaaaaaagaa

SEQ ID NO: 184116 - RNA, 18 nt, Artificial Sequence
  Synthetic
gucucaaaaaaaaaagaa

SEQ ID NO: 184117 - RNA, 19 nt, Artificial Sequence
  Synthetic
ugucucaaaaaaaaaagaa

SEQ ID NO: 184118 - RNA, 20 nt, Artificial Sequence
  Synthetic
cugucucaaaaaaaaaagaa

SEQ ID NO: 184119 - RNA, 21 nt, Artificial Sequence
  Synthetic
acugucucaaaaaaaaaagaa

SEQ ID NO: 184120 - RNA, 22 nt, Artificial Sequence
  Synthetic
gacugucucaaaaaaaaaagaa

SEQ ID NO: 184121 - RNA, 23 nt, Artificial Sequence
  Synthetic
agacugucucaaaaaaaaaagaa

SEQ ID NO: 184122 - RNA, 24 nt, Artificial Sequence
  Synthetic
aagacugucucaaaaaaaaaagaa

SEQ ID NO: 184123 - RNA, 18 nt, Artificial Sequence
  Synthetic
gucucuugaaaaaaagaa

SEQ ID NO: 184124 - RNA, 19 nt, Artificial Sequence
  Synthetic
agucucuugaaaaaaagaa

SEQ ID NO: 184125 - RNA, 20 nt, Artificial Sequence
  Synthetic
aagucucuugaaaaaaagaa

SEQ ID NO: 184126 - RNA, 21 nt, Artificial Sequence
  Synthetic
gaagucucuugaaaaaaagaa

SEQ ID NO: 184127 - RNA, 22 nt, Artificial Sequence
  Synthetic
agaagucucuugaaaaaaagaa

SEQ ID NO: 184128 - RNA, 23 nt, Artificial Sequence
  Synthetic
aagaagucucuugaaaaaaagaa

SEQ ID NO: 184129 - RNA, 24 nt, Artificial Sequence
  Synthetic
aaagaagucucuugaaaaaaagaa

SEQ ID NO: 184130 - RNA, 18 nt, Artificial Sequence
  Synthetic
agaacuuuaaaaaaagaa

SEQ ID NO: 184131 - RNA, 19 nt, Artificial Sequence
  Synthetic
uagaacuuuaaaaaaagaa

SEQ ID NO: 184132 - RNA, 20 nt, Artificial Sequence
  Synthetic
auagaacuuuaaaaaaagaa

SEQ ID NO: 184133 - RNA, 21 nt, Artificial Sequence
  Synthetic
cauagaacuuuaaaaaaagaa

SEQ ID NO: 184134 - RNA, 22 nt, Artificial Sequence
  Synthetic
ucauagaacuuuaaaaaaagaa

SEQ ID NO: 184135 - RNA, 23 nt, Artificial Sequence
  Synthetic
aucauagaacuuuaaaaaaagaa

SEQ ID NO: 184136 - RNA, 24 nt, Artificial Sequence
  Synthetic
aaucauagaacuuuaaaaaaagaa

SEQ ID NO: 184137 - RNA, 18 nt, Artificial Sequence
  Synthetic
aaaacuuuuaaaaaagaa

SEQ ID NO: 184138 - RNA, 19 nt, Artificial Sequence
  Synthetic
caaaacuuuuaaaaaagaa

SEQ ID NO: 184139 - RNA, 20 nt, Artificial Sequence
  Synthetic
acaaaacuuuuaaaaaagaa

SEQ ID NO: 184140 - RNA, 21 nt, Artificial Sequence
  Synthetic
cacaaaacuuuuaaaaaagaa

SEQ ID NO: 184141 - RNA, 22 nt, Artificial Sequence
  Synthetic
ucacaaaacuuuuaaaaaagaa

SEQ ID NO: 184142 - RNA, 23 nt, Artificial Sequence
  Synthetic
uucacaaaacuuuuaaaaaagaa

SEQ ID NO: 184143 - RNA, 24 nt, Artificial Sequence
  Synthetic
auucacaaaacuuuuaaaaaagaa

SEQ ID NO: 184144 - RNA, 18 nt, Artificial Sequence
  Synthetic
aagaaacuagaaaaagaa

SEQ ID NO: 184145 - RNA, 19 nt, Artificial Sequence
  Synthetic
uaagaaacuagaaaaagaa

SEQ ID NO: 184146 - RNA, 20 nt, Artificial Sequence
  Synthetic
uuaagaaacuagaaaaagaa

SEQ ID NO: 184147 - RNA, 21 nt, Artificial Sequence
  Synthetic
cuuaagaaacuagaaaaagaa

SEQ ID NO: 184148 - RNA, 22 nt, Artificial Sequence
  Synthetic
ccuuaagaaacuagaaaaagaa

SEQ ID NO: 184149 - RNA, 23 nt, Artificial Sequence
  Synthetic
accuuaagaaacuagaaaaagaa

SEQ ID NO: 184150 - RNA, 24 nt, Artificial Sequence
  Synthetic
uaccuuaagaaacuagaaaaagaa

SEQ ID NO: 184151 - RNA, 18 nt, Artificial Sequence
  Synthetic
uuuguuugggaaaaagaa

SEQ ID NO: 184152 - RNA, 19 nt, Artificial Sequence
  Synthetic
uuuuguuugggaaaaagaa

SEQ ID NO: 184153 - RNA, 20 nt, Artificial Sequence
  Synthetic
uuuuuguuugggaaaaagaa

SEQ ID NO: 184154 - RNA, 21 nt, Artificial Sequence
  Synthetic
guuuuuguuugggaaaaagaa

SEQ ID NO: 184155 - RNA, 22 nt, Artificial Sequence
  Synthetic
gguuuuuguuugggaaaaagaa

SEQ ID NO: 184156 - RNA, 23 nt, Artificial Sequence
  Synthetic
agguuuuuguuugggaaaaagaa

SEQ ID NO: 184157 - RNA, 24 nt, Artificial Sequence
  Synthetic
gagguuuuuguuugggaaaaagaa

SEQ ID NO: 184158 - RNA, 18 nt, Artificial Sequence
  Synthetic
uggaagguggaaaaagaa

SEQ ID NO: 184159 - RNA, 19 nt, Artificial Sequence
  Synthetic
cuggaagguggaaaaagaa

SEQ ID NO: 184160 - RNA, 20 nt, Artificial Sequence
  Synthetic
ccuggaagguggaaaaagaa

SEQ ID NO: 184161 - RNA, 21 nt, Artificial Sequence
  Synthetic
cccuggaagguggaaaaagaa

SEQ ID NO: 184162 - RNA, 22 nt, Artificial Sequence
  Synthetic
ccccuggaagguggaaaaagaa

SEQ ID NO: 184163 - RNA, 23 nt, Artificial Sequence
  Synthetic
cccccuggaagguggaaaaagaa

SEQ ID NO: 184164 - RNA, 24 nt, Artificial Sequence
  Synthetic
gcccccuggaagguggaaaaagaa

SEQ ID NO: 184165 - RNA, 18 nt, Artificial Sequence
  Synthetic
auuuagcaauaaaaagaa

SEQ ID NO: 184166 - RNA, 19 nt, Artificial Sequence
  Synthetic
uauuuagcaauaaaaagaa

SEQ ID NO: 184167 - RNA, 20 nt, Artificial Sequence
  Synthetic
uuauuuagcaauaaaaagaa

SEQ ID NO: 184168 - RNA, 21 nt, Artificial Sequence
  Synthetic
auuauuuagcaauaaaaagaa

SEQ ID NO: 184169 - RNA, 22 nt, Artificial Sequence
  Synthetic
uauuauuuagcaauaaaaagaa

SEQ ID NO: 184170 - RNA, 23 nt, Artificial Sequence
  Synthetic
auauuauuuagcaauaaaaagaa

SEQ ID NO: 184171 - RNA, 24 nt, Artificial Sequence
  Synthetic
aauauuauuuagcaauaaaaagaa

SEQ ID NO: 184172 - RNA, 18 nt, Artificial Sequence
  Synthetic
cacguaguagcaaaagaa

SEQ ID NO: 184173 - RNA, 19 nt, Artificial Sequence
  Synthetic
acacguaguagcaaaagaa

SEQ ID NO: 184174 - RNA, 20 nt, Artificial Sequence
  Synthetic
cacacguaguagcaaaagaa

SEQ ID NO: 184175 - RNA, 21 nt, Artificial Sequence
  Synthetic
ccacacguaguagcaaaagaa

SEQ ID NO: 184176 - RNA, 22 nt, Artificial Sequence
  Synthetic
gccacacguaguagcaaaagaa

SEQ ID NO: 184177 - RNA, 23 nt, Artificial Sequence
  Synthetic
ggccacacguaguagcaaaagaa

SEQ ID NO: 184178 - RNA, 24 nt, Artificial Sequence
  Synthetic
uggccacacguaguagcaaaagaa

SEQ ID NO: 184179 - RNA, 18 nt, Artificial Sequence
  Synthetic
aaaaaaaaaagaaaagaa

SEQ ID NO: 184180 - RNA, 19 nt, Artificial Sequence
  Synthetic
aaaaaaaaaaagaaaagaa

SEQ ID NO: 184181 - RNA, 20 nt, Artificial Sequence
  Synthetic
aaaaaaaaaaaagaaaagaa

SEQ ID NO: 184182 - RNA, 21 nt, Artificial Sequence
  Synthetic
aaaaaaaaaaaaagaaaagaa

SEQ ID NO: 184183 - RNA, 22 nt, Artificial Sequence
  Synthetic
aaaaaaaaaaaaaagaaaagaa

SEQ ID NO: 184184 - RNA, 23 nt, Artificial Sequence
  Synthetic
aaaaaaaaaaaaaaagaaaagaa

SEQ ID NO: 184185 - RNA, 24 nt, Artificial Sequence
  Synthetic
aaaaaaaaaaaaaaaagaaaagaa

SEQ ID NO: 184186 - RNA, 18 nt, Artificial Sequence
  Synthetic
gggagggaaagaaaagaa

SEQ ID NO: 184187 - RNA, 19 nt, Artificial Sequence
  Synthetic
agggagggaaagaaaagaa

SEQ ID NO: 184188 - RNA, 20 nt, Artificial Sequence
  Synthetic
gagggagggaaagaaaagaa

SEQ ID NO: 184189 - RNA, 21 nt, Artificial Sequence
  Synthetic
ggagggagggaaagaaaagaa

SEQ ID NO: 184190 - RNA, 22 nt, Artificial Sequence
  Synthetic
gggagggagggaaagaaaagaa

SEQ ID NO: 184191 - RNA, 23 nt, Artificial Sequence
  Synthetic
agggagggagggaaagaaaagaa

SEQ ID NO: 184192 - RNA, 24 nt, Artificial Sequence
  Synthetic
gagggagggagggaaagaaaagaa

SEQ ID NO: 184193 - RNA, 18 nt, Artificial Sequence
  Synthetic
aaggaaggaagaaaagaa

SEQ ID NO: 184194 - RNA, 19 nt, Artificial Sequence
  Synthetic
gaaggaaggaagaaaagaa

SEQ ID NO: 184195 - RNA, 20 nt, Artificial Sequence
  Synthetic
ggaaggaaggaagaaaagaa

SEQ ID NO: 184196 - RNA, 21 nt, Artificial Sequence
  Synthetic
aggaaggaaggaagaaaagaa

SEQ ID NO: 184197 - RNA, 22 nt, Artificial Sequence
  Synthetic
aaggaaggaaggaagaaaagaa

SEQ ID NO: 184198 - RNA, 23 nt, Artificial Sequence
  Synthetic
gaaggaaggaaggaagaaaagaa

SEQ ID NO: 184199 - RNA, 24 nt, Artificial Sequence
  Synthetic
agaaggaaggaaggaagaaaagaa

SEQ ID NO: 184200 - RNA, 18 nt, Artificial Sequence
  Synthetic
acggagaaacgaaaagaa

SEQ ID NO: 184201 - RNA, 19 nt, Artificial Sequence
  Synthetic
cacggagaaacgaaaagaa

SEQ ID NO: 184202 - RNA, 20 nt, Artificial Sequence
  Synthetic
ccacggagaaacgaaaagaa

SEQ ID NO: 184203 - RNA, 21 nt, Artificial Sequence
  Synthetic
gccacggagaaacgaaaagaa

SEQ ID NO: 184204 - RNA, 22 nt, Artificial Sequence
  Synthetic
agccacggagaaacgaaaagaa

SEQ ID NO: 184205 - RNA, 23 nt, Artificial Sequence
  Synthetic
aagccacggagaaacgaaaagaa

SEQ ID NO: 184206 - RNA, 24 nt, Artificial Sequence
  Synthetic
gaagccacggagaaacgaaaagaa

SEQ ID NO: 184207 - RNA, 18 nt, Artificial Sequence
  Synthetic
cacucccuaauaaaagaa

SEQ ID NO: 184208 - RNA, 19 nt, Artificial Sequence
  Synthetic
gcacucccuaauaaaagaa

SEQ ID NO: 184209 - RNA, 20 nt, Artificial Sequence
  Synthetic
ugcacucccuaauaaaagaa

SEQ ID NO: 184210 - RNA, 21 nt, Artificial Sequence
  Synthetic
cugcacucccuaauaaaagaa

SEQ ID NO: 184211 - RNA, 22 nt, Artificial Sequence
  Synthetic
ccugcacucccuaauaaaagaa

SEQ ID NO: 184212 - RNA, 23 nt, Artificial Sequence
  Synthetic
gccugcacucccuaauaaaagaa

SEQ ID NO: 184213 - RNA, 24 nt, Artificial Sequence
  Synthetic
ggccugcacucccuaauaaaagaa

SEQ ID NO: 184214 - RNA, 18 nt, Artificial Sequence
  Synthetic
uucuuacacauaaaagaa

SEQ ID NO: 184215 - RNA, 19 nt, Artificial Sequence
  Synthetic
guucuuacacauaaaagaa

SEQ ID NO: 184216 - RNA, 20 nt, Artificial Sequence
  Synthetic
aguucuuacacauaaaagaa

SEQ ID NO: 184217 - RNA, 21 nt, Artificial Sequence
  Synthetic
aaguucuuacacauaaaagaa

SEQ ID NO: 184218 - RNA, 22 nt, Artificial Sequence
  Synthetic
uaaguucuuacacauaaaagaa

SEQ ID NO: 184219 - RNA, 23 nt, Artificial Sequence
  Synthetic
auaaguucuuacacauaaaagaa

SEQ ID NO: 184220 - RNA, 24 nt, Artificial Sequence
  Synthetic
aauaaguucuuacacauaaaagaa

SEQ ID NO: 184221 - RNA, 18 nt, Artificial Sequence
  Synthetic
ggguaauauauaaaagaa

SEQ ID NO: 184222 - RNA, 19 nt, Artificial Sequence
  Synthetic
aggguaauauauaaaagaa

SEQ ID NO: 184223 - RNA, 20 nt, Artificial Sequence
  Synthetic
gaggguaauauauaaaagaa

SEQ ID NO: 184224 - RNA, 21 nt, Artificial Sequence
  Synthetic
ggaggguaauauauaaaagaa

SEQ ID NO: 184225 - RNA, 22 nt, Artificial Sequence
  Synthetic
gggaggguaauauauaaaagaa

SEQ ID NO: 184226 - RNA, 23 nt, Artificial Sequence
  Synthetic
agggaggguaauauauaaaagaa

SEQ ID NO: 184227 - RNA, 24 nt, Artificial Sequence
  Synthetic
aagggaggguaauauauaaaagaa

SEQ ID NO: 184228 - RNA, 18 nt, Artificial Sequence
  Synthetic
agguuaaaauuaaaagaa

SEQ ID NO: 184229 - RNA, 19 nt, Artificial Sequence
  Synthetic
uagguuaaaauuaaaagaa

SEQ ID NO: 184230 - RNA, 20 nt, Artificial Sequence
  Synthetic
guagguuaaaauuaaaagaa

SEQ ID NO: 184231 - RNA, 21 nt, Artificial Sequence
  Synthetic
gguagguuaaaauuaaaagaa

SEQ ID NO: 184232 - RNA, 22 nt, Artificial Sequence
  Synthetic
agguagguuaaaauuaaaagaa

SEQ ID NO: 184233 - RNA, 23 nt, Artificial Sequence
  Synthetic
uagguagguuaaaauuaaaagaa

SEQ ID NO: 184234 - RNA, 24 nt, Artificial Sequence
  Synthetic
cuagguagguuaaaauuaaaagaa

SEQ ID NO: 184235 - RNA, 18 nt, Artificial Sequence
  Synthetic
uuuuaauaauuaaaagaa

SEQ ID NO: 184236 - RNA, 19 nt, Artificial Sequence
  Synthetic
uuuuuaauaauuaaaagaa

SEQ ID NO: 184237 - RNA, 20 nt, Artificial Sequence
  Synthetic
auuuuuaauaauuaaaagaa

SEQ ID NO: 184238 - RNA, 21 nt, Artificial Sequence
  Synthetic
gauuuuuaauaauuaaaagaa

SEQ ID NO: 184239 - RNA, 22 nt, Artificial Sequence
  Synthetic
agauuuuuaauaauuaaaagaa

SEQ ID NO: 184240 - RNA, 23 nt, Artificial Sequence
  Synthetic
aagauuuuuaauaauuaaaagaa

SEQ ID NO: 184241 - RNA, 24 nt, Artificial Sequence
  Synthetic
caagauuuuuaauaauuaaaagaa

SEQ ID NO: 184242 - RNA, 18 nt, Artificial Sequence
  Synthetic
aaaacuaaguuaaaagaa

SEQ ID NO: 184243 - RNA, 19 nt, Artificial Sequence
  Synthetic
caaaacuaaguuaaaagaa

SEQ ID NO: 184244 - RNA, 20 nt, Artificial Sequence
  Synthetic
acaaaacuaaguuaaaagaa

SEQ ID NO: 184245 - RNA, 21 nt, Artificial Sequence
  Synthetic
uacaaaacuaaguuaaaagaa

SEQ ID NO: 184246 - RNA, 22 nt, Artificial Sequence
  Synthetic
cuacaaaacuaaguuaaaagaa

SEQ ID NO: 184247 - RNA, 23 nt, Artificial Sequence
  Synthetic
ucuacaaaacuaaguuaaaagaa

SEQ ID NO: 184248 - RNA, 24 nt, Artificial Sequence
  Synthetic
aucuacaaaacuaaguuaaaagaa

SEQ ID NO: 184249 - RNA, 18 nt, Artificial Sequence
  Synthetic
gaaggagagaacaaagaa

SEQ ID NO: 184250 - RNA, 19 nt, Artificial Sequence
  Synthetic
ggaaggagagaacaaagaa

SEQ ID NO: 184251 - RNA, 20 nt, Artificial Sequence
  Synthetic
aggaaggagagaacaaagaa

SEQ ID NO: 184252 - RNA, 21 nt, Artificial Sequence
  Synthetic
aaggaaggagagaacaaagaa

SEQ ID NO: 184253 - RNA, 22 nt, Artificial Sequence
  Synthetic
aaaggaaggagagaacaaagaa

SEQ ID NO: 184254 - RNA, 23 nt, Artificial Sequence
  Synthetic
gaaaggaaggagagaacaaagaa

SEQ ID NO: 184255 - RNA, 24 nt, Artificial Sequence
  Synthetic
ggaaaggaaggagagaacaaagaa

SEQ ID NO: 184256 - RNA, 18 nt, Artificial Sequence
  Synthetic
agagaggaagacaaagaa

SEQ ID NO: 184257 - RNA, 19 nt, Artificial Sequence
  Synthetic
gagagaggaagacaaagaa

SEQ ID NO: 184258 - RNA, 20 nt, Artificial Sequence
  Synthetic
agagagaggaagacaaagaa

SEQ ID NO: 184259 - RNA, 21 nt, Artificial Sequence
  Synthetic
gagagagaggaagacaaagaa

SEQ ID NO: 184260 - RNA, 22 nt, Artificial Sequence
  Synthetic
agagagagaggaagacaaagaa

SEQ ID NO: 184261 - RNA, 23 nt, Artificial Sequence
  Synthetic
aagagagagaggaagacaaagaa

SEQ ID NO: 184262 - RNA, 24 nt, Artificial Sequence
  Synthetic
aaagagagagaggaagacaaagaa

SEQ ID NO: 184263 - RNA, 18 nt, Artificial Sequence
  Synthetic
caaggaggugacaaagaa

SEQ ID NO: 184264 - RNA, 19 nt, Artificial Sequence
  Synthetic
ucaaggaggugacaaagaa

SEQ ID NO: 184265 - RNA, 20 nt, Artificial Sequence
  Synthetic
uucaaggaggugacaaagaa

SEQ ID NO: 184266 - RNA, 21 nt, Artificial Sequence
  Synthetic
guucaaggaggugacaaagaa

SEQ ID NO: 184267 - RNA, 22 nt, Artificial Sequence
  Synthetic
aguucaaggaggugacaaagaa

SEQ ID NO: 184268 - RNA, 23 nt, Artificial Sequence
  Synthetic
uaguucaaggaggugacaaagaa

SEQ ID NO: 184269 - RNA, 24 nt, Artificial Sequence
  Synthetic
auaguucaaggaggugacaaagaa

SEQ ID NO: 184270 - RNA, 18 nt, Artificial Sequence
  Synthetic
aucaaaaaauacaaagaa

SEQ ID NO: 184271 - RNA, 19 nt, Artificial Sequence
  Synthetic
caucaaaaaauacaaagaa

SEQ ID NO: 184272 - RNA, 20 nt, Artificial Sequence
  Synthetic
gcaucaaaaaauacaaagaa

SEQ ID NO: 184273 - RNA, 21 nt, Artificial Sequence
  Synthetic
agcaucaaaaaauacaaagaa

SEQ ID NO: 184274 - RNA, 22 nt, Artificial Sequence
  Synthetic
cagcaucaaaaaauacaaagaa

SEQ ID NO: 184275 - RNA, 23 nt, Artificial Sequence
  Synthetic
ucagcaucaaaaaauacaaagaa

SEQ ID NO: 184276 - RNA, 24 nt, Artificial Sequence
  Synthetic
cucagcaucaaaaaauacaaagaa

SEQ ID NO: 184277 - RNA, 18 nt, Artificial Sequence
  Synthetic
uggguaauuuacaaagaa

SEQ ID NO: 184278 - RNA, 19 nt, Artificial Sequence
  Synthetic
auggguaauuuacaaagaa

SEQ ID NO: 184279 - RNA, 20 nt, Artificial Sequence
  Synthetic
aauggguaauuuacaaagaa

SEQ ID NO: 184280 - RNA, 21 nt, Artificial Sequence
  Synthetic
aaauggguaauuuacaaagaa

SEQ ID NO: 184281 - RNA, 22 nt, Artificial Sequence
  Synthetic
aaaauggguaauuuacaaagaa

SEQ ID NO: 184282 - RNA, 23 nt, Artificial Sequence
  Synthetic
gaaaauggguaauuuacaaagaa

SEQ ID NO: 184283 - RNA, 24 nt, Artificial Sequence
  Synthetic
ugaaaauggguaauuuacaaagaa

SEQ ID NO: 184284 - RNA, 18 nt, Artificial Sequence
  Synthetic
auacaucuaaccaaagaa

SEQ ID NO: 184285 - RNA, 19 nt, Artificial Sequence
  Synthetic
aauacaucuaaccaaagaa

SEQ ID NO: 184286 - RNA, 20 nt, Artificial Sequence
  Synthetic
gaauacaucuaaccaaagaa

SEQ ID NO: 184287 - RNA, 21 nt, Artificial Sequence
  Synthetic
ggaauacaucuaaccaaagaa

SEQ ID NO: 184288 - RNA, 22 nt, Artificial Sequence
  Synthetic
aggaauacaucuaaccaaagaa

SEQ ID NO: 184289 - RNA, 23 nt, Artificial Sequence
  Synthetic
uaggaauacaucuaaccaaagaa

SEQ ID NO: 184290 - RNA, 24 nt, Artificial Sequence
  Synthetic
cuaggaauacaucuaaccaaagaa

SEQ ID NO: 184291 - RNA, 18 nt, Artificial Sequence
  Synthetic
acgguggucaccaaagaa

SEQ ID NO: 184292 - RNA, 19 nt, Artificial Sequence
  Synthetic
gacgguggucaccaaagaa

SEQ ID NO: 184293 - RNA, 20 nt, Artificial Sequence
  Synthetic
ggacgguggucaccaaagaa

SEQ ID NO: 184294 - RNA, 21 nt, Artificial Sequence
  Synthetic
uggacgguggucaccaaagaa

SEQ ID NO: 184295 - RNA, 22 nt, Artificial Sequence
  Synthetic
auggacgguggucaccaaagaa

SEQ ID NO: 184296 - RNA, 23 nt, Artificial Sequence
  Synthetic
aauggacgguggucaccaaagaa

SEQ ID NO: 184297 - RNA, 24 nt, Artificial Sequence
  Synthetic
aaauggacgguggucaccaaagaa

SEQ ID NO: 184298 - RNA, 18 nt, Artificial Sequence
  Synthetic
auaauccaauccaaagaa

SEQ ID NO: 184299 - RNA, 19 nt, Artificial Sequence
  Synthetic
gauaauccaauccaaagaa

SEQ ID NO: 184300 - RNA, 20 nt, Artificial Sequence
  Synthetic
ggauaauccaauccaaagaa

SEQ ID NO: 184301 - RNA, 21 nt, Artificial Sequence
  Synthetic
gggauaauccaauccaaagaa

SEQ ID NO: 184302 - RNA, 22 nt, Artificial Sequence
  Synthetic
ugggauaauccaauccaaagaa

SEQ ID NO: 184303 - RNA, 23 nt, Artificial Sequence
  Synthetic
augggauaauccaauccaaagaa

SEQ ID NO: 184304 - RNA, 24 nt, Artificial Sequence
  Synthetic
aaugggauaauccaauccaaagaa

SEQ ID NO: 184305 - RNA, 18 nt, Artificial Sequence
  Synthetic
gggcauuuauccaaagaa

SEQ ID NO: 184306 - RNA, 19 nt, Artificial Sequence
  Synthetic
ugggcauuuauccaaagaa

SEQ ID NO: 184307 - RNA, 20 nt, Artificial Sequence
  Synthetic
cugggcauuuauccaaagaa

SEQ ID NO: 184308 - RNA, 21 nt, Artificial Sequence
  Synthetic
acugggcauuuauccaaagaa

SEQ ID NO: 184309 - RNA, 22 nt, Artificial Sequence
  Synthetic
uacugggcauuuauccaaagaa

SEQ ID NO: 184310 - RNA, 23 nt, Artificial Sequence
  Synthetic
cuacugggcauuuauccaaagaa

SEQ ID NO: 184311 - RNA, 24 nt, Artificial Sequence
  Synthetic
acuacugggcauuuauccaaagaa

SEQ ID NO: 184312 - RNA, 18 nt, Artificial Sequence
  Synthetic
uuacaaacaagcaaagaa

SEQ ID NO: 184313 - RNA, 19 nt, Artificial Sequence
  Synthetic
uuuacaaacaagcaaagaa

SEQ ID NO: 184314 - RNA, 20 nt, Artificial Sequence
  Synthetic
guuuacaaacaagcaaagaa

SEQ ID NO: 184315 - RNA, 21 nt, Artificial Sequence
  Synthetic
cguuuacaaacaagcaaagaa

SEQ ID NO: 184316 - RNA, 22 nt, Artificial Sequence
  Synthetic
ucguuuacaaacaagcaaagaa

SEQ ID NO: 184317 - RNA, 23 nt, Artificial Sequence
  Synthetic
gucguuuacaaacaagcaaagaa

SEQ ID NO: 184318 - RNA, 24 nt, Artificial Sequence
  Synthetic
cgucguuuacaaacaagcaaagaa

SEQ ID NO: 184319 - RNA, 18 nt, Artificial Sequence
  Synthetic
guucauuuaggcaaagaa

SEQ ID NO: 184320 - RNA, 19 nt, Artificial Sequence
  Synthetic
aguucauuuaggcaaagaa

SEQ ID NO: 184321 - RNA, 20 nt, Artificial Sequence
  Synthetic
uaguucauuuaggcaaagaa

SEQ ID NO: 184322 - RNA, 21 nt, Artificial Sequence
  Synthetic
auaguucauuuaggcaaagaa

SEQ ID NO: 184323 - RNA, 22 nt, Artificial Sequence
  Synthetic
aauaguucauuuaggcaaagaa

SEQ ID NO: 184324 - RNA, 23 nt, Artificial Sequence
  Synthetic
aaauaguucauuuaggcaaagaa

SEQ ID NO: 184325 - RNA, 24 nt, Artificial Sequence
  Synthetic
gaaauaguucauuuaggcaaagaa

SEQ ID NO: 184326 - RNA, 18 nt, Artificial Sequence
  Synthetic
agacaucuuugcaaagaa

SEQ ID NO: 184327 - RNA, 19 nt, Artificial Sequence
  Synthetic
cagacaucuuugcaaagaa

SEQ ID NO: 184328 - RNA, 20 nt, Artificial Sequence
  Synthetic
ucagacaucuuugcaaagaa

SEQ ID NO: 184329 - RNA, 21 nt, Artificial Sequence
  Synthetic
uucagacaucuuugcaaagaa

SEQ ID NO: 184330 - RNA, 22 nt, Artificial Sequence
  Synthetic
cuucagacaucuuugcaaagaa

SEQ ID NO: 184331 - RNA, 23 nt, Artificial Sequence
  Synthetic
ucuucagacaucuuugcaaagaa

SEQ ID NO: 184332 - RNA, 24 nt, Artificial Sequence
  Synthetic
cucuucagacaucuuugcaaagaa

SEQ ID NO: 184333 - RNA, 18 nt, Artificial Sequence
  Synthetic
cacugagaccucaaagaa

SEQ ID NO: 184334 - RNA, 19 nt, Artificial Sequence
  Synthetic
ucacugagaccucaaagaa

SEQ ID NO: 184335 - RNA, 20 nt, Artificial Sequence
  Synthetic
gucacugagaccucaaagaa

SEQ ID NO: 184336 - RNA, 21 nt, Artificial Sequence
  Synthetic
ugucacugagaccucaaagaa

SEQ ID NO: 184337 - RNA, 22 nt, Artificial Sequence
  Synthetic
augucacugagaccucaaagaa

SEQ ID NO: 184338 - RNA, 23 nt, Artificial Sequence
  Synthetic
uaugucacugagaccucaaagaa

SEQ ID NO: 184339 - RNA, 24 nt, Artificial Sequence
  Synthetic
auaugucacugagaccucaaagaa

SEQ ID NO: 184340 - RNA, 18 nt, Artificial Sequence
  Synthetic
uggaguaaaaagaaagaa

SEQ ID NO: 184341 - RNA, 19 nt, Artificial Sequence
  Synthetic
auggaguaaaaagaaagaa

SEQ ID NO: 184342 - RNA, 20 nt, Artificial Sequence
  Synthetic
cauggaguaaaaagaaagaa

SEQ ID NO: 184343 - RNA, 21 nt, Artificial Sequence
  Synthetic
ccauggaguaaaaagaaagaa

SEQ ID NO: 184344 - RNA, 22 nt, Artificial Sequence
  Synthetic
accauggaguaaaaagaaagaa

SEQ ID NO: 184345 - RNA, 23 nt, Artificial Sequence
  Synthetic
gaccauggaguaaaaagaaagaa

SEQ ID NO: 184346 - RNA, 24 nt, Artificial Sequence
  Synthetic
ugaccauggaguaaaaagaaagaa

SEQ ID NO: 184347 - RNA, 18 nt, Artificial Sequence
  Synthetic
aaaaaaggaaagaaagaa

SEQ ID NO: 184348 - RNA, 19 nt, Artificial Sequence
  Synthetic
aaaaaaaggaaagaaagaa

SEQ ID NO: 184349 - RNA, 20 nt, Artificial Sequence
  Synthetic
uaaaaaaaggaaagaaagaa

SEQ ID NO: 184350 - RNA, 21 nt, Artificial Sequence
  Synthetic
auaaaaaaaggaaagaaagaa

SEQ ID NO: 184351 - RNA, 22 nt, Artificial Sequence
  Synthetic
uauaaaaaaaggaaagaaagaa

SEQ ID NO: 184352 - RNA, 23 nt, Artificial Sequence
  Synthetic
guauaaaaaaaggaaagaaagaa

SEQ ID NO: 184353 - RNA, 24 nt, Artificial Sequence
  Synthetic
uguauaaaaaaaggaaagaaagaa

SEQ ID NO: 184354 - RNA, 18 nt, Artificial Sequence
  Synthetic
uagcgcuggaagaaagaa

SEQ ID NO: 184355 - RNA, 19 nt, Artificial Sequence
  Synthetic
auagcgcuggaagaaagaa

SEQ ID NO: 184356 - RNA, 20 nt, Artificial Sequence
  Synthetic
uauagcgcuggaagaaagaa

SEQ ID NO: 184357 - RNA, 21 nt, Artificial Sequence
  Synthetic
auauagcgcuggaagaaagaa

SEQ ID NO: 184358 - RNA, 22 nt, Artificial Sequence
  Synthetic
aauauagcgcuggaagaaagaa

SEQ ID NO: 184359 - RNA, 23 nt, Artificial Sequence
  Synthetic
uaauauagcgcuggaagaaagaa

SEQ ID NO: 184360 - RNA, 24 nt, Artificial Sequence
  Synthetic
auaauauagcgcuggaagaaagaa

SEQ ID NO: 184361 - RNA, 18 nt, Artificial Sequence
  Synthetic
uagugaguuaagaaagaa

SEQ ID NO: 184362 - RNA, 19 nt, Artificial Sequence
  Synthetic
cuagugaguuaagaaagaa

SEQ ID NO: 184363 - RNA, 20 nt, Artificial Sequence
  Synthetic
gcuagugaguuaagaaagaa

SEQ ID NO: 184364 - RNA, 21 nt, Artificial Sequence
  Synthetic
ugcuagugaguuaagaaagaa

SEQ ID NO: 184365 - RNA, 22 nt, Artificial Sequence
  Synthetic
augcuagugaguuaagaaagaa

SEQ ID NO: 184366 - RNA, 23 nt, Artificial Sequence
  Synthetic
uaugcuagugaguuaagaaagaa

SEQ ID NO: 184367 - RNA, 24 nt, Artificial Sequence
  Synthetic
guaugcuagugaguuaagaaagaa

SEQ ID NO: 184368 - RNA, 18 nt, Artificial Sequence
  Synthetic
acaugauuauagaaagaa

SEQ ID NO: 184369 - RNA, 19 nt, Artificial Sequence
  Synthetic
aacaugauuauagaaagaa

SEQ ID NO: 184370 - RNA, 20 nt, Artificial Sequence
  Synthetic
gaacaugauuauagaaagaa

SEQ ID NO: 184371 - RNA, 21 nt, Artificial Sequence
  Synthetic
ugaacaugauuauagaaagaa

SEQ ID NO: 184372 - RNA, 22 nt, Artificial Sequence
  Synthetic
augaacaugauuauagaaagaa

SEQ ID NO: 184373 - RNA, 23 nt, Artificial Sequence
  Synthetic
uaugaacaugauuauagaaagaa

SEQ ID NO: 184374 - RNA, 24 nt, Artificial Sequence
  Synthetic
guaugaacaugauuauagaaagaa

SEQ ID NO: 184375 - RNA, 21 nt, Artificial Sequence
  Synthetic
aaaaaaaaaaaaaggaaagaa

SEQ ID NO: 184376 - RNA, 22 nt, Artificial Sequence
  Synthetic
aaaaaaaaaaaaaaggaaagaa

SEQ ID NO: 184377 - RNA, 23 nt, Artificial Sequence
  Synthetic
aaaaaaaaaaaaaaaggaaagaa

SEQ ID NO: 184378 - RNA, 24 nt, Artificial Sequence
  Synthetic
aaaaaaaaaaaaaaaaggaaagaa

SEQ ID NO: 184379 - RNA, 22 nt, Artificial Sequence
  Synthetic
caaaaaaaaaaaaaggaaagaa

SEQ ID NO: 184380 - RNA, 23 nt, Artificial Sequence
  Synthetic
ucaaaaaaaaaaaaaggaaagaa

SEQ ID NO: 184381 - RNA, 24 nt, Artificial Sequence
  Synthetic
cucaaaaaaaaaaaaaggaaagaa

SEQ ID NO: 184382 - RNA, 18 nt, Artificial Sequence
  Synthetic
aaagaagggaggaaagaa

SEQ ID NO: 184383 - RNA, 19 nt, Artificial Sequence
  Synthetic
caaagaagggaggaaagaa

SEQ ID NO: 184384 - RNA, 20 nt, Artificial Sequence
  Synthetic
acaaagaagggaggaaagaa

SEQ ID NO: 184385 - RNA, 21 nt, Artificial Sequence
  Synthetic
aacaaagaagggaggaaagaa

SEQ ID NO: 184386 - RNA, 22 nt, Artificial Sequence
  Synthetic
gaacaaagaagggaggaaagaa

SEQ ID NO: 184387 - RNA, 23 nt, Artificial Sequence
  Synthetic
agaacaaagaagggaggaaagaa

SEQ ID NO: 184388 - RNA, 24 nt, Artificial Sequence
  Synthetic
gagaacaaagaagggaggaaagaa

SEQ ID NO: 184389 - RNA, 18 nt, Artificial Sequence
  Synthetic
agggagggagggaaagaa

SEQ ID NO: 184390 - RNA, 19 nt, Artificial Sequence
  Synthetic
gagggagggagggaaagaa

SEQ ID NO: 184391 - RNA, 20 nt, Artificial Sequence
  Synthetic
ggagggagggagggaaagaa

SEQ ID NO: 184392 - RNA, 21 nt, Artificial Sequence
  Synthetic
gggagggagggagggaaagaa

SEQ ID NO: 184393 - RNA, 22 nt, Artificial Sequence
  Synthetic
agggagggagggagggaaagaa

SEQ ID NO: 184394 - RNA, 23 nt, Artificial Sequence
  Synthetic
gagggagggagggagggaaagaa

SEQ ID NO: 184395 - RNA, 24 nt, Artificial Sequence
  Synthetic
ggagggagggagggagggaaagaa

SEQ ID NO: 184396 - RNA, 18 nt, Artificial Sequence
  Synthetic
acucauuuggggaaagaa

SEQ ID NO: 184397 - RNA, 19 nt, Artificial Sequence
  Synthetic
aacucauuuggggaaagaa

SEQ ID NO: 184398 - RNA, 20 nt, Artificial Sequence
  Synthetic
aaacucauuuggggaaagaa

SEQ ID NO: 184399 - RNA, 21 nt, Artificial Sequence
  Synthetic
uaaacucauuuggggaaagaa

SEQ ID NO: 184400 - RNA, 22 nt, Artificial Sequence
  Synthetic
guaaacucauuuggggaaagaa

SEQ ID NO: 184401 - RNA, 23 nt, Artificial Sequence
  Synthetic
aguaaacucauuuggggaaagaa

SEQ ID NO: 184402 - RNA, 24 nt, Artificial Sequence
  Synthetic
aaguaaacucauuuggggaaagaa

SEQ ID NO: 184403 - RNA, 18 nt, Artificial Sequence
  Synthetic
ggaggagccuggaaagaa

SEQ ID NO: 184404 - RNA, 19 nt, Artificial Sequence
  Synthetic
uggaggagccuggaaagaa

SEQ ID NO: 184405 - RNA, 20 nt, Artificial Sequence
  Synthetic
guggaggagccuggaaagaa

SEQ ID NO: 184406 - RNA, 21 nt, Artificial Sequence
  Synthetic
uguggaggagccuggaaagaa

SEQ ID NO: 184407 - RNA, 22 nt, Artificial Sequence
  Synthetic
guguggaggagccuggaaagaa

SEQ ID NO: 184408 - RNA, 23 nt, Artificial Sequence
  Synthetic
gguguggaggagccuggaaagaa

SEQ ID NO: 184409 - RNA, 24 nt, Artificial Sequence
  Synthetic
ggguguggaggagccuggaaagaa

SEQ ID NO: 184410 - RNA, 18 nt, Artificial Sequence
  Synthetic
augcagaauuggaaagaa

SEQ ID NO: 184411 - RNA, 19 nt, Artificial Sequence
  Synthetic
aaugcagaauuggaaagaa

SEQ ID NO: 184412 - RNA, 20 nt, Artificial Sequence
  Synthetic
gaaugcagaauuggaaagaa

SEQ ID NO: 184413 - RNA, 21 nt, Artificial Sequence
  Synthetic
ugaaugcagaauuggaaagaa

SEQ ID NO: 184414 - RNA, 22 nt, Artificial Sequence
  Synthetic
uugaaugcagaauuggaaagaa

SEQ ID NO: 184415 - RNA, 23 nt, Artificial Sequence
  Synthetic
auugaaugcagaauuggaaagaa

SEQ ID NO: 184416 - RNA, 24 nt, Artificial Sequence
  Synthetic
cauugaaugcagaauuggaaagaa

SEQ ID NO: 184417 - RNA, 18 nt, Artificial Sequence
  Synthetic
aaugagaaaaugaaagaa

SEQ ID NO: 184418 - RNA, 19 nt, Artificial Sequence
  Synthetic
aaaugagaaaaugaaagaa

SEQ ID NO: 184419 - RNA, 20 nt, Artificial Sequence
  Synthetic
aaaaugagaaaaugaaagaa

SEQ ID NO: 184420 - RNA, 21 nt, Artificial Sequence
  Synthetic
aaaaaugagaaaaugaaagaa

SEQ ID NO: 184421 - RNA, 22 nt, Artificial Sequence
  Synthetic
gaaaaaugagaaaaugaaagaa

SEQ ID NO: 184422 - RNA, 23 nt, Artificial Sequence
  Synthetic
agaaaaaugagaaaaugaaagaa

SEQ ID NO: 184423 - RNA, 24 nt, Artificial Sequence
  Synthetic
aagaaaaaugagaaaaugaaagaa

SEQ ID NO: 184424 - RNA, 18 nt, Artificial Sequence
  Synthetic
uuuuccccagugaaagaa

SEQ ID NO: 184425 - RNA, 19 nt, Artificial Sequence
  Synthetic
uuuuuccccagugaaagaa

SEQ ID NO: 184426 - RNA, 20 nt, Artificial Sequence
  Synthetic
guuuuuccccagugaaagaa

SEQ ID NO: 184427 - RNA, 21 nt, Artificial Sequence
  Synthetic
uguuuuuccccagugaaagaa

SEQ ID NO: 184428 - RNA, 22 nt, Artificial Sequence
  Synthetic
uuguuuuuccccagugaaagaa

SEQ ID NO: 184429 - RNA, 23 nt, Artificial Sequence
  Synthetic
uuuguuuuuccccagugaaagaa

SEQ ID NO: 184430 - RNA, 24 nt, Artificial Sequence
  Synthetic
auuuguuuuuccccagugaaagaa

SEQ ID NO: 184431 - RNA, 18 nt, Artificial Sequence
  Synthetic
uuuuaacuagugaaagaa

SEQ ID NO: 184432 - RNA, 19 nt, Artificial Sequence
  Synthetic
auuuuaacuagugaaagaa

SEQ ID NO: 184433 - RNA, 20 nt, Artificial Sequence
  Synthetic
cauuuuaacuagugaaagaa

SEQ ID NO: 184434 - RNA, 21 nt, Artificial Sequence
  Synthetic
acauuuuaacuagugaaagaa

SEQ ID NO: 184435 - RNA, 22 nt, Artificial Sequence
  Synthetic
uacauuuuaacuagugaaagaa

SEQ ID NO: 184436 - RNA, 23 nt, Artificial Sequence
  Synthetic
guacauuuuaacuagugaaagaa

SEQ ID NO: 184437 - RNA, 24 nt, Artificial Sequence
  Synthetic
gguacauuuuaacuagugaaagaa

SEQ ID NO: 184438 - RNA, 18 nt, Artificial Sequence
  Synthetic
aauaucuaugugaaagaa

SEQ ID NO: 184439 - RNA, 19 nt, Artificial Sequence
  Synthetic
aaauaucuaugugaaagaa

SEQ ID NO: 184440 - RNA, 20 nt, Artificial Sequence
  Synthetic
gaaauaucuaugugaaagaa

SEQ ID NO: 184441 - RNA, 21 nt, Artificial Sequence
  Synthetic
ggaaauaucuaugugaaagaa

SEQ ID NO: 184442 - RNA, 22 nt, Artificial Sequence
  Synthetic
uggaaauaucuaugugaaagaa

SEQ ID NO: 184443 - RNA, 23 nt, Artificial Sequence
  Synthetic
guggaaauaucuaugugaaagaa

SEQ ID NO: 184444 - RNA, 24 nt, Artificial Sequence
  Synthetic
aguggaaauaucuaugugaaagaa

SEQ ID NO: 184445 - RNA, 18 nt, Artificial Sequence
  Synthetic
aaaaauaaaaauaaagaa

SEQ ID NO: 184446 - RNA, 19 nt, Artificial Sequence
  Synthetic
aaaaaauaaaaauaaagaa

SEQ ID NO: 184447 - RNA, 20 nt, Artificial Sequence
  Synthetic
gaaaaaauaaaaauaaagaa

SEQ ID NO: 184448 - RNA, 21 nt, Artificial Sequence
  Synthetic
ugaaaaaauaaaaauaaagaa

SEQ ID NO: 184449 - RNA, 22 nt, Artificial Sequence
  Synthetic
cugaaaaaauaaaaauaaagaa

SEQ ID NO: 184450 - RNA, 23 nt, Artificial Sequence
  Synthetic
acugaaaaaauaaaaauaaagaa

SEQ ID NO: 184451 - RNA, 24 nt, Artificial Sequence
  Synthetic
cacugaaaaaauaaaaauaaagaa

SEQ ID NO: 184452 - RNA, 18 nt, Artificial Sequence
  Synthetic
auguuucuaaauaaagaa

SEQ ID NO: 184453 - RNA, 19 nt, Artificial Sequence
  Synthetic
aauguuucuaaauaaagaa

SEQ ID NO: 184454 - RNA, 20 nt, Artificial Sequence
  Synthetic
gaauguuucuaaauaaagaa

SEQ ID NO: 184455 - RNA, 21 nt, Artificial Sequence
  Synthetic
agaauguuucuaaauaaagaa

SEQ ID NO: 184456 - RNA, 22 nt, Artificial Sequence
  Synthetic
cagaauguuucuaaauaaagaa

SEQ ID NO: 184457 - RNA, 23 nt, Artificial Sequence
  Synthetic
acagaauguuucuaaauaaagaa

SEQ ID NO: 184458 - RNA, 24 nt, Artificial Sequence
  Synthetic
gacagaauguuucuaaauaaagaa

SEQ ID NO: 184459 - RNA, 18 nt, Artificial Sequence
  Synthetic
acugcagugcauaaagaa

SEQ ID NO: 184460 - RNA, 19 nt, Artificial Sequence
  Synthetic
aacugcagugcauaaagaa

SEQ ID NO: 184461 - RNA, 20 nt, Artificial Sequence
  Synthetic
uaacugcagugcauaaagaa

SEQ ID NO: 184462 - RNA, 21 nt, Artificial Sequence
  Synthetic
uuaacugcagugcauaaagaa

SEQ ID NO: 184463 - RNA, 22 nt, Artificial Sequence
  Synthetic
auuaacugcagugcauaaagaa

SEQ ID NO: 184464 - RNA, 23 nt, Artificial Sequence
  Synthetic
cauuaacugcagugcauaaagaa

SEQ ID NO: 184465 - RNA, 24 nt, Artificial Sequence
  Synthetic
ucauuaacugcagugcauaaagaa

SEQ ID NO: 184466 - RNA, 18 nt, Artificial Sequence
  Synthetic
uggauuuugcauaaagaa

SEQ ID NO: 184467 - RNA, 19 nt, Artificial Sequence
  Synthetic
cuggauuuugcauaaagaa

SEQ ID NO: 184468 - RNA, 20 nt, Artificial Sequence
  Synthetic
ccuggauuuugcauaaagaa

SEQ ID NO: 184469 - RNA, 21 nt, Artificial Sequence
  Synthetic
accuggauuuugcauaaagaa

SEQ ID NO: 184470 - RNA, 22 nt, Artificial Sequence
  Synthetic
uaccuggauuuugcauaaagaa

SEQ ID NO: 184471 - RNA, 23 nt, Artificial Sequence
  Synthetic
guaccuggauuuugcauaaagaa

SEQ ID NO: 184472 - RNA, 24 nt, Artificial Sequence
  Synthetic
aguaccuggauuuugcauaaagaa

SEQ ID NO: 184473 - RNA, 18 nt, Artificial Sequence
  Synthetic
cuuuugcaggauaaagaa

SEQ ID NO: 184474 - RNA, 19 nt, Artificial Sequence
  Synthetic
gcuuuugcaggauaaagaa

SEQ ID NO: 184475 - RNA, 20 nt, Artificial Sequence
  Synthetic
ugcuuuugcaggauaaagaa

SEQ ID NO: 184476 - RNA, 21 nt, Artificial Sequence
  Synthetic
gugcuuuugcaggauaaagaa

SEQ ID NO: 184477 - RNA, 22 nt, Artificial Sequence
  Synthetic
ugugcuuuugcaggauaaagaa

SEQ ID NO: 184478 - RNA, 23 nt, Artificial Sequence
  Synthetic
cugugcuuuugcaggauaaagaa

SEQ ID NO: 184479 - RNA, 24 nt, Artificial Sequence
  Synthetic
ucugugcuuuugcaggauaaagaa

SEQ ID NO: 184480 - RNA, 18 nt, Artificial Sequence
  Synthetic
aucccuuaugauaaagaa

SEQ ID NO: 184481 - RNA, 19 nt, Artificial Sequence
  Synthetic
uaucccuuaugauaaagaa

SEQ ID NO: 184482 - RNA, 20 nt, Artificial Sequence
  Synthetic
cuaucccuuaugauaaagaa

SEQ ID NO: 184483 - RNA, 21 nt, Artificial Sequence
  Synthetic
ucuaucccuuaugauaaagaa

SEQ ID NO: 184484 - RNA, 22 nt, Artificial Sequence
  Synthetic
gucuaucccuuaugauaaagaa

SEQ ID NO: 184485 - RNA, 23 nt, Artificial Sequence
  Synthetic
agucuaucccuuaugauaaagaa

SEQ ID NO: 184486 - RNA, 24 nt, Artificial Sequence
  Synthetic
aagucuaucccuuaugauaaagaa

SEQ ID NO: 184487 - RNA, 18 nt, Artificial Sequence
  Synthetic
aauaaguacuauaaagaa

SEQ ID NO: 184488 - RNA, 19 nt, Artificial Sequence
  Synthetic
uaauaaguacuauaaagaa

SEQ ID NO: 184489 - RNA, 20 nt, Artificial Sequence
  Synthetic
guaauaaguacuauaaagaa

SEQ ID NO: 184490 - RNA, 21 nt, Artificial Sequence
  Synthetic
aguaauaaguacuauaaagaa

SEQ ID NO: 184491 - RNA, 22 nt, Artificial Sequence
  Synthetic
uaguaauaaguacuauaaagaa

SEQ ID NO: 184492 - RNA, 23 nt, Artificial Sequence
  Synthetic
uuaguaauaaguacuauaaagaa

SEQ ID NO: 184493 - RNA, 24 nt, Artificial Sequence
  Synthetic
guuaguaauaaguacuauaaagaa

SEQ ID NO: 184494 - RNA, 18 nt, Artificial Sequence
  Synthetic
uuuugcucuuauaaagaa

SEQ ID NO: 184495 - RNA, 19 nt, Artificial Sequence
  Synthetic
uuuuugcucuuauaaagaa

SEQ ID NO: 184496 - RNA, 20 nt, Artificial Sequence
  Synthetic
uuuuuugcucuuauaaagaa

SEQ ID NO: 184497 - RNA, 21 nt, Artificial Sequence
  Synthetic
auuuuuugcucuuauaaagaa

SEQ ID NO: 184498 - RNA, 22 nt, Artificial Sequence
  Synthetic
uauuuuuugcucuuauaaagaa

SEQ ID NO: 184499 - RNA, 23 nt, Artificial Sequence
  Synthetic
uuauuuuuugcucuuauaaagaa

SEQ ID NO: 184500 - RNA, 24 nt, Artificial Sequence
  Synthetic
uuuauuuuuugcucuuauaaagaa

SEQ ID NO: 184501 - RNA, 18 nt, Artificial Sequence
  Synthetic
ugggcaauuuauaaagaa

SEQ ID NO: 184502 - RNA, 19 nt, Artificial Sequence
  Synthetic
cugggcaauuuauaaagaa

SEQ ID NO: 184503 - RNA, 20 nt, Artificial Sequence
  Synthetic
acugggcaauuuauaaagaa

SEQ ID NO: 184504 - RNA, 21 nt, Artificial Sequence
  Synthetic
gacugggcaauuuauaaagaa

SEQ ID NO: 184505 - RNA, 22 nt, Artificial Sequence
  Synthetic
agacugggcaauuuauaaagaa

SEQ ID NO: 184506 - RNA, 23 nt, Artificial Sequence
  Synthetic
gagacugggcaauuuauaaagaa

SEQ ID NO: 184507 - RNA, 24 nt, Artificial Sequence
  Synthetic
agagacugggcaauuuauaaagaa

SEQ ID NO: 184508 - RNA, 18 nt, Artificial Sequence
  Synthetic
acagggagagguaaagaa

SEQ ID NO: 184509 - RNA, 19 nt, Artificial Sequence
  Synthetic
uacagggagagguaaagaa

SEQ ID NO: 184510 - RNA, 20 nt, Artificial Sequence
  Synthetic
auacagggagagguaaagaa

SEQ ID NO: 184511 - RNA, 21 nt, Artificial Sequence
  Synthetic
gauacagggagagguaaagaa

SEQ ID NO: 184512 - RNA, 22 nt, Artificial Sequence
  Synthetic
ggauacagggagagguaaagaa

SEQ ID NO: 184513 - RNA, 23 nt, Artificial Sequence
  Synthetic
uggauacagggagagguaaagaa

SEQ ID NO: 184514 - RNA, 24 nt, Artificial Sequence
  Synthetic
auggauacagggagagguaaagaa

SEQ ID NO: 184515 - RNA, 18 nt, Artificial Sequence
  Synthetic
gaggaaguauguaaagaa

SEQ ID NO: 184516 - RNA, 19 nt, Artificial Sequence
  Synthetic
agaggaaguauguaaagaa

SEQ ID NO: 184517 - RNA, 20 nt, Artificial Sequence
  Synthetic
aagaggaaguauguaaagaa

SEQ ID NO: 184518 - RNA, 21 nt, Artificial Sequence
  Synthetic
aaagaggaaguauguaaagaa

SEQ ID NO: 184519 - RNA, 22 nt, Artificial Sequence
  Synthetic
aaaagaggaaguauguaaagaa

SEQ ID NO: 184520 - RNA, 23 nt, Artificial Sequence
  Synthetic
uaaaagaggaaguauguaaagaa

SEQ ID NO: 184521 - RNA, 24 nt, Artificial Sequence
  Synthetic
guaaaagaggaaguauguaaagaa

SEQ ID NO: 184522 - RNA, 18 nt, Artificial Sequence
  Synthetic
aagcaauauuguaaagaa

SEQ ID NO: 184523 - RNA, 19 nt, Artificial Sequence
  Synthetic
caagcaauauuguaaagaa

SEQ ID NO: 184524 - RNA, 20 nt, Artificial Sequence
  Synthetic
gcaagcaauauuguaaagaa

SEQ ID NO: 184525 - RNA, 21 nt, Artificial Sequence
  Synthetic
ugcaagcaauauuguaaagaa

SEQ ID NO: 184526 - RNA, 22 nt, Artificial Sequence
  Synthetic
cugcaagcaauauuguaaagaa

SEQ ID NO: 184527 - RNA, 23 nt, Artificial Sequence
  Synthetic
acugcaagcaauauuguaaagaa

SEQ ID NO: 184528 - RNA, 24 nt, Artificial Sequence
  Synthetic
uacugcaagcaauauuguaaagaa

SEQ ID NO: 184529 - RNA, 18 nt, Artificial Sequence
  Synthetic
accugaaacuuuaaagaa

SEQ ID NO: 184530 - RNA, 19 nt, Artificial Sequence
  Synthetic
aaccugaaacuuuaaagaa

SEQ ID NO: 184531 - RNA, 20 nt, Artificial Sequence
  Synthetic
aaaccugaaacuuuaaagaa

SEQ ID NO: 184532 - RNA, 21 nt, Artificial Sequence
  Synthetic
caaaccugaaacuuuaaagaa

SEQ ID NO: 184533 - RNA, 22 nt, Artificial Sequence
  Synthetic
ccaaaccugaaacuuuaaagaa

SEQ ID NO: 184534 - RNA, 23 nt, Artificial Sequence
  Synthetic
uccaaaccugaaacuuuaaagaa

SEQ ID NO: 184535 - RNA, 24 nt, Artificial Sequence
  Synthetic
cuccaaaccugaaacuuuaaagaa

SEQ ID NO: 184536 - RNA, 18 nt, Artificial Sequence
  Synthetic
cuuuugaaaaaacaagaa

SEQ ID NO: 184537 - RNA, 19 nt, Artificial Sequence
  Synthetic
ccuuuugaaaaaacaagaa

SEQ ID NO: 184538 - RNA, 20 nt, Artificial Sequence
  Synthetic
accuuuugaaaaaacaagaa

SEQ ID NO: 184539 - RNA, 21 nt, Artificial Sequence
  Synthetic
uaccuuuugaaaaaacaagaa

SEQ ID NO: 184540 - RNA, 22 nt, Artificial Sequence
  Synthetic
cuaccuuuugaaaaaacaagaa

SEQ ID NO: 184541 - RNA, 23 nt, Artificial Sequence
  Synthetic
acuaccuuuugaaaaaacaagaa

SEQ ID NO: 184542 - RNA, 24 nt, Artificial Sequence
  Synthetic
uacuaccuuuugaaaaaacaagaa

SEQ ID NO: 184543 - RNA, 18 nt, Artificial Sequence
  Synthetic
uucuucuccaaacaagaa

SEQ ID NO: 184544 - RNA, 19 nt, Artificial Sequence
  Synthetic
cuucuucuccaaacaagaa

SEQ ID NO: 184545 - RNA, 20 nt, Artificial Sequence
  Synthetic
acuucuucuccaaacaagaa

SEQ ID NO: 184546 - RNA, 21 nt, Artificial Sequence
  Synthetic
aacuucuucuccaaacaagaa

SEQ ID NO: 184547 - RNA, 22 nt, Artificial Sequence
  Synthetic
gaacuucuucuccaaacaagaa

SEQ ID NO: 184548 - RNA, 23 nt, Artificial Sequence
  Synthetic
agaacuucuucuccaaacaagaa

SEQ ID NO: 184549 - RNA, 24 nt, Artificial Sequence
  Synthetic
cagaacuucuucuccaaacaagaa

SEQ ID NO: 184550 - RNA, 18 nt, Artificial Sequence
  Synthetic
ucuucauugcaacaagaa

SEQ ID NO: 184551 - RNA, 19 nt, Artificial Sequence
  Synthetic
aucuucauugcaacaagaa

SEQ ID NO: 184552 - RNA, 20 nt, Artificial Sequence
  Synthetic
caucuucauugcaacaagaa

SEQ ID NO: 184553 - RNA, 21 nt, Artificial Sequence
  Synthetic
ucaucuucauugcaacaagaa

SEQ ID NO: 184554 - RNA, 22 nt, Artificial Sequence
  Synthetic
cucaucuucauugcaacaagaa

SEQ ID NO: 184555 - RNA, 23 nt, Artificial Sequence
  Synthetic
ucucaucuucauugcaacaagaa

SEQ ID NO: 184556 - RNA, 24 nt, Artificial Sequence
  Synthetic
uucucaucuucauugcaacaagaa

SEQ ID NO: 184557 - RNA, 18 nt, Artificial Sequence
  Synthetic
aaaucaaacuaacaagaa

SEQ ID NO: 184558 - RNA, 19 nt, Artificial Sequence
  Synthetic
aaaaucaaacuaacaagaa

SEQ ID NO: 184559 - RNA, 20 nt, Artificial Sequence
  Synthetic
aaaaaucaaacuaacaagaa

SEQ ID NO: 184560 - RNA, 21 nt, Artificial Sequence
  Synthetic
uaaaaaucaaacuaacaagaa

SEQ ID NO: 184561 - RNA, 22 nt, Artificial Sequence
  Synthetic
guaaaaaucaaacuaacaagaa

SEQ ID NO: 184562 - RNA, 23 nt, Artificial Sequence
  Synthetic
aguaaaaaucaaacuaacaagaa

SEQ ID NO: 184563 - RNA, 24 nt, Artificial Sequence
  Synthetic
uaguaaaaaucaaacuaacaagaa

SEQ ID NO: 184564 - RNA, 18 nt, Artificial Sequence
  Synthetic
aguaaacuaucacaagaa

SEQ ID NO: 184565 - RNA, 19 nt, Artificial Sequence
  Synthetic
caguaaacuaucacaagaa

SEQ ID NO: 184566 - RNA, 20 nt, Artificial Sequence
  Synthetic
ucaguaaacuaucacaagaa

SEQ ID NO: 184567 - RNA, 21 nt, Artificial Sequence
  Synthetic
cucaguaaacuaucacaagaa

SEQ ID NO: 184568 - RNA, 22 nt, Artificial Sequence
  Synthetic
ucucaguaaacuaucacaagaa

SEQ ID NO: 184569 - RNA, 23 nt, Artificial Sequence
  Synthetic
uucucaguaaacuaucacaagaa

SEQ ID NO: 184570 - RNA, 24 nt, Artificial Sequence
  Synthetic
auucucaguaaacuaucacaagaa

SEQ ID NO: 184571 - RNA, 18 nt, Artificial Sequence
  Synthetic
uugaaccaaggacaagaa

SEQ ID NO: 184572 - RNA, 19 nt, Artificial Sequence
  Synthetic
cuugaaccaaggacaagaa

SEQ ID NO: 184573 - RNA, 20 nt, Artificial Sequence
  Synthetic
ccuugaaccaaggacaagaa

SEQ ID NO: 184574 - RNA, 21 nt, Artificial Sequence
  Synthetic
uccuugaaccaaggacaagaa

SEQ ID NO: 184575 - RNA, 22 nt, Artificial Sequence
  Synthetic
auccuugaaccaaggacaagaa

SEQ ID NO: 184576 - RNA, 23 nt, Artificial Sequence
  Synthetic
gauccuugaaccaaggacaagaa

SEQ ID NO: 184577 - RNA, 24 nt, Artificial Sequence
  Synthetic
cgauccuugaaccaaggacaagaa

SEQ ID NO: 184578 - RNA, 18 nt, Artificial Sequence
  Synthetic
gaauaaaagauacaagaa

SEQ ID NO: 184579 - RNA, 19 nt, Artificial Sequence
  Synthetic
agaauaaaagauacaagaa

SEQ ID NO: 184580 - RNA, 20 nt, Artificial Sequence
  Synthetic
gagaauaaaagauacaagaa

SEQ ID NO: 184581 - RNA, 21 nt, Artificial Sequence
  Synthetic
ugagaauaaaagauacaagaa

SEQ ID NO: 184582 - RNA, 22 nt, Artificial Sequence
  Synthetic
augagaauaaaagauacaagaa

SEQ ID NO: 184583 - RNA, 23 nt, Artificial Sequence
  Synthetic
aaugagaauaaaagauacaagaa

SEQ ID NO: 184584 - RNA, 24 nt, Artificial Sequence
  Synthetic
aaaugagaauaaaagauacaagaa

SEQ ID NO: 184585 - RNA, 18 nt, Artificial Sequence
  Synthetic
guaugguugcuacaagaa

SEQ ID NO: 184586 - RNA, 19 nt, Artificial Sequence
  Synthetic
gguaugguugcuacaagaa

SEQ ID NO: 184587 - RNA, 20 nt, Artificial Sequence
  Synthetic
ggguaugguugcuacaagaa

SEQ ID NO: 184588 - RNA, 21 nt, Artificial Sequence
  Synthetic
gggguaugguugcuacaagaa

SEQ ID NO: 184589 - RNA, 22 nt, Artificial Sequence
  Synthetic
ugggguaugguugcuacaagaa

SEQ ID NO: 184590 - RNA, 23 nt, Artificial Sequence
  Synthetic
cugggguaugguugcuacaagaa

SEQ ID NO: 184591 - RNA, 24 nt, Artificial Sequence
  Synthetic
gcugggguaugguugcuacaagaa

SEQ ID NO: 184592 - RNA, 18 nt, Artificial Sequence
  Synthetic
agaaauugaguacaagaa

SEQ ID NO: 184593 - RNA, 19 nt, Artificial Sequence
  Synthetic
aagaaauugaguacaagaa

SEQ ID NO: 184594 - RNA, 20 nt, Artificial Sequence
  Synthetic
aaagaaauugaguacaagaa

SEQ ID NO: 184595 - RNA, 21 nt, Artificial Sequence
  Synthetic
uaaagaaauugaguacaagaa

SEQ ID NO: 184596 - RNA, 22 nt, Artificial Sequence
  Synthetic
uuaaagaaauugaguacaagaa

SEQ ID NO: 184597 - RNA, 23 nt, Artificial Sequence
  Synthetic
uuuaaagaaauugaguacaagaa

SEQ ID NO: 184598 - RNA, 24 nt, Artificial Sequence
  Synthetic
auuuaaagaaauugaguacaagaa

SEQ ID NO: 184599 - RNA, 18 nt, Artificial Sequence
  Synthetic
cuaggaauggaccaagaa

SEQ ID NO: 184600 - RNA, 19 nt, Artificial Sequence
  Synthetic
ucuaggaauggaccaagaa

SEQ ID NO: 184601 - RNA, 20 nt, Artificial Sequence
  Synthetic
uucuaggaauggaccaagaa

SEQ ID NO: 184602 - RNA, 21 nt, Artificial Sequence
  Synthetic
uuucuaggaauggaccaagaa

SEQ ID NO: 184603 - RNA, 22 nt, Artificial Sequence
  Synthetic
auuucuaggaauggaccaagaa

SEQ ID NO: 184604 - RNA, 23 nt, Artificial Sequence
  Synthetic
uauuucuaggaauggaccaagaa

SEQ ID NO: 184605 - RNA, 24 nt, Artificial Sequence
  Synthetic
guauuucuaggaauggaccaagaa

SEQ ID NO: 184606 - RNA, 18 nt, Artificial Sequence
  Synthetic
guguacacugaccaagaa

SEQ ID NO: 184607 - RNA, 19 nt, Artificial Sequence
  Synthetic
uguguacacugaccaagaa

SEQ ID NO: 184608 - RNA, 20 nt, Artificial Sequence
  Synthetic
cuguguacacugaccaagaa

SEQ ID NO: 184609 - RNA, 21 nt, Artificial Sequence
  Synthetic
acuguguacacugaccaagaa

SEQ ID NO: 184610 - RNA, 22 nt, Artificial Sequence
  Synthetic
cacuguguacacugaccaagaa

SEQ ID NO: 184611 - RNA, 23 nt, Artificial Sequence
  Synthetic
acacuguguacacugaccaagaa

SEQ ID NO: 184612 - RNA, 24 nt, Artificial Sequence
  Synthetic
uacacuguguacacugaccaagaa

SEQ ID NO: 184613 - RNA, 18 nt, Artificial Sequence
  Synthetic
acuugaggcacccaagaa

SEQ ID NO: 184614 - RNA, 19 nt, Artificial Sequence
  Synthetic
gacuugaggcacccaagaa

SEQ ID NO: 184615 - RNA, 20 nt, Artificial Sequence
  Synthetic
ggacuugaggcacccaagaa

SEQ ID NO: 184616 - RNA, 21 nt, Artificial Sequence
  Synthetic
uggacuugaggcacccaagaa

SEQ ID NO: 184617 - RNA, 22 nt, Artificial Sequence
  Synthetic
uuggacuugaggcacccaagaa

SEQ ID NO: 184618 - RNA, 23 nt, Artificial Sequence
  Synthetic
cuuggacuugaggcacccaagaa

SEQ ID NO: 184619 - RNA, 24 nt, Artificial Sequence
  Synthetic
acuuggacuugaggcacccaagaa

SEQ ID NO: 184620 - RNA, 18 nt, Artificial Sequence
  Synthetic
cauauuuucacccaagaa

SEQ ID NO: 184621 - RNA, 19 nt, Artificial Sequence
  Synthetic
ccauauuuucacccaagaa

SEQ ID NO: 184622 - RNA, 20 nt, Artificial Sequence
  Synthetic
cccauauuuucacccaagaa

SEQ ID NO: 184623 - RNA, 21 nt, Artificial Sequence
  Synthetic
acccauauuuucacccaagaa

SEQ ID NO: 184624 - RNA, 22 nt, Artificial Sequence
  Synthetic
uacccauauuuucacccaagaa

SEQ ID NO: 184625 - RNA, 23 nt, Artificial Sequence
  Synthetic
uuacccauauuuucacccaagaa

SEQ ID NO: 184626 - RNA, 24 nt, Artificial Sequence
  Synthetic
cuuacccauauuuucacccaagaa

SEQ ID NO: 184627 - RNA, 18 nt, Artificial Sequence
  Synthetic
aaggcaauacgccaagaa

SEQ ID NO: 184628 - RNA, 19 nt, Artificial Sequence
  Synthetic
gaaggcaauacgccaagaa

SEQ ID NO: 184629 - RNA, 20 nt, Artificial Sequence
  Synthetic
agaaggcaauacgccaagaa

SEQ ID NO: 184630 - RNA, 21 nt, Artificial Sequence
  Synthetic
gagaaggcaauacgccaagaa

SEQ ID NO: 184631 - RNA, 22 nt, Artificial Sequence
  Synthetic
ggagaaggcaauacgccaagaa

SEQ ID NO: 184632 - RNA, 23 nt, Artificial Sequence
  Synthetic
aggagaaggcaauacgccaagaa

SEQ ID NO: 184633 - RNA, 24 nt, Artificial Sequence
  Synthetic
caggagaaggcaauacgccaagaa

SEQ ID NO: 184634 - RNA, 18 nt, Artificial Sequence
  Synthetic
ggcagccgaaugcaagaa

SEQ ID NO: 184635 - RNA, 19 nt, Artificial Sequence
  Synthetic
aggcagccgaaugcaagaa

SEQ ID NO: 184636 - RNA, 20 nt, Artificial Sequence
  Synthetic
gaggcagccgaaugcaagaa

SEQ ID NO: 184637 - RNA, 21 nt, Artificial Sequence
  Synthetic
agaggcagccgaaugcaagaa

SEQ ID NO: 184638 - RNA, 22 nt, Artificial Sequence
  Synthetic
gagaggcagccgaaugcaagaa

SEQ ID NO: 184639 - RNA, 23 nt, Artificial Sequence
  Synthetic
ggagaggcagccgaaugcaagaa

SEQ ID NO: 184640 - RNA, 24 nt, Artificial Sequence
  Synthetic
uggagaggcagccgaaugcaagaa

SEQ ID NO: 184641 - RNA, 18 nt, Artificial Sequence
  Synthetic
gaggcccuggaucaagaa

SEQ ID NO: 184642 - RNA, 19 nt, Artificial Sequence
  Synthetic
ggaggcccuggaucaagaa

SEQ ID NO: 184643 - RNA, 20 nt, Artificial Sequence
  Synthetic
uggaggcccuggaucaagaa

SEQ ID NO: 184644 - RNA, 21 nt, Artificial Sequence
  Synthetic
uuggaggcccuggaucaagaa

SEQ ID NO: 184645 - RNA, 22 nt, Artificial Sequence
  Synthetic
uuuggaggcccuggaucaagaa

SEQ ID NO: 184646 - RNA, 23 nt, Artificial Sequence
  Synthetic
auuuggaggcccuggaucaagaa

SEQ ID NO: 184647 - RNA, 24 nt, Artificial Sequence
  Synthetic
uauuuggaggcccuggaucaagaa

SEQ ID NO: 184648 - RNA, 18 nt, Artificial Sequence
  Synthetic
gaauccaacccucaagaa

SEQ ID NO: 184649 - RNA, 19 nt, Artificial Sequence
  Synthetic
agaauccaacccucaagaa

SEQ ID NO: 184650 - RNA, 20 nt, Artificial Sequence
  Synthetic
gagaauccaacccucaagaa

SEQ ID NO: 184651 - RNA, 21 nt, Artificial Sequence
  Synthetic
agagaauccaacccucaagaa

SEQ ID NO: 184652 - RNA, 22 nt, Artificial Sequence
  Synthetic
aagagaauccaacccucaagaa

SEQ ID NO: 184653 - RNA, 23 nt, Artificial Sequence
  Synthetic
uaagagaauccaacccucaagaa

SEQ ID NO: 184654 - RNA, 24 nt, Artificial Sequence
  Synthetic
auaagagaauccaacccucaagaa

SEQ ID NO: 184655 - RNA, 18 nt, Artificial Sequence
  Synthetic
uuggacagaagucaagaa

SEQ ID NO: 184656 - RNA, 19 nt, Artificial Sequence
  Synthetic
guuggacagaagucaagaa

SEQ ID NO: 184657 - RNA, 20 nt, Artificial Sequence
  Synthetic
gguuggacagaagucaagaa

SEQ ID NO: 184658 - RNA, 21 nt, Artificial Sequence
  Synthetic
ggguuggacagaagucaagaa

SEQ ID NO: 184659 - RNA, 22 nt, Artificial Sequence
  Synthetic
gggguuggacagaagucaagaa

SEQ ID NO: 184660 - RNA, 23 nt, Artificial Sequence
  Synthetic
ugggguuggacagaagucaagaa

SEQ ID NO: 184661 - RNA, 24 nt, Artificial Sequence
  Synthetic
cugggguuggacagaagucaagaa

SEQ ID NO: 184662 - RNA, 18 nt, Artificial Sequence
  Synthetic
uggagauguagucaagaa

SEQ ID NO: 184663 - RNA, 19 nt, Artificial Sequence
  Synthetic
auggagauguagucaagaa

SEQ ID NO: 184664 - RNA, 20 nt, Artificial Sequence
  Synthetic
uauggagauguagucaagaa

SEQ ID NO: 184665 - RNA, 21 nt, Artificial Sequence
  Synthetic
uuauggagauguagucaagaa

SEQ ID NO: 184666 - RNA, 22 nt, Artificial Sequence
  Synthetic
auuauggagauguagucaagaa

SEQ ID NO: 184667 - RNA, 23 nt, Artificial Sequence
  Synthetic
aauuauggagauguagucaagaa

SEQ ID NO: 184668 - RNA, 24 nt, Artificial Sequence
  Synthetic
aaauuauggagauguagucaagaa

SEQ ID NO: 184669 - RNA, 18 nt, Artificial Sequence
  Synthetic
uauucaagucuucaagaa

SEQ ID NO: 184670 - RNA, 19 nt, Artificial Sequence
  Synthetic
guauucaagucuucaagaa

SEQ ID NO: 184671 - RNA, 20 nt, Artificial Sequence
  Synthetic
gguauucaagucuucaagaa

SEQ ID NO: 184672 - RNA, 21 nt, Artificial Sequence
  Synthetic
ugguauucaagucuucaagaa

SEQ ID NO: 184673 - RNA, 22 nt, Artificial Sequence
  Synthetic
uugguauucaagucuucaagaa

SEQ ID NO: 184674 - RNA, 23 nt, Artificial Sequence
  Synthetic
auugguauucaagucuucaagaa

SEQ ID NO: 184675 - RNA, 24 nt, Artificial Sequence
  Synthetic
aauugguauucaagucuucaagaa

SEQ ID NO: 184676 - RNA, 18 nt, Artificial Sequence
  Synthetic
uauuauuuauuucaagaa

SEQ ID NO: 184677 - RNA, 19 nt, Artificial Sequence
  Synthetic
guauuauuuauuucaagaa

SEQ ID NO: 184678 - RNA, 20 nt, Artificial Sequence
  Synthetic
uguauuauuuauuucaagaa

SEQ ID NO: 184679 - RNA, 21 nt, Artificial Sequence
  Synthetic
cuguauuauuuauuucaagaa

SEQ ID NO: 184680 - RNA, 22 nt, Artificial Sequence
  Synthetic
acuguauuauuuauuucaagaa

SEQ ID NO: 184681 - RNA, 23 nt, Artificial Sequence
  Synthetic
uacuguauuauuuauuucaagaa

SEQ ID NO: 184682 - RNA, 24 nt, Artificial Sequence
  Synthetic
auacuguauuauuuauuucaagaa

SEQ ID NO: 184683 - RNA, 18 nt, Artificial Sequence
  Synthetic
aaaaguucuuuucaagaa

SEQ ID NO: 184684 - RNA, 19 nt, Artificial Sequence
  Synthetic
uaaaaguucuuuucaagaa

SEQ ID NO: 184685 - RNA, 20 nt, Artificial Sequence
  Synthetic
guaaaaguucuuuucaagaa

SEQ ID NO: 184686 - RNA, 21 nt, Artificial Sequence
  Synthetic
gguaaaaguucuuuucaagaa

SEQ ID NO: 184687 - RNA, 22 nt, Artificial Sequence
  Synthetic
ugguaaaaguucuuuucaagaa

SEQ ID NO: 184688 - RNA, 23 nt, Artificial Sequence
  Synthetic
cugguaaaaguucuuuucaagaa

SEQ ID NO: 184689 - RNA, 24 nt, Artificial Sequence
  Synthetic
ucugguaaaaguucuuuucaagaa

SEQ ID NO: 184690 - RNA, 18 nt, Artificial Sequence
  Synthetic
uguucuacaaaagaagaa

SEQ ID NO: 184691 - RNA, 19 nt, Artificial Sequence
  Synthetic
cuguucuacaaaagaagaa

SEQ ID NO: 184692 - RNA, 20 nt, Artificial Sequence
  Synthetic
ucuguucuacaaaagaagaa

SEQ ID NO: 184693 - RNA, 21 nt, Artificial Sequence
  Synthetic
cucuguucuacaaaagaagaa

SEQ ID NO: 184694 - RNA, 22 nt, Artificial Sequence
  Synthetic
ucucuguucuacaaaagaagaa

SEQ ID NO: 184695 - RNA, 23 nt, Artificial Sequence
  Synthetic
cucucuguucuacaaaagaagaa

SEQ ID NO: 184696 - RNA, 24 nt, Artificial Sequence
  Synthetic
acucucuguucuacaaaagaagaa

SEQ ID NO: 184697 - RNA, 18 nt, Artificial Sequence
  Synthetic
cagacuaauaaagaagaa

SEQ ID NO: 184698 - RNA, 19 nt, Artificial Sequence
  Synthetic
ccagacuaauaaagaagaa

SEQ ID NO: 184699 - RNA, 20 nt, Artificial Sequence
  Synthetic
gccagacuaauaaagaagaa

SEQ ID NO: 184700 - RNA, 24 nt, Artificial Sequence
  Synthetic
gcuagccagacuaauaaagaagaa

SEQ ID NO: 184701 - RNA, 18 nt, Artificial Sequence
  Synthetic
aaaaaaaaagaagaagaa

SEQ ID NO: 184702 - RNA, 19 nt, Artificial Sequence
  Synthetic
caaaaaaaaagaagaagaa

SEQ ID NO: 184703 - RNA, 20 nt, Artificial Sequence
  Synthetic
ucaaaaaaaaagaagaagaa

SEQ ID NO: 184704 - RNA, 21 nt, Artificial Sequence
  Synthetic
cucaaaaaaaaagaagaagaa

SEQ ID NO: 184705 - RNA, 22 nt, Artificial Sequence
  Synthetic
ucucaaaaaaaaagaagaagaa

SEQ ID NO: 184706 - RNA, 23 nt, Artificial Sequence
  Synthetic
gucucaaaaaaaaagaagaagaa

SEQ ID NO: 184707 - RNA, 24 nt, Artificial Sequence
  Synthetic
cgucucaaaaaaaaagaagaagaa

SEQ ID NO: 184708 - RNA, 18 nt, Artificial Sequence
  Synthetic
cacaguauagaagaagaa

SEQ ID NO: 184709 - RNA, 19 nt, Artificial Sequence
  Synthetic
ccacaguauagaagaagaa

SEQ ID NO: 184710 - RNA, 20 nt, Artificial Sequence
  Synthetic
uccacaguauagaagaagaa

SEQ ID NO: 184711 - RNA, 21 nt, Artificial Sequence
  Synthetic
auccacaguauagaagaagaa

SEQ ID NO: 184712 - RNA, 22 nt, Artificial Sequence
  Synthetic
cauccacaguauagaagaagaa

SEQ ID NO: 184713 - RNA, 23 nt, Artificial Sequence
  Synthetic
gcauccacaguauagaagaagaa

SEQ ID NO: 184714 - RNA, 24 nt, Artificial Sequence
  Synthetic
ggcauccacaguauagaagaagaa

SEQ ID NO: 184715 - RNA, 18 nt, Artificial Sequence
  Synthetic
uuaaaguguuaagaagaa

SEQ ID NO: 184716 - RNA, 19 nt, Artificial Sequence
  Synthetic
auuaaaguguuaagaagaa

SEQ ID NO: 184717 - RNA, 20 nt, Artificial Sequence
  Synthetic
uauuaaaguguuaagaagaa

SEQ ID NO: 184718 - RNA, 21 nt, Artificial Sequence
  Synthetic
guauuaaaguguuaagaagaa

SEQ ID NO: 184719 - RNA, 22 nt, Artificial Sequence
  Synthetic
aguauuaaaguguuaagaagaa

SEQ ID NO: 184720 - RNA, 23 nt, Artificial Sequence
  Synthetic
aaguauuaaaguguuaagaagaa

SEQ ID NO: 184721 - RNA, 24 nt, Artificial Sequence
  Synthetic
gaaguauuaaaguguuaagaagaa

SEQ ID NO: 184722 - RNA, 18 nt, Artificial Sequence
  Synthetic
gaaucaugaccagaagaa

SEQ ID NO: 184723 - RNA, 19 nt, Artificial Sequence
  Synthetic
ggaaucaugaccagaagaa

SEQ ID NO: 184724 - RNA, 20 nt, Artificial Sequence
  Synthetic
aggaaucaugaccagaagaa

SEQ ID NO: 184725 - RNA, 21 nt, Artificial Sequence
  Synthetic
gaggaaucaugaccagaagaa

SEQ ID NO: 184726 - RNA, 22 nt, Artificial Sequence
  Synthetic
ugaggaaucaugaccagaagaa

SEQ ID NO: 184727 - RNA, 23 nt, Artificial Sequence
  Synthetic
uugaggaaucaugaccagaagaa

SEQ ID NO: 184728 - RNA, 24 nt, Artificial Sequence
  Synthetic
guugaggaaucaugaccagaagaa

SEQ ID NO: 184729 - RNA, 18 nt, Artificial Sequence
  Synthetic
aguaacuagccagaagaa

SEQ ID NO: 184730 - RNA, 19 nt, Artificial Sequence
  Synthetic
gaguaacuagccagaagaa

SEQ ID NO: 184731 - RNA, 20 nt, Artificial Sequence
  Synthetic
agaguaacuagccagaagaa

SEQ ID NO: 184732 - RNA, 21 nt, Artificial Sequence
  Synthetic
aagaguaacuagccagaagaa

SEQ ID NO: 184733 - RNA, 22 nt, Artificial Sequence
  Synthetic
aaagaguaacuagccagaagaa

SEQ ID NO: 184734 - RNA, 23 nt, Artificial Sequence
  Synthetic
caaagaguaacuagccagaagaa

SEQ ID NO: 184735 - RNA, 24 nt, Artificial Sequence
  Synthetic
ccaaagaguaacuagccagaagaa

SEQ ID NO: 184736 - RNA, 18 nt, Artificial Sequence
  Synthetic
cguugucacagagaagaa

SEQ ID NO: 184737 - RNA, 19 nt, Artificial Sequence
  Synthetic
gcguugucacagagaagaa

SEQ ID NO: 184738 - RNA, 20 nt, Artificial Sequence
  Synthetic
ggcguugucacagagaagaa

SEQ ID NO: 184739 - RNA, 21 nt, Artificial Sequence
  Synthetic
gggcguugucacagagaagaa

SEQ ID NO: 184740 - RNA, 22 nt, Artificial Sequence
  Synthetic
cgggcguugucacagagaagaa

SEQ ID NO: 184741 - RNA, 23 nt, Artificial Sequence
  Synthetic
ucgggcguugucacagagaagaa

SEQ ID NO: 184742 - RNA, 24 nt, Artificial Sequence
  Synthetic
gucgggcguugucacagagaagaa

SEQ ID NO: 184743 - RNA, 18 nt, Artificial Sequence
  Synthetic
auuauggacagagaagaa

SEQ ID NO: 184744 - RNA, 19 nt, Artificial Sequence
  Synthetic
gauuauggacagagaagaa

SEQ ID NO: 184745 - RNA, 20 nt, Artificial Sequence
  Synthetic
ggauuauggacagagaagaa

SEQ ID NO: 184746 - RNA, 21 nt, Artificial Sequence
  Synthetic
uggauuauggacagagaagaa

SEQ ID NO: 184747 - RNA, 22 nt, Artificial Sequence
  Synthetic
auggauuauggacagagaagaa

SEQ ID NO: 184748 - RNA, 23 nt, Artificial Sequence
  Synthetic
gauggauuauggacagagaagaa

SEQ ID NO: 184749 - RNA, 24 nt, Artificial Sequence
  Synthetic
ggauggauuauggacagagaagaa

SEQ ID NO: 184750 - RNA, 18 nt, Artificial Sequence
  Synthetic
aacuuguauagagaagaa

SEQ ID NO: 184751 - RNA, 19 nt, Artificial Sequence
  Synthetic
uaacuuguauagagaagaa

SEQ ID NO: 184752 - RNA, 20 nt, Artificial Sequence
  Synthetic
auaacuuguauagagaagaa

SEQ ID NO: 184753 - RNA, 21 nt, Artificial Sequence
  Synthetic
cauaacuuguauagagaagaa

SEQ ID NO: 184754 - RNA, 22 nt, Artificial Sequence
  Synthetic
ucauaacuuguauagagaagaa

SEQ ID NO: 184755 - RNA, 23 nt, Artificial Sequence
  Synthetic
uucauaacuuguauagagaagaa

SEQ ID NO: 184756 - RNA, 24 nt, Artificial Sequence
  Synthetic
cuucauaacuuguauagagaagaa

SEQ ID NO: 184757 - RNA, 18 nt, Artificial Sequence
  Synthetic
aagugaggaggagaagaa

SEQ ID NO: 184758 - RNA, 19 nt, Artificial Sequence
  Synthetic
aaagugaggaggagaagaa

SEQ ID NO: 184759 - RNA, 20 nt, Artificial Sequence
  Synthetic
aaaagugaggaggagaagaa

SEQ ID NO: 184760 - RNA, 21 nt, Artificial Sequence
  Synthetic
aaaaagugaggaggagaagaa

SEQ ID NO: 184761 - RNA, 22 nt, Artificial Sequence
  Synthetic
aaaaaagugaggaggagaagaa

SEQ ID NO: 184762 - RNA, 23 nt, Artificial Sequence
  Synthetic
aaaaaaagugaggaggagaagaa

SEQ ID NO: 184763 - RNA, 24 nt, Artificial Sequence
  Synthetic
aaaaaaaagugaggaggagaagaa

SEQ ID NO: 184764 - RNA, 18 nt, Artificial Sequence
  Synthetic
guuuagcagggagaagaa

SEQ ID NO: 184765 - RNA, 19 nt, Artificial Sequence
  Synthetic
aguuuagcagggagaagaa

SEQ ID NO: 184766 - RNA, 20 nt, Artificial Sequence
  Synthetic
aaguuuagcagggagaagaa

SEQ ID NO: 184767 - RNA, 21 nt, Artificial Sequence
  Synthetic
gaaguuuagcagggagaagaa

SEQ ID NO: 184768 - RNA, 22 nt, Artificial Sequence
  Synthetic
ggaaguuuagcagggagaagaa

SEQ ID NO: 184769 - RNA, 23 nt, Artificial Sequence
  Synthetic
gggaaguuuagcagggagaagaa

SEQ ID NO: 184770 - RNA, 24 nt, Artificial Sequence
  Synthetic
agggaaguuuagcagggagaagaa

SEQ ID NO: 184771 - RNA, 18 nt, Artificial Sequence
  Synthetic
acuaauaccugagaagaa

SEQ ID NO: 184772 - RNA, 19 nt, Artificial Sequence
  Synthetic
aacuaauaccugagaagaa

SEQ ID NO: 184773 - RNA, 20 nt, Artificial Sequence
  Synthetic
aaacuaauaccugagaagaa

SEQ ID NO: 184774 - RNA, 21 nt, Artificial Sequence
  Synthetic
uaaacuaauaccugagaagaa

SEQ ID NO: 184775 - RNA, 22 nt, Artificial Sequence
  Synthetic
auaaacuaauaccugagaagaa

SEQ ID NO: 184776 - RNA, 23 nt, Artificial Sequence
  Synthetic
uauaaacuaauaccugagaagaa

SEQ ID NO: 184777 - RNA, 24 nt, Artificial Sequence
  Synthetic
auauaaacuaauaccugagaagaa

SEQ ID NO: 184778 - RNA, 18 nt, Artificial Sequence
  Synthetic
aaaguuugcugagaagaa

SEQ ID NO: 184779 - RNA, 19 nt, Artificial Sequence
  Synthetic
aaaaguuugcugagaagaa

SEQ ID NO: 184780 - RNA, 20 nt, Artificial Sequence
  Synthetic
uaaaaguuugcugagaagaa

SEQ ID NO: 184781 - RNA, 21 nt, Artificial Sequence
  Synthetic
auaaaaguuugcugagaagaa

SEQ ID NO: 184782 - RNA, 22 nt, Artificial Sequence
  Synthetic
aauaaaaguuugcugagaagaa

SEQ ID NO: 184783 - RNA, 23 nt, Artificial Sequence
  Synthetic
caauaaaaguuugcugagaagaa

SEQ ID NO: 184784 - RNA, 24 nt, Artificial Sequence
  Synthetic
ccaauaaaaguuugcugagaagaa

SEQ ID NO: 184785 - RNA, 18 nt, Artificial Sequence
  Synthetic
gcacauagaguagaagaa

SEQ ID NO: 184786 - RNA, 19 nt, Artificial Sequence
  Synthetic
agcacauagaguagaagaa

SEQ ID NO: 184787 - RNA, 20 nt, Artificial Sequence
  Synthetic
aagcacauagaguagaagaa

SEQ ID NO: 184788 - RNA, 21 nt, Artificial Sequence
  Synthetic
caagcacauagaguagaagaa

SEQ ID NO: 184789 - RNA, 22 nt, Artificial Sequence
  Synthetic
ccaagcacauagaguagaagaa

SEQ ID NO: 184790 - RNA, 23 nt, Artificial Sequence
  Synthetic
gccaagcacauagaguagaagaa

SEQ ID NO: 184791 - RNA, 24 nt, Artificial Sequence
  Synthetic
ggccaagcacauagaguagaagaa

SEQ ID NO: 184792 - RNA, 18 nt, Artificial Sequence
  Synthetic
uugcuuauuuuagaagaa

SEQ ID NO: 184793 - RNA, 19 nt, Artificial Sequence
  Synthetic
guugcuuauuuuagaagaa

SEQ ID NO: 184794 - RNA, 20 nt, Artificial Sequence
  Synthetic
gguugcuuauuuuagaagaa

SEQ ID NO: 184795 - RNA, 21 nt, Artificial Sequence
  Synthetic
ugguugcuuauuuuagaagaa

SEQ ID NO: 184796 - RNA, 22 nt, Artificial Sequence
  Synthetic
augguugcuuauuuuagaagaa

SEQ ID NO: 184797 - RNA, 23 nt, Artificial Sequence
  Synthetic
gaugguugcuuauuuuagaagaa

SEQ ID NO: 184798 - RNA, 24 nt, Artificial Sequence
  Synthetic
agaugguugcuuauuuuagaagaa

SEQ ID NO: 184799 - RNA, 18 nt, Artificial Sequence
  Synthetic
cauuaucuuuuagaagaa

SEQ ID NO: 184800 - RNA, 19 nt, Artificial Sequence
  Synthetic
ccauuaucuuuuagaagaa

SEQ ID NO: 184801 - RNA, 20 nt, Artificial Sequence
  Synthetic
accauuaucuuuuagaagaa

SEQ ID NO: 184802 - RNA, 21 nt, Artificial Sequence
  Synthetic
uaccauuaucuuuuagaagaa

SEQ ID NO: 184803 - RNA, 22 nt, Artificial Sequence
  Synthetic
auaccauuaucuuuuagaagaa

SEQ ID NO: 184804 - RNA, 23 nt, Artificial Sequence
  Synthetic
uauaccauuaucuuuuagaagaa

SEQ ID NO: 184805 - RNA, 24 nt, Artificial Sequence
  Synthetic
auauaccauuaucuuuuagaagaa

SEQ ID NO: 184806 - RNA, 18 nt, Artificial Sequence
  Synthetic
gugcuaggaaacgaagaa

SEQ ID NO: 184807 - RNA, 19 nt, Artificial Sequence
  Synthetic
agugcuaggaaacgaagaa

SEQ ID NO: 184808 - RNA, 20 nt, Artificial Sequence
  Synthetic
aagugcuaggaaacgaagaa

SEQ ID NO: 184809 - RNA, 21 nt, Artificial Sequence
  Synthetic
gaagugcuaggaaacgaagaa

SEQ ID NO: 184810 - RNA, 22 nt, Artificial Sequence
  Synthetic
agaagugcuaggaaacgaagaa

SEQ ID NO: 184811 - RNA, 23 nt, Artificial Sequence
  Synthetic
cagaagugcuaggaaacgaagaa

SEQ ID NO: 184812 - RNA, 24 nt, Artificial Sequence
  Synthetic
ucagaagugcuaggaaacgaagaa

SEQ ID NO: 184813 - RNA, 18 nt, Artificial Sequence
  Synthetic
gaaggaaggaaggaagaa

SEQ ID NO: 184814 - RNA, 19 nt, Artificial Sequence
  Synthetic
agaaggaaggaaggaagaa

SEQ ID NO: 184815 - RNA, 20 nt, Artificial Sequence
  Synthetic
aagaaggaaggaaggaagaa

SEQ ID NO: 184816 - RNA, 21 nt, Artificial Sequence
  Synthetic
aaagaaggaaggaaggaagaa

SEQ ID NO: 184817 - RNA, 22 nt, Artificial Sequence
  Synthetic
aaaagaaggaaggaaggaagaa

SEQ ID NO: 184818 - RNA, 23 nt, Artificial Sequence
  Synthetic
gaaaagaaggaaggaaggaagaa

SEQ ID NO: 184819 - RNA, 24 nt, Artificial Sequence
  Synthetic
agaaaagaaggaaggaaggaagaa

SEQ ID NO: 184820 - RNA, 18 nt, Artificial Sequence
  Synthetic
gaaggagguaaggaagaa

SEQ ID NO: 184821 - RNA, 19 nt, Artificial Sequence
  Synthetic
agaaggagguaaggaagaa

SEQ ID NO: 184822 - RNA, 20 nt, Artificial Sequence
  Synthetic
gagaaggagguaaggaagaa

SEQ ID NO: 184823 - RNA, 21 nt, Artificial Sequence
  Synthetic
agagaaggagguaaggaagaa

SEQ ID NO: 184824 - RNA, 22 nt, Artificial Sequence
  Synthetic
aagagaaggagguaaggaagaa

SEQ ID NO: 184825 - RNA, 23 nt, Artificial Sequence
  Synthetic
gaagagaaggagguaaggaagaa

SEQ ID NO: 184826 - RNA, 24 nt, Artificial Sequence
  Synthetic
ugaagagaaggagguaaggaagaa

SEQ ID NO: 184827 - RNA, 18 nt, Artificial Sequence
  Synthetic
uacuuuaaaauggaagaa

SEQ ID NO: 184828 - RNA, 19 nt, Artificial Sequence
  Synthetic
guacuuuaaaauggaagaa

SEQ ID NO: 184829 - RNA, 20 nt, Artificial Sequence
  Synthetic
uguacuuuaaaauggaagaa

SEQ ID NO: 184830 - RNA, 21 nt, Artificial Sequence
  Synthetic
cuguacuuuaaaauggaagaa

SEQ ID NO: 184831 - RNA, 22 nt, Artificial Sequence
  Synthetic
ucuguacuuuaaaauggaagaa

SEQ ID NO: 184832 - RNA, 23 nt, Artificial Sequence
  Synthetic
gucuguacuuuaaaauggaagaa

SEQ ID NO: 184833 - RNA, 24 nt, Artificial Sequence
  Synthetic
ugucuguacuuuaaaauggaagaa

SEQ ID NO: 184834 - RNA, 18 nt, Artificial Sequence
  Synthetic
ggguuggguuuggaagaa

SEQ ID NO: 184835 - RNA, 19 nt, Artificial Sequence
  Synthetic
aggguuggguuuggaagaa

SEQ ID NO: 184836 - RNA, 20 nt, Artificial Sequence
  Synthetic
caggguuggguuuggaagaa

SEQ ID NO: 184837 - RNA, 21 nt, Artificial Sequence
  Synthetic
acaggguuggguuuggaagaa

SEQ ID NO: 184838 - RNA, 22 nt, Artificial Sequence
  Synthetic
uacaggguuggguuuggaagaa

SEQ ID NO: 184839 - RNA, 23 nt, Artificial Sequence
  Synthetic
cuacaggguuggguuuggaagaa

SEQ ID NO: 184840 - RNA, 24 nt, Artificial Sequence
  Synthetic
ucuacaggguuggguuuggaagaa

SEQ ID NO: 184841 - RNA, 18 nt, Artificial Sequence
  Synthetic
ccuuacuuuuuggaagaa

SEQ ID NO: 184842 - RNA, 19 nt, Artificial Sequence
  Synthetic
uccuuacuuuuuggaagaa

SEQ ID NO: 184843 - RNA, 20 nt, Artificial Sequence
  Synthetic
auccuuacuuuuuggaagaa

SEQ ID NO: 184844 - RNA, 21 nt, Artificial Sequence
  Synthetic
uauccuuacuuuuuggaagaa

SEQ ID NO: 184845 - RNA, 22 nt, Artificial Sequence
  Synthetic
uuauccuuacuuuuuggaagaa

SEQ ID NO: 184846 - RNA, 23 nt, Artificial Sequence
  Synthetic
uuuauccuuacuuuuuggaagaa

SEQ ID NO: 184847 - RNA, 24 nt, Artificial Sequence
  Synthetic
auuuauccuuacuuuuuggaagaa

SEQ ID NO: 184848 - RNA, 18 nt, Artificial Sequence
  Synthetic
cacuuaacaaaugaagaa

SEQ ID NO: 184849 - RNA, 19 nt, Artificial Sequence
  Synthetic
acacuuaacaaaugaagaa

SEQ ID NO: 184850 - RNA, 20 nt, Artificial Sequence
  Synthetic
aacacuuaacaaaugaagaa

SEQ ID NO: 184851 - RNA, 21 nt, Artificial Sequence
  Synthetic
gaacacuuaacaaaugaagaa

SEQ ID NO: 184852 - RNA, 22 nt, Artificial Sequence
  Synthetic
agaacacuuaacaaaugaagaa

SEQ ID NO: 184853 - RNA, 23 nt, Artificial Sequence
  Synthetic
aagaacacuuaacaaaugaagaa

SEQ ID NO: 184854 - RNA, 24 nt, Artificial Sequence
  Synthetic
aaagaacacuuaacaaaugaagaa

SEQ ID NO: 184855 - RNA, 18 nt, Artificial Sequence
  Synthetic
aauuucaacaaugaagaa

SEQ ID NO: 184856 - RNA, 19 nt, Artificial Sequence
  Synthetic
caauuucaacaaugaagaa

SEQ ID NO: 184857 - RNA, 20 nt, Artificial Sequence
  Synthetic
gcaauuucaacaaugaagaa

SEQ ID NO: 184858 - RNA, 21 nt, Artificial Sequence
  Synthetic
ggcaauuucaacaaugaagaa

SEQ ID NO: 184859 - RNA, 22 nt, Artificial Sequence
  Synthetic
aggcaauuucaacaaugaagaa

SEQ ID NO: 184860 - RNA, 23 nt, Artificial Sequence
  Synthetic
aaggcaauuucaacaaugaagaa

SEQ ID NO: 184861 - RNA, 24 nt, Artificial Sequence
  Synthetic
gaaggcaauuucaacaaugaagaa

SEQ ID NO: 184862 - RNA, 18 nt, Artificial Sequence
  Synthetic
uauugguacaaugaagaa

SEQ ID NO: 184863 - RNA, 19 nt, Artificial Sequence
  Synthetic
uuauugguacaaugaagaa

SEQ ID NO: 184864 - RNA, 20 nt, Artificial Sequence
  Synthetic
cuuauugguacaaugaagaa

SEQ ID NO: 184865 - RNA, 21 nt, Artificial Sequence
  Synthetic
acuuauugguacaaugaagaa

SEQ ID NO: 184866 - RNA, 22 nt, Artificial Sequence
  Synthetic
cacuuauugguacaaugaagaa

SEQ ID NO: 184867 - RNA, 23 nt, Artificial Sequence
  Synthetic
ucacuuauugguacaaugaagaa

SEQ ID NO: 184868 - RNA, 24 nt, Artificial Sequence
  Synthetic
aucacuuauugguacaaugaagaa

SEQ ID NO: 184869 - RNA, 18 nt, Artificial Sequence
  Synthetic
cuuagugggaaugaagaa

SEQ ID NO: 184870 - RNA, 19 nt, Artificial Sequence
  Synthetic
gcuuagugggaaugaagaa

SEQ ID NO: 184871 - RNA, 20 nt, Artificial Sequence
  Synthetic
ugcuuagugggaaugaagaa

SEQ ID NO: 184872 - RNA, 21 nt, Artificial Sequence
  Synthetic
gugcuuagugggaaugaagaa

SEQ ID NO: 184873 - RNA, 22 nt, Artificial Sequence
  Synthetic
ugugcuuagugggaaugaagaa

SEQ ID NO: 184874 - RNA, 23 nt, Artificial Sequence
  Synthetic
augugcuuagugggaaugaagaa

SEQ ID NO: 184875 - RNA, 24 nt, Artificial Sequence
  Synthetic
aaugugcuuagugggaaugaagaa

SEQ ID NO: 184876 - RNA, 18 nt, Artificial Sequence
  Synthetic
ugaagcauggaugaagaa

SEQ ID NO: 184877 - RNA, 19 nt, Artificial Sequence
  Synthetic
cugaagcauggaugaagaa

SEQ ID NO: 184878 - RNA, 20 nt, Artificial Sequence
  Synthetic
acugaagcauggaugaagaa

SEQ ID NO: 184879 - RNA, 21 nt, Artificial Sequence
  Synthetic
cacugaagcauggaugaagaa

SEQ ID NO: 184880 - RNA, 22 nt, Artificial Sequence
  Synthetic
gcacugaagcauggaugaagaa

SEQ ID NO: 184881 - RNA, 23 nt, Artificial Sequence
  Synthetic
ugcacugaagcauggaugaagaa

SEQ ID NO: 184882 - RNA, 24 nt, Artificial Sequence
  Synthetic
uugcacugaagcauggaugaagaa

SEQ ID NO: 184883 - RNA, 18 nt, Artificial Sequence
  Synthetic
aaaauagacacugaagaa

SEQ ID NO: 184884 - RNA, 19 nt, Artificial Sequence
  Synthetic
gaaaauagacacugaagaa

SEQ ID NO: 184885 - RNA, 20 nt, Artificial Sequence
  Synthetic
agaaaauagacacugaagaa

SEQ ID NO: 184886 - RNA, 21 nt, Artificial Sequence
  Synthetic
gagaaaauagacacugaagaa

SEQ ID NO: 184887 - RNA, 22 nt, Artificial Sequence
  Synthetic
agagaaaauagacacugaagaa

SEQ ID NO: 184888 - RNA, 23 nt, Artificial Sequence
  Synthetic
cagagaaaauagacacugaagaa

SEQ ID NO: 184889 - RNA, 24 nt, Artificial Sequence
  Synthetic
acagagaaaauagacacugaagaa

SEQ ID NO: 184890 - RNA, 18 nt, Artificial Sequence
  Synthetic
aaccucugcucugaagaa

SEQ ID NO: 184891 - RNA, 19 nt, Artificial Sequence
  Synthetic
aaaccucugcucugaagaa

SEQ ID NO: 184892 - RNA, 20 nt, Artificial Sequence
  Synthetic
aaaaccucugcucugaagaa

SEQ ID NO: 184893 - RNA, 21 nt, Artificial Sequence
  Synthetic
aaaaaccucugcucugaagaa

SEQ ID NO: 184894 - RNA, 22 nt, Artificial Sequence
  Synthetic
uaaaaaccucugcucugaagaa

SEQ ID NO: 184895 - RNA, 23 nt, Artificial Sequence
  Synthetic
uuaaaaaccucugcucugaagaa

SEQ ID NO: 184896 - RNA, 24 nt, Artificial Sequence
  Synthetic
cuuaaaaaccucugcucugaagaa

SEQ ID NO: 184897 - RNA, 18 nt, Artificial Sequence
  Synthetic
ggaaaaaagucugaagaa

SEQ ID NO: 184898 - RNA, 19 nt, Artificial Sequence
  Synthetic
gggaaaaaagucugaagaa

SEQ ID NO: 184899 - RNA, 20 nt, Artificial Sequence
  Synthetic
ggggaaaaaagucugaagaa

SEQ ID NO: 184900 - RNA, 21 nt, Artificial Sequence
  Synthetic
aggggaaaaaagucugaagaa

SEQ ID NO: 184901 - RNA, 22 nt, Artificial Sequence
  Synthetic
uaggggaaaaaagucugaagaa

SEQ ID NO: 184902 - RNA, 23 nt, Artificial Sequence
  Synthetic
uuaggggaaaaaagucugaagaa

SEQ ID NO: 184903 - RNA, 24 nt, Artificial Sequence
  Synthetic
guuaggggaaaaaagucugaagaa

SEQ ID NO: 184904 - RNA, 18 nt, Artificial Sequence
  Synthetic
ggagggagaauugaagaa

SEQ ID NO: 184905 - RNA, 19 nt, Artificial Sequence
  Synthetic
gggagggagaauugaagaa

SEQ ID NO: 184906 - RNA, 20 nt, Artificial Sequence
  Synthetic
agggagggagaauugaagaa

SEQ ID NO: 184907 - RNA, 21 nt, Artificial Sequence
  Synthetic
gagggagggagaauugaagaa

SEQ ID NO: 184908 - RNA, 22 nt, Artificial Sequence
  Synthetic
ggagggagggagaauugaagaa

SEQ ID NO: 184909 - RNA, 23 nt, Artificial Sequence
  Synthetic
aggagggagggagaauugaagaa

SEQ ID NO: 184910 - RNA, 24 nt, Artificial Sequence
  Synthetic
aaggagggagggagaauugaagaa

SEQ ID NO: 184911 - RNA, 18 nt, Artificial Sequence
  Synthetic
uuaggaagauuugaagaa

SEQ ID NO: 184912 - RNA, 19 nt, Artificial Sequence
  Synthetic
auuaggaagauuugaagaa

SEQ ID NO: 184913 - RNA, 20 nt, Artificial Sequence
  Synthetic
uauuaggaagauuugaagaa

SEQ ID NO: 184914 - RNA, 21 nt, Artificial Sequence
  Synthetic
uuauuaggaagauuugaagaa

SEQ ID NO: 184915 - RNA, 22 nt, Artificial Sequence
  Synthetic
guuauuaggaagauuugaagaa

SEQ ID NO: 184916 - RNA, 23 nt, Artificial Sequence
  Synthetic
uguuauuaggaagauuugaagaa

SEQ ID NO: 184917 - RNA, 24 nt, Artificial Sequence
  Synthetic
uuguuauuaggaagauuugaagaa

SEQ ID NO: 184918 - RNA, 18 nt, Artificial Sequence
  Synthetic
aguuaccuauuugaagaa

SEQ ID NO: 184919 - RNA, 19 nt, Artificial Sequence
  Synthetic
gaguuaccuauuugaagaa

SEQ ID NO: 184920 - RNA, 20 nt, Artificial Sequence
  Synthetic
agaguuaccuauuugaagaa

SEQ ID NO: 184921 - RNA, 21 nt, Artificial Sequence
  Synthetic
gagaguuaccuauuugaagaa

SEQ ID NO: 184922 - RNA, 22 nt, Artificial Sequence
  Synthetic
agagaguuaccuauuugaagaa

SEQ ID NO: 184923 - RNA, 23 nt, Artificial Sequence
  Synthetic
aagagaguuaccuauuugaagaa

SEQ ID NO: 184924 - RNA, 24 nt, Artificial Sequence
  Synthetic
gaagagaguuaccuauuugaagaa

SEQ ID NO: 184925 - RNA, 18 nt, Artificial Sequence
  Synthetic
ccacauauagaauaagaa

SEQ ID NO: 184926 - RNA, 19 nt, Artificial Sequence
  Synthetic
gccacauauagaauaagaa

SEQ ID NO: 184927 - RNA, 20 nt, Artificial Sequence
  Synthetic
ggccacauauagaauaagaa

SEQ ID NO: 184928 - RNA, 21 nt, Artificial Sequence
  Synthetic
uggccacauauagaauaagaa

SEQ ID NO: 184929 - RNA, 22 nt, Artificial Sequence
  Synthetic
guggccacauauagaauaagaa

SEQ ID NO: 184930 - RNA, 23 nt, Artificial Sequence
  Synthetic
cguggccacauauagaauaagaa

SEQ ID NO: 184931 - RNA, 24 nt, Artificial Sequence
  Synthetic
gcguggccacauauagaauaagaa

SEQ ID NO: 184932 - RNA, 18 nt, Artificial Sequence
  Synthetic
uauuuauuauaauaagaa

SEQ ID NO: 184933 - RNA, 19 nt, Artificial Sequence
  Synthetic
guauuuauuauaauaagaa

SEQ ID NO: 184934 - RNA, 20 nt, Artificial Sequence
  Synthetic
gguauuuauuauaauaagaa

SEQ ID NO: 184935 - RNA, 21 nt, Artificial Sequence
  Synthetic
ugguauuuauuauaauaagaa

SEQ ID NO: 184936 - RNA, 22 nt, Artificial Sequence
  Synthetic
cugguauuuauuauaauaagaa

SEQ ID NO: 184937 - RNA, 23 nt, Artificial Sequence
  Synthetic
gcugguauuuauuauaauaagaa

SEQ ID NO: 184938 - RNA, 24 nt, Artificial Sequence
  Synthetic
ugcugguauuuauuauaauaagaa

SEQ ID NO: 184939 - RNA, 18 nt, Artificial Sequence
  Synthetic
gagaaauuuuaauaagaa

SEQ ID NO: 184940 - RNA, 19 nt, Artificial Sequence
  Synthetic
ugagaaauuuuaauaagaa

SEQ ID NO: 184941 - RNA, 20 nt, Artificial Sequence
  Synthetic
augagaaauuuuaauaagaa

SEQ ID NO: 184942 - RNA, 21 nt, Artificial Sequence
  Synthetic
uaugagaaauuuuaauaagaa

SEQ ID NO: 184943 - RNA, 22 nt, Artificial Sequence
  Synthetic
uuaugagaaauuuuaauaagaa

SEQ ID NO: 184944 - RNA, 23 nt, Artificial Sequence
  Synthetic
cuuaugagaaauuuuaauaagaa

SEQ ID NO: 184945 - RNA, 24 nt, Artificial Sequence
  Synthetic
ucuuaugagaaauuuuaauaagaa

SEQ ID NO: 184946 - RNA, 18 nt, Artificial Sequence
  Synthetic
agcaaauuaacauaagaa

SEQ ID NO: 184947 - RNA, 19 nt, Artificial Sequence
  Synthetic
aagcaaauuaacauaagaa

SEQ ID NO: 184948 - RNA, 20 nt, Artificial Sequence
  Synthetic
uaagcaaauuaacauaagaa

SEQ ID NO: 184949 - RNA, 21 nt, Artificial Sequence
  Synthetic
cuaagcaaauuaacauaagaa

SEQ ID NO: 184950 - RNA, 22 nt, Artificial Sequence
  Synthetic
ccuaagcaaauuaacauaagaa

SEQ ID NO: 184951 - RNA, 23 nt, Artificial Sequence
  Synthetic
uccuaagcaaauuaacauaagaa

SEQ ID NO: 184952 - RNA, 24 nt, Artificial Sequence
  Synthetic
auccuaagcaaauuaacauaagaa

SEQ ID NO: 184953 - RNA, 18 nt, Artificial Sequence
  Synthetic
aagauaggggcauaagaa

SEQ ID NO: 184954 - RNA, 19 nt, Artificial Sequence
  Synthetic
caagauaggggcauaagaa

SEQ ID NO: 184955 - RNA, 20 nt, Artificial Sequence
  Synthetic
ccaagauaggggcauaagaa

SEQ ID NO: 184956 - RNA, 21 nt, Artificial Sequence
  Synthetic
cccaagauaggggcauaagaa

SEQ ID NO: 184957 - RNA, 22 nt, Artificial Sequence
  Synthetic
acccaagauaggggcauaagaa

SEQ ID NO: 184958 - RNA, 23 nt, Artificial Sequence
  Synthetic
aacccaagauaggggcauaagaa

SEQ ID NO: 184959 - RNA, 24 nt, Artificial Sequence
  Synthetic
uaacccaagauaggggcauaagaa

SEQ ID NO: 184960 - RNA, 18 nt, Artificial Sequence
  Synthetic
guacacaaaucauaagaa

SEQ ID NO: 184961 - RNA, 19 nt, Artificial Sequence
  Synthetic
aguacacaaaucauaagaa

SEQ ID NO: 184962 - RNA, 20 nt, Artificial Sequence
  Synthetic
aaguacacaaaucauaagaa

SEQ ID NO: 184963 - RNA, 21 nt, Artificial Sequence
  Synthetic
aaaguacacaaaucauaagaa

SEQ ID NO: 184964 - RNA, 22 nt, Artificial Sequence
  Synthetic
aaaaguacacaaaucauaagaa

SEQ ID NO: 184965 - RNA, 23 nt, Artificial Sequence
  Synthetic
gaaaaguacacaaaucauaagaa

SEQ ID NO: 184966 - RNA, 24 nt, Artificial Sequence
  Synthetic
agaaaaguacacaaaucauaagaa

SEQ ID NO: 184967 - RNA, 18 nt, Artificial Sequence
  Synthetic
cuuccuccuucauaagaa

SEQ ID NO: 184968 - RNA, 19 nt, Artificial Sequence
  Synthetic
ucuuccuccuucauaagaa

SEQ ID NO: 184969 - RNA, 20 nt, Artificial Sequence
  Synthetic
uucuuccuccuucauaagaa

SEQ ID NO: 184970 - RNA, 21 nt, Artificial Sequence
  Synthetic
cuucuuccuccuucauaagaa

SEQ ID NO: 184971 - RNA, 22 nt, Artificial Sequence
  Synthetic
ucuucuuccuccuucauaagaa

SEQ ID NO: 184972 - RNA, 23 nt, Artificial Sequence
  Synthetic
cucuucuuccuccuucauaagaa

SEQ ID NO: 184973 - RNA, 24 nt, Artificial Sequence
  Synthetic
acucuucuuccuccuucauaagaa

SEQ ID NO: 184974 - RNA, 18 nt, Artificial Sequence
  Synthetic
acagauugcagauaagaa

SEQ ID NO: 184975 - RNA, 19 nt, Artificial Sequence
  Synthetic
uacagauugcagauaagaa

SEQ ID NO: 184976 - RNA, 20 nt, Artificial Sequence
  Synthetic
cuacagauugcagauaagaa

SEQ ID NO: 184977 - RNA, 21 nt, Artificial Sequence
  Synthetic
ccuacagauugcagauaagaa

SEQ ID NO: 184978 - RNA, 22 nt, Artificial Sequence
  Synthetic
uccuacagauugcagauaagaa

SEQ ID NO: 184979 - RNA, 23 nt, Artificial Sequence
  Synthetic
auccuacagauugcagauaagaa

SEQ ID NO: 184980 - RNA, 24 nt, Artificial Sequence
  Synthetic
cauccuacagauugcagauaagaa

SEQ ID NO: 184981 - RNA, 18 nt, Artificial Sequence
  Synthetic
cucccucccuuauaagaa

SEQ ID NO: 184982 - RNA, 19 nt, Artificial Sequence
  Synthetic
ucucccucccuuauaagaa

SEQ ID NO: 184983 - RNA, 20 nt, Artificial Sequence
  Synthetic
uucucccucccuuauaagaa

SEQ ID NO: 184984 - RNA, 21 nt, Artificial Sequence
  Synthetic
cuucucccucccuuauaagaa

SEQ ID NO: 184985 - RNA, 22 nt, Artificial Sequence
  Synthetic
ucuucucccucccuuauaagaa

SEQ ID NO: 184986 - RNA, 23 nt, Artificial Sequence
  Synthetic
cucuucucccucccuuauaagaa

SEQ ID NO: 184987 - RNA, 24 nt, Artificial Sequence
  Synthetic
acucuucucccucccuuauaagaa

SEQ ID NO: 184988 - RNA, 18 nt, Artificial Sequence
  Synthetic
augguauuuuuauaagaa

SEQ ID NO: 184989 - RNA, 19 nt, Artificial Sequence
  Synthetic
gaugguauuuuuauaagaa

SEQ ID NO: 184990 - RNA, 20 nt, Artificial Sequence
  Synthetic
agaugguauuuuuauaagaa

SEQ ID NO: 184991 - RNA, 21 nt, Artificial Sequence
  Synthetic
aagaugguauuuuuauaagaa

SEQ ID NO: 184992 - RNA, 22 nt, Artificial Sequence
  Synthetic
uaagaugguauuuuuauaagaa

SEQ ID NO: 184993 - RNA, 23 nt, Artificial Sequence
  Synthetic
uuaagaugguauuuuuauaagaa

SEQ ID NO: 184994 - RNA, 24 nt, Artificial Sequence
  Synthetic
guuaagaugguauuuuuauaagaa

SEQ ID NO: 184995 - RNA, 18 nt, Artificial Sequence
  Synthetic
aagcuaucuuacuaagaa

SEQ ID NO: 184996 - RNA, 19 nt, Artificial Sequence
  Synthetic
gaagcuaucuuacuaagaa

SEQ ID NO: 184997 - RNA, 20 nt, Artificial Sequence
  Synthetic
ugaagcuaucuuacuaagaa

SEQ ID NO: 184998 - RNA, 21 nt, Artificial Sequence
  Synthetic
augaagcuaucuuacuaagaa

SEQ ID NO: 184999 - RNA, 22 nt, Artificial Sequence
  Synthetic
aaugaagcuaucuuacuaagaa

SEQ ID NO: 185000 - RNA, 23 nt, Artificial Sequence
  Synthetic
gaaugaagcuaucuuacuaagaa

SEQ ID NO: 185001 - RNA, 24 nt, Artificial Sequence
  Synthetic
ggaaugaagcuaucuuacuaagaa

SEQ ID NO: 185002 - RNA, 18 nt, Artificial Sequence
  Synthetic
auuuaauaucccuaagaa

SEQ ID NO: 185003 - RNA, 19 nt, Artificial Sequence
  Synthetic
uauuuaauaucccuaagaa

SEQ ID NO: 185004 - RNA, 20 nt, Artificial Sequence
  Synthetic
auauuuaauaucccuaagaa

SEQ ID NO: 185005 - RNA, 21 nt, Artificial Sequence
  Synthetic
aauauuuaauaucccuaagaa

SEQ ID NO: 185006 - RNA, 22 nt, Artificial Sequence
  Synthetic
gaauauuuaauaucccuaagaa

SEQ ID NO: 185007 - RNA, 23 nt, Artificial Sequence
  Synthetic
ggaauauuuaauaucccuaagaa

SEQ ID NO: 185008 - RNA, 24 nt, Artificial Sequence
  Synthetic
aggaauauuuaauaucccuaagaa

SEQ ID NO: 185009 - RNA, 18 nt, Artificial Sequence
  Synthetic
uagucuaugugcuaagaa

SEQ ID NO: 185010 - RNA, 19 nt, Artificial Sequence
  Synthetic
auagucuaugugcuaagaa

SEQ ID NO: 185011 - RNA, 20 nt, Artificial Sequence
  Synthetic
aauagucuaugugcuaagaa

SEQ ID NO: 185012 - RNA, 21 nt, Artificial Sequence
  Synthetic
gaauagucuaugugcuaagaa

SEQ ID NO: 185013 - RNA, 22 nt, Artificial Sequence
  Synthetic
agaauagucuaugugcuaagaa

SEQ ID NO: 185014 - RNA, 23 nt, Artificial Sequence
  Synthetic
aagaauagucuaugugcuaagaa

SEQ ID NO: 185015 - RNA, 24 nt, Artificial Sequence
  Synthetic
uaagaauagucuaugugcuaagaa

SEQ ID NO: 185016 - RNA, 18 nt, Artificial Sequence
  Synthetic
gaguaaaugcucuaagaa

SEQ ID NO: 185017 - RNA, 19 nt, Artificial Sequence
  Synthetic
agaguaaaugcucuaagaa

SEQ ID NO: 185018 - RNA, 20 nt, Artificial Sequence
  Synthetic
uagaguaaaugcucuaagaa

SEQ ID NO: 185019 - RNA, 21 nt, Artificial Sequence
  Synthetic
cuagaguaaaugcucuaagaa

SEQ ID NO: 185020 - RNA, 22 nt, Artificial Sequence
  Synthetic
ucuagaguaaaugcucuaagaa

SEQ ID NO: 185021 - RNA, 23 nt, Artificial Sequence
  Synthetic
uucuagaguaaaugcucuaagaa

SEQ ID NO: 185022 - RNA, 24 nt, Artificial Sequence
  Synthetic
uuucuagaguaaaugcucuaagaa

SEQ ID NO: 185023 - RNA, 18 nt, Artificial Sequence
  Synthetic
cugggccgugucuaagaa

SEQ ID NO: 185024 - RNA, 19 nt, Artificial Sequence
  Synthetic
gcugggccgugucuaagaa

SEQ ID NO: 185025 - RNA, 20 nt, Artificial Sequence
  Synthetic
ugcugggccgugucuaagaa

SEQ ID NO: 185026 - RNA, 21 nt, Artificial Sequence
  Synthetic
augcugggccgugucuaagaa

SEQ ID NO: 185027 - RNA, 22 nt, Artificial Sequence
  Synthetic
caugcugggccgugucuaagaa

SEQ ID NO: 185028 - RNA, 23 nt, Artificial Sequence
  Synthetic
ucaugcugggccgugucuaagaa

SEQ ID NO: 185029 - RNA, 24 nt, Artificial Sequence
  Synthetic
uucaugcugggccgugucuaagaa

SEQ ID NO: 185030 - RNA, 18 nt, Artificial Sequence
  Synthetic
gaguaaauguucuaagaa

SEQ ID NO: 185031 - RNA, 19 nt, Artificial Sequence
  Synthetic
ugaguaaauguucuaagaa

SEQ ID NO: 185032 - RNA, 20 nt, Artificial Sequence
  Synthetic
uugaguaaauguucuaagaa

SEQ ID NO: 185033 - RNA, 21 nt, Artificial Sequence
  Synthetic
uuugaguaaauguucuaagaa

SEQ ID NO: 185034 - RNA, 22 nt, Artificial Sequence
  Synthetic
uuuugaguaaauguucuaagaa

SEQ ID NO: 185035 - RNA, 23 nt, Artificial Sequence
  Synthetic
cuuuugaguaaauguucuaagaa

SEQ ID NO: 185036 - RNA, 24 nt, Artificial Sequence
  Synthetic
ccuuuugaguaaauguucuaagaa

SEQ ID NO: 185037 - RNA, 18 nt, Artificial Sequence
  Synthetic
gcuaagcuauaguaagaa

SEQ ID NO: 185038 - RNA, 19 nt, Artificial Sequence
  Synthetic
ugcuaagcuauaguaagaa

SEQ ID NO: 185039 - RNA, 20 nt, Artificial Sequence
  Synthetic
augcuaagcuauaguaagaa

SEQ ID NO: 185040 - RNA, 21 nt, Artificial Sequence
  Synthetic
uaugcuaagcuauaguaagaa

SEQ ID NO: 185041 - RNA, 22 nt, Artificial Sequence
  Synthetic
cuaugcuaagcuauaguaagaa

SEQ ID NO: 185042 - RNA, 23 nt, Artificial Sequence
  Synthetic
gcuaugcuaagcuauaguaagaa

SEQ ID NO: 185043 - RNA, 24 nt, Artificial Sequence
  Synthetic
ggcuaugcuaagcuauaguaagaa

SEQ ID NO: 185044 - RNA, 18 nt, Artificial Sequence
  Synthetic
gaaaaaugcuaguaagaa

SEQ ID NO: 185045 - RNA, 19 nt, Artificial Sequence
  Synthetic
agaaaaaugcuaguaagaa

SEQ ID NO: 185046 - RNA, 20 nt, Artificial Sequence
  Synthetic
aagaaaaaugcuaguaagaa

SEQ ID NO: 185047 - RNA, 21 nt, Artificial Sequence
  Synthetic
uaagaaaaaugcuaguaagaa

SEQ ID NO: 185048 - RNA, 22 nt, Artificial Sequence
  Synthetic
uuaagaaaaaugcuaguaagaa

SEQ ID NO: 185049 - RNA, 23 nt, Artificial Sequence
  Synthetic
guuaagaaaaaugcuaguaagaa

SEQ ID NO: 185050 - RNA, 24 nt, Artificial Sequence
  Synthetic
uguuaagaaaaaugcuaguaagaa

SEQ ID NO: 185051 - RNA, 18 nt, Artificial Sequence
  Synthetic
aaauccuaaagguaagaa

SEQ ID NO: 185052 - RNA, 19 nt, Artificial Sequence
  Synthetic
gaaauccuaaagguaagaa

SEQ ID NO: 185053 - RNA, 20 nt, Artificial Sequence
  Synthetic
ggaaauccuaaagguaagaa

SEQ ID NO: 185054 - RNA, 21 nt, Artificial Sequence
  Synthetic
aggaaauccuaaagguaagaa

SEQ ID NO: 185055 - RNA, 22 nt, Artificial Sequence
  Synthetic
caggaaauccuaaagguaagaa

SEQ ID NO: 185056 - RNA, 23 nt, Artificial Sequence
  Synthetic
ccaggaaauccuaaagguaagaa

SEQ ID NO: 185057 - RNA, 24 nt, Artificial Sequence
  Synthetic
accaggaaauccuaaagguaagaa

SEQ ID NO: 185058 - RNA, 18 nt, Artificial Sequence
  Synthetic
aaauuaagaugguaagaa

SEQ ID NO: 185059 - RNA, 19 nt, Artificial Sequence
  Synthetic
caaauuaagaugguaagaa

SEQ ID NO: 185060 - RNA, 20 nt, Artificial Sequence
  Synthetic
ccaaauuaagaugguaagaa

SEQ ID NO: 185061 - RNA, 21 nt, Artificial Sequence
  Synthetic
uccaaauuaagaugguaagaa

SEQ ID NO: 185062 - RNA, 22 nt, Artificial Sequence
  Synthetic
auccaaauuaagaugguaagaa

SEQ ID NO: 185063 - RNA, 23 nt, Artificial Sequence
  Synthetic
aauccaaauuaagaugguaagaa

SEQ ID NO: 185064 - RNA, 24 nt, Artificial Sequence
  Synthetic
uaauccaaauuaagaugguaagaa

SEQ ID NO: 185065 - RNA, 18 nt, Artificial Sequence
  Synthetic
uucaguggauauuaagaa

SEQ ID NO: 185066 - RNA, 19 nt, Artificial Sequence
  Synthetic
cuucaguggauauuaagaa

SEQ ID NO: 185067 - RNA, 20 nt, Artificial Sequence
  Synthetic
ccuucaguggauauuaagaa

SEQ ID NO: 185068 - RNA, 21 nt, Artificial Sequence
  Synthetic
uccuucaguggauauuaagaa

SEQ ID NO: 185069 - RNA, 22 nt, Artificial Sequence
  Synthetic
uuccuucaguggauauuaagaa

SEQ ID NO: 185070 - RNA, 23 nt, Artificial Sequence
  Synthetic
auuccuucaguggauauuaagaa

SEQ ID NO: 185071 - RNA, 24 nt, Artificial Sequence
  Synthetic
gauuccuucaguggauauuaagaa

SEQ ID NO: 185072 - RNA, 18 nt, Artificial Sequence
  Synthetic
guugaagacuauuaagaa

SEQ ID NO: 185073 - RNA, 19 nt, Artificial Sequence
  Synthetic
gguugaagacuauuaagaa

SEQ ID NO: 185074 - RNA, 20 nt, Artificial Sequence
  Synthetic
agguugaagacuauuaagaa

SEQ ID NO: 185075 - RNA, 21 nt, Artificial Sequence
  Synthetic
cagguugaagacuauuaagaa

SEQ ID NO: 185076 - RNA, 22 nt, Artificial Sequence
  Synthetic
ucagguugaagacuauuaagaa

SEQ ID NO: 185077 - RNA, 23 nt, Artificial Sequence
  Synthetic
gucagguugaagacuauuaagaa

SEQ ID NO: 185078 - RNA, 24 nt, Artificial Sequence
  Synthetic
agucagguugaagacuauuaagaa

SEQ ID NO: 185079 - RNA, 18 nt, Artificial Sequence
  Synthetic
aagaagagcuauuaagaa

SEQ ID NO: 185080 - RNA, 19 nt, Artificial Sequence
  Synthetic
uaagaagagcuauuaagaa

SEQ ID NO: 185081 - RNA, 20 nt, Artificial Sequence
  Synthetic
uuaagaagagcuauuaagaa

SEQ ID NO: 185082 - RNA, 21 nt, Artificial Sequence
  Synthetic
uuuaagaagagcuauuaagaa

SEQ ID NO: 185083 - RNA, 22 nt, Artificial Sequence
  Synthetic
uuuuaagaagagcuauuaagaa

SEQ ID NO: 185084 - RNA, 23 nt, Artificial Sequence
  Synthetic
cuuuuaagaagagcuauuaagaa

SEQ ID NO: 185085 - RNA, 24 nt, Artificial Sequence
  Synthetic
acuuuuaagaagagcuauuaagaa

SEQ ID NO: 185086 - RNA, 18 nt, Artificial Sequence
  Synthetic
accaucauuccuuaagaa

SEQ ID NO: 185087 - RNA, 19 nt, Artificial Sequence
  Synthetic
aaccaucauuccuuaagaa

SEQ ID NO: 185088 - RNA, 20 nt, Artificial Sequence
  Synthetic
aaaccaucauuccuuaagaa

SEQ ID NO: 185089 - RNA, 21 nt, Artificial Sequence
  Synthetic
caaaccaucauuccuuaagaa

SEQ ID NO: 185090 - RNA, 22 nt, Artificial Sequence
  Synthetic
ucaaaccaucauuccuuaagaa

SEQ ID NO: 185091 - RNA, 23 nt, Artificial Sequence
  Synthetic
cucaaaccaucauuccuuaagaa

SEQ ID NO: 185092 - RNA, 24 nt, Artificial Sequence
  Synthetic
acucaaaccaucauuccuuaagaa

SEQ ID NO: 185093 - RNA, 18 nt, Artificial Sequence
  Synthetic
cauccacauauuuaagaa

SEQ ID NO: 185094 - RNA, 19 nt, Artificial Sequence
  Synthetic
acauccacauauuuaagaa

SEQ ID NO: 185095 - RNA, 20 nt, Artificial Sequence
  Synthetic
cacauccacauauuuaagaa

SEQ ID NO: 185096 - RNA, 21 nt, Artificial Sequence
  Synthetic
ccacauccacauauuuaagaa

SEQ ID NO: 185097 - RNA, 22 nt, Artificial Sequence
  Synthetic
uccacauccacauauuuaagaa

SEQ ID NO: 185098 - RNA, 23 nt, Artificial Sequence
  Synthetic
auccacauccacauauuuaagaa

SEQ ID NO: 185099 - RNA, 24 nt, Artificial Sequence
  Synthetic
aauccacauccacauauuuaagaa

SEQ ID NO: 185100 - RNA, 18 nt, Artificial Sequence
  Synthetic
augacucauauuuaagaa

SEQ ID NO: 185101 - RNA, 19 nt, Artificial Sequence
  Synthetic
aaugacucauauuuaagaa

SEQ ID NO: 185102 - RNA, 20 nt, Artificial Sequence
  Synthetic
caaugacucauauuuaagaa

SEQ ID NO: 185103 - RNA, 21 nt, Artificial Sequence
  Synthetic
ucaaugacucauauuuaagaa

SEQ ID NO: 185104 - RNA, 22 nt, Artificial Sequence
  Synthetic
uucaaugacucauauuuaagaa

SEQ ID NO: 185105 - RNA, 23 nt, Artificial Sequence
  Synthetic
cuucaaugacucauauuuaagaa

SEQ ID NO: 185106 - RNA, 24 nt, Artificial Sequence
  Synthetic
ucuucaaugacucauauuuaagaa

SEQ ID NO: 185107 - RNA, 18 nt, Artificial Sequence
  Synthetic
gcaacgauacuuuaagaa

SEQ ID NO: 185108 - RNA, 19 nt, Artificial Sequence
  Synthetic
agcaacgauacuuuaagaa

SEQ ID NO: 185109 - RNA, 20 nt, Artificial Sequence
  Synthetic
aagcaacgauacuuuaagaa

SEQ ID NO: 185110 - RNA, 21 nt, Artificial Sequence
  Synthetic
uaagcaacgauacuuuaagaa

SEQ ID NO: 185111 - RNA, 22 nt, Artificial Sequence
  Synthetic
auaagcaacgauacuuuaagaa

SEQ ID NO: 185112 - RNA, 23 nt, Artificial Sequence
  Synthetic
uauaagcaacgauacuuuaagaa

SEQ ID NO: 185113 - RNA, 24 nt, Artificial Sequence
  Synthetic
auauaagcaacgauacuuuaagaa

SEQ ID NO: 185114 - RNA, 18 nt, Artificial Sequence
  Synthetic
ggggaaugucuuuaagaa

SEQ ID NO: 185115 - RNA, 19 nt, Artificial Sequence
  Synthetic
uggggaaugucuuuaagaa

SEQ ID NO: 185116 - RNA, 20 nt, Artificial Sequence
  Synthetic
guggggaaugucuuuaagaa

SEQ ID NO: 185117 - RNA, 21 nt, Artificial Sequence
  Synthetic
uguggggaaugucuuuaagaa

SEQ ID NO: 185118 - RNA, 22 nt, Artificial Sequence
  Synthetic
guguggggaaugucuuuaagaa

SEQ ID NO: 185119 - RNA, 23 nt, Artificial Sequence
  Synthetic
uguguggggaaugucuuuaagaa

SEQ ID NO: 185120 - RNA, 24 nt, Artificial Sequence
  Synthetic
cuguguggggaaugucuuuaagaa

SEQ ID NO: 185121 - RNA, 18 nt, Artificial Sequence
  Synthetic
gcuuauaaauuuuaagaa

SEQ ID NO: 185122 - RNA, 19 nt, Artificial Sequence
  Synthetic
agcuuauaaauuuuaagaa

SEQ ID NO: 185123 - RNA, 20 nt, Artificial Sequence
  Synthetic
uagcuuauaaauuuuaagaa

SEQ ID NO: 185124 - RNA, 21 nt, Artificial Sequence
  Synthetic
auagcuuauaaauuuuaagaa

SEQ ID NO: 185125 - RNA, 22 nt, Artificial Sequence
  Synthetic
gauagcuuauaaauuuuaagaa

SEQ ID NO: 185126 - RNA, 23 nt, Artificial Sequence
  Synthetic
ugauagcuuauaaauuuuaagaa

SEQ ID NO: 185127 - RNA, 24 nt, Artificial Sequence
  Synthetic
gugauagcuuauaaauuuuaagaa

SEQ ID NO: 185128 - RNA, 18 nt, Artificial Sequence
  Synthetic
cacuacuacaaaacagaa

SEQ ID NO: 185129 - RNA, 19 nt, Artificial Sequence
  Synthetic
acacuacuacaaaacagaa

SEQ ID NO: 185130 - RNA, 20 nt, Artificial Sequence
  Synthetic
aacacuacuacaaaacagaa

SEQ ID NO: 185131 - RNA, 21 nt, Artificial Sequence
  Synthetic
uaacacuacuacaaaacagaa

SEQ ID NO: 185132 - RNA, 22 nt, Artificial Sequence
  Synthetic
auaacacuacuacaaaacagaa

SEQ ID NO: 185133 - RNA, 23 nt, Artificial Sequence
  Synthetic
uauaacacuacuacaaaacagaa

SEQ ID NO: 185134 - RNA, 24 nt, Artificial Sequence
  Synthetic
guauaacacuacuacaaaacagaa

SEQ ID NO: 185135 - RNA, 18 nt, Artificial Sequence
  Synthetic
guuaaaaauaaaacagaa

SEQ ID NO: 185136 - RNA, 19 nt, Artificial Sequence
  Synthetic
uguuaaaaauaaaacagaa

SEQ ID NO: 185137 - RNA, 20 nt, Artificial Sequence
  Synthetic
auguuaaaaauaaaacagaa

SEQ ID NO: 185138 - RNA, 21 nt, Artificial Sequence
  Synthetic
gauguuaaaaauaaaacagaa

SEQ ID NO: 185139 - RNA, 22 nt, Artificial Sequence
  Synthetic
agauguuaaaaauaaaacagaa

SEQ ID NO: 185140 - RNA, 23 nt, Artificial Sequence
  Synthetic
uagauguuaaaaauaaaacagaa

SEQ ID NO: 185141 - RNA, 24 nt, Artificial Sequence
  Synthetic
auagauguuaaaaauaaaacagaa

SEQ ID NO: 185142 - RNA, 18 nt, Artificial Sequence
  Synthetic
uuuccguagcaaacagaa

SEQ ID NO: 185143 - RNA, 19 nt, Artificial Sequence
  Synthetic
uuuuccguagcaaacagaa

SEQ ID NO: 185144 - RNA, 20 nt, Artificial Sequence
  Synthetic
cuuuuccguagcaaacagaa

SEQ ID NO: 185145 - RNA, 21 nt, Artificial Sequence
  Synthetic
ucuuuuccguagcaaacagaa

SEQ ID NO: 185146 - RNA, 22 nt, Artificial Sequence
  Synthetic
uucuuuuccguagcaaacagaa

SEQ ID NO: 185147 - RNA, 23 nt, Artificial Sequence
  Synthetic
uuucuuuuccguagcaaacagaa

SEQ ID NO: 185148 - RNA, 24 nt, Artificial Sequence
  Synthetic
uuuucuuuuccguagcaaacagaa

SEQ ID NO: 185149 - RNA, 18 nt, Artificial Sequence
  Synthetic
uagguugaggaaacagaa

SEQ ID NO: 185150 - RNA, 19 nt, Artificial Sequence
  Synthetic
cuagguugaggaaacagaa

SEQ ID NO: 185151 - RNA, 20 nt, Artificial Sequence
  Synthetic
gcuagguugaggaaacagaa

SEQ ID NO: 185152 - RNA, 21 nt, Artificial Sequence
  Synthetic
agcuagguugaggaaacagaa

SEQ ID NO: 185153 - RNA, 22 nt, Artificial Sequence
  Synthetic
aagcuagguugaggaaacagaa

SEQ ID NO: 185154 - RNA, 23 nt, Artificial Sequence
  Synthetic
aaagcuagguugaggaaacagaa

SEQ ID NO: 185155 - RNA, 24 nt, Artificial Sequence
  Synthetic
uaaagcuagguugaggaaacagaa

SEQ ID NO: 185156 - RNA, 18 nt, Artificial Sequence
  Synthetic
agaccaaaugaaacagaa

SEQ ID NO: 185157 - RNA, 19 nt, Artificial Sequence
  Synthetic
uagaccaaaugaaacagaa

SEQ ID NO: 185158 - RNA, 20 nt, Artificial Sequence
  Synthetic
auagaccaaaugaaacagaa

SEQ ID NO: 185159 - RNA, 21 nt, Artificial Sequence
  Synthetic
cauagaccaaaugaaacagaa

SEQ ID NO: 185160 - RNA, 22 nt, Artificial Sequence
  Synthetic
ucauagaccaaaugaaacagaa

SEQ ID NO: 185161 - RNA, 23 nt, Artificial Sequence
  Synthetic
cucauagaccaaaugaaacagaa

SEQ ID NO: 185162 - RNA, 24 nt, Artificial Sequence
  Synthetic
acucauagaccaaaugaaacagaa

SEQ ID NO: 185163 - RNA, 18 nt, Artificial Sequence
  Synthetic
gacauucucuaaacagaa

SEQ ID NO: 185164 - RNA, 19 nt, Artificial Sequence
  Synthetic
agacauucucuaaacagaa

SEQ ID NO: 185165 - RNA, 20 nt, Artificial Sequence
  Synthetic
aagacauucucuaaacagaa

SEQ ID NO: 185166 - RNA, 21 nt, Artificial Sequence
  Synthetic
aaagacauucucuaaacagaa

SEQ ID NO: 185167 - RNA, 22 nt, Artificial Sequence
  Synthetic
aaaagacauucucuaaacagaa

SEQ ID NO: 185168 - RNA, 23 nt, Artificial Sequence
  Synthetic
aaaaagacauucucuaaacagaa

SEQ ID NO: 185169 - RNA, 24 nt, Artificial Sequence
  Synthetic
caaaaagacauucucuaaacagaa

SEQ ID NO: 185170 - RNA, 18 nt, Artificial Sequence
  Synthetic
ugauaaaugccaacagaa

SEQ ID NO: 185171 - RNA, 19 nt, Artificial Sequence
  Synthetic
cugauaaaugccaacagaa

SEQ ID NO: 185172 - RNA, 20 nt, Artificial Sequence
  Synthetic
ucugauaaaugccaacagaa

SEQ ID NO: 185173 - RNA, 21 nt, Artificial Sequence
  Synthetic
uucugauaaaugccaacagaa

SEQ ID NO: 185174 - RNA, 22 nt, Artificial Sequence
  Synthetic
auucugauaaaugccaacagaa

SEQ ID NO: 185175 - RNA, 23 nt, Artificial Sequence
  Synthetic
aauucugauaaaugccaacagaa

SEQ ID NO: 185176 - RNA, 24 nt, Artificial Sequence
  Synthetic
uaauucugauaaaugccaacagaa

SEQ ID NO: 185177 - RNA, 18 nt, Artificial Sequence
  Synthetic
uuucacccaagaacagaa

SEQ ID NO: 185178 - RNA, 19 nt, Artificial Sequence
  Synthetic
uuuucacccaagaacagaa

SEQ ID NO: 185179 - RNA, 20 nt, Artificial Sequence
  Synthetic
auuuucacccaagaacagaa

SEQ ID NO: 185180 - RNA, 21 nt, Artificial Sequence
  Synthetic
uauuuucacccaagaacagaa

SEQ ID NO: 185181 - RNA, 22 nt, Artificial Sequence
  Synthetic
auauuuucacccaagaacagaa

SEQ ID NO: 185182 - RNA, 23 nt, Artificial Sequence
  Synthetic
cauauuuucacccaagaacagaa

SEQ ID NO: 185183 - RNA, 24 nt, Artificial Sequence
  Synthetic
ccauauuuucacccaagaacagaa

SEQ ID NO: 185184 - RNA, 18 nt, Artificial Sequence
  Synthetic
uugagcuggagaacagaa

SEQ ID NO: 185185 - RNA, 19 nt, Artificial Sequence
  Synthetic
auugagcuggagaacagaa

SEQ ID NO: 185186 - RNA, 20 nt, Artificial Sequence
  Synthetic
uauugagcuggagaacagaa

SEQ ID NO: 185187 - RNA, 21 nt, Artificial Sequence
  Synthetic
auauugagcuggagaacagaa

SEQ ID NO: 185188 - RNA, 22 nt, Artificial Sequence
  Synthetic
aauauugagcuggagaacagaa

SEQ ID NO: 185189 - RNA, 23 nt, Artificial Sequence
  Synthetic
uaauauugagcuggagaacagaa

SEQ ID NO: 185190 - RNA, 24 nt, Artificial Sequence
  Synthetic
auaauauugagcuggagaacagaa

SEQ ID NO: 185191 - RNA, 18 nt, Artificial Sequence
  Synthetic
uagaccaauagaacagaa

SEQ ID NO: 185192 - RNA, 19 nt, Artificial Sequence
  Synthetic
auagaccaauagaacagaa

SEQ ID NO: 185193 - RNA, 20 nt, Artificial Sequence
  Synthetic
cauagaccaauagaacagaa

SEQ ID NO: 185194 - RNA, 21 nt, Artificial Sequence
  Synthetic
acauagaccaauagaacagaa

SEQ ID NO: 185195 - RNA, 22 nt, Artificial Sequence
  Synthetic
cacauagaccaauagaacagaa

SEQ ID NO: 185196 - RNA, 23 nt, Artificial Sequence
  Synthetic
acacauagaccaauagaacagaa

SEQ ID NO: 185197 - RNA, 24 nt, Artificial Sequence
  Synthetic
uacacauagaccaauagaacagaa

SEQ ID NO: 185198 - RNA, 18 nt, Artificial Sequence
  Synthetic
gagcaggcuagaacagaa

SEQ ID NO: 185199 - RNA, 19 nt, Artificial Sequence
  Synthetic
agagcaggcuagaacagaa

SEQ ID NO: 185200 - RNA, 20 nt, Artificial Sequence
  Synthetic
aagagcaggcuagaacagaa

SEQ ID NO: 185201 - RNA, 21 nt, Artificial Sequence
  Synthetic
gaagagcaggcuagaacagaa

SEQ ID NO: 185202 - RNA, 22 nt, Artificial Sequence
  Synthetic
agaagagcaggcuagaacagaa

SEQ ID NO: 185203 - RNA, 23 nt, Artificial Sequence
  Synthetic
cagaagagcaggcuagaacagaa

SEQ ID NO: 185204 - RNA, 24 nt, Artificial Sequence
  Synthetic
acagaagagcaggcuagaacagaa

SEQ ID NO: 185205 - RNA, 18 nt, Artificial Sequence
  Synthetic
uggaccaguagaacagaa

SEQ ID NO: 185206 - RNA, 19 nt, Artificial Sequence
  Synthetic
uuggaccaguagaacagaa

SEQ ID NO: 185207 - RNA, 20 nt, Artificial Sequence
  Synthetic
cuuggaccaguagaacagaa

SEQ ID NO: 185208 - RNA, 21 nt, Artificial Sequence
  Synthetic
acuuggaccaguagaacagaa

SEQ ID NO: 185209 - RNA, 22 nt, Artificial Sequence
  Synthetic
aacuuggaccaguagaacagaa

SEQ ID NO: 185210 - RNA, 23 nt, Artificial Sequence
  Synthetic
aaacuuggaccaguagaacagaa

SEQ ID NO: 185211 - RNA, 24 nt, Artificial Sequence
  Synthetic
gaaacuuggaccaguagaacagaa

SEQ ID NO: 185212 - RNA, 18 nt, Artificial Sequence
  Synthetic
uagaucaauggaacagaa

SEQ ID NO: 185213 - RNA, 19 nt, Artificial Sequence
  Synthetic
auagaucaauggaacagaa

SEQ ID NO: 185214 - RNA, 20 nt, Artificial Sequence
  Synthetic
uauagaucaauggaacagaa

SEQ ID NO: 185215 - RNA, 22 nt, Artificial Sequence
  Synthetic
cauauagaucaauggaacagaa

SEQ ID NO: 185216 - RNA, 23 nt, Artificial Sequence
  Synthetic
acauauagaucaauggaacagaa

SEQ ID NO: 185217 - RNA, 24 nt, Artificial Sequence
  Synthetic
gacauauagaucaauggaacagaa

SEQ ID NO: 185218 - RNA, 18 nt, Artificial Sequence
  Synthetic
uuuagaaguggaacagaa

SEQ ID NO: 185219 - RNA, 19 nt, Artificial Sequence
  Synthetic
guuuagaaguggaacagaa

SEQ ID NO: 185220 - RNA, 20 nt, Artificial Sequence
  Synthetic
uguuuagaaguggaacagaa

SEQ ID NO: 185221 - RNA, 21 nt, Artificial Sequence
  Synthetic
auguuuagaaguggaacagaa

SEQ ID NO: 185222 - RNA, 22 nt, Artificial Sequence
  Synthetic
gauguuuagaaguggaacagaa

SEQ ID NO: 185223 - RNA, 23 nt, Artificial Sequence
  Synthetic
agauguuuagaaguggaacagaa

SEQ ID NO: 185224 - RNA, 24 nt, Artificial Sequence
  Synthetic
cagauguuuagaaguggaacagaa

SEQ ID NO: 185225 - RNA, 18 nt, Artificial Sequence
  Synthetic
uagaucaguggaacagaa

SEQ ID NO: 185226 - RNA, 19 nt, Artificial Sequence
  Synthetic
auagaucaguggaacagaa

SEQ ID NO: 185227 - RNA, 20 nt, Artificial Sequence
  Synthetic
uauagaucaguggaacagaa

SEQ ID NO: 185228 - RNA, 21 nt, Artificial Sequence
  Synthetic
auauagaucaguggaacagaa

SEQ ID NO: 185229 - RNA, 22 nt, Artificial Sequence
  Synthetic
gauauagaucaguggaacagaa

SEQ ID NO: 185230 - RNA, 23 nt, Artificial Sequence
  Synthetic
agauauagaucaguggaacagaa

SEQ ID NO: 185231 - RNA, 24 nt, Artificial Sequence
  Synthetic
gagauauagaucaguggaacagaa

SEQ ID NO: 185232 - RNA, 18 nt, Artificial Sequence
  Synthetic
ucauacaacugaacagaa

SEQ ID NO: 185233 - RNA, 19 nt, Artificial Sequence
  Synthetic
uucauacaacugaacagaa

SEQ ID NO: 185234 - RNA, 20 nt, Artificial Sequence
  Synthetic
auucauacaacugaacagaa

SEQ ID NO: 185235 - RNA, 21 nt, Artificial Sequence
  Synthetic
cauucauacaacugaacagaa

SEQ ID NO: 185236 - RNA, 22 nt, Artificial Sequence
  Synthetic
gcauucauacaacugaacagaa

SEQ ID NO: 185237 - RNA, 23 nt, Artificial Sequence
  Synthetic
agcauucauacaacugaacagaa

SEQ ID NO: 185238 - RNA, 24 nt, Artificial Sequence
  Synthetic
cagcauucauacaacugaacagaa

SEQ ID NO: 185239 - RNA, 18 nt, Artificial Sequence
  Synthetic
aaaaaugaguuaacagaa

SEQ ID NO: 185240 - RNA, 19 nt, Artificial Sequence
  Synthetic
gaaaaaugaguuaacagaa

SEQ ID NO: 185241 - RNA, 20 nt, Artificial Sequence
  Synthetic
agaaaaaugaguuaacagaa

SEQ ID NO: 185242 - RNA, 21 nt, Artificial Sequence
  Synthetic
gagaaaaaugaguuaacagaa

SEQ ID NO: 185243 - RNA, 22 nt, Artificial Sequence
  Synthetic
ggagaaaaaugaguuaacagaa

SEQ ID NO: 185244 - RNA, 23 nt, Artificial Sequence
  Synthetic
gggagaaaaaugaguuaacagaa

SEQ ID NO: 185245 - RNA, 24 nt, Artificial Sequence
  Synthetic
agggagaaaaaugaguuaacagaa

SEQ ID NO: 185246 - RNA, 18 nt, Artificial Sequence
  Synthetic
auucuugugaacacagaa

SEQ ID NO: 185247 - RNA, 19 nt, Artificial Sequence
  Synthetic
aauucuugugaacacagaa

SEQ ID NO: 185248 - RNA, 20 nt, Artificial Sequence
  Synthetic
gaauucuugugaacacagaa

SEQ ID NO: 185249 - RNA, 21 nt, Artificial Sequence
  Synthetic
ggaauucuugugaacacagaa

SEQ ID NO: 185250 - RNA, 22 nt, Artificial Sequence
  Synthetic
uggaauucuugugaacacagaa

SEQ ID NO: 185251 - RNA, 23 nt, Artificial Sequence
  Synthetic
auggaauucuugugaacacagaa

SEQ ID NO: 185252 - RNA, 24 nt, Artificial Sequence
  Synthetic
cauggaauucuugugaacacagaa

SEQ ID NO: 185253 - RNA, 18 nt, Artificial Sequence
  Synthetic
gaaacugaagacacagaa

SEQ ID NO: 185254 - RNA, 19 nt, Artificial Sequence
  Synthetic
cgaaacugaagacacagaa

SEQ ID NO: 185255 - RNA, 20 nt, Artificial Sequence
  Synthetic
gcgaaacugaagacacagaa

SEQ ID NO: 185256 - RNA, 21 nt, Artificial Sequence
  Synthetic
agcgaaacugaagacacagaa

SEQ ID NO: 185257 - RNA, 22 nt, Artificial Sequence
  Synthetic
gagcgaaacugaagacacagaa

SEQ ID NO: 185258 - RNA, 23 nt, Artificial Sequence
  Synthetic
agagcgaaacugaagacacagaa

SEQ ID NO: 185259 - RNA, 24 nt, Artificial Sequence
  Synthetic
aagagcgaaacugaagacacagaa

SEQ ID NO: 185260 - RNA, 18 nt, Artificial Sequence
  Synthetic
uuguuuagcagcacagaa

SEQ ID NO: 185261 - RNA, 19 nt, Artificial Sequence
  Synthetic
uuuguuuagcagcacagaa

SEQ ID NO: 185262 - RNA, 20 nt, Artificial Sequence
  Synthetic
guuuguuuagcagcacagaa

SEQ ID NO: 185263 - RNA, 21 nt, Artificial Sequence
  Synthetic
aguuuguuuagcagcacagaa

SEQ ID NO: 185264 - RNA, 22 nt, Artificial Sequence
  Synthetic
aaguuuguuuagcagcacagaa

SEQ ID NO: 185265 - RNA, 23 nt, Artificial Sequence
  Synthetic
gaaguuuguuuagcagcacagaa

SEQ ID NO: 185266 - RNA, 24 nt, Artificial Sequence
  Synthetic
agaaguuuguuuagcagcacagaa

SEQ ID NO: 185267 - RNA, 18 nt, Artificial Sequence
  Synthetic
aacaaccuauucacagaa

SEQ ID NO: 185268 - RNA, 19 nt, Artificial Sequence
  Synthetic
uaacaaccuauucacagaa

SEQ ID NO: 185269 - RNA, 20 nt, Artificial Sequence
  Synthetic
auaacaaccuauucacagaa

SEQ ID NO: 185270 - RNA, 21 nt, Artificial Sequence
  Synthetic
aauaacaaccuauucacagaa

SEQ ID NO: 185271 - RNA, 22 nt, Artificial Sequence
  Synthetic
caauaacaaccuauucacagaa

SEQ ID NO: 185272 - RNA, 23 nt, Artificial Sequence
  Synthetic
acaauaacaaccuauucacagaa

SEQ ID NO: 185273 - RNA, 24 nt, Artificial Sequence
  Synthetic
gacaauaacaaccuauucacagaa

SEQ ID NO: 185274 - RNA, 18 nt, Artificial Sequence
  Synthetic
augccuuucuucacagaa

SEQ ID NO: 185275 - RNA, 19 nt, Artificial Sequence
  Synthetic
aaugccuuucuucacagaa

SEQ ID NO: 185276 - RNA, 20 nt, Artificial Sequence
  Synthetic
caaugccuuucuucacagaa

SEQ ID NO: 185277 - RNA, 18 nt, Artificial Sequence
  Synthetic
uaacauugggagacagaa

SEQ ID NO: 185278 - RNA, 19 nt, Artificial Sequence
  Synthetic
auaacauugggagacagaa

SEQ ID NO: 185279 - RNA, 20 nt, Artificial Sequence
  Synthetic
uauaacauugggagacagaa

SEQ ID NO: 185280 - RNA, 21 nt, Artificial Sequence
  Synthetic
uuauaacauugggagacagaa

SEQ ID NO: 185281 - RNA, 22 nt, Artificial Sequence
  Synthetic
auuauaacauugggagacagaa

SEQ ID NO: 185282 - RNA, 23 nt, Artificial Sequence
  Synthetic
uauuauaacauugggagacagaa

SEQ ID NO: 185283 - RNA, 24 nt, Artificial Sequence
  Synthetic
uuauuauaacauugggagacagaa

SEQ ID NO: 185284 - RNA, 18 nt, Artificial Sequence
  Synthetic
ccuauaguguagacagaa

SEQ ID NO: 185285 - RNA, 19 nt, Artificial Sequence
  Synthetic
gccuauaguguagacagaa

SEQ ID NO: 185286 - RNA, 20 nt, Artificial Sequence
  Synthetic
ugccuauaguguagacagaa

SEQ ID NO: 185287 - RNA, 21 nt, Artificial Sequence
  Synthetic
cugccuauaguguagacagaa

SEQ ID NO: 185288 - RNA, 22 nt, Artificial Sequence
  Synthetic
gcugccuauaguguagacagaa

SEQ ID NO: 185289 - RNA, 23 nt, Artificial Sequence
  Synthetic
ugcugccuauaguguagacagaa

SEQ ID NO: 185290 - RNA, 24 nt, Artificial Sequence
  Synthetic
uugcugccuauaguguagacagaa

SEQ ID NO: 185291 - RNA, 18 nt, Artificial Sequence
  Synthetic
caugcaguagggacagaa

SEQ ID NO: 185292 - RNA, 19 nt, Artificial Sequence
  Synthetic
acaugcaguagggacagaa

SEQ ID NO: 185293 - RNA, 20 nt, Artificial Sequence
  Synthetic
uacaugcaguagggacagaa

SEQ ID NO: 185294 - RNA, 21 nt, Artificial Sequence
  Synthetic
uuacaugcaguagggacagaa

SEQ ID NO: 185295 - RNA, 22 nt, Artificial Sequence
  Synthetic
uuuacaugcaguagggacagaa

SEQ ID NO: 185296 - RNA, 23 nt, Artificial Sequence
  Synthetic
uuuuacaugcaguagggacagaa

SEQ ID NO: 185297 - RNA, 24 nt, Artificial Sequence
  Synthetic
uuuuuacaugcaguagggacagaa

SEQ ID NO: 185298 - RNA, 18 nt, Artificial Sequence
  Synthetic
uaaauuuucuggacagaa

SEQ ID NO: 185299 - RNA, 19 nt, Artificial Sequence
  Synthetic
guaaauuuucuggacagaa

SEQ ID NO: 185300 - RNA, 20 nt, Artificial Sequence
  Synthetic
uguaaauuuucuggacagaa

SEQ ID NO: 185301 - RNA, 21 nt, Artificial Sequence
  Synthetic
uuguaaauuuucuggacagaa

SEQ ID NO: 185302 - RNA, 22 nt, Artificial Sequence
  Synthetic
cuuguaaauuuucuggacagaa

SEQ ID NO: 185303 - RNA, 23 nt, Artificial Sequence
  Synthetic
acuuguaaauuuucuggacagaa

SEQ ID NO: 185304 - RNA, 24 nt, Artificial Sequence
  Synthetic
aacuuguaaauuuucuggacagaa

SEQ ID NO: 185305 - RNA, 18 nt, Artificial Sequence
  Synthetic
cucuuuagagugacagaa

SEQ ID NO: 185306 - RNA, 19 nt, Artificial Sequence
  Synthetic
acucuuuagagugacagaa

SEQ ID NO: 185307 - RNA, 20 nt, Artificial Sequence
  Synthetic
uacucuuuagagugacagaa

SEQ ID NO: 185308 - RNA, 21 nt, Artificial Sequence
  Synthetic
uuacucuuuagagugacagaa

SEQ ID NO: 185309 - RNA, 22 nt, Artificial Sequence
  Synthetic
uuuacucuuuagagugacagaa

SEQ ID NO: 185310 - RNA, 23 nt, Artificial Sequence
  Synthetic
auuuacucuuuagagugacagaa

SEQ ID NO: 185311 - RNA, 24 nt, Artificial Sequence
  Synthetic
uauuuacucuuuagagugacagaa

SEQ ID NO: 185312 - RNA, 18 nt, Artificial Sequence
  Synthetic
gaugcugagcauacagaa

SEQ ID NO: 185313 - RNA, 19 nt, Artificial Sequence
  Synthetic
agaugcugagcauacagaa

SEQ ID NO: 185314 - RNA, 20 nt, Artificial Sequence
  Synthetic
uagaugcugagcauacagaa

SEQ ID NO: 185315 - RNA, 21 nt, Artificial Sequence
  Synthetic
cuagaugcugagcauacagaa

SEQ ID NO: 185316 - RNA, 22 nt, Artificial Sequence
  Synthetic
acuagaugcugagcauacagaa

SEQ ID NO: 185317 - RNA, 23 nt, Artificial Sequence
  Synthetic
aacuagaugcugagcauacagaa

SEQ ID NO: 185318 - RNA, 24 nt, Artificial Sequence
  Synthetic
uaacuagaugcugagcauacagaa

SEQ ID NO: 185319 - RNA, 18 nt, Artificial Sequence
  Synthetic
aacaagcaaccuacagaa

SEQ ID NO: 185320 - RNA, 19 nt, Artificial Sequence
  Synthetic
gaacaagcaaccuacagaa

SEQ ID NO: 185321 - RNA, 20 nt, Artificial Sequence
  Synthetic
ugaacaagcaaccuacagaa

SEQ ID NO: 185322 - RNA, 21 nt, Artificial Sequence
  Synthetic
gugaacaagcaaccuacagaa

SEQ ID NO: 185323 - RNA, 22 nt, Artificial Sequence
  Synthetic
agugaacaagcaaccuacagaa

SEQ ID NO: 185324 - RNA, 23 nt, Artificial Sequence
  Synthetic
gagugaacaagcaaccuacagaa

SEQ ID NO: 185325 - RNA, 24 nt, Artificial Sequence
  Synthetic
agagugaacaagcaaccuacagaa

SEQ ID NO: 185326 - RNA, 18 nt, Artificial Sequence
  Synthetic
aaaauuauggguacagaa

SEQ ID NO: 185327 - RNA, 19 nt, Artificial Sequence
  Synthetic
gaaaauuauggguacagaa

SEQ ID NO: 185328 - RNA, 20 nt, Artificial Sequence
  Synthetic
ggaaaauuauggguacagaa

SEQ ID NO: 185329 - RNA, 21 nt, Artificial Sequence
  Synthetic
aggaaaauuauggguacagaa

SEQ ID NO: 185330 - RNA, 22 nt, Artificial Sequence
  Synthetic
uaggaaaauuauggguacagaa

SEQ ID NO: 185331 - RNA, 23 nt, Artificial Sequence
  Synthetic
auaggaaaauuauggguacagaa

SEQ ID NO: 185332 - RNA, 24 nt, Artificial Sequence
  Synthetic
gauaggaaaauuauggguacagaa

SEQ ID NO: 185333 - RNA, 18 nt, Artificial Sequence
  Synthetic
gguagaaagauuacagaa

SEQ ID NO: 185334 - RNA, 19 nt, Artificial Sequence
  Synthetic
agguagaaagauuacagaa

SEQ ID NO: 185335 - RNA, 20 nt, Artificial Sequence
  Synthetic
uagguagaaagauuacagaa

SEQ ID NO: 185336 - RNA, 21 nt, Artificial Sequence
  Synthetic
cuagguagaaagauuacagaa

SEQ ID NO: 185337 - RNA, 22 nt, Artificial Sequence
  Synthetic
ucuagguagaaagauuacagaa

SEQ ID NO: 185338 - RNA, 23 nt, Artificial Sequence
  Synthetic
cucuagguagaaagauuacagaa

SEQ ID NO: 185339 - RNA, 24 nt, Artificial Sequence
  Synthetic
ccucuagguagaaagauuacagaa

SEQ ID NO: 185340 - RNA, 18 nt, Artificial Sequence
  Synthetic
auaucaacuguuacagaa

SEQ ID NO: 185341 - RNA, 19 nt, Artificial Sequence
  Synthetic
gauaucaacuguuacagaa

SEQ ID NO: 185342 - RNA, 20 nt, Artificial Sequence
  Synthetic
agauaucaacuguuacagaa

SEQ ID NO: 185343 - RNA, 21 nt, Artificial Sequence
  Synthetic
cagauaucaacuguuacagaa

SEQ ID NO: 185344 - RNA, 22 nt, Artificial Sequence
  Synthetic
ccagauaucaacuguuacagaa

SEQ ID NO: 185345 - RNA, 23 nt, Artificial Sequence
  Synthetic
gccagauaucaacuguuacagaa

SEQ ID NO: 185346 - RNA, 24 nt, Artificial Sequence
  Synthetic
agccagauaucaacuguuacagaa

SEQ ID NO: 185347 - RNA, 18 nt, Artificial Sequence
  Synthetic
auaaucacauuuacagaa

SEQ ID NO: 185348 - RNA, 19 nt, Artificial Sequence
  Synthetic
aauaaucacauuuacagaa

SEQ ID NO: 185349 - RNA, 20 nt, Artificial Sequence
  Synthetic
uaauaaucacauuuacagaa

SEQ ID NO: 185350 - RNA, 21 nt, Artificial Sequence
  Synthetic
uuaauaaucacauuuacagaa

SEQ ID NO: 185351 - RNA, 22 nt, Artificial Sequence
  Synthetic
uuuaauaaucacauuuacagaa

SEQ ID NO: 185352 - RNA, 23 nt, Artificial Sequence
  Synthetic
guuuaauaaucacauuuacagaa

SEQ ID NO: 185353 - RNA, 24 nt, Artificial Sequence
  Synthetic
gguuuaauaaucacauuuacagaa

SEQ ID NO: 185354 - RNA, 18 nt, Artificial Sequence
  Synthetic
gacacuuuauuuacagaa

SEQ ID NO: 185355 - RNA, 19 nt, Artificial Sequence
  Synthetic
ugacacuuuauuuacagaa

SEQ ID NO: 185356 - RNA, 20 nt, Artificial Sequence
  Synthetic
gugacacuuuauuuacagaa

SEQ ID NO: 185357 - RNA, 21 nt, Artificial Sequence
  Synthetic
agugacacuuuauuuacagaa

SEQ ID NO: 185358 - RNA, 22 nt, Artificial Sequence
  Synthetic
cagugacacuuuauuuacagaa

SEQ ID NO: 185359 - RNA, 23 nt, Artificial Sequence
  Synthetic
ccagugacacuuuauuuacagaa

SEQ ID NO: 185360 - RNA, 24 nt, Artificial Sequence
  Synthetic
uccagugacacuuuauuuacagaa

SEQ ID NO: 185361 - RNA, 18 nt, Artificial Sequence
  Synthetic
caguugcaagaaccagaa

SEQ ID NO: 185362 - RNA, 19 nt, Artificial Sequence
  Synthetic
gcaguugcaagaaccagaa

SEQ ID NO: 185363 - RNA, 20 nt, Artificial Sequence
  Synthetic
ugcaguugcaagaaccagaa

SEQ ID NO: 185364 - RNA, 21 nt, Artificial Sequence
  Synthetic
gugcaguugcaagaaccagaa

SEQ ID NO: 185365 - RNA, 22 nt, Artificial Sequence
  Synthetic
agugcaguugcaagaaccagaa

SEQ ID NO: 185366 - RNA, 23 nt, Artificial Sequence
  Synthetic
uagugcaguugcaagaaccagaa

SEQ ID NO: 185367 - RNA, 24 nt, Artificial Sequence
  Synthetic
auagugcaguugcaagaaccagaa

SEQ ID NO: 185368 - RNA, 18 nt, Artificial Sequence
  Synthetic
caagaacuagaaccagaa

SEQ ID NO: 185369 - RNA, 19 nt, Artificial Sequence
  Synthetic
gcaagaacuagaaccagaa

SEQ ID NO: 185370 - RNA, 20 nt, Artificial Sequence
  Synthetic
ggcaagaacuagaaccagaa

SEQ ID NO: 185371 - RNA, 21 nt, Artificial Sequence
  Synthetic
aggcaagaacuagaaccagaa

SEQ ID NO: 185372 - RNA, 22 nt, Artificial Sequence
  Synthetic
uaggcaagaacuagaaccagaa

SEQ ID NO: 185373 - RNA, 23 nt, Artificial Sequence
  Synthetic
uuaggcaagaacuagaaccagaa

SEQ ID NO: 185374 - RNA, 24 nt, Artificial Sequence
  Synthetic
guuaggcaagaacuagaaccagaa

SEQ ID NO: 185375 - RNA, 18 nt, Artificial Sequence
  Synthetic
aaaaagaauccaccagaa

SEQ ID NO: 185376 - RNA, 19 nt, Artificial Sequence
  Synthetic
uaaaaagaauccaccagaa

SEQ ID NO: 185377 - RNA, 20 nt, Artificial Sequence
  Synthetic
guaaaaagaauccaccagaa

SEQ ID NO: 185378 - RNA, 21 nt, Artificial Sequence
  Synthetic
uguaaaaagaauccaccagaa

SEQ ID NO: 185379 - RNA, 22 nt, Artificial Sequence
  Synthetic
uuguaaaaagaauccaccagaa

SEQ ID NO: 185380 - RNA, 23 nt, Artificial Sequence
  Synthetic
guuguaaaaagaauccaccagaa

SEQ ID NO: 185381 - RNA, 24 nt, Artificial Sequence
  Synthetic
uguuguaaaaagaauccaccagaa

SEQ ID NO: 185382 - RNA, 18 nt, Artificial Sequence
  Synthetic
cuaaccguacacccagaa

SEQ ID NO: 185383 - RNA, 19 nt, Artificial Sequence
  Synthetic
acuaaccguacacccagaa

SEQ ID NO: 185384 - RNA, 20 nt, Artificial Sequence
  Synthetic
gacuaaccguacacccagaa

SEQ ID NO: 185385 - RNA, 21 nt, Artificial Sequence
  Synthetic
ggacuaaccguacacccagaa

SEQ ID NO: 185386 - RNA, 22 nt, Artificial Sequence
  Synthetic
gggacuaaccguacacccagaa

SEQ ID NO: 185387 - RNA, 23 nt, Artificial Sequence
  Synthetic
ggggacuaaccguacacccagaa

SEQ ID NO: 185388 - RNA, 24 nt, Artificial Sequence
  Synthetic
uggggacuaaccguacacccagaa

SEQ ID NO: 185389 - RNA, 18 nt, Artificial Sequence
  Synthetic
aaaugugagcacccagaa

SEQ ID NO: 185390 - RNA, 19 nt, Artificial Sequence
  Synthetic
gaaaugugagcacccagaa

SEQ ID NO: 185391 - RNA, 20 nt, Artificial Sequence
  Synthetic
ggaaaugugagcacccagaa

SEQ ID NO: 185392 - RNA, 21 nt, Artificial Sequence
  Synthetic
aggaaaugugagcacccagaa

SEQ ID NO: 185393 - RNA, 22 nt, Artificial Sequence
  Synthetic
aaggaaaugugagcacccagaa

SEQ ID NO: 185394 - RNA, 23 nt, Artificial Sequence
  Synthetic
gaaggaaaugugagcacccagaa

SEQ ID NO: 185395 - RNA, 24 nt, Artificial Sequence
  Synthetic
ugaaggaaaugugagcacccagaa

SEQ ID NO: 185396 - RNA, 18 nt, Artificial Sequence
  Synthetic
uuccugcugcacccagaa

SEQ ID NO: 185397 - RNA, 19 nt, Artificial Sequence
  Synthetic
guuccugcugcacccagaa

SEQ ID NO: 185398 - RNA, 20 nt, Artificial Sequence
  Synthetic
aguuccugcugcacccagaa

SEQ ID NO: 185399 - RNA, 21 nt, Artificial Sequence
  Synthetic
aaguuccugcugcacccagaa

SEQ ID NO: 185400 - RNA, 22 nt, Artificial Sequence
  Synthetic
caaguuccugcugcacccagaa

SEQ ID NO: 185401 - RNA, 23 nt, Artificial Sequence
  Synthetic
ucaaguuccugcugcacccagaa

SEQ ID NO: 185402 - RNA, 24 nt, Artificial Sequence
  Synthetic
aucaaguuccugcugcacccagaa

SEQ ID NO: 185403 - RNA, 18 nt, Artificial Sequence
  Synthetic
auggguguauacccagaa

SEQ ID NO: 185404 - RNA, 19 nt, Artificial Sequence
  Synthetic
cauggguguauacccagaa

SEQ ID NO: 185405 - RNA, 20 nt, Artificial Sequence
  Synthetic
acauggguguauacccagaa

SEQ ID NO: 185406 - RNA, 21 nt, Artificial Sequence
  Synthetic
cacauggguguauacccagaa

SEQ ID NO: 185407 - RNA, 22 nt, Artificial Sequence
  Synthetic
ucacauggguguauacccagaa

SEQ ID NO: 185408 - RNA, 23 nt, Artificial Sequence
  Synthetic
uucacauggguguauacccagaa

SEQ ID NO: 185409 - RNA, 24 nt, Artificial Sequence
  Synthetic
uuucacauggguguauacccagaa

SEQ ID NO: 185410 - RNA, 18 nt, Artificial Sequence
  Synthetic
uugaguauguacccagaa

SEQ ID NO: 185411 - RNA, 19 nt, Artificial Sequence
  Synthetic
uuugaguauguacccagaa

SEQ ID NO: 185412 - RNA, 20 nt, Artificial Sequence
  Synthetic
uuuugaguauguacccagaa

SEQ ID NO: 185413 - RNA, 21 nt, Artificial Sequence
  Synthetic
cuuuugaguauguacccagaa

SEQ ID NO: 185414 - RNA, 22 nt, Artificial Sequence
  Synthetic
ucuuuugaguauguacccagaa

SEQ ID NO: 185415 - RNA, 23 nt, Artificial Sequence
  Synthetic
uucuuuugaguauguacccagaa

SEQ ID NO: 185416 - RNA, 24 nt, Artificial Sequence
  Synthetic
uuucuuuugaguauguacccagaa

SEQ ID NO: 185417 - RNA, 18 nt, Artificial Sequence
  Synthetic
cgauagugaugcccagaa

SEQ ID NO: 185418 - RNA, 19 nt, Artificial Sequence
  Synthetic
acgauagugaugcccagaa

SEQ ID NO: 185419 - RNA, 20 nt, Artificial Sequence
  Synthetic
aacgauagugaugcccagaa

SEQ ID NO: 185420 - RNA, 21 nt, Artificial Sequence
  Synthetic
gaacgauagugaugcccagaa

SEQ ID NO: 185421 - RNA, 22 nt, Artificial Sequence
  Synthetic
ugaacgauagugaugcccagaa

SEQ ID NO: 185422 - RNA, 23 nt, Artificial Sequence
  Synthetic
augaacgauagugaugcccagaa

SEQ ID NO: 185423 - RNA, 24 nt, Artificial Sequence
  Synthetic
gaugaacgauagugaugcccagaa

SEQ ID NO: 185424 - RNA, 18 nt, Artificial Sequence
  Synthetic
cuuacaaccaugccagaa

SEQ ID NO: 185425 - RNA, 19 nt, Artificial Sequence
  Synthetic
acuuacaaccaugccagaa

SEQ ID NO: 185426 - RNA, 20 nt, Artificial Sequence
  Synthetic
aacuuacaaccaugccagaa

SEQ ID NO: 185427 - RNA, 21 nt, Artificial Sequence
  Synthetic
aaacuuacaaccaugccagaa

SEQ ID NO: 185428 - RNA, 22 nt, Artificial Sequence
  Synthetic
aaaacuuacaaccaugccagaa

SEQ ID NO: 185429 - RNA, 23 nt, Artificial Sequence
  Synthetic
gaaaacuuacaaccaugccagaa

SEQ ID NO: 185430 - RNA, 24 nt, Artificial Sequence
  Synthetic
ggaaaacuuacaaccaugccagaa

SEQ ID NO: 185431 - RNA, 18 nt, Artificial Sequence
  Synthetic
auccaaacuaugccagaa

SEQ ID NO: 185432 - RNA, 19 nt, Artificial Sequence
  Synthetic
cauccaaacuaugccagaa

SEQ ID NO: 185433 - RNA, 20 nt, Artificial Sequence
  Synthetic
ucauccaaacuaugccagaa

SEQ ID NO: 185434 - RNA, 21 nt, Artificial Sequence
  Synthetic
uucauccaaacuaugccagaa

SEQ ID NO: 185435 - RNA, 22 nt, Artificial Sequence
  Synthetic
auucauccaaacuaugccagaa

SEQ ID NO: 185436 - RNA, 23 nt, Artificial Sequence
  Synthetic
gauucauccaaacuaugccagaa

SEQ ID NO: 185437 - RNA, 24 nt, Artificial Sequence
  Synthetic
agauucauccaaacuaugccagaa

SEQ ID NO: 185438 - RNA, 18 nt, Artificial Sequence
  Synthetic
cuaaauccaucuccagaa

SEQ ID NO: 185439 - RNA, 19 nt, Artificial Sequence
  Synthetic
ucuaaauccaucuccagaa

SEQ ID NO: 185440 - RNA, 20 nt, Artificial Sequence
  Synthetic
aucuaaauccaucuccagaa

SEQ ID NO: 185441 - RNA, 21 nt, Artificial Sequence
  Synthetic
aaucuaaauccaucuccagaa

SEQ ID NO: 185442 - RNA, 22 nt, Artificial Sequence
  Synthetic
gaaucuaaauccaucuccagaa

SEQ ID NO: 185443 - RNA, 23 nt, Artificial Sequence
  Synthetic
ugaaucuaaauccaucuccagaa

SEQ ID NO: 185444 - RNA, 24 nt, Artificial Sequence
  Synthetic
gugaaucuaaauccaucuccagaa

SEQ ID NO: 185445 - RNA, 18 nt, Artificial Sequence
  Synthetic
acuaaaaugucuccagaa

SEQ ID NO: 185446 - RNA, 19 nt, Artificial Sequence
  Synthetic
uacuaaaaugucuccagaa

SEQ ID NO: 185447 - RNA, 20 nt, Artificial Sequence
  Synthetic
auacuaaaaugucuccagaa

SEQ ID NO: 185448 - RNA, 21 nt, Artificial Sequence
  Synthetic
cauacuaaaaugucuccagaa

SEQ ID NO: 185449 - RNA, 22 nt, Artificial Sequence
  Synthetic
ccauacuaaaaugucuccagaa

SEQ ID NO: 185450 - RNA, 23 nt, Artificial Sequence
  Synthetic
uccauacuaaaaugucuccagaa

SEQ ID NO: 185451 - RNA, 24 nt, Artificial Sequence
  Synthetic
cuccauacuaaaaugucuccagaa

SEQ ID NO: 185452 - RNA, 18 nt, Artificial Sequence
  Synthetic
aucugacgcaguccagaa

SEQ ID NO: 185453 - RNA, 19 nt, Artificial Sequence
  Synthetic
gaucugacgcaguccagaa

SEQ ID NO: 185454 - RNA, 20 nt, Artificial Sequence
  Synthetic
ggaucugacgcaguccagaa

SEQ ID NO: 185455 - RNA, 21 nt, Artificial Sequence
  Synthetic
uggaucugacgcaguccagaa

SEQ ID NO: 185456 - RNA, 22 nt, Artificial Sequence
  Synthetic
guggaucugacgcaguccagaa

SEQ ID NO: 185457 - RNA, 23 nt, Artificial Sequence
  Synthetic
gguggaucugacgcaguccagaa

SEQ ID NO: 185458 - RNA, 24 nt, Artificial Sequence
  Synthetic
ggguggaucugacgcaguccagaa

SEQ ID NO: 185459 - RNA, 18 nt, Artificial Sequence
  Synthetic
uugacuuaaaaagcagaa

SEQ ID NO: 185460 - RNA, 19 nt, Artificial Sequence
  Synthetic
uuugacuuaaaaagcagaa

SEQ ID NO: 185461 - RNA, 20 nt, Artificial Sequence
  Synthetic
uuuugacuuaaaaagcagaa

SEQ ID NO: 185462 - RNA, 21 nt, Artificial Sequence
  Synthetic
cuuuugacuuaaaaagcagaa

SEQ ID NO: 185463 - RNA, 22 nt, Artificial Sequence
  Synthetic
gcuuuugacuuaaaaagcagaa

SEQ ID NO: 185464 - RNA, 23 nt, Artificial Sequence
  Synthetic
agcuuuugacuuaaaaagcagaa

SEQ ID NO: 185465 - RNA, 24 nt, Artificial Sequence
  Synthetic
cagcuuuugacuuaaaaagcagaa

SEQ ID NO: 185466 - RNA, 18 nt, Artificial Sequence
  Synthetic
gacaaugaguaagcagaa

SEQ ID NO: 185467 - RNA, 19 nt, Artificial Sequence
  Synthetic
agacaaugaguaagcagaa

SEQ ID NO: 185468 - RNA, 20 nt, Artificial Sequence
  Synthetic
gagacaaugaguaagcagaa

SEQ ID NO: 185469 - RNA, 21 nt, Artificial Sequence
  Synthetic
agagacaaugaguaagcagaa

SEQ ID NO: 185470 - RNA, 22 nt, Artificial Sequence
  Synthetic
uagagacaaugaguaagcagaa

SEQ ID NO: 185471 - RNA, 23 nt, Artificial Sequence
  Synthetic
uuagagacaaugaguaagcagaa

SEQ ID NO: 185472 - RNA, 24 nt, Artificial Sequence
  Synthetic
guuagagacaaugaguaagcagaa

SEQ ID NO: 185473 - RNA, 18 nt, Artificial Sequence
  Synthetic
aauagauuguaagcagaa

SEQ ID NO: 185474 - RNA, 19 nt, Artificial Sequence
  Synthetic
gaauagauuguaagcagaa

SEQ ID NO: 185475 - RNA, 20 nt, Artificial Sequence
  Synthetic
agaauagauuguaagcagaa

SEQ ID NO: 185476 - RNA, 21 nt, Artificial Sequence
  Synthetic
gagaauagauuguaagcagaa

SEQ ID NO: 185477 - RNA, 22 nt, Artificial Sequence
  Synthetic
agagaauagauuguaagcagaa

SEQ ID NO: 185478 - RNA, 23 nt, Artificial Sequence
  Synthetic
cagagaauagauuguaagcagaa

SEQ ID NO: 185479 - RNA, 24 nt, Artificial Sequence
  Synthetic
acagagaauagauuguaagcagaa

SEQ ID NO: 185480 - RNA, 18 nt, Artificial Sequence
  Synthetic
acuacgaucagagcagaa

SEQ ID NO: 185481 - RNA, 19 nt, Artificial Sequence
  Synthetic
aacuacgaucagagcagaa

SEQ ID NO: 185482 - RNA, 20 nt, Artificial Sequence
  Synthetic
uaacuacgaucagagcagaa

SEQ ID NO: 185483 - RNA, 21 nt, Artificial Sequence
  Synthetic
auaacuacgaucagagcagaa

SEQ ID NO: 185484 - RNA, 22 nt, Artificial Sequence
  Synthetic
aauaacuacgaucagagcagaa

SEQ ID NO: 185485 - RNA, 23 nt, Artificial Sequence
  Synthetic
aaauaacuacgaucagagcagaa

SEQ ID NO: 185486 - RNA, 24 nt, Artificial Sequence
  Synthetic
gaaauaacuacgaucagagcagaa

SEQ ID NO: 185487 - RNA, 18 nt, Artificial Sequence
  Synthetic
aaaaacuuuagagcagaa

SEQ ID NO: 185488 - RNA, 19 nt, Artificial Sequence
  Synthetic
uaaaaacuuuagagcagaa

SEQ ID NO: 185489 - RNA, 20 nt, Artificial Sequence
  Synthetic
uuaaaaacuuuagagcagaa

SEQ ID NO: 185490 - RNA, 21 nt, Artificial Sequence
  Synthetic
uuuaaaaacuuuagagcagaa

SEQ ID NO: 185491 - RNA, 22 nt, Artificial Sequence
  Synthetic
auuuaaaaacuuuagagcagaa

SEQ ID NO: 185492 - RNA, 23 nt, Artificial Sequence
  Synthetic
uauuuaaaaacuuuagagcagaa

SEQ ID NO: 185493 - RNA, 24 nt, Artificial Sequence
  Synthetic
uuauuuaaaaacuuuagagcagaa

SEQ ID NO: 185494 - RNA, 18 nt, Artificial Sequence
  Synthetic
uugggaagaggagcagaa

SEQ ID NO: 185495 - RNA, 19 nt, Artificial Sequence
  Synthetic
uuugggaagaggagcagaa

SEQ ID NO: 185496 - RNA, 20 nt, Artificial Sequence
  Synthetic
auuugggaagaggagcagaa

SEQ ID NO: 185497 - RNA, 21 nt, Artificial Sequence
  Synthetic
cauuugggaagaggagcagaa

SEQ ID NO: 185498 - RNA, 22 nt, Artificial Sequence
  Synthetic
gcauuugggaagaggagcagaa

SEQ ID NO: 185499 - RNA, 23 nt, Artificial Sequence
  Synthetic
cgcauuugggaagaggagcagaa

SEQ ID NO: 185500 - RNA, 24 nt, Artificial Sequence
  Synthetic
acgcauuugggaagaggagcagaa

SEQ ID NO: 185501 - RNA, 18 nt, Artificial Sequence
  Synthetic
ccauggaaaauagcagaa

SEQ ID NO: 185502 - RNA, 19 nt, Artificial Sequence
  Synthetic
gccauggaaaauagcagaa

SEQ ID NO: 185503 - RNA, 20 nt, Artificial Sequence
  Synthetic
agccauggaaaauagcagaa

SEQ ID NO: 185504 - RNA, 21 nt, Artificial Sequence
  Synthetic
uagccauggaaaauagcagaa

SEQ ID NO: 185505 - RNA, 22 nt, Artificial Sequence
  Synthetic
auagccauggaaaauagcagaa

SEQ ID NO: 185506 - RNA, 23 nt, Artificial Sequence
  Synthetic
aauagccauggaaaauagcagaa

SEQ ID NO: 185507 - RNA, 24 nt, Artificial Sequence
  Synthetic
caauagccauggaaaauagcagaa

SEQ ID NO: 185508 - RNA, 18 nt, Artificial Sequence
  Synthetic
auuccaaagcuagcagaa

SEQ ID NO: 185509 - RNA, 19 nt, Artificial Sequence
  Synthetic
aauuccaaagcuagcagaa

SEQ ID NO: 185510 - RNA, 20 nt, Artificial Sequence
  Synthetic
aaauuccaaagcuagcagaa

SEQ ID NO: 185511 - RNA, 21 nt, Artificial Sequence
  Synthetic
caaauuccaaagcuagcagaa

SEQ ID NO: 185512 - RNA, 22 nt, Artificial Sequence
  Synthetic
acaaauuccaaagcuagcagaa

SEQ ID NO: 185513 - RNA, 23 nt, Artificial Sequence
  Synthetic
aacaaauuccaaagcuagcagaa

SEQ ID NO: 185514 - RNA, 24 nt, Artificial Sequence
  Synthetic
aaacaaauuccaaagcuagcagaa

SEQ ID NO: 185515 - RNA, 18 nt, Artificial Sequence
  Synthetic
cgucauagauuagcagaa

SEQ ID NO: 185516 - RNA, 19 nt, Artificial Sequence
  Synthetic
gcgucauagauuagcagaa

SEQ ID NO: 185517 - RNA, 20 nt, Artificial Sequence
  Synthetic
agcgucauagauuagcagaa

SEQ ID NO: 185518 - RNA, 21 nt, Artificial Sequence
  Synthetic
cagcgucauagauuagcagaa

SEQ ID NO: 185519 - RNA, 22 nt, Artificial Sequence
  Synthetic
gcagcgucauagauuagcagaa

SEQ ID NO: 185520 - RNA, 23 nt, Artificial Sequence
  Synthetic
agcagcgucauagauuagcagaa

SEQ ID NO: 185521 - RNA, 24 nt, Artificial Sequence
  Synthetic
aagcagcgucauagauuagcagaa

SEQ ID NO: 185522 - RNA, 18 nt, Artificial Sequence
  Synthetic
ucguggcagaaggcagaa

SEQ ID NO: 185523 - RNA, 19 nt, Artificial Sequence
  Synthetic
gucguggcagaaggcagaa

SEQ ID NO: 185524 - RNA, 20 nt, Artificial Sequence
  Synthetic
agucguggcagaaggcagaa

SEQ ID NO: 185525 - RNA, 21 nt, Artificial Sequence
  Synthetic
cagucguggcagaaggcagaa

SEQ ID NO: 185526 - RNA, 22 nt, Artificial Sequence
  Synthetic
ccagucguggcagaaggcagaa

SEQ ID NO: 185527 - RNA, 23 nt, Artificial Sequence
  Synthetic
uccagucguggcagaaggcagaa

SEQ ID NO: 185528 - RNA, 24 nt, Artificial Sequence
  Synthetic
uuccagucguggcagaaggcagaa

SEQ ID NO: 185529 - RNA, 18 nt, Artificial Sequence
  Synthetic
gucggucagcaggcagaa

SEQ ID NO: 185530 - RNA, 19 nt, Artificial Sequence
  Synthetic
agucggucagcaggcagaa

SEQ ID NO: 185531 - RNA, 20 nt, Artificial Sequence
  Synthetic
gagucggucagcaggcagaa

SEQ ID NO: 185532 - RNA, 21 nt, Artificial Sequence
  Synthetic
agagucggucagcaggcagaa

SEQ ID NO: 185533 - RNA, 22 nt, Artificial Sequence
  Synthetic
cagagucggucagcaggcagaa

SEQ ID NO: 185534 - RNA, 23 nt, Artificial Sequence
  Synthetic
ccagagucggucagcaggcagaa

SEQ ID NO: 185535 - RNA, 24 nt, Artificial Sequence
  Synthetic
uccagagucggucagcaggcagaa

SEQ ID NO: 185536 - RNA, 18 nt, Artificial Sequence
  Synthetic
gagaagcucuaggcagaa

SEQ ID NO: 185537 - RNA, 19 nt, Artificial Sequence
  Synthetic
agagaagcucuaggcagaa

SEQ ID NO: 185538 - RNA, 20 nt, Artificial Sequence
  Synthetic
cagagaagcucuaggcagaa

SEQ ID NO: 185539 - RNA, 21 nt, Artificial Sequence
  Synthetic
gcagagaagcucuaggcagaa

SEQ ID NO: 185540 - RNA, 22 nt, Artificial Sequence
  Synthetic
ggcagagaagcucuaggcagaa

SEQ ID NO: 185541 - RNA, 23 nt, Artificial Sequence
  Synthetic
aggcagagaagcucuaggcagaa

SEQ ID NO: 185542 - RNA, 24 nt, Artificial Sequence
  Synthetic
gaggcagagaagcucuaggcagaa

SEQ ID NO: 185543 - RNA, 18 nt, Artificial Sequence
  Synthetic
cuucauaugguggcagaa

SEQ ID NO: 185544 - RNA, 19 nt, Artificial Sequence
  Synthetic
ucuucauaugguggcagaa

SEQ ID NO: 185545 - RNA, 20 nt, Artificial Sequence
  Synthetic
uucuucauaugguggcagaa

SEQ ID NO: 185546 - RNA, 21 nt, Artificial Sequence
  Synthetic
cuucuucauaugguggcagaa

SEQ ID NO: 185547 - RNA, 22 nt, Artificial Sequence
  Synthetic
ccuucuucauaugguggcagaa

SEQ ID NO: 185548 - RNA, 23 nt, Artificial Sequence
  Synthetic
uccuucuucauaugguggcagaa

SEQ ID NO: 185549 - RNA, 24 nt, Artificial Sequence
  Synthetic
auccuucuucauaugguggcagaa

SEQ ID NO: 185550 - RNA, 18 nt, Artificial Sequence
  Synthetic
ccucagaauuuggcagaa

SEQ ID NO: 185551 - RNA, 19 nt, Artificial Sequence
  Synthetic
cccucagaauuuggcagaa

SEQ ID NO: 185552 - RNA, 20 nt, Artificial Sequence
  Synthetic
ucccucagaauuuggcagaa

SEQ ID NO: 185553 - RNA, 21 nt, Artificial Sequence
  Synthetic
gucccucagaauuuggcagaa

SEQ ID NO: 185554 - RNA, 22 nt, Artificial Sequence
  Synthetic
agucccucagaauuuggcagaa

SEQ ID NO: 185555 - RNA, 23 nt, Artificial Sequence
  Synthetic
cagucccucagaauuuggcagaa

SEQ ID NO: 185556 - RNA, 24 nt, Artificial Sequence
  Synthetic
acagucccucagaauuuggcagaa

SEQ ID NO: 185557 - RNA, 18 nt, Artificial Sequence
  Synthetic
acgucauugaaugcagaa

SEQ ID NO: 185558 - RNA, 19 nt, Artificial Sequence
  Synthetic
gacgucauugaaugcagaa

SEQ ID NO: 185559 - RNA, 20 nt, Artificial Sequence
  Synthetic
ugacgucauugaaugcagaa

SEQ ID NO: 185560 - RNA, 21 nt, Artificial Sequence
  Synthetic
gugacgucauugaaugcagaa

SEQ ID NO: 185561 - RNA, 22 nt, Artificial Sequence
  Synthetic
ugugacgucauugaaugcagaa

SEQ ID NO: 185562 - RNA, 23 nt, Artificial Sequence
  Synthetic
gugugacgucauugaaugcagaa

SEQ ID NO: 185563 - RNA, 24 nt, Artificial Sequence
  Synthetic
agugugacgucauugaaugcagaa

SEQ ID NO: 185564 - RNA, 18 nt, Artificial Sequence
  Synthetic
cauuggcccacugcagaa

SEQ ID NO: 185565 - RNA, 19 nt, Artificial Sequence
  Synthetic
ucauuggcccacugcagaa

SEQ ID NO: 185566 - RNA, 20 nt, Artificial Sequence
  Synthetic
uucauuggcccacugcagaa

SEQ ID NO: 185567 - RNA, 21 nt, Artificial Sequence
  Synthetic
uuucauuggcccacugcagaa

SEQ ID NO: 185568 - RNA, 22 nt, Artificial Sequence
  Synthetic
guuucauuggcccacugcagaa

SEQ ID NO: 185569 - RNA, 23 nt, Artificial Sequence
  Synthetic
aguuucauuggcccacugcagaa

SEQ ID NO: 185570 - RNA, 24 nt, Artificial Sequence
  Synthetic
aaguuucauuggcccacugcagaa

SEQ ID NO: 185571 - RNA, 18 nt, Artificial Sequence
  Synthetic
ccaaaagccacugcagaa

SEQ ID NO: 185572 - RNA, 19 nt, Artificial Sequence
  Synthetic
gccaaaagccacugcagaa

SEQ ID NO: 185573 - RNA, 20 nt, Artificial Sequence
  Synthetic
ugccaaaagccacugcagaa

SEQ ID NO: 185574 - RNA, 21 nt, Artificial Sequence
  Synthetic
cugccaaaagccacugcagaa

SEQ ID NO: 185575 - RNA, 22 nt, Artificial Sequence
  Synthetic
acugccaaaagccacugcagaa

SEQ ID NO: 185576 - RNA, 23 nt, Artificial Sequence
  Synthetic
cacugccaaaagccacugcagaa

SEQ ID NO: 185577 - RNA, 24 nt, Artificial Sequence
  Synthetic
acacugccaaaagccacugcagaa

SEQ ID NO: 185578 - RNA, 18 nt, Artificial Sequence
  Synthetic
acggaguucacugcagaa

SEQ ID NO: 185579 - RNA, 19 nt, Artificial Sequence
  Synthetic
aacggaguucacugcagaa

SEQ ID NO: 185580 - RNA, 20 nt, Artificial Sequence
  Synthetic
uaacggaguucacugcagaa

SEQ ID NO: 185581 - RNA, 21 nt, Artificial Sequence
  Synthetic
auaacggaguucacugcagaa

SEQ ID NO: 185582 - RNA, 22 nt, Artificial Sequence
  Synthetic
uauaacggaguucacugcagaa

SEQ ID NO: 185583 - RNA, 23 nt, Artificial Sequence
  Synthetic
auauaacggaguucacugcagaa

SEQ ID NO: 185584 - RNA, 24 nt, Artificial Sequence
  Synthetic
aauauaacggaguucacugcagaa

SEQ ID NO: 185585 - RNA, 18 nt, Artificial Sequence
  Synthetic
auaauuuggcuugcagaa

SEQ ID NO: 185586 - RNA, 19 nt, Artificial Sequence
  Synthetic
gauaauuuggcuugcagaa

SEQ ID NO: 185587 - RNA, 20 nt, Artificial Sequence
  Synthetic
agauaauuuggcuugcagaa

SEQ ID NO: 185588 - RNA, 21 nt, Artificial Sequence
  Synthetic
aagauaauuuggcuugcagaa

SEQ ID NO: 185589 - RNA, 22 nt, Artificial Sequence
  Synthetic
aaagauaauuuggcuugcagaa

SEQ ID NO: 185590 - RNA, 23 nt, Artificial Sequence
  Synthetic
gaaagauaauuuggcuugcagaa

SEQ ID NO: 185591 - RNA, 24 nt, Artificial Sequence
  Synthetic
ugaaagauaauuuggcuugcagaa

SEQ ID NO: 185592 - RNA, 18 nt, Artificial Sequence
  Synthetic
acagggaaauuugcagaa

SEQ ID NO: 185593 - RNA, 19 nt, Artificial Sequence
  Synthetic
aacagggaaauuugcagaa

SEQ ID NO: 185594 - RNA, 20 nt, Artificial Sequence
  Synthetic
caacagggaaauuugcagaa

SEQ ID NO: 185595 - RNA, 21 nt, Artificial Sequence
  Synthetic
gcaacagggaaauuugcagaa

SEQ ID NO: 185596 - RNA, 22 nt, Artificial Sequence
  Synthetic
ggcaacagggaaauuugcagaa

SEQ ID NO: 185597 - RNA, 23 nt, Artificial Sequence
  Synthetic
uggcaacagggaaauuugcagaa

SEQ ID NO: 185598 - RNA, 24 nt, Artificial Sequence
  Synthetic
cuggcaacagggaaauuugcagaa

SEQ ID NO: 185599 - RNA, 18 nt, Artificial Sequence
  Synthetic
cuguacuuacaaucagaa

SEQ ID NO: 185600 - RNA, 19 nt, Artificial Sequence
  Synthetic
acuguacuuacaaucagaa

SEQ ID NO: 185601 - RNA, 20 nt, Artificial Sequence
  Synthetic
gacuguacuuacaaucagaa

SEQ ID NO: 185602 - RNA, 21 nt, Artificial Sequence
  Synthetic
ugacuguacuuacaaucagaa

SEQ ID NO: 185603 - RNA, 22 nt, Artificial Sequence
  Synthetic
uugacuguacuuacaaucagaa

SEQ ID NO: 185604 - RNA, 23 nt, Artificial Sequence
  Synthetic
guugacuguacuuacaaucagaa

SEQ ID NO: 185605 - RNA, 24 nt, Artificial Sequence
  Synthetic
uguugacuguacuuacaaucagaa

SEQ ID NO: 185606 - RNA, 18 nt, Artificial Sequence
  Synthetic
gccacuuggagaucagaa

SEQ ID NO: 185607 - RNA, 19 nt, Artificial Sequence
  Synthetic
ggccacuuggagaucagaa

SEQ ID NO: 185608 - RNA, 20 nt, Artificial Sequence
  Synthetic
gggccacuuggagaucagaa

SEQ ID NO: 185609 - RNA, 21 nt, Artificial Sequence
  Synthetic
ugggccacuuggagaucagaa

SEQ ID NO: 185610 - RNA, 22 nt, Artificial Sequence
  Synthetic
cugggccacuuggagaucagaa

SEQ ID NO: 185611 - RNA, 23 nt, Artificial Sequence
  Synthetic
acugggccacuuggagaucagaa

SEQ ID NO: 185612 - RNA, 24 nt, Artificial Sequence
  Synthetic
uacugggccacuuggagaucagaa

SEQ ID NO: 185613 - RNA, 18 nt, Artificial Sequence
  Synthetic
cuguggcugggaucagaa

SEQ ID NO: 185614 - RNA, 19 nt, Artificial Sequence
  Synthetic
acuguggcugggaucagaa

SEQ ID NO: 185615 - RNA, 20 nt, Artificial Sequence
  Synthetic
gacuguggcugggaucagaa

SEQ ID NO: 185616 - RNA, 21 nt, Artificial Sequence
  Synthetic
ugacuguggcugggaucagaa

SEQ ID NO: 185617 - RNA, 22 nt, Artificial Sequence
  Synthetic
augacuguggcugggaucagaa

SEQ ID NO: 185618 - RNA, 23 nt, Artificial Sequence
  Synthetic
gaugacuguggcugggaucagaa

SEQ ID NO: 185619 - RNA, 24 nt, Artificial Sequence
  Synthetic
agaugacuguggcugggaucagaa

SEQ ID NO: 185620 - RNA, 18 nt, Artificial Sequence
  Synthetic
ccacguccgugaucagaa

SEQ ID NO: 185621 - RNA, 19 nt, Artificial Sequence
  Synthetic
accacguccgugaucagaa

SEQ ID NO: 185622 - RNA, 20 nt, Artificial Sequence
  Synthetic
aaccacguccgugaucagaa

SEQ ID NO: 185623 - RNA, 21 nt, Artificial Sequence
  Synthetic
caaccacguccgugaucagaa

SEQ ID NO: 185624 - RNA, 22 nt, Artificial Sequence
  Synthetic
acaaccacguccgugaucagaa

SEQ ID NO: 185625 - RNA, 23 nt, Artificial Sequence
  Synthetic
uacaaccacguccgugaucagaa

SEQ ID NO: 185626 - RNA, 24 nt, Artificial Sequence
  Synthetic
cuacaaccacguccgugaucagaa

SEQ ID NO: 185627 - RNA, 18 nt, Artificial Sequence
  Synthetic
ucuuccuuugccucagaa

SEQ ID NO: 185628 - RNA, 19 nt, Artificial Sequence
  Synthetic
uucuuccuuugccucagaa

SEQ ID NO: 185629 - RNA, 20 nt, Artificial Sequence
  Synthetic
guucuuccuuugccucagaa

SEQ ID NO: 185630 - RNA, 21 nt, Artificial Sequence
  Synthetic
aguucuuccuuugccucagaa

SEQ ID NO: 185631 - RNA, 22 nt, Artificial Sequence
  Synthetic
aaguucuuccuuugccucagaa

SEQ ID NO: 185632 - RNA, 23 nt, Artificial Sequence
  Synthetic
caaguucuuccuuugccucagaa

SEQ ID NO: 185633 - RNA, 24 nt, Artificial Sequence
  Synthetic
ucaaguucuuccuuugccucagaa

SEQ ID NO: 185634 - RNA, 18 nt, Artificial Sequence
  Synthetic
cagagauucuccucagaa

SEQ ID NO: 185635 - RNA, 19 nt, Artificial Sequence
  Synthetic
ucagagauucuccucagaa

SEQ ID NO: 185636 - RNA, 20 nt, Artificial Sequence
  Synthetic
cucagagauucuccucagaa

SEQ ID NO: 185637 - RNA, 21 nt, Artificial Sequence
  Synthetic
ccucagagauucuccucagaa

SEQ ID NO: 185638 - RNA, 22 nt, Artificial Sequence
  Synthetic
cccucagagauucuccucagaa

SEQ ID NO: 185639 - RNA, 23 nt, Artificial Sequence
  Synthetic
ucccucagagauucuccucagaa

SEQ ID NO: 185640 - RNA, 24 nt, Artificial Sequence
  Synthetic
uucccucagagauucuccucagaa

SEQ ID NO: 185641 - RNA, 18 nt, Artificial Sequence
  Synthetic
uaguaauaaagcucagaa

SEQ ID NO: 185642 - RNA, 19 nt, Artificial Sequence
  Synthetic
guaguaauaaagcucagaa

SEQ ID NO: 185643 - RNA, 20 nt, Artificial Sequence
  Synthetic
gguaguaauaaagcucagaa

SEQ ID NO: 185644 - RNA, 21 nt, Artificial Sequence
  Synthetic
ugguaguaauaaagcucagaa

SEQ ID NO: 185645 - RNA, 22 nt, Artificial Sequence
  Synthetic
augguaguaauaaagcucagaa

SEQ ID NO: 185646 - RNA, 23 nt, Artificial Sequence
  Synthetic
uaugguaguaauaaagcucagaa

SEQ ID NO: 185647 - RNA, 24 nt, Artificial Sequence
  Synthetic
auaugguaguaauaaagcucagaa

SEQ ID NO: 185648 - RNA, 18 nt, Artificial Sequence
  Synthetic
caucaucuuugcucagaa

SEQ ID NO: 185649 - RNA, 19 nt, Artificial Sequence
  Synthetic
gcaucaucuuugcucagaa

SEQ ID NO: 185650 - RNA, 20 nt, Artificial Sequence
  Synthetic
agcaucaucuuugcucagaa

SEQ ID NO: 185651 - RNA, 21 nt, Artificial Sequence
  Synthetic
aagcaucaucuuugcucagaa

SEQ ID NO: 185652 - RNA, 22 nt, Artificial Sequence
  Synthetic
aaagcaucaucuuugcucagaa

SEQ ID NO: 185653 - RNA, 23 nt, Artificial Sequence
  Synthetic
uaaagcaucaucuuugcucagaa

SEQ ID NO: 185654 - RNA, 24 nt, Artificial Sequence
  Synthetic
uuaaagcaucaucuuugcucagaa

SEQ ID NO: 185655 - RNA, 18 nt, Artificial Sequence
  Synthetic
uauuguugugucucagaa

SEQ ID NO: 185656 - RNA, 19 nt, Artificial Sequence
  Synthetic
auauuguugugucucagaa

SEQ ID NO: 185657 - RNA, 20 nt, Artificial Sequence
  Synthetic
aauauuguugugucucagaa

SEQ ID NO: 185658 - RNA, 21 nt, Artificial Sequence
  Synthetic
caauauuguugugucucagaa

SEQ ID NO: 185659 - RNA, 22 nt, Artificial Sequence
  Synthetic
ucaauauuguugugucucagaa

SEQ ID NO: 185660 - RNA, 23 nt, Artificial Sequence
  Synthetic
uucaauauuguugugucucagaa

SEQ ID NO: 185661 - RNA, 24 nt, Artificial Sequence
  Synthetic
uuucaauauuguugugucucagaa

SEQ ID NO: 185662 - RNA, 18 nt, Artificial Sequence
  Synthetic
uuucuaguuaagucagaa

SEQ ID NO: 185663 - RNA, 19 nt, Artificial Sequence
  Synthetic
uuuucuaguuaagucagaa

SEQ ID NO: 185664 - RNA, 20 nt, Artificial Sequence
  Synthetic
cuuuucuaguuaagucagaa

SEQ ID NO: 185665 - RNA, 21 nt, Artificial Sequence
  Synthetic
ucuuuucuaguuaagucagaa

SEQ ID NO: 185666 - RNA, 22 nt, Artificial Sequence
  Synthetic
aucuuuucuaguuaagucagaa

SEQ ID NO: 185667 - RNA, 23 nt, Artificial Sequence
  Synthetic
gaucuuuucuaguuaagucagaa

SEQ ID NO: 185668 - RNA, 24 nt, Artificial Sequence
  Synthetic
ugaucuuuucuaguuaagucagaa

SEQ ID NO: 185669 - RNA, 18 nt, Artificial Sequence
  Synthetic
uaaguauuugagucagaa

SEQ ID NO: 185670 - RNA, 19 nt, Artificial Sequence
  Synthetic
cuaaguauuugagucagaa

SEQ ID NO: 185671 - RNA, 20 nt, Artificial Sequence
  Synthetic
ucuaaguauuugagucagaa

SEQ ID NO: 185672 - RNA, 21 nt, Artificial Sequence
  Synthetic
aucuaaguauuugagucagaa

SEQ ID NO: 185673 - RNA, 22 nt, Artificial Sequence
  Synthetic
uaucuaaguauuugagucagaa

SEQ ID NO: 185674 - RNA, 23 nt, Artificial Sequence
  Synthetic
auaucuaaguauuugagucagaa

SEQ ID NO: 185675 - RNA, 24 nt, Artificial Sequence
  Synthetic
aauaucuaaguauuugagucagaa

SEQ ID NO: 185676 - RNA, 18 nt, Artificial Sequence
  Synthetic
caggccuccaugucagaa

SEQ ID NO: 185677 - RNA, 19 nt, Artificial Sequence
  Synthetic
ucaggccuccaugucagaa

SEQ ID NO: 185678 - RNA, 20 nt, Artificial Sequence
  Synthetic
uucaggccuccaugucagaa

SEQ ID NO: 185679 - RNA, 21 nt, Artificial Sequence
  Synthetic
auucaggccuccaugucagaa

SEQ ID NO: 185680 - RNA, 22 nt, Artificial Sequence
  Synthetic
gauucaggccuccaugucagaa

SEQ ID NO: 185681 - RNA, 23 nt, Artificial Sequence
  Synthetic
ggauucaggccuccaugucagaa

SEQ ID NO: 185682 - RNA, 24 nt, Artificial Sequence
  Synthetic
aggauucaggccuccaugucagaa

SEQ ID NO: 185683 - RNA, 18 nt, Artificial Sequence
  Synthetic
uaggaagaguauucagaa

SEQ ID NO: 185684 - RNA, 19 nt, Artificial Sequence
  Synthetic
uuaggaagaguauucagaa

SEQ ID NO: 185685 - RNA, 20 nt, Artificial Sequence
  Synthetic
uuuaggaagaguauucagaa

SEQ ID NO: 185686 - RNA, 21 nt, Artificial Sequence
  Synthetic
guuuaggaagaguauucagaa

SEQ ID NO: 185687 - RNA, 22 nt, Artificial Sequence
  Synthetic
uguuuaggaagaguauucagaa

SEQ ID NO: 185688 - RNA, 23 nt, Artificial Sequence
  Synthetic
auguuuaggaagaguauucagaa

SEQ ID NO: 185689 - RNA, 24 nt, Artificial Sequence
  Synthetic
cauguuuaggaagaguauucagaa

SEQ ID NO: 185690 - RNA, 18 nt, Artificial Sequence
  Synthetic
cuucacuuuuauucagaa

SEQ ID NO: 185691 - RNA, 19 nt, Artificial Sequence
  Synthetic
ucuucacuuuuauucagaa

SEQ ID NO: 185692 - RNA, 20 nt, Artificial Sequence
  Synthetic
aucuucacuuuuauucagaa

SEQ ID NO: 185693 - RNA, 21 nt, Artificial Sequence
  Synthetic
uaucuucacuuuuauucagaa

SEQ ID NO: 185694 - RNA, 22 nt, Artificial Sequence
  Synthetic
uuaucuucacuuuuauucagaa

SEQ ID NO: 185695 - RNA, 23 nt, Artificial Sequence
  Synthetic
cuuaucuucacuuuuauucagaa

SEQ ID NO: 185696 - RNA, 24 nt, Artificial Sequence
  Synthetic
ccuuaucuucacuuuuauucagaa

SEQ ID NO: 185697 - RNA, 18 nt, Artificial Sequence
  Synthetic
cgaaacagaucuucagaa

SEQ ID NO: 185698 - RNA, 19 nt, Artificial Sequence
  Synthetic
ccgaaacagaucuucagaa

SEQ ID NO: 185699 - RNA, 20 nt, Artificial Sequence
  Synthetic
gccgaaacagaucuucagaa

SEQ ID NO: 185700 - RNA, 21 nt, Artificial Sequence
  Synthetic
agccgaaacagaucuucagaa

SEQ ID NO: 185701 - RNA, 22 nt, Artificial Sequence
  Synthetic
gagccgaaacagaucuucagaa

SEQ ID NO: 185702 - RNA, 23 nt, Artificial Sequence
  Synthetic
ugagccgaaacagaucuucagaa

SEQ ID NO: 185703 - RNA, 24 nt, Artificial Sequence
  Synthetic
augagccgaaacagaucuucagaa

SEQ ID NO: 185704 - RNA, 18 nt, Artificial Sequence
  Synthetic
ccuacaaaucuuucagaa

SEQ ID NO: 185705 - RNA, 19 nt, Artificial Sequence
  Synthetic
uccuacaaaucuuucagaa

SEQ ID NO: 185706 - RNA, 20 nt, Artificial Sequence
  Synthetic
uuccuacaaaucuuucagaa

SEQ ID NO: 185707 - RNA, 21 nt, Artificial Sequence
  Synthetic
auuccuacaaaucuuucagaa

SEQ ID NO: 185708 - RNA, 22 nt, Artificial Sequence
  Synthetic
aauuccuacaaaucuuucagaa

SEQ ID NO: 185709 - RNA, 23 nt, Artificial Sequence
  Synthetic
gaauuccuacaaaucuuucagaa

SEQ ID NO: 185710 - RNA, 24 nt, Artificial Sequence
  Synthetic
agaauuccuacaaaucuuucagaa

SEQ ID NO: 185711 - RNA, 18 nt, Artificial Sequence
  Synthetic
ggaaaaauucuuucagaa

SEQ ID NO: 185712 - RNA, 19 nt, Artificial Sequence
  Synthetic
aggaaaaauucuuucagaa

SEQ ID NO: 185713 - RNA, 20 nt, Artificial Sequence
  Synthetic
aaggaaaaauucuuucagaa

SEQ ID NO: 185714 - RNA, 21 nt, Artificial Sequence
  Synthetic
caaggaaaaauucuuucagaa

SEQ ID NO: 185715 - RNA, 22 nt, Artificial Sequence
  Synthetic
ccaaggaaaaauucuuucagaa

SEQ ID NO: 185716 - RNA, 23 nt, Artificial Sequence
  Synthetic
uccaaggaaaaauucuuucagaa

SEQ ID NO: 185717 - RNA, 24 nt, Artificial Sequence
  Synthetic
guccaaggaaaaauucuuucagaa

SEQ ID NO: 185718 - RNA, 18 nt, Artificial Sequence
  Synthetic
uccuucuacuuuucagaa

SEQ ID NO: 185719 - RNA, 19 nt, Artificial Sequence
  Synthetic
uuccuucuacuuuucagaa

SEQ ID NO: 185720 - RNA, 20 nt, Artificial Sequence
  Synthetic
uuuccuucuacuuuucagaa

SEQ ID NO: 185721 - RNA, 21 nt, Artificial Sequence
  Synthetic
guuuccuucuacuuuucagaa

SEQ ID NO: 185722 - RNA, 22 nt, Artificial Sequence
  Synthetic
gguuuccuucuacuuuucagaa

SEQ ID NO: 185723 - RNA, 23 nt, Artificial Sequence
  Synthetic
ugguuuccuucuacuuuucagaa

SEQ ID NO: 185724 - RNA, 24 nt, Artificial Sequence
  Synthetic
uugguuuccuucuacuuuucagaa

SEQ ID NO: 185725 - RNA, 18 nt, Artificial Sequence
  Synthetic
cagggcgaaaaaagagaa

SEQ ID NO: 185726 - RNA, 19 nt, Artificial Sequence
  Synthetic
acagggcgaaaaaagagaa

SEQ ID NO: 185727 - RNA, 20 nt, Artificial Sequence
  Synthetic
cacagggcgaaaaaagagaa

SEQ ID NO: 185728 - RNA, 21 nt, Artificial Sequence
  Synthetic
ucacagggcgaaaaaagagaa

SEQ ID NO: 185729 - RNA, 22 nt, Artificial Sequence
  Synthetic
uucacagggcgaaaaaagagaa

SEQ ID NO: 185730 - RNA, 23 nt, Artificial Sequence
  Synthetic
guucacagggcgaaaaaagagaa

SEQ ID NO: 185731 - RNA, 24 nt, Artificial Sequence
  Synthetic
uguucacagggcgaaaaaagagaa

SEQ ID NO: 185732 - RNA, 18 nt, Artificial Sequence
  Synthetic
ggggagugaaaaagagaa

SEQ ID NO: 185733 - RNA, 19 nt, Artificial Sequence
  Synthetic
aggggagugaaaaagagaa

SEQ ID NO: 185734 - RNA, 20 nt, Artificial Sequence
  Synthetic
aaggggagugaaaaagagaa

SEQ ID NO: 185735 - RNA, 21 nt, Artificial Sequence
  Synthetic
aaaggggagugaaaaagagaa

SEQ ID NO: 185736 - RNA, 22 nt, Artificial Sequence
  Synthetic
caaaggggagugaaaaagagaa

SEQ ID NO: 185737 - RNA, 23 nt, Artificial Sequence
  Synthetic
ccaaaggggagugaaaaagagaa

SEQ ID NO: 185738 - RNA, 24 nt, Artificial Sequence
  Synthetic
accaaaggggagugaaaaagagaa

SEQ ID NO: 185739 - RNA, 18 nt, Artificial Sequence
  Synthetic
auggaaaccaaaagagaa

SEQ ID NO: 185740 - RNA, 19 nt, Artificial Sequence
  Synthetic
aauggaaaccaaaagagaa

SEQ ID NO: 185741 - RNA, 20 nt, Artificial Sequence
  Synthetic
aaauggaaaccaaaagagaa

SEQ ID NO: 185742 - RNA, 21 nt, Artificial Sequence
  Synthetic
caaauggaaaccaaaagagaa

SEQ ID NO: 185743 - RNA, 22 nt, Artificial Sequence
  Synthetic
gcaaauggaaaccaaaagagaa

SEQ ID NO: 185744 - RNA, 23 nt, Artificial Sequence
  Synthetic
ugcaaauggaaaccaaaagagaa

SEQ ID NO: 185745 - RNA, 24 nt, Artificial Sequence
  Synthetic
augcaaauggaaaccaaaagagaa

SEQ ID NO: 185746 - RNA, 18 nt, Artificial Sequence
  Synthetic
augaugaugaaaagagaa

SEQ ID NO: 185747 - RNA, 19 nt, Artificial Sequence
  Synthetic
aaugaugaugaaaagagaa

SEQ ID NO: 185748 - RNA, 20 nt, Artificial Sequence
  Synthetic
aaaugaugaugaaaagagaa

SEQ ID NO: 185749 - RNA, 21 nt, Artificial Sequence
  Synthetic
uaaaugaugaugaaaagagaa

SEQ ID NO: 185750 - RNA, 22 nt, Artificial Sequence
  Synthetic
auaaaugaugaugaaaagagaa

SEQ ID NO: 185751 - RNA, 23 nt, Artificial Sequence
  Synthetic
uauaaaugaugaugaaaagagaa

SEQ ID NO: 185752 - RNA, 24 nt, Artificial Sequence
  Synthetic
guauaaaugaugaugaaaagagaa

SEQ ID NO: 185753 - RNA, 18 nt, Artificial Sequence
  Synthetic
acaguuacccaaagagaa

SEQ ID NO: 185754 - RNA, 19 nt, Artificial Sequence
  Synthetic
uacaguuacccaaagagaa

SEQ ID NO: 185755 - RNA, 20 nt, Artificial Sequence
  Synthetic
cuacaguuacccaaagagaa

SEQ ID NO: 185756 - RNA, 21 nt, Artificial Sequence
  Synthetic
gcuacaguuacccaaagagaa

SEQ ID NO: 185757 - RNA, 22 nt, Artificial Sequence
  Synthetic
ggcuacaguuacccaaagagaa

SEQ ID NO: 185758 - RNA, 23 nt, Artificial Sequence
  Synthetic
aggcuacaguuacccaaagagaa

SEQ ID NO: 185759 - RNA, 24 nt, Artificial Sequence
  Synthetic
aaggcuacaguuacccaaagagaa

SEQ ID NO: 185760 - RNA, 18 nt, Artificial Sequence
  Synthetic
ucucccagucaaagagaa

SEQ ID NO: 185761 - RNA, 19 nt, Artificial Sequence
  Synthetic
gucucccagucaaagagaa

SEQ ID NO: 185762 - RNA, 20 nt, Artificial Sequence
  Synthetic
ugucucccagucaaagagaa

SEQ ID NO: 185763 - RNA, 21 nt, Artificial Sequence
  Synthetic
cugucucccagucaaagagaa

SEQ ID NO: 185764 - RNA, 22 nt, Artificial Sequence
  Synthetic
ccugucucccagucaaagagaa

SEQ ID NO: 185765 - RNA, 23 nt, Artificial Sequence
  Synthetic
gccugucucccagucaaagagaa

SEQ ID NO: 185766 - RNA, 24 nt, Artificial Sequence
  Synthetic
ugccugucucccagucaaagagaa

SEQ ID NO: 185767 - RNA, 18 nt, Artificial Sequence
  Synthetic
cuaauaagggaaagagaa

SEQ ID NO: 185768 - RNA, 19 nt, Artificial Sequence
  Synthetic
gcuaauaagggaaagagaa

SEQ ID NO: 185769 - RNA, 20 nt, Artificial Sequence
  Synthetic
ggcuaauaagggaaagagaa

SEQ ID NO: 185770 - RNA, 21 nt, Artificial Sequence
  Synthetic
uggcuaauaagggaaagagaa

SEQ ID NO: 185771 - RNA, 22 nt, Artificial Sequence
  Synthetic
guggcuaauaagggaaagagaa

SEQ ID NO: 185772 - RNA, 23 nt, Artificial Sequence
  Synthetic
uguggcuaauaagggaaagagaa

SEQ ID NO: 185773 - RNA, 24 nt, Artificial Sequence
  Synthetic
auguggcuaauaagggaaagagaa

SEQ ID NO: 185774 - RNA, 18 nt, Artificial Sequence
  Synthetic
acaagccuugaaagagaa

SEQ ID NO: 185775 - RNA, 19 nt, Artificial Sequence
  Synthetic
cacaagccuugaaagagaa

SEQ ID NO: 185776 - RNA, 20 nt, Artificial Sequence
  Synthetic
gcacaagccuugaaagagaa

SEQ ID NO: 185777 - RNA, 21 nt, Artificial Sequence
  Synthetic
ugcacaagccuugaaagagaa

SEQ ID NO: 185778 - RNA, 22 nt, Artificial Sequence
  Synthetic
augcacaagccuugaaagagaa

SEQ ID NO: 185779 - RNA, 23 nt, Artificial Sequence
  Synthetic
caugcacaagccuugaaagagaa

SEQ ID NO: 185780 - RNA, 24 nt, Artificial Sequence
  Synthetic
gcaugcacaagccuugaaagagaa

SEQ ID NO: 185781 - RNA, 18 nt, Artificial Sequence
  Synthetic
aagcaaggguaaagagaa

SEQ ID NO: 185782 - RNA, 19 nt, Artificial Sequence
  Synthetic
uaagcaaggguaaagagaa

SEQ ID NO: 185783 - RNA, 20 nt, Artificial Sequence
  Synthetic
auaagcaaggguaaagagaa

SEQ ID NO: 185784 - RNA, 21 nt, Artificial Sequence
  Synthetic
aauaagcaaggguaaagagaa

SEQ ID NO: 185785 - RNA, 22 nt, Artificial Sequence
  Synthetic
aaauaagcaaggguaaagagaa

SEQ ID NO: 185786 - RNA, 23 nt, Artificial Sequence
  Synthetic
aaaauaagcaaggguaaagagaa

SEQ ID NO: 185787 - RNA, 24 nt, Artificial Sequence
  Synthetic
gaaaauaagcaaggguaaagagaa

SEQ ID NO: 185788 - RNA, 18 nt, Artificial Sequence
  Synthetic
cuaaaagcagcaagagaa

SEQ ID NO: 185789 - RNA, 19 nt, Artificial Sequence
  Synthetic
ccuaaaagcagcaagagaa

SEQ ID NO: 185790 - RNA, 20 nt, Artificial Sequence
  Synthetic
uccuaaaagcagcaagagaa

SEQ ID NO: 185791 - RNA, 21 nt, Artificial Sequence
  Synthetic
auccuaaaagcagcaagagaa

SEQ ID NO: 185792 - RNA, 22 nt, Artificial Sequence
  Synthetic
aauccuaaaagcagcaagagaa

SEQ ID NO: 185793 - RNA, 23 nt, Artificial Sequence
  Synthetic
gaauccuaaaagcagcaagagaa

SEQ ID NO: 185794 - RNA, 24 nt, Artificial Sequence
  Synthetic
agaauccuaaaagcagcaagagaa

SEQ ID NO: 185795 - RNA, 18 nt, Artificial Sequence
  Synthetic
uugcaguacucaagagaa

SEQ ID NO: 185796 - RNA, 19 nt, Artificial Sequence
  Synthetic
uuugcaguacucaagagaa

SEQ ID NO: 185797 - RNA, 20 nt, Artificial Sequence
  Synthetic
auuugcaguacucaagagaa

SEQ ID NO: 185798 - RNA, 21 nt, Artificial Sequence
  Synthetic
aauuugcaguacucaagagaa

SEQ ID NO: 185799 - RNA, 22 nt, Artificial Sequence
  Synthetic
gaauuugcaguacucaagagaa

SEQ ID NO: 185800 - RNA, 23 nt, Artificial Sequence
  Synthetic
agaauuugcaguacucaagagaa

SEQ ID NO: 185801 - RNA, 24 nt, Artificial Sequence
  Synthetic
uagaauuugcaguacucaagagaa

SEQ ID NO: 185802 - RNA, 18 nt, Artificial Sequence
  Synthetic
ccaaaaaauagaagagaa

SEQ ID NO: 185803 - RNA, 19 nt, Artificial Sequence
  Synthetic
uccaaaaaauagaagagaa

SEQ ID NO: 185804 - RNA, 20 nt, Artificial Sequence
  Synthetic
uuccaaaaaauagaagagaa

SEQ ID NO: 185805 - RNA, 21 nt, Artificial Sequence
  Synthetic
cuuccaaaaaauagaagagaa

SEQ ID NO: 185806 - RNA, 22 nt, Artificial Sequence
  Synthetic
ucuuccaaaaaauagaagagaa

SEQ ID NO: 185807 - RNA, 23 nt, Artificial Sequence
  Synthetic
cucuuccaaaaaauagaagagaa

SEQ ID NO: 185808 - RNA, 24 nt, Artificial Sequence
  Synthetic
acucuuccaaaaaauagaagagaa

SEQ ID NO: 185809 - RNA, 18 nt, Artificial Sequence
  Synthetic
gcugcugauggaagagaa

SEQ ID NO: 185810 - RNA, 19 nt, Artificial Sequence
  Synthetic
ugcugcugauggaagagaa

SEQ ID NO: 185811 - RNA, 20 nt, Artificial Sequence
  Synthetic
gugcugcugauggaagagaa

SEQ ID NO: 185812 - RNA, 21 nt, Artificial Sequence
  Synthetic
ugugcugcugauggaagagaa

SEQ ID NO: 185813 - RNA, 22 nt, Artificial Sequence
  Synthetic
cugugcugcugauggaagagaa

SEQ ID NO: 185814 - RNA, 23 nt, Artificial Sequence
  Synthetic
gcugugcugcugauggaagagaa

SEQ ID NO: 185815 - RNA, 24 nt, Artificial Sequence
  Synthetic
cgcugugcugcugauggaagagaa

SEQ ID NO: 185816 - RNA, 18 nt, Artificial Sequence
  Synthetic
aaagcagcuggaagagaa

SEQ ID NO: 185817 - RNA, 19 nt, Artificial Sequence
  Synthetic
caaagcagcuggaagagaa

SEQ ID NO: 185818 - RNA, 20 nt, Artificial Sequence
  Synthetic
ccaaagcagcuggaagagaa

SEQ ID NO: 185819 - RNA, 21 nt, Artificial Sequence
  Synthetic
uccaaagcagcuggaagagaa

SEQ ID NO: 185820 - RNA, 22 nt, Artificial Sequence
  Synthetic
uuccaaagcagcuggaagagaa

SEQ ID NO: 185821 - RNA, 23 nt, Artificial Sequence
  Synthetic
auuccaaagcagcuggaagagaa

SEQ ID NO: 185822 - RNA, 24 nt, Artificial Sequence
  Synthetic
uauuccaaagcagcuggaagagaa

SEQ ID NO: 185823 - RNA, 18 nt, Artificial Sequence
  Synthetic
auguuguauauaagagaa

SEQ ID NO: 185824 - RNA, 19 nt, Artificial Sequence
  Synthetic
aauguuguauauaagagaa

SEQ ID NO: 185825 - RNA, 20 nt, Artificial Sequence
  Synthetic
caauguuguauauaagagaa

SEQ ID NO: 185826 - RNA, 21 nt, Artificial Sequence
  Synthetic
acaauguuguauauaagagaa

SEQ ID NO: 185827 - RNA, 22 nt, Artificial Sequence
  Synthetic
uacaauguuguauauaagagaa

SEQ ID NO: 185828 - RNA, 23 nt, Artificial Sequence
  Synthetic
auacaauguuguauauaagagaa

SEQ ID NO: 185829 - RNA, 24 nt, Artificial Sequence
  Synthetic
cauacaauguuguauauaagagaa

SEQ ID NO: 185830 - RNA, 18 nt, Artificial Sequence
  Synthetic
guguguugguuaagagaa

SEQ ID NO: 185831 - RNA, 19 nt, Artificial Sequence
  Synthetic
gguguguugguuaagagaa

SEQ ID NO: 185832 - RNA, 20 nt, Artificial Sequence
  Synthetic
agguguguugguuaagagaa

SEQ ID NO: 185833 - RNA, 21 nt, Artificial Sequence
  Synthetic
aagguguguugguuaagagaa

SEQ ID NO: 185834 - RNA, 22 nt, Artificial Sequence
  Synthetic
caagguguguugguuaagagaa

SEQ ID NO: 185835 - RNA, 23 nt, Artificial Sequence
  Synthetic
ucaagguguguugguuaagagaa

SEQ ID NO: 185836 - RNA, 24 nt, Artificial Sequence
  Synthetic
uucaagguguguugguuaagagaa

SEQ ID NO: 185837 - RNA, 18 nt, Artificial Sequence
  Synthetic
uuccuaguaaacagagaa

SEQ ID NO: 185838 - RNA, 19 nt, Artificial Sequence
  Synthetic
auuccuaguaaacagagaa

SEQ ID NO: 185839 - RNA, 20 nt, Artificial Sequence
  Synthetic
uauuccuaguaaacagagaa

SEQ ID NO: 185840 - RNA, 21 nt, Artificial Sequence
  Synthetic
auauuccuaguaaacagagaa

SEQ ID NO: 185841 - RNA, 22 nt, Artificial Sequence
  Synthetic
cauauuccuaguaaacagagaa

SEQ ID NO: 185842 - RNA, 23 nt, Artificial Sequence
  Synthetic
ccauauuccuaguaaacagagaa

SEQ ID NO: 185843 - RNA, 24 nt, Artificial Sequence
  Synthetic
uccauauuccuaguaaacagagaa

SEQ ID NO: 185844 - RNA, 18 nt, Artificial Sequence
  Synthetic
cuaucuucccacagagaa

SEQ ID NO: 185845 - RNA, 19 nt, Artificial Sequence
  Synthetic
ucuaucuucccacagagaa

SEQ ID NO: 185846 - RNA, 20 nt, Artificial Sequence
  Synthetic
uucuaucuucccacagagaa

SEQ ID NO: 185847 - RNA, 21 nt, Artificial Sequence
  Synthetic
auucuaucuucccacagagaa

SEQ ID NO: 185848 - RNA, 22 nt, Artificial Sequence
  Synthetic
gauucuaucuucccacagagaa

SEQ ID NO: 185849 - RNA, 23 nt, Artificial Sequence
  Synthetic
ggauucuaucuucccacagagaa

SEQ ID NO: 185850 - RNA, 24 nt, Artificial Sequence
  Synthetic
aggauucuaucuucccacagagaa

SEQ ID NO: 185851 - RNA, 18 nt, Artificial Sequence
  Synthetic
ugggcaaaugccagagaa

SEQ ID NO: 185852 - RNA, 19 nt, Artificial Sequence
  Synthetic
augggcaaaugccagagaa

SEQ ID NO: 185853 - RNA, 20 nt, Artificial Sequence
  Synthetic
uaugggcaaaugccagagaa

SEQ ID NO: 185854 - RNA, 21 nt, Artificial Sequence
  Synthetic
auaugggcaaaugccagagaa

SEQ ID NO: 185855 - RNA, 22 nt, Artificial Sequence
  Synthetic
aauaugggcaaaugccagagaa

SEQ ID NO: 185856 - RNA, 23 nt, Artificial Sequence
  Synthetic
aaauaugggcaaaugccagagaa

SEQ ID NO: 185857 - RNA, 24 nt, Artificial Sequence
  Synthetic
aaaauaugggcaaaugccagagaa

SEQ ID NO: 185858 - RNA, 18 nt, Artificial Sequence
  Synthetic
gaaauguaaagcagagaa

SEQ ID NO: 185859 - RNA, 19 nt, Artificial Sequence
  Synthetic
agaaauguaaagcagagaa

SEQ ID NO: 185860 - RNA, 20 nt, Artificial Sequence
  Synthetic
cagaaauguaaagcagagaa

SEQ ID NO: 185861 - RNA, 21 nt, Artificial Sequence
  Synthetic
acagaaauguaaagcagagaa

SEQ ID NO: 185862 - RNA, 22 nt, Artificial Sequence
  Synthetic
uacagaaauguaaagcagagaa

SEQ ID NO: 185863 - RNA, 23 nt, Artificial Sequence
  Synthetic
uuacagaaauguaaagcagagaa

SEQ ID NO: 185864 - RNA, 24 nt, Artificial Sequence
  Synthetic
uuuacagaaauguaaagcagagaa

SEQ ID NO: 185865 - RNA, 18 nt, Artificial Sequence
  Synthetic
uccucaauaagcagagaa

SEQ ID NO: 185866 - RNA, 19 nt, Artificial Sequence
  Synthetic
uuccucaauaagcagagaa

SEQ ID NO: 185867 - RNA, 20 nt, Artificial Sequence
  Synthetic
uuuccucaauaagcagagaa

SEQ ID NO: 185868 - RNA, 21 nt, Artificial Sequence
  Synthetic
auuuccucaauaagcagagaa

SEQ ID NO: 185869 - RNA, 22 nt, Artificial Sequence
  Synthetic
gauuuccucaauaagcagagaa

SEQ ID NO: 185870 - RNA, 23 nt, Artificial Sequence
  Synthetic
agauuuccucaauaagcagagaa

SEQ ID NO: 185871 - RNA, 24 nt, Artificial Sequence
  Synthetic
aagauuuccucaauaagcagagaa

SEQ ID NO: 185872 - RNA, 18 nt, Artificial Sequence
  Synthetic
uuaggaauaugcagagaa

SEQ ID NO: 185873 - RNA, 19 nt, Artificial Sequence
  Synthetic
uuuaggaauaugcagagaa

SEQ ID NO: 185874 - RNA, 20 nt, Artificial Sequence
  Synthetic
auuuaggaauaugcagagaa

SEQ ID NO: 185875 - RNA, 21 nt, Artificial Sequence
  Synthetic
aauuuaggaauaugcagagaa

SEQ ID NO: 185876 - RNA, 22 nt, Artificial Sequence
  Synthetic
aaauuuaggaauaugcagagaa

SEQ ID NO: 185877 - RNA, 23 nt, Artificial Sequence
  Synthetic
aaaauuuaggaauaugcagagaa

SEQ ID NO: 185878 - RNA, 24 nt, Artificial Sequence
  Synthetic
aaaaauuuaggaauaugcagagaa

SEQ ID NO: 185879 - RNA, 18 nt, Artificial Sequence
  Synthetic
uggugaggcugcagagaa

SEQ ID NO: 185880 - RNA, 19 nt, Artificial Sequence
  Synthetic
uuggugaggcugcagagaa

SEQ ID NO: 185881 - RNA, 20 nt, Artificial Sequence
  Synthetic
guuggugaggcugcagagaa

SEQ ID NO: 185882 - RNA, 21 nt, Artificial Sequence
  Synthetic
uguuggugaggcugcagagaa

SEQ ID NO: 185883 - RNA, 22 nt, Artificial Sequence
  Synthetic
auguuggugaggcugcagagaa

SEQ ID NO: 185884 - RNA, 23 nt, Artificial Sequence
  Synthetic
gauguuggugaggcugcagagaa

SEQ ID NO: 185885 - RNA, 24 nt, Artificial Sequence
  Synthetic
agauguuggugaggcugcagagaa

SEQ ID NO: 185886 - RNA, 18 nt, Artificial Sequence
  Synthetic
cccucuuggaucagagaa

SEQ ID NO: 185887 - RNA, 19 nt, Artificial Sequence
  Synthetic
acccucuuggaucagagaa

SEQ ID NO: 185888 - RNA, 20 nt, Artificial Sequence
  Synthetic
gacccucuuggaucagagaa

SEQ ID NO: 185889 - RNA, 21 nt, Artificial Sequence
  Synthetic
ugacccucuuggaucagagaa

SEQ ID NO: 185890 - RNA, 22 nt, Artificial Sequence
  Synthetic
uugacccucuuggaucagagaa

SEQ ID NO: 185891 - RNA, 23 nt, Artificial Sequence
  Synthetic
uuugacccucuuggaucagagaa

SEQ ID NO: 185892 - RNA, 24 nt, Artificial Sequence
  Synthetic
guuugacccucuuggaucagagaa

SEQ ID NO: 185893 - RNA, 18 nt, Artificial Sequence
  Synthetic
uguuaguccuucagagaa

SEQ ID NO: 185894 - RNA, 19 nt, Artificial Sequence
  Synthetic
auguuaguccuucagagaa

SEQ ID NO: 185895 - RNA, 20 nt, Artificial Sequence
  Synthetic
aauguuaguccuucagagaa

SEQ ID NO: 185896 - RNA, 21 nt, Artificial Sequence
  Synthetic
uaauguuaguccuucagagaa

SEQ ID NO: 185897 - RNA, 22 nt, Artificial Sequence
  Synthetic
cuaauguuaguccuucagagaa

SEQ ID NO: 185898 - RNA, 23 nt, Artificial Sequence
  Synthetic
gcuaauguuaguccuucagagaa

SEQ ID NO: 185899 - RNA, 24 nt, Artificial Sequence
  Synthetic
ugcuaauguuaguccuucagagaa

SEQ ID NO: 185900 - RNA, 18 nt, Artificial Sequence
  Synthetic
uggugaggcuucagagaa

SEQ ID NO: 185901 - RNA, 19 nt, Artificial Sequence
  Synthetic
auggugaggcuucagagaa

SEQ ID NO: 185902 - RNA, 20 nt, Artificial Sequence
  Synthetic
gauggugaggcuucagagaa

SEQ ID NO: 185903 - RNA, 21 nt, Artificial Sequence
  Synthetic
ugauggugaggcuucagagaa

SEQ ID NO: 185904 - RNA, 22 nt, Artificial Sequence
  Synthetic
augauggugaggcuucagagaa

SEQ ID NO: 185905 - RNA, 23 nt, Artificial Sequence
  Synthetic
gaugauggugaggcuucagagaa

SEQ ID NO: 185906 - RNA, 24 nt, Artificial Sequence
  Synthetic
agaugauggugaggcuucagagaa

SEQ ID NO: 185907 - RNA, 18 nt, Artificial Sequence
  Synthetic
uauauaacuuucagagaa

SEQ ID NO: 185908 - RNA, 19 nt, Artificial Sequence
  Synthetic
uuauauaacuuucagagaa

SEQ ID NO: 185909 - RNA, 20 nt, Artificial Sequence
  Synthetic
uuuauauaacuuucagagaa

SEQ ID NO: 185910 - RNA, 21 nt, Artificial Sequence
  Synthetic
auuuauauaacuuucagagaa

SEQ ID NO: 185911 - RNA, 22 nt, Artificial Sequence
  Synthetic
cauuuauauaacuuucagagaa

SEQ ID NO: 185912 - RNA, 23 nt, Artificial Sequence
  Synthetic
acauuuauauaacuuucagagaa

SEQ ID NO: 185913 - RNA, 24 nt, Artificial Sequence
  Synthetic
cacauuuauauaacuuucagagaa

SEQ ID NO: 185914 - RNA, 18 nt, Artificial Sequence
  Synthetic
ggaauagacaagagagaa

SEQ ID NO: 185915 - RNA, 19 nt, Artificial Sequence
  Synthetic
gggaauagacaagagagaa

SEQ ID NO: 185916 - RNA, 20 nt, Artificial Sequence
  Synthetic
ugggaauagacaagagagaa

SEQ ID NO: 185917 - RNA, 21 nt, Artificial Sequence
  Synthetic
gugggaauagacaagagagaa

SEQ ID NO: 185918 - RNA, 22 nt, Artificial Sequence
  Synthetic
ugugggaauagacaagagagaa

SEQ ID NO: 185919 - RNA, 23 nt, Artificial Sequence
  Synthetic
gugugggaauagacaagagagaa

SEQ ID NO: 185920 - RNA, 24 nt, Artificial Sequence
  Synthetic
ggugugggaauagacaagagagaa

SEQ ID NO: 185921 - RNA, 18 nt, Artificial Sequence
  Synthetic
gauuugguacagagagaa

SEQ ID NO: 185922 - RNA, 19 nt, Artificial Sequence
  Synthetic
ggauuugguacagagagaa

SEQ ID NO: 185923 - RNA, 20 nt, Artificial Sequence
  Synthetic
uggauuugguacagagagaa

SEQ ID NO: 185924 - RNA, 21 nt, Artificial Sequence
  Synthetic
auggauuugguacagagagaa

SEQ ID NO: 185925 - RNA, 22 nt, Artificial Sequence
  Synthetic
gauggauuugguacagagagaa

SEQ ID NO: 185926 - RNA, 23 nt, Artificial Sequence
  Synthetic
agauggauuugguacagagagaa

SEQ ID NO: 185927 - RNA, 24 nt, Artificial Sequence
  Synthetic
gagauggauuugguacagagagaa

SEQ ID NO: 185928 - RNA, 18 nt, Artificial Sequence
  Synthetic
ugaaauguccagagagaa

SEQ ID NO: 185929 - RNA, 19 nt, Artificial Sequence
  Synthetic
gugaaauguccagagagaa

SEQ ID NO: 185930 - RNA, 20 nt, Artificial Sequence
  Synthetic
ugugaaauguccagagagaa

SEQ ID NO: 185931 - RNA, 21 nt, Artificial Sequence
  Synthetic
augugaaauguccagagagaa

SEQ ID NO: 185932 - RNA, 22 nt, Artificial Sequence
  Synthetic
aaugugaaauguccagagagaa

SEQ ID NO: 185933 - RNA, 23 nt, Artificial Sequence
  Synthetic
aaaugugaaauguccagagagaa

SEQ ID NO: 185934 - RNA, 24 nt, Artificial Sequence
  Synthetic
caaaugugaaauguccagagagaa

SEQ ID NO: 185935 - RNA, 18 nt, Artificial Sequence
  Synthetic
gccaagacagagagagaa

SEQ ID NO: 185936 - RNA, 19 nt, Artificial Sequence
  Synthetic
ugccaagacagagagagaa

SEQ ID NO: 185937 - RNA, 20 nt, Artificial Sequence
  Synthetic
cugccaagacagagagagaa

SEQ ID NO: 185938 - RNA, 21 nt, Artificial Sequence
  Synthetic
acugccaagacagagagagaa

SEQ ID NO: 185939 - RNA, 22 nt, Artificial Sequence
  Synthetic
uacugccaagacagagagagaa

SEQ ID NO: 185940 - RNA, 23 nt, Artificial Sequence
  Synthetic
auacugccaagacagagagagaa

SEQ ID NO: 185941 - RNA, 24 nt, Artificial Sequence
  Synthetic
gauacugccaagacagagagagaa

SEQ ID NO: 185942 - RNA, 18 nt, Artificial Sequence
  Synthetic
agagagacagagagagaa

SEQ ID NO: 185943 - RNA, 19 nt, Artificial Sequence
  Synthetic
gagagagacagagagagaa

SEQ ID NO: 185944 - RNA, 20 nt, Artificial Sequence
  Synthetic
agagagagacagagagagaa

SEQ ID NO: 185945 - RNA, 21 nt, Artificial Sequence
  Synthetic
gagagagagacagagagagaa

SEQ ID NO: 185946 - RNA, 22 nt, Artificial Sequence
  Synthetic
agagagagagacagagagagaa

SEQ ID NO: 185947 - RNA, 23 nt, Artificial Sequence
  Synthetic
gagagagagagacagagagagaa

SEQ ID NO: 185948 - RNA, 24 nt, Artificial Sequence
  Synthetic
agagagagagagacagagagagaa

SEQ ID NO: 185949 - RNA, 18 nt, Artificial Sequence
  Synthetic
auugagagagagagagaa

SEQ ID NO: 185950 - RNA, 19 nt, Artificial Sequence
  Synthetic
gauugagagagagagagaa

SEQ ID NO: 185951 - RNA, 20 nt, Artificial Sequence
  Synthetic
agauugagagagagagagaa

SEQ ID NO: 185952 - RNA, 21 nt, Artificial Sequence
  Synthetic
gagauugagagagagagagaa

SEQ ID NO: 185953 - RNA, 22 nt, Artificial Sequence
  Synthetic
agagauugagagagagagagaa

SEQ ID NO: 185954 - RNA, 23 nt, Artificial Sequence
  Synthetic
gagagauugagagagagagagaa

SEQ ID NO: 185955 - RNA, 24 nt, Artificial Sequence
  Synthetic
agagagauugagagagagagagaa

SEQ ID NO: 185956 - RNA, 18 nt, Artificial Sequence
  Synthetic
uaauaccucuagagagaa

SEQ ID NO: 185957 - RNA, 19 nt, Artificial Sequence
  Synthetic
auaauaccucuagagagaa

SEQ ID NO: 185958 - RNA, 20 nt, Artificial Sequence
  Synthetic
gauaauaccucuagagagaa

SEQ ID NO: 185959 - RNA, 21 nt, Artificial Sequence
  Synthetic
ugauaauaccucuagagagaa

SEQ ID NO: 185960 - RNA, 22 nt, Artificial Sequence
  Synthetic
uugauaauaccucuagagagaa

SEQ ID NO: 185961 - RNA, 23 nt, Artificial Sequence
  Synthetic
auugauaauaccucuagagagaa

SEQ ID NO: 185962 - RNA, 24 nt, Artificial Sequence
  Synthetic
aauugauaauaccucuagagagaa

SEQ ID NO: 185963 - RNA, 18 nt, Artificial Sequence
  Synthetic
uaugcauugaggagagaa

SEQ ID NO: 185964 - RNA, 19 nt, Artificial Sequence
  Synthetic
auaugcauugaggagagaa

SEQ ID NO: 185965 - RNA, 20 nt, Artificial Sequence
  Synthetic
aauaugcauugaggagagaa

SEQ ID NO: 185966 - RNA, 21 nt, Artificial Sequence
  Synthetic
aaauaugcauugaggagagaa

SEQ ID NO: 185967 - RNA, 22 nt, Artificial Sequence
  Synthetic
caaauaugcauugaggagagaa

SEQ ID NO: 185968 - RNA, 23 nt, Artificial Sequence
  Synthetic
acaaauaugcauugaggagagaa

SEQ ID NO: 185969 - RNA, 24 nt, Artificial Sequence
  Synthetic
aacaaauaugcauugaggagagaa

SEQ ID NO: 185970 - RNA, 18 nt, Artificial Sequence
  Synthetic
acaggaggauggagagaa

SEQ ID NO: 185971 - RNA, 19 nt, Artificial Sequence
  Synthetic
gacaggaggauggagagaa

SEQ ID NO: 185972 - RNA, 20 nt, Artificial Sequence
  Synthetic
cgacaggaggauggagagaa

SEQ ID NO: 185973 - RNA, 21 nt, Artificial Sequence
  Synthetic
gcgacaggaggauggagagaa

SEQ ID NO: 185974 - RNA, 22 nt, Artificial Sequence
  Synthetic
agcgacaggaggauggagagaa

SEQ ID NO: 185975 - RNA, 23 nt, Artificial Sequence
  Synthetic
cagcgacaggaggauggagagaa

SEQ ID NO: 185976 - RNA, 24 nt, Artificial Sequence
  Synthetic
acagcgacaggaggauggagagaa

SEQ ID NO: 185977 - RNA, 18 nt, Artificial Sequence
  Synthetic
auuggaaugaugagagaa

SEQ ID NO: 185978 - RNA, 19 nt, Artificial Sequence
  Synthetic
aauuggaaugaugagagaa

SEQ ID NO: 185979 - RNA, 20 nt, Artificial Sequence
  Synthetic
uaauuggaaugaugagagaa

SEQ ID NO: 185980 - RNA, 21 nt, Artificial Sequence
  Synthetic
uuaauuggaaugaugagagaa

SEQ ID NO: 185981 - RNA, 22 nt, Artificial Sequence
  Synthetic
cuuaauuggaaugaugagagaa

SEQ ID NO: 185982 - RNA, 23 nt, Artificial Sequence
  Synthetic
gcuuaauuggaaugaugagagaa

SEQ ID NO: 185983 - RNA, 24 nt, Artificial Sequence
  Synthetic
agcuuaauuggaaugaugagagaa

SEQ ID NO: 185984 - RNA, 18 nt, Artificial Sequence
  Synthetic
uggugaaugcugagagaa

SEQ ID NO: 185985 - RNA, 19 nt, Artificial Sequence
  Synthetic
guggugaaugcugagagaa

SEQ ID NO: 185986 - RNA, 20 nt, Artificial Sequence
  Synthetic
uguggugaaugcugagagaa

SEQ ID NO: 185987 - RNA, 21 nt, Artificial Sequence
  Synthetic
uuguggugaaugcugagagaa

SEQ ID NO: 185988 - RNA, 22 nt, Artificial Sequence
  Synthetic
cuuguggugaaugcugagagaa

SEQ ID NO: 185989 - RNA, 23 nt, Artificial Sequence
  Synthetic
gcuuguggugaaugcugagagaa

SEQ ID NO: 185990 - RNA, 24 nt, Artificial Sequence
  Synthetic
agcuuguggugaaugcugagagaa

SEQ ID NO: 185991 - RNA, 18 nt, Artificial Sequence
  Synthetic
gacucacuguugagagaa

SEQ ID NO: 185992 - RNA, 19 nt, Artificial Sequence
  Synthetic
agacucacuguugagagaa

SEQ ID NO: 185993 - RNA, 20 nt, Artificial Sequence
  Synthetic
aagacucacuguugagagaa

SEQ ID NO: 185994 - RNA, 21 nt, Artificial Sequence
  Synthetic
uaagacucacuguugagagaa

SEQ ID NO: 185995 - RNA, 22 nt, Artificial Sequence
  Synthetic
auaagacucacuguugagagaa

SEQ ID NO: 185996 - RNA, 23 nt, Artificial Sequence
  Synthetic
aauaagacucacuguugagagaa

SEQ ID NO: 185997 - RNA, 24 nt, Artificial Sequence
  Synthetic
aaauaagacucacuguugagagaa

SEQ ID NO: 185998 - RNA, 18 nt, Artificial Sequence
  Synthetic
aagaugucuuugagagaa

SEQ ID NO: 185999 - RNA, 19 nt, Artificial Sequence
  Synthetic
uaagaugucuuugagagaa

SEQ ID NO: 186000 - RNA, 20 nt, Artificial Sequence
  Synthetic
uuaagaugucuuugagagaa

SEQ ID NO: 186001 - RNA, 21 nt, Artificial Sequence
  Synthetic
auuaagaugucuuugagagaa

SEQ ID NO: 186002 - RNA, 22 nt, Artificial Sequence
  Synthetic
aauuaagaugucuuugagagaa

SEQ ID NO: 186003 - RNA, 23 nt, Artificial Sequence
  Synthetic
uaauuaagaugucuuugagagaa

SEQ ID NO: 186004 - RNA, 24 nt, Artificial Sequence
  Synthetic
guaauuaagaugucuuugagagaa

SEQ ID NO: 186005 - RNA, 18 nt, Artificial Sequence
  Synthetic
gucauagacaauagagaa

SEQ ID NO: 186006 - RNA, 19 nt, Artificial Sequence
  Synthetic
agucauagacaauagagaa

SEQ ID NO: 186007 - RNA, 20 nt, Artificial Sequence
  Synthetic
cagucauagacaauagagaa

SEQ ID NO: 186008 - RNA, 21 nt, Artificial Sequence
  Synthetic
gcagucauagacaauagagaa

SEQ ID NO: 186009 - RNA, 22 nt, Artificial Sequence
  Synthetic
agcagucauagacaauagagaa

SEQ ID NO: 186010 - RNA, 23 nt, Artificial Sequence
  Synthetic
aagcagucauagacaauagagaa

SEQ ID NO: 186011 - RNA, 24 nt, Artificial Sequence
  Synthetic
gaagcagucauagacaauagagaa

SEQ ID NO: 186012 - RNA, 18 nt, Artificial Sequence
  Synthetic
caugaauucaauagagaa

SEQ ID NO: 186013 - RNA, 19 nt, Artificial Sequence
  Synthetic
acaugaauucaauagagaa

SEQ ID NO: 186014 - RNA, 20 nt, Artificial Sequence
  Synthetic
uacaugaauucaauagagaa

SEQ ID NO: 186015 - RNA, 21 nt, Artificial Sequence
  Synthetic
guacaugaauucaauagagaa

SEQ ID NO: 186016 - RNA, 22 nt, Artificial Sequence
  Synthetic
aguacaugaauucaauagagaa

SEQ ID NO: 186017 - RNA, 23 nt, Artificial Sequence
  Synthetic
gaguacaugaauucaauagagaa

SEQ ID NO: 186018 - RNA, 24 nt, Artificial Sequence
  Synthetic
agaguacaugaauucaauagagaa

SEQ ID NO: 186019 - RNA, 18 nt, Artificial Sequence
  Synthetic
ggcuuugaagauagagaa

SEQ ID NO: 186020 - RNA, 19 nt, Artificial Sequence
  Synthetic
uggcuuugaagauagagaa

SEQ ID NO: 186021 - RNA, 20 nt, Artificial Sequence
  Synthetic
cuggcuuugaagauagagaa

SEQ ID NO: 186022 - RNA, 21 nt, Artificial Sequence
  Synthetic
gcuggcuuugaagauagagaa

SEQ ID NO: 186023 - RNA, 22 nt, Artificial Sequence
  Synthetic
ugcuggcuuugaagauagagaa

SEQ ID NO: 186024 - RNA, 23 nt, Artificial Sequence
  Synthetic
cugcuggcuuugaagauagagaa

SEQ ID NO: 186025 - RNA, 24 nt, Artificial Sequence
  Synthetic
ccugcuggcuuugaagauagagaa

SEQ ID NO: 186026 - RNA, 18 nt, Artificial Sequence
  Synthetic
uugagucaagguagagaa

SEQ ID NO: 186027 - RNA, 19 nt, Artificial Sequence
  Synthetic
uuugagucaagguagagaa

SEQ ID NO: 186028 - RNA, 20 nt, Artificial Sequence
  Synthetic
uuuugagucaagguagagaa

SEQ ID NO: 186029 - RNA, 21 nt, Artificial Sequence
  Synthetic
cuuuugagucaagguagagaa

SEQ ID NO: 186030 - RNA, 22 nt, Artificial Sequence
  Synthetic
acuuuugagucaagguagagaa

SEQ ID NO: 186031 - RNA, 23 nt, Artificial Sequence
  Synthetic
gacuuuugagucaagguagagaa

SEQ ID NO: 186032 - RNA, 24 nt, Artificial Sequence
  Synthetic
agacuuuugagucaagguagagaa

SEQ ID NO: 186033 - RNA, 18 nt, Artificial Sequence
  Synthetic
acgcucaguguuagagaa

SEQ ID NO: 186034 - RNA, 19 nt, Artificial Sequence
  Synthetic
uacgcucaguguuagagaa

SEQ ID NO: 186035 - RNA, 20 nt, Artificial Sequence
  Synthetic
cuacgcucaguguuagagaa

SEQ ID NO: 186036 - RNA, 21 nt, Artificial Sequence
  Synthetic
gcuacgcucaguguuagagaa

SEQ ID NO: 186037 - RNA, 22 nt, Artificial Sequence
  Synthetic
ugcuacgcucaguguuagagaa

SEQ ID NO: 186038 - RNA, 23 nt, Artificial Sequence
  Synthetic
uugcuacgcucaguguuagagaa

SEQ ID NO: 186039 - RNA, 24 nt, Artificial Sequence
  Synthetic
uuugcuacgcucaguguuagagaa

SEQ ID NO: 186040 - RNA, 18 nt, Artificial Sequence
  Synthetic
guaggggaaaagcgagaa

SEQ ID NO: 186041 - RNA, 19 nt, Artificial Sequence
  Synthetic
aguaggggaaaagcgagaa

SEQ ID NO: 186042 - RNA, 20 nt, Artificial Sequence
  Synthetic
aaguaggggaaaagcgagaa

SEQ ID NO: 186043 - RNA, 21 nt, Artificial Sequence
  Synthetic
gaaguaggggaaaagcgagaa

SEQ ID NO: 186044 - RNA, 22 nt, Artificial Sequence
  Synthetic
ggaaguaggggaaaagcgagaa

SEQ ID NO: 186045 - RNA, 23 nt, Artificial Sequence
  Synthetic
gggaaguaggggaaaagcgagaa

SEQ ID NO: 186046 - RNA, 24 nt, Artificial Sequence
  Synthetic
ggggaaguaggggaaaagcgagaa

SEQ ID NO: 186047 - RNA, 18 nt, Artificial Sequence
  Synthetic
ugcuugugaaaucgagaa

SEQ ID NO: 186048 - RNA, 19 nt, Artificial Sequence
  Synthetic
uugcuugugaaaucgagaa

SEQ ID NO: 186049 - RNA, 20 nt, Artificial Sequence
  Synthetic
guugcuugugaaaucgagaa

SEQ ID NO: 186050 - RNA, 21 nt, Artificial Sequence
  Synthetic
aguugcuugugaaaucgagaa

SEQ ID NO: 186051 - RNA, 22 nt, Artificial Sequence
  Synthetic
gaguugcuugugaaaucgagaa

SEQ ID NO: 186052 - RNA, 23 nt, Artificial Sequence
  Synthetic
ggaguugcuugugaaaucgagaa

SEQ ID NO: 186053 - RNA, 24 nt, Artificial Sequence
  Synthetic
aggaguugcuugugaaaucgagaa

SEQ ID NO: 186054 - RNA, 18 nt, Artificial Sequence
  Synthetic
gauaaaauaaaaggagaa

SEQ ID NO: 186055 - RNA, 19 nt, Artificial Sequence
  Synthetic
ugauaaaauaaaaggagaa

SEQ ID NO: 186056 - RNA, 20 nt, Artificial Sequence
  Synthetic
uugauaaaauaaaaggagaa

SEQ ID NO: 186057 - RNA, 21 nt, Artificial Sequence
  Synthetic
cuugauaaaauaaaaggagaa

SEQ ID NO: 186058 - RNA, 22 nt, Artificial Sequence
  Synthetic
acuugauaaaauaaaaggagaa

SEQ ID NO: 186059 - RNA, 23 nt, Artificial Sequence
  Synthetic
aacuugauaaaauaaaaggagaa

SEQ ID NO: 186060 - RNA, 24 nt, Artificial Sequence
  Synthetic
gaacuugauaaaauaaaaggagaa

SEQ ID NO: 186061 - RNA, 18 nt, Artificial Sequence
  Synthetic
acuauuaagaaaggagaa

SEQ ID NO: 186062 - RNA, 19 nt, Artificial Sequence
  Synthetic
gacuauuaagaaaggagaa

SEQ ID NO: 186063 - RNA, 20 nt, Artificial Sequence
  Synthetic
agacuauuaagaaaggagaa

SEQ ID NO: 186064 - RNA, 21 nt, Artificial Sequence
  Synthetic
aagacuauuaagaaaggagaa

SEQ ID NO: 186065 - RNA, 22 nt, Artificial Sequence
  Synthetic
gaagacuauuaagaaaggagaa

SEQ ID NO: 186066 - RNA, 23 nt, Artificial Sequence
  Synthetic
ugaagacuauuaagaaaggagaa

SEQ ID NO: 186067 - RNA, 24 nt, Artificial Sequence
  Synthetic
uugaagacuauuaagaaaggagaa

SEQ ID NO: 186068 - RNA, 18 nt, Artificial Sequence
  Synthetic
cggguagccccaggagaa

SEQ ID NO: 186069 - RNA, 19 nt, Artificial Sequence
  Synthetic
acggguagccccaggagaa

SEQ ID NO: 186070 - RNA, 20 nt, Artificial Sequence
  Synthetic
aacggguagccccaggagaa

SEQ ID NO: 186071 - RNA, 21 nt, Artificial Sequence
  Synthetic
aaacggguagccccaggagaa

SEQ ID NO: 186072 - RNA, 22 nt, Artificial Sequence
  Synthetic
caaacggguagccccaggagaa

SEQ ID NO: 186073 - RNA, 23 nt, Artificial Sequence
  Synthetic
ucaaacggguagccccaggagaa

SEQ ID NO: 186074 - RNA, 24 nt, Artificial Sequence
  Synthetic
uucaaacggguagccccaggagaa

SEQ ID NO: 186075 - RNA, 18 nt, Artificial Sequence
  Synthetic
caugaauuuccaggagaa

SEQ ID NO: 186076 - RNA, 19 nt, Artificial Sequence
  Synthetic
ucaugaauuuccaggagaa

SEQ ID NO: 186077 - RNA, 20 nt, Artificial Sequence
  Synthetic
uucaugaauuuccaggagaa

SEQ ID NO: 186078 - RNA, 21 nt, Artificial Sequence
  Synthetic
cuucaugaauuuccaggagaa

SEQ ID NO: 186079 - RNA, 22 nt, Artificial Sequence
  Synthetic
ccuucaugaauuuccaggagaa

SEQ ID NO: 186080 - RNA, 23 nt, Artificial Sequence
  Synthetic
uccuucaugaauuuccaggagaa

SEQ ID NO: 186081 - RNA, 24 nt, Artificial Sequence
  Synthetic
auccuucaugaauuuccaggagaa

SEQ ID NO: 186082 - RNA, 18 nt, Artificial Sequence
  Synthetic
gauuggagagcaggagaa

SEQ ID NO: 186083 - RNA, 19 nt, Artificial Sequence
  Synthetic
agauuggagagcaggagaa

SEQ ID NO: 186084 - RNA, 20 nt, Artificial Sequence
  Synthetic
gagauuggagagcaggagaa

SEQ ID NO: 186085 - RNA, 21 nt, Artificial Sequence
  Synthetic
ggagauuggagagcaggagaa

SEQ ID NO: 186086 - RNA, 22 nt, Artificial Sequence
  Synthetic
aggagauuggagagcaggagaa

SEQ ID NO: 186087 - RNA, 23 nt, Artificial Sequence
  Synthetic
caggagauuggagagcaggagaa

SEQ ID NO: 186088 - RNA, 24 nt, Artificial Sequence
  Synthetic
gcaggagauuggagagcaggagaa

SEQ ID NO: 186089 - RNA, 18 nt, Artificial Sequence
  Synthetic
gaggcugaggcaggagaa

SEQ ID NO: 186090 - RNA, 19 nt, Artificial Sequence
  Synthetic
ggaggcugaggcaggagaa

SEQ ID NO: 186091 - RNA, 20 nt, Artificial Sequence
  Synthetic
gggaggcugaggcaggagaa

SEQ ID NO: 186092 - RNA, 18 nt, Artificial Sequence
  Synthetic
acuauuaauucaggagaa

SEQ ID NO: 186093 - RNA, 19 nt, Artificial Sequence
  Synthetic
aacuauuaauucaggagaa

SEQ ID NO: 186094 - RNA, 20 nt, Artificial Sequence
  Synthetic
caacuauuaauucaggagaa

SEQ ID NO: 186095 - RNA, 21 nt, Artificial Sequence
  Synthetic
gcaacuauuaauucaggagaa

SEQ ID NO: 186096 - RNA, 22 nt, Artificial Sequence
  Synthetic
agcaacuauuaauucaggagaa

SEQ ID NO: 186097 - RNA, 23 nt, Artificial Sequence
  Synthetic
uagcaacuauuaauucaggagaa

SEQ ID NO: 186098 - RNA, 24 nt, Artificial Sequence
  Synthetic
uuagcaacuauuaauucaggagaa

SEQ ID NO: 186099 - RNA, 18 nt, Artificial Sequence
  Synthetic
gaguaaauaagaggagaa

SEQ ID NO: 186100 - RNA, 19 nt, Artificial Sequence
  Synthetic
ugaguaaauaagaggagaa

SEQ ID NO: 186101 - RNA, 20 nt, Artificial Sequence
  Synthetic
gugaguaaauaagaggagaa

SEQ ID NO: 186102 - RNA, 21 nt, Artificial Sequence
  Synthetic
ggugaguaaauaagaggagaa

SEQ ID NO: 186103 - RNA, 22 nt, Artificial Sequence
  Synthetic
gggugaguaaauaagaggagaa

SEQ ID NO: 186104 - RNA, 23 nt, Artificial Sequence
  Synthetic
ugggugaguaaauaagaggagaa

SEQ ID NO: 186105 - RNA, 24 nt, Artificial Sequence
  Synthetic
cugggugaguaaauaagaggagaa

SEQ ID NO: 186106 - RNA, 18 nt, Artificial Sequence
  Synthetic
uuucauaacagaggagaa

SEQ ID NO: 186107 - RNA, 19 nt, Artificial Sequence
  Synthetic
guuucauaacagaggagaa

SEQ ID NO: 186108 - RNA, 20 nt, Artificial Sequence
  Synthetic
aguuucauaacagaggagaa

SEQ ID NO: 186109 - RNA, 21 nt, Artificial Sequence
  Synthetic
caguuucauaacagaggagaa

SEQ ID NO: 186110 - RNA, 22 nt, Artificial Sequence
  Synthetic
acaguuucauaacagaggagaa

SEQ ID NO: 186111 - RNA, 23 nt, Artificial Sequence
  Synthetic
uacaguuucauaacagaggagaa

SEQ ID NO: 186112 - RNA, 24 nt, Artificial Sequence
  Synthetic
uuacaguuucauaacagaggagaa

SEQ ID NO: 186113 - RNA, 18 nt, Artificial Sequence
  Synthetic
guuuuacacagaggagaa

SEQ ID NO: 186114 - RNA, 19 nt, Artificial Sequence
  Synthetic
gguuuuacacagaggagaa

SEQ ID NO: 186115 - RNA, 20 nt, Artificial Sequence
  Synthetic
agguuuuacacagaggagaa

SEQ ID NO: 186116 - RNA, 21 nt, Artificial Sequence
  Synthetic
aagguuuuacacagaggagaa

SEQ ID NO: 186117 - RNA, 22 nt, Artificial Sequence
  Synthetic
aaagguuuuacacagaggagaa

SEQ ID NO: 186118 - RNA, 23 nt, Artificial Sequence
  Synthetic
gaaagguuuuacacagaggagaa

SEQ ID NO: 186119 - RNA, 24 nt, Artificial Sequence
  Synthetic
ugaaagguuuuacacagaggagaa

SEQ ID NO: 186120 - RNA, 18 nt, Artificial Sequence
  Synthetic
gagacagagagaggagaa

SEQ ID NO: 186121 - RNA, 19 nt, Artificial Sequence
  Synthetic
agagacagagagaggagaa

SEQ ID NO: 186122 - RNA, 20 nt, Artificial Sequence
  Synthetic
gagagacagagagaggagaa

SEQ ID NO: 186123 - RNA, 21 nt, Artificial Sequence
  Synthetic
agagagacagagagaggagaa

SEQ ID NO: 186124 - RNA, 22 nt, Artificial Sequence
  Synthetic
uagagagacagagagaggagaa

SEQ ID NO: 186125 - RNA, 23 nt, Artificial Sequence
  Synthetic
uuagagagacagagagaggagaa

SEQ ID NO: 186126 - RNA, 24 nt, Artificial Sequence
  Synthetic
uuuagagagacagagagaggagaa

SEQ ID NO: 186127 - RNA, 18 nt, Artificial Sequence
  Synthetic
cuagaauuuggaggagaa

SEQ ID NO: 186128 - RNA, 19 nt, Artificial Sequence
  Synthetic
ucuagaauuuggaggagaa

SEQ ID NO: 186129 - RNA, 20 nt, Artificial Sequence
  Synthetic
gucuagaauuuggaggagaa

SEQ ID NO: 186130 - RNA, 21 nt, Artificial Sequence
  Synthetic
ugucuagaauuuggaggagaa

SEQ ID NO: 186131 - RNA, 22 nt, Artificial Sequence
  Synthetic
augucuagaauuuggaggagaa

SEQ ID NO: 186132 - RNA, 23 nt, Artificial Sequence
  Synthetic
aaugucuagaauuuggaggagaa

SEQ ID NO: 186133 - RNA, 24 nt, Artificial Sequence
  Synthetic
uaaugucuagaauuuggaggagaa

SEQ ID NO: 186134 - RNA, 18 nt, Artificial Sequence
  Synthetic
aauauuaccguaggagaa

SEQ ID NO: 186135 - RNA, 19 nt, Artificial Sequence
  Synthetic
gaauauuaccguaggagaa

SEQ ID NO: 186136 - RNA, 20 nt, Artificial Sequence
  Synthetic
agaauauuaccguaggagaa

SEQ ID NO: 186137 - RNA, 21 nt, Artificial Sequence
  Synthetic
cagaauauuaccguaggagaa

SEQ ID NO: 186138 - RNA, 22 nt, Artificial Sequence
  Synthetic
gcagaauauuaccguaggagaa

SEQ ID NO: 186139 - RNA, 23 nt, Artificial Sequence
  Synthetic
ggcagaauauuaccguaggagaa

SEQ ID NO: 186140 - RNA, 24 nt, Artificial Sequence
  Synthetic
gggcagaauauuaccguaggagaa

SEQ ID NO: 186141 - RNA, 18 nt, Artificial Sequence
  Synthetic
uaggaagucuuaggagaa

SEQ ID NO: 186142 - RNA, 19 nt, Artificial Sequence
  Synthetic
guaggaagucuuaggagaa

SEQ ID NO: 186143 - RNA, 20 nt, Artificial Sequence
  Synthetic
aguaggaagucuuaggagaa

SEQ ID NO: 186144 - RNA, 21 nt, Artificial Sequence
  Synthetic
gaguaggaagucuuaggagaa

SEQ ID NO: 186145 - RNA, 22 nt, Artificial Sequence
  Synthetic
agaguaggaagucuuaggagaa

SEQ ID NO: 186146 - RNA, 23 nt, Artificial Sequence
  Synthetic
aagaguaggaagucuuaggagaa

SEQ ID NO: 186147 - RNA, 24 nt, Artificial Sequence
  Synthetic
uaagaguaggaagucuuaggagaa

SEQ ID NO: 186148 - RNA, 18 nt, Artificial Sequence
  Synthetic
gggagaagccacggagaa

SEQ ID NO: 186149 - RNA, 19 nt, Artificial Sequence
  Synthetic
ugggagaagccacggagaa

SEQ ID NO: 186150 - RNA, 20 nt, Artificial Sequence
  Synthetic
uugggagaagccacggagaa

SEQ ID NO: 186151 - RNA, 21 nt, Artificial Sequence
  Synthetic
uuugggagaagccacggagaa

SEQ ID NO: 186152 - RNA, 22 nt, Artificial Sequence
  Synthetic
cuuugggagaagccacggagaa

SEQ ID NO: 186153 - RNA, 23 nt, Artificial Sequence
  Synthetic
ucuuugggagaagccacggagaa

SEQ ID NO: 186154 - RNA, 24 nt, Artificial Sequence
  Synthetic
cucuuugggagaagccacggagaa

SEQ ID NO: 186155 - RNA, 18 nt, Artificial Sequence
  Synthetic
ggaaggacagagggagaa

SEQ ID NO: 186156 - RNA, 19 nt, Artificial Sequence
  Synthetic
aggaaggacagagggagaa

SEQ ID NO: 186157 - RNA, 20 nt, Artificial Sequence
  Synthetic
caggaaggacagagggagaa

SEQ ID NO: 186158 - RNA, 21 nt, Artificial Sequence
  Synthetic
acaggaaggacagagggagaa

SEQ ID NO: 186159 - RNA, 22 nt, Artificial Sequence
  Synthetic
aacaggaaggacagagggagaa

SEQ ID NO: 186160 - RNA, 23 nt, Artificial Sequence
  Synthetic
gaacaggaaggacagagggagaa

SEQ ID NO: 186161 - RNA, 24 nt, Artificial Sequence
  Synthetic
agaacaggaaggacagagggagaa

SEQ ID NO: 186162 - RNA, 18 nt, Artificial Sequence
  Synthetic
gaaaggagagagggagaa

SEQ ID NO: 186163 - RNA, 19 nt, Artificial Sequence
  Synthetic
agaaaggagagagggagaa

SEQ ID NO: 186164 - RNA, 20 nt, Artificial Sequence
  Synthetic
uagaaaggagagagggagaa

SEQ ID NO: 186165 - RNA, 21 nt, Artificial Sequence
  Synthetic
auagaaaggagagagggagaa

SEQ ID NO: 186166 - RNA, 22 nt, Artificial Sequence
  Synthetic
gauagaaaggagagagggagaa

SEQ ID NO: 186167 - RNA, 23 nt, Artificial Sequence
  Synthetic
ggauagaaaggagagagggagaa

SEQ ID NO: 186168 - RNA, 24 nt, Artificial Sequence
  Synthetic
aggauagaaaggagagagggagaa

SEQ ID NO: 186169 - RNA, 18 nt, Artificial Sequence
  Synthetic
ggaaggagggagggagaa

SEQ ID NO: 186170 - RNA, 19 nt, Artificial Sequence
  Synthetic
gggaaggagggagggagaa

SEQ ID NO: 186171 - RNA, 20 nt, Artificial Sequence
  Synthetic
agggaaggagggagggagaa

SEQ ID NO: 186172 - RNA, 21 nt, Artificial Sequence
  Synthetic
gagggaaggagggagggagaa

SEQ ID NO: 186173 - RNA, 22 nt, Artificial Sequence
  Synthetic
ugagggaaggagggagggagaa

SEQ ID NO: 186174 - RNA, 23 nt, Artificial Sequence
  Synthetic
gugagggaaggagggagggagaa

SEQ ID NO: 186175 - RNA, 24 nt, Artificial Sequence
  Synthetic
agugagggaaggagggagggagaa

SEQ ID NO: 186176 - RNA, 18 nt, Artificial Sequence
  Synthetic
ucaguuuucuagggagaa

SEQ ID NO: 186177 - RNA, 19 nt, Artificial Sequence
  Synthetic
aucaguuuucuagggagaa

SEQ ID NO: 186178 - RNA, 20 nt, Artificial Sequence
  Synthetic
uaucaguuuucuagggagaa

SEQ ID NO: 186179 - RNA, 21 nt, Artificial Sequence
  Synthetic
uuaucaguuuucuagggagaa

SEQ ID NO: 186180 - RNA, 22 nt, Artificial Sequence
  Synthetic
uuuaucaguuuucuagggagaa

SEQ ID NO: 186181 - RNA, 23 nt, Artificial Sequence
  Synthetic
cuuuaucaguuuucuagggagaa

SEQ ID NO: 186182 - RNA, 24 nt, Artificial Sequence
  Synthetic
acuuuaucaguuuucuagggagaa

SEQ ID NO: 186183 - RNA, 18 nt, Artificial Sequence
  Synthetic
uacaacaucaggggagaa

SEQ ID NO: 186184 - RNA, 19 nt, Artificial Sequence
  Synthetic
uuacaacaucaggggagaa

SEQ ID NO: 186185 - RNA, 20 nt, Artificial Sequence
  Synthetic
auuacaacaucaggggagaa

SEQ ID NO: 186186 - RNA, 21 nt, Artificial Sequence
  Synthetic
uauuacaacaucaggggagaa

SEQ ID NO: 186187 - RNA, 22 nt, Artificial Sequence
  Synthetic
cuauuacaacaucaggggagaa

SEQ ID NO: 186188 - RNA, 23 nt, Artificial Sequence
  Synthetic
ucuauuacaacaucaggggagaa

SEQ ID NO: 186189 - RNA, 24 nt, Artificial Sequence
  Synthetic
uucuauuacaacaucaggggagaa

SEQ ID NO: 186190 - RNA, 18 nt, Artificial Sequence
  Synthetic
accugcuucaggggagaa

SEQ ID NO: 186191 - RNA, 19 nt, Artificial Sequence
  Synthetic
gaccugcuucaggggagaa

SEQ ID NO: 186192 - RNA, 20 nt, Artificial Sequence
  Synthetic
ugaccugcuucaggggagaa

SEQ ID NO: 186193 - RNA, 21 nt, Artificial Sequence
  Synthetic
augaccugcuucaggggagaa

SEQ ID NO: 186194 - RNA, 22 nt, Artificial Sequence
  Synthetic
caugaccugcuucaggggagaa

SEQ ID NO: 186195 - RNA, 23 nt, Artificial Sequence
  Synthetic
ucaugaccugcuucaggggagaa

SEQ ID NO: 186196 - RNA, 24 nt, Artificial Sequence
  Synthetic
cucaugaccugcuucaggggagaa

SEQ ID NO: 186197 - RNA, 18 nt, Artificial Sequence
  Synthetic
ucaaauacauggggagaa

SEQ ID NO: 186198 - RNA, 19 nt, Artificial Sequence
  Synthetic
uucaaauacauggggagaa

SEQ ID NO: 186199 - RNA, 20 nt, Artificial Sequence
  Synthetic
cuucaaauacauggggagaa

SEQ ID NO: 186200 - RNA, 21 nt, Artificial Sequence
  Synthetic
acuucaaauacauggggagaa

SEQ ID NO: 186201 - RNA, 22 nt, Artificial Sequence
  Synthetic
gacuucaaauacauggggagaa

SEQ ID NO: 186202 - RNA, 23 nt, Artificial Sequence
  Synthetic
ugacuucaaauacauggggagaa

SEQ ID NO: 186203 - RNA, 24 nt, Artificial Sequence
  Synthetic
gugacuucaaauacauggggagaa

SEQ ID NO: 186204 - RNA, 18 nt, Artificial Sequence
  Synthetic
ugaaagugauggggagaa

SEQ ID NO: 186205 - RNA, 19 nt, Artificial Sequence
  Synthetic
cugaaagugauggggagaa

SEQ ID NO: 186206 - RNA, 20 nt, Artificial Sequence
  Synthetic
ccugaaagugauggggagaa

SEQ ID NO: 186207 - RNA, 21 nt, Artificial Sequence
  Synthetic
accugaaagugauggggagaa

SEQ ID NO: 186208 - RNA, 22 nt, Artificial Sequence
  Synthetic
uaccugaaagugauggggagaa

SEQ ID NO: 186209 - RNA, 23 nt, Artificial Sequence
  Synthetic
guaccugaaagugauggggagaa

SEQ ID NO: 186210 - RNA, 24 nt, Artificial Sequence
  Synthetic
uguaccugaaagugauggggagaa

SEQ ID NO: 186211 - RNA, 18 nt, Artificial Sequence
  Synthetic
agaaggcaguggggagaa

SEQ ID NO: 186212 - RNA, 19 nt, Artificial Sequence
  Synthetic
gagaaggcaguggggagaa

SEQ ID NO: 186213 - RNA, 20 nt, Artificial Sequence
  Synthetic
cgagaaggcaguggggagaa

SEQ ID NO: 186214 - RNA, 21 nt, Artificial Sequence
  Synthetic
ccgagaaggcaguggggagaa

SEQ ID NO: 186215 - RNA, 22 nt, Artificial Sequence
  Synthetic
gccgagaaggcaguggggagaa

SEQ ID NO: 186216 - RNA, 23 nt, Artificial Sequence
  Synthetic
agccgagaaggcaguggggagaa

SEQ ID NO: 186217 - RNA, 24 nt, Artificial Sequence
  Synthetic
gagccgagaaggcaguggggagaa

SEQ ID NO: 186218 - RNA, 18 nt, Artificial Sequence
  Synthetic
uaaauuacacauggagaa

SEQ ID NO: 186219 - RNA, 19 nt, Artificial Sequence
  Synthetic
guaaauuacacauggagaa

SEQ ID NO: 186220 - RNA, 20 nt, Artificial Sequence
  Synthetic
aguaaauuacacauggagaa

SEQ ID NO: 186221 - RNA, 21 nt, Artificial Sequence
  Synthetic
gaguaaauuacacauggagaa

SEQ ID NO: 186222 - RNA, 22 nt, Artificial Sequence
  Synthetic
ggaguaaauuacacauggagaa

SEQ ID NO: 186223 - RNA, 23 nt, Artificial Sequence
  Synthetic
uggaguaaauuacacauggagaa

SEQ ID NO: 186224 - RNA, 24 nt, Artificial Sequence
  Synthetic
guggaguaaauuacacauggagaa

SEQ ID NO: 186225 - RNA, 18 nt, Artificial Sequence
  Synthetic
uaaucacaucauggagaa

SEQ ID NO: 186226 - RNA, 19 nt, Artificial Sequence
  Synthetic
auaaucacaucauggagaa

SEQ ID NO: 186227 - RNA, 20 nt, Artificial Sequence
  Synthetic
aauaaucacaucauggagaa

SEQ ID NO: 186228 - RNA, 21 nt, Artificial Sequence
  Synthetic
uaauaaucacaucauggagaa

SEQ ID NO: 186229 - RNA, 22 nt, Artificial Sequence
  Synthetic
auaauaaucacaucauggagaa

SEQ ID NO: 186230 - RNA, 23 nt, Artificial Sequence
  Synthetic
cauaauaaucacaucauggagaa

SEQ ID NO: 186231 - RNA, 24 nt, Artificial Sequence
  Synthetic
gcauaauaaucacaucauggagaa

SEQ ID NO: 186232 - RNA, 18 nt, Artificial Sequence
  Synthetic
ccauacucagauggagaa

SEQ ID NO: 186233 - RNA, 19 nt, Artificial Sequence
  Synthetic
cccauacucagauggagaa

SEQ ID NO: 186234 - RNA, 20 nt, Artificial Sequence
  Synthetic
acccauacucagauggagaa

SEQ ID NO: 186235 - RNA, 21 nt, Artificial Sequence
  Synthetic
uacccauacucagauggagaa

SEQ ID NO: 186236 - RNA, 22 nt, Artificial Sequence
  Synthetic
auacccauacucagauggagaa

SEQ ID NO: 186237 - RNA, 23 nt, Artificial Sequence
  Synthetic
uauacccauacucagauggagaa

SEQ ID NO: 186238 - RNA, 24 nt, Artificial Sequence
  Synthetic
uuauacccauacucagauggagaa

SEQ ID NO: 186239 - RNA, 18 nt, Artificial Sequence
  Synthetic
aaaaaaaaaacuggagaa

SEQ ID NO: 186240 - RNA, 19 nt, Artificial Sequence
  Synthetic
aaaaaaaaaaacuggagaa

SEQ ID NO: 186241 - RNA, 20 nt, Artificial Sequence
  Synthetic
aaaaaaaaaaaacuggagaa

SEQ ID NO: 186242 - RNA, 21 nt, Artificial Sequence
  Synthetic
aaaaaaaaaaaaacuggagaa

SEQ ID NO: 186243 - RNA, 22 nt, Artificial Sequence
  Synthetic
aaaaaaaaaaaaaacuggagaa

SEQ ID NO: 186244 - RNA, 23 nt, Artificial Sequence
  Synthetic
aaaaaaaaaaaaaaacuggagaa

SEQ ID NO: 186245 - RNA, 24 nt, Artificial Sequence
  Synthetic
aaaaaaaaaaaaaaaacuggagaa

SEQ ID NO: 186246 - RNA, 18 nt, Artificial Sequence
  Synthetic
uaauauugagcuggagaa

SEQ ID NO: 186247 - RNA, 19 nt, Artificial Sequence
  Synthetic
auaauauugagcuggagaa

SEQ ID NO: 186248 - RNA, 20 nt, Artificial Sequence
  Synthetic
gauaauauugagcuggagaa

SEQ ID NO: 186249 - RNA, 21 nt, Artificial Sequence
  Synthetic
agauaauauugagcuggagaa

SEQ ID NO: 186250 - RNA, 22 nt, Artificial Sequence
  Synthetic
uagauaauauugagcuggagaa

SEQ ID NO: 186251 - RNA, 23 nt, Artificial Sequence
  Synthetic
uuagauaauauugagcuggagaa

SEQ ID NO: 186252 - RNA, 24 nt, Artificial Sequence
  Synthetic
auuagauaauauugagcuggagaa

SEQ ID NO: 186253 - RNA, 18 nt, Artificial Sequence
  Synthetic
guggugcaugcuggagaa

SEQ ID NO: 186254 - RNA, 19 nt, Artificial Sequence
  Synthetic
gguggugcaugcuggagaa

SEQ ID NO: 186255 - RNA, 20 nt, Artificial Sequence
  Synthetic
agguggugcaugcuggagaa

SEQ ID NO: 186256 - RNA, 21 nt, Artificial Sequence
  Synthetic
cagguggugcaugcuggagaa

SEQ ID NO: 186257 - RNA, 22 nt, Artificial Sequence
  Synthetic
ucagguggugcaugcuggagaa

SEQ ID NO: 186258 - RNA, 23 nt, Artificial Sequence
  Synthetic
uucagguggugcaugcuggagaa

SEQ ID NO: 186259 - RNA, 24 nt, Artificial Sequence
  Synthetic
cuucagguggugcaugcuggagaa

SEQ ID NO: 186260 - RNA, 18 nt, Artificial Sequence
  Synthetic
ucuguggcaucuggagaa

SEQ ID NO: 186261 - RNA, 19 nt, Artificial Sequence
  Synthetic
cucuguggcaucuggagaa

SEQ ID NO: 186262 - RNA, 20 nt, Artificial Sequence
  Synthetic
gcucuguggcaucuggagaa

SEQ ID NO: 186263 - RNA, 21 nt, Artificial Sequence
  Synthetic
ugcucuguggcaucuggagaa

SEQ ID NO: 186264 - RNA, 22 nt, Artificial Sequence
  Synthetic
augcucuguggcaucuggagaa

SEQ ID NO: 186265 - RNA, 23 nt, Artificial Sequence
  Synthetic
gaugcucuguggcaucuggagaa

SEQ ID NO: 186266 - RNA, 24 nt, Artificial Sequence
  Synthetic
ugaugcucuguggcaucuggagaa

SEQ ID NO: 186267 - RNA, 18 nt, Artificial Sequence
  Synthetic
gaucugaaaaguggagaa

SEQ ID NO: 186268 - RNA, 19 nt, Artificial Sequence
  Synthetic
ggaucugaaaaguggagaa

SEQ ID NO: 186269 - RNA, 20 nt, Artificial Sequence
  Synthetic
aggaucugaaaaguggagaa

SEQ ID NO: 186270 - RNA, 21 nt, Artificial Sequence
  Synthetic
gaggaucugaaaaguggagaa

SEQ ID NO: 186271 - RNA, 22 nt, Artificial Sequence
  Synthetic
cgaggaucugaaaaguggagaa

SEQ ID NO: 186272 - RNA, 23 nt, Artificial Sequence
  Synthetic
gcgaggaucugaaaaguggagaa

SEQ ID NO: 186273 - RNA, 24 nt, Artificial Sequence
  Synthetic
ugcgaggaucugaaaaguggagaa

SEQ ID NO: 186274 - RNA, 18 nt, Artificial Sequence
  Synthetic
uagccacggaguggagaa

SEQ ID NO: 186275 - RNA, 19 nt, Artificial Sequence
  Synthetic
cuagccacggaguggagaa

SEQ ID NO: 186276 - RNA, 20 nt, Artificial Sequence
  Synthetic
ucuagccacggaguggagaa

SEQ ID NO: 186277 - RNA, 21 nt, Artificial Sequence
  Synthetic
uucuagccacggaguggagaa

SEQ ID NO: 186278 - RNA, 22 nt, Artificial Sequence
  Synthetic
guucuagccacggaguggagaa

SEQ ID NO: 186279 - RNA, 23 nt, Artificial Sequence
  Synthetic
uguucuagccacggaguggagaa

SEQ ID NO: 186280 - RNA, 24 nt, Artificial Sequence
  Synthetic
uuguucuagccacggaguggagaa

SEQ ID NO: 186281 - RNA, 18 nt, Artificial Sequence
  Synthetic
uagaucaccuguggagaa

SEQ ID NO: 186282 - RNA, 19 nt, Artificial Sequence
  Synthetic
auagaucaccuguggagaa

SEQ ID NO: 186283 - RNA, 20 nt, Artificial Sequence
  Synthetic
uauagaucaccuguggagaa

SEQ ID NO: 186284 - RNA, 21 nt, Artificial Sequence
  Synthetic
cuauagaucaccuguggagaa

SEQ ID NO: 186285 - RNA, 22 nt, Artificial Sequence
  Synthetic
gcuauagaucaccuguggagaa

SEQ ID NO: 186286 - RNA, 23 nt, Artificial Sequence
  Synthetic
agcuauagaucaccuguggagaa

SEQ ID NO: 186287 - RNA, 24 nt, Artificial Sequence
  Synthetic
aagcuauagaucaccuguggagaa

SEQ ID NO: 186288 - RNA, 18 nt, Artificial Sequence
  Synthetic
gucuuugaaaaaugagaa

SEQ ID NO: 186289 - RNA, 19 nt, Artificial Sequence
  Synthetic
agucuuugaaaaaugagaa

SEQ ID NO: 186290 - RNA, 20 nt, Artificial Sequence
  Synthetic
aagucuuugaaaaaugagaa

SEQ ID NO: 186291 - RNA, 21 nt, Artificial Sequence
  Synthetic
aaagucuuugaaaaaugagaa

SEQ ID NO: 186292 - RNA, 22 nt, Artificial Sequence
  Synthetic
aaaagucuuugaaaaaugagaa

SEQ ID NO: 186293 - RNA, 23 nt, Artificial Sequence
  Synthetic
aaaaagucuuugaaaaaugagaa

SEQ ID NO: 186294 - RNA, 24 nt, Artificial Sequence
  Synthetic
aaaaaagucuuugaaaaaugagaa

SEQ ID NO: 186295 - RNA, 18 nt, Artificial Sequence
  Synthetic
ccuucacuaaaaugagaa

SEQ ID NO: 186296 - RNA, 19 nt, Artificial Sequence
  Synthetic
accuucacuaaaaugagaa

SEQ ID NO: 186297 - RNA, 20 nt, Artificial Sequence
  Synthetic
aaccuucacuaaaaugagaa

SEQ ID NO: 186298 - RNA, 21 nt, Artificial Sequence
  Synthetic
uaaccuucacuaaaaugagaa

SEQ ID NO: 186299 - RNA, 22 nt, Artificial Sequence
  Synthetic
uuaaccuucacuaaaaugagaa

SEQ ID NO: 186300 - RNA, 23 nt, Artificial Sequence
  Synthetic
uuuaaccuucacuaaaaugagaa

SEQ ID NO: 186301 - RNA, 24 nt, Artificial Sequence
  Synthetic
cuuuaaccuucacuaaaaugagaa

SEQ ID NO: 186302 - RNA, 18 nt, Artificial Sequence
  Synthetic
auaaaauggaaaugagaa

SEQ ID NO: 186303 - RNA, 19 nt, Artificial Sequence
  Synthetic
uauaaaauggaaaugagaa

SEQ ID NO: 186304 - RNA, 20 nt, Artificial Sequence
  Synthetic
guauaaaauggaaaugagaa

SEQ ID NO: 186305 - RNA, 21 nt, Artificial Sequence
  Synthetic
aguauaaaauggaaaugagaa

SEQ ID NO: 186306 - RNA, 22 nt, Artificial Sequence
  Synthetic
caguauaaaauggaaaugagaa

SEQ ID NO: 186307 - RNA, 23 nt, Artificial Sequence
  Synthetic
ccaguauaaaauggaaaugagaa

SEQ ID NO: 186308 - RNA, 24 nt, Artificial Sequence
  Synthetic
gccaguauaaaauggaaaugagaa

SEQ ID NO: 186309 - RNA, 18 nt, Artificial Sequence
  Synthetic
cccaaugcuaaaugagaa

SEQ ID NO: 186310 - RNA, 19 nt, Artificial Sequence
  Synthetic
gcccaaugcuaaaugagaa

SEQ ID NO: 186311 - RNA, 20 nt, Artificial Sequence
  Synthetic
ugcccaaugcuaaaugagaa

SEQ ID NO: 186312 - RNA, 21 nt, Artificial Sequence
  Synthetic
augcccaaugcuaaaugagaa

SEQ ID NO: 186313 - RNA, 22 nt, Artificial Sequence
  Synthetic
gaugcccaaugcuaaaugagaa

SEQ ID NO: 186314 - RNA, 23 nt, Artificial Sequence
  Synthetic
ggaugcccaaugcuaaaugagaa

SEQ ID NO: 186315 - RNA, 24 nt, Artificial Sequence
  Synthetic
aggaugcccaaugcuaaaugagaa

SEQ ID NO: 186316 - RNA, 18 nt, Artificial Sequence
  Synthetic
ucacuuucccaaugagaa

SEQ ID NO: 186317 - RNA, 19 nt, Artificial Sequence
  Synthetic
uucacuuucccaaugagaa

SEQ ID NO: 186318 - RNA, 20 nt, Artificial Sequence
  Synthetic
cuucacuuucccaaugagaa

SEQ ID NO: 186319 - RNA, 21 nt, Artificial Sequence
  Synthetic
gcuucacuuucccaaugagaa

SEQ ID NO: 186320 - RNA, 22 nt, Artificial Sequence
  Synthetic
agcuucacuuucccaaugagaa

SEQ ID NO: 186321 - RNA, 23 nt, Artificial Sequence
  Synthetic
gagcuucacuuucccaaugagaa

SEQ ID NO: 186322 - RNA, 24 nt, Artificial Sequence
  Synthetic
agagcuucacuuucccaaugagaa

SEQ ID NO: 186323 - RNA, 18 nt, Artificial Sequence
  Synthetic
ugagaaccagaaugagaa

SEQ ID NO: 186324 - RNA, 19 nt, Artificial Sequence
  Synthetic
augagaaccagaaugagaa

SEQ ID NO: 186325 - RNA, 20 nt, Artificial Sequence
  Synthetic
caugagaaccagaaugagaa

SEQ ID NO: 186326 - RNA, 21 nt, Artificial Sequence
  Synthetic
gcaugagaaccagaaugagaa

SEQ ID NO: 186327 - RNA, 22 nt, Artificial Sequence
  Synthetic
agcaugagaaccagaaugagaa

SEQ ID NO: 186328 - RNA, 23 nt, Artificial Sequence
  Synthetic
uagcaugagaaccagaaugagaa

SEQ ID NO: 186329 - RNA, 24 nt, Artificial Sequence
  Synthetic
auagcaugagaaccagaaugagaa

SEQ ID NO: 186330 - RNA, 18 nt, Artificial Sequence
  Synthetic
uugucccaggaaugagaa

SEQ ID NO: 186331 - RNA, 19 nt, Artificial Sequence
  Synthetic
guugucccaggaaugagaa

SEQ ID NO: 186332 - RNA, 20 nt, Artificial Sequence
  Synthetic
uguugucccaggaaugagaa

SEQ ID NO: 186333 - RNA, 21 nt, Artificial Sequence
  Synthetic
uuguugucccaggaaugagaa

SEQ ID NO: 186334 - RNA, 22 nt, Artificial Sequence
  Synthetic
auuguugucccaggaaugagaa

SEQ ID NO: 186335 - RNA, 23 nt, Artificial Sequence
  Synthetic
cauuguugucccaggaaugagaa

SEQ ID NO: 186336 - RNA, 24 nt, Artificial Sequence
  Synthetic
acauuguugucccaggaaugagaa

SEQ ID NO: 186337 - RNA, 18 nt, Artificial Sequence
  Synthetic
aaaguucguagaugagaa

SEQ ID NO: 186338 - RNA, 19 nt, Artificial Sequence
  Synthetic
uaaaguucguagaugagaa

SEQ ID NO: 186339 - RNA, 20 nt, Artificial Sequence
  Synthetic
guaaaguucguagaugagaa

SEQ ID NO: 186340 - RNA, 21 nt, Artificial Sequence
  Synthetic
aguaaaguucguagaugagaa

SEQ ID NO: 186341 - RNA, 22 nt, Artificial Sequence
  Synthetic
gaguaaaguucguagaugagaa

SEQ ID NO: 186342 - RNA, 23 nt, Artificial Sequence
  Synthetic
agaguaaaguucguagaugagaa

SEQ ID NO: 186343 - RNA, 24 nt, Artificial Sequence
  Synthetic
cagaguaaaguucguagaugagaa

SEQ ID NO: 186344 - RNA, 18 nt, Artificial Sequence
  Synthetic
uuacgcuuuagaugagaa

SEQ ID NO: 186345 - RNA, 19 nt, Artificial Sequence
  Synthetic
auuacgcuuuagaugagaa

SEQ ID NO: 186346 - RNA, 20 nt, Artificial Sequence
  Synthetic
cauuacgcuuuagaugagaa

SEQ ID NO: 186347 - RNA, 21 nt, Artificial Sequence
  Synthetic
acauuacgcuuuagaugagaa

SEQ ID NO: 186348 - RNA, 22 nt, Artificial Sequence
  Synthetic
gacauuacgcuuuagaugagaa

SEQ ID NO: 186349 - RNA, 23 nt, Artificial Sequence
  Synthetic
agacauuacgcuuuagaugagaa

SEQ ID NO: 186350 - RNA, 24 nt, Artificial Sequence
  Synthetic
cagacauuacgcuuuagaugagaa

SEQ ID NO: 186351 - RNA, 18 nt, Artificial Sequence
  Synthetic
auuacuucuauaugagaa

SEQ ID NO: 186352 - RNA, 19 nt, Artificial Sequence
  Synthetic
uauuacuucuauaugagaa

SEQ ID NO: 186353 - RNA, 20 nt, Artificial Sequence
  Synthetic
cuauuacuucuauaugagaa

SEQ ID NO: 186354 - RNA, 21 nt, Artificial Sequence
  Synthetic
acuauuacuucuauaugagaa

SEQ ID NO: 186355 - RNA, 22 nt, Artificial Sequence
  Synthetic
cacuauuacuucuauaugagaa

SEQ ID NO: 186356 - RNA, 23 nt, Artificial Sequence
  Synthetic
gcacuauuacuucuauaugagaa

SEQ ID NO: 186357 - RNA, 24 nt, Artificial Sequence
  Synthetic
ggcacuauuacuucuauaugagaa

SEQ ID NO: 186358 - RNA, 18 nt, Artificial Sequence
  Synthetic
uaggauacaaacugagaa

SEQ ID NO: 186359 - RNA, 19 nt, Artificial Sequence
  Synthetic
auaggauacaaacugagaa

SEQ ID NO: 186360 - RNA, 20 nt, Artificial Sequence
  Synthetic
gauaggauacaaacugagaa

SEQ ID NO: 186361 - RNA, 21 nt, Artificial Sequence
  Synthetic
ggauaggauacaaacugagaa

SEQ ID NO: 186362 - RNA, 22 nt, Artificial Sequence
  Synthetic
gggauaggauacaaacugagaa

SEQ ID NO: 186363 - RNA, 23 nt, Artificial Sequence
  Synthetic
agggauaggauacaaacugagaa

SEQ ID NO: 186364 - RNA, 24 nt, Artificial Sequence
  Synthetic
cagggauaggauacaaacugagaa

SEQ ID NO: 186365 - RNA, 18 nt, Artificial Sequence
  Synthetic
uggugcgagaccugagaa

SEQ ID NO: 186366 - RNA, 19 nt, Artificial Sequence
  Synthetic
cuggugcgagaccugagaa

SEQ ID NO: 186367 - RNA, 20 nt, Artificial Sequence
  Synthetic
ucuggugcgagaccugagaa

SEQ ID NO: 186368 - RNA, 21 nt, Artificial Sequence
  Synthetic
uucuggugcgagaccugagaa

SEQ ID NO: 186369 - RNA, 22 nt, Artificial Sequence
  Synthetic
uuucuggugcgagaccugagaa

SEQ ID NO: 186370 - RNA, 23 nt, Artificial Sequence
  Synthetic
uuuucuggugcgagaccugagaa

SEQ ID NO: 186371 - RNA, 24 nt, Artificial Sequence
  Synthetic
uuuuucuggugcgagaccugagaa

SEQ ID NO: 186372 - RNA, 18 nt, Artificial Sequence
  Synthetic
gaacgcagacccugagaa

SEQ ID NO: 186373 - RNA, 19 nt, Artificial Sequence
  Synthetic
ugaacgcagacccugagaa

SEQ ID NO: 186374 - RNA, 20 nt, Artificial Sequence
  Synthetic
augaacgcagacccugagaa

SEQ ID NO: 186375 - RNA, 21 nt, Artificial Sequence
  Synthetic
caugaacgcagacccugagaa

SEQ ID NO: 186376 - RNA, 22 nt, Artificial Sequence
  Synthetic
ccaugaacgcagacccugagaa

SEQ ID NO: 186377 - RNA, 23 nt, Artificial Sequence
  Synthetic
uccaugaacgcagacccugagaa

SEQ ID NO: 186378 - RNA, 24 nt, Artificial Sequence
  Synthetic
uuccaugaacgcagacccugagaa

SEQ ID NO: 186379 - RNA, 18 nt, Artificial Sequence
  Synthetic
uaggaaugggccugagaa

SEQ ID NO: 186380 - RNA, 19 nt, Artificial Sequence
  Synthetic
uuaggaaugggccugagaa

SEQ ID NO: 186381 - RNA, 20 nt, Artificial Sequence
  Synthetic
cuuaggaaugggccugagaa

SEQ ID NO: 186382 - RNA, 21 nt, Artificial Sequence
  Synthetic
ccuuaggaaugggccugagaa

SEQ ID NO: 186383 - RNA, 22 nt, Artificial Sequence
  Synthetic
gccuuaggaaugggccugagaa

SEQ ID NO: 186384 - RNA, 23 nt, Artificial Sequence
  Synthetic
ugccuuaggaaugggccugagaa

SEQ ID NO: 186385 - RNA, 24 nt, Artificial Sequence
  Synthetic
gugccuuaggaaugggccugagaa

SEQ ID NO: 186386 - RNA, 18 nt, Artificial Sequence
  Synthetic
uucucuggaagcugagaa

SEQ ID NO: 186387 - RNA, 19 nt, Artificial Sequence
  Synthetic
uuucucuggaagcugagaa

SEQ ID NO: 186388 - RNA, 20 nt, Artificial Sequence
  Synthetic
uuuucucuggaagcugagaa

SEQ ID NO: 186389 - RNA, 21 nt, Artificial Sequence
  Synthetic
guuuucucuggaagcugagaa

SEQ ID NO: 186390 - RNA, 22 nt, Artificial Sequence
  Synthetic
aguuuucucuggaagcugagaa

SEQ ID NO: 186391 - RNA, 23 nt, Artificial Sequence
  Synthetic
gaguuuucucuggaagcugagaa

SEQ ID NO: 186392 - RNA, 24 nt, Artificial Sequence
  Synthetic
ugaguuuucucuggaagcugagaa

SEQ ID NO: 186393 - RNA, 18 nt, Artificial Sequence
  Synthetic
ugcucauggagcugagaa

SEQ ID NO: 186394 - RNA, 19 nt, Artificial Sequence
  Synthetic
augcucauggagcugagaa

SEQ ID NO: 186395 - RNA, 20 nt, Artificial Sequence
  Synthetic
aaugcucauggagcugagaa

SEQ ID NO: 186396 - RNA, 21 nt, Artificial Sequence
  Synthetic
aaaugcucauggagcugagaa

SEQ ID NO: 186397 - RNA, 22 nt, Artificial Sequence
  Synthetic
aaaaugcucauggagcugagaa

SEQ ID NO: 186398 - RNA, 23 nt, Artificial Sequence
  Synthetic
aaaaaugcucauggagcugagaa

SEQ ID NO: 186399 - RNA, 24 nt, Artificial Sequence
  Synthetic
caaaaaugcucauggagcugagaa

SEQ ID NO: 186400 - RNA, 18 nt, Artificial Sequence
  Synthetic
caaggauacaucugagaa

SEQ ID NO: 186401 - RNA, 19 nt, Artificial Sequence
  Synthetic
ccaaggauacaucugagaa

SEQ ID NO: 186402 - RNA, 20 nt, Artificial Sequence
  Synthetic
uccaaggauacaucugagaa

SEQ ID NO: 186403 - RNA, 21 nt, Artificial Sequence
  Synthetic
guccaaggauacaucugagaa

SEQ ID NO: 186404 - RNA, 22 nt, Artificial Sequence
  Synthetic
uguccaaggauacaucugagaa

SEQ ID NO: 186405 - RNA, 23 nt, Artificial Sequence
  Synthetic
uuguccaaggauacaucugagaa

SEQ ID NO: 186406 - RNA, 24 nt, Artificial Sequence
  Synthetic
uuuguccaaggauacaucugagaa

SEQ ID NO: 186407 - RNA, 18 nt, Artificial Sequence
  Synthetic
gcuuaggaaaugugagaa

SEQ ID NO: 186408 - RNA, 19 nt, Artificial Sequence
  Synthetic
ugcuuaggaaaugugagaa

SEQ ID NO: 186409 - RNA, 20 nt, Artificial Sequence
  Synthetic
cugcuuaggaaaugugagaa

SEQ ID NO: 186410 - RNA, 21 nt, Artificial Sequence
  Synthetic
acugcuuaggaaaugugagaa

SEQ ID NO: 186411 - RNA, 22 nt, Artificial Sequence
  Synthetic
uacugcuuaggaaaugugagaa

SEQ ID NO: 186412 - RNA, 23 nt, Artificial Sequence
  Synthetic
cuacugcuuaggaaaugugagaa

SEQ ID NO: 186413 - RNA, 24 nt, Artificial Sequence
  Synthetic
gcuacugcuuaggaaaugugagaa

SEQ ID NO: 186414 - RNA, 18 nt, Artificial Sequence
  Synthetic
cuaguggagcugugagaa

SEQ ID NO: 186415 - RNA, 19 nt, Artificial Sequence
  Synthetic
ccuaguggagcugugagaa

SEQ ID NO: 186416 - RNA, 20 nt, Artificial Sequence
  Synthetic
gccuaguggagcugugagaa

SEQ ID NO: 186417 - RNA, 21 nt, Artificial Sequence
  Synthetic
ugccuaguggagcugugagaa

SEQ ID NO: 186418 - RNA, 22 nt, Artificial Sequence
  Synthetic
cugccuaguggagcugugagaa

SEQ ID NO: 186419 - RNA, 23 nt, Artificial Sequence
  Synthetic
acugccuaguggagcugugagaa

SEQ ID NO: 186420 - RNA, 24 nt, Artificial Sequence
  Synthetic
cacugccuaguggagcugugagaa

SEQ ID NO: 186421 - RNA, 18 nt, Artificial Sequence
  Synthetic
cucgcugaccauugagaa

SEQ ID NO: 186422 - RNA, 19 nt, Artificial Sequence
  Synthetic
ccucgcugaccauugagaa

SEQ ID NO: 186423 - RNA, 20 nt, Artificial Sequence
  Synthetic
gccucgcugaccauugagaa

SEQ ID NO: 186424 - RNA, 21 nt, Artificial Sequence
  Synthetic
agccucgcugaccauugagaa

SEQ ID NO: 186425 - RNA, 22 nt, Artificial Sequence
  Synthetic
aagccucgcugaccauugagaa

SEQ ID NO: 186426 - RNA, 23 nt, Artificial Sequence
  Synthetic
caagccucgcugaccauugagaa

SEQ ID NO: 186427 - RNA, 24 nt, Artificial Sequence
  Synthetic
ccaagccucgcugaccauugagaa

SEQ ID NO: 186428 - RNA, 18 nt, Artificial Sequence
  Synthetic
uucaggcaugauugagaa

SEQ ID NO: 186429 - RNA, 19 nt, Artificial Sequence
  Synthetic
guucaggcaugauugagaa

SEQ ID NO: 186430 - RNA, 20 nt, Artificial Sequence
  Synthetic
cguucaggcaugauugagaa

SEQ ID NO: 186431 - RNA, 21 nt, Artificial Sequence
  Synthetic
acguucaggcaugauugagaa

SEQ ID NO: 186432 - RNA, 22 nt, Artificial Sequence
  Synthetic
uacguucaggcaugauugagaa

SEQ ID NO: 186433 - RNA, 23 nt, Artificial Sequence
  Synthetic
guacguucaggcaugauugagaa

SEQ ID NO: 186434 - RNA, 24 nt, Artificial Sequence
  Synthetic
aguacguucaggcaugauugagaa

SEQ ID NO: 186435 - RNA, 18 nt, Artificial Sequence
  Synthetic
uagaguggguauugagaa

SEQ ID NO: 186436 - RNA, 19 nt, Artificial Sequence
  Synthetic
cuagaguggguauugagaa

SEQ ID NO: 186437 - RNA, 20 nt, Artificial Sequence
  Synthetic
gcuagaguggguauugagaa

SEQ ID NO: 186438 - RNA, 21 nt, Artificial Sequence
  Synthetic
agcuagaguggguauugagaa

SEQ ID NO: 186439 - RNA, 22 nt, Artificial Sequence
  Synthetic
aagcuagaguggguauugagaa

SEQ ID NO: 186440 - RNA, 23 nt, Artificial Sequence
  Synthetic
aaagcuagaguggguauugagaa

SEQ ID NO: 186441 - RNA, 24 nt, Artificial Sequence
  Synthetic
aaaagcuagaguggguauugagaa

SEQ ID NO: 186442 - RNA, 18 nt, Artificial Sequence
  Synthetic
augaaaggaauuugagaa

SEQ ID NO: 186443 - RNA, 19 nt, Artificial Sequence
  Synthetic
caugaaaggaauuugagaa

SEQ ID NO: 186444 - RNA, 20 nt, Artificial Sequence
  Synthetic
acaugaaaggaauuugagaa

SEQ ID NO: 186445 - RNA, 21 nt, Artificial Sequence
  Synthetic
gacaugaaaggaauuugagaa

SEQ ID NO: 186446 - RNA, 22 nt, Artificial Sequence
  Synthetic
agacaugaaaggaauuugagaa

SEQ ID NO: 186447 - RNA, 23 nt, Artificial Sequence
  Synthetic
aagacaugaaaggaauuugagaa

SEQ ID NO: 186448 - RNA, 24 nt, Artificial Sequence
  Synthetic
gaagacaugaaaggaauuugagaa

SEQ ID NO: 186449 - RNA, 18 nt, Artificial Sequence
  Synthetic
uuguuuucucuuugagaa

SEQ ID NO: 186450 - RNA, 19 nt, Artificial Sequence
  Synthetic
uuuguuuucucuuugagaa

SEQ ID NO: 186451 - RNA, 20 nt, Artificial Sequence
  Synthetic
guuuguuuucucuuugagaa

SEQ ID NO: 186452 - RNA, 21 nt, Artificial Sequence
  Synthetic
cguuuguuuucucuuugagaa

SEQ ID NO: 186453 - RNA, 22 nt, Artificial Sequence
  Synthetic
ucguuuguuuucucuuugagaa

SEQ ID NO: 186454 - RNA, 23 nt, Artificial Sequence
  Synthetic
cucguuuguuuucucuuugagaa

SEQ ID NO: 186455 - RNA, 24 nt, Artificial Sequence
  Synthetic
acucguuuguuuucucuuugagaa

SEQ ID NO: 186456 - RNA, 18 nt, Artificial Sequence
  Synthetic
ucugaaaaguuuugagaa

SEQ ID NO: 186457 - RNA, 19 nt, Artificial Sequence
  Synthetic
uucugaaaaguuuugagaa

SEQ ID NO: 186458 - RNA, 20 nt, Artificial Sequence
  Synthetic
auucugaaaaguuuugagaa

SEQ ID NO: 186459 - RNA, 21 nt, Artificial Sequence
  Synthetic
uauucugaaaaguuuugagaa

SEQ ID NO: 186460 - RNA, 22 nt, Artificial Sequence
  Synthetic
guauucugaaaaguuuugagaa

SEQ ID NO: 186461 - RNA, 23 nt, Artificial Sequence
  Synthetic
uguauucugaaaaguuuugagaa

SEQ ID NO: 186462 - RNA, 24 nt, Artificial Sequence
  Synthetic
uuguauucugaaaaguuuugagaa

SEQ ID NO: 186463 - RNA, 18 nt, Artificial Sequence
  Synthetic
cucuuccaaaaaauagaa

SEQ ID NO: 186464 - RNA, 19 nt, Artificial Sequence
  Synthetic
acucuuccaaaaaauagaa

SEQ ID NO: 186465 - RNA, 20 nt, Artificial Sequence
  Synthetic
aacucuuccaaaaaauagaa

SEQ ID NO: 186466 - RNA, 21 nt, Artificial Sequence
  Synthetic
caacucuuccaaaaaauagaa

SEQ ID NO: 186467 - RNA, 22 nt, Artificial Sequence
  Synthetic
acaacucuuccaaaaaauagaa

SEQ ID NO: 186468 - RNA, 23 nt, Artificial Sequence
  Synthetic
aacaacucuuccaaaaaauagaa

SEQ ID NO: 186469 - RNA, 24 nt, Artificial Sequence
  Synthetic
aaacaacucuuccaaaaaauagaa

SEQ ID NO: 186470 - RNA, 18 nt, Artificial Sequence
  Synthetic
gaaauuaguaaaauagaa

SEQ ID NO: 186471 - RNA, 19 nt, Artificial Sequence
  Synthetic
ugaaauuaguaaaauagaa

SEQ ID NO: 186472 - RNA, 20 nt, Artificial Sequence
  Synthetic
augaaauuaguaaaauagaa

SEQ ID NO: 186473 - RNA, 21 nt, Artificial Sequence
  Synthetic
aaugaaauuaguaaaauagaa

SEQ ID NO: 186474 - RNA, 22 nt, Artificial Sequence
  Synthetic
gaaugaaauuaguaaaauagaa

SEQ ID NO: 186475 - RNA, 23 nt, Artificial Sequence
  Synthetic
ugaaugaaauuaguaaaauagaa

SEQ ID NO: 186476 - RNA, 24 nt, Artificial Sequence
  Synthetic
augaaugaaauuaguaaaauagaa

SEQ ID NO: 186477 - RNA, 18 nt, Artificial Sequence
  Synthetic
uuuccuuuuaaaauagaa

SEQ ID NO: 186478 - RNA, 19 nt, Artificial Sequence
  Synthetic
cuuuccuuuuaaaauagaa

SEQ ID NO: 186479 - RNA, 20 nt, Artificial Sequence
  Synthetic
acuuuccuuuuaaaauagaa

SEQ ID NO: 186480 - RNA, 21 nt, Artificial Sequence
  Synthetic
aacuuuccuuuuaaaauagaa

SEQ ID NO: 186481 - RNA, 22 nt, Artificial Sequence
  Synthetic
aaacuuuccuuuuaaaauagaa

SEQ ID NO: 186482 - RNA, 23 nt, Artificial Sequence
  Synthetic
uaaacuuuccuuuuaaaauagaa

SEQ ID NO: 186483 - RNA, 24 nt, Artificial Sequence
  Synthetic
auaaacuuuccuuuuaaaauagaa

SEQ ID NO: 186484 - RNA, 18 nt, Artificial Sequence
  Synthetic
uagaucaaugaaauagaa

SEQ ID NO: 186485 - RNA, 19 nt, Artificial Sequence
  Synthetic
auagaucaaugaaauagaa

SEQ ID NO: 186486 - RNA, 20 nt, Artificial Sequence
  Synthetic
uauagaucaaugaaauagaa

SEQ ID NO: 186487 - RNA, 21 nt, Artificial Sequence
  Synthetic
auauagaucaaugaaauagaa

SEQ ID NO: 186488 - RNA, 22 nt, Artificial Sequence
  Synthetic
cauauagaucaaugaaauagaa

SEQ ID NO: 186489 - RNA, 23 nt, Artificial Sequence
  Synthetic
acauauagaucaaugaaauagaa

SEQ ID NO: 186490 - RNA, 24 nt, Artificial Sequence
  Synthetic
gacauauagaucaaugaaauagaa

SEQ ID NO: 186491 - RNA, 18 nt, Artificial Sequence
  Synthetic
aaaacuaaugaaauagaa

SEQ ID NO: 186492 - RNA, 19 nt, Artificial Sequence
  Synthetic
gaaaacuaaugaaauagaa

SEQ ID NO: 186493 - RNA, 20 nt, Artificial Sequence
  Synthetic
ugaaaacuaaugaaauagaa

SEQ ID NO: 186494 - RNA, 21 nt, Artificial Sequence
  Synthetic
augaaaacuaaugaaauagaa

SEQ ID NO: 186495 - RNA, 22 nt, Artificial Sequence
  Synthetic
caugaaaacuaaugaaauagaa

SEQ ID NO: 186496 - RNA, 23 nt, Artificial Sequence
  Synthetic
ucaugaaaacuaaugaaauagaa

SEQ ID NO: 186497 - RNA, 24 nt, Artificial Sequence
  Synthetic
aucaugaaaacuaaugaaauagaa

SEQ ID NO: 186498 - RNA, 18 nt, Artificial Sequence
  Synthetic
ggagaauagacaauagaa

SEQ ID NO: 186499 - RNA, 19 nt, Artificial Sequence
  Synthetic
aggagaauagacaauagaa

SEQ ID NO: 186500 - RNA, 20 nt, Artificial Sequence
  Synthetic
gaggagaauagacaauagaa

SEQ ID NO: 186501 - RNA, 21 nt, Artificial Sequence
  Synthetic
ggaggagaauagacaauagaa

SEQ ID NO: 186502 - RNA, 22 nt, Artificial Sequence
  Synthetic
aggaggagaauagacaauagaa

SEQ ID NO: 186503 - RNA, 23 nt, Artificial Sequence
  Synthetic
gaggaggagaauagacaauagaa

SEQ ID NO: 186504 - RNA, 24 nt, Artificial Sequence
  Synthetic
ggaggaggagaauagacaauagaa

SEQ ID NO: 186505 - RNA, 18 nt, Artificial Sequence
  Synthetic
cugcuuccagcaauagaa

SEQ ID NO: 186506 - RNA, 19 nt, Artificial Sequence
  Synthetic
ucugcuuccagcaauagaa

SEQ ID NO: 186507 - RNA, 20 nt, Artificial Sequence
  Synthetic
uucugcuuccagcaauagaa

SEQ ID NO: 186508 - RNA, 21 nt, Artificial Sequence
  Synthetic
cuucugcuuccagcaauagaa

SEQ ID NO: 186509 - RNA, 22 nt, Artificial Sequence
  Synthetic
ucuucugcuuccagcaauagaa

SEQ ID NO: 186510 - RNA, 23 nt, Artificial Sequence
  Synthetic
gucuucugcuuccagcaauagaa

SEQ ID NO: 186511 - RNA, 24 nt, Artificial Sequence
  Synthetic
agucuucugcuuccagcaauagaa

SEQ ID NO: 186512 - RNA, 18 nt, Artificial Sequence
  Synthetic
augauuaucucaauagaa

SEQ ID NO: 186513 - RNA, 19 nt, Artificial Sequence
  Synthetic
caugauuaucucaauagaa

SEQ ID NO: 186514 - RNA, 20 nt, Artificial Sequence
  Synthetic
acaugauuaucucaauagaa

SEQ ID NO: 186515 - RNA, 21 nt, Artificial Sequence
  Synthetic
cacaugauuaucucaauagaa

SEQ ID NO: 186516 - RNA, 22 nt, Artificial Sequence
  Synthetic
ccacaugauuaucucaauagaa

SEQ ID NO: 186517 - RNA, 23 nt, Artificial Sequence
  Synthetic
accacaugauuaucucaauagaa

SEQ ID NO: 186518 - RNA, 24 nt, Artificial Sequence
  Synthetic
aaccacaugauuaucucaauagaa

SEQ ID NO: 186519 - RNA, 18 nt, Artificial Sequence
  Synthetic
ccaggaaugagaauagaa

SEQ ID NO: 186520 - RNA, 19 nt, Artificial Sequence
  Synthetic
cccaggaaugagaauagaa

SEQ ID NO: 186521 - RNA, 20 nt, Artificial Sequence
  Synthetic
ucccaggaaugagaauagaa

SEQ ID NO: 186522 - RNA, 21 nt, Artificial Sequence
  Synthetic
gucccaggaaugagaauagaa

SEQ ID NO: 186523 - RNA, 22 nt, Artificial Sequence
  Synthetic
ugucccaggaaugagaauagaa

SEQ ID NO: 186524 - RNA, 23 nt, Artificial Sequence
  Synthetic
uugucccaggaaugagaauagaa

SEQ ID NO: 186525 - RNA, 24 nt, Artificial Sequence
  Synthetic
guugucccaggaaugagaauagaa

SEQ ID NO: 186526 - RNA, 18 nt, Artificial Sequence
  Synthetic
uggauaaggugaauagaa

SEQ ID NO: 186527 - RNA, 19 nt, Artificial Sequence
  Synthetic
guggauaaggugaauagaa

SEQ ID NO: 186528 - RNA, 20 nt, Artificial Sequence
  Synthetic
gguggauaaggugaauagaa

SEQ ID NO: 186529 - RNA, 21 nt, Artificial Sequence
  Synthetic
agguggauaaggugaauagaa

SEQ ID NO: 186530 - RNA, 22 nt, Artificial Sequence
  Synthetic
aagguggauaaggugaauagaa

SEQ ID NO: 186531 - RNA, 23 nt, Artificial Sequence
  Synthetic
caagguggauaaggugaauagaa

SEQ ID NO: 186532 - RNA, 24 nt, Artificial Sequence
  Synthetic
ccaagguggauaaggugaauagaa

SEQ ID NO: 186533 - RNA, 18 nt, Artificial Sequence
  Synthetic
ccugcagcuugaauagaa

SEQ ID NO: 186534 - RNA, 19 nt, Artificial Sequence
  Synthetic
uccugcagcuugaauagaa

SEQ ID NO: 186535 - RNA, 20 nt, Artificial Sequence
  Synthetic
uuccugcagcuugaauagaa

SEQ ID NO: 186536 - RNA, 21 nt, Artificial Sequence
  Synthetic
cuuccugcagcuugaauagaa

SEQ ID NO: 186537 - RNA, 22 nt, Artificial Sequence
  Synthetic
ccuuccugcagcuugaauagaa

SEQ ID NO: 186538 - RNA, 23 nt, Artificial Sequence
  Synthetic
gccuuccugcagcuugaauagaa

SEQ ID NO: 186539 - RNA, 24 nt, Artificial Sequence
  Synthetic
ugccuuccugcagcuugaauagaa

SEQ ID NO: 186540 - RNA, 18 nt, Artificial Sequence
  Synthetic
aacuagggacuaauagaa

SEQ ID NO: 186541 - RNA, 19 nt, Artificial Sequence
  Synthetic
aaacuagggacuaauagaa

SEQ ID NO: 186542 - RNA, 20 nt, Artificial Sequence
  Synthetic
gaaacuagggacuaauagaa

SEQ ID NO: 186543 - RNA, 21 nt, Artificial Sequence
  Synthetic
agaaacuagggacuaauagaa

SEQ ID NO: 186544 - RNA, 22 nt, Artificial Sequence
  Synthetic
uagaaacuagggacuaauagaa

SEQ ID NO: 186545 - RNA, 23 nt, Artificial Sequence
  Synthetic
guagaaacuagggacuaauagaa

SEQ ID NO: 186546 - RNA, 24 nt, Artificial Sequence
  Synthetic
aguagaaacuagggacuaauagaa

SEQ ID NO: 186547 - RNA, 18 nt, Artificial Sequence
  Synthetic
aucaacauucuaauagaa

SEQ ID NO: 186548 - RNA, 19 nt, Artificial Sequence
  Synthetic
caucaacauucuaauagaa

SEQ ID NO: 186549 - RNA, 20 nt, Artificial Sequence
  Synthetic
ucaucaacauucuaauagaa

SEQ ID NO: 186550 - RNA, 21 nt, Artificial Sequence
  Synthetic
uucaucaacauucuaauagaa

SEQ ID NO: 186551 - RNA, 22 nt, Artificial Sequence
  Synthetic
cuucaucaacauucuaauagaa

SEQ ID NO: 186552 - RNA, 23 nt, Artificial Sequence
  Synthetic
ucuucaucaacauucuaauagaa

SEQ ID NO: 186553 - RNA, 24 nt, Artificial Sequence
  Synthetic
gucuucaucaacauucuaauagaa

SEQ ID NO: 186554 - RNA, 18 nt, Artificial Sequence
  Synthetic
aaauaaagcuuaauagaa

SEQ ID NO: 186555 - RNA, 19 nt, Artificial Sequence
  Synthetic
caaauaaagcuuaauagaa

SEQ ID NO: 186556 - RNA, 20 nt, Artificial Sequence
  Synthetic
gcaaauaaagcuuaauagaa

SEQ ID NO: 186557 - RNA, 21 nt, Artificial Sequence
  Synthetic
ggcaaauaaagcuuaauagaa

SEQ ID NO: 186558 - RNA, 22 nt, Artificial Sequence
  Synthetic
aggcaaauaaagcuuaauagaa

SEQ ID NO: 186559 - RNA, 23 nt, Artificial Sequence
  Synthetic
uaggcaaauaaagcuuaauagaa

SEQ ID NO: 186560 - RNA, 24 nt, Artificial Sequence
  Synthetic
cuaggcaaauaaagcuuaauagaa

SEQ ID NO: 186561 - RNA, 18 nt, Artificial Sequence
  Synthetic
uguuaccucuuaauagaa

SEQ ID NO: 186562 - RNA, 19 nt, Artificial Sequence
  Synthetic
uuguuaccucuuaauagaa

SEQ ID NO: 186563 - RNA, 20 nt, Artificial Sequence
  Synthetic
cuuguuaccucuuaauagaa

SEQ ID NO: 186564 - RNA, 21 nt, Artificial Sequence
  Synthetic
ucuuguuaccucuuaauagaa

SEQ ID NO: 186565 - RNA, 22 nt, Artificial Sequence
  Synthetic
gucuuguuaccucuuaauagaa

SEQ ID NO: 186566 - RNA, 23 nt, Artificial Sequence
  Synthetic
ggucuuguuaccucuuaauagaa

SEQ ID NO: 186567 - RNA, 24 nt, Artificial Sequence
  Synthetic
gggucuuguuaccucuuaauagaa

SEQ ID NO: 186568 - RNA, 18 nt, Artificial Sequence
  Synthetic
gugcuucaaaccauagaa

SEQ ID NO: 186569 - RNA, 19 nt, Artificial Sequence
  Synthetic
agugcuucaaaccauagaa

SEQ ID NO: 186570 - RNA, 20 nt, Artificial Sequence
  Synthetic
uagugcuucaaaccauagaa

SEQ ID NO: 186571 - RNA, 21 nt, Artificial Sequence
  Synthetic
cuagugcuucaaaccauagaa

SEQ ID NO: 186572 - RNA, 22 nt, Artificial Sequence
  Synthetic
ccuagugcuucaaaccauagaa

SEQ ID NO: 186573 - RNA, 23 nt, Artificial Sequence
  Synthetic
cccuagugcuucaaaccauagaa

SEQ ID NO: 186574 - RNA, 24 nt, Artificial Sequence
  Synthetic
ccccuagugcuucaaaccauagaa

SEQ ID NO: 186575 - RNA, 18 nt, Artificial Sequence
  Synthetic
caguguugucccauagaa

SEQ ID NO: 186576 - RNA, 19 nt, Artificial Sequence
  Synthetic
acaguguugucccauagaa

SEQ ID NO: 186577 - RNA, 20 nt, Artificial Sequence
  Synthetic
aacaguguugucccauagaa

SEQ ID NO: 186578 - RNA, 21 nt, Artificial Sequence
  Synthetic
gaacaguguugucccauagaa

SEQ ID NO: 186579 - RNA, 22 nt, Artificial Sequence
  Synthetic
agaacaguguugucccauagaa

SEQ ID NO: 186580 - RNA, 23 nt, Artificial Sequence
  Synthetic
cagaacaguguugucccauagaa

SEQ ID NO: 186581 - RNA, 24 nt, Artificial Sequence
  Synthetic
ccagaacaguguugucccauagaa

SEQ ID NO: 186582 - RNA, 18 nt, Artificial Sequence
  Synthetic
guauacagggccauagaa

SEQ ID NO: 186583 - RNA, 19 nt, Artificial Sequence
  Synthetic
gguauacagggccauagaa

SEQ ID NO: 186584 - RNA, 20 nt, Artificial Sequence
  Synthetic
ugguauacagggccauagaa

SEQ ID NO: 186585 - RNA, 21 nt, Artificial Sequence
  Synthetic
cugguauacagggccauagaa

SEQ ID NO: 186586 - RNA, 22 nt, Artificial Sequence
  Synthetic
acugguauacagggccauagaa

SEQ ID NO: 186587 - RNA, 23 nt, Artificial Sequence
  Synthetic
aacugguauacagggccauagaa

SEQ ID NO: 186588 - RNA, 24 nt, Artificial Sequence
  Synthetic
gaacugguauacagggccauagaa

SEQ ID NO: 186589 - RNA, 18 nt, Artificial Sequence
  Synthetic
gaauaaguguucauagaa

SEQ ID NO: 186590 - RNA, 19 nt, Artificial Sequence
  Synthetic
agaauaaguguucauagaa

SEQ ID NO: 186591 - RNA, 20 nt, Artificial Sequence
  Synthetic
cagaauaaguguucauagaa

SEQ ID NO: 186592 - RNA, 21 nt, Artificial Sequence
  Synthetic
ccagaauaaguguucauagaa

SEQ ID NO: 186593 - RNA, 22 nt, Artificial Sequence
  Synthetic
uccagaauaaguguucauagaa

SEQ ID NO: 186594 - RNA, 23 nt, Artificial Sequence
  Synthetic
uuccagaauaaguguucauagaa

SEQ ID NO: 186595 - RNA, 24 nt, Artificial Sequence
  Synthetic
cuuccagaauaaguguucauagaa

SEQ ID NO: 186596 - RNA, 18 nt, Artificial Sequence
  Synthetic
uaaagacuauagauagaa

SEQ ID NO: 186597 - RNA, 19 nt, Artificial Sequence
  Synthetic
auaaagacuauagauagaa

SEQ ID NO: 186598 - RNA, 20 nt, Artificial Sequence
  Synthetic
aauaaagacuauagauagaa

SEQ ID NO: 186599 - RNA, 21 nt, Artificial Sequence
  Synthetic
uaauaaagacuauagauagaa

SEQ ID NO: 186600 - RNA, 22 nt, Artificial Sequence
  Synthetic
auaauaaagacuauagauagaa

SEQ ID NO: 186601 - RNA, 23 nt, Artificial Sequence
  Synthetic
aauaauaaagacuauagauagaa

SEQ ID NO: 186602 - RNA, 24 nt, Artificial Sequence
  Synthetic
aaauaauaaagacuauagauagaa

SEQ ID NO: 186603 - RNA, 18 nt, Artificial Sequence
  Synthetic
gagagagggaggauagaa

SEQ ID NO: 186604 - RNA, 19 nt, Artificial Sequence
  Synthetic
ggagagagggaggauagaa

SEQ ID NO: 186605 - RNA, 20 nt, Artificial Sequence
  Synthetic
aggagagagggaggauagaa

SEQ ID NO: 186606 - RNA, 21 nt, Artificial Sequence
  Synthetic
aaggagagagggaggauagaa

SEQ ID NO: 186607 - RNA, 22 nt, Artificial Sequence
  Synthetic
gaaggagagagggaggauagaa

SEQ ID NO: 186608 - RNA, 23 nt, Artificial Sequence
  Synthetic
ugaaggagagagggaggauagaa

SEQ ID NO: 186609 - RNA, 24 nt, Artificial Sequence
  Synthetic
gugaaggagagagggaggauagaa

SEQ ID NO: 186610 - RNA, 18 nt, Artificial Sequence
  Synthetic
uuguucaaagugauagaa

SEQ ID NO: 186611 - RNA, 19 nt, Artificial Sequence
  Synthetic
auuguucaaagugauagaa

SEQ ID NO: 186612 - RNA, 20 nt, Artificial Sequence
  Synthetic
uauuguucaaagugauagaa

SEQ ID NO: 186613 - RNA, 21 nt, Artificial Sequence
  Synthetic
uuauuguucaaagugauagaa

SEQ ID NO: 186614 - RNA, 22 nt, Artificial Sequence
  Synthetic
auuauuguucaaagugauagaa

SEQ ID NO: 186615 - RNA, 23 nt, Artificial Sequence
  Synthetic
gauuauuguucaaagugauagaa

SEQ ID NO: 186616 - RNA, 24 nt, Artificial Sequence
  Synthetic
agauuauuguucaaagugauagaa

SEQ ID NO: 186617 - RNA, 18 nt, Artificial Sequence
  Synthetic
ccuaacaaugugauagaa

SEQ ID NO: 186618 - RNA, 19 nt, Artificial Sequence
  Synthetic
gccuaacaaugugauagaa

SEQ ID NO: 186619 - RNA, 20 nt, Artificial Sequence
  Synthetic
agccuaacaaugugauagaa

SEQ ID NO: 186620 - RNA, 21 nt, Artificial Sequence
  Synthetic
cagccuaacaaugugauagaa

SEQ ID NO: 186621 - RNA, 22 nt, Artificial Sequence
  Synthetic
gcagccuaacaaugugauagaa

SEQ ID NO: 186622 - RNA, 23 nt, Artificial Sequence
  Synthetic
ugcagccuaacaaugugauagaa

SEQ ID NO: 186623 - RNA, 24 nt, Artificial Sequence
  Synthetic
cugcagccuaacaaugugauagaa

SEQ ID NO: 186624 - RNA, 18 nt, Artificial Sequence
  Synthetic
caguuuuuguugauagaa

SEQ ID NO: 186625 - RNA, 19 nt, Artificial Sequence
  Synthetic
ccaguuuuuguugauagaa

SEQ ID NO: 186626 - RNA, 20 nt, Artificial Sequence
  Synthetic
cccaguuuuuguugauagaa

SEQ ID NO: 186627 - RNA, 21 nt, Artificial Sequence
  Synthetic
acccaguuuuuguugauagaa

SEQ ID NO: 186628 - RNA, 22 nt, Artificial Sequence
  Synthetic
aacccaguuuuuguugauagaa

SEQ ID NO: 186629 - RNA, 23 nt, Artificial Sequence
  Synthetic
gaacccaguuuuuguugauagaa

SEQ ID NO: 186630 - RNA, 24 nt, Artificial Sequence
  Synthetic
agaacccaguuuuuguugauagaa

SEQ ID NO: 186631 - RNA, 18 nt, Artificial Sequence
  Synthetic
ugcuugccagcuauagaa

SEQ ID NO: 186632 - RNA, 19 nt, Artificial Sequence
  Synthetic
cugcuugccagcuauagaa

SEQ ID NO: 186633 - RNA, 20 nt, Artificial Sequence
  Synthetic
gcugcuugccagcuauagaa

SEQ ID NO: 186634 - RNA, 21 nt, Artificial Sequence
  Synthetic
agcugcuugccagcuauagaa

SEQ ID NO: 186635 - RNA, 22 nt, Artificial Sequence
  Synthetic
aagcugcuugccagcuauagaa

SEQ ID NO: 186636 - RNA, 23 nt, Artificial Sequence
  Synthetic
gaagcugcuugccagcuauagaa

SEQ ID NO: 186637 - RNA, 24 nt, Artificial Sequence
  Synthetic
ugaagcugcuugccagcuauagaa

SEQ ID NO: 186638 - RNA, 18 nt, Artificial Sequence
  Synthetic
aaaaaaauaucuauagaa

SEQ ID NO: 186639 - RNA, 19 nt, Artificial Sequence
  Synthetic
aaaaaaaauaucuauagaa

SEQ ID NO: 186640 - RNA, 20 nt, Artificial Sequence
  Synthetic
aaaaaaaaauaucuauagaa

SEQ ID NO: 186641 - RNA, 21 nt, Artificial Sequence
  Synthetic
aaaaaaaaaauaucuauagaa

SEQ ID NO: 186642 - RNA, 22 nt, Artificial Sequence
  Synthetic
aaaaaaaaaaauaucuauagaa

SEQ ID NO: 186643 - RNA, 23 nt, Artificial Sequence
  Synthetic
aaaaaaaaaaaauaucuauagaa

SEQ ID NO: 186644 - RNA, 24 nt, Artificial Sequence
  Synthetic
gaaaaaaaaaaaauaucuauagaa

SEQ ID NO: 186645 - RNA, 18 nt, Artificial Sequence
  Synthetic
ugcucuguuucuauagaa

SEQ ID NO: 186646 - RNA, 19 nt, Artificial Sequence
  Synthetic
uugcucuguuucuauagaa

SEQ ID NO: 186647 - RNA, 20 nt, Artificial Sequence
  Synthetic
auugcucuguuucuauagaa

SEQ ID NO: 186648 - RNA, 21 nt, Artificial Sequence
  Synthetic
cauugcucuguuucuauagaa

SEQ ID NO: 186649 - RNA, 22 nt, Artificial Sequence
  Synthetic
ccauugcucuguuucuauagaa

SEQ ID NO: 186650 - RNA, 23 nt, Artificial Sequence
  Synthetic
cccauugcucuguuucuauagaa

SEQ ID NO: 186651 - RNA, 24 nt, Artificial Sequence
  Synthetic
acccauugcucuguuucuauagaa

SEQ ID NO: 186652 - RNA, 18 nt, Artificial Sequence
  Synthetic
uguuagguacuuauagaa

SEQ ID NO: 186653 - RNA, 19 nt, Artificial Sequence
  Synthetic
auguuagguacuuauagaa

SEQ ID NO: 186654 - RNA, 20 nt, Artificial Sequence
  Synthetic
aauguuagguacuuauagaa

SEQ ID NO: 186655 - RNA, 21 nt, Artificial Sequence
  Synthetic
aaauguuagguacuuauagaa

SEQ ID NO: 186656 - RNA, 22 nt, Artificial Sequence
  Synthetic
uaaauguuagguacuuauagaa

SEQ ID NO: 186657 - RNA, 23 nt, Artificial Sequence
  Synthetic
cuaaauguuagguacuuauagaa

SEQ ID NO: 186658 - RNA, 24 nt, Artificial Sequence
  Synthetic
gcuaaauguuagguacuuauagaa

SEQ ID NO: 186659 - RNA, 18 nt, Artificial Sequence
  Synthetic
cacaagcuccuuauagaa

SEQ ID NO: 186660 - RNA, 19 nt, Artificial Sequence
  Synthetic
acacaagcuccuuauagaa

SEQ ID NO: 186661 - RNA, 20 nt, Artificial Sequence
  Synthetic
cacacaagcuccuuauagaa

SEQ ID NO: 186662 - RNA, 21 nt, Artificial Sequence
  Synthetic
ccacacaagcuccuuauagaa

SEQ ID NO: 186663 - RNA, 22 nt, Artificial Sequence
  Synthetic
cccacacaagcuccuuauagaa

SEQ ID NO: 186664 - RNA, 23 nt, Artificial Sequence
  Synthetic
ucccacacaagcuccuuauagaa

SEQ ID NO: 186665 - RNA, 24 nt, Artificial Sequence
  Synthetic
cucccacacaagcuccuuauagaa

SEQ ID NO: 186666 - RNA, 18 nt, Artificial Sequence
  Synthetic
agauguuaggcacuagaa

SEQ ID NO: 186667 - RNA, 19 nt, Artificial Sequence
  Synthetic
uagauguuaggcacuagaa

SEQ ID NO: 186668 - RNA, 20 nt, Artificial Sequence
  Synthetic
auagauguuaggcacuagaa

SEQ ID NO: 186669 - RNA, 21 nt, Artificial Sequence
  Synthetic
aauagauguuaggcacuagaa

SEQ ID NO: 186670 - RNA, 22 nt, Artificial Sequence
  Synthetic
uaauagauguuaggcacuagaa

SEQ ID NO: 186671 - RNA, 23 nt, Artificial Sequence
  Synthetic
guaauagauguuaggcacuagaa

SEQ ID NO: 186672 - RNA, 24 nt, Artificial Sequence
  Synthetic
uguaauagauguuaggcacuagaa

SEQ ID NO: 186673 - RNA, 18 nt, Artificial Sequence
  Synthetic
aauuaguuuucacuagaa

SEQ ID NO: 186674 - RNA, 19 nt, Artificial Sequence
  Synthetic
aaauuaguuuucacuagaa

SEQ ID NO: 186675 - RNA, 20 nt, Artificial Sequence
  Synthetic
uaaauuaguuuucacuagaa

SEQ ID NO: 186676 - RNA, 21 nt, Artificial Sequence
  Synthetic
auaaauuaguuuucacuagaa

SEQ ID NO: 186677 - RNA, 22 nt, Artificial Sequence
  Synthetic
aauaaauuaguuuucacuagaa

SEQ ID NO: 186678 - RNA, 23 nt, Artificial Sequence
  Synthetic
gaauaaauuaguuuucacuagaa

SEQ ID NO: 186679 - RNA, 24 nt, Artificial Sequence
  Synthetic
agaauaaauuaguuuucacuagaa

SEQ ID NO: 186680 - RNA, 18 nt, Artificial Sequence
  Synthetic
cauuggggacuacuagaa

SEQ ID NO: 186681 - RNA, 19 nt, Artificial Sequence
  Synthetic
acauuggggacuacuagaa

SEQ ID NO: 186682 - RNA, 20 nt, Artificial Sequence
  Synthetic
gacauuggggacuacuagaa

SEQ ID NO: 186683 - RNA, 21 nt, Artificial Sequence
  Synthetic
agacauuggggacuacuagaa

SEQ ID NO: 186684 - RNA, 22 nt, Artificial Sequence
  Synthetic
uagacauuggggacuacuagaa

SEQ ID NO: 186685 - RNA, 23 nt, Artificial Sequence
  Synthetic
auagacauuggggacuacuagaa

SEQ ID NO: 186686 - RNA, 24 nt, Artificial Sequence
  Synthetic
aauagacauuggggacuacuagaa

SEQ ID NO: 186687 - RNA, 18 nt, Artificial Sequence
  Synthetic
gcaccauuuaaccuagaa

SEQ ID NO: 186688 - RNA, 19 nt, Artificial Sequence
  Synthetic
agcaccauuuaaccuagaa

SEQ ID NO: 186689 - RNA, 20 nt, Artificial Sequence
  Synthetic
cagcaccauuuaaccuagaa

SEQ ID NO: 186690 - RNA, 21 nt, Artificial Sequence
  Synthetic
ucagcaccauuuaaccuagaa

SEQ ID NO: 186691 - RNA, 22 nt, Artificial Sequence
  Synthetic
gucagcaccauuuaaccuagaa

SEQ ID NO: 186692 - RNA, 23 nt, Artificial Sequence
  Synthetic
agucagcaccauuuaaccuagaa

SEQ ID NO: 186693 - RNA, 24 nt, Artificial Sequence
  Synthetic
gagucagcaccauuuaaccuagaa

SEQ ID NO: 186694 - RNA, 18 nt, Artificial Sequence
  Synthetic
auaugagaacaccuagaa

SEQ ID NO: 186695 - RNA, 19 nt, Artificial Sequence
  Synthetic
cauaugagaacaccuagaa

SEQ ID NO: 186696 - RNA, 20 nt, Artificial Sequence
  Synthetic
acauaugagaacaccuagaa

SEQ ID NO: 186697 - RNA, 21 nt, Artificial Sequence
  Synthetic
gacauaugagaacaccuagaa

SEQ ID NO: 186698 - RNA, 22 nt, Artificial Sequence
  Synthetic
agacauaugagaacaccuagaa

SEQ ID NO: 186699 - RNA, 23 nt, Artificial Sequence
  Synthetic
uagacauaugagaacaccuagaa

SEQ ID NO: 186700 - RNA, 24 nt, Artificial Sequence
  Synthetic
auagacauaugagaacaccuagaa

SEQ ID NO: 186701 - RNA, 18 nt, Artificial Sequence
  Synthetic
agucagcaauuccuagaa

SEQ ID NO: 186702 - RNA, 19 nt, Artificial Sequence
  Synthetic
gagucagcaauuccuagaa

SEQ ID NO: 186703 - RNA, 20 nt, Artificial Sequence
  Synthetic
ggagucagcaauuccuagaa

SEQ ID NO: 186704 - RNA, 21 nt, Artificial Sequence
  Synthetic
aggagucagcaauuccuagaa

SEQ ID NO: 186705 - RNA, 22 nt, Artificial Sequence
  Synthetic
aaggagucagcaauuccuagaa

SEQ ID NO: 186706 - RNA, 23 nt, Artificial Sequence
  Synthetic
aaaggagucagcaauuccuagaa

SEQ ID NO: 186707 - RNA, 24 nt, Artificial Sequence
  Synthetic
aaaaggagucagcaauuccuagaa

SEQ ID NO: 186708 - RNA, 18 nt, Artificial Sequence
  Synthetic
uuaauacaugagcuagaa

SEQ ID NO: 186709 - RNA, 19 nt, Artificial Sequence
  Synthetic
guuaauacaugagcuagaa

SEQ ID NO: 186710 - RNA, 20 nt, Artificial Sequence
  Synthetic
uguuaauacaugagcuagaa

SEQ ID NO: 186711 - RNA, 21 nt, Artificial Sequence
  Synthetic
auguuaauacaugagcuagaa

SEQ ID NO: 186712 - RNA, 22 nt, Artificial Sequence
  Synthetic
cauguuaauacaugagcuagaa

SEQ ID NO: 186713 - RNA, 23 nt, Artificial Sequence
  Synthetic
acauguuaauacaugagcuagaa

SEQ ID NO: 186714 - RNA, 24 nt, Artificial Sequence
  Synthetic
cacauguuaauacaugagcuagaa

SEQ ID NO: 186715 - RNA, 18 nt, Artificial Sequence
  Synthetic
cagaagagcaggcuagaa

SEQ ID NO: 186716 - RNA, 19 nt, Artificial Sequence
  Synthetic
acagaagagcaggcuagaa

SEQ ID NO: 186717 - RNA, 20 nt, Artificial Sequence
  Synthetic
cacagaagagcaggcuagaa

SEQ ID NO: 186718 - RNA, 21 nt, Artificial Sequence
  Synthetic
ccacagaagagcaggcuagaa

SEQ ID NO: 186719 - RNA, 22 nt, Artificial Sequence
  Synthetic
gccacagaagagcaggcuagaa

SEQ ID NO: 186720 - RNA, 23 nt, Artificial Sequence
  Synthetic
agccacagaagagcaggcuagaa

SEQ ID NO: 186721 - RNA, 24 nt, Artificial Sequence
  Synthetic
cagccacagaagagcaggcuagaa

SEQ ID NO: 186722 - RNA, 18 nt, Artificial Sequence
  Synthetic
cagaagaggaggcuagaa

SEQ ID NO: 186723 - RNA, 19 nt, Artificial Sequence
  Synthetic
acagaagaggaggcuagaa

SEQ ID NO: 186724 - RNA, 20 nt, Artificial Sequence
  Synthetic
aacagaagaggaggcuagaa

SEQ ID NO: 186725 - RNA, 21 nt, Artificial Sequence
  Synthetic
gaacagaagaggaggcuagaa

SEQ ID NO: 186726 - RNA, 22 nt, Artificial Sequence
  Synthetic
agaacagaagaggaggcuagaa

SEQ ID NO: 186727 - RNA, 23 nt, Artificial Sequence
  Synthetic
uagaacagaagaggaggcuagaa

SEQ ID NO: 186728 - RNA, 24 nt, Artificial Sequence
  Synthetic
cuagaacagaagaggaggcuagaa

SEQ ID NO: 186729 - RNA, 18 nt, Artificial Sequence
  Synthetic
aucucaaaacggcuagaa

SEQ ID NO: 186730 - RNA, 19 nt, Artificial Sequence
  Synthetic
uaucucaaaacggcuagaa

SEQ ID NO: 186731 - RNA, 20 nt, Artificial Sequence
  Synthetic
guaucucaaaacggcuagaa

SEQ ID NO: 186732 - RNA, 21 nt, Artificial Sequence
  Synthetic
cguaucucaaaacggcuagaa

SEQ ID NO: 186733 - RNA, 22 nt, Artificial Sequence
  Synthetic
gcguaucucaaaacggcuagaa

SEQ ID NO: 186734 - RNA, 23 nt, Artificial Sequence
  Synthetic
ugcguaucucaaaacggcuagaa

SEQ ID NO: 186735 - RNA, 24 nt, Artificial Sequence
  Synthetic
uugcguaucucaaaacggcuagaa

SEQ ID NO: 186736 - RNA, 18 nt, Artificial Sequence
  Synthetic
uuuuuggcuccucuagaa

SEQ ID NO: 186737 - RNA, 19 nt, Artificial Sequence
  Synthetic
uuuuuuggcuccucuagaa

SEQ ID NO: 186738 - RNA, 20 nt, Artificial Sequence
  Synthetic
uuuuuuuggcuccucuagaa

SEQ ID NO: 186739 - RNA, 21 nt, Artificial Sequence
  Synthetic
cuuuuuuuggcuccucuagaa

SEQ ID NO: 186740 - RNA, 22 nt, Artificial Sequence
  Synthetic
ucuuuuuuuggcuccucuagaa

SEQ ID NO: 186741 - RNA, 23 nt, Artificial Sequence
  Synthetic
uucuuuuuuuggcuccucuagaa

SEQ ID NO: 186742 - RNA, 24 nt, Artificial Sequence
  Synthetic
uuucuuuuuuuggcuccucuagaa

SEQ ID NO: 186743 - RNA, 18 nt, Artificial Sequence
  Synthetic
gucacucgaagucuagaa

SEQ ID NO: 186744 - RNA, 19 nt, Artificial Sequence
  Synthetic
ggucacucgaagucuagaa

SEQ ID NO: 186745 - RNA, 20 nt, Artificial Sequence
  Synthetic
gggucacucgaagucuagaa

SEQ ID NO: 186746 - RNA, 21 nt, Artificial Sequence
  Synthetic
ugggucacucgaagucuagaa

SEQ ID NO: 186747 - RNA, 22 nt, Artificial Sequence
  Synthetic
augggucacucgaagucuagaa

SEQ ID NO: 186748 - RNA, 23 nt, Artificial Sequence
  Synthetic
uaugggucacucgaagucuagaa

SEQ ID NO: 186749 - RNA, 24 nt, Artificial Sequence
  Synthetic
auaugggucacucgaagucuagaa

SEQ ID NO: 186750 - RNA, 18 nt, Artificial Sequence
  Synthetic
caaaugaaaauucuagaa

SEQ ID NO: 186751 - RNA, 19 nt, Artificial Sequence
  Synthetic
ccaaaugaaaauucuagaa

SEQ ID NO: 186752 - RNA, 20 nt, Artificial Sequence
  Synthetic
accaaaugaaaauucuagaa

SEQ ID NO: 186753 - RNA, 21 nt, Artificial Sequence
  Synthetic
aaccaaaugaaaauucuagaa

SEQ ID NO: 186754 - RNA, 22 nt, Artificial Sequence
  Synthetic
gaaccaaaugaaaauucuagaa

SEQ ID NO: 186755 - RNA, 23 nt, Artificial Sequence
  Synthetic
agaaccaaaugaaaauucuagaa

SEQ ID NO: 186756 - RNA, 24 nt, Artificial Sequence
  Synthetic
aagaaccaaaugaaaauucuagaa

SEQ ID NO: 186757 - RNA, 18 nt, Artificial Sequence
  Synthetic
aagcaaugacuucuagaa

SEQ ID NO: 186758 - RNA, 19 nt, Artificial Sequence
  Synthetic
gaagcaaugacuucuagaa

SEQ ID NO: 186759 - RNA, 20 nt, Artificial Sequence
  Synthetic
ugaagcaaugacuucuagaa

SEQ ID NO: 186760 - RNA, 21 nt, Artificial Sequence
  Synthetic
cugaagcaaugacuucuagaa

SEQ ID NO: 186761 - RNA, 22 nt, Artificial Sequence
  Synthetic
ccugaagcaaugacuucuagaa

SEQ ID NO: 186762 - RNA, 23 nt, Artificial Sequence
  Synthetic
gccugaagcaaugacuucuagaa

SEQ ID NO: 186763 - RNA, 24 nt, Artificial Sequence
  Synthetic
ugccugaagcaaugacuucuagaa

SEQ ID NO: 186764 - RNA, 18 nt, Artificial Sequence
  Synthetic
cucucuuuauuucuagaa

SEQ ID NO: 186765 - RNA, 19 nt, Artificial Sequence
  Synthetic
ccucucuuuauuucuagaa

SEQ ID NO: 186766 - RNA, 20 nt, Artificial Sequence
  Synthetic
cccucucuuuauuucuagaa

SEQ ID NO: 186767 - RNA, 21 nt, Artificial Sequence
  Synthetic
ucccucucuuuauuucuagaa

SEQ ID NO: 186768 - RNA, 22 nt, Artificial Sequence
  Synthetic
aucccucucuuuauuucuagaa

SEQ ID NO: 186769 - RNA, 23 nt, Artificial Sequence
  Synthetic
aaucccucucuuuauuucuagaa

SEQ ID NO: 186770 - RNA, 24 nt, Artificial Sequence
  Synthetic
aaaucccucucuuuauuucuagaa

SEQ ID NO: 186771 - RNA, 18 nt, Artificial Sequence
  Synthetic
cguucuuuaaaaguagaa

SEQ ID NO: 186772 - RNA, 19 nt, Artificial Sequence
  Synthetic
acguucuuuaaaaguagaa

SEQ ID NO: 186773 - RNA, 20 nt, Artificial Sequence
  Synthetic
cacguucuuuaaaaguagaa

SEQ ID NO: 186774 - RNA, 21 nt, Artificial Sequence
  Synthetic
ccacguucuuuaaaaguagaa

SEQ ID NO: 186775 - RNA, 22 nt, Artificial Sequence
  Synthetic
gccacguucuuuaaaaguagaa

SEQ ID NO: 186776 - RNA, 23 nt, Artificial Sequence
  Synthetic
agccacguucuuuaaaaguagaa

SEQ ID NO: 186777 - RNA, 24 nt, Artificial Sequence
  Synthetic
uagccacguucuuuaaaaguagaa

SEQ ID NO: 186778 - RNA, 18 nt, Artificial Sequence
  Synthetic
aaaacagcagcaguagaa

SEQ ID NO: 186779 - RNA, 19 nt, Artificial Sequence
  Synthetic
uaaaacagcagcaguagaa

SEQ ID NO: 186780 - RNA, 20 nt, Artificial Sequence
  Synthetic
guaaaacagcagcaguagaa

SEQ ID NO: 186781 - RNA, 21 nt, Artificial Sequence
  Synthetic
uguaaaacagcagcaguagaa

SEQ ID NO: 186782 - RNA, 22 nt, Artificial Sequence
  Synthetic
guguaaaacagcagcaguagaa

SEQ ID NO: 186783 - RNA, 23 nt, Artificial Sequence
  Synthetic
cguguaaaacagcagcaguagaa

SEQ ID NO: 186784 - RNA, 24 nt, Artificial Sequence
  Synthetic
ucguguaaaacagcagcaguagaa

SEQ ID NO: 186785 - RNA, 18 nt, Artificial Sequence
  Synthetic
uagacaguugcaguagaa

SEQ ID NO: 186786 - RNA, 19 nt, Artificial Sequence
  Synthetic
cuagacaguugcaguagaa

SEQ ID NO: 186787 - RNA, 20 nt, Artificial Sequence
  Synthetic
ucuagacaguugcaguagaa

SEQ ID NO: 186788 - RNA, 21 nt, Artificial Sequence
  Synthetic
aucuagacaguugcaguagaa

SEQ ID NO: 186789 - RNA, 22 nt, Artificial Sequence
  Synthetic
caucuagacaguugcaguagaa

SEQ ID NO: 186790 - RNA, 23 nt, Artificial Sequence
  Synthetic
acaucuagacaguugcaguagaa

SEQ ID NO: 186791 - RNA, 24 nt, Artificial Sequence
  Synthetic
cacaucuagacaguugcaguagaa

SEQ ID NO: 186792 - RNA, 18 nt, Artificial Sequence
  Synthetic
uggcagacaaagguagaa

SEQ ID NO: 186793 - RNA, 19 nt, Artificial Sequence
  Synthetic
uuggcagacaaagguagaa

SEQ ID NO: 186794 - RNA, 20 nt, Artificial Sequence
  Synthetic
guuggcagacaaagguagaa

SEQ ID NO: 186795 - RNA, 21 nt, Artificial Sequence
  Synthetic
uguuggcagacaaagguagaa

SEQ ID NO: 186796 - RNA, 22 nt, Artificial Sequence
  Synthetic
uuguuggcagacaaagguagaa

SEQ ID NO: 186797 - RNA, 23 nt, Artificial Sequence
  Synthetic
auuguuggcagacaaagguagaa

SEQ ID NO: 186798 - RNA, 24 nt, Artificial Sequence
  Synthetic
aauuguuggcagacaaagguagaa

SEQ ID NO: 186799 - RNA, 18 nt, Artificial Sequence
  Synthetic
aaagccuagaagguagaa

SEQ ID NO: 186800 - RNA, 19 nt, Artificial Sequence
  Synthetic
caaagccuagaagguagaa

SEQ ID NO: 186801 - RNA, 20 nt, Artificial Sequence
  Synthetic
ucaaagccuagaagguagaa

SEQ ID NO: 186802 - RNA, 21 nt, Artificial Sequence
  Synthetic
cucaaagccuagaagguagaa

SEQ ID NO: 186803 - RNA, 22 nt, Artificial Sequence
  Synthetic
acucaaagccuagaagguagaa

SEQ ID NO: 186804 - RNA, 23 nt, Artificial Sequence
  Synthetic
aacucaaagccuagaagguagaa

SEQ ID NO: 186805 - RNA, 24 nt, Artificial Sequence
  Synthetic
gaacucaaagccuagaagguagaa

SEQ ID NO: 186806 - RNA, 18 nt, Artificial Sequence
  Synthetic
aauuccacauagguagaa

SEQ ID NO: 186807 - RNA, 19 nt, Artificial Sequence
  Synthetic
caauuccacauagguagaa

SEQ ID NO: 186808 - RNA, 20 nt, Artificial Sequence
  Synthetic
gcaauuccacauagguagaa

SEQ ID NO: 186809 - RNA, 21 nt, Artificial Sequence
  Synthetic
agcaauuccacauagguagaa

SEQ ID NO: 186810 - RNA, 22 nt, Artificial Sequence
  Synthetic
cagcaauuccacauagguagaa

SEQ ID NO: 186811 - RNA, 23 nt, Artificial Sequence
  Synthetic
gcagcaauuccacauagguagaa

SEQ ID NO: 186812 - RNA, 24 nt, Artificial Sequence
  Synthetic
ugcagcaauuccacauagguagaa

SEQ ID NO: 186813 - RNA, 18 nt, Artificial Sequence
  Synthetic
aaaugaggguugguagaa

SEQ ID NO: 186814 - RNA, 19 nt, Artificial Sequence
  Synthetic
uaaaugaggguugguagaa

SEQ ID NO: 186815 - RNA, 20 nt, Artificial Sequence
  Synthetic
auaaaugaggguugguagaa

SEQ ID NO: 186816 - RNA, 21 nt, Artificial Sequence
  Synthetic
gauaaaugaggguugguagaa

SEQ ID NO: 186817 - RNA, 22 nt, Artificial Sequence
  Synthetic
ggauaaaugaggguugguagaa

SEQ ID NO: 186818 - RNA, 23 nt, Artificial Sequence
  Synthetic
gggauaaaugaggguugguagaa

SEQ ID NO: 186819 - RNA, 24 nt, Artificial Sequence
  Synthetic
agggauaaaugaggguugguagaa

SEQ ID NO: 186820 - RNA, 18 nt, Artificial Sequence
  Synthetic
uuuguauuuuugguagaa

SEQ ID NO: 186821 - RNA, 19 nt, Artificial Sequence
  Synthetic
uuuuguauuuuugguagaa

SEQ ID NO: 186822 - RNA, 20 nt, Artificial Sequence
  Synthetic
uuuuuguauuuuugguagaa

SEQ ID NO: 186823 - RNA, 21 nt, Artificial Sequence
  Synthetic
uuuuuuguauuuuugguagaa

SEQ ID NO: 186824 - RNA, 22 nt, Artificial Sequence
  Synthetic
auuuuuuguauuuuugguagaa

SEQ ID NO: 186825 - RNA, 23 nt, Artificial Sequence
  Synthetic
aauuuuuuguauuuuugguagaa

SEQ ID NO: 186826 - RNA, 24 nt, Artificial Sequence
  Synthetic
uaauuuuuuguauuuuugguagaa

SEQ ID NO: 186827 - RNA, 18 nt, Artificial Sequence
  Synthetic
augugucacacuguagaa

SEQ ID NO: 186828 - RNA, 19 nt, Artificial Sequence
  Synthetic
gaugugucacacuguagaa

SEQ ID NO: 186829 - RNA, 20 nt, Artificial Sequence
  Synthetic
agaugugucacacuguagaa

SEQ ID NO: 186830 - RNA, 21 nt, Artificial Sequence
  Synthetic
gagaugugucacacuguagaa

SEQ ID NO: 186831 - RNA, 22 nt, Artificial Sequence
  Synthetic
ugagaugugucacacuguagaa

SEQ ID NO: 186832 - RNA, 23 nt, Artificial Sequence
  Synthetic
augagaugugucacacuguagaa

SEQ ID NO: 186833 - RNA, 24 nt, Artificial Sequence
  Synthetic
aaugagaugugucacacuguagaa

SEQ ID NO: 186834 - RNA, 18 nt, Artificial Sequence
  Synthetic
uugaguaacucuguagaa

SEQ ID NO: 186835 - RNA, 19 nt, Artificial Sequence
  Synthetic
uuugaguaacucuguagaa

SEQ ID NO: 186836 - RNA, 20 nt, Artificial Sequence
  Synthetic
guuugaguaacucuguagaa

SEQ ID NO: 186837 - RNA, 21 nt, Artificial Sequence
  Synthetic
aguuugaguaacucuguagaa

SEQ ID NO: 186838 - RNA, 22 nt, Artificial Sequence
  Synthetic
uaguuugaguaacucuguagaa

SEQ ID NO: 186839 - RNA, 23 nt, Artificial Sequence
  Synthetic
uuaguuugaguaacucuguagaa

SEQ ID NO: 186840 - RNA, 24 nt, Artificial Sequence
  Synthetic
uuuaguuugaguaacucuguagaa

SEQ ID NO: 186841 - RNA, 18 nt, Artificial Sequence
  Synthetic
gcugccuaggguguagaa

SEQ ID NO: 186842 - RNA, 19 nt, Artificial Sequence
  Synthetic
ggcugccuaggguguagaa

SEQ ID NO: 186843 - RNA, 20 nt, Artificial Sequence
  Synthetic
aggcugccuaggguguagaa

SEQ ID NO: 186844 - RNA, 21 nt, Artificial Sequence
  Synthetic
aaggcugccuaggguguagaa

SEQ ID NO: 186845 - RNA, 22 nt, Artificial Sequence
  Synthetic
aaaggcugccuaggguguagaa

SEQ ID NO: 186846 - RNA, 23 nt, Artificial Sequence
  Synthetic
aaaaggcugccuaggguguagaa

SEQ ID NO: 186847 - RNA, 24 nt, Artificial Sequence
  Synthetic
gaaaaggcugccuaggguguagaa

SEQ ID NO: 186848 - RNA, 18 nt, Artificial Sequence
  Synthetic
uguucuguucuuguagaa

SEQ ID NO: 186849 - RNA, 19 nt, Artificial Sequence
  Synthetic
uuguucuguucuuguagaa

SEQ ID NO: 186850 - RNA, 20 nt, Artificial Sequence
  Synthetic
cuuguucuguucuuguagaa

SEQ ID NO: 186851 - RNA, 21 nt, Artificial Sequence
  Synthetic
ucuuguucuguucuuguagaa

SEQ ID NO: 186852 - RNA, 22 nt, Artificial Sequence
  Synthetic
cucuuguucuguucuuguagaa

SEQ ID NO: 186853 - RNA, 23 nt, Artificial Sequence
  Synthetic
ccucuuguucuguucuuguagaa

SEQ ID NO: 186854 - RNA, 24 nt, Artificial Sequence
  Synthetic
uccucuuguucuguucuuguagaa

SEQ ID NO: 186855 - RNA, 18 nt, Artificial Sequence
  Synthetic
ucacagcugguuguagaa

SEQ ID NO: 186856 - RNA, 19 nt, Artificial Sequence
  Synthetic
gucacagcugguuguagaa

SEQ ID NO: 186857 - RNA, 20 nt, Artificial Sequence
  Synthetic
agucacagcugguuguagaa

SEQ ID NO: 186858 - RNA, 21 nt, Artificial Sequence
  Synthetic
uagucacagcugguuguagaa

SEQ ID NO: 186859 - RNA, 22 nt, Artificial Sequence
  Synthetic
auagucacagcugguuguagaa

SEQ ID NO: 186860 - RNA, 23 nt, Artificial Sequence
  Synthetic
gauagucacagcugguuguagaa

SEQ ID NO: 186861 - RNA, 24 nt, Artificial Sequence
  Synthetic
cgauagucacagcugguuguagaa

SEQ ID NO: 186862 - RNA, 18 nt, Artificial Sequence
  Synthetic
uagaauuuuuuuguagaa

SEQ ID NO: 186863 - RNA, 19 nt, Artificial Sequence
  Synthetic
uuagaauuuuuuuguagaa

SEQ ID NO: 186864 - RNA, 20 nt, Artificial Sequence
  Synthetic
auuagaauuuuuuuguagaa

SEQ ID NO: 186865 - RNA, 21 nt, Artificial Sequence
  Synthetic
aauuagaauuuuuuuguagaa

SEQ ID NO: 186866 - RNA, 22 nt, Artificial Sequence
  Synthetic
caauuagaauuuuuuuguagaa

SEQ ID NO: 186867 - RNA, 23 nt, Artificial Sequence
  Synthetic
ucaauuagaauuuuuuuguagaa

SEQ ID NO: 186868 - RNA, 24 nt, Artificial Sequence
  Synthetic
gucaauuagaauuuuuuuguagaa

SEQ ID NO: 186869 - RNA, 18 nt, Artificial Sequence
  Synthetic
uuagugacaaaauuagaa

SEQ ID NO: 186870 - RNA, 19 nt, Artificial Sequence
  Synthetic
guuagugacaaaauuagaa

SEQ ID NO: 186871 - RNA, 20 nt, Artificial Sequence
  Synthetic
aguuagugacaaaauuagaa

SEQ ID NO: 186872 - RNA, 21 nt, Artificial Sequence
  Synthetic
caguuagugacaaaauuagaa

SEQ ID NO: 186873 - RNA, 22 nt, Artificial Sequence
  Synthetic
acaguuagugacaaaauuagaa

SEQ ID NO: 186874 - RNA, 23 nt, Artificial Sequence
  Synthetic
aacaguuagugacaaaauuagaa

SEQ ID NO: 186875 - RNA, 24 nt, Artificial Sequence
  Synthetic
uaacaguuagugacaaaauuagaa

SEQ ID NO: 186876 - RNA, 18 nt, Artificial Sequence
  Synthetic
aucguauuuuaauuagaa

SEQ ID NO: 186877 - RNA, 19 nt, Artificial Sequence
  Synthetic
caucguauuuuaauuagaa

SEQ ID NO: 186878 - RNA, 20 nt, Artificial Sequence
  Synthetic
gcaucguauuuuaauuagaa

SEQ ID NO: 186879 - RNA, 21 nt, Artificial Sequence
  Synthetic
ggcaucguauuuuaauuagaa

SEQ ID NO: 186880 - RNA, 22 nt, Artificial Sequence
  Synthetic
uggcaucguauuuuaauuagaa

SEQ ID NO: 186881 - RNA, 23 nt, Artificial Sequence
  Synthetic
uuggcaucguauuuuaauuagaa

SEQ ID NO: 186882 - RNA, 24 nt, Artificial Sequence
  Synthetic
uuuggcaucguauuuuaauuagaa

SEQ ID NO: 186883 - RNA, 18 nt, Artificial Sequence
  Synthetic
cuuuccuagucauuagaa

SEQ ID NO: 186884 - RNA, 19 nt, Artificial Sequence
  Synthetic
ucuuuccuagucauuagaa

SEQ ID NO: 186885 - RNA, 20 nt, Artificial Sequence
  Synthetic
cucuuuccuagucauuagaa

SEQ ID NO: 186886 - RNA, 21 nt, Artificial Sequence
  Synthetic
acucuuuccuagucauuagaa

SEQ ID NO: 186887 - RNA, 22 nt, Artificial Sequence
  Synthetic
uacucuuuccuagucauuagaa

SEQ ID NO: 186888 - RNA, 23 nt, Artificial Sequence
  Synthetic
auacucuuuccuagucauuagaa

SEQ ID NO: 186889 - RNA, 24 nt, Artificial Sequence
  Synthetic
uauacucuuuccuagucauuagaa

SEQ ID NO: 186890 - RNA, 18 nt, Artificial Sequence
  Synthetic
acaaagucacgauuagaa

SEQ ID NO: 186891 - RNA, 19 nt, Artificial Sequence
  Synthetic
uacaaagucacgauuagaa

SEQ ID NO: 186892 - RNA, 20 nt, Artificial Sequence
  Synthetic
guacaaagucacgauuagaa

SEQ ID NO: 186893 - RNA, 21 nt, Artificial Sequence
  Synthetic
gguacaaagucacgauuagaa

SEQ ID NO: 186894 - RNA, 22 nt, Artificial Sequence
  Synthetic
ggguacaaagucacgauuagaa

SEQ ID NO: 186895 - RNA, 23 nt, Artificial Sequence
  Synthetic
uggguacaaagucacgauuagaa

SEQ ID NO: 186896 - RNA, 24 nt, Artificial Sequence
  Synthetic
auggguacaaagucacgauuagaa

SEQ ID NO: 186897 - RNA, 18 nt, Artificial Sequence
  Synthetic
auuucaaauggauuagaa

SEQ ID NO: 186898 - RNA, 19 nt, Artificial Sequence
  Synthetic
uauuucaaauggauuagaa

SEQ ID NO: 186899 - RNA, 20 nt, Artificial Sequence
  Synthetic
uuauuucaaauggauuagaa

SEQ ID NO: 186900 - RNA, 21 nt, Artificial Sequence
  Synthetic
guuauuucaaauggauuagaa

SEQ ID NO: 186901 - RNA, 22 nt, Artificial Sequence
  Synthetic
uguuauuucaaauggauuagaa

SEQ ID NO: 186902 - RNA, 23 nt, Artificial Sequence
  Synthetic
uuguuauuucaaauggauuagaa

SEQ ID NO: 186903 - RNA, 24 nt, Artificial Sequence
  Synthetic
uuuguuauuucaaauggauuagaa

SEQ ID NO: 186904 - RNA, 18 nt, Artificial Sequence
  Synthetic
acacgcuguugauuagaa

SEQ ID NO: 186905 - RNA, 19 nt, Artificial Sequence
  Synthetic
uacacgcuguugauuagaa

SEQ ID NO: 186906 - RNA, 20 nt, Artificial Sequence
  Synthetic
auacacgcuguugauuagaa

SEQ ID NO: 186907 - RNA, 21 nt, Artificial Sequence
  Synthetic
aauacacgcuguugauuagaa

SEQ ID NO: 186908 - RNA, 22 nt, Artificial Sequence
  Synthetic
aaauacacgcuguugauuagaa

SEQ ID NO: 186909 - RNA, 23 nt, Artificial Sequence
  Synthetic
caaauacacgcuguugauuagaa

SEQ ID NO: 186910 - RNA, 24 nt, Artificial Sequence
  Synthetic
gcaaauacacgcuguugauuagaa

SEQ ID NO: 186911 - RNA, 18 nt, Artificial Sequence
  Synthetic
gugaauaaaauauuagaa

SEQ ID NO: 186912 - RNA, 19 nt, Artificial Sequence
  Synthetic
ugugaauaaaauauuagaa

SEQ ID NO: 186913 - RNA, 20 nt, Artificial Sequence
  Synthetic
cugugaauaaaauauuagaa

SEQ ID NO: 186914 - RNA, 21 nt, Artificial Sequence
  Synthetic
acugugaauaaaauauuagaa

SEQ ID NO: 186915 - RNA, 22 nt, Artificial Sequence
  Synthetic
cacugugaauaaaauauuagaa

SEQ ID NO: 186916 - RNA, 23 nt, Artificial Sequence
  Synthetic
ucacugugaauaaaauauuagaa

SEQ ID NO: 186917 - RNA, 24 nt, Artificial Sequence
  Synthetic
gucacugugaauaaaauauuagaa

SEQ ID NO: 186918 - RNA, 18 nt, Artificial Sequence
  Synthetic
uauuguauaguauuagaa

SEQ ID NO: 186919 - RNA, 19 nt, Artificial Sequence
  Synthetic
auauuguauaguauuagaa

SEQ ID NO: 186920 - RNA, 20 nt, Artificial Sequence
  Synthetic
aauauuguauaguauuagaa

SEQ ID NO: 186921 - RNA, 21 nt, Artificial Sequence
  Synthetic
uaauauuguauaguauuagaa

SEQ ID NO: 186922 - RNA, 22 nt, Artificial Sequence
  Synthetic
cuaauauuguauaguauuagaa

SEQ ID NO: 186923 - RNA, 23 nt, Artificial Sequence
  Synthetic
ucuaauauuguauaguauuagaa

SEQ ID NO: 186924 - RNA, 24 nt, Artificial Sequence
  Synthetic
aucuaauauuguauaguauuagaa

SEQ ID NO: 186925 - RNA, 18 nt, Artificial Sequence
  Synthetic
accugccauguauuagaa

SEQ ID NO: 186926 - RNA, 19 nt, Artificial Sequence
  Synthetic
caccugccauguauuagaa

SEQ ID NO: 186927 - RNA, 20 nt, Artificial Sequence
  Synthetic
ucaccugccauguauuagaa

SEQ ID NO: 186928 - RNA, 21 nt, Artificial Sequence
  Synthetic
aucaccugccauguauuagaa

SEQ ID NO: 186929 - RNA, 22 nt, Artificial Sequence
  Synthetic
caucaccugccauguauuagaa

SEQ ID NO: 186930 - RNA, 23 nt, Artificial Sequence
  Synthetic
acaucaccugccauguauuagaa

SEQ ID NO: 186931 - RNA, 24 nt, Artificial Sequence
  Synthetic
uacaucaccugccauguauuagaa

SEQ ID NO: 186932 - RNA, 18 nt, Artificial Sequence
  Synthetic
aauguucuguuauuagaa

SEQ ID NO: 186933 - RNA, 19 nt, Artificial Sequence
  Synthetic
aaauguucuguuauuagaa

SEQ ID NO: 186934 - RNA, 20 nt, Artificial Sequence
  Synthetic
gaaauguucuguuauuagaa

SEQ ID NO: 186935 - RNA, 21 nt, Artificial Sequence
  Synthetic
ggaaauguucuguuauuagaa

SEQ ID NO: 186936 - RNA, 22 nt, Artificial Sequence
  Synthetic
uggaaauguucuguuauuagaa

SEQ ID NO: 186937 - RNA, 23 nt, Artificial Sequence
  Synthetic
auggaaauguucuguuauuagaa

SEQ ID NO: 186938 - RNA, 24 nt, Artificial Sequence
  Synthetic
aauggaaauguucuguuauuagaa

SEQ ID NO: 186939 - RNA, 18 nt, Artificial Sequence
  Synthetic
aucuugacuggcuuagaa

SEQ ID NO: 186940 - RNA, 19 nt, Artificial Sequence
  Synthetic
uaucuugacuggcuuagaa

SEQ ID NO: 186941 - RNA, 20 nt, Artificial Sequence
  Synthetic
uuaucuugacuggcuuagaa

SEQ ID NO: 186942 - RNA, 21 nt, Artificial Sequence
  Synthetic
auuaucuugacuggcuuagaa

SEQ ID NO: 186943 - RNA, 22 nt, Artificial Sequence
  Synthetic
gauuaucuugacuggcuuagaa

SEQ ID NO: 186944 - RNA, 23 nt, Artificial Sequence
  Synthetic
agauuaucuugacuggcuuagaa

SEQ ID NO: 186945 - RNA, 24 nt, Artificial Sequence
  Synthetic
gagauuaucuugacuggcuuagaa

SEQ ID NO: 186946 - RNA, 18 nt, Artificial Sequence
  Synthetic
gauaaauacugcuuagaa

SEQ ID NO: 186947 - RNA, 19 nt, Artificial Sequence
  Synthetic
ugauaaauacugcuuagaa

SEQ ID NO: 186948 - RNA, 20 nt, Artificial Sequence
  Synthetic
cugauaaauacugcuuagaa

SEQ ID NO: 186949 - RNA, 21 nt, Artificial Sequence
  Synthetic
acugauaaauacugcuuagaa

SEQ ID NO: 186950 - RNA, 22 nt, Artificial Sequence
  Synthetic
uacugauaaauacugcuuagaa

SEQ ID NO: 186951 - RNA, 23 nt, Artificial Sequence
  Synthetic
auacugauaaauacugcuuagaa

SEQ ID NO: 186952 - RNA, 24 nt, Artificial Sequence
  Synthetic
aauacugauaaauacugcuuagaa

SEQ ID NO: 186953 - RNA, 18 nt, Artificial Sequence
  Synthetic
agcaaaugcugcuuagaa

SEQ ID NO: 186954 - RNA, 19 nt, Artificial Sequence
  Synthetic
gagcaaaugcugcuuagaa

SEQ ID NO: 186955 - RNA, 20 nt, Artificial Sequence
  Synthetic
ugagcaaaugcugcuuagaa

SEQ ID NO: 186956 - RNA, 21 nt, Artificial Sequence
  Synthetic
uugagcaaaugcugcuuagaa

SEQ ID NO: 186957 - RNA, 22 nt, Artificial Sequence
  Synthetic
uuugagcaaaugcugcuuagaa

SEQ ID NO: 186958 - RNA, 23 nt, Artificial Sequence
  Synthetic
uuuugagcaaaugcugcuuagaa

SEQ ID NO: 186959 - RNA, 24 nt, Artificial Sequence
  Synthetic
auuuugagcaaaugcugcuuagaa

SEQ ID NO: 186960 - RNA, 18 nt, Artificial Sequence
  Synthetic
acaucaguuuucuuagaa

SEQ ID NO: 186961 - RNA, 19 nt, Artificial Sequence
  Synthetic
aacaucaguuuucuuagaa

SEQ ID NO: 186962 - RNA, 20 nt, Artificial Sequence
  Synthetic
caacaucaguuuucuuagaa

SEQ ID NO: 186963 - RNA, 21 nt, Artificial Sequence
  Synthetic
acaacaucaguuuucuuagaa

SEQ ID NO: 186964 - RNA, 22 nt, Artificial Sequence
  Synthetic
gacaacaucaguuuucuuagaa

SEQ ID NO: 186965 - RNA, 23 nt, Artificial Sequence
  Synthetic
ugacaacaucaguuuucuuagaa

SEQ ID NO: 186966 - RNA, 24 nt, Artificial Sequence
  Synthetic
gugacaacaucaguuuucuuagaa

SEQ ID NO: 186967 - RNA, 18 nt, Artificial Sequence
  Synthetic
aauccuuuuuucuuagaa

SEQ ID NO: 186968 - RNA, 19 nt, Artificial Sequence
  Synthetic
uaauccuuuuuucuuagaa

SEQ ID NO: 186969 - RNA, 20 nt, Artificial Sequence
  Synthetic
cuaauccuuuuuucuuagaa

SEQ ID NO: 186970 - RNA, 21 nt, Artificial Sequence
  Synthetic
ucuaauccuuuuuucuuagaa

SEQ ID NO: 186971 - RNA, 22 nt, Artificial Sequence
  Synthetic
uucuaauccuuuuuucuuagaa

SEQ ID NO: 186972 - RNA, 23 nt, Artificial Sequence
  Synthetic
uuucuaauccuuuuuucuuagaa

SEQ ID NO: 186973 - RNA, 24 nt, Artificial Sequence
  Synthetic
uuuucuaauccuuuuuucuuagaa

SEQ ID NO: 186974 - RNA, 18 nt, Artificial Sequence
  Synthetic
acugaacaaauguuagaa

SEQ ID NO: 186975 - RNA, 19 nt, Artificial Sequence
  Synthetic
uacugaacaaauguuagaa

SEQ ID NO: 186976 - RNA, 20 nt, Artificial Sequence
  Synthetic
guacugaacaaauguuagaa

SEQ ID NO: 186977 - RNA, 21 nt, Artificial Sequence
  Synthetic
aguacugaacaaauguuagaa

SEQ ID NO: 186978 - RNA, 22 nt, Artificial Sequence
  Synthetic
uaguacugaacaaauguuagaa

SEQ ID NO: 186979 - RNA, 23 nt, Artificial Sequence
  Synthetic
cuaguacugaacaaauguuagaa

SEQ ID NO: 186980 - RNA, 24 nt, Artificial Sequence
  Synthetic
gcuaguacugaacaaauguuagaa

SEQ ID NO: 186981 - RNA, 18 nt, Artificial Sequence
  Synthetic
aaggaauaaguguuagaa

SEQ ID NO: 186982 - RNA, 19 nt, Artificial Sequence
  Synthetic
uaaggaauaaguguuagaa

SEQ ID NO: 186983 - RNA, 20 nt, Artificial Sequence
  Synthetic
guaaggaauaaguguuagaa

SEQ ID NO: 186984 - RNA, 21 nt, Artificial Sequence
  Synthetic
aguaaggaauaaguguuagaa

SEQ ID NO: 186985 - RNA, 22 nt, Artificial Sequence
  Synthetic
aaguaaggaauaaguguuagaa

SEQ ID NO: 186986 - RNA, 23 nt, Artificial Sequence
  Synthetic
aaaguaaggaauaaguguuagaa

SEQ ID NO: 186987 - RNA, 24 nt, Artificial Sequence
  Synthetic
gaaaguaaggaauaaguguuagaa

SEQ ID NO: 186988 - RNA, 18 nt, Artificial Sequence
  Synthetic
uuuauauuguauuuagaa

SEQ ID NO: 186989 - RNA, 19 nt, Artificial Sequence
  Synthetic
guuuauauuguauuuagaa

SEQ ID NO: 186990 - RNA, 20 nt, Artificial Sequence
  Synthetic
gguuuauauuguauuuagaa

SEQ ID NO: 186991 - RNA, 21 nt, Artificial Sequence
  Synthetic
ugguuuauauuguauuuagaa

SEQ ID NO: 186992 - RNA, 22 nt, Artificial Sequence
  Synthetic
cugguuuauauuguauuuagaa

SEQ ID NO: 186993 - RNA, 23 nt, Artificial Sequence
  Synthetic
acugguuuauauuguauuuagaa

SEQ ID NO: 186994 - RNA, 24 nt, Artificial Sequence
  Synthetic
aacugguuuauauuguauuuagaa

SEQ ID NO: 186995 - RNA, 18 nt, Artificial Sequence
  Synthetic
uugagaauuuauuuagaa

SEQ ID NO: 186996 - RNA, 19 nt, Artificial Sequence
  Synthetic
auugagaauuuauuuagaa

SEQ ID NO: 186997 - RNA, 20 nt, Artificial Sequence
  Synthetic
cauugagaauuuauuuagaa

SEQ ID NO: 186998 - RNA, 21 nt, Artificial Sequence
  Synthetic
ucauugagaauuuauuuagaa

SEQ ID NO: 186999 - RNA, 22 nt, Artificial Sequence
  Synthetic
aucauugagaauuuauuuagaa

SEQ ID NO: 187000 - RNA, 23 nt, Artificial Sequence
  Synthetic
aaucauugagaauuuauuuagaa

SEQ ID NO: 187001 - RNA, 24 nt, Artificial Sequence
  Synthetic
aaaucauugagaauuuauuuagaa

SEQ ID NO: 187002 - RNA, 18 nt, Artificial Sequence
  Synthetic
auaauuaaaaguuuagaa

SEQ ID NO: 187003 - RNA, 19 nt, Artificial Sequence
  Synthetic
aauaauuaaaaguuuagaa

SEQ ID NO: 187004 - RNA, 20 nt, Artificial Sequence
  Synthetic
aaauaauuaaaaguuuagaa

SEQ ID NO: 187005 - RNA, 21 nt, Artificial Sequence
  Synthetic
aaaauaauuaaaaguuuagaa

SEQ ID NO: 187006 - RNA, 22 nt, Artificial Sequence
  Synthetic
gaaaauaauuaaaaguuuagaa

SEQ ID NO: 187007 - RNA, 23 nt, Artificial Sequence
  Synthetic
ugaaaauaauuaaaaguuuagaa

SEQ ID NO: 187008 - RNA, 24 nt, Artificial Sequence
  Synthetic
augaaaauaauuaaaaguuuagaa

SEQ ID NO: 187009 - RNA, 18 nt, Artificial Sequence
  Synthetic
ucuaauagaaguuuagaa

SEQ ID NO: 187010 - RNA, 19 nt, Artificial Sequence
  Synthetic
cucuaauagaaguuuagaa

SEQ ID NO: 187011 - RNA, 20 nt, Artificial Sequence
  Synthetic
gcucuaauagaaguuuagaa

SEQ ID NO: 187012 - RNA, 21 nt, Artificial Sequence
  Synthetic
ggcucuaauagaaguuuagaa

SEQ ID NO: 187013 - RNA, 22 nt, Artificial Sequence
  Synthetic
aggcucuaauagaaguuuagaa

SEQ ID NO: 187014 - RNA, 23 nt, Artificial Sequence
  Synthetic
gaggcucuaauagaaguuuagaa

SEQ ID NO: 187015 - RNA, 24 nt, Artificial Sequence
  Synthetic
ugaggcucuaauagaaguuuagaa

SEQ ID NO: 187016 - RNA, 18 nt, Artificial Sequence
  Synthetic
acacucagauguuuagaa

SEQ ID NO: 187017 - RNA, 19 nt, Artificial Sequence
  Synthetic
gacacucagauguuuagaa

SEQ ID NO: 187018 - RNA, 20 nt, Artificial Sequence
  Synthetic
agacacucagauguuuagaa

SEQ ID NO: 187019 - RNA, 21 nt, Artificial Sequence
  Synthetic
gagacacucagauguuuagaa

SEQ ID NO: 187020 - RNA, 22 nt, Artificial Sequence
  Synthetic
ugagacacucagauguuuagaa

SEQ ID NO: 187021 - RNA, 23 nt, Artificial Sequence
  Synthetic
cugagacacucagauguuuagaa

SEQ ID NO: 187022 - RNA, 24 nt, Artificial Sequence
  Synthetic
ccugagacacucagauguuuagaa

SEQ ID NO: 187023 - RNA, 18 nt, Artificial Sequence
  Synthetic
cacuguaauauuuuagaa

SEQ ID NO: 187024 - RNA, 19 nt, Artificial Sequence
  Synthetic
gcacuguaauauuuuagaa

SEQ ID NO: 187025 - RNA, 20 nt, Artificial Sequence
  Synthetic
ugcacuguaauauuuuagaa

SEQ ID NO: 187026 - RNA, 21 nt, Artificial Sequence
  Synthetic
gugcacuguaauauuuuagaa

SEQ ID NO: 187027 - RNA, 22 nt, Artificial Sequence
  Synthetic
agugcacuguaauauuuuagaa

SEQ ID NO: 187028 - RNA, 23 nt, Artificial Sequence
  Synthetic
gagugcacuguaauauuuuagaa

SEQ ID NO: 187029 - RNA, 24 nt, Artificial Sequence
  Synthetic
ggagugcacuguaauauuuuagaa

SEQ ID NO: 187030 - RNA, 18 nt, Artificial Sequence
  Synthetic
gagaacauucuuuuagaa

SEQ ID NO: 187031 - RNA, 19 nt, Artificial Sequence
  Synthetic
ggagaacauucuuuuagaa

SEQ ID NO: 187032 - RNA, 20 nt, Artificial Sequence
  Synthetic
gggagaacauucuuuuagaa

SEQ ID NO: 187033 - RNA, 21 nt, Artificial Sequence
  Synthetic
agggagaacauucuuuuagaa

SEQ ID NO: 187034 - RNA, 22 nt, Artificial Sequence
  Synthetic
aagggagaacauucuuuuagaa

SEQ ID NO: 187035 - RNA, 23 nt, Artificial Sequence
  Synthetic
uaagggagaacauucuuuuagaa

SEQ ID NO: 187036 - RNA, 24 nt, Artificial Sequence
  Synthetic
auaagggagaacauucuuuuagaa

SEQ ID NO: 187037 - RNA, 18 nt, Artificial Sequence
  Synthetic
gaaaaugaaagaaacgaa

SEQ ID NO: 187038 - RNA, 19 nt, Artificial Sequence
  Synthetic
agaaaaugaaagaaacgaa

SEQ ID NO: 187039 - RNA, 20 nt, Artificial Sequence
  Synthetic
gagaaaaugaaagaaacgaa

SEQ ID NO: 187040 - RNA, 21 nt, Artificial Sequence
  Synthetic
ugagaaaaugaaagaaacgaa

SEQ ID NO: 187041 - RNA, 22 nt, Artificial Sequence
  Synthetic
augagaaaaugaaagaaacgaa

SEQ ID NO: 187042 - RNA, 23 nt, Artificial Sequence
  Synthetic
aaugagaaaaugaaagaaacgaa

SEQ ID NO: 187043 - RNA, 24 nt, Artificial Sequence
  Synthetic
aaaugagaaaaugaaagaaacgaa

SEQ ID NO: 187044 - RNA, 18 nt, Artificial Sequence
  Synthetic
acggaaggagacaacgaa

SEQ ID NO: 187045 - RNA, 19 nt, Artificial Sequence
  Synthetic
aacggaaggagacaacgaa

SEQ ID NO: 187046 - RNA, 20 nt, Artificial Sequence
  Synthetic
gaacggaaggagacaacgaa

SEQ ID NO: 187047 - RNA, 21 nt, Artificial Sequence
  Synthetic
ugaacggaaggagacaacgaa

SEQ ID NO: 187048 - RNA, 22 nt, Artificial Sequence
  Synthetic
cugaacggaaggagacaacgaa

SEQ ID NO: 187049 - RNA, 23 nt, Artificial Sequence
  Synthetic
acugaacggaaggagacaacgaa

SEQ ID NO: 187050 - RNA, 24 nt, Artificial Sequence
  Synthetic
aacugaacggaaggagacaacgaa

SEQ ID NO: 187051 - RNA, 18 nt, Artificial Sequence
  Synthetic
ucuaagagacagaacgaa

SEQ ID NO: 187052 - RNA, 19 nt, Artificial Sequence
  Synthetic
uucuaagagacagaacgaa

SEQ ID NO: 187053 - RNA, 20 nt, Artificial Sequence
  Synthetic
guucuaagagacagaacgaa

SEQ ID NO: 187054 - RNA, 21 nt, Artificial Sequence
  Synthetic
aguucuaagagacagaacgaa

SEQ ID NO: 187055 - RNA, 22 nt, Artificial Sequence
  Synthetic
gaguucuaagagacagaacgaa

SEQ ID NO: 187056 - RNA, 23 nt, Artificial Sequence
  Synthetic
ugaguucuaagagacagaacgaa

SEQ ID NO: 187057 - RNA, 24 nt, Artificial Sequence
  Synthetic
cugaguucuaagagacagaacgaa

SEQ ID NO: 187058 - RNA, 18 nt, Artificial Sequence
  Synthetic
cuagucaucucuaacgaa

SEQ ID NO: 187059 - RNA, 19 nt, Artificial Sequence
  Synthetic
gcuagucaucucuaacgaa

SEQ ID NO: 187060 - RNA, 20 nt, Artificial Sequence
  Synthetic
ugcuagucaucucuaacgaa

SEQ ID NO: 187061 - RNA, 21 nt, Artificial Sequence
  Synthetic
cugcuagucaucucuaacgaa

SEQ ID NO: 187062 - RNA, 22 nt, Artificial Sequence
  Synthetic
gcugcuagucaucucuaacgaa

SEQ ID NO: 187063 - RNA, 23 nt, Artificial Sequence
  Synthetic
ggcugcuagucaucucuaacgaa

SEQ ID NO: 187064 - RNA, 24 nt, Artificial Sequence
  Synthetic
aggcugcuagucaucucuaacgaa

SEQ ID NO: 187065 - RNA, 18 nt, Artificial Sequence
  Synthetic
auacuauacagccacgaa

SEQ ID NO: 187066 - RNA, 19 nt, Artificial Sequence
  Synthetic
aauacuauacagccacgaa

SEQ ID NO: 187067 - RNA, 20 nt, Artificial Sequence
  Synthetic
aaauacuauacagccacgaa

SEQ ID NO: 187068 - RNA, 21 nt, Artificial Sequence
  Synthetic
aaaauacuauacagccacgaa

SEQ ID NO: 187069 - RNA, 22 nt, Artificial Sequence
  Synthetic
uaaaauacuauacagccacgaa

SEQ ID NO: 187070 - RNA, 23 nt, Artificial Sequence
  Synthetic
auaaaauacuauacagccacgaa

SEQ ID NO: 187071 - RNA, 24 nt, Artificial Sequence
  Synthetic
cauaaaauacuauacagccacgaa

SEQ ID NO: 187072 - RNA, 18 nt, Artificial Sequence
  Synthetic
cuuucaacugaacccgaa

SEQ ID NO: 187073 - RNA, 19 nt, Artificial Sequence
  Synthetic
gcuuucaacugaacccgaa

SEQ ID NO: 187074 - RNA, 20 nt, Artificial Sequence
  Synthetic
ugcuuucaacugaacccgaa

SEQ ID NO: 187075 - RNA, 21 nt, Artificial Sequence
  Synthetic
uugcuuucaacugaacccgaa

SEQ ID NO: 187076 - RNA, 22 nt, Artificial Sequence
  Synthetic
uuugcuuucaacugaacccgaa

SEQ ID NO: 187077 - RNA, 23 nt, Artificial Sequence
  Synthetic
cuuugcuuucaacugaacccgaa

SEQ ID NO: 187078 - RNA, 24 nt, Artificial Sequence
  Synthetic
ucuuugcuuucaacugaacccgaa

SEQ ID NO: 187079 - RNA, 18 nt, Artificial Sequence
  Synthetic
aaguuauacuggcccgaa

SEQ ID NO: 187080 - RNA, 19 nt, Artificial Sequence
  Synthetic
uaaguuauacuggcccgaa

SEQ ID NO: 187081 - RNA, 20 nt, Artificial Sequence
  Synthetic
uuaaguuauacuggcccgaa

SEQ ID NO: 187082 - RNA, 21 nt, Artificial Sequence
  Synthetic
auuaaguuauacuggcccgaa

SEQ ID NO: 187083 - RNA, 22 nt, Artificial Sequence
  Synthetic
uauuaaguuauacuggcccgaa

SEQ ID NO: 187084 - RNA, 23 nt, Artificial Sequence
  Synthetic
cuauuaaguuauacuggcccgaa

SEQ ID NO: 187085 - RNA, 24 nt, Artificial Sequence
  Synthetic
ccuauuaaguuauacuggcccgaa

SEQ ID NO: 187086 - RNA, 18 nt, Artificial Sequence
  Synthetic
agcauugcuugucccgaa

SEQ ID NO: 187087 - RNA, 19 nt, Artificial Sequence
  Synthetic
gagcauugcuugucccgaa

SEQ ID NO: 187088 - RNA, 20 nt, Artificial Sequence
  Synthetic
ugagcauugcuugucccgaa

SEQ ID NO: 187089 - RNA, 21 nt, Artificial Sequence
  Synthetic
cugagcauugcuugucccgaa

SEQ ID NO: 187090 - RNA, 22 nt, Artificial Sequence
  Synthetic
acugagcauugcuugucccgaa

SEQ ID NO: 187091 - RNA, 23 nt, Artificial Sequence
  Synthetic
aacugagcauugcuugucccgaa

SEQ ID NO: 187092 - RNA, 24 nt, Artificial Sequence
  Synthetic
uaacugagcauugcuugucccgaa

SEQ ID NO: 187093 - RNA, 18 nt, Artificial Sequence
  Synthetic
acacuuugggaggccgaa

SEQ ID NO: 187094 - RNA, 19 nt, Artificial Sequence
  Synthetic
aacacuuugggaggccgaa

SEQ ID NO: 187095 - RNA, 20 nt, Artificial Sequence
  Synthetic
caacacuuugggaggccgaa

SEQ ID NO: 187096 - RNA, 21 nt, Artificial Sequence
  Synthetic
ccaacacuuugggaggccgaa

SEQ ID NO: 187097 - RNA, 22 nt, Artificial Sequence
  Synthetic
cccaacacuuugggaggccgaa

SEQ ID NO: 187098 - RNA, 23 nt, Artificial Sequence
  Synthetic
ucccaacacuuugggaggccgaa

SEQ ID NO: 187099 - RNA, 24 nt, Artificial Sequence
  Synthetic
aucccaacacuuugggaggccgaa

SEQ ID NO: 187100 - RNA, 18 nt, Artificial Sequence
  Synthetic
ucucagagaaaauccgaa

SEQ ID NO: 187101 - RNA, 19 nt, Artificial Sequence
  Synthetic
aucucagagaaaauccgaa

SEQ ID NO: 187102 - RNA, 20 nt, Artificial Sequence
  Synthetic
gaucucagagaaaauccgaa

SEQ ID NO: 187103 - RNA, 21 nt, Artificial Sequence
  Synthetic
agaucucagagaaaauccgaa

SEQ ID NO: 187104 - RNA, 22 nt, Artificial Sequence
  Synthetic
uagaucucagagaaaauccgaa

SEQ ID NO: 187105 - RNA, 23 nt, Artificial Sequence
  Synthetic
guagaucucagagaaaauccgaa

SEQ ID NO: 187106 - RNA, 24 nt, Artificial Sequence
  Synthetic
uguagaucucagagaaaauccgaa

SEQ ID NO: 187107 - RNA, 18 nt, Artificial Sequence
  Synthetic
cgaauuaggcacuccgaa

SEQ ID NO: 187108 - RNA, 19 nt, Artificial Sequence
  Synthetic
acgaauuaggcacuccgaa

SEQ ID NO: 187109 - RNA, 20 nt, Artificial Sequence
  Synthetic
cacgaauuaggcacuccgaa

SEQ ID NO: 187110 - RNA, 21 nt, Artificial Sequence
  Synthetic
acacgaauuaggcacuccgaa

SEQ ID NO: 187111 - RNA, 22 nt, Artificial Sequence
  Synthetic
aacacgaauuaggcacuccgaa

SEQ ID NO: 187112 - RNA, 23 nt, Artificial Sequence
  Synthetic
caacacgaauuaggcacuccgaa

SEQ ID NO: 187113 - RNA, 24 nt, Artificial Sequence
  Synthetic
ccaacacgaauuaggcacuccgaa

SEQ ID NO: 187114 - RNA, 18 nt, Artificial Sequence
  Synthetic
uagaauuucaacagcgaa

SEQ ID NO: 187115 - RNA, 19 nt, Artificial Sequence
  Synthetic
guagaauuucaacagcgaa

SEQ ID NO: 187116 - RNA, 20 nt, Artificial Sequence
  Synthetic
uguagaauuucaacagcgaa

SEQ ID NO: 187117 - RNA, 21 nt, Artificial Sequence
  Synthetic
guguagaauuucaacagcgaa

SEQ ID NO: 187118 - RNA, 22 nt, Artificial Sequence
  Synthetic
uguguagaauuucaacagcgaa

SEQ ID NO: 187119 - RNA, 23 nt, Artificial Sequence
  Synthetic
auguguagaauuucaacagcgaa

SEQ ID NO: 187120 - RNA, 24 nt, Artificial Sequence
  Synthetic
aauguguagaauuucaacagcgaa

SEQ ID NO: 187121 - RNA, 18 nt, Artificial Sequence
  Synthetic
agauacagagaacgcgaa

SEQ ID NO: 187122 - RNA, 19 nt, Artificial Sequence
  Synthetic
gagauacagagaacgcgaa

SEQ ID NO: 187123 - RNA, 20 nt, Artificial Sequence
  Synthetic
agagauacagagaacgcgaa

SEQ ID NO: 187124 - RNA, 21 nt, Artificial Sequence
  Synthetic
gagagauacagagaacgcgaa

SEQ ID NO: 187125 - RNA, 22 nt, Artificial Sequence
  Synthetic
ggagagauacagagaacgcgaa

SEQ ID NO: 187126 - RNA, 23 nt, Artificial Sequence
  Synthetic
uggagagauacagagaacgcgaa

SEQ ID NO: 187127 - RNA, 24 nt, Artificial Sequence
  Synthetic
auggagagauacagagaacgcgaa

SEQ ID NO: 187128 - RNA, 18 nt, Artificial Sequence
  Synthetic
auaugcagaaugggcgaa

SEQ ID NO: 187129 - RNA, 19 nt, Artificial Sequence
  Synthetic
uauaugcagaaugggcgaa

SEQ ID NO: 187130 - RNA, 20 nt, Artificial Sequence
  Synthetic
auauaugcagaaugggcgaa

SEQ ID NO: 187131 - RNA, 21 nt, Artificial Sequence
  Synthetic
gauauaugcagaaugggcgaa

SEQ ID NO: 187132 - RNA, 22 nt, Artificial Sequence
  Synthetic
agauauaugcagaaugggcgaa

SEQ ID NO: 187133 - RNA, 23 nt, Artificial Sequence
  Synthetic
gagauauaugcagaaugggcgaa

SEQ ID NO: 187134 - RNA, 24 nt, Artificial Sequence
  Synthetic
ugagauauaugcagaaugggcgaa

SEQ ID NO: 187135 - RNA, 18 nt, Artificial Sequence
  Synthetic
aaccaggggcugggcgaa

SEQ ID NO: 187136 - RNA, 19 nt, Artificial Sequence
  Synthetic
uaaccaggggcugggcgaa

SEQ ID NO: 187137 - RNA, 20 nt, Artificial Sequence
  Synthetic
guaaccaggggcugggcgaa

SEQ ID NO: 187138 - RNA, 21 nt, Artificial Sequence
  Synthetic
aguaaccaggggcugggcgaa

SEQ ID NO: 187139 - RNA, 22 nt, Artificial Sequence
  Synthetic
uaguaaccaggggcugggcgaa

SEQ ID NO: 187140 - RNA, 23 nt, Artificial Sequence
  Synthetic
auaguaaccaggggcugggcgaa

SEQ ID NO: 187141 - RNA, 24 nt, Artificial Sequence
  Synthetic
gauaguaaccaggggcugggcgaa

SEQ ID NO: 187142 - RNA, 18 nt, Artificial Sequence
  Synthetic
caaaagaagcauggcgaa

SEQ ID NO: 187143 - RNA, 19 nt, Artificial Sequence
  Synthetic
gcaaaagaagcauggcgaa

SEQ ID NO: 187144 - RNA, 20 nt, Artificial Sequence
  Synthetic
agcaaaagaagcauggcgaa

SEQ ID NO: 187145 - RNA, 21 nt, Artificial Sequence
  Synthetic
aagcaaaagaagcauggcgaa

SEQ ID NO: 187146 - RNA, 22 nt, Artificial Sequence
  Synthetic
uaagcaaaagaagcauggcgaa

SEQ ID NO: 187147 - RNA, 23 nt, Artificial Sequence
  Synthetic
cuaagcaaaagaagcauggcgaa

SEQ ID NO: 187148 - RNA, 24 nt, Artificial Sequence
  Synthetic
ucuaagcaaaagaagcauggcgaa

SEQ ID NO: 187149 - RNA, 18 nt, Artificial Sequence
  Synthetic
acagaagguuaaugcgaa

SEQ ID NO: 187150 - RNA, 19 nt, Artificial Sequence
  Synthetic
cacagaagguuaaugcgaa

SEQ ID NO: 187151 - RNA, 20 nt, Artificial Sequence
  Synthetic
ccacagaagguuaaugcgaa

SEQ ID NO: 187152 - RNA, 21 nt, Artificial Sequence
  Synthetic
cccacagaagguuaaugcgaa

SEQ ID NO: 187153 - RNA, 22 nt, Artificial Sequence
  Synthetic
gcccacagaagguuaaugcgaa

SEQ ID NO: 187154 - RNA, 23 nt, Artificial Sequence
  Synthetic
agcccacagaagguuaaugcgaa

SEQ ID NO: 187155 - RNA, 24 nt, Artificial Sequence
  Synthetic
gagcccacagaagguuaaugcgaa

SEQ ID NO: 187156 - RNA, 18 nt, Artificial Sequence
  Synthetic
uguuugaaugucugcgaa

SEQ ID NO: 187157 - RNA, 19 nt, Artificial Sequence
  Synthetic
guguuugaaugucugcgaa

SEQ ID NO: 187158 - RNA, 20 nt, Artificial Sequence
  Synthetic
gguguuugaaugucugcgaa

SEQ ID NO: 187159 - RNA, 21 nt, Artificial Sequence
  Synthetic
ugguguuugaaugucugcgaa

SEQ ID NO: 187160 - RNA, 22 nt, Artificial Sequence
  Synthetic
augguguuugaaugucugcgaa

SEQ ID NO: 187161 - RNA, 23 nt, Artificial Sequence
  Synthetic
gaugguguuugaaugucugcgaa

SEQ ID NO: 187162 - RNA, 24 nt, Artificial Sequence
  Synthetic
ugaugguguuugaaugucugcgaa

SEQ ID NO: 187163 - RNA, 18 nt, Artificial Sequence
  Synthetic
cuggcguaauauugcgaa

SEQ ID NO: 187164 - RNA, 19 nt, Artificial Sequence
  Synthetic
acuggcguaauauugcgaa

SEQ ID NO: 187165 - RNA, 20 nt, Artificial Sequence
  Synthetic
aacuggcguaauauugcgaa

SEQ ID NO: 187166 - RNA, 21 nt, Artificial Sequence
  Synthetic
uaacuggcguaauauugcgaa

SEQ ID NO: 187167 - RNA, 22 nt, Artificial Sequence
  Synthetic
guaacuggcguaauauugcgaa

SEQ ID NO: 187168 - RNA, 23 nt, Artificial Sequence
  Synthetic
aguaacuggcguaauauugcgaa

SEQ ID NO: 187169 - RNA, 24 nt, Artificial Sequence
  Synthetic
aaguaacuggcguaauauugcgaa

SEQ ID NO: 187170 - RNA, 18 nt, Artificial Sequence
  Synthetic
uuaacguaguaucucgaa

SEQ ID NO: 187171 - RNA, 19 nt, Artificial Sequence
  Synthetic
guuaacguaguaucucgaa

SEQ ID NO: 187172 - RNA, 20 nt, Artificial Sequence
  Synthetic
aguuaacguaguaucucgaa

SEQ ID NO: 187173 - RNA, 21 nt, Artificial Sequence
  Synthetic
uaguuaacguaguaucucgaa

SEQ ID NO: 187174 - RNA, 22 nt, Artificial Sequence
  Synthetic
guaguuaacguaguaucucgaa

SEQ ID NO: 187175 - RNA, 23 nt, Artificial Sequence
  Synthetic
uguaguuaacguaguaucucgaa

SEQ ID NO: 187176 - RNA, 24 nt, Artificial Sequence
  Synthetic
auguaguuaacguaguaucucgaa

SEQ ID NO: 187177 - RNA, 18 nt, Artificial Sequence
  Synthetic
ugugagcauaaagucgaa

SEQ ID NO: 187178 - RNA, 19 nt, Artificial Sequence
  Synthetic
uugugagcauaaagucgaa

SEQ ID NO: 187179 - RNA, 20 nt, Artificial Sequence
  Synthetic
uuugugagcauaaagucgaa

SEQ ID NO: 187180 - RNA, 21 nt, Artificial Sequence
  Synthetic
auuugugagcauaaagucgaa

SEQ ID NO: 187181 - RNA, 22 nt, Artificial Sequence
  Synthetic
cauuugugagcauaaagucgaa

SEQ ID NO: 187182 - RNA, 23 nt, Artificial Sequence
  Synthetic
acauuugugagcauaaagucgaa

SEQ ID NO: 187183 - RNA, 24 nt, Artificial Sequence
  Synthetic
cacauuugugagcauaaagucgaa

SEQ ID NO: 187184 - RNA, 18 nt, Artificial Sequence
  Synthetic
gaaaaaagauaagucgaa

SEQ ID NO: 187185 - RNA, 19 nt, Artificial Sequence
  Synthetic
ggaaaaaagauaagucgaa

SEQ ID NO: 187186 - RNA, 20 nt, Artificial Sequence
  Synthetic
gggaaaaaagauaagucgaa

SEQ ID NO: 187187 - RNA, 21 nt, Artificial Sequence
  Synthetic
ugggaaaaaagauaagucgaa

SEQ ID NO: 187188 - RNA, 22 nt, Artificial Sequence
  Synthetic
gugggaaaaaagauaagucgaa

SEQ ID NO: 187189 - RNA, 23 nt, Artificial Sequence
  Synthetic
agugggaaaaaagauaagucgaa

SEQ ID NO: 187190 - RNA, 24 nt, Artificial Sequence
  Synthetic
aagugggaaaaaagauaagucgaa

SEQ ID NO: 187191 - RNA, 18 nt, Artificial Sequence
  Synthetic
aaauaaaucagauucgaa

SEQ ID NO: 187192 - RNA, 19 nt, Artificial Sequence
  Synthetic
caaauaaaucagauucgaa

SEQ ID NO: 187193 - RNA, 20 nt, Artificial Sequence
  Synthetic
ccaaauaaaucagauucgaa

SEQ ID NO: 187194 - RNA, 21 nt, Artificial Sequence
  Synthetic
accaaauaaaucagauucgaa

SEQ ID NO: 187195 - RNA, 22 nt, Artificial Sequence
  Synthetic
aaccaaauaaaucagauucgaa

SEQ ID NO: 187196 - RNA, 23 nt, Artificial Sequence
  Synthetic
aaaccaaauaaaucagauucgaa

SEQ ID NO: 187197 - RNA, 24 nt, Artificial Sequence
  Synthetic
gaaaccaaauaaaucagauucgaa

SEQ ID NO: 187198 - RNA, 18 nt, Artificial Sequence
  Synthetic
aaauuauuuuuauucgaa

SEQ ID NO: 187199 - RNA, 19 nt, Artificial Sequence
  Synthetic
uaaauuauuuuuauucgaa

SEQ ID NO: 187200 - RNA, 20 nt, Artificial Sequence
  Synthetic
cuaaauuauuuuuauucgaa

SEQ ID NO: 187201 - RNA, 21 nt, Artificial Sequence
  Synthetic
ucuaaauuauuuuuauucgaa

SEQ ID NO: 187202 - RNA, 22 nt, Artificial Sequence
  Synthetic
gucuaaauuauuuuuauucgaa

SEQ ID NO: 187203 - RNA, 23 nt, Artificial Sequence
  Synthetic
ugucuaaauuauuuuuauucgaa

SEQ ID NO: 187204 - RNA, 24 nt, Artificial Sequence
  Synthetic
cugucuaaauuauuuuuauucgaa

SEQ ID NO: 187205 - RNA, 18 nt, Artificial Sequence
  Synthetic
gagaaacaagauuucgaa

SEQ ID NO: 187206 - RNA, 19 nt, Artificial Sequence
  Synthetic
agagaaacaagauuucgaa

SEQ ID NO: 187207 - RNA, 20 nt, Artificial Sequence
  Synthetic
gagagaaacaagauuucgaa

SEQ ID NO: 187208 - RNA, 21 nt, Artificial Sequence
  Synthetic
agagagaaacaagauuucgaa

SEQ ID NO: 187209 - RNA, 22 nt, Artificial Sequence
  Synthetic
cagagagaaacaagauuucgaa

SEQ ID NO: 187210 - RNA, 23 nt, Artificial Sequence
  Synthetic
ucagagagaaacaagauuucgaa

SEQ ID NO: 187211 - RNA, 24 nt, Artificial Sequence
  Synthetic
uucagagagaaacaagauuucgaa

SEQ ID NO: 187212 - RNA, 18 nt, Artificial Sequence
  Synthetic
aauuuaagaaaaaaggaa

SEQ ID NO: 187213 - RNA, 19 nt, Artificial Sequence
  Synthetic
gaauuuaagaaaaaaggaa

SEQ ID NO: 187214 - RNA, 20 nt, Artificial Sequence
  Synthetic
ugaauuuaagaaaaaaggaa

SEQ ID NO: 187215 - RNA, 21 nt, Artificial Sequence
  Synthetic
augaauuuaagaaaaaaggaa

SEQ ID NO: 187216 - RNA, 22 nt, Artificial Sequence
  Synthetic
uaugaauuuaagaaaaaaggaa

SEQ ID NO: 187217 - RNA, 23 nt, Artificial Sequence
  Synthetic
uuaugaauuuaagaaaaaaggaa

SEQ ID NO: 187218 - RNA, 24 nt, Artificial Sequence
  Synthetic
uuuaugaauuuaagaaaaaaggaa

SEQ ID NO: 187219 - RNA, 18 nt, Artificial Sequence
  Synthetic
ggauaaaagaaaaaggaa

SEQ ID NO: 187220 - RNA, 19 nt, Artificial Sequence
  Synthetic
aggauaaaagaaaaaggaa

SEQ ID NO: 187221 - RNA, 20 nt, Artificial Sequence
  Synthetic
caggauaaaagaaaaaggaa

SEQ ID NO: 187222 - RNA, 21 nt, Artificial Sequence
  Synthetic
ucaggauaaaagaaaaaggaa

SEQ ID NO: 187223 - RNA, 22 nt, Artificial Sequence
  Synthetic
cucaggauaaaagaaaaaggaa

SEQ ID NO: 187224 - RNA, 23 nt, Artificial Sequence
  Synthetic
ccucaggauaaaagaaaaaggaa

SEQ ID NO: 187225 - RNA, 24 nt, Artificial Sequence
  Synthetic
uccucaggauaaaagaaaaaggaa

SEQ ID NO: 187226 - RNA, 18 nt, Artificial Sequence
  Synthetic
acauuaaaccaaaaggaa

SEQ ID NO: 187227 - RNA, 19 nt, Artificial Sequence
  Synthetic
cacauuaaaccaaaaggaa

SEQ ID NO: 187228 - RNA, 20 nt, Artificial Sequence
  Synthetic
ccacauuaaaccaaaaggaa

SEQ ID NO: 187229 - RNA, 21 nt, Artificial Sequence
  Synthetic
uccacauuaaaccaaaaggaa

SEQ ID NO: 187230 - RNA, 22 nt, Artificial Sequence
  Synthetic
auccacauuaaaccaaaaggaa

SEQ ID NO: 187231 - RNA, 23 nt, Artificial Sequence
  Synthetic
gauccacauuaaaccaaaaggaa

SEQ ID NO: 187232 - RNA, 24 nt, Artificial Sequence
  Synthetic
agauccacauuaaaccaaaaggaa

SEQ ID NO: 187233 - RNA, 18 nt, Artificial Sequence
  Synthetic
uggaagaaagaaaaggaa

SEQ ID NO: 187234 - RNA, 19 nt, Artificial Sequence
  Synthetic
cuggaagaaagaaaaggaa

SEQ ID NO: 187235 - RNA, 20 nt, Artificial Sequence
  Synthetic
gcuggaagaaagaaaaggaa

SEQ ID NO: 187236 - RNA, 21 nt, Artificial Sequence
  Synthetic
cgcuggaagaaagaaaaggaa

SEQ ID NO: 187237 - RNA, 22 nt, Artificial Sequence
  Synthetic
gcgcuggaagaaagaaaaggaa

SEQ ID NO: 187238 - RNA, 23 nt, Artificial Sequence
  Synthetic
agcgcuggaagaaagaaaaggaa

SEQ ID NO: 187239 - RNA, 24 nt, Artificial Sequence
  Synthetic
uagcgcuggaagaaagaaaaggaa

SEQ ID NO: 187240 - RNA, 18 nt, Artificial Sequence
  Synthetic
acacauggagaaaaggaa

SEQ ID NO: 187241 - RNA, 19 nt, Artificial Sequence
  Synthetic
uacacauggagaaaaggaa

SEQ ID NO: 187242 - RNA, 20 nt, Artificial Sequence
  Synthetic
uuacacauggagaaaaggaa

SEQ ID NO: 187243 - RNA, 21 nt, Artificial Sequence
  Synthetic
auuacacauggagaaaaggaa

SEQ ID NO: 187244 - RNA, 22 nt, Artificial Sequence
  Synthetic
aauuacacauggagaaaaggaa

SEQ ID NO: 187245 - RNA, 23 nt, Artificial Sequence
  Synthetic
aaauuacacauggagaaaaggaa

SEQ ID NO: 187246 - RNA, 24 nt, Artificial Sequence
  Synthetic
uaaauuacacauggagaaaaggaa

SEQ ID NO: 187247 - RNA, 18 nt, Artificial Sequence
  Synthetic
uauucauaggaaaaggaa

SEQ ID NO: 187248 - RNA, 19 nt, Artificial Sequence
  Synthetic
guauucauaggaaaaggaa

SEQ ID NO: 187249 - RNA, 20 nt, Artificial Sequence
  Synthetic
aguauucauaggaaaaggaa

SEQ ID NO: 187250 - RNA, 21 nt, Artificial Sequence
  Synthetic
uaguauucauaggaaaaggaa

SEQ ID NO: 187251 - RNA, 22 nt, Artificial Sequence
  Synthetic
auaguauucauaggaaaaggaa

SEQ ID NO: 187252 - RNA, 23 nt, Artificial Sequence
  Synthetic
uauaguauucauaggaaaaggaa

SEQ ID NO: 187253 - RNA, 24 nt, Artificial Sequence
  Synthetic
auauaguauucauaggaaaaggaa

SEQ ID NO: 187254 - RNA, 18 nt, Artificial Sequence
  Synthetic
uauagccaugaaaaggaa

SEQ ID NO: 187255 - RNA, 19 nt, Artificial Sequence
  Synthetic
uuauagccaugaaaaggaa

SEQ ID NO: 187256 - RNA, 20 nt, Artificial Sequence
  Synthetic
uuuauagccaugaaaaggaa

SEQ ID NO: 187257 - RNA, 21 nt, Artificial Sequence
  Synthetic
auuuauagccaugaaaaggaa

SEQ ID NO: 187258 - RNA, 22 nt, Artificial Sequence
  Synthetic
aauuuauagccaugaaaaggaa

SEQ ID NO: 187259 - RNA, 23 nt, Artificial Sequence
  Synthetic
uaauuuauagccaugaaaaggaa

SEQ ID NO: 187260 - RNA, 24 nt, Artificial Sequence
  Synthetic
guaauuuauagccaugaaaaggaa

SEQ ID NO: 187261 - RNA, 18 nt, Artificial Sequence
  Synthetic
gcagauaccuaaaaggaa

SEQ ID NO: 187262 - RNA, 19 nt, Artificial Sequence
  Synthetic
agcagauaccuaaaaggaa

SEQ ID NO: 187263 - RNA, 20 nt, Artificial Sequence
  Synthetic
aagcagauaccuaaaaggaa

SEQ ID NO: 187264 - RNA, 21 nt, Artificial Sequence
  Synthetic
uaagcagauaccuaaaaggaa

SEQ ID NO: 187265 - RNA, 22 nt, Artificial Sequence
  Synthetic
cuaagcagauaccuaaaaggaa

SEQ ID NO: 187266 - RNA, 23 nt, Artificial Sequence
  Synthetic
ccuaagcagauaccuaaaaggaa

SEQ ID NO: 187267 - RNA, 24 nt, Artificial Sequence
  Synthetic
gccuaagcagauaccuaaaaggaa

SEQ ID NO: 187268 - RNA, 18 nt, Artificial Sequence
  Synthetic
gugaauguguaaaaggaa

SEQ ID NO: 187269 - RNA, 19 nt, Artificial Sequence
  Synthetic
agugaauguguaaaaggaa

SEQ ID NO: 187270 - RNA, 20 nt, Artificial Sequence
  Synthetic
aagugaauguguaaaaggaa

SEQ ID NO: 187271 - RNA, 21 nt, Artificial Sequence
  Synthetic
aaagugaauguguaaaaggaa

SEQ ID NO: 187272 - RNA, 22 nt, Artificial Sequence
  Synthetic
aaaagugaauguguaaaaggaa

SEQ ID NO: 187273 - RNA, 23 nt, Artificial Sequence
  Synthetic
aaaaagugaauguguaaaaggaa

SEQ ID NO: 187274 - RNA, 24 nt, Artificial Sequence
  Synthetic
caaaaagugaauguguaaaaggaa

SEQ ID NO: 187275 - RNA, 18 nt, Artificial Sequence
  Synthetic
gugagcggaggaaaggaa

SEQ ID NO: 187276 - RNA, 19 nt, Artificial Sequence
  Synthetic
ugugagcggaggaaaggaa

SEQ ID NO: 187277 - RNA, 20 nt, Artificial Sequence
  Synthetic
cugugagcggaggaaaggaa

SEQ ID NO: 187278 - RNA, 21 nt, Artificial Sequence
  Synthetic
ccugugagcggaggaaaggaa

SEQ ID NO: 187279 - RNA, 22 nt, Artificial Sequence
  Synthetic
accugugagcggaggaaaggaa

SEQ ID NO: 187280 - RNA, 23 nt, Artificial Sequence
  Synthetic
caccugugagcggaggaaaggaa

SEQ ID NO: 187281 - RNA, 24 nt, Artificial Sequence
  Synthetic
acaccugugagcggaggaaaggaa

SEQ ID NO: 187282 - RNA, 18 nt, Artificial Sequence
  Synthetic
aauagaaggggaaaggaa

SEQ ID NO: 187283 - RNA, 19 nt, Artificial Sequence
  Synthetic
uaauagaaggggaaaggaa

SEQ ID NO: 187284 - RNA, 20 nt, Artificial Sequence
  Synthetic
cuaauagaaggggaaaggaa

SEQ ID NO: 187285 - RNA, 21 nt, Artificial Sequence
  Synthetic
acuaauagaaggggaaaggaa

SEQ ID NO: 187286 - RNA, 22 nt, Artificial Sequence
  Synthetic
gacuaauagaaggggaaaggaa

SEQ ID NO: 187287 - RNA, 23 nt, Artificial Sequence
  Synthetic
ggacuaauagaaggggaaaggaa

SEQ ID NO: 187288 - RNA, 24 nt, Artificial Sequence
  Synthetic
gggacuaauagaaggggaaaggaa

SEQ ID NO: 187289 - RNA, 18 nt, Artificial Sequence
  Synthetic
gugucagagauaaaggaa

SEQ ID NO: 187290 - RNA, 19 nt, Artificial Sequence
  Synthetic
agugucagagauaaaggaa

SEQ ID NO: 187291 - RNA, 20 nt, Artificial Sequence
  Synthetic
gagugucagagauaaaggaa

SEQ ID NO: 187292 - RNA, 21 nt, Artificial Sequence
  Synthetic
agagugucagagauaaaggaa

SEQ ID NO: 187293 - RNA, 22 nt, Artificial Sequence
  Synthetic
gagagugucagagauaaaggaa

SEQ ID NO: 187294 - RNA, 23 nt, Artificial Sequence
  Synthetic
ugagagugucagagauaaaggaa

SEQ ID NO: 187295 - RNA, 24 nt, Artificial Sequence
  Synthetic
cugagagugucagagauaaaggaa

SEQ ID NO: 187296 - RNA, 18 nt, Artificial Sequence
  Synthetic
acuacuguuauaaaggaa

SEQ ID NO: 187297 - RNA, 19 nt, Artificial Sequence
  Synthetic
aacuacuguuauaaaggaa

SEQ ID NO: 187298 - RNA, 20 nt, Artificial Sequence
  Synthetic
aaacuacuguuauaaaggaa

SEQ ID NO: 187299 - RNA, 21 nt, Artificial Sequence
  Synthetic
uaaacuacuguuauaaaggaa

SEQ ID NO: 187300 - RNA, 22 nt, Artificial Sequence
  Synthetic
cuaaacuacuguuauaaaggaa

SEQ ID NO: 187301 - RNA, 23 nt, Artificial Sequence
  Synthetic
gcuaaacuacuguuauaaaggaa

SEQ ID NO: 187302 - RNA, 24 nt, Artificial Sequence
  Synthetic
agcuaaacuacuguuauaaaggaa

SEQ ID NO: 187303 - RNA, 18 nt, Artificial Sequence
  Synthetic
aguuagagucuaaaggaa

SEQ ID NO: 187304 - RNA, 19 nt, Artificial Sequence
  Synthetic
caguuagagucuaaaggaa

SEQ ID NO: 187305 - RNA, 20 nt, Artificial Sequence
  Synthetic
ccaguuagagucuaaaggaa

SEQ ID NO: 187306 - RNA, 21 nt, Artificial Sequence
  Synthetic
uccaguuagagucuaaaggaa

SEQ ID NO: 187307 - RNA, 22 nt, Artificial Sequence
  Synthetic
cuccaguuagagucuaaaggaa

SEQ ID NO: 187308 - RNA, 23 nt, Artificial Sequence
  Synthetic
ucuccaguuagagucuaaaggaa

SEQ ID NO: 187309 - RNA, 24 nt, Artificial Sequence
  Synthetic
uucuccaguuagagucuaaaggaa

SEQ ID NO: 187310 - RNA, 18 nt, Artificial Sequence
  Synthetic
aacuagauguuaaaggaa

SEQ ID NO: 187311 - RNA, 19 nt, Artificial Sequence
  Synthetic
aaacuagauguuaaaggaa

SEQ ID NO: 187312 - RNA, 20 nt, Artificial Sequence
  Synthetic
aaaacuagauguuaaaggaa

SEQ ID NO: 187313 - RNA, 21 nt, Artificial Sequence
  Synthetic
uaaaacuagauguuaaaggaa

SEQ ID NO: 187314 - RNA, 22 nt, Artificial Sequence
  Synthetic
auaaaacuagauguuaaaggaa

SEQ ID NO: 187315 - RNA, 23 nt, Artificial Sequence
  Synthetic
aauaaaacuagauguuaaaggaa

SEQ ID NO: 187316 - RNA, 24 nt, Artificial Sequence
  Synthetic
aaauaaaacuagauguuaaaggaa

SEQ ID NO: 187317 - RNA, 18 nt, Artificial Sequence
  Synthetic
agauacacccacaaggaa

SEQ ID NO: 187318 - RNA, 19 nt, Artificial Sequence
  Synthetic
gagauacacccacaaggaa

SEQ ID NO: 187319 - RNA, 20 nt, Artificial Sequence
  Synthetic
ggagauacacccacaaggaa

SEQ ID NO: 187320 - RNA, 21 nt, Artificial Sequence
  Synthetic
uggagauacacccacaaggaa

SEQ ID NO: 187321 - RNA, 22 nt, Artificial Sequence
  Synthetic
cuggagauacacccacaaggaa

SEQ ID NO: 187322 - RNA, 23 nt, Artificial Sequence
  Synthetic
ucuggagauacacccacaaggaa

SEQ ID NO: 187323 - RNA, 24 nt, Artificial Sequence
  Synthetic
cucuggagauacacccacaaggaa

SEQ ID NO: 187324 - RNA, 18 nt, Artificial Sequence
  Synthetic
acuuugcaacccaaggaa

SEQ ID NO: 187325 - RNA, 19 nt, Artificial Sequence
  Synthetic
aacuuugcaacccaaggaa

SEQ ID NO: 187326 - RNA, 20 nt, Artificial Sequence
  Synthetic
uaacuuugcaacccaaggaa

SEQ ID NO: 187327 - RNA, 21 nt, Artificial Sequence
  Synthetic
cuaacuuugcaacccaaggaa

SEQ ID NO: 187328 - RNA, 22 nt, Artificial Sequence
  Synthetic
acuaacuuugcaacccaaggaa

SEQ ID NO: 187329 - RNA, 23 nt, Artificial Sequence
  Synthetic
uacuaacuuugcaacccaaggaa

SEQ ID NO: 187330 - RNA, 24 nt, Artificial Sequence
  Synthetic
uuacuaacuuugcaacccaaggaa

SEQ ID NO: 187331 - RNA, 18 nt, Artificial Sequence
  Synthetic
cuuugccaagccaaggaa

SEQ ID NO: 187332 - RNA, 19 nt, Artificial Sequence
  Synthetic
ucuuugccaagccaaggaa

SEQ ID NO: 187333 - RNA, 20 nt, Artificial Sequence
  Synthetic
cucuuugccaagccaaggaa

SEQ ID NO: 187334 - RNA, 21 nt, Artificial Sequence
  Synthetic
ccucuuugccaagccaaggaa

SEQ ID NO: 187335 - RNA, 22 nt, Artificial Sequence
  Synthetic
uccucuuugccaagccaaggaa

SEQ ID NO: 187336 - RNA, 23 nt, Artificial Sequence
  Synthetic
uuccucuuugccaagccaaggaa

SEQ ID NO: 187337 - RNA, 24 nt, Artificial Sequence
  Synthetic
uuuccucuuugccaagccaaggaa

SEQ ID NO: 187338 - RNA, 18 nt, Artificial Sequence
  Synthetic
auugugguuuccaaggaa

SEQ ID NO: 187339 - RNA, 19 nt, Artificial Sequence
  Synthetic
uauugugguuuccaaggaa

SEQ ID NO: 187340 - RNA, 20 nt, Artificial Sequence
  Synthetic
uuauugugguuuccaaggaa

SEQ ID NO: 187341 - RNA, 21 nt, Artificial Sequence
  Synthetic
uuuauugugguuuccaaggaa

SEQ ID NO: 187342 - RNA, 22 nt, Artificial Sequence
  Synthetic
cuuuauugugguuuccaaggaa

SEQ ID NO: 187343 - RNA, 23 nt, Artificial Sequence
  Synthetic
ccuuuauugugguuuccaaggaa

SEQ ID NO: 187344 - RNA, 24 nt, Artificial Sequence
  Synthetic
cccuuuauugugguuuccaaggaa

SEQ ID NO: 187345 - RNA, 18 nt, Artificial Sequence
  Synthetic
cuaguucuaagcaaggaa

SEQ ID NO: 187346 - RNA, 19 nt, Artificial Sequence
  Synthetic
ccuaguucuaagcaaggaa

SEQ ID NO: 187347 - RNA, 20 nt, Artificial Sequence
  Synthetic
gccuaguucuaagcaaggaa

SEQ ID NO: 187348 - RNA, 21 nt, Artificial Sequence
  Synthetic
agccuaguucuaagcaaggaa

SEQ ID NO: 187349 - RNA, 22 nt, Artificial Sequence
  Synthetic
uagccuaguucuaagcaaggaa

SEQ ID NO: 187350 - RNA, 23 nt, Artificial Sequence
  Synthetic
auagccuaguucuaagcaaggaa

SEQ ID NO: 187351 - RNA, 24 nt, Artificial Sequence
  Synthetic
cauagccuaguucuaagcaaggaa

SEQ ID NO: 187352 - RNA, 18 nt, Artificial Sequence
  Synthetic
uucugacucugcaaggaa

SEQ ID NO: 187353 - RNA, 19 nt, Artificial Sequence
  Synthetic
auucugacucugcaaggaa

SEQ ID NO: 187354 - RNA, 20 nt, Artificial Sequence
  Synthetic
aauucugacucugcaaggaa

SEQ ID NO: 187355 - RNA, 21 nt, Artificial Sequence
  Synthetic
caauucugacucugcaaggaa

SEQ ID NO: 187356 - RNA, 22 nt, Artificial Sequence
  Synthetic
gcaauucugacucugcaaggaa

SEQ ID NO: 187357 - RNA, 23 nt, Artificial Sequence
  Synthetic
ugcaauucugacucugcaaggaa

SEQ ID NO: 187358 - RNA, 24 nt, Artificial Sequence
  Synthetic
augcaauucugacucugcaaggaa

SEQ ID NO: 187359 - RNA, 18 nt, Artificial Sequence
  Synthetic
aaaccacugcucaaggaa

SEQ ID NO: 187360 - RNA, 19 nt, Artificial Sequence
  Synthetic
caaaccacugcucaaggaa

SEQ ID NO: 187361 - RNA, 20 nt, Artificial Sequence
  Synthetic
acaaaccacugcucaaggaa

SEQ ID NO: 187362 - RNA, 21 nt, Artificial Sequence
  Synthetic
uacaaaccacugcucaaggaa

SEQ ID NO: 187363 - RNA, 22 nt, Artificial Sequence
  Synthetic
cuacaaaccacugcucaaggaa

SEQ ID NO: 187364 - RNA, 23 nt, Artificial Sequence
  Synthetic
acuacaaaccacugcucaaggaa

SEQ ID NO: 187365 - RNA, 24 nt, Artificial Sequence
  Synthetic
aacuacaaaccacugcucaaggaa

SEQ ID NO: 187366 - RNA, 18 nt, Artificial Sequence
  Synthetic
aacagaaaucucaaggaa

SEQ ID NO: 187367 - RNA, 19 nt, Artificial Sequence
  Synthetic
gaacagaaaucucaaggaa

SEQ ID NO: 187368 - RNA, 20 nt, Artificial Sequence
  Synthetic
ugaacagaaaucucaaggaa

SEQ ID NO: 187369 - RNA, 21 nt, Artificial Sequence
  Synthetic
uugaacagaaaucucaaggaa

SEQ ID NO: 187370 - RNA, 22 nt, Artificial Sequence
  Synthetic
uuugaacagaaaucucaaggaa

SEQ ID NO: 187371 - RNA, 23 nt, Artificial Sequence
  Synthetic
auuugaacagaaaucucaaggaa

SEQ ID NO: 187372 - RNA, 24 nt, Artificial Sequence
  Synthetic
cauuugaacagaaaucucaaggaa

SEQ ID NO: 187373 - RNA, 18 nt, Artificial Sequence
  Synthetic
agggaaaaaaagaaggaa

SEQ ID NO: 187374 - RNA, 19 nt, Artificial Sequence
  Synthetic
aagggaaaaaaagaaggaa

SEQ ID NO: 187375 - RNA, 20 nt, Artificial Sequence
  Synthetic
aaagggaaaaaaagaaggaa

SEQ ID NO: 187376 - RNA, 21 nt, Artificial Sequence
  Synthetic
gaaagggaaaaaaagaaggaa

SEQ ID NO: 187377 - RNA, 22 nt, Artificial Sequence
  Synthetic
ggaaagggaaaaaaagaaggaa

SEQ ID NO: 187378 - RNA, 23 nt, Artificial Sequence
  Synthetic
aggaaagggaaaaaaagaaggaa

SEQ ID NO: 187379 - RNA, 24 nt, Artificial Sequence
  Synthetic
gaggaaagggaaaaaaagaaggaa

SEQ ID NO: 187380 - RNA, 18 nt, Artificial Sequence
  Synthetic
ccccuuugagagaaggaa

SEQ ID NO: 187381 - RNA, 19 nt, Artificial Sequence
  Synthetic
gccccuuugagagaaggaa

SEQ ID NO: 187382 - RNA, 20 nt, Artificial Sequence
  Synthetic
ugccccuuugagagaaggaa

SEQ ID NO: 187383 - RNA, 21 nt, Artificial Sequence
  Synthetic
uugccccuuugagagaaggaa

SEQ ID NO: 187384 - RNA, 22 nt, Artificial Sequence
  Synthetic
cuugccccuuugagagaaggaa

SEQ ID NO: 187385 - RNA, 23 nt, Artificial Sequence
  Synthetic
gcuugccccuuugagagaaggaa

SEQ ID NO: 187386 - RNA, 24 nt, Artificial Sequence
  Synthetic
ugcuugccccuuugagagaaggaa

SEQ ID NO: 187387 - RNA, 18 nt, Artificial Sequence
  Synthetic
aaagauuuagagaaggaa

SEQ ID NO: 187388 - RNA, 19 nt, Artificial Sequence
  Synthetic
aaaagauuuagagaaggaa

SEQ ID NO: 187389 - RNA, 20 nt, Artificial Sequence
  Synthetic
aaaaagauuuagagaaggaa

SEQ ID NO: 187390 - RNA, 21 nt, Artificial Sequence
  Synthetic
aaaaaagauuuagagaaggaa

SEQ ID NO: 187391 - RNA, 22 nt, Artificial Sequence
  Synthetic
uaaaaaagauuuagagaaggaa

SEQ ID NO: 187392 - RNA, 23 nt, Artificial Sequence
  Synthetic
uuaaaaaagauuuagagaaggaa

SEQ ID NO: 187393 - RNA, 24 nt, Artificial Sequence
  Synthetic
uuuaaaaaagauuuagagaaggaa

SEQ ID NO: 187394 - RNA, 18 nt, Artificial Sequence
  Synthetic
guggguggcucgaaggaa

SEQ ID NO: 187395 - RNA, 19 nt, Artificial Sequence
  Synthetic
uguggguggcucgaaggaa

SEQ ID NO: 187396 - RNA, 20 nt, Artificial Sequence
  Synthetic
cuguggguggcucgaaggaa

SEQ ID NO: 187397 - RNA, 21 nt, Artificial Sequence
  Synthetic
ucuguggguggcucgaaggaa

SEQ ID NO: 187398 - RNA, 22 nt, Artificial Sequence
  Synthetic
aucuguggguggcucgaaggaa

SEQ ID NO: 187399 - RNA, 23 nt, Artificial Sequence
  Synthetic
caucuguggguggcucgaaggaa

SEQ ID NO: 187400 - RNA, 24 nt, Artificial Sequence
  Synthetic
ucaucuguggguggcucgaaggaa

SEQ ID NO: 187401 - RNA, 18 nt, Artificial Sequence
  Synthetic
gacaaagaaaggaaggaa

SEQ ID NO: 187402 - RNA, 19 nt, Artificial Sequence
  Synthetic
agacaaagaaaggaaggaa

SEQ ID NO: 187403 - RNA, 20 nt, Artificial Sequence
  Synthetic
aagacaaagaaaggaaggaa

SEQ ID NO: 187404 - RNA, 21 nt, Artificial Sequence
  Synthetic
gaagacaaagaaaggaaggaa

SEQ ID NO: 187405 - RNA, 22 nt, Artificial Sequence
  Synthetic
ggaagacaaagaaaggaaggaa

SEQ ID NO: 187406 - RNA, 23 nt, Artificial Sequence
  Synthetic
aggaagacaaagaaaggaaggaa

SEQ ID NO: 187407 - RNA, 24 nt, Artificial Sequence
  Synthetic
gaggaagacaaagaaaggaaggaa

SEQ ID NO: 187408 - RNA, 18 nt, Artificial Sequence
  Synthetic
aggaaagaaaggaaggaa

SEQ ID NO: 187409 - RNA, 19 nt, Artificial Sequence
  Synthetic
aaggaaagaaaggaaggaa

SEQ ID NO: 187410 - RNA, 20 nt, Artificial Sequence
  Synthetic
aaaggaaagaaaggaaggaa

SEQ ID NO: 187411 - RNA, 21 nt, Artificial Sequence
  Synthetic
aaaaggaaagaaaggaaggaa

SEQ ID NO: 187412 - RNA, 22 nt, Artificial Sequence
  Synthetic
aaaaaggaaagaaaggaaggaa

SEQ ID NO: 187413 - RNA, 23 nt, Artificial Sequence
  Synthetic
aaaaaaggaaagaaaggaaggaa

SEQ ID NO: 187414 - RNA, 24 nt, Artificial Sequence
  Synthetic
aaaaaaaggaaagaaaggaaggaa

SEQ ID NO: 187415 - RNA, 18 nt, Artificial Sequence
  Synthetic
aggaaaauaaggaaggaa

SEQ ID NO: 187416 - RNA, 19 nt, Artificial Sequence
  Synthetic
gaggaaaauaaggaaggaa

SEQ ID NO: 187417 - RNA, 20 nt, Artificial Sequence
  Synthetic
agaggaaaauaaggaaggaa

SEQ ID NO: 187418 - RNA, 21 nt, Artificial Sequence
  Synthetic
aagaggaaaauaaggaaggaa

SEQ ID NO: 187419 - RNA, 22 nt, Artificial Sequence
  Synthetic
uaagaggaaaauaaggaaggaa

SEQ ID NO: 187420 - RNA, 23 nt, Artificial Sequence
  Synthetic
auaagaggaaaauaaggaaggaa

SEQ ID NO: 187421 - RNA, 24 nt, Artificial Sequence
  Synthetic
cauaagaggaaaauaaggaaggaa

SEQ ID NO: 187422 - RNA, 18 nt, Artificial Sequence
  Synthetic
gaaaggaggaggaaggaa

SEQ ID NO: 187423 - RNA, 19 nt, Artificial Sequence
  Synthetic
ugaaaggaggaggaaggaa

SEQ ID NO: 187424 - RNA, 20 nt, Artificial Sequence
  Synthetic
cugaaaggaggaggaaggaa

SEQ ID NO: 187425 - RNA, 21 nt, Artificial Sequence
  Synthetic
acugaaaggaggaggaaggaa

SEQ ID NO: 187426 - RNA, 22 nt, Artificial Sequence
  Synthetic
cacugaaaggaggaggaaggaa

SEQ ID NO: 187427 - RNA, 23 nt, Artificial Sequence
  Synthetic
ucacugaaaggaggaggaaggaa

SEQ ID NO: 187428 - RNA, 24 nt, Artificial Sequence
  Synthetic
aucacugaaaggaggaggaaggaa

SEQ ID NO: 187429 - RNA, 18 nt, Artificial Sequence
  Synthetic
auuuuuauuaggaaggaa

SEQ ID NO: 187430 - RNA, 19 nt, Artificial Sequence
  Synthetic
cauuuuuauuaggaaggaa

SEQ ID NO: 187431 - RNA, 20 nt, Artificial Sequence
  Synthetic
acauuuuuauuaggaaggaa

SEQ ID NO: 187432 - RNA, 21 nt, Artificial Sequence
  Synthetic
cacauuuuuauuaggaaggaa

SEQ ID NO: 187433 - RNA, 22 nt, Artificial Sequence
  Synthetic
ccacauuuuuauuaggaaggaa

SEQ ID NO: 187434 - RNA, 23 nt, Artificial Sequence
  Synthetic
accacauuuuuauuaggaaggaa

SEQ ID NO: 187435 - RNA, 24 nt, Artificial Sequence
  Synthetic
uaccacauuuuuauuaggaaggaa

SEQ ID NO: 187436 - RNA, 18 nt, Artificial Sequence
  Synthetic
cugcaaccagggaaggaa

SEQ ID NO: 187437 - RNA, 19 nt, Artificial Sequence
  Synthetic
gcugcaaccagggaaggaa

SEQ ID NO: 187438 - RNA, 20 nt, Artificial Sequence
  Synthetic
ggcugcaaccagggaaggaa

SEQ ID NO: 187439 - RNA, 21 nt, Artificial Sequence
  Synthetic
uggcugcaaccagggaaggaa

SEQ ID NO: 187440 - RNA, 22 nt, Artificial Sequence
  Synthetic
auggcugcaaccagggaaggaa

SEQ ID NO: 187441 - RNA, 23 nt, Artificial Sequence
  Synthetic
cauggcugcaaccagggaaggaa

SEQ ID NO: 187442 - RNA, 24 nt, Artificial Sequence
  Synthetic
acauggcugcaaccagggaaggaa

SEQ ID NO: 187443 - RNA, 18 nt, Artificial Sequence
  Synthetic
uucuuggaaaugaaggaa

SEQ ID NO: 187444 - RNA, 19 nt, Artificial Sequence
  Synthetic
guucuuggaaaugaaggaa

SEQ ID NO: 187445 - RNA, 20 nt, Artificial Sequence
  Synthetic
aguucuuggaaaugaaggaa

SEQ ID NO: 187446 - RNA, 21 nt, Artificial Sequence
  Synthetic
uaguucuuggaaaugaaggaa

SEQ ID NO: 187447 - RNA, 22 nt, Artificial Sequence
  Synthetic
auaguucuuggaaaugaaggaa

SEQ ID NO: 187448 - RNA, 23 nt, Artificial Sequence
  Synthetic
uauaguucuuggaaaugaaggaa

SEQ ID NO: 187449 - RNA, 24 nt, Artificial Sequence
  Synthetic
guauaguucuuggaaaugaaggaa

SEQ ID NO: 187450 - RNA, 18 nt, Artificial Sequence
  Synthetic
ucugaacugaugaaggaa

SEQ ID NO: 187451 - RNA, 19 nt, Artificial Sequence
  Synthetic
gucugaacugaugaaggaa

SEQ ID NO: 187452 - RNA, 20 nt, Artificial Sequence
  Synthetic
ggucugaacugaugaaggaa

SEQ ID NO: 187453 - RNA, 21 nt, Artificial Sequence
  Synthetic
gggucugaacugaugaaggaa

SEQ ID NO: 187454 - RNA, 22 nt, Artificial Sequence
  Synthetic
ggggucugaacugaugaaggaa

SEQ ID NO: 187455 - RNA, 23 nt, Artificial Sequence
  Synthetic
uggggucugaacugaugaaggaa

SEQ ID NO: 187456 - RNA, 24 nt, Artificial Sequence
  Synthetic
uuggggucugaacugaugaaggaa

SEQ ID NO: 187457 - RNA, 18 nt, Artificial Sequence
  Synthetic
guguauuauaugaaggaa

SEQ ID NO: 187458 - RNA, 19 nt, Artificial Sequence
  Synthetic
uguguauuauaugaaggaa

SEQ ID NO: 187459 - RNA, 20 nt, Artificial Sequence
  Synthetic
uuguguauuauaugaaggaa

SEQ ID NO: 187460 - RNA, 21 nt, Artificial Sequence
  Synthetic
uuuguguauuauaugaaggaa

SEQ ID NO: 187461 - RNA, 22 nt, Artificial Sequence
  Synthetic
uuuuguguauuauaugaaggaa

SEQ ID NO: 187462 - RNA, 23 nt, Artificial Sequence
  Synthetic
uuuuuguguauuauaugaaggaa

SEQ ID NO: 187463 - RNA, 24 nt, Artificial Sequence
  Synthetic
guuuuuguguauuauaugaaggaa

SEQ ID NO: 187464 - RNA, 18 nt, Artificial Sequence
  Synthetic
gcuuugagcuugaaggaa

SEQ ID NO: 187465 - RNA, 19 nt, Artificial Sequence
  Synthetic
ugcuuugagcuugaaggaa

SEQ ID NO: 187466 - RNA, 20 nt, Artificial Sequence
  Synthetic
augcuuugagcuugaaggaa

SEQ ID NO: 187467 - RNA, 21 nt, Artificial Sequence
  Synthetic
caugcuuugagcuugaaggaa

SEQ ID NO: 187468 - RNA, 22 nt, Artificial Sequence
  Synthetic
ucaugcuuugagcuugaaggaa

SEQ ID NO: 187469 - RNA, 23 nt, Artificial Sequence
  Synthetic
cucaugcuuugagcuugaaggaa

SEQ ID NO: 187470 - RNA, 24 nt, Artificial Sequence
  Synthetic
acucaugcuuugagcuugaaggaa

SEQ ID NO: 187471 - RNA, 18 nt, Artificial Sequence
  Synthetic
ggagguggaaauaaggaa

SEQ ID NO: 187472 - RNA, 19 nt, Artificial Sequence
  Synthetic
gggagguggaaauaaggaa

SEQ ID NO: 187473 - RNA, 20 nt, Artificial Sequence
  Synthetic
agggagguggaaauaaggaa

SEQ ID NO: 187474 - RNA, 21 nt, Artificial Sequence
  Synthetic
uagggagguggaaauaaggaa

SEQ ID NO: 187475 - RNA, 22 nt, Artificial Sequence
  Synthetic
guagggagguggaaauaaggaa

SEQ ID NO: 187476 - RNA, 23 nt, Artificial Sequence
  Synthetic
aguagggagguggaaauaaggaa

SEQ ID NO: 187477 - RNA, 24 nt, Artificial Sequence
  Synthetic
aaguagggagguggaaauaaggaa

SEQ ID NO: 187478 - RNA, 18 nt, Artificial Sequence
  Synthetic
ucaaugguccauaaggaa

SEQ ID NO: 187479 - RNA, 19 nt, Artificial Sequence
  Synthetic
uucaaugguccauaaggaa

SEQ ID NO: 187480 - RNA, 20 nt, Artificial Sequence
  Synthetic
uuucaaugguccauaaggaa

SEQ ID NO: 187481 - RNA, 21 nt, Artificial Sequence
  Synthetic
uuuucaaugguccauaaggaa

SEQ ID NO: 187482 - RNA, 22 nt, Artificial Sequence
  Synthetic
guuuucaaugguccauaaggaa

SEQ ID NO: 187483 - RNA, 23 nt, Artificial Sequence
  Synthetic
aguuuucaaugguccauaaggaa

SEQ ID NO: 187484 - RNA, 24 nt, Artificial Sequence
  Synthetic
aaguuuucaaugguccauaaggaa

SEQ ID NO: 187485 - RNA, 18 nt, Artificial Sequence
  Synthetic
uaagaaaaucauaaggaa

SEQ ID NO: 187486 - RNA, 19 nt, Artificial Sequence
  Synthetic
cuaagaaaaucauaaggaa

SEQ ID NO: 187487 - RNA, 20 nt, Artificial Sequence
  Synthetic
acuaagaaaaucauaaggaa

SEQ ID NO: 187488 - RNA, 21 nt, Artificial Sequence
  Synthetic
uacuaagaaaaucauaaggaa

SEQ ID NO: 187489 - RNA, 22 nt, Artificial Sequence
  Synthetic
uuacuaagaaaaucauaaggaa

SEQ ID NO: 187490 - RNA, 23 nt, Artificial Sequence
  Synthetic
guuacuaagaaaaucauaaggaa

SEQ ID NO: 187491 - RNA, 24 nt, Artificial Sequence
  Synthetic
uguuacuaagaaaaucauaaggaa

SEQ ID NO: 187492 - RNA, 18 nt, Artificial Sequence
  Synthetic
guauuuauucauaaggaa

SEQ ID NO: 187493 - RNA, 19 nt, Artificial Sequence
  Synthetic
uguauuuauucauaaggaa

SEQ ID NO: 187494 - RNA, 20 nt, Artificial Sequence
  Synthetic
auguauuuauucauaaggaa

SEQ ID NO: 187495 - RNA, 21 nt, Artificial Sequence
  Synthetic
cauguauuuauucauaaggaa

SEQ ID NO: 187496 - RNA, 22 nt, Artificial Sequence
  Synthetic
ccauguauuuauucauaaggaa

SEQ ID NO: 187497 - RNA, 23 nt, Artificial Sequence
  Synthetic
uccauguauuuauucauaaggaa

SEQ ID NO: 187498 - RNA, 24 nt, Artificial Sequence
  Synthetic
auccauguauuuauucauaaggaa

SEQ ID NO: 187499 - RNA, 18 nt, Artificial Sequence
  Synthetic
auaugugucgauaaggaa

SEQ ID NO: 187500 - RNA, 19 nt, Artificial Sequence
  Synthetic
uauaugugucgauaaggaa

SEQ ID NO: 187501 - RNA, 20 nt, Artificial Sequence
  Synthetic
uuauaugugucgauaaggaa

SEQ ID NO: 187502 - RNA, 21 nt, Artificial Sequence
  Synthetic
uuuauaugugucgauaaggaa

SEQ ID NO: 187503 - RNA, 22 nt, Artificial Sequence
  Synthetic
uuuuauaugugucgauaaggaa

SEQ ID NO: 187504 - RNA, 23 nt, Artificial Sequence
  Synthetic
guuuuauaugugucgauaaggaa

SEQ ID NO: 187505 - RNA, 24 nt, Artificial Sequence
  Synthetic
aguuuuauaugugucgauaaggaa

SEQ ID NO: 187506 - RNA, 18 nt, Artificial Sequence
  Synthetic
guugcuauuuauaaggaa

SEQ ID NO: 187507 - RNA, 19 nt, Artificial Sequence
  Synthetic
uguugcuauuuauaaggaa

SEQ ID NO: 187508 - RNA, 20 nt, Artificial Sequence
  Synthetic
uuguugcuauuuauaaggaa

SEQ ID NO: 187509 - RNA, 21 nt, Artificial Sequence
  Synthetic
auuguugcuauuuauaaggaa

SEQ ID NO: 187510 - RNA, 22 nt, Artificial Sequence
  Synthetic
uauuguugcuauuuauaaggaa

SEQ ID NO: 187511 - RNA, 23 nt, Artificial Sequence
  Synthetic
guauuguugcuauuuauaaggaa

SEQ ID NO: 187512 - RNA, 24 nt, Artificial Sequence
  Synthetic
aguauuguugcuauuuauaaggaa

SEQ ID NO: 187513 - RNA, 18 nt, Artificial Sequence
  Synthetic
aaucugacccuuaaggaa

SEQ ID NO: 187514 - RNA, 19 nt, Artificial Sequence
  Synthetic
aaaucugacccuuaaggaa

SEQ ID NO: 187515 - RNA, 20 nt, Artificial Sequence
  Synthetic
uaaaucugacccuuaaggaa

SEQ ID NO: 187516 - RNA, 21 nt, Artificial Sequence
  Synthetic
cuaaaucugacccuuaaggaa

SEQ ID NO: 187517 - RNA, 22 nt, Artificial Sequence
  Synthetic
acuaaaucugacccuuaaggaa

SEQ ID NO: 187518 - RNA, 23 nt, Artificial Sequence
  Synthetic
uacuaaaucugacccuuaaggaa

SEQ ID NO: 187519 - RNA, 24 nt, Artificial Sequence
  Synthetic
uuacuaaaucugacccuuaaggaa

SEQ ID NO: 187520 - RNA, 18 nt, Artificial Sequence
  Synthetic
gagcugcugguuaaggaa

SEQ ID NO: 187521 - RNA, 19 nt, Artificial Sequence
  Synthetic
ugagcugcugguuaaggaa

SEQ ID NO: 187522 - RNA, 20 nt, Artificial Sequence
  Synthetic
cugagcugcugguuaaggaa

SEQ ID NO: 187523 - RNA, 21 nt, Artificial Sequence
  Synthetic
acugagcugcugguuaaggaa

SEQ ID NO: 187524 - RNA, 22 nt, Artificial Sequence
  Synthetic
cacugagcugcugguuaaggaa

SEQ ID NO: 187525 - RNA, 23 nt, Artificial Sequence
  Synthetic
ucacugagcugcugguuaaggaa

SEQ ID NO: 187526 - RNA, 24 nt, Artificial Sequence
  Synthetic
aucacugagcugcugguuaaggaa

SEQ ID NO: 187527 - RNA, 18 nt, Artificial Sequence
  Synthetic
aagagcaggaaacaggaa

SEQ ID NO: 187528 - RNA, 19 nt, Artificial Sequence
  Synthetic
uaagagcaggaaacaggaa

SEQ ID NO: 187529 - RNA, 20 nt, Artificial Sequence
  Synthetic
auaagagcaggaaacaggaa

SEQ ID NO: 187530 - RNA, 21 nt, Artificial Sequence
  Synthetic
cauaagagcaggaaacaggaa

SEQ ID NO: 187531 - RNA, 22 nt, Artificial Sequence
  Synthetic
acauaagagcaggaaacaggaa

SEQ ID NO: 187532 - RNA, 23 nt, Artificial Sequence
  Synthetic
cacauaagagcaggaaacaggaa

SEQ ID NO: 187533 - RNA, 24 nt, Artificial Sequence
  Synthetic
ucacauaagagcaggaaacaggaa

SEQ ID NO: 187534 - RNA, 18 nt, Artificial Sequence
  Synthetic
ggguuaaugaaacaggaa

SEQ ID NO: 187535 - RNA, 19 nt, Artificial Sequence
  Synthetic
aggguuaaugaaacaggaa

SEQ ID NO: 187536 - RNA, 20 nt, Artificial Sequence
  Synthetic
uaggguuaaugaaacaggaa

SEQ ID NO: 187537 - RNA, 21 nt, Artificial Sequence
  Synthetic
auaggguuaaugaaacaggaa

SEQ ID NO: 187538 - RNA, 22 nt, Artificial Sequence
  Synthetic
aauaggguuaaugaaacaggaa

SEQ ID NO: 187539 - RNA, 23 nt, Artificial Sequence
  Synthetic
gaauaggguuaaugaaacaggaa

SEQ ID NO: 187540 - RNA, 24 nt, Artificial Sequence
  Synthetic
agaauaggguuaaugaaacaggaa

SEQ ID NO: 187541 - RNA, 21 nt, Artificial Sequence
  Synthetic
cucagcaaacuaacacaggaa

SEQ ID NO: 187542 - RNA, 22 nt, Artificial Sequence
  Synthetic
ucucagcaaacuaacacaggaa

SEQ ID NO: 187543 - RNA, 23 nt, Artificial Sequence
  Synthetic
aucucagcaaacuaacacaggaa

SEQ ID NO: 187544 - RNA, 24 nt, Artificial Sequence
  Synthetic
aaucucagcaaacuaacacaggaa

SEQ ID NO: 187545 - RNA, 18 nt, Artificial Sequence
  Synthetic
aacacauggacacaggaa

SEQ ID NO: 187546 - RNA, 19 nt, Artificial Sequence
  Synthetic
gaacacauggacacaggaa

SEQ ID NO: 187547 - RNA, 20 nt, Artificial Sequence
  Synthetic
agaacacauggacacaggaa

SEQ ID NO: 187548 - RNA, 21 nt, Artificial Sequence
  Synthetic
gagaacacauggacacaggaa

SEQ ID NO: 187549 - RNA, 22 nt, Artificial Sequence
  Synthetic
ugagaacacauggacacaggaa

SEQ ID NO: 187550 - RNA, 23 nt, Artificial Sequence
  Synthetic
augagaacacauggacacaggaa

SEQ ID NO: 187551 - RNA, 24 nt, Artificial Sequence
  Synthetic
aaugagaacacauggacacaggaa

SEQ ID NO: 187552 - RNA, 18 nt, Artificial Sequence
  Synthetic
aucacauggacacaggaa

SEQ ID NO: 187553 - RNA, 19 nt, Artificial Sequence
  Synthetic
gaucacauggacacaggaa

SEQ ID NO: 187554 - RNA, 20 nt, Artificial Sequence
  Synthetic
agaucacauggacacaggaa

SEQ ID NO: 187555 - RNA, 21 nt, Artificial Sequence
  Synthetic
gagaucacauggacacaggaa

SEQ ID NO: 187556 - RNA, 22 nt, Artificial Sequence
  Synthetic
ugagaucacauggacacaggaa

SEQ ID NO: 187557 - RNA, 23 nt, Artificial Sequence
  Synthetic
augagaucacauggacacaggaa

SEQ ID NO: 187558 - RNA, 24 nt, Artificial Sequence
  Synthetic
aaugagaucacauggacacaggaa

SEQ ID NO: 187559 - RNA, 18 nt, Artificial Sequence
  Synthetic
uuuaaaauauuacaggaa

SEQ ID NO: 187560 - RNA, 19 nt, Artificial Sequence
  Synthetic
uuuuaaaauauuacaggaa

SEQ ID NO: 187561 - RNA, 20 nt, Artificial Sequence
  Synthetic
uuuuuaaaauauuacaggaa

SEQ ID NO: 187562 - RNA, 21 nt, Artificial Sequence
  Synthetic
cuuuuuaaaauauuacaggaa

SEQ ID NO: 187563 - RNA, 22 nt, Artificial Sequence
  Synthetic
ucuuuuuaaaauauuacaggaa

SEQ ID NO: 187564 - RNA, 23 nt, Artificial Sequence
  Synthetic
aucuuuuuaaaauauuacaggaa

SEQ ID NO: 187565 - RNA, 24 nt, Artificial Sequence
  Synthetic
caucuuuuuaaaauauuacaggaa

SEQ ID NO: 187566 - RNA, 18 nt, Artificial Sequence
  Synthetic
gaauuagaaaaccaggaa

SEQ ID NO: 187567 - RNA, 19 nt, Artificial Sequence
  Synthetic
ugaauuagaaaaccaggaa

SEQ ID NO: 187568 - RNA, 20 nt, Artificial Sequence
  Synthetic
gugaauuagaaaaccaggaa

SEQ ID NO: 187569 - RNA, 21 nt, Artificial Sequence
  Synthetic
agugaauuagaaaaccaggaa

SEQ ID NO: 187570 - RNA, 22 nt, Artificial Sequence
  Synthetic
cagugaauuagaaaaccaggaa

SEQ ID NO: 187571 - RNA, 23 nt, Artificial Sequence
  Synthetic
acagugaauuagaaaaccaggaa

SEQ ID NO: 187572 - RNA, 24 nt, Artificial Sequence
  Synthetic
cacagugaauuagaaaaccaggaa

SEQ ID NO: 187573 - RNA, 18 nt, Artificial Sequence
  Synthetic
uguggagaucaccaggaa

SEQ ID NO: 187574 - RNA, 19 nt, Artificial Sequence
  Synthetic
uuguggagaucaccaggaa

SEQ ID NO: 187575 - RNA, 20 nt, Artificial Sequence
  Synthetic
cuuguggagaucaccaggaa

SEQ ID NO: 187576 - RNA, 21 nt, Artificial Sequence
  Synthetic
acuuguggagaucaccaggaa

SEQ ID NO: 187577 - RNA, 22 nt, Artificial Sequence
  Synthetic
cacuuguggagaucaccaggaa

SEQ ID NO: 187578 - RNA, 23 nt, Artificial Sequence
  Synthetic
acacuuguggagaucaccaggaa

SEQ ID NO: 187579 - RNA, 24 nt, Artificial Sequence
  Synthetic
aacacuuguggagaucaccaggaa

SEQ ID NO: 187580 - RNA, 18 nt, Artificial Sequence
  Synthetic
auuccuugaacccaggaa

SEQ ID NO: 187581 - RNA, 19 nt, Artificial Sequence
  Synthetic
gauuccuugaacccaggaa

SEQ ID NO: 187582 - RNA, 20 nt, Artificial Sequence
  Synthetic
ggauuccuugaacccaggaa

SEQ ID NO: 187583 - RNA, 21 nt, Artificial Sequence
  Synthetic
aggauuccuugaacccaggaa

SEQ ID NO: 187584 - RNA, 22 nt, Artificial Sequence
  Synthetic
gaggauuccuugaacccaggaa

SEQ ID NO: 187585 - RNA, 23 nt, Artificial Sequence
  Synthetic
ggaggauuccuugaacccaggaa

SEQ ID NO: 187586 - RNA, 24 nt, Artificial Sequence
  Synthetic
aggaggauuccuugaacccaggaa

SEQ ID NO: 187587 - RNA, 18 nt, Artificial Sequence
  Synthetic
gccauucacauccaggaa

SEQ ID NO: 187588 - RNA, 19 nt, Artificial Sequence
  Synthetic
agccauucacauccaggaa

SEQ ID NO: 187589 - RNA, 20 nt, Artificial Sequence
  Synthetic
uagccauucacauccaggaa

SEQ ID NO: 187590 - RNA, 21 nt, Artificial Sequence
  Synthetic
cuagccauucacauccaggaa

SEQ ID NO: 187591 - RNA, 22 nt, Artificial Sequence
  Synthetic
acuagccauucacauccaggaa

SEQ ID NO: 187592 - RNA, 23 nt, Artificial Sequence
  Synthetic
cacuagccauucacauccaggaa

SEQ ID NO: 187593 - RNA, 24 nt, Artificial Sequence
  Synthetic
gcacuagccauucacauccaggaa

SEQ ID NO: 187594 - RNA, 18 nt, Artificial Sequence
  Synthetic
guaagcugcuuccaggaa

SEQ ID NO: 187595 - RNA, 19 nt, Artificial Sequence
  Synthetic
gguaagcugcuuccaggaa

SEQ ID NO: 187596 - RNA, 20 nt, Artificial Sequence
  Synthetic
ggguaagcugcuuccaggaa

SEQ ID NO: 187597 - RNA, 21 nt, Artificial Sequence
  Synthetic
uggguaagcugcuuccaggaa

SEQ ID NO: 187598 - RNA, 22 nt, Artificial Sequence
  Synthetic
uuggguaagcugcuuccaggaa

SEQ ID NO: 187599 - RNA, 23 nt, Artificial Sequence
  Synthetic
uuuggguaagcugcuuccaggaa

SEQ ID NO: 187600 - RNA, 24 nt, Artificial Sequence
  Synthetic
cuuuggguaagcugcuuccaggaa

SEQ ID NO: 187601 - RNA, 18 nt, Artificial Sequence
  Synthetic
ucagggagauagcaggaa

SEQ ID NO: 187602 - RNA, 19 nt, Artificial Sequence
  Synthetic
gucagggagauagcaggaa

SEQ ID NO: 187603 - RNA, 20 nt, Artificial Sequence
  Synthetic
agucagggagauagcaggaa

SEQ ID NO: 187604 - RNA, 21 nt, Artificial Sequence
  Synthetic
aagucagggagauagcaggaa

SEQ ID NO: 187605 - RNA, 22 nt, Artificial Sequence
  Synthetic
uaagucagggagauagcaggaa

SEQ ID NO: 187606 - RNA, 23 nt, Artificial Sequence
  Synthetic
auaagucagggagauagcaggaa

SEQ ID NO: 187607 - RNA, 24 nt, Artificial Sequence
  Synthetic
aauaagucagggagauagcaggaa

SEQ ID NO: 187608 - RNA, 18 nt, Artificial Sequence
  Synthetic
agugaauuaaugcaggaa

SEQ ID NO: 187609 - RNA, 19 nt, Artificial Sequence
  Synthetic
aagugaauuaaugcaggaa

SEQ ID NO: 187610 - RNA, 20 nt, Artificial Sequence
  Synthetic
uaagugaauuaaugcaggaa

SEQ ID NO: 187611 - RNA, 21 nt, Artificial Sequence
  Synthetic
cuaagugaauuaaugcaggaa

SEQ ID NO: 187612 - RNA, 22 nt, Artificial Sequence
  Synthetic
ccuaagugaauuaaugcaggaa

SEQ ID NO: 187613 - RNA, 23 nt, Artificial Sequence
  Synthetic
uccuaagugaauuaaugcaggaa

SEQ ID NO: 187614 - RNA, 24 nt, Artificial Sequence
  Synthetic
auccuaagugaauuaaugcaggaa

SEQ ID NO: 187615 - RNA, 18 nt, Artificial Sequence
  Synthetic
accaucuagcugcaggaa

SEQ ID NO: 187616 - RNA, 19 nt, Artificial Sequence
  Synthetic
gaccaucuagcugcaggaa

SEQ ID NO: 187617 - RNA, 20 nt, Artificial Sequence
  Synthetic
ggaccaucuagcugcaggaa

SEQ ID NO: 187618 - RNA, 21 nt, Artificial Sequence
  Synthetic
gggaccaucuagcugcaggaa

SEQ ID NO: 187619 - RNA, 22 nt, Artificial Sequence
  Synthetic
ugggaccaucuagcugcaggaa

SEQ ID NO: 187620 - RNA, 23 nt, Artificial Sequence
  Synthetic
augggaccaucuagcugcaggaa

SEQ ID NO: 187621 - RNA, 24 nt, Artificial Sequence
  Synthetic
gaugggaccaucuagcugcaggaa

SEQ ID NO: 187622 - RNA, 18 nt, Artificial Sequence
  Synthetic
agugaaguaauucaggaa

SEQ ID NO: 187623 - RNA, 19 nt, Artificial Sequence
  Synthetic
aagugaaguaauucaggaa

SEQ ID NO: 187624 - RNA, 20 nt, Artificial Sequence
  Synthetic
uaagugaaguaauucaggaa

SEQ ID NO: 187625 - RNA, 21 nt, Artificial Sequence
  Synthetic
cuaagugaaguaauucaggaa

SEQ ID NO: 187626 - RNA, 22 nt, Artificial Sequence
  Synthetic
ucuaagugaaguaauucaggaa

SEQ ID NO: 187627 - RNA, 23 nt, Artificial Sequence
  Synthetic
uucuaagugaaguaauucaggaa

SEQ ID NO: 187628 - RNA, 24 nt, Artificial Sequence
  Synthetic
auucuaagugaaguaauucaggaa

SEQ ID NO: 187629 - RNA, 18 nt, Artificial Sequence
  Synthetic
agauuugguuuucaggaa

SEQ ID NO: 187630 - RNA, 19 nt, Artificial Sequence
  Synthetic
aagauuugguuuucaggaa

SEQ ID NO: 187631 - RNA, 20 nt, Artificial Sequence
  Synthetic
aaagauuugguuuucaggaa

SEQ ID NO: 187632 - RNA, 21 nt, Artificial Sequence
  Synthetic
uaaagauuugguuuucaggaa

SEQ ID NO: 187633 - RNA, 22 nt, Artificial Sequence
  Synthetic
guaaagauuugguuuucaggaa

SEQ ID NO: 187634 - RNA, 23 nt, Artificial Sequence
  Synthetic
aguaaagauuugguuuucaggaa

SEQ ID NO: 187635 - RNA, 24 nt, Artificial Sequence
  Synthetic
uaguaaagauuugguuuucaggaa

SEQ ID NO: 187636 - RNA, 18 nt, Artificial Sequence
  Synthetic
aagaaaaaaaaagaggaa

SEQ ID NO: 187637 - RNA, 19 nt, Artificial Sequence
  Synthetic
aaagaaaaaaaaagaggaa

SEQ ID NO: 187638 - RNA, 20 nt, Artificial Sequence
  Synthetic
aaaagaaaaaaaaagaggaa

SEQ ID NO: 187639 - RNA, 21 nt, Artificial Sequence
  Synthetic
aaaaagaaaaaaaaagaggaa

SEQ ID NO: 187640 - RNA, 22 nt, Artificial Sequence
  Synthetic
uaaaaagaaaaaaaaagaggaa

SEQ ID NO: 187641 - RNA, 23 nt, Artificial Sequence
  Synthetic
uuaaaaagaaaaaaaaagaggaa

SEQ ID NO: 187642 - RNA, 24 nt, Artificial Sequence
  Synthetic
uuuaaaaagaaaaaaaaagaggaa

SEQ ID NO: 187643 - RNA, 18 nt, Artificial Sequence
  Synthetic
uaaacgaguaaagaggaa

SEQ ID NO: 187644 - RNA, 19 nt, Artificial Sequence
  Synthetic
uuaaacgaguaaagaggaa

SEQ ID NO: 187645 - RNA, 20 nt, Artificial Sequence
  Synthetic
auuaaacgaguaaagaggaa

SEQ ID NO: 187646 - RNA, 21 nt, Artificial Sequence
  Synthetic
aauuaaacgaguaaagaggaa

SEQ ID NO: 187647 - RNA, 22 nt, Artificial Sequence
  Synthetic
uaauuaaacgaguaaagaggaa

SEQ ID NO: 187648 - RNA, 23 nt, Artificial Sequence
  Synthetic
auaauuaaacgaguaaagaggaa

SEQ ID NO: 187649 - RNA, 24 nt, Artificial Sequence
  Synthetic
cauaauuaaacgaguaaagaggaa

SEQ ID NO: 187650 - RNA, 18 nt, Artificial Sequence
  Synthetic
uuuuuauaagaagaggaa

SEQ ID NO: 187651 - RNA, 19 nt, Artificial Sequence
  Synthetic
auuuuuauaagaagaggaa

SEQ ID NO: 187652 - RNA, 20 nt, Artificial Sequence
  Synthetic
uauuuuuauaagaagaggaa

SEQ ID NO: 187653 - RNA, 21 nt, Artificial Sequence
  Synthetic
guauuuuuauaagaagaggaa

SEQ ID NO: 187654 - RNA, 22 nt, Artificial Sequence
  Synthetic
gguauuuuuauaagaagaggaa

SEQ ID NO: 187655 - RNA, 23 nt, Artificial Sequence
  Synthetic
ugguauuuuuauaagaagaggaa

SEQ ID NO: 187656 - RNA, 24 nt, Artificial Sequence
  Synthetic
augguauuuuuauaagaagaggaa

SEQ ID NO: 187657 - RNA, 18 nt, Artificial Sequence
  Synthetic
uuguaagcagaagaggaa

SEQ ID NO: 187658 - RNA, 19 nt, Artificial Sequence
  Synthetic
auuguaagcagaagaggaa

SEQ ID NO: 187659 - RNA, 20 nt, Artificial Sequence
  Synthetic
gauuguaagcagaagaggaa

SEQ ID NO: 187660 - RNA, 21 nt, Artificial Sequence
  Synthetic
agauuguaagcagaagaggaa

SEQ ID NO: 187661 - RNA, 22 nt, Artificial Sequence
  Synthetic
uagauuguaagcagaagaggaa

SEQ ID NO: 187662 - RNA, 23 nt, Artificial Sequence
  Synthetic
auagauuguaagcagaagaggaa

SEQ ID NO: 187663 - RNA, 24 nt, Artificial Sequence
  Synthetic
aauagauuguaagcagaagaggaa

SEQ ID NO: 187664 - RNA, 18 nt, Artificial Sequence
  Synthetic
gaguuacuuuaagaggaa

SEQ ID NO: 187665 - RNA, 19 nt, Artificial Sequence
  Synthetic
agaguuacuuuaagaggaa

SEQ ID NO: 187666 - RNA, 20 nt, Artificial Sequence
  Synthetic
uagaguuacuuuaagaggaa

SEQ ID NO: 187667 - RNA, 21 nt, Artificial Sequence
  Synthetic
uuagaguuacuuuaagaggaa

SEQ ID NO: 187668 - RNA, 22 nt, Artificial Sequence
  Synthetic
uuuagaguuacuuuaagaggaa

SEQ ID NO: 187669 - RNA, 23 nt, Artificial Sequence
  Synthetic
uuuuagaguuacuuuaagaggaa

SEQ ID NO: 187670 - RNA, 24 nt, Artificial Sequence
  Synthetic
auuuuagaguuacuuuaagaggaa

SEQ ID NO: 187671 - RNA, 18 nt, Artificial Sequence
  Synthetic
ggcauauacccagaggaa

SEQ ID NO: 187672 - RNA, 19 nt, Artificial Sequence
  Synthetic
gggcauauacccagaggaa

SEQ ID NO: 187673 - RNA, 20 nt, Artificial Sequence
  Synthetic
ugggcauauacccagaggaa

SEQ ID NO: 187674 - RNA, 21 nt, Artificial Sequence
  Synthetic
uugggcauauacccagaggaa

SEQ ID NO: 187675 - RNA, 22 nt, Artificial Sequence
  Synthetic
auugggcauauacccagaggaa

SEQ ID NO: 187676 - RNA, 23 nt, Artificial Sequence
  Synthetic
uauugggcauauacccagaggaa

SEQ ID NO: 187677 - RNA, 24 nt, Artificial Sequence
  Synthetic
uuauugggcauauacccagaggaa

SEQ ID NO: 187678 - RNA, 18 nt, Artificial Sequence
  Synthetic
gaggcccaaggagaggaa

SEQ ID NO: 187679 - RNA, 19 nt, Artificial Sequence
  Synthetic
ggaggcccaaggagaggaa

SEQ ID NO: 187680 - RNA, 20 nt, Artificial Sequence
  Synthetic
gggaggcccaaggagaggaa

SEQ ID NO: 187681 - RNA, 21 nt, Artificial Sequence
  Synthetic
agggaggcccaaggagaggaa

SEQ ID NO: 187682 - RNA, 22 nt, Artificial Sequence
  Synthetic
uagggaggcccaaggagaggaa

SEQ ID NO: 187683 - RNA, 23 nt, Artificial Sequence
  Synthetic
auagggaggcccaaggagaggaa

SEQ ID NO: 187684 - RNA, 24 nt, Artificial Sequence
  Synthetic
aauagggaggcccaaggagaggaa

SEQ ID NO: 187685 - RNA, 18 nt, Artificial Sequence
  Synthetic
aaaucaaguggagaggaa

SEQ ID NO: 187686 - RNA, 19 nt, Artificial Sequence
  Synthetic
aaaaucaaguggagaggaa

SEQ ID NO: 187687 - RNA, 20 nt, Artificial Sequence
  Synthetic
uaaaaucaaguggagaggaa

SEQ ID NO: 187688 - RNA, 21 nt, Artificial Sequence
  Synthetic
guaaaaucaaguggagaggaa

SEQ ID NO: 187689 - RNA, 22 nt, Artificial Sequence
  Synthetic
cguaaaaucaaguggagaggaa

SEQ ID NO: 187690 - RNA, 23 nt, Artificial Sequence
  Synthetic
acguaaaaucaaguggagaggaa

SEQ ID NO: 187691 - RNA, 24 nt, Artificial Sequence
  Synthetic
cacguaaaaucaaguggagaggaa

SEQ ID NO: 187692 - RNA, 18 nt, Artificial Sequence
  Synthetic
uuuucaccaugagaggaa

SEQ ID NO: 187693 - RNA, 19 nt, Artificial Sequence
  Synthetic
uuuuucaccaugagaggaa

SEQ ID NO: 187694 - RNA, 20 nt, Artificial Sequence
  Synthetic
auuuuucaccaugagaggaa

SEQ ID NO: 187695 - RNA, 21 nt, Artificial Sequence
  Synthetic
uauuuuucaccaugagaggaa

SEQ ID NO: 187696 - RNA, 22 nt, Artificial Sequence
  Synthetic
uuauuuuucaccaugagaggaa

SEQ ID NO: 187697 - RNA, 23 nt, Artificial Sequence
  Synthetic
auuauuuuucaccaugagaggaa

SEQ ID NO: 187698 - RNA, 24 nt, Artificial Sequence
  Synthetic
uauuauuuuucaccaugagaggaa

SEQ ID NO: 187699 - RNA, 18 nt, Artificial Sequence
  Synthetic
gguuucuaaauagaggaa

SEQ ID NO: 187700 - RNA, 19 nt, Artificial Sequence
  Synthetic
ugguuucuaaauagaggaa

SEQ ID NO: 187701 - RNA, 20 nt, Artificial Sequence
  Synthetic
cugguuucuaaauagaggaa

SEQ ID NO: 187702 - RNA, 21 nt, Artificial Sequence
  Synthetic
ucugguuucuaaauagaggaa

SEQ ID NO: 187703 - RNA, 22 nt, Artificial Sequence
  Synthetic
gucugguuucuaaauagaggaa

SEQ ID NO: 187704 - RNA, 23 nt, Artificial Sequence
  Synthetic
ggucugguuucuaaauagaggaa

SEQ ID NO: 187705 - RNA, 24 nt, Artificial Sequence
  Synthetic
aggucugguuucuaaauagaggaa

SEQ ID NO: 187706 - RNA, 18 nt, Artificial Sequence
  Synthetic
agugaaagaauagaggaa

SEQ ID NO: 187707 - RNA, 19 nt, Artificial Sequence
  Synthetic
uagugaaagaauagaggaa

SEQ ID NO: 187708 - RNA, 20 nt, Artificial Sequence
  Synthetic
cuagugaaagaauagaggaa

SEQ ID NO: 187709 - RNA, 21 nt, Artificial Sequence
  Synthetic
acuagugaaagaauagaggaa

SEQ ID NO: 187710 - RNA, 22 nt, Artificial Sequence
  Synthetic
aacuagugaaagaauagaggaa

SEQ ID NO: 187711 - RNA, 23 nt, Artificial Sequence
  Synthetic
uaacuagugaaagaauagaggaa

SEQ ID NO: 187712 - RNA, 24 nt, Artificial Sequence
  Synthetic
uuaacuagugaaagaauagaggaa

SEQ ID NO: 187713 - RNA, 18 nt, Artificial Sequence
  Synthetic
guagaacuggucgaggaa

SEQ ID NO: 187714 - RNA, 19 nt, Artificial Sequence
  Synthetic
cguagaacuggucgaggaa

SEQ ID NO: 187715 - RNA, 20 nt, Artificial Sequence
  Synthetic
acguagaacuggucgaggaa

SEQ ID NO: 187716 - RNA, 21 nt, Artificial Sequence
  Synthetic
aacguagaacuggucgaggaa

SEQ ID NO: 187717 - RNA, 22 nt, Artificial Sequence
  Synthetic
aaacguagaacuggucgaggaa

SEQ ID NO: 187718 - RNA, 23 nt, Artificial Sequence
  Synthetic
aaaacguagaacuggucgaggaa

SEQ ID NO: 187719 - RNA, 24 nt, Artificial Sequence
  Synthetic
aaaaacguagaacuggucgaggaa

SEQ ID NO: 187720 - RNA, 18 nt, Artificial Sequence
  Synthetic
gagugaggaaaggaggaa

SEQ ID NO: 187721 - RNA, 19 nt, Artificial Sequence
  Synthetic
ggagugaggaaaggaggaa

SEQ ID NO: 187722 - RNA, 20 nt, Artificial Sequence
  Synthetic
aggagugaggaaaggaggaa

SEQ ID NO: 187723 - RNA, 21 nt, Artificial Sequence
  Synthetic
gaggagugaggaaaggaggaa

SEQ ID NO: 187724 - RNA, 22 nt, Artificial Sequence
  Synthetic
agaggagugaggaaaggaggaa

SEQ ID NO: 187725 - RNA, 23 nt, Artificial Sequence
  Synthetic
aagaggagugaggaaaggaggaa

SEQ ID NO: 187726 - RNA, 24 nt, Artificial Sequence
  Synthetic
aaagaggagugaggaaaggaggaa

SEQ ID NO: 187727 - RNA, 18 nt, Artificial Sequence
  Synthetic
auaaccaugaaggaggaa

SEQ ID NO: 187728 - RNA, 19 nt, Artificial Sequence
  Synthetic
cauaaccaugaaggaggaa

SEQ ID NO: 187729 - RNA, 20 nt, Artificial Sequence
  Synthetic
acauaaccaugaaggaggaa

SEQ ID NO: 187730 - RNA, 21 nt, Artificial Sequence
  Synthetic
uacauaaccaugaaggaggaa

SEQ ID NO: 187731 - RNA, 22 nt, Artificial Sequence
  Synthetic
uuacauaaccaugaaggaggaa

SEQ ID NO: 187732 - RNA, 23 nt, Artificial Sequence
  Synthetic
auuacauaaccaugaaggaggaa

SEQ ID NO: 187733 - RNA, 24 nt, Artificial Sequence
  Synthetic
gauuacauaaccaugaaggaggaa

SEQ ID NO: 187734 - RNA, 18 nt, Artificial Sequence
  Synthetic
ggaaggaaggaggaggaa

SEQ ID NO: 187735 - RNA, 19 nt, Artificial Sequence
  Synthetic
gggaaggaaggaggaggaa

SEQ ID NO: 187736 - RNA, 20 nt, Artificial Sequence
  Synthetic
agggaaggaaggaggaggaa

SEQ ID NO: 187737 - RNA, 21 nt, Artificial Sequence
  Synthetic
aagggaaggaaggaggaggaa

SEQ ID NO: 187738 - RNA, 22 nt, Artificial Sequence
  Synthetic
aaagggaaggaaggaggaggaa

SEQ ID NO: 187739 - RNA, 23 nt, Artificial Sequence
  Synthetic
gaaagggaaggaaggaggaggaa

SEQ ID NO: 187740 - RNA, 24 nt, Artificial Sequence
  Synthetic
agaaagggaaggaaggaggaggaa

SEQ ID NO: 187741 - RNA, 18 nt, Artificial Sequence
  Synthetic
caccugugagcggaggaa

SEQ ID NO: 187742 - RNA, 19 nt, Artificial Sequence
  Synthetic
acaccugugagcggaggaa

SEQ ID NO: 187743 - RNA, 20 nt, Artificial Sequence
  Synthetic
aacaccugugagcggaggaa

SEQ ID NO: 187744 - RNA, 21 nt, Artificial Sequence
  Synthetic
uaacaccugugagcggaggaa

SEQ ID NO: 187745 - RNA, 22 nt, Artificial Sequence
  Synthetic
uuaacaccugugagcggaggaa

SEQ ID NO: 187746 - RNA, 23 nt, Artificial Sequence
  Synthetic
auuaacaccugugagcggaggaa

SEQ ID NO: 187747 - RNA, 24 nt, Artificial Sequence
  Synthetic
gauuaacaccugugagcggaggaa

SEQ ID NO: 187748 - RNA, 18 nt, Artificial Sequence
  Synthetic
gagagagagagggaggaa

SEQ ID NO: 187749 - RNA, 19 nt, Artificial Sequence
  Synthetic
agagagagagagggaggaa

SEQ ID NO: 187750 - RNA, 20 nt, Artificial Sequence
  Synthetic
gagagagagagagggaggaa

SEQ ID NO: 187751 - RNA, 21 nt, Artificial Sequence
  Synthetic
agagagagagagagggaggaa

SEQ ID NO: 187752 - RNA, 22 nt, Artificial Sequence
  Synthetic
gagagagagagagagggaggaa

SEQ ID NO: 187753 - RNA, 23 nt, Artificial Sequence
  Synthetic
agagagagagagagagggaggaa

SEQ ID NO: 187754 - RNA, 24 nt, Artificial Sequence
  Synthetic
gagagagagagagagagggaggaa

SEQ ID NO: 187755 - RNA, 18 nt, Artificial Sequence
  Synthetic
ggguaggggagggaggaa

SEQ ID NO: 187756 - RNA, 19 nt, Artificial Sequence
  Synthetic
gggguaggggagggaggaa

SEQ ID NO: 187757 - RNA, 20 nt, Artificial Sequence
  Synthetic
cgggguaggggagggaggaa

SEQ ID NO: 187758 - RNA, 21 nt, Artificial Sequence
  Synthetic
ccgggguaggggagggaggaa

SEQ ID NO: 187759 - RNA, 22 nt, Artificial Sequence
  Synthetic
uccgggguaggggagggaggaa

SEQ ID NO: 187760 - RNA, 23 nt, Artificial Sequence
  Synthetic
cuccgggguaggggagggaggaa

SEQ ID NO: 187761 - RNA, 24 nt, Artificial Sequence
  Synthetic
gcuccgggguaggggagggaggaa

SEQ ID NO: 187762 - RNA, 18 nt, Artificial Sequence
  Synthetic
gagggagggauggaggaa

SEQ ID NO: 187763 - RNA, 19 nt, Artificial Sequence
  Synthetic
agagggagggauggaggaa

SEQ ID NO: 187764 - RNA, 20 nt, Artificial Sequence
  Synthetic
gagagggagggauggaggaa

SEQ ID NO: 187765 - RNA, 21 nt, Artificial Sequence
  Synthetic
agagagggagggauggaggaa

SEQ ID NO: 187766 - RNA, 22 nt, Artificial Sequence
  Synthetic
gagagagggagggauggaggaa

SEQ ID NO: 187767 - RNA, 23 nt, Artificial Sequence
  Synthetic
ugagagagggagggauggaggaa

SEQ ID NO: 187768 - RNA, 24 nt, Artificial Sequence
  Synthetic
augagagagggagggauggaggaa

SEQ ID NO: 187769 - RNA, 18 nt, Artificial Sequence
  Synthetic
uaggcacaguuggaggaa

SEQ ID NO: 187770 - RNA, 19 nt, Artificial Sequence
  Synthetic
uuaggcacaguuggaggaa

SEQ ID NO: 187771 - RNA, 20 nt, Artificial Sequence
  Synthetic
cuuaggcacaguuggaggaa

SEQ ID NO: 187772 - RNA, 21 nt, Artificial Sequence
  Synthetic
gcuuaggcacaguuggaggaa

SEQ ID NO: 187773 - RNA, 22 nt, Artificial Sequence
  Synthetic
agcuuaggcacaguuggaggaa

SEQ ID NO: 187774 - RNA, 23 nt, Artificial Sequence
  Synthetic
uagcuuaggcacaguuggaggaa

SEQ ID NO: 187775 - RNA, 24 nt, Artificial Sequence
  Synthetic
uuagcuuaggcacaguuggaggaa

SEQ ID NO: 187776 - RNA, 18 nt, Artificial Sequence
  Synthetic
aaguuucagaaugaggaa

SEQ ID NO: 187777 - RNA, 19 nt, Artificial Sequence
  Synthetic
gaaguuucagaaugaggaa

SEQ ID NO: 187778 - RNA, 20 nt, Artificial Sequence
  Synthetic
ugaaguuucagaaugaggaa

SEQ ID NO: 187779 - RNA, 21 nt, Artificial Sequence
  Synthetic
uugaaguuucagaaugaggaa

SEQ ID NO: 187780 - RNA, 22 nt, Artificial Sequence
  Synthetic
cuugaaguuucagaaugaggaa

SEQ ID NO: 187781 - RNA, 23 nt, Artificial Sequence
  Synthetic
gcuugaaguuucagaaugaggaa

SEQ ID NO: 187782 - RNA, 24 nt, Artificial Sequence
  Synthetic
ugcuugaaguuucagaaugaggaa

SEQ ID NO: 187783 - RNA, 18 nt, Artificial Sequence
  Synthetic
gcuguguguaaugaggaa

SEQ ID NO: 187784 - RNA, 19 nt, Artificial Sequence
  Synthetic
ggcuguguguaaugaggaa

SEQ ID NO: 187785 - RNA, 20 nt, Artificial Sequence
  Synthetic
aggcuguguguaaugaggaa

SEQ ID NO: 187786 - RNA, 21 nt, Artificial Sequence
  Synthetic
uaggcuguguguaaugaggaa

SEQ ID NO: 187787 - RNA, 22 nt, Artificial Sequence
  Synthetic
guaggcuguguguaaugaggaa

SEQ ID NO: 187788 - RNA, 23 nt, Artificial Sequence
  Synthetic
gguaggcuguguguaaugaggaa

SEQ ID NO: 187789 - RNA, 24 nt, Artificial Sequence
  Synthetic
ggguaggcuguguguaaugaggaa

SEQ ID NO: 187790 - RNA, 18 nt, Artificial Sequence
  Synthetic
uauggaaaagaugaggaa

SEQ ID NO: 187791 - RNA, 19 nt, Artificial Sequence
  Synthetic
guauggaaaagaugaggaa

SEQ ID NO: 187792 - RNA, 20 nt, Artificial Sequence
  Synthetic
aguauggaaaagaugaggaa

SEQ ID NO: 187793 - RNA, 21 nt, Artificial Sequence
  Synthetic
uaguauggaaaagaugaggaa

SEQ ID NO: 187794 - RNA, 22 nt, Artificial Sequence
  Synthetic
uuaguauggaaaagaugaggaa

SEQ ID NO: 187795 - RNA, 23 nt, Artificial Sequence
  Synthetic
uuuaguauggaaaagaugaggaa

SEQ ID NO: 187796 - RNA, 24 nt, Artificial Sequence
  Synthetic
uuuuaguauggaaaagaugaggaa

SEQ ID NO: 187797 - RNA, 18 nt, Artificial Sequence
  Synthetic
ucucuuacagaugaggaa

SEQ ID NO: 187798 - RNA, 19 nt, Artificial Sequence
  Synthetic
aucucuuacagaugaggaa

SEQ ID NO: 187799 - RNA, 20 nt, Artificial Sequence
  Synthetic
gaucucuuacagaugaggaa

SEQ ID NO: 187800 - RNA, 21 nt, Artificial Sequence
  Synthetic
agaucucuuacagaugaggaa

SEQ ID NO: 187801 - RNA, 22 nt, Artificial Sequence
  Synthetic
uagaucucuuacagaugaggaa

SEQ ID NO: 187802 - RNA, 23 nt, Artificial Sequence
  Synthetic
auagaucucuuacagaugaggaa

SEQ ID NO: 187803 - RNA, 24 nt, Artificial Sequence
  Synthetic
aauagaucucuuacagaugaggaa

SEQ ID NO: 187804 - RNA, 18 nt, Artificial Sequence
  Synthetic
ggacuguaaacugaggaa

SEQ ID NO: 187805 - RNA, 19 nt, Artificial Sequence
  Synthetic
cggacuguaaacugaggaa

SEQ ID NO: 187806 - RNA, 20 nt, Artificial Sequence
  Synthetic
acggacuguaaacugaggaa

SEQ ID NO: 187807 - RNA, 21 nt, Artificial Sequence
  Synthetic
cacggacuguaaacugaggaa

SEQ ID NO: 187808 - RNA, 22 nt, Artificial Sequence
  Synthetic
gcacggacuguaaacugaggaa

SEQ ID NO: 187809 - RNA, 23 nt, Artificial Sequence
  Synthetic
agcacggacuguaaacugaggaa

SEQ ID NO: 187810 - RNA, 24 nt, Artificial Sequence
  Synthetic
aagcacggacuguaaacugaggaa

SEQ ID NO: 187811 - RNA, 18 nt, Artificial Sequence
  Synthetic
ugagguacaacugaggaa

SEQ ID NO: 187812 - RNA, 19 nt, Artificial Sequence
  Synthetic
gugagguacaacugaggaa

SEQ ID NO: 187813 - RNA, 20 nt, Artificial Sequence
  Synthetic
ugugagguacaacugaggaa

SEQ ID NO: 187814 - RNA, 21 nt, Artificial Sequence
  Synthetic
cugugagguacaacugaggaa

SEQ ID NO: 187815 - RNA, 22 nt, Artificial Sequence
  Synthetic
gcugugagguacaacugaggaa

SEQ ID NO: 187816 - RNA, 23 nt, Artificial Sequence
  Synthetic
agcugugagguacaacugaggaa

SEQ ID NO: 187817 - RNA, 24 nt, Artificial Sequence
  Synthetic
uagcugugagguacaacugaggaa

SEQ ID NO: 187818 - RNA, 18 nt, Artificial Sequence
  Synthetic
aggagaaguacugaggaa

SEQ ID NO: 187819 - RNA, 19 nt, Artificial Sequence
  Synthetic
aaggagaaguacugaggaa

SEQ ID NO: 187820 - RNA, 20 nt, Artificial Sequence
  Synthetic
gaaggagaaguacugaggaa

SEQ ID NO: 187821 - RNA, 21 nt, Artificial Sequence
  Synthetic
ggaaggagaaguacugaggaa

SEQ ID NO: 187822 - RNA, 22 nt, Artificial Sequence
  Synthetic
aggaaggagaaguacugaggaa

SEQ ID NO: 187823 - RNA, 23 nt, Artificial Sequence
  Synthetic
caggaaggagaaguacugaggaa

SEQ ID NO: 187824 - RNA, 24 nt, Artificial Sequence
  Synthetic
gcaggaaggagaaguacugaggaa

SEQ ID NO: 187825 - RNA, 18 nt, Artificial Sequence
  Synthetic
ggacugugcccugaggaa

SEQ ID NO: 187826 - RNA, 19 nt, Artificial Sequence
  Synthetic
gggacugugcccugaggaa

SEQ ID NO: 187827 - RNA, 20 nt, Artificial Sequence
  Synthetic
agggacugugcccugaggaa

SEQ ID NO: 187828 - RNA, 21 nt, Artificial Sequence
  Synthetic
gagggacugugcccugaggaa

SEQ ID NO: 187829 - RNA, 22 nt, Artificial Sequence
  Synthetic
ugagggacugugcccugaggaa

SEQ ID NO: 187830 - RNA, 23 nt, Artificial Sequence
  Synthetic
gugagggacugugcccugaggaa

SEQ ID NO: 187831 - RNA, 24 nt, Artificial Sequence
  Synthetic
cgugagggacugugcccugaggaa

SEQ ID NO: 187832 - RNA, 18 nt, Artificial Sequence
  Synthetic
acugauguaagugaggaa

SEQ ID NO: 187833 - RNA, 19 nt, Artificial Sequence
  Synthetic
aacugauguaagugaggaa

SEQ ID NO: 187834 - RNA, 20 nt, Artificial Sequence
  Synthetic
aaacugauguaagugaggaa

SEQ ID NO: 187835 - RNA, 21 nt, Artificial Sequence
  Synthetic
aaaacugauguaagugaggaa

SEQ ID NO: 187836 - RNA, 22 nt, Artificial Sequence
  Synthetic
gaaaacugauguaagugaggaa

SEQ ID NO: 187837 - RNA, 23 nt, Artificial Sequence
  Synthetic
agaaaacugauguaagugaggaa

SEQ ID NO: 187838 - RNA, 24 nt, Artificial Sequence
  Synthetic
cagaaaacugauguaagugaggaa

SEQ ID NO: 187839 - RNA, 18 nt, Artificial Sequence
  Synthetic
caaaagaggagugaggaa

SEQ ID NO: 187840 - RNA, 19 nt, Artificial Sequence
  Synthetic
acaaaagaggagugaggaa

SEQ ID NO: 187841 - RNA, 20 nt, Artificial Sequence
  Synthetic
gacaaaagaggagugaggaa

SEQ ID NO: 187842 - RNA, 21 nt, Artificial Sequence
  Synthetic
ggacaaaagaggagugaggaa

SEQ ID NO: 187843 - RNA, 22 nt, Artificial Sequence
  Synthetic
aggacaaaagaggagugaggaa

SEQ ID NO: 187844 - RNA, 23 nt, Artificial Sequence
  Synthetic
gaggacaaaagaggagugaggaa

SEQ ID NO: 187845 - RNA, 24 nt, Artificial Sequence
  Synthetic
agaggacaaaagaggagugaggaa

SEQ ID NO: 187846 - RNA, 18 nt, Artificial Sequence
  Synthetic
caggguaguugugaggaa

SEQ ID NO: 187847 - RNA, 19 nt, Artificial Sequence
  Synthetic
ucaggguaguugugaggaa

SEQ ID NO: 187848 - RNA, 20 nt, Artificial Sequence
  Synthetic
gucaggguaguugugaggaa

SEQ ID NO: 187849 - RNA, 21 nt, Artificial Sequence
  Synthetic
ggucaggguaguugugaggaa

SEQ ID NO: 187850 - RNA, 22 nt, Artificial Sequence
  Synthetic
gggucaggguaguugugaggaa

SEQ ID NO: 187851 - RNA, 23 nt, Artificial Sequence
  Synthetic
agggucaggguaguugugaggaa

SEQ ID NO: 187852 - RNA, 24 nt, Artificial Sequence
  Synthetic
cagggucaggguaguugugaggaa

SEQ ID NO: 187853 - RNA, 18 nt, Artificial Sequence
  Synthetic
uaaaauuuccuugaggaa

SEQ ID NO: 187854 - RNA, 19 nt, Artificial Sequence
  Synthetic
guaaaauuuccuugaggaa

SEQ ID NO: 187855 - RNA, 20 nt, Artificial Sequence
  Synthetic
aguaaaauuuccuugaggaa

SEQ ID NO: 187856 - RNA, 21 nt, Artificial Sequence
  Synthetic
aaguaaaauuuccuugaggaa

SEQ ID NO: 187857 - RNA, 22 nt, Artificial Sequence
  Synthetic
gaaguaaaauuuccuugaggaa

SEQ ID NO: 187858 - RNA, 23 nt, Artificial Sequence
  Synthetic
agaaguaaaauuuccuugaggaa

SEQ ID NO: 187859 - RNA, 24 nt, Artificial Sequence
  Synthetic
aagaaguaaaauuuccuugaggaa

SEQ ID NO: 187860 - RNA, 18 nt, Artificial Sequence
  Synthetic
aggguauucaaauaggaa

SEQ ID NO: 187861 - RNA, 19 nt, Artificial Sequence
  Synthetic
aaggguauucaaauaggaa

SEQ ID NO: 187862 - RNA, 20 nt, Artificial Sequence
  Synthetic
aaaggguauucaaauaggaa

SEQ ID NO: 187863 - RNA, 21 nt, Artificial Sequence
  Synthetic
uaaaggguauucaaauaggaa

SEQ ID NO: 187864 - RNA, 22 nt, Artificial Sequence
  Synthetic
auaaaggguauucaaauaggaa

SEQ ID NO: 187865 - RNA, 23 nt, Artificial Sequence
  Synthetic
aauaaaggguauucaaauaggaa

SEQ ID NO: 187866 - RNA, 24 nt, Artificial Sequence
  Synthetic
aaauaaaggguauucaaauaggaa

SEQ ID NO: 187867 - RNA, 18 nt, Artificial Sequence
  Synthetic
uauucuaaacaauaggaa

SEQ ID NO: 187868 - RNA, 19 nt, Artificial Sequence
  Synthetic
cuauucuaaacaauaggaa

SEQ ID NO: 187869 - RNA, 20 nt, Artificial Sequence
  Synthetic
acuauucuaaacaauaggaa

SEQ ID NO: 187870 - RNA, 21 nt, Artificial Sequence
  Synthetic
aacuauucuaaacaauaggaa

SEQ ID NO: 187871 - RNA, 22 nt, Artificial Sequence
  Synthetic
aaacuauucuaaacaauaggaa

SEQ ID NO: 187872 - RNA, 23 nt, Artificial Sequence
  Synthetic
gaaacuauucuaaacaauaggaa

SEQ ID NO: 187873 - RNA, 24 nt, Artificial Sequence
  Synthetic
ugaaacuauucuaaacaauaggaa

SEQ ID NO: 187874 - RNA, 18 nt, Artificial Sequence
  Synthetic
uagaugaugcaauaggaa

SEQ ID NO: 187875 - RNA, 19 nt, Artificial Sequence
  Synthetic
uuagaugaugcaauaggaa

SEQ ID NO: 187876 - RNA, 20 nt, Artificial Sequence
  Synthetic
uuuagaugaugcaauaggaa

SEQ ID NO: 187877 - RNA, 21 nt, Artificial Sequence
  Synthetic
uuuuagaugaugcaauaggaa

SEQ ID NO: 187878 - RNA, 22 nt, Artificial Sequence
  Synthetic
uuuuuagaugaugcaauaggaa

SEQ ID NO: 187879 - RNA, 23 nt, Artificial Sequence
  Synthetic
uuuuuuagaugaugcaauaggaa

SEQ ID NO: 187880 - RNA, 24 nt, Artificial Sequence
  Synthetic
auuuuuuagaugaugcaauaggaa

SEQ ID NO: 187881 - RNA, 18 nt, Artificial Sequence
  Synthetic
auuccauuuacauaggaa

SEQ ID NO: 187882 - RNA, 19 nt, Artificial Sequence
  Synthetic
aauuccauuuacauaggaa

SEQ ID NO: 187883 - RNA, 20 nt, Artificial Sequence
  Synthetic
uaauuccauuuacauaggaa

SEQ ID NO: 187884 - RNA, 21 nt, Artificial Sequence
  Synthetic
auaauuccauuuacauaggaa

SEQ ID NO: 187885 - RNA, 22 nt, Artificial Sequence
  Synthetic
aauaauuccauuuacauaggaa

SEQ ID NO: 187886 - RNA, 23 nt, Artificial Sequence
  Synthetic
caauaauuccauuuacauaggaa

SEQ ID NO: 187887 - RNA, 24 nt, Artificial Sequence
  Synthetic
ccaauaauuccauuuacauaggaa

SEQ ID NO: 187888 - RNA, 18 nt, Artificial Sequence
  Synthetic
auauaguauucauaggaa

SEQ ID NO: 187889 - RNA, 19 nt, Artificial Sequence
  Synthetic
aauauaguauucauaggaa

SEQ ID NO: 187890 - RNA, 20 nt, Artificial Sequence
  Synthetic
aaauauaguauucauaggaa

SEQ ID NO: 187891 - RNA, 21 nt, Artificial Sequence
  Synthetic
aaaauauaguauucauaggaa

SEQ ID NO: 187892 - RNA, 22 nt, Artificial Sequence
  Synthetic
aaaaauauaguauucauaggaa

SEQ ID NO: 187893 - RNA, 23 nt, Artificial Sequence
  Synthetic
aaaaaauauaguauucauaggaa

SEQ ID NO: 187894 - RNA, 24 nt, Artificial Sequence
  Synthetic
gaaaaaauauaguauucauaggaa

SEQ ID NO: 187895 - RNA, 18 nt, Artificial Sequence
  Synthetic
uacuuggugauauaggaa

SEQ ID NO: 187896 - RNA, 19 nt, Artificial Sequence
  Synthetic
guacuuggugauauaggaa

SEQ ID NO: 187897 - RNA, 20 nt, Artificial Sequence
  Synthetic
uguacuuggugauauaggaa

SEQ ID NO: 187898 - RNA, 21 nt, Artificial Sequence
  Synthetic
cuguacuuggugauauaggaa

SEQ ID NO: 187899 - RNA, 22 nt, Artificial Sequence
  Synthetic
gcuguacuuggugauauaggaa

SEQ ID NO: 187900 - RNA, 23 nt, Artificial Sequence
  Synthetic
cgcuguacuuggugauauaggaa

SEQ ID NO: 187901 - RNA, 24 nt, Artificial Sequence
  Synthetic
gcgcuguacuuggugauauaggaa

SEQ ID NO: 187902 - RNA, 18 nt, Artificial Sequence
  Synthetic
cacuguugagccuaggaa

SEQ ID NO: 187903 - RNA, 19 nt, Artificial Sequence
  Synthetic
acacuguugagccuaggaa

SEQ ID NO: 187904 - RNA, 20 nt, Artificial Sequence
  Synthetic
uacacuguugagccuaggaa

SEQ ID NO: 187905 - RNA, 21 nt, Artificial Sequence
  Synthetic
guacacuguugagccuaggaa

SEQ ID NO: 187906 - RNA, 22 nt, Artificial Sequence
  Synthetic
uguacacuguugagccuaggaa

SEQ ID NO: 187907 - RNA, 23 nt, Artificial Sequence
  Synthetic
guguacacuguugagccuaggaa

SEQ ID NO: 187908 - RNA, 24 nt, Artificial Sequence
  Synthetic
aguguacacuguugagccuaggaa

SEQ ID NO: 187909 - RNA, 18 nt, Artificial Sequence
  Synthetic
cuucagaagugcuaggaa

SEQ ID NO: 187910 - RNA, 19 nt, Artificial Sequence
  Synthetic
ccuucagaagugcuaggaa

SEQ ID NO: 187911 - RNA, 20 nt, Artificial Sequence
  Synthetic
cccuucagaagugcuaggaa

SEQ ID NO: 187912 - RNA, 21 nt, Artificial Sequence
  Synthetic
acccuucagaagugcuaggaa

SEQ ID NO: 187913 - RNA, 22 nt, Artificial Sequence
  Synthetic
gacccuucagaagugcuaggaa

SEQ ID NO: 187914 - RNA, 23 nt, Artificial Sequence
  Synthetic
ugacccuucagaagugcuaggaa

SEQ ID NO: 187915 - RNA, 24 nt, Artificial Sequence
  Synthetic
augacccuucagaagugcuaggaa

SEQ ID NO: 187916 - RNA, 18 nt, Artificial Sequence
  Synthetic
acauaaacuaucuaggaa

SEQ ID NO: 187917 - RNA, 19 nt, Artificial Sequence
  Synthetic
uacauaaacuaucuaggaa

SEQ ID NO: 187918 - RNA, 20 nt, Artificial Sequence
  Synthetic
uuacauaaacuaucuaggaa

SEQ ID NO: 187919 - RNA, 21 nt, Artificial Sequence
  Synthetic
uuuacauaaacuaucuaggaa

SEQ ID NO: 187920 - RNA, 22 nt, Artificial Sequence
  Synthetic
auuuacauaaacuaucuaggaa

SEQ ID NO: 187921 - RNA, 23 nt, Artificial Sequence
  Synthetic
cauuuacauaaacuaucuaggaa

SEQ ID NO: 187922 - RNA, 24 nt, Artificial Sequence
  Synthetic
gcauuuacauaaacuaucuaggaa

SEQ ID NO: 187923 - RNA, 18 nt, Artificial Sequence
  Synthetic
uagggaccaaaguaggaa

SEQ ID NO: 187924 - RNA, 19 nt, Artificial Sequence
  Synthetic
auagggaccaaaguaggaa

SEQ ID NO: 187925 - RNA, 20 nt, Artificial Sequence
  Synthetic
uauagggaccaaaguaggaa

SEQ ID NO: 187926 - RNA, 21 nt, Artificial Sequence
  Synthetic
guauagggaccaaaguaggaa

SEQ ID NO: 187927 - RNA, 22 nt, Artificial Sequence
  Synthetic
uguauagggaccaaaguaggaa

SEQ ID NO: 187928 - RNA, 23 nt, Artificial Sequence
  Synthetic
uuguauagggaccaaaguaggaa

SEQ ID NO: 187929 - RNA, 24 nt, Artificial Sequence
  Synthetic
uuuguauagggaccaaaguaggaa

SEQ ID NO: 187930 - RNA, 18 nt, Artificial Sequence
  Synthetic
aucuccuuuaaguaggaa

SEQ ID NO: 187931 - RNA, 19 nt, Artificial Sequence
  Synthetic
gaucuccuuuaaguaggaa

SEQ ID NO: 187932 - RNA, 20 nt, Artificial Sequence
  Synthetic
ugaucuccuuuaaguaggaa

SEQ ID NO: 187933 - RNA, 21 nt, Artificial Sequence
  Synthetic
augaucuccuuuaaguaggaa

SEQ ID NO: 187934 - RNA, 22 nt, Artificial Sequence
  Synthetic
uaugaucuccuuuaaguaggaa

SEQ ID NO: 187935 - RNA, 23 nt, Artificial Sequence
  Synthetic
uuaugaucuccuuuaaguaggaa

SEQ ID NO: 187936 - RNA, 24 nt, Artificial Sequence
  Synthetic
guuaugaucuccuuuaaguaggaa

SEQ ID NO: 187937 - RNA, 18 nt, Artificial Sequence
  Synthetic
gagagacuggaguaggaa

SEQ ID NO: 187938 - RNA, 19 nt, Artificial Sequence
  Synthetic
ugagagacuggaguaggaa

SEQ ID NO: 187939 - RNA, 20 nt, Artificial Sequence
  Synthetic
uugagagacuggaguaggaa

SEQ ID NO: 187940 - RNA, 21 nt, Artificial Sequence
  Synthetic
guugagagacuggaguaggaa

SEQ ID NO: 187941 - RNA, 22 nt, Artificial Sequence
  Synthetic
aguugagagacuggaguaggaa

SEQ ID NO: 187942 - RNA, 23 nt, Artificial Sequence
  Synthetic
gaguugagagacuggaguaggaa

SEQ ID NO: 187943 - RNA, 24 nt, Artificial Sequence
  Synthetic
agaguugagagacuggaguaggaa

SEQ ID NO: 187944 - RNA, 18 nt, Artificial Sequence
  Synthetic
uacugccuauaguaggaa

SEQ ID NO: 187945 - RNA, 19 nt, Artificial Sequence
  Synthetic
auacugccuauaguaggaa

SEQ ID NO: 187946 - RNA, 20 nt, Artificial Sequence
  Synthetic
uauacugccuauaguaggaa

SEQ ID NO: 187947 - RNA, 21 nt, Artificial Sequence
  Synthetic
guauacugccuauaguaggaa

SEQ ID NO: 187948 - RNA, 22 nt, Artificial Sequence
  Synthetic
gguauacugccuauaguaggaa

SEQ ID NO: 187949 - RNA, 23 nt, Artificial Sequence
  Synthetic
agguauacugccuauaguaggaa

SEQ ID NO: 187950 - RNA, 24 nt, Artificial Sequence
  Synthetic
aagguauacugccuauaguaggaa

SEQ ID NO: 187951 - RNA, 18 nt, Artificial Sequence
  Synthetic
uaaaugaauuaguaggaa

SEQ ID NO: 187952 - RNA, 19 nt, Artificial Sequence
  Synthetic
guaaaugaauuaguaggaa

SEQ ID NO: 187953 - RNA, 20 nt, Artificial Sequence
  Synthetic
cguaaaugaauuaguaggaa

SEQ ID NO: 187954 - RNA, 21 nt, Artificial Sequence
  Synthetic
ucguaaaugaauuaguaggaa

SEQ ID NO: 187955 - RNA, 22 nt, Artificial Sequence
  Synthetic
aucguaaaugaauuaguaggaa

SEQ ID NO: 187956 - RNA, 23 nt, Artificial Sequence
  Synthetic
uaucguaaaugaauuaguaggaa

SEQ ID NO: 187957 - RNA, 24 nt, Artificial Sequence
  Synthetic
uuaucguaaaugaauuaguaggaa

SEQ ID NO: 187958 - RNA, 18 nt, Artificial Sequence
  Synthetic
ggcugcaagguguaggaa

SEQ ID NO: 187959 - RNA, 19 nt, Artificial Sequence
  Synthetic
aggcugcaagguguaggaa

SEQ ID NO: 187960 - RNA, 20 nt, Artificial Sequence
  Synthetic
aaggcugcaagguguaggaa

SEQ ID NO: 187961 - RNA, 21 nt, Artificial Sequence
  Synthetic
aaaggcugcaagguguaggaa

SEQ ID NO: 187962 - RNA, 22 nt, Artificial Sequence
  Synthetic
caaaggcugcaagguguaggaa

SEQ ID NO: 187963 - RNA, 23 nt, Artificial Sequence
  Synthetic
ucaaaggcugcaagguguaggaa

SEQ ID NO: 187964 - RNA, 24 nt, Artificial Sequence
  Synthetic
uucaaaggcugcaagguguaggaa

SEQ ID NO: 187965 - RNA, 18 nt, Artificial Sequence
  Synthetic
aaacaaugcaauuaggaa

SEQ ID NO: 187966 - RNA, 19 nt, Artificial Sequence
  Synthetic
caaacaaugcaauuaggaa

SEQ ID NO: 187967 - RNA, 20 nt, Artificial Sequence
  Synthetic
acaaacaaugcaauuaggaa

SEQ ID NO: 187968 - RNA, 21 nt, Artificial Sequence
  Synthetic
aacaaacaaugcaauuaggaa

SEQ ID NO: 187969 - RNA, 22 nt, Artificial Sequence
  Synthetic
aaacaaacaaugcaauuaggaa

SEQ ID NO: 187970 - RNA, 23 nt, Artificial Sequence
  Synthetic
gaaacaaacaaugcaauuaggaa

SEQ ID NO: 187971 - RNA, 24 nt, Artificial Sequence
  Synthetic
agaaacaaacaaugcaauuaggaa

SEQ ID NO: 187972 - RNA, 18 nt, Artificial Sequence
  Synthetic
aggguauucaauuaggaa

SEQ ID NO: 187973 - RNA, 19 nt, Artificial Sequence
  Synthetic
aaggguauucaauuaggaa

SEQ ID NO: 187974 - RNA, 20 nt, Artificial Sequence
  Synthetic
aaaggguauucaauuaggaa

SEQ ID NO: 187975 - RNA, 18 nt, Artificial Sequence
  Synthetic
gggcucuuggauuaggaa

SEQ ID NO: 187976 - RNA, 19 nt, Artificial Sequence
  Synthetic
agggcucuuggauuaggaa

SEQ ID NO: 187977 - RNA, 20 nt, Artificial Sequence
  Synthetic
aagggcucuuggauuaggaa

SEQ ID NO: 187978 - RNA, 21 nt, Artificial Sequence
  Synthetic
uaagggcucuuggauuaggaa

SEQ ID NO: 187979 - RNA, 22 nt, Artificial Sequence
  Synthetic
auaagggcucuuggauuaggaa

SEQ ID NO: 187980 - RNA, 23 nt, Artificial Sequence
  Synthetic
cauaagggcucuuggauuaggaa

SEQ ID NO: 187981 - RNA, 24 nt, Artificial Sequence
  Synthetic
gcauaagggcucuuggauuaggaa

SEQ ID NO: 187982 - RNA, 18 nt, Artificial Sequence
  Synthetic
guaaugggaaguuaggaa

SEQ ID NO: 187983 - RNA, 19 nt, Artificial Sequence
  Synthetic
aguaaugggaaguuaggaa

SEQ ID NO: 187984 - RNA, 20 nt, Artificial Sequence
  Synthetic
uaguaaugggaaguuaggaa

SEQ ID NO: 187985 - RNA, 21 nt, Artificial Sequence
  Synthetic
auaguaaugggaaguuaggaa

SEQ ID NO: 187986 - RNA, 22 nt, Artificial Sequence
  Synthetic
uauaguaaugggaaguuaggaa

SEQ ID NO: 187987 - RNA, 23 nt, Artificial Sequence
  Synthetic
auauaguaaugggaaguuaggaa

SEQ ID NO: 187988 - RNA, 24 nt, Artificial Sequence
  Synthetic
cauauaguaaugggaaguuaggaa

SEQ ID NO: 187989 - RNA, 18 nt, Artificial Sequence
  Synthetic
aagguauucaguuaggaa

SEQ ID NO: 187990 - RNA, 19 nt, Artificial Sequence
  Synthetic
aaagguauucaguuaggaa

SEQ ID NO: 187991 - RNA, 20 nt, Artificial Sequence
  Synthetic
aaaagguauucaguuaggaa

SEQ ID NO: 187992 - RNA, 21 nt, Artificial Sequence
  Synthetic
uaaaagguauucaguuaggaa

SEQ ID NO: 187993 - RNA, 22 nt, Artificial Sequence
  Synthetic
auaaaagguauucaguuaggaa

SEQ ID NO: 187994 - RNA, 23 nt, Artificial Sequence
  Synthetic
aauaaaagguauucaguuaggaa

SEQ ID NO: 187995 - RNA, 24 nt, Artificial Sequence
  Synthetic
aaauaaaagguauucaguuaggaa

SEQ ID NO: 187996 - RNA, 18 nt, Artificial Sequence
  Synthetic
ucagugaccuguuaggaa

SEQ ID NO: 187997 - RNA, 19 nt, Artificial Sequence
  Synthetic
gucagugaccuguuaggaa

SEQ ID NO: 187998 - RNA, 20 nt, Artificial Sequence
  Synthetic
ggucagugaccuguuaggaa

SEQ ID NO: 187999 - RNA, 21 nt, Artificial Sequence
  Synthetic
aggucagugaccuguuaggaa

SEQ ID NO: 188000 - RNA, 22 nt, Artificial Sequence
  Synthetic
caggucagugaccuguuaggaa

SEQ ID NO: 188001 - RNA, 23 nt, Artificial Sequence
  Synthetic
acaggucagugaccuguuaggaa

SEQ ID NO: 188002 - RNA, 24 nt, Artificial Sequence
  Synthetic
uacaggucagugaccuguuaggaa

SEQ ID NO: 188003 - RNA, 18 nt, Artificial Sequence
  Synthetic
guccaucauauuuaggaa

SEQ ID NO: 188004 - RNA, 19 nt, Artificial Sequence
  Synthetic
gguccaucauauuuaggaa

SEQ ID NO: 188005 - RNA, 20 nt, Artificial Sequence
  Synthetic
agguccaucauauuuaggaa

SEQ ID NO: 188006 - RNA, 21 nt, Artificial Sequence
  Synthetic
aagguccaucauauuuaggaa

SEQ ID NO: 188007 - RNA, 22 nt, Artificial Sequence
  Synthetic
gaagguccaucauauuuaggaa

SEQ ID NO: 188008 - RNA, 23 nt, Artificial Sequence
  Synthetic
ugaagguccaucauauuuaggaa

SEQ ID NO: 188009 - RNA, 24 nt, Artificial Sequence
  Synthetic
gugaagguccaucauauuuaggaa

SEQ ID NO: 188010 - RNA, 18 nt, Artificial Sequence
  Synthetic
uggcuuccacuuuaggaa

SEQ ID NO: 188011 - RNA, 19 nt, Artificial Sequence
  Synthetic
uuggcuuccacuuuaggaa

SEQ ID NO: 188012 - RNA, 20 nt, Artificial Sequence
  Synthetic
cuuggcuuccacuuuaggaa

SEQ ID NO: 188013 - RNA, 21 nt, Artificial Sequence
  Synthetic
acuuggcuuccacuuuaggaa

SEQ ID NO: 188014 - RNA, 22 nt, Artificial Sequence
  Synthetic
aacuuggcuuccacuuuaggaa

SEQ ID NO: 188015 - RNA, 23 nt, Artificial Sequence
  Synthetic
gaacuuggcuuccacuuuaggaa

SEQ ID NO: 188016 - RNA, 24 nt, Artificial Sequence
  Synthetic
ugaacuuggcuuccacuuuaggaa

SEQ ID NO: 188017 - RNA, 18 nt, Artificial Sequence
  Synthetic
ugggguggagggacggaa

SEQ ID NO: 188018 - RNA, 19 nt, Artificial Sequence
  Synthetic
uugggguggagggacggaa

SEQ ID NO: 188019 - RNA, 20 nt, Artificial Sequence
  Synthetic
guugggguggagggacggaa

SEQ ID NO: 188020 - RNA, 21 nt, Artificial Sequence
  Synthetic
gguugggguggagggacggaa

SEQ ID NO: 188021 - RNA, 22 nt, Artificial Sequence
  Synthetic
ugguugggguggagggacggaa

SEQ ID NO: 188022 - RNA, 23 nt, Artificial Sequence
  Synthetic
augguugggguggagggacggaa

SEQ ID NO: 188023 - RNA, 24 nt, Artificial Sequence
  Synthetic
uaugguugggguggagggacggaa

SEQ ID NO: 188024 - RNA, 18 nt, Artificial Sequence
  Synthetic
uuguugauagaagcggaa

SEQ ID NO: 188025 - RNA, 19 nt, Artificial Sequence
  Synthetic
uuuguugauagaagcggaa

SEQ ID NO: 188026 - RNA, 20 nt, Artificial Sequence
  Synthetic
uuuuguugauagaagcggaa

SEQ ID NO: 188027 - RNA, 21 nt, Artificial Sequence
  Synthetic
uuuuuguugauagaagcggaa

SEQ ID NO: 188028 - RNA, 22 nt, Artificial Sequence
  Synthetic
guuuuuguugauagaagcggaa

SEQ ID NO: 188029 - RNA, 23 nt, Artificial Sequence
  Synthetic
aguuuuuguugauagaagcggaa

SEQ ID NO: 188030 - RNA, 24 nt, Artificial Sequence
  Synthetic
caguuuuuguugauagaagcggaa

SEQ ID NO: 188031 - RNA, 18 nt, Artificial Sequence
  Synthetic
aauuacagugaagcggaa

SEQ ID NO: 188032 - RNA, 19 nt, Artificial Sequence
  Synthetic
aaauuacagugaagcggaa

SEQ ID NO: 188033 - RNA, 20 nt, Artificial Sequence
  Synthetic
gaaauuacagugaagcggaa

SEQ ID NO: 188034 - RNA, 21 nt, Artificial Sequence
  Synthetic
agaaauuacagugaagcggaa

SEQ ID NO: 188035 - RNA, 22 nt, Artificial Sequence
  Synthetic
uagaaauuacagugaagcggaa

SEQ ID NO: 188036 - RNA, 23 nt, Artificial Sequence
  Synthetic
auagaaauuacagugaagcggaa

SEQ ID NO: 188037 - RNA, 24 nt, Artificial Sequence
  Synthetic
aauagaaauuacagugaagcggaa

SEQ ID NO: 188038 - RNA, 18 nt, Artificial Sequence
  Synthetic
gaaauuauaaaaagggaa

SEQ ID NO: 188039 - RNA, 19 nt, Artificial Sequence
  Synthetic
ggaaauuauaaaaagggaa

SEQ ID NO: 188040 - RNA, 20 nt, Artificial Sequence
  Synthetic
aggaaauuauaaaaagggaa

SEQ ID NO: 188041 - RNA, 21 nt, Artificial Sequence
  Synthetic
uaggaaauuauaaaaagggaa

SEQ ID NO: 188042 - RNA, 22 nt, Artificial Sequence
  Synthetic
auaggaaauuauaaaaagggaa

SEQ ID NO: 188043 - RNA, 23 nt, Artificial Sequence
  Synthetic
uauaggaaauuauaaaaagggaa

SEQ ID NO: 188044 - RNA, 24 nt, Artificial Sequence
  Synthetic
auauaggaaauuauaaaaagggaa

SEQ ID NO: 188045 - RNA, 18 nt, Artificial Sequence
  Synthetic
aacugagagcaaagggaa

SEQ ID NO: 188046 - RNA, 19 nt, Artificial Sequence
  Synthetic
gaacugagagcaaagggaa

SEQ ID NO: 188047 - RNA, 20 nt, Artificial Sequence
  Synthetic
ggaacugagagcaaagggaa

SEQ ID NO: 188048 - RNA, 21 nt, Artificial Sequence
  Synthetic
uggaacugagagcaaagggaa

SEQ ID NO: 188049 - RNA, 22 nt, Artificial Sequence
  Synthetic
cuggaacugagagcaaagggaa

SEQ ID NO: 188050 - RNA, 23 nt, Artificial Sequence
  Synthetic
gcuggaacugagagcaaagggaa

SEQ ID NO: 188051 - RNA, 24 nt, Artificial Sequence
  Synthetic
ugcuggaacugagagcaaagggaa

SEQ ID NO: 188052 - RNA, 18 nt, Artificial Sequence
  Synthetic
ucacauaaucaaagggaa

SEQ ID NO: 188053 - RNA, 19 nt, Artificial Sequence
  Synthetic
gucacauaaucaaagggaa

SEQ ID NO: 188054 - RNA, 20 nt, Artificial Sequence
  Synthetic
ggucacauaaucaaagggaa

SEQ ID NO: 188055 - RNA, 21 nt, Artificial Sequence
  Synthetic
cggucacauaaucaaagggaa

SEQ ID NO: 188056 - RNA, 22 nt, Artificial Sequence
  Synthetic
acggucacauaaucaaagggaa

SEQ ID NO: 188057 - RNA, 23 nt, Artificial Sequence
  Synthetic
cacggucacauaaucaaagggaa

SEQ ID NO: 188058 - RNA, 24 nt, Artificial Sequence
  Synthetic
acacggucacauaaucaaagggaa

SEQ ID NO: 188059 - RNA, 18 nt, Artificial Sequence
  Synthetic
uuagagaaggaaagggaa

SEQ ID NO: 188060 - RNA, 19 nt, Artificial Sequence
  Synthetic
uuuagagaaggaaagggaa

SEQ ID NO: 188061 - RNA, 20 nt, Artificial Sequence
  Synthetic
auuuagagaaggaaagggaa

SEQ ID NO: 188062 - RNA, 21 nt, Artificial Sequence
  Synthetic
gauuuagagaaggaaagggaa

SEQ ID NO: 188063 - RNA, 22 nt, Artificial Sequence
  Synthetic
agauuuagagaaggaaagggaa

SEQ ID NO: 188064 - RNA, 23 nt, Artificial Sequence
  Synthetic
aagauuuagagaaggaaagggaa

SEQ ID NO: 188065 - RNA, 24 nt, Artificial Sequence
  Synthetic
aaagauuuagagaaggaaagggaa

SEQ ID NO: 188066 - RNA, 18 nt, Artificial Sequence
  Synthetic
aagaaguaauaaagggaa

SEQ ID NO: 188067 - RNA, 19 nt, Artificial Sequence
  Synthetic
aaagaaguaauaaagggaa

SEQ ID NO: 188068 - RNA, 20 nt, Artificial Sequence
  Synthetic
uaaagaaguaauaaagggaa

SEQ ID NO: 188069 - RNA, 21 nt, Artificial Sequence
  Synthetic
cuaaagaaguaauaaagggaa

SEQ ID NO: 188070 - RNA, 22 nt, Artificial Sequence
  Synthetic
acuaaagaaguaauaaagggaa

SEQ ID NO: 188071 - RNA, 23 nt, Artificial Sequence
  Synthetic
aacuaaagaaguaauaaagggaa

SEQ ID NO: 188072 - RNA, 24 nt, Artificial Sequence
  Synthetic
aaacuaaagaaguaauaaagggaa

SEQ ID NO: 188073 - RNA, 18 nt, Artificial Sequence
  Synthetic
ugugucaccuaaagggaa

SEQ ID NO: 188074 - RNA, 19 nt, Artificial Sequence
  Synthetic
uugugucaccuaaagggaa

SEQ ID NO: 188075 - RNA, 20 nt, Artificial Sequence
  Synthetic
auugugucaccuaaagggaa

SEQ ID NO: 188076 - RNA, 21 nt, Artificial Sequence
  Synthetic
cauugugucaccuaaagggaa

SEQ ID NO: 188077 - RNA, 22 nt, Artificial Sequence
  Synthetic
acauugugucaccuaaagggaa

SEQ ID NO: 188078 - RNA, 23 nt, Artificial Sequence
  Synthetic
uacauugugucaccuaaagggaa

SEQ ID NO: 188079 - RNA, 24 nt, Artificial Sequence
  Synthetic
guacauugugucaccuaaagggaa

SEQ ID NO: 188080 - RNA, 18 nt, Artificial Sequence
  Synthetic
ucacagaauccaagggaa

SEQ ID NO: 188081 - RNA, 19 nt, Artificial Sequence
  Synthetic
gucacagaauccaagggaa

SEQ ID NO: 188082 - RNA, 20 nt, Artificial Sequence
  Synthetic
ugucacagaauccaagggaa

SEQ ID NO: 188083 - RNA, 21 nt, Artificial Sequence
  Synthetic
augucacagaauccaagggaa

SEQ ID NO: 188084 - RNA, 22 nt, Artificial Sequence
  Synthetic
gaugucacagaauccaagggaa

SEQ ID NO: 188085 - RNA, 23 nt, Artificial Sequence
  Synthetic
ugaugucacagaauccaagggaa

SEQ ID NO: 188086 - RNA, 24 nt, Artificial Sequence
  Synthetic
gugaugucacagaauccaagggaa

SEQ ID NO: 188087 - RNA, 18 nt, Artificial Sequence
  Synthetic
gcagauguuagaagggaa

SEQ ID NO: 188088 - RNA, 19 nt, Artificial Sequence
  Synthetic
agcagauguuagaagggaa

SEQ ID NO: 188089 - RNA, 20 nt, Artificial Sequence
  Synthetic
aagcagauguuagaagggaa

SEQ ID NO: 188090 - RNA, 21 nt, Artificial Sequence
  Synthetic
caagcagauguuagaagggaa

SEQ ID NO: 188091 - RNA, 22 nt, Artificial Sequence
  Synthetic
gcaagcagauguuagaagggaa

SEQ ID NO: 188092 - RNA, 23 nt, Artificial Sequence
  Synthetic
cgcaagcagauguuagaagggaa

SEQ ID NO: 188093 - RNA, 24 nt, Artificial Sequence
  Synthetic
acgcaagcagauguuagaagggaa

SEQ ID NO: 188094 - RNA, 18 nt, Artificial Sequence
  Synthetic
uaaagcugguuaagggaa

SEQ ID NO: 188095 - RNA, 19 nt, Artificial Sequence
  Synthetic
auaaagcugguuaagggaa

SEQ ID NO: 188096 - RNA, 20 nt, Artificial Sequence
  Synthetic
aauaaagcugguuaagggaa

SEQ ID NO: 188097 - RNA, 21 nt, Artificial Sequence
  Synthetic
aaauaaagcugguuaagggaa

SEQ ID NO: 188098 - RNA, 22 nt, Artificial Sequence
  Synthetic
gaaauaaagcugguuaagggaa

SEQ ID NO: 188099 - RNA, 23 nt, Artificial Sequence
  Synthetic
ggaaauaaagcugguuaagggaa

SEQ ID NO: 188100 - RNA, 24 nt, Artificial Sequence
  Synthetic
uggaaauaaagcugguuaagggaa

SEQ ID NO: 188101 - RNA, 18 nt, Artificial Sequence
  Synthetic
caggccuucaagagggaa

SEQ ID NO: 188102 - RNA, 19 nt, Artificial Sequence
  Synthetic
acaggccuucaagagggaa

SEQ ID NO: 188103 - RNA, 20 nt, Artificial Sequence
  Synthetic
cacaggccuucaagagggaa

SEQ ID NO: 188104 - RNA, 21 nt, Artificial Sequence
  Synthetic
ucacaggccuucaagagggaa

SEQ ID NO: 188105 - RNA, 22 nt, Artificial Sequence
  Synthetic
uucacaggccuucaagagggaa

SEQ ID NO: 188106 - RNA, 23 nt, Artificial Sequence
  Synthetic
uuucacaggccuucaagagggaa

SEQ ID NO: 188107 - RNA, 24 nt, Artificial Sequence
  Synthetic
auuucacaggccuucaagagggaa

SEQ ID NO: 188108 - RNA, 18 nt, Artificial Sequence
  Synthetic
cccggaagcaggagggaa

SEQ ID NO: 188109 - RNA, 19 nt, Artificial Sequence
  Synthetic
acccggaagcaggagggaa

SEQ ID NO: 188110 - RNA, 20 nt, Artificial Sequence
  Synthetic
gacccggaagcaggagggaa

SEQ ID NO: 188111 - RNA, 21 nt, Artificial Sequence
  Synthetic
ugacccggaagcaggagggaa

SEQ ID NO: 188112 - RNA, 22 nt, Artificial Sequence
  Synthetic
gugacccggaagcaggagggaa

SEQ ID NO: 188113 - RNA, 23 nt, Artificial Sequence
  Synthetic
ggugacccggaagcaggagggaa

SEQ ID NO: 188114 - RNA, 24 nt, Artificial Sequence
  Synthetic
gggugacccggaagcaggagggaa

SEQ ID NO: 188115 - RNA, 18 nt, Artificial Sequence
  Synthetic
guauguuuugggagggaa

SEQ ID NO: 188116 - RNA, 19 nt, Artificial Sequence
  Synthetic
aguauguuuugggagggaa

SEQ ID NO: 188117 - RNA, 20 nt, Artificial Sequence
  Synthetic
aaguauguuuugggagggaa

SEQ ID NO: 188118 - RNA, 21 nt, Artificial Sequence
  Synthetic
aaaguauguuuugggagggaa

SEQ ID NO: 188119 - RNA, 22 nt, Artificial Sequence
  Synthetic
gaaaguauguuuugggagggaa

SEQ ID NO: 188120 - RNA, 23 nt, Artificial Sequence
  Synthetic
ggaaaguauguuuugggagggaa

SEQ ID NO: 188121 - RNA, 24 nt, Artificial Sequence
  Synthetic
uggaaaguauguuuugggagggaa

SEQ ID NO: 188122 - RNA, 18 nt, Artificial Sequence
  Synthetic
ggagguggagugagggaa

SEQ ID NO: 188123 - RNA, 19 nt, Artificial Sequence
  Synthetic
gggagguggagugagggaa

SEQ ID NO: 188124 - RNA, 20 nt, Artificial Sequence
  Synthetic
ugggagguggagugagggaa

SEQ ID NO: 188125 - RNA, 21 nt, Artificial Sequence
  Synthetic
uugggagguggagugagggaa

SEQ ID NO: 188126 - RNA, 22 nt, Artificial Sequence
  Synthetic
cuugggagguggagugagggaa

SEQ ID NO: 188127 - RNA, 23 nt, Artificial Sequence
  Synthetic
gcuugggagguggagugagggaa

SEQ ID NO: 188128 - RNA, 24 nt, Artificial Sequence
  Synthetic
ggcuugggagguggagugagggaa

SEQ ID NO: 188129 - RNA, 18 nt, Artificial Sequence
  Synthetic
gauauuuuauugagggaa

SEQ ID NO: 188130 - RNA, 19 nt, Artificial Sequence
  Synthetic
agauauuuuauugagggaa

SEQ ID NO: 188131 - RNA, 20 nt, Artificial Sequence
  Synthetic
gagauauuuuauugagggaa

SEQ ID NO: 188132 - RNA, 21 nt, Artificial Sequence
  Synthetic
agagauauuuuauugagggaa

SEQ ID NO: 188133 - RNA, 22 nt, Artificial Sequence
  Synthetic
aagagauauuuuauugagggaa

SEQ ID NO: 188134 - RNA, 23 nt, Artificial Sequence
  Synthetic
aaagagauauuuuauugagggaa

SEQ ID NO: 188135 - RNA, 24 nt, Artificial Sequence
  Synthetic
aaaagagauauuuuauugagggaa

SEQ ID NO: 188136 - RNA, 18 nt, Artificial Sequence
  Synthetic
cuaaagcaaucuagggaa

SEQ ID NO: 188137 - RNA, 19 nt, Artificial Sequence
  Synthetic
acuaaagcaaucuagggaa

SEQ ID NO: 188138 - RNA, 20 nt, Artificial Sequence
  Synthetic
aacuaaagcaaucuagggaa

SEQ ID NO: 188139 - RNA, 21 nt, Artificial Sequence
  Synthetic
uaacuaaagcaaucuagggaa

SEQ ID NO: 188140 - RNA, 22 nt, Artificial Sequence
  Synthetic
uuaacuaaagcaaucuagggaa

SEQ ID NO: 188141 - RNA, 23 nt, Artificial Sequence
  Synthetic
uuuaacuaaagcaaucuagggaa

SEQ ID NO: 188142 - RNA, 24 nt, Artificial Sequence
  Synthetic
uuuuaacuaaagcaaucuagggaa

SEQ ID NO: 188143 - RNA, 18 nt, Artificial Sequence
  Synthetic
guuuuucuaauuagggaa

SEQ ID NO: 188144 - RNA, 19 nt, Artificial Sequence
  Synthetic
uguuuuucuaauuagggaa

SEQ ID NO: 188145 - RNA, 20 nt, Artificial Sequence
  Synthetic
auguuuuucuaauuagggaa

SEQ ID NO: 188146 - RNA, 21 nt, Artificial Sequence
  Synthetic
uauguuuuucuaauuagggaa

SEQ ID NO: 188147 - RNA, 22 nt, Artificial Sequence
  Synthetic
auauguuuuucuaauuagggaa

SEQ ID NO: 188148 - RNA, 23 nt, Artificial Sequence
  Synthetic
uauauguuuuucuaauuagggaa

SEQ ID NO: 188149 - RNA, 24 nt, Artificial Sequence
  Synthetic
auauauguuuuucuaauuagggaa

SEQ ID NO: 188150 - RNA, 18 nt, Artificial Sequence
  Synthetic
agcugaaguaaccgggaa

SEQ ID NO: 188151 - RNA, 19 nt, Artificial Sequence
  Synthetic
aagcugaaguaaccgggaa

SEQ ID NO: 188152 - RNA, 20 nt, Artificial Sequence
  Synthetic
aaagcugaaguaaccgggaa

SEQ ID NO: 188153 - RNA, 21 nt, Artificial Sequence
  Synthetic
aaaagcugaaguaaccgggaa

SEQ ID NO: 188154 - RNA, 22 nt, Artificial Sequence
  Synthetic
aaaaagcugaaguaaccgggaa

SEQ ID NO: 188155 - RNA, 23 nt, Artificial Sequence
  Synthetic
aaaaaagcugaaguaaccgggaa

SEQ ID NO: 188156 - RNA, 24 nt, Artificial Sequence
  Synthetic
aaaaaaagcugaaguaaccgggaa

SEQ ID NO: 188157 - RNA, 18 nt, Artificial Sequence
  Synthetic
ucaucugagacccgggaa

SEQ ID NO: 188158 - RNA, 19 nt, Artificial Sequence
  Synthetic
cucaucugagacccgggaa

SEQ ID NO: 188159 - RNA, 20 nt, Artificial Sequence
  Synthetic
ccucaucugagacccgggaa

SEQ ID NO: 188160 - RNA, 21 nt, Artificial Sequence
  Synthetic
uccucaucugagacccgggaa

SEQ ID NO: 188161 - RNA, 22 nt, Artificial Sequence
  Synthetic
auccucaucugagacccgggaa

SEQ ID NO: 188162 - RNA, 23 nt, Artificial Sequence
  Synthetic
cauccucaucugagacccgggaa

SEQ ID NO: 188163 - RNA, 24 nt, Artificial Sequence
  Synthetic
gcauccucaucugagacccgggaa

SEQ ID NO: 188164 - RNA, 18 nt, Artificial Sequence
  Synthetic
cuuacucacaggcgggaa

SEQ ID NO: 188165 - RNA, 19 nt, Artificial Sequence
  Synthetic
ucuuacucacaggcgggaa

SEQ ID NO: 188166 - RNA, 20 nt, Artificial Sequence
  Synthetic
uucuuacucacaggcgggaa

SEQ ID NO: 188167 - RNA, 21 nt, Artificial Sequence
  Synthetic
guucuuacucacaggcgggaa

SEQ ID NO: 188168 - RNA, 22 nt, Artificial Sequence
  Synthetic
uguucuuacucacaggcgggaa

SEQ ID NO: 188169 - RNA, 23 nt, Artificial Sequence
  Synthetic
auguucuuacucacaggcgggaa

SEQ ID NO: 188170 - RNA, 24 nt, Artificial Sequence
  Synthetic
cauguucuuacucacaggcgggaa

SEQ ID NO: 188171 - RNA, 18 nt, Artificial Sequence
  Synthetic
cagaaggugaaaggggaa

SEQ ID NO: 188172 - RNA, 19 nt, Artificial Sequence
  Synthetic
gcagaaggugaaaggggaa

SEQ ID NO: 188173 - RNA, 20 nt, Artificial Sequence
  Synthetic
agcagaaggugaaaggggaa

SEQ ID NO: 188174 - RNA, 21 nt, Artificial Sequence
  Synthetic
aagcagaaggugaaaggggaa

SEQ ID NO: 188175 - RNA, 22 nt, Artificial Sequence
  Synthetic
caagcagaaggugaaaggggaa

SEQ ID NO: 188176 - RNA, 23 nt, Artificial Sequence
  Synthetic
ucaagcagaaggugaaaggggaa

SEQ ID NO: 188177 - RNA, 24 nt, Artificial Sequence
  Synthetic
gucaagcagaaggugaaaggggaa

SEQ ID NO: 188178 - RNA, 18 nt, Artificial Sequence
  Synthetic
ggacuaauagaaggggaa

SEQ ID NO: 188179 - RNA, 19 nt, Artificial Sequence
  Synthetic
gggacuaauagaaggggaa

SEQ ID NO: 188180 - RNA, 20 nt, Artificial Sequence
  Synthetic
agggacuaauagaaggggaa

SEQ ID NO: 188181 - RNA, 21 nt, Artificial Sequence
  Synthetic
uagggacuaauagaaggggaa

SEQ ID NO: 188182 - RNA, 22 nt, Artificial Sequence
  Synthetic
cuagggacuaauagaaggggaa

SEQ ID NO: 188183 - RNA, 23 nt, Artificial Sequence
  Synthetic
acuagggacuaauagaaggggaa

SEQ ID NO: 188184 - RNA, 24 nt, Artificial Sequence
  Synthetic
aacuagggacuaauagaaggggaa

SEQ ID NO: 188185 - RNA, 18 nt, Artificial Sequence
  Synthetic
gcagaaaaugaaggggaa

SEQ ID NO: 188186 - RNA, 19 nt, Artificial Sequence
  Synthetic
ggcagaaaaugaaggggaa

SEQ ID NO: 188187 - RNA, 20 nt, Artificial Sequence
  Synthetic
uggcagaaaaugaaggggaa

SEQ ID NO: 188188 - RNA, 21 nt, Artificial Sequence
  Synthetic
auggcagaaaaugaaggggaa

SEQ ID NO: 188189 - RNA, 22 nt, Artificial Sequence
  Synthetic
cauggcagaaaaugaaggggaa

SEQ ID NO: 188190 - RNA, 23 nt, Artificial Sequence
  Synthetic
ucauggcagaaaaugaaggggaa

SEQ ID NO: 188191 - RNA, 24 nt, Artificial Sequence
  Synthetic
aucauggcagaaaaugaaggggaa

SEQ ID NO: 188192 - RNA, 18 nt, Artificial Sequence
  Synthetic
auuuauaauacaggggaa

SEQ ID NO: 188193 - RNA, 19 nt, Artificial Sequence
  Synthetic
cauuuauaauacaggggaa

SEQ ID NO: 188194 - RNA, 20 nt, Artificial Sequence
  Synthetic
ucauuuauaauacaggggaa

SEQ ID NO: 188195 - RNA, 21 nt, Artificial Sequence
  Synthetic
gucauuuauaauacaggggaa

SEQ ID NO: 188196 - RNA, 22 nt, Artificial Sequence
  Synthetic
agucauuuauaauacaggggaa

SEQ ID NO: 188197 - RNA, 23 nt, Artificial Sequence
  Synthetic
aagucauuuauaauacaggggaa

SEQ ID NO: 188198 - RNA, 24 nt, Artificial Sequence
  Synthetic
aaagucauuuauaauacaggggaa

SEQ ID NO: 188199 - RNA, 18 nt, Artificial Sequence
  Synthetic
cagggagggguaggggaa

SEQ ID NO: 188200 - RNA, 19 nt, Artificial Sequence
  Synthetic
ccagggagggguaggggaa

SEQ ID NO: 188201 - RNA, 20 nt, Artificial Sequence
  Synthetic
accagggagggguaggggaa

SEQ ID NO: 188202 - RNA, 21 nt, Artificial Sequence
  Synthetic
gaccagggagggguaggggaa

SEQ ID NO: 188203 - RNA, 22 nt, Artificial Sequence
  Synthetic
ggaccagggagggguaggggaa

SEQ ID NO: 188204 - RNA, 23 nt, Artificial Sequence
  Synthetic
gggaccagggagggguaggggaa

SEQ ID NO: 188205 - RNA, 24 nt, Artificial Sequence
  Synthetic
agggaccagggagggguaggggaa

SEQ ID NO: 188206 - RNA, 18 nt, Artificial Sequence
  Synthetic
ucaggggagaagggggaa

SEQ ID NO: 188207 - RNA, 19 nt, Artificial Sequence
  Synthetic
uucaggggagaagggggaa

SEQ ID NO: 188208 - RNA, 20 nt, Artificial Sequence
  Synthetic
cuucaggggagaagggggaa

SEQ ID NO: 188209 - RNA, 21 nt, Artificial Sequence
  Synthetic
gcuucaggggagaagggggaa

SEQ ID NO: 188210 - RNA, 22 nt, Artificial Sequence
  Synthetic
ugcuucaggggagaagggggaa

SEQ ID NO: 188211 - RNA, 23 nt, Artificial Sequence
  Synthetic
cugcuucaggggagaagggggaa

SEQ ID NO: 188212 - RNA, 24 nt, Artificial Sequence
  Synthetic
ccugcuucaggggagaagggggaa

SEQ ID NO: 188213 - RNA, 18 nt, Artificial Sequence
  Synthetic
ggcugggcgaagggggaa

SEQ ID NO: 188214 - RNA, 19 nt, Artificial Sequence
  Synthetic
gggcugggcgaagggggaa

SEQ ID NO: 188215 - RNA, 20 nt, Artificial Sequence
  Synthetic
ggggcugggcgaagggggaa

SEQ ID NO: 188216 - RNA, 21 nt, Artificial Sequence
  Synthetic
aggggcugggcgaagggggaa

SEQ ID NO: 188217 - RNA, 22 nt, Artificial Sequence
  Synthetic
caggggcugggcgaagggggaa

SEQ ID NO: 188218 - RNA, 23 nt, Artificial Sequence
  Synthetic
ccaggggcugggcgaagggggaa

SEQ ID NO: 188219 - RNA, 24 nt, Artificial Sequence
  Synthetic
accaggggcugggcgaagggggaa

SEQ ID NO: 188220 - RNA, 18 nt, Artificial Sequence
  Synthetic
aaagaaggguagggggaa

SEQ ID NO: 188221 - RNA, 19 nt, Artificial Sequence
  Synthetic
uaaagaaggguagggggaa

SEQ ID NO: 188222 - RNA, 20 nt, Artificial Sequence
  Synthetic
auaaagaaggguagggggaa

SEQ ID NO: 188223 - RNA, 21 nt, Artificial Sequence
  Synthetic
aauaaagaaggguagggggaa

SEQ ID NO: 188224 - RNA, 22 nt, Artificial Sequence
  Synthetic
aaauaaagaaggguagggggaa

SEQ ID NO: 188225 - RNA, 23 nt, Artificial Sequence
  Synthetic
caaauaaagaaggguagggggaa

SEQ ID NO: 188226 - RNA, 24 nt, Artificial Sequence
  Synthetic
acaaauaaagaaggguagggggaa

SEQ ID NO: 188227 - RNA, 18 nt, Artificial Sequence
  Synthetic
uguuguggggugggggaa

SEQ ID NO: 188228 - RNA, 19 nt, Artificial Sequence
  Synthetic
cuguuguggggugggggaa

SEQ ID NO: 188229 - RNA, 20 nt, Artificial Sequence
  Synthetic
acuguuguggggugggggaa

SEQ ID NO: 188230 - RNA, 21 nt, Artificial Sequence
  Synthetic
gacuguuguggggugggggaa

SEQ ID NO: 188231 - RNA, 22 nt, Artificial Sequence
  Synthetic
ggacuguuguggggugggggaa

SEQ ID NO: 188232 - RNA, 23 nt, Artificial Sequence
  Synthetic
gggacuguuguggggugggggaa

SEQ ID NO: 188233 - RNA, 24 nt, Artificial Sequence
  Synthetic
ggggacuguuguggggugggggaa

SEQ ID NO: 188234 - RNA, 18 nt, Artificial Sequence
  Synthetic
gaagucaaguugggggaa

SEQ ID NO: 188235 - RNA, 19 nt, Artificial Sequence
  Synthetic
ugaagucaaguugggggaa

SEQ ID NO: 188236 - RNA, 20 nt, Artificial Sequence
  Synthetic
uugaagucaaguugggggaa

SEQ ID NO: 188237 - RNA, 21 nt, Artificial Sequence
  Synthetic
auugaagucaaguugggggaa

SEQ ID NO: 188238 - RNA, 22 nt, Artificial Sequence
  Synthetic
cauugaagucaaguugggggaa

SEQ ID NO: 188239 - RNA, 23 nt, Artificial Sequence
  Synthetic
acauugaagucaaguugggggaa

SEQ ID NO: 188240 - RNA, 24 nt, Artificial Sequence
  Synthetic
cacauugaagucaaguugggggaa

SEQ ID NO: 188241 - RNA, 18 nt, Artificial Sequence
  Synthetic
uauuacaggaauggggaa

SEQ ID NO: 188242 - RNA, 19 nt, Artificial Sequence
  Synthetic
auauuacaggaauggggaa

SEQ ID NO: 188243 - RNA, 20 nt, Artificial Sequence
  Synthetic
aauauuacaggaauggggaa

SEQ ID NO: 188244 - RNA, 21 nt, Artificial Sequence
  Synthetic
aaauauuacaggaauggggaa

SEQ ID NO: 188245 - RNA, 22 nt, Artificial Sequence
  Synthetic
aaaauauuacaggaauggggaa

SEQ ID NO: 188246 - RNA, 23 nt, Artificial Sequence
  Synthetic
uaaaauauuacaggaauggggaa

SEQ ID NO: 188247 - RNA, 24 nt, Artificial Sequence
  Synthetic
uuaaaauauuacaggaauggggaa

SEQ ID NO: 188248 - RNA, 18 nt, Artificial Sequence
  Synthetic
cuuccuuguaauggggaa

SEQ ID NO: 188249 - RNA, 19 nt, Artificial Sequence
  Synthetic
ccuuccuuguaauggggaa

SEQ ID NO: 188250 - RNA, 20 nt, Artificial Sequence
  Synthetic
accuuccuuguaauggggaa

SEQ ID NO: 188251 - RNA, 21 nt, Artificial Sequence
  Synthetic
uaccuuccuuguaauggggaa

SEQ ID NO: 188252 - RNA, 22 nt, Artificial Sequence
  Synthetic
cuaccuuccuuguaauggggaa

SEQ ID NO: 188253 - RNA, 23 nt, Artificial Sequence
  Synthetic
ucuaccuuccuuguaauggggaa

SEQ ID NO: 188254 - RNA, 24 nt, Artificial Sequence
  Synthetic
uucuaccuuccuuguaauggggaa

SEQ ID NO: 188255 - RNA, 18 nt, Artificial Sequence
  Synthetic
gcacuccggcauggggaa

SEQ ID NO: 188256 - RNA, 19 nt, Artificial Sequence
  Synthetic
ugcacuccggcauggggaa

SEQ ID NO: 188257 - RNA, 20 nt, Artificial Sequence
  Synthetic
cugcacuccggcauggggaa

SEQ ID NO: 188258 - RNA, 21 nt, Artificial Sequence
  Synthetic
acugcacuccggcauggggaa

SEQ ID NO: 188259 - RNA, 22 nt, Artificial Sequence
  Synthetic
cacugcacuccggcauggggaa

SEQ ID NO: 188260 - RNA, 23 nt, Artificial Sequence
  Synthetic
ccacugcacuccggcauggggaa

SEQ ID NO: 188261 - RNA, 24 nt, Artificial Sequence
  Synthetic
accacugcacuccggcauggggaa

SEQ ID NO: 188262 - RNA, 18 nt, Artificial Sequence
  Synthetic
gcuggucacccuggggaa

SEQ ID NO: 188263 - RNA, 19 nt, Artificial Sequence
  Synthetic
agcuggucacccuggggaa

SEQ ID NO: 188264 - RNA, 20 nt, Artificial Sequence
  Synthetic
aagcuggucacccuggggaa

SEQ ID NO: 188265 - RNA, 21 nt, Artificial Sequence
  Synthetic
uaagcuggucacccuggggaa

SEQ ID NO: 188266 - RNA, 22 nt, Artificial Sequence
  Synthetic
uuaagcuggucacccuggggaa

SEQ ID NO: 188267 - RNA, 23 nt, Artificial Sequence
  Synthetic
uuuaagcuggucacccuggggaa

SEQ ID NO: 188268 - RNA, 24 nt, Artificial Sequence
  Synthetic
auuuaagcuggucacccuggggaa

SEQ ID NO: 188269 - RNA, 18 nt, Artificial Sequence
  Synthetic
augaccuuguguggggaa

SEQ ID NO: 188270 - RNA, 19 nt, Artificial Sequence
  Synthetic
uaugaccuuguguggggaa

SEQ ID NO: 188271 - RNA, 20 nt, Artificial Sequence
  Synthetic
guaugaccuuguguggggaa

SEQ ID NO: 188272 - RNA, 21 nt, Artificial Sequence
  Synthetic
uguaugaccuuguguggggaa

SEQ ID NO: 188273 - RNA, 22 nt, Artificial Sequence
  Synthetic
auguaugaccuuguguggggaa

SEQ ID NO: 188274 - RNA, 23 nt, Artificial Sequence
  Synthetic
uauguaugaccuuguguggggaa

SEQ ID NO: 188275 - RNA, 24 nt, Artificial Sequence
  Synthetic
uuauguaugaccuuguguggggaa

SEQ ID NO: 188276 - RNA, 18 nt, Artificial Sequence
  Synthetic
aaucacuacauuggggaa

SEQ ID NO: 188277 - RNA, 19 nt, Artificial Sequence
  Synthetic
aaaucacuacauuggggaa

SEQ ID NO: 188278 - RNA, 20 nt, Artificial Sequence
  Synthetic
caaaucacuacauuggggaa

SEQ ID NO: 188279 - RNA, 21 nt, Artificial Sequence
  Synthetic
acaaaucacuacauuggggaa

SEQ ID NO: 188280 - RNA, 22 nt, Artificial Sequence
  Synthetic
cacaaaucacuacauuggggaa

SEQ ID NO: 188281 - RNA, 23 nt, Artificial Sequence
  Synthetic
acacaaaucacuacauuggggaa

SEQ ID NO: 188282 - RNA, 24 nt, Artificial Sequence
  Synthetic
uacacaaaucacuacauuggggaa

SEQ ID NO: 188283 - RNA, 18 nt, Artificial Sequence
  Synthetic
auuaguucaaaaugggaa

SEQ ID NO: 188284 - RNA, 19 nt, Artificial Sequence
  Synthetic
gauuaguucaaaaugggaa

SEQ ID NO: 188285 - RNA, 20 nt, Artificial Sequence
  Synthetic
ugauuaguucaaaaugggaa

SEQ ID NO: 188286 - RNA, 21 nt, Artificial Sequence
  Synthetic
uugauuaguucaaaaugggaa

SEQ ID NO: 188287 - RNA, 22 nt, Artificial Sequence
  Synthetic
cuugauuaguucaaaaugggaa

SEQ ID NO: 188288 - RNA, 23 nt, Artificial Sequence
  Synthetic
ccuugauuaguucaaaaugggaa

SEQ ID NO: 188289 - RNA, 24 nt, Artificial Sequence
  Synthetic
cccuugauuaguucaaaaugggaa

SEQ ID NO: 188290 - RNA, 18 nt, Artificial Sequence
  Synthetic
gcccaaagucaaugggaa

SEQ ID NO: 188291 - RNA, 19 nt, Artificial Sequence
  Synthetic
agcccaaagucaaugggaa

SEQ ID NO: 188292 - RNA, 20 nt, Artificial Sequence
  Synthetic
aagcccaaagucaaugggaa

SEQ ID NO: 188293 - RNA, 21 nt, Artificial Sequence
  Synthetic
caagcccaaagucaaugggaa

SEQ ID NO: 188294 - RNA, 22 nt, Artificial Sequence
  Synthetic
ucaagcccaaagucaaugggaa

SEQ ID NO: 188295 - RNA, 23 nt, Artificial Sequence
  Synthetic
gucaagcccaaagucaaugggaa

SEQ ID NO: 188296 - RNA, 24 nt, Artificial Sequence
  Synthetic
agucaagcccaaagucaaugggaa

SEQ ID NO: 188297 - RNA, 18 nt, Artificial Sequence
  Synthetic
caaagggagagaugggaa

SEQ ID NO: 188298 - RNA, 19 nt, Artificial Sequence
  Synthetic
ccaaagggagagaugggaa

SEQ ID NO: 188299 - RNA, 20 nt, Artificial Sequence
  Synthetic
gccaaagggagagaugggaa

SEQ ID NO: 188300 - RNA, 21 nt, Artificial Sequence
  Synthetic
ggccaaagggagagaugggaa

SEQ ID NO: 188301 - RNA, 22 nt, Artificial Sequence
  Synthetic
aggccaaagggagagaugggaa

SEQ ID NO: 188302 - RNA, 23 nt, Artificial Sequence
  Synthetic
gaggccaaagggagagaugggaa

SEQ ID NO: 188303 - RNA, 24 nt, Artificial Sequence
  Synthetic
agaggccaaagggagagaugggaa

SEQ ID NO: 188304 - RNA, 18 nt, Artificial Sequence
  Synthetic
uuuuggcugcgaugggaa

SEQ ID NO: 188305 - RNA, 19 nt, Artificial Sequence
  Synthetic
cuuuuggcugcgaugggaa

SEQ ID NO: 188306 - RNA, 20 nt, Artificial Sequence
  Synthetic
acuuuuggcugcgaugggaa

SEQ ID NO: 188307 - RNA, 21 nt, Artificial Sequence
  Synthetic
gacuuuuggcugcgaugggaa

SEQ ID NO: 188308 - RNA, 22 nt, Artificial Sequence
  Synthetic
agacuuuuggcugcgaugggaa

SEQ ID NO: 188309 - RNA, 23 nt, Artificial Sequence
  Synthetic
aagacuuuuggcugcgaugggaa

SEQ ID NO: 188310 - RNA, 24 nt, Artificial Sequence
  Synthetic
uaagacuuuuggcugcgaugggaa

SEQ ID NO: 188311 - RNA, 18 nt, Artificial Sequence
  Synthetic
gaaugguggugaugggaa

SEQ ID NO: 188312 - RNA, 19 nt, Artificial Sequence
  Synthetic
ggaaugguggugaugggaa

SEQ ID NO: 188313 - RNA, 20 nt, Artificial Sequence
  Synthetic
aggaaugguggugaugggaa

SEQ ID NO: 188314 - RNA, 21 nt, Artificial Sequence
  Synthetic
gaggaaugguggugaugggaa

SEQ ID NO: 188315 - RNA, 22 nt, Artificial Sequence
  Synthetic
ggaggaaugguggugaugggaa

SEQ ID NO: 188316 - RNA, 23 nt, Artificial Sequence
  Synthetic
aggaggaaugguggugaugggaa

SEQ ID NO: 188317 - RNA, 24 nt, Artificial Sequence
  Synthetic
aaggaggaaugguggugaugggaa

SEQ ID NO: 188318 - RNA, 18 nt, Artificial Sequence
  Synthetic
cuaugagaaaacugggaa

SEQ ID NO: 188319 - RNA, 19 nt, Artificial Sequence
  Synthetic
acuaugagaaaacugggaa

SEQ ID NO: 188320 - RNA, 20 nt, Artificial Sequence
  Synthetic
aacuaugagaaaacugggaa

SEQ ID NO: 188321 - RNA, 21 nt, Artificial Sequence
  Synthetic
aaacuaugagaaaacugggaa

SEQ ID NO: 188322 - RNA, 22 nt, Artificial Sequence
  Synthetic
aaaacuaugagaaaacugggaa

SEQ ID NO: 188323 - RNA, 23 nt, Artificial Sequence
  Synthetic
aaaaacuaugagaaaacugggaa

SEQ ID NO: 188324 - RNA, 24 nt, Artificial Sequence
  Synthetic
uaaaaacuaugagaaaacugggaa

SEQ ID NO: 188325 - RNA, 18 nt, Artificial Sequence
  Synthetic
gguaaagaacacugggaa

SEQ ID NO: 188326 - RNA, 19 nt, Artificial Sequence
  Synthetic
ugguaaagaacacugggaa

SEQ ID NO: 188327 - RNA, 20 nt, Artificial Sequence
  Synthetic
gugguaaagaacacugggaa

SEQ ID NO: 188328 - RNA, 21 nt, Artificial Sequence
  Synthetic
agugguaaagaacacugggaa

SEQ ID NO: 188329 - RNA, 22 nt, Artificial Sequence
  Synthetic
aagugguaaagaacacugggaa

SEQ ID NO: 188330 - RNA, 23 nt, Artificial Sequence
  Synthetic
uaagugguaaagaacacugggaa

SEQ ID NO: 188331 - RNA, 24 nt, Artificial Sequence
  Synthetic
guaagugguaaagaacacugggaa

SEQ ID NO: 188332 - RNA, 18 nt, Artificial Sequence
  Synthetic
aaugcuauuaccugggaa

SEQ ID NO: 188333 - RNA, 19 nt, Artificial Sequence
  Synthetic
aaaugcuauuaccugggaa

SEQ ID NO: 188334 - RNA, 20 nt, Artificial Sequence
  Synthetic
uaaaugcuauuaccugggaa

SEQ ID NO: 188335 - RNA, 21 nt, Artificial Sequence
  Synthetic
auaaaugcuauuaccugggaa

SEQ ID NO: 188336 - RNA, 22 nt, Artificial Sequence
  Synthetic
uauaaaugcuauuaccugggaa

SEQ ID NO: 188337 - RNA, 23 nt, Artificial Sequence
  Synthetic
cuauaaaugcuauuaccugggaa

SEQ ID NO: 188338 - RNA, 24 nt, Artificial Sequence
  Synthetic
ccuauaaaugcuauuaccugggaa

SEQ ID NO: 188339 - RNA, 18 nt, Artificial Sequence
  Synthetic
aaaagauuguucugggaa

SEQ ID NO: 188340 - RNA, 19 nt, Artificial Sequence
  Synthetic
gaaaagauuguucugggaa

SEQ ID NO: 188341 - RNA, 20 nt, Artificial Sequence
  Synthetic
agaaaagauuguucugggaa

SEQ ID NO: 188342 - RNA, 21 nt, Artificial Sequence
  Synthetic
uagaaaagauuguucugggaa

SEQ ID NO: 188343 - RNA, 22 nt, Artificial Sequence
  Synthetic
uuagaaaagauuguucugggaa

SEQ ID NO: 188344 - RNA, 23 nt, Artificial Sequence
  Synthetic
uuuagaaaagauuguucugggaa

SEQ ID NO: 188345 - RNA, 24 nt, Artificial Sequence
  Synthetic
cuuuagaaaagauuguucugggaa

SEQ ID NO: 188346 - RNA, 18 nt, Artificial Sequence
  Synthetic
ucaugaguuuucugggaa

SEQ ID NO: 188347 - RNA, 19 nt, Artificial Sequence
  Synthetic
uucaugaguuuucugggaa

SEQ ID NO: 188348 - RNA, 20 nt, Artificial Sequence
  Synthetic
auucaugaguuuucugggaa

SEQ ID NO: 188349 - RNA, 21 nt, Artificial Sequence
  Synthetic
uauucaugaguuuucugggaa

SEQ ID NO: 188350 - RNA, 22 nt, Artificial Sequence
  Synthetic
uuauucaugaguuuucugggaa

SEQ ID NO: 188351 - RNA, 23 nt, Artificial Sequence
  Synthetic
auuauucaugaguuuucugggaa

SEQ ID NO: 188352 - RNA, 24 nt, Artificial Sequence
  Synthetic
gauuauucaugaguuuucugggaa

SEQ ID NO: 188353 - RNA, 18 nt, Artificial Sequence
  Synthetic
gugauagaacagugggaa

SEQ ID NO: 188354 - RNA, 19 nt, Artificial Sequence
  Synthetic
ugugauagaacagugggaa

SEQ ID NO: 188355 - RNA, 20 nt, Artificial Sequence
  Synthetic
augugauagaacagugggaa

SEQ ID NO: 188356 - RNA, 21 nt, Artificial Sequence
  Synthetic
aaugugauagaacagugggaa

SEQ ID NO: 188357 - RNA, 22 nt, Artificial Sequence
  Synthetic
caaugugauagaacagugggaa

SEQ ID NO: 188358 - RNA, 23 nt, Artificial Sequence
  Synthetic
acaaugugauagaacagugggaa

SEQ ID NO: 188359 - RNA, 24 nt, Artificial Sequence
  Synthetic
cacaaugugauagaacagugggaa

SEQ ID NO: 188360 - RNA, 18 nt, Artificial Sequence
  Synthetic
gauuuuuaacagugggaa

SEQ ID NO: 188361 - RNA, 19 nt, Artificial Sequence
  Synthetic
ugauuuuuaacagugggaa

SEQ ID NO: 188362 - RNA, 20 nt, Artificial Sequence
  Synthetic
uugauuuuuaacagugggaa

SEQ ID NO: 188363 - RNA, 21 nt, Artificial Sequence
  Synthetic
uuugauuuuuaacagugggaa

SEQ ID NO: 188364 - RNA, 22 nt, Artificial Sequence
  Synthetic
cuuugauuuuuaacagugggaa

SEQ ID NO: 188365 - RNA, 23 nt, Artificial Sequence
  Synthetic
gcuuugauuuuuaacagugggaa

SEQ ID NO: 188366 - RNA, 24 nt, Artificial Sequence
  Synthetic
cgcuuugauuuuuaacagugggaa

SEQ ID NO: 188367 - RNA, 18 nt, Artificial Sequence
  Synthetic
gcagccguccagugggaa

SEQ ID NO: 188368 - RNA, 19 nt, Artificial Sequence
  Synthetic
agcagccguccagugggaa

SEQ ID NO: 188369 - RNA, 20 nt, Artificial Sequence
  Synthetic
gagcagccguccagugggaa

SEQ ID NO: 188370 - RNA, 21 nt, Artificial Sequence
  Synthetic
ggagcagccguccagugggaa

SEQ ID NO: 188371 - RNA, 22 nt, Artificial Sequence
  Synthetic
gggagcagccguccagugggaa

SEQ ID NO: 188372 - RNA, 23 nt, Artificial Sequence
  Synthetic
agggagcagccguccagugggaa

SEQ ID NO: 188373 - RNA, 24 nt, Artificial Sequence
  Synthetic
gagggagcagccguccagugggaa

SEQ ID NO: 188374 - RNA, 18 nt, Artificial Sequence
  Synthetic
gaagcaaggcagugggaa

SEQ ID NO: 188375 - RNA, 19 nt, Artificial Sequence
  Synthetic
ggaagcaaggcagugggaa

SEQ ID NO: 188376 - RNA, 20 nt, Artificial Sequence
  Synthetic
cggaagcaaggcagugggaa

SEQ ID NO: 188377 - RNA, 21 nt, Artificial Sequence
  Synthetic
acggaagcaaggcagugggaa

SEQ ID NO: 188378 - RNA, 22 nt, Artificial Sequence
  Synthetic
gacggaagcaaggcagugggaa

SEQ ID NO: 188379 - RNA, 23 nt, Artificial Sequence
  Synthetic
agacggaagcaaggcagugggaa

SEQ ID NO: 188380 - RNA, 24 nt, Artificial Sequence
  Synthetic
gagacggaagcaaggcagugggaa

SEQ ID NO: 188381 - RNA, 20 nt, Artificial Sequence
  Synthetic
uucucacucacaggugggaa

SEQ ID NO: 188382 - RNA, 21 nt, Artificial Sequence
  Synthetic
guucucacucacaggugggaa

SEQ ID NO: 188383 - RNA, 22 nt, Artificial Sequence
  Synthetic
uguucucacucacaggugggaa

SEQ ID NO: 188384 - RNA, 23 nt, Artificial Sequence
  Synthetic
auguucucacucacaggugggaa

SEQ ID NO: 188385 - RNA, 24 nt, Artificial Sequence
  Synthetic
cauguucucacucacaggugggaa

SEQ ID NO: 188386 - RNA, 19 nt, Artificial Sequence
  Synthetic
ucucacucauaggugggaa

SEQ ID NO: 188387 - RNA, 20 nt, Artificial Sequence
  Synthetic
uucucacucauaggugggaa

SEQ ID NO: 188388 - RNA, 21 nt, Artificial Sequence
  Synthetic
auucucacucauaggugggaa

SEQ ID NO: 188389 - RNA, 22 nt, Artificial Sequence
  Synthetic
uauucucacucauaggugggaa

SEQ ID NO: 188390 - RNA, 23 nt, Artificial Sequence
  Synthetic
auauucucacucauaggugggaa

SEQ ID NO: 188391 - RNA, 24 nt, Artificial Sequence
  Synthetic
cauauucucacucauaggugggaa

SEQ ID NO: 188392 - RNA, 21 nt, Artificial Sequence
  Synthetic
guucucacucauaggugggaa

SEQ ID NO: 188393 - RNA, 22 nt, Artificial Sequence
  Synthetic
uguucucacucauaggugggaa

SEQ ID NO: 188394 - RNA, 23 nt, Artificial Sequence
  Synthetic
auguucucacucauaggugggaa

SEQ ID NO: 188395 - RNA, 24 nt, Artificial Sequence
  Synthetic
cauguucucacucauaggugggaa

SEQ ID NO: 188396 - RNA, 18 nt, Artificial Sequence
  Synthetic
cucauucauaggugggaa

SEQ ID NO: 188397 - RNA, 19 nt, Artificial Sequence
  Synthetic
ucucauucauaggugggaa

SEQ ID NO: 188398 - RNA, 20 nt, Artificial Sequence
  Synthetic
uucucauucauaggugggaa

SEQ ID NO: 188399 - RNA, 21 nt, Artificial Sequence
  Synthetic
auucucauucauaggugggaa

SEQ ID NO: 188400 - RNA, 22 nt, Artificial Sequence
  Synthetic
uauucucauucauaggugggaa

SEQ ID NO: 188401 - RNA, 23 nt, Artificial Sequence
  Synthetic
auauucucauucauaggugggaa

SEQ ID NO: 188402 - RNA, 24 nt, Artificial Sequence
  Synthetic
cauauucucauucauaggugggaa

SEQ ID NO: 188403 - RNA, 18 nt, Artificial Sequence
  Synthetic
ucauagguggggugggaa

SEQ ID NO: 188404 - RNA, 19 nt, Artificial Sequence
  Synthetic
cucauagguggggugggaa

SEQ ID NO: 188405 - RNA, 20 nt, Artificial Sequence
  Synthetic
acucauagguggggugggaa

SEQ ID NO: 188406 - RNA, 21 nt, Artificial Sequence
  Synthetic
cacucauagguggggugggaa

SEQ ID NO: 188407 - RNA, 22 nt, Artificial Sequence
  Synthetic
ucacucauagguggggugggaa

SEQ ID NO: 188408 - RNA, 23 nt, Artificial Sequence
  Synthetic
cucacucauagguggggugggaa

SEQ ID NO: 188409 - RNA, 24 nt, Artificial Sequence
  Synthetic
ucucacucauagguggggugggaa

SEQ ID NO: 188410 - RNA, 18 nt, Artificial Sequence
  Synthetic
aaacacuccuggugggaa

SEQ ID NO: 188411 - RNA, 19 nt, Artificial Sequence
  Synthetic
caaacacuccuggugggaa

SEQ ID NO: 188412 - RNA, 20 nt, Artificial Sequence
  Synthetic
acaaacacuccuggugggaa

SEQ ID NO: 188413 - RNA, 21 nt, Artificial Sequence
  Synthetic
uacaaacacuccuggugggaa

SEQ ID NO: 188414 - RNA, 22 nt, Artificial Sequence
  Synthetic
uuacaaacacuccuggugggaa

SEQ ID NO: 188415 - RNA, 23 nt, Artificial Sequence
  Synthetic
uuuacaaacacuccuggugggaa

SEQ ID NO: 188416 - RNA, 24 nt, Artificial Sequence
  Synthetic
auuuacaaacacuccuggugggaa

SEQ ID NO: 188417 - RNA, 18 nt, Artificial Sequence
  Synthetic
ggccaaguguggugggaa

SEQ ID NO: 188418 - RNA, 19 nt, Artificial Sequence
  Synthetic
uggccaaguguggugggaa

SEQ ID NO: 188419 - RNA, 20 nt, Artificial Sequence
  Synthetic
uuggccaaguguggugggaa

SEQ ID NO: 188420 - RNA, 21 nt, Artificial Sequence
  Synthetic
guuggccaaguguggugggaa

SEQ ID NO: 188421 - RNA, 22 nt, Artificial Sequence
  Synthetic
gguuggccaaguguggugggaa

SEQ ID NO: 188422 - RNA, 23 nt, Artificial Sequence
  Synthetic
ugguuggccaaguguggugggaa

SEQ ID NO: 188423 - RNA, 24 nt, Artificial Sequence
  Synthetic
augguuggccaaguguggugggaa

SEQ ID NO: 188424 - RNA, 18 nt, Artificial Sequence
  Synthetic
uggaugugugugugggaa

SEQ ID NO: 188425 - RNA, 19 nt, Artificial Sequence
  Synthetic
uuggaugugugugugggaa

SEQ ID NO: 188426 - RNA, 20 nt, Artificial Sequence
  Synthetic
guuggaugugugugugggaa

SEQ ID NO: 188427 - RNA, 21 nt, Artificial Sequence
  Synthetic
uguuggaugugugugugggaa

SEQ ID NO: 188428 - RNA, 22 nt, Artificial Sequence
  Synthetic
guguuggaugugugugugggaa

SEQ ID NO: 188429 - RNA, 23 nt, Artificial Sequence
  Synthetic
gguguuggaugugugugugggaa

SEQ ID NO: 188430 - RNA, 24 nt, Artificial Sequence
  Synthetic
ugguguuggaugugugugugggaa

SEQ ID NO: 188431 - RNA, 18 nt, Artificial Sequence
  Synthetic
uaaaagcaugcuugggaa

SEQ ID NO: 188432 - RNA, 19 nt, Artificial Sequence
  Synthetic
uuaaaagcaugcuugggaa

SEQ ID NO: 188433 - RNA, 20 nt, Artificial Sequence
  Synthetic
uuuaaaagcaugcuugggaa

SEQ ID NO: 188434 - RNA, 21 nt, Artificial Sequence
  Synthetic
auuuaaaagcaugcuugggaa

SEQ ID NO: 188435 - RNA, 22 nt, Artificial Sequence
  Synthetic
aauuuaaaagcaugcuugggaa

SEQ ID NO: 188436 - RNA, 23 nt, Artificial Sequence
  Synthetic
aaauuuaaaagcaugcuugggaa

SEQ ID NO: 188437 - RNA, 24 nt, Artificial Sequence
  Synthetic
aaaauuuaaaagcaugcuugggaa

SEQ ID NO: 188438 - RNA, 18 nt, Artificial Sequence
  Synthetic
uuaggaacuucuugggaa

SEQ ID NO: 188439 - RNA, 19 nt, Artificial Sequence
  Synthetic
auuaggaacuucuugggaa

SEQ ID NO: 188440 - RNA, 20 nt, Artificial Sequence
  Synthetic
gauuaggaacuucuugggaa

SEQ ID NO: 188441 - RNA, 21 nt, Artificial Sequence
  Synthetic
agauuaggaacuucuugggaa

SEQ ID NO: 188442 - RNA, 22 nt, Artificial Sequence
  Synthetic
gagauuaggaacuucuugggaa

SEQ ID NO: 188443 - RNA, 23 nt, Artificial Sequence
  Synthetic
ggagauuaggaacuucuugggaa

SEQ ID NO: 188444 - RNA, 24 nt, Artificial Sequence
  Synthetic
uggagauuaggaacuucuugggaa

SEQ ID NO: 188445 - RNA, 18 nt, Artificial Sequence
  Synthetic
ggaggcauaaguugggaa

SEQ ID NO: 188446 - RNA, 19 nt, Artificial Sequence
  Synthetic
uggaggcauaaguugggaa

SEQ ID NO: 188447 - RNA, 20 nt, Artificial Sequence
  Synthetic
uuggaggcauaaguugggaa

SEQ ID NO: 188448 - RNA, 21 nt, Artificial Sequence
  Synthetic
cuuggaggcauaaguugggaa

SEQ ID NO: 188449 - RNA, 22 nt, Artificial Sequence
  Synthetic
ccuuggaggcauaaguugggaa

SEQ ID NO: 188450 - RNA, 23 nt, Artificial Sequence
  Synthetic
gccuuggaggcauaaguugggaa

SEQ ID NO: 188451 - RNA, 24 nt, Artificial Sequence
  Synthetic
agccuuggaggcauaaguugggaa

SEQ ID NO: 188452 - RNA, 18 nt, Artificial Sequence
  Synthetic
aggagacgcauuugggaa

SEQ ID NO: 188453 - RNA, 19 nt, Artificial Sequence
  Synthetic
aaggagacgcauuugggaa

SEQ ID NO: 188454 - RNA, 20 nt, Artificial Sequence
  Synthetic
aaaggagacgcauuugggaa

SEQ ID NO: 188455 - RNA, 21 nt, Artificial Sequence
  Synthetic
gaaaggagacgcauuugggaa

SEQ ID NO: 188456 - RNA, 22 nt, Artificial Sequence
  Synthetic
ggaaaggagacgcauuugggaa

SEQ ID NO: 188457 - RNA, 23 nt, Artificial Sequence
  Synthetic
gggaaaggagacgcauuugggaa

SEQ ID NO: 188458 - RNA, 24 nt, Artificial Sequence
  Synthetic
ggggaaaggagacgcauuugggaa

SEQ ID NO: 188459 - RNA, 18 nt, Artificial Sequence
  Synthetic
uuaccauaaguuugggaa

SEQ ID NO: 188460 - RNA, 19 nt, Artificial Sequence
  Synthetic
uuuaccauaaguuugggaa

SEQ ID NO: 188461 - RNA, 20 nt, Artificial Sequence
  Synthetic
uuuuaccauaaguuugggaa

SEQ ID NO: 188462 - RNA, 21 nt, Artificial Sequence
  Synthetic
auuuuaccauaaguuugggaa

SEQ ID NO: 188463 - RNA, 22 nt, Artificial Sequence
  Synthetic
aauuuuaccauaaguuugggaa

SEQ ID NO: 188464 - RNA, 23 nt, Artificial Sequence
  Synthetic
aaauuuuaccauaaguuugggaa

SEQ ID NO: 188465 - RNA, 24 nt, Artificial Sequence
  Synthetic
uaaauuuuaccauaaguuugggaa

SEQ ID NO: 188466 - RNA, 18 nt, Artificial Sequence
  Synthetic
aggaggagaguuugggaa

SEQ ID NO: 188467 - RNA, 19 nt, Artificial Sequence
  Synthetic
uaggaggagaguuugggaa

SEQ ID NO: 188468 - RNA, 20 nt, Artificial Sequence
  Synthetic
cuaggaggagaguuugggaa

SEQ ID NO: 188469 - RNA, 21 nt, Artificial Sequence
  Synthetic
ucuaggaggagaguuugggaa

SEQ ID NO: 188470 - RNA, 22 nt, Artificial Sequence
  Synthetic
uucuaggaggagaguuugggaa

SEQ ID NO: 188471 - RNA, 23 nt, Artificial Sequence
  Synthetic
cuucuaggaggagaguuugggaa

SEQ ID NO: 188472 - RNA, 24 nt, Artificial Sequence
  Synthetic
ucuucuaggaggagaguuugggaa

SEQ ID NO: 188473 - RNA, 18 nt, Artificial Sequence
  Synthetic
accugguacuuuugggaa

SEQ ID NO: 188474 - RNA, 19 nt, Artificial Sequence
  Synthetic
aaccugguacuuuugggaa

SEQ ID NO: 188475 - RNA, 20 nt, Artificial Sequence
  Synthetic
gaaccugguacuuuugggaa

SEQ ID NO: 188476 - RNA, 21 nt, Artificial Sequence
  Synthetic
agaaccugguacuuuugggaa

SEQ ID NO: 188477 - RNA, 22 nt, Artificial Sequence
  Synthetic
uagaaccugguacuuuugggaa

SEQ ID NO: 188478 - RNA, 23 nt, Artificial Sequence
  Synthetic
uuagaaccugguacuuuugggaa

SEQ ID NO: 188479 - RNA, 24 nt, Artificial Sequence
  Synthetic
guuagaaccugguacuuuugggaa

SEQ ID NO: 188480 - RNA, 18 nt, Artificial Sequence
  Synthetic
acaauaagaaaaauggaa

SEQ ID NO: 188481 - RNA, 19 nt, Artificial Sequence
  Synthetic
aacaauaagaaaaauggaa

SEQ ID NO: 188482 - RNA, 20 nt, Artificial Sequence
  Synthetic
caacaauaagaaaaauggaa

SEQ ID NO: 188483 - RNA, 21 nt, Artificial Sequence
  Synthetic
acaacaauaagaaaaauggaa

SEQ ID NO: 188484 - RNA, 22 nt, Artificial Sequence
  Synthetic
gacaacaauaagaaaaauggaa

SEQ ID NO: 188485 - RNA, 23 nt, Artificial Sequence
  Synthetic
agacaacaauaagaaaaauggaa

SEQ ID NO: 188486 - RNA, 24 nt, Artificial Sequence
  Synthetic
aagacaacaauaagaaaaauggaa

SEQ ID NO: 188487 - RNA, 18 nt, Artificial Sequence
  Synthetic
gauuugagcaaaauggaa

SEQ ID NO: 188488 - RNA, 19 nt, Artificial Sequence
  Synthetic
ugauuugagcaaaauggaa

SEQ ID NO: 188489 - RNA, 20 nt, Artificial Sequence
  Synthetic
cugauuugagcaaaauggaa

SEQ ID NO: 188490 - RNA, 21 nt, Artificial Sequence
  Synthetic
gcugauuugagcaaaauggaa

SEQ ID NO: 188491 - RNA, 22 nt, Artificial Sequence
  Synthetic
ugcugauuugagcaaaauggaa

SEQ ID NO: 188492 - RNA, 23 nt, Artificial Sequence
  Synthetic
cugcugauuugagcaaaauggaa

SEQ ID NO: 188493 - RNA, 24 nt, Artificial Sequence
  Synthetic
ucugcugauuugagcaaaauggaa

SEQ ID NO: 188494 - RNA, 18 nt, Artificial Sequence
  Synthetic
agccaguauaaaauggaa

SEQ ID NO: 188495 - RNA, 19 nt, Artificial Sequence
  Synthetic
aagccaguauaaaauggaa

SEQ ID NO: 188496 - RNA, 20 nt, Artificial Sequence
  Synthetic
caagccaguauaaaauggaa

SEQ ID NO: 188497 - RNA, 21 nt, Artificial Sequence
  Synthetic
ccaagccaguauaaaauggaa

SEQ ID NO: 188498 - RNA, 22 nt, Artificial Sequence
  Synthetic
uccaagccaguauaaaauggaa

SEQ ID NO: 188499 - RNA, 23 nt, Artificial Sequence
  Synthetic
auccaagccaguauaaaauggaa

SEQ ID NO: 188500 - RNA, 24 nt, Artificial Sequence
  Synthetic
uauccaagccaguauaaaauggaa

SEQ ID NO: 188501 - RNA, 18 nt, Artificial Sequence
  Synthetic
ggaaaggaggaaauggaa

SEQ ID NO: 188502 - RNA, 19 nt, Artificial Sequence
  Synthetic
aggaaaggaggaaauggaa

SEQ ID NO: 188503 - RNA, 20 nt, Artificial Sequence
  Synthetic
gaggaaaggaggaaauggaa

SEQ ID NO: 188504 - RNA, 21 nt, Artificial Sequence
  Synthetic
ugaggaaaggaggaaauggaa

SEQ ID NO: 188505 - RNA, 22 nt, Artificial Sequence
  Synthetic
gugaggaaaggaggaaauggaa

SEQ ID NO: 188506 - RNA, 23 nt, Artificial Sequence
  Synthetic
agugaggaaaggaggaaauggaa

SEQ ID NO: 188507 - RNA, 24 nt, Artificial Sequence
  Synthetic
gagugaggaaaggaggaaauggaa

SEQ ID NO: 188508 - RNA, 18 nt, Artificial Sequence
  Synthetic
cuuuaaauggaaauggaa

SEQ ID NO: 188509 - RNA, 19 nt, Artificial Sequence
  Synthetic
ccuuuaaauggaaauggaa

SEQ ID NO: 188510 - RNA, 20 nt, Artificial Sequence
  Synthetic
uccuuuaaauggaaauggaa

SEQ ID NO: 188511 - RNA, 21 nt, Artificial Sequence
  Synthetic
auccuuuaaauggaaauggaa

SEQ ID NO: 188512 - RNA, 22 nt, Artificial Sequence
  Synthetic
uauccuuuaaauggaaauggaa

SEQ ID NO: 188513 - RNA, 23 nt, Artificial Sequence
  Synthetic
uuauccuuuaaauggaaauggaa

SEQ ID NO: 188514 - RNA, 24 nt, Artificial Sequence
  Synthetic
uuuauccuuuaaauggaaauggaa

SEQ ID NO: 188515 - RNA, 18 nt, Artificial Sequence
  Synthetic
agaagcccguaaauggaa

SEQ ID NO: 188516 - RNA, 19 nt, Artificial Sequence
  Synthetic
aagaagcccguaaauggaa

SEQ ID NO: 188517 - RNA, 20 nt, Artificial Sequence
  Synthetic
gaagaagcccguaaauggaa

SEQ ID NO: 188518 - RNA, 21 nt, Artificial Sequence
  Synthetic
ggaagaagcccguaaauggaa

SEQ ID NO: 188519 - RNA, 22 nt, Artificial Sequence
  Synthetic
uggaagaagcccguaaauggaa

SEQ ID NO: 188520 - RNA, 23 nt, Artificial Sequence
  Synthetic
uuggaagaagcccguaaauggaa

SEQ ID NO: 188521 - RNA, 24 nt, Artificial Sequence
  Synthetic
uuuggaagaagcccguaaauggaa

SEQ ID NO: 188522 - RNA, 18 nt, Artificial Sequence
  Synthetic
uuuauccuuuaaauggaa

SEQ ID NO: 188523 - RNA, 19 nt, Artificial Sequence
  Synthetic
cuuuauccuuuaaauggaa

SEQ ID NO: 188524 - RNA, 20 nt, Artificial Sequence
  Synthetic
ccuuuauccuuuaaauggaa

SEQ ID NO: 188525 - RNA, 21 nt, Artificial Sequence
  Synthetic
gccuuuauccuuuaaauggaa

SEQ ID NO: 188526 - RNA, 22 nt, Artificial Sequence
  Synthetic
agccuuuauccuuuaaauggaa

SEQ ID NO: 188527 - RNA, 23 nt, Artificial Sequence
  Synthetic
aagccuuuauccuuuaaauggaa

SEQ ID NO: 188528 - RNA, 24 nt, Artificial Sequence
  Synthetic
gaagccuuuauccuuuaaauggaa

SEQ ID NO: 188529 - RNA, 18 nt, Artificial Sequence
  Synthetic
ugcugagaaacaauggaa

SEQ ID NO: 188530 - RNA, 19 nt, Artificial Sequence
  Synthetic
augcugagaaacaauggaa

SEQ ID NO: 188531 - RNA, 20 nt, Artificial Sequence
  Synthetic
gaugcugagaaacaauggaa

SEQ ID NO: 188532 - RNA, 21 nt, Artificial Sequence
  Synthetic
agaugcugagaaacaauggaa

SEQ ID NO: 188533 - RNA, 22 nt, Artificial Sequence
  Synthetic
aagaugcugagaaacaauggaa

SEQ ID NO: 188534 - RNA, 23 nt, Artificial Sequence
  Synthetic
uaagaugcugagaaacaauggaa

SEQ ID NO: 188535 - RNA, 24 nt, Artificial Sequence
  Synthetic
uuaagaugcugagaaacaauggaa

SEQ ID NO: 188536 - RNA, 18 nt, Artificial Sequence
  Synthetic
auauauagaccaauggaa

SEQ ID NO: 188537 - RNA, 19 nt, Artificial Sequence
  Synthetic
gauauauagaccaauggaa

SEQ ID NO: 188538 - RNA, 20 nt, Artificial Sequence
  Synthetic
agauauauagaccaauggaa

SEQ ID NO: 188539 - RNA, 21 nt, Artificial Sequence
  Synthetic
cagauauauagaccaauggaa

SEQ ID NO: 188540 - RNA, 22 nt, Artificial Sequence
  Synthetic
acagauauauagaccaauggaa

SEQ ID NO: 188541 - RNA, 23 nt, Artificial Sequence
  Synthetic
aacagauauauagaccaauggaa

SEQ ID NO: 188542 - RNA, 24 nt, Artificial Sequence
  Synthetic
aaacagauauauagaccaauggaa

SEQ ID NO: 188543 - RNA, 18 nt, Artificial Sequence
  Synthetic
cuugagauggcaauggaa

SEQ ID NO: 188544 - RNA, 19 nt, Artificial Sequence
  Synthetic
ccuugagauggcaauggaa

SEQ ID NO: 188545 - RNA, 20 nt, Artificial Sequence
  Synthetic
gccuugagauggcaauggaa

SEQ ID NO: 188546 - RNA, 21 nt, Artificial Sequence
  Synthetic
agccuugagauggcaauggaa

SEQ ID NO: 188547 - RNA, 22 nt, Artificial Sequence
  Synthetic
aagccuugagauggcaauggaa

SEQ ID NO: 188548 - RNA, 23 nt, Artificial Sequence
  Synthetic
caagccuugagauggcaauggaa

SEQ ID NO: 188549 - RNA, 24 nt, Artificial Sequence
  Synthetic
ccaagccuugagauggcaauggaa

SEQ ID NO: 188550 - RNA, 18 nt, Artificial Sequence
  Synthetic
acauauagaucaauggaa

SEQ ID NO: 188551 - RNA, 19 nt, Artificial Sequence
  Synthetic
gacauauagaucaauggaa

SEQ ID NO: 188552 - RNA, 20 nt, Artificial Sequence
  Synthetic
agacauauagaucaauggaa

SEQ ID NO: 188553 - RNA, 21 nt, Artificial Sequence
  Synthetic
cagacauauagaucaauggaa

SEQ ID NO: 188554 - RNA, 22 nt, Artificial Sequence
  Synthetic
acagacauauagaucaauggaa

SEQ ID NO: 188555 - RNA, 23 nt, Artificial Sequence
  Synthetic
aacagacauauagaucaauggaa

SEQ ID NO: 188556 - RNA, 24 nt, Artificial Sequence
  Synthetic
aaacagacauauagaucaauggaa

SEQ ID NO: 188557 - RNA, 18 nt, Artificial Sequence
  Synthetic
agauauagaucaauggaa

SEQ ID NO: 188558 - RNA, 19 nt, Artificial Sequence
  Synthetic
gagauauagaucaauggaa

SEQ ID NO: 188559 - RNA, 20 nt, Artificial Sequence
  Synthetic
agagauauagaucaauggaa

SEQ ID NO: 188560 - RNA, 18 nt, Artificial Sequence
  Synthetic
aauaguuguugaauggaa

SEQ ID NO: 188561 - RNA, 19 nt, Artificial Sequence
  Synthetic
aaauaguuguugaauggaa

SEQ ID NO: 188562 - RNA, 20 nt, Artificial Sequence
  Synthetic
uaaauaguuguugaauggaa

SEQ ID NO: 188563 - RNA, 21 nt, Artificial Sequence
  Synthetic
guaaauaguuguugaauggaa

SEQ ID NO: 188564 - RNA, 22 nt, Artificial Sequence
  Synthetic
aguaaauaguuguugaauggaa

SEQ ID NO: 188565 - RNA, 23 nt, Artificial Sequence
  Synthetic
caguaaauaguuguugaauggaa

SEQ ID NO: 188566 - RNA, 24 nt, Artificial Sequence
  Synthetic
ucaguaaauaguuguugaauggaa

SEQ ID NO: 188567 - RNA, 18 nt, Artificial Sequence
  Synthetic
ugaggcacaauaauggaa

SEQ ID NO: 188568 - RNA, 19 nt, Artificial Sequence
  Synthetic
cugaggcacaauaauggaa

SEQ ID NO: 188569 - RNA, 20 nt, Artificial Sequence
  Synthetic
acugaggcacaauaauggaa

SEQ ID NO: 188570 - RNA, 21 nt, Artificial Sequence
  Synthetic
gacugaggcacaauaauggaa

SEQ ID NO: 188571 - RNA, 22 nt, Artificial Sequence
  Synthetic
ugacugaggcacaauaauggaa

SEQ ID NO: 188572 - RNA, 23 nt, Artificial Sequence
  Synthetic
gugacugaggcacaauaauggaa

SEQ ID NO: 188573 - RNA, 24 nt, Artificial Sequence
  Synthetic
ggugacugaggcacaauaauggaa

SEQ ID NO: 188574 - RNA, 18 nt, Artificial Sequence
  Synthetic
cauuccauguuaauggaa

SEQ ID NO: 188575 - RNA, 19 nt, Artificial Sequence
  Synthetic
acauuccauguuaauggaa

SEQ ID NO: 188576 - RNA, 20 nt, Artificial Sequence
  Synthetic
aacauuccauguuaauggaa

SEQ ID NO: 188577 - RNA, 21 nt, Artificial Sequence
  Synthetic
aaacauuccauguuaauggaa

SEQ ID NO: 188578 - RNA, 22 nt, Artificial Sequence
  Synthetic
gaaacauuccauguuaauggaa

SEQ ID NO: 188579 - RNA, 23 nt, Artificial Sequence
  Synthetic
agaaacauuccauguuaauggaa

SEQ ID NO: 188580 - RNA, 24 nt, Artificial Sequence
  Synthetic
gagaaacauuccauguuaauggaa

SEQ ID NO: 188581 - RNA, 18 nt, Artificial Sequence
  Synthetic
ugauaauuuuuaauggaa

SEQ ID NO: 188582 - RNA, 19 nt, Artificial Sequence
  Synthetic
augauaauuuuuaauggaa

SEQ ID NO: 188583 - RNA, 20 nt, Artificial Sequence
  Synthetic
aaugauaauuuuuaauggaa

SEQ ID NO: 188584 - RNA, 21 nt, Artificial Sequence
  Synthetic
gaaugauaauuuuuaauggaa

SEQ ID NO: 188585 - RNA, 22 nt, Artificial Sequence
  Synthetic
agaaugauaauuuuuaauggaa

SEQ ID NO: 188586 - RNA, 23 nt, Artificial Sequence
  Synthetic
aagaaugauaauuuuuaauggaa

SEQ ID NO: 188587 - RNA, 24 nt, Artificial Sequence
  Synthetic
uaagaaugauaauuuuuaauggaa

SEQ ID NO: 188588 - RNA, 18 nt, Artificial Sequence
  Synthetic
gaaucacuaaacauggaa

SEQ ID NO: 188589 - RNA, 19 nt, Artificial Sequence
  Synthetic
ggaaucacuaaacauggaa

SEQ ID NO: 188590 - RNA, 20 nt, Artificial Sequence
  Synthetic
aggaaucacuaaacauggaa

SEQ ID NO: 188591 - RNA, 21 nt, Artificial Sequence
  Synthetic
aaggaaucacuaaacauggaa

SEQ ID NO: 188592 - RNA, 22 nt, Artificial Sequence
  Synthetic
gaaggaaucacuaaacauggaa

SEQ ID NO: 188593 - RNA, 23 nt, Artificial Sequence
  Synthetic
ugaaggaaucacuaaacauggaa

SEQ ID NO: 188594 - RNA, 24 nt, Artificial Sequence
  Synthetic
cugaaggaaucacuaaacauggaa

SEQ ID NO: 188595 - RNA, 18 nt, Artificial Sequence
  Synthetic
ccaucacguuacauggaa

SEQ ID NO: 188596 - RNA, 19 nt, Artificial Sequence
  Synthetic
accaucacguuacauggaa

SEQ ID NO: 188597 - RNA, 20 nt, Artificial Sequence
  Synthetic
aaccaucacguuacauggaa

SEQ ID NO: 188598 - RNA, 21 nt, Artificial Sequence
  Synthetic
gaaccaucacguuacauggaa

SEQ ID NO: 188599 - RNA, 22 nt, Artificial Sequence
  Synthetic
ggaaccaucacguuacauggaa

SEQ ID NO: 188600 - RNA, 23 nt, Artificial Sequence
  Synthetic
uggaaccaucacguuacauggaa

SEQ ID NO: 188601 - RNA, 24 nt, Artificial Sequence
  Synthetic
auggaaccaucacguuacauggaa

SEQ ID NO: 188602 - RNA, 18 nt, Artificial Sequence
  Synthetic
auggaaaagaccauggaa

SEQ ID NO: 188603 - RNA, 19 nt, Artificial Sequence
  Synthetic
gauggaaaagaccauggaa

SEQ ID NO: 188604 - RNA, 20 nt, Artificial Sequence
  Synthetic
agauggaaaagaccauggaa

SEQ ID NO: 188605 - RNA, 21 nt, Artificial Sequence
  Synthetic
uagauggaaaagaccauggaa

SEQ ID NO: 188606 - RNA, 22 nt, Artificial Sequence
  Synthetic
auagauggaaaagaccauggaa

SEQ ID NO: 188607 - RNA, 23 nt, Artificial Sequence
  Synthetic
uauagauggaaaagaccauggaa

SEQ ID NO: 188608 - RNA, 24 nt, Artificial Sequence
  Synthetic
guauagauggaaaagaccauggaa

SEQ ID NO: 188609 - RNA, 18 nt, Artificial Sequence
  Synthetic
cccucucaaggcauggaa

SEQ ID NO: 188610 - RNA, 19 nt, Artificial Sequence
  Synthetic
acccucucaaggcauggaa

SEQ ID NO: 188611 - RNA, 20 nt, Artificial Sequence
  Synthetic
uacccucucaaggcauggaa

SEQ ID NO: 188612 - RNA, 21 nt, Artificial Sequence
  Synthetic
uuacccucucaaggcauggaa

SEQ ID NO: 188613 - RNA, 22 nt, Artificial Sequence
  Synthetic
cuuacccucucaaggcauggaa

SEQ ID NO: 188614 - RNA, 23 nt, Artificial Sequence
  Synthetic
ucuuacccucucaaggcauggaa

SEQ ID NO: 188615 - RNA, 24 nt, Artificial Sequence
  Synthetic
aucuuacccucucaaggcauggaa

SEQ ID NO: 188616 - RNA, 18 nt, Artificial Sequence
  Synthetic
aucuuuuuuaagauggaa

SEQ ID NO: 188617 - RNA, 19 nt, Artificial Sequence
  Synthetic
caucuuuuuuaagauggaa

SEQ ID NO: 188618 - RNA, 20 nt, Artificial Sequence
  Synthetic
ccaucuuuuuuaagauggaa

SEQ ID NO: 188619 - RNA, 21 nt, Artificial Sequence
  Synthetic
gccaucuuuuuuaagauggaa

SEQ ID NO: 188620 - RNA, 22 nt, Artificial Sequence
  Synthetic
agccaucuuuuuuaagauggaa

SEQ ID NO: 188621 - RNA, 23 nt, Artificial Sequence
  Synthetic
cagccaucuuuuuuaagauggaa

SEQ ID NO: 188622 - RNA, 24 nt, Artificial Sequence
  Synthetic
acagccaucuuuuuuaagauggaa

SEQ ID NO: 188623 - RNA, 18 nt, Artificial Sequence
  Synthetic
gcugugcugcugauggaa

SEQ ID NO: 188624 - RNA, 19 nt, Artificial Sequence
  Synthetic
cgcugugcugcugauggaa

SEQ ID NO: 188625 - RNA, 20 nt, Artificial Sequence
  Synthetic
ucgcugugcugcugauggaa

SEQ ID NO: 188626 - RNA, 21 nt, Artificial Sequence
  Synthetic
aucgcugugcugcugauggaa

SEQ ID NO: 188627 - RNA, 22 nt, Artificial Sequence
  Synthetic
caucgcugugcugcugauggaa

SEQ ID NO: 188628 - RNA, 23 nt, Artificial Sequence
  Synthetic
acaucgcugugcugcugauggaa

SEQ ID NO: 188629 - RNA, 24 nt, Artificial Sequence
  Synthetic
uacaucgcugugcugcugauggaa

SEQ ID NO: 188630 - RNA, 18 nt, Artificial Sequence
  Synthetic
ucagaauuagugauggaa

SEQ ID NO: 188631 - RNA, 19 nt, Artificial Sequence
  Synthetic
aucagaauuagugauggaa

SEQ ID NO: 188632 - RNA, 20 nt, Artificial Sequence
  Synthetic
caucagaauuagugauggaa

SEQ ID NO: 188633 - RNA, 21 nt, Artificial Sequence
  Synthetic
ucaucagaauuagugauggaa

SEQ ID NO: 188634 - RNA, 22 nt, Artificial Sequence
  Synthetic
uucaucagaauuagugauggaa

SEQ ID NO: 188635 - RNA, 23 nt, Artificial Sequence
  Synthetic
guucaucagaauuagugauggaa

SEQ ID NO: 188636 - RNA, 24 nt, Artificial Sequence
  Synthetic
uguucaucagaauuagugauggaa

SEQ ID NO: 188637 - RNA, 18 nt, Artificial Sequence
  Synthetic
caggauuaguugauggaa

SEQ ID NO: 188638 - RNA, 19 nt, Artificial Sequence
  Synthetic
acaggauuaguugauggaa

SEQ ID NO: 188639 - RNA, 20 nt, Artificial Sequence
  Synthetic
aacaggauuaguugauggaa

SEQ ID NO: 188640 - RNA, 21 nt, Artificial Sequence
  Synthetic
caacaggauuaguugauggaa

SEQ ID NO: 188641 - RNA, 22 nt, Artificial Sequence
  Synthetic
acaacaggauuaguugauggaa

SEQ ID NO: 188642 - RNA, 23 nt, Artificial Sequence
  Synthetic
gacaacaggauuaguugauggaa

SEQ ID NO: 188643 - RNA, 24 nt, Artificial Sequence
  Synthetic
ggacaacaggauuaguugauggaa

SEQ ID NO: 188644 - RNA, 18 nt, Artificial Sequence
  Synthetic
gaagcacuaaauauggaa

SEQ ID NO: 188645 - RNA, 19 nt, Artificial Sequence
  Synthetic
ggaagcacuaaauauggaa

SEQ ID NO: 188646 - RNA, 20 nt, Artificial Sequence
  Synthetic
aggaagcacuaaauauggaa

SEQ ID NO: 188647 - RNA, 21 nt, Artificial Sequence
  Synthetic
aaggaagcacuaaauauggaa

SEQ ID NO: 188648 - RNA, 22 nt, Artificial Sequence
  Synthetic
gaaggaagcacuaaauauggaa

SEQ ID NO: 188649 - RNA, 23 nt, Artificial Sequence
  Synthetic
ugaaggaagcacuaaauauggaa

SEQ ID NO: 188650 - RNA, 24 nt, Artificial Sequence
  Synthetic
augaaggaagcacuaaauauggaa

SEQ ID NO: 188651 - RNA, 18 nt, Artificial Sequence
  Synthetic
ucauaauauuauauggaa

SEQ ID NO: 188652 - RNA, 19 nt, Artificial Sequence
  Synthetic
aucauaauauuauauggaa

SEQ ID NO: 188653 - RNA, 20 nt, Artificial Sequence
  Synthetic
caucauaauauuauauggaa

SEQ ID NO: 188654 - RNA, 21 nt, Artificial Sequence
  Synthetic
acaucauaauauuauauggaa

SEQ ID NO: 188655 - RNA, 22 nt, Artificial Sequence
  Synthetic
cacaucauaauauuauauggaa

SEQ ID NO: 188656 - RNA, 23 nt, Artificial Sequence
  Synthetic
ucacaucauaauauuauauggaa

SEQ ID NO: 188657 - RNA, 24 nt, Artificial Sequence
  Synthetic
aucacaucauaauauuauauggaa

SEQ ID NO: 188658 - RNA, 18 nt, Artificial Sequence
  Synthetic
augccacugaguauggaa

SEQ ID NO: 188659 - RNA, 19 nt, Artificial Sequence
  Synthetic
aaugccacugaguauggaa

SEQ ID NO: 188660 - RNA, 20 nt, Artificial Sequence
  Synthetic
uaaugccacugaguauggaa

SEQ ID NO: 188661 - RNA, 21 nt, Artificial Sequence
  Synthetic
auaaugccacugaguauggaa

SEQ ID NO: 188662 - RNA, 22 nt, Artificial Sequence
  Synthetic
cauaaugccacugaguauggaa

SEQ ID NO: 188663 - RNA, 23 nt, Artificial Sequence
  Synthetic
acauaaugccacugaguauggaa

SEQ ID NO: 188664 - RNA, 24 nt, Artificial Sequence
  Synthetic
gacauaaugccacugaguauggaa

SEQ ID NO: 188665 - RNA, 18 nt, Artificial Sequence
  Synthetic
guuguuuuguguauggaa

SEQ ID NO: 188666 - RNA, 19 nt, Artificial Sequence
  Synthetic
uguuguuuuguguauggaa

SEQ ID NO: 188667 - RNA, 20 nt, Artificial Sequence
  Synthetic
cuguuguuuuguguauggaa

SEQ ID NO: 188668 - RNA, 21 nt, Artificial Sequence
  Synthetic
ccuguuguuuuguguauggaa

SEQ ID NO: 188669 - RNA, 22 nt, Artificial Sequence
  Synthetic
uccuguuguuuuguguauggaa

SEQ ID NO: 188670 - RNA, 23 nt, Artificial Sequence
  Synthetic
uuccuguuguuuuguguauggaa

SEQ ID NO: 188671 - RNA, 24 nt, Artificial Sequence
  Synthetic
guuccuguuguuuuguguauggaa

SEQ ID NO: 188672 - RNA, 18 nt, Artificial Sequence
  Synthetic
uuagaggauauuauggaa

SEQ ID NO: 188673 - RNA, 19 nt, Artificial Sequence
  Synthetic
uuuagaggauauuauggaa

SEQ ID NO: 188674 - RNA, 20 nt, Artificial Sequence
  Synthetic
uuuuagaggauauuauggaa

SEQ ID NO: 188675 - RNA, 21 nt, Artificial Sequence
  Synthetic
uuuuuagaggauauuauggaa

SEQ ID NO: 188676 - RNA, 22 nt, Artificial Sequence
  Synthetic
cuuuuuagaggauauuauggaa

SEQ ID NO: 188677 - RNA, 23 nt, Artificial Sequence
  Synthetic
gcuuuuuagaggauauuauggaa

SEQ ID NO: 188678 - RNA, 24 nt, Artificial Sequence
  Synthetic
ggcuuuuuagaggauauuauggaa

SEQ ID NO: 188679 - RNA, 18 nt, Artificial Sequence
  Synthetic
aagagaaaaacacuggaa

SEQ ID NO: 188680 - RNA, 19 nt, Artificial Sequence
  Synthetic
aaagagaaaaacacuggaa

SEQ ID NO: 188681 - RNA, 20 nt, Artificial Sequence
  Synthetic
aaaagagaaaaacacuggaa

SEQ ID NO: 188682 - RNA, 21 nt, Artificial Sequence
  Synthetic
uaaaagagaaaaacacuggaa

SEQ ID NO: 188683 - RNA, 22 nt, Artificial Sequence
  Synthetic
guaaaagagaaaaacacuggaa

SEQ ID NO: 188684 - RNA, 23 nt, Artificial Sequence
  Synthetic
uguaaaagagaaaaacacuggaa

SEQ ID NO: 188685 - RNA, 24 nt, Artificial Sequence
  Synthetic
auguaaaagagaaaaacacuggaa

SEQ ID NO: 188686 - RNA, 18 nt, Artificial Sequence
  Synthetic
uauuguuuaggacuggaa

SEQ ID NO: 188687 - RNA, 19 nt, Artificial Sequence
  Synthetic
auauuguuuaggacuggaa

SEQ ID NO: 188688 - RNA, 20 nt, Artificial Sequence
  Synthetic
uauauuguuuaggacuggaa

SEQ ID NO: 188689 - RNA, 21 nt, Artificial Sequence
  Synthetic
uuauauuguuuaggacuggaa

SEQ ID NO: 188690 - RNA, 22 nt, Artificial Sequence
  Synthetic
uuuauauuguuuaggacuggaa

SEQ ID NO: 188691 - RNA, 23 nt, Artificial Sequence
  Synthetic
auuuauauuguuuaggacuggaa

SEQ ID NO: 188692 - RNA, 24 nt, Artificial Sequence
  Synthetic
aauuuauauuguuuaggacuggaa

SEQ ID NO: 188693 - RNA, 18 nt, Artificial Sequence
  Synthetic
ccauucacuccccuggaa

SEQ ID NO: 188694 - RNA, 19 nt, Artificial Sequence
  Synthetic
accauucacuccccuggaa

SEQ ID NO: 188695 - RNA, 20 nt, Artificial Sequence
  Synthetic
aaccauucacuccccuggaa

SEQ ID NO: 188696 - RNA, 21 nt, Artificial Sequence
  Synthetic
gaaccauucacuccccuggaa

SEQ ID NO: 188697 - RNA, 22 nt, Artificial Sequence
  Synthetic
agaaccauucacuccccuggaa

SEQ ID NO: 188698 - RNA, 23 nt, Artificial Sequence
  Synthetic
uagaaccauucacuccccuggaa

SEQ ID NO: 188699 - RNA, 24 nt, Artificial Sequence
  Synthetic
auagaaccauucacuccccuggaa

SEQ ID NO: 188700 - RNA, 18 nt, Artificial Sequence
  Synthetic
acauuuguucgccuggaa

SEQ ID NO: 188701 - RNA, 19 nt, Artificial Sequence
  Synthetic
gacauuuguucgccuggaa

SEQ ID NO: 188702 - RNA, 20 nt, Artificial Sequence
  Synthetic
ggacauuuguucgccuggaa

SEQ ID NO: 188703 - RNA, 21 nt, Artificial Sequence
  Synthetic
aggacauuuguucgccuggaa

SEQ ID NO: 188704 - RNA, 22 nt, Artificial Sequence
  Synthetic
gaggacauuuguucgccuggaa

SEQ ID NO: 188705 - RNA, 23 nt, Artificial Sequence
  Synthetic
agaggacauuuguucgccuggaa

SEQ ID NO: 188706 - RNA, 24 nt, Artificial Sequence
  Synthetic
cagaggacauuuguucgccuggaa

SEQ ID NO: 188707 - RNA, 18 nt, Artificial Sequence
  Synthetic
augcauaaaggccuggaa

SEQ ID NO: 188708 - RNA, 19 nt, Artificial Sequence
  Synthetic
uaugcauaaaggccuggaa

SEQ ID NO: 188709 - RNA, 20 nt, Artificial Sequence
  Synthetic
cuaugcauaaaggccuggaa

SEQ ID NO: 188710 - RNA, 21 nt, Artificial Sequence
  Synthetic
acuaugcauaaaggccuggaa

SEQ ID NO: 188711 - RNA, 22 nt, Artificial Sequence
  Synthetic
uacuaugcauaaaggccuggaa

SEQ ID NO: 188712 - RNA, 23 nt, Artificial Sequence
  Synthetic
auacuaugcauaaaggccuggaa

SEQ ID NO: 188713 - RNA, 24 nt, Artificial Sequence
  Synthetic
aauacuaugcauaaaggccuggaa

SEQ ID NO: 188714 - RNA, 18 nt, Artificial Sequence
  Synthetic
aggaacuagggccuggaa

SEQ ID NO: 188715 - RNA, 19 nt, Artificial Sequence
  Synthetic
caggaacuagggccuggaa

SEQ ID NO: 188716 - RNA, 20 nt, Artificial Sequence
  Synthetic
ccaggaacuagggccuggaa

SEQ ID NO: 188717 - RNA, 21 nt, Artificial Sequence
  Synthetic
uccaggaacuagggccuggaa

SEQ ID NO: 188718 - RNA, 22 nt, Artificial Sequence
  Synthetic
auccaggaacuagggccuggaa

SEQ ID NO: 188719 - RNA, 23 nt, Artificial Sequence
  Synthetic
uauccaggaacuagggccuggaa

SEQ ID NO: 188720 - RNA, 24 nt, Artificial Sequence
  Synthetic
cuauccaggaacuagggccuggaa

SEQ ID NO: 188721 - RNA, 18 nt, Artificial Sequence
  Synthetic
ccagcuaucaagcuggaa

SEQ ID NO: 188722 - RNA, 19 nt, Artificial Sequence
  Synthetic
accagcuaucaagcuggaa

SEQ ID NO: 188723 - RNA, 20 nt, Artificial Sequence
  Synthetic
uaccagcuaucaagcuggaa

SEQ ID NO: 188724 - RNA, 21 nt, Artificial Sequence
  Synthetic
auaccagcuaucaagcuggaa

SEQ ID NO: 188725 - RNA, 22 nt, Artificial Sequence
  Synthetic
cauaccagcuaucaagcuggaa

SEQ ID NO: 188726 - RNA, 23 nt, Artificial Sequence
  Synthetic
gcauaccagcuaucaagcuggaa

SEQ ID NO: 188727 - RNA, 24 nt, Artificial Sequence
  Synthetic
ugcauaccagcuaucaagcuggaa

SEQ ID NO: 188728 - RNA, 18 nt, Artificial Sequence
  Synthetic
auggaacaccagcuggaa

SEQ ID NO: 188729 - RNA, 19 nt, Artificial Sequence
  Synthetic
uauggaacaccagcuggaa

SEQ ID NO: 188730 - RNA, 20 nt, Artificial Sequence
  Synthetic
auauggaacaccagcuggaa

SEQ ID NO: 188731 - RNA, 21 nt, Artificial Sequence
  Synthetic
aauauggaacaccagcuggaa

SEQ ID NO: 188732 - RNA, 22 nt, Artificial Sequence
  Synthetic
aaauauggaacaccagcuggaa

SEQ ID NO: 188733 - RNA, 23 nt, Artificial Sequence
  Synthetic
aaaauauggaacaccagcuggaa

SEQ ID NO: 188734 - RNA, 24 nt, Artificial Sequence
  Synthetic
gaaaauauggaacaccagcuggaa

SEQ ID NO: 188735 - RNA, 18 nt, Artificial Sequence
  Synthetic
aaaaguguccagcuggaa

SEQ ID NO: 188736 - RNA, 19 nt, Artificial Sequence
  Synthetic
gaaaaguguccagcuggaa

SEQ ID NO: 188737 - RNA, 20 nt, Artificial Sequence
  Synthetic
ggaaaaguguccagcuggaa

SEQ ID NO: 188738 - RNA, 21 nt, Artificial Sequence
  Synthetic
gggaaaaguguccagcuggaa

SEQ ID NO: 188739 - RNA, 22 nt, Artificial Sequence
  Synthetic
agggaaaaguguccagcuggaa

SEQ ID NO: 188740 - RNA, 23 nt, Artificial Sequence
  Synthetic
aagggaaaaguguccagcuggaa

SEQ ID NO: 188741 - RNA, 24 nt, Artificial Sequence
  Synthetic
aaagggaaaaguguccagcuggaa

SEQ ID NO: 188742 - RNA, 18 nt, Artificial Sequence
  Synthetic
auuccaaagcagcuggaa

SEQ ID NO: 188743 - RNA, 19 nt, Artificial Sequence
  Synthetic
uauuccaaagcagcuggaa

SEQ ID NO: 188744 - RNA, 20 nt, Artificial Sequence
  Synthetic
uuauuccaaagcagcuggaa

SEQ ID NO: 188745 - RNA, 21 nt, Artificial Sequence
  Synthetic
cuuauuccaaagcagcuggaa

SEQ ID NO: 188746 - RNA, 22 nt, Artificial Sequence
  Synthetic
acuuauuccaaagcagcuggaa

SEQ ID NO: 188747 - RNA, 23 nt, Artificial Sequence
  Synthetic
aacuuauuccaaagcagcuggaa

SEQ ID NO: 188748 - RNA, 24 nt, Artificial Sequence
  Synthetic
aaacuuauuccaaagcagcuggaa

SEQ ID NO: 188749 - RNA, 18 nt, Artificial Sequence
  Synthetic
gcuguuguuuugcuggaa

SEQ ID NO: 188750 - RNA, 19 nt, Artificial Sequence
  Synthetic
agcuguuguuuugcuggaa

SEQ ID NO: 188751 - RNA, 20 nt, Artificial Sequence
  Synthetic
uagcuguuguuuugcuggaa

SEQ ID NO: 188752 - RNA, 21 nt, Artificial Sequence
  Synthetic
uuagcuguuguuuugcuggaa

SEQ ID NO: 188753 - RNA, 22 nt, Artificial Sequence
  Synthetic
uuuagcuguuguuuugcuggaa

SEQ ID NO: 188754 - RNA, 23 nt, Artificial Sequence
  Synthetic
auuuagcuguuguuuugcuggaa

SEQ ID NO: 188755 - RNA, 24 nt, Artificial Sequence
  Synthetic
cauuuagcuguuguuuugcuggaa

SEQ ID NO: 188756 - RNA, 18 nt, Artificial Sequence
  Synthetic
aauaaaguacaucuggaa

SEQ ID NO: 188757 - RNA, 19 nt, Artificial Sequence
  Synthetic
aaauaaaguacaucuggaa

SEQ ID NO: 188758 - RNA, 20 nt, Artificial Sequence
  Synthetic
gaaauaaaguacaucuggaa

SEQ ID NO: 188759 - RNA, 21 nt, Artificial Sequence
  Synthetic
ggaaauaaaguacaucuggaa

SEQ ID NO: 188760 - RNA, 22 nt, Artificial Sequence
  Synthetic
aggaaauaaaguacaucuggaa

SEQ ID NO: 188761 - RNA, 23 nt, Artificial Sequence
  Synthetic
aaggaaauaaaguacaucuggaa

SEQ ID NO: 188762 - RNA, 24 nt, Artificial Sequence
  Synthetic
aaaggaaauaaaguacaucuggaa

SEQ ID NO: 188763 - RNA, 18 nt, Artificial Sequence
  Synthetic
aaaaaacaaagucuggaa

SEQ ID NO: 188764 - RNA, 19 nt, Artificial Sequence
  Synthetic
gaaaaaacaaagucuggaa

SEQ ID NO: 188765 - RNA, 20 nt, Artificial Sequence
  Synthetic
ugaaaaaacaaagucuggaa

SEQ ID NO: 188766 - RNA, 21 nt, Artificial Sequence
  Synthetic
uugaaaaaacaaagucuggaa

SEQ ID NO: 188767 - RNA, 22 nt, Artificial Sequence
  Synthetic
uuugaaaaaacaaagucuggaa

SEQ ID NO: 188768 - RNA, 23 nt, Artificial Sequence
  Synthetic
auuugaaaaaacaaagucuggaa

SEQ ID NO: 188769 - RNA, 24 nt, Artificial Sequence
  Synthetic
gauuugaaaaaacaaagucuggaa

SEQ ID NO: 188770 - RNA, 18 nt, Artificial Sequence
  Synthetic
aagaaaagaggucuggaa

SEQ ID NO: 188771 - RNA, 19 nt, Artificial Sequence
  Synthetic
gaagaaaagaggucuggaa

SEQ ID NO: 188772 - RNA, 20 nt, Artificial Sequence
  Synthetic
ggaagaaaagaggucuggaa

SEQ ID NO: 188773 - RNA, 21 nt, Artificial Sequence
  Synthetic
uggaagaaaagaggucuggaa

SEQ ID NO: 188774 - RNA, 22 nt, Artificial Sequence
  Synthetic
uuggaagaaaagaggucuggaa

SEQ ID NO: 188775 - RNA, 23 nt, Artificial Sequence
  Synthetic
uuuggaagaaaagaggucuggaa

SEQ ID NO: 188776 - RNA, 24 nt, Artificial Sequence
  Synthetic
guuuggaagaaaagaggucuggaa

SEQ ID NO: 188777 - RNA, 18 nt, Artificial Sequence
  Synthetic
gauuaaguuggucuggaa

SEQ ID NO: 188778 - RNA, 19 nt, Artificial Sequence
  Synthetic
ugauuaaguuggucuggaa

SEQ ID NO: 188779 - RNA, 20 nt, Artificial Sequence
  Synthetic
cugauuaaguuggucuggaa

SEQ ID NO: 188780 - RNA, 21 nt, Artificial Sequence
  Synthetic
acugauuaaguuggucuggaa

SEQ ID NO: 188781 - RNA, 22 nt, Artificial Sequence
  Synthetic
uacugauuaaguuggucuggaa

SEQ ID NO: 188782 - RNA, 23 nt, Artificial Sequence
  Synthetic
auacugauuaaguuggucuggaa

SEQ ID NO: 188783 - RNA, 24 nt, Artificial Sequence
  Synthetic
aauacugauuaaguuggucuggaa

SEQ ID NO: 188784 - RNA, 18 nt, Artificial Sequence
  Synthetic
gucaauauguuucuggaa

SEQ ID NO: 188785 - RNA, 19 nt, Artificial Sequence
  Synthetic
agucaauauguuucuggaa

SEQ ID NO: 188786 - RNA, 20 nt, Artificial Sequence
  Synthetic
cagucaauauguuucuggaa

SEQ ID NO: 188787 - RNA, 21 nt, Artificial Sequence
  Synthetic
ccagucaauauguuucuggaa

SEQ ID NO: 188788 - RNA, 22 nt, Artificial Sequence
  Synthetic
cccagucaauauguuucuggaa

SEQ ID NO: 188789 - RNA, 23 nt, Artificial Sequence
  Synthetic
acccagucaauauguuucuggaa

SEQ ID NO: 188790 - RNA, 24 nt, Artificial Sequence
  Synthetic
aacccagucaauauguuucuggaa

SEQ ID NO: 188791 - RNA, 18 nt, Artificial Sequence
  Synthetic
agauguuuagaaguggaa

SEQ ID NO: 188792 - RNA, 19 nt, Artificial Sequence
  Synthetic
cagauguuuagaaguggaa

SEQ ID NO: 188793 - RNA, 20 nt, Artificial Sequence
  Synthetic
ucagauguuuagaaguggaa

SEQ ID NO: 188794 - RNA, 21 nt, Artificial Sequence
  Synthetic
cucagauguuuagaaguggaa

SEQ ID NO: 188795 - RNA, 22 nt, Artificial Sequence
  Synthetic
acucagauguuuagaaguggaa

SEQ ID NO: 188796 - RNA, 23 nt, Artificial Sequence
  Synthetic
cacucagauguuuagaaguggaa

SEQ ID NO: 188797 - RNA, 24 nt, Artificial Sequence
  Synthetic
acacucagauguuuagaaguggaa

SEQ ID NO: 188798 - RNA, 18 nt, Artificial Sequence
  Synthetic
acucuuccuacaguggaa

SEQ ID NO: 188799 - RNA, 19 nt, Artificial Sequence
  Synthetic
gacucuuccuacaguggaa

SEQ ID NO: 188800 - RNA, 20 nt, Artificial Sequence
  Synthetic
agacucuuccuacaguggaa

SEQ ID NO: 188801 - RNA, 21 nt, Artificial Sequence
  Synthetic
uagacucuuccuacaguggaa

SEQ ID NO: 188802 - RNA, 22 nt, Artificial Sequence
  Synthetic
guagacucuuccuacaguggaa

SEQ ID NO: 188803 - RNA, 23 nt, Artificial Sequence
  Synthetic
aguagacucuuccuacaguggaa

SEQ ID NO: 188804 - RNA, 24 nt, Artificial Sequence
  Synthetic
aaguagacucuuccuacaguggaa

SEQ ID NO: 188805 - RNA, 18 nt, Artificial Sequence
  Synthetic
agauauagaucaguggaa

SEQ ID NO: 188806 - RNA, 19 nt, Artificial Sequence
  Synthetic
gagauauagaucaguggaa

SEQ ID NO: 188807 - RNA, 20 nt, Artificial Sequence
  Synthetic
agagauauagaucaguggaa

SEQ ID NO: 188808 - RNA, 21 nt, Artificial Sequence
  Synthetic
cagagauauagaucaguggaa

SEQ ID NO: 188809 - RNA, 22 nt, Artificial Sequence
  Synthetic
acagagauauagaucaguggaa

SEQ ID NO: 188810 - RNA, 23 nt, Artificial Sequence
  Synthetic
aacagagauauagaucaguggaa

SEQ ID NO: 188811 - RNA, 24 nt, Artificial Sequence
  Synthetic
aaacagagauauagaucaguggaa

SEQ ID NO: 188812 - RNA, 18 nt, Artificial Sequence
  Synthetic
gaauccauaugaguggaa

SEQ ID NO: 188813 - RNA, 19 nt, Artificial Sequence
  Synthetic
agaauccauaugaguggaa

SEQ ID NO: 188814 - RNA, 20 nt, Artificial Sequence
  Synthetic
gagaauccauaugaguggaa

SEQ ID NO: 188815 - RNA, 21 nt, Artificial Sequence
  Synthetic
ugagaauccauaugaguggaa

SEQ ID NO: 188816 - RNA, 22 nt, Artificial Sequence
  Synthetic
gugagaauccauaugaguggaa

SEQ ID NO: 188817 - RNA, 23 nt, Artificial Sequence
  Synthetic
ugugagaauccauaugaguggaa

SEQ ID NO: 188818 - RNA, 24 nt, Artificial Sequence
  Synthetic
augugagaauccauaugaguggaa

SEQ ID NO: 188819 - RNA, 18 nt, Artificial Sequence
  Synthetic
agcuuccacaacguggaa

SEQ ID NO: 188820 - RNA, 19 nt, Artificial Sequence
  Synthetic
aagcuuccacaacguggaa

SEQ ID NO: 188821 - RNA, 20 nt, Artificial Sequence
  Synthetic
aaagcuuccacaacguggaa

SEQ ID NO: 188822 - RNA, 21 nt, Artificial Sequence
  Synthetic
caaagcuuccacaacguggaa

SEQ ID NO: 188823 - RNA, 22 nt, Artificial Sequence
  Synthetic
acaaagcuuccacaacguggaa

SEQ ID NO: 188824 - RNA, 23 nt, Artificial Sequence
  Synthetic
aacaaagcuuccacaacguggaa

SEQ ID NO: 188825 - RNA, 24 nt, Artificial Sequence
  Synthetic
gaacaaagcuuccacaacguggaa

SEQ ID NO: 188826 - RNA, 18 nt, Artificial Sequence
  Synthetic
gaaggacugaagguggaa

SEQ ID NO: 188827 - RNA, 19 nt, Artificial Sequence
  Synthetic
ugaaggacugaagguggaa

SEQ ID NO: 188828 - RNA, 20 nt, Artificial Sequence
  Synthetic
cugaaggacugaagguggaa

SEQ ID NO: 188829 - RNA, 21 nt, Artificial Sequence
  Synthetic
ccugaaggacugaagguggaa

SEQ ID NO: 188830 - RNA, 22 nt, Artificial Sequence
  Synthetic
cccugaaggacugaagguggaa

SEQ ID NO: 188831 - RNA, 23 nt, Artificial Sequence
  Synthetic
ucccugaaggacugaagguggaa

SEQ ID NO: 188832 - RNA, 24 nt, Artificial Sequence
  Synthetic
uucccugaaggacugaagguggaa

SEQ ID NO: 188833 - RNA, 18 nt, Artificial Sequence
  Synthetic
agagagagggagguggaa

SEQ ID NO: 188834 - RNA, 19 nt, Artificial Sequence
  Synthetic
gagagagagggagguggaa

SEQ ID NO: 188835 - RNA, 20 nt, Artificial Sequence
  Synthetic
agagagagagggagguggaa

SEQ ID NO: 188836 - RNA, 21 nt, Artificial Sequence
  Synthetic
gagagagagagggagguggaa

SEQ ID NO: 188837 - RNA, 22 nt, Artificial Sequence
  Synthetic
ggagagagagagggagguggaa

SEQ ID NO: 188838 - RNA, 23 nt, Artificial Sequence
  Synthetic
uggagagagagagggagguggaa

SEQ ID NO: 188839 - RNA, 24 nt, Artificial Sequence
  Synthetic
guggagagagagagggagguggaa

SEQ ID NO: 188840 - RNA, 18 nt, Artificial Sequence
  Synthetic
aaaucuccguggguggaa

SEQ ID NO: 188841 - RNA, 19 nt, Artificial Sequence
  Synthetic
uaaaucuccguggguggaa

SEQ ID NO: 188842 - RNA, 20 nt, Artificial Sequence
  Synthetic
uuaaaucuccguggguggaa

SEQ ID NO: 188843 - RNA, 21 nt, Artificial Sequence
  Synthetic
auuaaaucuccguggguggaa

SEQ ID NO: 188844 - RNA, 22 nt, Artificial Sequence
  Synthetic
uauuaaaucuccguggguggaa

SEQ ID NO: 188845 - RNA, 23 nt, Artificial Sequence
  Synthetic
uuauuaaaucuccguggguggaa

SEQ ID NO: 188846 - RNA, 24 nt, Artificial Sequence
  Synthetic
uuuauuaaaucuccguggguggaa

SEQ ID NO: 188847 - RNA, 18 nt, Artificial Sequence
  Synthetic
uacuaugacaugguggaa

SEQ ID NO: 188848 - RNA, 19 nt, Artificial Sequence
  Synthetic
guacuaugacaugguggaa

SEQ ID NO: 188849 - RNA, 20 nt, Artificial Sequence
  Synthetic
aguacuaugacaugguggaa

SEQ ID NO: 188850 - RNA, 21 nt, Artificial Sequence
  Synthetic
uaguacuaugacaugguggaa

SEQ ID NO: 188851 - RNA, 22 nt, Artificial Sequence
  Synthetic
cuaguacuaugacaugguggaa

SEQ ID NO: 188852 - RNA, 23 nt, Artificial Sequence
  Synthetic
ucuaguacuaugacaugguggaa

SEQ ID NO: 188853 - RNA, 24 nt, Artificial Sequence
  Synthetic
uucuaguacuaugacaugguggaa

SEQ ID NO: 188854 - RNA, 18 nt, Artificial Sequence
  Synthetic
caaggaguggugguggaa

SEQ ID NO: 188855 - RNA, 19 nt, Artificial Sequence
  Synthetic
acaaggaguggugguggaa

SEQ ID NO: 188856 - RNA, 20 nt, Artificial Sequence
  Synthetic
gacaaggaguggugguggaa

SEQ ID NO: 188857 - RNA, 21 nt, Artificial Sequence
  Synthetic
ggacaaggaguggugguggaa

SEQ ID NO: 188858 - RNA, 22 nt, Artificial Sequence
  Synthetic
gggacaaggaguggugguggaa

SEQ ID NO: 188859 - RNA, 23 nt, Artificial Sequence
  Synthetic
ggggacaaggaguggugguggaa

SEQ ID NO: 188860 - RNA, 24 nt, Artificial Sequence
  Synthetic
uggggacaaggaguggugguggaa

SEQ ID NO: 188861 - RNA, 18 nt, Artificial Sequence
  Synthetic
guagcuagccauguggaa

SEQ ID NO: 188862 - RNA, 19 nt, Artificial Sequence
  Synthetic
uguagcuagccauguggaa

SEQ ID NO: 188863 - RNA, 20 nt, Artificial Sequence
  Synthetic
guguagcuagccauguggaa

SEQ ID NO: 188864 - RNA, 21 nt, Artificial Sequence
  Synthetic
aguguagcuagccauguggaa

SEQ ID NO: 188865 - RNA, 22 nt, Artificial Sequence
  Synthetic
uaguguagcuagccauguggaa

SEQ ID NO: 188866 - RNA, 23 nt, Artificial Sequence
  Synthetic
cuaguguagcuagccauguggaa

SEQ ID NO: 188867 - RNA, 24 nt, Artificial Sequence
  Synthetic
ccuaguguagcuagccauguggaa

SEQ ID NO: 188868 - RNA, 18 nt, Artificial Sequence
  Synthetic
uuaagcacugcuguggaa

SEQ ID NO: 188869 - RNA, 19 nt, Artificial Sequence
  Synthetic
auuaagcacugcuguggaa

SEQ ID NO: 188870 - RNA, 20 nt, Artificial Sequence
  Synthetic
cauuaagcacugcuguggaa

SEQ ID NO: 188871 - RNA, 21 nt, Artificial Sequence
  Synthetic
ccauuaagcacugcuguggaa

SEQ ID NO: 188872 - RNA, 22 nt, Artificial Sequence
  Synthetic
accauuaagcacugcuguggaa

SEQ ID NO: 188873 - RNA, 23 nt, Artificial Sequence
  Synthetic
aaccauuaagcacugcuguggaa

SEQ ID NO: 188874 - RNA, 24 nt, Artificial Sequence
  Synthetic
uaaccauuaagcacugcuguggaa

SEQ ID NO: 188875 - RNA, 18 nt, Artificial Sequence
  Synthetic
uucaagcaagguguggaa

SEQ ID NO: 188876 - RNA, 19 nt, Artificial Sequence
  Synthetic
cuucaagcaagguguggaa

SEQ ID NO: 188877 - RNA, 20 nt, Artificial Sequence
  Synthetic
gcuucaagcaagguguggaa

SEQ ID NO: 188878 - RNA, 21 nt, Artificial Sequence
  Synthetic
ugcuucaagcaagguguggaa

SEQ ID NO: 188879 - RNA, 22 nt, Artificial Sequence
  Synthetic
uugcuucaagcaagguguggaa

SEQ ID NO: 188880 - RNA, 23 nt, Artificial Sequence
  Synthetic
auugcuucaagcaagguguggaa

SEQ ID NO: 188881 - RNA, 24 nt, Artificial Sequence
  Synthetic
aauugcuucaagcaagguguggaa

SEQ ID NO: 188882 - RNA, 18 nt, Artificial Sequence
  Synthetic
ugaacccacauuguggaa

SEQ ID NO: 188883 - RNA, 19 nt, Artificial Sequence
  Synthetic
cugaacccacauuguggaa

SEQ ID NO: 188884 - RNA, 20 nt, Artificial Sequence
  Synthetic
gcugaacccacauuguggaa

SEQ ID NO: 188885 - RNA, 21 nt, Artificial Sequence
  Synthetic
agcugaacccacauuguggaa

SEQ ID NO: 188886 - RNA, 22 nt, Artificial Sequence
  Synthetic
gagcugaacccacauuguggaa

SEQ ID NO: 188887 - RNA, 23 nt, Artificial Sequence
  Synthetic
agagcugaacccacauuguggaa

SEQ ID NO: 188888 - RNA, 24 nt, Artificial Sequence
  Synthetic
aagagcugaacccacauuguggaa

SEQ ID NO: 188889 - RNA, 18 nt, Artificial Sequence
  Synthetic
aucaauuuuguuguggaa

SEQ ID NO: 188890 - RNA, 19 nt, Artificial Sequence
  Synthetic
caucaauuuuguuguggaa

SEQ ID NO: 188891 - RNA, 20 nt, Artificial Sequence
  Synthetic
ccaucaauuuuguuguggaa

SEQ ID NO: 188892 - RNA, 21 nt, Artificial Sequence
  Synthetic
uccaucaauuuuguuguggaa

SEQ ID NO: 188893 - RNA, 22 nt, Artificial Sequence
  Synthetic
auccaucaauuuuguuguggaa

SEQ ID NO: 188894 - RNA, 23 nt, Artificial Sequence
  Synthetic
aauccaucaauuuuguuguggaa

SEQ ID NO: 188895 - RNA, 24 nt, Artificial Sequence
  Synthetic
aaauccaucaauuuuguuguggaa

SEQ ID NO: 188896 - RNA, 18 nt, Artificial Sequence
  Synthetic
cuuuagugaccauuggaa

SEQ ID NO: 188897 - RNA, 19 nt, Artificial Sequence
  Synthetic
acuuuagugaccauuggaa

SEQ ID NO: 188898 - RNA, 20 nt, Artificial Sequence
  Synthetic
uacuuuagugaccauuggaa

SEQ ID NO: 188899 - RNA, 21 nt, Artificial Sequence
  Synthetic
auacuuuagugaccauuggaa

SEQ ID NO: 188900 - RNA, 22 nt, Artificial Sequence
  Synthetic
aauacuuuagugaccauuggaa

SEQ ID NO: 188901 - RNA, 23 nt, Artificial Sequence
  Synthetic
uaauacuuuagugaccauuggaa

SEQ ID NO: 188902 - RNA, 24 nt, Artificial Sequence
  Synthetic
auaauacuuuagugaccauuggaa

SEQ ID NO: 188903 - RNA, 18 nt, Artificial Sequence
  Synthetic
aaaaaaagaauauuggaa

SEQ ID NO: 188904 - RNA, 19 nt, Artificial Sequence
  Synthetic
aaaaaaaagaauauuggaa

SEQ ID NO: 188905 - RNA, 20 nt, Artificial Sequence
  Synthetic
aaaaaaaaagaauauuggaa

SEQ ID NO: 188906 - RNA, 21 nt, Artificial Sequence
  Synthetic
aaaaaaaaaagaauauuggaa

SEQ ID NO: 188907 - RNA, 22 nt, Artificial Sequence
  Synthetic
aaaaaaaaaaagaauauuggaa

SEQ ID NO: 188908 - RNA, 23 nt, Artificial Sequence
  Synthetic
aaaaaaaaaaaagaauauuggaa

SEQ ID NO: 188909 - RNA, 24 nt, Artificial Sequence
  Synthetic
aaaaaaaaaaaaagaauauuggaa

SEQ ID NO: 188910 - RNA, 18 nt, Artificial Sequence
  Synthetic
uugcauauuguauuggaa

SEQ ID NO: 188911 - RNA, 19 nt, Artificial Sequence
  Synthetic
cuugcauauuguauuggaa

SEQ ID NO: 188912 - RNA, 20 nt, Artificial Sequence
  Synthetic
ucuugcauauuguauuggaa

SEQ ID NO: 188913 - RNA, 21 nt, Artificial Sequence
  Synthetic
uucuugcauauuguauuggaa

SEQ ID NO: 188914 - RNA, 22 nt, Artificial Sequence
  Synthetic
uuucuugcauauuguauuggaa

SEQ ID NO: 188915 - RNA, 23 nt, Artificial Sequence
  Synthetic
uuuucuugcauauuguauuggaa

SEQ ID NO: 188916 - RNA, 24 nt, Artificial Sequence
  Synthetic
auuuucuugcauauuguauuggaa

SEQ ID NO: 188917 - RNA, 18 nt, Artificial Sequence
  Synthetic
aauuauuacuuauuggaa

SEQ ID NO: 188918 - RNA, 19 nt, Artificial Sequence
  Synthetic
aaauuauuacuuauuggaa

SEQ ID NO: 188919 - RNA, 20 nt, Artificial Sequence
  Synthetic
uaaauuauuacuuauuggaa

SEQ ID NO: 188920 - RNA, 21 nt, Artificial Sequence
  Synthetic
guaaauuauuacuuauuggaa

SEQ ID NO: 188921 - RNA, 22 nt, Artificial Sequence
  Synthetic
uguaaauuauuacuuauuggaa

SEQ ID NO: 188922 - RNA, 23 nt, Artificial Sequence
  Synthetic
auguaaauuauuacuuauuggaa

SEQ ID NO: 188923 - RNA, 24 nt, Artificial Sequence
  Synthetic
cauguaaauuauuacuuauuggaa

SEQ ID NO: 188924 - RNA, 18 nt, Artificial Sequence
  Synthetic
cuugggagcuuauuggaa

SEQ ID NO: 188925 - RNA, 19 nt, Artificial Sequence
  Synthetic
acuugggagcuuauuggaa

SEQ ID NO: 188926 - RNA, 20 nt, Artificial Sequence
  Synthetic
cacuugggagcuuauuggaa

SEQ ID NO: 188927 - RNA, 21 nt, Artificial Sequence
  Synthetic
ccacuugggagcuuauuggaa

SEQ ID NO: 188928 - RNA, 22 nt, Artificial Sequence
  Synthetic
accacuugggagcuuauuggaa

SEQ ID NO: 188929 - RNA, 23 nt, Artificial Sequence
  Synthetic
uaccacuugggagcuuauuggaa

SEQ ID NO: 188930 - RNA, 24 nt, Artificial Sequence
  Synthetic
guaccacuugggagcuuauuggaa

SEQ ID NO: 188931 - RNA, 18 nt, Artificial Sequence
  Synthetic
accucaaaacacuuggaa

SEQ ID NO: 188932 - RNA, 19 nt, Artificial Sequence
  Synthetic
aaccucaaaacacuuggaa

SEQ ID NO: 188933 - RNA, 20 nt, Artificial Sequence
  Synthetic
aaaccucaaaacacuuggaa

SEQ ID NO: 188934 - RNA, 21 nt, Artificial Sequence
  Synthetic
aaaaccucaaaacacuuggaa

SEQ ID NO: 188935 - RNA, 22 nt, Artificial Sequence
  Synthetic
aaaaaccucaaaacacuuggaa

SEQ ID NO: 188936 - RNA, 23 nt, Artificial Sequence
  Synthetic
gaaaaaccucaaaacacuuggaa

SEQ ID NO: 188937 - RNA, 24 nt, Artificial Sequence
  Synthetic
agaaaaaccucaaaacacuuggaa

SEQ ID NO: 188938 - RNA, 18 nt, Artificial Sequence
  Synthetic
aaggguaaagacuuggaa

SEQ ID NO: 188939 - RNA, 19 nt, Artificial Sequence
  Synthetic
aaaggguaaagacuuggaa

SEQ ID NO: 188940 - RNA, 20 nt, Artificial Sequence
  Synthetic
gaaaggguaaagacuuggaa

SEQ ID NO: 188941 - RNA, 21 nt, Artificial Sequence
  Synthetic
agaaaggguaaagacuuggaa

SEQ ID NO: 188942 - RNA, 22 nt, Artificial Sequence
  Synthetic
uagaaaggguaaagacuuggaa

SEQ ID NO: 188943 - RNA, 23 nt, Artificial Sequence
  Synthetic
uuagaaaggguaaagacuuggaa

SEQ ID NO: 188944 - RNA, 24 nt, Artificial Sequence
  Synthetic
uuuagaaaggguaaagacuuggaa

SEQ ID NO: 188945 - RNA, 18 nt, Artificial Sequence
  Synthetic
aauguauaguucuuggaa

SEQ ID NO: 188946 - RNA, 19 nt, Artificial Sequence
  Synthetic
uaauguauaguucuuggaa

SEQ ID NO: 188947 - RNA, 20 nt, Artificial Sequence
  Synthetic
auaauguauaguucuuggaa

SEQ ID NO: 188948 - RNA, 21 nt, Artificial Sequence
  Synthetic
gauaauguauaguucuuggaa

SEQ ID NO: 188949 - RNA, 22 nt, Artificial Sequence
  Synthetic
ggauaauguauaguucuuggaa

SEQ ID NO: 188950 - RNA, 23 nt, Artificial Sequence
  Synthetic
gggauaauguauaguucuuggaa

SEQ ID NO: 188951 - RNA, 24 nt, Artificial Sequence
  Synthetic
agggauaauguauaguucuuggaa

SEQ ID NO: 188952 - RNA, 18 nt, Artificial Sequence
  Synthetic
gggcagcauuucuuggaa

SEQ ID NO: 188953 - RNA, 19 nt, Artificial Sequence
  Synthetic
agggcagcauuucuuggaa

SEQ ID NO: 188954 - RNA, 20 nt, Artificial Sequence
  Synthetic
cagggcagcauuucuuggaa

SEQ ID NO: 188955 - RNA, 21 nt, Artificial Sequence
  Synthetic
ccagggcagcauuucuuggaa

SEQ ID NO: 188956 - RNA, 22 nt, Artificial Sequence
  Synthetic
cccagggcagcauuucuuggaa

SEQ ID NO: 188957 - RNA, 23 nt, Artificial Sequence
  Synthetic
gcccagggcagcauuucuuggaa

SEQ ID NO: 188958 - RNA, 24 nt, Artificial Sequence
  Synthetic
ggcccagggcagcauuucuuggaa

SEQ ID NO: 188959 - RNA, 18 nt, Artificial Sequence
  Synthetic
agaagacauaaguuggaa

SEQ ID NO: 188960 - RNA, 19 nt, Artificial Sequence
  Synthetic
aagaagacauaaguuggaa

SEQ ID NO: 188961 - RNA, 20 nt, Artificial Sequence
  Synthetic
aaagaagacauaaguuggaa

SEQ ID NO: 188962 - RNA, 21 nt, Artificial Sequence
  Synthetic
gaaagaagacauaaguuggaa

SEQ ID NO: 188963 - RNA, 22 nt, Artificial Sequence
  Synthetic
agaaagaagacauaaguuggaa

SEQ ID NO: 188964 - RNA, 23 nt, Artificial Sequence
  Synthetic
aagaaagaagacauaaguuggaa

SEQ ID NO: 188965 - RNA, 24 nt, Artificial Sequence
  Synthetic
gaagaaagaagacauaaguuggaa

SEQ ID NO: 188966 - RNA, 18 nt, Artificial Sequence
  Synthetic
gcuuuagaacaguuggaa

SEQ ID NO: 188967 - RNA, 19 nt, Artificial Sequence
  Synthetic
ggcuuuagaacaguuggaa

SEQ ID NO: 188968 - RNA, 20 nt, Artificial Sequence
  Synthetic
aggcuuuagaacaguuggaa

SEQ ID NO: 188969 - RNA, 21 nt, Artificial Sequence
  Synthetic
aaggcuuuagaacaguuggaa

SEQ ID NO: 188970 - RNA, 22 nt, Artificial Sequence
  Synthetic
aaaggcuuuagaacaguuggaa

SEQ ID NO: 188971 - RNA, 23 nt, Artificial Sequence
  Synthetic
aaaaggcuuuagaacaguuggaa

SEQ ID NO: 188972 - RNA, 24 nt, Artificial Sequence
  Synthetic
gaaaaggcuuuagaacaguuggaa

SEQ ID NO: 188973 - RNA, 18 nt, Artificial Sequence
  Synthetic
ggauuaucuauguuggaa

SEQ ID NO: 188974 - RNA, 19 nt, Artificial Sequence
  Synthetic
cggauuaucuauguuggaa

SEQ ID NO: 188975 - RNA, 20 nt, Artificial Sequence
  Synthetic
acggauuaucuauguuggaa

SEQ ID NO: 188976 - RNA, 21 nt, Artificial Sequence
  Synthetic
uacggauuaucuauguuggaa

SEQ ID NO: 188977 - RNA, 22 nt, Artificial Sequence
  Synthetic
uuacggauuaucuauguuggaa

SEQ ID NO: 188978 - RNA, 23 nt, Artificial Sequence
  Synthetic
cuuacggauuaucuauguuggaa

SEQ ID NO: 188979 - RNA, 24 nt, Artificial Sequence
  Synthetic
acuuacggauuaucuauguuggaa

SEQ ID NO: 188980 - RNA, 18 nt, Artificial Sequence
  Synthetic
caaguauggcauuuggaa

SEQ ID NO: 188981 - RNA, 19 nt, Artificial Sequence
  Synthetic
gcaaguauggcauuuggaa

SEQ ID NO: 188982 - RNA, 20 nt, Artificial Sequence
  Synthetic
agcaaguauggcauuuggaa

SEQ ID NO: 188983 - RNA, 21 nt, Artificial Sequence
  Synthetic
cagcaaguauggcauuuggaa

SEQ ID NO: 188984 - RNA, 22 nt, Artificial Sequence
  Synthetic
ccagcaaguauggcauuuggaa

SEQ ID NO: 188985 - RNA, 23 nt, Artificial Sequence
  Synthetic
uccagcaaguauggcauuuggaa

SEQ ID NO: 188986 - RNA, 24 nt, Artificial Sequence
  Synthetic
uuccagcaaguauggcauuuggaa

SEQ ID NO: 188987 - RNA, 18 nt, Artificial Sequence
  Synthetic
acaaugcaggauuuggaa

SEQ ID NO: 188988 - RNA, 19 nt, Artificial Sequence
  Synthetic
aacaaugcaggauuuggaa

SEQ ID NO: 188989 - RNA, 20 nt, Artificial Sequence
  Synthetic
caacaaugcaggauuuggaa

SEQ ID NO: 188990 - RNA, 21 nt, Artificial Sequence
  Synthetic
gcaacaaugcaggauuuggaa

SEQ ID NO: 188991 - RNA, 22 nt, Artificial Sequence
  Synthetic
ggcaacaaugcaggauuuggaa

SEQ ID NO: 188992 - RNA, 23 nt, Artificial Sequence
  Synthetic
aggcaacaaugcaggauuuggaa

SEQ ID NO: 188993 - RNA, 24 nt, Artificial Sequence
  Synthetic
caggcaacaaugcaggauuuggaa

SEQ ID NO: 188994 - RNA, 18 nt, Artificial Sequence
  Synthetic
gugagguuuacuuuggaa

SEQ ID NO: 188995 - RNA, 19 nt, Artificial Sequence
  Synthetic
ugugagguuuacuuuggaa

SEQ ID NO: 188996 - RNA, 20 nt, Artificial Sequence
  Synthetic
uugugagguuuacuuuggaa

SEQ ID NO: 188997 - RNA, 21 nt, Artificial Sequence
  Synthetic
cuugugagguuuacuuuggaa

SEQ ID NO: 188998 - RNA, 22 nt, Artificial Sequence
  Synthetic
ucuugugagguuuacuuuggaa

SEQ ID NO: 188999 - RNA, 23 nt, Artificial Sequence
  Synthetic
cucuugugagguuuacuuuggaa

SEQ ID NO: 189000 - RNA, 24 nt, Artificial Sequence
  Synthetic
ucucuugugagguuuacuuuggaa

SEQ ID NO: 189001 - RNA, 18 nt, Artificial Sequence
  Synthetic
uucugaacguguuuggaa

SEQ ID NO: 189002 - RNA, 19 nt, Artificial Sequence
  Synthetic
auucugaacguguuuggaa

SEQ ID NO: 189003 - RNA, 20 nt, Artificial Sequence
  Synthetic
uauucugaacguguuuggaa

SEQ ID NO: 189004 - RNA, 21 nt, Artificial Sequence
  Synthetic
auauucugaacguguuuggaa

SEQ ID NO: 189005 - RNA, 22 nt, Artificial Sequence
  Synthetic
cauauucugaacguguuuggaa

SEQ ID NO: 189006 - RNA, 23 nt, Artificial Sequence
  Synthetic
ucauauucugaacguguuuggaa

SEQ ID NO: 189007 - RNA, 24 nt, Artificial Sequence
  Synthetic
gucauauucugaacguguuuggaa

SEQ ID NO: 189008 - RNA, 18 nt, Artificial Sequence
  Synthetic
cugauaaguguuuuggaa

SEQ ID NO: 189009 - RNA, 19 nt, Artificial Sequence
  Synthetic
acugauaaguguuuuggaa

SEQ ID NO: 189010 - RNA, 20 nt, Artificial Sequence
  Synthetic
uacugauaaguguuuuggaa

SEQ ID NO: 189011 - RNA, 21 nt, Artificial Sequence
  Synthetic
auacugauaaguguuuuggaa

SEQ ID NO: 189012 - RNA, 22 nt, Artificial Sequence
  Synthetic
gauacugauaaguguuuuggaa

SEQ ID NO: 189013 - RNA, 23 nt, Artificial Sequence
  Synthetic
ggauacugauaaguguuuuggaa

SEQ ID NO: 189014 - RNA, 24 nt, Artificial Sequence
  Synthetic
uggauacugauaaguguuuuggaa

SEQ ID NO: 189015 - RNA, 18 nt, Artificial Sequence
  Synthetic
gaagaaagaaaaaaugaa

SEQ ID NO: 189016 - RNA, 19 nt, Artificial Sequence
  Synthetic
agaagaaagaaaaaaugaa

SEQ ID NO: 189017 - RNA, 20 nt, Artificial Sequence
  Synthetic
aagaagaaagaaaaaaugaa

SEQ ID NO: 189018 - RNA, 21 nt, Artificial Sequence
  Synthetic
gaagaagaaagaaaaaaugaa

SEQ ID NO: 189019 - RNA, 22 nt, Artificial Sequence
  Synthetic
agaagaagaaagaaaaaaugaa

SEQ ID NO: 189020 - RNA, 23 nt, Artificial Sequence
  Synthetic
aagaagaagaaagaaaaaaugaa

SEQ ID NO: 189021 - RNA, 24 nt, Artificial Sequence
  Synthetic
gaagaagaagaaagaaaaaaugaa

SEQ ID NO: 189022 - RNA, 18 nt, Artificial Sequence
  Synthetic
acaugaagcaaaaaugaa

SEQ ID NO: 189023 - RNA, 19 nt, Artificial Sequence
  Synthetic
uacaugaagcaaaaaugaa

SEQ ID NO: 189024 - RNA, 20 nt, Artificial Sequence
  Synthetic
auacaugaagcaaaaaugaa

SEQ ID NO: 189025 - RNA, 21 nt, Artificial Sequence
  Synthetic
aauacaugaagcaaaaaugaa

SEQ ID NO: 189026 - RNA, 22 nt, Artificial Sequence
  Synthetic
aaauacaugaagcaaaaaugaa

SEQ ID NO: 189027 - RNA, 23 nt, Artificial Sequence
  Synthetic
caaauacaugaagcaaaaaugaa

SEQ ID NO: 189028 - RNA, 24 nt, Artificial Sequence
  Synthetic
ccaaauacaugaagcaaaaaugaa

SEQ ID NO: 189029 - RNA, 18 nt, Artificial Sequence
  Synthetic
agagaauguaaaaaugaa

SEQ ID NO: 189030 - RNA, 19 nt, Artificial Sequence
  Synthetic
cagagaauguaaaaaugaa

SEQ ID NO: 189031 - RNA, 20 nt, Artificial Sequence
  Synthetic
ccagagaauguaaaaaugaa

SEQ ID NO: 189032 - RNA, 21 nt, Artificial Sequence
  Synthetic
cccagagaauguaaaaaugaa

SEQ ID NO: 189033 - RNA, 22 nt, Artificial Sequence
  Synthetic
ccccagagaauguaaaaaugaa

SEQ ID NO: 189034 - RNA, 23 nt, Artificial Sequence
  Synthetic
uccccagagaauguaaaaaugaa

SEQ ID NO: 189035 - RNA, 24 nt, Artificial Sequence
  Synthetic
cuccccagagaauguaaaaaugaa

SEQ ID NO: 189036 - RNA, 18 nt, Artificial Sequence
  Synthetic
cugcagaugcaaaaugaa

SEQ ID NO: 189037 - RNA, 19 nt, Artificial Sequence
  Synthetic
ucugcagaugcaaaaugaa

SEQ ID NO: 189038 - RNA, 20 nt, Artificial Sequence
  Synthetic
gucugcagaugcaaaaugaa

SEQ ID NO: 189039 - RNA, 21 nt, Artificial Sequence
  Synthetic
ugucugcagaugcaaaaugaa

SEQ ID NO: 189040 - RNA, 22 nt, Artificial Sequence
  Synthetic
gugucugcagaugcaaaaugaa

SEQ ID NO: 189041 - RNA, 23 nt, Artificial Sequence
  Synthetic
ugugucugcagaugcaaaaugaa

SEQ ID NO: 189042 - RNA, 24 nt, Artificial Sequence
  Synthetic
cugugucugcagaugcaaaaugaa

SEQ ID NO: 189043 - RNA, 18 nt, Artificial Sequence
  Synthetic
aucauggcagaaaaugaa

SEQ ID NO: 189044 - RNA, 19 nt, Artificial Sequence
  Synthetic
aaucauggcagaaaaugaa

SEQ ID NO: 189045 - RNA, 20 nt, Artificial Sequence
  Synthetic
aaaucauggcagaaaaugaa

SEQ ID NO: 189046 - RNA, 21 nt, Artificial Sequence
  Synthetic
aaaaucauggcagaaaaugaa

SEQ ID NO: 189047 - RNA, 22 nt, Artificial Sequence
  Synthetic
uaaaaucauggcagaaaaugaa

SEQ ID NO: 189048 - RNA, 23 nt, Artificial Sequence
  Synthetic
uuaaaaucauggcagaaaaugaa

SEQ ID NO: 189049 - RNA, 24 nt, Artificial Sequence
  Synthetic
cuuaaaaucauggcagaaaaugaa

SEQ ID NO: 189050 - RNA, 18 nt, Artificial Sequence
  Synthetic
uagacuugagaaaaugaa

SEQ ID NO: 189051 - RNA, 19 nt, Artificial Sequence
  Synthetic
cuagacuugagaaaaugaa

SEQ ID NO: 189052 - RNA, 20 nt, Artificial Sequence
  Synthetic
acuagacuugagaaaaugaa

SEQ ID NO: 189053 - RNA, 21 nt, Artificial Sequence
  Synthetic
aacuagacuugagaaaaugaa

SEQ ID NO: 189054 - RNA, 22 nt, Artificial Sequence
  Synthetic
gaacuagacuugagaaaaugaa

SEQ ID NO: 189055 - RNA, 23 nt, Artificial Sequence
  Synthetic
agaacuagacuugagaaaaugaa

SEQ ID NO: 189056 - RNA, 24 nt, Artificial Sequence
  Synthetic
aagaacuagacuugagaaaaugaa

SEQ ID NO: 189057 - RNA, 18 nt, Artificial Sequence
  Synthetic
ccagagagugaaaaugaa

SEQ ID NO: 189058 - RNA, 19 nt, Artificial Sequence
  Synthetic
uccagagagugaaaaugaa

SEQ ID NO: 189059 - RNA, 20 nt, Artificial Sequence
  Synthetic
uuccagagagugaaaaugaa

SEQ ID NO: 189060 - RNA, 21 nt, Artificial Sequence
  Synthetic
auuccagagagugaaaaugaa

SEQ ID NO: 189061 - RNA, 22 nt, Artificial Sequence
  Synthetic
aauuccagagagugaaaaugaa

SEQ ID NO: 189062 - RNA, 23 nt, Artificial Sequence
  Synthetic
aaauuccagagagugaaaaugaa

SEQ ID NO: 189063 - RNA, 24 nt, Artificial Sequence
  Synthetic
caaauuccagagagugaaaaugaa

SEQ ID NO: 189064 - RNA, 18 nt, Artificial Sequence
  Synthetic
cauaaucuaucaaaugaa

SEQ ID NO: 189065 - RNA, 19 nt, Artificial Sequence
  Synthetic
acauaaucuaucaaaugaa

SEQ ID NO: 189066 - RNA, 20 nt, Artificial Sequence
  Synthetic
gacauaaucuaucaaaugaa

SEQ ID NO: 189067 - RNA, 21 nt, Artificial Sequence
  Synthetic
ugacauaaucuaucaaaugaa

SEQ ID NO: 189068 - RNA, 22 nt, Artificial Sequence
  Synthetic
uugacauaaucuaucaaaugaa

SEQ ID NO: 189069 - RNA, 23 nt, Artificial Sequence
  Synthetic
uuugacauaaucuaucaaaugaa

SEQ ID NO: 189070 - RNA, 24 nt, Artificial Sequence
  Synthetic
uuuugacauaaucuaucaaaugaa

SEQ ID NO: 189071 - RNA, 18 nt, Artificial Sequence
  Synthetic
cuuuagagcagaaaugaa

SEQ ID NO: 189072 - RNA, 19 nt, Artificial Sequence
  Synthetic
acuuuagagcagaaaugaa

SEQ ID NO: 189073 - RNA, 20 nt, Artificial Sequence
  Synthetic
aacuuuagagcagaaaugaa

SEQ ID NO: 189074 - RNA, 21 nt, Artificial Sequence
  Synthetic
aaacuuuagagcagaaaugaa

SEQ ID NO: 189075 - RNA, 22 nt, Artificial Sequence
  Synthetic
aaaacuuuagagcagaaaugaa

SEQ ID NO: 189076 - RNA, 23 nt, Artificial Sequence
  Synthetic
aaaaacuuuagagcagaaaugaa

SEQ ID NO: 189077 - RNA, 24 nt, Artificial Sequence
  Synthetic
uaaaaacuuuagagcagaaaugaa

SEQ ID NO: 189078 - RNA, 18 nt, Artificial Sequence
  Synthetic
aagauaagucgaaaugaa

SEQ ID NO: 189079 - RNA, 19 nt, Artificial Sequence
  Synthetic
aaagauaagucgaaaugaa

SEQ ID NO: 189080 - RNA, 20 nt, Artificial Sequence
  Synthetic
aaaagauaagucgaaaugaa

SEQ ID NO: 189081 - RNA, 21 nt, Artificial Sequence
  Synthetic
aaaaagauaagucgaaaugaa

SEQ ID NO: 189082 - RNA, 22 nt, Artificial Sequence
  Synthetic
aaaaaagauaagucgaaaugaa

SEQ ID NO: 189083 - RNA, 23 nt, Artificial Sequence
  Synthetic
gaaaaaagauaagucgaaaugaa

SEQ ID NO: 189084 - RNA, 24 nt, Artificial Sequence
  Synthetic
ggaaaaaagauaagucgaaaugaa

SEQ ID NO: 189085 - RNA, 18 nt, Artificial Sequence
  Synthetic
uucaaacagauaaaugaa

SEQ ID NO: 189086 - RNA, 19 nt, Artificial Sequence
  Synthetic
uuucaaacagauaaaugaa

SEQ ID NO: 189087 - RNA, 20 nt, Artificial Sequence
  Synthetic
uuuucaaacagauaaaugaa

SEQ ID NO: 189088 - RNA, 21 nt, Artificial Sequence
  Synthetic
cuuuucaaacagauaaaugaa

SEQ ID NO: 189089 - RNA, 22 nt, Artificial Sequence
  Synthetic
gcuuuucaaacagauaaaugaa

SEQ ID NO: 189090 - RNA, 23 nt, Artificial Sequence
  Synthetic
agcuuuucaaacagauaaaugaa

SEQ ID NO: 189091 - RNA, 24 nt, Artificial Sequence
  Synthetic
aagcuuuucaaacagauaaaugaa

SEQ ID NO: 189092 - RNA, 18 nt, Artificial Sequence
  Synthetic
uagaucaaagacaaugaa

SEQ ID NO: 189093 - RNA, 19 nt, Artificial Sequence
  Synthetic
auagaucaaagacaaugaa

SEQ ID NO: 189094 - RNA, 20 nt, Artificial Sequence
  Synthetic
aauagaucaaagacaaugaa

SEQ ID NO: 189095 - RNA, 21 nt, Artificial Sequence
  Synthetic
aaauagaucaaagacaaugaa

SEQ ID NO: 189096 - RNA, 22 nt, Artificial Sequence
  Synthetic
aaaauagaucaaagacaaugaa

SEQ ID NO: 189097 - RNA, 23 nt, Artificial Sequence
  Synthetic
caaaauagaucaaagacaaugaa

SEQ ID NO: 189098 - RNA, 24 nt, Artificial Sequence
  Synthetic
gcaaaauagaucaaagacaaugaa

SEQ ID NO: 189099 - RNA, 18 nt, Artificial Sequence
  Synthetic
ugaggauauuacaaugaa

SEQ ID NO: 189100 - RNA, 19 nt, Artificial Sequence
  Synthetic
cugaggauauuacaaugaa

SEQ ID NO: 189101 - RNA, 20 nt, Artificial Sequence
  Synthetic
gcugaggauauuacaaugaa

SEQ ID NO: 189102 - RNA, 21 nt, Artificial Sequence
  Synthetic
ggcugaggauauuacaaugaa

SEQ ID NO: 189103 - RNA, 22 nt, Artificial Sequence
  Synthetic
aggcugaggauauuacaaugaa

SEQ ID NO: 189104 - RNA, 23 nt, Artificial Sequence
  Synthetic
aaggcugaggauauuacaaugaa

SEQ ID NO: 189105 - RNA, 24 nt, Artificial Sequence
  Synthetic
uaaggcugaggauauuacaaugaa

SEQ ID NO: 189106 - RNA, 18 nt, Artificial Sequence
  Synthetic
ccaggcuuuuacaaugaa

SEQ ID NO: 189107 - RNA, 19 nt, Artificial Sequence
  Synthetic
uccaggcuuuuacaaugaa

SEQ ID NO: 189108 - RNA, 20 nt, Artificial Sequence
  Synthetic
cuccaggcuuuuacaaugaa

SEQ ID NO: 189109 - RNA, 21 nt, Artificial Sequence
  Synthetic
ucuccaggcuuuuacaaugaa

SEQ ID NO: 189110 - RNA, 22 nt, Artificial Sequence
  Synthetic
uucuccaggcuuuuacaaugaa

SEQ ID NO: 189111 - RNA, 23 nt, Artificial Sequence
  Synthetic
uuucuccaggcuuuuacaaugaa

SEQ ID NO: 189112 - RNA, 24 nt, Artificial Sequence
  Synthetic
uuuucuccaggcuuuuacaaugaa

SEQ ID NO: 189113 - RNA, 18 nt, Artificial Sequence
  Synthetic
uucaaaaauuccaaugaa

SEQ ID NO: 189114 - RNA, 19 nt, Artificial Sequence
  Synthetic
uuucaaaaauuccaaugaa

SEQ ID NO: 189115 - RNA, 20 nt, Artificial Sequence
  Synthetic
uuuucaaaaauuccaaugaa

SEQ ID NO: 189116 - RNA, 21 nt, Artificial Sequence
  Synthetic
uuuuucaaaaauuccaaugaa

SEQ ID NO: 189117 - RNA, 22 nt, Artificial Sequence
  Synthetic
auuuuucaaaaauuccaaugaa

SEQ ID NO: 189118 - RNA, 23 nt, Artificial Sequence
  Synthetic
cauuuuucaaaaauuccaaugaa

SEQ ID NO: 189119 - RNA, 24 nt, Artificial Sequence
  Synthetic
ucauuuuucaaaaauuccaaugaa

SEQ ID NO: 189120 - RNA, 18 nt, Artificial Sequence
  Synthetic
uacugaaaaaagaaugaa

SEQ ID NO: 189121 - RNA, 19 nt, Artificial Sequence
  Synthetic
uuacugaaaaaagaaugaa

SEQ ID NO: 189122 - RNA, 20 nt, Artificial Sequence
  Synthetic
auuacugaaaaaagaaugaa

SEQ ID NO: 189123 - RNA, 21 nt, Artificial Sequence
  Synthetic
gauuacugaaaaaagaaugaa

SEQ ID NO: 189124 - RNA, 22 nt, Artificial Sequence
  Synthetic
agauuacugaaaaaagaaugaa

SEQ ID NO: 189125 - RNA, 23 nt, Artificial Sequence
  Synthetic
aagauuacugaaaaaagaaugaa

SEQ ID NO: 189126 - RNA, 24 nt, Artificial Sequence
  Synthetic
gaagauuacugaaaaaagaaugaa

SEQ ID NO: 189127 - RNA, 18 nt, Artificial Sequence
  Synthetic
agugguuaggagaaugaa

SEQ ID NO: 189128 - RNA, 19 nt, Artificial Sequence
  Synthetic
uagugguuaggagaaugaa

SEQ ID NO: 189129 - RNA, 20 nt, Artificial Sequence
  Synthetic
guagugguuaggagaaugaa

SEQ ID NO: 189130 - RNA, 21 nt, Artificial Sequence
  Synthetic
gguagugguuaggagaaugaa

SEQ ID NO: 189131 - RNA, 22 nt, Artificial Sequence
  Synthetic
ugguagugguuaggagaaugaa

SEQ ID NO: 189132 - RNA, 23 nt, Artificial Sequence
  Synthetic
cugguagugguuaggagaaugaa

SEQ ID NO: 189133 - RNA, 24 nt, Artificial Sequence
  Synthetic
ucugguagugguuaggagaaugaa

SEQ ID NO: 189134 - RNA, 18 nt, Artificial Sequence
  Synthetic
uaaagacaaaugaaugaa

SEQ ID NO: 189135 - RNA, 19 nt, Artificial Sequence
  Synthetic
auaaagacaaaugaaugaa

SEQ ID NO: 189136 - RNA, 20 nt, Artificial Sequence
  Synthetic
aauaaagacaaaugaaugaa

SEQ ID NO: 189137 - RNA, 21 nt, Artificial Sequence
  Synthetic
aaauaaagacaaaugaaugaa

SEQ ID NO: 189138 - RNA, 22 nt, Artificial Sequence
  Synthetic
gaaauaaagacaaaugaaugaa

SEQ ID NO: 189139 - RNA, 23 nt, Artificial Sequence
  Synthetic
agaaauaaagacaaaugaaugaa

SEQ ID NO: 189140 - RNA, 24 nt, Artificial Sequence
  Synthetic
aagaaauaaagacaaaugaaugaa

SEQ ID NO: 189141 - RNA, 18 nt, Artificial Sequence
  Synthetic
caaaugcuagugaaugaa

SEQ ID NO: 189142 - RNA, 19 nt, Artificial Sequence
  Synthetic
acaaaugcuagugaaugaa

SEQ ID NO: 189143 - RNA, 20 nt, Artificial Sequence
  Synthetic
uacaaaugcuagugaaugaa

SEQ ID NO: 189144 - RNA, 21 nt, Artificial Sequence
  Synthetic
auacaaaugcuagugaaugaa

SEQ ID NO: 189145 - RNA, 22 nt, Artificial Sequence
  Synthetic
cauacaaaugcuagugaaugaa

SEQ ID NO: 189146 - RNA, 23 nt, Artificial Sequence
  Synthetic
ucauacaaaugcuagugaaugaa

SEQ ID NO: 189147 - RNA, 24 nt, Artificial Sequence
  Synthetic
uucauacaaaugcuagugaaugaa

SEQ ID NO: 189148 - RNA, 18 nt, Artificial Sequence
  Synthetic
auccauuuguugaaugaa

SEQ ID NO: 189149 - RNA, 19 nt, Artificial Sequence
  Synthetic
uauccauuuguugaaugaa

SEQ ID NO: 189150 - RNA, 20 nt, Artificial Sequence
  Synthetic
guauccauuuguugaaugaa

SEQ ID NO: 189151 - RNA, 21 nt, Artificial Sequence
  Synthetic
gguauccauuuguugaaugaa

SEQ ID NO: 189152 - RNA, 22 nt, Artificial Sequence
  Synthetic
cgguauccauuuguugaaugaa

SEQ ID NO: 189153 - RNA, 23 nt, Artificial Sequence
  Synthetic
ucgguauccauuuguugaaugaa

SEQ ID NO: 189154 - RNA, 24 nt, Artificial Sequence
  Synthetic
cucgguauccauuuguugaaugaa

SEQ ID NO: 189155 - RNA, 18 nt, Artificial Sequence
  Synthetic
guuuuguguuugaaugaa

SEQ ID NO: 189156 - RNA, 19 nt, Artificial Sequence
  Synthetic
uguuuuguguuugaaugaa

SEQ ID NO: 189157 - RNA, 20 nt, Artificial Sequence
  Synthetic
auguuuuguguuugaaugaa

SEQ ID NO: 189158 - RNA, 21 nt, Artificial Sequence
  Synthetic
uauguuuuguguuugaaugaa

SEQ ID NO: 189159 - RNA, 22 nt, Artificial Sequence
  Synthetic
auauguuuuguguuugaaugaa

SEQ ID NO: 189160 - RNA, 23 nt, Artificial Sequence
  Synthetic
uauauguuuuguguuugaaugaa

SEQ ID NO: 189161 - RNA, 24 nt, Artificial Sequence
  Synthetic
auauauguuuuguguuugaaugaa

SEQ ID NO: 189162 - RNA, 18 nt, Artificial Sequence
  Synthetic
gucuacugaaauaaugaa

SEQ ID NO: 189163 - RNA, 19 nt, Artificial Sequence
  Synthetic
cgucuacugaaauaaugaa

SEQ ID NO: 189164 - RNA, 20 nt, Artificial Sequence
  Synthetic
acgucuacugaaauaaugaa

SEQ ID NO: 189165 - RNA, 21 nt, Artificial Sequence
  Synthetic
uacgucuacugaaauaaugaa

SEQ ID NO: 189166 - RNA, 22 nt, Artificial Sequence
  Synthetic
uuacgucuacugaaauaaugaa

SEQ ID NO: 189167 - RNA, 23 nt, Artificial Sequence
  Synthetic
uuuacgucuacugaaauaaugaa

SEQ ID NO: 189168 - RNA, 24 nt, Artificial Sequence
  Synthetic
auuuacgucuacugaaauaaugaa

SEQ ID NO: 189169 - RNA, 18 nt, Artificial Sequence
  Synthetic
acagcacaggauaaugaa

SEQ ID NO: 189170 - RNA, 19 nt, Artificial Sequence
  Synthetic
aacagcacaggauaaugaa

SEQ ID NO: 189171 - RNA, 20 nt, Artificial Sequence
  Synthetic
aaacagcacaggauaaugaa

SEQ ID NO: 189172 - RNA, 21 nt, Artificial Sequence
  Synthetic
aaaacagcacaggauaaugaa

SEQ ID NO: 189173 - RNA, 22 nt, Artificial Sequence
  Synthetic
gaaaacagcacaggauaaugaa

SEQ ID NO: 189174 - RNA, 23 nt, Artificial Sequence
  Synthetic
agaaaacagcacaggauaaugaa

SEQ ID NO: 189175 - RNA, 24 nt, Artificial Sequence
  Synthetic
gagaaaacagcacaggauaaugaa

SEQ ID NO: 189176 - RNA, 18 nt, Artificial Sequence
  Synthetic
agaaaaagugauaaugaa

SEQ ID NO: 189177 - RNA, 19 nt, Artificial Sequence
  Synthetic
gagaaaaagugauaaugaa

SEQ ID NO: 189178 - RNA, 20 nt, Artificial Sequence
  Synthetic
agagaaaaagugauaaugaa

SEQ ID NO: 189179 - RNA, 21 nt, Artificial Sequence
  Synthetic
uagagaaaaagugauaaugaa

SEQ ID NO: 189180 - RNA, 22 nt, Artificial Sequence
  Synthetic
cuagagaaaaagugauaaugaa

SEQ ID NO: 189181 - RNA, 23 nt, Artificial Sequence
  Synthetic
ucuagagaaaaagugauaaugaa

SEQ ID NO: 189182 - RNA, 24 nt, Artificial Sequence
  Synthetic
gucuagagaaaaagugauaaugaa

SEQ ID NO: 189183 - RNA, 18 nt, Artificial Sequence
  Synthetic
agagcuaaauauaaugaa

SEQ ID NO: 189184 - RNA, 19 nt, Artificial Sequence
  Synthetic
cagagcuaaauauaaugaa

SEQ ID NO: 189185 - RNA, 20 nt, Artificial Sequence
  Synthetic
acagagcuaaauauaaugaa

SEQ ID NO: 189186 - RNA, 21 nt, Artificial Sequence
  Synthetic
aacagagcuaaauauaaugaa

SEQ ID NO: 189187 - RNA, 22 nt, Artificial Sequence
  Synthetic
uaacagagcuaaauauaaugaa

SEQ ID NO: 189188 - RNA, 23 nt, Artificial Sequence
  Synthetic
guaacagagcuaaauauaaugaa

SEQ ID NO: 189189 - RNA, 24 nt, Artificial Sequence
  Synthetic
uguaacagagcuaaauauaaugaa

SEQ ID NO: 189190 - RNA, 18 nt, Artificial Sequence
  Synthetic
uggguaauuuauaaugaa

SEQ ID NO: 189191 - RNA, 19 nt, Artificial Sequence
  Synthetic
cuggguaauuuauaaugaa

SEQ ID NO: 189192 - RNA, 20 nt, Artificial Sequence
  Synthetic
acuggguaauuuauaaugaa

SEQ ID NO: 189193 - RNA, 21 nt, Artificial Sequence
  Synthetic
gacuggguaauuuauaaugaa

SEQ ID NO: 189194 - RNA, 22 nt, Artificial Sequence
  Synthetic
agacuggguaauuuauaaugaa

SEQ ID NO: 189195 - RNA, 23 nt, Artificial Sequence
  Synthetic
cagacuggguaauuuauaaugaa

SEQ ID NO: 189196 - RNA, 24 nt, Artificial Sequence
  Synthetic
acagacuggguaauuuauaaugaa

SEQ ID NO: 189197 - RNA, 18 nt, Artificial Sequence
  Synthetic
ggauuuccuacuaaugaa

SEQ ID NO: 189198 - RNA, 19 nt, Artificial Sequence
  Synthetic
gggauuuccuacuaaugaa

SEQ ID NO: 189199 - RNA, 20 nt, Artificial Sequence
  Synthetic
ugggauuuccuacuaaugaa

SEQ ID NO: 189200 - RNA, 21 nt, Artificial Sequence
  Synthetic
uugggauuuccuacuaaugaa

SEQ ID NO: 189201 - RNA, 22 nt, Artificial Sequence
  Synthetic
uuugggauuuccuacuaaugaa

SEQ ID NO: 189202 - RNA, 23 nt, Artificial Sequence
  Synthetic
auuugggauuuccuacuaaugaa

SEQ ID NO: 189203 - RNA, 24 nt, Artificial Sequence
  Synthetic
aauuugggauuuccuacuaaugaa

SEQ ID NO: 189204 - RNA, 18 nt, Artificial Sequence
  Synthetic
auucaacaaguuaaugaa

SEQ ID NO: 189205 - RNA, 19 nt, Artificial Sequence
  Synthetic
aauucaacaaguuaaugaa

SEQ ID NO: 189206 - RNA, 20 nt, Artificial Sequence
  Synthetic
caauucaacaaguuaaugaa

SEQ ID NO: 189207 - RNA, 21 nt, Artificial Sequence
  Synthetic
acaauucaacaaguuaaugaa

SEQ ID NO: 189208 - RNA, 22 nt, Artificial Sequence
  Synthetic
aacaauucaacaaguuaaugaa

SEQ ID NO: 189209 - RNA, 23 nt, Artificial Sequence
  Synthetic
aaacaauucaacaaguuaaugaa

SEQ ID NO: 189210 - RNA, 24 nt, Artificial Sequence
  Synthetic
uaaacaauucaacaaguuaaugaa

SEQ ID NO: 189211 - RNA, 18 nt, Artificial Sequence
  Synthetic
cagacaacauuuaaugaa

SEQ ID NO: 189212 - RNA, 19 nt, Artificial Sequence
  Synthetic
ucagacaacauuuaaugaa

SEQ ID NO: 189213 - RNA, 20 nt, Artificial Sequence
  Synthetic
aucagacaacauuuaaugaa

SEQ ID NO: 189214 - RNA, 21 nt, Artificial Sequence
  Synthetic
aaucagacaacauuuaaugaa

SEQ ID NO: 189215 - RNA, 22 nt, Artificial Sequence
  Synthetic
uaaucagacaacauuuaaugaa

SEQ ID NO: 189216 - RNA, 23 nt, Artificial Sequence
  Synthetic
auaaucagacaacauuuaaugaa

SEQ ID NO: 189217 - RNA, 24 nt, Artificial Sequence
  Synthetic
uauaaucagacaacauuuaaugaa

SEQ ID NO: 189218 - RNA, 18 nt, Artificial Sequence
  Synthetic
cuauaugggaaacaugaa

SEQ ID NO: 189219 - RNA, 19 nt, Artificial Sequence
  Synthetic
ccuauaugggaaacaugaa

SEQ ID NO: 189220 - RNA, 20 nt, Artificial Sequence
  Synthetic
cccuauaugggaaacaugaa

SEQ ID NO: 189221 - RNA, 21 nt, Artificial Sequence
  Synthetic
ucccuauaugggaaacaugaa

SEQ ID NO: 189222 - RNA, 22 nt, Artificial Sequence
  Synthetic
aucccuauaugggaaacaugaa

SEQ ID NO: 189223 - RNA, 23 nt, Artificial Sequence
  Synthetic
uaucccuauaugggaaacaugaa

SEQ ID NO: 189224 - RNA, 24 nt, Artificial Sequence
  Synthetic
cuaucccuauaugggaaacaugaa

SEQ ID NO: 189225 - RNA, 18 nt, Artificial Sequence
  Synthetic
agauagaaccaacaugaa

SEQ ID NO: 189226 - RNA, 19 nt, Artificial Sequence
  Synthetic
cagauagaaccaacaugaa

SEQ ID NO: 189227 - RNA, 20 nt, Artificial Sequence
  Synthetic
gcagauagaaccaacaugaa

SEQ ID NO: 189228 - RNA, 21 nt, Artificial Sequence
  Synthetic
agcagauagaaccaacaugaa

SEQ ID NO: 189229 - RNA, 22 nt, Artificial Sequence
  Synthetic
gagcagauagaaccaacaugaa

SEQ ID NO: 189230 - RNA, 23 nt, Artificial Sequence
  Synthetic
ugagcagauagaaccaacaugaa

SEQ ID NO: 189231 - RNA, 24 nt, Artificial Sequence
  Synthetic
augagcagauagaaccaacaugaa

SEQ ID NO: 189232 - RNA, 18 nt, Artificial Sequence
  Synthetic
cagagcccauaacaugaa

SEQ ID NO: 189233 - RNA, 19 nt, Artificial Sequence
  Synthetic
acagagcccauaacaugaa

SEQ ID NO: 189234 - RNA, 20 nt, Artificial Sequence
  Synthetic
uacagagcccauaacaugaa

SEQ ID NO: 189235 - RNA, 21 nt, Artificial Sequence
  Synthetic
cuacagagcccauaacaugaa

SEQ ID NO: 189236 - RNA, 22 nt, Artificial Sequence
  Synthetic
gcuacagagcccauaacaugaa

SEQ ID NO: 189237 - RNA, 23 nt, Artificial Sequence
  Synthetic
agcuacagagcccauaacaugaa

SEQ ID NO: 189238 - RNA, 24 nt, Artificial Sequence
  Synthetic
uagcuacagagcccauaacaugaa

SEQ ID NO: 189239 - RNA, 18 nt, Artificial Sequence
  Synthetic
acuuuauaaagacaugaa

SEQ ID NO: 189240 - RNA, 19 nt, Artificial Sequence
  Synthetic
aacuuuauaaagacaugaa

SEQ ID NO: 189241 - RNA, 20 nt, Artificial Sequence
  Synthetic
gaacuuuauaaagacaugaa

SEQ ID NO: 189242 - RNA, 21 nt, Artificial Sequence
  Synthetic
ggaacuuuauaaagacaugaa

SEQ ID NO: 189243 - RNA, 22 nt, Artificial Sequence
  Synthetic
aggaacuuuauaaagacaugaa

SEQ ID NO: 189244 - RNA, 23 nt, Artificial Sequence
  Synthetic
uaggaacuuuauaaagacaugaa

SEQ ID NO: 189245 - RNA, 24 nt, Artificial Sequence
  Synthetic
cuaggaacuuuauaaagacaugaa

SEQ ID NO: 189246 - RNA, 18 nt, Artificial Sequence
  Synthetic
gugaccuuucuacaugaa

SEQ ID NO: 189247 - RNA, 19 nt, Artificial Sequence
  Synthetic
ugugaccuuucuacaugaa

SEQ ID NO: 189248 - RNA, 20 nt, Artificial Sequence
  Synthetic
uugugaccuuucuacaugaa

SEQ ID NO: 189249 - RNA, 21 nt, Artificial Sequence
  Synthetic
auugugaccuuucuacaugaa

SEQ ID NO: 189250 - RNA, 22 nt, Artificial Sequence
  Synthetic
gauugugaccuuucuacaugaa

SEQ ID NO: 189251 - RNA, 23 nt, Artificial Sequence
  Synthetic
agauugugaccuuucuacaugaa

SEQ ID NO: 189252 - RNA, 24 nt, Artificial Sequence
  Synthetic
uagauugugaccuuucuacaugaa

SEQ ID NO: 189253 - RNA, 18 nt, Artificial Sequence
  Synthetic
aucaucccucaccaugaa

SEQ ID NO: 189254 - RNA, 19 nt, Artificial Sequence
  Synthetic
aaucaucccucaccaugaa

SEQ ID NO: 189255 - RNA, 20 nt, Artificial Sequence
  Synthetic
uaaucaucccucaccaugaa

SEQ ID NO: 189256 - RNA, 21 nt, Artificial Sequence
  Synthetic
auaaucaucccucaccaugaa

SEQ ID NO: 189257 - RNA, 22 nt, Artificial Sequence
  Synthetic
aauaaucaucccucaccaugaa

SEQ ID NO: 189258 - RNA, 23 nt, Artificial Sequence
  Synthetic
gaauaaucaucccucaccaugaa

SEQ ID NO: 189259 - RNA, 24 nt, Artificial Sequence
  Synthetic
agaauaaucaucccucaccaugaa

SEQ ID NO: 189260 - RNA, 18 nt, Artificial Sequence
  Synthetic
ucaaguggagaccaugaa

SEQ ID NO: 189261 - RNA, 19 nt, Artificial Sequence
  Synthetic
cucaaguggagaccaugaa

SEQ ID NO: 189262 - RNA, 20 nt, Artificial Sequence
  Synthetic
acucaaguggagaccaugaa

SEQ ID NO: 189263 - RNA, 21 nt, Artificial Sequence
  Synthetic
uacucaaguggagaccaugaa

SEQ ID NO: 189264 - RNA, 22 nt, Artificial Sequence
  Synthetic
uuacucaaguggagaccaugaa

SEQ ID NO: 189265 - RNA, 23 nt, Artificial Sequence
  Synthetic
auuacucaaguggagaccaugaa

SEQ ID NO: 189266 - RNA, 24 nt, Artificial Sequence
  Synthetic
cauuacucaaguggagaccaugaa

SEQ ID NO: 189267 - RNA, 18 nt, Artificial Sequence
  Synthetic
uacgguauuuaccaugaa

SEQ ID NO: 189268 - RNA, 19 nt, Artificial Sequence
  Synthetic
auacgguauuuaccaugaa

SEQ ID NO: 189269 - RNA, 20 nt, Artificial Sequence
  Synthetic
cauacgguauuuaccaugaa

SEQ ID NO: 189270 - RNA, 21 nt, Artificial Sequence
  Synthetic
gcauacgguauuuaccaugaa

SEQ ID NO: 189271 - RNA, 22 nt, Artificial Sequence
  Synthetic
ugcauacgguauuuaccaugaa

SEQ ID NO: 189272 - RNA, 23 nt, Artificial Sequence
  Synthetic
cugcauacgguauuuaccaugaa

SEQ ID NO: 189273 - RNA, 24 nt, Artificial Sequence
  Synthetic
gcugcauacgguauuuaccaugaa

SEQ ID NO: 189274 - RNA, 18 nt, Artificial Sequence
  Synthetic
gaauuuuguccccaugaa

SEQ ID NO: 189275 - RNA, 19 nt, Artificial Sequence
  Synthetic
cgaauuuuguccccaugaa

SEQ ID NO: 189276 - RNA, 20 nt, Artificial Sequence
  Synthetic
acgaauuuuguccccaugaa

SEQ ID NO: 189277 - RNA, 21 nt, Artificial Sequence
  Synthetic
aacgaauuuuguccccaugaa

SEQ ID NO: 189278 - RNA, 22 nt, Artificial Sequence
  Synthetic
aaacgaauuuuguccccaugaa

SEQ ID NO: 189279 - RNA, 23 nt, Artificial Sequence
  Synthetic
aaaacgaauuuuguccccaugaa

SEQ ID NO: 189280 - RNA, 24 nt, Artificial Sequence
  Synthetic
uaaaacgaauuuuguccccaugaa

SEQ ID NO: 189281 - RNA, 18 nt, Artificial Sequence
  Synthetic
gugcagugaucccaugaa

SEQ ID NO: 189282 - RNA, 19 nt, Artificial Sequence
  Synthetic
agugcagugaucccaugaa

SEQ ID NO: 189283 - RNA, 20 nt, Artificial Sequence
  Synthetic
uagugcagugaucccaugaa

SEQ ID NO: 189284 - RNA, 21 nt, Artificial Sequence
  Synthetic
uuagugcagugaucccaugaa

SEQ ID NO: 189285 - RNA, 22 nt, Artificial Sequence
  Synthetic
uuuagugcagugaucccaugaa

SEQ ID NO: 189286 - RNA, 23 nt, Artificial Sequence
  Synthetic
uuuuagugcagugaucccaugaa

SEQ ID NO: 189287 - RNA, 24 nt, Artificial Sequence
  Synthetic
guuuuagugcagugaucccaugaa

SEQ ID NO: 189288 - RNA, 18 nt, Artificial Sequence
  Synthetic
guaauuuauagccaugaa

SEQ ID NO: 189289 - RNA, 19 nt, Artificial Sequence
  Synthetic
uguaauuuauagccaugaa

SEQ ID NO: 189290 - RNA, 20 nt, Artificial Sequence
  Synthetic
auguaauuuauagccaugaa

SEQ ID NO: 189291 - RNA, 21 nt, Artificial Sequence
  Synthetic
aauguaauuuauagccaugaa

SEQ ID NO: 189292 - RNA, 22 nt, Artificial Sequence
  Synthetic
aaauguaauuuauagccaugaa

SEQ ID NO: 189293 - RNA, 23 nt, Artificial Sequence
  Synthetic
gaaauguaauuuauagccaugaa

SEQ ID NO: 189294 - RNA, 24 nt, Artificial Sequence
  Synthetic
ugaaauguaauuuauagccaugaa

SEQ ID NO: 189295 - RNA, 18 nt, Artificial Sequence
  Synthetic
ucauauccucuccaugaa

SEQ ID NO: 189296 - RNA, 19 nt, Artificial Sequence
  Synthetic
aucauauccucuccaugaa

SEQ ID NO: 189297 - RNA, 20 nt, Artificial Sequence
  Synthetic
aaucauauccucuccaugaa

SEQ ID NO: 189298 - RNA, 21 nt, Artificial Sequence
  Synthetic
uaaucauauccucuccaugaa

SEQ ID NO: 189299 - RNA, 22 nt, Artificial Sequence
  Synthetic
cuaaucauauccucuccaugaa

SEQ ID NO: 189300 - RNA, 23 nt, Artificial Sequence
  Synthetic
ucuaaucauauccucuccaugaa

SEQ ID NO: 189301 - RNA, 24 nt, Artificial Sequence
  Synthetic
uucuaaucauauccucuccaugaa

SEQ ID NO: 189302 - RNA, 18 nt, Artificial Sequence
  Synthetic
aaauaaacaaagcaugaa

SEQ ID NO: 189303 - RNA, 19 nt, Artificial Sequence
  Synthetic
aaaauaaacaaagcaugaa

SEQ ID NO: 189304 - RNA, 20 nt, Artificial Sequence
  Synthetic
gaaaauaaacaaagcaugaa

SEQ ID NO: 189305 - RNA, 21 nt, Artificial Sequence
  Synthetic
agaaaauaaacaaagcaugaa

SEQ ID NO: 189306 - RNA, 22 nt, Artificial Sequence
  Synthetic
gagaaaauaaacaaagcaugaa

SEQ ID NO: 189307 - RNA, 23 nt, Artificial Sequence
  Synthetic
agagaaaauaaacaaagcaugaa

SEQ ID NO: 189308 - RNA, 24 nt, Artificial Sequence
  Synthetic
aagagaaaauaaacaaagcaugaa

SEQ ID NO: 189309 - RNA, 18 nt, Artificial Sequence
  Synthetic
aaugaaauaaagcaugaa

SEQ ID NO: 189310 - RNA, 19 nt, Artificial Sequence
  Synthetic
uaaugaaauaaagcaugaa

SEQ ID NO: 189311 - RNA, 20 nt, Artificial Sequence
  Synthetic
uuaaugaaauaaagcaugaa

SEQ ID NO: 189312 - RNA, 21 nt, Artificial Sequence
  Synthetic
cuuaaugaaauaaagcaugaa

SEQ ID NO: 189313 - RNA, 22 nt, Artificial Sequence
  Synthetic
acuuaaugaaauaaagcaugaa

SEQ ID NO: 189314 - RNA, 23 nt, Artificial Sequence
  Synthetic
aacuuaaugaaauaaagcaugaa

SEQ ID NO: 189315 - RNA, 24 nt, Artificial Sequence
  Synthetic
caacuuaaugaaauaaagcaugaa

SEQ ID NO: 189316 - RNA, 18 nt, Artificial Sequence
  Synthetic
uguaacugaaaucaugaa

SEQ ID NO: 189317 - RNA, 19 nt, Artificial Sequence
  Synthetic
guguaacugaaaucaugaa

SEQ ID NO: 189318 - RNA, 20 nt, Artificial Sequence
  Synthetic
aguguaacugaaaucaugaa

SEQ ID NO: 189319 - RNA, 21 nt, Artificial Sequence
  Synthetic
gaguguaacugaaaucaugaa

SEQ ID NO: 189320 - RNA, 22 nt, Artificial Sequence
  Synthetic
ugaguguaacugaaaucaugaa

SEQ ID NO: 189321 - RNA, 23 nt, Artificial Sequence
  Synthetic
augaguguaacugaaaucaugaa

SEQ ID NO: 189322 - RNA, 24 nt, Artificial Sequence
  Synthetic
caugaguguaacugaaaucaugaa

SEQ ID NO: 189323 - RNA, 18 nt, Artificial Sequence
  Synthetic
gagagcgaugaucaugaa

SEQ ID NO: 189324 - RNA, 19 nt, Artificial Sequence
  Synthetic
agagagcgaugaucaugaa

SEQ ID NO: 189325 - RNA, 20 nt, Artificial Sequence
  Synthetic
uagagagcgaugaucaugaa

SEQ ID NO: 189326 - RNA, 21 nt, Artificial Sequence
  Synthetic
uuagagagcgaugaucaugaa

SEQ ID NO: 189327 - RNA, 22 nt, Artificial Sequence
  Synthetic
auuagagagcgaugaucaugaa

SEQ ID NO: 189328 - RNA, 23 nt, Artificial Sequence
  Synthetic
aauuagagagcgaugaucaugaa

SEQ ID NO: 189329 - RNA, 24 nt, Artificial Sequence
  Synthetic
gaauuagagagcgaugaucaugaa

SEQ ID NO: 189330 - RNA, 18 nt, Artificial Sequence
  Synthetic
gugauaugaugucaugaa

SEQ ID NO: 189331 - RNA, 19 nt, Artificial Sequence
  Synthetic
ugugauaugaugucaugaa

SEQ ID NO: 189332 - RNA, 20 nt, Artificial Sequence
  Synthetic
cugugauaugaugucaugaa

SEQ ID NO: 189333 - RNA, 21 nt, Artificial Sequence
  Synthetic
ccugugauaugaugucaugaa

SEQ ID NO: 189334 - RNA, 22 nt, Artificial Sequence
  Synthetic
uccugugauaugaugucaugaa

SEQ ID NO: 189335 - RNA, 23 nt, Artificial Sequence
  Synthetic
cuccugugauaugaugucaugaa

SEQ ID NO: 189336 - RNA, 24 nt, Artificial Sequence
  Synthetic
ucuccugugauaugaugucaugaa

SEQ ID NO: 189337 - RNA, 18 nt, Artificial Sequence
  Synthetic
auauuccauguucaugaa

SEQ ID NO: 189338 - RNA, 19 nt, Artificial Sequence
  Synthetic
cauauuccauguucaugaa

SEQ ID NO: 189339 - RNA, 20 nt, Artificial Sequence
  Synthetic
ccauauuccauguucaugaa

SEQ ID NO: 189340 - RNA, 21 nt, Artificial Sequence
  Synthetic
accauauuccauguucaugaa

SEQ ID NO: 189341 - RNA, 22 nt, Artificial Sequence
  Synthetic
gaccauauuccauguucaugaa

SEQ ID NO: 189342 - RNA, 23 nt, Artificial Sequence
  Synthetic
ggaccauauuccauguucaugaa

SEQ ID NO: 189343 - RNA, 24 nt, Artificial Sequence
  Synthetic
gggaccauauuccauguucaugaa

SEQ ID NO: 189344 - RNA, 18 nt, Artificial Sequence
  Synthetic
aagccugauuuucaugaa

SEQ ID NO: 189345 - RNA, 19 nt, Artificial Sequence
  Synthetic
gaagccugauuuucaugaa

SEQ ID NO: 189346 - RNA, 20 nt, Artificial Sequence
  Synthetic
agaagccugauuuucaugaa

SEQ ID NO: 189347 - RNA, 21 nt, Artificial Sequence
  Synthetic
cagaagccugauuuucaugaa

SEQ ID NO: 189348 - RNA, 22 nt, Artificial Sequence
  Synthetic
gcagaagccugauuuucaugaa

SEQ ID NO: 189349 - RNA, 23 nt, Artificial Sequence
  Synthetic
ggcagaagccugauuuucaugaa

SEQ ID NO: 189350 - RNA, 24 nt, Artificial Sequence
  Synthetic
uggcagaagccugauuuucaugaa

SEQ ID NO: 189351 - RNA, 18 nt, Artificial Sequence
  Synthetic
caaggagggaaagaugaa

SEQ ID NO: 189352 - RNA, 19 nt, Artificial Sequence
  Synthetic
ccaaggagggaaagaugaa

SEQ ID NO: 189353 - RNA, 20 nt, Artificial Sequence
  Synthetic
gccaaggagggaaagaugaa

SEQ ID NO: 189354 - RNA, 21 nt, Artificial Sequence
  Synthetic
ugccaaggagggaaagaugaa

SEQ ID NO: 189355 - RNA, 22 nt, Artificial Sequence
  Synthetic
cugccaaggagggaaagaugaa

SEQ ID NO: 189356 - RNA, 23 nt, Artificial Sequence
  Synthetic
ccugccaaggagggaaagaugaa

SEQ ID NO: 189357 - RNA, 24 nt, Artificial Sequence
  Synthetic
uccugccaaggagggaaagaugaa

SEQ ID NO: 189358 - RNA, 18 nt, Artificial Sequence
  Synthetic
uaacacuuguaagaugaa

SEQ ID NO: 189359 - RNA, 19 nt, Artificial Sequence
  Synthetic
uuaacacuuguaagaugaa

SEQ ID NO: 189360 - RNA, 20 nt, Artificial Sequence
  Synthetic
auuaacacuuguaagaugaa

SEQ ID NO: 189361 - RNA, 21 nt, Artificial Sequence
  Synthetic
uauuaacacuuguaagaugaa

SEQ ID NO: 189362 - RNA, 22 nt, Artificial Sequence
  Synthetic
uuauuaacacuuguaagaugaa

SEQ ID NO: 189363 - RNA, 23 nt, Artificial Sequence
  Synthetic
auuauuaacacuuguaagaugaa

SEQ ID NO: 189364 - RNA, 24 nt, Artificial Sequence
  Synthetic
uauuauuaacacuuguaagaugaa

SEQ ID NO: 189365 - RNA, 18 nt, Artificial Sequence
  Synthetic
aaugugucuucagaugaa

SEQ ID NO: 189366 - RNA, 19 nt, Artificial Sequence
  Synthetic
aaaugugucuucagaugaa

SEQ ID NO: 189367 - RNA, 20 nt, Artificial Sequence
  Synthetic
caaaugugucuucagaugaa

SEQ ID NO: 189368 - RNA, 21 nt, Artificial Sequence
  Synthetic
ccaaaugugucuucagaugaa

SEQ ID NO: 189369 - RNA, 22 nt, Artificial Sequence
  Synthetic
cccaaaugugucuucagaugaa

SEQ ID NO: 189370 - RNA, 23 nt, Artificial Sequence
  Synthetic
acccaaaugugucuucagaugaa

SEQ ID NO: 189371 - RNA, 24 nt, Artificial Sequence
  Synthetic
cacccaaaugugucuucagaugaa

SEQ ID NO: 189372 - RNA, 18 nt, Artificial Sequence
  Synthetic
ccugagcccagagaugaa

SEQ ID NO: 189373 - RNA, 19 nt, Artificial Sequence
  Synthetic
accugagcccagagaugaa

SEQ ID NO: 189374 - RNA, 20 nt, Artificial Sequence
  Synthetic
uaccugagcccagagaugaa

SEQ ID NO: 189375 - RNA, 21 nt, Artificial Sequence
  Synthetic
cuaccugagcccagagaugaa

SEQ ID NO: 189376 - RNA, 22 nt, Artificial Sequence
  Synthetic
ccuaccugagcccagagaugaa

SEQ ID NO: 189377 - RNA, 23 nt, Artificial Sequence
  Synthetic
gccuaccugagcccagagaugaa

SEQ ID NO: 189378 - RNA, 24 nt, Artificial Sequence
  Synthetic
agccuaccugagcccagagaugaa

SEQ ID NO: 189379 - RNA, 18 nt, Artificial Sequence
  Synthetic
uaagugccaggagaugaa

SEQ ID NO: 189380 - RNA, 19 nt, Artificial Sequence
  Synthetic
guaagugccaggagaugaa

SEQ ID NO: 189381 - RNA, 20 nt, Artificial Sequence
  Synthetic
gguaagugccaggagaugaa

SEQ ID NO: 189382 - RNA, 21 nt, Artificial Sequence
  Synthetic
agguaagugccaggagaugaa

SEQ ID NO: 189383 - RNA, 22 nt, Artificial Sequence
  Synthetic
gagguaagugccaggagaugaa

SEQ ID NO: 189384 - RNA, 23 nt, Artificial Sequence
  Synthetic
agagguaagugccaggagaugaa

SEQ ID NO: 189385 - RNA, 24 nt, Artificial Sequence
  Synthetic
gagagguaagugccaggagaugaa

SEQ ID NO: 189386 - RNA, 18 nt, Artificial Sequence
  Synthetic
aauccuccuuuagaugaa

SEQ ID NO: 189387 - RNA, 19 nt, Artificial Sequence
  Synthetic
caauccuccuuuagaugaa

SEQ ID NO: 189388 - RNA, 20 nt, Artificial Sequence
  Synthetic
gcaauccuccuuuagaugaa

SEQ ID NO: 189389 - RNA, 21 nt, Artificial Sequence
  Synthetic
ggcaauccuccuuuagaugaa

SEQ ID NO: 189390 - RNA, 22 nt, Artificial Sequence
  Synthetic
aggcaauccuccuuuagaugaa

SEQ ID NO: 189391 - RNA, 23 nt, Artificial Sequence
  Synthetic
caggcaauccuccuuuagaugaa

SEQ ID NO: 189392 - RNA, 24 nt, Artificial Sequence
  Synthetic
acaggcaauccuccuuuagaugaa

SEQ ID NO: 189393 - RNA, 18 nt, Artificial Sequence
  Synthetic
cguccaucaguggaugaa

SEQ ID NO: 189394 - RNA, 19 nt, Artificial Sequence
  Synthetic
acguccaucaguggaugaa

SEQ ID NO: 189395 - RNA, 20 nt, Artificial Sequence
  Synthetic
aacguccaucaguggaugaa

SEQ ID NO: 189396 - RNA, 21 nt, Artificial Sequence
  Synthetic
aaacguccaucaguggaugaa

SEQ ID NO: 189397 - RNA, 22 nt, Artificial Sequence
  Synthetic
uaaacguccaucaguggaugaa

SEQ ID NO: 189398 - RNA, 23 nt, Artificial Sequence
  Synthetic
cuaaacguccaucaguggaugaa

SEQ ID NO: 189399 - RNA, 24 nt, Artificial Sequence
  Synthetic
ccuaaacguccaucaguggaugaa

SEQ ID NO: 189400 - RNA, 18 nt, Artificial Sequence
  Synthetic
aguauaaaugaugaugaa

SEQ ID NO: 189401 - RNA, 19 nt, Artificial Sequence
  Synthetic
gaguauaaaugaugaugaa

SEQ ID NO: 189402 - RNA, 20 nt, Artificial Sequence
  Synthetic
agaguauaaaugaugaugaa

SEQ ID NO: 189403 - RNA, 21 nt, Artificial Sequence
  Synthetic
aagaguauaaaugaugaugaa

SEQ ID NO: 189404 - RNA, 22 nt, Artificial Sequence
  Synthetic
gaagaguauaaaugaugaugaa

SEQ ID NO: 189405 - RNA, 23 nt, Artificial Sequence
  Synthetic
ugaagaguauaaaugaugaugaa

SEQ ID NO: 189406 - RNA, 24 nt, Artificial Sequence
  Synthetic
augaagaguauaaaugaugaugaa

SEQ ID NO: 189407 - RNA, 18 nt, Artificial Sequence
  Synthetic
gccucagaauaugaugaa

SEQ ID NO: 189408 - RNA, 19 nt, Artificial Sequence
  Synthetic
agccucagaauaugaugaa

SEQ ID NO: 189409 - RNA, 20 nt, Artificial Sequence
  Synthetic
cagccucagaauaugaugaa

SEQ ID NO: 189410 - RNA, 21 nt, Artificial Sequence
  Synthetic
ucagccucagaauaugaugaa

SEQ ID NO: 189411 - RNA, 22 nt, Artificial Sequence
  Synthetic
uucagccucagaauaugaugaa

SEQ ID NO: 189412 - RNA, 23 nt, Artificial Sequence
  Synthetic
uuucagccucagaauaugaugaa

SEQ ID NO: 189413 - RNA, 24 nt, Artificial Sequence
  Synthetic
uuuucagccucagaauaugaugaa

SEQ ID NO: 189414 - RNA, 18 nt, Artificial Sequence
  Synthetic
uugucgauaucugaugaa

SEQ ID NO: 189415 - RNA, 19 nt, Artificial Sequence
  Synthetic
guugucgauaucugaugaa

SEQ ID NO: 189416 - RNA, 20 nt, Artificial Sequence
  Synthetic
aguugucgauaucugaugaa

SEQ ID NO: 189417 - RNA, 21 nt, Artificial Sequence
  Synthetic
aaguugucgauaucugaugaa

SEQ ID NO: 189418 - RNA, 22 nt, Artificial Sequence
  Synthetic
aaaguugucgauaucugaugaa

SEQ ID NO: 189419 - RNA, 23 nt, Artificial Sequence
  Synthetic
aaaaguugucgauaucugaugaa

SEQ ID NO: 189420 - RNA, 24 nt, Artificial Sequence
  Synthetic
uaaaaguugucgauaucugaugaa

SEQ ID NO: 189421 - RNA, 18 nt, Artificial Sequence
  Synthetic
aaugucucaguugaugaa

SEQ ID NO: 189422 - RNA, 19 nt, Artificial Sequence
  Synthetic
aaaugucucaguugaugaa

SEQ ID NO: 189423 - RNA, 20 nt, Artificial Sequence
  Synthetic
uaaaugucucaguugaugaa

SEQ ID NO: 189424 - RNA, 21 nt, Artificial Sequence
  Synthetic
auaaaugucucaguugaugaa

SEQ ID NO: 189425 - RNA, 22 nt, Artificial Sequence
  Synthetic
aauaaaugucucaguugaugaa

SEQ ID NO: 189426 - RNA, 23 nt, Artificial Sequence
  Synthetic
aaauaaaugucucaguugaugaa

SEQ ID NO: 189427 - RNA, 24 nt, Artificial Sequence
  Synthetic
aaaauaaaugucucaguugaugaa

SEQ ID NO: 189428 - RNA, 18 nt, Artificial Sequence
  Synthetic
agcuauuuaaaauaugaa

SEQ ID NO: 189429 - RNA, 19 nt, Artificial Sequence
  Synthetic
aagcuauuuaaaauaugaa

SEQ ID NO: 189430 - RNA, 20 nt, Artificial Sequence
  Synthetic
caagcuauuuaaaauaugaa

SEQ ID NO: 189431 - RNA, 21 nt, Artificial Sequence
  Synthetic
ucaagcuauuuaaaauaugaa

SEQ ID NO: 189432 - RNA, 22 nt, Artificial Sequence
  Synthetic
aucaagcuauuuaaaauaugaa

SEQ ID NO: 189433 - RNA, 23 nt, Artificial Sequence
  Synthetic
caucaagcuauuuaaaauaugaa

SEQ ID NO: 189434 - RNA, 24 nt, Artificial Sequence
  Synthetic
ucaucaagcuauuuaaaauaugaa

SEQ ID NO: 189435 - RNA, 18 nt, Artificial Sequence
  Synthetic
uggagggggaaauaugaa

SEQ ID NO: 189436 - RNA, 19 nt, Artificial Sequence
  Synthetic
guggagggggaaauaugaa

SEQ ID NO: 189437 - RNA, 20 nt, Artificial Sequence
  Synthetic
gguggagggggaaauaugaa

SEQ ID NO: 189438 - RNA, 21 nt, Artificial Sequence
  Synthetic
agguggagggggaaauaugaa

SEQ ID NO: 189439 - RNA, 22 nt, Artificial Sequence
  Synthetic
aagguggagggggaaauaugaa

SEQ ID NO: 189440 - RNA, 23 nt, Artificial Sequence
  Synthetic
aaagguggagggggaaauaugaa

SEQ ID NO: 189441 - RNA, 24 nt, Artificial Sequence
  Synthetic
gaaagguggagggggaaauaugaa

SEQ ID NO: 189442 - RNA, 18 nt, Artificial Sequence
  Synthetic
uuccaaggagaauaugaa

SEQ ID NO: 189443 - RNA, 19 nt, Artificial Sequence
  Synthetic
guuccaaggagaauaugaa

SEQ ID NO: 189444 - RNA, 20 nt, Artificial Sequence
  Synthetic
aguuccaaggagaauaugaa

SEQ ID NO: 189445 - RNA, 21 nt, Artificial Sequence
  Synthetic
caguuccaaggagaauaugaa

SEQ ID NO: 189446 - RNA, 22 nt, Artificial Sequence
  Synthetic
ucaguuccaaggagaauaugaa

SEQ ID NO: 189447 - RNA, 23 nt, Artificial Sequence
  Synthetic
uucaguuccaaggagaauaugaa

SEQ ID NO: 189448 - RNA, 24 nt, Artificial Sequence
  Synthetic
auucaguuccaaggagaauaugaa

SEQ ID NO: 189449 - RNA, 18 nt, Artificial Sequence
  Synthetic
cauaaagaguaauaugaa

SEQ ID NO: 189450 - RNA, 19 nt, Artificial Sequence
  Synthetic
acauaaagaguaauaugaa

SEQ ID NO: 189451 - RNA, 20 nt, Artificial Sequence
  Synthetic
aacauaaagaguaauaugaa

SEQ ID NO: 189452 - RNA, 21 nt, Artificial Sequence
  Synthetic
uaacauaaagaguaauaugaa

SEQ ID NO: 189453 - RNA, 22 nt, Artificial Sequence
  Synthetic
guaacauaaagaguaauaugaa

SEQ ID NO: 189454 - RNA, 23 nt, Artificial Sequence
  Synthetic
uguaacauaaagaguaauaugaa

SEQ ID NO: 189455 - RNA, 24 nt, Artificial Sequence
  Synthetic
uuguaacauaaagaguaauaugaa

SEQ ID NO: 189456 - RNA, 18 nt, Artificial Sequence
  Synthetic
uuucagaaaggauaugaa

SEQ ID NO: 189457 - RNA, 19 nt, Artificial Sequence
  Synthetic
cuuucagaaaggauaugaa

SEQ ID NO: 189458 - RNA, 20 nt, Artificial Sequence
  Synthetic
ucuuucagaaaggauaugaa

SEQ ID NO: 189459 - RNA, 21 nt, Artificial Sequence
  Synthetic
aucuuucagaaaggauaugaa

SEQ ID NO: 189460 - RNA, 22 nt, Artificial Sequence
  Synthetic
uaucuuucagaaaggauaugaa

SEQ ID NO: 189461 - RNA, 23 nt, Artificial Sequence
  Synthetic
uuaucuuucagaaaggauaugaa

SEQ ID NO: 189462 - RNA, 24 nt, Artificial Sequence
  Synthetic
uuuaucuuucagaaaggauaugaa

SEQ ID NO: 189463 - RNA, 18 nt, Artificial Sequence
  Synthetic
uauauauauauauaugaa

SEQ ID NO: 189464 - RNA, 19 nt, Artificial Sequence
  Synthetic
auauauauauauauaugaa

SEQ ID NO: 189465 - RNA, 20 nt, Artificial Sequence
  Synthetic
uauauauauauauauaugaa

SEQ ID NO: 189466 - RNA, 21 nt, Artificial Sequence
  Synthetic
auauauauauauauauaugaa

SEQ ID NO: 189467 - RNA, 22 nt, Artificial Sequence
  Synthetic
uauauauauauauauauaugaa

SEQ ID NO: 189468 - RNA, 23 nt, Artificial Sequence
  Synthetic
auauauauauauauauauaugaa

SEQ ID NO: 189469 - RNA, 24 nt, Artificial Sequence
  Synthetic
uauauauauauauauauauaugaa

SEQ ID NO: 189470 - RNA, 18 nt, Artificial Sequence
  Synthetic
uuucccauuauauaugaa

SEQ ID NO: 189471 - RNA, 19 nt, Artificial Sequence
  Synthetic
auuucccauuauauaugaa

SEQ ID NO: 189472 - RNA, 20 nt, Artificial Sequence
  Synthetic
cauuucccauuauauaugaa

SEQ ID NO: 189473 - RNA, 21 nt, Artificial Sequence
  Synthetic
ucauuucccauuauauaugaa

SEQ ID NO: 189474 - RNA, 22 nt, Artificial Sequence
  Synthetic
uucauuucccauuauauaugaa

SEQ ID NO: 189475 - RNA, 23 nt, Artificial Sequence
  Synthetic
cuucauuucccauuauauaugaa

SEQ ID NO: 189476 - RNA, 24 nt, Artificial Sequence
  Synthetic
acuucauuucccauuauauaugaa

SEQ ID NO: 189477 - RNA, 18 nt, Artificial Sequence
  Synthetic
gggugagugguauaugaa

SEQ ID NO: 189478 - RNA, 19 nt, Artificial Sequence
  Synthetic
agggugagugguauaugaa

SEQ ID NO: 189479 - RNA, 20 nt, Artificial Sequence
  Synthetic
uagggugagugguauaugaa

SEQ ID NO: 189480 - RNA, 21 nt, Artificial Sequence
  Synthetic
auagggugagugguauaugaa

SEQ ID NO: 189481 - RNA, 22 nt, Artificial Sequence
  Synthetic
uauagggugagugguauaugaa

SEQ ID NO: 189482 - RNA, 23 nt, Artificial Sequence
  Synthetic
guauagggugagugguauaugaa

SEQ ID NO: 189483 - RNA, 24 nt, Artificial Sequence
  Synthetic
gguauagggugagugguauaugaa

SEQ ID NO: 189484 - RNA, 18 nt, Artificial Sequence
  Synthetic
ugucuucaguuauaugaa

SEQ ID NO: 189485 - RNA, 19 nt, Artificial Sequence
  Synthetic
cugucuucaguuauaugaa

SEQ ID NO: 189486 - RNA, 20 nt, Artificial Sequence
  Synthetic
ucugucuucaguuauaugaa

SEQ ID NO: 189487 - RNA, 21 nt, Artificial Sequence
  Synthetic
gucugucuucaguuauaugaa

SEQ ID NO: 189488 - RNA, 22 nt, Artificial Sequence
  Synthetic
ugucugucuucaguuauaugaa

SEQ ID NO: 189489 - RNA, 23 nt, Artificial Sequence
  Synthetic
uugucugucuucaguuauaugaa

SEQ ID NO: 189490 - RNA, 24 nt, Artificial Sequence
  Synthetic
uuugucugucuucaguuauaugaa

SEQ ID NO: 189491 - RNA, 18 nt, Artificial Sequence
  Synthetic
uauuguucuuacuaugaa

SEQ ID NO: 189492 - RNA, 19 nt, Artificial Sequence
  Synthetic
uuauuguucuuacuaugaa

SEQ ID NO: 189493 - RNA, 20 nt, Artificial Sequence
  Synthetic
uuuauuguucuuacuaugaa

SEQ ID NO: 189494 - RNA, 21 nt, Artificial Sequence
  Synthetic
uuuuauuguucuuacuaugaa

SEQ ID NO: 189495 - RNA, 22 nt, Artificial Sequence
  Synthetic
cuuuuauuguucuuacuaugaa

SEQ ID NO: 189496 - RNA, 23 nt, Artificial Sequence
  Synthetic
acuuuuauuguucuuacuaugaa

SEQ ID NO: 189497 - RNA, 24 nt, Artificial Sequence
  Synthetic
aacuuuuauuguucuuacuaugaa

SEQ ID NO: 189498 - RNA, 18 nt, Artificial Sequence
  Synthetic
gguaguaagugcuaugaa

SEQ ID NO: 189499 - RNA, 19 nt, Artificial Sequence
  Synthetic
ggguaguaagugcuaugaa

SEQ ID NO: 189500 - RNA, 20 nt, Artificial Sequence
  Synthetic
uggguaguaagugcuaugaa

SEQ ID NO: 189501 - RNA, 21 nt, Artificial Sequence
  Synthetic
uuggguaguaagugcuaugaa

SEQ ID NO: 189502 - RNA, 22 nt, Artificial Sequence
  Synthetic
guuggguaguaagugcuaugaa

SEQ ID NO: 189503 - RNA, 23 nt, Artificial Sequence
  Synthetic
uguuggguaguaagugcuaugaa

SEQ ID NO: 189504 - RNA, 24 nt, Artificial Sequence
  Synthetic
auguuggguaguaagugcuaugaa

SEQ ID NO: 189505 - RNA, 18 nt, Artificial Sequence
  Synthetic
uagcuaaugugcuaugaa

SEQ ID NO: 189506 - RNA, 19 nt, Artificial Sequence
  Synthetic
guagcuaaugugcuaugaa

SEQ ID NO: 189507 - RNA, 20 nt, Artificial Sequence
  Synthetic
uguagcuaaugugcuaugaa

SEQ ID NO: 189508 - RNA, 21 nt, Artificial Sequence
  Synthetic
auguagcuaaugugcuaugaa

SEQ ID NO: 189509 - RNA, 22 nt, Artificial Sequence
  Synthetic
cauguagcuaaugugcuaugaa

SEQ ID NO: 189510 - RNA, 23 nt, Artificial Sequence
  Synthetic
gcauguagcuaaugugcuaugaa

SEQ ID NO: 189511 - RNA, 24 nt, Artificial Sequence
  Synthetic
agcauguagcuaaugugcuaugaa

SEQ ID NO: 189512 - RNA, 18 nt, Artificial Sequence
  Synthetic
gugcauuuacucuaugaa

SEQ ID NO: 189513 - RNA, 19 nt, Artificial Sequence
  Synthetic
ugugcauuuacucuaugaa

SEQ ID NO: 189514 - RNA, 20 nt, Artificial Sequence
  Synthetic
uugugcauuuacucuaugaa

SEQ ID NO: 189515 - RNA, 21 nt, Artificial Sequence
  Synthetic
uuugugcauuuacucuaugaa

SEQ ID NO: 189516 - RNA, 22 nt, Artificial Sequence
  Synthetic
uuuugugcauuuacucuaugaa

SEQ ID NO: 189517 - RNA, 23 nt, Artificial Sequence
  Synthetic
guuuugugcauuuacucuaugaa

SEQ ID NO: 189518 - RNA, 24 nt, Artificial Sequence
  Synthetic
aguuuugugcauuuacucuaugaa

SEQ ID NO: 189519 - RNA, 18 nt, Artificial Sequence
  Synthetic
cauuucaaagucuaugaa

SEQ ID NO: 189520 - RNA, 19 nt, Artificial Sequence
  Synthetic
acauuucaaagucuaugaa

SEQ ID NO: 189521 - RNA, 20 nt, Artificial Sequence
  Synthetic
cacauuucaaagucuaugaa

SEQ ID NO: 189522 - RNA, 21 nt, Artificial Sequence
  Synthetic
acacauuucaaagucuaugaa

SEQ ID NO: 189523 - RNA, 22 nt, Artificial Sequence
  Synthetic
uacacauuucaaagucuaugaa

SEQ ID NO: 189524 - RNA, 23 nt, Artificial Sequence
  Synthetic
cuacacauuucaaagucuaugaa

SEQ ID NO: 189525 - RNA, 24 nt, Artificial Sequence
  Synthetic
acuacacauuucaaagucuaugaa

SEQ ID NO: 189526 - RNA, 18 nt, Artificial Sequence
  Synthetic
aaucaguuuauguaugaa

SEQ ID NO: 189527 - RNA, 19 nt, Artificial Sequence
  Synthetic
aaaucaguuuauguaugaa

SEQ ID NO: 189528 - RNA, 20 nt, Artificial Sequence
  Synthetic
aaaaucaguuuauguaugaa

SEQ ID NO: 189529 - RNA, 21 nt, Artificial Sequence
  Synthetic
uaaaaucaguuuauguaugaa

SEQ ID NO: 189530 - RNA, 22 nt, Artificial Sequence
  Synthetic
auaaaaucaguuuauguaugaa

SEQ ID NO: 189531 - RNA, 23 nt, Artificial Sequence
  Synthetic
aauaaaaucaguuuauguaugaa

SEQ ID NO: 189532 - RNA, 24 nt, Artificial Sequence
  Synthetic
aaauaaaaucaguuuauguaugaa

SEQ ID NO: 189533 - RNA, 18 nt, Artificial Sequence
  Synthetic
cuucagucuuuguaugaa

SEQ ID NO: 189534 - RNA, 19 nt, Artificial Sequence
  Synthetic
acuucagucuuuguaugaa

SEQ ID NO: 189535 - RNA, 20 nt, Artificial Sequence
  Synthetic
gacuucagucuuuguaugaa

SEQ ID NO: 189536 - RNA, 21 nt, Artificial Sequence
  Synthetic
agacuucagucuuuguaugaa

SEQ ID NO: 189537 - RNA, 22 nt, Artificial Sequence
  Synthetic
uagacuucagucuuuguaugaa

SEQ ID NO: 189538 - RNA, 23 nt, Artificial Sequence
  Synthetic
guagacuucagucuuuguaugaa

SEQ ID NO: 189539 - RNA, 24 nt, Artificial Sequence
  Synthetic
uguagacuucagucuuuguaugaa

SEQ ID NO: 189540 - RNA, 18 nt, Artificial Sequence
  Synthetic
accacaaucacuuaugaa

SEQ ID NO: 189541 - RNA, 19 nt, Artificial Sequence
  Synthetic
gaccacaaucacuuaugaa

SEQ ID NO: 189542 - RNA, 20 nt, Artificial Sequence
  Synthetic
ugaccacaaucacuuaugaa

SEQ ID NO: 189543 - RNA, 21 nt, Artificial Sequence
  Synthetic
cugaccacaaucacuuaugaa

SEQ ID NO: 189544 - RNA, 22 nt, Artificial Sequence
  Synthetic
gcugaccacaaucacuuaugaa

SEQ ID NO: 189545 - RNA, 23 nt, Artificial Sequence
  Synthetic
ggcugaccacaaucacuuaugaa

SEQ ID NO: 189546 - RNA, 24 nt, Artificial Sequence
  Synthetic
uggcugaccacaaucacuuaugaa

SEQ ID NO: 189547 - RNA, 18 nt, Artificial Sequence
  Synthetic
gcgaagggaaaaacugaa

SEQ ID NO: 189548 - RNA, 19 nt, Artificial Sequence
  Synthetic
ugcgaagggaaaaacugaa

SEQ ID NO: 189549 - RNA, 20 nt, Artificial Sequence
  Synthetic
cugcgaagggaaaaacugaa

SEQ ID NO: 189550 - RNA, 21 nt, Artificial Sequence
  Synthetic
ucugcgaagggaaaaacugaa

SEQ ID NO: 189551 - RNA, 22 nt, Artificial Sequence
  Synthetic
gucugcgaagggaaaaacugaa

SEQ ID NO: 189552 - RNA, 23 nt, Artificial Sequence
  Synthetic
ugucugcgaagggaaaaacugaa

SEQ ID NO: 189553 - RNA, 24 nt, Artificial Sequence
  Synthetic
augucugcgaagggaaaaacugaa

SEQ ID NO: 189554 - RNA, 18 nt, Artificial Sequence
  Synthetic
auugcccugaaaacugaa

SEQ ID NO: 189555 - RNA, 19 nt, Artificial Sequence
  Synthetic
aauugcccugaaaacugaa

SEQ ID NO: 189556 - RNA, 20 nt, Artificial Sequence
  Synthetic
gaauugcccugaaaacugaa

SEQ ID NO: 189557 - RNA, 21 nt, Artificial Sequence
  Synthetic
agaauugcccugaaaacugaa

SEQ ID NO: 189558 - RNA, 22 nt, Artificial Sequence
  Synthetic
aagaauugcccugaaaacugaa

SEQ ID NO: 189559 - RNA, 23 nt, Artificial Sequence
  Synthetic
caagaauugcccugaaaacugaa

SEQ ID NO: 189560 - RNA, 24 nt, Artificial Sequence
  Synthetic
acaagaauugcccugaaaacugaa

SEQ ID NO: 189561 - RNA, 18 nt, Artificial Sequence
  Synthetic
uucuuucaaacaacugaa

SEQ ID NO: 189562 - RNA, 19 nt, Artificial Sequence
  Synthetic
cuucuuucaaacaacugaa

SEQ ID NO: 189563 - RNA, 20 nt, Artificial Sequence
  Synthetic
ucuucuuucaaacaacugaa

SEQ ID NO: 189564 - RNA, 21 nt, Artificial Sequence
  Synthetic
cucuucuuucaaacaacugaa

SEQ ID NO: 189565 - RNA, 22 nt, Artificial Sequence
  Synthetic
gcucuucuuucaaacaacugaa

SEQ ID NO: 189566 - RNA, 23 nt, Artificial Sequence
  Synthetic
ugcucuucuuucaaacaacugaa

SEQ ID NO: 189567 - RNA, 24 nt, Artificial Sequence
  Synthetic
cugcucuucuuucaaacaacugaa

SEQ ID NO: 189568 - RNA, 18 nt, Artificial Sequence
  Synthetic
caauagauaccaacugaa

SEQ ID NO: 189569 - RNA, 19 nt, Artificial Sequence
  Synthetic
acaauagauaccaacugaa

SEQ ID NO: 189570 - RNA, 20 nt, Artificial Sequence
  Synthetic
cacaauagauaccaacugaa

SEQ ID NO: 189571 - RNA, 21 nt, Artificial Sequence
  Synthetic
ccacaauagauaccaacugaa

SEQ ID NO: 189572 - RNA, 22 nt, Artificial Sequence
  Synthetic
cccacaauagauaccaacugaa

SEQ ID NO: 189573 - RNA, 23 nt, Artificial Sequence
  Synthetic
gcccacaauagauaccaacugaa

SEQ ID NO: 189574 - RNA, 24 nt, Artificial Sequence
  Synthetic
ugcccacaauagauaccaacugaa

SEQ ID NO: 189575 - RNA, 18 nt, Artificial Sequence
  Synthetic
auauauaaaagaacugaa

SEQ ID NO: 189576 - RNA, 19 nt, Artificial Sequence
  Synthetic
aauauauaaaagaacugaa

SEQ ID NO: 189577 - RNA, 20 nt, Artificial Sequence
  Synthetic
uaauauauaaaagaacugaa

SEQ ID NO: 189578 - RNA, 21 nt, Artificial Sequence
  Synthetic
guaauauauaaaagaacugaa

SEQ ID NO: 189579 - RNA, 22 nt, Artificial Sequence
  Synthetic
gguaauauauaaaagaacugaa

SEQ ID NO: 189580 - RNA, 23 nt, Artificial Sequence
  Synthetic
ggguaauauauaaaagaacugaa

SEQ ID NO: 189581 - RNA, 24 nt, Artificial Sequence
  Synthetic
aggguaauauauaaaagaacugaa

SEQ ID NO: 189582 - RNA, 18 nt, Artificial Sequence
  Synthetic
caaaggagaguaacugaa

SEQ ID NO: 189583 - RNA, 19 nt, Artificial Sequence
  Synthetic
acaaaggagaguaacugaa

SEQ ID NO: 189584 - RNA, 20 nt, Artificial Sequence
  Synthetic
uacaaaggagaguaacugaa

SEQ ID NO: 189585 - RNA, 21 nt, Artificial Sequence
  Synthetic
auacaaaggagaguaacugaa

SEQ ID NO: 189586 - RNA, 22 nt, Artificial Sequence
  Synthetic
aauacaaaggagaguaacugaa

SEQ ID NO: 189587 - RNA, 23 nt, Artificial Sequence
  Synthetic
aaauacaaaggagaguaacugaa

SEQ ID NO: 189588 - RNA, 24 nt, Artificial Sequence
  Synthetic
gaaauacaaaggagaguaacugaa

SEQ ID NO: 189589 - RNA, 18 nt, Artificial Sequence
  Synthetic
caucuccauuuaacugaa

SEQ ID NO: 189590 - RNA, 19 nt, Artificial Sequence
  Synthetic
ccaucuccauuuaacugaa

SEQ ID NO: 189591 - RNA, 20 nt, Artificial Sequence
  Synthetic
gccaucuccauuuaacugaa

SEQ ID NO: 189592 - RNA, 21 nt, Artificial Sequence
  Synthetic
agccaucuccauuuaacugaa

SEQ ID NO: 189593 - RNA, 22 nt, Artificial Sequence
  Synthetic
aagccaucuccauuuaacugaa

SEQ ID NO: 189594 - RNA, 23 nt, Artificial Sequence
  Synthetic
gaagccaucuccauuuaacugaa

SEQ ID NO: 189595 - RNA, 24 nt, Artificial Sequence
  Synthetic
agaagccaucuccauuuaacugaa

SEQ ID NO: 189596 - RNA, 18 nt, Artificial Sequence
  Synthetic
auaacuucuuuaacugaa

SEQ ID NO: 189597 - RNA, 19 nt, Artificial Sequence
  Synthetic
cauaacuucuuuaacugaa

SEQ ID NO: 189598 - RNA, 20 nt, Artificial Sequence
  Synthetic
gcauaacuucuuuaacugaa

SEQ ID NO: 189599 - RNA, 21 nt, Artificial Sequence
  Synthetic
ugcauaacuucuuuaacugaa

SEQ ID NO: 189600 - RNA, 22 nt, Artificial Sequence
  Synthetic
augcauaacuucuuuaacugaa

SEQ ID NO: 189601 - RNA, 23 nt, Artificial Sequence
  Synthetic
gaugcauaacuucuuuaacugaa

SEQ ID NO: 189602 - RNA, 24 nt, Artificial Sequence
  Synthetic
ggaugcauaacuucuuuaacugaa

SEQ ID NO: 189603 - RNA, 18 nt, Artificial Sequence
  Synthetic
cucaguccagccacugaa

SEQ ID NO: 189604 - RNA, 19 nt, Artificial Sequence
  Synthetic
ucucaguccagccacugaa

SEQ ID NO: 189605 - RNA, 20 nt, Artificial Sequence
  Synthetic
uucucaguccagccacugaa

SEQ ID NO: 189606 - RNA, 21 nt, Artificial Sequence
  Synthetic
cuucucaguccagccacugaa

SEQ ID NO: 189607 - RNA, 22 nt, Artificial Sequence
  Synthetic
ucuucucaguccagccacugaa

SEQ ID NO: 189608 - RNA, 23 nt, Artificial Sequence
  Synthetic
uucuucucaguccagccacugaa

SEQ ID NO: 189609 - RNA, 24 nt, Artificial Sequence
  Synthetic
cuucuucucaguccagccacugaa

SEQ ID NO: 189610 - RNA, 18 nt, Artificial Sequence
  Synthetic
auaggccaggccacugaa

SEQ ID NO: 189611 - RNA, 19 nt, Artificial Sequence
  Synthetic
uauaggccaggccacugaa

SEQ ID NO: 189612 - RNA, 20 nt, Artificial Sequence
  Synthetic
auauaggccaggccacugaa

SEQ ID NO: 189613 - RNA, 21 nt, Artificial Sequence
  Synthetic
cauauaggccaggccacugaa

SEQ ID NO: 189614 - RNA, 22 nt, Artificial Sequence
  Synthetic
gcauauaggccaggccacugaa

SEQ ID NO: 189615 - RNA, 23 nt, Artificial Sequence
  Synthetic
agcauauaggccaggccacugaa

SEQ ID NO: 189616 - RNA, 24 nt, Artificial Sequence
  Synthetic
uagcauauaggccaggccacugaa

SEQ ID NO: 189617 - RNA, 18 nt, Artificial Sequence
  Synthetic
gaguuucaaaucacugaa

SEQ ID NO: 189618 - RNA, 19 nt, Artificial Sequence
  Synthetic
ggaguuucaaaucacugaa

SEQ ID NO: 189619 - RNA, 20 nt, Artificial Sequence
  Synthetic
uggaguuucaaaucacugaa

SEQ ID NO: 189620 - RNA, 21 nt, Artificial Sequence
  Synthetic
cuggaguuucaaaucacugaa

SEQ ID NO: 189621 - RNA, 22 nt, Artificial Sequence
  Synthetic
acuggaguuucaaaucacugaa

SEQ ID NO: 189622 - RNA, 23 nt, Artificial Sequence
  Synthetic
cacuggaguuucaaaucacugaa

SEQ ID NO: 189623 - RNA, 24 nt, Artificial Sequence
  Synthetic
gcacuggaguuucaaaucacugaa

SEQ ID NO: 189624 - RNA, 18 nt, Artificial Sequence
  Synthetic
auuuucuccuucacugaa

SEQ ID NO: 189625 - RNA, 19 nt, Artificial Sequence
  Synthetic
aauuuucuccuucacugaa

SEQ ID NO: 189626 - RNA, 20 nt, Artificial Sequence
  Synthetic
caauuuucuccuucacugaa

SEQ ID NO: 189627 - RNA, 21 nt, Artificial Sequence
  Synthetic
ucaauuuucuccuucacugaa

SEQ ID NO: 189628 - RNA, 22 nt, Artificial Sequence
  Synthetic
uucaauuuucuccuucacugaa

SEQ ID NO: 189629 - RNA, 23 nt, Artificial Sequence
  Synthetic
cuucaauuuucuccuucacugaa

SEQ ID NO: 189630 - RNA, 24 nt, Artificial Sequence
  Synthetic
acuucaauuuucuccuucacugaa

SEQ ID NO: 189631 - RNA, 18 nt, Artificial Sequence
  Synthetic
aguagagguuagacugaa

SEQ ID NO: 189632 - RNA, 19 nt, Artificial Sequence
  Synthetic
gaguagagguuagacugaa

SEQ ID NO: 189633 - RNA, 20 nt, Artificial Sequence
  Synthetic
ugaguagagguuagacugaa

SEQ ID NO: 189634 - RNA, 21 nt, Artificial Sequence
  Synthetic
cugaguagagguuagacugaa

SEQ ID NO: 189635 - RNA, 22 nt, Artificial Sequence
  Synthetic
gcugaguagagguuagacugaa

SEQ ID NO: 189636 - RNA, 23 nt, Artificial Sequence
  Synthetic
ugcugaguagagguuagacugaa

SEQ ID NO: 189637 - RNA, 24 nt, Artificial Sequence
  Synthetic
uugcugaguagagguuagacugaa

SEQ ID NO: 189638 - RNA, 18 nt, Artificial Sequence
  Synthetic
aagcaaaaacugacugaa

SEQ ID NO: 189639 - RNA, 19 nt, Artificial Sequence
  Synthetic
aaagcaaaaacugacugaa

SEQ ID NO: 189640 - RNA, 20 nt, Artificial Sequence
  Synthetic
gaaagcaaaaacugacugaa

SEQ ID NO: 189641 - RNA, 21 nt, Artificial Sequence
  Synthetic
agaaagcaaaaacugacugaa

SEQ ID NO: 189642 - RNA, 22 nt, Artificial Sequence
  Synthetic
cagaaagcaaaaacugacugaa

SEQ ID NO: 189643 - RNA, 23 nt, Artificial Sequence
  Synthetic
acagaaagcaaaaacugacugaa

SEQ ID NO: 189644 - RNA, 24 nt, Artificial Sequence
  Synthetic
uacagaaagcaaaaacugacugaa

SEQ ID NO: 189645 - RNA, 18 nt, Artificial Sequence
  Synthetic
aaguagaaaaauacugaa

SEQ ID NO: 189646 - RNA, 19 nt, Artificial Sequence
  Synthetic
caaguagaaaaauacugaa

SEQ ID NO: 189647 - RNA, 20 nt, Artificial Sequence
  Synthetic
ucaaguagaaaaauacugaa

SEQ ID NO: 189648 - RNA, 21 nt, Artificial Sequence
  Synthetic
gucaaguagaaaaauacugaa

SEQ ID NO: 189649 - RNA, 22 nt, Artificial Sequence
  Synthetic
ugucaaguagaaaaauacugaa

SEQ ID NO: 189650 - RNA, 23 nt, Artificial Sequence
  Synthetic
augucaaguagaaaaauacugaa

SEQ ID NO: 189651 - RNA, 24 nt, Artificial Sequence
  Synthetic
uaugucaaguagaaaaauacugaa

SEQ ID NO: 189652 - RNA, 18 nt, Artificial Sequence
  Synthetic
cauugaaugaauacugaa

SEQ ID NO: 189653 - RNA, 19 nt, Artificial Sequence
  Synthetic
ucauugaaugaauacugaa

SEQ ID NO: 189654 - RNA, 20 nt, Artificial Sequence
  Synthetic
uucauugaaugaauacugaa

SEQ ID NO: 189655 - RNA, 21 nt, Artificial Sequence
  Synthetic
guucauugaaugaauacugaa

SEQ ID NO: 189656 - RNA, 22 nt, Artificial Sequence
  Synthetic
uguucauugaaugaauacugaa

SEQ ID NO: 189657 - RNA, 23 nt, Artificial Sequence
  Synthetic
auguucauugaaugaauacugaa

SEQ ID NO: 189658 - RNA, 24 nt, Artificial Sequence
  Synthetic
aauguucauugaaugaauacugaa

SEQ ID NO: 189659 - RNA, 18 nt, Artificial Sequence
  Synthetic
uuucuuuacauuacugaa

SEQ ID NO: 189660 - RNA, 19 nt, Artificial Sequence
  Synthetic
auuucuuuacauuacugaa

SEQ ID NO: 189661 - RNA, 20 nt, Artificial Sequence
  Synthetic
uauuucuuuacauuacugaa

SEQ ID NO: 189662 - RNA, 21 nt, Artificial Sequence
  Synthetic
uuauuucuuuacauuacugaa

SEQ ID NO: 189663 - RNA, 22 nt, Artificial Sequence
  Synthetic
auuauuucuuuacauuacugaa

SEQ ID NO: 189664 - RNA, 23 nt, Artificial Sequence
  Synthetic
uauuauuucuuuacauuacugaa

SEQ ID NO: 189665 - RNA, 24 nt, Artificial Sequence
  Synthetic
cuauuauuucuuuacauuacugaa

SEQ ID NO: 189666 - RNA, 18 nt, Artificial Sequence
  Synthetic
uuauauuucauuacugaa

SEQ ID NO: 189667 - RNA, 19 nt, Artificial Sequence
  Synthetic
uuuauauuucauuacugaa

SEQ ID NO: 189668 - RNA, 20 nt, Artificial Sequence
  Synthetic
auuuauauuucauuacugaa

SEQ ID NO: 189669 - RNA, 21 nt, Artificial Sequence
  Synthetic
cauuuauauuucauuacugaa

SEQ ID NO: 189670 - RNA, 22 nt, Artificial Sequence
  Synthetic
acauuuauauuucauuacugaa

SEQ ID NO: 189671 - RNA, 23 nt, Artificial Sequence
  Synthetic
uacauuuauauuucauuacugaa

SEQ ID NO: 189672 - RNA, 24 nt, Artificial Sequence
  Synthetic
guacauuuauauuucauuacugaa

SEQ ID NO: 189673 - RNA, 18 nt, Artificial Sequence
  Synthetic
uaauugccauuuacugaa

SEQ ID NO: 189674 - RNA, 19 nt, Artificial Sequence
  Synthetic
guaauugccauuuacugaa

SEQ ID NO: 189675 - RNA, 20 nt, Artificial Sequence
  Synthetic
aguaauugccauuuacugaa

SEQ ID NO: 189676 - RNA, 21 nt, Artificial Sequence
  Synthetic
caguaauugccauuuacugaa

SEQ ID NO: 189677 - RNA, 22 nt, Artificial Sequence
  Synthetic
ucaguaauugccauuuacugaa

SEQ ID NO: 189678 - RNA, 23 nt, Artificial Sequence
  Synthetic
aucaguaauugccauuuacugaa

SEQ ID NO: 189679 - RNA, 24 nt, Artificial Sequence
  Synthetic
aaucaguaauugccauuuacugaa

SEQ ID NO: 189680 - RNA, 18 nt, Artificial Sequence
  Synthetic
uguucuuuguuuacugaa

SEQ ID NO: 189681 - RNA, 19 nt, Artificial Sequence
  Synthetic
cuguucuuuguuuacugaa

SEQ ID NO: 189682 - RNA, 20 nt, Artificial Sequence
  Synthetic
ucuguucuuuguuuacugaa

SEQ ID NO: 189683 - RNA, 21 nt, Artificial Sequence
  Synthetic
gucuguucuuuguuuacugaa

SEQ ID NO: 189684 - RNA, 22 nt, Artificial Sequence
  Synthetic
agucuguucuuuguuuacugaa

SEQ ID NO: 189685 - RNA, 23 nt, Artificial Sequence
  Synthetic
cagucuguucuuuguuuacugaa

SEQ ID NO: 189686 - RNA, 24 nt, Artificial Sequence
  Synthetic
acagucuguucuuuguuuacugaa

SEQ ID NO: 189687 - RNA, 18 nt, Artificial Sequence
  Synthetic
auugaaaugaaaccugaa

SEQ ID NO: 189688 - RNA, 19 nt, Artificial Sequence
  Synthetic
aauugaaaugaaaccugaa

SEQ ID NO: 189689 - RNA, 20 nt, Artificial Sequence
  Synthetic
gaauugaaaugaaaccugaa

SEQ ID NO: 189690 - RNA, 21 nt, Artificial Sequence
  Synthetic
ugaauugaaaugaaaccugaa

SEQ ID NO: 189691 - RNA, 22 nt, Artificial Sequence
  Synthetic
cugaauugaaaugaaaccugaa

SEQ ID NO: 189692 - RNA, 23 nt, Artificial Sequence
  Synthetic
acugaauugaaaugaaaccugaa

SEQ ID NO: 189693 - RNA, 24 nt, Artificial Sequence
  Synthetic
aacugaauugaaaugaaaccugaa

SEQ ID NO: 189694 - RNA, 18 nt, Artificial Sequence
  Synthetic
ccucagcugagaccugaa

SEQ ID NO: 189695 - RNA, 19 nt, Artificial Sequence
  Synthetic
accucagcugagaccugaa

SEQ ID NO: 189696 - RNA, 20 nt, Artificial Sequence
  Synthetic
uaccucagcugagaccugaa

SEQ ID NO: 189697 - RNA, 21 nt, Artificial Sequence
  Synthetic
uuaccucagcugagaccugaa

SEQ ID NO: 189698 - RNA, 22 nt, Artificial Sequence
  Synthetic
cuuaccucagcugagaccugaa

SEQ ID NO: 189699 - RNA, 23 nt, Artificial Sequence
  Synthetic
ccuuaccucagcugagaccugaa

SEQ ID NO: 189700 - RNA, 24 nt, Artificial Sequence
  Synthetic
gccuuaccucagcugagaccugaa

SEQ ID NO: 189701 - RNA, 18 nt, Artificial Sequence
  Synthetic
guaaggaauaacccugaa

SEQ ID NO: 189702 - RNA, 19 nt, Artificial Sequence
  Synthetic
gguaaggaauaacccugaa

SEQ ID NO: 189703 - RNA, 20 nt, Artificial Sequence
  Synthetic
ggguaaggaauaacccugaa

SEQ ID NO: 189704 - RNA, 21 nt, Artificial Sequence
  Synthetic
uggguaaggaauaacccugaa

SEQ ID NO: 189705 - RNA, 22 nt, Artificial Sequence
  Synthetic
cuggguaaggaauaacccugaa

SEQ ID NO: 189706 - RNA, 23 nt, Artificial Sequence
  Synthetic
acuggguaaggaauaacccugaa

SEQ ID NO: 189707 - RNA, 24 nt, Artificial Sequence
  Synthetic
gacuggguaaggaauaacccugaa

SEQ ID NO: 189708 - RNA, 18 nt, Artificial Sequence
  Synthetic
caaaaauuguccccugaa

SEQ ID NO: 189709 - RNA, 19 nt, Artificial Sequence
  Synthetic
acaaaaauuguccccugaa

SEQ ID NO: 189710 - RNA, 20 nt, Artificial Sequence
  Synthetic
gacaaaaauuguccccugaa

SEQ ID NO: 189711 - RNA, 21 nt, Artificial Sequence
  Synthetic
agacaaaaauuguccccugaa

SEQ ID NO: 189712 - RNA, 22 nt, Artificial Sequence
  Synthetic
cagacaaaaauuguccccugaa

SEQ ID NO: 189713 - RNA, 23 nt, Artificial Sequence
  Synthetic
acagacaaaaauuguccccugaa

SEQ ID NO: 189714 - RNA, 24 nt, Artificial Sequence
  Synthetic
aacagacaaaaauuguccccugaa

SEQ ID NO: 189715 - RNA, 18 nt, Artificial Sequence
  Synthetic
ggaugaugacgcccugaa

SEQ ID NO: 189716 - RNA, 19 nt, Artificial Sequence
  Synthetic
aggaugaugacgcccugaa

SEQ ID NO: 189717 - RNA, 20 nt, Artificial Sequence
  Synthetic
uaggaugaugacgcccugaa

SEQ ID NO: 189718 - RNA, 21 nt, Artificial Sequence
  Synthetic
uuaggaugaugacgcccugaa

SEQ ID NO: 189719 - RNA, 22 nt, Artificial Sequence
  Synthetic
auuaggaugaugacgcccugaa

SEQ ID NO: 189720 - RNA, 23 nt, Artificial Sequence
  Synthetic
aauuaggaugaugacgcccugaa

SEQ ID NO: 189721 - RNA, 24 nt, Artificial Sequence
  Synthetic
caauuaggaugaugacgcccugaa

SEQ ID NO: 189722 - RNA, 18 nt, Artificial Sequence
  Synthetic
cuguaagucaucccugaa

SEQ ID NO: 189723 - RNA, 19 nt, Artificial Sequence
  Synthetic
ucuguaagucaucccugaa

SEQ ID NO: 189724 - RNA, 20 nt, Artificial Sequence
  Synthetic
cucuguaagucaucccugaa

SEQ ID NO: 189725 - RNA, 21 nt, Artificial Sequence
  Synthetic
ccucuguaagucaucccugaa

SEQ ID NO: 189726 - RNA, 22 nt, Artificial Sequence
  Synthetic
cccucuguaagucaucccugaa

SEQ ID NO: 189727 - RNA, 23 nt, Artificial Sequence
  Synthetic
ucccucuguaagucaucccugaa

SEQ ID NO: 189728 - RNA, 24 nt, Artificial Sequence
  Synthetic
gucccucuguaagucaucccugaa

SEQ ID NO: 189729 - RNA, 18 nt, Artificial Sequence
  Synthetic
gccucccaagucccugaa

SEQ ID NO: 189730 - RNA, 19 nt, Artificial Sequence
  Synthetic
ggccucccaagucccugaa

SEQ ID NO: 189731 - RNA, 20 nt, Artificial Sequence
  Synthetic
uggccucccaagucccugaa

SEQ ID NO: 189732 - RNA, 21 nt, Artificial Sequence
  Synthetic
cuggccucccaagucccugaa

SEQ ID NO: 189733 - RNA, 22 nt, Artificial Sequence
  Synthetic
ucuggccucccaagucccugaa

SEQ ID NO: 189734 - RNA, 23 nt, Artificial Sequence
  Synthetic
cucuggccucccaagucccugaa

SEQ ID NO: 189735 - RNA, 24 nt, Artificial Sequence
  Synthetic
gcucuggccucccaagucccugaa

SEQ ID NO: 189736 - RNA, 18 nt, Artificial Sequence
  Synthetic
ucccuggacuagccugaa

SEQ ID NO: 189737 - RNA, 19 nt, Artificial Sequence
  Synthetic
cucccuggacuagccugaa

SEQ ID NO: 189738 - RNA, 20 nt, Artificial Sequence
  Synthetic
ucucccuggacuagccugaa

SEQ ID NO: 189739 - RNA, 21 nt, Artificial Sequence
  Synthetic
gucucccuggacuagccugaa

SEQ ID NO: 189740 - RNA, 22 nt, Artificial Sequence
  Synthetic
agucucccuggacuagccugaa

SEQ ID NO: 189741 - RNA, 23 nt, Artificial Sequence
  Synthetic
gagucucccuggacuagccugaa

SEQ ID NO: 189742 - RNA, 24 nt, Artificial Sequence
  Synthetic
agagucucccuggacuagccugaa

SEQ ID NO: 189743 - RNA, 18 nt, Artificial Sequence
  Synthetic
auuaauuaaaggccugaa

SEQ ID NO: 189744 - RNA, 19 nt, Artificial Sequence
  Synthetic
aauuaauuaaaggccugaa

SEQ ID NO: 189745 - RNA, 20 nt, Artificial Sequence
  Synthetic
uaauuaauuaaaggccugaa

SEQ ID NO: 189746 - RNA, 21 nt, Artificial Sequence
  Synthetic
guaauuaauuaaaggccugaa

SEQ ID NO: 189747 - RNA, 22 nt, Artificial Sequence
  Synthetic
uguaauuaauuaaaggccugaa

SEQ ID NO: 189748 - RNA, 23 nt, Artificial Sequence
  Synthetic
auguaauuaauuaaaggccugaa

SEQ ID NO: 189749 - RNA, 24 nt, Artificial Sequence
  Synthetic
cauguaauuaauuaaaggccugaa

SEQ ID NO: 189750 - RNA, 18 nt, Artificial Sequence
  Synthetic
gguguacaggauccugaa

SEQ ID NO: 189751 - RNA, 19 nt, Artificial Sequence
  Synthetic
agguguacaggauccugaa

SEQ ID NO: 189752 - RNA, 20 nt, Artificial Sequence
  Synthetic
gagguguacaggauccugaa

SEQ ID NO: 189753 - RNA, 21 nt, Artificial Sequence
  Synthetic
ugagguguacaggauccugaa

SEQ ID NO: 189754 - RNA, 22 nt, Artificial Sequence
  Synthetic
uugagguguacaggauccugaa

SEQ ID NO: 189755 - RNA, 23 nt, Artificial Sequence
  Synthetic
uuugagguguacaggauccugaa

SEQ ID NO: 189756 - RNA, 24 nt, Artificial Sequence
  Synthetic
cuuugagguguacaggauccugaa

SEQ ID NO: 189757 - RNA, 18 nt, Artificial Sequence
  Synthetic
gguaggauuccuccugaa

SEQ ID NO: 189758 - RNA, 19 nt, Artificial Sequence
  Synthetic
ugguaggauuccuccugaa

SEQ ID NO: 189759 - RNA, 20 nt, Artificial Sequence
  Synthetic
augguaggauuccuccugaa

SEQ ID NO: 189760 - RNA, 21 nt, Artificial Sequence
  Synthetic
uaugguaggauuccuccugaa

SEQ ID NO: 189761 - RNA, 22 nt, Artificial Sequence
  Synthetic
uuaugguaggauuccuccugaa

SEQ ID NO: 189762 - RNA, 23 nt, Artificial Sequence
  Synthetic
auuaugguaggauuccuccugaa

SEQ ID NO: 189763 - RNA, 24 nt, Artificial Sequence
  Synthetic
uauuaugguaggauuccuccugaa

SEQ ID NO: 189764 - RNA, 18 nt, Artificial Sequence
  Synthetic
aaaggcaauucuccugaa

SEQ ID NO: 189765 - RNA, 19 nt, Artificial Sequence
  Synthetic
gaaaggcaauucuccugaa

SEQ ID NO: 189766 - RNA, 20 nt, Artificial Sequence
  Synthetic
ggaaaggcaauucuccugaa

SEQ ID NO: 189767 - RNA, 21 nt, Artificial Sequence
  Synthetic
gggaaaggcaauucuccugaa

SEQ ID NO: 189768 - RNA, 22 nt, Artificial Sequence
  Synthetic
agggaaaggcaauucuccugaa

SEQ ID NO: 189769 - RNA, 23 nt, Artificial Sequence
  Synthetic
uagggaaaggcaauucuccugaa

SEQ ID NO: 189770 - RNA, 24 nt, Artificial Sequence
  Synthetic
uuagggaaaggcaauucuccugaa

SEQ ID NO: 189771 - RNA, 18 nt, Artificial Sequence
  Synthetic
caguccuacaguccugaa

SEQ ID NO: 189772 - RNA, 19 nt, Artificial Sequence
  Synthetic
ccaguccuacaguccugaa

SEQ ID NO: 189773 - RNA, 20 nt, Artificial Sequence
  Synthetic
cccaguccuacaguccugaa

SEQ ID NO: 189774 - RNA, 21 nt, Artificial Sequence
  Synthetic
acccaguccuacaguccugaa

SEQ ID NO: 189775 - RNA, 22 nt, Artificial Sequence
  Synthetic
aacccaguccuacaguccugaa

SEQ ID NO: 189776 - RNA, 23 nt, Artificial Sequence
  Synthetic
uaacccaguccuacaguccugaa

SEQ ID NO: 189777 - RNA, 24 nt, Artificial Sequence
  Synthetic
cuaacccaguccuacaguccugaa

SEQ ID NO: 189778 - RNA, 18 nt, Artificial Sequence
  Synthetic
aaguauuucaguccugaa

SEQ ID NO: 189779 - RNA, 19 nt, Artificial Sequence
  Synthetic
gaaguauuucaguccugaa

SEQ ID NO: 189780 - RNA, 20 nt, Artificial Sequence
  Synthetic
agaaguauuucaguccugaa

SEQ ID NO: 189781 - RNA, 21 nt, Artificial Sequence
  Synthetic
cagaaguauuucaguccugaa

SEQ ID NO: 189782 - RNA, 22 nt, Artificial Sequence
  Synthetic
ucagaaguauuucaguccugaa

SEQ ID NO: 189783 - RNA, 23 nt, Artificial Sequence
  Synthetic
gucagaaguauuucaguccugaa

SEQ ID NO: 189784 - RNA, 24 nt, Artificial Sequence
  Synthetic
ggucagaaguauuucaguccugaa

SEQ ID NO: 189785 - RNA, 18 nt, Artificial Sequence
  Synthetic
gugugcauuguuccugaa

SEQ ID NO: 189786 - RNA, 19 nt, Artificial Sequence
  Synthetic
ugugugcauuguuccugaa

SEQ ID NO: 189787 - RNA, 20 nt, Artificial Sequence
  Synthetic
augugugcauuguuccugaa

SEQ ID NO: 189788 - RNA, 21 nt, Artificial Sequence
  Synthetic
gaugugugcauuguuccugaa

SEQ ID NO: 189789 - RNA, 22 nt, Artificial Sequence
  Synthetic
ggaugugugcauuguuccugaa

SEQ ID NO: 189790 - RNA, 23 nt, Artificial Sequence
  Synthetic
gggaugugugcauuguuccugaa

SEQ ID NO: 189791 - RNA, 24 nt, Artificial Sequence
  Synthetic
agggaugugugcauuguuccugaa

SEQ ID NO: 189792 - RNA, 18 nt, Artificial Sequence
  Synthetic
uucauuccauuuccugaa

SEQ ID NO: 189793 - RNA, 19 nt, Artificial Sequence
  Synthetic
cuucauuccauuuccugaa

SEQ ID NO: 189794 - RNA, 20 nt, Artificial Sequence
  Synthetic
acuucauuccauuuccugaa

SEQ ID NO: 189795 - RNA, 21 nt, Artificial Sequence
  Synthetic
cacuucauuccauuuccugaa

SEQ ID NO: 189796 - RNA, 22 nt, Artificial Sequence
  Synthetic
ucacuucauuccauuuccugaa

SEQ ID NO: 189797 - RNA, 23 nt, Artificial Sequence
  Synthetic
uucacuucauuccauuuccugaa

SEQ ID NO: 189798 - RNA, 24 nt, Artificial Sequence
  Synthetic
cuucacuucauuccauuuccugaa

SEQ ID NO: 189799 - RNA, 18 nt, Artificial Sequence
  Synthetic
aaucacguuaaagcugaa

SEQ ID NO: 189800 - RNA, 19 nt, Artificial Sequence
  Synthetic
aaaucacguuaaagcugaa

SEQ ID NO: 189801 - RNA, 20 nt, Artificial Sequence
  Synthetic
aaaaucacguuaaagcugaa

SEQ ID NO: 189802 - RNA, 21 nt, Artificial Sequence
  Synthetic
gaaaaucacguuaaagcugaa

SEQ ID NO: 189803 - RNA, 22 nt, Artificial Sequence
  Synthetic
agaaaaucacguuaaagcugaa

SEQ ID NO: 189804 - RNA, 23 nt, Artificial Sequence
  Synthetic
cagaaaaucacguuaaagcugaa

SEQ ID NO: 189805 - RNA, 24 nt, Artificial Sequence
  Synthetic
acagaaaaucacguuaaagcugaa

SEQ ID NO: 189806 - RNA, 18 nt, Artificial Sequence
  Synthetic
uuuaagcuacaagcugaa

SEQ ID NO: 189807 - RNA, 19 nt, Artificial Sequence
  Synthetic
uuuuaagcuacaagcugaa

SEQ ID NO: 189808 - RNA, 20 nt, Artificial Sequence
  Synthetic
cuuuuaagcuacaagcugaa

SEQ ID NO: 189809 - RNA, 21 nt, Artificial Sequence
  Synthetic
gcuuuuaagcuacaagcugaa

SEQ ID NO: 189810 - RNA, 22 nt, Artificial Sequence
  Synthetic
ggcuuuuaagcuacaagcugaa

SEQ ID NO: 189811 - RNA, 23 nt, Artificial Sequence
  Synthetic
uggcuuuuaagcuacaagcugaa

SEQ ID NO: 189812 - RNA, 24 nt, Artificial Sequence
  Synthetic
uuggcuuuuaagcuacaagcugaa

SEQ ID NO: 189813 - RNA, 18 nt, Artificial Sequence
  Synthetic
cuuuagagacacgcugaa

SEQ ID NO: 189814 - RNA, 19 nt, Artificial Sequence
  Synthetic
ccuuuagagacacgcugaa

SEQ ID NO: 189815 - RNA, 20 nt, Artificial Sequence
  Synthetic
cccuuuagagacacgcugaa

SEQ ID NO: 189816 - RNA, 21 nt, Artificial Sequence
  Synthetic
gcccuuuagagacacgcugaa

SEQ ID NO: 189817 - RNA, 22 nt, Artificial Sequence
  Synthetic
ggcccuuuagagacacgcugaa

SEQ ID NO: 189818 - RNA, 23 nt, Artificial Sequence
  Synthetic
uggcccuuuagagacacgcugaa

SEQ ID NO: 189819 - RNA, 24 nt, Artificial Sequence
  Synthetic
auggcccuuuagagacacgcugaa

SEQ ID NO: 189820 - RNA, 18 nt, Artificial Sequence
  Synthetic
caaguguuaaaggcugaa

SEQ ID NO: 189821 - RNA, 19 nt, Artificial Sequence
  Synthetic
ucaaguguuaaaggcugaa

SEQ ID NO: 189822 - RNA, 20 nt, Artificial Sequence
  Synthetic
gucaaguguuaaaggcugaa

SEQ ID NO: 189823 - RNA, 21 nt, Artificial Sequence
  Synthetic
agucaaguguuaaaggcugaa

SEQ ID NO: 189824 - RNA, 22 nt, Artificial Sequence
  Synthetic
gagucaaguguuaaaggcugaa

SEQ ID NO: 189825 - RNA, 23 nt, Artificial Sequence
  Synthetic
ugagucaaguguuaaaggcugaa

SEQ ID NO: 189826 - RNA, 24 nt, Artificial Sequence
  Synthetic
uugagucaaguguuaaaggcugaa

SEQ ID NO: 189827 - RNA, 18 nt, Artificial Sequence
  Synthetic
aaagucauucaggcugaa

SEQ ID NO: 189828 - RNA, 19 nt, Artificial Sequence
  Synthetic
uaaagucauucaggcugaa

SEQ ID NO: 189829 - RNA, 20 nt, Artificial Sequence
  Synthetic
auaaagucauucaggcugaa

SEQ ID NO: 189830 - RNA, 21 nt, Artificial Sequence
  Synthetic
aauaaagucauucaggcugaa

SEQ ID NO: 189831 - RNA, 22 nt, Artificial Sequence
  Synthetic
aaauaaagucauucaggcugaa

SEQ ID NO: 189832 - RNA, 23 nt, Artificial Sequence
  Synthetic
uaaauaaagucauucaggcugaa

SEQ ID NO: 189833 - RNA, 24 nt, Artificial Sequence
  Synthetic
cuaaauaaagucauucaggcugaa

SEQ ID NO: 189834 - RNA, 18 nt, Artificial Sequence
  Synthetic
gcuggcaagauggcugaa

SEQ ID NO: 189835 - RNA, 19 nt, Artificial Sequence
  Synthetic
ggcuggcaagauggcugaa

SEQ ID NO: 189836 - RNA, 20 nt, Artificial Sequence
  Synthetic
uggcuggcaagauggcugaa

SEQ ID NO: 189837 - RNA, 21 nt, Artificial Sequence
  Synthetic
guggcuggcaagauggcugaa

SEQ ID NO: 189838 - RNA, 22 nt, Artificial Sequence
  Synthetic
aguggcuggcaagauggcugaa

SEQ ID NO: 189839 - RNA, 23 nt, Artificial Sequence
  Synthetic
aaguggcuggcaagauggcugaa

SEQ ID NO: 189840 - RNA, 24 nt, Artificial Sequence
  Synthetic
gaaguggcuggcaagauggcugaa

SEQ ID NO: 189841 - RNA, 18 nt, Artificial Sequence
  Synthetic
gcacccucacaugcugaa

SEQ ID NO: 189842 - RNA, 19 nt, Artificial Sequence
  Synthetic
ugcacccucacaugcugaa

SEQ ID NO: 189843 - RNA, 20 nt, Artificial Sequence
  Synthetic
cugcacccucacaugcugaa

SEQ ID NO: 189844 - RNA, 21 nt, Artificial Sequence
  Synthetic
acugcacccucacaugcugaa

SEQ ID NO: 189845 - RNA, 22 nt, Artificial Sequence
  Synthetic
cacugcacccucacaugcugaa

SEQ ID NO: 189846 - RNA, 23 nt, Artificial Sequence
  Synthetic
ucacugcacccucacaugcugaa

SEQ ID NO: 189847 - RNA, 24 nt, Artificial Sequence
  Synthetic
cucacugcacccucacaugcugaa

SEQ ID NO: 189848 - RNA, 18 nt, Artificial Sequence
  Synthetic
auauuuagggaugcugaa

SEQ ID NO: 189849 - RNA, 19 nt, Artificial Sequence
  Synthetic
cauauuuagggaugcugaa

SEQ ID NO: 189850 - RNA, 20 nt, Artificial Sequence
  Synthetic
ucauauuuagggaugcugaa

SEQ ID NO: 189851 - RNA, 21 nt, Artificial Sequence
  Synthetic
gucauauuuagggaugcugaa

SEQ ID NO: 189852 - RNA, 22 nt, Artificial Sequence
  Synthetic
agucauauuuagggaugcugaa

SEQ ID NO: 189853 - RNA, 23 nt, Artificial Sequence
  Synthetic
cagucauauuuagggaugcugaa

SEQ ID NO: 189854 - RNA, 24 nt, Artificial Sequence
  Synthetic
gcagucauauuuagggaugcugaa

SEQ ID NO: 189855 - RNA, 18 nt, Artificial Sequence
  Synthetic
ccccaaaccuaugcugaa

SEQ ID NO: 189856 - RNA, 19 nt, Artificial Sequence
  Synthetic
uccccaaaccuaugcugaa

SEQ ID NO: 189857 - RNA, 20 nt, Artificial Sequence
  Synthetic
uuccccaaaccuaugcugaa

SEQ ID NO: 189858 - RNA, 21 nt, Artificial Sequence
  Synthetic
uuuccccaaaccuaugcugaa

SEQ ID NO: 189859 - RNA, 22 nt, Artificial Sequence
  Synthetic
cuuuccccaaaccuaugcugaa

SEQ ID NO: 189860 - RNA, 23 nt, Artificial Sequence
  Synthetic
ucuuuccccaaaccuaugcugaa

SEQ ID NO: 189861 - RNA, 24 nt, Artificial Sequence
  Synthetic
uucuuuccccaaaccuaugcugaa

SEQ ID NO: 189862 - RNA, 18 nt, Artificial Sequence
  Synthetic
ucccagguguaugcugaa

SEQ ID NO: 189863 - RNA, 19 nt, Artificial Sequence
  Synthetic
cucccagguguaugcugaa

SEQ ID NO: 189864 - RNA, 20 nt, Artificial Sequence
  Synthetic
acucccagguguaugcugaa

SEQ ID NO: 189865 - RNA, 21 nt, Artificial Sequence
  Synthetic
uacucccagguguaugcugaa

SEQ ID NO: 189866 - RNA, 22 nt, Artificial Sequence
  Synthetic
cuacucccagguguaugcugaa

SEQ ID NO: 189867 - RNA, 23 nt, Artificial Sequence
  Synthetic
ucuacucccagguguaugcugaa

SEQ ID NO: 189868 - RNA, 24 nt, Artificial Sequence
  Synthetic
uucuacucccagguguaugcugaa

SEQ ID NO: 189869 - RNA, 18 nt, Artificial Sequence
  Synthetic
gaccucuuuucugcugaa

SEQ ID NO: 189870 - RNA, 19 nt, Artificial Sequence
  Synthetic
ugaccucuuuucugcugaa

SEQ ID NO: 189871 - RNA, 20 nt, Artificial Sequence
  Synthetic
uugaccucuuuucugcugaa

SEQ ID NO: 189872 - RNA, 21 nt, Artificial Sequence
  Synthetic
cuugaccucuuuucugcugaa

SEQ ID NO: 189873 - RNA, 22 nt, Artificial Sequence
  Synthetic
acuugaccucuuuucugcugaa

SEQ ID NO: 189874 - RNA, 23 nt, Artificial Sequence
  Synthetic
aacuugaccucuuuucugcugaa

SEQ ID NO: 189875 - RNA, 24 nt, Artificial Sequence
  Synthetic
aaacuugaccucuuuucugcugaa

SEQ ID NO: 189876 - RNA, 18 nt, Artificial Sequence
  Synthetic
auugugaauagugcugaa

SEQ ID NO: 189877 - RNA, 19 nt, Artificial Sequence
  Synthetic
uauugugaauagugcugaa

SEQ ID NO: 189878 - RNA, 20 nt, Artificial Sequence
  Synthetic
cuauugugaauagugcugaa

SEQ ID NO: 189879 - RNA, 21 nt, Artificial Sequence
  Synthetic
gcuauugugaauagugcugaa

SEQ ID NO: 189880 - RNA, 22 nt, Artificial Sequence
  Synthetic
ugcuauugugaauagugcugaa

SEQ ID NO: 189881 - RNA, 23 nt, Artificial Sequence
  Synthetic
uugcuauugugaauagugcugaa

SEQ ID NO: 189882 - RNA, 24 nt, Artificial Sequence
  Synthetic
uuugcuauugugaauagugcugaa

SEQ ID NO: 189883 - RNA, 18 nt, Artificial Sequence
  Synthetic
cuucucuugcuugcugaa

SEQ ID NO: 189884 - RNA, 19 nt, Artificial Sequence
  Synthetic
ccuucucuugcuugcugaa

SEQ ID NO: 189885 - RNA, 20 nt, Artificial Sequence
  Synthetic
cccuucucuugcuugcugaa

SEQ ID NO: 189886 - RNA, 21 nt, Artificial Sequence
  Synthetic
ucccuucucuugcuugcugaa

SEQ ID NO: 189887 - RNA, 22 nt, Artificial Sequence
  Synthetic
cucccuucucuugcuugcugaa

SEQ ID NO: 189888 - RNA, 23 nt, Artificial Sequence
  Synthetic
ucucccuucucuugcuugcugaa

SEQ ID NO: 189889 - RNA, 24 nt, Artificial Sequence
  Synthetic
aucucccuucucuugcuugcugaa

SEQ ID NO: 189890 - RNA, 18 nt, Artificial Sequence
  Synthetic
gggacaccuaaaucugaa

SEQ ID NO: 189891 - RNA, 19 nt, Artificial Sequence
  Synthetic
agggacaccuaaaucugaa

SEQ ID NO: 189892 - RNA, 20 nt, Artificial Sequence
  Synthetic
gagggacaccuaaaucugaa

SEQ ID NO: 189893 - RNA, 21 nt, Artificial Sequence
  Synthetic
ggagggacaccuaaaucugaa

SEQ ID NO: 189894 - RNA, 22 nt, Artificial Sequence
  Synthetic
aggagggacaccuaaaucugaa

SEQ ID NO: 189895 - RNA, 23 nt, Artificial Sequence
  Synthetic
uaggagggacaccuaaaucugaa

SEQ ID NO: 189896 - RNA, 24 nt, Artificial Sequence
  Synthetic
guaggagggacaccuaaaucugaa

SEQ ID NO: 189897 - RNA, 18 nt, Artificial Sequence
  Synthetic
uguauagauuccucugaa

SEQ ID NO: 189898 - RNA, 19 nt, Artificial Sequence
  Synthetic
cuguauagauuccucugaa

SEQ ID NO: 189899 - RNA, 20 nt, Artificial Sequence
  Synthetic
gcuguauagauuccucugaa

SEQ ID NO: 189900 - RNA, 21 nt, Artificial Sequence
  Synthetic
ugcuguauagauuccucugaa

SEQ ID NO: 189901 - RNA, 22 nt, Artificial Sequence
  Synthetic
uugcuguauagauuccucugaa

SEQ ID NO: 189902 - RNA, 23 nt, Artificial Sequence
  Synthetic
uuugcuguauagauuccucugaa

SEQ ID NO: 189903 - RNA, 24 nt, Artificial Sequence
  Synthetic
auuugcuguauagauuccucugaa

SEQ ID NO: 189904 - RNA, 18 nt, Artificial Sequence
  Synthetic
aaaagcagcagcucugaa

SEQ ID NO: 189905 - RNA, 19 nt, Artificial Sequence
  Synthetic
aaaaagcagcagcucugaa

SEQ ID NO: 189906 - RNA, 20 nt, Artificial Sequence
  Synthetic
caaaaagcagcagcucugaa

SEQ ID NO: 189907 - RNA, 21 nt, Artificial Sequence
  Synthetic
acaaaaagcagcagcucugaa

SEQ ID NO: 189908 - RNA, 22 nt, Artificial Sequence
  Synthetic
aacaaaaagcagcagcucugaa

SEQ ID NO: 189909 - RNA, 23 nt, Artificial Sequence
  Synthetic
aaacaaaaagcagcagcucugaa

SEQ ID NO: 189910 - RNA, 24 nt, Artificial Sequence
  Synthetic
aaaacaaaaagcagcagcucugaa

SEQ ID NO: 189911 - RNA, 18 nt, Artificial Sequence
  Synthetic
cugccugcuggcucugaa

SEQ ID NO: 189912 - RNA, 19 nt, Artificial Sequence
  Synthetic
ccugccugcuggcucugaa

SEQ ID NO: 189913 - RNA, 20 nt, Artificial Sequence
  Synthetic
uccugccugcuggcucugaa

SEQ ID NO: 189914 - RNA, 21 nt, Artificial Sequence
  Synthetic
uuccugccugcuggcucugaa

SEQ ID NO: 189915 - RNA, 22 nt, Artificial Sequence
  Synthetic
guuccugccugcuggcucugaa

SEQ ID NO: 189916 - RNA, 23 nt, Artificial Sequence
  Synthetic
cguuccugccugcuggcucugaa

SEQ ID NO: 189917 - RNA, 24 nt, Artificial Sequence
  Synthetic
acguuccugccugcuggcucugaa

SEQ ID NO: 189918 - RNA, 18 nt, Artificial Sequence
  Synthetic
ccagauagaaucucugaa

SEQ ID NO: 189919 - RNA, 19 nt, Artificial Sequence
  Synthetic
uccagauagaaucucugaa

SEQ ID NO: 189920 - RNA, 20 nt, Artificial Sequence
  Synthetic
uuccagauagaaucucugaa

SEQ ID NO: 189921 - RNA, 21 nt, Artificial Sequence
  Synthetic
auuccagauagaaucucugaa

SEQ ID NO: 189922 - RNA, 22 nt, Artificial Sequence
  Synthetic
gauuccagauagaaucucugaa

SEQ ID NO: 189923 - RNA, 23 nt, Artificial Sequence
  Synthetic
agauuccagauagaaucucugaa

SEQ ID NO: 189924 - RNA, 24 nt, Artificial Sequence
  Synthetic
cagauuccagauagaaucucugaa

SEQ ID NO: 189925 - RNA, 18 nt, Artificial Sequence
  Synthetic
gaauauggucucucugaa

SEQ ID NO: 189926 - RNA, 19 nt, Artificial Sequence
  Synthetic
ggaauauggucucucugaa

SEQ ID NO: 189927 - RNA, 20 nt, Artificial Sequence
  Synthetic
uggaauauggucucucugaa

SEQ ID NO: 189928 - RNA, 21 nt, Artificial Sequence
  Synthetic
cuggaauauggucucucugaa

SEQ ID NO: 189929 - RNA, 22 nt, Artificial Sequence
  Synthetic
gcuggaauauggucucucugaa

SEQ ID NO: 189930 - RNA, 23 nt, Artificial Sequence
  Synthetic
ugcuggaauauggucucucugaa

SEQ ID NO: 189931 - RNA, 24 nt, Artificial Sequence
  Synthetic
cugcuggaauauggucucucugaa

SEQ ID NO: 189932 - RNA, 18 nt, Artificial Sequence
  Synthetic
ccagcacagcagucugaa

SEQ ID NO: 189933 - RNA, 19 nt, Artificial Sequence
  Synthetic
gccagcacagcagucugaa

SEQ ID NO: 189934 - RNA, 20 nt, Artificial Sequence
  Synthetic
ugccagcacagcagucugaa

SEQ ID NO: 189935 - RNA, 21 nt, Artificial Sequence
  Synthetic
cugccagcacagcagucugaa

SEQ ID NO: 189936 - RNA, 22 nt, Artificial Sequence
  Synthetic
gcugccagcacagcagucugaa

SEQ ID NO: 189937 - RNA, 23 nt, Artificial Sequence
  Synthetic
cgcugccagcacagcagucugaa

SEQ ID NO: 189938 - RNA, 24 nt, Artificial Sequence
  Synthetic
ucgcugccagcacagcagucugaa

SEQ ID NO: 189939 - RNA, 18 nt, Artificial Sequence
  Synthetic
augcucauggggucugaa

SEQ ID NO: 189940 - RNA, 19 nt, Artificial Sequence
  Synthetic
uaugcucauggggucugaa

SEQ ID NO: 189941 - RNA, 20 nt, Artificial Sequence
  Synthetic
auaugcucauggggucugaa

SEQ ID NO: 189942 - RNA, 21 nt, Artificial Sequence
  Synthetic
aauaugcucauggggucugaa

SEQ ID NO: 189943 - RNA, 22 nt, Artificial Sequence
  Synthetic
caauaugcucauggggucugaa

SEQ ID NO: 189944 - RNA, 23 nt, Artificial Sequence
  Synthetic
acaauaugcucauggggucugaa

SEQ ID NO: 189945 - RNA, 24 nt, Artificial Sequence
  Synthetic
cacaauaugcucauggggucugaa

SEQ ID NO: 189946 - RNA, 18 nt, Artificial Sequence
  Synthetic
ucucuagcaucuucugaa

SEQ ID NO: 189947 - RNA, 19 nt, Artificial Sequence
  Synthetic
gucucuagcaucuucugaa

SEQ ID NO: 189948 - RNA, 20 nt, Artificial Sequence
  Synthetic
ggucucuagcaucuucugaa

SEQ ID NO: 189949 - RNA, 21 nt, Artificial Sequence
  Synthetic
gggucucuagcaucuucugaa

SEQ ID NO: 189950 - RNA, 22 nt, Artificial Sequence
  Synthetic
agggucucuagcaucuucugaa

SEQ ID NO: 189951 - RNA, 23 nt, Artificial Sequence
  Synthetic
aagggucucuagcaucuucugaa

SEQ ID NO: 189952 - RNA, 24 nt, Artificial Sequence
  Synthetic
uaagggucucuagcaucuucugaa

SEQ ID NO: 189953 - RNA, 18 nt, Artificial Sequence
  Synthetic
aaguaauguuuuucugaa

SEQ ID NO: 189954 - RNA, 19 nt, Artificial Sequence
  Synthetic
uaaguaauguuuuucugaa

SEQ ID NO: 189955 - RNA, 20 nt, Artificial Sequence
  Synthetic
uuaaguaauguuuuucugaa

SEQ ID NO: 189956 - RNA, 21 nt, Artificial Sequence
  Synthetic
uuuaaguaauguuuuucugaa

SEQ ID NO: 189957 - RNA, 22 nt, Artificial Sequence
  Synthetic
uuuuaaguaauguuuuucugaa

SEQ ID NO: 189958 - RNA, 23 nt, Artificial Sequence
  Synthetic
auuuuaaguaauguuuuucugaa

SEQ ID NO: 189959 - RNA, 24 nt, Artificial Sequence
  Synthetic
uauuuuaaguaauguuuuucugaa

SEQ ID NO: 189960 - RNA, 18 nt, Artificial Sequence
  Synthetic
gugaaaaagaaaagugaa

SEQ ID NO: 189961 - RNA, 19 nt, Artificial Sequence
  Synthetic
agugaaaaagaaaagugaa

SEQ ID NO: 189962 - RNA, 20 nt, Artificial Sequence
  Synthetic
gagugaaaaagaaaagugaa

SEQ ID NO: 189963 - RNA, 21 nt, Artificial Sequence
  Synthetic
ugagugaaaaagaaaagugaa

SEQ ID NO: 189964 - RNA, 22 nt, Artificial Sequence
  Synthetic
augagugaaaaagaaaagugaa

SEQ ID NO: 189965 - RNA, 23 nt, Artificial Sequence
  Synthetic
gaugagugaaaaagaaaagugaa

SEQ ID NO: 189966 - RNA, 24 nt, Artificial Sequence
  Synthetic
cgaugagugaaaaagaaaagugaa

SEQ ID NO: 189967 - RNA, 18 nt, Artificial Sequence
  Synthetic
aguugcaaagaaagugaa

SEQ ID NO: 189968 - RNA, 19 nt, Artificial Sequence
  Synthetic
aaguugcaaagaaagugaa

SEQ ID NO: 189969 - RNA, 20 nt, Artificial Sequence
  Synthetic
gaaguugcaaagaaagugaa

SEQ ID NO: 189970 - RNA, 21 nt, Artificial Sequence
  Synthetic
cgaaguugcaaagaaagugaa

SEQ ID NO: 189971 - RNA, 22 nt, Artificial Sequence
  Synthetic
ccgaaguugcaaagaaagugaa

SEQ ID NO: 189972 - RNA, 23 nt, Artificial Sequence
  Synthetic
uccgaaguugcaaagaaagugaa

SEQ ID NO: 189973 - RNA, 24 nt, Artificial Sequence
  Synthetic
uuccgaaguugcaaagaaagugaa

SEQ ID NO: 189974 - RNA, 18 nt, Artificial Sequence
  Synthetic
agggaacauuaaagugaa

SEQ ID NO: 189975 - RNA, 19 nt, Artificial Sequence
  Synthetic
gagggaacauuaaagugaa

SEQ ID NO: 189976 - RNA, 20 nt, Artificial Sequence
  Synthetic
cgagggaacauuaaagugaa

SEQ ID NO: 189977 - RNA, 21 nt, Artificial Sequence
  Synthetic
gcgagggaacauuaaagugaa

SEQ ID NO: 189978 - RNA, 22 nt, Artificial Sequence
  Synthetic
ggcgagggaacauuaaagugaa

SEQ ID NO: 189979 - RNA, 23 nt, Artificial Sequence
  Synthetic
aggcgagggaacauuaaagugaa

SEQ ID NO: 189980 - RNA, 24 nt, Artificial Sequence
  Synthetic
aaggcgagggaacauuaaagugaa

SEQ ID NO: 189981 - RNA, 18 nt, Artificial Sequence
  Synthetic
aguuaucuagcaagugaa

SEQ ID NO: 189982 - RNA, 19 nt, Artificial Sequence
  Synthetic
caguuaucuagcaagugaa

SEQ ID NO: 189983 - RNA, 20 nt, Artificial Sequence
  Synthetic
gcaguuaucuagcaagugaa

SEQ ID NO: 189984 - RNA, 21 nt, Artificial Sequence
  Synthetic
ugcaguuaucuagcaagugaa

SEQ ID NO: 189985 - RNA, 22 nt, Artificial Sequence
  Synthetic
augcaguuaucuagcaagugaa

SEQ ID NO: 189986 - RNA, 23 nt, Artificial Sequence
  Synthetic
gaugcaguuaucuagcaagugaa

SEQ ID NO: 189987 - RNA, 24 nt, Artificial Sequence
  Synthetic
ggaugcaguuaucuagcaagugaa

SEQ ID NO: 189988 - RNA, 18 nt, Artificial Sequence
  Synthetic
ugcuaaaugagaagugaa

SEQ ID NO: 189989 - RNA, 19 nt, Artificial Sequence
  Synthetic
augcuaaaugagaagugaa

SEQ ID NO: 189990 - RNA, 20 nt, Artificial Sequence
  Synthetic
aaugcuaaaugagaagugaa

SEQ ID NO: 189991 - RNA, 21 nt, Artificial Sequence
  Synthetic
caaugcuaaaugagaagugaa

SEQ ID NO: 189992 - RNA, 22 nt, Artificial Sequence
  Synthetic
ccaaugcuaaaugagaagugaa

SEQ ID NO: 189993 - RNA, 23 nt, Artificial Sequence
  Synthetic
cccaaugcuaaaugagaagugaa

SEQ ID NO: 189994 - RNA, 24 nt, Artificial Sequence
  Synthetic
gcccaaugcuaaaugagaagugaa

SEQ ID NO: 189995 - RNA, 18 nt, Artificial Sequence
  Synthetic
ccauuuaacugaagugaa

SEQ ID NO: 189996 - RNA, 19 nt, Artificial Sequence
  Synthetic
uccauuuaacugaagugaa

SEQ ID NO: 189997 - RNA, 20 nt, Artificial Sequence
  Synthetic
cuccauuuaacugaagugaa

SEQ ID NO: 189998 - RNA, 21 nt, Artificial Sequence
  Synthetic
ucuccauuuaacugaagugaa

SEQ ID NO: 189999 - RNA, 22 nt, Artificial Sequence
  Synthetic
aucuccauuuaacugaagugaa

SEQ ID NO: 190000 - RNA, 23 nt, Artificial Sequence
  Synthetic
caucuccauuuaacugaagugaa

SEQ ID NO: 190001 - RNA, 24 nt, Artificial Sequence
  Synthetic
ccaucuccauuuaacugaagugaa

SEQ ID NO: 190002 - RNA, 18 nt, Artificial Sequence
  Synthetic
uugucauacugaagugaa

SEQ ID NO: 190003 - RNA, 19 nt, Artificial Sequence
  Synthetic
cuugucauacugaagugaa

SEQ ID NO: 190004 - RNA, 20 nt, Artificial Sequence
  Synthetic
ucuugucauacugaagugaa

SEQ ID NO: 190005 - RNA, 21 nt, Artificial Sequence
  Synthetic
uucuugucauacugaagugaa

SEQ ID NO: 190006 - RNA, 22 nt, Artificial Sequence
  Synthetic
uuucuugucauacugaagugaa

SEQ ID NO: 190007 - RNA, 23 nt, Artificial Sequence
  Synthetic
uuuucuugucauacugaagugaa

SEQ ID NO: 190008 - RNA, 24 nt, Artificial Sequence
  Synthetic
guuuucuugucauacugaagugaa

SEQ ID NO: 190009 - RNA, 18 nt, Artificial Sequence
  Synthetic
agaguuuaaauaagugaa

SEQ ID NO: 190010 - RNA, 19 nt, Artificial Sequence
  Synthetic
cagaguuuaaauaagugaa

SEQ ID NO: 190011 - RNA, 20 nt, Artificial Sequence
  Synthetic
gcagaguuuaaauaagugaa

SEQ ID NO: 190012 - RNA, 21 nt, Artificial Sequence
  Synthetic
ugcagaguuuaaauaagugaa

SEQ ID NO: 190013 - RNA, 22 nt, Artificial Sequence
  Synthetic
gugcagaguuuaaauaagugaa

SEQ ID NO: 190014 - RNA, 23 nt, Artificial Sequence
  Synthetic
ugugcagaguuuaaauaagugaa

SEQ ID NO: 190015 - RNA, 24 nt, Artificial Sequence
  Synthetic
augugcagaguuuaaauaagugaa

SEQ ID NO: 190016 - RNA, 18 nt, Artificial Sequence
  Synthetic
guagaaaaagacagugaa

SEQ ID NO: 190017 - RNA, 19 nt, Artificial Sequence
  Synthetic
cguagaaaaagacagugaa

SEQ ID NO: 190018 - RNA, 20 nt, Artificial Sequence
  Synthetic
gcguagaaaaagacagugaa

SEQ ID NO: 190019 - RNA, 21 nt, Artificial Sequence
  Synthetic
ggcguagaaaaagacagugaa

SEQ ID NO: 190020 - RNA, 22 nt, Artificial Sequence
  Synthetic
aggcguagaaaaagacagugaa

SEQ ID NO: 190021 - RNA, 23 nt, Artificial Sequence
  Synthetic
aaggcguagaaaaagacagugaa

SEQ ID NO: 190022 - RNA, 24 nt, Artificial Sequence
  Synthetic
uaaggcguagaaaaagacagugaa

SEQ ID NO: 190023 - RNA, 18 nt, Artificial Sequence
  Synthetic
aauagaaauuacagugaa

SEQ ID NO: 190024 - RNA, 19 nt, Artificial Sequence
  Synthetic
gaauagaaauuacagugaa

SEQ ID NO: 190025 - RNA, 20 nt, Artificial Sequence
  Synthetic
agaauagaaauuacagugaa

SEQ ID NO: 190026 - RNA, 21 nt, Artificial Sequence
  Synthetic
aagaauagaaauuacagugaa

SEQ ID NO: 190027 - RNA, 22 nt, Artificial Sequence
  Synthetic
aaagaauagaaauuacagugaa

SEQ ID NO: 190028 - RNA, 23 nt, Artificial Sequence
  Synthetic
uaaagaauagaaauuacagugaa

SEQ ID NO: 190029 - RNA, 24 nt, Artificial Sequence
  Synthetic
auaaagaauagaaauuacagugaa

SEQ ID NO: 190030 - RNA, 18 nt, Artificial Sequence
  Synthetic
agcuagcugcccagugaa

SEQ ID NO: 190031 - RNA, 19 nt, Artificial Sequence
  Synthetic
uagcuagcugcccagugaa

SEQ ID NO: 190032 - RNA, 20 nt, Artificial Sequence
  Synthetic
auagcuagcugcccagugaa

SEQ ID NO: 190033 - RNA, 21 nt, Artificial Sequence
  Synthetic
uauagcuagcugcccagugaa

SEQ ID NO: 190034 - RNA, 22 nt, Artificial Sequence
  Synthetic
guauagcuagcugcccagugaa

SEQ ID NO: 190035 - RNA, 23 nt, Artificial Sequence
  Synthetic
cguauagcuagcugcccagugaa

SEQ ID NO: 190036 - RNA, 24 nt, Artificial Sequence
  Synthetic
ucguauagcuagcugcccagugaa

SEQ ID NO: 190037 - RNA, 18 nt, Artificial Sequence
  Synthetic
cuaaaaaucuccagugaa

SEQ ID NO: 190038 - RNA, 19 nt, Artificial Sequence
  Synthetic
acuaaaaaucuccagugaa

SEQ ID NO: 190039 - RNA, 20 nt, Artificial Sequence
  Synthetic
cacuaaaaaucuccagugaa

SEQ ID NO: 190040 - RNA, 21 nt, Artificial Sequence
  Synthetic
acacuaaaaaucuccagugaa

SEQ ID NO: 190041 - RNA, 22 nt, Artificial Sequence
  Synthetic
cacacuaaaaaucuccagugaa

SEQ ID NO: 190042 - RNA, 23 nt, Artificial Sequence
  Synthetic
ccacacuaaaaaucuccagugaa

SEQ ID NO: 190043 - RNA, 24 nt, Artificial Sequence
  Synthetic
uccacacuaaaaaucuccagugaa

SEQ ID NO: 190044 - RNA, 18 nt, Artificial Sequence
  Synthetic
auuuuacucggcagugaa

SEQ ID NO: 190045 - RNA, 19 nt, Artificial Sequence
  Synthetic
aauuuuacucggcagugaa

SEQ ID NO: 190046 - RNA, 20 nt, Artificial Sequence
  Synthetic
gaauuuuacucggcagugaa

SEQ ID NO: 190047 - RNA, 21 nt, Artificial Sequence
  Synthetic
ggaauuuuacucggcagugaa

SEQ ID NO: 190048 - RNA, 22 nt, Artificial Sequence
  Synthetic
uggaauuuuacucggcagugaa

SEQ ID NO: 190049 - RNA, 23 nt, Artificial Sequence
  Synthetic
auggaauuuuacucggcagugaa

SEQ ID NO: 190050 - RNA, 24 nt, Artificial Sequence
  Synthetic
aauggaauuuuacucggcagugaa

SEQ ID NO: 190051 - RNA, 18 nt, Artificial Sequence
  Synthetic
gaaugaugaugcagugaa

SEQ ID NO: 190052 - RNA, 19 nt, Artificial Sequence
  Synthetic
ugaaugaugaugcagugaa

SEQ ID NO: 190053 - RNA, 20 nt, Artificial Sequence
  Synthetic
uugaaugaugaugcagugaa

SEQ ID NO: 190054 - RNA, 21 nt, Artificial Sequence
  Synthetic
guugaaugaugaugcagugaa

SEQ ID NO: 190055 - RNA, 22 nt, Artificial Sequence
  Synthetic
aguugaaugaugaugcagugaa

SEQ ID NO: 190056 - RNA, 23 nt, Artificial Sequence
  Synthetic
gaguugaaugaugaugcagugaa

SEQ ID NO: 190057 - RNA, 24 nt, Artificial Sequence
  Synthetic
ggaguugaaugaugaugcagugaa

SEQ ID NO: 190058 - RNA, 18 nt, Artificial Sequence
  Synthetic
ggcggagguugcagugaa

SEQ ID NO: 190059 - RNA, 19 nt, Artificial Sequence
  Synthetic
aggcggagguugcagugaa

SEQ ID NO: 190060 - RNA, 20 nt, Artificial Sequence
  Synthetic
gaggcggagguugcagugaa

SEQ ID NO: 190061 - RNA, 21 nt, Artificial Sequence
  Synthetic
ggaggcggagguugcagugaa

SEQ ID NO: 190062 - RNA, 22 nt, Artificial Sequence
  Synthetic
aggaggcggagguugcagugaa

SEQ ID NO: 190063 - RNA, 23 nt, Artificial Sequence
  Synthetic
caggaggcggagguugcagugaa

SEQ ID NO: 190064 - RNA, 24 nt, Artificial Sequence
  Synthetic
ccaggaggcggagguugcagugaa

SEQ ID NO: 190065 - RNA, 18 nt, Artificial Sequence
  Synthetic
gguggagguugcagugaa

SEQ ID NO: 190066 - RNA, 19 nt, Artificial Sequence
  Synthetic
agguggagguugcagugaa

SEQ ID NO: 190067 - RNA, 20 nt, Artificial Sequence
  Synthetic
gagguggagguugcagugaa

SEQ ID NO: 190068 - RNA, 21 nt, Artificial Sequence
  Synthetic
ggagguggagguugcagugaa

SEQ ID NO: 190069 - RNA, 22 nt, Artificial Sequence
  Synthetic
gggagguggagguugcagugaa

SEQ ID NO: 190070 - RNA, 23 nt, Artificial Sequence
  Synthetic
ugggagguggagguugcagugaa

SEQ ID NO: 190071 - RNA, 24 nt, Artificial Sequence
  Synthetic
cugggagguggagguugcagugaa

SEQ ID NO: 190072 - RNA, 18 nt, Artificial Sequence
  Synthetic
agagagagaaagagugaa

SEQ ID NO: 190073 - RNA, 19 nt, Artificial Sequence
  Synthetic
gagagagagaaagagugaa

SEQ ID NO: 190074 - RNA, 20 nt, Artificial Sequence
  Synthetic
agagagagagaaagagugaa

SEQ ID NO: 190075 - RNA, 21 nt, Artificial Sequence
  Synthetic
gagagagagagaaagagugaa

SEQ ID NO: 190076 - RNA, 22 nt, Artificial Sequence
  Synthetic
ggagagagagagaaagagugaa

SEQ ID NO: 190077 - RNA, 23 nt, Artificial Sequence
  Synthetic
aggagagagagagaaagagugaa

SEQ ID NO: 190078 - RNA, 24 nt, Artificial Sequence
  Synthetic
caggagagagagagaaagagugaa

SEQ ID NO: 190079 - RNA, 18 nt, Artificial Sequence
  Synthetic
aacuaccaucagagugaa

SEQ ID NO: 190080 - RNA, 19 nt, Artificial Sequence
  Synthetic
aaacuaccaucagagugaa

SEQ ID NO: 190081 - RNA, 20 nt, Artificial Sequence
  Synthetic
gaaacuaccaucagagugaa

SEQ ID NO: 190082 - RNA, 21 nt, Artificial Sequence
  Synthetic
agaaacuaccaucagagugaa

SEQ ID NO: 190083 - RNA, 22 nt, Artificial Sequence
  Synthetic
aagaaacuaccaucagagugaa

SEQ ID NO: 190084 - RNA, 23 nt, Artificial Sequence
  Synthetic
aaagaaacuaccaucagagugaa

SEQ ID NO: 190085 - RNA, 24 nt, Artificial Sequence
  Synthetic
aaaagaaacuaccaucagagugaa

SEQ ID NO: 190086 - RNA, 18 nt, Artificial Sequence
  Synthetic
ggaaaauggaugagugaa

SEQ ID NO: 190087 - RNA, 19 nt, Artificial Sequence
  Synthetic
aggaaaauggaugagugaa

SEQ ID NO: 190088 - RNA, 20 nt, Artificial Sequence
  Synthetic
aaggaaaauggaugagugaa

SEQ ID NO: 190089 - RNA, 21 nt, Artificial Sequence
  Synthetic
gaaggaaaauggaugagugaa

SEQ ID NO: 190090 - RNA, 22 nt, Artificial Sequence
  Synthetic
ggaaggaaaauggaugagugaa

SEQ ID NO: 190091 - RNA, 23 nt, Artificial Sequence
  Synthetic
aggaaggaaaauggaugagugaa

SEQ ID NO: 190092 - RNA, 24 nt, Artificial Sequence
  Synthetic
caggaaggaaaauggaugagugaa

SEQ ID NO: 190093 - RNA, 18 nt, Artificial Sequence
  Synthetic
uauuacuaagugagugaa

SEQ ID NO: 190094 - RNA, 19 nt, Artificial Sequence
  Synthetic
cuauuacuaagugagugaa

SEQ ID NO: 190095 - RNA, 20 nt, Artificial Sequence
  Synthetic
gcuauuacuaagugagugaa

SEQ ID NO: 190096 - RNA, 21 nt, Artificial Sequence
  Synthetic
agcuauuacuaagugagugaa

SEQ ID NO: 190097 - RNA, 22 nt, Artificial Sequence
  Synthetic
aagcuauuacuaagugagugaa

SEQ ID NO: 190098 - RNA, 23 nt, Artificial Sequence
  Synthetic
gaagcuauuacuaagugagugaa

SEQ ID NO: 190099 - RNA, 24 nt, Artificial Sequence
  Synthetic
ggaagcuauuacuaagugagugaa

SEQ ID NO: 190100 - RNA, 18 nt, Artificial Sequence
  Synthetic
auuaugcgauauagugaa

SEQ ID NO: 190101 - RNA, 19 nt, Artificial Sequence
  Synthetic
cauuaugcgauauagugaa

SEQ ID NO: 190102 - RNA, 20 nt, Artificial Sequence
  Synthetic
gcauuaugcgauauagugaa

SEQ ID NO: 190103 - RNA, 21 nt, Artificial Sequence
  Synthetic
ugcauuaugcgauauagugaa

SEQ ID NO: 190104 - RNA, 22 nt, Artificial Sequence
  Synthetic
augcauuaugcgauauagugaa

SEQ ID NO: 190105 - RNA, 23 nt, Artificial Sequence
  Synthetic
aaugcauuaugcgauauagugaa

SEQ ID NO: 190106 - RNA, 24 nt, Artificial Sequence
  Synthetic
aaaugcauuaugcgauauagugaa

SEQ ID NO: 190107 - RNA, 18 nt, Artificial Sequence
  Synthetic
aaaugacgcccuagugaa

SEQ ID NO: 190108 - RNA, 19 nt, Artificial Sequence
  Synthetic
caaaugacgcccuagugaa

SEQ ID NO: 190109 - RNA, 20 nt, Artificial Sequence
  Synthetic
ccaaaugacgcccuagugaa

SEQ ID NO: 190110 - RNA, 21 nt, Artificial Sequence
  Synthetic
gccaaaugacgcccuagugaa

SEQ ID NO: 190111 - RNA, 22 nt, Artificial Sequence
  Synthetic
ugccaaaugacgcccuagugaa

SEQ ID NO: 190112 - RNA, 23 nt, Artificial Sequence
  Synthetic
uugccaaaugacgcccuagugaa

SEQ ID NO: 190113 - RNA, 24 nt, Artificial Sequence
  Synthetic
uuugccaaaugacgcccuagugaa

SEQ ID NO: 190114 - RNA, 18 nt, Artificial Sequence
  Synthetic
ugagaauauucuagugaa

SEQ ID NO: 190115 - RNA, 19 nt, Artificial Sequence
  Synthetic
uugagaauauucuagugaa

SEQ ID NO: 190116 - RNA, 20 nt, Artificial Sequence
  Synthetic
uuugagaauauucuagugaa

SEQ ID NO: 190117 - RNA, 21 nt, Artificial Sequence
  Synthetic
guuugagaauauucuagugaa

SEQ ID NO: 190118 - RNA, 22 nt, Artificial Sequence
  Synthetic
aguuugagaauauucuagugaa

SEQ ID NO: 190119 - RNA, 23 nt, Artificial Sequence
  Synthetic
aaguuugagaauauucuagugaa

SEQ ID NO: 190120 - RNA, 24 nt, Artificial Sequence
  Synthetic
gaaguuugagaauauucuagugaa

SEQ ID NO: 190121 - RNA, 18 nt, Artificial Sequence
  Synthetic
uagaaggcuuuccgugaa

SEQ ID NO: 190122 - RNA, 19 nt, Artificial Sequence
  Synthetic
uuagaaggcuuuccgugaa

SEQ ID NO: 190123 - RNA, 20 nt, Artificial Sequence
  Synthetic
auuagaaggcuuuccgugaa

SEQ ID NO: 190124 - RNA, 21 nt, Artificial Sequence
  Synthetic
aauuagaaggcuuuccgugaa

SEQ ID NO: 190125 - RNA, 22 nt, Artificial Sequence
  Synthetic
aaauuagaaggcuuuccgugaa

SEQ ID NO: 190126 - RNA, 23 nt, Artificial Sequence
  Synthetic
uaaauuagaaggcuuuccgugaa

SEQ ID NO: 190127 - RNA, 24 nt, Artificial Sequence
  Synthetic
cuaaauuagaaggcuuuccgugaa

SEQ ID NO: 190128 - RNA, 18 nt, Artificial Sequence
  Synthetic
auuacuucaucucgugaa

SEQ ID NO: 190129 - RNA, 19 nt, Artificial Sequence
  Synthetic
aauuacuucaucucgugaa

SEQ ID NO: 190130 - RNA, 20 nt, Artificial Sequence
  Synthetic
aaauuacuucaucucgugaa

SEQ ID NO: 190131 - RNA, 21 nt, Artificial Sequence
  Synthetic
gaaauuacuucaucucgugaa

SEQ ID NO: 190132 - RNA, 22 nt, Artificial Sequence
  Synthetic
ggaaauuacuucaucucgugaa

SEQ ID NO: 190133 - RNA, 23 nt, Artificial Sequence
  Synthetic
aggaaauuacuucaucucgugaa

SEQ ID NO: 190134 - RNA, 24 nt, Artificial Sequence
  Synthetic
gaggaaauuacuucaucucgugaa

SEQ ID NO: 190135 - RNA, 18 nt, Artificial Sequence
  Synthetic
uggcuauuaaaaggugaa

SEQ ID NO: 190136 - RNA, 19 nt, Artificial Sequence
  Synthetic
guggcuauuaaaaggugaa

SEQ ID NO: 190137 - RNA, 20 nt, Artificial Sequence
  Synthetic
uguggcuauuaaaaggugaa

SEQ ID NO: 190138 - RNA, 21 nt, Artificial Sequence
  Synthetic
uuguggcuauuaaaaggugaa

SEQ ID NO: 190139 - RNA, 22 nt, Artificial Sequence
  Synthetic
auuguggcuauuaaaaggugaa

SEQ ID NO: 190140 - RNA, 23 nt, Artificial Sequence
  Synthetic
cauuguggcuauuaaaaggugaa

SEQ ID NO: 190141 - RNA, 24 nt, Artificial Sequence
  Synthetic
ccauuguggcuauuaaaaggugaa

SEQ ID NO: 190142 - RNA, 18 nt, Artificial Sequence
  Synthetic
cugucuuggaaaggugaa

SEQ ID NO: 190143 - RNA, 19 nt, Artificial Sequence
  Synthetic
gcugucuuggaaaggugaa

SEQ ID NO: 190144 - RNA, 20 nt, Artificial Sequence
  Synthetic
ggcugucuuggaaaggugaa

SEQ ID NO: 190145 - RNA, 21 nt, Artificial Sequence
  Synthetic
uggcugucuuggaaaggugaa

SEQ ID NO: 190146 - RNA, 22 nt, Artificial Sequence
  Synthetic
cuggcugucuuggaaaggugaa

SEQ ID NO: 190147 - RNA, 23 nt, Artificial Sequence
  Synthetic
ucuggcugucuuggaaaggugaa

SEQ ID NO: 190148 - RNA, 24 nt, Artificial Sequence
  Synthetic
gucuggcugucuuggaaaggugaa

SEQ ID NO: 190149 - RNA, 18 nt, Artificial Sequence
  Synthetic
ugucaagcagaaggugaa

SEQ ID NO: 190150 - RNA, 19 nt, Artificial Sequence
  Synthetic
uugucaagcagaaggugaa

SEQ ID NO: 190151 - RNA, 20 nt, Artificial Sequence
  Synthetic
guugucaagcagaaggugaa

SEQ ID NO: 190152 - RNA, 21 nt, Artificial Sequence
  Synthetic
aguugucaagcagaaggugaa

SEQ ID NO: 190153 - RNA, 22 nt, Artificial Sequence
  Synthetic
uaguugucaagcagaaggugaa

SEQ ID NO: 190154 - RNA, 23 nt, Artificial Sequence
  Synthetic
uuaguugucaagcagaaggugaa

SEQ ID NO: 190155 - RNA, 24 nt, Artificial Sequence
  Synthetic
uuuaguugucaagcagaaggugaa

SEQ ID NO: 190156 - RNA, 18 nt, Artificial Sequence
  Synthetic
aucauggcagaaggugaa

SEQ ID NO: 190157 - RNA, 19 nt, Artificial Sequence
  Synthetic
aaucauggcagaaggugaa

SEQ ID NO: 190158 - RNA, 20 nt, Artificial Sequence
  Synthetic
caaucauggcagaaggugaa

SEQ ID NO: 190159 - RNA, 21 nt, Artificial Sequence
  Synthetic
acaaucauggcagaaggugaa

SEQ ID NO: 190160 - RNA, 22 nt, Artificial Sequence
  Synthetic
uacaaucauggcagaaggugaa

SEQ ID NO: 190161 - RNA, 23 nt, Artificial Sequence
  Synthetic
uuacaaucauggcagaaggugaa

SEQ ID NO: 190162 - RNA, 24 nt, Artificial Sequence
  Synthetic
cuuacaaucauggcagaaggugaa

SEQ ID NO: 190163 - RNA, 18 nt, Artificial Sequence
  Synthetic
cauguccuuuaaggugaa

SEQ ID NO: 190164 - RNA, 19 nt, Artificial Sequence
  Synthetic
gcauguccuuuaaggugaa

SEQ ID NO: 190165 - RNA, 20 nt, Artificial Sequence
  Synthetic
ugcauguccuuuaaggugaa

SEQ ID NO: 190166 - RNA, 21 nt, Artificial Sequence
  Synthetic
augcauguccuuuaaggugaa

SEQ ID NO: 190167 - RNA, 22 nt, Artificial Sequence
  Synthetic
uaugcauguccuuuaaggugaa

SEQ ID NO: 190168 - RNA, 23 nt, Artificial Sequence
  Synthetic
cuaugcauguccuuuaaggugaa

SEQ ID NO: 190169 - RNA, 24 nt, Artificial Sequence
  Synthetic
ucuaugcauguccuuuaaggugaa

SEQ ID NO: 190170 - RNA, 18 nt, Artificial Sequence
  Synthetic
aucagucccugaggugaa

SEQ ID NO: 190171 - RNA, 19 nt, Artificial Sequence
  Synthetic
caucagucccugaggugaa

SEQ ID NO: 190172 - RNA, 20 nt, Artificial Sequence
  Synthetic
ccaucagucccugaggugaa

SEQ ID NO: 190173 - RNA, 21 nt, Artificial Sequence
  Synthetic
cccaucagucccugaggugaa

SEQ ID NO: 190174 - RNA, 22 nt, Artificial Sequence
  Synthetic
ccccaucagucccugaggugaa

SEQ ID NO: 190175 - RNA, 23 nt, Artificial Sequence
  Synthetic
uccccaucagucccugaggugaa

SEQ ID NO: 190176 - RNA, 24 nt, Artificial Sequence
  Synthetic
cuccccaucagucccugaggugaa

SEQ ID NO: 190177 - RNA, 18 nt, Artificial Sequence
  Synthetic
acuccaaaucuaggugaa

SEQ ID NO: 190178 - RNA, 19 nt, Artificial Sequence
  Synthetic
aacuccaaaucuaggugaa

SEQ ID NO: 190179 - RNA, 20 nt, Artificial Sequence
  Synthetic
aaacuccaaaucuaggugaa

SEQ ID NO: 190180 - RNA, 21 nt, Artificial Sequence
  Synthetic
aaaacuccaaaucuaggugaa

SEQ ID NO: 190181 - RNA, 22 nt, Artificial Sequence
  Synthetic
uaaaacuccaaaucuaggugaa

SEQ ID NO: 190182 - RNA, 23 nt, Artificial Sequence
  Synthetic
uuaaaacuccaaaucuaggugaa

SEQ ID NO: 190183 - RNA, 24 nt, Artificial Sequence
  Synthetic
auuaaaacuccaaaucuaggugaa

SEQ ID NO: 190184 - RNA, 18 nt, Artificial Sequence
  Synthetic
gagcuuucuguaggugaa

SEQ ID NO: 190185 - RNA, 19 nt, Artificial Sequence
  Synthetic
agagcuuucuguaggugaa

SEQ ID NO: 190186 - RNA, 20 nt, Artificial Sequence
  Synthetic
uagagcuuucuguaggugaa

SEQ ID NO: 190187 - RNA, 21 nt, Artificial Sequence
  Synthetic
cuagagcuuucuguaggugaa

SEQ ID NO: 190188 - RNA, 22 nt, Artificial Sequence
  Synthetic
gcuagagcuuucuguaggugaa

SEQ ID NO: 190189 - RNA, 23 nt, Artificial Sequence
  Synthetic
ggcuagagcuuucuguaggugaa

SEQ ID NO: 190190 - RNA, 24 nt, Artificial Sequence
  Synthetic
aggcuagagcuuucuguaggugaa

SEQ ID NO: 190191 - RNA, 18 nt, Artificial Sequence
  Synthetic
aggcuuugauagggugaa

SEQ ID NO: 190192 - RNA, 19 nt, Artificial Sequence
  Synthetic
aaggcuuugauagggugaa

SEQ ID NO: 190193 - RNA, 20 nt, Artificial Sequence
  Synthetic
caaggcuuugauagggugaa

SEQ ID NO: 190194 - RNA, 21 nt, Artificial Sequence
  Synthetic
acaaggcuuugauagggugaa

SEQ ID NO: 190195 - RNA, 22 nt, Artificial Sequence
  Synthetic
aacaaggcuuugauagggugaa

SEQ ID NO: 190196 - RNA, 23 nt, Artificial Sequence
  Synthetic
aaacaaggcuuugauagggugaa

SEQ ID NO: 190197 - RNA, 24 nt, Artificial Sequence
  Synthetic
uaaacaaggcuuugauagggugaa

SEQ ID NO: 190198 - RNA, 18 nt, Artificial Sequence
  Synthetic
ugcacagguaggggugaa

SEQ ID NO: 190199 - RNA, 19 nt, Artificial Sequence
  Synthetic
augcacagguaggggugaa

SEQ ID NO: 190200 - RNA, 20 nt, Artificial Sequence
  Synthetic
aaugcacagguaggggugaa

SEQ ID NO: 190201 - RNA, 21 nt, Artificial Sequence
  Synthetic
gaaugcacagguaggggugaa

SEQ ID NO: 190202 - RNA, 22 nt, Artificial Sequence
  Synthetic
ugaaugcacagguaggggugaa

SEQ ID NO: 190203 - RNA, 23 nt, Artificial Sequence
  Synthetic
cugaaugcacagguaggggugaa

SEQ ID NO: 190204 - RNA, 24 nt, Artificial Sequence
  Synthetic
acugaaugcacagguaggggugaa

SEQ ID NO: 190205 - RNA, 18 nt, Artificial Sequence
  Synthetic
aaauaaaaauugggugaa

SEQ ID NO: 190206 - RNA, 19 nt, Artificial Sequence
  Synthetic
aaaauaaaaauugggugaa

SEQ ID NO: 190207 - RNA, 20 nt, Artificial Sequence
  Synthetic
aaaaauaaaaauugggugaa

SEQ ID NO: 190208 - RNA, 21 nt, Artificial Sequence
  Synthetic
uaaaaauaaaaauugggugaa

SEQ ID NO: 190209 - RNA, 22 nt, Artificial Sequence
  Synthetic
auaaaaauaaaaauugggugaa

SEQ ID NO: 190210 - RNA, 23 nt, Artificial Sequence
  Synthetic
cauaaaaauaaaaauugggugaa

SEQ ID NO: 190211 - RNA, 24 nt, Artificial Sequence
  Synthetic
acauaaaaauaaaaauugggugaa

SEQ ID NO: 190212 - RNA, 18 nt, Artificial Sequence
  Synthetic
uguuaaucuuugggugaa

SEQ ID NO: 190213 - RNA, 19 nt, Artificial Sequence
  Synthetic
auguuaaucuuugggugaa

SEQ ID NO: 190214 - RNA, 20 nt, Artificial Sequence
  Synthetic
aauguuaaucuuugggugaa

SEQ ID NO: 190215 - RNA, 21 nt, Artificial Sequence
  Synthetic
aaauguuaaucuuugggugaa

SEQ ID NO: 190216 - RNA, 22 nt, Artificial Sequence
  Synthetic
gaaauguuaaucuuugggugaa

SEQ ID NO: 190217 - RNA, 23 nt, Artificial Sequence
  Synthetic
ggaaauguuaaucuuugggugaa

SEQ ID NO: 190218 - RNA, 24 nt, Artificial Sequence
  Synthetic
aggaaauguuaaucuuugggugaa

SEQ ID NO: 190219 - RNA, 18 nt, Artificial Sequence
  Synthetic
uuuagcaagaguggugaa

SEQ ID NO: 190220 - RNA, 19 nt, Artificial Sequence
  Synthetic
uuuuagcaagaguggugaa

SEQ ID NO: 190221 - RNA, 20 nt, Artificial Sequence
  Synthetic
auuuuagcaagaguggugaa

SEQ ID NO: 190222 - RNA, 21 nt, Artificial Sequence
  Synthetic
uauuuuagcaagaguggugaa

SEQ ID NO: 190223 - RNA, 22 nt, Artificial Sequence
  Synthetic
guauuuuagcaagaguggugaa

SEQ ID NO: 190224 - RNA, 23 nt, Artificial Sequence
  Synthetic
aguauuuuagcaagaguggugaa

SEQ ID NO: 190225 - RNA, 24 nt, Artificial Sequence
  Synthetic
caguauuuuagcaagaguggugaa

SEQ ID NO: 190226 - RNA, 18 nt, Artificial Sequence
  Synthetic
uaaaaaugaaaaugugaa

SEQ ID NO: 190227 - RNA, 19 nt, Artificial Sequence
  Synthetic
cuaaaaaugaaaaugugaa

SEQ ID NO: 190228 - RNA, 20 nt, Artificial Sequence
  Synthetic
ucuaaaaaugaaaaugugaa

SEQ ID NO: 190229 - RNA, 21 nt, Artificial Sequence
  Synthetic
cucuaaaaaugaaaaugugaa

SEQ ID NO: 190230 - RNA, 22 nt, Artificial Sequence
  Synthetic
acucuaaaaaugaaaaugugaa

SEQ ID NO: 190231 - RNA, 23 nt, Artificial Sequence
  Synthetic
uacucuaaaaaugaaaaugugaa

SEQ ID NO: 190232 - RNA, 24 nt, Artificial Sequence
  Synthetic
guacucuaaaaaugaaaaugugaa

SEQ ID NO: 190233 - RNA, 18 nt, Artificial Sequence
  Synthetic
aguuuuauccaaugugaa

SEQ ID NO: 190234 - RNA, 19 nt, Artificial Sequence
  Synthetic
caguuuuauccaaugugaa

SEQ ID NO: 190235 - RNA, 20 nt, Artificial Sequence
  Synthetic
ucaguuuuauccaaugugaa

SEQ ID NO: 190236 - RNA, 21 nt, Artificial Sequence
  Synthetic
cucaguuuuauccaaugugaa

SEQ ID NO: 190237 - RNA, 22 nt, Artificial Sequence
  Synthetic
ccucaguuuuauccaaugugaa

SEQ ID NO: 190238 - RNA, 23 nt, Artificial Sequence
  Synthetic
gccucaguuuuauccaaugugaa

SEQ ID NO: 190239 - RNA, 24 nt, Artificial Sequence
  Synthetic
ugccucaguuuuauccaaugugaa

SEQ ID NO: 190240 - RNA, 18 nt, Artificial Sequence
  Synthetic
caaaauucagaaugugaa

SEQ ID NO: 190241 - RNA, 19 nt, Artificial Sequence
  Synthetic
ccaaaauucagaaugugaa

SEQ ID NO: 190242 - RNA, 20 nt, Artificial Sequence
  Synthetic
uccaaaauucagaaugugaa

SEQ ID NO: 190243 - RNA, 21 nt, Artificial Sequence
  Synthetic
auccaaaauucagaaugugaa

SEQ ID NO: 190244 - RNA, 22 nt, Artificial Sequence
  Synthetic
gauccaaaauucagaaugugaa

SEQ ID NO: 190245 - RNA, 23 nt, Artificial Sequence
  Synthetic
agauccaaaauucagaaugugaa

SEQ ID NO: 190246 - RNA, 24 nt, Artificial Sequence
  Synthetic
aagauccaaaauucagaaugugaa

SEQ ID NO: 190247 - RNA, 18 nt, Artificial Sequence
  Synthetic
uguuucagauaaugugaa

SEQ ID NO: 190248 - RNA, 19 nt, Artificial Sequence
  Synthetic
auguuucagauaaugugaa

SEQ ID NO: 190249 - RNA, 20 nt, Artificial Sequence
  Synthetic
uauguuucagauaaugugaa

SEQ ID NO: 190250 - RNA, 21 nt, Artificial Sequence
  Synthetic
cuauguuucagauaaugugaa

SEQ ID NO: 190251 - RNA, 22 nt, Artificial Sequence
  Synthetic
ucuauguuucagauaaugugaa

SEQ ID NO: 190252 - RNA, 23 nt, Artificial Sequence
  Synthetic
aucuauguuucagauaaugugaa

SEQ ID NO: 190253 - RNA, 24 nt, Artificial Sequence
  Synthetic
aaucuauguuucagauaaugugaa

SEQ ID NO: 190254 - RNA, 18 nt, Artificial Sequence
  Synthetic
uuguaaaauuaaugugaa

SEQ ID NO: 190255 - RNA, 19 nt, Artificial Sequence
  Synthetic
uuuguaaaauuaaugugaa

SEQ ID NO: 190256 - RNA, 20 nt, Artificial Sequence
  Synthetic
uuuuguaaaauuaaugugaa

SEQ ID NO: 190257 - RNA, 21 nt, Artificial Sequence
  Synthetic
uuuuuguaaaauuaaugugaa

SEQ ID NO: 190258 - RNA, 22 nt, Artificial Sequence
  Synthetic
guuuuuguaaaauuaaugugaa

SEQ ID NO: 190259 - RNA, 23 nt, Artificial Sequence
  Synthetic
aguuuuuguaaaauuaaugugaa

SEQ ID NO: 190260 - RNA, 24 nt, Artificial Sequence
  Synthetic
aaguuuuuguaaaauuaaugugaa

SEQ ID NO: 190261 - RNA, 18 nt, Artificial Sequence
  Synthetic
ccaagaaauguaugugaa

SEQ ID NO: 190262 - RNA, 19 nt, Artificial Sequence
  Synthetic
gccaagaaauguaugugaa

SEQ ID NO: 190263 - RNA, 20 nt, Artificial Sequence
  Synthetic
agccaagaaauguaugugaa

SEQ ID NO: 190264 - RNA, 21 nt, Artificial Sequence
  Synthetic
aagccaagaaauguaugugaa

SEQ ID NO: 190265 - RNA, 22 nt, Artificial Sequence
  Synthetic
aaagccaagaaauguaugugaa

SEQ ID NO: 190266 - RNA, 23 nt, Artificial Sequence
  Synthetic
aaaagccaagaaauguaugugaa

SEQ ID NO: 190267 - RNA, 24 nt, Artificial Sequence
  Synthetic
aaaaagccaagaaauguaugugaa

SEQ ID NO: 190268 - RNA, 18 nt, Artificial Sequence
  Synthetic
ucacugguguuaugugaa

SEQ ID NO: 190269 - RNA, 19 nt, Artificial Sequence
  Synthetic
gucacugguguuaugugaa

SEQ ID NO: 190270 - RNA, 20 nt, Artificial Sequence
  Synthetic
ggucacugguguuaugugaa

SEQ ID NO: 190271 - RNA, 21 nt, Artificial Sequence
  Synthetic
gggucacugguguuaugugaa

SEQ ID NO: 190272 - RNA, 22 nt, Artificial Sequence
  Synthetic
agggucacugguguuaugugaa

SEQ ID NO: 190273 - RNA, 23 nt, Artificial Sequence
  Synthetic
cagggucacugguguuaugugaa

SEQ ID NO: 190274 - RNA, 24 nt, Artificial Sequence
  Synthetic
ccagggucacugguguuaugugaa

SEQ ID NO: 190275 - RNA, 18 nt, Artificial Sequence
  Synthetic
aaacaaaaacacugugaa

SEQ ID NO: 190276 - RNA, 19 nt, Artificial Sequence
  Synthetic
aaaacaaaaacacugugaa

SEQ ID NO: 190277 - RNA, 20 nt, Artificial Sequence
  Synthetic
caaaacaaaaacacugugaa

SEQ ID NO: 190278 - RNA, 21 nt, Artificial Sequence
  Synthetic
ucaaaacaaaaacacugugaa

SEQ ID NO: 190279 - RNA, 22 nt, Artificial Sequence
  Synthetic
cucaaaacaaaaacacugugaa

SEQ ID NO: 190280 - RNA, 23 nt, Artificial Sequence
  Synthetic
acucaaaacaaaaacacugugaa

SEQ ID NO: 190281 - RNA, 24 nt, Artificial Sequence
  Synthetic
uacucaaaacaaaaacacugugaa

SEQ ID NO: 190282 - RNA, 18 nt, Artificial Sequence
  Synthetic
auaaucuuccacugugaa

SEQ ID NO: 190283 - RNA, 19 nt, Artificial Sequence
  Synthetic
aauaaucuuccacugugaa

SEQ ID NO: 190284 - RNA, 20 nt, Artificial Sequence
  Synthetic
caauaaucuuccacugugaa

SEQ ID NO: 190285 - RNA, 21 nt, Artificial Sequence
  Synthetic
ucaauaaucuuccacugugaa

SEQ ID NO: 190286 - RNA, 22 nt, Artificial Sequence
  Synthetic
cucaauaaucuuccacugugaa

SEQ ID NO: 190287 - RNA, 23 nt, Artificial Sequence
  Synthetic
ucucaauaaucuuccacugugaa

SEQ ID NO: 190288 - RNA, 24 nt, Artificial Sequence
  Synthetic
aucucaauaaucuuccacugugaa

SEQ ID NO: 190289 - RNA, 18 nt, Artificial Sequence
  Synthetic
agauagugagacugugaa

SEQ ID NO: 190290 - RNA, 19 nt, Artificial Sequence
  Synthetic
aagauagugagacugugaa

SEQ ID NO: 190291 - RNA, 20 nt, Artificial Sequence
  Synthetic
uaagauagugagacugugaa

SEQ ID NO: 190292 - RNA, 21 nt, Artificial Sequence
  Synthetic
guaagauagugagacugugaa

SEQ ID NO: 190293 - RNA, 22 nt, Artificial Sequence
  Synthetic
gguaagauagugagacugugaa

SEQ ID NO: 190294 - RNA, 23 nt, Artificial Sequence
  Synthetic
agguaagauagugagacugugaa

SEQ ID NO: 190295 - RNA, 24 nt, Artificial Sequence
  Synthetic
gagguaagauagugagacugugaa

SEQ ID NO: 190296 - RNA, 18 nt, Artificial Sequence
  Synthetic
aaagagugugacugugaa

SEQ ID NO: 190297 - RNA, 19 nt, Artificial Sequence
  Synthetic
uaaagagugugacugugaa

SEQ ID NO: 190298 - RNA, 20 nt, Artificial Sequence
  Synthetic
cuaaagagugugacugugaa

SEQ ID NO: 190299 - RNA, 21 nt, Artificial Sequence
  Synthetic
ucuaaagagugugacugugaa

SEQ ID NO: 190300 - RNA, 22 nt, Artificial Sequence
  Synthetic
uucuaaagagugugacugugaa

SEQ ID NO: 190301 - RNA, 23 nt, Artificial Sequence
  Synthetic
cuucuaaagagugugacugugaa

SEQ ID NO: 190302 - RNA, 24 nt, Artificial Sequence
  Synthetic
ccuucuaaagagugugacugugaa

SEQ ID NO: 190303 - RNA, 18 nt, Artificial Sequence
  Synthetic
uuuugagauuacugugaa

SEQ ID NO: 190304 - RNA, 19 nt, Artificial Sequence
  Synthetic
uuuuugagauuacugugaa

SEQ ID NO: 190305 - RNA, 20 nt, Artificial Sequence
  Synthetic
cuuuuugagauuacugugaa

SEQ ID NO: 190306 - RNA, 21 nt, Artificial Sequence
  Synthetic
gcuuuuugagauuacugugaa

SEQ ID NO: 190307 - RNA, 22 nt, Artificial Sequence
  Synthetic
ggcuuuuugagauuacugugaa

SEQ ID NO: 190308 - RNA, 23 nt, Artificial Sequence
  Synthetic
aggcuuuuugagauuacugugaa

SEQ ID NO: 190309 - RNA, 24 nt, Artificial Sequence
  Synthetic
aaggcuuuuugagauuacugugaa

SEQ ID NO: 190310 - RNA, 18 nt, Artificial Sequence
  Synthetic
ucaaaguacaccugugaa

SEQ ID NO: 190311 - RNA, 19 nt, Artificial Sequence
  Synthetic
uucaaaguacaccugugaa

SEQ ID NO: 190312 - RNA, 20 nt, Artificial Sequence
  Synthetic
auucaaaguacaccugugaa

SEQ ID NO: 190313 - RNA, 21 nt, Artificial Sequence
  Synthetic
gauucaaaguacaccugugaa

SEQ ID NO: 190314 - RNA, 22 nt, Artificial Sequence
  Synthetic
ugauucaaaguacaccugugaa

SEQ ID NO: 190315 - RNA, 23 nt, Artificial Sequence
  Synthetic
cugauucaaaguacaccugugaa

SEQ ID NO: 190316 - RNA, 24 nt, Artificial Sequence
  Synthetic
ucugauucaaaguacaccugugaa

SEQ ID NO: 190317 - RNA, 18 nt, Artificial Sequence
  Synthetic
agacagaaaugcugugaa

SEQ ID NO: 190318 - RNA, 19 nt, Artificial Sequence
  Synthetic
aagacagaaaugcugugaa

SEQ ID NO: 190319 - RNA, 20 nt, Artificial Sequence
  Synthetic
caagacagaaaugcugugaa

SEQ ID NO: 190320 - RNA, 21 nt, Artificial Sequence
  Synthetic
ucaagacagaaaugcugugaa

SEQ ID NO: 190321 - RNA, 22 nt, Artificial Sequence
  Synthetic
gucaagacagaaaugcugugaa

SEQ ID NO: 190322 - RNA, 23 nt, Artificial Sequence
  Synthetic
agucaagacagaaaugcugugaa

SEQ ID NO: 190323 - RNA, 24 nt, Artificial Sequence
  Synthetic
gagucaagacagaaaugcugugaa

SEQ ID NO: 190324 - RNA, 18 nt, Artificial Sequence
  Synthetic
agguagaaccucugugaa

SEQ ID NO: 190325 - RNA, 19 nt, Artificial Sequence
  Synthetic
aagguagaaccucugugaa

SEQ ID NO: 190326 - RNA, 20 nt, Artificial Sequence
  Synthetic
caagguagaaccucugugaa

SEQ ID NO: 190327 - RNA, 21 nt, Artificial Sequence
  Synthetic
ucaagguagaaccucugugaa

SEQ ID NO: 190328 - RNA, 22 nt, Artificial Sequence
  Synthetic
uucaagguagaaccucugugaa

SEQ ID NO: 190329 - RNA, 23 nt, Artificial Sequence
  Synthetic
cuucaagguagaaccucugugaa

SEQ ID NO: 190330 - RNA, 24 nt, Artificial Sequence
  Synthetic
ucuucaagguagaaccucugugaa

SEQ ID NO: 190331 - RNA, 18 nt, Artificial Sequence
  Synthetic
cuuugaagcaauugugaa

SEQ ID NO: 190332 - RNA, 19 nt, Artificial Sequence
  Synthetic
ucuuugaagcaauugugaa

SEQ ID NO: 190333 - RNA, 20 nt, Artificial Sequence
  Synthetic
cucuuugaagcaauugugaa

SEQ ID NO: 190334 - RNA, 24 nt, Artificial Sequence
  Synthetic
uauucucuuugaagcaauugugaa

SEQ ID NO: 190335 - RNA, 18 nt, Artificial Sequence
  Synthetic
cuuuguagcaauugugaa

SEQ ID NO: 190336 - RNA, 19 nt, Artificial Sequence
  Synthetic
ucuuuguagcaauugugaa

SEQ ID NO: 190337 - RNA, 20 nt, Artificial Sequence
  Synthetic
cucuuuguagcaauugugaa

SEQ ID NO: 190338 - RNA, 21 nt, Artificial Sequence
  Synthetic
ucucuuuguagcaauugugaa

SEQ ID NO: 190339 - RNA, 22 nt, Artificial Sequence
  Synthetic
uucucuuuguagcaauugugaa

SEQ ID NO: 190340 - RNA, 23 nt, Artificial Sequence
  Synthetic
auucucuuuguagcaauugugaa

SEQ ID NO: 190341 - RNA, 24 nt, Artificial Sequence
  Synthetic
uauucucuuuguagcaauugugaa

SEQ ID NO: 190342 - RNA, 18 nt, Artificial Sequence
  Synthetic
aaccuuggcuauugugaa

SEQ ID NO: 190343 - RNA, 19 nt, Artificial Sequence
  Synthetic
aaaccuuggcuauugugaa

SEQ ID NO: 190344 - RNA, 20 nt, Artificial Sequence
  Synthetic
caaaccuuggcuauugugaa

SEQ ID NO: 190345 - RNA, 21 nt, Artificial Sequence
  Synthetic
ccaaaccuuggcuauugugaa

SEQ ID NO: 190346 - RNA, 22 nt, Artificial Sequence
  Synthetic
uccaaaccuuggcuauugugaa

SEQ ID NO: 190347 - RNA, 23 nt, Artificial Sequence
  Synthetic
uuccaaaccuuggcuauugugaa

SEQ ID NO: 190348 - RNA, 24 nt, Artificial Sequence
  Synthetic
uuuccaaaccuuggcuauugugaa

SEQ ID NO: 190349 - RNA, 18 nt, Artificial Sequence
  Synthetic
agucuuugcuauugugaa

SEQ ID NO: 190350 - RNA, 19 nt, Artificial Sequence
  Synthetic
aagucuuugcuauugugaa

SEQ ID NO: 190351 - RNA, 20 nt, Artificial Sequence
  Synthetic
caagucuuugcuauugugaa

SEQ ID NO: 190352 - RNA, 18 nt, Artificial Sequence
  Synthetic
auauggaauaaaauugaa

SEQ ID NO: 190353 - RNA, 19 nt, Artificial Sequence
  Synthetic
cauauggaauaaaauugaa

SEQ ID NO: 190354 - RNA, 20 nt, Artificial Sequence
  Synthetic
acauauggaauaaaauugaa

SEQ ID NO: 190355 - RNA, 21 nt, Artificial Sequence
  Synthetic
aacauauggaauaaaauugaa

SEQ ID NO: 190356 - RNA, 22 nt, Artificial Sequence
  Synthetic
uaacauauggaauaaaauugaa

SEQ ID NO: 190357 - RNA, 23 nt, Artificial Sequence
  Synthetic
auaacauauggaauaaaauugaa

SEQ ID NO: 190358 - RNA, 24 nt, Artificial Sequence
  Synthetic
uauaacauauggaauaaaauugaa

SEQ ID NO: 190359 - RNA, 18 nt, Artificial Sequence
  Synthetic
uaauauaaagaaauugaa

SEQ ID NO: 190360 - RNA, 19 nt, Artificial Sequence
  Synthetic
auaauauaaagaaauugaa

SEQ ID NO: 190361 - RNA, 20 nt, Artificial Sequence
  Synthetic
cauaauauaaagaaauugaa

SEQ ID NO: 190362 - RNA, 21 nt, Artificial Sequence
  Synthetic
ucauaauauaaagaaauugaa

SEQ ID NO: 190363 - RNA, 22 nt, Artificial Sequence
  Synthetic
uucauaauauaaagaaauugaa

SEQ ID NO: 190364 - RNA, 23 nt, Artificial Sequence
  Synthetic
auucauaauauaaagaaauugaa

SEQ ID NO: 190365 - RNA, 24 nt, Artificial Sequence
  Synthetic
uauucauaauauaaagaaauugaa

SEQ ID NO: 190366 - RNA, 18 nt, Artificial Sequence
  Synthetic
aucaguggaugaauugaa

SEQ ID NO: 190367 - RNA, 19 nt, Artificial Sequence
  Synthetic
caucaguggaugaauugaa

SEQ ID NO: 190368 - RNA, 20 nt, Artificial Sequence
  Synthetic
ccaucaguggaugaauugaa

SEQ ID NO: 190369 - RNA, 21 nt, Artificial Sequence
  Synthetic
uccaucaguggaugaauugaa

SEQ ID NO: 190370 - RNA, 22 nt, Artificial Sequence
  Synthetic
guccaucaguggaugaauugaa

SEQ ID NO: 190371 - RNA, 23 nt, Artificial Sequence
  Synthetic
cguccaucaguggaugaauugaa

SEQ ID NO: 190372 - RNA, 24 nt, Artificial Sequence
  Synthetic
acguccaucaguggaugaauugaa

SEQ ID NO: 190373 - RNA, 18 nt, Artificial Sequence
  Synthetic
uucuuuaacugaauugaa

SEQ ID NO: 190374 - RNA, 19 nt, Artificial Sequence
  Synthetic
cuucuuuaacugaauugaa

SEQ ID NO: 190375 - RNA, 20 nt, Artificial Sequence
  Synthetic
acuucuuuaacugaauugaa

SEQ ID NO: 190376 - RNA, 21 nt, Artificial Sequence
  Synthetic
aacuucuuuaacugaauugaa

SEQ ID NO: 190377 - RNA, 22 nt, Artificial Sequence
  Synthetic
uaacuucuuuaacugaauugaa

SEQ ID NO: 190378 - RNA, 23 nt, Artificial Sequence
  Synthetic
auaacuucuuuaacugaauugaa

SEQ ID NO: 190379 - RNA, 24 nt, Artificial Sequence
  Synthetic
cauaacuucuuuaacugaauugaa

SEQ ID NO: 190380 - RNA, 18 nt, Artificial Sequence
  Synthetic
agaaaaagcuuaauugaa

SEQ ID NO: 190381 - RNA, 19 nt, Artificial Sequence
  Synthetic
aagaaaaagcuuaauugaa

SEQ ID NO: 190382 - RNA, 20 nt, Artificial Sequence
  Synthetic
aaagaaaaagcuuaauugaa

SEQ ID NO: 190383 - RNA, 21 nt, Artificial Sequence
  Synthetic
aaaagaaaaagcuuaauugaa

SEQ ID NO: 190384 - RNA, 22 nt, Artificial Sequence
  Synthetic
aaaaagaaaaagcuuaauugaa

SEQ ID NO: 190385 - RNA, 23 nt, Artificial Sequence
  Synthetic
caaaaagaaaaagcuuaauugaa

SEQ ID NO: 190386 - RNA, 24 nt, Artificial Sequence
  Synthetic
gcaaaaagaaaaagcuuaauugaa

SEQ ID NO: 190387 - RNA, 18 nt, Artificial Sequence
  Synthetic
gaauguaauuccauugaa

SEQ ID NO: 190388 - RNA, 19 nt, Artificial Sequence
  Synthetic
ugaauguaauuccauugaa

SEQ ID NO: 190389 - RNA, 20 nt, Artificial Sequence
  Synthetic
augaauguaauuccauugaa

SEQ ID NO: 190390 - RNA, 21 nt, Artificial Sequence
  Synthetic
aaugaauguaauuccauugaa

SEQ ID NO: 190391 - RNA, 22 nt, Artificial Sequence
  Synthetic
aaaugaauguaauuccauugaa

SEQ ID NO: 190392 - RNA, 23 nt, Artificial Sequence
  Synthetic
uaaaugaauguaauuccauugaa

SEQ ID NO: 190393 - RNA, 24 nt, Artificial Sequence
  Synthetic
auaaaugaauguaauuccauugaa

SEQ ID NO: 190394 - RNA, 18 nt, Artificial Sequence
  Synthetic
uucauacauaucauugaa

SEQ ID NO: 190395 - RNA, 19 nt, Artificial Sequence
  Synthetic
cuucauacauaucauugaa

SEQ ID NO: 190396 - RNA, 20 nt, Artificial Sequence
  Synthetic
ucuucauacauaucauugaa

SEQ ID NO: 190397 - RNA, 21 nt, Artificial Sequence
  Synthetic
cucuucauacauaucauugaa

SEQ ID NO: 190398 - RNA, 22 nt, Artificial Sequence
  Synthetic
ucucuucauacauaucauugaa

SEQ ID NO: 190399 - RNA, 23 nt, Artificial Sequence
  Synthetic
uucucuucauacauaucauugaa

SEQ ID NO: 190400 - RNA, 24 nt, Artificial Sequence
  Synthetic
uuucucuucauacauaucauugaa

SEQ ID NO: 190401 - RNA, 18 nt, Artificial Sequence
  Synthetic
ucccccuuagucauugaa

SEQ ID NO: 190402 - RNA, 19 nt, Artificial Sequence
  Synthetic
gucccccuuagucauugaa

SEQ ID NO: 190403 - RNA, 20 nt, Artificial Sequence
  Synthetic
agucccccuuagucauugaa

SEQ ID NO: 190404 - RNA, 21 nt, Artificial Sequence
  Synthetic
gagucccccuuagucauugaa

SEQ ID NO: 190405 - RNA, 22 nt, Artificial Sequence
  Synthetic
agagucccccuuagucauugaa

SEQ ID NO: 190406 - RNA, 23 nt, Artificial Sequence
  Synthetic
uagagucccccuuagucauugaa

SEQ ID NO: 190407 - RNA, 24 nt, Artificial Sequence
  Synthetic
uuagagucccccuuagucauugaa

SEQ ID NO: 190408 - RNA, 18 nt, Artificial Sequence
  Synthetic
cagggaacacagauugaa

SEQ ID NO: 190409 - RNA, 19 nt, Artificial Sequence
  Synthetic
ucagggaacacagauugaa

SEQ ID NO: 190410 - RNA, 20 nt, Artificial Sequence
  Synthetic
cucagggaacacagauugaa

SEQ ID NO: 190411 - RNA, 21 nt, Artificial Sequence
  Synthetic
ucucagggaacacagauugaa

SEQ ID NO: 190412 - RNA, 22 nt, Artificial Sequence
  Synthetic
aucucagggaacacagauugaa

SEQ ID NO: 190413 - RNA, 23 nt, Artificial Sequence
  Synthetic
gaucucagggaacacagauugaa

SEQ ID NO: 190414 - RNA, 24 nt, Artificial Sequence
  Synthetic
ggaucucagggaacacagauugaa

SEQ ID NO: 190415 - RNA, 18 nt, Artificial Sequence
  Synthetic
cuuuuacgucagauugaa

SEQ ID NO: 190416 - RNA, 19 nt, Artificial Sequence
  Synthetic
acuuuuacgucagauugaa

SEQ ID NO: 190417 - RNA, 20 nt, Artificial Sequence
  Synthetic
cacuuuuacgucagauugaa

SEQ ID NO: 190418 - RNA, 21 nt, Artificial Sequence
  Synthetic
ccacuuuuacgucagauugaa

SEQ ID NO: 190419 - RNA, 22 nt, Artificial Sequence
  Synthetic
uccacuuuuacgucagauugaa

SEQ ID NO: 190420 - RNA, 23 nt, Artificial Sequence
  Synthetic
uuccacuuuuacgucagauugaa

SEQ ID NO: 190421 - RNA, 24 nt, Artificial Sequence
  Synthetic
auuccacuuuuacgucagauugaa

SEQ ID NO: 190422 - RNA, 18 nt, Artificial Sequence
  Synthetic
aagguaaauuggauugaa

SEQ ID NO: 190423 - RNA, 19 nt, Artificial Sequence
  Synthetic
aaagguaaauuggauugaa

SEQ ID NO: 190424 - RNA, 20 nt, Artificial Sequence
  Synthetic
aaaagguaaauuggauugaa

SEQ ID NO: 190425 - RNA, 21 nt, Artificial Sequence
  Synthetic
aaaaagguaaauuggauugaa

SEQ ID NO: 190426 - RNA, 22 nt, Artificial Sequence
  Synthetic
uaaaaagguaaauuggauugaa

SEQ ID NO: 190427 - RNA, 23 nt, Artificial Sequence
  Synthetic
uuaaaaagguaaauuggauugaa

SEQ ID NO: 190428 - RNA, 24 nt, Artificial Sequence
  Synthetic
uuuaaaaagguaaauuggauugaa

SEQ ID NO: 190429 - RNA, 18 nt, Artificial Sequence
  Synthetic
uuuuucaguuggauugaa

SEQ ID NO: 190430 - RNA, 19 nt, Artificial Sequence
  Synthetic
auuuuucaguuggauugaa

SEQ ID NO: 190431 - RNA, 20 nt, Artificial Sequence
  Synthetic
aauuuuucaguuggauugaa

SEQ ID NO: 190432 - RNA, 21 nt, Artificial Sequence
  Synthetic
aaauuuuucaguuggauugaa

SEQ ID NO: 190433 - RNA, 22 nt, Artificial Sequence
  Synthetic
caaauuuuucaguuggauugaa

SEQ ID NO: 190434 - RNA, 23 nt, Artificial Sequence
  Synthetic
ucaaauuuuucaguuggauugaa

SEQ ID NO: 190435 - RNA, 24 nt, Artificial Sequence
  Synthetic
uucaaauuuuucaguuggauugaa

SEQ ID NO: 190436 - RNA, 18 nt, Artificial Sequence
  Synthetic
uuuacauuugugauugaa

SEQ ID NO: 190437 - RNA, 19 nt, Artificial Sequence
  Synthetic
cuuuacauuugugauugaa

SEQ ID NO: 190438 - RNA, 20 nt, Artificial Sequence
  Synthetic
ucuuuacauuugugauugaa

SEQ ID NO: 190439 - RNA, 21 nt, Artificial Sequence
  Synthetic
uucuuuacauuugugauugaa

SEQ ID NO: 190440 - RNA, 22 nt, Artificial Sequence
  Synthetic
guucuuuacauuugugauugaa

SEQ ID NO: 190441 - RNA, 23 nt, Artificial Sequence
  Synthetic
uguucuuuacauuugugauugaa

SEQ ID NO: 190442 - RNA, 24 nt, Artificial Sequence
  Synthetic
cuguucuuuacauuugugauugaa

SEQ ID NO: 190443 - RNA, 18 nt, Artificial Sequence
  Synthetic
aagacauccccuauugaa

SEQ ID NO: 190444 - RNA, 19 nt, Artificial Sequence
  Synthetic
uaagacauccccuauugaa

SEQ ID NO: 190445 - RNA, 20 nt, Artificial Sequence
  Synthetic
cuaagacauccccuauugaa

SEQ ID NO: 190446 - RNA, 21 nt, Artificial Sequence
  Synthetic
ccuaagacauccccuauugaa

SEQ ID NO: 190447 - RNA, 22 nt, Artificial Sequence
  Synthetic
uccuaagacauccccuauugaa

SEQ ID NO: 190448 - RNA, 23 nt, Artificial Sequence
  Synthetic
guccuaagacauccccuauugaa

SEQ ID NO: 190449 - RNA, 24 nt, Artificial Sequence
  Synthetic
gguccuaagacauccccuauugaa

SEQ ID NO: 190450 - RNA, 18 nt, Artificial Sequence
  Synthetic
acuguuuucccuauugaa

SEQ ID NO: 190451 - RNA, 19 nt, Artificial Sequence
  Synthetic
gacuguuuucccuauugaa

SEQ ID NO: 190452 - RNA, 20 nt, Artificial Sequence
  Synthetic
agacuguuuucccuauugaa

SEQ ID NO: 190453 - RNA, 21 nt, Artificial Sequence
  Synthetic
uagacuguuuucccuauugaa

SEQ ID NO: 190454 - RNA, 22 nt, Artificial Sequence
  Synthetic
auagacuguuuucccuauugaa

SEQ ID NO: 190455 - RNA, 23 nt, Artificial Sequence
  Synthetic
uauagacuguuuucccuauugaa

SEQ ID NO: 190456 - RNA, 24 nt, Artificial Sequence
  Synthetic
auauagacuguuuucccuauugaa

SEQ ID NO: 190457 - RNA, 18 nt, Artificial Sequence
  Synthetic
aaaaagaaugguauugaa

SEQ ID NO: 190458 - RNA, 19 nt, Artificial Sequence
  Synthetic
gaaaaagaaugguauugaa

SEQ ID NO: 190459 - RNA, 20 nt, Artificial Sequence
  Synthetic
ggaaaaagaaugguauugaa

SEQ ID NO: 190460 - RNA, 21 nt, Artificial Sequence
  Synthetic
uggaaaaagaaugguauugaa

SEQ ID NO: 190461 - RNA, 22 nt, Artificial Sequence
  Synthetic
auggaaaaagaaugguauugaa

SEQ ID NO: 190462 - RNA, 23 nt, Artificial Sequence
  Synthetic
uauggaaaaagaaugguauugaa

SEQ ID NO: 190463 - RNA, 24 nt, Artificial Sequence
  Synthetic
auauggaaaaagaaugguauugaa

SEQ ID NO: 190464 - RNA, 18 nt, Artificial Sequence
  Synthetic
uucaauagauguauugaa

SEQ ID NO: 190465 - RNA, 19 nt, Artificial Sequence
  Synthetic
uuucaauagauguauugaa

SEQ ID NO: 190466 - RNA, 20 nt, Artificial Sequence
  Synthetic
guuucaauagauguauugaa

SEQ ID NO: 190467 - RNA, 21 nt, Artificial Sequence
  Synthetic
gguuucaauagauguauugaa

SEQ ID NO: 190468 - RNA, 22 nt, Artificial Sequence
  Synthetic
ugguuucaauagauguauugaa

SEQ ID NO: 190469 - RNA, 23 nt, Artificial Sequence
  Synthetic
augguuucaauagauguauugaa

SEQ ID NO: 190470 - RNA, 24 nt, Artificial Sequence
  Synthetic
uaugguuucaauagauguauugaa

SEQ ID NO: 190471 - RNA, 18 nt, Artificial Sequence
  Synthetic
gacaaguucuuuauugaa

SEQ ID NO: 190472 - RNA, 19 nt, Artificial Sequence
  Synthetic
ggacaaguucuuuauugaa

SEQ ID NO: 190473 - RNA, 20 nt, Artificial Sequence
  Synthetic
gggacaaguucuuuauugaa

SEQ ID NO: 190474 - RNA, 21 nt, Artificial Sequence
  Synthetic
ugggacaaguucuuuauugaa

SEQ ID NO: 190475 - RNA, 22 nt, Artificial Sequence
  Synthetic
cugggacaaguucuuuauugaa

SEQ ID NO: 190476 - RNA, 23 nt, Artificial Sequence
  Synthetic
gcugggacaaguucuuuauugaa

SEQ ID NO: 190477 - RNA, 24 nt, Artificial Sequence
  Synthetic
ugcugggacaaguucuuuauugaa

SEQ ID NO: 190478 - RNA, 18 nt, Artificial Sequence
  Synthetic
gauuuauuuuuuauugaa

SEQ ID NO: 190479 - RNA, 19 nt, Artificial Sequence
  Synthetic
ggauuuauuuuuuauugaa

SEQ ID NO: 190480 - RNA, 20 nt, Artificial Sequence
  Synthetic
uggauuuauuuuuuauugaa

SEQ ID NO: 190481 - RNA, 21 nt, Artificial Sequence
  Synthetic
uuggauuuauuuuuuauugaa

SEQ ID NO: 190482 - RNA, 22 nt, Artificial Sequence
  Synthetic
auuggauuuauuuuuuauugaa

SEQ ID NO: 190483 - RNA, 23 nt, Artificial Sequence
  Synthetic
uauuggauuuauuuuuuauugaa

SEQ ID NO: 190484 - RNA, 24 nt, Artificial Sequence
  Synthetic
guauuggauuuauuuuuuauugaa

SEQ ID NO: 190485 - RNA, 18 nt, Artificial Sequence
  Synthetic
uagucuaaaaaacuugaa

SEQ ID NO: 190486 - RNA, 19 nt, Artificial Sequence
  Synthetic
cuagucuaaaaaacuugaa

SEQ ID NO: 190487 - RNA, 20 nt, Artificial Sequence
  Synthetic
gcuagucuaaaaaacuugaa

SEQ ID NO: 190488 - RNA, 21 nt, Artificial Sequence
  Synthetic
agcuagucuaaaaaacuugaa

SEQ ID NO: 190489 - RNA, 22 nt, Artificial Sequence
  Synthetic
uagcuagucuaaaaaacuugaa

SEQ ID NO: 190490 - RNA, 23 nt, Artificial Sequence
  Synthetic
auagcuagucuaaaaaacuugaa

SEQ ID NO: 190491 - RNA, 24 nt, Artificial Sequence
  Synthetic
cauagcuagucuaaaaaacuugaa

SEQ ID NO: 190492 - RNA, 18 nt, Artificial Sequence
  Synthetic
cuauuuuggugacuugaa

SEQ ID NO: 190493 - RNA, 19 nt, Artificial Sequence
  Synthetic
gcuauuuuggugacuugaa

SEQ ID NO: 190494 - RNA, 20 nt, Artificial Sequence
  Synthetic
ggcuauuuuggugacuugaa

SEQ ID NO: 190495 - RNA, 21 nt, Artificial Sequence
  Synthetic
gggcuauuuuggugacuugaa

SEQ ID NO: 190496 - RNA, 22 nt, Artificial Sequence
  Synthetic
agggcuauuuuggugacuugaa

SEQ ID NO: 190497 - RNA, 23 nt, Artificial Sequence
  Synthetic
uagggcuauuuuggugacuugaa

SEQ ID NO: 190498 - RNA, 24 nt, Artificial Sequence
  Synthetic
cuagggcuauuuuggugacuugaa

SEQ ID NO: 190499 - RNA, 18 nt, Artificial Sequence
  Synthetic
gcuguuuuguuacuugaa

SEQ ID NO: 190500 - RNA, 19 nt, Artificial Sequence
  Synthetic
agcuguuuuguuacuugaa

SEQ ID NO: 190501 - RNA, 20 nt, Artificial Sequence
  Synthetic
aagcuguuuuguuacuugaa

SEQ ID NO: 190502 - RNA, 21 nt, Artificial Sequence
  Synthetic
uaagcuguuuuguuacuugaa

SEQ ID NO: 190503 - RNA, 22 nt, Artificial Sequence
  Synthetic
uuaagcuguuuuguuacuugaa

SEQ ID NO: 190504 - RNA, 23 nt, Artificial Sequence
  Synthetic
auuaagcuguuuuguuacuugaa

SEQ ID NO: 190505 - RNA, 24 nt, Artificial Sequence
  Synthetic
uauuaagcuguuuuguuacuugaa

SEQ ID NO: 190506 - RNA, 18 nt, Artificial Sequence
  Synthetic
gccuuccugcagcuugaa

SEQ ID NO: 190507 - RNA, 19 nt, Artificial Sequence
  Synthetic
ugccuuccugcagcuugaa

SEQ ID NO: 190508 - RNA, 20 nt, Artificial Sequence
  Synthetic
augccuuccugcagcuugaa

SEQ ID NO: 190509 - RNA, 21 nt, Artificial Sequence
  Synthetic
caugccuuccugcagcuugaa

SEQ ID NO: 190510 - RNA, 22 nt, Artificial Sequence
  Synthetic
acaugccuuccugcagcuugaa

SEQ ID NO: 190511 - RNA, 23 nt, Artificial Sequence
  Synthetic
uacaugccuuccugcagcuugaa

SEQ ID NO: 190512 - RNA, 24 nt, Artificial Sequence
  Synthetic
guacaugccuuccugcagcuugaa

SEQ ID NO: 190513 - RNA, 18 nt, Artificial Sequence
  Synthetic
ccugccuuugagcuugaa

SEQ ID NO: 190514 - RNA, 19 nt, Artificial Sequence
  Synthetic
uccugccuuugagcuugaa

SEQ ID NO: 190515 - RNA, 20 nt, Artificial Sequence
  Synthetic
uuccugccuuugagcuugaa

SEQ ID NO: 190516 - RNA, 21 nt, Artificial Sequence
  Synthetic
uuuccugccuuugagcuugaa

SEQ ID NO: 190517 - RNA, 22 nt, Artificial Sequence
  Synthetic
uuuuccugccuuugagcuugaa

SEQ ID NO: 190518 - RNA, 23 nt, Artificial Sequence
  Synthetic
cuuuuccugccuuugagcuugaa

SEQ ID NO: 190519 - RNA, 24 nt, Artificial Sequence
  Synthetic
ucuuuuccugccuuugagcuugaa

SEQ ID NO: 190520 - RNA, 18 nt, Artificial Sequence
  Synthetic
uuuuaugugaggcuugaa

SEQ ID NO: 190521 - RNA, 19 nt, Artificial Sequence
  Synthetic
auuuuaugugaggcuugaa

SEQ ID NO: 190522 - RNA, 20 nt, Artificial Sequence
  Synthetic
aauuuuaugugaggcuugaa

SEQ ID NO: 190523 - RNA, 21 nt, Artificial Sequence
  Synthetic
aaauuuuaugugaggcuugaa

SEQ ID NO: 190524 - RNA, 22 nt, Artificial Sequence
  Synthetic
aaaauuuuaugugaggcuugaa

SEQ ID NO: 190525 - RNA, 23 nt, Artificial Sequence
  Synthetic
uaaaauuuuaugugaggcuugaa

SEQ ID NO: 190526 - RNA, 24 nt, Artificial Sequence
  Synthetic
uuaaaauuuuaugugaggcuugaa

SEQ ID NO: 190527 - RNA, 18 nt, Artificial Sequence
  Synthetic
ugugaauacauucuugaa

SEQ ID NO: 190528 - RNA, 19 nt, Artificial Sequence
  Synthetic
uugugaauacauucuugaa

SEQ ID NO: 190529 - RNA, 20 nt, Artificial Sequence
  Synthetic
uuugugaauacauucuugaa

SEQ ID NO: 190530 - RNA, 21 nt, Artificial Sequence
  Synthetic
auuugugaauacauucuugaa

SEQ ID NO: 190531 - RNA, 22 nt, Artificial Sequence
  Synthetic
cauuugugaauacauucuugaa

SEQ ID NO: 190532 - RNA, 23 nt, Artificial Sequence
  Synthetic
acauuugugaauacauucuugaa

SEQ ID NO: 190533 - RNA, 24 nt, Artificial Sequence
  Synthetic
cacauuugugaauacauucuugaa

SEQ ID NO: 190534 - RNA, 18 nt, Artificial Sequence
  Synthetic
guuugaaauuaaguugaa

SEQ ID NO: 190535 - RNA, 19 nt, Artificial Sequence
  Synthetic
uguuugaaauuaaguugaa

SEQ ID NO: 190536 - RNA, 20 nt, Artificial Sequence
  Synthetic
uuguuugaaauuaaguugaa

SEQ ID NO: 190537 - RNA, 21 nt, Artificial Sequence
  Synthetic
uuuguuugaaauuaaguugaa

SEQ ID NO: 190538 - RNA, 22 nt, Artificial Sequence
  Synthetic
uuuuguuugaaauuaaguugaa

SEQ ID NO: 190539 - RNA, 23 nt, Artificial Sequence
  Synthetic
auuuuguuugaaauuaaguugaa

SEQ ID NO: 190540 - RNA, 24 nt, Artificial Sequence
  Synthetic
aauuuuguuugaaauuaaguugaa

SEQ ID NO: 190541 - RNA, 18 nt, Artificial Sequence
  Synthetic
uacuuguucucaguugaa

SEQ ID NO: 190542 - RNA, 19 nt, Artificial Sequence
  Synthetic
guacuuguucucaguugaa

SEQ ID NO: 190543 - RNA, 20 nt, Artificial Sequence
  Synthetic
uguacuuguucucaguugaa

SEQ ID NO: 190544 - RNA, 21 nt, Artificial Sequence
  Synthetic
auguacuuguucucaguugaa

SEQ ID NO: 190545 - RNA, 22 nt, Artificial Sequence
  Synthetic
aauguacuuguucucaguugaa

SEQ ID NO: 190546 - RNA, 23 nt, Artificial Sequence
  Synthetic
aaauguacuuguucucaguugaa

SEQ ID NO: 190547 - RNA, 24 nt, Artificial Sequence
  Synthetic
caaauguacuuguucucaguugaa

SEQ ID NO: 190548 - RNA, 18 nt, Artificial Sequence
  Synthetic
cauuuuuuaaucguugaa

SEQ ID NO: 190549 - RNA, 19 nt, Artificial Sequence
  Synthetic
acauuuuuuaaucguugaa

SEQ ID NO: 190550 - RNA, 20 nt, Artificial Sequence
  Synthetic
uacauuuuuuaaucguugaa

SEQ ID NO: 190551 - RNA, 21 nt, Artificial Sequence
  Synthetic
auacauuuuuuaaucguugaa

SEQ ID NO: 190552 - RNA, 22 nt, Artificial Sequence
  Synthetic
gauacauuuuuuaaucguugaa

SEQ ID NO: 190553 - RNA, 23 nt, Artificial Sequence
  Synthetic
agauacauuuuuuaaucguugaa

SEQ ID NO: 190554 - RNA, 24 nt, Artificial Sequence
  Synthetic
uagauacauuuuuuaaucguugaa

SEQ ID NO: 190555 - RNA, 18 nt, Artificial Sequence
  Synthetic
ggauucaccaagguugaa

SEQ ID NO: 190556 - RNA, 19 nt, Artificial Sequence
  Synthetic
cggauucaccaagguugaa

SEQ ID NO: 190557 - RNA, 20 nt, Artificial Sequence
  Synthetic
ucggauucaccaagguugaa

SEQ ID NO: 190558 - RNA, 21 nt, Artificial Sequence
  Synthetic
aucggauucaccaagguugaa

SEQ ID NO: 190559 - RNA, 22 nt, Artificial Sequence
  Synthetic
aaucggauucaccaagguugaa

SEQ ID NO: 190560 - RNA, 23 nt, Artificial Sequence
  Synthetic
uaaucggauucaccaagguugaa

SEQ ID NO: 190561 - RNA, 24 nt, Artificial Sequence
  Synthetic
auaaucggauucaccaagguugaa

SEQ ID NO: 190562 - RNA, 18 nt, Artificial Sequence
  Synthetic
ugggaggcggagguugaa

SEQ ID NO: 190563 - RNA, 19 nt, Artificial Sequence
  Synthetic
uugggaggcggagguugaa

SEQ ID NO: 190564 - RNA, 20 nt, Artificial Sequence
  Synthetic
cuugggaggcggagguugaa

SEQ ID NO: 190565 - RNA, 21 nt, Artificial Sequence
  Synthetic
acuugggaggcggagguugaa

SEQ ID NO: 190566 - RNA, 22 nt, Artificial Sequence
  Synthetic
aacuugggaggcggagguugaa

SEQ ID NO: 190567 - RNA, 23 nt, Artificial Sequence
  Synthetic
gaacuugggaggcggagguugaa

SEQ ID NO: 190568 - RNA, 24 nt, Artificial Sequence
  Synthetic
ugaacuugggaggcggagguugaa

SEQ ID NO: 190569 - RNA, 18 nt, Artificial Sequence
  Synthetic
gaaauugaugagguugaa

SEQ ID NO: 190570 - RNA, 19 nt, Artificial Sequence
  Synthetic
agaaauugaugagguugaa

SEQ ID NO: 190571 - RNA, 20 nt, Artificial Sequence
  Synthetic
aagaaauugaugagguugaa

SEQ ID NO: 190572 - RNA, 21 nt, Artificial Sequence
  Synthetic
gaagaaauugaugagguugaa

SEQ ID NO: 190573 - RNA, 22 nt, Artificial Sequence
  Synthetic
ggaagaaauugaugagguugaa

SEQ ID NO: 190574 - RNA, 23 nt, Artificial Sequence
  Synthetic
aggaagaaauugaugagguugaa

SEQ ID NO: 190575 - RNA, 24 nt, Artificial Sequence
  Synthetic
gaggaagaaauugaugagguugaa

SEQ ID NO: 190576 - RNA, 18 nt, Artificial Sequence
  Synthetic
uagguucaugggguugaa

SEQ ID NO: 190577 - RNA, 19 nt, Artificial Sequence
  Synthetic
uuagguucaugggguugaa

SEQ ID NO: 190578 - RNA, 20 nt, Artificial Sequence
  Synthetic
uuuagguucaugggguugaa

SEQ ID NO: 190579 - RNA, 21 nt, Artificial Sequence
  Synthetic
auuuagguucaugggguugaa

SEQ ID NO: 190580 - RNA, 22 nt, Artificial Sequence
  Synthetic
uauuuagguucaugggguugaa

SEQ ID NO: 190581 - RNA, 23 nt, Artificial Sequence
  Synthetic
uuauuuagguucaugggguugaa

SEQ ID NO: 190582 - RNA, 24 nt, Artificial Sequence
  Synthetic
guuauuuagguucaugggguugaa

SEQ ID NO: 190583 - RNA, 18 nt, Artificial Sequence
  Synthetic
uguucuuaauugguugaa

SEQ ID NO: 190584 - RNA, 19 nt, Artificial Sequence
  Synthetic
auguucuuaauugguugaa

SEQ ID NO: 190585 - RNA, 20 nt, Artificial Sequence
  Synthetic
uauguucuuaauugguugaa

SEQ ID NO: 190586 - RNA, 21 nt, Artificial Sequence
  Synthetic
uuauguucuuaauugguugaa

SEQ ID NO: 190587 - RNA, 22 nt, Artificial Sequence
  Synthetic
auuauguucuuaauugguugaa

SEQ ID NO: 190588 - RNA, 23 nt, Artificial Sequence
  Synthetic
aauuauguucuuaauugguugaa

SEQ ID NO: 190589 - RNA, 24 nt, Artificial Sequence
  Synthetic
caauuauguucuuaauugguugaa

SEQ ID NO: 190590 - RNA, 18 nt, Artificial Sequence
  Synthetic
uaauaauuguugguugaa

SEQ ID NO: 190591 - RNA, 19 nt, Artificial Sequence
  Synthetic
auaauaauuguugguugaa

SEQ ID NO: 190592 - RNA, 20 nt, Artificial Sequence
  Synthetic
aauaauaauuguugguugaa

SEQ ID NO: 190593 - RNA, 21 nt, Artificial Sequence
  Synthetic
uaauaauaauuguugguugaa

SEQ ID NO: 190594 - RNA, 22 nt, Artificial Sequence
  Synthetic
uuaauaauaauuguugguugaa

SEQ ID NO: 190595 - RNA, 23 nt, Artificial Sequence
  Synthetic
guuaauaauaauuguugguugaa

SEQ ID NO: 190596 - RNA, 24 nt, Artificial Sequence
  Synthetic
uguuaauaauaauuguugguugaa

SEQ ID NO: 190597 - RNA, 18 nt, Artificial Sequence
  Synthetic
uuccaacacuauguugaa

SEQ ID NO: 190598 - RNA, 19 nt, Artificial Sequence
  Synthetic
cuuccaacacuauguugaa

SEQ ID NO: 190599 - RNA, 20 nt, Artificial Sequence
  Synthetic
acuuccaacacuauguugaa

SEQ ID NO: 190600 - RNA, 18 nt, Artificial Sequence
  Synthetic
uuccaauacuauguugaa

SEQ ID NO: 190601 - RNA, 19 nt, Artificial Sequence
  Synthetic
cuuccaauacuauguugaa

SEQ ID NO: 190602 - RNA, 20 nt, Artificial Sequence
  Synthetic
acuuccaauacuauguugaa

SEQ ID NO: 190603 - RNA, 21 nt, Artificial Sequence
  Synthetic
gacuuccaauacuauguugaa

SEQ ID NO: 190604 - RNA, 22 nt, Artificial Sequence
  Synthetic
ggacuuccaauacuauguugaa

SEQ ID NO: 190605 - RNA, 23 nt, Artificial Sequence
  Synthetic
aggacuuccaauacuauguugaa

SEQ ID NO: 190606 - RNA, 24 nt, Artificial Sequence
  Synthetic
caggacuuccaauacuauguugaa

SEQ ID NO: 190607 - RNA, 18 nt, Artificial Sequence
  Synthetic
cccaagucuccuguugaa

SEQ ID NO: 190608 - RNA, 19 nt, Artificial Sequence
  Synthetic
gcccaagucuccuguugaa

SEQ ID NO: 190609 - RNA, 20 nt, Artificial Sequence
  Synthetic
ugcccaagucuccuguugaa

SEQ ID NO: 190610 - RNA, 21 nt, Artificial Sequence
  Synthetic
cugcccaagucuccuguugaa

SEQ ID NO: 190611 - RNA, 22 nt, Artificial Sequence
  Synthetic
ucugcccaagucuccuguugaa

SEQ ID NO: 190612 - RNA, 23 nt, Artificial Sequence
  Synthetic
cucugcccaagucuccuguugaa

SEQ ID NO: 190613 - RNA, 24 nt, Artificial Sequence
  Synthetic
ccucugcccaagucuccuguugaa

SEQ ID NO: 190614 - RNA, 18 nt, Artificial Sequence
  Synthetic
uacaaaaagaguguugaa

SEQ ID NO: 190615 - RNA, 19 nt, Artificial Sequence
  Synthetic
auacaaaaagaguguugaa

SEQ ID NO: 190616 - RNA, 20 nt, Artificial Sequence
  Synthetic
gauacaaaaagaguguugaa

SEQ ID NO: 190617 - RNA, 21 nt, Artificial Sequence
  Synthetic
agauacaaaaagaguguugaa

SEQ ID NO: 190618 - RNA, 22 nt, Artificial Sequence
  Synthetic
aagauacaaaaagaguguugaa

SEQ ID NO: 190619 - RNA, 23 nt, Artificial Sequence
  Synthetic
aaagauacaaaaagaguguugaa

SEQ ID NO: 190620 - RNA, 24 nt, Artificial Sequence
  Synthetic
gaaagauacaaaaagaguguugaa

SEQ ID NO: 190621 - RNA, 18 nt, Artificial Sequence
  Synthetic
ugagcugcauguguugaa

SEQ ID NO: 190622 - RNA, 19 nt, Artificial Sequence
  Synthetic
uugagcugcauguguugaa

SEQ ID NO: 190623 - RNA, 20 nt, Artificial Sequence
  Synthetic
cuugagcugcauguguugaa

SEQ ID NO: 190624 - RNA, 21 nt, Artificial Sequence
  Synthetic
ucuugagcugcauguguugaa

SEQ ID NO: 190625 - RNA, 22 nt, Artificial Sequence
  Synthetic
uucuugagcugcauguguugaa

SEQ ID NO: 190626 - RNA, 23 nt, Artificial Sequence
  Synthetic
guucuugagcugcauguguugaa

SEQ ID NO: 190627 - RNA, 24 nt, Artificial Sequence
  Synthetic
aguucuugagcugcauguguugaa

SEQ ID NO: 190628 - RNA, 18 nt, Artificial Sequence
  Synthetic
auuuuuaaacuuguugaa

SEQ ID NO: 190629 - RNA, 19 nt, Artificial Sequence
  Synthetic
aauuuuuaaacuuguugaa

SEQ ID NO: 190630 - RNA, 20 nt, Artificial Sequence
  Synthetic
gaauuuuuaaacuuguugaa

SEQ ID NO: 190631 - RNA, 21 nt, Artificial Sequence
  Synthetic
ugaauuuuuaaacuuguugaa

SEQ ID NO: 190632 - RNA, 22 nt, Artificial Sequence
  Synthetic
augaauuuuuaaacuuguugaa

SEQ ID NO: 190633 - RNA, 23 nt, Artificial Sequence
  Synthetic
aaugaauuuuuaaacuuguugaa

SEQ ID NO: 190634 - RNA, 24 nt, Artificial Sequence
  Synthetic
gaaugaauuuuuaaacuuguugaa

SEQ ID NO: 190635 - RNA, 18 nt, Artificial Sequence
  Synthetic
gaggaaaugacauuugaa

SEQ ID NO: 190636 - RNA, 19 nt, Artificial Sequence
  Synthetic
ugaggaaaugacauuugaa

SEQ ID NO: 190637 - RNA, 20 nt, Artificial Sequence
  Synthetic
uugaggaaaugacauuugaa

SEQ ID NO: 190638 - RNA, 21 nt, Artificial Sequence
  Synthetic
uuugaggaaaugacauuugaa

SEQ ID NO: 190639 - RNA, 22 nt, Artificial Sequence
  Synthetic
guuugaggaaaugacauuugaa

SEQ ID NO: 190640 - RNA, 23 nt, Artificial Sequence
  Synthetic
uguuugaggaaaugacauuugaa

SEQ ID NO: 190641 - RNA, 24 nt, Artificial Sequence
  Synthetic
uuguuugaggaaaugacauuugaa

SEQ ID NO: 190642 - RNA, 18 nt, Artificial Sequence
  Synthetic
uaugaggugacauuugaa

SEQ ID NO: 190643 - RNA, 19 nt, Artificial Sequence
  Synthetic
cuaugaggugacauuugaa

SEQ ID NO: 190644 - RNA, 20 nt, Artificial Sequence
  Synthetic
ucuaugaggugacauuugaa

SEQ ID NO: 190645 - RNA, 21 nt, Artificial Sequence
  Synthetic
cucuaugaggugacauuugaa

SEQ ID NO: 190646 - RNA, 22 nt, Artificial Sequence
  Synthetic
ccucuaugaggugacauuugaa

SEQ ID NO: 190647 - RNA, 23 nt, Artificial Sequence
  Synthetic
accucuaugaggugacauuugaa

SEQ ID NO: 190648 - RNA, 24 nt, Artificial Sequence
  Synthetic
gaccucuaugaggugacauuugaa

SEQ ID NO: 190649 - RNA, 18 nt, Artificial Sequence
  Synthetic
uaauaaugcugauuugaa

SEQ ID NO: 190650 - RNA, 19 nt, Artificial Sequence
  Synthetic
auaauaaugcugauuugaa

SEQ ID NO: 190651 - RNA, 20 nt, Artificial Sequence
  Synthetic
uauaauaaugcugauuugaa

SEQ ID NO: 190652 - RNA, 21 nt, Artificial Sequence
  Synthetic
auauaauaaugcugauuugaa

SEQ ID NO: 190653 - RNA, 22 nt, Artificial Sequence
  Synthetic
aauauaauaaugcugauuugaa

SEQ ID NO: 190654 - RNA, 23 nt, Artificial Sequence
  Synthetic
uaauauaauaaugcugauuugaa

SEQ ID NO: 190655 - RNA, 24 nt, Artificial Sequence
  Synthetic
auaauauaauaaugcugauuugaa

SEQ ID NO: 190656 - RNA, 18 nt, Artificial Sequence
  Synthetic
uuuauuuuaauauuugaa

SEQ ID NO: 190657 - RNA, 19 nt, Artificial Sequence
  Synthetic
guuuauuuuaauauuugaa

SEQ ID NO: 190658 - RNA, 20 nt, Artificial Sequence
  Synthetic
uguuuauuuuaauauuugaa

SEQ ID NO: 190659 - RNA, 21 nt, Artificial Sequence
  Synthetic
cuguuuauuuuaauauuugaa

SEQ ID NO: 190660 - RNA, 22 nt, Artificial Sequence
  Synthetic
ccuguuuauuuuaauauuugaa

SEQ ID NO: 190661 - RNA, 23 nt, Artificial Sequence
  Synthetic
uccuguuuauuuuaauauuugaa

SEQ ID NO: 190662 - RNA, 24 nt, Artificial Sequence
  Synthetic
guccuguuuauuuuaauauuugaa

SEQ ID NO: 190663 - RNA, 18 nt, Artificial Sequence
  Synthetic
auuugagacauauuugaa

SEQ ID NO: 190664 - RNA, 19 nt, Artificial Sequence
  Synthetic
aauuugagacauauuugaa

SEQ ID NO: 190665 - RNA, 20 nt, Artificial Sequence
  Synthetic
uaauuugagacauauuugaa

SEQ ID NO: 190666 - RNA, 21 nt, Artificial Sequence
  Synthetic
auaauuugagacauauuugaa

SEQ ID NO: 190667 - RNA, 22 nt, Artificial Sequence
  Synthetic
aauaauuugagacauauuugaa

SEQ ID NO: 190668 - RNA, 23 nt, Artificial Sequence
  Synthetic
aaauaauuugagacauauuugaa

SEQ ID NO: 190669 - RNA, 24 nt, Artificial Sequence
  Synthetic
uaaauaauuugagacauauuugaa

SEQ ID NO: 190670 - RNA, 18 nt, Artificial Sequence
  Synthetic
uuugaugugauauuugaa

SEQ ID NO: 190671 - RNA, 19 nt, Artificial Sequence
  Synthetic
cuuugaugugauauuugaa

SEQ ID NO: 190672 - RNA, 20 nt, Artificial Sequence
  Synthetic
ucuuugaugugauauuugaa

SEQ ID NO: 190673 - RNA, 21 nt, Artificial Sequence
  Synthetic
cucuuugaugugauauuugaa

SEQ ID NO: 190674 - RNA, 22 nt, Artificial Sequence
  Synthetic
ccucuuugaugugauauuugaa

SEQ ID NO: 190675 - RNA, 23 nt, Artificial Sequence
  Synthetic
accucuuugaugugauauuugaa

SEQ ID NO: 190676 - RNA, 24 nt, Artificial Sequence
  Synthetic
gaccucuuugaugugauauuugaa

SEQ ID NO: 190677 - RNA, 18 nt, Artificial Sequence
  Synthetic
uugaucagauuauuugaa

SEQ ID NO: 190678 - RNA, 19 nt, Artificial Sequence
  Synthetic
auugaucagauuauuugaa

SEQ ID NO: 190679 - RNA, 20 nt, Artificial Sequence
  Synthetic
gauugaucagauuauuugaa

SEQ ID NO: 190680 - RNA, 21 nt, Artificial Sequence
  Synthetic
agauugaucagauuauuugaa

SEQ ID NO: 190681 - RNA, 22 nt, Artificial Sequence
  Synthetic
aagauugaucagauuauuugaa

SEQ ID NO: 190682 - RNA, 23 nt, Artificial Sequence
  Synthetic
aaagauugaucagauuauuugaa

SEQ ID NO: 190683 - RNA, 24 nt, Artificial Sequence
  Synthetic
aaaagauugaucagauuauuugaa

SEQ ID NO: 190684 - RNA, 18 nt, Artificial Sequence
  Synthetic
auuuauagauuauuugaa

SEQ ID NO: 190685 - RNA, 19 nt, Artificial Sequence
  Synthetic
aauuuauagauuauuugaa

SEQ ID NO: 190686 - RNA, 20 nt, Artificial Sequence
  Synthetic
gaauuuauagauuauuugaa

SEQ ID NO: 190687 - RNA, 21 nt, Artificial Sequence
  Synthetic
ugaauuuauagauuauuugaa

SEQ ID NO: 190688 - RNA, 22 nt, Artificial Sequence
  Synthetic
uugaauuuauagauuauuugaa

SEQ ID NO: 190689 - RNA, 23 nt, Artificial Sequence
  Synthetic
auugaauuuauagauuauuugaa

SEQ ID NO: 190690 - RNA, 24 nt, Artificial Sequence
  Synthetic
cauugaauuuauagauuauuugaa

SEQ ID NO: 190691 - RNA, 18 nt, Artificial Sequence
  Synthetic
uugaaaaccuuauuugaa

SEQ ID NO: 190692 - RNA, 19 nt, Artificial Sequence
  Synthetic
uuugaaaaccuuauuugaa

SEQ ID NO: 190693 - RNA, 20 nt, Artificial Sequence
  Synthetic
uuuugaaaaccuuauuugaa

SEQ ID NO: 190694 - RNA, 21 nt, Artificial Sequence
  Synthetic
auuuugaaaaccuuauuugaa

SEQ ID NO: 190695 - RNA, 22 nt, Artificial Sequence
  Synthetic
uauuuugaaaaccuuauuugaa

SEQ ID NO: 190696 - RNA, 23 nt, Artificial Sequence
  Synthetic
auauuuugaaaaccuuauuugaa

SEQ ID NO: 190697 - RNA, 24 nt, Artificial Sequence
  Synthetic
cauauuuugaaaaccuuauuugaa

SEQ ID NO: 190698 - RNA, 18 nt, Artificial Sequence
  Synthetic
cugagugguaacuuugaa

SEQ ID NO: 190699 - RNA, 19 nt, Artificial Sequence
  Synthetic
ucugagugguaacuuugaa

SEQ ID NO: 190700 - RNA, 20 nt, Artificial Sequence
  Synthetic
uucugagugguaacuuugaa

SEQ ID NO: 190701 - RNA, 21 nt, Artificial Sequence
  Synthetic
uuucugagugguaacuuugaa

SEQ ID NO: 190702 - RNA, 22 nt, Artificial Sequence
  Synthetic
cuuucugagugguaacuuugaa

SEQ ID NO: 190703 - RNA, 23 nt, Artificial Sequence
  Synthetic
ucuuucugagugguaacuuugaa

SEQ ID NO: 190704 - RNA, 24 nt, Artificial Sequence
  Synthetic
uucuuucugagugguaacuuugaa

SEQ ID NO: 190705 - RNA, 18 nt, Artificial Sequence
  Synthetic
caaauguuguccuuugaa

SEQ ID NO: 190706 - RNA, 19 nt, Artificial Sequence
  Synthetic
gcaaauguuguccuuugaa

SEQ ID NO: 190707 - RNA, 20 nt, Artificial Sequence
  Synthetic
ugcaaauguuguccuuugaa

SEQ ID NO: 190708 - RNA, 21 nt, Artificial Sequence
  Synthetic
augcaaauguuguccuuugaa

SEQ ID NO: 190709 - RNA, 22 nt, Artificial Sequence
  Synthetic
aaugcaaauguuguccuuugaa

SEQ ID NO: 190710 - RNA, 23 nt, Artificial Sequence
  Synthetic
aaaugcaaauguuguccuuugaa

SEQ ID NO: 190711 - RNA, 24 nt, Artificial Sequence
  Synthetic
aaaaugcaaauguuguccuuugaa

SEQ ID NO: 190712 - RNA, 18 nt, Artificial Sequence
  Synthetic
uguagggauaucuuugaa

SEQ ID NO: 190713 - RNA, 19 nt, Artificial Sequence
  Synthetic
guguagggauaucuuugaa

SEQ ID NO: 190714 - RNA, 20 nt, Artificial Sequence
  Synthetic
gguguagggauaucuuugaa

SEQ ID NO: 190715 - RNA, 21 nt, Artificial Sequence
  Synthetic
ggguguagggauaucuuugaa

SEQ ID NO: 190716 - RNA, 22 nt, Artificial Sequence
  Synthetic
uggguguagggauaucuuugaa

SEQ ID NO: 190717 - RNA, 23 nt, Artificial Sequence
  Synthetic
guggguguagggauaucuuugaa

SEQ ID NO: 190718 - RNA, 24 nt, Artificial Sequence
  Synthetic
aguggguguagggauaucuuugaa

SEQ ID NO: 190719 - RNA, 18 nt, Artificial Sequence
  Synthetic
caagagucuuucuuugaa

SEQ ID NO: 190720 - RNA, 19 nt, Artificial Sequence
  Synthetic
acaagagucuuucuuugaa

SEQ ID NO: 190721 - RNA, 20 nt, Artificial Sequence
  Synthetic
aacaagagucuuucuuugaa

SEQ ID NO: 190722 - RNA, 21 nt, Artificial Sequence
  Synthetic
gaacaagagucuuucuuugaa

SEQ ID NO: 190723 - RNA, 22 nt, Artificial Sequence
  Synthetic
agaacaagagucuuucuuugaa

SEQ ID NO: 190724 - RNA, 23 nt, Artificial Sequence
  Synthetic
uagaacaagagucuuucuuugaa

SEQ ID NO: 190725 - RNA, 24 nt, Artificial Sequence
  Synthetic
cuagaacaagagucuuucuuugaa

SEQ ID NO: 190726 - RNA, 18 nt, Artificial Sequence
  Synthetic
aguugauaaaaguuugaa

SEQ ID NO: 190727 - RNA, 19 nt, Artificial Sequence
  Synthetic
caguugauaaaaguuugaa

SEQ ID NO: 190728 - RNA, 20 nt, Artificial Sequence
  Synthetic
ucaguugauaaaaguuugaa

SEQ ID NO: 190729 - RNA, 21 nt, Artificial Sequence
  Synthetic
gucaguugauaaaaguuugaa

SEQ ID NO: 190730 - RNA, 22 nt, Artificial Sequence
  Synthetic
ugucaguugauaaaaguuugaa

SEQ ID NO: 190731 - RNA, 23 nt, Artificial Sequence
  Synthetic
augucaguugauaaaaguuugaa

SEQ ID NO: 190732 - RNA, 24 nt, Artificial Sequence
  Synthetic
aaugucaguugauaaaaguuugaa

SEQ ID NO: 190733 - RNA, 18 nt, Artificial Sequence
  Synthetic
auuuaccauaaguuugaa

SEQ ID NO: 190734 - RNA, 19 nt, Artificial Sequence
  Synthetic
uauuuaccauaaguuugaa

SEQ ID NO: 190735 - RNA, 20 nt, Artificial Sequence
  Synthetic
cuauuuaccauaaguuugaa

SEQ ID NO: 190736 - RNA, 21 nt, Artificial Sequence
  Synthetic
ccuauuuaccauaaguuugaa

SEQ ID NO: 190737 - RNA, 22 nt, Artificial Sequence
  Synthetic
uccuauuuaccauaaguuugaa

SEQ ID NO: 190738 - RNA, 23 nt, Artificial Sequence
  Synthetic
auccuauuuaccauaaguuugaa

SEQ ID NO: 190739 - RNA, 24 nt, Artificial Sequence
  Synthetic
uauccuauuuaccauaaguuugaa

SEQ ID NO: 190740 - RNA, 18 nt, Artificial Sequence
  Synthetic
gggucccugcaguuugaa

SEQ ID NO: 190741 - RNA, 19 nt, Artificial Sequence
  Synthetic
ugggucccugcaguuugaa

SEQ ID NO: 190742 - RNA, 20 nt, Artificial Sequence
  Synthetic
augggucccugcaguuugaa

SEQ ID NO: 190743 - RNA, 21 nt, Artificial Sequence
  Synthetic
aaugggucccugcaguuugaa

SEQ ID NO: 190744 - RNA, 22 nt, Artificial Sequence
  Synthetic
aaaugggucccugcaguuugaa

SEQ ID NO: 190745 - RNA, 23 nt, Artificial Sequence
  Synthetic
caaaugggucccugcaguuugaa

SEQ ID NO: 190746 - RNA, 24 nt, Artificial Sequence
  Synthetic
ccaaaugggucccugcaguuugaa

SEQ ID NO: 190747 - RNA, 18 nt, Artificial Sequence
  Synthetic
guaaaccuagaguuugaa

SEQ ID NO: 190748 - RNA, 19 nt, Artificial Sequence
  Synthetic
gguaaaccuagaguuugaa

SEQ ID NO: 190749 - RNA, 20 nt, Artificial Sequence
  Synthetic
ugguaaaccuagaguuugaa

SEQ ID NO: 190750 - RNA, 21 nt, Artificial Sequence
  Synthetic
uugguaaaccuagaguuugaa

SEQ ID NO: 190751 - RNA, 22 nt, Artificial Sequence
  Synthetic
cuugguaaaccuagaguuugaa

SEQ ID NO: 190752 - RNA, 23 nt, Artificial Sequence
  Synthetic
gcuugguaaaccuagaguuugaa

SEQ ID NO: 190753 - RNA, 24 nt, Artificial Sequence
  Synthetic
ugcuugguaaaccuagaguuugaa

SEQ ID NO: 190754 - RNA, 18 nt, Artificial Sequence
  Synthetic
agcagguacggguuugaa

SEQ ID NO: 190755 - RNA, 19 nt, Artificial Sequence
  Synthetic
gagcagguacggguuugaa

SEQ ID NO: 190756 - RNA, 20 nt, Artificial Sequence
  Synthetic
ggagcagguacggguuugaa

SEQ ID NO: 190757 - RNA, 21 nt, Artificial Sequence
  Synthetic
uggagcagguacggguuugaa

SEQ ID NO: 190758 - RNA, 22 nt, Artificial Sequence
  Synthetic
auggagcagguacggguuugaa

SEQ ID NO: 190759 - RNA, 23 nt, Artificial Sequence
  Synthetic
gauggagcagguacggguuugaa

SEQ ID NO: 190760 - RNA, 24 nt, Artificial Sequence
  Synthetic
agauggagcagguacggguuugaa

SEQ ID NO: 190761 - RNA, 18 nt, Artificial Sequence
  Synthetic
gaagugggaguguuugaa

SEQ ID NO: 190762 - RNA, 19 nt, Artificial Sequence
  Synthetic
ugaagugggaguguuugaa

SEQ ID NO: 190763 - RNA, 20 nt, Artificial Sequence
  Synthetic
gugaagugggaguguuugaa

SEQ ID NO: 190764 - RNA, 21 nt, Artificial Sequence
  Synthetic
agugaagugggaguguuugaa

SEQ ID NO: 190765 - RNA, 22 nt, Artificial Sequence
  Synthetic
aagugaagugggaguguuugaa

SEQ ID NO: 190766 - RNA, 23 nt, Artificial Sequence
  Synthetic
aaagugaagugggaguguuugaa

SEQ ID NO: 190767 - RNA, 24 nt, Artificial Sequence
  Synthetic
aaaagugaagugggaguguuugaa

SEQ ID NO: 190768 - RNA, 18 nt, Artificial Sequence
  Synthetic
aaaauggcauuguuugaa

SEQ ID NO: 190769 - RNA, 19 nt, Artificial Sequence
  Synthetic
uaaaauggcauuguuugaa

SEQ ID NO: 190770 - RNA, 20 nt, Artificial Sequence
  Synthetic
auaaaauggcauuguuugaa

SEQ ID NO: 190771 - RNA, 21 nt, Artificial Sequence
  Synthetic
gauaaaauggcauuguuugaa

SEQ ID NO: 190772 - RNA, 22 nt, Artificial Sequence
  Synthetic
agauaaaauggcauuguuugaa

SEQ ID NO: 190773 - RNA, 23 nt, Artificial Sequence
  Synthetic
aagauaaaauggcauuguuugaa

SEQ ID NO: 190774 - RNA, 24 nt, Artificial Sequence
  Synthetic
gaagauaaaauggcauuguuugaa

SEQ ID NO: 190775 - RNA, 18 nt, Artificial Sequence
  Synthetic
aagagcagaaauuuugaa

SEQ ID NO: 190776 - RNA, 19 nt, Artificial Sequence
  Synthetic
uaagagcagaaauuuugaa

SEQ ID NO: 190777 - RNA, 20 nt, Artificial Sequence
  Synthetic
uuaagagcagaaauuuugaa

SEQ ID NO: 190778 - RNA, 21 nt, Artificial Sequence
  Synthetic
auuaagagcagaaauuuugaa

SEQ ID NO: 190779 - RNA, 22 nt, Artificial Sequence
  Synthetic
cauuaagagcagaaauuuugaa

SEQ ID NO: 190780 - RNA, 23 nt, Artificial Sequence
  Synthetic
ucauuaagagcagaaauuuugaa

SEQ ID NO: 190781 - RNA, 24 nt, Artificial Sequence
  Synthetic
aucauuaagagcagaaauuuugaa

SEQ ID NO: 190782 - RNA, 18 nt, Artificial Sequence
  Synthetic
accauauuaaauuuugaa

SEQ ID NO: 190783 - RNA, 19 nt, Artificial Sequence
  Synthetic
uaccauauuaaauuuugaa

SEQ ID NO: 190784 - RNA, 20 nt, Artificial Sequence
  Synthetic
guaccauauuaaauuuugaa

SEQ ID NO: 190785 - RNA, 21 nt, Artificial Sequence
  Synthetic
uguaccauauuaaauuuugaa

SEQ ID NO: 190786 - RNA, 22 nt, Artificial Sequence
  Synthetic
cuguaccauauuaaauuuugaa

SEQ ID NO: 190787 - RNA, 23 nt, Artificial Sequence
  Synthetic
ccuguaccauauuaaauuuugaa

SEQ ID NO: 190788 - RNA, 24 nt, Artificial Sequence
  Synthetic
accuguaccauauuaaauuuugaa

SEQ ID NO: 190789 - RNA, 18 nt, Artificial Sequence
  Synthetic
uaaagauuagauuuugaa

SEQ ID NO: 190790 - RNA, 19 nt, Artificial Sequence
  Synthetic
uuaaagauuagauuuugaa

SEQ ID NO: 190791 - RNA, 20 nt, Artificial Sequence
  Synthetic
uuuaaagauuagauuuugaa

SEQ ID NO: 190792 - RNA, 21 nt, Artificial Sequence
  Synthetic
uuuuaaagauuagauuuugaa

SEQ ID NO: 190793 - RNA, 22 nt, Artificial Sequence
  Synthetic
uuuuuaaagauuagauuuugaa

SEQ ID NO: 190794 - RNA, 23 nt, Artificial Sequence
  Synthetic
auuuuuaaagauuagauuuugaa

SEQ ID NO: 190795 - RNA, 24 nt, Artificial Sequence
  Synthetic
cauuuuuaaagauuagauuuugaa

SEQ ID NO: 190796 - RNA, 18 nt, Artificial Sequence
  Synthetic
uucugguacgauuuugaa

SEQ ID NO: 190797 - RNA, 19 nt, Artificial Sequence
  Synthetic
cuucugguacgauuuugaa

SEQ ID NO: 190798 - RNA, 20 nt, Artificial Sequence
  Synthetic
acuucugguacgauuuugaa

SEQ ID NO: 190799 - RNA, 21 nt, Artificial Sequence
  Synthetic
uacuucugguacgauuuugaa

SEQ ID NO: 190800 - RNA, 22 nt, Artificial Sequence
  Synthetic
guacuucugguacgauuuugaa

SEQ ID NO: 190801 - RNA, 23 nt, Artificial Sequence
  Synthetic
aguacuucugguacgauuuugaa

SEQ ID NO: 190802 - RNA, 24 nt, Artificial Sequence
  Synthetic
uaguacuucugguacgauuuugaa

SEQ ID NO: 190803 - RNA, 18 nt, Artificial Sequence
  Synthetic
auccaaaaauauuuugaa

SEQ ID NO: 190804 - RNA, 19 nt, Artificial Sequence
  Synthetic
uauccaaaaauauuuugaa

SEQ ID NO: 190805 - RNA, 20 nt, Artificial Sequence
  Synthetic
uuauccaaaaauauuuugaa

SEQ ID NO: 190806 - RNA, 21 nt, Artificial Sequence
  Synthetic
uuuauccaaaaauauuuugaa

SEQ ID NO: 190807 - RNA, 22 nt, Artificial Sequence
  Synthetic
uuuuauccaaaaauauuuugaa

SEQ ID NO: 190808 - RNA, 23 nt, Artificial Sequence
  Synthetic
uuuuuauccaaaaauauuuugaa

SEQ ID NO: 190809 - RNA, 24 nt, Artificial Sequence
  Synthetic
auuuuuauccaaaaauauuuugaa

SEQ ID NO: 190810 - RNA, 18 nt, Artificial Sequence
  Synthetic
ucugacauauauuuugaa

SEQ ID NO: 190811 - RNA, 19 nt, Artificial Sequence
  Synthetic
aucugacauauauuuugaa

SEQ ID NO: 190812 - RNA, 20 nt, Artificial Sequence
  Synthetic
uaucugacauauauuuugaa

SEQ ID NO: 190813 - RNA, 21 nt, Artificial Sequence
  Synthetic
auaucugacauauauuuugaa

SEQ ID NO: 190814 - RNA, 22 nt, Artificial Sequence
  Synthetic
uauaucugacauauauuuugaa

SEQ ID NO: 190815 - RNA, 23 nt, Artificial Sequence
  Synthetic
auauaucugacauauauuuugaa

SEQ ID NO: 190816 - RNA, 24 nt, Artificial Sequence
  Synthetic
uauauaucugacauauauuuugaa

SEQ ID NO: 190817 - RNA, 18 nt, Artificial Sequence
  Synthetic
aaaccaguguauuuugaa

SEQ ID NO: 190818 - RNA, 19 nt, Artificial Sequence
  Synthetic
caaaccaguguauuuugaa

SEQ ID NO: 190819 - RNA, 20 nt, Artificial Sequence
  Synthetic
ucaaaccaguguauuuugaa

SEQ ID NO: 190820 - RNA, 21 nt, Artificial Sequence
  Synthetic
gucaaaccaguguauuuugaa

SEQ ID NO: 190821 - RNA, 22 nt, Artificial Sequence
  Synthetic
agucaaaccaguguauuuugaa

SEQ ID NO: 190822 - RNA, 23 nt, Artificial Sequence
  Synthetic
aagucaaaccaguguauuuugaa

SEQ ID NO: 190823 - RNA, 24 nt, Artificial Sequence
  Synthetic
gaagucaaaccaguguauuuugaa

SEQ ID NO: 190824 - RNA, 18 nt, Artificial Sequence
  Synthetic
acugccauuucuuuugaa

SEQ ID NO: 190825 - RNA, 19 nt, Artificial Sequence
  Synthetic
cacugccauuucuuuugaa

SEQ ID NO: 190826 - RNA, 20 nt, Artificial Sequence
  Synthetic
acacugccauuucuuuugaa

SEQ ID NO: 190827 - RNA, 21 nt, Artificial Sequence
  Synthetic
aacacugccauuucuuuugaa

SEQ ID NO: 190828 - RNA, 22 nt, Artificial Sequence
  Synthetic
uaacacugccauuucuuuugaa

SEQ ID NO: 190829 - RNA, 23 nt, Artificial Sequence
  Synthetic
auaacacugccauuucuuuugaa

SEQ ID NO: 190830 - RNA, 24 nt, Artificial Sequence
  Synthetic
gauaacacugccauuucuuuugaa

SEQ ID NO: 190831 - RNA, 18 nt, Artificial Sequence
  Synthetic
gacaucaacaguuuugaa

SEQ ID NO: 190832 - RNA, 19 nt, Artificial Sequence
  Synthetic
ugacaucaacaguuuugaa

SEQ ID NO: 190833 - RNA, 20 nt, Artificial Sequence
  Synthetic
gugacaucaacaguuuugaa

SEQ ID NO: 190834 - RNA, 21 nt, Artificial Sequence
  Synthetic
ggugacaucaacaguuuugaa

SEQ ID NO: 190835 - RNA, 22 nt, Artificial Sequence
  Synthetic
gggugacaucaacaguuuugaa

SEQ ID NO: 190836 - RNA, 23 nt, Artificial Sequence
  Synthetic
ugggugacaucaacaguuuugaa

SEQ ID NO: 190837 - RNA, 24 nt, Artificial Sequence
  Synthetic
gugggugacaucaacaguuuugaa

SEQ ID NO: 190838 - RNA, 18 nt, Artificial Sequence
  Synthetic
uuuaacaaggguuuugaa

SEQ ID NO: 190839 - RNA, 19 nt, Artificial Sequence
  Synthetic
uuuuaacaaggguuuugaa

SEQ ID NO: 190840 - RNA, 20 nt, Artificial Sequence
  Synthetic
auuuuaacaaggguuuugaa

SEQ ID NO: 190841 - RNA, 21 nt, Artificial Sequence
  Synthetic
uauuuuaacaaggguuuugaa

SEQ ID NO: 190842 - RNA, 22 nt, Artificial Sequence
  Synthetic
cuauuuuaacaaggguuuugaa

SEQ ID NO: 190843 - RNA, 23 nt, Artificial Sequence
  Synthetic
acuauuuuaacaaggguuuugaa

SEQ ID NO: 190844 - RNA, 24 nt, Artificial Sequence
  Synthetic
uacuauuuuaacaaggguuuugaa

SEQ ID NO: 190845 - RNA, 18 nt, Artificial Sequence
  Synthetic
uuauuggaggguuuugaa

SEQ ID NO: 190846 - RNA, 19 nt, Artificial Sequence
  Synthetic
guuauuggaggguuuugaa

SEQ ID NO: 190847 - RNA, 20 nt, Artificial Sequence
  Synthetic
aguuauuggaggguuuugaa

SEQ ID NO: 190848 - RNA, 21 nt, Artificial Sequence
  Synthetic
gaguuauuggaggguuuugaa

SEQ ID NO: 190849 - RNA, 22 nt, Artificial Sequence
  Synthetic
ggaguuauuggaggguuuugaa

SEQ ID NO: 190850 - RNA, 23 nt, Artificial Sequence
  Synthetic
gggaguuauuggaggguuuugaa

SEQ ID NO: 190851 - RNA, 24 nt, Artificial Sequence
  Synthetic
ugggaguuauuggaggguuuugaa

SEQ ID NO: 190852 - RNA, 18 nt, Artificial Sequence
  Synthetic
cguuuuucuuguuuugaa

SEQ ID NO: 190853 - RNA, 19 nt, Artificial Sequence
  Synthetic
gcguuuuucuuguuuugaa

SEQ ID NO: 190854 - RNA, 20 nt, Artificial Sequence
  Synthetic
ggcguuuuucuuguuuugaa

SEQ ID NO: 190855 - RNA, 21 nt, Artificial Sequence
  Synthetic
uggcguuuuucuuguuuugaa

SEQ ID NO: 190856 - RNA, 22 nt, Artificial Sequence
  Synthetic
cuggcguuuuucuuguuuugaa

SEQ ID NO: 190857 - RNA, 23 nt, Artificial Sequence
  Synthetic
acuggcguuuuucuuguuuugaa

SEQ ID NO: 190858 - RNA, 24 nt, Artificial Sequence
  Synthetic
aacuggcguuuuucuuguuuugaa

SEQ ID NO: 190859 - RNA, 18 nt, Artificial Sequence
  Synthetic
cguuuguagauuuuugaa

SEQ ID NO: 190860 - RNA, 19 nt, Artificial Sequence
  Synthetic
acguuuguagauuuuugaa

SEQ ID NO: 190861 - RNA, 20 nt, Artificial Sequence
  Synthetic
cacguuuguagauuuuugaa

SEQ ID NO: 190862 - RNA, 21 nt, Artificial Sequence
  Synthetic
ucacguuuguagauuuuugaa

SEQ ID NO: 190863 - RNA, 22 nt, Artificial Sequence
  Synthetic
gucacguuuguagauuuuugaa

SEQ ID NO: 190864 - RNA, 23 nt, Artificial Sequence
  Synthetic
agucacguuuguagauuuuugaa

SEQ ID NO: 190865 - RNA, 24 nt, Artificial Sequence
  Synthetic
cagucacguuuguagauuuuugaa

SEQ ID NO: 190866 - RNA, 18 nt, Artificial Sequence
  Synthetic
ccuaggugccuuuuugaa

SEQ ID NO: 190867 - RNA, 19 nt, Artificial Sequence
  Synthetic
uccuaggugccuuuuugaa

SEQ ID NO: 190868 - RNA, 20 nt, Artificial Sequence
  Synthetic
uuccuaggugccuuuuugaa

SEQ ID NO: 190869 - RNA, 21 nt, Artificial Sequence
  Synthetic
cuuccuaggugccuuuuugaa

SEQ ID NO: 190870 - RNA, 22 nt, Artificial Sequence
  Synthetic
acuuccuaggugccuuuuugaa

SEQ ID NO: 190871 - RNA, 23 nt, Artificial Sequence
  Synthetic
cacuuccuaggugccuuuuugaa

SEQ ID NO: 190872 - RNA, 24 nt, Artificial Sequence
  Synthetic
ucacuuccuaggugccuuuuugaa

SEQ ID NO: 190873 - RNA, 18 nt, Artificial Sequence
  Synthetic
uucauugacuuuuuugaa

SEQ ID NO: 190874 - RNA, 19 nt, Artificial Sequence
  Synthetic
cuucauugacuuuuuugaa

SEQ ID NO: 190875 - RNA, 20 nt, Artificial Sequence
  Synthetic
ccuucauugacuuuuuugaa

SEQ ID NO: 190876 - RNA, 21 nt, Artificial Sequence
  Synthetic
accuucauugacuuuuuugaa

SEQ ID NO: 190877 - RNA, 22 nt, Artificial Sequence
  Synthetic
uaccuucauugacuuuuuugaa

SEQ ID NO: 190878 - RNA, 23 nt, Artificial Sequence
  Synthetic
cuaccuucauugacuuuuuugaa

SEQ ID NO: 190879 - RNA, 24 nt, Artificial Sequence
  Synthetic
ccuaccuucauugacuuuuuugaa

SEQ ID NO: 190880 - RNA, 18 nt, Artificial Sequence
  Synthetic
auuuuuuuuuuuuuugaa

SEQ ID NO: 190881 - RNA, 19 nt, Artificial Sequence
  Synthetic
aauuuuuuuuuuuuuugaa

SEQ ID NO: 190882 - RNA, 20 nt, Artificial Sequence
  Synthetic
uaauuuuuuuuuuuuuugaa

SEQ ID NO: 190883 - RNA, 21 nt, Artificial Sequence
  Synthetic
cuaauuuuuuuuuuuuuugaa

SEQ ID NO: 190884 - RNA, 22 nt, Artificial Sequence
  Synthetic
ccuaauuuuuuuuuuuuuugaa

SEQ ID NO: 190885 - RNA, 23 nt, Artificial Sequence
  Synthetic
accuaauuuuuuuuuuuuuugaa

SEQ ID NO: 190886 - RNA, 24 nt, Artificial Sequence
  Synthetic
caccuaauuuuuuuuuuuuuugaa

SEQ ID NO: 190887 - RNA, 18 nt, Artificial Sequence
  Synthetic
gcacaaauggaaaaauaa

SEQ ID NO: 190888 - RNA, 19 nt, Artificial Sequence
  Synthetic
ugcacaaauggaaaaauaa

SEQ ID NO: 190889 - RNA, 20 nt, Artificial Sequence
  Synthetic
cugcacaaauggaaaaauaa

SEQ ID NO: 190890 - RNA, 21 nt, Artificial Sequence
  Synthetic
acugcacaaauggaaaaauaa

SEQ ID NO: 190891 - RNA, 22 nt, Artificial Sequence
  Synthetic
aacugcacaaauggaaaaauaa

SEQ ID NO: 190892 - RNA, 23 nt, Artificial Sequence
  Synthetic
aaacugcacaaauggaaaaauaa

SEQ ID NO: 190893 - RNA, 24 nt, Artificial Sequence
  Synthetic
aaaacugcacaaauggaaaaauaa

SEQ ID NO: 190894 - RNA, 18 nt, Artificial Sequence
  Synthetic
gguaguuaauaaaaauaa

SEQ ID NO: 190895 - RNA, 19 nt, Artificial Sequence
  Synthetic
ggguaguuaauaaaaauaa

SEQ ID NO: 190896 - RNA, 20 nt, Artificial Sequence
  Synthetic
uggguaguuaauaaaaauaa

SEQ ID NO: 190897 - RNA, 21 nt, Artificial Sequence
  Synthetic
uuggguaguuaauaaaaauaa

SEQ ID NO: 190898 - RNA, 22 nt, Artificial Sequence
  Synthetic
uuuggguaguuaauaaaaauaa

SEQ ID NO: 190899 - RNA, 23 nt, Artificial Sequence
  Synthetic
uuuuggguaguuaauaaaaauaa

SEQ ID NO: 190900 - RNA, 24 nt, Artificial Sequence
  Synthetic
auuuuggguaguuaauaaaaauaa

SEQ ID NO: 190901 - RNA, 18 nt, Artificial Sequence
  Synthetic
gcuguaaguacaaaauaa

SEQ ID NO: 190902 - RNA, 19 nt, Artificial Sequence
  Synthetic
agcuguaaguacaaaauaa

SEQ ID NO: 190903 - RNA, 20 nt, Artificial Sequence
  Synthetic
uagcuguaaguacaaaauaa

SEQ ID NO: 190904 - RNA, 21 nt, Artificial Sequence
  Synthetic
cuagcuguaaguacaaaauaa

SEQ ID NO: 190905 - RNA, 22 nt, Artificial Sequence
  Synthetic
gcuagcuguaaguacaaaauaa

SEQ ID NO: 190906 - RNA, 23 nt, Artificial Sequence
  Synthetic
ugcuagcuguaaguacaaaauaa

SEQ ID NO: 190907 - RNA, 24 nt, Artificial Sequence
  Synthetic
augcuagcuguaaguacaaaauaa

SEQ ID NO: 190908 - RNA, 18 nt, Artificial Sequence
  Synthetic
gguauauacccaaaauaa

SEQ ID NO: 190909 - RNA, 19 nt, Artificial Sequence
  Synthetic
ggguauauacccaaaauaa

SEQ ID NO: 190910 - RNA, 20 nt, Artificial Sequence
  Synthetic
uggguauauacccaaaauaa

SEQ ID NO: 190911 - RNA, 21 nt, Artificial Sequence
  Synthetic
cuggguauauacccaaaauaa

SEQ ID NO: 190912 - RNA, 22 nt, Artificial Sequence
  Synthetic
ucuggguauauacccaaaauaa

SEQ ID NO: 190913 - RNA, 23 nt, Artificial Sequence
  Synthetic
uucuggguauauacccaaaauaa

SEQ ID NO: 190914 - RNA, 24 nt, Artificial Sequence
  Synthetic
cuucuggguauauacccaaaauaa

SEQ ID NO: 190915 - RNA, 18 nt, Artificial Sequence
  Synthetic
aucagugaugcaaaauaa

SEQ ID NO: 190916 - RNA, 19 nt, Artificial Sequence
  Synthetic
uaucagugaugcaaaauaa

SEQ ID NO: 190917 - RNA, 20 nt, Artificial Sequence
  Synthetic
guaucagugaugcaaaauaa

SEQ ID NO: 190918 - RNA, 21 nt, Artificial Sequence
  Synthetic
cguaucagugaugcaaaauaa

SEQ ID NO: 190919 - RNA, 22 nt, Artificial Sequence
  Synthetic
ccguaucagugaugcaaaauaa

SEQ ID NO: 190920 - RNA, 23 nt, Artificial Sequence
  Synthetic
accguaucagugaugcaaaauaa

SEQ ID NO: 190921 - RNA, 24 nt, Artificial Sequence
  Synthetic
aaccguaucagugaugcaaaauaa

SEQ ID NO: 190922 - RNA, 18 nt, Artificial Sequence
  Synthetic
aucucugcugcaaaauaa

SEQ ID NO: 190923 - RNA, 19 nt, Artificial Sequence
  Synthetic
aaucucugcugcaaaauaa

SEQ ID NO: 190924 - RNA, 20 nt, Artificial Sequence
  Synthetic
uaaucucugcugcaaaauaa

SEQ ID NO: 190925 - RNA, 21 nt, Artificial Sequence
  Synthetic
cuaaucucugcugcaaaauaa

SEQ ID NO: 190926 - RNA, 22 nt, Artificial Sequence
  Synthetic
acuaaucucugcugcaaaauaa

SEQ ID NO: 190927 - RNA, 23 nt, Artificial Sequence
  Synthetic
uacuaaucucugcugcaaaauaa

SEQ ID NO: 190928 - RNA, 24 nt, Artificial Sequence
  Synthetic
guacuaaucucugcugcaaaauaa

SEQ ID NO: 190929 - RNA, 18 nt, Artificial Sequence
  Synthetic
auguaagacagaaaauaa

SEQ ID NO: 190930 - RNA, 19 nt, Artificial Sequence
  Synthetic
cauguaagacagaaaauaa

SEQ ID NO: 190931 - RNA, 20 nt, Artificial Sequence
  Synthetic
ccauguaagacagaaaauaa

SEQ ID NO: 190932 - RNA, 21 nt, Artificial Sequence
  Synthetic
gccauguaagacagaaaauaa

SEQ ID NO: 190933 - RNA, 22 nt, Artificial Sequence
  Synthetic
agccauguaagacagaaaauaa

SEQ ID NO: 190934 - RNA, 23 nt, Artificial Sequence
  Synthetic
aagccauguaagacagaaaauaa

SEQ ID NO: 190935 - RNA, 24 nt, Artificial Sequence
  Synthetic
gaagccauguaagacagaaaauaa

SEQ ID NO: 190936 - RNA, 18 nt, Artificial Sequence
  Synthetic
auaucugaaggaaaauaa

SEQ ID NO: 190937 - RNA, 19 nt, Artificial Sequence
  Synthetic
aauaucugaaggaaaauaa

SEQ ID NO: 190938 - RNA, 20 nt, Artificial Sequence
  Synthetic
aaauaucugaaggaaaauaa

SEQ ID NO: 190939 - RNA, 21 nt, Artificial Sequence
  Synthetic
aaaauaucugaaggaaaauaa

SEQ ID NO: 190940 - RNA, 22 nt, Artificial Sequence
  Synthetic
caaaauaucugaaggaaaauaa

SEQ ID NO: 190941 - RNA, 23 nt, Artificial Sequence
  Synthetic
acaaaauaucugaaggaaaauaa

SEQ ID NO: 190942 - RNA, 24 nt, Artificial Sequence
  Synthetic
aacaaaauaucugaaggaaaauaa

SEQ ID NO: 190943 - RNA, 18 nt, Artificial Sequence
  Synthetic
agagcgauaugaaaauaa

SEQ ID NO: 190944 - RNA, 19 nt, Artificial Sequence
  Synthetic
gagagcgauaugaaaauaa

SEQ ID NO: 190945 - RNA, 20 nt, Artificial Sequence
  Synthetic
agagagcgauaugaaaauaa

SEQ ID NO: 190946 - RNA, 21 nt, Artificial Sequence
  Synthetic
gagagagcgauaugaaaauaa

SEQ ID NO: 190947 - RNA, 22 nt, Artificial Sequence
  Synthetic
agagagagcgauaugaaaauaa

SEQ ID NO: 190948 - RNA, 23 nt, Artificial Sequence
  Synthetic
uagagagagcgauaugaaaauaa

SEQ ID NO: 190949 - RNA, 24 nt, Artificial Sequence
  Synthetic
auagagagagcgauaugaaaauaa

SEQ ID NO: 190950 - RNA, 18 nt, Artificial Sequence
  Synthetic
aucuuguucugaaaauaa

SEQ ID NO: 190951 - RNA, 19 nt, Artificial Sequence
  Synthetic
caucuuguucugaaaauaa

SEQ ID NO: 190952 - RNA, 20 nt, Artificial Sequence
  Synthetic
acaucuuguucugaaaauaa

SEQ ID NO: 190953 - RNA, 21 nt, Artificial Sequence
  Synthetic
aacaucuuguucugaaaauaa

SEQ ID NO: 190954 - RNA, 22 nt, Artificial Sequence
  Synthetic
uaacaucuuguucugaaaauaa

SEQ ID NO: 190955 - RNA, 23 nt, Artificial Sequence
  Synthetic
cuaacaucuuguucugaaaauaa

SEQ ID NO: 190956 - RNA, 24 nt, Artificial Sequence
  Synthetic
ucuaacaucuuguucugaaaauaa

SEQ ID NO: 190957 - RNA, 18 nt, Artificial Sequence
  Synthetic
auuaguaaaauaaaauaa

SEQ ID NO: 190958 - RNA, 19 nt, Artificial Sequence
  Synthetic
aauuaguaaaauaaaauaa

SEQ ID NO: 190959 - RNA, 20 nt, Artificial Sequence
  Synthetic
uaauuaguaaaauaaaauaa

SEQ ID NO: 190960 - RNA, 21 nt, Artificial Sequence
  Synthetic
guaauuaguaaaauaaaauaa

SEQ ID NO: 190961 - RNA, 22 nt, Artificial Sequence
  Synthetic
aguaauuaguaaaauaaaauaa

SEQ ID NO: 190962 - RNA, 23 nt, Artificial Sequence
  Synthetic
caguaauuaguaaaauaaaauaa

SEQ ID NO: 190963 - RNA, 24 nt, Artificial Sequence
  Synthetic
acaguaauuaguaaaauaaaauaa

SEQ ID NO: 190964 - RNA, 18 nt, Artificial Sequence
  Synthetic
ugguuccgaauaaaauaa

SEQ ID NO: 190965 - RNA, 19 nt, Artificial Sequence
  Synthetic
gugguuccgaauaaaauaa

SEQ ID NO: 190966 - RNA, 20 nt, Artificial Sequence
  Synthetic
ugugguuccgaauaaaauaa

SEQ ID NO: 190967 - RNA, 21 nt, Artificial Sequence
  Synthetic
uugugguuccgaauaaaauaa

SEQ ID NO: 190968 - RNA, 22 nt, Artificial Sequence
  Synthetic
auugugguuccgaauaaaauaa

SEQ ID NO: 190969 - RNA, 23 nt, Artificial Sequence
  Synthetic
cauugugguuccgaauaaaauaa

SEQ ID NO: 190970 - RNA, 24 nt, Artificial Sequence
  Synthetic
acauugugguuccgaauaaaauaa

SEQ ID NO: 190971 - RNA, 18 nt, Artificial Sequence
  Synthetic
acuauguucauaaaauaa

SEQ ID NO: 190972 - RNA, 19 nt, Artificial Sequence
  Synthetic
gacuauguucauaaaauaa

SEQ ID NO: 190973 - RNA, 20 nt, Artificial Sequence
  Synthetic
ggacuauguucauaaaauaa

SEQ ID NO: 190974 - RNA, 21 nt, Artificial Sequence
  Synthetic
uggacuauguucauaaaauaa

SEQ ID NO: 190975 - RNA, 22 nt, Artificial Sequence
  Synthetic
auggacuauguucauaaaauaa

SEQ ID NO: 190976 - RNA, 23 nt, Artificial Sequence
  Synthetic
cauggacuauguucauaaaauaa

SEQ ID NO: 190977 - RNA, 24 nt, Artificial Sequence
  Synthetic
ccauggacuauguucauaaaauaa

SEQ ID NO: 190978 - RNA, 18 nt, Artificial Sequence
  Synthetic
uaauauuucauaaaauaa

SEQ ID NO: 190979 - RNA, 19 nt, Artificial Sequence
  Synthetic
auaauauuucauaaaauaa

SEQ ID NO: 190980 - RNA, 20 nt, Artificial Sequence
  Synthetic
aauaauauuucauaaaauaa

SEQ ID NO: 190981 - RNA, 21 nt, Artificial Sequence
  Synthetic
uaauaauauuucauaaaauaa

SEQ ID NO: 190982 - RNA, 22 nt, Artificial Sequence
  Synthetic
uuaauaauauuucauaaaauaa

SEQ ID NO: 190983 - RNA, 23 nt, Artificial Sequence
  Synthetic
auuaauaauauuucauaaaauaa

SEQ ID NO: 190984 - RNA, 24 nt, Artificial Sequence
  Synthetic
uauuaauaauauuucauaaaauaa

SEQ ID NO: 190985 - RNA, 18 nt, Artificial Sequence
  Synthetic
gugaacuugauaaaauaa

SEQ ID NO: 190986 - RNA, 19 nt, Artificial Sequence
  Synthetic
ugugaacuugauaaaauaa

SEQ ID NO: 190987 - RNA, 20 nt, Artificial Sequence
  Synthetic
augugaacuugauaaaauaa

SEQ ID NO: 190988 - RNA, 21 nt, Artificial Sequence
  Synthetic
caugugaacuugauaaaauaa

SEQ ID NO: 190989 - RNA, 22 nt, Artificial Sequence
  Synthetic
ucaugugaacuugauaaaauaa

SEQ ID NO: 190990 - RNA, 23 nt, Artificial Sequence
  Synthetic
cucaugugaacuugauaaaauaa

SEQ ID NO: 190991 - RNA, 24 nt, Artificial Sequence
  Synthetic
ccucaugugaacuugauaaaauaa

SEQ ID NO: 190992 - RNA, 18 nt, Artificial Sequence
  Synthetic
auaguauugcuaaaauaa

SEQ ID NO: 190993 - RNA, 19 nt, Artificial Sequence
  Synthetic
aauaguauugcuaaaauaa

SEQ ID NO: 190994 - RNA, 20 nt, Artificial Sequence
  Synthetic
caauaguauugcuaaaauaa

SEQ ID NO: 190995 - RNA, 21 nt, Artificial Sequence
  Synthetic
gcaauaguauugcuaaaauaa

SEQ ID NO: 190996 - RNA, 22 nt, Artificial Sequence
  Synthetic
ugcaauaguauugcuaaaauaa

SEQ ID NO: 190997 - RNA, 23 nt, Artificial Sequence
  Synthetic
cugcaauaguauugcuaaaauaa

SEQ ID NO: 190998 - RNA, 24 nt, Artificial Sequence
  Synthetic
gcugcaauaguauugcuaaaauaa

SEQ ID NO: 190999 - RNA, 18 nt, Artificial Sequence
  Synthetic
uguuacugcuuaaaauaa

SEQ ID NO: 191000 - RNA, 19 nt, Artificial Sequence
  Synthetic
uuguuacugcuuaaaauaa

SEQ ID NO: 191001 - RNA, 20 nt, Artificial Sequence
  Synthetic
cuuguuacugcuuaaaauaa

SEQ ID NO: 191002 - RNA, 21 nt, Artificial Sequence
  Synthetic
ccuuguuacugcuuaaaauaa

SEQ ID NO: 191003 - RNA, 22 nt, Artificial Sequence
  Synthetic
accuuguuacugcuuaaaauaa

SEQ ID NO: 191004 - RNA, 23 nt, Artificial Sequence
  Synthetic
uaccuuguuacugcuuaaaauaa

SEQ ID NO: 191005 - RNA, 24 nt, Artificial Sequence
  Synthetic
auaccuuguuacugcuuaaaauaa

SEQ ID NO: 191006 - RNA, 18 nt, Artificial Sequence
  Synthetic
aauaaaugaaacaaauaa

SEQ ID NO: 191007 - RNA, 19 nt, Artificial Sequence
  Synthetic
aaauaaaugaaacaaauaa

SEQ ID NO: 191008 - RNA, 20 nt, Artificial Sequence
  Synthetic
gaaauaaaugaaacaaauaa

SEQ ID NO: 191009 - RNA, 21 nt, Artificial Sequence
  Synthetic
ggaaauaaaugaaacaaauaa

SEQ ID NO: 191010 - RNA, 22 nt, Artificial Sequence
  Synthetic
uggaaauaaaugaaacaaauaa

SEQ ID NO: 191011 - RNA, 23 nt, Artificial Sequence
  Synthetic
guggaaauaaaugaaacaaauaa

SEQ ID NO: 191012 - RNA, 24 nt, Artificial Sequence
  Synthetic
uguggaaauaaaugaaacaaauaa

SEQ ID NO: 191013 - RNA, 18 nt, Artificial Sequence
  Synthetic
gaugcauuuaacaaauaa

SEQ ID NO: 191014 - RNA, 19 nt, Artificial Sequence
  Synthetic
agaugcauuuaacaaauaa

SEQ ID NO: 191015 - RNA, 20 nt, Artificial Sequence
  Synthetic
aagaugcauuuaacaaauaa

SEQ ID NO: 191016 - RNA, 21 nt, Artificial Sequence
  Synthetic
aaagaugcauuuaacaaauaa

SEQ ID NO: 191017 - RNA, 22 nt, Artificial Sequence
  Synthetic
caaagaugcauuuaacaaauaa

SEQ ID NO: 191018 - RNA, 23 nt, Artificial Sequence
  Synthetic
gcaaagaugcauuuaacaaauaa

SEQ ID NO: 191019 - RNA, 24 nt, Artificial Sequence
  Synthetic
ugcaaagaugcauuuaacaaauaa

SEQ ID NO: 191020 - RNA, 18 nt, Artificial Sequence
  Synthetic
uuuaaaucccacaaauaa

SEQ ID NO: 191021 - RNA, 19 nt, Artificial Sequence
  Synthetic
uuuuaaaucccacaaauaa

SEQ ID NO: 191022 - RNA, 20 nt, Artificial Sequence
  Synthetic
auuuuaaaucccacaaauaa

SEQ ID NO: 191023 - RNA, 21 nt, Artificial Sequence
  Synthetic
aauuuuaaaucccacaaauaa

SEQ ID NO: 191024 - RNA, 22 nt, Artificial Sequence
  Synthetic
gaauuuuaaaucccacaaauaa

SEQ ID NO: 191025 - RNA, 23 nt, Artificial Sequence
  Synthetic
ugaauuuuaaaucccacaaauaa

SEQ ID NO: 191026 - RNA, 24 nt, Artificial Sequence
  Synthetic
uugaauuuuaaaucccacaaauaa

SEQ ID NO: 191027 - RNA, 18 nt, Artificial Sequence
  Synthetic
uuuagaucccacaaauaa

SEQ ID NO: 191028 - RNA, 19 nt, Artificial Sequence
  Synthetic
uuuuagaucccacaaauaa

SEQ ID NO: 191029 - RNA, 20 nt, Artificial Sequence
  Synthetic
uuuuuagaucccacaaauaa

SEQ ID NO: 191030 - RNA, 21 nt, Artificial Sequence
  Synthetic
auuuuuagaucccacaaauaa

SEQ ID NO: 191031 - RNA, 22 nt, Artificial Sequence
  Synthetic
aauuuuuagaucccacaaauaa

SEQ ID NO: 191032 - RNA, 23 nt, Artificial Sequence
  Synthetic
uaauuuuuagaucccacaaauaa

SEQ ID NO: 191033 - RNA, 24 nt, Artificial Sequence
  Synthetic
uuaauuuuuagaucccacaaauaa

SEQ ID NO: 191034 - RNA, 18 nt, Artificial Sequence
  Synthetic
uuuaccugccacaaauaa

SEQ ID NO: 191035 - RNA, 19 nt, Artificial Sequence
  Synthetic
uuuuaccugccacaaauaa

SEQ ID NO: 191036 - RNA, 20 nt, Artificial Sequence
  Synthetic
uuuuuaccugccacaaauaa

SEQ ID NO: 191037 - RNA, 21 nt, Artificial Sequence
  Synthetic
auuuuuaccugccacaaauaa

SEQ ID NO: 191038 - RNA, 22 nt, Artificial Sequence
  Synthetic
gauuuuuaccugccacaaauaa

SEQ ID NO: 191039 - RNA, 23 nt, Artificial Sequence
  Synthetic
ugauuuuuaccugccacaaauaa

SEQ ID NO: 191040 - RNA, 24 nt, Artificial Sequence
  Synthetic
uugauuuuuaccugccacaaauaa

SEQ ID NO: 191041 - RNA, 18 nt, Artificial Sequence
  Synthetic
cuuaaggaauacaaauaa

SEQ ID NO: 191042 - RNA, 19 nt, Artificial Sequence
  Synthetic
ccuuaaggaauacaaauaa

SEQ ID NO: 191043 - RNA, 20 nt, Artificial Sequence
  Synthetic
uccuuaaggaauacaaauaa

SEQ ID NO: 191044 - RNA, 21 nt, Artificial Sequence
  Synthetic
auccuuaaggaauacaaauaa

SEQ ID NO: 191045 - RNA, 22 nt, Artificial Sequence
  Synthetic
cauccuuaaggaauacaaauaa

SEQ ID NO: 191046 - RNA, 23 nt, Artificial Sequence
  Synthetic
gcauccuuaaggaauacaaauaa

SEQ ID NO: 191047 - RNA, 24 nt, Artificial Sequence
  Synthetic
ggcauccuuaaggaauacaaauaa

SEQ ID NO: 191048 - RNA, 18 nt, Artificial Sequence
  Synthetic
ccuccgccucccaaauaa

SEQ ID NO: 191049 - RNA, 19 nt, Artificial Sequence
  Synthetic
gccuccgccucccaaauaa

SEQ ID NO: 191050 - RNA, 20 nt, Artificial Sequence
  Synthetic
ugccuccgccucccaaauaa

SEQ ID NO: 191051 - RNA, 21 nt, Artificial Sequence
  Synthetic
gugccuccgccucccaaauaa

SEQ ID NO: 191052 - RNA, 22 nt, Artificial Sequence
  Synthetic
ugugccuccgccucccaaauaa

SEQ ID NO: 191053 - RNA, 23 nt, Artificial Sequence
  Synthetic
gugugccuccgccucccaaauaa

SEQ ID NO: 191054 - RNA, 24 nt, Artificial Sequence
  Synthetic
cgugugccuccgccucccaaauaa

SEQ ID NO: 191055 - RNA, 18 nt, Artificial Sequence
  Synthetic
ggaggauagagcaaauaa

SEQ ID NO: 191056 - RNA, 19 nt, Artificial Sequence
  Synthetic
uggaggauagagcaaauaa

SEQ ID NO: 191057 - RNA, 20 nt, Artificial Sequence
  Synthetic
uuggaggauagagcaaauaa

SEQ ID NO: 191058 - RNA, 21 nt, Artificial Sequence
  Synthetic
guuggaggauagagcaaauaa

SEQ ID NO: 191059 - RNA, 22 nt, Artificial Sequence
  Synthetic
aguuggaggauagagcaaauaa

SEQ ID NO: 191060 - RNA, 23 nt, Artificial Sequence
  Synthetic
aaguuggaggauagagcaaauaa

SEQ ID NO: 191061 - RNA, 24 nt, Artificial Sequence
  Synthetic
uaaguuggaggauagagcaaauaa

SEQ ID NO: 191062 - RNA, 18 nt, Artificial Sequence
  Synthetic
uuuagauucugcaaauaa

SEQ ID NO: 191063 - RNA, 19 nt, Artificial Sequence
  Synthetic
uuuuagauucugcaaauaa

SEQ ID NO: 191064 - RNA, 20 nt, Artificial Sequence
  Synthetic
uuuuuagauucugcaaauaa

SEQ ID NO: 191065 - RNA, 21 nt, Artificial Sequence
  Synthetic
auuuuuagauucugcaaauaa

SEQ ID NO: 191066 - RNA, 22 nt, Artificial Sequence
  Synthetic
gauuuuuagauucugcaaauaa

SEQ ID NO: 191067 - RNA, 23 nt, Artificial Sequence
  Synthetic
ugauuuuuagauucugcaaauaa

SEQ ID NO: 191068 - RNA, 24 nt, Artificial Sequence
  Synthetic
uugauuuuuagauucugcaaauaa

SEQ ID NO: 191069 - RNA, 18 nt, Artificial Sequence
  Synthetic
uacccagggaagaaauaa

SEQ ID NO: 191070 - RNA, 19 nt, Artificial Sequence
  Synthetic
auacccagggaagaaauaa

SEQ ID NO: 191071 - RNA, 20 nt, Artificial Sequence
  Synthetic
gauacccagggaagaaauaa

SEQ ID NO: 191072 - RNA, 21 nt, Artificial Sequence
  Synthetic
agauacccagggaagaaauaa

SEQ ID NO: 191073 - RNA, 22 nt, Artificial Sequence
  Synthetic
uagauacccagggaagaaauaa

SEQ ID NO: 191074 - RNA, 23 nt, Artificial Sequence
  Synthetic
auagauacccagggaagaaauaa

SEQ ID NO: 191075 - RNA, 24 nt, Artificial Sequence
  Synthetic
aauagauacccagggaagaaauaa

SEQ ID NO: 191076 - RNA, 18 nt, Artificial Sequence
  Synthetic
aaaguaagucagaaauaa

SEQ ID NO: 191077 - RNA, 19 nt, Artificial Sequence
  Synthetic
uaaaguaagucagaaauaa

SEQ ID NO: 191078 - RNA, 20 nt, Artificial Sequence
  Synthetic
auaaaguaagucagaaauaa

SEQ ID NO: 191079 - RNA, 21 nt, Artificial Sequence
  Synthetic
uauaaaguaagucagaaauaa

SEQ ID NO: 191080 - RNA, 22 nt, Artificial Sequence
  Synthetic
guauaaaguaagucagaaauaa

SEQ ID NO: 191081 - RNA, 23 nt, Artificial Sequence
  Synthetic
uguauaaaguaagucagaaauaa

SEQ ID NO: 191082 - RNA, 24 nt, Artificial Sequence
  Synthetic
uuguauaaaguaagucagaaauaa

SEQ ID NO: 191083 - RNA, 18 nt, Artificial Sequence
  Synthetic
ugaaguuaugagaaauaa

SEQ ID NO: 191084 - RNA, 19 nt, Artificial Sequence
  Synthetic
gugaaguuaugagaaauaa

SEQ ID NO: 191085 - RNA, 20 nt, Artificial Sequence
  Synthetic
agugaaguuaugagaaauaa

SEQ ID NO: 191086 - RNA, 21 nt, Artificial Sequence
  Synthetic
aagugaaguuaugagaaauaa

SEQ ID NO: 191087 - RNA, 22 nt, Artificial Sequence
  Synthetic
uaagugaaguuaugagaaauaa

SEQ ID NO: 191088 - RNA, 23 nt, Artificial Sequence
  Synthetic
auaagugaaguuaugagaaauaa

SEQ ID NO: 191089 - RNA, 24 nt, Artificial Sequence
  Synthetic
aauaagugaaguuaugagaaauaa

SEQ ID NO: 191090 - RNA, 18 nt, Artificial Sequence
  Synthetic
cuauauaugccgaaauaa

SEQ ID NO: 191091 - RNA, 19 nt, Artificial Sequence
  Synthetic
acuauauaugccgaaauaa

SEQ ID NO: 191092 - RNA, 20 nt, Artificial Sequence
  Synthetic
aacuauauaugccgaaauaa

SEQ ID NO: 191093 - RNA, 21 nt, Artificial Sequence
  Synthetic
gaacuauauaugccgaaauaa

SEQ ID NO: 191094 - RNA, 22 nt, Artificial Sequence
  Synthetic
ggaacuauauaugccgaaauaa

SEQ ID NO: 191095 - RNA, 23 nt, Artificial Sequence
  Synthetic
uggaacuauauaugccgaaauaa

SEQ ID NO: 191096 - RNA, 24 nt, Artificial Sequence
  Synthetic
cuggaacuauauaugccgaaauaa

SEQ ID NO: 191097 - RNA, 18 nt, Artificial Sequence
  Synthetic
cacugcucaaggaaauaa

SEQ ID NO: 191098 - RNA, 19 nt, Artificial Sequence
  Synthetic
ccacugcucaaggaaauaa

SEQ ID NO: 191099 - RNA, 20 nt, Artificial Sequence
  Synthetic
accacugcucaaggaaauaa

SEQ ID NO: 191100 - RNA, 21 nt, Artificial Sequence
  Synthetic
aaccacugcucaaggaaauaa

SEQ ID NO: 191101 - RNA, 22 nt, Artificial Sequence
  Synthetic
aaaccacugcucaaggaaauaa

SEQ ID NO: 191102 - RNA, 23 nt, Artificial Sequence
  Synthetic
caaaccacugcucaaggaaauaa

SEQ ID NO: 191103 - RNA, 24 nt, Artificial Sequence
  Synthetic
acaaaccacugcucaaggaaauaa

SEQ ID NO: 191104 - RNA, 18 nt, Artificial Sequence
  Synthetic
gcauaaggaaggaaauaa

SEQ ID NO: 191105 - RNA, 19 nt, Artificial Sequence
  Synthetic
agcauaaggaaggaaauaa

SEQ ID NO: 191106 - RNA, 20 nt, Artificial Sequence
  Synthetic
aagcauaaggaaggaaauaa

SEQ ID NO: 191107 - RNA, 21 nt, Artificial Sequence
  Synthetic
gaagcauaaggaaggaaauaa

SEQ ID NO: 191108 - RNA, 22 nt, Artificial Sequence
  Synthetic
ggaagcauaaggaaggaaauaa

SEQ ID NO: 191109 - RNA, 23 nt, Artificial Sequence
  Synthetic
aggaagcauaaggaaggaaauaa

SEQ ID NO: 191110 - RNA, 24 nt, Artificial Sequence
  Synthetic
aaggaagcauaaggaaggaaauaa

SEQ ID NO: 191111 - RNA, 18 nt, Artificial Sequence
  Synthetic
gaaacaaggaggaaauaa

SEQ ID NO: 191112 - RNA, 19 nt, Artificial Sequence
  Synthetic
agaaacaaggaggaaauaa

SEQ ID NO: 191113 - RNA, 20 nt, Artificial Sequence
  Synthetic
gagaaacaaggaggaaauaa

SEQ ID NO: 191114 - RNA, 21 nt, Artificial Sequence
  Synthetic
agagaaacaaggaggaaauaa

SEQ ID NO: 191115 - RNA, 22 nt, Artificial Sequence
  Synthetic
gagagaaacaaggaggaaauaa

SEQ ID NO: 191116 - RNA, 23 nt, Artificial Sequence
  Synthetic
ggagagaaacaaggaggaaauaa

SEQ ID NO: 191117 - RNA, 24 nt, Artificial Sequence
  Synthetic
aggagagaaacaaggaggaaauaa

SEQ ID NO: 191118 - RNA, 18 nt, Artificial Sequence
  Synthetic
uuuggaguguggaaauaa

SEQ ID NO: 191119 - RNA, 19 nt, Artificial Sequence
  Synthetic
uuuuggaguguggaaauaa

SEQ ID NO: 191120 - RNA, 20 nt, Artificial Sequence
  Synthetic
uuuuuggaguguggaaauaa

SEQ ID NO: 191121 - RNA, 21 nt, Artificial Sequence
  Synthetic
cuuuuuggaguguggaaauaa

SEQ ID NO: 191122 - RNA, 22 nt, Artificial Sequence
  Synthetic
acuuuuuggaguguggaaauaa

SEQ ID NO: 191123 - RNA, 23 nt, Artificial Sequence
  Synthetic
gacuuuuuggaguguggaaauaa

SEQ ID NO: 191124 - RNA, 24 nt, Artificial Sequence
  Synthetic
agacuuuuuggaguguggaaauaa

SEQ ID NO: 191125 - RNA, 18 nt, Artificial Sequence
  Synthetic
uauagauaaaugaaauaa

SEQ ID NO: 191126 - RNA, 19 nt, Artificial Sequence
  Synthetic
guauagauaaaugaaauaa

SEQ ID NO: 191127 - RNA, 20 nt, Artificial Sequence
  Synthetic
uguauagauaaaugaaauaa

SEQ ID NO: 191128 - RNA, 21 nt, Artificial Sequence
  Synthetic
auguauagauaaaugaaauaa

SEQ ID NO: 191129 - RNA, 22 nt, Artificial Sequence
  Synthetic
cauguauagauaaaugaaauaa

SEQ ID NO: 191130 - RNA, 23 nt, Artificial Sequence
  Synthetic
acauguauagauaaaugaaauaa

SEQ ID NO: 191131 - RNA, 24 nt, Artificial Sequence
  Synthetic
aacauguauagauaaaugaaauaa

SEQ ID NO: 191132 - RNA, 18 nt, Artificial Sequence
  Synthetic
uuucuagguaugaaauaa

SEQ ID NO: 191133 - RNA, 19 nt, Artificial Sequence
  Synthetic
auuucuagguaugaaauaa

SEQ ID NO: 191134 - RNA, 20 nt, Artificial Sequence
  Synthetic
uauuucuagguaugaaauaa

SEQ ID NO: 191135 - RNA, 21 nt, Artificial Sequence
  Synthetic
uuauuucuagguaugaaauaa

SEQ ID NO: 191136 - RNA, 22 nt, Artificial Sequence
  Synthetic
cuuauuucuagguaugaaauaa

SEQ ID NO: 191137 - RNA, 23 nt, Artificial Sequence
  Synthetic
gcuuauuucuagguaugaaauaa

SEQ ID NO: 191138 - RNA, 24 nt, Artificial Sequence
  Synthetic
agcuuauuucuagguaugaaauaa

SEQ ID NO: 191139 - RNA, 18 nt, Artificial Sequence
  Synthetic
cuuuugcugcugaaauaa

SEQ ID NO: 191140 - RNA, 19 nt, Artificial Sequence
  Synthetic
ucuuuugcugcugaaauaa

SEQ ID NO: 191141 - RNA, 20 nt, Artificial Sequence
  Synthetic
aucuuuugcugcugaaauaa

SEQ ID NO: 191142 - RNA, 21 nt, Artificial Sequence
  Synthetic
caucuuuugcugcugaaauaa

SEQ ID NO: 191143 - RNA, 22 nt, Artificial Sequence
  Synthetic
acaucuuuugcugcugaaauaa

SEQ ID NO: 191144 - RNA, 23 nt, Artificial Sequence
  Synthetic
gacaucuuuugcugcugaaauaa

SEQ ID NO: 191145 - RNA, 24 nt, Artificial Sequence
  Synthetic
ugacaucuuuugcugcugaaauaa

SEQ ID NO: 191146 - RNA, 18 nt, Artificial Sequence
  Synthetic
uugguaaaggugaaauaa

SEQ ID NO: 191147 - RNA, 19 nt, Artificial Sequence
  Synthetic
uuugguaaaggugaaauaa

SEQ ID NO: 191148 - RNA, 20 nt, Artificial Sequence
  Synthetic
guuugguaaaggugaaauaa

SEQ ID NO: 191149 - RNA, 21 nt, Artificial Sequence
  Synthetic
gguuugguaaaggugaaauaa

SEQ ID NO: 191150 - RNA, 22 nt, Artificial Sequence
  Synthetic
ugguuugguaaaggugaaauaa

SEQ ID NO: 191151 - RNA, 23 nt, Artificial Sequence
  Synthetic
augguuugguaaaggugaaauaa

SEQ ID NO: 191152 - RNA, 24 nt, Artificial Sequence
  Synthetic
gaugguuugguaaaggugaaauaa

SEQ ID NO: 191153 - RNA, 18 nt, Artificial Sequence
  Synthetic
uaaugacuggugaaauaa

SEQ ID NO: 191154 - RNA, 19 nt, Artificial Sequence
  Synthetic
auaaugacuggugaaauaa

SEQ ID NO: 191155 - RNA, 20 nt, Artificial Sequence
  Synthetic
aauaaugacuggugaaauaa

SEQ ID NO: 191156 - RNA, 21 nt, Artificial Sequence
  Synthetic
uaauaaugacuggugaaauaa

SEQ ID NO: 191157 - RNA, 22 nt, Artificial Sequence
  Synthetic
guaauaaugacuggugaaauaa

SEQ ID NO: 191158 - RNA, 23 nt, Artificial Sequence
  Synthetic
cguaauaaugacuggugaaauaa

SEQ ID NO: 191159 - RNA, 24 nt, Artificial Sequence
  Synthetic
acguaauaaugacuggugaaauaa

SEQ ID NO: 191160 - RNA, 18 nt, Artificial Sequence
  Synthetic
aaggucuaaaauaaauaa

SEQ ID NO: 191161 - RNA, 19 nt, Artificial Sequence
  Synthetic
aaaggucuaaaauaaauaa

SEQ ID NO: 191162 - RNA, 20 nt, Artificial Sequence
  Synthetic
gaaaggucuaaaauaaauaa

SEQ ID NO: 191163 - RNA, 21 nt, Artificial Sequence
  Synthetic
ggaaaggucuaaaauaaauaa

SEQ ID NO: 191164 - RNA, 22 nt, Artificial Sequence
  Synthetic
aggaaaggucuaaaauaaauaa

SEQ ID NO: 191165 - RNA, 23 nt, Artificial Sequence
  Synthetic
caggaaaggucuaaaauaaauaa

SEQ ID NO: 191166 - RNA, 24 nt, Artificial Sequence
  Synthetic
acaggaaaggucuaaaauaaauaa

SEQ ID NO: 191167 - RNA, 18 nt, Artificial Sequence
  Synthetic
aaauaaauaaauaaauaa

SEQ ID NO: 191168 - RNA, 19 nt, Artificial Sequence
  Synthetic
uaaauaaauaaauaaauaa

SEQ ID NO: 191169 - RNA, 20 nt, Artificial Sequence
  Synthetic
auaaauaaauaaauaaauaa

SEQ ID NO: 191170 - RNA, 21 nt, Artificial Sequence
  Synthetic
aauaaauaaauaaauaaauaa

SEQ ID NO: 191171 - RNA, 22 nt, Artificial Sequence
  Synthetic
aaauaaauaaauaaauaaauaa

SEQ ID NO: 191172 - RNA, 23 nt, Artificial Sequence
  Synthetic
uaaauaaauaaauaaauaaauaa

SEQ ID NO: 191173 - RNA, 24 nt, Artificial Sequence
  Synthetic
auaaauaaauaaauaaauaaauaa

SEQ ID NO: 191174 - RNA, 18 nt, Artificial Sequence
  Synthetic
agacacaucaauaaauaa

SEQ ID NO: 191175 - RNA, 19 nt, Artificial Sequence
  Synthetic
gagacacaucaauaaauaa

SEQ ID NO: 191176 - RNA, 20 nt, Artificial Sequence
  Synthetic
agagacacaucaauaaauaa

SEQ ID NO: 191177 - RNA, 21 nt, Artificial Sequence
  Synthetic
uagagacacaucaauaaauaa

SEQ ID NO: 191178 - RNA, 22 nt, Artificial Sequence
  Synthetic
cuagagacacaucaauaaauaa

SEQ ID NO: 191179 - RNA, 23 nt, Artificial Sequence
  Synthetic
acuagagacacaucaauaaauaa

SEQ ID NO: 191180 - RNA, 24 nt, Artificial Sequence
  Synthetic
cacuagagacacaucaauaaauaa

SEQ ID NO: 191181 - RNA, 18 nt, Artificial Sequence
  Synthetic
aaacaaauuaauaaauaa

SEQ ID NO: 191182 - RNA, 19 nt, Artificial Sequence
  Synthetic
aaaacaaauuaauaaauaa

SEQ ID NO: 191183 - RNA, 20 nt, Artificial Sequence
  Synthetic
caaaacaaauuaauaaauaa

SEQ ID NO: 191184 - RNA, 21 nt, Artificial Sequence
  Synthetic
acaaaacaaauuaauaaauaa

SEQ ID NO: 191185 - RNA, 22 nt, Artificial Sequence
  Synthetic
aacaaaacaaauuaauaaauaa

SEQ ID NO: 191186 - RNA, 23 nt, Artificial Sequence
  Synthetic
caacaaaacaaauuaauaaauaa

SEQ ID NO: 191187 - RNA, 24 nt, Artificial Sequence
  Synthetic
acaacaaaacaaauuaauaaauaa

SEQ ID NO: 191188 - RNA, 18 nt, Artificial Sequence
  Synthetic
uguucauuccauaaauaa

SEQ ID NO: 191189 - RNA, 19 nt, Artificial Sequence
  Synthetic
uuguucauuccauaaauaa

SEQ ID NO: 191190 - RNA, 20 nt, Artificial Sequence
  Synthetic
uuuguucauuccauaaauaa

SEQ ID NO: 191191 - RNA, 21 nt, Artificial Sequence
  Synthetic
guuuguucauuccauaaauaa

SEQ ID NO: 191192 - RNA, 22 nt, Artificial Sequence
  Synthetic
gguuuguucauuccauaaauaa

SEQ ID NO: 191193 - RNA, 23 nt, Artificial Sequence
  Synthetic
ggguuuguucauuccauaaauaa

SEQ ID NO: 191194 - RNA, 24 nt, Artificial Sequence
  Synthetic
uggguuuguucauuccauaaauaa

SEQ ID NO: 191195 - RNA, 18 nt, Artificial Sequence
  Synthetic
ccaucaguguauaaauaa

SEQ ID NO: 191196 - RNA, 19 nt, Artificial Sequence
  Synthetic
accaucaguguauaaauaa

SEQ ID NO: 191197 - RNA, 20 nt, Artificial Sequence
  Synthetic
aaccaucaguguauaaauaa

SEQ ID NO: 191198 - RNA, 21 nt, Artificial Sequence
  Synthetic
uaaccaucaguguauaaauaa

SEQ ID NO: 191199 - RNA, 22 nt, Artificial Sequence
  Synthetic
auaaccaucaguguauaaauaa

SEQ ID NO: 191200 - RNA, 23 nt, Artificial Sequence
  Synthetic
uauaaccaucaguguauaaauaa

SEQ ID NO: 191201 - RNA, 24 nt, Artificial Sequence
  Synthetic
uuauaaccaucaguguauaaauaa

SEQ ID NO: 191202 - RNA, 18 nt, Artificial Sequence
  Synthetic
aaauauuacacuaaauaa

SEQ ID NO: 191203 - RNA, 19 nt, Artificial Sequence
  Synthetic
aaaauauuacacuaaauaa

SEQ ID NO: 191204 - RNA, 20 nt, Artificial Sequence
  Synthetic
aaaaauauuacacuaaauaa

SEQ ID NO: 191205 - RNA, 21 nt, Artificial Sequence
  Synthetic
aaaaaauauuacacuaaauaa

SEQ ID NO: 191206 - RNA, 22 nt, Artificial Sequence
  Synthetic
gaaaaaauauuacacuaaauaa

SEQ ID NO: 191207 - RNA, 23 nt, Artificial Sequence
  Synthetic
ugaaaaaauauuacacuaaauaa

SEQ ID NO: 191208 - RNA, 24 nt, Artificial Sequence
  Synthetic
augaaaaaauauuacacuaaauaa

SEQ ID NO: 191209 - RNA, 18 nt, Artificial Sequence
  Synthetic
cagacaauaccuaaauaa

SEQ ID NO: 191210 - RNA, 19 nt, Artificial Sequence
  Synthetic
acagacaauaccuaaauaa

SEQ ID NO: 191211 - RNA, 20 nt, Artificial Sequence
  Synthetic
cacagacaauaccuaaauaa

SEQ ID NO: 191212 - RNA, 21 nt, Artificial Sequence
  Synthetic
ccacagacaauaccuaaauaa

SEQ ID NO: 191213 - RNA, 22 nt, Artificial Sequence
  Synthetic
gccacagacaauaccuaaauaa

SEQ ID NO: 191214 - RNA, 23 nt, Artificial Sequence
  Synthetic
agccacagacaauaccuaaauaa

SEQ ID NO: 191215 - RNA, 24 nt, Artificial Sequence
  Synthetic
aagccacagacaauaccuaaauaa

SEQ ID NO: 191216 - RNA, 18 nt, Artificial Sequence
  Synthetic
aggacuggggcuaaauaa

SEQ ID NO: 191217 - RNA, 19 nt, Artificial Sequence
  Synthetic
gaggacuggggcuaaauaa

SEQ ID NO: 191218 - RNA, 20 nt, Artificial Sequence
  Synthetic
agaggacuggggcuaaauaa

SEQ ID NO: 191219 - RNA, 21 nt, Artificial Sequence
  Synthetic
gagaggacuggggcuaaauaa

SEQ ID NO: 191220 - RNA, 22 nt, Artificial Sequence
  Synthetic
agagaggacuggggcuaaauaa

SEQ ID NO: 191221 - RNA, 23 nt, Artificial Sequence
  Synthetic
uagagaggacuggggcuaaauaa

SEQ ID NO: 191222 - RNA, 24 nt, Artificial Sequence
  Synthetic
auagagaggacuggggcuaaauaa

SEQ ID NO: 191223 - RNA, 18 nt, Artificial Sequence
  Synthetic
aauuaaaaaucuaaauaa

SEQ ID NO: 191224 - RNA, 19 nt, Artificial Sequence
  Synthetic
aaauuaaaaaucuaaauaa

SEQ ID NO: 191225 - RNA, 20 nt, Artificial Sequence
  Synthetic
gaaauuaaaaaucuaaauaa

SEQ ID NO: 191226 - RNA, 21 nt, Artificial Sequence
  Synthetic
agaaauuaaaaaucuaaauaa

SEQ ID NO: 191227 - RNA, 22 nt, Artificial Sequence
  Synthetic
gagaaauuaaaaaucuaaauaa

SEQ ID NO: 191228 - RNA, 23 nt, Artificial Sequence
  Synthetic
agagaaauuaaaaaucuaaauaa

SEQ ID NO: 191229 - RNA, 24 nt, Artificial Sequence
  Synthetic
gagagaaauuaaaaaucuaaauaa

SEQ ID NO: 191230 - RNA, 18 nt, Artificial Sequence
  Synthetic
uuaauauuuucuaaauaa

SEQ ID NO: 191231 - RNA, 19 nt, Artificial Sequence
  Synthetic
cuuaauauuuucuaaauaa

SEQ ID NO: 191232 - RNA, 20 nt, Artificial Sequence
  Synthetic
acuuaauauuuucuaaauaa

SEQ ID NO: 191233 - RNA, 21 nt, Artificial Sequence
  Synthetic
aacuuaauauuuucuaaauaa

SEQ ID NO: 191234 - RNA, 22 nt, Artificial Sequence
  Synthetic
uaacuuaauauuuucuaaauaa

SEQ ID NO: 191235 - RNA, 23 nt, Artificial Sequence
  Synthetic
auaacuuaauauuuucuaaauaa

SEQ ID NO: 191236 - RNA, 24 nt, Artificial Sequence
  Synthetic
gauaacuuaauauuuucuaaauaa

SEQ ID NO: 191237 - RNA, 18 nt, Artificial Sequence
  Synthetic
gccugggugaguaaauaa

SEQ ID NO: 191238 - RNA, 19 nt, Artificial Sequence
  Synthetic
ugccugggugaguaaauaa

SEQ ID NO: 191239 - RNA, 20 nt, Artificial Sequence
  Synthetic
augccugggugaguaaauaa

SEQ ID NO: 191240 - RNA, 21 nt, Artificial Sequence
  Synthetic
aaugccugggugaguaaauaa

SEQ ID NO: 191241 - RNA, 22 nt, Artificial Sequence
  Synthetic
aaaugccugggugaguaaauaa

SEQ ID NO: 191242 - RNA, 23 nt, Artificial Sequence
  Synthetic
caaaugccugggugaguaaauaa

SEQ ID NO: 191243 - RNA, 24 nt, Artificial Sequence
  Synthetic
ccaaaugccugggugaguaaauaa

SEQ ID NO: 191244 - RNA, 18 nt, Artificial Sequence
  Synthetic
uugcuauuauguaaauaa

SEQ ID NO: 191245 - RNA, 19 nt, Artificial Sequence
  Synthetic
auugcuauuauguaaauaa

SEQ ID NO: 191246 - RNA, 20 nt, Artificial Sequence
  Synthetic
cauugcuauuauguaaauaa

SEQ ID NO: 191247 - RNA, 21 nt, Artificial Sequence
  Synthetic
ucauugcuauuauguaaauaa

SEQ ID NO: 191248 - RNA, 22 nt, Artificial Sequence
  Synthetic
aucauugcuauuauguaaauaa

SEQ ID NO: 191249 - RNA, 23 nt, Artificial Sequence
  Synthetic
uaucauugcuauuauguaaauaa

SEQ ID NO: 191250 - RNA, 24 nt, Artificial Sequence
  Synthetic
uuaucauugcuauuauguaaauaa

SEQ ID NO: 191251 - RNA, 18 nt, Artificial Sequence
  Synthetic
uagaaaugacuuaaauaa

SEQ ID NO: 191252 - RNA, 19 nt, Artificial Sequence
  Synthetic
guagaaaugacuuaaauaa

SEQ ID NO: 191253 - RNA, 20 nt, Artificial Sequence
  Synthetic
gguagaaaugacuuaaauaa

SEQ ID NO: 191254 - RNA, 21 nt, Artificial Sequence
  Synthetic
agguagaaaugacuuaaauaa

SEQ ID NO: 191255 - RNA, 22 nt, Artificial Sequence
  Synthetic
aagguagaaaugacuuaaauaa

SEQ ID NO: 191256 - RNA, 23 nt, Artificial Sequence
  Synthetic
caagguagaaaugacuuaaauaa

SEQ ID NO: 191257 - RNA, 24 nt, Artificial Sequence
  Synthetic
ucaagguagaaaugacuuaaauaa

SEQ ID NO: 191258 - RNA, 18 nt, Artificial Sequence
  Synthetic
gcaagggaaguuaaauaa

SEQ ID NO: 191259 - RNA, 19 nt, Artificial Sequence
  Synthetic
agcaagggaaguuaaauaa

SEQ ID NO: 191260 - RNA, 20 nt, Artificial Sequence
  Synthetic
aagcaagggaaguuaaauaa

SEQ ID NO: 191261 - RNA, 21 nt, Artificial Sequence
  Synthetic
gaagcaagggaaguuaaauaa

SEQ ID NO: 191262 - RNA, 22 nt, Artificial Sequence
  Synthetic
ugaagcaagggaaguuaaauaa

SEQ ID NO: 191263 - RNA, 23 nt, Artificial Sequence
  Synthetic
uugaagcaagggaaguuaaauaa

SEQ ID NO: 191264 - RNA, 24 nt, Artificial Sequence
  Synthetic
auugaagcaagggaaguuaaauaa

SEQ ID NO: 191265 - RNA, 18 nt, Artificial Sequence
  Synthetic
cagucauuaguuaaauaa

SEQ ID NO: 191266 - RNA, 19 nt, Artificial Sequence
  Synthetic
acagucauuaguuaaauaa

SEQ ID NO: 191267 - RNA, 20 nt, Artificial Sequence
  Synthetic
uacagucauuaguuaaauaa

SEQ ID NO: 191268 - RNA, 21 nt, Artificial Sequence
  Synthetic
uuacagucauuaguuaaauaa

SEQ ID NO: 191269 - RNA, 22 nt, Artificial Sequence
  Synthetic
auuacagucauuaguuaaauaa

SEQ ID NO: 191270 - RNA, 23 nt, Artificial Sequence
  Synthetic
aauuacagucauuaguuaaauaa

SEQ ID NO: 191271 - RNA, 24 nt, Artificial Sequence
  Synthetic
gaauuacagucauuaguuaaauaa

SEQ ID NO: 191272 - RNA, 18 nt, Artificial Sequence
  Synthetic
gaaauauacguuaaauaa

SEQ ID NO: 191273 - RNA, 19 nt, Artificial Sequence
  Synthetic
ggaaauauacguuaaauaa

SEQ ID NO: 191274 - RNA, 20 nt, Artificial Sequence
  Synthetic
uggaaauauacguuaaauaa

SEQ ID NO: 191275 - RNA, 21 nt, Artificial Sequence
  Synthetic
cuggaaauauacguuaaauaa

SEQ ID NO: 191276 - RNA, 22 nt, Artificial Sequence
  Synthetic
ccuggaaauauacguuaaauaa

SEQ ID NO: 191277 - RNA, 23 nt, Artificial Sequence
  Synthetic
accuggaaauauacguuaaauaa

SEQ ID NO: 191278 - RNA, 24 nt, Artificial Sequence
  Synthetic
uaccuggaaauauacguuaaauaa

SEQ ID NO: 191279 - RNA, 18 nt, Artificial Sequence
  Synthetic
auuuuucaauuuaaauaa

SEQ ID NO: 191280 - RNA, 19 nt, Artificial Sequence
  Synthetic
uauuuuucaauuuaaauaa

SEQ ID NO: 191281 - RNA, 20 nt, Artificial Sequence
  Synthetic
cuauuuuucaauuuaaauaa

SEQ ID NO: 191282 - RNA, 21 nt, Artificial Sequence
  Synthetic
ccuauuuuucaauuuaaauaa

SEQ ID NO: 191283 - RNA, 22 nt, Artificial Sequence
  Synthetic
uccuauuuuucaauuuaaauaa

SEQ ID NO: 191284 - RNA, 23 nt, Artificial Sequence
  Synthetic
uuccuauuuuucaauuuaaauaa

SEQ ID NO: 191285 - RNA, 24 nt, Artificial Sequence
  Synthetic
uuuccuauuuuucaauuuaaauaa

SEQ ID NO: 191286 - RNA, 18 nt, Artificial Sequence
  Synthetic
ugugcagaguuuaaauaa

SEQ ID NO: 191287 - RNA, 19 nt, Artificial Sequence
  Synthetic
augugcagaguuuaaauaa

SEQ ID NO: 191288 - RNA, 20 nt, Artificial Sequence
  Synthetic
uaugugcagaguuuaaauaa

SEQ ID NO: 191289 - RNA, 21 nt, Artificial Sequence
  Synthetic
uuaugugcagaguuuaaauaa

SEQ ID NO: 191290 - RNA, 22 nt, Artificial Sequence
  Synthetic
auuaugugcagaguuuaaauaa

SEQ ID NO: 191291 - RNA, 23 nt, Artificial Sequence
  Synthetic
aauuaugugcagaguuuaaauaa

SEQ ID NO: 191292 - RNA, 24 nt, Artificial Sequence
  Synthetic
caauuaugugcagaguuuaaauaa

SEQ ID NO: 191293 - RNA, 18 nt, Artificial Sequence
  Synthetic
ggcugcuauuuuaaauaa

SEQ ID NO: 191294 - RNA, 19 nt, Artificial Sequence
  Synthetic
cggcugcuauuuuaaauaa

SEQ ID NO: 191295 - RNA, 20 nt, Artificial Sequence
  Synthetic
ccggcugcuauuuuaaauaa

SEQ ID NO: 191296 - RNA, 21 nt, Artificial Sequence
  Synthetic
cccggcugcuauuuuaaauaa

SEQ ID NO: 191297 - RNA, 22 nt, Artificial Sequence
  Synthetic
gcccggcugcuauuuuaaauaa

SEQ ID NO: 191298 - RNA, 23 nt, Artificial Sequence
  Synthetic
cgcccggcugcuauuuuaaauaa

SEQ ID NO: 191299 - RNA, 24 nt, Artificial Sequence
  Synthetic
gcgcccggcugcuauuuuaaauaa

SEQ ID NO: 191300 - RNA, 18 nt, Artificial Sequence
  Synthetic
aauucauauaaacaauaa

SEQ ID NO: 191301 - RNA, 19 nt, Artificial Sequence
  Synthetic
aaauucauauaaacaauaa

SEQ ID NO: 191302 - RNA, 20 nt, Artificial Sequence
  Synthetic
uaaauucauauaaacaauaa

SEQ ID NO: 191303 - RNA, 21 nt, Artificial Sequence
  Synthetic
auaaauucauauaaacaauaa

SEQ ID NO: 191304 - RNA, 22 nt, Artificial Sequence
  Synthetic
uauaaauucauauaaacaauaa

SEQ ID NO: 191305 - RNA, 23 nt, Artificial Sequence
  Synthetic
auauaaauucauauaaacaauaa

SEQ ID NO: 191306 - RNA, 24 nt, Artificial Sequence
  Synthetic
aauauaaauucauauaaacaauaa

SEQ ID NO: 191307 - RNA, 18 nt, Artificial Sequence
  Synthetic
uuuagaaaggaacaauaa

SEQ ID NO: 191308 - RNA, 19 nt, Artificial Sequence
  Synthetic
uuuuagaaaggaacaauaa

SEQ ID NO: 191309 - RNA, 20 nt, Artificial Sequence
  Synthetic
cuuuuagaaaggaacaauaa

SEQ ID NO: 191310 - RNA, 21 nt, Artificial Sequence
  Synthetic
ucuuuuagaaaggaacaauaa

SEQ ID NO: 191311 - RNA, 22 nt, Artificial Sequence
  Synthetic
uucuuuuagaaaggaacaauaa

SEQ ID NO: 191312 - RNA, 23 nt, Artificial Sequence
  Synthetic
auucuuuuagaaaggaacaauaa

SEQ ID NO: 191313 - RNA, 24 nt, Artificial Sequence
  Synthetic
cauucuuuuagaaaggaacaauaa

SEQ ID NO: 191314 - RNA, 18 nt, Artificial Sequence
  Synthetic
gugacugaggcacaauaa

SEQ ID NO: 191315 - RNA, 19 nt, Artificial Sequence
  Synthetic
ggugacugaggcacaauaa

SEQ ID NO: 191316 - RNA, 20 nt, Artificial Sequence
  Synthetic
gggugacugaggcacaauaa

SEQ ID NO: 191317 - RNA, 21 nt, Artificial Sequence
  Synthetic
ggggugacugaggcacaauaa

SEQ ID NO: 191318 - RNA, 22 nt, Artificial Sequence
  Synthetic
gggggugacugaggcacaauaa

SEQ ID NO: 191319 - RNA, 23 nt, Artificial Sequence
  Synthetic
agggggugacugaggcacaauaa

SEQ ID NO: 191320 - RNA, 24 nt, Artificial Sequence
  Synthetic
uagggggugacugaggcacaauaa

SEQ ID NO: 191321 - RNA, 18 nt, Artificial Sequence
  Synthetic
uuuacagauucacaauaa

SEQ ID NO: 191322 - RNA, 19 nt, Artificial Sequence
  Synthetic
auuuacagauucacaauaa

SEQ ID NO: 191323 - RNA, 20 nt, Artificial Sequence
  Synthetic
aauuuacagauucacaauaa

SEQ ID NO: 191324 - RNA, 21 nt, Artificial Sequence
  Synthetic
gaauuuacagauucacaauaa

SEQ ID NO: 191325 - RNA, 22 nt, Artificial Sequence
  Synthetic
ggaauuuacagauucacaauaa

SEQ ID NO: 191326 - RNA, 23 nt, Artificial Sequence
  Synthetic
uggaauuuacagauucacaauaa

SEQ ID NO: 191327 - RNA, 24 nt, Artificial Sequence
  Synthetic
auggaauuuacagauucacaauaa

SEQ ID NO: 191328 - RNA, 18 nt, Artificial Sequence
  Synthetic
uucaaaggaugacaauaa

SEQ ID NO: 191329 - RNA, 19 nt, Artificial Sequence
  Synthetic
cuucaaaggaugacaauaa

SEQ ID NO: 191330 - RNA, 20 nt, Artificial Sequence
  Synthetic
acuucaaaggaugacaauaa

SEQ ID NO: 191331 - RNA, 21 nt, Artificial Sequence
  Synthetic
aacuucaaaggaugacaauaa

SEQ ID NO: 191332 - RNA, 22 nt, Artificial Sequence
  Synthetic
aaacuucaaaggaugacaauaa

SEQ ID NO: 191333 - RNA, 23 nt, Artificial Sequence
  Synthetic
uaaacuucaaaggaugacaauaa

SEQ ID NO: 191334 - RNA, 24 nt, Artificial Sequence
  Synthetic
guaaacuucaaaggaugacaauaa

SEQ ID NO: 191335 - RNA, 18 nt, Artificial Sequence
  Synthetic
gcaagacucaaccaauaa

SEQ ID NO: 191336 - RNA, 19 nt, Artificial Sequence
  Synthetic
agcaagacucaaccaauaa

SEQ ID NO: 191337 - RNA, 20 nt, Artificial Sequence
  Synthetic
gagcaagacucaaccaauaa

SEQ ID NO: 191338 - RNA, 21 nt, Artificial Sequence
  Synthetic
ggagcaagacucaaccaauaa

SEQ ID NO: 191339 - RNA, 22 nt, Artificial Sequence
  Synthetic
aggagcaagacucaaccaauaa

SEQ ID NO: 191340 - RNA, 23 nt, Artificial Sequence
  Synthetic
caggagcaagacucaaccaauaa

SEQ ID NO: 191341 - RNA, 24 nt, Artificial Sequence
  Synthetic
acaggagcaagacucaaccaauaa

SEQ ID NO: 191342 - RNA, 18 nt, Artificial Sequence
  Synthetic
cucugaauagaccaauaa

SEQ ID NO: 191343 - RNA, 19 nt, Artificial Sequence
  Synthetic
ucucugaauagaccaauaa

SEQ ID NO: 191344 - RNA, 20 nt, Artificial Sequence
  Synthetic
aucucugaauagaccaauaa

SEQ ID NO: 191345 - RNA, 21 nt, Artificial Sequence
  Synthetic
aaucucugaauagaccaauaa

SEQ ID NO: 191346 - RNA, 22 nt, Artificial Sequence
  Synthetic
gaaucucugaauagaccaauaa

SEQ ID NO: 191347 - RNA, 23 nt, Artificial Sequence
  Synthetic
ugaaucucugaauagaccaauaa

SEQ ID NO: 191348 - RNA, 24 nt, Artificial Sequence
  Synthetic
uugaaucucugaauagaccaauaa

SEQ ID NO: 191349 - RNA, 18 nt, Artificial Sequence
  Synthetic
ucaguuaagacccaauaa

SEQ ID NO: 191350 - RNA, 19 nt, Artificial Sequence
  Synthetic
gucaguuaagacccaauaa

SEQ ID NO: 191351 - RNA, 20 nt, Artificial Sequence
  Synthetic
agucaguuaagacccaauaa

SEQ ID NO: 191352 - RNA, 21 nt, Artificial Sequence
  Synthetic
cagucaguuaagacccaauaa

SEQ ID NO: 191353 - RNA, 22 nt, Artificial Sequence
  Synthetic
ucagucaguuaagacccaauaa

SEQ ID NO: 191354 - RNA, 23 nt, Artificial Sequence
  Synthetic
cucagucaguuaagacccaauaa

SEQ ID NO: 191355 - RNA, 24 nt, Artificial Sequence
  Synthetic
ccucagucaguuaagacccaauaa

SEQ ID NO: 191356 - RNA, 18 nt, Artificial Sequence
  Synthetic
cccugcauauggcaauaa

SEQ ID NO: 191357 - RNA, 19 nt, Artificial Sequence
  Synthetic
acccugcauauggcaauaa

SEQ ID NO: 191358 - RNA, 20 nt, Artificial Sequence
  Synthetic
gacccugcauauggcaauaa

SEQ ID NO: 191359 - RNA, 21 nt, Artificial Sequence
  Synthetic
cgacccugcauauggcaauaa

SEQ ID NO: 191360 - RNA, 22 nt, Artificial Sequence
  Synthetic
acgacccugcauauggcaauaa

SEQ ID NO: 191361 - RNA, 23 nt, Artificial Sequence
  Synthetic
aacgacccugcauauggcaauaa

SEQ ID NO: 191362 - RNA, 24 nt, Artificial Sequence
  Synthetic
caacgacccugcauauggcaauaa

SEQ ID NO: 191363 - RNA, 18 nt, Artificial Sequence
  Synthetic
uuauucagaaugcaauaa

SEQ ID NO: 191364 - RNA, 19 nt, Artificial Sequence
  Synthetic
uuuauucagaaugcaauaa

SEQ ID NO: 191365 - RNA, 20 nt, Artificial Sequence
  Synthetic
guuuauucagaaugcaauaa

SEQ ID NO: 191366 - RNA, 21 nt, Artificial Sequence
  Synthetic
uguuuauucagaaugcaauaa

SEQ ID NO: 191367 - RNA, 22 nt, Artificial Sequence
  Synthetic
cuguuuauucagaaugcaauaa

SEQ ID NO: 191368 - RNA, 23 nt, Artificial Sequence
  Synthetic
gcuguuuauucagaaugcaauaa

SEQ ID NO: 191369 - RNA, 24 nt, Artificial Sequence
  Synthetic
ugcuguuuauucagaaugcaauaa

SEQ ID NO: 191370 - RNA, 18 nt, Artificial Sequence
  Synthetic
aaacagcccaugcaauaa

SEQ ID NO: 191371 - RNA, 19 nt, Artificial Sequence
  Synthetic
aaaacagcccaugcaauaa

SEQ ID NO: 191372 - RNA, 20 nt, Artificial Sequence
  Synthetic
caaaacagcccaugcaauaa

SEQ ID NO: 191373 - RNA, 21 nt, Artificial Sequence
  Synthetic
gcaaaacagcccaugcaauaa

SEQ ID NO: 191374 - RNA, 22 nt, Artificial Sequence
  Synthetic
ggcaaaacagcccaugcaauaa

SEQ ID NO: 191375 - RNA, 23 nt, Artificial Sequence
  Synthetic
aggcaaaacagcccaugcaauaa

SEQ ID NO: 191376 - RNA, 24 nt, Artificial Sequence
  Synthetic
uaggcaaaacagcccaugcaauaa

SEQ ID NO: 191377 - RNA, 18 nt, Artificial Sequence
  Synthetic
caagcuagaaaucaauaa

SEQ ID NO: 191378 - RNA, 19 nt, Artificial Sequence
  Synthetic
ccaagcuagaaaucaauaa

SEQ ID NO: 191379 - RNA, 20 nt, Artificial Sequence
  Synthetic
accaagcuagaaaucaauaa

SEQ ID NO: 191380 - RNA, 21 nt, Artificial Sequence
  Synthetic
aaccaagcuagaaaucaauaa

SEQ ID NO: 191381 - RNA, 22 nt, Artificial Sequence
  Synthetic
aaaccaagcuagaaaucaauaa

SEQ ID NO: 191382 - RNA, 23 nt, Artificial Sequence
  Synthetic
gaaaccaagcuagaaaucaauaa

SEQ ID NO: 191383 - RNA, 24 nt, Artificial Sequence
  Synthetic
ugaaaccaagcuagaaaucaauaa

SEQ ID NO: 191384 - RNA, 18 nt, Artificial Sequence
  Synthetic
ggauaaaagugucaauaa

SEQ ID NO: 191385 - RNA, 19 nt, Artificial Sequence
  Synthetic
uggauaaaagugucaauaa

SEQ ID NO: 191386 - RNA, 20 nt, Artificial Sequence
  Synthetic
guggauaaaagugucaauaa

SEQ ID NO: 191387 - RNA, 21 nt, Artificial Sequence
  Synthetic
aguggauaaaagugucaauaa

SEQ ID NO: 191388 - RNA, 22 nt, Artificial Sequence
  Synthetic
uaguggauaaaagugucaauaa

SEQ ID NO: 191389 - RNA, 23 nt, Artificial Sequence
  Synthetic
auaguggauaaaagugucaauaa

SEQ ID NO: 191390 - RNA, 24 nt, Artificial Sequence
  Synthetic
gauaguggauaaaagugucaauaa

SEQ ID NO: 191391 - RNA, 18 nt, Artificial Sequence
  Synthetic
cgaggagaaauucaauaa

SEQ ID NO: 191392 - RNA, 19 nt, Artificial Sequence
  Synthetic
gcgaggagaaauucaauaa

SEQ ID NO: 191393 - RNA, 20 nt, Artificial Sequence
  Synthetic
agcgaggagaaauucaauaa

SEQ ID NO: 191394 - RNA, 21 nt, Artificial Sequence
  Synthetic
cagcgaggagaaauucaauaa

SEQ ID NO: 191395 - RNA, 22 nt, Artificial Sequence
  Synthetic
acagcgaggagaaauucaauaa

SEQ ID NO: 191396 - RNA, 23 nt, Artificial Sequence
  Synthetic
gacagcgaggagaaauucaauaa

SEQ ID NO: 191397 - RNA, 24 nt, Artificial Sequence
  Synthetic
ggacagcgaggagaaauucaauaa

SEQ ID NO: 191398 - RNA, 18 nt, Artificial Sequence
  Synthetic
uagugaugcauucaauaa

SEQ ID NO: 191399 - RNA, 19 nt, Artificial Sequence
  Synthetic
uuagugaugcauucaauaa

SEQ ID NO: 191400 - RNA, 20 nt, Artificial Sequence
  Synthetic
auuagugaugcauucaauaa

SEQ ID NO: 191401 - RNA, 21 nt, Artificial Sequence
  Synthetic
aauuagugaugcauucaauaa

SEQ ID NO: 191402 - RNA, 22 nt, Artificial Sequence
  Synthetic
uaauuagugaugcauucaauaa

SEQ ID NO: 191403 - RNA, 23 nt, Artificial Sequence
  Synthetic
uuaauuagugaugcauucaauaa

SEQ ID NO: 191404 - RNA, 24 nt, Artificial Sequence
  Synthetic
uuuaauuagugaugcauucaauaa

SEQ ID NO: 191405 - RNA, 18 nt, Artificial Sequence
  Synthetic
ccaccccaucuucaauaa

SEQ ID NO: 191406 - RNA, 19 nt, Artificial Sequence
  Synthetic
cccaccccaucuucaauaa

SEQ ID NO: 191407 - RNA, 20 nt, Artificial Sequence
  Synthetic
ucccaccccaucuucaauaa

SEQ ID NO: 191408 - RNA, 21 nt, Artificial Sequence
  Synthetic
uucccaccccaucuucaauaa

SEQ ID NO: 191409 - RNA, 22 nt, Artificial Sequence
  Synthetic
auucccaccccaucuucaauaa

SEQ ID NO: 191410 - RNA, 23 nt, Artificial Sequence
  Synthetic
uauucccaccccaucuucaauaa

SEQ ID NO: 191411 - RNA, 24 nt, Artificial Sequence
  Synthetic
guauucccaccccaucuucaauaa

SEQ ID NO: 191412 - RNA, 18 nt, Artificial Sequence
  Synthetic
acaaaaguuuuucaauaa

SEQ ID NO: 191413 - RNA, 19 nt, Artificial Sequence
  Synthetic
cacaaaaguuuuucaauaa

SEQ ID NO: 191414 - RNA, 20 nt, Artificial Sequence
  Synthetic
acacaaaaguuuuucaauaa

SEQ ID NO: 191415 - RNA, 21 nt, Artificial Sequence
  Synthetic
uacacaaaaguuuuucaauaa

SEQ ID NO: 191416 - RNA, 22 nt, Artificial Sequence
  Synthetic
auacacaaaaguuuuucaauaa

SEQ ID NO: 191417 - RNA, 23 nt, Artificial Sequence
  Synthetic
cauacacaaaaguuuuucaauaa

SEQ ID NO: 191418 - RNA, 24 nt, Artificial Sequence
  Synthetic
acauacacaaaaguuuuucaauaa

SEQ ID NO: 191419 - RNA, 18 nt, Artificial Sequence
  Synthetic
guaaaggaucaagaauaa

SEQ ID NO: 191420 - RNA, 19 nt, Artificial Sequence
  Synthetic
aguaaaggaucaagaauaa

SEQ ID NO: 191421 - RNA, 20 nt, Artificial Sequence
  Synthetic
gaguaaaggaucaagaauaa

SEQ ID NO: 191422 - RNA, 21 nt, Artificial Sequence
  Synthetic
agaguaaaggaucaagaauaa

SEQ ID NO: 191423 - RNA, 22 nt, Artificial Sequence
  Synthetic
aagaguaaaggaucaagaauaa

SEQ ID NO: 191424 - RNA, 23 nt, Artificial Sequence
  Synthetic
aaagaguaaaggaucaagaauaa

SEQ ID NO: 191425 - RNA, 24 nt, Artificial Sequence
  Synthetic
gaaagaguaaaggaucaagaauaa

SEQ ID NO: 191426 - RNA, 18 nt, Artificial Sequence
  Synthetic
uuggagguagcagaauaa

SEQ ID NO: 191427 - RNA, 19 nt, Artificial Sequence
  Synthetic
auuggagguagcagaauaa

SEQ ID NO: 191428 - RNA, 20 nt, Artificial Sequence
  Synthetic
aauuggagguagcagaauaa

SEQ ID NO: 191429 - RNA, 21 nt, Artificial Sequence
  Synthetic
aaauuggagguagcagaauaa

SEQ ID NO: 191430 - RNA, 22 nt, Artificial Sequence
  Synthetic
uaaauuggagguagcagaauaa

SEQ ID NO: 191431 - RNA, 23 nt, Artificial Sequence
  Synthetic
auaaauuggagguagcagaauaa

SEQ ID NO: 191432 - RNA, 24 nt, Artificial Sequence
  Synthetic
aauaaauuggagguagcagaauaa

SEQ ID NO: 191433 - RNA, 18 nt, Artificial Sequence
  Synthetic
cauaaauaaggagaauaa

SEQ ID NO: 191434 - RNA, 19 nt, Artificial Sequence
  Synthetic
acauaaauaaggagaauaa

SEQ ID NO: 191435 - RNA, 20 nt, Artificial Sequence
  Synthetic
uacauaaauaaggagaauaa

SEQ ID NO: 191436 - RNA, 21 nt, Artificial Sequence
  Synthetic
auacauaaauaaggagaauaa

SEQ ID NO: 191437 - RNA, 22 nt, Artificial Sequence
  Synthetic
aauacauaaauaaggagaauaa

SEQ ID NO: 191438 - RNA, 23 nt, Artificial Sequence
  Synthetic
aaauacauaaauaaggagaauaa

SEQ ID NO: 191439 - RNA, 24 nt, Artificial Sequence
  Synthetic
aaaauacauaaauaaggagaauaa

SEQ ID NO: 191440 - RNA, 18 nt, Artificial Sequence
  Synthetic
uuagccccgggagaauaa

SEQ ID NO: 191441 - RNA, 19 nt, Artificial Sequence
  Synthetic
uuuagccccgggagaauaa

SEQ ID NO: 191442 - RNA, 20 nt, Artificial Sequence
  Synthetic
auuuagccccgggagaauaa

SEQ ID NO: 191443 - RNA, 21 nt, Artificial Sequence
  Synthetic
uauuuagccccgggagaauaa

SEQ ID NO: 191444 - RNA, 22 nt, Artificial Sequence
  Synthetic
auauuuagccccgggagaauaa

SEQ ID NO: 191445 - RNA, 23 nt, Artificial Sequence
  Synthetic
cauauuuagccccgggagaauaa

SEQ ID NO: 191446 - RNA, 24 nt, Artificial Sequence
  Synthetic
ucauauuuagccccgggagaauaa

SEQ ID NO: 191447 - RNA, 18 nt, Artificial Sequence
  Synthetic
uguaaaguaugagaauaa

SEQ ID NO: 191448 - RNA, 19 nt, Artificial Sequence
  Synthetic
auguaaaguaugagaauaa

SEQ ID NO: 191449 - RNA, 20 nt, Artificial Sequence
  Synthetic
gauguaaaguaugagaauaa

SEQ ID NO: 191450 - RNA, 21 nt, Artificial Sequence
  Synthetic
agauguaaaguaugagaauaa

SEQ ID NO: 191451 - RNA, 22 nt, Artificial Sequence
  Synthetic
uagauguaaaguaugagaauaa

SEQ ID NO: 191452 - RNA, 23 nt, Artificial Sequence
  Synthetic
uuagauguaaaguaugagaauaa

SEQ ID NO: 191453 - RNA, 24 nt, Artificial Sequence
  Synthetic
auuagauguaaaguaugagaauaa

SEQ ID NO: 191454 - RNA, 18 nt, Artificial Sequence
  Synthetic
gaaacauuuugagaauaa

SEQ ID NO: 191455 - RNA, 19 nt, Artificial Sequence
  Synthetic
ggaaacauuuugagaauaa

SEQ ID NO: 191456 - RNA, 20 nt, Artificial Sequence
  Synthetic
aggaaacauuuugagaauaa

SEQ ID NO: 191457 - RNA, 21 nt, Artificial Sequence
  Synthetic
gaggaaacauuuugagaauaa

SEQ ID NO: 191458 - RNA, 22 nt, Artificial Sequence
  Synthetic
ugaggaaacauuuugagaauaa

SEQ ID NO: 191459 - RNA, 23 nt, Artificial Sequence
  Synthetic
cugaggaaacauuuugagaauaa

SEQ ID NO: 191460 - RNA, 24 nt, Artificial Sequence
  Synthetic
ccugaggaaacauuuugagaauaa

SEQ ID NO: 191461 - RNA, 18 nt, Artificial Sequence
  Synthetic
guuguuggcguagaauaa

SEQ ID NO: 191462 - RNA, 19 nt, Artificial Sequence
  Synthetic
uguuguuggcguagaauaa

SEQ ID NO: 191463 - RNA, 20 nt, Artificial Sequence
  Synthetic
uuguuguuggcguagaauaa

SEQ ID NO: 191464 - RNA, 21 nt, Artificial Sequence
  Synthetic
guuguuguuggcguagaauaa

SEQ ID NO: 191465 - RNA, 22 nt, Artificial Sequence
  Synthetic
uguuguuguuggcguagaauaa

SEQ ID NO: 191466 - RNA, 23 nt, Artificial Sequence
  Synthetic
uuguuguuguuggcguagaauaa

SEQ ID NO: 191467 - RNA, 24 nt, Artificial Sequence
  Synthetic
uuuguuguuguuggcguagaauaa

SEQ ID NO: 191468 - RNA, 18 nt, Artificial Sequence
  Synthetic
agagccaguaccgaauaa

SEQ ID NO: 191469 - RNA, 19 nt, Artificial Sequence
  Synthetic
aagagccaguaccgaauaa

SEQ ID NO: 191470 - RNA, 20 nt, Artificial Sequence
  Synthetic
aaagagccaguaccgaauaa

SEQ ID NO: 191471 - RNA, 21 nt, Artificial Sequence
  Synthetic
aaaagagccaguaccgaauaa

SEQ ID NO: 191472 - RNA, 22 nt, Artificial Sequence
  Synthetic
gaaaagagccaguaccgaauaa

SEQ ID NO: 191473 - RNA, 23 nt, Artificial Sequence
  Synthetic
agaaaagagccaguaccgaauaa

SEQ ID NO: 191474 - RNA, 24 nt, Artificial Sequence
  Synthetic
cagaaaagagccaguaccgaauaa

SEQ ID NO: 191475 - RNA, 18 nt, Artificial Sequence
  Synthetic
uuaaaaacuuaggaauaa

SEQ ID NO: 191476 - RNA, 19 nt, Artificial Sequence
  Synthetic
guuaaaaacuuaggaauaa

SEQ ID NO: 191477 - RNA, 20 nt, Artificial Sequence
  Synthetic
uguuaaaaacuuaggaauaa

SEQ ID NO: 191478 - RNA, 21 nt, Artificial Sequence
  Synthetic
auguuaaaaacuuaggaauaa

SEQ ID NO: 191479 - RNA, 22 nt, Artificial Sequence
  Synthetic
aauguuaaaaacuuaggaauaa

SEQ ID NO: 191480 - RNA, 23 nt, Artificial Sequence
  Synthetic
aaauguuaaaaacuuaggaauaa

SEQ ID NO: 191481 - RNA, 24 nt, Artificial Sequence
  Synthetic
aaaauguuaaaaacuuaggaauaa

SEQ ID NO: 191482 - RNA, 18 nt, Artificial Sequence
  Synthetic
uuaauaauauuggaauaa

SEQ ID NO: 191483 - RNA, 19 nt, Artificial Sequence
  Synthetic
uuuaauaauauuggaauaa

SEQ ID NO: 191484 - RNA, 20 nt, Artificial Sequence
  Synthetic
auuuaauaauauuggaauaa

SEQ ID NO: 191485 - RNA, 21 nt, Artificial Sequence
  Synthetic
uauuuaauaauauuggaauaa

SEQ ID NO: 191486 - RNA, 22 nt, Artificial Sequence
  Synthetic
guauuuaauaauauuggaauaa

SEQ ID NO: 191487 - RNA, 23 nt, Artificial Sequence
  Synthetic
gguauuuaauaauauuggaauaa

SEQ ID NO: 191488 - RNA, 24 nt, Artificial Sequence
  Synthetic
ggguauuuaauaauauuggaauaa

SEQ ID NO: 191489 - RNA, 18 nt, Artificial Sequence
  Synthetic
gauucucugaaugaauaa

SEQ ID NO: 191490 - RNA, 19 nt, Artificial Sequence
  Synthetic
agauucucugaaugaauaa

SEQ ID NO: 191491 - RNA, 20 nt, Artificial Sequence
  Synthetic
aagauucucugaaugaauaa

SEQ ID NO: 191492 - RNA, 21 nt, Artificial Sequence
  Synthetic
caagauucucugaaugaauaa

SEQ ID NO: 191493 - RNA, 22 nt, Artificial Sequence
  Synthetic
ucaagauucucugaaugaauaa

SEQ ID NO: 191494 - RNA, 23 nt, Artificial Sequence
  Synthetic
aucaagauucucugaaugaauaa

SEQ ID NO: 191495 - RNA, 24 nt, Artificial Sequence
  Synthetic
caucaagauucucugaaugaauaa

SEQ ID NO: 191496 - RNA, 18 nt, Artificial Sequence
  Synthetic
agauauucacaugaauaa

SEQ ID NO: 191497 - RNA, 19 nt, Artificial Sequence
  Synthetic
uagauauucacaugaauaa

SEQ ID NO: 191498 - RNA, 20 nt, Artificial Sequence
  Synthetic
uuagauauucacaugaauaa

SEQ ID NO: 191499 - RNA, 21 nt, Artificial Sequence
  Synthetic
uuuagauauucacaugaauaa

SEQ ID NO: 191500 - RNA, 22 nt, Artificial Sequence
  Synthetic
uuuuagauauucacaugaauaa

SEQ ID NO: 191501 - RNA, 23 nt, Artificial Sequence
  Synthetic
cuuuuagauauucacaugaauaa

SEQ ID NO: 191502 - RNA, 24 nt, Artificial Sequence
  Synthetic
ccuuuuagauauucacaugaauaa

SEQ ID NO: 191503 - RNA, 18 nt, Artificial Sequence
  Synthetic
guugaggaaacugaauaa

SEQ ID NO: 191504 - RNA, 19 nt, Artificial Sequence
  Synthetic
aguugaggaaacugaauaa

SEQ ID NO: 191505 - RNA, 20 nt, Artificial Sequence
  Synthetic
caguugaggaaacugaauaa

SEQ ID NO: 191506 - RNA, 21 nt, Artificial Sequence
  Synthetic
gcaguugaggaaacugaauaa

SEQ ID NO: 191507 - RNA, 22 nt, Artificial Sequence
  Synthetic
cgcaguugaggaaacugaauaa

SEQ ID NO: 191508 - RNA, 23 nt, Artificial Sequence
  Synthetic
ccgcaguugaggaaacugaauaa

SEQ ID NO: 191509 - RNA, 24 nt, Artificial Sequence
  Synthetic
cccgcaguugaggaaacugaauaa

SEQ ID NO: 191510 - RNA, 18 nt, Artificial Sequence
  Synthetic
guagagcccagugaauaa

SEQ ID NO: 191511 - RNA, 19 nt, Artificial Sequence
  Synthetic
aguagagcccagugaauaa

SEQ ID NO: 191512 - RNA, 20 nt, Artificial Sequence
  Synthetic
gaguagagcccagugaauaa

SEQ ID NO: 191513 - RNA, 21 nt, Artificial Sequence
  Synthetic
agaguagagcccagugaauaa

SEQ ID NO: 191514 - RNA, 22 nt, Artificial Sequence
  Synthetic
cagaguagagcccagugaauaa

SEQ ID NO: 191515 - RNA, 23 nt, Artificial Sequence
  Synthetic
acagaguagagcccagugaauaa

SEQ ID NO: 191516 - RNA, 24 nt, Artificial Sequence
  Synthetic
uacagaguagagcccagugaauaa

SEQ ID NO: 191517 - RNA, 18 nt, Artificial Sequence
  Synthetic
uaguaacugagugaauaa

SEQ ID NO: 191518 - RNA, 19 nt, Artificial Sequence
  Synthetic
uuaguaacugagugaauaa

SEQ ID NO: 191519 - RNA, 20 nt, Artificial Sequence
  Synthetic
uuuaguaacugagugaauaa

SEQ ID NO: 191520 - RNA, 21 nt, Artificial Sequence
  Synthetic
auuuaguaacugagugaauaa

SEQ ID NO: 191521 - RNA, 22 nt, Artificial Sequence
  Synthetic
uauuuaguaacugagugaauaa

SEQ ID NO: 191522 - RNA, 23 nt, Artificial Sequence
  Synthetic
auauuuaguaacugagugaauaa

SEQ ID NO: 191523 - RNA, 24 nt, Artificial Sequence
  Synthetic
uauauuuaguaacugagugaauaa

SEQ ID NO: 191524 - RNA, 18 nt, Artificial Sequence
  Synthetic
gguggcuguggugaauaa

SEQ ID NO: 191525 - RNA, 19 nt, Artificial Sequence
  Synthetic
cgguggcuguggugaauaa

SEQ ID NO: 191526 - RNA, 20 nt, Artificial Sequence
  Synthetic
ucgguggcuguggugaauaa

SEQ ID NO: 191527 - RNA, 21 nt, Artificial Sequence
  Synthetic
uucgguggcuguggugaauaa

SEQ ID NO: 191528 - RNA, 22 nt, Artificial Sequence
  Synthetic
guucgguggcuguggugaauaa

SEQ ID NO: 191529 - RNA, 23 nt, Artificial Sequence
  Synthetic
uguucgguggcuguggugaauaa

SEQ ID NO: 191530 - RNA, 24 nt, Artificial Sequence
  Synthetic
uuguucgguggcuguggugaauaa

SEQ ID NO: 191531 - RNA, 18 nt, Artificial Sequence
  Synthetic
guucauagcugugaauaa

SEQ ID NO: 191532 - RNA, 19 nt, Artificial Sequence
  Synthetic
aguucauagcugugaauaa

SEQ ID NO: 191533 - RNA, 20 nt, Artificial Sequence
  Synthetic
gaguucauagcugugaauaa

SEQ ID NO: 191534 - RNA, 21 nt, Artificial Sequence
  Synthetic
agaguucauagcugugaauaa

SEQ ID NO: 191535 - RNA, 22 nt, Artificial Sequence
  Synthetic
cagaguucauagcugugaauaa

SEQ ID NO: 191536 - RNA, 23 nt, Artificial Sequence
  Synthetic
ucagaguucauagcugugaauaa

SEQ ID NO: 191537 - RNA, 24 nt, Artificial Sequence
  Synthetic
gucagaguucauagcugugaauaa

SEQ ID NO: 191538 - RNA, 18 nt, Artificial Sequence
  Synthetic
uggggacauuuugaauaa

SEQ ID NO: 191539 - RNA, 19 nt, Artificial Sequence
  Synthetic
cuggggacauuuugaauaa

SEQ ID NO: 191540 - RNA, 20 nt, Artificial Sequence
  Synthetic
acuggggacauuuugaauaa

SEQ ID NO: 191541 - RNA, 21 nt, Artificial Sequence
  Synthetic
uacuggggacauuuugaauaa

SEQ ID NO: 191542 - RNA, 22 nt, Artificial Sequence
  Synthetic
auacuggggacauuuugaauaa

SEQ ID NO: 191543 - RNA, 23 nt, Artificial Sequence
  Synthetic
uauacuggggacauuuugaauaa

SEQ ID NO: 191544 - RNA, 24 nt, Artificial Sequence
  Synthetic
guauacuggggacauuuugaauaa

SEQ ID NO: 191545 - RNA, 18 nt, Artificial Sequence
  Synthetic
caguaacaacaauaauaa

SEQ ID NO: 191546 - RNA, 19 nt, Artificial Sequence
  Synthetic
ccaguaacaacaauaauaa

SEQ ID NO: 191547 - RNA, 20 nt, Artificial Sequence
  Synthetic
accaguaacaacaauaauaa

SEQ ID NO: 191548 - RNA, 21 nt, Artificial Sequence
  Synthetic
caccaguaacaacaauaauaa

SEQ ID NO: 191549 - RNA, 22 nt, Artificial Sequence
  Synthetic
ccaccaguaacaacaauaauaa

SEQ ID NO: 191550 - RNA, 23 nt, Artificial Sequence
  Synthetic
accaccaguaacaacaauaauaa

SEQ ID NO: 191551 - RNA, 24 nt, Artificial Sequence
  Synthetic
uaccaccaguaacaacaauaauaa

SEQ ID NO: 191552 - RNA, 18 nt, Artificial Sequence
  Synthetic
cuuaaaguacaauaauaa

SEQ ID NO: 191553 - RNA, 19 nt, Artificial Sequence
  Synthetic
acuuaaaguacaauaauaa

SEQ ID NO: 191554 - RNA, 20 nt, Artificial Sequence
  Synthetic
aacuuaaaguacaauaauaa

SEQ ID NO: 191555 - RNA, 21 nt, Artificial Sequence
  Synthetic
aaacuuaaaguacaauaauaa

SEQ ID NO: 191556 - RNA, 22 nt, Artificial Sequence
  Synthetic
aaaacuuaaaguacaauaauaa

SEQ ID NO: 191557 - RNA, 23 nt, Artificial Sequence
  Synthetic
uaaaacuuaaaguacaauaauaa

SEQ ID NO: 191558 - RNA, 24 nt, Artificial Sequence
  Synthetic
cuaaaacuuaaaguacaauaauaa

SEQ ID NO: 191559 - RNA, 18 nt, Artificial Sequence
  Synthetic
ucucugcaucaauaauaa

SEQ ID NO: 191560 - RNA, 19 nt, Artificial Sequence
  Synthetic
gucucugcaucaauaauaa

SEQ ID NO: 191561 - RNA, 20 nt, Artificial Sequence
  Synthetic
ugucucugcaucaauaauaa

SEQ ID NO: 191562 - RNA, 21 nt, Artificial Sequence
  Synthetic
augucucugcaucaauaauaa

SEQ ID NO: 191563 - RNA, 22 nt, Artificial Sequence
  Synthetic
aaugucucugcaucaauaauaa

SEQ ID NO: 191564 - RNA, 23 nt, Artificial Sequence
  Synthetic
aaaugucucugcaucaauaauaa

SEQ ID NO: 191565 - RNA, 24 nt, Artificial Sequence
  Synthetic
uaaaugucucugcaucaauaauaa

SEQ ID NO: 191566 - RNA, 18 nt, Artificial Sequence
  Synthetic
guugaaguagaauaauaa

SEQ ID NO: 191567 - RNA, 19 nt, Artificial Sequence
  Synthetic
aguugaaguagaauaauaa

SEQ ID NO: 191568 - RNA, 20 nt, Artificial Sequence
  Synthetic
gaguugaaguagaauaauaa

SEQ ID NO: 191569 - RNA, 21 nt, Artificial Sequence
  Synthetic
ugaguugaaguagaauaauaa

SEQ ID NO: 191570 - RNA, 22 nt, Artificial Sequence
  Synthetic
cugaguugaaguagaauaauaa

SEQ ID NO: 191571 - RNA, 23 nt, Artificial Sequence
  Synthetic
gcugaguugaaguagaauaauaa

SEQ ID NO: 191572 - RNA, 24 nt, Artificial Sequence
  Synthetic
ugcugaguugaaguagaauaauaa

SEQ ID NO: 191573 - RNA, 18 nt, Artificial Sequence
  Synthetic
cacauaguagaauaauaa

SEQ ID NO: 191574 - RNA, 19 nt, Artificial Sequence
  Synthetic
acacauaguagaauaauaa

SEQ ID NO: 191575 - RNA, 20 nt, Artificial Sequence
  Synthetic
gacacauaguagaauaauaa

SEQ ID NO: 191576 - RNA, 21 nt, Artificial Sequence
  Synthetic
agacacauaguagaauaauaa

SEQ ID NO: 191577 - RNA, 22 nt, Artificial Sequence
  Synthetic
gagacacauaguagaauaauaa

SEQ ID NO: 191578 - RNA, 23 nt, Artificial Sequence
  Synthetic
agagacacauaguagaauaauaa

SEQ ID NO: 191579 - RNA, 24 nt, Artificial Sequence
  Synthetic
cagagacacauaguagaauaauaa

SEQ ID NO: 191580 - RNA, 18 nt, Artificial Sequence
  Synthetic
uaauucauauaauaauaa

SEQ ID NO: 191581 - RNA, 19 nt, Artificial Sequence
  Synthetic
cuaauucauauaauaauaa

SEQ ID NO: 191582 - RNA, 20 nt, Artificial Sequence
  Synthetic
ccuaauucauauaauaauaa

SEQ ID NO: 191583 - RNA, 21 nt, Artificial Sequence
  Synthetic
uccuaauucauauaauaauaa

SEQ ID NO: 191584 - RNA, 22 nt, Artificial Sequence
  Synthetic
auccuaauucauauaauaauaa

SEQ ID NO: 191585 - RNA, 23 nt, Artificial Sequence
  Synthetic
aauccuaauucauauaauaauaa

SEQ ID NO: 191586 - RNA, 24 nt, Artificial Sequence
  Synthetic
uaauccuaauucauauaauaauaa

SEQ ID NO: 191587 - RNA, 18 nt, Artificial Sequence
  Synthetic
gaagaaaugacauaauaa

SEQ ID NO: 191588 - RNA, 19 nt, Artificial Sequence
  Synthetic
agaagaaaugacauaauaa

SEQ ID NO: 191589 - RNA, 20 nt, Artificial Sequence
  Synthetic
gagaagaaaugacauaauaa

SEQ ID NO: 191590 - RNA, 21 nt, Artificial Sequence
  Synthetic
ggagaagaaaugacauaauaa

SEQ ID NO: 191591 - RNA, 22 nt, Artificial Sequence
  Synthetic
aggagaagaaaugacauaauaa

SEQ ID NO: 191592 - RNA, 23 nt, Artificial Sequence
  Synthetic
aaggagaagaaaugacauaauaa

SEQ ID NO: 191593 - RNA, 24 nt, Artificial Sequence
  Synthetic
aaaggagaagaaaugacauaauaa

SEQ ID NO: 191594 - RNA, 18 nt, Artificial Sequence
  Synthetic
uuuaaaucuacauaauaa

SEQ ID NO: 191595 - RNA, 19 nt, Artificial Sequence
  Synthetic
uuuuaaaucuacauaauaa

SEQ ID NO: 191596 - RNA, 20 nt, Artificial Sequence
  Synthetic
auuuuaaaucuacauaauaa

SEQ ID NO: 191597 - RNA, 21 nt, Artificial Sequence
  Synthetic
cauuuuaaaucuacauaauaa

SEQ ID NO: 191598 - RNA, 22 nt, Artificial Sequence
  Synthetic
ccauuuuaaaucuacauaauaa

SEQ ID NO: 191599 - RNA, 23 nt, Artificial Sequence
  Synthetic
cccauuuuaaaucuacauaauaa

SEQ ID NO: 191600 - RNA, 24 nt, Artificial Sequence
  Synthetic
gcccauuuuaaaucuacauaauaa

SEQ ID NO: 191601 - RNA, 18 nt, Artificial Sequence
  Synthetic
gggacaaugagauaauaa

SEQ ID NO: 191602 - RNA, 19 nt, Artificial Sequence
  Synthetic
ugggacaaugagauaauaa

SEQ ID NO: 191603 - RNA, 20 nt, Artificial Sequence
  Synthetic
gugggacaaugagauaauaa

SEQ ID NO: 191604 - RNA, 21 nt, Artificial Sequence
  Synthetic
agugggacaaugagauaauaa

SEQ ID NO: 191605 - RNA, 22 nt, Artificial Sequence
  Synthetic
gagugggacaaugagauaauaa

SEQ ID NO: 191606 - RNA, 23 nt, Artificial Sequence
  Synthetic
agagugggacaaugagauaauaa

SEQ ID NO: 191607 - RNA, 24 nt, Artificial Sequence
  Synthetic
gagagugggacaaugagauaauaa

SEQ ID NO: 191608 - RNA, 18 nt, Artificial Sequence
  Synthetic
cuaaagcagggauaauaa

SEQ ID NO: 191609 - RNA, 19 nt, Artificial Sequence
  Synthetic
gcuaaagcagggauaauaa

SEQ ID NO: 191610 - RNA, 20 nt, Artificial Sequence
  Synthetic
agcuaaagcagggauaauaa

SEQ ID NO: 191611 - RNA, 21 nt, Artificial Sequence
  Synthetic
uagcuaaagcagggauaauaa

SEQ ID NO: 191612 - RNA, 22 nt, Artificial Sequence
  Synthetic
guagcuaaagcagggauaauaa

SEQ ID NO: 191613 - RNA, 23 nt, Artificial Sequence
  Synthetic
gguagcuaaagcagggauaauaa

SEQ ID NO: 191614 - RNA, 24 nt, Artificial Sequence
  Synthetic
agguagcuaaagcagggauaauaa

SEQ ID NO: 191615 - RNA, 18 nt, Artificial Sequence
  Synthetic
auaaauuuaauauaauaa

SEQ ID NO: 191616 - RNA, 19 nt, Artificial Sequence
  Synthetic
aauaaauuuaauauaauaa

SEQ ID NO: 191617 - RNA, 20 nt, Artificial Sequence
  Synthetic
caauaaauuuaauauaauaa

SEQ ID NO: 191618 - RNA, 21 nt, Artificial Sequence
  Synthetic
gcaauaaauuuaauauaauaa

SEQ ID NO: 191619 - RNA, 22 nt, Artificial Sequence
  Synthetic
ugcaauaaauuuaauauaauaa

SEQ ID NO: 191620 - RNA, 23 nt, Artificial Sequence
  Synthetic
uugcaauaaauuuaauauaauaa

SEQ ID NO: 191621 - RNA, 24 nt, Artificial Sequence
  Synthetic
uuugcaauaaauuuaauauaauaa

SEQ ID NO: 191622 - RNA, 18 nt, Artificial Sequence
  Synthetic
aucagauugcuauaauaa

SEQ ID NO: 191623 - RNA, 19 nt, Artificial Sequence
  Synthetic
uaucagauugcuauaauaa

SEQ ID NO: 191624 - RNA, 20 nt, Artificial Sequence
  Synthetic
auaucagauugcuauaauaa

SEQ ID NO: 191625 - RNA, 21 nt, Artificial Sequence
  Synthetic
uauaucagauugcuauaauaa

SEQ ID NO: 191626 - RNA, 22 nt, Artificial Sequence
  Synthetic
auauaucagauugcuauaauaa

SEQ ID NO: 191627 - RNA, 23 nt, Artificial Sequence
  Synthetic
uauauaucagauugcuauaauaa

SEQ ID NO: 191628 - RNA, 24 nt, Artificial Sequence
  Synthetic
guauauaucagauugcuauaauaa

SEQ ID NO: 191629 - RNA, 18 nt, Artificial Sequence
  Synthetic
uuuagcucccacuaauaa

SEQ ID NO: 191630 - RNA, 19 nt, Artificial Sequence
  Synthetic
auuuagcucccacuaauaa

SEQ ID NO: 191631 - RNA, 20 nt, Artificial Sequence
  Synthetic
cauuuagcucccacuaauaa

SEQ ID NO: 191632 - RNA, 21 nt, Artificial Sequence
  Synthetic
ucauuuagcucccacuaauaa

SEQ ID NO: 191633 - RNA, 22 nt, Artificial Sequence
  Synthetic
aucauuuagcucccacuaauaa

SEQ ID NO: 191634 - RNA, 23 nt, Artificial Sequence
  Synthetic
caucauuuagcucccacuaauaa

SEQ ID NO: 191635 - RNA, 24 nt, Artificial Sequence
  Synthetic
ucaucauuuagcucccacuaauaa

SEQ ID NO: 191636 - RNA, 18 nt, Artificial Sequence
  Synthetic
gccugcacucccuaauaa

SEQ ID NO: 191637 - RNA, 19 nt, Artificial Sequence
  Synthetic
ggccugcacucccuaauaa

SEQ ID NO: 191638 - RNA, 20 nt, Artificial Sequence
  Synthetic
gggccugcacucccuaauaa

SEQ ID NO: 191639 - RNA, 21 nt, Artificial Sequence
  Synthetic
ggggccugcacucccuaauaa

SEQ ID NO: 191640 - RNA, 22 nt, Artificial Sequence
  Synthetic
uggggccugcacucccuaauaa

SEQ ID NO: 191641 - RNA, 23 nt, Artificial Sequence
  Synthetic
guggggccugcacucccuaauaa

SEQ ID NO: 191642 - RNA, 24 nt, Artificial Sequence
  Synthetic
gguggggccugcacucccuaauaa

SEQ ID NO: 191643 - RNA, 18 nt, Artificial Sequence
  Synthetic
aaaucauaaagcuaauaa

SEQ ID NO: 191644 - RNA, 19 nt, Artificial Sequence
  Synthetic
caaaucauaaagcuaauaa

SEQ ID NO: 191645 - RNA, 20 nt, Artificial Sequence
  Synthetic
ccaaaucauaaagcuaauaa

SEQ ID NO: 191646 - RNA, 21 nt, Artificial Sequence
  Synthetic
cccaaaucauaaagcuaauaa

SEQ ID NO: 191647 - RNA, 22 nt, Artificial Sequence
  Synthetic
ucccaaaucauaaagcuaauaa

SEQ ID NO: 191648 - RNA, 23 nt, Artificial Sequence
  Synthetic
aucccaaaucauaaagcuaauaa

SEQ ID NO: 191649 - RNA, 24 nt, Artificial Sequence
  Synthetic
uaucccaaaucauaaagcuaauaa

SEQ ID NO: 191650 - RNA, 18 nt, Artificial Sequence
  Synthetic
auuccuuguagcuaauaa

SEQ ID NO: 191651 - RNA, 19 nt, Artificial Sequence
  Synthetic
gauuccuuguagcuaauaa

SEQ ID NO: 191652 - RNA, 20 nt, Artificial Sequence
  Synthetic
agauuccuuguagcuaauaa

SEQ ID NO: 191653 - RNA, 21 nt, Artificial Sequence
  Synthetic
uagauuccuuguagcuaauaa

SEQ ID NO: 191654 - RNA, 22 nt, Artificial Sequence
  Synthetic
auagauuccuuguagcuaauaa

SEQ ID NO: 191655 - RNA, 23 nt, Artificial Sequence
  Synthetic
aauagauuccuuguagcuaauaa

SEQ ID NO: 191656 - RNA, 24 nt, Artificial Sequence
  Synthetic
caauagauuccuuguagcuaauaa

SEQ ID NO: 191657 - RNA, 18 nt, Artificial Sequence
  Synthetic
ucauuauguggcuaauaa

SEQ ID NO: 191658 - RNA, 19 nt, Artificial Sequence
  Synthetic
aucauuauguggcuaauaa

SEQ ID NO: 191659 - RNA, 20 nt, Artificial Sequence
  Synthetic
caucauuauguggcuaauaa

SEQ ID NO: 191660 - RNA, 21 nt, Artificial Sequence
  Synthetic
ucaucauuauguggcuaauaa

SEQ ID NO: 191661 - RNA, 22 nt, Artificial Sequence
  Synthetic
uucaucauuauguggcuaauaa

SEQ ID NO: 191662 - RNA, 23 nt, Artificial Sequence
  Synthetic
uuucaucauuauguggcuaauaa

SEQ ID NO: 191663 - RNA, 24 nt, Artificial Sequence
  Synthetic
uuuucaucauuauguggcuaauaa

SEQ ID NO: 191664 - RNA, 18 nt, Artificial Sequence
  Synthetic
guacaagaaaaguaauaa

SEQ ID NO: 191665 - RNA, 19 nt, Artificial Sequence
  Synthetic
uguacaagaaaaguaauaa

SEQ ID NO: 191666 - RNA, 20 nt, Artificial Sequence
  Synthetic
auguacaagaaaaguaauaa

SEQ ID NO: 191667 - RNA, 21 nt, Artificial Sequence
  Synthetic
gauguacaagaaaaguaauaa

SEQ ID NO: 191668 - RNA, 22 nt, Artificial Sequence
  Synthetic
agauguacaagaaaaguaauaa

SEQ ID NO: 191669 - RNA, 23 nt, Artificial Sequence
  Synthetic
gagauguacaagaaaaguaauaa

SEQ ID NO: 191670 - RNA, 24 nt, Artificial Sequence
  Synthetic
agagauguacaagaaaaguaauaa

SEQ ID NO: 191671 - RNA, 18 nt, Artificial Sequence
  Synthetic
aaacuaaagaaguaauaa

SEQ ID NO: 191672 - RNA, 19 nt, Artificial Sequence
  Synthetic
uaaacuaaagaaguaauaa

SEQ ID NO: 191673 - RNA, 20 nt, Artificial Sequence
  Synthetic
cuaaacuaaagaaguaauaa

SEQ ID NO: 191674 - RNA, 21 nt, Artificial Sequence
  Synthetic
ccuaaacuaaagaaguaauaa

SEQ ID NO: 191675 - RNA, 22 nt, Artificial Sequence
  Synthetic
accuaaacuaaagaaguaauaa

SEQ ID NO: 191676 - RNA, 23 nt, Artificial Sequence
  Synthetic
gaccuaaacuaaagaaguaauaa

SEQ ID NO: 191677 - RNA, 24 nt, Artificial Sequence
  Synthetic
ugaccuaaacuaaagaaguaauaa

SEQ ID NO: 191678 - RNA, 18 nt, Artificial Sequence
  Synthetic
cuuaugucuuuguaauaa

SEQ ID NO: 191679 - RNA, 19 nt, Artificial Sequence
  Synthetic
gcuuaugucuuuguaauaa

SEQ ID NO: 191680 - RNA, 20 nt, Artificial Sequence
  Synthetic
ugcuuaugucuuuguaauaa

SEQ ID NO: 191681 - RNA, 21 nt, Artificial Sequence
  Synthetic
gugcuuaugucuuuguaauaa

SEQ ID NO: 191682 - RNA, 22 nt, Artificial Sequence
  Synthetic
ggugcuuaugucuuuguaauaa

SEQ ID NO: 191683 - RNA, 23 nt, Artificial Sequence
  Synthetic
uggugcuuaugucuuuguaauaa

SEQ ID NO: 191684 - RNA, 24 nt, Artificial Sequence
  Synthetic
auggugcuuaugucuuuguaauaa

SEQ ID NO: 191685 - RNA, 18 nt, Artificial Sequence
  Synthetic
aacaugguaaauuaauaa

SEQ ID NO: 191686 - RNA, 19 nt, Artificial Sequence
  Synthetic
gaacaugguaaauuaauaa

SEQ ID NO: 191687 - RNA, 20 nt, Artificial Sequence
  Synthetic
ugaacaugguaaauuaauaa

SEQ ID NO: 191688 - RNA, 21 nt, Artificial Sequence
  Synthetic
gugaacaugguaaauuaauaa

SEQ ID NO: 191689 - RNA, 22 nt, Artificial Sequence
  Synthetic
ggugaacaugguaaauuaauaa

SEQ ID NO: 191690 - RNA, 23 nt, Artificial Sequence
  Synthetic
uggugaacaugguaaauuaauaa

SEQ ID NO: 191691 - RNA, 24 nt, Artificial Sequence
  Synthetic
guggugaacaugguaaauuaauaa

SEQ ID NO: 191692 - RNA, 18 nt, Artificial Sequence
  Synthetic
gaguuuauguauuaauaa

SEQ ID NO: 191693 - RNA, 19 nt, Artificial Sequence
  Synthetic
agaguuuauguauuaauaa

SEQ ID NO: 191694 - RNA, 20 nt, Artificial Sequence
  Synthetic
uagaguuuauguauuaauaa

SEQ ID NO: 191695 - RNA, 21 nt, Artificial Sequence
  Synthetic
uuagaguuuauguauuaauaa

SEQ ID NO: 191696 - RNA, 22 nt, Artificial Sequence
  Synthetic
uuuagaguuuauguauuaauaa

SEQ ID NO: 191697 - RNA, 23 nt, Artificial Sequence
  Synthetic
auuuagaguuuauguauuaauaa

SEQ ID NO: 191698 - RNA, 24 nt, Artificial Sequence
  Synthetic
uauuuagaguuuauguauuaauaa

SEQ ID NO: 191699 - RNA, 18 nt, Artificial Sequence
  Synthetic
cuuccuauuuauuaauaa

SEQ ID NO: 191700 - RNA, 19 nt, Artificial Sequence
  Synthetic
gcuuccuauuuauuaauaa

SEQ ID NO: 191701 - RNA, 20 nt, Artificial Sequence
  Synthetic
ggcuuccuauuuauuaauaa

SEQ ID NO: 191702 - RNA, 21 nt, Artificial Sequence
  Synthetic
uggcuuccuauuuauuaauaa

SEQ ID NO: 191703 - RNA, 22 nt, Artificial Sequence
  Synthetic
guggcuuccuauuuauuaauaa

SEQ ID NO: 191704 - RNA, 23 nt, Artificial Sequence
  Synthetic
uguggcuuccuauuuauuaauaa

SEQ ID NO: 191705 - RNA, 24 nt, Artificial Sequence
  Synthetic
auguggcuuccuauuuauuaauaa

SEQ ID NO: 191706 - RNA, 18 nt, Artificial Sequence
  Synthetic
cuucacacuacuuaauaa

SEQ ID NO: 191707 - RNA, 19 nt, Artificial Sequence
  Synthetic
ucuucacacuacuuaauaa

SEQ ID NO: 191708 - RNA, 20 nt, Artificial Sequence
  Synthetic
gucuucacacuacuuaauaa

SEQ ID NO: 191709 - RNA, 21 nt, Artificial Sequence
  Synthetic
ugucuucacacuacuuaauaa

SEQ ID NO: 191710 - RNA, 22 nt, Artificial Sequence
  Synthetic
uugucuucacacuacuuaauaa

SEQ ID NO: 191711 - RNA, 23 nt, Artificial Sequence
  Synthetic
uuugucuucacacuacuuaauaa

SEQ ID NO: 191712 - RNA, 24 nt, Artificial Sequence
  Synthetic
uuuugucuucacacuacuuaauaa

SEQ ID NO: 191713 - RNA, 18 nt, Artificial Sequence
  Synthetic
aagccauuuauuuaauaa

SEQ ID NO: 191714 - RNA, 19 nt, Artificial Sequence
  Synthetic
aaagccauuuauuuaauaa

SEQ ID NO: 191715 - RNA, 20 nt, Artificial Sequence
  Synthetic
uaaagccauuuauuuaauaa

SEQ ID NO: 191716 - RNA, 21 nt, Artificial Sequence
  Synthetic
auaaagccauuuauuuaauaa

SEQ ID NO: 191717 - RNA, 22 nt, Artificial Sequence
  Synthetic
cauaaagccauuuauuuaauaa

SEQ ID NO: 191718 - RNA, 23 nt, Artificial Sequence
  Synthetic
gcauaaagccauuuauuuaauaa

SEQ ID NO: 191719 - RNA, 24 nt, Artificial Sequence
  Synthetic
agcauaaagccauuuauuuaauaa

SEQ ID NO: 191720 - RNA, 18 nt, Artificial Sequence
  Synthetic
cuuaauuugcuuuaauaa

SEQ ID NO: 191721 - RNA, 19 nt, Artificial Sequence
  Synthetic
gcuuaauuugcuuuaauaa

SEQ ID NO: 191722 - RNA, 20 nt, Artificial Sequence
  Synthetic
agcuuaauuugcuuuaauaa

SEQ ID NO: 191723 - RNA, 21 nt, Artificial Sequence
  Synthetic
uagcuuaauuugcuuuaauaa

SEQ ID NO: 191724 - RNA, 22 nt, Artificial Sequence
  Synthetic
guagcuuaauuugcuuuaauaa

SEQ ID NO: 191725 - RNA, 23 nt, Artificial Sequence
  Synthetic
gguagcuuaauuugcuuuaauaa

SEQ ID NO: 191726 - RNA, 24 nt, Artificial Sequence
  Synthetic
agguagcuuaauuugcuuuaauaa

SEQ ID NO: 191727 - RNA, 18 nt, Artificial Sequence
  Synthetic
auagcauaauuuuaauaa

SEQ ID NO: 191728 - RNA, 19 nt, Artificial Sequence
  Synthetic
aauagcauaauuuuaauaa

SEQ ID NO: 191729 - RNA, 20 nt, Artificial Sequence
  Synthetic
uaauagcauaauuuuaauaa

SEQ ID NO: 191730 - RNA, 21 nt, Artificial Sequence
  Synthetic
uuaauagcauaauuuuaauaa

SEQ ID NO: 191731 - RNA, 22 nt, Artificial Sequence
  Synthetic
guuaauagcauaauuuuaauaa

SEQ ID NO: 191732 - RNA, 23 nt, Artificial Sequence
  Synthetic
aguuaauagcauaauuuuaauaa

SEQ ID NO: 191733 - RNA, 24 nt, Artificial Sequence
  Synthetic
caguuaauagcauaauuuuaauaa

SEQ ID NO: 191734 - RNA, 18 nt, Artificial Sequence
  Synthetic
uaugcuguguuuuaauaa

SEQ ID NO: 191735 - RNA, 19 nt, Artificial Sequence
  Synthetic
guaugcuguguuuuaauaa

SEQ ID NO: 191736 - RNA, 20 nt, Artificial Sequence
  Synthetic
uguaugcuguguuuuaauaa

SEQ ID NO: 191737 - RNA, 21 nt, Artificial Sequence
  Synthetic
guguaugcuguguuuuaauaa

SEQ ID NO: 191738 - RNA, 22 nt, Artificial Sequence
  Synthetic
gguguaugcuguguuuuaauaa

SEQ ID NO: 191739 - RNA, 23 nt, Artificial Sequence
  Synthetic
ugguguaugcuguguuuuaauaa

SEQ ID NO: 191740 - RNA, 24 nt, Artificial Sequence
  Synthetic
augguguaugcuguguuuuaauaa

SEQ ID NO: 191741 - RNA, 18 nt, Artificial Sequence
  Synthetic
gaugguacagaaacauaa

SEQ ID NO: 191742 - RNA, 19 nt, Artificial Sequence
  Synthetic
ggaugguacagaaacauaa

SEQ ID NO: 191743 - RNA, 20 nt, Artificial Sequence
  Synthetic
aggaugguacagaaacauaa

SEQ ID NO: 191744 - RNA, 21 nt, Artificial Sequence
  Synthetic
aaggaugguacagaaacauaa

SEQ ID NO: 191745 - RNA, 22 nt, Artificial Sequence
  Synthetic
aaaggaugguacagaaacauaa

SEQ ID NO: 191746 - RNA, 23 nt, Artificial Sequence
  Synthetic
gaaaggaugguacagaaacauaa

SEQ ID NO: 191747 - RNA, 24 nt, Artificial Sequence
  Synthetic
ugaaaggaugguacagaaacauaa

SEQ ID NO: 191748 - RNA, 18 nt, Artificial Sequence
  Synthetic
ggcaguuaccgaacauaa

SEQ ID NO: 191749 - RNA, 19 nt, Artificial Sequence
  Synthetic
uggcaguuaccgaacauaa

SEQ ID NO: 191750 - RNA, 20 nt, Artificial Sequence
  Synthetic
uuggcaguuaccgaacauaa

SEQ ID NO: 191751 - RNA, 21 nt, Artificial Sequence
  Synthetic
uuuggcaguuaccgaacauaa

SEQ ID NO: 191752 - RNA, 22 nt, Artificial Sequence
  Synthetic
auuuggcaguuaccgaacauaa

SEQ ID NO: 191753 - RNA, 23 nt, Artificial Sequence
  Synthetic
uauuuggcaguuaccgaacauaa

SEQ ID NO: 191754 - RNA, 24 nt, Artificial Sequence
  Synthetic
auauuuggcaguuaccgaacauaa

SEQ ID NO: 191755 - RNA, 18 nt, Artificial Sequence
  Synthetic
cucaguggcuuaacauaa

SEQ ID NO: 191756 - RNA, 19 nt, Artificial Sequence
  Synthetic
ccucaguggcuuaacauaa

SEQ ID NO: 191757 - RNA, 20 nt, Artificial Sequence
  Synthetic
accucaguggcuuaacauaa

SEQ ID NO: 191758 - RNA, 21 nt, Artificial Sequence
  Synthetic
caccucaguggcuuaacauaa

SEQ ID NO: 191759 - RNA, 22 nt, Artificial Sequence
  Synthetic
acaccucaguggcuuaacauaa

SEQ ID NO: 191760 - RNA, 23 nt, Artificial Sequence
  Synthetic
cacaccucaguggcuuaacauaa

SEQ ID NO: 191761 - RNA, 24 nt, Artificial Sequence
  Synthetic
ccacaccucaguggcuuaacauaa

SEQ ID NO: 191762 - RNA, 18 nt, Artificial Sequence
  Synthetic
auaaguucuuacacauaa

SEQ ID NO: 191763 - RNA, 19 nt, Artificial Sequence
  Synthetic
aauaaguucuuacacauaa

SEQ ID NO: 191764 - RNA, 20 nt, Artificial Sequence
  Synthetic
aaauaaguucuuacacauaa

SEQ ID NO: 191765 - RNA, 21 nt, Artificial Sequence
  Synthetic
aaaauaaguucuuacacauaa

SEQ ID NO: 191766 - RNA, 22 nt, Artificial Sequence
  Synthetic
uaaaauaaguucuuacacauaa

SEQ ID NO: 191767 - RNA, 23 nt, Artificial Sequence
  Synthetic
cuaaaauaaguucuuacacauaa

SEQ ID NO: 191768 - RNA, 24 nt, Artificial Sequence
  Synthetic
acuaaaauaaguucuuacacauaa

SEQ ID NO: 191769 - RNA, 18 nt, Artificial Sequence
  Synthetic
auaaaauugaccacauaa

SEQ ID NO: 191770 - RNA, 19 nt, Artificial Sequence
  Synthetic
uauaaaauugaccacauaa

SEQ ID NO: 191771 - RNA, 20 nt, Artificial Sequence
  Synthetic
uuauaaaauugaccacauaa

SEQ ID NO: 191772 - RNA, 21 nt, Artificial Sequence
  Synthetic
auuauaaaauugaccacauaa

SEQ ID NO: 191773 - RNA, 22 nt, Artificial Sequence
  Synthetic
uauuauaaaauugaccacauaa

SEQ ID NO: 191774 - RNA, 23 nt, Artificial Sequence
  Synthetic
uuauuauaaaauugaccacauaa

SEQ ID NO: 191775 - RNA, 24 nt, Artificial Sequence
  Synthetic
cuuauuauaaaauugaccacauaa

SEQ ID NO: 191776 - RNA, 18 nt, Artificial Sequence
  Synthetic
aaaacaauagccacauaa

SEQ ID NO: 191777 - RNA, 19 nt, Artificial Sequence
  Synthetic
aaaaacaauagccacauaa

SEQ ID NO: 191778 - RNA, 20 nt, Artificial Sequence
  Synthetic
aaaaaacaauagccacauaa

SEQ ID NO: 191779 - RNA, 21 nt, Artificial Sequence
  Synthetic
aaaaaaacaauagccacauaa

SEQ ID NO: 191780 - RNA, 22 nt, Artificial Sequence
  Synthetic
gaaaaaaacaauagccacauaa

SEQ ID NO: 191781 - RNA, 23 nt, Artificial Sequence
  Synthetic
ggaaaaaaacaauagccacauaa

SEQ ID NO: 191782 - RNA, 24 nt, Artificial Sequence
  Synthetic
gggaaaaaaacaauagccacauaa

SEQ ID NO: 191783 - RNA, 18 nt, Artificial Sequence
  Synthetic
guggcaaacagcacauaa

SEQ ID NO: 191784 - RNA, 19 nt, Artificial Sequence
  Synthetic
uguggcaaacagcacauaa

SEQ ID NO: 191785 - RNA, 20 nt, Artificial Sequence
  Synthetic
uuguggcaaacagcacauaa

SEQ ID NO: 191786 - RNA, 21 nt, Artificial Sequence
  Synthetic
auuguggcaaacagcacauaa

SEQ ID NO: 191787 - RNA, 22 nt, Artificial Sequence
  Synthetic
uauuguggcaaacagcacauaa

SEQ ID NO: 191788 - RNA, 23 nt, Artificial Sequence
  Synthetic
uuauuguggcaaacagcacauaa

SEQ ID NO: 191789 - RNA, 24 nt, Artificial Sequence
  Synthetic
uuuauuguggcaaacagcacauaa

SEQ ID NO: 191790 - RNA, 18 nt, Artificial Sequence
  Synthetic
aaguuaugcugcacauaa

SEQ ID NO: 191791 - RNA, 19 nt, Artificial Sequence
  Synthetic
uaaguuaugcugcacauaa

SEQ ID NO: 191792 - RNA, 20 nt, Artificial Sequence
  Synthetic
auaaguuaugcugcacauaa

SEQ ID NO: 191793 - RNA, 21 nt, Artificial Sequence
  Synthetic
aauaaguuaugcugcacauaa

SEQ ID NO: 191794 - RNA, 22 nt, Artificial Sequence
  Synthetic
aaauaaguuaugcugcacauaa

SEQ ID NO: 191795 - RNA, 23 nt, Artificial Sequence
  Synthetic
aaaauaaguuaugcugcacauaa

SEQ ID NO: 191796 - RNA, 24 nt, Artificial Sequence
  Synthetic
gaaaauaaguuaugcugcacauaa

SEQ ID NO: 191797 - RNA, 18 nt, Artificial Sequence
  Synthetic
uuuucuaucaucacauaa

SEQ ID NO: 191798 - RNA, 19 nt, Artificial Sequence
  Synthetic
cuuuucuaucaucacauaa

SEQ ID NO: 191799 - RNA, 20 nt, Artificial Sequence
  Synthetic
ccuuuucuaucaucacauaa

SEQ ID NO: 191800 - RNA, 21 nt, Artificial Sequence
  Synthetic
accuuuucuaucaucacauaa

SEQ ID NO: 191801 - RNA, 22 nt, Artificial Sequence
  Synthetic
uaccuuuucuaucaucacauaa

SEQ ID NO: 191802 - RNA, 23 nt, Artificial Sequence
  Synthetic
auaccuuuucuaucaucacauaa

SEQ ID NO: 191803 - RNA, 24 nt, Artificial Sequence
  Synthetic
gauaccuuuucuaucaucacauaa

SEQ ID NO: 191804 - RNA, 18 nt, Artificial Sequence
  Synthetic
auaauucaacucacauaa

SEQ ID NO: 191805 - RNA, 19 nt, Artificial Sequence
  Synthetic
aauaauucaacucacauaa

SEQ ID NO: 191806 - RNA, 20 nt, Artificial Sequence
  Synthetic
gaauaauucaacucacauaa

SEQ ID NO: 191807 - RNA, 21 nt, Artificial Sequence
  Synthetic
agaauaauucaacucacauaa

SEQ ID NO: 191808 - RNA, 22 nt, Artificial Sequence
  Synthetic
aagaauaauucaacucacauaa

SEQ ID NO: 191809 - RNA, 23 nt, Artificial Sequence
  Synthetic
uaagaauaauucaacucacauaa

SEQ ID NO: 191810 - RNA, 24 nt, Artificial Sequence
  Synthetic
auaagaauaauucaacucacauaa

SEQ ID NO: 191811 - RNA, 18 nt, Artificial Sequence
  Synthetic
caaucuuccaugacauaa

SEQ ID NO: 191812 - RNA, 19 nt, Artificial Sequence
  Synthetic
acaaucuuccaugacauaa

SEQ ID NO: 191813 - RNA, 20 nt, Artificial Sequence
  Synthetic
uacaaucuuccaugacauaa

SEQ ID NO: 191814 - RNA, 21 nt, Artificial Sequence
  Synthetic
uuacaaucuuccaugacauaa

SEQ ID NO: 191815 - RNA, 22 nt, Artificial Sequence
  Synthetic
uuuacaaucuuccaugacauaa

SEQ ID NO: 191816 - RNA, 23 nt, Artificial Sequence
  Synthetic
uuuuacaaucuuccaugacauaa

SEQ ID NO: 191817 - RNA, 24 nt, Artificial Sequence
  Synthetic
cuuuuacaaucuuccaugacauaa

SEQ ID NO: 191818 - RNA, 18 nt, Artificial Sequence
  Synthetic
uaagaaauucugacauaa

SEQ ID NO: 191819 - RNA, 19 nt, Artificial Sequence
  Synthetic
auaagaaauucugacauaa

SEQ ID NO: 191820 - RNA, 20 nt, Artificial Sequence
  Synthetic
cauaagaaauucugacauaa

SEQ ID NO: 191821 - RNA, 21 nt, Artificial Sequence
  Synthetic
acauaagaaauucugacauaa

SEQ ID NO: 191822 - RNA, 22 nt, Artificial Sequence
  Synthetic
aacauaagaaauucugacauaa

SEQ ID NO: 191823 - RNA, 23 nt, Artificial Sequence
  Synthetic
caacauaagaaauucugacauaa

SEQ ID NO: 191824 - RNA, 24 nt, Artificial Sequence
  Synthetic
ccaacauaagaaauucugacauaa

SEQ ID NO: 191825 - RNA, 18 nt, Artificial Sequence
  Synthetic
uucgccagagugacauaa

SEQ ID NO: 191826 - RNA, 19 nt, Artificial Sequence
  Synthetic
uuucgccagagugacauaa

SEQ ID NO: 191827 - RNA, 20 nt, Artificial Sequence
  Synthetic
uuuucgccagagugacauaa

SEQ ID NO: 191828 - RNA, 21 nt, Artificial Sequence
  Synthetic
uuuuucgccagagugacauaa

SEQ ID NO: 191829 - RNA, 22 nt, Artificial Sequence
  Synthetic
cuuuuucgccagagugacauaa

SEQ ID NO: 191830 - RNA, 23 nt, Artificial Sequence
  Synthetic
acuuuuucgccagagugacauaa

SEQ ID NO: 191831 - RNA, 24 nt, Artificial Sequence
  Synthetic
cacuuuuucgccagagugacauaa

SEQ ID NO: 191832 - RNA, 18 nt, Artificial Sequence
  Synthetic
cuuauauaaaauacauaa

SEQ ID NO: 191833 - RNA, 19 nt, Artificial Sequence
  Synthetic
ccuuauauaaaauacauaa

SEQ ID NO: 191834 - RNA, 20 nt, Artificial Sequence
  Synthetic
uccuuauauaaaauacauaa

SEQ ID NO: 191835 - RNA, 21 nt, Artificial Sequence
  Synthetic
uuccuuauauaaaauacauaa

SEQ ID NO: 191836 - RNA, 22 nt, Artificial Sequence
  Synthetic
uuuccuuauauaaaauacauaa

SEQ ID NO: 191837 - RNA, 23 nt, Artificial Sequence
  Synthetic
uuuuccuuauauaaaauacauaa

SEQ ID NO: 191838 - RNA, 24 nt, Artificial Sequence
  Synthetic
uuuuuccuuauauaaaauacauaa

SEQ ID NO: 191839 - RNA, 18 nt, Artificial Sequence
  Synthetic
ugaugaaugcauacauaa

SEQ ID NO: 191840 - RNA, 19 nt, Artificial Sequence
  Synthetic
gugaugaaugcauacauaa

SEQ ID NO: 191841 - RNA, 20 nt, Artificial Sequence
  Synthetic
ugugaugaaugcauacauaa

SEQ ID NO: 191842 - RNA, 21 nt, Artificial Sequence
  Synthetic
uugugaugaaugcauacauaa

SEQ ID NO: 191843 - RNA, 22 nt, Artificial Sequence
  Synthetic
uuugugaugaaugcauacauaa

SEQ ID NO: 191844 - RNA, 23 nt, Artificial Sequence
  Synthetic
guuugugaugaaugcauacauaa

SEQ ID NO: 191845 - RNA, 24 nt, Artificial Sequence
  Synthetic
aguuugugaugaaugcauacauaa

SEQ ID NO: 191846 - RNA, 18 nt, Artificial Sequence
  Synthetic
ggcugugggacuacauaa

SEQ ID NO: 191847 - RNA, 19 nt, Artificial Sequence
  Synthetic
gggcugugggacuacauaa

SEQ ID NO: 191848 - RNA, 20 nt, Artificial Sequence
  Synthetic
ggggcugugggacuacauaa

SEQ ID NO: 191849 - RNA, 21 nt, Artificial Sequence
  Synthetic
aggggcugugggacuacauaa

SEQ ID NO: 191850 - RNA, 22 nt, Artificial Sequence
  Synthetic
gaggggcugugggacuacauaa

SEQ ID NO: 191851 - RNA, 23 nt, Artificial Sequence
  Synthetic
ugaggggcugugggacuacauaa

SEQ ID NO: 191852 - RNA, 24 nt, Artificial Sequence
  Synthetic
augaggggcugugggacuacauaa

SEQ ID NO: 191853 - RNA, 18 nt, Artificial Sequence
  Synthetic
aauuaucuuccuacauaa

SEQ ID NO: 191854 - RNA, 19 nt, Artificial Sequence
  Synthetic
aaauuaucuuccuacauaa

SEQ ID NO: 191855 - RNA, 20 nt, Artificial Sequence
  Synthetic
aaaauuaucuuccuacauaa

SEQ ID NO: 191856 - RNA, 21 nt, Artificial Sequence
  Synthetic
uaaaauuaucuuccuacauaa

SEQ ID NO: 191857 - RNA, 22 nt, Artificial Sequence
  Synthetic
uuaaaauuaucuuccuacauaa

SEQ ID NO: 191858 - RNA, 23 nt, Artificial Sequence
  Synthetic
auuaaaauuaucuuccuacauaa

SEQ ID NO: 191859 - RNA, 24 nt, Artificial Sequence
  Synthetic
gauuaaaauuaucuuccuacauaa

SEQ ID NO: 191860 - RNA, 18 nt, Artificial Sequence
  Synthetic
augggaggggguacauaa

SEQ ID NO: 191861 - RNA, 19 nt, Artificial Sequence
  Synthetic
gaugggaggggguacauaa

SEQ ID NO: 191862 - RNA, 20 nt, Artificial Sequence
  Synthetic
agaugggaggggguacauaa

SEQ ID NO: 191863 - RNA, 21 nt, Artificial Sequence
  Synthetic
uagaugggaggggguacauaa

SEQ ID NO: 191864 - RNA, 22 nt, Artificial Sequence
  Synthetic
uuagaugggaggggguacauaa

SEQ ID NO: 191865 - RNA, 23 nt, Artificial Sequence
  Synthetic
uuuagaugggaggggguacauaa

SEQ ID NO: 191866 - RNA, 24 nt, Artificial Sequence
  Synthetic
uuuuagaugggaggggguacauaa

SEQ ID NO: 191867 - RNA, 18 nt, Artificial Sequence
  Synthetic
uauuagugauuuacauaa

SEQ ID NO: 191868 - RNA, 19 nt, Artificial Sequence
  Synthetic
guauuagugauuuacauaa

SEQ ID NO: 191869 - RNA, 20 nt, Artificial Sequence
  Synthetic
aguauuagugauuuacauaa

SEQ ID NO: 191870 - RNA, 21 nt, Artificial Sequence
  Synthetic
aaguauuagugauuuacauaa

SEQ ID NO: 191871 - RNA, 22 nt, Artificial Sequence
  Synthetic
uaaguauuagugauuuacauaa

SEQ ID NO: 191872 - RNA, 23 nt, Artificial Sequence
  Synthetic
auaaguauuagugauuuacauaa

SEQ ID NO: 191873 - RNA, 24 nt, Artificial Sequence
  Synthetic
aauaaguauuagugauuuacauaa

SEQ ID NO: 191874 - RNA, 18 nt, Artificial Sequence
  Synthetic
aaaacagucaaaccauaa

SEQ ID NO: 191875 - RNA, 19 nt, Artificial Sequence
  Synthetic
caaaacagucaaaccauaa

SEQ ID NO: 191876 - RNA, 20 nt, Artificial Sequence
  Synthetic
gcaaaacagucaaaccauaa

SEQ ID NO: 191877 - RNA, 21 nt, Artificial Sequence
  Synthetic
agcaaaacagucaaaccauaa

SEQ ID NO: 191878 - RNA, 22 nt, Artificial Sequence
  Synthetic
gagcaaaacagucaaaccauaa

SEQ ID NO: 191879 - RNA, 23 nt, Artificial Sequence
  Synthetic
ugagcaaaacagucaaaccauaa

SEQ ID NO: 191880 - RNA, 24 nt, Artificial Sequence
  Synthetic
cugagcaaaacagucaaaccauaa

SEQ ID NO: 191881 - RNA, 18 nt, Artificial Sequence
  Synthetic
uaaguggacagcccauaa

SEQ ID NO: 191882 - RNA, 19 nt, Artificial Sequence
  Synthetic
guaaguggacagcccauaa

SEQ ID NO: 191883 - RNA, 20 nt, Artificial Sequence
  Synthetic
aguaaguggacagcccauaa

SEQ ID NO: 191884 - RNA, 21 nt, Artificial Sequence
  Synthetic
gaguaaguggacagcccauaa

SEQ ID NO: 191885 - RNA, 22 nt, Artificial Sequence
  Synthetic
ggaguaaguggacagcccauaa

SEQ ID NO: 191886 - RNA, 23 nt, Artificial Sequence
  Synthetic
gggaguaaguggacagcccauaa

SEQ ID NO: 191887 - RNA, 24 nt, Artificial Sequence
  Synthetic
agggaguaaguggacagcccauaa

SEQ ID NO: 191888 - RNA, 18 nt, Artificial Sequence
  Synthetic
ggguuacagugcccauaa

SEQ ID NO: 191889 - RNA, 19 nt, Artificial Sequence
  Synthetic
uggguuacagugcccauaa

SEQ ID NO: 191890 - RNA, 20 nt, Artificial Sequence
  Synthetic
auggguuacagugcccauaa

SEQ ID NO: 191891 - RNA, 21 nt, Artificial Sequence
  Synthetic
aauggguuacagugcccauaa

SEQ ID NO: 191892 - RNA, 22 nt, Artificial Sequence
  Synthetic
uaauggguuacagugcccauaa

SEQ ID NO: 191893 - RNA, 23 nt, Artificial Sequence
  Synthetic
uuaauggguuacagugcccauaa

SEQ ID NO: 191894 - RNA, 24 nt, Artificial Sequence
  Synthetic
cuuaauggguuacagugcccauaa

SEQ ID NO: 191895 - RNA, 18 nt, Artificial Sequence
  Synthetic
uggcuggguacuccauaa

SEQ ID NO: 191896 - RNA, 19 nt, Artificial Sequence
  Synthetic
guggcuggguacuccauaa

SEQ ID NO: 191897 - RNA, 20 nt, Artificial Sequence
  Synthetic
aguggcuggguacuccauaa

SEQ ID NO: 191898 - RNA, 21 nt, Artificial Sequence
  Synthetic
gaguggcuggguacuccauaa

SEQ ID NO: 191899 - RNA, 22 nt, Artificial Sequence
  Synthetic
ugaguggcuggguacuccauaa

SEQ ID NO: 191900 - RNA, 23 nt, Artificial Sequence
  Synthetic
uugaguggcuggguacuccauaa

SEQ ID NO: 191901 - RNA, 24 nt, Artificial Sequence
  Synthetic
cuugaguggcuggguacuccauaa

SEQ ID NO: 191902 - RNA, 18 nt, Artificial Sequence
  Synthetic
gugaaauagauuccauaa

SEQ ID NO: 191903 - RNA, 19 nt, Artificial Sequence
  Synthetic
ugugaaauagauuccauaa

SEQ ID NO: 191904 - RNA, 20 nt, Artificial Sequence
  Synthetic
augugaaauagauuccauaa

SEQ ID NO: 191905 - RNA, 21 nt, Artificial Sequence
  Synthetic
uaugugaaauagauuccauaa

SEQ ID NO: 191906 - RNA, 22 nt, Artificial Sequence
  Synthetic
uuaugugaaauagauuccauaa

SEQ ID NO: 191907 - RNA, 23 nt, Artificial Sequence
  Synthetic
uuuaugugaaauagauuccauaa

SEQ ID NO: 191908 - RNA, 24 nt, Artificial Sequence
  Synthetic
uuuuaugugaaauagauuccauaa

SEQ ID NO: 191909 - RNA, 18 nt, Artificial Sequence
  Synthetic
ccacgggaauuuccauaa

SEQ ID NO: 191910 - RNA, 19 nt, Artificial Sequence
  Synthetic
gccacgggaauuuccauaa

SEQ ID NO: 191911 - RNA, 20 nt, Artificial Sequence
  Synthetic
agccacgggaauuuccauaa

SEQ ID NO: 191912 - RNA, 21 nt, Artificial Sequence
  Synthetic
uagccacgggaauuuccauaa

SEQ ID NO: 191913 - RNA, 22 nt, Artificial Sequence
  Synthetic
uuagccacgggaauuuccauaa

SEQ ID NO: 191914 - RNA, 23 nt, Artificial Sequence
  Synthetic
uuuagccacgggaauuuccauaa

SEQ ID NO: 191915 - RNA, 24 nt, Artificial Sequence
  Synthetic
cuuuagccacgggaauuuccauaa

SEQ ID NO: 191916 - RNA, 18 nt, Artificial Sequence
  Synthetic
uuaaucggugaagcauaa

SEQ ID NO: 191917 - RNA, 19 nt, Artificial Sequence
  Synthetic
uuuaaucggugaagcauaa

SEQ ID NO: 191918 - RNA, 20 nt, Artificial Sequence
  Synthetic
auuuaaucggugaagcauaa

SEQ ID NO: 191919 - RNA, 21 nt, Artificial Sequence
  Synthetic
aauuuaaucggugaagcauaa

SEQ ID NO: 191920 - RNA, 22 nt, Artificial Sequence
  Synthetic
uaauuuaaucggugaagcauaa

SEQ ID NO: 191921 - RNA, 23 nt, Artificial Sequence
  Synthetic
auaauuuaaucggugaagcauaa

SEQ ID NO: 191922 - RNA, 24 nt, Artificial Sequence
  Synthetic
aauaauuuaaucggugaagcauaa

SEQ ID NO: 191923 - RNA, 18 nt, Artificial Sequence
  Synthetic
ucauuagcauaagcauaa

SEQ ID NO: 191924 - RNA, 19 nt, Artificial Sequence
  Synthetic
aucauuagcauaagcauaa

SEQ ID NO: 191925 - RNA, 20 nt, Artificial Sequence
  Synthetic
gaucauuagcauaagcauaa

SEQ ID NO: 191926 - RNA, 21 nt, Artificial Sequence
  Synthetic
agaucauuagcauaagcauaa

SEQ ID NO: 191927 - RNA, 22 nt, Artificial Sequence
  Synthetic
gagaucauuagcauaagcauaa

SEQ ID NO: 191928 - RNA, 23 nt, Artificial Sequence
  Synthetic
agagaucauuagcauaagcauaa

SEQ ID NO: 191929 - RNA, 24 nt, Artificial Sequence
  Synthetic
uagagaucauuagcauaagcauaa

SEQ ID NO: 191930 - RNA, 18 nt, Artificial Sequence
  Synthetic
uaagaaaaauuagcauaa

SEQ ID NO: 191931 - RNA, 19 nt, Artificial Sequence
  Synthetic
guaagaaaaauuagcauaa

SEQ ID NO: 191932 - RNA, 20 nt, Artificial Sequence
  Synthetic
uguaagaaaaauuagcauaa

SEQ ID NO: 191933 - RNA, 21 nt, Artificial Sequence
  Synthetic
cuguaagaaaaauuagcauaa

SEQ ID NO: 191934 - RNA, 22 nt, Artificial Sequence
  Synthetic
acuguaagaaaaauuagcauaa

SEQ ID NO: 191935 - RNA, 23 nt, Artificial Sequence
  Synthetic
uacuguaagaaaaauuagcauaa

SEQ ID NO: 191936 - RNA, 24 nt, Artificial Sequence
  Synthetic
uuacuguaagaaaaauuagcauaa

SEQ ID NO: 191937 - RNA, 18 nt, Artificial Sequence
  Synthetic
gaaugguuaaaugcauaa

SEQ ID NO: 191938 - RNA, 19 nt, Artificial Sequence
  Synthetic
ugaaugguuaaaugcauaa

SEQ ID NO: 191939 - RNA, 20 nt, Artificial Sequence
  Synthetic
augaaugguuaaaugcauaa

SEQ ID NO: 191940 - RNA, 21 nt, Artificial Sequence
  Synthetic
aaugaaugguuaaaugcauaa

SEQ ID NO: 191941 - RNA, 22 nt, Artificial Sequence
  Synthetic
uaaugaaugguuaaaugcauaa

SEQ ID NO: 191942 - RNA, 23 nt, Artificial Sequence
  Synthetic
auaaugaaugguuaaaugcauaa

SEQ ID NO: 191943 - RNA, 24 nt, Artificial Sequence
  Synthetic
aauaaugaaugguuaaaugcauaa

SEQ ID NO: 191944 - RNA, 18 nt, Artificial Sequence
  Synthetic
acuuuuuucucugcauaa

SEQ ID NO: 191945 - RNA, 19 nt, Artificial Sequence
  Synthetic
cacuuuuuucucugcauaa

SEQ ID NO: 191946 - RNA, 20 nt, Artificial Sequence
  Synthetic
ucacuuuuuucucugcauaa

SEQ ID NO: 191947 - RNA, 21 nt, Artificial Sequence
  Synthetic
uucacuuuuuucucugcauaa

SEQ ID NO: 191948 - RNA, 22 nt, Artificial Sequence
  Synthetic
uuucacuuuuuucucugcauaa

SEQ ID NO: 191949 - RNA, 23 nt, Artificial Sequence
  Synthetic
auuucacuuuuuucucugcauaa

SEQ ID NO: 191950 - RNA, 24 nt, Artificial Sequence
  Synthetic
gauuucacuuuuuucucugcauaa

SEQ ID NO: 191951 - RNA, 18 nt, Artificial Sequence
  Synthetic
uaaacuacuucugcauaa

SEQ ID NO: 191952 - RNA, 19 nt, Artificial Sequence
  Synthetic
auaaacuacuucugcauaa

SEQ ID NO: 191953 - RNA, 20 nt, Artificial Sequence
  Synthetic
aauaaacuacuucugcauaa

SEQ ID NO: 191954 - RNA, 21 nt, Artificial Sequence
  Synthetic
caauaaacuacuucugcauaa

SEQ ID NO: 191955 - RNA, 22 nt, Artificial Sequence
  Synthetic
gcaauaaacuacuucugcauaa

SEQ ID NO: 191956 - RNA, 23 nt, Artificial Sequence
  Synthetic
ugcaauaaacuacuucugcauaa

SEQ ID NO: 191957 - RNA, 24 nt, Artificial Sequence
  Synthetic
uugcaauaaacuacuucugcauaa

SEQ ID NO: 191958 - RNA, 18 nt, Artificial Sequence
  Synthetic
ugacugcagauugcauaa

SEQ ID NO: 191959 - RNA, 19 nt, Artificial Sequence
  Synthetic
augacugcagauugcauaa

SEQ ID NO: 191960 - RNA, 20 nt, Artificial Sequence
  Synthetic
caugacugcagauugcauaa

SEQ ID NO: 191961 - RNA, 21 nt, Artificial Sequence
  Synthetic
ucaugacugcagauugcauaa

SEQ ID NO: 191962 - RNA, 22 nt, Artificial Sequence
  Synthetic
uucaugacugcagauugcauaa

SEQ ID NO: 191963 - RNA, 23 nt, Artificial Sequence
  Synthetic
uuucaugacugcagauugcauaa

SEQ ID NO: 191964 - RNA, 24 nt, Artificial Sequence
  Synthetic
auuucaugacugcagauugcauaa

SEQ ID NO: 191965 - RNA, 18 nt, Artificial Sequence
  Synthetic
gaauuaccaaaaucauaa

SEQ ID NO: 191966 - RNA, 19 nt, Artificial Sequence
  Synthetic
agaauuaccaaaaucauaa

SEQ ID NO: 191967 - RNA, 20 nt, Artificial Sequence
  Synthetic
aagaauuaccaaaaucauaa

SEQ ID NO: 191968 - RNA, 21 nt, Artificial Sequence
  Synthetic
aaagaauuaccaaaaucauaa

SEQ ID NO: 191969 - RNA, 22 nt, Artificial Sequence
  Synthetic
aaaagaauuaccaaaaucauaa

SEQ ID NO: 191970 - RNA, 23 nt, Artificial Sequence
  Synthetic
aaaaagaauuaccaaaaucauaa

SEQ ID NO: 191971 - RNA, 24 nt, Artificial Sequence
  Synthetic
aaaaaagaauuaccaaaaucauaa

SEQ ID NO: 191972 - RNA, 18 nt, Artificial Sequence
  Synthetic
aaaauguacguaucauaa

SEQ ID NO: 191973 - RNA, 19 nt, Artificial Sequence
  Synthetic
caaaauguacguaucauaa

SEQ ID NO: 191974 - RNA, 20 nt, Artificial Sequence
  Synthetic
acaaaauguacguaucauaa

SEQ ID NO: 191975 - RNA, 21 nt, Artificial Sequence
  Synthetic
cacaaaauguacguaucauaa

SEQ ID NO: 191976 - RNA, 22 nt, Artificial Sequence
  Synthetic
acacaaaauguacguaucauaa

SEQ ID NO: 191977 - RNA, 23 nt, Artificial Sequence
  Synthetic
aacacaaaauguacguaucauaa

SEQ ID NO: 191978 - RNA, 24 nt, Artificial Sequence
  Synthetic
uaacacaaaauguacguaucauaa

SEQ ID NO: 191979 - RNA, 18 nt, Artificial Sequence
  Synthetic
cauagaaagguaucauaa

SEQ ID NO: 191980 - RNA, 19 nt, Artificial Sequence
  Synthetic
gcauagaaagguaucauaa

SEQ ID NO: 191981 - RNA, 20 nt, Artificial Sequence
  Synthetic
ugcauagaaagguaucauaa

SEQ ID NO: 191982 - RNA, 21 nt, Artificial Sequence
  Synthetic
cugcauagaaagguaucauaa

SEQ ID NO: 191983 - RNA, 22 nt, Artificial Sequence
  Synthetic
ucugcauagaaagguaucauaa

SEQ ID NO: 191984 - RNA, 23 nt, Artificial Sequence
  Synthetic
aucugcauagaaagguaucauaa

SEQ ID NO: 191985 - RNA, 24 nt, Artificial Sequence
  Synthetic
gaucugcauagaaagguaucauaa

SEQ ID NO: 191986 - RNA, 18 nt, Artificial Sequence
  Synthetic
agcuuaaauguaucauaa

SEQ ID NO: 191987 - RNA, 19 nt, Artificial Sequence
  Synthetic
uagcuuaaauguaucauaa

SEQ ID NO: 191988 - RNA, 20 nt, Artificial Sequence
  Synthetic
uuagcuuaaauguaucauaa

SEQ ID NO: 191989 - RNA, 21 nt, Artificial Sequence
  Synthetic
auuagcuuaaauguaucauaa

SEQ ID NO: 191990 - RNA, 22 nt, Artificial Sequence
  Synthetic
aauuagcuuaaauguaucauaa

SEQ ID NO: 191991 - RNA, 23 nt, Artificial Sequence
  Synthetic
aaauuagcuuaaauguaucauaa

SEQ ID NO: 191992 - RNA, 24 nt, Artificial Sequence
  Synthetic
aaaauuagcuuaaauguaucauaa

SEQ ID NO: 191993 - RNA, 18 nt, Artificial Sequence
  Synthetic
ugaccucauaacucauaa

SEQ ID NO: 191994 - RNA, 19 nt, Artificial Sequence
  Synthetic
uugaccucauaacucauaa

SEQ ID NO: 191995 - RNA, 20 nt, Artificial Sequence
  Synthetic
uuugaccucauaacucauaa

SEQ ID NO: 191996 - RNA, 21 nt, Artificial Sequence
  Synthetic
cuuugaccucauaacucauaa

SEQ ID NO: 191997 - RNA, 22 nt, Artificial Sequence
  Synthetic
ucuuugaccucauaacucauaa

SEQ ID NO: 191998 - RNA, 23 nt, Artificial Sequence
  Synthetic
uucuuugaccucauaacucauaa

SEQ ID NO: 191999 - RNA, 24 nt, Artificial Sequence
  Synthetic
uuucuuugaccucauaacucauaa

SEQ ID NO: 192000 - RNA, 18 nt, Artificial Sequence
  Synthetic
gcauguucucacucauaa

SEQ ID NO: 192001 - RNA, 19 nt, Artificial Sequence
  Synthetic
cgcauguucucacucauaa

SEQ ID NO: 192002 - RNA, 20 nt, Artificial Sequence
  Synthetic
ccgcauguucucacucauaa

SEQ ID NO: 192003 - RNA, 21 nt, Artificial Sequence
  Synthetic
accgcauguucucacucauaa

SEQ ID NO: 192004 - RNA, 22 nt, Artificial Sequence
  Synthetic
caccgcauguucucacucauaa

SEQ ID NO: 192005 - RNA, 23 nt, Artificial Sequence
  Synthetic
acaccgcauguucucacucauaa

SEQ ID NO: 192006 - RNA, 24 nt, Artificial Sequence
  Synthetic
aacaccgcauguucucacucauaa

SEQ ID NO: 192007 - RNA, 18 nt, Artificial Sequence
  Synthetic
gcauuuucucacucauaa

SEQ ID NO: 192008 - RNA, 19 nt, Artificial Sequence
  Synthetic
cgcauuuucucacucauaa

SEQ ID NO: 192009 - RNA, 20 nt, Artificial Sequence
  Synthetic
ccgcauuuucucacucauaa

SEQ ID NO: 192010 - RNA, 21 nt, Artificial Sequence
  Synthetic
accgcauuuucucacucauaa

SEQ ID NO: 192011 - RNA, 22 nt, Artificial Sequence
  Synthetic
caccgcauuuucucacucauaa

SEQ ID NO: 192012 - RNA, 23 nt, Artificial Sequence
  Synthetic
acaccgcauuuucucacucauaa

SEQ ID NO: 192013 - RNA, 24 nt, Artificial Sequence
  Synthetic
gacaccgcauuuucucacucauaa

SEQ ID NO: 192014 - RNA, 18 nt, Artificial Sequence
  Synthetic
guaacacuaaucucauaa

SEQ ID NO: 192015 - RNA, 19 nt, Artificial Sequence
  Synthetic
aguaacacuaaucucauaa

SEQ ID NO: 192016 - RNA, 20 nt, Artificial Sequence
  Synthetic
aaguaacacuaaucucauaa

SEQ ID NO: 192017 - RNA, 21 nt, Artificial Sequence
  Synthetic
uaaguaacacuaaucucauaa

SEQ ID NO: 192018 - RNA, 22 nt, Artificial Sequence
  Synthetic
uuaaguaacacuaaucucauaa

SEQ ID NO: 192019 - RNA, 23 nt, Artificial Sequence
  Synthetic
cuuaaguaacacuaaucucauaa

SEQ ID NO: 192020 - RNA, 24 nt, Artificial Sequence
  Synthetic
ucuuaaguaacacuaaucucauaa

SEQ ID NO: 192021 - RNA, 18 nt, Artificial Sequence
  Synthetic
gacacauaugucucauaa

SEQ ID NO: 192022 - RNA, 19 nt, Artificial Sequence
  Synthetic
agacacauaugucucauaa

SEQ ID NO: 192023 - RNA, 20 nt, Artificial Sequence
  Synthetic
gagacacauaugucucauaa

SEQ ID NO: 192024 - RNA, 21 nt, Artificial Sequence
  Synthetic
ugagacacauaugucucauaa

SEQ ID NO: 192025 - RNA, 22 nt, Artificial Sequence
  Synthetic
uugagacacauaugucucauaa

SEQ ID NO: 192026 - RNA, 23 nt, Artificial Sequence
  Synthetic
guugagacacauaugucucauaa

SEQ ID NO: 192027 - RNA, 24 nt, Artificial Sequence
  Synthetic
gguugagacacauaugucucauaa

SEQ ID NO: 192028 - RNA, 18 nt, Artificial Sequence
  Synthetic
auauugcuugucucauaa

SEQ ID NO: 192029 - RNA, 19 nt, Artificial Sequence
  Synthetic
cauauugcuugucucauaa

SEQ ID NO: 192030 - RNA, 20 nt, Artificial Sequence
  Synthetic
acauauugcuugucucauaa

SEQ ID NO: 192031 - RNA, 21 nt, Artificial Sequence
  Synthetic
aacauauugcuugucucauaa

SEQ ID NO: 192032 - RNA, 22 nt, Artificial Sequence
  Synthetic
gaacauauugcuugucucauaa

SEQ ID NO: 192033 - RNA, 23 nt, Artificial Sequence
  Synthetic
ugaacauauugcuugucucauaa

SEQ ID NO: 192034 - RNA, 24 nt, Artificial Sequence
  Synthetic
gugaacauauugcuugucucauaa

SEQ ID NO: 192035 - RNA, 18 nt, Artificial Sequence
  Synthetic
acuguagcagugucauaa

SEQ ID NO: 192036 - RNA, 19 nt, Artificial Sequence
  Synthetic
cacuguagcagugucauaa

SEQ ID NO: 192037 - RNA, 20 nt, Artificial Sequence
  Synthetic
acacuguagcagugucauaa

SEQ ID NO: 192038 - RNA, 21 nt, Artificial Sequence
  Synthetic
uacacuguagcagugucauaa

SEQ ID NO: 192039 - RNA, 22 nt, Artificial Sequence
  Synthetic
guacacuguagcagugucauaa

SEQ ID NO: 192040 - RNA, 23 nt, Artificial Sequence
  Synthetic
gguacacuguagcagugucauaa

SEQ ID NO: 192041 - RNA, 24 nt, Artificial Sequence
  Synthetic
ugguacacuguagcagugucauaa

SEQ ID NO: 192042 - RNA, 18 nt, Artificial Sequence
  Synthetic
uguugagaggugucauaa

SEQ ID NO: 192043 - RNA, 19 nt, Artificial Sequence
  Synthetic
auguugagaggugucauaa

SEQ ID NO: 192044 - RNA, 20 nt, Artificial Sequence
  Synthetic
aauguugagaggugucauaa

SEQ ID NO: 192045 - RNA, 21 nt, Artificial Sequence
  Synthetic
caauguugagaggugucauaa

SEQ ID NO: 192046 - RNA, 22 nt, Artificial Sequence
  Synthetic
gcaauguugagaggugucauaa

SEQ ID NO: 192047 - RNA, 23 nt, Artificial Sequence
  Synthetic
ggcaauguugagaggugucauaa

SEQ ID NO: 192048 - RNA, 24 nt, Artificial Sequence
  Synthetic
uggcaauguugagaggugucauaa

SEQ ID NO: 192049 - RNA, 18 nt, Artificial Sequence
  Synthetic
ccaguaaaugguucauaa

SEQ ID NO: 192050 - RNA, 19 nt, Artificial Sequence
  Synthetic
cccaguaaaugguucauaa

SEQ ID NO: 192051 - RNA, 20 nt, Artificial Sequence
  Synthetic
ccccaguaaaugguucauaa

SEQ ID NO: 192052 - RNA, 21 nt, Artificial Sequence
  Synthetic
cccccaguaaaugguucauaa

SEQ ID NO: 192053 - RNA, 22 nt, Artificial Sequence
  Synthetic
ucccccaguaaaugguucauaa

SEQ ID NO: 192054 - RNA, 23 nt, Artificial Sequence
  Synthetic
uucccccaguaaaugguucauaa

SEQ ID NO: 192055 - RNA, 24 nt, Artificial Sequence
  Synthetic
uuucccccaguaaaugguucauaa

SEQ ID NO: 192056 - RNA, 18 nt, Artificial Sequence
  Synthetic
cgccuuacaguuucauaa

SEQ ID NO: 192057 - RNA, 19 nt, Artificial Sequence
  Synthetic
ucgccuuacaguuucauaa

SEQ ID NO: 192058 - RNA, 20 nt, Artificial Sequence
  Synthetic
cucgccuuacaguuucauaa

SEQ ID NO: 192059 - RNA, 21 nt, Artificial Sequence
  Synthetic
ccucgccuuacaguuucauaa

SEQ ID NO: 192060 - RNA, 22 nt, Artificial Sequence
  Synthetic
uccucgccuuacaguuucauaa

SEQ ID NO: 192061 - RNA, 23 nt, Artificial Sequence
  Synthetic
uuccucgccuuacaguuucauaa

SEQ ID NO: 192062 - RNA, 24 nt, Artificial Sequence
  Synthetic
auuccucgccuuacaguuucauaa

SEQ ID NO: 192063 - RNA, 18 nt, Artificial Sequence
  Synthetic
auggaauguuuuucauaa

SEQ ID NO: 192064 - RNA, 19 nt, Artificial Sequence
  Synthetic
aauggaauguuuuucauaa

SEQ ID NO: 192065 - RNA, 20 nt, Artificial Sequence
  Synthetic
gaauggaauguuuuucauaa

SEQ ID NO: 192066 - RNA, 21 nt, Artificial Sequence
  Synthetic
ggaauggaauguuuuucauaa

SEQ ID NO: 192067 - RNA, 22 nt, Artificial Sequence
  Synthetic
aggaauggaauguuuuucauaa

SEQ ID NO: 192068 - RNA, 23 nt, Artificial Sequence
  Synthetic
caggaauggaauguuuuucauaa

SEQ ID NO: 192069 - RNA, 24 nt, Artificial Sequence
  Synthetic
ccaggaauggaauguuuuucauaa

SEQ ID NO: 192070 - RNA, 18 nt, Artificial Sequence
  Synthetic
ugaaaaaaaaaaagauaa

SEQ ID NO: 192071 - RNA, 19 nt, Artificial Sequence
  Synthetic
uugaaaaaaaaaaagauaa

SEQ ID NO: 192072 - RNA, 20 nt, Artificial Sequence
  Synthetic
auugaaaaaaaaaaagauaa

SEQ ID NO: 192073 - RNA, 21 nt, Artificial Sequence
  Synthetic
aauugaaaaaaaaaaagauaa

SEQ ID NO: 192074 - RNA, 22 nt, Artificial Sequence
  Synthetic
aaauugaaaaaaaaaaagauaa

SEQ ID NO: 192075 - RNA, 23 nt, Artificial Sequence
  Synthetic
gaaauugaaaaaaaaaaagauaa

SEQ ID NO: 192076 - RNA, 24 nt, Artificial Sequence
  Synthetic
ugaaauugaaaaaaaaaaagauaa

SEQ ID NO: 192077 - RNA, 18 nt, Artificial Sequence
  Synthetic
guguuauuaaaaagauaa

SEQ ID NO: 192078 - RNA, 19 nt, Artificial Sequence
  Synthetic
aguguuauuaaaaagauaa

SEQ ID NO: 192079 - RNA, 20 nt, Artificial Sequence
  Synthetic
gaguguuauuaaaaagauaa

SEQ ID NO: 192080 - RNA, 21 nt, Artificial Sequence
  Synthetic
ugaguguuauuaaaaagauaa

SEQ ID NO: 192081 - RNA, 22 nt, Artificial Sequence
  Synthetic
gugaguguuauuaaaaagauaa

SEQ ID NO: 192082 - RNA, 23 nt, Artificial Sequence
  Synthetic
ugugaguguuauuaaaaagauaa

SEQ ID NO: 192083 - RNA, 24 nt, Artificial Sequence
  Synthetic
gugugaguguuauuaaaaagauaa

SEQ ID NO: 192084 - RNA, 18 nt, Artificial Sequence
  Synthetic
augguguaaauaagauaa

SEQ ID NO: 192085 - RNA, 19 nt, Artificial Sequence
  Synthetic
aaugguguaaauaagauaa

SEQ ID NO: 192086 - RNA, 20 nt, Artificial Sequence
  Synthetic
uaaugguguaaauaagauaa

SEQ ID NO: 192087 - RNA, 21 nt, Artificial Sequence
  Synthetic
uuaaugguguaaauaagauaa

SEQ ID NO: 192088 - RNA, 22 nt, Artificial Sequence
  Synthetic
auuaaugguguaaauaagauaa

SEQ ID NO: 192089 - RNA, 23 nt, Artificial Sequence
  Synthetic
aauuaaugguguaaauaagauaa

SEQ ID NO: 192090 - RNA, 24 nt, Artificial Sequence
  Synthetic
aaauuaaugguguaaauaagauaa

SEQ ID NO: 192091 - RNA, 18 nt, Artificial Sequence
  Synthetic
ggaccuugcauaagauaa

SEQ ID NO: 192092 - RNA, 19 nt, Artificial Sequence
  Synthetic
uggaccuugcauaagauaa

SEQ ID NO: 192093 - RNA, 20 nt, Artificial Sequence
  Synthetic
auggaccuugcauaagauaa

SEQ ID NO: 192094 - RNA, 21 nt, Artificial Sequence
  Synthetic
gauggaccuugcauaagauaa

SEQ ID NO: 192095 - RNA, 22 nt, Artificial Sequence
  Synthetic
ggauggaccuugcauaagauaa

SEQ ID NO: 192096 - RNA, 23 nt, Artificial Sequence
  Synthetic
aggauggaccuugcauaagauaa

SEQ ID NO: 192097 - RNA, 24 nt, Artificial Sequence
  Synthetic
uaggauggaccuugcauaagauaa

SEQ ID NO: 192098 - RNA, 18 nt, Artificial Sequence
  Synthetic
caagaaauuaacagauaa

SEQ ID NO: 192099 - RNA, 19 nt, Artificial Sequence
  Synthetic
acaagaaauuaacagauaa

SEQ ID NO: 192100 - RNA, 20 nt, Artificial Sequence
  Synthetic
cacaagaaauuaacagauaa

SEQ ID NO: 192101 - RNA, 21 nt, Artificial Sequence
  Synthetic
acacaagaaauuaacagauaa

SEQ ID NO: 192102 - RNA, 22 nt, Artificial Sequence
  Synthetic
gacacaagaaauuaacagauaa

SEQ ID NO: 192103 - RNA, 23 nt, Artificial Sequence
  Synthetic
agacacaagaaauuaacagauaa

SEQ ID NO: 192104 - RNA, 24 nt, Artificial Sequence
  Synthetic
aagacacaagaaauuaacagauaa

SEQ ID NO: 192105 - RNA, 18 nt, Artificial Sequence
  Synthetic
gaauauagauacagauaa

SEQ ID NO: 192106 - RNA, 19 nt, Artificial Sequence
  Synthetic
agaauauagauacagauaa

SEQ ID NO: 192107 - RNA, 20 nt, Artificial Sequence
  Synthetic
gagaauauagauacagauaa

SEQ ID NO: 192108 - RNA, 21 nt, Artificial Sequence
  Synthetic
ggagaauauagauacagauaa

SEQ ID NO: 192109 - RNA, 22 nt, Artificial Sequence
  Synthetic
aggagaauauagauacagauaa

SEQ ID NO: 192110 - RNA, 23 nt, Artificial Sequence
  Synthetic
aaggagaauauagauacagauaa

SEQ ID NO: 192111 - RNA, 24 nt, Artificial Sequence
  Synthetic
uaaggagaauauagauacagauaa

SEQ ID NO: 192112 - RNA, 18 nt, Artificial Sequence
  Synthetic
gagaaauuaaccagauaa

SEQ ID NO: 192113 - RNA, 19 nt, Artificial Sequence
  Synthetic
ggagaaauuaaccagauaa

SEQ ID NO: 192114 - RNA, 20 nt, Artificial Sequence
  Synthetic
aggagaaauuaaccagauaa

SEQ ID NO: 192115 - RNA, 21 nt, Artificial Sequence
  Synthetic
uaggagaaauuaaccagauaa

SEQ ID NO: 192116 - RNA, 22 nt, Artificial Sequence
  Synthetic
uuaggagaaauuaaccagauaa

SEQ ID NO: 192117 - RNA, 23 nt, Artificial Sequence
  Synthetic
uuuaggagaaauuaaccagauaa

SEQ ID NO: 192118 - RNA, 24 nt, Artificial Sequence
  Synthetic
guuuaggagaaauuaaccagauaa

SEQ ID NO: 192119 - RNA, 18 nt, Artificial Sequence
  Synthetic
gagaaauuauccagauaa

SEQ ID NO: 192120 - RNA, 19 nt, Artificial Sequence
  Synthetic
ggagaaauuauccagauaa

SEQ ID NO: 192121 - RNA, 20 nt, Artificial Sequence
  Synthetic
aggagaaauuauccagauaa

SEQ ID NO: 192122 - RNA, 21 nt, Artificial Sequence
  Synthetic
gaggagaaauuauccagauaa

SEQ ID NO: 192123 - RNA, 22 nt, Artificial Sequence
  Synthetic
ugaggagaaauuauccagauaa

SEQ ID NO: 192124 - RNA, 23 nt, Artificial Sequence
  Synthetic
augaggagaaauuauccagauaa

SEQ ID NO: 192125 - RNA, 24 nt, Artificial Sequence
  Synthetic
aaugaggagaaauuauccagauaa

SEQ ID NO: 192126 - RNA, 18 nt, Artificial Sequence
  Synthetic
cuguaaacaaucagauaa

SEQ ID NO: 192127 - RNA, 19 nt, Artificial Sequence
  Synthetic
ucuguaaacaaucagauaa

SEQ ID NO: 192128 - RNA, 20 nt, Artificial Sequence
  Synthetic
cucuguaaacaaucagauaa

SEQ ID NO: 192129 - RNA, 21 nt, Artificial Sequence
  Synthetic
gcucuguaaacaaucagauaa

SEQ ID NO: 192130 - RNA, 22 nt, Artificial Sequence
  Synthetic
ugcucuguaaacaaucagauaa

SEQ ID NO: 192131 - RNA, 23 nt, Artificial Sequence
  Synthetic
uugcucuguaaacaaucagauaa

SEQ ID NO: 192132 - RNA, 24 nt, Artificial Sequence
  Synthetic
uuugcucuguaaacaaucagauaa

SEQ ID NO: 192133 - RNA, 18 nt, Artificial Sequence
  Synthetic
ugagagugucagagauaa

SEQ ID NO: 192134 - RNA, 19 nt, Artificial Sequence
  Synthetic
cugagagugucagagauaa

SEQ ID NO: 192135 - RNA, 20 nt, Artificial Sequence
  Synthetic
ccugagagugucagagauaa

SEQ ID NO: 192136 - RNA, 21 nt, Artificial Sequence
  Synthetic
gccugagagugucagagauaa

SEQ ID NO: 192137 - RNA, 22 nt, Artificial Sequence
  Synthetic
agccugagagugucagagauaa

SEQ ID NO: 192138 - RNA, 23 nt, Artificial Sequence
  Synthetic
aagccugagagugucagagauaa

SEQ ID NO: 192139 - RNA, 24 nt, Artificial Sequence
  Synthetic
uaagccugagagugucagagauaa

SEQ ID NO: 192140 - RNA, 18 nt, Artificial Sequence
  Synthetic
uaagguuauuggagauaa

SEQ ID NO: 192141 - RNA, 19 nt, Artificial Sequence
  Synthetic
uuaagguuauuggagauaa

SEQ ID NO: 192142 - RNA, 20 nt, Artificial Sequence
  Synthetic
guuaagguuauuggagauaa

SEQ ID NO: 192143 - RNA, 21 nt, Artificial Sequence
  Synthetic
aguuaagguuauuggagauaa

SEQ ID NO: 192144 - RNA, 22 nt, Artificial Sequence
  Synthetic
uaguuaagguuauuggagauaa

SEQ ID NO: 192145 - RNA, 23 nt, Artificial Sequence
  Synthetic
guaguuaagguuauuggagauaa

SEQ ID NO: 192146 - RNA, 24 nt, Artificial Sequence
  Synthetic
uguaguuaagguuauuggagauaa

SEQ ID NO: 192147 - RNA, 18 nt, Artificial Sequence
  Synthetic
cacagaaaaaugagauaa

SEQ ID NO: 192148 - RNA, 19 nt, Artificial Sequence
  Synthetic
acacagaaaaaugagauaa

SEQ ID NO: 192149 - RNA, 20 nt, Artificial Sequence
  Synthetic
aacacagaaaaaugagauaa

SEQ ID NO: 192150 - RNA, 21 nt, Artificial Sequence
  Synthetic
gaacacagaaaaaugagauaa

SEQ ID NO: 192151 - RNA, 22 nt, Artificial Sequence
  Synthetic
agaacacagaaaaaugagauaa

SEQ ID NO: 192152 - RNA, 23 nt, Artificial Sequence
  Synthetic
aagaacacagaaaaaugagauaa

SEQ ID NO: 192153 - RNA, 24 nt, Artificial Sequence
  Synthetic
gaagaacacagaaaaaugagauaa

SEQ ID NO: 192154 - RNA, 18 nt, Artificial Sequence
  Synthetic
gguuuaugugugagauaa

SEQ ID NO: 192155 - RNA, 19 nt, Artificial Sequence
  Synthetic
ggguuuaugugugagauaa

SEQ ID NO: 192156 - RNA, 20 nt, Artificial Sequence
  Synthetic
uggguuuaugugugagauaa

SEQ ID NO: 192157 - RNA, 21 nt, Artificial Sequence
  Synthetic
cuggguuuaugugugagauaa

SEQ ID NO: 192158 - RNA, 22 nt, Artificial Sequence
  Synthetic
ucuggguuuaugugugagauaa

SEQ ID NO: 192159 - RNA, 23 nt, Artificial Sequence
  Synthetic
uucuggguuuaugugugagauaa

SEQ ID NO: 192160 - RNA, 24 nt, Artificial Sequence
  Synthetic
auucuggguuuaugugugagauaa

SEQ ID NO: 192161 - RNA, 18 nt, Artificial Sequence
  Synthetic
aaaaauaucuugagauaa

SEQ ID NO: 192162 - RNA, 19 nt, Artificial Sequence
  Synthetic
caaaaauaucuugagauaa

SEQ ID NO: 192163 - RNA, 20 nt, Artificial Sequence
  Synthetic
acaaaaauaucuugagauaa

SEQ ID NO: 192164 - RNA, 21 nt, Artificial Sequence
  Synthetic
uacaaaaauaucuugagauaa

SEQ ID NO: 192165 - RNA, 22 nt, Artificial Sequence
  Synthetic
auacaaaaauaucuugagauaa

SEQ ID NO: 192166 - RNA, 23 nt, Artificial Sequence
  Synthetic
aauacaaaaauaucuugagauaa

SEQ ID NO: 192167 - RNA, 24 nt, Artificial Sequence
  Synthetic
aaauacaaaaauaucuugagauaa

SEQ ID NO: 192168 - RNA, 18 nt, Artificial Sequence
  Synthetic
auagauaaauauagauaa

SEQ ID NO: 192169 - RNA, 19 nt, Artificial Sequence
  Synthetic
aauagauaaauauagauaa

SEQ ID NO: 192170 - RNA, 20 nt, Artificial Sequence
  Synthetic
aaauagauaaauauagauaa

SEQ ID NO: 192171 - RNA, 21 nt, Artificial Sequence
  Synthetic
uaaauagauaaauauagauaa

SEQ ID NO: 192172 - RNA, 22 nt, Artificial Sequence
  Synthetic
auaaauagauaaauauagauaa

SEQ ID NO: 192173 - RNA, 23 nt, Artificial Sequence
  Synthetic
gauaaauagauaaauauagauaa

SEQ ID NO: 192174 - RNA, 24 nt, Artificial Sequence
  Synthetic
ugauaaauagauaaauauagauaa

SEQ ID NO: 192175 - RNA, 18 nt, Artificial Sequence
  Synthetic
uuaaacauguauagauaa

SEQ ID NO: 192176 - RNA, 19 nt, Artificial Sequence
  Synthetic
auuaaacauguauagauaa

SEQ ID NO: 192177 - RNA, 20 nt, Artificial Sequence
  Synthetic
aauuaaacauguauagauaa

SEQ ID NO: 192178 - RNA, 21 nt, Artificial Sequence
  Synthetic
aaauuaaacauguauagauaa

SEQ ID NO: 192179 - RNA, 22 nt, Artificial Sequence
  Synthetic
uaaauuaaacauguauagauaa

SEQ ID NO: 192180 - RNA, 23 nt, Artificial Sequence
  Synthetic
cuaaauuaaacauguauagauaa

SEQ ID NO: 192181 - RNA, 24 nt, Artificial Sequence
  Synthetic
ucuaaauuaaacauguauagauaa

SEQ ID NO: 192182 - RNA, 18 nt, Artificial Sequence
  Synthetic
ccucauuugucuagauaa

SEQ ID NO: 192183 - RNA, 19 nt, Artificial Sequence
  Synthetic
gccucauuugucuagauaa

SEQ ID NO: 192184 - RNA, 20 nt, Artificial Sequence
  Synthetic
ugccucauuugucuagauaa

SEQ ID NO: 192185 - RNA, 21 nt, Artificial Sequence
  Synthetic
uugccucauuugucuagauaa

SEQ ID NO: 192186 - RNA, 22 nt, Artificial Sequence
  Synthetic
uuugccucauuugucuagauaa

SEQ ID NO: 192187 - RNA, 23 nt, Artificial Sequence
  Synthetic
uuuugccucauuugucuagauaa

SEQ ID NO: 192188 - RNA, 24 nt, Artificial Sequence
  Synthetic
guuuugccucauuugucuagauaa

SEQ ID NO: 192189 - RNA, 18 nt, Artificial Sequence
  Synthetic
uagacacugguuagauaa

SEQ ID NO: 192190 - RNA, 19 nt, Artificial Sequence
  Synthetic
guagacacugguuagauaa

SEQ ID NO: 192191 - RNA, 20 nt, Artificial Sequence
  Synthetic
aguagacacugguuagauaa

SEQ ID NO: 192192 - RNA, 21 nt, Artificial Sequence
  Synthetic
caguagacacugguuagauaa

SEQ ID NO: 192193 - RNA, 22 nt, Artificial Sequence
  Synthetic
acaguagacacugguuagauaa

SEQ ID NO: 192194 - RNA, 23 nt, Artificial Sequence
  Synthetic
uacaguagacacugguuagauaa

SEQ ID NO: 192195 - RNA, 24 nt, Artificial Sequence
  Synthetic
auacaguagacacugguuagauaa

SEQ ID NO: 192196 - RNA, 18 nt, Artificial Sequence
  Synthetic
caagcauucaaaggauaa

SEQ ID NO: 192197 - RNA, 19 nt, Artificial Sequence
  Synthetic
ccaagcauucaaaggauaa

SEQ ID NO: 192198 - RNA, 20 nt, Artificial Sequence
  Synthetic
accaagcauucaaaggauaa

SEQ ID NO: 192199 - RNA, 21 nt, Artificial Sequence
  Synthetic
aaccaagcauucaaaggauaa

SEQ ID NO: 192200 - RNA, 22 nt, Artificial Sequence
  Synthetic
aaaccaagcauucaaaggauaa

SEQ ID NO: 192201 - RNA, 23 nt, Artificial Sequence
  Synthetic
aaaaccaagcauucaaaggauaa

SEQ ID NO: 192202 - RNA, 24 nt, Artificial Sequence
  Synthetic
uaaaaccaagcauucaaaggauaa

SEQ ID NO: 192203 - RNA, 18 nt, Artificial Sequence
  Synthetic
aauucaauucaaggauaa

SEQ ID NO: 192204 - RNA, 19 nt, Artificial Sequence
  Synthetic
gaauucaauucaaggauaa

SEQ ID NO: 192205 - RNA, 20 nt, Artificial Sequence
  Synthetic
agaauucaauucaaggauaa

SEQ ID NO: 192206 - RNA, 21 nt, Artificial Sequence
  Synthetic
aagaauucaauucaaggauaa

SEQ ID NO: 192207 - RNA, 22 nt, Artificial Sequence
  Synthetic
uaagaauucaauucaaggauaa

SEQ ID NO: 192208 - RNA, 23 nt, Artificial Sequence
  Synthetic
auaagaauucaauucaaggauaa

SEQ ID NO: 192209 - RNA, 24 nt, Artificial Sequence
  Synthetic
aauaagaauucaauucaaggauaa

SEQ ID NO: 192210 - RNA, 18 nt, Artificial Sequence
  Synthetic
cuccaaugauaaggauaa

SEQ ID NO: 192211 - RNA, 19 nt, Artificial Sequence
  Synthetic
ucuccaaugauaaggauaa

SEQ ID NO: 192212 - RNA, 20 nt, Artificial Sequence
  Synthetic
uucuccaaugauaaggauaa

SEQ ID NO: 192213 - RNA, 21 nt, Artificial Sequence
  Synthetic
cuucuccaaugauaaggauaa

SEQ ID NO: 192214 - RNA, 22 nt, Artificial Sequence
  Synthetic
ccuucuccaaugauaaggauaa

SEQ ID NO: 192215 - RNA, 23 nt, Artificial Sequence
  Synthetic
gccuucuccaaugauaaggauaa

SEQ ID NO: 192216 - RNA, 24 nt, Artificial Sequence
  Synthetic
ugccuucuccaaugauaaggauaa

SEQ ID NO: 192217 - RNA, 18 nt, Artificial Sequence
  Synthetic
uauaauuccucaggauaa

SEQ ID NO: 192218 - RNA, 19 nt, Artificial Sequence
  Synthetic
cuauaauuccucaggauaa

SEQ ID NO: 192219 - RNA, 20 nt, Artificial Sequence
  Synthetic
ucuauaauuccucaggauaa

SEQ ID NO: 192220 - RNA, 21 nt, Artificial Sequence
  Synthetic
gucuauaauuccucaggauaa

SEQ ID NO: 192221 - RNA, 22 nt, Artificial Sequence
  Synthetic
agucuauaauuccucaggauaa

SEQ ID NO: 192222 - RNA, 23 nt, Artificial Sequence
  Synthetic
uagucuauaauuccucaggauaa

SEQ ID NO: 192223 - RNA, 24 nt, Artificial Sequence
  Synthetic
guagucuauaauuccucaggauaa

SEQ ID NO: 192224 - RNA, 18 nt, Artificial Sequence
  Synthetic
gugacugcaaagggauaa

SEQ ID NO: 192225 - RNA, 19 nt, Artificial Sequence
  Synthetic
agugacugcaaagggauaa

SEQ ID NO: 192226 - RNA, 20 nt, Artificial Sequence
  Synthetic
cagugacugcaaagggauaa

SEQ ID NO: 192227 - RNA, 21 nt, Artificial Sequence
  Synthetic
gcagugacugcaaagggauaa

SEQ ID NO: 192228 - RNA, 22 nt, Artificial Sequence
  Synthetic
ggcagugacugcaaagggauaa

SEQ ID NO: 192229 - RNA, 23 nt, Artificial Sequence
  Synthetic
aggcagugacugcaaagggauaa

SEQ ID NO: 192230 - RNA, 24 nt, Artificial Sequence
  Synthetic
gaggcagugacugcaaagggauaa

SEQ ID NO: 192231 - RNA, 18 nt, Artificial Sequence
  Synthetic
ucaauggcugagggauaa

SEQ ID NO: 192232 - RNA, 19 nt, Artificial Sequence
  Synthetic
aucaauggcugagggauaa

SEQ ID NO: 192233 - RNA, 20 nt, Artificial Sequence
  Synthetic
aaucaauggcugagggauaa

SEQ ID NO: 192234 - RNA, 21 nt, Artificial Sequence
  Synthetic
aaaucaauggcugagggauaa

SEQ ID NO: 192235 - RNA, 22 nt, Artificial Sequence
  Synthetic
aaaaucaauggcugagggauaa

SEQ ID NO: 192236 - RNA, 23 nt, Artificial Sequence
  Synthetic
uaaaaucaauggcugagggauaa

SEQ ID NO: 192237 - RNA, 24 nt, Artificial Sequence
  Synthetic
uuaaaaucaauggcugagggauaa

SEQ ID NO: 192238 - RNA, 18 nt, Artificial Sequence
  Synthetic
aucuucuuuuagggauaa

SEQ ID NO: 192239 - RNA, 19 nt, Artificial Sequence
  Synthetic
caucuucuuuuagggauaa

SEQ ID NO: 192240 - RNA, 20 nt, Artificial Sequence
  Synthetic
acaucuucuuuuagggauaa

SEQ ID NO: 192241 - RNA, 21 nt, Artificial Sequence
  Synthetic
uacaucuucuuuuagggauaa

SEQ ID NO: 192242 - RNA, 22 nt, Artificial Sequence
  Synthetic
cuacaucuucuuuuagggauaa

SEQ ID NO: 192243 - RNA, 23 nt, Artificial Sequence
  Synthetic
ccuacaucuucuuuuagggauaa

SEQ ID NO: 192244 - RNA, 24 nt, Artificial Sequence
  Synthetic
uccuacaucuucuuuuagggauaa

SEQ ID NO: 192245 - RNA, 18 nt, Artificial Sequence
  Synthetic
aagagaaaguggggauaa

SEQ ID NO: 192246 - RNA, 19 nt, Artificial Sequence
  Synthetic
aaagagaaaguggggauaa

SEQ ID NO: 192247 - RNA, 20 nt, Artificial Sequence
  Synthetic
uaaagagaaaguggggauaa

SEQ ID NO: 192248 - RNA, 21 nt, Artificial Sequence
  Synthetic
auaaagagaaaguggggauaa

SEQ ID NO: 192249 - RNA, 22 nt, Artificial Sequence
  Synthetic
uauaaagagaaaguggggauaa

SEQ ID NO: 192250 - RNA, 23 nt, Artificial Sequence
  Synthetic
uuauaaagagaaaguggggauaa

SEQ ID NO: 192251 - RNA, 24 nt, Artificial Sequence
  Synthetic
auuauaaagagaaaguggggauaa

SEQ ID NO: 192252 - RNA, 18 nt, Artificial Sequence
  Synthetic
cacuguuuuaugggauaa

SEQ ID NO: 192253 - RNA, 19 nt, Artificial Sequence
  Synthetic
ccacuguuuuaugggauaa

SEQ ID NO: 192254 - RNA, 20 nt, Artificial Sequence
  Synthetic
accacuguuuuaugggauaa

SEQ ID NO: 192255 - RNA, 21 nt, Artificial Sequence
  Synthetic
gaccacuguuuuaugggauaa

SEQ ID NO: 192256 - RNA, 22 nt, Artificial Sequence
  Synthetic
ggaccacuguuuuaugggauaa

SEQ ID NO: 192257 - RNA, 23 nt, Artificial Sequence
  Synthetic
gggaccacuguuuuaugggauaa

SEQ ID NO: 192258 - RNA, 24 nt, Artificial Sequence
  Synthetic
agggaccacuguuuuaugggauaa

SEQ ID NO: 192259 - RNA, 18 nt, Artificial Sequence
  Synthetic
aagaaaaaugugggauaa

SEQ ID NO: 192260 - RNA, 19 nt, Artificial Sequence
  Synthetic
gaagaaaaaugugggauaa

SEQ ID NO: 192261 - RNA, 20 nt, Artificial Sequence
  Synthetic
agaagaaaaaugugggauaa

SEQ ID NO: 192262 - RNA, 21 nt, Artificial Sequence
  Synthetic
aagaagaaaaaugugggauaa

SEQ ID NO: 192263 - RNA, 22 nt, Artificial Sequence
  Synthetic
uaagaagaaaaaugugggauaa

SEQ ID NO: 192264 - RNA, 23 nt, Artificial Sequence
  Synthetic
cuaagaagaaaaaugugggauaa

SEQ ID NO: 192265 - RNA, 24 nt, Artificial Sequence
  Synthetic
gcuaagaagaaaaaugugggauaa

SEQ ID NO: 192266 - RNA, 18 nt, Artificial Sequence
  Synthetic
gcuacacaggauggauaa

SEQ ID NO: 192267 - RNA, 19 nt, Artificial Sequence
  Synthetic
ggcuacacaggauggauaa

SEQ ID NO: 192268 - RNA, 20 nt, Artificial Sequence
  Synthetic
gggcuacacaggauggauaa

SEQ ID NO: 192269 - RNA, 21 nt, Artificial Sequence
  Synthetic
agggcuacacaggauggauaa

SEQ ID NO: 192270 - RNA, 22 nt, Artificial Sequence
  Synthetic
aagggcuacacaggauggauaa

SEQ ID NO: 192271 - RNA, 23 nt, Artificial Sequence
  Synthetic
gaagggcuacacaggauggauaa

SEQ ID NO: 192272 - RNA, 24 nt, Artificial Sequence
  Synthetic
agaagggcuacacaggauggauaa

SEQ ID NO: 192273 - RNA, 18 nt, Artificial Sequence
  Synthetic
gucaggaguacuggauaa

SEQ ID NO: 192274 - RNA, 19 nt, Artificial Sequence
  Synthetic
agucaggaguacuggauaa

SEQ ID NO: 192275 - RNA, 20 nt, Artificial Sequence
  Synthetic
gagucaggaguacuggauaa

SEQ ID NO: 192276 - RNA, 21 nt, Artificial Sequence
  Synthetic
agagucaggaguacuggauaa

SEQ ID NO: 192277 - RNA, 22 nt, Artificial Sequence
  Synthetic
cagagucaggaguacuggauaa

SEQ ID NO: 192278 - RNA, 23 nt, Artificial Sequence
  Synthetic
gcagagucaggaguacuggauaa

SEQ ID NO: 192279 - RNA, 24 nt, Artificial Sequence
  Synthetic
ugcagagucaggaguacuggauaa

SEQ ID NO: 192280 - RNA, 18 nt, Artificial Sequence
  Synthetic
ucuugauccccuggauaa

SEQ ID NO: 192281 - RNA, 19 nt, Artificial Sequence
  Synthetic
cucuugauccccuggauaa

SEQ ID NO: 192282 - RNA, 20 nt, Artificial Sequence
  Synthetic
ucucuugauccccuggauaa

SEQ ID NO: 192283 - RNA, 21 nt, Artificial Sequence
  Synthetic
uucucuugauccccuggauaa

SEQ ID NO: 192284 - RNA, 22 nt, Artificial Sequence
  Synthetic
uuucucuugauccccuggauaa

SEQ ID NO: 192285 - RNA, 23 nt, Artificial Sequence
  Synthetic
uuuucucuugauccccuggauaa

SEQ ID NO: 192286 - RNA, 24 nt, Artificial Sequence
  Synthetic
uuuuucucuugauccccuggauaa

SEQ ID NO: 192287 - RNA, 18 nt, Artificial Sequence
  Synthetic
cacaagaaaaaaugauaa

SEQ ID NO: 192288 - RNA, 19 nt, Artificial Sequence
  Synthetic
acacaagaaaaaaugauaa

SEQ ID NO: 192289 - RNA, 20 nt, Artificial Sequence
  Synthetic
gacacaagaaaaaaugauaa

SEQ ID NO: 192290 - RNA, 21 nt, Artificial Sequence
  Synthetic
agacacaagaaaaaaugauaa

SEQ ID NO: 192291 - RNA, 22 nt, Artificial Sequence
  Synthetic
cagacacaagaaaaaaugauaa

SEQ ID NO: 192292 - RNA, 23 nt, Artificial Sequence
  Synthetic
acagacacaagaaaaaaugauaa

SEQ ID NO: 192293 - RNA, 24 nt, Artificial Sequence
  Synthetic
gacagacacaagaaaaaaugauaa

SEQ ID NO: 192294 - RNA, 18 nt, Artificial Sequence
  Synthetic
ucuacagucaaaugauaa

SEQ ID NO: 192295 - RNA, 19 nt, Artificial Sequence
  Synthetic
aucuacagucaaaugauaa

SEQ ID NO: 192296 - RNA, 20 nt, Artificial Sequence
  Synthetic
uaucuacagucaaaugauaa

SEQ ID NO: 192297 - RNA, 21 nt, Artificial Sequence
  Synthetic
uuaucuacagucaaaugauaa

SEQ ID NO: 192298 - RNA, 22 nt, Artificial Sequence
  Synthetic
cuuaucuacagucaaaugauaa

SEQ ID NO: 192299 - RNA, 23 nt, Artificial Sequence
  Synthetic
gcuuaucuacagucaaaugauaa

SEQ ID NO: 192300 - RNA, 24 nt, Artificial Sequence
  Synthetic
agcuuaucuacagucaaaugauaa

SEQ ID NO: 192301 - RNA, 18 nt, Artificial Sequence
  Synthetic
uguacaauguacugauaa

SEQ ID NO: 192302 - RNA, 19 nt, Artificial Sequence
  Synthetic
uuguacaauguacugauaa

SEQ ID NO: 192303 - RNA, 20 nt, Artificial Sequence
  Synthetic
auuguacaauguacugauaa

SEQ ID NO: 192304 - RNA, 21 nt, Artificial Sequence
  Synthetic
uauuguacaauguacugauaa

SEQ ID NO: 192305 - RNA, 22 nt, Artificial Sequence
  Synthetic
auauuguacaauguacugauaa

SEQ ID NO: 192306 - RNA, 23 nt, Artificial Sequence
  Synthetic
gauauuguacaauguacugauaa

SEQ ID NO: 192307 - RNA, 24 nt, Artificial Sequence
  Synthetic
ugauauuguacaauguacugauaa

SEQ ID NO: 192308 - RNA, 18 nt, Artificial Sequence
  Synthetic
aacaaucuuuccugauaa

SEQ ID NO: 192309 - RNA, 19 nt, Artificial Sequence
  Synthetic
uaacaaucuuuccugauaa

SEQ ID NO: 192310 - RNA, 20 nt, Artificial Sequence
  Synthetic
uuaacaaucuuuccugauaa

SEQ ID NO: 192311 - RNA, 21 nt, Artificial Sequence
  Synthetic
cuuaacaaucuuuccugauaa

SEQ ID NO: 192312 - RNA, 22 nt, Artificial Sequence
  Synthetic
ucuuaacaaucuuuccugauaa

SEQ ID NO: 192313 - RNA, 23 nt, Artificial Sequence
  Synthetic
cucuuaacaaucuuuccugauaa

SEQ ID NO: 192314 - RNA, 24 nt, Artificial Sequence
  Synthetic
ucucuuaacaaucuuuccugauaa

SEQ ID NO: 192315 - RNA, 18 nt, Artificial Sequence
  Synthetic
aauuauuucuucugauaa

SEQ ID NO: 192316 - RNA, 19 nt, Artificial Sequence
  Synthetic
gaauuauuucuucugauaa

SEQ ID NO: 192317 - RNA, 20 nt, Artificial Sequence
  Synthetic
ugaauuauuucuucugauaa

SEQ ID NO: 192318 - RNA, 21 nt, Artificial Sequence
  Synthetic
uugaauuauuucuucugauaa

SEQ ID NO: 192319 - RNA, 22 nt, Artificial Sequence
  Synthetic
uuugaauuauuucuucugauaa

SEQ ID NO: 192320 - RNA, 23 nt, Artificial Sequence
  Synthetic
auuugaauuauuucuucugauaa

SEQ ID NO: 192321 - RNA, 24 nt, Artificial Sequence
  Synthetic
aauuugaauuauuucuucugauaa

SEQ ID NO: 192322 - RNA, 18 nt, Artificial Sequence
  Synthetic
uuugauggacugugauaa

SEQ ID NO: 192323 - RNA, 19 nt, Artificial Sequence
  Synthetic
uuuugauggacugugauaa

SEQ ID NO: 192324 - RNA, 20 nt, Artificial Sequence
  Synthetic
auuuugauggacugugauaa

SEQ ID NO: 192325 - RNA, 21 nt, Artificial Sequence
  Synthetic
uauuuugauggacugugauaa

SEQ ID NO: 192326 - RNA, 22 nt, Artificial Sequence
  Synthetic
uuauuuugauggacugugauaa

SEQ ID NO: 192327 - RNA, 23 nt, Artificial Sequence
  Synthetic
guuauuuugauggacugugauaa

SEQ ID NO: 192328 - RNA, 24 nt, Artificial Sequence
  Synthetic
uguuauuuugauggacugugauaa

SEQ ID NO: 192329 - RNA, 18 nt, Artificial Sequence
  Synthetic
uaauaaagauugugauaa

SEQ ID NO: 192330 - RNA, 19 nt, Artificial Sequence
  Synthetic
uuaauaaagauugugauaa

SEQ ID NO: 192331 - RNA, 20 nt, Artificial Sequence
  Synthetic
auuaauaaagauugugauaa

SEQ ID NO: 192332 - RNA, 21 nt, Artificial Sequence
  Synthetic
uauuaauaaagauugugauaa

SEQ ID NO: 192333 - RNA, 22 nt, Artificial Sequence
  Synthetic
guauuaauaaagauugugauaa

SEQ ID NO: 192334 - RNA, 23 nt, Artificial Sequence
  Synthetic
aguauuaauaaagauugugauaa

SEQ ID NO: 192335 - RNA, 24 nt, Artificial Sequence
  Synthetic
gaguauuaauaaagauugugauaa

SEQ ID NO: 192336 - RNA, 18 nt, Artificial Sequence
  Synthetic
uucccaaguacuugauaa

SEQ ID NO: 192337 - RNA, 19 nt, Artificial Sequence
  Synthetic
auucccaaguacuugauaa

SEQ ID NO: 192338 - RNA, 20 nt, Artificial Sequence
  Synthetic
aauucccaaguacuugauaa

SEQ ID NO: 192339 - RNA, 21 nt, Artificial Sequence
  Synthetic
uaauucccaaguacuugauaa

SEQ ID NO: 192340 - RNA, 22 nt, Artificial Sequence
  Synthetic
uuaauucccaaguacuugauaa

SEQ ID NO: 192341 - RNA, 23 nt, Artificial Sequence
  Synthetic
cuuaauucccaaguacuugauaa

SEQ ID NO: 192342 - RNA, 24 nt, Artificial Sequence
  Synthetic
ccuuaauucccaaguacuugauaa

SEQ ID NO: 192343 - RNA, 18 nt, Artificial Sequence
  Synthetic
aacuguaaugcuugauaa

SEQ ID NO: 192344 - RNA, 19 nt, Artificial Sequence
  Synthetic
aaacuguaaugcuugauaa

SEQ ID NO: 192345 - RNA, 20 nt, Artificial Sequence
  Synthetic
gaaacuguaaugcuugauaa

SEQ ID NO: 192346 - RNA, 21 nt, Artificial Sequence
  Synthetic
agaaacuguaaugcuugauaa

SEQ ID NO: 192347 - RNA, 22 nt, Artificial Sequence
  Synthetic
uagaaacuguaaugcuugauaa

SEQ ID NO: 192348 - RNA, 23 nt, Artificial Sequence
  Synthetic
auagaaacuguaaugcuugauaa

SEQ ID NO: 192349 - RNA, 24 nt, Artificial Sequence
  Synthetic
aauagaaacuguaaugcuugauaa

SEQ ID NO: 192350 - RNA, 18 nt, Artificial Sequence
  Synthetic
gagaauucgucuugauaa

SEQ ID NO: 192351 - RNA, 19 nt, Artificial Sequence
  Synthetic
agagaauucgucuugauaa

SEQ ID NO: 192352 - RNA, 20 nt, Artificial Sequence
  Synthetic
aagagaauucgucuugauaa

SEQ ID NO: 192353 - RNA, 21 nt, Artificial Sequence
  Synthetic
caagagaauucgucuugauaa

SEQ ID NO: 192354 - RNA, 22 nt, Artificial Sequence
  Synthetic
acaagagaauucgucuugauaa

SEQ ID NO: 192355 - RNA, 23 nt, Artificial Sequence
  Synthetic
gacaagagaauucgucuugauaa

SEQ ID NO: 192356 - RNA, 24 nt, Artificial Sequence
  Synthetic
ggacaagagaauucgucuugauaa

SEQ ID NO: 192357 - RNA, 18 nt, Artificial Sequence
  Synthetic
ccuaaucaaguuugauaa

SEQ ID NO: 192358 - RNA, 19 nt, Artificial Sequence
  Synthetic
cccuaaucaaguuugauaa

SEQ ID NO: 192359 - RNA, 20 nt, Artificial Sequence
  Synthetic
acccuaaucaaguuugauaa

SEQ ID NO: 192360 - RNA, 21 nt, Artificial Sequence
  Synthetic
uacccuaaucaaguuugauaa

SEQ ID NO: 192361 - RNA, 22 nt, Artificial Sequence
  Synthetic
uuacccuaaucaaguuugauaa

SEQ ID NO: 192362 - RNA, 23 nt, Artificial Sequence
  Synthetic
cuuacccuaaucaaguuugauaa

SEQ ID NO: 192363 - RNA, 24 nt, Artificial Sequence
  Synthetic
acuuacccuaaucaaguuugauaa

SEQ ID NO: 192364 - RNA, 18 nt, Artificial Sequence
  Synthetic
aggacuaucaaaauauaa

SEQ ID NO: 192365 - RNA, 19 nt, Artificial Sequence
  Synthetic
caggacuaucaaaauauaa

SEQ ID NO: 192366 - RNA, 20 nt, Artificial Sequence
  Synthetic
gcaggacuaucaaaauauaa

SEQ ID NO: 192367 - RNA, 21 nt, Artificial Sequence
  Synthetic
ggcaggacuaucaaaauauaa

SEQ ID NO: 192368 - RNA, 22 nt, Artificial Sequence
  Synthetic
gggcaggacuaucaaaauauaa

SEQ ID NO: 192369 - RNA, 23 nt, Artificial Sequence
  Synthetic
agggcaggacuaucaaaauauaa

SEQ ID NO: 192370 - RNA, 24 nt, Artificial Sequence
  Synthetic
gagggcaggacuaucaaaauauaa

SEQ ID NO: 192371 - RNA, 18 nt, Artificial Sequence
  Synthetic
uagaggaagaaaauauaa

SEQ ID NO: 192372 - RNA, 19 nt, Artificial Sequence
  Synthetic
auagaggaagaaaauauaa

SEQ ID NO: 192373 - RNA, 20 nt, Artificial Sequence
  Synthetic
gauagaggaagaaaauauaa

SEQ ID NO: 192374 - RNA, 21 nt, Artificial Sequence
  Synthetic
agauagaggaagaaaauauaa

SEQ ID NO: 192375 - RNA, 22 nt, Artificial Sequence
  Synthetic
cagauagaggaagaaaauauaa

SEQ ID NO: 192376 - RNA, 23 nt, Artificial Sequence
  Synthetic
ucagauagaggaagaaaauauaa

SEQ ID NO: 192377 - RNA, 24 nt, Artificial Sequence
  Synthetic
aucagauagaggaagaaaauauaa

SEQ ID NO: 192378 - RNA, 18 nt, Artificial Sequence
  Synthetic
uuuagaaguaaaauauaa

SEQ ID NO: 192379 - RNA, 19 nt, Artificial Sequence
  Synthetic
auuuagaaguaaaauauaa

SEQ ID NO: 192380 - RNA, 20 nt, Artificial Sequence
  Synthetic
aauuuagaaguaaaauauaa

SEQ ID NO: 192381 - RNA, 21 nt, Artificial Sequence
  Synthetic
uaauuuagaaguaaaauauaa

SEQ ID NO: 192382 - RNA, 22 nt, Artificial Sequence
  Synthetic
uuaauuuagaaguaaaauauaa

SEQ ID NO: 192383 - RNA, 23 nt, Artificial Sequence
  Synthetic
guuaauuuagaaguaaaauauaa

SEQ ID NO: 192384 - RNA, 24 nt, Artificial Sequence
  Synthetic
aguuaauuuagaaguaaaauauaa

SEQ ID NO: 192385 - RNA, 18 nt, Artificial Sequence
  Synthetic
ucuaaaauggaaauauaa

SEQ ID NO: 192386 - RNA, 19 nt, Artificial Sequence
  Synthetic
cucuaaaauggaaauauaa

SEQ ID NO: 192387 - RNA, 20 nt, Artificial Sequence
  Synthetic
ucucuaaaauggaaauauaa

SEQ ID NO: 192388 - RNA, 21 nt, Artificial Sequence
  Synthetic
uucucuaaaauggaaauauaa

SEQ ID NO: 192389 - RNA, 22 nt, Artificial Sequence
  Synthetic
cuucucuaaaauggaaauauaa

SEQ ID NO: 192390 - RNA, 23 nt, Artificial Sequence
  Synthetic
ucuucucuaaaauggaaauauaa

SEQ ID NO: 192391 - RNA, 24 nt, Artificial Sequence
  Synthetic
cucuucucuaaaauggaaauauaa

SEQ ID NO: 192392 - RNA, 18 nt, Artificial Sequence
  Synthetic
agaacuggugaaauauaa

SEQ ID NO: 192393 - RNA, 19 nt, Artificial Sequence
  Synthetic
aagaacuggugaaauauaa

SEQ ID NO: 192394 - RNA, 20 nt, Artificial Sequence
  Synthetic
uaagaacuggugaaauauaa

SEQ ID NO: 192395 - RNA, 21 nt, Artificial Sequence
  Synthetic
guaagaacuggugaaauauaa

SEQ ID NO: 192396 - RNA, 22 nt, Artificial Sequence
  Synthetic
uguaagaacuggugaaauauaa

SEQ ID NO: 192397 - RNA, 23 nt, Artificial Sequence
  Synthetic
auguaagaacuggugaaauauaa

SEQ ID NO: 192398 - RNA, 24 nt, Artificial Sequence
  Synthetic
uauguaagaacuggugaaauauaa

SEQ ID NO: 192399 - RNA, 18 nt, Artificial Sequence
  Synthetic
uuaagucaaagaauauaa

SEQ ID NO: 192400 - RNA, 19 nt, Artificial Sequence
  Synthetic
uuuaagucaaagaauauaa

SEQ ID NO: 192401 - RNA, 20 nt, Artificial Sequence
  Synthetic
cuuuaagucaaagaauauaa

SEQ ID NO: 192402 - RNA, 21 nt, Artificial Sequence
  Synthetic
ucuuuaagucaaagaauauaa

SEQ ID NO: 192403 - RNA, 22 nt, Artificial Sequence
  Synthetic
uucuuuaagucaaagaauauaa

SEQ ID NO: 192404 - RNA, 23 nt, Artificial Sequence
  Synthetic
uuucuuuaagucaaagaauauaa

SEQ ID NO: 192405 - RNA, 24 nt, Artificial Sequence
  Synthetic
uuuucuuuaagucaaagaauauaa

SEQ ID NO: 192406 - RNA, 18 nt, Artificial Sequence
  Synthetic
uauuuuuauggaauauaa

SEQ ID NO: 192407 - RNA, 19 nt, Artificial Sequence
  Synthetic
cuauuuuuauggaauauaa

SEQ ID NO: 192408 - RNA, 20 nt, Artificial Sequence
  Synthetic
ucuauuuuuauggaauauaa

SEQ ID NO: 192409 - RNA, 21 nt, Artificial Sequence
  Synthetic
aucuauuuuuauggaauauaa

SEQ ID NO: 192410 - RNA, 22 nt, Artificial Sequence
  Synthetic
uaucuauuuuuauggaauauaa

SEQ ID NO: 192411 - RNA, 23 nt, Artificial Sequence
  Synthetic
cuaucuauuuuuauggaauauaa

SEQ ID NO: 192412 - RNA, 24 nt, Artificial Sequence
  Synthetic
ucuaucuauuuuuauggaauauaa

SEQ ID NO: 192413 - RNA, 18 nt, Artificial Sequence
  Synthetic
cuugaggugugaauauaa

SEQ ID NO: 192414 - RNA, 19 nt, Artificial Sequence
  Synthetic
gcuugaggugugaauauaa

SEQ ID NO: 192415 - RNA, 20 nt, Artificial Sequence
  Synthetic
agcuugaggugugaauauaa

SEQ ID NO: 192416 - RNA, 21 nt, Artificial Sequence
  Synthetic
uagcuugaggugugaauauaa

SEQ ID NO: 192417 - RNA, 22 nt, Artificial Sequence
  Synthetic
uuagcuugaggugugaauauaa

SEQ ID NO: 192418 - RNA, 23 nt, Artificial Sequence
  Synthetic
cuuagcuugaggugugaauauaa

SEQ ID NO: 192419 - RNA, 24 nt, Artificial Sequence
  Synthetic
ccuuagcuugaggugugaauauaa

SEQ ID NO: 192420 - RNA, 18 nt, Artificial Sequence
  Synthetic
uggaaccugcuaauauaa

SEQ ID NO: 192421 - RNA, 19 nt, Artificial Sequence
  Synthetic
cuggaaccugcuaauauaa

SEQ ID NO: 192422 - RNA, 20 nt, Artificial Sequence
  Synthetic
ccuggaaccugcuaauauaa

SEQ ID NO: 192423 - RNA, 21 nt, Artificial Sequence
  Synthetic
uccuggaaccugcuaauauaa

SEQ ID NO: 192424 - RNA, 22 nt, Artificial Sequence
  Synthetic
guccuggaaccugcuaauauaa

SEQ ID NO: 192425 - RNA, 23 nt, Artificial Sequence
  Synthetic
aguccuggaaccugcuaauauaa

SEQ ID NO: 192426 - RNA, 24 nt, Artificial Sequence
  Synthetic
uaguccuggaaccugcuaauauaa

SEQ ID NO: 192427 - RNA, 18 nt, Artificial Sequence
  Synthetic
uaaauauuaguaauauaa

SEQ ID NO: 192428 - RNA, 19 nt, Artificial Sequence
  Synthetic
guaaauauuaguaauauaa

SEQ ID NO: 192429 - RNA, 20 nt, Artificial Sequence
  Synthetic
uguaaauauuaguaauauaa

SEQ ID NO: 192430 - RNA, 21 nt, Artificial Sequence
  Synthetic
auguaaauauuaguaauauaa

SEQ ID NO: 192431 - RNA, 22 nt, Artificial Sequence
  Synthetic
uauguaaauauuaguaauauaa

SEQ ID NO: 192432 - RNA, 23 nt, Artificial Sequence
  Synthetic
uuauguaaauauuaguaauauaa

SEQ ID NO: 192433 - RNA, 24 nt, Artificial Sequence
  Synthetic
uuuauguaaauauuaguaauauaa

SEQ ID NO: 192434 - RNA, 18 nt, Artificial Sequence
  Synthetic
uuuagauuucacauauaa

SEQ ID NO: 192435 - RNA, 19 nt, Artificial Sequence
  Synthetic
uuuuagauuucacauauaa

SEQ ID NO: 192436 - RNA, 20 nt, Artificial Sequence
  Synthetic
uuuuuagauuucacauauaa

SEQ ID NO: 192437 - RNA, 21 nt, Artificial Sequence
  Synthetic
auuuuuagauuucacauauaa

SEQ ID NO: 192438 - RNA, 22 nt, Artificial Sequence
  Synthetic
cauuuuuagauuucacauauaa

SEQ ID NO: 192439 - RNA, 23 nt, Artificial Sequence
  Synthetic
acauuuuuagauuucacauauaa

SEQ ID NO: 192440 - RNA, 24 nt, Artificial Sequence
  Synthetic
gacauuuuuagauuucacauauaa

SEQ ID NO: 192441 - RNA, 18 nt, Artificial Sequence
  Synthetic
guuauuauccccauauaa

SEQ ID NO: 192442 - RNA, 19 nt, Artificial Sequence
  Synthetic
uguuauuauccccauauaa

SEQ ID NO: 192443 - RNA, 20 nt, Artificial Sequence
  Synthetic
uuguuauuauccccauauaa

SEQ ID NO: 192444 - RNA, 21 nt, Artificial Sequence
  Synthetic
cuuguuauuauccccauauaa

SEQ ID NO: 192445 - RNA, 22 nt, Artificial Sequence
  Synthetic
ucuuguuauuauccccauauaa

SEQ ID NO: 192446 - RNA, 23 nt, Artificial Sequence
  Synthetic
uucuuguuauuauccccauauaa

SEQ ID NO: 192447 - RNA, 24 nt, Artificial Sequence
  Synthetic
uuucuuguuauuauccccauauaa

SEQ ID NO: 192448 - RNA, 18 nt, Artificial Sequence
  Synthetic
agucuaugugccauauaa

SEQ ID NO: 192449 - RNA, 19 nt, Artificial Sequence
  Synthetic
cagucuaugugccauauaa

SEQ ID NO: 192450 - RNA, 20 nt, Artificial Sequence
  Synthetic
ucagucuaugugccauauaa

SEQ ID NO: 192451 - RNA, 21 nt, Artificial Sequence
  Synthetic
cucagucuaugugccauauaa

SEQ ID NO: 192452 - RNA, 22 nt, Artificial Sequence
  Synthetic
gcucagucuaugugccauauaa

SEQ ID NO: 192453 - RNA, 23 nt, Artificial Sequence
  Synthetic
ggcucagucuaugugccauauaa

SEQ ID NO: 192454 - RNA, 24 nt, Artificial Sequence
  Synthetic
gggcucagucuaugugccauauaa

SEQ ID NO: 192455 - RNA, 18 nt, Artificial Sequence
  Synthetic
aauuuuauaagcauauaa

SEQ ID NO: 192456 - RNA, 19 nt, Artificial Sequence
  Synthetic
uaauuuuauaagcauauaa

SEQ ID NO: 192457 - RNA, 20 nt, Artificial Sequence
  Synthetic
uuaauuuuauaagcauauaa

SEQ ID NO: 192458 - RNA, 21 nt, Artificial Sequence
  Synthetic
cuuaauuuuauaagcauauaa

SEQ ID NO: 192459 - RNA, 22 nt, Artificial Sequence
  Synthetic
acuuaauuuuauaagcauauaa

SEQ ID NO: 192460 - RNA, 23 nt, Artificial Sequence
  Synthetic
aacuuaauuuuauaagcauauaa

SEQ ID NO: 192461 - RNA, 24 nt, Artificial Sequence
  Synthetic
uaacuuaauuuuauaagcauauaa

SEQ ID NO: 192462 - RNA, 18 nt, Artificial Sequence
  Synthetic
uacuaugauagcauauaa

SEQ ID NO: 192463 - RNA, 19 nt, Artificial Sequence
  Synthetic
uuacuaugauagcauauaa

SEQ ID NO: 192464 - RNA, 20 nt, Artificial Sequence
  Synthetic
cuuacuaugauagcauauaa

SEQ ID NO: 192465 - RNA, 21 nt, Artificial Sequence
  Synthetic
ucuuacuaugauagcauauaa

SEQ ID NO: 192466 - RNA, 22 nt, Artificial Sequence
  Synthetic
uucuuacuaugauagcauauaa

SEQ ID NO: 192467 - RNA, 23 nt, Artificial Sequence
  Synthetic
cuucuuacuaugauagcauauaa

SEQ ID NO: 192468 - RNA, 24 nt, Artificial Sequence
  Synthetic
ucuucuuacuaugauagcauauaa

SEQ ID NO: 192469 - RNA, 18 nt, Artificial Sequence
  Synthetic
uaucggguuagcauauaa

SEQ ID NO: 192470 - RNA, 19 nt, Artificial Sequence
  Synthetic
uuaucggguuagcauauaa

SEQ ID NO: 192471 - RNA, 20 nt, Artificial Sequence
  Synthetic
guuaucggguuagcauauaa

SEQ ID NO: 192472 - RNA, 21 nt, Artificial Sequence
  Synthetic
aguuaucggguuagcauauaa

SEQ ID NO: 192473 - RNA, 22 nt, Artificial Sequence
  Synthetic
gaguuaucggguuagcauauaa

SEQ ID NO: 192474 - RNA, 23 nt, Artificial Sequence
  Synthetic
ggaguuaucggguuagcauauaa

SEQ ID NO: 192475 - RNA, 24 nt, Artificial Sequence
  Synthetic
uggaguuaucggguuagcauauaa

SEQ ID NO: 192476 - RNA, 18 nt, Artificial Sequence
  Synthetic
uuuagauacaucauauaa

SEQ ID NO: 192477 - RNA, 19 nt, Artificial Sequence
  Synthetic
cuuuagauacaucauauaa

SEQ ID NO: 192478 - RNA, 20 nt, Artificial Sequence
  Synthetic
acuuuagauacaucauauaa

SEQ ID NO: 192479 - RNA, 21 nt, Artificial Sequence
  Synthetic
uacuuuagauacaucauauaa

SEQ ID NO: 192480 - RNA, 22 nt, Artificial Sequence
  Synthetic
cuacuuuagauacaucauauaa

SEQ ID NO: 192481 - RNA, 23 nt, Artificial Sequence
  Synthetic
acuacuuuagauacaucauauaa

SEQ ID NO: 192482 - RNA, 24 nt, Artificial Sequence
  Synthetic
aacuacuuuagauacaucauauaa

SEQ ID NO: 192483 - RNA, 18 nt, Artificial Sequence
  Synthetic
accacaggguucauauaa

SEQ ID NO: 192484 - RNA, 19 nt, Artificial Sequence
  Synthetic
aaccacaggguucauauaa

SEQ ID NO: 192485 - RNA, 20 nt, Artificial Sequence
  Synthetic
uaaccacaggguucauauaa

SEQ ID NO: 192486 - RNA, 21 nt, Artificial Sequence
  Synthetic
cuaaccacaggguucauauaa

SEQ ID NO: 192487 - RNA, 22 nt, Artificial Sequence
  Synthetic
ucuaaccacaggguucauauaa

SEQ ID NO: 192488 - RNA, 23 nt, Artificial Sequence
  Synthetic
aucuaaccacaggguucauauaa

SEQ ID NO: 192489 - RNA, 24 nt, Artificial Sequence
  Synthetic
aaucuaaccacaggguucauauaa

SEQ ID NO: 192490 - RNA, 18 nt, Artificial Sequence
  Synthetic
agcaucuaauagauauaa

SEQ ID NO: 192491 - RNA, 19 nt, Artificial Sequence
  Synthetic
uagcaucuaauagauauaa

SEQ ID NO: 192492 - RNA, 20 nt, Artificial Sequence
  Synthetic
auagcaucuaauagauauaa

SEQ ID NO: 192493 - RNA, 21 nt, Artificial Sequence
  Synthetic
aauagcaucuaauagauauaa

SEQ ID NO: 192494 - RNA, 22 nt, Artificial Sequence
  Synthetic
aaauagcaucuaauagauauaa

SEQ ID NO: 192495 - RNA, 23 nt, Artificial Sequence
  Synthetic
aaaauagcaucuaauagauauaa

SEQ ID NO: 192496 - RNA, 24 nt, Artificial Sequence
  Synthetic
aaaaauagcaucuaauagauauaa

SEQ ID NO: 192497 - RNA, 18 nt, Artificial Sequence
  Synthetic
uuuuacacuuagauauaa

SEQ ID NO: 192498 - RNA, 19 nt, Artificial Sequence
  Synthetic
auuuuacacuuagauauaa

SEQ ID NO: 192499 - RNA, 20 nt, Artificial Sequence
  Synthetic
cauuuuacacuuagauauaa

SEQ ID NO: 192500 - RNA, 21 nt, Artificial Sequence
  Synthetic
gcauuuuacacuuagauauaa

SEQ ID NO: 192501 - RNA, 22 nt, Artificial Sequence
  Synthetic
ugcauuuuacacuuagauauaa

SEQ ID NO: 192502 - RNA, 23 nt, Artificial Sequence
  Synthetic
cugcauuuuacacuuagauauaa

SEQ ID NO: 192503 - RNA, 24 nt, Artificial Sequence
  Synthetic
ucugcauuuuacacuuagauauaa

SEQ ID NO: 192504 - RNA, 18 nt, Artificial Sequence
  Synthetic
cugaaccacgugauauaa

SEQ ID NO: 192505 - RNA, 19 nt, Artificial Sequence
  Synthetic
ccugaaccacgugauauaa

SEQ ID NO: 192506 - RNA, 20 nt, Artificial Sequence
  Synthetic
uccugaaccacgugauauaa

SEQ ID NO: 192507 - RNA, 21 nt, Artificial Sequence
  Synthetic
guccugaaccacgugauauaa

SEQ ID NO: 192508 - RNA, 22 nt, Artificial Sequence
  Synthetic
gguccugaaccacgugauauaa

SEQ ID NO: 192509 - RNA, 23 nt, Artificial Sequence
  Synthetic
agguccugaaccacgugauauaa

SEQ ID NO: 192510 - RNA, 24 nt, Artificial Sequence
  Synthetic
cagguccugaaccacgugauauaa

SEQ ID NO: 192511 - RNA, 18 nt, Artificial Sequence
  Synthetic
uuagagugggugauauaa

SEQ ID NO: 192512 - RNA, 19 nt, Artificial Sequence
  Synthetic
guuagagugggugauauaa

SEQ ID NO: 192513 - RNA, 20 nt, Artificial Sequence
  Synthetic
gguuagagugggugauauaa

SEQ ID NO: 192514 - RNA, 21 nt, Artificial Sequence
  Synthetic
agguuagagugggugauauaa

SEQ ID NO: 192515 - RNA, 22 nt, Artificial Sequence
  Synthetic
aagguuagagugggugauauaa

SEQ ID NO: 192516 - RNA, 23 nt, Artificial Sequence
  Synthetic
aaagguuagagugggugauauaa

SEQ ID NO: 192517 - RNA, 24 nt, Artificial Sequence
  Synthetic
caaagguuagagugggugauauaa

SEQ ID NO: 192518 - RNA, 18 nt, Artificial Sequence
  Synthetic
agggaggguaauauauaa

SEQ ID NO: 192519 - RNA, 19 nt, Artificial Sequence
  Synthetic
aagggaggguaauauauaa

SEQ ID NO: 192520 - RNA, 20 nt, Artificial Sequence
  Synthetic
aaagggaggguaauauauaa

SEQ ID NO: 192521 - RNA, 21 nt, Artificial Sequence
  Synthetic
aaaagggaggguaauauauaa

SEQ ID NO: 192522 - RNA, 22 nt, Artificial Sequence
  Synthetic
gaaaagggaggguaauauauaa

SEQ ID NO: 192523 - RNA, 23 nt, Artificial Sequence
  Synthetic
ugaaaagggaggguaauauauaa

SEQ ID NO: 192524 - RNA, 24 nt, Artificial Sequence
  Synthetic
augaaaagggaggguaauauauaa

SEQ ID NO: 192525 - RNA, 18 nt, Artificial Sequence
  Synthetic
agaaguagacauauauaa

SEQ ID NO: 192526 - RNA, 19 nt, Artificial Sequence
  Synthetic
uagaaguagacauauauaa

SEQ ID NO: 192527 - RNA, 20 nt, Artificial Sequence
  Synthetic
auagaaguagacauauauaa

SEQ ID NO: 192528 - RNA, 21 nt, Artificial Sequence
  Synthetic
cauagaaguagacauauauaa

SEQ ID NO: 192529 - RNA, 22 nt, Artificial Sequence
  Synthetic
acauagaaguagacauauauaa

SEQ ID NO: 192530 - RNA, 23 nt, Artificial Sequence
  Synthetic
gacauagaaguagacauauauaa

SEQ ID NO: 192531 - RNA, 24 nt, Artificial Sequence
  Synthetic
agacauagaaguagacauauauaa

SEQ ID NO: 192532 - RNA, 18 nt, Artificial Sequence
  Synthetic
aagauacacacuauauaa

SEQ ID NO: 192533 - RNA, 19 nt, Artificial Sequence
  Synthetic
aaagauacacacuauauaa

SEQ ID NO: 192534 - RNA, 20 nt, Artificial Sequence
  Synthetic
aaaagauacacacuauauaa

SEQ ID NO: 192535 - RNA, 21 nt, Artificial Sequence
  Synthetic
uaaaagauacacacuauauaa

SEQ ID NO: 192536 - RNA, 22 nt, Artificial Sequence
  Synthetic
cuaaaagauacacacuauauaa

SEQ ID NO: 192537 - RNA, 23 nt, Artificial Sequence
  Synthetic
acuaaaagauacacacuauauaa

SEQ ID NO: 192538 - RNA, 24 nt, Artificial Sequence
  Synthetic
aacuaaaagauacacacuauauaa

SEQ ID NO: 192539 - RNA, 18 nt, Artificial Sequence
  Synthetic
ugauaguacaguauauaa

SEQ ID NO: 192540 - RNA, 19 nt, Artificial Sequence
  Synthetic
gugauaguacaguauauaa

SEQ ID NO: 192541 - RNA, 20 nt, Artificial Sequence
  Synthetic
ggugauaguacaguauauaa

SEQ ID NO: 192542 - RNA, 21 nt, Artificial Sequence
  Synthetic
uggugauaguacaguauauaa

SEQ ID NO: 192543 - RNA, 22 nt, Artificial Sequence
  Synthetic
guggugauaguacaguauauaa

SEQ ID NO: 192544 - RNA, 23 nt, Artificial Sequence
  Synthetic
aguggugauaguacaguauauaa

SEQ ID NO: 192545 - RNA, 24 nt, Artificial Sequence
  Synthetic
uaguggugauaguacaguauauaa

SEQ ID NO: 192546 - RNA, 18 nt, Artificial Sequence
  Synthetic
auacaauguuguauauaa

SEQ ID NO: 192547 - RNA, 19 nt, Artificial Sequence
  Synthetic
cauacaauguuguauauaa

SEQ ID NO: 192548 - RNA, 20 nt, Artificial Sequence
  Synthetic
acauacaauguuguauauaa

SEQ ID NO: 192549 - RNA, 21 nt, Artificial Sequence
  Synthetic
uacauacaauguuguauauaa

SEQ ID NO: 192550 - RNA, 22 nt, Artificial Sequence
  Synthetic
uuacauacaauguuguauauaa

SEQ ID NO: 192551 - RNA, 23 nt, Artificial Sequence
  Synthetic
auuacauacaauguuguauauaa

SEQ ID NO: 192552 - RNA, 24 nt, Artificial Sequence
  Synthetic
cauuacauacaauguuguauauaa

SEQ ID NO: 192553 - RNA, 18 nt, Artificial Sequence
  Synthetic
ugaguaguaguuauauaa

SEQ ID NO: 192554 - RNA, 19 nt, Artificial Sequence
  Synthetic
augaguaguaguuauauaa

SEQ ID NO: 192555 - RNA, 20 nt, Artificial Sequence
  Synthetic
gaugaguaguaguuauauaa

SEQ ID NO: 192556 - RNA, 21 nt, Artificial Sequence
  Synthetic
ugaugaguaguaguuauauaa

SEQ ID NO: 192557 - RNA, 22 nt, Artificial Sequence
  Synthetic
augaugaguaguaguuauauaa

SEQ ID NO: 192558 - RNA, 23 nt, Artificial Sequence
  Synthetic
aaugaugaguaguaguuauauaa

SEQ ID NO: 192559 - RNA, 24 nt, Artificial Sequence
  Synthetic
aaaugaugaguaguaguuauauaa

SEQ ID NO: 192560 - RNA, 18 nt, Artificial Sequence
  Synthetic
ucuagaucuuuuauauaa

SEQ ID NO: 192561 - RNA, 19 nt, Artificial Sequence
  Synthetic
uucuagaucuuuuauauaa

SEQ ID NO: 192562 - RNA, 20 nt, Artificial Sequence
  Synthetic
auucuagaucuuuuauauaa

SEQ ID NO: 192563 - RNA, 21 nt, Artificial Sequence
  Synthetic
uauucuagaucuuuuauauaa

SEQ ID NO: 192564 - RNA, 22 nt, Artificial Sequence
  Synthetic
cuauucuagaucuuuuauauaa

SEQ ID NO: 192565 - RNA, 23 nt, Artificial Sequence
  Synthetic
gcuauucuagaucuuuuauauaa

SEQ ID NO: 192566 - RNA, 24 nt, Artificial Sequence
  Synthetic
ggcuauucuagaucuuuuauauaa

SEQ ID NO: 192567 - RNA, 18 nt, Artificial Sequence
  Synthetic
caaaauuucaaacuauaa

SEQ ID NO: 192568 - RNA, 19 nt, Artificial Sequence
  Synthetic
acaaaauuucaaacuauaa

SEQ ID NO: 192569 - RNA, 20 nt, Artificial Sequence
  Synthetic
aacaaaauuucaaacuauaa

SEQ ID NO: 192570 - RNA, 21 nt, Artificial Sequence
  Synthetic
uaacaaaauuucaaacuauaa

SEQ ID NO: 192571 - RNA, 22 nt, Artificial Sequence
  Synthetic
guaacaaaauuucaaacuauaa

SEQ ID NO: 192572 - RNA, 23 nt, Artificial Sequence
  Synthetic
uguaacaaaauuucaaacuauaa

SEQ ID NO: 192573 - RNA, 24 nt, Artificial Sequence
  Synthetic
auguaacaaaauuucaaacuauaa

SEQ ID NO: 192574 - RNA, 18 nt, Artificial Sequence
  Synthetic
aaugggcagaaacuauaa

SEQ ID NO: 192575 - RNA, 19 nt, Artificial Sequence
  Synthetic
caaugggcagaaacuauaa

SEQ ID NO: 192576 - RNA, 20 nt, Artificial Sequence
  Synthetic
acaaugggcagaaacuauaa

SEQ ID NO: 192577 - RNA, 21 nt, Artificial Sequence
  Synthetic
aacaaugggcagaaacuauaa

SEQ ID NO: 192578 - RNA, 22 nt, Artificial Sequence
  Synthetic
uaacaaugggcagaaacuauaa

SEQ ID NO: 192579 - RNA, 23 nt, Artificial Sequence
  Synthetic
uuaacaaugggcagaaacuauaa

SEQ ID NO: 192580 - RNA, 24 nt, Artificial Sequence
  Synthetic
uuuaacaaugggcagaaacuauaa

SEQ ID NO: 192581 - RNA, 18 nt, Artificial Sequence
  Synthetic
cacuauuuccaccuauaa

SEQ ID NO: 192582 - RNA, 19 nt, Artificial Sequence
  Synthetic
ucacuauuuccaccuauaa

SEQ ID NO: 192583 - RNA, 20 nt, Artificial Sequence
  Synthetic
cucacuauuuccaccuauaa

SEQ ID NO: 192584 - RNA, 21 nt, Artificial Sequence
  Synthetic
ccucacuauuuccaccuauaa

SEQ ID NO: 192585 - RNA, 22 nt, Artificial Sequence
  Synthetic
uccucacuauuuccaccuauaa

SEQ ID NO: 192586 - RNA, 23 nt, Artificial Sequence
  Synthetic
auccucacuauuuccaccuauaa

SEQ ID NO: 192587 - RNA, 24 nt, Artificial Sequence
  Synthetic
cauccucacuauuuccaccuauaa

SEQ ID NO: 192588 - RNA, 18 nt, Artificial Sequence
  Synthetic
cuauuuacgccccuauaa

SEQ ID NO: 192589 - RNA, 19 nt, Artificial Sequence
  Synthetic
ccuauuuacgccccuauaa

SEQ ID NO: 192590 - RNA, 20 nt, Artificial Sequence
  Synthetic
gccuauuuacgccccuauaa

SEQ ID NO: 192591 - RNA, 21 nt, Artificial Sequence
  Synthetic
ugccuauuuacgccccuauaa

SEQ ID NO: 192592 - RNA, 22 nt, Artificial Sequence
  Synthetic
uugccuauuuacgccccuauaa

SEQ ID NO: 192593 - RNA, 23 nt, Artificial Sequence
  Synthetic
auugccuauuuacgccccuauaa

SEQ ID NO: 192594 - RNA, 24 nt, Artificial Sequence
  Synthetic
gauugccuauuuacgccccuauaa

SEQ ID NO: 192595 - RNA, 18 nt, Artificial Sequence
  Synthetic
uagaagaguccccuauaa

SEQ ID NO: 192596 - RNA, 19 nt, Artificial Sequence
  Synthetic
guagaagaguccccuauaa

SEQ ID NO: 192597 - RNA, 20 nt, Artificial Sequence
  Synthetic
aguagaagaguccccuauaa

SEQ ID NO: 192598 - RNA, 21 nt, Artificial Sequence
  Synthetic
caguagaagaguccccuauaa

SEQ ID NO: 192599 - RNA, 22 nt, Artificial Sequence
  Synthetic
acaguagaagaguccccuauaa

SEQ ID NO: 192600 - RNA, 23 nt, Artificial Sequence
  Synthetic
cacaguagaagaguccccuauaa

SEQ ID NO: 192601 - RNA, 24 nt, Artificial Sequence
  Synthetic
gcacaguagaagaguccccuauaa

SEQ ID NO: 192602 - RNA, 18 nt, Artificial Sequence
  Synthetic
aaaacugaugagcuauaa

SEQ ID NO: 192603 - RNA, 19 nt, Artificial Sequence
  Synthetic
aaaaacugaugagcuauaa

SEQ ID NO: 192604 - RNA, 20 nt, Artificial Sequence
  Synthetic
aaaaaacugaugagcuauaa

SEQ ID NO: 192605 - RNA, 21 nt, Artificial Sequence
  Synthetic
caaaaaacugaugagcuauaa

SEQ ID NO: 192606 - RNA, 22 nt, Artificial Sequence
  Synthetic
acaaaaaacugaugagcuauaa

SEQ ID NO: 192607 - RNA, 23 nt, Artificial Sequence
  Synthetic
aacaaaaaacugaugagcuauaa

SEQ ID NO: 192608 - RNA, 24 nt, Artificial Sequence
  Synthetic
aaacaaaaaacugaugagcuauaa

SEQ ID NO: 192609 - RNA, 18 nt, Artificial Sequence
  Synthetic
aauggaaggaggcuauaa

SEQ ID NO: 192610 - RNA, 19 nt, Artificial Sequence
  Synthetic
caauggaaggaggcuauaa

SEQ ID NO: 192611 - RNA, 20 nt, Artificial Sequence
  Synthetic
ucaauggaaggaggcuauaa

SEQ ID NO: 192612 - RNA, 21 nt, Artificial Sequence
  Synthetic
aucaauggaaggaggcuauaa

SEQ ID NO: 192613 - RNA, 22 nt, Artificial Sequence
  Synthetic
aaucaauggaaggaggcuauaa

SEQ ID NO: 192614 - RNA, 23 nt, Artificial Sequence
  Synthetic
gaaucaauggaaggaggcuauaa

SEQ ID NO: 192615 - RNA, 24 nt, Artificial Sequence
  Synthetic
ugaaucaauggaaggaggcuauaa

SEQ ID NO: 192616 - RNA, 18 nt, Artificial Sequence
  Synthetic
cuuacguggaggcuauaa

SEQ ID NO: 192617 - RNA, 19 nt, Artificial Sequence
  Synthetic
acuuacguggaggcuauaa

SEQ ID NO: 192618 - RNA, 20 nt, Artificial Sequence
  Synthetic
aacuuacguggaggcuauaa

SEQ ID NO: 192619 - RNA, 21 nt, Artificial Sequence
  Synthetic
caacuuacguggaggcuauaa

SEQ ID NO: 192620 - RNA, 22 nt, Artificial Sequence
  Synthetic
gcaacuuacguggaggcuauaa

SEQ ID NO: 192621 - RNA, 23 nt, Artificial Sequence
  Synthetic
ugcaacuuacguggaggcuauaa

SEQ ID NO: 192622 - RNA, 24 nt, Artificial Sequence
  Synthetic
augcaacuuacguggaggcuauaa

SEQ ID NO: 192623 - RNA, 18 nt, Artificial Sequence
  Synthetic
agaaaucauuggcuauaa

SEQ ID NO: 192624 - RNA, 19 nt, Artificial Sequence
  Synthetic
aagaaaucauuggcuauaa

SEQ ID NO: 192625 - RNA, 20 nt, Artificial Sequence
  Synthetic
aaagaaaucauuggcuauaa

SEQ ID NO: 192626 - RNA, 21 nt, Artificial Sequence
  Synthetic
caaagaaaucauuggcuauaa

SEQ ID NO: 192627 - RNA, 22 nt, Artificial Sequence
  Synthetic
acaaagaaaucauuggcuauaa

SEQ ID NO: 192628 - RNA, 23 nt, Artificial Sequence
  Synthetic
uacaaagaaaucauuggcuauaa

SEQ ID NO: 192629 - RNA, 24 nt, Artificial Sequence
  Synthetic
cuacaaagaaaucauuggcuauaa

SEQ ID NO: 192630 - RNA, 18 nt, Artificial Sequence
  Synthetic
cuguuccagcugcuauaa

SEQ ID NO: 192631 - RNA, 19 nt, Artificial Sequence
  Synthetic
ucuguuccagcugcuauaa

SEQ ID NO: 192632 - RNA, 20 nt, Artificial Sequence
  Synthetic
gucuguuccagcugcuauaa

SEQ ID NO: 192633 - RNA, 21 nt, Artificial Sequence
  Synthetic
agucuguuccagcugcuauaa

SEQ ID NO: 192634 - RNA, 22 nt, Artificial Sequence
  Synthetic
uagucuguuccagcugcuauaa

SEQ ID NO: 192635 - RNA, 23 nt, Artificial Sequence
  Synthetic
uuagucuguuccagcugcuauaa

SEQ ID NO: 192636 - RNA, 24 nt, Artificial Sequence
  Synthetic
cuuagucuguuccagcugcuauaa

SEQ ID NO: 192637 - RNA, 18 nt, Artificial Sequence
  Synthetic
cuuguuuuuugucuauaa

SEQ ID NO: 192638 - RNA, 19 nt, Artificial Sequence
  Synthetic
gcuuguuuuuugucuauaa

SEQ ID NO: 192639 - RNA, 20 nt, Artificial Sequence
  Synthetic
ugcuuguuuuuugucuauaa

SEQ ID NO: 192640 - RNA, 21 nt, Artificial Sequence
  Synthetic
uugcuuguuuuuugucuauaa

SEQ ID NO: 192641 - RNA, 22 nt, Artificial Sequence
  Synthetic
uuugcuuguuuuuugucuauaa

SEQ ID NO: 192642 - RNA, 23 nt, Artificial Sequence
  Synthetic
uuuugcuuguuuuuugucuauaa

SEQ ID NO: 192643 - RNA, 24 nt, Artificial Sequence
  Synthetic
uuuuugcuuguuuuuugucuauaa

SEQ ID NO: 192644 - RNA, 18 nt, Artificial Sequence
  Synthetic
agcuuuauugaaguauaa

SEQ ID NO: 192645 - RNA, 19 nt, Artificial Sequence
  Synthetic
uagcuuuauugaaguauaa

SEQ ID NO: 192646 - RNA, 20 nt, Artificial Sequence
  Synthetic
cuagcuuuauugaaguauaa

SEQ ID NO: 192647 - RNA, 21 nt, Artificial Sequence
  Synthetic
ccuagcuuuauugaaguauaa

SEQ ID NO: 192648 - RNA, 22 nt, Artificial Sequence
  Synthetic
accuagcuuuauugaaguauaa

SEQ ID NO: 192649 - RNA, 23 nt, Artificial Sequence
  Synthetic
uaccuagcuuuauugaaguauaa

SEQ ID NO: 192650 - RNA, 24 nt, Artificial Sequence
  Synthetic
uuaccuagcuuuauugaaguauaa

SEQ ID NO: 192651 - RNA, 18 nt, Artificial Sequence
  Synthetic
gauauuauucuaguauaa

SEQ ID NO: 192652 - RNA, 19 nt, Artificial Sequence
  Synthetic
ugauauuauucuaguauaa

SEQ ID NO: 192653 - RNA, 20 nt, Artificial Sequence
  Synthetic
augauauuauucuaguauaa

SEQ ID NO: 192654 - RNA, 21 nt, Artificial Sequence
  Synthetic
aaugauauuauucuaguauaa

SEQ ID NO: 192655 - RNA, 22 nt, Artificial Sequence
  Synthetic
caaugauauuauucuaguauaa

SEQ ID NO: 192656 - RNA, 23 nt, Artificial Sequence
  Synthetic
acaaugauauuauucuaguauaa

SEQ ID NO: 192657 - RNA, 24 nt, Artificial Sequence
  Synthetic
aacaaugauauuauucuaguauaa

SEQ ID NO: 192658 - RNA, 18 nt, Artificial Sequence
  Synthetic
ggguagacguagguauaa

SEQ ID NO: 192659 - RNA, 19 nt, Artificial Sequence
  Synthetic
gggguagacguagguauaa

SEQ ID NO: 192660 - RNA, 20 nt, Artificial Sequence
  Synthetic
agggguagacguagguauaa

SEQ ID NO: 192661 - RNA, 21 nt, Artificial Sequence
  Synthetic
cagggguagacguagguauaa

SEQ ID NO: 192662 - RNA, 22 nt, Artificial Sequence
  Synthetic
acagggguagacguagguauaa

SEQ ID NO: 192663 - RNA, 23 nt, Artificial Sequence
  Synthetic
uacagggguagacguagguauaa

SEQ ID NO: 192664 - RNA, 24 nt, Artificial Sequence
  Synthetic
cuacagggguagacguagguauaa

SEQ ID NO: 192665 - RNA, 18 nt, Artificial Sequence
  Synthetic
uuaaagaaaaugguauaa

SEQ ID NO: 192666 - RNA, 19 nt, Artificial Sequence
  Synthetic
uuuaaagaaaaugguauaa

SEQ ID NO: 192667 - RNA, 20 nt, Artificial Sequence
  Synthetic
uuuuaaagaaaaugguauaa

SEQ ID NO: 192668 - RNA, 21 nt, Artificial Sequence
  Synthetic
uuuuuaaagaaaaugguauaa

SEQ ID NO: 192669 - RNA, 22 nt, Artificial Sequence
  Synthetic
uuuuuuaaagaaaaugguauaa

SEQ ID NO: 192670 - RNA, 23 nt, Artificial Sequence
  Synthetic
uuuuuuuaaagaaaaugguauaa

SEQ ID NO: 192671 - RNA, 24 nt, Artificial Sequence
  Synthetic
cuuuuuuuaaagaaaaugguauaa

SEQ ID NO: 192672 - RNA, 18 nt, Artificial Sequence
  Synthetic
acuggaguauugguauaa

SEQ ID NO: 192673 - RNA, 19 nt, Artificial Sequence
  Synthetic
aacuggaguauugguauaa

SEQ ID NO: 192674 - RNA, 20 nt, Artificial Sequence
  Synthetic
aaacuggaguauugguauaa

SEQ ID NO: 192675 - RNA, 21 nt, Artificial Sequence
  Synthetic
uaaacuggaguauugguauaa

SEQ ID NO: 192676 - RNA, 22 nt, Artificial Sequence
  Synthetic
uuaaacuggaguauugguauaa

SEQ ID NO: 192677 - RNA, 23 nt, Artificial Sequence
  Synthetic
cuuaaacuggaguauugguauaa

SEQ ID NO: 192678 - RNA, 24 nt, Artificial Sequence
  Synthetic
gcuuaaacuggaguauugguauaa

SEQ ID NO: 192679 - RNA, 18 nt, Artificial Sequence
  Synthetic
aaaaauuauaauguauaa

SEQ ID NO: 192680 - RNA, 19 nt, Artificial Sequence
  Synthetic
uaaaaauuauaauguauaa

SEQ ID NO: 192681 - RNA, 20 nt, Artificial Sequence
  Synthetic
auaaaaauuauaauguauaa

SEQ ID NO: 192682 - RNA, 21 nt, Artificial Sequence
  Synthetic
cauaaaaauuauaauguauaa

SEQ ID NO: 192683 - RNA, 22 nt, Artificial Sequence
  Synthetic
gcauaaaaauuauaauguauaa

SEQ ID NO: 192684 - RNA, 23 nt, Artificial Sequence
  Synthetic
ugcauaaaaauuauaauguauaa

SEQ ID NO: 192685 - RNA, 24 nt, Artificial Sequence
  Synthetic
augcauaaaaauuauaauguauaa

SEQ ID NO: 192686 - RNA, 18 nt, Artificial Sequence
  Synthetic
ugugggccauauguauaa

SEQ ID NO: 192687 - RNA, 19 nt, Artificial Sequence
  Synthetic
augugggccauauguauaa

SEQ ID NO: 192688 - RNA, 20 nt, Artificial Sequence
  Synthetic
gaugugggccauauguauaa

SEQ ID NO: 192689 - RNA, 21 nt, Artificial Sequence
  Synthetic
ggaugugggccauauguauaa

SEQ ID NO: 192690 - RNA, 22 nt, Artificial Sequence
  Synthetic
aggaugugggccauauguauaa

SEQ ID NO: 192691 - RNA, 23 nt, Artificial Sequence
  Synthetic
gaggaugugggccauauguauaa

SEQ ID NO: 192692 - RNA, 24 nt, Artificial Sequence
  Synthetic
ugaggaugugggccauauguauaa

SEQ ID NO: 192693 - RNA, 18 nt, Artificial Sequence
  Synthetic
uggugaaugacuguauaa

SEQ ID NO: 192694 - RNA, 19 nt, Artificial Sequence
  Synthetic
guggugaaugacuguauaa

SEQ ID NO: 192695 - RNA, 20 nt, Artificial Sequence
  Synthetic
uguggugaaugacuguauaa

SEQ ID NO: 192696 - RNA, 21 nt, Artificial Sequence
  Synthetic
auguggugaaugacuguauaa

SEQ ID NO: 192697 - RNA, 22 nt, Artificial Sequence
  Synthetic
aauguggugaaugacuguauaa

SEQ ID NO: 192698 - RNA, 23 nt, Artificial Sequence
  Synthetic
aaauguggugaaugacuguauaa

SEQ ID NO: 192699 - RNA, 24 nt, Artificial Sequence
  Synthetic
gaaauguggugaaugacuguauaa

SEQ ID NO: 192700 - RNA, 18 nt, Artificial Sequence
  Synthetic
guucacccuauuguauaa

SEQ ID NO: 192701 - RNA, 19 nt, Artificial Sequence
  Synthetic
uguucacccuauuguauaa

SEQ ID NO: 192702 - RNA, 20 nt, Artificial Sequence
  Synthetic
cuguucacccuauuguauaa

SEQ ID NO: 192703 - RNA, 21 nt, Artificial Sequence
  Synthetic
acuguucacccuauuguauaa

SEQ ID NO: 192704 - RNA, 22 nt, Artificial Sequence
  Synthetic
cacuguucacccuauuguauaa

SEQ ID NO: 192705 - RNA, 23 nt, Artificial Sequence
  Synthetic
ucacuguucacccuauuguauaa

SEQ ID NO: 192706 - RNA, 24 nt, Artificial Sequence
  Synthetic
aucacuguucacccuauuguauaa

SEQ ID NO: 192707 - RNA, 18 nt, Artificial Sequence
  Synthetic
uuuuaaaaauuuguauaa

SEQ ID NO: 192708 - RNA, 19 nt, Artificial Sequence
  Synthetic
uuuuuaaaaauuuguauaa

SEQ ID NO: 192709 - RNA, 20 nt, Artificial Sequence
  Synthetic
cuuuuuaaaaauuuguauaa

SEQ ID NO: 192710 - RNA, 21 nt, Artificial Sequence
  Synthetic
ucuuuuuaaaaauuuguauaa

SEQ ID NO: 192711 - RNA, 22 nt, Artificial Sequence
  Synthetic
gucuuuuuaaaaauuuguauaa

SEQ ID NO: 192712 - RNA, 23 nt, Artificial Sequence
  Synthetic
ugucuuuuuaaaaauuuguauaa

SEQ ID NO: 192713 - RNA, 24 nt, Artificial Sequence
  Synthetic
uugucuuuuuaaaaauuuguauaa

SEQ ID NO: 192714 - RNA, 18 nt, Artificial Sequence
  Synthetic
guuagugucuuuguauaa

SEQ ID NO: 192715 - RNA, 19 nt, Artificial Sequence
  Synthetic
aguuagugucuuuguauaa

SEQ ID NO: 192716 - RNA, 20 nt, Artificial Sequence
  Synthetic
uaguuagugucuuuguauaa

SEQ ID NO: 192717 - RNA, 21 nt, Artificial Sequence
  Synthetic
auaguuagugucuuuguauaa

SEQ ID NO: 192718 - RNA, 22 nt, Artificial Sequence
  Synthetic
aauaguuagugucuuuguauaa

SEQ ID NO: 192719 - RNA, 23 nt, Artificial Sequence
  Synthetic
gaauaguuagugucuuuguauaa

SEQ ID NO: 192720 - RNA, 24 nt, Artificial Sequence
  Synthetic
agaauaguuagugucuuuguauaa

SEQ ID NO: 192721 - RNA, 18 nt, Artificial Sequence
  Synthetic
cagcaaaagaaauuauaa

SEQ ID NO: 192722 - RNA, 19 nt, Artificial Sequence
  Synthetic
ccagcaaaagaaauuauaa

SEQ ID NO: 192723 - RNA, 20 nt, Artificial Sequence
  Synthetic
accagcaaaagaaauuauaa

SEQ ID NO: 192724 - RNA, 21 nt, Artificial Sequence
  Synthetic
aaccagcaaaagaaauuauaa

SEQ ID NO: 192725 - RNA, 22 nt, Artificial Sequence
  Synthetic
aaaccagcaaaagaaauuauaa

SEQ ID NO: 192726 - RNA, 23 nt, Artificial Sequence
  Synthetic
aaaaccagcaaaagaaauuauaa

SEQ ID NO: 192727 - RNA, 24 nt, Artificial Sequence
  Synthetic
gaaaaccagcaaaagaaauuauaa

SEQ ID NO: 192728 - RNA, 18 nt, Artificial Sequence
  Synthetic
auaauaugcacauuauaa

SEQ ID NO: 192729 - RNA, 19 nt, Artificial Sequence
  Synthetic
aauaauaugcacauuauaa

SEQ ID NO: 192730 - RNA, 20 nt, Artificial Sequence
  Synthetic
aaauaauaugcacauuauaa

SEQ ID NO: 192731 - RNA, 21 nt, Artificial Sequence
  Synthetic
aaaauaauaugcacauuauaa

SEQ ID NO: 192732 - RNA, 22 nt, Artificial Sequence
  Synthetic
aaaaauaauaugcacauuauaa

SEQ ID NO: 192733 - RNA, 23 nt, Artificial Sequence
  Synthetic
aaaaaauaauaugcacauuauaa

SEQ ID NO: 192734 - RNA, 24 nt, Artificial Sequence
  Synthetic
caaaaaauaauaugcacauuauaa

SEQ ID NO: 192735 - RNA, 18 nt, Artificial Sequence
  Synthetic
uuagggccuugauuauaa

SEQ ID NO: 192736 - RNA, 19 nt, Artificial Sequence
  Synthetic
cuuagggccuugauuauaa

SEQ ID NO: 192737 - RNA, 20 nt, Artificial Sequence
  Synthetic
gcuuagggccuugauuauaa

SEQ ID NO: 192738 - RNA, 21 nt, Artificial Sequence
  Synthetic
ugcuuagggccuugauuauaa

SEQ ID NO: 192739 - RNA, 22 nt, Artificial Sequence
  Synthetic
cugcuuagggccuugauuauaa

SEQ ID NO: 192740 - RNA, 23 nt, Artificial Sequence
  Synthetic
gcugcuuagggccuugauuauaa

SEQ ID NO: 192741 - RNA, 24 nt, Artificial Sequence
  Synthetic
agcugcuuagggccuugauuauaa

SEQ ID NO: 192742 - RNA, 18 nt, Artificial Sequence
  Synthetic
ccacauccaauauuauaa

SEQ ID NO: 192743 - RNA, 19 nt, Artificial Sequence
  Synthetic
accacauccaauauuauaa

SEQ ID NO: 192744 - RNA, 20 nt, Artificial Sequence
  Synthetic
caccacauccaauauuauaa

SEQ ID NO: 192745 - RNA, 21 nt, Artificial Sequence
  Synthetic
ucaccacauccaauauuauaa

SEQ ID NO: 192746 - RNA, 22 nt, Artificial Sequence
  Synthetic
aucaccacauccaauauuauaa

SEQ ID NO: 192747 - RNA, 23 nt, Artificial Sequence
  Synthetic
caucaccacauccaauauuauaa

SEQ ID NO: 192748 - RNA, 24 nt, Artificial Sequence
  Synthetic
ucaucaccacauccaauauuauaa

SEQ ID NO: 192749 - RNA, 18 nt, Artificial Sequence
  Synthetic
uuauguauaauauuauaa

SEQ ID NO: 192750 - RNA, 19 nt, Artificial Sequence
  Synthetic
auuauguauaauauuauaa

SEQ ID NO: 192751 - RNA, 20 nt, Artificial Sequence
  Synthetic
uauuauguauaauauuauaa

SEQ ID NO: 192752 - RNA, 21 nt, Artificial Sequence
  Synthetic
auauuauguauaauauuauaa

SEQ ID NO: 192753 - RNA, 22 nt, Artificial Sequence
  Synthetic
gauauuauguauaauauuauaa

SEQ ID NO: 192754 - RNA, 23 nt, Artificial Sequence
  Synthetic
ugauauuauguauaauauuauaa

SEQ ID NO: 192755 - RNA, 24 nt, Artificial Sequence
  Synthetic
gugauauuauguauaauauuauaa

SEQ ID NO: 192756 - RNA, 18 nt, Artificial Sequence
  Synthetic
uuuuucaugcuauuauaa

SEQ ID NO: 192757 - RNA, 19 nt, Artificial Sequence
  Synthetic
uuuuuucaugcuauuauaa

SEQ ID NO: 192758 - RNA, 20 nt, Artificial Sequence
  Synthetic
auuuuuucaugcuauuauaa

SEQ ID NO: 192759 - RNA, 21 nt, Artificial Sequence
  Synthetic
uauuuuuucaugcuauuauaa

SEQ ID NO: 192760 - RNA, 22 nt, Artificial Sequence
  Synthetic
auauuuuuucaugcuauuauaa

SEQ ID NO: 192761 - RNA, 23 nt, Artificial Sequence
  Synthetic
aauauuuuuucaugcuauuauaa

SEQ ID NO: 192762 - RNA, 24 nt, Artificial Sequence
  Synthetic
aaauauuuuuucaugcuauuauaa

SEQ ID NO: 192763 - RNA, 18 nt, Artificial Sequence
  Synthetic
uuuagcucccacuuauaa

SEQ ID NO: 192764 - RNA, 19 nt, Artificial Sequence
  Synthetic
auuuagcucccacuuauaa

SEQ ID NO: 192765 - RNA, 20 nt, Artificial Sequence
  Synthetic
cauuuagcucccacuuauaa

SEQ ID NO: 192766 - RNA, 21 nt, Artificial Sequence
  Synthetic
ucauuuagcucccacuuauaa

SEQ ID NO: 192767 - RNA, 22 nt, Artificial Sequence
  Synthetic
aucauuuagcucccacuuauaa

SEQ ID NO: 192768 - RNA, 23 nt, Artificial Sequence
  Synthetic
caucauuuagcucccacuuauaa

SEQ ID NO: 192769 - RNA, 24 nt, Artificial Sequence
  Synthetic
ucaucauuuagcucccacuuauaa

SEQ ID NO: 192770 - RNA, 19 nt, Artificial Sequence
  Synthetic
guuuagcucccacuuauaa

SEQ ID NO: 192771 - RNA, 20 nt, Artificial Sequence
  Synthetic
uguuuagcucccacuuauaa

SEQ ID NO: 192772 - RNA, 21 nt, Artificial Sequence
  Synthetic
auguuuagcucccacuuauaa

SEQ ID NO: 192773 - RNA, 22 nt, Artificial Sequence
  Synthetic
uauguuuagcucccacuuauaa

SEQ ID NO: 192774 - RNA, 23 nt, Artificial Sequence
  Synthetic
cuauguuuagcucccacuuauaa

SEQ ID NO: 192775 - RNA, 24 nt, Artificial Sequence
  Synthetic
ucuauguuuagcucccacuuauaa

SEQ ID NO: 192776 - RNA, 18 nt, Artificial Sequence
  Synthetic
guuuagcuccacuuauaa

SEQ ID NO: 192777 - RNA, 19 nt, Artificial Sequence
  Synthetic
uguuuagcuccacuuauaa

SEQ ID NO: 192778 - RNA, 20 nt, Artificial Sequence
  Synthetic
guguuuagcuccacuuauaa

SEQ ID NO: 192779 - RNA, 21 nt, Artificial Sequence
  Synthetic
aguguuuagcuccacuuauaa

SEQ ID NO: 192780 - RNA, 22 nt, Artificial Sequence
  Synthetic
caguguuuagcuccacuuauaa

SEQ ID NO: 192781 - RNA, 23 nt, Artificial Sequence
  Synthetic
ucaguguuuagcuccacuuauaa

SEQ ID NO: 192782 - RNA, 24 nt, Artificial Sequence
  Synthetic
cucaguguuuagcuccacuuauaa

SEQ ID NO: 192783 - RNA, 18 nt, Artificial Sequence
  Synthetic
ccauguucucacuuauaa

SEQ ID NO: 192784 - RNA, 19 nt, Artificial Sequence
  Synthetic
cccauguucucacuuauaa

SEQ ID NO: 192785 - RNA, 20 nt, Artificial Sequence
  Synthetic
ccccauguucucacuuauaa

SEQ ID NO: 192786 - RNA, 21 nt, Artificial Sequence
  Synthetic
accccauguucucacuuauaa

SEQ ID NO: 192787 - RNA, 22 nt, Artificial Sequence
  Synthetic
uaccccauguucucacuuauaa

SEQ ID NO: 192788 - RNA, 23 nt, Artificial Sequence
  Synthetic
auaccccauguucucacuuauaa

SEQ ID NO: 192789 - RNA, 24 nt, Artificial Sequence
  Synthetic
gauaccccauguucucacuuauaa

SEQ ID NO: 192790 - RNA, 18 nt, Artificial Sequence
  Synthetic
guauguucucacuuauaa

SEQ ID NO: 192791 - RNA, 19 nt, Artificial Sequence
  Synthetic
uguauguucucacuuauaa

SEQ ID NO: 192792 - RNA, 20 nt, Artificial Sequence
  Synthetic
cuguauguucucacuuauaa

SEQ ID NO: 192793 - RNA, 21 nt, Artificial Sequence
  Synthetic
acuguauguucucacuuauaa

SEQ ID NO: 192794 - RNA, 22 nt, Artificial Sequence
  Synthetic
uacuguauguucucacuuauaa

SEQ ID NO: 192795 - RNA, 23 nt, Artificial Sequence
  Synthetic
auacuguauguucucacuuauaa

SEQ ID NO: 192796 - RNA, 24 nt, Artificial Sequence
  Synthetic
aauacuguauguucucacuuauaa

SEQ ID NO: 192797 - RNA, 18 nt, Artificial Sequence
  Synthetic
gcguguucucacuuauaa

SEQ ID NO: 192798 - RNA, 19 nt, Artificial Sequence
  Synthetic
ugcguguucucacuuauaa

SEQ ID NO: 192799 - RNA, 20 nt, Artificial Sequence
  Synthetic
cugcguguucucacuuauaa

SEQ ID NO: 192800 - RNA, 21 nt, Artificial Sequence
  Synthetic
acugcguguucucacuuauaa

SEQ ID NO: 192801 - RNA, 22 nt, Artificial Sequence
  Synthetic
uacugcguguucucacuuauaa

SEQ ID NO: 192802 - RNA, 23 nt, Artificial Sequence
  Synthetic
auacugcguguucucacuuauaa

SEQ ID NO: 192803 - RNA, 24 nt, Artificial Sequence
  Synthetic
aauacugcguguucucacuuauaa

SEQ ID NO: 192804 - RNA, 18 nt, Artificial Sequence
  Synthetic
cuuuguucucacuuauaa

SEQ ID NO: 192805 - RNA, 19 nt, Artificial Sequence
  Synthetic
acuuuguucucacuuauaa

SEQ ID NO: 192806 - RNA, 20 nt, Artificial Sequence
  Synthetic
cacuuuguucucacuuauaa

SEQ ID NO: 192807 - RNA, 21 nt, Artificial Sequence
  Synthetic
ccacuuuguucucacuuauaa

SEQ ID NO: 192808 - RNA, 22 nt, Artificial Sequence
  Synthetic
accacuuuguucucacuuauaa

SEQ ID NO: 192809 - RNA, 23 nt, Artificial Sequence
  Synthetic
uaccacuuuguucucacuuauaa

SEQ ID NO: 192810 - RNA, 24 nt, Artificial Sequence
  Synthetic
auaccacuuuguucucacuuauaa

SEQ ID NO: 192811 - RNA, 18 nt, Artificial Sequence
  Synthetic
gaaaugcaaggcuuauaa

SEQ ID NO: 192812 - RNA, 19 nt, Artificial Sequence
  Synthetic
ggaaaugcaaggcuuauaa

SEQ ID NO: 192813 - RNA, 20 nt, Artificial Sequence
  Synthetic
aggaaaugcaaggcuuauaa

SEQ ID NO: 192814 - RNA, 21 nt, Artificial Sequence
  Synthetic
gaggaaaugcaaggcuuauaa

SEQ ID NO: 192815 - RNA, 22 nt, Artificial Sequence
  Synthetic
ggaggaaaugcaaggcuuauaa

SEQ ID NO: 192816 - RNA, 23 nt, Artificial Sequence
  Synthetic
gggaggaaaugcaaggcuuauaa

SEQ ID NO: 192817 - RNA, 24 nt, Artificial Sequence
  Synthetic
ugggaggaaaugcaaggcuuauaa

SEQ ID NO: 192818 - RNA, 18 nt, Artificial Sequence
  Synthetic
uggagcuucggcuuauaa

SEQ ID NO: 192819 - RNA, 19 nt, Artificial Sequence
  Synthetic
guggagcuucggcuuauaa

SEQ ID NO: 192820 - RNA, 20 nt, Artificial Sequence
  Synthetic
cguggagcuucggcuuauaa

SEQ ID NO: 192821 - RNA, 21 nt, Artificial Sequence
  Synthetic
ucguggagcuucggcuuauaa

SEQ ID NO: 192822 - RNA, 22 nt, Artificial Sequence
  Synthetic
uucguggagcuucggcuuauaa

SEQ ID NO: 192823 - RNA, 23 nt, Artificial Sequence
  Synthetic
uuucguggagcuucggcuuauaa

SEQ ID NO: 192824 - RNA, 24 nt, Artificial Sequence
  Synthetic
guuucguggagcuucggcuuauaa

SEQ ID NO: 192825 - RNA, 18 nt, Artificial Sequence
  Synthetic
cauuuuuucugcuuauaa

SEQ ID NO: 192826 - RNA, 19 nt, Artificial Sequence
  Synthetic
ucauuuuuucugcuuauaa

SEQ ID NO: 192827 - RNA, 20 nt, Artificial Sequence
  Synthetic
aucauuuuuucugcuuauaa

SEQ ID NO: 192828 - RNA, 21 nt, Artificial Sequence
  Synthetic
aaucauuuuuucugcuuauaa

SEQ ID NO: 192829 - RNA, 22 nt, Artificial Sequence
  Synthetic
aaaucauuuuuucugcuuauaa

SEQ ID NO: 192830 - RNA, 23 nt, Artificial Sequence
  Synthetic
aaaaucauuuuuucugcuuauaa

SEQ ID NO: 192831 - RNA, 24 nt, Artificial Sequence
  Synthetic
aaaaaucauuuuuucugcuuauaa

SEQ ID NO: 192832 - RNA, 18 nt, Artificial Sequence
  Synthetic
uccccagacaucuuauaa

SEQ ID NO: 192833 - RNA, 19 nt, Artificial Sequence
  Synthetic
auccccagacaucuuauaa

SEQ ID NO: 192834 - RNA, 20 nt, Artificial Sequence
  Synthetic
gauccccagacaucuuauaa

SEQ ID NO: 192835 - RNA, 21 nt, Artificial Sequence
  Synthetic
agauccccagacaucuuauaa

SEQ ID NO: 192836 - RNA, 22 nt, Artificial Sequence
  Synthetic
uagauccccagacaucuuauaa

SEQ ID NO: 192837 - RNA, 23 nt, Artificial Sequence
  Synthetic
uuagauccccagacaucuuauaa

SEQ ID NO: 192838 - RNA, 24 nt, Artificial Sequence
  Synthetic
auuagauccccagacaucuuauaa

SEQ ID NO: 192839 - RNA, 18 nt, Artificial Sequence
  Synthetic
cuggacagguaguuauaa

SEQ ID NO: 192840 - RNA, 19 nt, Artificial Sequence
  Synthetic
gcuggacagguaguuauaa

SEQ ID NO: 192841 - RNA, 20 nt, Artificial Sequence
  Synthetic
ugcuggacagguaguuauaa

SEQ ID NO: 192842 - RNA, 21 nt, Artificial Sequence
  Synthetic
gugcuggacagguaguuauaa

SEQ ID NO: 192843 - RNA, 22 nt, Artificial Sequence
  Synthetic
ugugcuggacagguaguuauaa

SEQ ID NO: 192844 - RNA, 23 nt, Artificial Sequence
  Synthetic
augugcuggacagguaguuauaa

SEQ ID NO: 192845 - RNA, 24 nt, Artificial Sequence
  Synthetic
aaugugcuggacagguaguuauaa

SEQ ID NO: 192846 - RNA, 18 nt, Artificial Sequence
  Synthetic
uaaacaucuugguuauaa

SEQ ID NO: 192847 - RNA, 19 nt, Artificial Sequence
  Synthetic
uuaaacaucuugguuauaa

SEQ ID NO: 192848 - RNA, 20 nt, Artificial Sequence
  Synthetic
uuuaaacaucuugguuauaa

SEQ ID NO: 192849 - RNA, 21 nt, Artificial Sequence
  Synthetic
uuuuaaacaucuugguuauaa

SEQ ID NO: 192850 - RNA, 22 nt, Artificial Sequence
  Synthetic
uuuuuaaacaucuugguuauaa

SEQ ID NO: 192851 - RNA, 23 nt, Artificial Sequence
  Synthetic
auuuuuaaacaucuugguuauaa

SEQ ID NO: 192852 - RNA, 24 nt, Artificial Sequence
  Synthetic
cauuuuuaaacaucuugguuauaa

SEQ ID NO: 192853 - RNA, 18 nt, Artificial Sequence
  Synthetic
gcuaaacuacuguuauaa

SEQ ID NO: 192854 - RNA, 19 nt, Artificial Sequence
  Synthetic
agcuaaacuacuguuauaa

SEQ ID NO: 192855 - RNA, 20 nt, Artificial Sequence
  Synthetic
uagcuaaacuacuguuauaa

SEQ ID NO: 192856 - RNA, 21 nt, Artificial Sequence
  Synthetic
guagcuaaacuacuguuauaa

SEQ ID NO: 192857 - RNA, 22 nt, Artificial Sequence
  Synthetic
aguagcuaaacuacuguuauaa

SEQ ID NO: 192858 - RNA, 23 nt, Artificial Sequence
  Synthetic
aaguagcuaaacuacuguuauaa

SEQ ID NO: 192859 - RNA, 24 nt, Artificial Sequence
  Synthetic
aaaguagcuaaacuacuguuauaa

SEQ ID NO: 192860 - RNA, 18 nt, Artificial Sequence
  Synthetic
uuucugucauuguuauaa

SEQ ID NO: 192861 - RNA, 19 nt, Artificial Sequence
  Synthetic
auuucugucauuguuauaa

SEQ ID NO: 192862 - RNA, 20 nt, Artificial Sequence
  Synthetic
aauuucugucauuguuauaa

SEQ ID NO: 192863 - RNA, 21 nt, Artificial Sequence
  Synthetic
uaauuucugucauuguuauaa

SEQ ID NO: 192864 - RNA, 22 nt, Artificial Sequence
  Synthetic
auaauuucugucauuguuauaa

SEQ ID NO: 192865 - RNA, 23 nt, Artificial Sequence
  Synthetic
aauaauuucugucauuguuauaa

SEQ ID NO: 192866 - RNA, 24 nt, Artificial Sequence
  Synthetic
caauaauuucugucauuguuauaa

SEQ ID NO: 192867 - RNA, 18 nt, Artificial Sequence
  Synthetic
cacuuccucuuguuauaa

SEQ ID NO: 192868 - RNA, 19 nt, Artificial Sequence
  Synthetic
acacuuccucuuguuauaa

SEQ ID NO: 192869 - RNA, 20 nt, Artificial Sequence
  Synthetic
gacacuuccucuuguuauaa

SEQ ID NO: 192870 - RNA, 21 nt, Artificial Sequence
  Synthetic
ugacacuuccucuuguuauaa

SEQ ID NO: 192871 - RNA, 22 nt, Artificial Sequence
  Synthetic
augacacuuccucuuguuauaa

SEQ ID NO: 192872 - RNA, 23 nt, Artificial Sequence
  Synthetic
gaugacacuuccucuuguuauaa

SEQ ID NO: 192873 - RNA, 24 nt, Artificial Sequence
  Synthetic
ugaugacacuuccucuuguuauaa

SEQ ID NO: 192874 - RNA, 18 nt, Artificial Sequence
  Synthetic
agacuggguaauuuauaa

SEQ ID NO: 192875 - RNA, 19 nt, Artificial Sequence
  Synthetic
gagacuggguaauuuauaa

SEQ ID NO: 192876 - RNA, 20 nt, Artificial Sequence
  Synthetic
ugagacuggguaauuuauaa

SEQ ID NO: 192877 - RNA, 21 nt, Artificial Sequence
  Synthetic
cugagacuggguaauuuauaa

SEQ ID NO: 192878 - RNA, 22 nt, Artificial Sequence
  Synthetic
ccugagacuggguaauuuauaa

SEQ ID NO: 192879 - RNA, 23 nt, Artificial Sequence
  Synthetic
accugagacuggguaauuuauaa

SEQ ID NO: 192880 - RNA, 24 nt, Artificial Sequence
  Synthetic
uaccugagacuggguaauuuauaa

SEQ ID NO: 192881 - RNA, 18 nt, Artificial Sequence
  Synthetic
agauuggguaauuuauaa

SEQ ID NO: 192882 - RNA, 19 nt, Artificial Sequence
  Synthetic
gagauuggguaauuuauaa

SEQ ID NO: 192883 - RNA, 20 nt, Artificial Sequence
  Synthetic
cgagauuggguaauuuauaa

SEQ ID NO: 192884 - RNA, 21 nt, Artificial Sequence
  Synthetic
ccgagauuggguaauuuauaa

SEQ ID NO: 192885 - RNA, 22 nt, Artificial Sequence
  Synthetic
cccgagauuggguaauuuauaa

SEQ ID NO: 192886 - RNA, 23 nt, Artificial Sequence
  Synthetic
gcccgagauuggguaauuuauaa

SEQ ID NO: 192887 - RNA, 24 nt, Artificial Sequence
  Synthetic
ugcccgagauuggguaauuuauaa

SEQ ID NO: 192888 - RNA, 18 nt, Artificial Sequence
  Synthetic
ugucaaagagauuuauaa

SEQ ID NO: 192889 - RNA, 19 nt, Artificial Sequence
  Synthetic
gugucaaagagauuuauaa

SEQ ID NO: 192890 - RNA, 20 nt, Artificial Sequence
  Synthetic
ugugucaaagagauuuauaa

SEQ ID NO: 192891 - RNA, 21 nt, Artificial Sequence
  Synthetic
uugugucaaagagauuuauaa

SEQ ID NO: 192892 - RNA, 22 nt, Artificial Sequence
  Synthetic
auugugucaaagagauuuauaa

SEQ ID NO: 192893 - RNA, 23 nt, Artificial Sequence
  Synthetic
uauugugucaaagagauuuauaa

SEQ ID NO: 192894 - RNA, 24 nt, Artificial Sequence
  Synthetic
auauugugucaaagagauuuauaa

SEQ ID NO: 192895 - RNA, 18 nt, Artificial Sequence
  Synthetic
auuauuuuuacuuuauaa

SEQ ID NO: 192896 - RNA, 19 nt, Artificial Sequence
  Synthetic
aauuauuuuuacuuuauaa

SEQ ID NO: 192897 - RNA, 20 nt, Artificial Sequence
  Synthetic
aaauuauuuuuacuuuauaa

SEQ ID NO: 192898 - RNA, 21 nt, Artificial Sequence
  Synthetic
gaaauuauuuuuacuuuauaa

SEQ ID NO: 192899 - RNA, 22 nt, Artificial Sequence
  Synthetic
ugaaauuauuuuuacuuuauaa

SEQ ID NO: 192900 - RNA, 23 nt, Artificial Sequence
  Synthetic
uugaaauuauuuuuacuuuauaa

SEQ ID NO: 192901 - RNA, 24 nt, Artificial Sequence
  Synthetic
uuugaaauuauuuuuacuuuauaa

SEQ ID NO: 192902 - RNA, 18 nt, Artificial Sequence
  Synthetic
ucuaauuuaucuuuauaa

SEQ ID NO: 192903 - RNA, 19 nt, Artificial Sequence
  Synthetic
uucuaauuuaucuuuauaa

SEQ ID NO: 192904 - RNA, 20 nt, Artificial Sequence
  Synthetic
auucuaauuuaucuuuauaa

SEQ ID NO: 192905 - RNA, 21 nt, Artificial Sequence
  Synthetic
uauucuaauuuaucuuuauaa

SEQ ID NO: 192906 - RNA, 22 nt, Artificial Sequence
  Synthetic
guauucuaauuuaucuuuauaa

SEQ ID NO: 192907 - RNA, 23 nt, Artificial Sequence
  Synthetic
gguauucuaauuuaucuuuauaa

SEQ ID NO: 192908 - RNA, 24 nt, Artificial Sequence
  Synthetic
agguauucuaauuuaucuuuauaa

SEQ ID NO: 192909 - RNA, 18 nt, Artificial Sequence
  Synthetic
agccuagagaguuuauaa

SEQ ID NO: 192910 - RNA, 19 nt, Artificial Sequence
  Synthetic
aagccuagagaguuuauaa

SEQ ID NO: 192911 - RNA, 20 nt, Artificial Sequence
  Synthetic
aaagccuagagaguuuauaa

SEQ ID NO: 192912 - RNA, 21 nt, Artificial Sequence
  Synthetic
gaaagccuagagaguuuauaa

SEQ ID NO: 192913 - RNA, 22 nt, Artificial Sequence
  Synthetic
ggaaagccuagagaguuuauaa

SEQ ID NO: 192914 - RNA, 23 nt, Artificial Sequence
  Synthetic
uggaaagccuagagaguuuauaa

SEQ ID NO: 192915 - RNA, 24 nt, Artificial Sequence
  Synthetic
uuggaaagccuagagaguuuauaa

SEQ ID NO: 192916 - RNA, 18 nt, Artificial Sequence
  Synthetic
uuucaagugaguuuauaa

SEQ ID NO: 192917 - RNA, 19 nt, Artificial Sequence
  Synthetic
cuuucaagugaguuuauaa

SEQ ID NO: 192918 - RNA, 20 nt, Artificial Sequence
  Synthetic
ucuuucaagugaguuuauaa

SEQ ID NO: 192919 - RNA, 21 nt, Artificial Sequence
  Synthetic
aucuuucaagugaguuuauaa

SEQ ID NO: 192920 - RNA, 22 nt, Artificial Sequence
  Synthetic
aaucuuucaagugaguuuauaa

SEQ ID NO: 192921 - RNA, 23 nt, Artificial Sequence
  Synthetic
aaaucuuucaagugaguuuauaa

SEQ ID NO: 192922 - RNA, 24 nt, Artificial Sequence
  Synthetic
uaaaucuuucaagugaguuuauaa

SEQ ID NO: 192923 - RNA, 18 nt, Artificial Sequence
  Synthetic
acuucagcucguuuauaa

SEQ ID NO: 192924 - RNA, 19 nt, Artificial Sequence
  Synthetic
uacuucagcucguuuauaa

SEQ ID NO: 192925 - RNA, 20 nt, Artificial Sequence
  Synthetic
auacuucagcucguuuauaa

SEQ ID NO: 192926 - RNA, 21 nt, Artificial Sequence
  Synthetic
uauacuucagcucguuuauaa

SEQ ID NO: 192927 - RNA, 22 nt, Artificial Sequence
  Synthetic
cuauacuucagcucguuuauaa

SEQ ID NO: 192928 - RNA, 23 nt, Artificial Sequence
  Synthetic
acuauacuucagcucguuuauaa

SEQ ID NO: 192929 - RNA, 24 nt, Artificial Sequence
  Synthetic
cacuauacuucagcucguuuauaa

SEQ ID NO: 192930 - RNA, 18 nt, Artificial Sequence
  Synthetic
guaauaacaauuuuauaa

SEQ ID NO: 192931 - RNA, 19 nt, Artificial Sequence
  Synthetic
aguaauaacaauuuuauaa

SEQ ID NO: 192932 - RNA, 20 nt, Artificial Sequence
  Synthetic
aaguaauaacaauuuuauaa

SEQ ID NO: 192933 - RNA, 21 nt, Artificial Sequence
  Synthetic
caaguaauaacaauuuuauaa

SEQ ID NO: 192934 - RNA, 22 nt, Artificial Sequence
  Synthetic
acaaguaauaacaauuuuauaa

SEQ ID NO: 192935 - RNA, 23 nt, Artificial Sequence
  Synthetic
cacaaguaauaacaauuuuauaa

SEQ ID NO: 192936 - RNA, 24 nt, Artificial Sequence
  Synthetic
ccacaaguaauaacaauuuuauaa

SEQ ID NO: 192937 - RNA, 18 nt, Artificial Sequence
  Synthetic
aaugcucacauuuuauaa

SEQ ID NO: 192938 - RNA, 19 nt, Artificial Sequence
  Synthetic
aaaugcucacauuuuauaa

SEQ ID NO: 192939 - RNA, 20 nt, Artificial Sequence
  Synthetic
uaaaugcucacauuuuauaa

SEQ ID NO: 192940 - RNA, 21 nt, Artificial Sequence
  Synthetic
uuaaaugcucacauuuuauaa

SEQ ID NO: 192941 - RNA, 22 nt, Artificial Sequence
  Synthetic
auuaaaugcucacauuuuauaa

SEQ ID NO: 192942 - RNA, 23 nt, Artificial Sequence
  Synthetic
aauuaaaugcucacauuuuauaa

SEQ ID NO: 192943 - RNA, 24 nt, Artificial Sequence
  Synthetic
caauuaaaugcucacauuuuauaa

SEQ ID NO: 192944 - RNA, 18 nt, Artificial Sequence
  Synthetic
aaugguaguauuuuauaa

SEQ ID NO: 192945 - RNA, 19 nt, Artificial Sequence
  Synthetic
aaaugguaguauuuuauaa

SEQ ID NO: 192946 - RNA, 20 nt, Artificial Sequence
  Synthetic
aaaaugguaguauuuuauaa

SEQ ID NO: 192947 - RNA, 21 nt, Artificial Sequence
  Synthetic
uaaaaugguaguauuuuauaa

SEQ ID NO: 192948 - RNA, 22 nt, Artificial Sequence
  Synthetic
cuaaaaugguaguauuuuauaa

SEQ ID NO: 192949 - RNA, 23 nt, Artificial Sequence
  Synthetic
ucuaaaaugguaguauuuuauaa

SEQ ID NO: 192950 - RNA, 24 nt, Artificial Sequence
  Synthetic
gucuaaaaugguaguauuuuauaa

SEQ ID NO: 192951 - RNA, 18 nt, Artificial Sequence
  Synthetic
uggaaaauuauuuuauaa

SEQ ID NO: 192952 - RNA, 19 nt, Artificial Sequence
  Synthetic
uuggaaaauuauuuuauaa

SEQ ID NO: 192953 - RNA, 20 nt, Artificial Sequence
  Synthetic
uuuggaaaauuauuuuauaa

SEQ ID NO: 192954 - RNA, 21 nt, Artificial Sequence
  Synthetic
cuuuggaaaauuauuuuauaa

SEQ ID NO: 192955 - RNA, 22 nt, Artificial Sequence
  Synthetic
ucuuuggaaaauuauuuuauaa

SEQ ID NO: 192956 - RNA, 23 nt, Artificial Sequence
  Synthetic
uucuuuggaaaauuauuuuauaa

SEQ ID NO: 192957 - RNA, 24 nt, Artificial Sequence
  Synthetic
uuucuuuggaaaauuauuuuauaa

SEQ ID NO: 192958 - RNA, 18 nt, Artificial Sequence
  Synthetic
ugcuucauuauuuuauaa

SEQ ID NO: 192959 - RNA, 19 nt, Artificial Sequence
  Synthetic
cugcuucauuauuuuauaa

SEQ ID NO: 192960 - RNA, 20 nt, Artificial Sequence
  Synthetic
ccugcuucauuauuuuauaa

SEQ ID NO: 192961 - RNA, 21 nt, Artificial Sequence
  Synthetic
cccugcuucauuauuuuauaa

SEQ ID NO: 192962 - RNA, 22 nt, Artificial Sequence
  Synthetic
gcccugcuucauuauuuuauaa

SEQ ID NO: 192963 - RNA, 23 nt, Artificial Sequence
  Synthetic
ugcccugcuucauuauuuuauaa

SEQ ID NO: 192964 - RNA, 24 nt, Artificial Sequence
  Synthetic
uugcccugcuucauuauuuuauaa

SEQ ID NO: 192965 - RNA, 18 nt, Artificial Sequence
  Synthetic
gaacucccacuuuuauaa

SEQ ID NO: 192966 - RNA, 19 nt, Artificial Sequence
  Synthetic
ugaacucccacuuuuauaa

SEQ ID NO: 192967 - RNA, 20 nt, Artificial Sequence
  Synthetic
cugaacucccacuuuuauaa

SEQ ID NO: 192968 - RNA, 21 nt, Artificial Sequence
  Synthetic
gcugaacucccacuuuuauaa

SEQ ID NO: 192969 - RNA, 22 nt, Artificial Sequence
  Synthetic
ggcugaacucccacuuuuauaa

SEQ ID NO: 192970 - RNA, 23 nt, Artificial Sequence
  Synthetic
gggcugaacucccacuuuuauaa

SEQ ID NO: 192971 - RNA, 24 nt, Artificial Sequence
  Synthetic
ggggcugaacucccacuuuuauaa

SEQ ID NO: 192972 - RNA, 18 nt, Artificial Sequence
  Synthetic
gauaucauucuuuuauaa

SEQ ID NO: 192973 - RNA, 19 nt, Artificial Sequence
  Synthetic
ugauaucauucuuuuauaa

SEQ ID NO: 192974 - RNA, 20 nt, Artificial Sequence
  Synthetic
cugauaucauucuuuuauaa

SEQ ID NO: 192975 - RNA, 21 nt, Artificial Sequence
  Synthetic
ccugauaucauucuuuuauaa

SEQ ID NO: 192976 - RNA, 22 nt, Artificial Sequence
  Synthetic
cccugauaucauucuuuuauaa

SEQ ID NO: 192977 - RNA, 23 nt, Artificial Sequence
  Synthetic
acccugauaucauucuuuuauaa

SEQ ID NO: 192978 - RNA, 24 nt, Artificial Sequence
  Synthetic
aacccugauaucauucuuuuauaa

SEQ ID NO: 192979 - RNA, 18 nt, Artificial Sequence
  Synthetic
auaucauuaguuuuauaa

SEQ ID NO: 192980 - RNA, 19 nt, Artificial Sequence
  Synthetic
uauaucauuaguuuuauaa

SEQ ID NO: 192981 - RNA, 20 nt, Artificial Sequence
  Synthetic
auauaucauuaguuuuauaa

SEQ ID NO: 192982 - RNA, 21 nt, Artificial Sequence
  Synthetic
gauauaucauuaguuuuauaa

SEQ ID NO: 192983 - RNA, 22 nt, Artificial Sequence
  Synthetic
ggauauaucauuaguuuuauaa

SEQ ID NO: 192984 - RNA, 23 nt, Artificial Sequence
  Synthetic
gggauauaucauuaguuuuauaa

SEQ ID NO: 192985 - RNA, 24 nt, Artificial Sequence
  Synthetic
agggauauaucauuaguuuuauaa

SEQ ID NO: 192986 - RNA, 18 nt, Artificial Sequence
  Synthetic
cauugaaggguuuuauaa

SEQ ID NO: 192987 - RNA, 19 nt, Artificial Sequence
  Synthetic
acauugaaggguuuuauaa

SEQ ID NO: 192988 - RNA, 20 nt, Artificial Sequence
  Synthetic
aacauugaaggguuuuauaa

SEQ ID NO: 192989 - RNA, 21 nt, Artificial Sequence
  Synthetic
aaacauugaaggguuuuauaa

SEQ ID NO: 192990 - RNA, 22 nt, Artificial Sequence
  Synthetic
gaaacauugaaggguuuuauaa

SEQ ID NO: 192991 - RNA, 23 nt, Artificial Sequence
  Synthetic
ggaaacauugaaggguuuuauaa

SEQ ID NO: 192992 - RNA, 24 nt, Artificial Sequence
  Synthetic
gggaaacauugaaggguuuuauaa

SEQ ID NO: 192993 - RNA, 18 nt, Artificial Sequence
  Synthetic
caauucaguguuuuauaa

SEQ ID NO: 192994 - RNA, 19 nt, Artificial Sequence
  Synthetic
acaauucaguguuuuauaa

SEQ ID NO: 192995 - RNA, 20 nt, Artificial Sequence
  Synthetic
aacaauucaguguuuuauaa

SEQ ID NO: 192996 - RNA, 21 nt, Artificial Sequence
  Synthetic
uaacaauucaguguuuuauaa

SEQ ID NO: 192997 - RNA, 22 nt, Artificial Sequence
  Synthetic
uuaacaauucaguguuuuauaa

SEQ ID NO: 192998 - RNA, 23 nt, Artificial Sequence
  Synthetic
auuaacaauucaguguuuuauaa

SEQ ID NO: 192999 - RNA, 24 nt, Artificial Sequence
  Synthetic
uauuaacaauucaguguuuuauaa

SEQ ID NO: 193000 - RNA, 18 nt, Artificial Sequence
  Synthetic
aauuaugggauaaacuaa

SEQ ID NO: 193001 - RNA, 19 nt, Artificial Sequence
  Synthetic
gaauuaugggauaaacuaa

SEQ ID NO: 193002 - RNA, 20 nt, Artificial Sequence
  Synthetic
agaauuaugggauaaacuaa

SEQ ID NO: 193003 - RNA, 21 nt, Artificial Sequence
  Synthetic
gagaauuaugggauaaacuaa

SEQ ID NO: 193004 - RNA, 22 nt, Artificial Sequence
  Synthetic
agagaauuaugggauaaacuaa

SEQ ID NO: 193005 - RNA, 23 nt, Artificial Sequence
  Synthetic
aagagaauuaugggauaaacuaa

SEQ ID NO: 193006 - RNA, 24 nt, Artificial Sequence
  Synthetic
aaagagaauuaugggauaaacuaa

SEQ ID NO: 193007 - RNA, 18 nt, Artificial Sequence
  Synthetic
guucugaguuacaacuaa

SEQ ID NO: 193008 - RNA, 19 nt, Artificial Sequence
  Synthetic
gguucugaguuacaacuaa

SEQ ID NO: 193009 - RNA, 20 nt, Artificial Sequence
  Synthetic
agguucugaguuacaacuaa

SEQ ID NO: 193010 - RNA, 21 nt, Artificial Sequence
  Synthetic
aagguucugaguuacaacuaa

SEQ ID NO: 193011 - RNA, 22 nt, Artificial Sequence
  Synthetic
caagguucugaguuacaacuaa

SEQ ID NO: 193012 - RNA, 23 nt, Artificial Sequence
  Synthetic
ucaagguucugaguuacaacuaa

SEQ ID NO: 193013 - RNA, 24 nt, Artificial Sequence
  Synthetic
uucaagguucugaguuacaacuaa

SEQ ID NO: 193014 - RNA, 18 nt, Artificial Sequence
  Synthetic
gaaaagagcagcaacuaa

SEQ ID NO: 193015 - RNA, 19 nt, Artificial Sequence
  Synthetic
ggaaaagagcagcaacuaa

SEQ ID NO: 193016 - RNA, 20 nt, Artificial Sequence
  Synthetic
uggaaaagagcagcaacuaa

SEQ ID NO: 193017 - RNA, 21 nt, Artificial Sequence
  Synthetic
cuggaaaagagcagcaacuaa

SEQ ID NO: 193018 - RNA, 22 nt, Artificial Sequence
  Synthetic
ccuggaaaagagcagcaacuaa

SEQ ID NO: 193019 - RNA, 23 nt, Artificial Sequence
  Synthetic
accuggaaaagagcagcaacuaa

SEQ ID NO: 193020 - RNA, 24 nt, Artificial Sequence
  Synthetic
aaccuggaaaagagcagcaacuaa

SEQ ID NO: 193021 - RNA, 18 nt, Artificial Sequence
  Synthetic
aacagccaagagaacuaa

SEQ ID NO: 193022 - RNA, 19 nt, Artificial Sequence
  Synthetic
uaacagccaagagaacuaa

SEQ ID NO: 193023 - RNA, 20 nt, Artificial Sequence
  Synthetic
guaacagccaagagaacuaa

SEQ ID NO: 193024 - RNA, 21 nt, Artificial Sequence
  Synthetic
aguaacagccaagagaacuaa

SEQ ID NO: 193025 - RNA, 22 nt, Artificial Sequence
  Synthetic
uaguaacagccaagagaacuaa

SEQ ID NO: 193026 - RNA, 23 nt, Artificial Sequence
  Synthetic
uuaguaacagccaagagaacuaa

SEQ ID NO: 193027 - RNA, 24 nt, Artificial Sequence
  Synthetic
uuuaguaacagccaagagaacuaa

SEQ ID NO: 193028 - RNA, 18 nt, Artificial Sequence
  Synthetic
ugacuauaugugaacuaa

SEQ ID NO: 193029 - RNA, 19 nt, Artificial Sequence
  Synthetic
gugacuauaugugaacuaa

SEQ ID NO: 193030 - RNA, 20 nt, Artificial Sequence
  Synthetic
ugugacuauaugugaacuaa

SEQ ID NO: 193031 - RNA, 21 nt, Artificial Sequence
  Synthetic
gugugacuauaugugaacuaa

SEQ ID NO: 193032 - RNA, 22 nt, Artificial Sequence
  Synthetic
ugugugacuauaugugaacuaa

SEQ ID NO: 193033 - RNA, 23 nt, Artificial Sequence
  Synthetic
uugugugacuauaugugaacuaa

SEQ ID NO: 193034 - RNA, 24 nt, Artificial Sequence
  Synthetic
cuugugugacuauaugugaacuaa

SEQ ID NO: 193035 - RNA, 18 nt, Artificial Sequence
  Synthetic
ccauauauuuugaacuaa

SEQ ID NO: 193036 - RNA, 19 nt, Artificial Sequence
  Synthetic
gccauauauuuugaacuaa

SEQ ID NO: 193037 - RNA, 20 nt, Artificial Sequence
  Synthetic
ugccauauauuuugaacuaa

SEQ ID NO: 193038 - RNA, 21 nt, Artificial Sequence
  Synthetic
augccauauauuuugaacuaa

SEQ ID NO: 193039 - RNA, 22 nt, Artificial Sequence
  Synthetic
aaugccauauauuuugaacuaa

SEQ ID NO: 193040 - RNA, 23 nt, Artificial Sequence
  Synthetic
gaaugccauauauuuugaacuaa

SEQ ID NO: 193041 - RNA, 24 nt, Artificial Sequence
  Synthetic
agaaugccauauauuuugaacuaa

SEQ ID NO: 193042 - RNA, 18 nt, Artificial Sequence
  Synthetic
gugucauaccauaacuaa

SEQ ID NO: 193043 - RNA, 19 nt, Artificial Sequence
  Synthetic
agugucauaccauaacuaa

SEQ ID NO: 193044 - RNA, 20 nt, Artificial Sequence
  Synthetic
gagugucauaccauaacuaa

SEQ ID NO: 193045 - RNA, 21 nt, Artificial Sequence
  Synthetic
agagugucauaccauaacuaa

SEQ ID NO: 193046 - RNA, 22 nt, Artificial Sequence
  Synthetic
aagagugucauaccauaacuaa

SEQ ID NO: 193047 - RNA, 23 nt, Artificial Sequence
  Synthetic
aaagagugucauaccauaacuaa

SEQ ID NO: 193048 - RNA, 24 nt, Artificial Sequence
  Synthetic
aaaagagugucauaccauaacuaa

SEQ ID NO: 193049 - RNA, 18 nt, Artificial Sequence
  Synthetic
ugacaucaagcuaacuaa

SEQ ID NO: 193050 - RNA, 19 nt, Artificial Sequence
  Synthetic
augacaucaagcuaacuaa

SEQ ID NO: 193051 - RNA, 20 nt, Artificial Sequence
  Synthetic
caugacaucaagcuaacuaa

SEQ ID NO: 193052 - RNA, 21 nt, Artificial Sequence
  Synthetic
ccaugacaucaagcuaacuaa

SEQ ID NO: 193053 - RNA, 22 nt, Artificial Sequence
  Synthetic
uccaugacaucaagcuaacuaa

SEQ ID NO: 193054 - RNA, 23 nt, Artificial Sequence
  Synthetic
auccaugacaucaagcuaacuaa

SEQ ID NO: 193055 - RNA, 24 nt, Artificial Sequence
  Synthetic
aauccaugacaucaagcuaacuaa

SEQ ID NO: 193056 - RNA, 18 nt, Artificial Sequence
  Synthetic
aaaacccuggguaacuaa

SEQ ID NO: 193057 - RNA, 19 nt, Artificial Sequence
  Synthetic
uaaaacccuggguaacuaa

SEQ ID NO: 193058 - RNA, 20 nt, Artificial Sequence
  Synthetic
auaaaacccuggguaacuaa

SEQ ID NO: 193059 - RNA, 21 nt, Artificial Sequence
  Synthetic
cauaaaacccuggguaacuaa

SEQ ID NO: 193060 - RNA, 22 nt, Artificial Sequence
  Synthetic
ccauaaaacccuggguaacuaa

SEQ ID NO: 193061 - RNA, 23 nt, Artificial Sequence
  Synthetic
accauaaaacccuggguaacuaa

SEQ ID NO: 193062 - RNA, 24 nt, Artificial Sequence
  Synthetic
uaccauaaaacccuggguaacuaa

SEQ ID NO: 193063 - RNA, 18 nt, Artificial Sequence
  Synthetic
uaucacucugguaacuaa

SEQ ID NO: 193064 - RNA, 19 nt, Artificial Sequence
  Synthetic
auaucacucugguaacuaa

SEQ ID NO: 193065 - RNA, 20 nt, Artificial Sequence
  Synthetic
uauaucacucugguaacuaa

SEQ ID NO: 193066 - RNA, 21 nt, Artificial Sequence
  Synthetic
auauaucacucugguaacuaa

SEQ ID NO: 193067 - RNA, 22 nt, Artificial Sequence
  Synthetic
aauauaucacucugguaacuaa

SEQ ID NO: 193068 - RNA, 23 nt, Artificial Sequence
  Synthetic
aaauauaucacucugguaacuaa

SEQ ID NO: 193069 - RNA, 24 nt, Artificial Sequence
  Synthetic
caaauauaucacucugguaacuaa

SEQ ID NO: 193070 - RNA, 18 nt, Artificial Sequence
  Synthetic
auuauuuguuaacacuaa

SEQ ID NO: 193071 - RNA, 19 nt, Artificial Sequence
  Synthetic
uauuauuuguuaacacuaa

SEQ ID NO: 193072 - RNA, 20 nt, Artificial Sequence
  Synthetic
cuauuauuuguuaacacuaa

SEQ ID NO: 193073 - RNA, 21 nt, Artificial Sequence
  Synthetic
acuauuauuuguuaacacuaa

SEQ ID NO: 193074 - RNA, 22 nt, Artificial Sequence
  Synthetic
aacuauuauuuguuaacacuaa

SEQ ID NO: 193075 - RNA, 23 nt, Artificial Sequence
  Synthetic
aaacuauuauuuguuaacacuaa

SEQ ID NO: 193076 - RNA, 24 nt, Artificial Sequence
  Synthetic
aaaacuauuauuuguuaacacuaa

SEQ ID NO: 193077 - RNA, 18 nt, Artificial Sequence
  Synthetic
caaucauaaacccacuaa

SEQ ID NO: 193078 - RNA, 19 nt, Artificial Sequence
  Synthetic
gcaaucauaaacccacuaa

SEQ ID NO: 193079 - RNA, 20 nt, Artificial Sequence
  Synthetic
ggcaaucauaaacccacuaa

SEQ ID NO: 193080 - RNA, 21 nt, Artificial Sequence
  Synthetic
uggcaaucauaaacccacuaa

SEQ ID NO: 193081 - RNA, 22 nt, Artificial Sequence
  Synthetic
uuggcaaucauaaacccacuaa

SEQ ID NO: 193082 - RNA, 23 nt, Artificial Sequence
  Synthetic
uuuggcaaucauaaacccacuaa

SEQ ID NO: 193083 - RNA, 24 nt, Artificial Sequence
  Synthetic
guuuggcaaucauaaacccacuaa

SEQ ID NO: 193084 - RNA, 18 nt, Artificial Sequence
  Synthetic
ccuuguaggagccacuaa

SEQ ID NO: 193085 - RNA, 19 nt, Artificial Sequence
  Synthetic
cccuuguaggagccacuaa

SEQ ID NO: 193086 - RNA, 20 nt, Artificial Sequence
  Synthetic
ucccuuguaggagccacuaa

SEQ ID NO: 193087 - RNA, 21 nt, Artificial Sequence
  Synthetic
aucccuuguaggagccacuaa

SEQ ID NO: 193088 - RNA, 22 nt, Artificial Sequence
  Synthetic
aaucccuuguaggagccacuaa

SEQ ID NO: 193089 - RNA, 23 nt, Artificial Sequence
  Synthetic
uaaucccuuguaggagccacuaa

SEQ ID NO: 193090 - RNA, 24 nt, Artificial Sequence
  Synthetic
cuaaucccuuguaggagccacuaa

SEQ ID NO: 193091 - RNA, 18 nt, Artificial Sequence
  Synthetic
cugaaucaaaagcacuaa

SEQ ID NO: 193092 - RNA, 19 nt, Artificial Sequence
  Synthetic
acugaaucaaaagcacuaa

SEQ ID NO: 193093 - RNA, 20 nt, Artificial Sequence
  Synthetic
cacugaaucaaaagcacuaa

SEQ ID NO: 193094 - RNA, 21 nt, Artificial Sequence
  Synthetic
ccacugaaucaaaagcacuaa

SEQ ID NO: 193095 - RNA, 22 nt, Artificial Sequence
  Synthetic
cccacugaaucaaaagcacuaa

SEQ ID NO: 193096 - RNA, 23 nt, Artificial Sequence
  Synthetic
acccacugaaucaaaagcacuaa

SEQ ID NO: 193097 - RNA, 24 nt, Artificial Sequence
  Synthetic
cacccacugaaucaaaagcacuaa

SEQ ID NO: 193098 - RNA, 18 nt, Artificial Sequence
  Synthetic
auuuaaaaaaaucacuaa

SEQ ID NO: 193099 - RNA, 19 nt, Artificial Sequence
  Synthetic
aauuuaaaaaaaucacuaa

SEQ ID NO: 193100 - RNA, 20 nt, Artificial Sequence
  Synthetic
aaauuuaaaaaaaucacuaa

SEQ ID NO: 193101 - RNA, 21 nt, Artificial Sequence
  Synthetic
aaaauuuaaaaaaaucacuaa

SEQ ID NO: 193102 - RNA, 22 nt, Artificial Sequence
  Synthetic
caaaauuuaaaaaaaucacuaa

SEQ ID NO: 193103 - RNA, 23 nt, Artificial Sequence
  Synthetic
ccaaaauuuaaaaaaaucacuaa

SEQ ID NO: 193104 - RNA, 24 nt, Artificial Sequence
  Synthetic
accaaaauuuaaaaaaaucacuaa

SEQ ID NO: 193105 - RNA, 18 nt, Artificial Sequence
  Synthetic
ccauuuuuacaagacuaa

SEQ ID NO: 193106 - RNA, 19 nt, Artificial Sequence
  Synthetic
gccauuuuuacaagacuaa

SEQ ID NO: 193107 - RNA, 20 nt, Artificial Sequence
  Synthetic
ugccauuuuuacaagacuaa

SEQ ID NO: 193108 - RNA, 21 nt, Artificial Sequence
  Synthetic
uugccauuuuuacaagacuaa

SEQ ID NO: 193109 - RNA, 22 nt, Artificial Sequence
  Synthetic
guugccauuuuuacaagacuaa

SEQ ID NO: 193110 - RNA, 23 nt, Artificial Sequence
  Synthetic
aguugccauuuuuacaagacuaa

SEQ ID NO: 193111 - RNA, 24 nt, Artificial Sequence
  Synthetic
caguugccauuuuuacaagacuaa

SEQ ID NO: 193112 - RNA, 18 nt, Artificial Sequence
  Synthetic
auuuguaacucagacuaa

SEQ ID NO: 193113 - RNA, 19 nt, Artificial Sequence
  Synthetic
cauuuguaacucagacuaa

SEQ ID NO: 193114 - RNA, 20 nt, Artificial Sequence
  Synthetic
ucauuuguaacucagacuaa

SEQ ID NO: 193115 - RNA, 21 nt, Artificial Sequence
  Synthetic
aucauuuguaacucagacuaa

SEQ ID NO: 193116 - RNA, 22 nt, Artificial Sequence
  Synthetic
uaucauuuguaacucagacuaa

SEQ ID NO: 193117 - RNA, 23 nt, Artificial Sequence
  Synthetic
auaucauuuguaacucagacuaa

SEQ ID NO: 193118 - RNA, 24 nt, Artificial Sequence
  Synthetic
aauaucauuuguaacucagacuaa

SEQ ID NO: 193119 - RNA, 18 nt, Artificial Sequence
  Synthetic
guagaaacuagggacuaa

SEQ ID NO: 193120 - RNA, 19 nt, Artificial Sequence
  Synthetic
aguagaaacuagggacuaa

SEQ ID NO: 193121 - RNA, 20 nt, Artificial Sequence
  Synthetic
caguagaaacuagggacuaa

SEQ ID NO: 193122 - RNA, 21 nt, Artificial Sequence
  Synthetic
acaguagaaacuagggacuaa

SEQ ID NO: 193123 - RNA, 22 nt, Artificial Sequence
  Synthetic
aacaguagaaacuagggacuaa

SEQ ID NO: 193124 - RNA, 23 nt, Artificial Sequence
  Synthetic
caacaguagaaacuagggacuaa

SEQ ID NO: 193125 - RNA, 24 nt, Artificial Sequence
  Synthetic
gcaacaguagaaacuagggacuaa

SEQ ID NO: 193126 - RNA, 18 nt, Artificial Sequence
  Synthetic
aguaugaaaauggacuaa

SEQ ID NO: 193127 - RNA, 19 nt, Artificial Sequence
  Synthetic
caguaugaaaauggacuaa

SEQ ID NO: 193128 - RNA, 20 nt, Artificial Sequence
  Synthetic
gcaguaugaaaauggacuaa

SEQ ID NO: 193129 - RNA, 21 nt, Artificial Sequence
  Synthetic
agcaguaugaaaauggacuaa

SEQ ID NO: 193130 - RNA, 22 nt, Artificial Sequence
  Synthetic
uagcaguaugaaaauggacuaa

SEQ ID NO: 193131 - RNA, 23 nt, Artificial Sequence
  Synthetic
auagcaguaugaaaauggacuaa

SEQ ID NO: 193132 - RNA, 24 nt, Artificial Sequence
  Synthetic
uauagcaguaugaaaauggacuaa

SEQ ID NO: 193133 - RNA, 18 nt, Artificial Sequence
  Synthetic
gauuuuuuuaaugacuaa

SEQ ID NO: 193134 - RNA, 19 nt, Artificial Sequence
  Synthetic
agauuuuuuuaaugacuaa

SEQ ID NO: 193135 - RNA, 20 nt, Artificial Sequence
  Synthetic
uagauuuuuuuaaugacuaa

SEQ ID NO: 193136 - RNA, 21 nt, Artificial Sequence
  Synthetic
guagauuuuuuuaaugacuaa

SEQ ID NO: 193137 - RNA, 22 nt, Artificial Sequence
  Synthetic
uguagauuuuuuuaaugacuaa

SEQ ID NO: 193138 - RNA, 23 nt, Artificial Sequence
  Synthetic
uuguagauuuuuuuaaugacuaa

SEQ ID NO: 193139 - RNA, 24 nt, Artificial Sequence
  Synthetic
uuuguagauuuuuuuaaugacuaa

SEQ ID NO: 193140 - RNA, 18 nt, Artificial Sequence
  Synthetic
acaaaaauauaugacuaa

SEQ ID NO: 193141 - RNA, 19 nt, Artificial Sequence
  Synthetic
uacaaaaauauaugacuaa

SEQ ID NO: 193142 - RNA, 20 nt, Artificial Sequence
  Synthetic
uuacaaaaauauaugacuaa

SEQ ID NO: 193143 - RNA, 21 nt, Artificial Sequence
  Synthetic
uuuacaaaaauauaugacuaa

SEQ ID NO: 193144 - RNA, 22 nt, Artificial Sequence
  Synthetic
auuuacaaaaauauaugacuaa

SEQ ID NO: 193145 - RNA, 23 nt, Artificial Sequence
  Synthetic
uauuuacaaaaauauaugacuaa

SEQ ID NO: 193146 - RNA, 24 nt, Artificial Sequence
  Synthetic
guauuuacaaaaauauaugacuaa

SEQ ID NO: 193147 - RNA, 18 nt, Artificial Sequence
  Synthetic
auaaaauucaaauacuaa

SEQ ID NO: 193148 - RNA, 19 nt, Artificial Sequence
  Synthetic
cauaaaauucaaauacuaa

SEQ ID NO: 193149 - RNA, 20 nt, Artificial Sequence
  Synthetic
ccauaaaauucaaauacuaa

SEQ ID NO: 193150 - RNA, 21 nt, Artificial Sequence
  Synthetic
uccauaaaauucaaauacuaa

SEQ ID NO: 193151 - RNA, 22 nt, Artificial Sequence
  Synthetic
auccauaaaauucaaauacuaa

SEQ ID NO: 193152 - RNA, 23 nt, Artificial Sequence
  Synthetic
cauccauaaaauucaaauacuaa

SEQ ID NO: 193153 - RNA, 24 nt, Artificial Sequence
  Synthetic
acauccauaaaauucaaauacuaa

SEQ ID NO: 193154 - RNA, 18 nt, Artificial Sequence
  Synthetic
caaagaaaugcauacuaa

SEQ ID NO: 193155 - RNA, 19 nt, Artificial Sequence
  Synthetic
acaaagaaaugcauacuaa

SEQ ID NO: 193156 - RNA, 20 nt, Artificial Sequence
  Synthetic
uacaaagaaaugcauacuaa

SEQ ID NO: 193157 - RNA, 21 nt, Artificial Sequence
  Synthetic
cuacaaagaaaugcauacuaa

SEQ ID NO: 193158 - RNA, 22 nt, Artificial Sequence
  Synthetic
ucuacaaagaaaugcauacuaa

SEQ ID NO: 193159 - RNA, 23 nt, Artificial Sequence
  Synthetic
uucuacaaagaaaugcauacuaa

SEQ ID NO: 193160 - RNA, 24 nt, Artificial Sequence
  Synthetic
cuucuacaaagaaaugcauacuaa

SEQ ID NO: 193161 - RNA, 18 nt, Artificial Sequence
  Synthetic
uggaggacauuauacuaa

SEQ ID NO: 193162 - RNA, 19 nt, Artificial Sequence
  Synthetic
cuggaggacauuauacuaa

SEQ ID NO: 193163 - RNA, 20 nt, Artificial Sequence
  Synthetic
ccuggaggacauuauacuaa

SEQ ID NO: 193164 - RNA, 21 nt, Artificial Sequence
  Synthetic
accuggaggacauuauacuaa

SEQ ID NO: 193165 - RNA, 22 nt, Artificial Sequence
  Synthetic
aaccuggaggacauuauacuaa

SEQ ID NO: 193166 - RNA, 23 nt, Artificial Sequence
  Synthetic
gaaccuggaggacauuauacuaa

SEQ ID NO: 193167 - RNA, 24 nt, Artificial Sequence
  Synthetic
ugaaccuggaggacauuauacuaa

SEQ ID NO: 193168 - RNA, 18 nt, Artificial Sequence
  Synthetic
aguugauagaacuacuaa

SEQ ID NO: 193169 - RNA, 19 nt, Artificial Sequence
  Synthetic
caguugauagaacuacuaa

SEQ ID NO: 193170 - RNA, 20 nt, Artificial Sequence
  Synthetic
ucaguugauagaacuacuaa

SEQ ID NO: 193171 - RNA, 21 nt, Artificial Sequence
  Synthetic
uucaguugauagaacuacuaa

SEQ ID NO: 193172 - RNA, 22 nt, Artificial Sequence
  Synthetic
cuucaguugauagaacuacuaa

SEQ ID NO: 193173 - RNA, 23 nt, Artificial Sequence
  Synthetic
ucuucaguugauagaacuacuaa

SEQ ID NO: 193174 - RNA, 24 nt, Artificial Sequence
  Synthetic
cucuucaguugauagaacuacuaa

SEQ ID NO: 193175 - RNA, 18 nt, Artificial Sequence
  Synthetic
uucuuaauuaacuacuaa

SEQ ID NO: 193176 - RNA, 19 nt, Artificial Sequence
  Synthetic
cuucuuaauuaacuacuaa

SEQ ID NO: 193177 - RNA, 20 nt, Artificial Sequence
  Synthetic
gcuucuuaauuaacuacuaa

SEQ ID NO: 193178 - RNA, 21 nt, Artificial Sequence
  Synthetic
ugcuucuuaauuaacuacuaa

SEQ ID NO: 193179 - RNA, 22 nt, Artificial Sequence
  Synthetic
augcuucuuaauuaacuacuaa

SEQ ID NO: 193180 - RNA, 23 nt, Artificial Sequence
  Synthetic
aaugcuucuuaauuaacuacuaa

SEQ ID NO: 193181 - RNA, 24 nt, Artificial Sequence
  Synthetic
uaaugcuucuuaauuaacuacuaa

SEQ ID NO: 193182 - RNA, 18 nt, Artificial Sequence
  Synthetic
agaaauauuuacuacuaa

SEQ ID NO: 193183 - RNA, 19 nt, Artificial Sequence
  Synthetic
gagaaauauuuacuacuaa

SEQ ID NO: 193184 - RNA, 20 nt, Artificial Sequence
  Synthetic
cgagaaauauuuacuacuaa

SEQ ID NO: 193185 - RNA, 21 nt, Artificial Sequence
  Synthetic
ccgagaaauauuuacuacuaa

SEQ ID NO: 193186 - RNA, 22 nt, Artificial Sequence
  Synthetic
cccgagaaauauuuacuacuaa

SEQ ID NO: 193187 - RNA, 23 nt, Artificial Sequence
  Synthetic
ccccgagaaauauuuacuacuaa

SEQ ID NO: 193188 - RNA, 24 nt, Artificial Sequence
  Synthetic
accccgagaaauauuuacuacuaa

SEQ ID NO: 193189 - RNA, 18 nt, Artificial Sequence
  Synthetic
aaaacacccagcuacuaa

SEQ ID NO: 193190 - RNA, 19 nt, Artificial Sequence
  Synthetic
aaaaacacccagcuacuaa

SEQ ID NO: 193191 - RNA, 20 nt, Artificial Sequence
  Synthetic
caaaaacacccagcuacuaa

SEQ ID NO: 193192 - RNA, 21 nt, Artificial Sequence
  Synthetic
ccaaaaacacccagcuacuaa

SEQ ID NO: 193193 - RNA, 22 nt, Artificial Sequence
  Synthetic
uccaaaaacacccagcuacuaa

SEQ ID NO: 193194 - RNA, 23 nt, Artificial Sequence
  Synthetic
auccaaaaacacccagcuacuaa

SEQ ID NO: 193195 - RNA, 24 nt, Artificial Sequence
  Synthetic
uauccaaaaacacccagcuacuaa

SEQ ID NO: 193196 - RNA, 18 nt, Artificial Sequence
  Synthetic
aaaugcggcuaguacuaa

SEQ ID NO: 193197 - RNA, 19 nt, Artificial Sequence
  Synthetic
aaaaugcggcuaguacuaa

SEQ ID NO: 193198 - RNA, 20 nt, Artificial Sequence
  Synthetic
uaaaaugcggcuaguacuaa

SEQ ID NO: 193199 - RNA, 21 nt, Artificial Sequence
  Synthetic
uuaaaaugcggcuaguacuaa

SEQ ID NO: 193200 - RNA, 22 nt, Artificial Sequence
  Synthetic
cuuaaaaugcggcuaguacuaa

SEQ ID NO: 193201 - RNA, 23 nt, Artificial Sequence
  Synthetic
ucuuaaaaugcggcuaguacuaa

SEQ ID NO: 193202 - RNA, 24 nt, Artificial Sequence
  Synthetic
cucuuaaaaugcggcuaguacuaa

SEQ ID NO: 193203 - RNA, 18 nt, Artificial Sequence
  Synthetic
caaaccauaucguacuaa

SEQ ID NO: 193204 - RNA, 19 nt, Artificial Sequence
  Synthetic
ccaaaccauaucguacuaa

SEQ ID NO: 193205 - RNA, 20 nt, Artificial Sequence
  Synthetic
gccaaaccauaucguacuaa

SEQ ID NO: 193206 - RNA, 21 nt, Artificial Sequence
  Synthetic
ugccaaaccauaucguacuaa

SEQ ID NO: 193207 - RNA, 22 nt, Artificial Sequence
  Synthetic
cugccaaaccauaucguacuaa

SEQ ID NO: 193208 - RNA, 23 nt, Artificial Sequence
  Synthetic
acugccaaaccauaucguacuaa

SEQ ID NO: 193209 - RNA, 24 nt, Artificial Sequence
  Synthetic
cacugccaaaccauaucguacuaa

SEQ ID NO: 193210 - RNA, 18 nt, Artificial Sequence
  Synthetic
aguaagcgcugguacuaa

SEQ ID NO: 193211 - RNA, 19 nt, Artificial Sequence
  Synthetic
uaguaagcgcugguacuaa

SEQ ID NO: 193212 - RNA, 20 nt, Artificial Sequence
  Synthetic
uuaguaagcgcugguacuaa

SEQ ID NO: 193213 - RNA, 21 nt, Artificial Sequence
  Synthetic
guuaguaagcgcugguacuaa

SEQ ID NO: 193214 - RNA, 22 nt, Artificial Sequence
  Synthetic
uguuaguaagcgcugguacuaa

SEQ ID NO: 193215 - RNA, 23 nt, Artificial Sequence
  Synthetic
guguuaguaagcgcugguacuaa

SEQ ID NO: 193216 - RNA, 24 nt, Artificial Sequence
  Synthetic
aguguuaguaagcgcugguacuaa

SEQ ID NO: 193217 - RNA, 18 nt, Artificial Sequence
  Synthetic
ugagaaccacuguacuaa

SEQ ID NO: 193218 - RNA, 19 nt, Artificial Sequence
  Synthetic
uugagaaccacuguacuaa

SEQ ID NO: 193219 - RNA, 20 nt, Artificial Sequence
  Synthetic
uuugagaaccacuguacuaa

SEQ ID NO: 193220 - RNA, 21 nt, Artificial Sequence
  Synthetic
guuugagaaccacuguacuaa

SEQ ID NO: 193221 - RNA, 22 nt, Artificial Sequence
  Synthetic
aguuugagaaccacuguacuaa

SEQ ID NO: 193222 - RNA, 23 nt, Artificial Sequence
  Synthetic
aaguuugagaaccacuguacuaa

SEQ ID NO: 193223 - RNA, 24 nt, Artificial Sequence
  Synthetic
caaguuugagaaccacuguacuaa

SEQ ID NO: 193224 - RNA, 18 nt, Artificial Sequence
  Synthetic
ucuuguuuucguuacuaa

SEQ ID NO: 193225 - RNA, 19 nt, Artificial Sequence
  Synthetic
cucuuguuuucguuacuaa

SEQ ID NO: 193226 - RNA, 20 nt, Artificial Sequence
  Synthetic
gcucuuguuuucguuacuaa

SEQ ID NO: 193227 - RNA, 21 nt, Artificial Sequence
  Synthetic
ggcucuuguuuucguuacuaa

SEQ ID NO: 193228 - RNA, 22 nt, Artificial Sequence
  Synthetic
uggcucuuguuuucguuacuaa

SEQ ID NO: 193229 - RNA, 23 nt, Artificial Sequence
  Synthetic
uuggcucuuguuuucguuacuaa

SEQ ID NO: 193230 - RNA, 24 nt, Artificial Sequence
  Synthetic
guuggcucuuguuuucguuacuaa

SEQ ID NO: 193231 - RNA, 18 nt, Artificial Sequence
  Synthetic
cucuguccaagaaccuaa

SEQ ID NO: 193232 - RNA, 19 nt, Artificial Sequence
  Synthetic
ucucuguccaagaaccuaa

SEQ ID NO: 193233 - RNA, 20 nt, Artificial Sequence
  Synthetic
cucucuguccaagaaccuaa

SEQ ID NO: 193234 - RNA, 21 nt, Artificial Sequence
  Synthetic
ucucucuguccaagaaccuaa

SEQ ID NO: 193235 - RNA, 22 nt, Artificial Sequence
  Synthetic
aucucucuguccaagaaccuaa

SEQ ID NO: 193236 - RNA, 23 nt, Artificial Sequence
  Synthetic
uaucucucuguccaagaaccuaa

SEQ ID NO: 193237 - RNA, 24 nt, Artificial Sequence
  Synthetic
cuaucucucuguccaagaaccuaa

SEQ ID NO: 193238 - RNA, 18 nt, Artificial Sequence
  Synthetic
aaaauaaaaauaaccuaa

SEQ ID NO: 193239 - RNA, 19 nt, Artificial Sequence
  Synthetic
caaaauaaaaauaaccuaa

SEQ ID NO: 193240 - RNA, 20 nt, Artificial Sequence
  Synthetic
acaaaauaaaaauaaccuaa

SEQ ID NO: 193241 - RNA, 21 nt, Artificial Sequence
  Synthetic
aacaaaauaaaaauaaccuaa

SEQ ID NO: 193242 - RNA, 22 nt, Artificial Sequence
  Synthetic
gaacaaaauaaaaauaaccuaa

SEQ ID NO: 193243 - RNA, 23 nt, Artificial Sequence
  Synthetic
agaacaaaauaaaaauaaccuaa

SEQ ID NO: 193244 - RNA, 24 nt, Artificial Sequence
  Synthetic
uagaacaaaauaaaaauaaccuaa

SEQ ID NO: 193245 - RNA, 18 nt, Artificial Sequence
  Synthetic
cggucagcauuaaccuaa

SEQ ID NO: 193246 - RNA, 19 nt, Artificial Sequence
  Synthetic
ucggucagcauuaaccuaa

SEQ ID NO: 193247 - RNA, 20 nt, Artificial Sequence
  Synthetic
uucggucagcauuaaccuaa

SEQ ID NO: 193248 - RNA, 21 nt, Artificial Sequence
  Synthetic
uuucggucagcauuaaccuaa

SEQ ID NO: 193249 - RNA, 22 nt, Artificial Sequence
  Synthetic
cuuucggucagcauuaaccuaa

SEQ ID NO: 193250 - RNA, 23 nt, Artificial Sequence
  Synthetic
ucuuucggucagcauuaaccuaa

SEQ ID NO: 193251 - RNA, 24 nt, Artificial Sequence
  Synthetic
aucuuucggucagcauuaaccuaa

SEQ ID NO: 193252 - RNA, 18 nt, Artificial Sequence
  Synthetic
guacauugugucaccuaa

SEQ ID NO: 193253 - RNA, 19 nt, Artificial Sequence
  Synthetic
uguacauugugucaccuaa

SEQ ID NO: 193254 - RNA, 20 nt, Artificial Sequence
  Synthetic
auguacauugugucaccuaa

SEQ ID NO: 193255 - RNA, 21 nt, Artificial Sequence
  Synthetic
aauguacauugugucaccuaa

SEQ ID NO: 193256 - RNA, 22 nt, Artificial Sequence
  Synthetic
aaauguacauugugucaccuaa

SEQ ID NO: 193257 - RNA, 23 nt, Artificial Sequence
  Synthetic
aaaauguacauugugucaccuaa

SEQ ID NO: 193258 - RNA, 24 nt, Artificial Sequence
  Synthetic
gaaaauguacauugugucaccuaa

SEQ ID NO: 193259 - RNA, 18 nt, Artificial Sequence
  Synthetic
uuuaaaagcaauaccuaa

SEQ ID NO: 193260 - RNA, 19 nt, Artificial Sequence
  Synthetic
uuuuaaaagcaauaccuaa

SEQ ID NO: 193261 - RNA, 20 nt, Artificial Sequence
  Synthetic
uuuuuaaaagcaauaccuaa

SEQ ID NO: 193262 - RNA, 21 nt, Artificial Sequence
  Synthetic
auuuuuaaaagcaauaccuaa

SEQ ID NO: 193263 - RNA, 22 nt, Artificial Sequence
  Synthetic
aauuuuuaaaagcaauaccuaa

SEQ ID NO: 193264 - RNA, 23 nt, Artificial Sequence
  Synthetic
aaauuuuuaaaagcaauaccuaa

SEQ ID NO: 193265 - RNA, 24 nt, Artificial Sequence
  Synthetic
uaaauuuuuaaaagcaauaccuaa

SEQ ID NO: 193266 - RNA, 18 nt, Artificial Sequence
  Synthetic
aaaagaagacauaccuaa

SEQ ID NO: 193267 - RNA, 19 nt, Artificial Sequence
  Synthetic
uaaaagaagacauaccuaa

SEQ ID NO: 193268 - RNA, 20 nt, Artificial Sequence
  Synthetic
uuaaaagaagacauaccuaa

SEQ ID NO: 193269 - RNA, 21 nt, Artificial Sequence
  Synthetic
uuuaaaagaagacauaccuaa

SEQ ID NO: 193270 - RNA, 22 nt, Artificial Sequence
  Synthetic
uuuuaaaagaagacauaccuaa

SEQ ID NO: 193271 - RNA, 23 nt, Artificial Sequence
  Synthetic
auuuuaaaagaagacauaccuaa

SEQ ID NO: 193272 - RNA, 24 nt, Artificial Sequence
  Synthetic
uauuuuaaaagaagacauaccuaa

SEQ ID NO: 193273 - RNA, 18 nt, Artificial Sequence
  Synthetic
gccuaagcagauaccuaa

SEQ ID NO: 193274 - RNA, 19 nt, Artificial Sequence
  Synthetic
agccuaagcagauaccuaa

SEQ ID NO: 193275 - RNA, 20 nt, Artificial Sequence
  Synthetic
cagccuaagcagauaccuaa

SEQ ID NO: 193276 - RNA, 21 nt, Artificial Sequence
  Synthetic
ccagccuaagcagauaccuaa

SEQ ID NO: 193277 - RNA, 22 nt, Artificial Sequence
  Synthetic
accagccuaagcagauaccuaa

SEQ ID NO: 193278 - RNA, 23 nt, Artificial Sequence
  Synthetic
uaccagccuaagcagauaccuaa

SEQ ID NO: 193279 - RNA, 24 nt, Artificial Sequence
  Synthetic
auaccagccuaagcagauaccuaa

SEQ ID NO: 193280 - RNA, 18 nt, Artificial Sequence
  Synthetic
ucucgaaaagaacccuaa

SEQ ID NO: 193281 - RNA, 19 nt, Artificial Sequence
  Synthetic
aucucgaaaagaacccuaa

SEQ ID NO: 193282 - RNA, 20 nt, Artificial Sequence
  Synthetic
uaucucgaaaagaacccuaa

SEQ ID NO: 193283 - RNA, 21 nt, Artificial Sequence
  Synthetic
guaucucgaaaagaacccuaa

SEQ ID NO: 193284 - RNA, 22 nt, Artificial Sequence
  Synthetic
aguaucucgaaaagaacccuaa

SEQ ID NO: 193285 - RNA, 23 nt, Artificial Sequence
  Synthetic
uaguaucucgaaaagaacccuaa

SEQ ID NO: 193286 - RNA, 24 nt, Artificial Sequence
  Synthetic
guaguaucucgaaaagaacccuaa

SEQ ID NO: 193287 - RNA, 18 nt, Artificial Sequence
  Synthetic
aguuuuuaguaacccuaa

SEQ ID NO: 193288 - RNA, 19 nt, Artificial Sequence
  Synthetic
uaguuuuuaguaacccuaa

SEQ ID NO: 193289 - RNA, 20 nt, Artificial Sequence
  Synthetic
guaguuuuuaguaacccuaa

SEQ ID NO: 193290 - RNA, 21 nt, Artificial Sequence
  Synthetic
uguaguuuuuaguaacccuaa

SEQ ID NO: 193291 - RNA, 22 nt, Artificial Sequence
  Synthetic
uuguaguuuuuaguaacccuaa

SEQ ID NO: 193292 - RNA, 23 nt, Artificial Sequence
  Synthetic
guuguaguuuuuaguaacccuaa

SEQ ID NO: 193293 - RNA, 24 nt, Artificial Sequence
  Synthetic
aguuguaguuuuuaguaacccuaa

SEQ ID NO: 193294 - RNA, 18 nt, Artificial Sequence
  Synthetic
accuuuugucaccccuaa

SEQ ID NO: 193295 - RNA, 19 nt, Artificial Sequence
  Synthetic
uaccuuuugucaccccuaa

SEQ ID NO: 193296 - RNA, 20 nt, Artificial Sequence
  Synthetic
auaccuuuugucaccccuaa

SEQ ID NO: 193297 - RNA, 21 nt, Artificial Sequence
  Synthetic
uauaccuuuugucaccccuaa

SEQ ID NO: 193298 - RNA, 22 nt, Artificial Sequence
  Synthetic
auauaccuuuugucaccccuaa

SEQ ID NO: 193299 - RNA, 23 nt, Artificial Sequence
  Synthetic
uauauaccuuuugucaccccuaa

SEQ ID NO: 193300 - RNA, 24 nt, Artificial Sequence
  Synthetic
cuauauaccuuuugucaccccuaa

SEQ ID NO: 193301 - RNA, 18 nt, Artificial Sequence
  Synthetic
gcauuaucuugccccuaa

SEQ ID NO: 193302 - RNA, 19 nt, Artificial Sequence
  Synthetic
ugcauuaucuugccccuaa

SEQ ID NO: 193303 - RNA, 20 nt, Artificial Sequence
  Synthetic
augcauuaucuugccccuaa

SEQ ID NO: 193304 - RNA, 21 nt, Artificial Sequence
  Synthetic
aaugcauuaucuugccccuaa

SEQ ID NO: 193305 - RNA, 22 nt, Artificial Sequence
  Synthetic
gaaugcauuaucuugccccuaa

SEQ ID NO: 193306 - RNA, 23 nt, Artificial Sequence
  Synthetic
agaaugcauuaucuugccccuaa

SEQ ID NO: 193307 - RNA, 24 nt, Artificial Sequence
  Synthetic
uagaaugcauuaucuugccccuaa

SEQ ID NO: 193308 - RNA, 18 nt, Artificial Sequence
  Synthetic
aaauacccuacucccuaa

SEQ ID NO: 193309 - RNA, 19 nt, Artificial Sequence
  Synthetic
aaaauacccuacucccuaa

SEQ ID NO: 193310 - RNA, 20 nt, Artificial Sequence
  Synthetic
caaaauacccuacucccuaa

SEQ ID NO: 193311 - RNA, 21 nt, Artificial Sequence
  Synthetic
acaaaauacccuacucccuaa

SEQ ID NO: 193312 - RNA, 22 nt, Artificial Sequence
  Synthetic
gacaaaauacccuacucccuaa

SEQ ID NO: 193313 - RNA, 23 nt, Artificial Sequence
  Synthetic
ugacaaaauacccuacucccuaa

SEQ ID NO: 193314 - RNA, 24 nt, Artificial Sequence
  Synthetic
uugacaaaauacccuacucccuaa

SEQ ID NO: 193315 - RNA, 18 nt, Artificial Sequence
  Synthetic
auauauuggccucccuaa

SEQ ID NO: 193316 - RNA, 19 nt, Artificial Sequence
  Synthetic
cauauauuggccucccuaa

SEQ ID NO: 193317 - RNA, 20 nt, Artificial Sequence
  Synthetic
ucauauauuggccucccuaa

SEQ ID NO: 193318 - RNA, 21 nt, Artificial Sequence
  Synthetic
uucauauauuggccucccuaa

SEQ ID NO: 193319 - RNA, 22 nt, Artificial Sequence
  Synthetic
cuucauauauuggccucccuaa

SEQ ID NO: 193320 - RNA, 23 nt, Artificial Sequence
  Synthetic
ucuucauauauuggccucccuaa

SEQ ID NO: 193321 - RNA, 24 nt, Artificial Sequence
  Synthetic
cucuucauauauuggccucccuaa

SEQ ID NO: 193322 - RNA, 18 nt, Artificial Sequence
  Synthetic
aauaacauuccucccuaa

SEQ ID NO: 193323 - RNA, 19 nt, Artificial Sequence
  Synthetic
aaauaacauuccucccuaa

SEQ ID NO: 193324 - RNA, 20 nt, Artificial Sequence
  Synthetic
uaaauaacauuccucccuaa

SEQ ID NO: 193325 - RNA, 21 nt, Artificial Sequence
  Synthetic
auaaauaacauuccucccuaa

SEQ ID NO: 193326 - RNA, 22 nt, Artificial Sequence
  Synthetic
uauaaauaacauuccucccuaa

SEQ ID NO: 193327 - RNA, 23 nt, Artificial Sequence
  Synthetic
guauaaauaacauuccucccuaa

SEQ ID NO: 193328 - RNA, 24 nt, Artificial Sequence
  Synthetic
uguauaaauaacauuccucccuaa

SEQ ID NO: 193329 - RNA, 18 nt, Artificial Sequence
  Synthetic
cuucaauuuuuucccuaa

SEQ ID NO: 193330 - RNA, 19 nt, Artificial Sequence
  Synthetic
acuucaauuuuuucccuaa

SEQ ID NO: 193331 - RNA, 20 nt, Artificial Sequence
  Synthetic
cacuucaauuuuuucccuaa

SEQ ID NO: 193332 - RNA, 21 nt, Artificial Sequence
  Synthetic
ucacuucaauuuuuucccuaa

SEQ ID NO: 193333 - RNA, 22 nt, Artificial Sequence
  Synthetic
aucacuucaauuuuuucccuaa

SEQ ID NO: 193334 - RNA, 23 nt, Artificial Sequence
  Synthetic
aaucacuucaauuuuuucccuaa

SEQ ID NO: 193335 - RNA, 24 nt, Artificial Sequence
  Synthetic
aaaucacuucaauuuuuucccuaa

SEQ ID NO: 193336 - RNA, 18 nt, Artificial Sequence
  Synthetic
cuuauauaugaagccuaa

SEQ ID NO: 193337 - RNA, 19 nt, Artificial Sequence
  Synthetic
gcuuauauaugaagccuaa

SEQ ID NO: 193338 - RNA, 20 nt, Artificial Sequence
  Synthetic
ugcuuauauaugaagccuaa

SEQ ID NO: 193339 - RNA, 21 nt, Artificial Sequence
  Synthetic
gugcuuauauaugaagccuaa

SEQ ID NO: 193340 - RNA, 22 nt, Artificial Sequence
  Synthetic
ugugcuuauauaugaagccuaa

SEQ ID NO: 193341 - RNA, 23 nt, Artificial Sequence
  Synthetic
cugugcuuauauaugaagccuaa

SEQ ID NO: 193342 - RNA, 24 nt, Artificial Sequence
  Synthetic
ucugugcuuauauaugaagccuaa

SEQ ID NO: 193343 - RNA, 18 nt, Artificial Sequence
  Synthetic
caaucuuauguagccuaa

SEQ ID NO: 193344 - RNA, 19 nt, Artificial Sequence
  Synthetic
ccaaucuuauguagccuaa

SEQ ID NO: 193345 - RNA, 20 nt, Artificial Sequence
  Synthetic
cccaaucuuauguagccuaa

SEQ ID NO: 193346 - RNA, 21 nt, Artificial Sequence
  Synthetic
ucccaaucuuauguagccuaa

SEQ ID NO: 193347 - RNA, 22 nt, Artificial Sequence
  Synthetic
gucccaaucuuauguagccuaa

SEQ ID NO: 193348 - RNA, 23 nt, Artificial Sequence
  Synthetic
agucccaaucuuauguagccuaa

SEQ ID NO: 193349 - RNA, 24 nt, Artificial Sequence
  Synthetic
aagucccaaucuuauguagccuaa

SEQ ID NO: 193350 - RNA, 18 nt, Artificial Sequence
  Synthetic
acaagcccagaggccuaa

SEQ ID NO: 193351 - RNA, 19 nt, Artificial Sequence
  Synthetic
cacaagcccagaggccuaa

SEQ ID NO: 193352 - RNA, 20 nt, Artificial Sequence
  Synthetic
ucacaagcccagaggccuaa

SEQ ID NO: 193353 - RNA, 21 nt, Artificial Sequence
  Synthetic
aucacaagcccagaggccuaa

SEQ ID NO: 193354 - RNA, 22 nt, Artificial Sequence
  Synthetic
caucacaagcccagaggccuaa

SEQ ID NO: 193355 - RNA, 23 nt, Artificial Sequence
  Synthetic
ccaucacaagcccagaggccuaa

SEQ ID NO: 193356 - RNA, 24 nt, Artificial Sequence
  Synthetic
cccaucacaagcccagaggccuaa

SEQ ID NO: 193357 - RNA, 18 nt, Artificial Sequence
  Synthetic
acucacauuacauccuaa

SEQ ID NO: 193358 - RNA, 19 nt, Artificial Sequence
  Synthetic
aacucacauuacauccuaa

SEQ ID NO: 193359 - RNA, 20 nt, Artificial Sequence
  Synthetic
aaacucacauuacauccuaa

SEQ ID NO: 193360 - RNA, 21 nt, Artificial Sequence
  Synthetic
gaaacucacauuacauccuaa

SEQ ID NO: 193361 - RNA, 22 nt, Artificial Sequence
  Synthetic
ugaaacucacauuacauccuaa

SEQ ID NO: 193362 - RNA, 23 nt, Artificial Sequence
  Synthetic
uugaaacucacauuacauccuaa

SEQ ID NO: 193363 - RNA, 24 nt, Artificial Sequence
  Synthetic
auugaaacucacauuacauccuaa

SEQ ID NO: 193364 - RNA, 18 nt, Artificial Sequence
  Synthetic
aagucucccucauccuaa

SEQ ID NO: 193365 - RNA, 19 nt, Artificial Sequence
  Synthetic
caagucucccucauccuaa

SEQ ID NO: 193366 - RNA, 20 nt, Artificial Sequence
  Synthetic
ucaagucucccucauccuaa

SEQ ID NO: 193367 - RNA, 21 nt, Artificial Sequence
  Synthetic
cucaagucucccucauccuaa

SEQ ID NO: 193368 - RNA, 22 nt, Artificial Sequence
  Synthetic
acucaagucucccucauccuaa

SEQ ID NO: 193369 - RNA, 23 nt, Artificial Sequence
  Synthetic
uacucaagucucccucauccuaa

SEQ ID NO: 193370 - RNA, 24 nt, Artificial Sequence
  Synthetic
auacucaagucucccucauccuaa

SEQ ID NO: 193371 - RNA, 18 nt, Artificial Sequence
  Synthetic
ccauaauuaguauccuaa

SEQ ID NO: 193372 - RNA, 19 nt, Artificial Sequence
  Synthetic
gccauaauuaguauccuaa

SEQ ID NO: 193373 - RNA, 20 nt, Artificial Sequence
  Synthetic
ugccauaauuaguauccuaa

SEQ ID NO: 193374 - RNA, 21 nt, Artificial Sequence
  Synthetic
gugccauaauuaguauccuaa

SEQ ID NO: 193375 - RNA, 22 nt, Artificial Sequence
  Synthetic
agugccauaauuaguauccuaa

SEQ ID NO: 193376 - RNA, 23 nt, Artificial Sequence
  Synthetic
uagugccauaauuaguauccuaa

SEQ ID NO: 193377 - RNA, 24 nt, Artificial Sequence
  Synthetic
auagugccauaauuaguauccuaa

SEQ ID NO: 193378 - RNA, 18 nt, Artificial Sequence
  Synthetic
ucacaagaguccuccuaa

SEQ ID NO: 193379 - RNA, 19 nt, Artificial Sequence
  Synthetic
aucacaagaguccuccuaa

SEQ ID NO: 193380 - RNA, 20 nt, Artificial Sequence
  Synthetic
aaucacaagaguccuccuaa

SEQ ID NO: 193381 - RNA, 21 nt, Artificial Sequence
  Synthetic
uaaucacaagaguccuccuaa

SEQ ID NO: 193382 - RNA, 22 nt, Artificial Sequence
  Synthetic
guaaucacaagaguccuccuaa

SEQ ID NO: 193383 - RNA, 23 nt, Artificial Sequence
  Synthetic
uguaaucacaagaguccuccuaa

SEQ ID NO: 193384 - RNA, 24 nt, Artificial Sequence
  Synthetic
auguaaucacaagaguccuccuaa

SEQ ID NO: 193385 - RNA, 18 nt, Artificial Sequence
  Synthetic
cacaaacuguucuccuaa

SEQ ID NO: 193386 - RNA, 19 nt, Artificial Sequence
  Synthetic
acacaaacuguucuccuaa

SEQ ID NO: 193387 - RNA, 20 nt, Artificial Sequence
  Synthetic
uacacaaacuguucuccuaa

SEQ ID NO: 193388 - RNA, 21 nt, Artificial Sequence
  Synthetic
uuacacaaacuguucuccuaa

SEQ ID NO: 193389 - RNA, 22 nt, Artificial Sequence
  Synthetic
auuacacaaacuguucuccuaa

SEQ ID NO: 193390 - RNA, 23 nt, Artificial Sequence
  Synthetic
cauuacacaaacuguucuccuaa

SEQ ID NO: 193391 - RNA, 24 nt, Artificial Sequence
  Synthetic
acauuacacaaacuguucuccuaa

SEQ ID NO: 193392 - RNA, 18 nt, Artificial Sequence
  Synthetic
gaaaacccaaaguccuaa

SEQ ID NO: 193393 - RNA, 19 nt, Artificial Sequence
  Synthetic
agaaaacccaaaguccuaa

SEQ ID NO: 193394 - RNA, 20 nt, Artificial Sequence
  Synthetic
aagaaaacccaaaguccuaa

SEQ ID NO: 193395 - RNA, 21 nt, Artificial Sequence
  Synthetic
aaagaaaacccaaaguccuaa

SEQ ID NO: 193396 - RNA, 22 nt, Artificial Sequence
  Synthetic
aaaagaaaacccaaaguccuaa

SEQ ID NO: 193397 - RNA, 23 nt, Artificial Sequence
  Synthetic
caaaagaaaacccaaaguccuaa

SEQ ID NO: 193398 - RNA, 24 nt, Artificial Sequence
  Synthetic
acaaaagaaaacccaaaguccuaa

SEQ ID NO: 193399 - RNA, 18 nt, Artificial Sequence
  Synthetic
uucucgguggcuuccuaa

SEQ ID NO: 193400 - RNA, 19 nt, Artificial Sequence
  Synthetic
auucucgguggcuuccuaa

SEQ ID NO: 193401 - RNA, 20 nt, Artificial Sequence
  Synthetic
uauucucgguggcuuccuaa

SEQ ID NO: 193402 - RNA, 21 nt, Artificial Sequence
  Synthetic
uuauucucgguggcuuccuaa

SEQ ID NO: 193403 - RNA, 22 nt, Artificial Sequence
  Synthetic
uuuauucucgguggcuuccuaa

SEQ ID NO: 193404 - RNA, 23 nt, Artificial Sequence
  Synthetic
uuuuauucucgguggcuuccuaa

SEQ ID NO: 193405 - RNA, 24 nt, Artificial Sequence
  Synthetic
cuuuuauucucgguggcuuccuaa

SEQ ID NO: 193406 - RNA, 18 nt, Artificial Sequence
  Synthetic
uuaucacucuguuccuaa

SEQ ID NO: 193407 - RNA, 19 nt, Artificial Sequence
  Synthetic
auuaucacucuguuccuaa

SEQ ID NO: 193408 - RNA, 20 nt, Artificial Sequence
  Synthetic
gauuaucacucuguuccuaa

SEQ ID NO: 193409 - RNA, 21 nt, Artificial Sequence
  Synthetic
agauuaucacucuguuccuaa

SEQ ID NO: 193410 - RNA, 22 nt, Artificial Sequence
  Synthetic
uagauuaucacucuguuccuaa

SEQ ID NO: 193411 - RNA, 23 nt, Artificial Sequence
  Synthetic
auagauuaucacucuguuccuaa

SEQ ID NO: 193412 - RNA, 24 nt, Artificial Sequence
  Synthetic
aauagauuaucacucuguuccuaa

SEQ ID NO: 193413 - RNA, 18 nt, Artificial Sequence
  Synthetic
agaauuguuuguuccuaa

SEQ ID NO: 193414 - RNA, 19 nt, Artificial Sequence
  Synthetic
cagaauuguuuguuccuaa

SEQ ID NO: 193415 - RNA, 20 nt, Artificial Sequence
  Synthetic
ccagaauuguuuguuccuaa

SEQ ID NO: 193416 - RNA, 21 nt, Artificial Sequence
  Synthetic
uccagaauuguuuguuccuaa

SEQ ID NO: 193417 - RNA, 22 nt, Artificial Sequence
  Synthetic
uuccagaauuguuuguuccuaa

SEQ ID NO: 193418 - RNA, 23 nt, Artificial Sequence
  Synthetic
uuuccagaauuguuuguuccuaa

SEQ ID NO: 193419 - RNA, 24 nt, Artificial Sequence
  Synthetic
uuuuccagaauuguuuguuccuaa

SEQ ID NO: 193420 - RNA, 18 nt, Artificial Sequence
  Synthetic
cugaaauaacuaagcuaa

SEQ ID NO: 193421 - RNA, 19 nt, Artificial Sequence
  Synthetic
acugaaauaacuaagcuaa

SEQ ID NO: 193422 - RNA, 20 nt, Artificial Sequence
  Synthetic
aacugaaauaacuaagcuaa

SEQ ID NO: 193423 - RNA, 21 nt, Artificial Sequence
  Synthetic
caacugaaauaacuaagcuaa

SEQ ID NO: 193424 - RNA, 22 nt, Artificial Sequence
  Synthetic
ucaacugaaauaacuaagcuaa

SEQ ID NO: 193425 - RNA, 23 nt, Artificial Sequence
  Synthetic
cucaacugaaauaacuaagcuaa

SEQ ID NO: 193426 - RNA, 24 nt, Artificial Sequence
  Synthetic
ucucaacugaaauaacuaagcuaa

SEQ ID NO: 193427 - RNA, 18 nt, Artificial Sequence
  Synthetic
auaauaugugacagcuaa

SEQ ID NO: 193428 - RNA, 19 nt, Artificial Sequence
  Synthetic
cauaauaugugacagcuaa

SEQ ID NO: 193429 - RNA, 20 nt, Artificial Sequence
  Synthetic
ucauaauaugugacagcuaa

SEQ ID NO: 193430 - RNA, 21 nt, Artificial Sequence
  Synthetic
gucauaauaugugacagcuaa

SEQ ID NO: 193431 - RNA, 22 nt, Artificial Sequence
  Synthetic
ggucauaauaugugacagcuaa

SEQ ID NO: 193432 - RNA, 23 nt, Artificial Sequence
  Synthetic
aggucauaauaugugacagcuaa

SEQ ID NO: 193433 - RNA, 24 nt, Artificial Sequence
  Synthetic
caggucauaauaugugacagcuaa

SEQ ID NO: 193434 - RNA, 18 nt, Artificial Sequence
  Synthetic
guaagaauuugcagcuaa

SEQ ID NO: 193435 - RNA, 19 nt, Artificial Sequence
  Synthetic
uguaagaauuugcagcuaa

SEQ ID NO: 193436 - RNA, 20 nt, Artificial Sequence
  Synthetic
uuguaagaauuugcagcuaa

SEQ ID NO: 193437 - RNA, 21 nt, Artificial Sequence
  Synthetic
guuguaagaauuugcagcuaa

SEQ ID NO: 193438 - RNA, 22 nt, Artificial Sequence
  Synthetic
uguuguaagaauuugcagcuaa

SEQ ID NO: 193439 - RNA, 23 nt, Artificial Sequence
  Synthetic
uuguuguaagaauuugcagcuaa

SEQ ID NO: 193440 - RNA, 24 nt, Artificial Sequence
  Synthetic
guuguuguaagaauuugcagcuaa

SEQ ID NO: 193441 - RNA, 18 nt, Artificial Sequence
  Synthetic
uuucaguauuucagcuaa

SEQ ID NO: 193442 - RNA, 19 nt, Artificial Sequence
  Synthetic
auuucaguauuucagcuaa

SEQ ID NO: 193443 - RNA, 20 nt, Artificial Sequence
  Synthetic
aauuucaguauuucagcuaa

SEQ ID NO: 193444 - RNA, 21 nt, Artificial Sequence
  Synthetic
caauuucaguauuucagcuaa

SEQ ID NO: 193445 - RNA, 22 nt, Artificial Sequence
  Synthetic
gcaauuucaguauuucagcuaa

SEQ ID NO: 193446 - RNA, 23 nt, Artificial Sequence
  Synthetic
ugcaauuucaguauuucagcuaa

SEQ ID NO: 193447 - RNA, 24 nt, Artificial Sequence
  Synthetic
augcaauuucaguauuucagcuaa

SEQ ID NO: 193448 - RNA, 18 nt, Artificial Sequence
  Synthetic
gcugcaauuuucagcuaa

SEQ ID NO: 193449 - RNA, 19 nt, Artificial Sequence
  Synthetic
ggcugcaauuuucagcuaa

SEQ ID NO: 193450 - RNA, 20 nt, Artificial Sequence
  Synthetic
gggcugcaauuuucagcuaa

SEQ ID NO: 193451 - RNA, 21 nt, Artificial Sequence
  Synthetic
ugggcugcaauuuucagcuaa

SEQ ID NO: 193452 - RNA, 22 nt, Artificial Sequence
  Synthetic
cugggcugcaauuuucagcuaa

SEQ ID NO: 193453 - RNA, 23 nt, Artificial Sequence
  Synthetic
gcugggcugcaauuuucagcuaa

SEQ ID NO: 193454 - RNA, 24 nt, Artificial Sequence
  Synthetic
agcugggcugcaauuuucagcuaa

SEQ ID NO: 193455 - RNA, 18 nt, Artificial Sequence
  Synthetic
cguggauggcagagcuaa

SEQ ID NO: 193456 - RNA, 19 nt, Artificial Sequence
  Synthetic
ccguggauggcagagcuaa

SEQ ID NO: 193457 - RNA, 20 nt, Artificial Sequence
  Synthetic
uccguggauggcagagcuaa

SEQ ID NO: 193458 - RNA, 21 nt, Artificial Sequence
  Synthetic
guccguggauggcagagcuaa

SEQ ID NO: 193459 - RNA, 22 nt, Artificial Sequence
  Synthetic
uguccguggauggcagagcuaa

SEQ ID NO: 193460 - RNA, 23 nt, Artificial Sequence
  Synthetic
cuguccguggauggcagagcuaa

SEQ ID NO: 193461 - RNA, 24 nt, Artificial Sequence
  Synthetic
gcuguccguggauggcagagcuaa

SEQ ID NO: 193462 - RNA, 18 nt, Artificial Sequence
  Synthetic
caaacucuuacgagcuaa

SEQ ID NO: 193463 - RNA, 19 nt, Artificial Sequence
  Synthetic
acaaacucuuacgagcuaa

SEQ ID NO: 193464 - RNA, 20 nt, Artificial Sequence
  Synthetic
aacaaacucuuacgagcuaa

SEQ ID NO: 193465 - RNA, 21 nt, Artificial Sequence
  Synthetic
uaacaaacucuuacgagcuaa

SEQ ID NO: 193466 - RNA, 22 nt, Artificial Sequence
  Synthetic
auaacaaacucuuacgagcuaa

SEQ ID NO: 193467 - RNA, 23 nt, Artificial Sequence
  Synthetic
aauaacaaacucuuacgagcuaa

SEQ ID NO: 193468 - RNA, 24 nt, Artificial Sequence
  Synthetic
uaauaacaaacucuuacgagcuaa

SEQ ID NO: 193469 - RNA, 18 nt, Artificial Sequence
  Synthetic
aggauuuaagggagcuaa

SEQ ID NO: 193470 - RNA, 19 nt, Artificial Sequence
  Synthetic
aaggauuuaagggagcuaa

SEQ ID NO: 193471 - RNA, 20 nt, Artificial Sequence
  Synthetic
gaaggauuuaagggagcuaa

SEQ ID NO: 193472 - RNA, 21 nt, Artificial Sequence
  Synthetic
ugaaggauuuaagggagcuaa

SEQ ID NO: 193473 - RNA, 22 nt, Artificial Sequence
  Synthetic
cugaaggauuuaagggagcuaa

SEQ ID NO: 193474 - RNA, 23 nt, Artificial Sequence
  Synthetic
gcugaaggauuuaagggagcuaa

SEQ ID NO: 193475 - RNA, 24 nt, Artificial Sequence
  Synthetic
ugcugaaggauuuaagggagcuaa

SEQ ID NO: 193476 - RNA, 18 nt, Artificial Sequence
  Synthetic
cauugagaauggagcuaa

SEQ ID NO: 193477 - RNA, 19 nt, Artificial Sequence
  Synthetic
ccauugagaauggagcuaa

SEQ ID NO: 193478 - RNA, 20 nt, Artificial Sequence
  Synthetic
accauugagaauggagcuaa

SEQ ID NO: 193479 - RNA, 21 nt, Artificial Sequence
  Synthetic
gaccauugagaauggagcuaa

SEQ ID NO: 193480 - RNA, 22 nt, Artificial Sequence
  Synthetic
ugaccauugagaauggagcuaa

SEQ ID NO: 193481 - RNA, 23 nt, Artificial Sequence
  Synthetic
cugaccauugagaauggagcuaa

SEQ ID NO: 193482 - RNA, 24 nt, Artificial Sequence
  Synthetic
gcugaccauugagaauggagcuaa

SEQ ID NO: 193483 - RNA, 18 nt, Artificial Sequence
  Synthetic
aauaaaaacuggagcuaa

SEQ ID NO: 193484 - RNA, 19 nt, Artificial Sequence
  Synthetic
aaauaaaaacuggagcuaa

SEQ ID NO: 193485 - RNA, 20 nt, Artificial Sequence
  Synthetic
aaaauaaaaacuggagcuaa

SEQ ID NO: 193486 - RNA, 21 nt, Artificial Sequence
  Synthetic
aaaaauaaaaacuggagcuaa

SEQ ID NO: 193487 - RNA, 22 nt, Artificial Sequence
  Synthetic
caaaaauaaaaacuggagcuaa

SEQ ID NO: 193488 - RNA, 23 nt, Artificial Sequence
  Synthetic
acaaaaauaaaaacuggagcuaa

SEQ ID NO: 193489 - RNA, 24 nt, Artificial Sequence
  Synthetic
uacaaaaauaaaaacuggagcuaa

SEQ ID NO: 193490 - RNA, 18 nt, Artificial Sequence
  Synthetic
ugaacaaagcugagcuaa

SEQ ID NO: 193491 - RNA, 19 nt, Artificial Sequence
  Synthetic
augaacaaagcugagcuaa

SEQ ID NO: 193492 - RNA, 20 nt, Artificial Sequence
  Synthetic
aaugaacaaagcugagcuaa

SEQ ID NO: 193493 - RNA, 21 nt, Artificial Sequence
  Synthetic
gaaugaacaaagcugagcuaa

SEQ ID NO: 193494 - RNA, 22 nt, Artificial Sequence
  Synthetic
ugaaugaacaaagcugagcuaa

SEQ ID NO: 193495 - RNA, 23 nt, Artificial Sequence
  Synthetic
uugaaugaacaaagcugagcuaa

SEQ ID NO: 193496 - RNA, 24 nt, Artificial Sequence
  Synthetic
guugaaugaacaaagcugagcuaa

SEQ ID NO: 193497 - RNA, 18 nt, Artificial Sequence
  Synthetic
uacugugacaauagcuaa

SEQ ID NO: 193498 - RNA, 19 nt, Artificial Sequence
  Synthetic
uuacugugacaauagcuaa

SEQ ID NO: 193499 - RNA, 20 nt, Artificial Sequence
  Synthetic
auuacugugacaauagcuaa

SEQ ID NO: 193500 - RNA, 21 nt, Artificial Sequence
  Synthetic
cauuacugugacaauagcuaa

SEQ ID NO: 193501 - RNA, 22 nt, Artificial Sequence
  Synthetic
acauuacugugacaauagcuaa

SEQ ID NO: 193502 - RNA, 23 nt, Artificial Sequence
  Synthetic
uacauuacugugacaauagcuaa

SEQ ID NO: 193503 - RNA, 24 nt, Artificial Sequence
  Synthetic
cuacauuacugugacaauagcuaa

SEQ ID NO: 193504 - RNA, 18 nt, Artificial Sequence
  Synthetic
agaucaccgcauagcuaa

SEQ ID NO: 193505 - RNA, 19 nt, Artificial Sequence
  Synthetic
uagaucaccgcauagcuaa

SEQ ID NO: 193506 - RNA, 20 nt, Artificial Sequence
  Synthetic
auagaucaccgcauagcuaa

SEQ ID NO: 193507 - RNA, 21 nt, Artificial Sequence
  Synthetic
aauagaucaccgcauagcuaa

SEQ ID NO: 193508 - RNA, 22 nt, Artificial Sequence
  Synthetic
aaauagaucaccgcauagcuaa

SEQ ID NO: 193509 - RNA, 23 nt, Artificial Sequence
  Synthetic
gaaauagaucaccgcauagcuaa

SEQ ID NO: 193510 - RNA, 24 nt, Artificial Sequence
  Synthetic
ggaaauagaucaccgcauagcuaa

SEQ ID NO: 193511 - RNA, 18 nt, Artificial Sequence
  Synthetic
ucaaagucauauagcuaa

SEQ ID NO: 193512 - RNA, 19 nt, Artificial Sequence
  Synthetic
cucaaagucauauagcuaa

SEQ ID NO: 193513 - RNA, 20 nt, Artificial Sequence
  Synthetic
ucucaaagucauauagcuaa

SEQ ID NO: 193514 - RNA, 21 nt, Artificial Sequence
  Synthetic
uucucaaagucauauagcuaa

SEQ ID NO: 193515 - RNA, 22 nt, Artificial Sequence
  Synthetic
uuucucaaagucauauagcuaa

SEQ ID NO: 193516 - RNA, 23 nt, Artificial Sequence
  Synthetic
uuuucucaaagucauauagcuaa

SEQ ID NO: 193517 - RNA, 24 nt, Artificial Sequence
  Synthetic
auuuucucaaagucauauagcuaa

SEQ ID NO: 193518 - RNA, 18 nt, Artificial Sequence
  Synthetic
aaacggaugcuuagcuaa

SEQ ID NO: 193519 - RNA, 19 nt, Artificial Sequence
  Synthetic
aaaacggaugcuuagcuaa

SEQ ID NO: 193520 - RNA, 20 nt, Artificial Sequence
  Synthetic
uaaaacggaugcuuagcuaa

SEQ ID NO: 193521 - RNA, 21 nt, Artificial Sequence
  Synthetic
uuaaaacggaugcuuagcuaa

SEQ ID NO: 193522 - RNA, 22 nt, Artificial Sequence
  Synthetic
uuuaaaacggaugcuuagcuaa

SEQ ID NO: 193523 - RNA, 23 nt, Artificial Sequence
  Synthetic
uuuuaaaacggaugcuuagcuaa

SEQ ID NO: 193524 - RNA, 24 nt, Artificial Sequence
  Synthetic
auuuuaaaacggaugcuuagcuaa

SEQ ID NO: 193525 - RNA, 18 nt, Artificial Sequence
  Synthetic
gucuuucuuaaaggcuaa

SEQ ID NO: 193526 - RNA, 19 nt, Artificial Sequence
  Synthetic
ugucuuucuuaaaggcuaa

SEQ ID NO: 193527 - RNA, 20 nt, Artificial Sequence
  Synthetic
augucuuucuuaaaggcuaa

SEQ ID NO: 193528 - RNA, 21 nt, Artificial Sequence
  Synthetic
caugucuuucuuaaaggcuaa

SEQ ID NO: 193529 - RNA, 22 nt, Artificial Sequence
  Synthetic
ccaugucuuucuuaaaggcuaa

SEQ ID NO: 193530 - RNA, 23 nt, Artificial Sequence
  Synthetic
cccaugucuuucuuaaaggcuaa

SEQ ID NO: 193531 - RNA, 24 nt, Artificial Sequence
  Synthetic
ucccaugucuuucuuaaaggcuaa

SEQ ID NO: 193532 - RNA, 18 nt, Artificial Sequence
  Synthetic
aguucacugcugggcuaa

SEQ ID NO: 193533 - RNA, 19 nt, Artificial Sequence
  Synthetic
aaguucacugcugggcuaa

SEQ ID NO: 193534 - RNA, 20 nt, Artificial Sequence
  Synthetic
gaaguucacugcugggcuaa

SEQ ID NO: 193535 - RNA, 21 nt, Artificial Sequence
  Synthetic
ugaaguucacugcugggcuaa

SEQ ID NO: 193536 - RNA, 22 nt, Artificial Sequence
  Synthetic
cugaaguucacugcugggcuaa

SEQ ID NO: 193537 - RNA, 23 nt, Artificial Sequence
  Synthetic
ccugaaguucacugcugggcuaa

SEQ ID NO: 193538 - RNA, 24 nt, Artificial Sequence
  Synthetic
cccugaaguucacugcugggcuaa

SEQ ID NO: 193539 - RNA, 18 nt, Artificial Sequence
  Synthetic
aaguuaccaaauggcuaa

SEQ ID NO: 193540 - RNA, 19 nt, Artificial Sequence
  Synthetic
uaaguuaccaaauggcuaa

SEQ ID NO: 193541 - RNA, 20 nt, Artificial Sequence
  Synthetic
cuaaguuaccaaauggcuaa

SEQ ID NO: 193542 - RNA, 21 nt, Artificial Sequence
  Synthetic
gcuaaguuaccaaauggcuaa

SEQ ID NO: 193543 - RNA, 22 nt, Artificial Sequence
  Synthetic
agcuaaguuaccaaauggcuaa

SEQ ID NO: 193544 - RNA, 23 nt, Artificial Sequence
  Synthetic
aagcuaaguuaccaaauggcuaa

SEQ ID NO: 193545 - RNA, 24 nt, Artificial Sequence
  Synthetic
caagcuaaguuaccaaauggcuaa

SEQ ID NO: 193546 - RNA, 18 nt, Artificial Sequence
  Synthetic
uccacagugucuggcuaa

SEQ ID NO: 193547 - RNA, 19 nt, Artificial Sequence
  Synthetic
uuccacagugucuggcuaa

SEQ ID NO: 193548 - RNA, 20 nt, Artificial Sequence
  Synthetic
cuuccacagugucuggcuaa

SEQ ID NO: 193549 - RNA, 21 nt, Artificial Sequence
  Synthetic
ccuuccacagugucuggcuaa

SEQ ID NO: 193550 - RNA, 22 nt, Artificial Sequence
  Synthetic
accuuccacagugucuggcuaa

SEQ ID NO: 193551 - RNA, 23 nt, Artificial Sequence
  Synthetic
caccuuccacagugucuggcuaa

SEQ ID NO: 193552 - RNA, 24 nt, Artificial Sequence
  Synthetic
gcaccuuccacagugucuggcuaa

SEQ ID NO: 193553 - RNA, 18 nt, Artificial Sequence
  Synthetic
gaguaaaaacaaugcuaa

SEQ ID NO: 193554 - RNA, 19 nt, Artificial Sequence
  Synthetic
agaguaaaaacaaugcuaa

SEQ ID NO: 193555 - RNA, 20 nt, Artificial Sequence
  Synthetic
aagaguaaaaacaaugcuaa

SEQ ID NO: 193556 - RNA, 21 nt, Artificial Sequence
  Synthetic
gaagaguaaaaacaaugcuaa

SEQ ID NO: 193557 - RNA, 22 nt, Artificial Sequence
  Synthetic
ugaagaguaaaaacaaugcuaa

SEQ ID NO: 193558 - RNA, 23 nt, Artificial Sequence
  Synthetic
cugaagaguaaaaacaaugcuaa

SEQ ID NO: 193559 - RNA, 24 nt, Artificial Sequence
  Synthetic
ucugaagaguaaaaacaaugcuaa

SEQ ID NO: 193560 - RNA, 18 nt, Artificial Sequence
  Synthetic
caggaugcccaaugcuaa

SEQ ID NO: 193561 - RNA, 19 nt, Artificial Sequence
  Synthetic
ccaggaugcccaaugcuaa

SEQ ID NO: 193562 - RNA, 20 nt, Artificial Sequence
  Synthetic
uccaggaugcccaaugcuaa

SEQ ID NO: 193563 - RNA, 21 nt, Artificial Sequence
  Synthetic
guccaggaugcccaaugcuaa

SEQ ID NO: 193564 - RNA, 22 nt, Artificial Sequence
  Synthetic
gguccaggaugcccaaugcuaa

SEQ ID NO: 193565 - RNA, 23 nt, Artificial Sequence
  Synthetic
ugguccaggaugcccaaugcuaa

SEQ ID NO: 193566 - RNA, 24 nt, Artificial Sequence
  Synthetic
gugguccaggaugcccaaugcuaa

SEQ ID NO: 193567 - RNA, 18 nt, Artificial Sequence
  Synthetic
ugaagaaggcaaugcuaa

SEQ ID NO: 193568 - RNA, 19 nt, Artificial Sequence
  Synthetic
uugaagaaggcaaugcuaa

SEQ ID NO: 193569 - RNA, 20 nt, Artificial Sequence
  Synthetic
guugaagaaggcaaugcuaa

SEQ ID NO: 193570 - RNA, 21 nt, Artificial Sequence
  Synthetic
gguugaagaaggcaaugcuaa

SEQ ID NO: 193571 - RNA, 22 nt, Artificial Sequence
  Synthetic
agguugaagaaggcaaugcuaa

SEQ ID NO: 193572 - RNA, 23 nt, Artificial Sequence
  Synthetic
uagguugaagaaggcaaugcuaa

SEQ ID NO: 193573 - RNA, 24 nt, Artificial Sequence
  Synthetic
cuagguugaagaaggcaaugcuaa

SEQ ID NO: 193574 - RNA, 18 nt, Artificial Sequence
  Synthetic
cagugcugugaaugcuaa

SEQ ID NO: 193575 - RNA, 19 nt, Artificial Sequence
  Synthetic
ccagugcugugaaugcuaa

SEQ ID NO: 193576 - RNA, 20 nt, Artificial Sequence
  Synthetic
uccagugcugugaaugcuaa

SEQ ID NO: 193577 - RNA, 21 nt, Artificial Sequence
  Synthetic
auccagugcugugaaugcuaa

SEQ ID NO: 193578 - RNA, 22 nt, Artificial Sequence
  Synthetic
gauccagugcugugaaugcuaa

SEQ ID NO: 193579 - RNA, 23 nt, Artificial Sequence
  Synthetic
agauccagugcugugaaugcuaa

SEQ ID NO: 193580 - RNA, 24 nt, Artificial Sequence
  Synthetic
gagauccagugcugugaaugcuaa

SEQ ID NO: 193581 - RNA, 18 nt, Artificial Sequence
  Synthetic
uuauuucugauaugcuaa

SEQ ID NO: 193582 - RNA, 19 nt, Artificial Sequence
  Synthetic
guuauuucugauaugcuaa

SEQ ID NO: 193583 - RNA, 20 nt, Artificial Sequence
  Synthetic
uguuauuucugauaugcuaa

SEQ ID NO: 193584 - RNA, 21 nt, Artificial Sequence
  Synthetic
uuguuauuucugauaugcuaa

SEQ ID NO: 193585 - RNA, 22 nt, Artificial Sequence
  Synthetic
auuguuauuucugauaugcuaa

SEQ ID NO: 193586 - RNA, 23 nt, Artificial Sequence
  Synthetic
uauuguuauuucugauaugcuaa

SEQ ID NO: 193587 - RNA, 24 nt, Artificial Sequence
  Synthetic
auauuguuauuucugauaugcuaa

SEQ ID NO: 193588 - RNA, 18 nt, Artificial Sequence
  Synthetic
uggaaggcauuaugcuaa

SEQ ID NO: 193589 - RNA, 19 nt, Artificial Sequence
  Synthetic
cuggaaggcauuaugcuaa

SEQ ID NO: 193590 - RNA, 20 nt, Artificial Sequence
  Synthetic
ccuggaaggcauuaugcuaa

SEQ ID NO: 193591 - RNA, 21 nt, Artificial Sequence
  Synthetic
accuggaaggcauuaugcuaa

SEQ ID NO: 193592 - RNA, 22 nt, Artificial Sequence
  Synthetic
aaccuggaaggcauuaugcuaa

SEQ ID NO: 193593 - RNA, 23 nt, Artificial Sequence
  Synthetic
gaaccuggaaggcauuaugcuaa

SEQ ID NO: 193594 - RNA, 24 nt, Artificial Sequence
  Synthetic
ugaaccuggaaggcauuaugcuaa

SEQ ID NO: 193595 - RNA, 18 nt, Artificial Sequence
  Synthetic
uuagaggcauuaugcuaa

SEQ ID NO: 193596 - RNA, 19 nt, Artificial Sequence
  Synthetic
cuuagaggcauuaugcuaa

SEQ ID NO: 193597 - RNA, 20 nt, Artificial Sequence
  Synthetic
ucuuagaggcauuaugcuaa

SEQ ID NO: 193598 - RNA, 21 nt, Artificial Sequence
  Synthetic
aucuuagaggcauuaugcuaa

SEQ ID NO: 193599 - RNA, 22 nt, Artificial Sequence
  Synthetic
aaucuuagaggcauuaugcuaa

SEQ ID NO: 193600 - RNA, 23 nt, Artificial Sequence
  Synthetic
gaaucuuagaggcauuaugcuaa

SEQ ID NO: 193601 - RNA, 24 nt, Artificial Sequence
  Synthetic
ugaaucuuagaggcauuaugcuaa

SEQ ID NO: 193602 - RNA, 18 nt, Artificial Sequence
  Synthetic
uggaggaccuuaugcuaa

SEQ ID NO: 193603 - RNA, 19 nt, Artificial Sequence
  Synthetic
cuggaggaccuuaugcuaa

SEQ ID NO: 193604 - RNA, 20 nt, Artificial Sequence
  Synthetic
ccuggaggaccuuaugcuaa

SEQ ID NO: 193605 - RNA, 21 nt, Artificial Sequence
  Synthetic
accuggaggaccuuaugcuaa

SEQ ID NO: 193606 - RNA, 22 nt, Artificial Sequence
  Synthetic
gaccuggaggaccuuaugcuaa

SEQ ID NO: 193607 - RNA, 23 nt, Artificial Sequence
  Synthetic
ggaccuggaggaccuuaugcuaa

SEQ ID NO: 193608 - RNA, 24 nt, Artificial Sequence
  Synthetic
uggaccuggaggaccuuaugcuaa

SEQ ID NO: 193609 - RNA, 18 nt, Artificial Sequence
  Synthetic
aaauucagugugugcuaa

SEQ ID NO: 193610 - RNA, 19 nt, Artificial Sequence
  Synthetic
gaaauucagugugugcuaa

SEQ ID NO: 193611 - RNA, 20 nt, Artificial Sequence
  Synthetic
ugaaauucagugugugcuaa

SEQ ID NO: 193612 - RNA, 21 nt, Artificial Sequence
  Synthetic
augaaauucagugugugcuaa

SEQ ID NO: 193613 - RNA, 22 nt, Artificial Sequence
  Synthetic
uaugaaauucagugugugcuaa

SEQ ID NO: 193614 - RNA, 23 nt, Artificial Sequence
  Synthetic
auaugaaauucagugugugcuaa

SEQ ID NO: 193615 - RNA, 24 nt, Artificial Sequence
  Synthetic
gauaugaaauucagugugugcuaa

SEQ ID NO: 193616 - RNA, 18 nt, Artificial Sequence
  Synthetic
aacaaaauauugugcuaa

SEQ ID NO: 193617 - RNA, 19 nt, Artificial Sequence
  Synthetic
aaacaaaauauugugcuaa

SEQ ID NO: 193618 - RNA, 20 nt, Artificial Sequence
  Synthetic
caaacaaaauauugugcuaa

SEQ ID NO: 193619 - RNA, 21 nt, Artificial Sequence
  Synthetic
acaaacaaaauauugugcuaa

SEQ ID NO: 193620 - RNA, 22 nt, Artificial Sequence
  Synthetic
uacaaacaaaauauugugcuaa

SEQ ID NO: 193621 - RNA, 23 nt, Artificial Sequence
  Synthetic
cuacaaacaaaauauugugcuaa

SEQ ID NO: 193622 - RNA, 24 nt, Artificial Sequence
  Synthetic
ucuacaaacaaaauauugugcuaa

SEQ ID NO: 193623 - RNA, 18 nt, Artificial Sequence
  Synthetic
uuaaucgucauuugcuaa

SEQ ID NO: 193624 - RNA, 19 nt, Artificial Sequence
  Synthetic
uuuaaucgucauuugcuaa

SEQ ID NO: 193625 - RNA, 20 nt, Artificial Sequence
  Synthetic
cuuuaaucgucauuugcuaa

SEQ ID NO: 193626 - RNA, 21 nt, Artificial Sequence
  Synthetic
acuuuaaucgucauuugcuaa

SEQ ID NO: 193627 - RNA, 22 nt, Artificial Sequence
  Synthetic
aacuuuaaucgucauuugcuaa

SEQ ID NO: 193628 - RNA, 23 nt, Artificial Sequence
  Synthetic
aaacuuuaaucgucauuugcuaa

SEQ ID NO: 193629 - RNA, 24 nt, Artificial Sequence
  Synthetic
gaaacuuuaaucgucauuugcuaa

SEQ ID NO: 193630 - RNA, 18 nt, Artificial Sequence
  Synthetic
guucaugugcuuugcuaa

SEQ ID NO: 193631 - RNA, 19 nt, Artificial Sequence
  Synthetic
uguucaugugcuuugcuaa

SEQ ID NO: 193632 - RNA, 20 nt, Artificial Sequence
  Synthetic
cuguucaugugcuuugcuaa

SEQ ID NO: 193633 - RNA, 21 nt, Artificial Sequence
  Synthetic
ucuguucaugugcuuugcuaa

SEQ ID NO: 193634 - RNA, 22 nt, Artificial Sequence
  Synthetic
gucuguucaugugcuuugcuaa

SEQ ID NO: 193635 - RNA, 23 nt, Artificial Sequence
  Synthetic
ugucuguucaugugcuuugcuaa

SEQ ID NO: 193636 - RNA, 24 nt, Artificial Sequence
  Synthetic
gugucuguucaugugcuuugcuaa

SEQ ID NO: 193637 - RNA, 18 nt, Artificial Sequence
  Synthetic
cauaaaaucuaaaucuaa

SEQ ID NO: 193638 - RNA, 19 nt, Artificial Sequence
  Synthetic
ucauaaaaucuaaaucuaa

SEQ ID NO: 193639 - RNA, 20 nt, Artificial Sequence
  Synthetic
aucauaaaaucuaaaucuaa

SEQ ID NO: 193640 - RNA, 21 nt, Artificial Sequence
  Synthetic
aaucauaaaaucuaaaucuaa

SEQ ID NO: 193641 - RNA, 22 nt, Artificial Sequence
  Synthetic
gaaucauaaaaucuaaaucuaa

SEQ ID NO: 193642 - RNA, 23 nt, Artificial Sequence
  Synthetic
ggaaucauaaaaucuaaaucuaa

SEQ ID NO: 193643 - RNA, 24 nt, Artificial Sequence
  Synthetic
uggaaucauaaaaucuaaaucuaa

SEQ ID NO: 193644 - RNA, 18 nt, Artificial Sequence
  Synthetic
uuauuggagccaaucuaa

SEQ ID NO: 193645 - RNA, 19 nt, Artificial Sequence
  Synthetic
uuuauuggagccaaucuaa

SEQ ID NO: 193646 - RNA, 20 nt, Artificial Sequence
  Synthetic
uuuuauuggagccaaucuaa

SEQ ID NO: 193647 - RNA, 21 nt, Artificial Sequence
  Synthetic
auuuuauuggagccaaucuaa

SEQ ID NO: 193648 - RNA, 22 nt, Artificial Sequence
  Synthetic
uauuuuauuggagccaaucuaa

SEQ ID NO: 193649 - RNA, 23 nt, Artificial Sequence
  Synthetic
auauuuuauuggagccaaucuaa

SEQ ID NO: 193650 - RNA, 24 nt, Artificial Sequence
  Synthetic
aauauuuuauuggagccaaucuaa

SEQ ID NO: 193651 - RNA, 18 nt, Artificial Sequence
  Synthetic
auaaaacugucaaucuaa

SEQ ID NO: 193652 - RNA, 19 nt, Artificial Sequence
  Synthetic
uauaaaacugucaaucuaa

SEQ ID NO: 193653 - RNA, 20 nt, Artificial Sequence
  Synthetic
auauaaaacugucaaucuaa

SEQ ID NO: 193654 - RNA, 21 nt, Artificial Sequence
  Synthetic
uauauaaaacugucaaucuaa

SEQ ID NO: 193655 - RNA, 22 nt, Artificial Sequence
  Synthetic
auauauaaaacugucaaucuaa

SEQ ID NO: 193656 - RNA, 23 nt, Artificial Sequence
  Synthetic
cauauauaaaacugucaaucuaa

SEQ ID NO: 193657 - RNA, 24 nt, Artificial Sequence
  Synthetic
gcauauauaaaacugucaaucuaa

SEQ ID NO: 193658 - RNA, 18 nt, Artificial Sequence
  Synthetic
uuuaaaagucacaucuaa

SEQ ID NO: 193659 - RNA, 19 nt, Artificial Sequence
  Synthetic
cuuuaaaagucacaucuaa

SEQ ID NO: 193660 - RNA, 20 nt, Artificial Sequence
  Synthetic
ucuuuaaaagucacaucuaa

SEQ ID NO: 193661 - RNA, 21 nt, Artificial Sequence
  Synthetic
aucuuuaaaagucacaucuaa

SEQ ID NO: 193662 - RNA, 22 nt, Artificial Sequence
  Synthetic
uaucuuuaaaagucacaucuaa

SEQ ID NO: 193663 - RNA, 23 nt, Artificial Sequence
  Synthetic
cuaucuuuaaaagucacaucuaa

SEQ ID NO: 193664 - RNA, 24 nt, Artificial Sequence
  Synthetic
gcuaucuuuaaaagucacaucuaa

SEQ ID NO: 193665 - RNA, 18 nt, Artificial Sequence
  Synthetic
gcuccuccugacaucuaa

SEQ ID NO: 193666 - RNA, 19 nt, Artificial Sequence
  Synthetic
ggcuccuccugacaucuaa

SEQ ID NO: 193667 - RNA, 20 nt, Artificial Sequence
  Synthetic
aggcuccuccugacaucuaa

SEQ ID NO: 193668 - RNA, 21 nt, Artificial Sequence
  Synthetic
aaggcuccuccugacaucuaa

SEQ ID NO: 193669 - RNA, 22 nt, Artificial Sequence
  Synthetic
aaaggcuccuccugacaucuaa

SEQ ID NO: 193670 - RNA, 23 nt, Artificial Sequence
  Synthetic
gaaaggcuccuccugacaucuaa

SEQ ID NO: 193671 - RNA, 24 nt, Artificial Sequence
  Synthetic
agaaaggcuccuccugacaucuaa

SEQ ID NO: 193672 - RNA, 18 nt, Artificial Sequence
  Synthetic
acauacguagccaucuaa

SEQ ID NO: 193673 - RNA, 19 nt, Artificial Sequence
  Synthetic
uacauacguagccaucuaa

SEQ ID NO: 193674 - RNA, 20 nt, Artificial Sequence
  Synthetic
uuacauacguagccaucuaa

SEQ ID NO: 193675 - RNA, 21 nt, Artificial Sequence
  Synthetic
uuuacauacguagccaucuaa

SEQ ID NO: 193676 - RNA, 22 nt, Artificial Sequence
  Synthetic
guuuacauacguagccaucuaa

SEQ ID NO: 193677 - RNA, 23 nt, Artificial Sequence
  Synthetic
uguuuacauacguagccaucuaa

SEQ ID NO: 193678 - RNA, 24 nt, Artificial Sequence
  Synthetic
uuguuuacauacguagccaucuaa

SEQ ID NO: 193679 - RNA, 18 nt, Artificial Sequence
  Synthetic
uucaaaucacucaucuaa

SEQ ID NO: 193680 - RNA, 19 nt, Artificial Sequence
  Synthetic
cuucaaaucacucaucuaa

SEQ ID NO: 193681 - RNA, 20 nt, Artificial Sequence
  Synthetic
gcuucaaaucacucaucuaa

SEQ ID NO: 193682 - RNA, 21 nt, Artificial Sequence
  Synthetic
agcuucaaaucacucaucuaa

SEQ ID NO: 193683 - RNA, 22 nt, Artificial Sequence
  Synthetic
aagcuucaaaucacucaucuaa

SEQ ID NO: 193684 - RNA, 23 nt, Artificial Sequence
  Synthetic
caagcuucaaaucacucaucuaa

SEQ ID NO: 193685 - RNA, 24 nt, Artificial Sequence
  Synthetic
gcaagcuucaaaucacucaucuaa

SEQ ID NO: 193686 - RNA, 18 nt, Artificial Sequence
  Synthetic
guagggcgacagaucuaa

SEQ ID NO: 193687 - RNA, 19 nt, Artificial Sequence
  Synthetic
gguagggcgacagaucuaa

SEQ ID NO: 193688 - RNA, 20 nt, Artificial Sequence
  Synthetic
agguagggcgacagaucuaa

SEQ ID NO: 193689 - RNA, 21 nt, Artificial Sequence
  Synthetic
gagguagggcgacagaucuaa

SEQ ID NO: 193690 - RNA, 22 nt, Artificial Sequence
  Synthetic
agagguagggcgacagaucuaa

SEQ ID NO: 193691 - RNA, 23 nt, Artificial Sequence
  Synthetic
aagagguagggcgacagaucuaa

SEQ ID NO: 193692 - RNA, 24 nt, Artificial Sequence
  Synthetic
aaagagguagggcgacagaucuaa

SEQ ID NO: 193693 - RNA, 18 nt, Artificial Sequence
  Synthetic
ucaaccaauaggaucuaa

SEQ ID NO: 193694 - RNA, 19 nt, Artificial Sequence
  Synthetic
aucaaccaauaggaucuaa

SEQ ID NO: 193695 - RNA, 20 nt, Artificial Sequence
  Synthetic
caucaaccaauaggaucuaa

SEQ ID NO: 193696 - RNA, 21 nt, Artificial Sequence
  Synthetic
ccaucaaccaauaggaucuaa

SEQ ID NO: 193697 - RNA, 22 nt, Artificial Sequence
  Synthetic
accaucaaccaauaggaucuaa

SEQ ID NO: 193698 - RNA, 23 nt, Artificial Sequence
  Synthetic
caccaucaaccaauaggaucuaa

SEQ ID NO: 193699 - RNA, 24 nt, Artificial Sequence
  Synthetic
acaccaucaaccaauaggaucuaa

SEQ ID NO: 193700 - RNA, 18 nt, Artificial Sequence
  Synthetic
cauagauuacauaucuaa

SEQ ID NO: 193701 - RNA, 19 nt, Artificial Sequence
  Synthetic
acauagauuacauaucuaa

SEQ ID NO: 193702 - RNA, 20 nt, Artificial Sequence
  Synthetic
uacauagauuacauaucuaa

SEQ ID NO: 193703 - RNA, 21 nt, Artificial Sequence
  Synthetic
uuacauagauuacauaucuaa

SEQ ID NO: 193704 - RNA, 22 nt, Artificial Sequence
  Synthetic
guuacauagauuacauaucuaa

SEQ ID NO: 193705 - RNA, 23 nt, Artificial Sequence
  Synthetic
uguuacauagauuacauaucuaa

SEQ ID NO: 193706 - RNA, 24 nt, Artificial Sequence
  Synthetic
uuguuacauagauuacauaucuaa

SEQ ID NO: 193707 - RNA, 18 nt, Artificial Sequence
  Synthetic
cucaggcaggauaucuaa

SEQ ID NO: 193708 - RNA, 19 nt, Artificial Sequence
  Synthetic
ucucaggcaggauaucuaa

SEQ ID NO: 193709 - RNA, 20 nt, Artificial Sequence
  Synthetic
uucucaggcaggauaucuaa

SEQ ID NO: 193710 - RNA, 21 nt, Artificial Sequence
  Synthetic
uuucucaggcaggauaucuaa

SEQ ID NO: 193711 - RNA, 22 nt, Artificial Sequence
  Synthetic
auuucucaggcaggauaucuaa

SEQ ID NO: 193712 - RNA, 23 nt, Artificial Sequence
  Synthetic
gauuucucaggcaggauaucuaa

SEQ ID NO: 193713 - RNA, 24 nt, Artificial Sequence
  Synthetic
ugauuucucaggcaggauaucuaa

SEQ ID NO: 193714 - RNA, 18 nt, Artificial Sequence
  Synthetic
cuccuuuucuauaucuaa

SEQ ID NO: 193715 - RNA, 19 nt, Artificial Sequence
  Synthetic
ccuccuuuucuauaucuaa

SEQ ID NO: 193716 - RNA, 20 nt, Artificial Sequence
  Synthetic
uccuccuuuucuauaucuaa

SEQ ID NO: 193717 - RNA, 21 nt, Artificial Sequence
  Synthetic
uuccuccuuuucuauaucuaa

SEQ ID NO: 193718 - RNA, 22 nt, Artificial Sequence
  Synthetic
auuccuccuuuucuauaucuaa

SEQ ID NO: 193719 - RNA, 23 nt, Artificial Sequence
  Synthetic
cauuccuccuuuucuauaucuaa

SEQ ID NO: 193720 - RNA, 24 nt, Artificial Sequence
  Synthetic
acauuccuccuuuucuauaucuaa

SEQ ID NO: 193721 - RNA, 18 nt, Artificial Sequence
  Synthetic
gucuuuacuaaccucuaa

SEQ ID NO: 193722 - RNA, 19 nt, Artificial Sequence
  Synthetic
ugucuuuacuaaccucuaa

SEQ ID NO: 193723 - RNA, 20 nt, Artificial Sequence
  Synthetic
uugucuuuacuaaccucuaa

SEQ ID NO: 193724 - RNA, 21 nt, Artificial Sequence
  Synthetic
uuugucuuuacuaaccucuaa

SEQ ID NO: 193725 - RNA, 22 nt, Artificial Sequence
  Synthetic
auuugucuuuacuaaccucuaa

SEQ ID NO: 193726 - RNA, 23 nt, Artificial Sequence
  Synthetic
uauuugucuuuacuaaccucuaa

SEQ ID NO: 193727 - RNA, 24 nt, Artificial Sequence
  Synthetic
cuauuugucuuuacuaaccucuaa

SEQ ID NO: 193728 - RNA, 18 nt, Artificial Sequence
  Synthetic
aguagugauuaccucuaa

SEQ ID NO: 193729 - RNA, 19 nt, Artificial Sequence
  Synthetic
caguagugauuaccucuaa

SEQ ID NO: 193730 - RNA, 20 nt, Artificial Sequence
  Synthetic
acaguagugauuaccucuaa

SEQ ID NO: 193731 - RNA, 21 nt, Artificial Sequence
  Synthetic
gacaguagugauuaccucuaa

SEQ ID NO: 193732 - RNA, 22 nt, Artificial Sequence
  Synthetic
ggacaguagugauuaccucuaa

SEQ ID NO: 193733 - RNA, 23 nt, Artificial Sequence
  Synthetic
uggacaguagugauuaccucuaa

SEQ ID NO: 193734 - RNA, 24 nt, Artificial Sequence
  Synthetic
uuggacaguagugauuaccucuaa

SEQ ID NO: 193735 - RNA, 18 nt, Artificial Sequence
  Synthetic
uauggugggacccucuaa

SEQ ID NO: 193736 - RNA, 19 nt, Artificial Sequence
  Synthetic
auauggugggacccucuaa

SEQ ID NO: 193737 - RNA, 20 nt, Artificial Sequence
  Synthetic
uauauggugggacccucuaa

SEQ ID NO: 193738 - RNA, 21 nt, Artificial Sequence
  Synthetic
guauauggugggacccucuaa

SEQ ID NO: 193739 - RNA, 22 nt, Artificial Sequence
  Synthetic
gguauauggugggacccucuaa

SEQ ID NO: 193740 - RNA, 23 nt, Artificial Sequence
  Synthetic
ggguauauggugggacccucuaa

SEQ ID NO: 193741 - RNA, 24 nt, Artificial Sequence
  Synthetic
aggguauauggugggacccucuaa

SEQ ID NO: 193742 - RNA, 18 nt, Artificial Sequence
  Synthetic
agcaaauuaguccucuaa

SEQ ID NO: 193743 - RNA, 19 nt, Artificial Sequence
  Synthetic
aagcaaauuaguccucuaa

SEQ ID NO: 193744 - RNA, 20 nt, Artificial Sequence
  Synthetic
aaagcaaauuaguccucuaa

SEQ ID NO: 193745 - RNA, 21 nt, Artificial Sequence
  Synthetic
gaaagcaaauuaguccucuaa

SEQ ID NO: 193746 - RNA, 22 nt, Artificial Sequence
  Synthetic
agaaagcaaauuaguccucuaa

SEQ ID NO: 193747 - RNA, 23 nt, Artificial Sequence
  Synthetic
uagaaagcaaauuaguccucuaa

SEQ ID NO: 193748 - RNA, 24 nt, Artificial Sequence
  Synthetic
auagaaagcaaauuaguccucuaa

SEQ ID NO: 193749 - RNA, 18 nt, Artificial Sequence
  Synthetic
auccacaugaggcucuaa

SEQ ID NO: 193750 - RNA, 19 nt, Artificial Sequence
  Synthetic
aauccacaugaggcucuaa

SEQ ID NO: 193751 - RNA, 20 nt, Artificial Sequence
  Synthetic
caauccacaugaggcucuaa

SEQ ID NO: 193752 - RNA, 21 nt, Artificial Sequence
  Synthetic
acaauccacaugaggcucuaa

SEQ ID NO: 193753 - RNA, 22 nt, Artificial Sequence
  Synthetic
gacaauccacaugaggcucuaa

SEQ ID NO: 193754 - RNA, 23 nt, Artificial Sequence
  Synthetic
ugacaauccacaugaggcucuaa

SEQ ID NO: 193755 - RNA, 24 nt, Artificial Sequence
  Synthetic
gugacaauccacaugaggcucuaa

SEQ ID NO: 193756 - RNA, 18 nt, Artificial Sequence
  Synthetic
uuaacauacuggcucuaa

SEQ ID NO: 193757 - RNA, 19 nt, Artificial Sequence
  Synthetic
auuaacauacuggcucuaa

SEQ ID NO: 193758 - RNA, 20 nt, Artificial Sequence
  Synthetic
uauuaacauacuggcucuaa

SEQ ID NO: 193759 - RNA, 21 nt, Artificial Sequence
  Synthetic
guauuaacauacuggcucuaa

SEQ ID NO: 193760 - RNA, 22 nt, Artificial Sequence
  Synthetic
cguauuaacauacuggcucuaa

SEQ ID NO: 193761 - RNA, 23 nt, Artificial Sequence
  Synthetic
gcguauuaacauacuggcucuaa

SEQ ID NO: 193762 - RNA, 24 nt, Artificial Sequence
  Synthetic
agcguauuaacauacuggcucuaa

SEQ ID NO: 193763 - RNA, 18 nt, Artificial Sequence
  Synthetic
augaacaauggucucuaa

SEQ ID NO: 193764 - RNA, 19 nt, Artificial Sequence
  Synthetic
aaugaacaauggucucuaa

SEQ ID NO: 193765 - RNA, 20 nt, Artificial Sequence
  Synthetic
aaaugaacaauggucucuaa

SEQ ID NO: 193766 - RNA, 21 nt, Artificial Sequence
  Synthetic
gaaaugaacaauggucucuaa

SEQ ID NO: 193767 - RNA, 22 nt, Artificial Sequence
  Synthetic
ugaaaugaacaauggucucuaa

SEQ ID NO: 193768 - RNA, 23 nt, Artificial Sequence
  Synthetic
gugaaaugaacaauggucucuaa

SEQ ID NO: 193769 - RNA, 24 nt, Artificial Sequence
  Synthetic
agugaaaugaacaauggucucuaa

SEQ ID NO: 193770 - RNA, 18 nt, Artificial Sequence
  Synthetic
ugugaaacgagagucuaa

SEQ ID NO: 193771 - RNA, 19 nt, Artificial Sequence
  Synthetic
augugaaacgagagucuaa

SEQ ID NO: 193772 - RNA, 20 nt, Artificial Sequence
  Synthetic
uaugugaaacgagagucuaa

SEQ ID NO: 193773 - RNA, 21 nt, Artificial Sequence
  Synthetic
guaugugaaacgagagucuaa

SEQ ID NO: 193774 - RNA, 22 nt, Artificial Sequence
  Synthetic
uguaugugaaacgagagucuaa

SEQ ID NO: 193775 - RNA, 23 nt, Artificial Sequence
  Synthetic
auguaugugaaacgagagucuaa

SEQ ID NO: 193776 - RNA, 24 nt, Artificial Sequence
  Synthetic
aauguaugugaaacgagagucuaa

SEQ ID NO: 193777 - RNA, 18 nt, Artificial Sequence
  Synthetic
ucuccaguuagagucuaa

SEQ ID NO: 193778 - RNA, 19 nt, Artificial Sequence
  Synthetic
uucuccaguuagagucuaa

SEQ ID NO: 193779 - RNA, 20 nt, Artificial Sequence
  Synthetic
cuucuccaguuagagucuaa

SEQ ID NO: 193780 - RNA, 21 nt, Artificial Sequence
  Synthetic
ucuucuccaguuagagucuaa

SEQ ID NO: 193781 - RNA, 22 nt, Artificial Sequence
  Synthetic
cucuucuccaguuagagucuaa

SEQ ID NO: 193782 - RNA, 23 nt, Artificial Sequence
  Synthetic
ucucuucuccaguuagagucuaa

SEQ ID NO: 193783 - RNA, 24 nt, Artificial Sequence
  Synthetic
cucucuucuccaguuagagucuaa

SEQ ID NO: 193784 - RNA, 18 nt, Artificial Sequence
  Synthetic
acacaauaugccgucuaa

SEQ ID NO: 193785 - RNA, 19 nt, Artificial Sequence
  Synthetic
cacacaauaugccgucuaa

SEQ ID NO: 193786 - RNA, 20 nt, Artificial Sequence
  Synthetic
gcacacaauaugccgucuaa

SEQ ID NO: 193787 - RNA, 21 nt, Artificial Sequence
  Synthetic
agcacacaauaugccgucuaa

SEQ ID NO: 193788 - RNA, 22 nt, Artificial Sequence
  Synthetic
gagcacacaauaugccgucuaa

SEQ ID NO: 193789 - RNA, 23 nt, Artificial Sequence
  Synthetic
ugagcacacaauaugccgucuaa

SEQ ID NO: 193790 - RNA, 24 nt, Artificial Sequence
  Synthetic
cugagcacacaauaugccgucuaa

SEQ ID NO: 193791 - RNA, 18 nt, Artificial Sequence
  Synthetic
ucauucuagaaugucuaa

SEQ ID NO: 193792 - RNA, 19 nt, Artificial Sequence
  Synthetic
uucauucuagaaugucuaa

SEQ ID NO: 193793 - RNA, 20 nt, Artificial Sequence
  Synthetic
uuucauucuagaaugucuaa

SEQ ID NO: 193794 - RNA, 21 nt, Artificial Sequence
  Synthetic
uuuucauucuagaaugucuaa

SEQ ID NO: 193795 - RNA, 22 nt, Artificial Sequence
  Synthetic
auuuucauucuagaaugucuaa

SEQ ID NO: 193796 - RNA, 23 nt, Artificial Sequence
  Synthetic
uauuuucauucuagaaugucuaa

SEQ ID NO: 193797 - RNA, 24 nt, Artificial Sequence
  Synthetic
auauuuucauucuagaaugucuaa

SEQ ID NO: 193798 - RNA, 18 nt, Artificial Sequence
  Synthetic
cauacuccuccugucuaa

SEQ ID NO: 193799 - RNA, 19 nt, Artificial Sequence
  Synthetic
acauacuccuccugucuaa

SEQ ID NO: 193800 - RNA, 20 nt, Artificial Sequence
  Synthetic
aacauacuccuccugucuaa

SEQ ID NO: 193801 - RNA, 21 nt, Artificial Sequence
  Synthetic
gaacauacuccuccugucuaa

SEQ ID NO: 193802 - RNA, 22 nt, Artificial Sequence
  Synthetic
ugaacauacuccuccugucuaa

SEQ ID NO: 193803 - RNA, 23 nt, Artificial Sequence
  Synthetic
uugaacauacuccuccugucuaa

SEQ ID NO: 193804 - RNA, 24 nt, Artificial Sequence
  Synthetic
cuugaacauacuccuccugucuaa

SEQ ID NO: 193805 - RNA, 18 nt, Artificial Sequence
  Synthetic
cuuauuccuccugucuaa

SEQ ID NO: 193806 - RNA, 19 nt, Artificial Sequence
  Synthetic
acuuauuccuccugucuaa

SEQ ID NO: 193807 - RNA, 20 nt, Artificial Sequence
  Synthetic
aacuuauuccuccugucuaa

SEQ ID NO: 193808 - RNA, 21 nt, Artificial Sequence
  Synthetic
gaacuuauuccuccugucuaa

SEQ ID NO: 193809 - RNA, 22 nt, Artificial Sequence
  Synthetic
agaacuuauuccuccugucuaa

SEQ ID NO: 193810 - RNA, 23 nt, Artificial Sequence
  Synthetic
cagaacuuauuccuccugucuaa

SEQ ID NO: 193811 - RNA, 24 nt, Artificial Sequence
  Synthetic
ccagaacuuauuccuccugucuaa

SEQ ID NO: 193812 - RNA, 18 nt, Artificial Sequence
  Synthetic
auuaaaaugucugucuaa

SEQ ID NO: 193813 - RNA, 19 nt, Artificial Sequence
  Synthetic
aauuaaaaugucugucuaa

SEQ ID NO: 193814 - RNA, 20 nt, Artificial Sequence
  Synthetic
aaauuaaaaugucugucuaa

SEQ ID NO: 193815 - RNA, 21 nt, Artificial Sequence
  Synthetic
gaaauuaaaaugucugucuaa

SEQ ID NO: 193816 - RNA, 22 nt, Artificial Sequence
  Synthetic
agaaauuaaaaugucugucuaa

SEQ ID NO: 193817 - RNA, 23 nt, Artificial Sequence
  Synthetic
aagaaauuaaaaugucugucuaa

SEQ ID NO: 193818 - RNA, 24 nt, Artificial Sequence
  Synthetic
gaagaaauuaaaaugucugucuaa

SEQ ID NO: 193819 - RNA, 18 nt, Artificial Sequence
  Synthetic
gcaagcagaaaauucuaa

SEQ ID NO: 193820 - RNA, 19 nt, Artificial Sequence
  Synthetic
ggcaagcagaaaauucuaa

SEQ ID NO: 193821 - RNA, 20 nt, Artificial Sequence
  Synthetic
uggcaagcagaaaauucuaa

SEQ ID NO: 193822 - RNA, 21 nt, Artificial Sequence
  Synthetic
guggcaagcagaaaauucuaa

SEQ ID NO: 193823 - RNA, 22 nt, Artificial Sequence
  Synthetic
aguggcaagcagaaaauucuaa

SEQ ID NO: 193824 - RNA, 23 nt, Artificial Sequence
  Synthetic
aaguggcaagcagaaaauucuaa

SEQ ID NO: 193825 - RNA, 24 nt, Artificial Sequence
  Synthetic
gaaguggcaagcagaaaauucuaa

SEQ ID NO: 193826 - RNA, 18 nt, Artificial Sequence
  Synthetic
gaauguucgaaauucuaa

SEQ ID NO: 193827 - RNA, 19 nt, Artificial Sequence
  Synthetic
ggaauguucgaaauucuaa

SEQ ID NO: 193828 - RNA, 20 nt, Artificial Sequence
  Synthetic
uggaauguucgaaauucuaa

SEQ ID NO: 193829 - RNA, 21 nt, Artificial Sequence
  Synthetic
uuggaauguucgaaauucuaa

SEQ ID NO: 193830 - RNA, 22 nt, Artificial Sequence
  Synthetic
cuuggaauguucgaaauucuaa

SEQ ID NO: 193831 - RNA, 23 nt, Artificial Sequence
  Synthetic
ucuuggaauguucgaaauucuaa

SEQ ID NO: 193832 - RNA, 24 nt, Artificial Sequence
  Synthetic
aucuuggaauguucgaaauucuaa

SEQ ID NO: 193833 - RNA, 18 nt, Artificial Sequence
  Synthetic
uaaugaucaccauucuaa

SEQ ID NO: 193834 - RNA, 19 nt, Artificial Sequence
  Synthetic
uuaaugaucaccauucuaa

SEQ ID NO: 193835 - RNA, 20 nt, Artificial Sequence
  Synthetic
uuuaaugaucaccauucuaa

SEQ ID NO: 193836 - RNA, 21 nt, Artificial Sequence
  Synthetic
uuuuaaugaucaccauucuaa

SEQ ID NO: 193837 - RNA, 22 nt, Artificial Sequence
  Synthetic
uuuuuaaugaucaccauucuaa

SEQ ID NO: 193838 - RNA, 23 nt, Artificial Sequence
  Synthetic
cuuuuuaaugaucaccauucuaa

SEQ ID NO: 193839 - RNA, 24 nt, Artificial Sequence
  Synthetic
acuuuuuaaugaucaccauucuaa

SEQ ID NO: 193840 - RNA, 18 nt, Artificial Sequence
  Synthetic
ugauaauagccauucuaa

SEQ ID NO: 193841 - RNA, 19 nt, Artificial Sequence
  Synthetic
uugauaauagccauucuaa

SEQ ID NO: 193842 - RNA, 20 nt, Artificial Sequence
  Synthetic
uuugauaauagccauucuaa

SEQ ID NO: 193843 - RNA, 21 nt, Artificial Sequence
  Synthetic
uuuugauaauagccauucuaa

SEQ ID NO: 193844 - RNA, 22 nt, Artificial Sequence
  Synthetic
auuuugauaauagccauucuaa

SEQ ID NO: 193845 - RNA, 23 nt, Artificial Sequence
  Synthetic
uauuuugauaauagccauucuaa

SEQ ID NO: 193846 - RNA, 24 nt, Artificial Sequence
  Synthetic
guauuuugauaauagccauucuaa

SEQ ID NO: 193847 - RNA, 18 nt, Artificial Sequence
  Synthetic
ugguauguuucauucuaa

SEQ ID NO: 193848 - RNA, 19 nt, Artificial Sequence
  Synthetic
cugguauguuucauucuaa

SEQ ID NO: 193849 - RNA, 20 nt, Artificial Sequence
  Synthetic
acugguauguuucauucuaa

SEQ ID NO: 193850 - RNA, 21 nt, Artificial Sequence
  Synthetic
aacugguauguuucauucuaa

SEQ ID NO: 193851 - RNA, 22 nt, Artificial Sequence
  Synthetic
gaacugguauguuucauucuaa

SEQ ID NO: 193852 - RNA, 23 nt, Artificial Sequence
  Synthetic
agaacugguauguuucauucuaa

SEQ ID NO: 193853 - RNA, 24 nt, Artificial Sequence
  Synthetic
uagaacugguauguuucauucuaa

SEQ ID NO: 193854 - RNA, 18 nt, Artificial Sequence
  Synthetic
uuguaaagaagauucuaa

SEQ ID NO: 193855 - RNA, 19 nt, Artificial Sequence
  Synthetic
auuguaaagaagauucuaa

SEQ ID NO: 193856 - RNA, 20 nt, Artificial Sequence
  Synthetic
cauuguaaagaagauucuaa

SEQ ID NO: 193857 - RNA, 21 nt, Artificial Sequence
  Synthetic
ccauuguaaagaagauucuaa

SEQ ID NO: 193858 - RNA, 22 nt, Artificial Sequence
  Synthetic
gccauuguaaagaagauucuaa

SEQ ID NO: 193859 - RNA, 23 nt, Artificial Sequence
  Synthetic
ggccauuguaaagaagauucuaa

SEQ ID NO: 193860 - RNA, 24 nt, Artificial Sequence
  Synthetic
gggccauuguaaagaagauucuaa

SEQ ID NO: 193861 - RNA, 18 nt, Artificial Sequence
  Synthetic
uauuguuuaagauucuaa

SEQ ID NO: 193862 - RNA, 19 nt, Artificial Sequence
  Synthetic
auauuguuuaagauucuaa

SEQ ID NO: 193863 - RNA, 20 nt, Artificial Sequence
  Synthetic
gauauuguuuaagauucuaa

SEQ ID NO: 193864 - RNA, 21 nt, Artificial Sequence
  Synthetic
ugauauuguuuaagauucuaa

SEQ ID NO: 193865 - RNA, 22 nt, Artificial Sequence
  Synthetic
augauauuguuuaagauucuaa

SEQ ID NO: 193866 - RNA, 23 nt, Artificial Sequence
  Synthetic
aaugauauuguuuaagauucuaa

SEQ ID NO: 193867 - RNA, 24 nt, Artificial Sequence
  Synthetic
uaaugauauuguuuaagauucuaa

SEQ ID NO: 193868 - RNA, 18 nt, Artificial Sequence
  Synthetic
caagaaacaggauucuaa

SEQ ID NO: 193869 - RNA, 19 nt, Artificial Sequence
  Synthetic
gcaagaaacaggauucuaa

SEQ ID NO: 193870 - RNA, 20 nt, Artificial Sequence
  Synthetic
ugcaagaaacaggauucuaa

SEQ ID NO: 193871 - RNA, 21 nt, Artificial Sequence
  Synthetic
augcaagaaacaggauucuaa

SEQ ID NO: 193872 - RNA, 22 nt, Artificial Sequence
  Synthetic
caugcaagaaacaggauucuaa

SEQ ID NO: 193873 - RNA, 23 nt, Artificial Sequence
  Synthetic
ucaugcaagaaacaggauucuaa

SEQ ID NO: 193874 - RNA, 24 nt, Artificial Sequence
  Synthetic
cucaugcaagaaacaggauucuaa

SEQ ID NO: 193875 - RNA, 18 nt, Artificial Sequence
  Synthetic
ugcugucccauauucuaa

SEQ ID NO: 193876 - RNA, 19 nt, Artificial Sequence
  Synthetic
uugcugucccauauucuaa

SEQ ID NO: 193877 - RNA, 20 nt, Artificial Sequence
  Synthetic
uuugcugucccauauucuaa

SEQ ID NO: 193878 - RNA, 21 nt, Artificial Sequence
  Synthetic
auuugcugucccauauucuaa

SEQ ID NO: 193879 - RNA, 22 nt, Artificial Sequence
  Synthetic
aauuugcugucccauauucuaa

SEQ ID NO: 193880 - RNA, 23 nt, Artificial Sequence
  Synthetic
caauuugcugucccauauucuaa

SEQ ID NO: 193881 - RNA, 24 nt, Artificial Sequence
  Synthetic
acaauuugcugucccauauucuaa

SEQ ID NO: 193882 - RNA, 18 nt, Artificial Sequence
  Synthetic
uggaugccauuauucuaa

SEQ ID NO: 193883 - RNA, 19 nt, Artificial Sequence
  Synthetic
cuggaugccauuauucuaa

SEQ ID NO: 193884 - RNA, 20 nt, Artificial Sequence
  Synthetic
gcuggaugccauuauucuaa

SEQ ID NO: 193885 - RNA, 21 nt, Artificial Sequence
  Synthetic
agcuggaugccauuauucuaa

SEQ ID NO: 193886 - RNA, 22 nt, Artificial Sequence
  Synthetic
gagcuggaugccauuauucuaa

SEQ ID NO: 193887 - RNA, 23 nt, Artificial Sequence
  Synthetic
ggagcuggaugccauuauucuaa

SEQ ID NO: 193888 - RNA, 24 nt, Artificial Sequence
  Synthetic
uggagcuggaugccauuauucuaa

SEQ ID NO: 193889 - RNA, 18 nt, Artificial Sequence
  Synthetic
acuuucauaaacuucuaa

SEQ ID NO: 193890 - RNA, 19 nt, Artificial Sequence
  Synthetic
gacuuucauaaacuucuaa

SEQ ID NO: 193891 - RNA, 20 nt, Artificial Sequence
  Synthetic
ugacuuucauaaacuucuaa

SEQ ID NO: 193892 - RNA, 21 nt, Artificial Sequence
  Synthetic
cugacuuucauaaacuucuaa

SEQ ID NO: 193893 - RNA, 22 nt, Artificial Sequence
  Synthetic
gcugacuuucauaaacuucuaa

SEQ ID NO: 193894 - RNA, 23 nt, Artificial Sequence
  Synthetic
ugcugacuuucauaaacuucuaa

SEQ ID NO: 193895 - RNA, 24 nt, Artificial Sequence
  Synthetic
uugcugacuuucauaaacuucuaa

SEQ ID NO: 193896 - RNA, 18 nt, Artificial Sequence
  Synthetic
uucauguuguacuucuaa

SEQ ID NO: 193897 - RNA, 19 nt, Artificial Sequence
  Synthetic
uuucauguuguacuucuaa

SEQ ID NO: 193898 - RNA, 20 nt, Artificial Sequence
  Synthetic
cuuucauguuguacuucuaa

SEQ ID NO: 193899 - RNA, 21 nt, Artificial Sequence
  Synthetic
ccuuucauguuguacuucuaa

SEQ ID NO: 193900 - RNA, 22 nt, Artificial Sequence
  Synthetic
uccuuucauguuguacuucuaa

SEQ ID NO: 193901 - RNA, 23 nt, Artificial Sequence
  Synthetic
uuccuuucauguuguacuucuaa

SEQ ID NO: 193902 - RNA, 24 nt, Artificial Sequence
  Synthetic
auuccuuucauguuguacuucuaa

SEQ ID NO: 193903 - RNA, 18 nt, Artificial Sequence
  Synthetic
ggaggcuuguccuucuaa

SEQ ID NO: 193904 - RNA, 19 nt, Artificial Sequence
  Synthetic
gggaggcuuguccuucuaa

SEQ ID NO: 193905 - RNA, 20 nt, Artificial Sequence
  Synthetic
agggaggcuuguccuucuaa

SEQ ID NO: 193906 - RNA, 21 nt, Artificial Sequence
  Synthetic
uagggaggcuuguccuucuaa

SEQ ID NO: 193907 - RNA, 22 nt, Artificial Sequence
  Synthetic
cuagggaggcuuguccuucuaa

SEQ ID NO: 193908 - RNA, 23 nt, Artificial Sequence
  Synthetic
acuagggaggcuuguccuucuaa

SEQ ID NO: 193909 - RNA, 24 nt, Artificial Sequence
  Synthetic
aacuagggaggcuuguccuucuaa

SEQ ID NO: 193910 - RNA, 18 nt, Artificial Sequence
  Synthetic
uuacccuuaagcuucuaa

SEQ ID NO: 193911 - RNA, 19 nt, Artificial Sequence
  Synthetic
uuuacccuuaagcuucuaa

SEQ ID NO: 193912 - RNA, 20 nt, Artificial Sequence
  Synthetic
uuuuacccuuaagcuucuaa

SEQ ID NO: 193913 - RNA, 21 nt, Artificial Sequence
  Synthetic
guuuuacccuuaagcuucuaa

SEQ ID NO: 193914 - RNA, 22 nt, Artificial Sequence
  Synthetic
cguuuuacccuuaagcuucuaa

SEQ ID NO: 193915 - RNA, 23 nt, Artificial Sequence
  Synthetic
ccguuuuacccuuaagcuucuaa

SEQ ID NO: 193916 - RNA, 24 nt, Artificial Sequence
  Synthetic
accguuuuacccuuaagcuucuaa

SEQ ID NO: 193917 - RNA, 18 nt, Artificial Sequence
  Synthetic
cacauaacacucuucuaa

SEQ ID NO: 193918 - RNA, 19 nt, Artificial Sequence
  Synthetic
ccacauaacacucuucuaa

SEQ ID NO: 193919 - RNA, 20 nt, Artificial Sequence
  Synthetic
gccacauaacacucuucuaa

SEQ ID NO: 193920 - RNA, 21 nt, Artificial Sequence
  Synthetic
ugccacauaacacucuucuaa

SEQ ID NO: 193921 - RNA, 22 nt, Artificial Sequence
  Synthetic
augccacauaacacucuucuaa

SEQ ID NO: 193922 - RNA, 23 nt, Artificial Sequence
  Synthetic
gaugccacauaacacucuucuaa

SEQ ID NO: 193923 - RNA, 24 nt, Artificial Sequence
  Synthetic
agaugccacauaacacucuucuaa

SEQ ID NO: 193924 - RNA, 18 nt, Artificial Sequence
  Synthetic
acuuccauccucuucuaa

SEQ ID NO: 193925 - RNA, 19 nt, Artificial Sequence
  Synthetic
cacuuccauccucuucuaa

SEQ ID NO: 193926 - RNA, 20 nt, Artificial Sequence
  Synthetic
ccacuuccauccucuucuaa

SEQ ID NO: 193927 - RNA, 21 nt, Artificial Sequence
  Synthetic
uccacuuccauccucuucuaa

SEQ ID NO: 193928 - RNA, 22 nt, Artificial Sequence
  Synthetic
guccacuuccauccucuucuaa

SEQ ID NO: 193929 - RNA, 23 nt, Artificial Sequence
  Synthetic
uguccacuuccauccucuucuaa

SEQ ID NO: 193930 - RNA, 24 nt, Artificial Sequence
  Synthetic
cuguccacuuccauccucuucuaa

SEQ ID NO: 193931 - RNA, 18 nt, Artificial Sequence
  Synthetic
accuguaacuucuucuaa

SEQ ID NO: 193932 - RNA, 19 nt, Artificial Sequence
  Synthetic
aaccuguaacuucuucuaa

SEQ ID NO: 193933 - RNA, 20 nt, Artificial Sequence
  Synthetic
aaaccuguaacuucuucuaa

SEQ ID NO: 193934 - RNA, 21 nt, Artificial Sequence
  Synthetic
aaaaccuguaacuucuucuaa

SEQ ID NO: 193935 - RNA, 22 nt, Artificial Sequence
  Synthetic
caaaaccuguaacuucuucuaa

SEQ ID NO: 193936 - RNA, 23 nt, Artificial Sequence
  Synthetic
ccaaaaccuguaacuucuucuaa

SEQ ID NO: 193937 - RNA, 24 nt, Artificial Sequence
  Synthetic
cccaaaaccuguaacuucuucuaa

SEQ ID NO: 193938 - RNA, 18 nt, Artificial Sequence
  Synthetic
gccgucaagaaguucuaa

SEQ ID NO: 193939 - RNA, 19 nt, Artificial Sequence
  Synthetic
agccgucaagaaguucuaa

SEQ ID NO: 193940 - RNA, 20 nt, Artificial Sequence
  Synthetic
aagccgucaagaaguucuaa

SEQ ID NO: 193941 - RNA, 21 nt, Artificial Sequence
  Synthetic
aaagccgucaagaaguucuaa

SEQ ID NO: 193942 - RNA, 22 nt, Artificial Sequence
  Synthetic
caaagccgucaagaaguucuaa

SEQ ID NO: 193943 - RNA, 23 nt, Artificial Sequence
  Synthetic
acaaagccgucaagaaguucuaa

SEQ ID NO: 193944 - RNA, 24 nt, Artificial Sequence
  Synthetic
aacaaagccgucaagaaguucuaa

SEQ ID NO: 193945 - RNA, 18 nt, Artificial Sequence
  Synthetic
agacuggguaauuucuaa

SEQ ID NO: 193946 - RNA, 19 nt, Artificial Sequence
  Synthetic
gagacuggguaauuucuaa

SEQ ID NO: 193947 - RNA, 20 nt, Artificial Sequence
  Synthetic
cgagacuggguaauuucuaa

SEQ ID NO: 193948 - RNA, 21 nt, Artificial Sequence
  Synthetic
ccgagacuggguaauuucuaa

SEQ ID NO: 193949 - RNA, 22 nt, Artificial Sequence
  Synthetic
cccgagacuggguaauuucuaa

SEQ ID NO: 193950 - RNA, 23 nt, Artificial Sequence
  Synthetic
gcccgagacuggguaauuucuaa

SEQ ID NO: 193951 - RNA, 24 nt, Artificial Sequence
  Synthetic
ugcccgagacuggguaauuucuaa

SEQ ID NO: 193952 - RNA, 18 nt, Artificial Sequence
  Synthetic
ccauuucugcauuucuaa

SEQ ID NO: 193953 - RNA, 19 nt, Artificial Sequence
  Synthetic
gccauuucugcauuucuaa

SEQ ID NO: 193954 - RNA, 20 nt, Artificial Sequence
  Synthetic
agccauuucugcauuucuaa

SEQ ID NO: 193955 - RNA, 21 nt, Artificial Sequence
  Synthetic
uagccauuucugcauuucuaa

SEQ ID NO: 193956 - RNA, 22 nt, Artificial Sequence
  Synthetic
uuagccauuucugcauuucuaa

SEQ ID NO: 193957 - RNA, 23 nt, Artificial Sequence
  Synthetic
uuuagccauuucugcauuucuaa

SEQ ID NO: 193958 - RNA, 24 nt, Artificial Sequence
  Synthetic
cuuuagccauuucugcauuucuaa

SEQ ID NO: 193959 - RNA, 18 nt, Artificial Sequence
  Synthetic
uucaagacugcuuucuaa

SEQ ID NO: 193960 - RNA, 19 nt, Artificial Sequence
  Synthetic
uuucaagacugcuuucuaa

SEQ ID NO: 193961 - RNA, 20 nt, Artificial Sequence
  Synthetic
auuucaagacugcuuucuaa

SEQ ID NO: 193962 - RNA, 21 nt, Artificial Sequence
  Synthetic
aauuucaagacugcuuucuaa

SEQ ID NO: 193963 - RNA, 22 nt, Artificial Sequence
  Synthetic
aaauuucaagacugcuuucuaa

SEQ ID NO: 193964 - RNA, 23 nt, Artificial Sequence
  Synthetic
aaaauuucaagacugcuuucuaa

SEQ ID NO: 193965 - RNA, 24 nt, Artificial Sequence
  Synthetic
caaaauuucaagacugcuuucuaa

SEQ ID NO: 193966 - RNA, 18 nt, Artificial Sequence
  Synthetic
agauugacccuuuucuaa

SEQ ID NO: 193967 - RNA, 19 nt, Artificial Sequence
  Synthetic
uagauugacccuuuucuaa

SEQ ID NO: 193968 - RNA, 20 nt, Artificial Sequence
  Synthetic
auagauugacccuuuucuaa

SEQ ID NO: 193969 - RNA, 21 nt, Artificial Sequence
  Synthetic
cauagauugacccuuuucuaa

SEQ ID NO: 193970 - RNA, 22 nt, Artificial Sequence
  Synthetic
acauagauugacccuuuucuaa

SEQ ID NO: 193971 - RNA, 23 nt, Artificial Sequence
  Synthetic
aacauagauugacccuuuucuaa

SEQ ID NO: 193972 - RNA, 24 nt, Artificial Sequence
  Synthetic
aaacauagauugacccuuuucuaa

SEQ ID NO: 193973 - RNA, 18 nt, Artificial Sequence
  Synthetic
aguacaauuguuuucuaa

SEQ ID NO: 193974 - RNA, 19 nt, Artificial Sequence
  Synthetic
caguacaauuguuuucuaa

SEQ ID NO: 193975 - RNA, 20 nt, Artificial Sequence
  Synthetic
acaguacaauuguuuucuaa

SEQ ID NO: 193976 - RNA, 21 nt, Artificial Sequence
  Synthetic
uacaguacaauuguuuucuaa

SEQ ID NO: 193977 - RNA, 22 nt, Artificial Sequence
  Synthetic
uuacaguacaauuguuuucuaa

SEQ ID NO: 193978 - RNA, 23 nt, Artificial Sequence
  Synthetic
uuuacaguacaauuguuuucuaa

SEQ ID NO: 193979 - RNA, 24 nt, Artificial Sequence
  Synthetic
uuuuacaguacaauuguuuucuaa

SEQ ID NO: 193980 - RNA, 18 nt, Artificial Sequence
  Synthetic
gugaauuuuguuuucuaa

SEQ ID NO: 193981 - RNA, 19 nt, Artificial Sequence
  Synthetic
cgugaauuuuguuuucuaa

SEQ ID NO: 193982 - RNA, 20 nt, Artificial Sequence
  Synthetic
acgugaauuuuguuuucuaa

SEQ ID NO: 193983 - RNA, 21 nt, Artificial Sequence
  Synthetic
gacgugaauuuuguuuucuaa

SEQ ID NO: 193984 - RNA, 22 nt, Artificial Sequence
  Synthetic
agacgugaauuuuguuuucuaa

SEQ ID NO: 193985 - RNA, 23 nt, Artificial Sequence
  Synthetic
aagacgugaauuuuguuuucuaa

SEQ ID NO: 193986 - RNA, 24 nt, Artificial Sequence
  Synthetic
gaagacgugaauuuuguuuucuaa

SEQ ID NO: 193987 - RNA, 18 nt, Artificial Sequence
  Synthetic
agcaggagauuuuucuaa

SEQ ID NO: 193988 - RNA, 19 nt, Artificial Sequence
  Synthetic
gagcaggagauuuuucuaa

SEQ ID NO: 193989 - RNA, 20 nt, Artificial Sequence
  Synthetic
ugagcaggagauuuuucuaa

SEQ ID NO: 193990 - RNA, 21 nt, Artificial Sequence
  Synthetic
augagcaggagauuuuucuaa

SEQ ID NO: 193991 - RNA, 22 nt, Artificial Sequence
  Synthetic
gaugagcaggagauuuuucuaa

SEQ ID NO: 193992 - RNA, 23 nt, Artificial Sequence
  Synthetic
ugaugagcaggagauuuuucuaa

SEQ ID NO: 193993 - RNA, 24 nt, Artificial Sequence
  Synthetic
augaugagcaggagauuuuucuaa

SEQ ID NO: 193994 - RNA, 18 nt, Artificial Sequence
  Synthetic
uugaagacuuuuuucuaa

SEQ ID NO: 193995 - RNA, 19 nt, Artificial Sequence
  Synthetic
uuugaagacuuuuuucuaa

SEQ ID NO: 193996 - RNA, 20 nt, Artificial Sequence
  Synthetic
auuugaagacuuuuuucuaa

SEQ ID NO: 193997 - RNA, 21 nt, Artificial Sequence
  Synthetic
cauuugaagacuuuuuucuaa

SEQ ID NO: 193998 - RNA, 22 nt, Artificial Sequence
  Synthetic
ucauuugaagacuuuuuucuaa

SEQ ID NO: 193999 - RNA, 23 nt, Artificial Sequence
  Synthetic
uucauuugaagacuuuuuucuaa

SEQ ID NO: 194000 - RNA, 24 nt, Artificial Sequence
  Synthetic
uuucauuugaagacuuuuuucuaa

SEQ ID NO: 194001 - RNA, 18 nt, Artificial Sequence
  Synthetic
gaaaaaagaaaaaaguaa

SEQ ID NO: 194002 - RNA, 19 nt, Artificial Sequence
  Synthetic
agaaaaaagaaaaaaguaa

SEQ ID NO: 194003 - RNA, 20 nt, Artificial Sequence
  Synthetic
aagaaaaaagaaaaaaguaa

SEQ ID NO: 194004 - RNA, 21 nt, Artificial Sequence
  Synthetic
aaagaaaaaagaaaaaaguaa

SEQ ID NO: 194005 - RNA, 22 nt, Artificial Sequence
  Synthetic
aaaagaaaaaagaaaaaaguaa

SEQ ID NO: 194006 - RNA, 23 nt, Artificial Sequence
  Synthetic
caaaagaaaaaagaaaaaaguaa

SEQ ID NO: 194007 - RNA, 24 nt, Artificial Sequence
  Synthetic
ucaaaagaaaaaagaaaaaaguaa

SEQ ID NO: 194008 - RNA, 18 nt, Artificial Sequence
  Synthetic
auuuuucagaaaaaguaa

SEQ ID NO: 194009 - RNA, 19 nt, Artificial Sequence
  Synthetic
cauuuuucagaaaaaguaa

SEQ ID NO: 194010 - RNA, 20 nt, Artificial Sequence
  Synthetic
acauuuuucagaaaaaguaa

SEQ ID NO: 194011 - RNA, 21 nt, Artificial Sequence
  Synthetic
cacauuuuucagaaaaaguaa

SEQ ID NO: 194012 - RNA, 22 nt, Artificial Sequence
  Synthetic
ccacauuuuucagaaaaaguaa

SEQ ID NO: 194013 - RNA, 23 nt, Artificial Sequence
  Synthetic
gccacauuuuucagaaaaaguaa

SEQ ID NO: 194014 - RNA, 24 nt, Artificial Sequence
  Synthetic
agccacauuuuucagaaaaaguaa

SEQ ID NO: 194015 - RNA, 18 nt, Artificial Sequence
  Synthetic
gcagcagguaaaaaguaa

SEQ ID NO: 194016 - RNA, 19 nt, Artificial Sequence
  Synthetic
ggcagcagguaaaaaguaa

SEQ ID NO: 194017 - RNA, 20 nt, Artificial Sequence
  Synthetic
aggcagcagguaaaaaguaa

SEQ ID NO: 194018 - RNA, 21 nt, Artificial Sequence
  Synthetic
aaggcagcagguaaaaaguaa

SEQ ID NO: 194019 - RNA, 22 nt, Artificial Sequence
  Synthetic
gaaggcagcagguaaaaaguaa

SEQ ID NO: 194020 - RNA, 23 nt, Artificial Sequence
  Synthetic
agaaggcagcagguaaaaaguaa

SEQ ID NO: 194021 - RNA, 24 nt, Artificial Sequence
  Synthetic
gagaaggcagcagguaaaaaguaa

SEQ ID NO: 194022 - RNA, 18 nt, Artificial Sequence
  Synthetic
caccaaaagcaaaaguaa

SEQ ID NO: 194023 - RNA, 19 nt, Artificial Sequence
  Synthetic
acaccaaaagcaaaaguaa

SEQ ID NO: 194024 - RNA, 20 nt, Artificial Sequence
  Synthetic
gacaccaaaagcaaaaguaa

SEQ ID NO: 194025 - RNA, 21 nt, Artificial Sequence
  Synthetic
ugacaccaaaagcaaaaguaa

SEQ ID NO: 194026 - RNA, 22 nt, Artificial Sequence
  Synthetic
augacaccaaaagcaaaaguaa

SEQ ID NO: 194027 - RNA, 23 nt, Artificial Sequence
  Synthetic
uaugacaccaaaagcaaaaguaa

SEQ ID NO: 194028 - RNA, 24 nt, Artificial Sequence
  Synthetic
auaugacaccaaaagcaaaaguaa

SEQ ID NO: 194029 - RNA, 18 nt, Artificial Sequence
  Synthetic
uuuuaauuagaaaaguaa

SEQ ID NO: 194030 - RNA, 19 nt, Artificial Sequence
  Synthetic
auuuuaauuagaaaaguaa

SEQ ID NO: 194031 - RNA, 20 nt, Artificial Sequence
  Synthetic
uauuuuaauuagaaaaguaa

SEQ ID NO: 194032 - RNA, 21 nt, Artificial Sequence
  Synthetic
cuauuuuaauuagaaaaguaa

SEQ ID NO: 194033 - RNA, 22 nt, Artificial Sequence
  Synthetic
acuauuuuaauuagaaaaguaa

SEQ ID NO: 194034 - RNA, 23 nt, Artificial Sequence
  Synthetic
uacuauuuuaauuagaaaaguaa

SEQ ID NO: 194035 - RNA, 24 nt, Artificial Sequence
  Synthetic
auacuauuuuaauuagaaaaguaa

SEQ ID NO: 194036 - RNA, 18 nt, Artificial Sequence
  Synthetic
aaguuuuuuuaaaaguaa

SEQ ID NO: 194037 - RNA, 19 nt, Artificial Sequence
  Synthetic
caaguuuuuuuaaaaguaa

SEQ ID NO: 194038 - RNA, 20 nt, Artificial Sequence
  Synthetic
acaaguuuuuuuaaaaguaa

SEQ ID NO: 194039 - RNA, 21 nt, Artificial Sequence
  Synthetic
cacaaguuuuuuuaaaaguaa

SEQ ID NO: 194040 - RNA, 22 nt, Artificial Sequence
  Synthetic
acacaaguuuuuuuaaaaguaa

SEQ ID NO: 194041 - RNA, 23 nt, Artificial Sequence
  Synthetic
aacacaaguuuuuuuaaaaguaa

SEQ ID NO: 194042 - RNA, 24 nt, Artificial Sequence
  Synthetic
uaacacaaguuuuuuuaaaaguaa

SEQ ID NO: 194043 - RNA, 18 nt, Artificial Sequence
  Synthetic
cucauuuuggcaaaguaa

SEQ ID NO: 194044 - RNA, 19 nt, Artificial Sequence
  Synthetic
ccucauuuuggcaaaguaa

SEQ ID NO: 194045 - RNA, 20 nt, Artificial Sequence
  Synthetic
cccucauuuuggcaaaguaa

SEQ ID NO: 194046 - RNA, 21 nt, Artificial Sequence
  Synthetic
ucccucauuuuggcaaaguaa

SEQ ID NO: 194047 - RNA, 22 nt, Artificial Sequence
  Synthetic
uucccucauuuuggcaaaguaa

SEQ ID NO: 194048 - RNA, 23 nt, Artificial Sequence
  Synthetic
uuucccucauuuuggcaaaguaa

SEQ ID NO: 194049 - RNA, 24 nt, Artificial Sequence
  Synthetic
guuucccucauuuuggcaaaguaa

SEQ ID NO: 194050 - RNA, 18 nt, Artificial Sequence
  Synthetic
gucuuuuucucaaaguaa

SEQ ID NO: 194051 - RNA, 19 nt, Artificial Sequence
  Synthetic
agucuuuuucucaaaguaa

SEQ ID NO: 194052 - RNA, 20 nt, Artificial Sequence
  Synthetic
cagucuuuuucucaaaguaa

SEQ ID NO: 194053 - RNA, 21 nt, Artificial Sequence
  Synthetic
ccagucuuuuucucaaaguaa

SEQ ID NO: 194054 - RNA, 22 nt, Artificial Sequence
  Synthetic
cccagucuuuuucucaaaguaa

SEQ ID NO: 194055 - RNA, 23 nt, Artificial Sequence
  Synthetic
ccccagucuuuuucucaaaguaa

SEQ ID NO: 194056 - RNA, 24 nt, Artificial Sequence
  Synthetic
uccccagucuuuuucucaaaguaa

SEQ ID NO: 194057 - RNA, 18 nt, Artificial Sequence
  Synthetic
auggggucuucaaaguaa

SEQ ID NO: 194058 - RNA, 19 nt, Artificial Sequence
  Synthetic
gauggggucuucaaaguaa

SEQ ID NO: 194059 - RNA, 20 nt, Artificial Sequence
  Synthetic
cgauggggucuucaaaguaa

SEQ ID NO: 194060 - RNA, 21 nt, Artificial Sequence
  Synthetic
acgauggggucuucaaaguaa

SEQ ID NO: 194061 - RNA, 22 nt, Artificial Sequence
  Synthetic
aacgauggggucuucaaaguaa

SEQ ID NO: 194062 - RNA, 23 nt, Artificial Sequence
  Synthetic
aaacgauggggucuucaaaguaa

SEQ ID NO: 194063 - RNA, 24 nt, Artificial Sequence
  Synthetic
gaaacgauggggucuucaaaguaa

SEQ ID NO: 194064 - RNA, 18 nt, Artificial Sequence
  Synthetic
ccccuauggguaaaguaa

SEQ ID NO: 194065 - RNA, 19 nt, Artificial Sequence
  Synthetic
uccccuauggguaaaguaa

SEQ ID NO: 194066 - RNA, 20 nt, Artificial Sequence
  Synthetic
uuccccuauggguaaaguaa

SEQ ID NO: 194067 - RNA, 21 nt, Artificial Sequence
  Synthetic
cuuccccuauggguaaaguaa

SEQ ID NO: 194068 - RNA, 22 nt, Artificial Sequence
  Synthetic
acuuccccuauggguaaaguaa

SEQ ID NO: 194069 - RNA, 23 nt, Artificial Sequence
  Synthetic
uacuuccccuauggguaaaguaa

SEQ ID NO: 194070 - RNA, 24 nt, Artificial Sequence
  Synthetic
uuacuuccccuauggguaaaguaa

SEQ ID NO: 194071 - RNA, 18 nt, Artificial Sequence
  Synthetic
aauagccagaacaaguaa

SEQ ID NO: 194072 - RNA, 19 nt, Artificial Sequence
  Synthetic
aaauagccagaacaaguaa

SEQ ID NO: 194073 - RNA, 20 nt, Artificial Sequence
  Synthetic
aaaauagccagaacaaguaa

SEQ ID NO: 194074 - RNA, 21 nt, Artificial Sequence
  Synthetic
aaaaauagccagaacaaguaa

SEQ ID NO: 194075 - RNA, 22 nt, Artificial Sequence
  Synthetic
aaaaaauagccagaacaaguaa

SEQ ID NO: 194076 - RNA, 23 nt, Artificial Sequence
  Synthetic
gaaaaaauagccagaacaaguaa

SEQ ID NO: 194077 - RNA, 24 nt, Artificial Sequence
  Synthetic
agaaaaaauagccagaacaaguaa

SEQ ID NO: 194078 - RNA, 18 nt, Artificial Sequence
  Synthetic
auaccuuauuucaaguaa

SEQ ID NO: 194079 - RNA, 19 nt, Artificial Sequence
  Synthetic
gauaccuuauuucaaguaa

SEQ ID NO: 194080 - RNA, 20 nt, Artificial Sequence
  Synthetic
agauaccuuauuucaaguaa

SEQ ID NO: 194081 - RNA, 21 nt, Artificial Sequence
  Synthetic
uagauaccuuauuucaaguaa

SEQ ID NO: 194082 - RNA, 22 nt, Artificial Sequence
  Synthetic
uuagauaccuuauuucaaguaa

SEQ ID NO: 194083 - RNA, 23 nt, Artificial Sequence
  Synthetic
uuuagauaccuuauuucaaguaa

SEQ ID NO: 194084 - RNA, 24 nt, Artificial Sequence
  Synthetic
uuuuagauaccuuauuucaaguaa

SEQ ID NO: 194085 - RNA, 18 nt, Artificial Sequence
  Synthetic
agaaauaaaaagaaguaa

SEQ ID NO: 194086 - RNA, 19 nt, Artificial Sequence
  Synthetic
cagaaauaaaaagaaguaa

SEQ ID NO: 194087 - RNA, 20 nt, Artificial Sequence
  Synthetic
acagaaauaaaaagaaguaa

SEQ ID NO: 194088 - RNA, 21 nt, Artificial Sequence
  Synthetic
uacagaaauaaaaagaaguaa

SEQ ID NO: 194089 - RNA, 22 nt, Artificial Sequence
  Synthetic
uuacagaaauaaaaagaaguaa

SEQ ID NO: 194090 - RNA, 23 nt, Artificial Sequence
  Synthetic
auuacagaaauaaaaagaaguaa

SEQ ID NO: 194091 - RNA, 24 nt, Artificial Sequence
  Synthetic
cauuacagaaauaaaaagaaguaa

SEQ ID NO: 194092 - RNA, 18 nt, Artificial Sequence
  Synthetic
aacgugagaaagaaguaa

SEQ ID NO: 194093 - RNA, 19 nt, Artificial Sequence
  Synthetic
uaacgugagaaagaaguaa

SEQ ID NO: 194094 - RNA, 20 nt, Artificial Sequence
  Synthetic
uuaacgugagaaagaaguaa

SEQ ID NO: 194095 - RNA, 21 nt, Artificial Sequence
  Synthetic
uuuaacgugagaaagaaguaa

SEQ ID NO: 194096 - RNA, 22 nt, Artificial Sequence
  Synthetic
cuuuaacgugagaaagaaguaa

SEQ ID NO: 194097 - RNA, 23 nt, Artificial Sequence
  Synthetic
ccuuuaacgugagaaagaaguaa

SEQ ID NO: 194098 - RNA, 24 nt, Artificial Sequence
  Synthetic
cccuuuaacgugagaaagaaguaa

SEQ ID NO: 194099 - RNA, 18 nt, Artificial Sequence
  Synthetic
ggauguugggagaaguaa

SEQ ID NO: 194100 - RNA, 19 nt, Artificial Sequence
  Synthetic
gggauguugggagaaguaa

SEQ ID NO: 194101 - RNA, 20 nt, Artificial Sequence
  Synthetic
ugggauguugggagaaguaa

SEQ ID NO: 194102 - RNA, 21 nt, Artificial Sequence
  Synthetic
gugggauguugggagaaguaa

SEQ ID NO: 194103 - RNA, 22 nt, Artificial Sequence
  Synthetic
agugggauguugggagaaguaa

SEQ ID NO: 194104 - RNA, 23 nt, Artificial Sequence
  Synthetic
cagugggauguugggagaaguaa

SEQ ID NO: 194105 - RNA, 24 nt, Artificial Sequence
  Synthetic
gcagugggauguugggagaaguaa

SEQ ID NO: 194106 - RNA, 18 nt, Artificial Sequence
  Synthetic
ugagaagugaggaaguaa

SEQ ID NO: 194107 - RNA, 19 nt, Artificial Sequence
  Synthetic
augagaagugaggaaguaa

SEQ ID NO: 194108 - RNA, 20 nt, Artificial Sequence
  Synthetic
aaugagaagugaggaaguaa

SEQ ID NO: 194109 - RNA, 21 nt, Artificial Sequence
  Synthetic
aaaugagaagugaggaaguaa

SEQ ID NO: 194110 - RNA, 22 nt, Artificial Sequence
  Synthetic
gaaaugagaagugaggaaguaa

SEQ ID NO: 194111 - RNA, 23 nt, Artificial Sequence
  Synthetic
ggaaaugagaagugaggaaguaa

SEQ ID NO: 194112 - RNA, 24 nt, Artificial Sequence
  Synthetic
uggaaaugagaagugaggaaguaa

SEQ ID NO: 194113 - RNA, 18 nt, Artificial Sequence
  Synthetic
auuacagcagggaaguaa

SEQ ID NO: 194114 - RNA, 19 nt, Artificial Sequence
  Synthetic
cauuacagcagggaaguaa

SEQ ID NO: 194115 - RNA, 20 nt, Artificial Sequence
  Synthetic
ucauuacagcagggaaguaa

SEQ ID NO: 194116 - RNA, 21 nt, Artificial Sequence
  Synthetic
gucauuacagcagggaaguaa

SEQ ID NO: 194117 - RNA, 22 nt, Artificial Sequence
  Synthetic
ugucauuacagcagggaaguaa

SEQ ID NO: 194118 - RNA, 23 nt, Artificial Sequence
  Synthetic
cugucauuacagcagggaaguaa

SEQ ID NO: 194119 - RNA, 24 nt, Artificial Sequence
  Synthetic
ccugucauuacagcagggaaguaa

SEQ ID NO: 194120 - RNA, 18 nt, Artificial Sequence
  Synthetic
uaaaaaaagcugaaguaa

SEQ ID NO: 194121 - RNA, 19 nt, Artificial Sequence
  Synthetic
uuaaaaaaagcugaaguaa

SEQ ID NO: 194122 - RNA, 20 nt, Artificial Sequence
  Synthetic
uuuaaaaaaagcugaaguaa

SEQ ID NO: 194123 - RNA, 21 nt, Artificial Sequence
  Synthetic
auuuaaaaaaagcugaaguaa

SEQ ID NO: 194124 - RNA, 22 nt, Artificial Sequence
  Synthetic
cauuuaaaaaaagcugaaguaa

SEQ ID NO: 194125 - RNA, 23 nt, Artificial Sequence
  Synthetic
ucauuuaaaaaaagcugaaguaa

SEQ ID NO: 194126 - RNA, 24 nt, Artificial Sequence
  Synthetic
cucauuuaaaaaaagcugaaguaa

SEQ ID NO: 194127 - RNA, 18 nt, Artificial Sequence
  Synthetic
guggcuagagugaaguaa

SEQ ID NO: 194128 - RNA, 19 nt, Artificial Sequence
  Synthetic
uguggcuagagugaaguaa

SEQ ID NO: 194129 - RNA, 20 nt, Artificial Sequence
  Synthetic
guguggcuagagugaaguaa

SEQ ID NO: 194130 - RNA, 21 nt, Artificial Sequence
  Synthetic
aguguggcuagagugaaguaa

SEQ ID NO: 194131 - RNA, 22 nt, Artificial Sequence
  Synthetic
caguguggcuagagugaaguaa

SEQ ID NO: 194132 - RNA, 23 nt, Artificial Sequence
  Synthetic
gcaguguggcuagagugaaguaa

SEQ ID NO: 194133 - RNA, 24 nt, Artificial Sequence
  Synthetic
ugcaguguggcuagagugaaguaa

SEQ ID NO: 194134 - RNA, 18 nt, Artificial Sequence
  Synthetic
auguacugugugaaguaa

SEQ ID NO: 194135 - RNA, 19 nt, Artificial Sequence
  Synthetic
uauguacugugugaaguaa

SEQ ID NO: 194136 - RNA, 20 nt, Artificial Sequence
  Synthetic
auauguacugugugaaguaa

SEQ ID NO: 194137 - RNA, 21 nt, Artificial Sequence
  Synthetic
cauauguacugugugaaguaa

SEQ ID NO: 194138 - RNA, 22 nt, Artificial Sequence
  Synthetic
ccauauguacugugugaaguaa

SEQ ID NO: 194139 - RNA, 23 nt, Artificial Sequence
  Synthetic
uccauauguacugugugaaguaa

SEQ ID NO: 194140 - RNA, 24 nt, Artificial Sequence
  Synthetic
guccauauguacugugugaaguaa

SEQ ID NO: 194141 - RNA, 18 nt, Artificial Sequence
  Synthetic
gcucccacuuauaaguaa

SEQ ID NO: 194142 - RNA, 19 nt, Artificial Sequence
  Synthetic
agcucccacuuauaaguaa

SEQ ID NO: 194143 - RNA, 20 nt, Artificial Sequence
  Synthetic
uagcucccacuuauaaguaa

SEQ ID NO: 194144 - RNA, 21 nt, Artificial Sequence
  Synthetic
uuagcucccacuuauaaguaa

SEQ ID NO: 194145 - RNA, 22 nt, Artificial Sequence
  Synthetic
cuuagcucccacuuauaaguaa

SEQ ID NO: 194146 - RNA, 23 nt, Artificial Sequence
  Synthetic
gcuuagcucccacuuauaaguaa

SEQ ID NO: 194147 - RNA, 24 nt, Artificial Sequence
  Synthetic
ugcuuagcucccacuuauaaguaa

SEQ ID NO: 194148 - RNA, 18 nt, Artificial Sequence
  Synthetic
cuuugcaaaucuaaguaa

SEQ ID NO: 194149 - RNA, 19 nt, Artificial Sequence
  Synthetic
ucuuugcaaaucuaaguaa

SEQ ID NO: 194150 - RNA, 20 nt, Artificial Sequence
  Synthetic
uucuuugcaaaucuaaguaa

SEQ ID NO: 194151 - RNA, 21 nt, Artificial Sequence
  Synthetic
uuucuuugcaaaucuaaguaa

SEQ ID NO: 194152 - RNA, 22 nt, Artificial Sequence
  Synthetic
uuuucuuugcaaaucuaaguaa

SEQ ID NO: 194153 - RNA, 23 nt, Artificial Sequence
  Synthetic
guuuucuuugcaaaucuaaguaa

SEQ ID NO: 194154 - RNA, 24 nt, Artificial Sequence
  Synthetic
uguuuucuuugcaaaucuaaguaa

SEQ ID NO: 194155 - RNA, 18 nt, Artificial Sequence
  Synthetic
gacccucacucuaaguaa

SEQ ID NO: 194156 - RNA, 19 nt, Artificial Sequence
  Synthetic
agacccucacucuaaguaa

SEQ ID NO: 194157 - RNA, 20 nt, Artificial Sequence
  Synthetic
gagacccucacucuaaguaa

SEQ ID NO: 194158 - RNA, 21 nt, Artificial Sequence
  Synthetic
ugagacccucacucuaaguaa

SEQ ID NO: 194159 - RNA, 22 nt, Artificial Sequence
  Synthetic
uugagacccucacucuaaguaa

SEQ ID NO: 194160 - RNA, 23 nt, Artificial Sequence
  Synthetic
uuugagacccucacucuaaguaa

SEQ ID NO: 194161 - RNA, 24 nt, Artificial Sequence
  Synthetic
uuuugagacccucacucuaaguaa

SEQ ID NO: 194162 - RNA, 18 nt, Artificial Sequence
  Synthetic
auuguccuuauuaaguaa

SEQ ID NO: 194163 - RNA, 19 nt, Artificial Sequence
  Synthetic
uauuguccuuauuaaguaa

SEQ ID NO: 194164 - RNA, 20 nt, Artificial Sequence
  Synthetic
auauuguccuuauuaaguaa

SEQ ID NO: 194165 - RNA, 21 nt, Artificial Sequence
  Synthetic
gauauuguccuuauuaaguaa

SEQ ID NO: 194166 - RNA, 22 nt, Artificial Sequence
  Synthetic
agauauuguccuuauuaaguaa

SEQ ID NO: 194167 - RNA, 23 nt, Artificial Sequence
  Synthetic
uagauauuguccuuauuaaguaa

SEQ ID NO: 194168 - RNA, 24 nt, Artificial Sequence
  Synthetic
guagauauuguccuuauuaaguaa

SEQ ID NO: 194169 - RNA, 18 nt, Artificial Sequence
  Synthetic
agaacuuugcuuaaguaa

SEQ ID NO: 194170 - RNA, 19 nt, Artificial Sequence
  Synthetic
cagaacuuugcuuaaguaa

SEQ ID NO: 194171 - RNA, 20 nt, Artificial Sequence
  Synthetic
gcagaacuuugcuuaaguaa

SEQ ID NO: 194172 - RNA, 21 nt, Artificial Sequence
  Synthetic
ugcagaacuuugcuuaaguaa

SEQ ID NO: 194173 - RNA, 22 nt, Artificial Sequence
  Synthetic
cugcagaacuuugcuuaaguaa

SEQ ID NO: 194174 - RNA, 23 nt, Artificial Sequence
  Synthetic
gcugcagaacuuugcuuaaguaa

SEQ ID NO: 194175 - RNA, 24 nt, Artificial Sequence
  Synthetic
ggcugcagaacuuugcuuaaguaa

SEQ ID NO: 194176 - RNA, 18 nt, Artificial Sequence
  Synthetic
cuaauuguaguuaaguaa

SEQ ID NO: 194177 - RNA, 19 nt, Artificial Sequence
  Synthetic
ccuaauuguaguuaaguaa

SEQ ID NO: 194178 - RNA, 20 nt, Artificial Sequence
  Synthetic
accuaauuguaguuaaguaa

SEQ ID NO: 194179 - RNA, 21 nt, Artificial Sequence
  Synthetic
aaccuaauuguaguuaaguaa

SEQ ID NO: 194180 - RNA, 22 nt, Artificial Sequence
  Synthetic
aaaccuaauuguaguuaaguaa

SEQ ID NO: 194181 - RNA, 23 nt, Artificial Sequence
  Synthetic
caaaccuaauuguaguuaaguaa

SEQ ID NO: 194182 - RNA, 24 nt, Artificial Sequence
  Synthetic
gcaaaccuaauuguaguuaaguaa

SEQ ID NO: 194183 - RNA, 18 nt, Artificial Sequence
  Synthetic
uuuuauuuaauacaguaa

SEQ ID NO: 194184 - RNA, 19 nt, Artificial Sequence
  Synthetic
guuuuauuuaauacaguaa

SEQ ID NO: 194185 - RNA, 20 nt, Artificial Sequence
  Synthetic
gguuuuauuuaauacaguaa

SEQ ID NO: 194186 - RNA, 21 nt, Artificial Sequence
  Synthetic
agguuuuauuuaauacaguaa

SEQ ID NO: 194187 - RNA, 22 nt, Artificial Sequence
  Synthetic
uagguuuuauuuaauacaguaa

SEQ ID NO: 194188 - RNA, 23 nt, Artificial Sequence
  Synthetic
guagguuuuauuuaauacaguaa

SEQ ID NO: 194189 - RNA, 24 nt, Artificial Sequence
  Synthetic
gguagguuuuauuuaauacaguaa

SEQ ID NO: 194190 - RNA, 18 nt, Artificial Sequence
  Synthetic
auaguuauuauacaguaa

SEQ ID NO: 194191 - RNA, 19 nt, Artificial Sequence
  Synthetic
cauaguuauuauacaguaa

SEQ ID NO: 194192 - RNA, 20 nt, Artificial Sequence
  Synthetic
gcauaguuauuauacaguaa

SEQ ID NO: 194193 - RNA, 21 nt, Artificial Sequence
  Synthetic
agcauaguuauuauacaguaa

SEQ ID NO: 194194 - RNA, 22 nt, Artificial Sequence
  Synthetic
uagcauaguuauuauacaguaa

SEQ ID NO: 194195 - RNA, 23 nt, Artificial Sequence
  Synthetic
auagcauaguuauuauacaguaa

SEQ ID NO: 194196 - RNA, 24 nt, Artificial Sequence
  Synthetic
gauagcauaguuauuauacaguaa

SEQ ID NO: 194197 - RNA, 18 nt, Artificial Sequence
  Synthetic
auuuaggacuuacaguaa

SEQ ID NO: 194198 - RNA, 19 nt, Artificial Sequence
  Synthetic
cauuuaggacuuacaguaa

SEQ ID NO: 194199 - RNA, 20 nt, Artificial Sequence
  Synthetic
acauuuaggacuuacaguaa

SEQ ID NO: 194200 - RNA, 21 nt, Artificial Sequence
  Synthetic
uacauuuaggacuuacaguaa

SEQ ID NO: 194201 - RNA, 22 nt, Artificial Sequence
  Synthetic
uuacauuuaggacuuacaguaa

SEQ ID NO: 194202 - RNA, 23 nt, Artificial Sequence
  Synthetic
uuuacauuuaggacuuacaguaa

SEQ ID NO: 194203 - RNA, 24 nt, Artificial Sequence
  Synthetic
uuuuacauuuaggacuuacaguaa

SEQ ID NO: 194204 - RNA, 18 nt, Artificial Sequence
  Synthetic
uucaccacauaccaguaa

SEQ ID NO: 194205 - RNA, 19 nt, Artificial Sequence
  Synthetic
uuucaccacauaccaguaa

SEQ ID NO: 194206 - RNA, 20 nt, Artificial Sequence
  Synthetic
guuucaccacauaccaguaa

SEQ ID NO: 194207 - RNA, 21 nt, Artificial Sequence
  Synthetic
aguuucaccacauaccaguaa

SEQ ID NO: 194208 - RNA, 22 nt, Artificial Sequence
  Synthetic
caguuucaccacauaccaguaa

SEQ ID NO: 194209 - RNA, 23 nt, Artificial Sequence
  Synthetic
gcaguuucaccacauaccaguaa

SEQ ID NO: 194210 - RNA, 24 nt, Artificial Sequence
  Synthetic
ugcaguuucaccacauaccaguaa

SEQ ID NO: 194211 - RNA, 18 nt, Artificial Sequence
  Synthetic
aucucauagaagcaguaa

SEQ ID NO: 194212 - RNA, 19 nt, Artificial Sequence
  Synthetic
gaucucauagaagcaguaa

SEQ ID NO: 194213 - RNA, 20 nt, Artificial Sequence
  Synthetic
cgaucucauagaagcaguaa

SEQ ID NO: 194214 - RNA, 21 nt, Artificial Sequence
  Synthetic
ucgaucucauagaagcaguaa

SEQ ID NO: 194215 - RNA, 22 nt, Artificial Sequence
  Synthetic
aucgaucucauagaagcaguaa

SEQ ID NO: 194216 - RNA, 23 nt, Artificial Sequence
  Synthetic
caucgaucucauagaagcaguaa

SEQ ID NO: 194217 - RNA, 24 nt, Artificial Sequence
  Synthetic
acaucgaucucauagaagcaguaa

SEQ ID NO: 194218 - RNA, 18 nt, Artificial Sequence
  Synthetic
ggggagggauagcaguaa

SEQ ID NO: 194219 - RNA, 19 nt, Artificial Sequence
  Synthetic
aggggagggauagcaguaa

SEQ ID NO: 194220 - RNA, 20 nt, Artificial Sequence
  Synthetic
uaggggagggauagcaguaa

SEQ ID NO: 194221 - RNA, 21 nt, Artificial Sequence
  Synthetic
uuaggggagggauagcaguaa

SEQ ID NO: 194222 - RNA, 22 nt, Artificial Sequence
  Synthetic
guuaggggagggauagcaguaa

SEQ ID NO: 194223 - RNA, 23 nt, Artificial Sequence
  Synthetic
gguuaggggagggauagcaguaa

SEQ ID NO: 194224 - RNA, 24 nt, Artificial Sequence
  Synthetic
agguuaggggagggauagcaguaa

SEQ ID NO: 194225 - RNA, 18 nt, Artificial Sequence
  Synthetic
aaugaguaguagcaguaa

SEQ ID NO: 194226 - RNA, 19 nt, Artificial Sequence
  Synthetic
gaaugaguaguagcaguaa

SEQ ID NO: 194227 - RNA, 20 nt, Artificial Sequence
  Synthetic
agaaugaguaguagcaguaa

SEQ ID NO: 194228 - RNA, 21 nt, Artificial Sequence
  Synthetic
gagaaugaguaguagcaguaa

SEQ ID NO: 194229 - RNA, 22 nt, Artificial Sequence
  Synthetic
ggagaaugaguaguagcaguaa

SEQ ID NO: 194230 - RNA, 23 nt, Artificial Sequence
  Synthetic
uggagaaugaguaguagcaguaa

SEQ ID NO: 194231 - RNA, 24 nt, Artificial Sequence
  Synthetic
guggagaaugaguaguagcaguaa

SEQ ID NO: 194232 - RNA, 18 nt, Artificial Sequence
  Synthetic
ggcaccaccuggcaguaa

SEQ ID NO: 194233 - RNA, 19 nt, Artificial Sequence
  Synthetic
cggcaccaccuggcaguaa

SEQ ID NO: 194234 - RNA, 20 nt, Artificial Sequence
  Synthetic
ucggcaccaccuggcaguaa

SEQ ID NO: 194235 - RNA, 21 nt, Artificial Sequence
  Synthetic
aucggcaccaccuggcaguaa

SEQ ID NO: 194236 - RNA, 22 nt, Artificial Sequence
  Synthetic
aaucggcaccaccuggcaguaa

SEQ ID NO: 194237 - RNA, 23 nt, Artificial Sequence
  Synthetic
gaaucggcaccaccuggcaguaa

SEQ ID NO: 194238 - RNA, 24 nt, Artificial Sequence
  Synthetic
ugaaucggcaccaccuggcaguaa

SEQ ID NO: 194239 - RNA, 18 nt, Artificial Sequence
  Synthetic
gauuucaaaaugcaguaa

SEQ ID NO: 194240 - RNA, 19 nt, Artificial Sequence
  Synthetic
ggauuucaaaaugcaguaa

SEQ ID NO: 194241 - RNA, 20 nt, Artificial Sequence
  Synthetic
uggauuucaaaaugcaguaa

SEQ ID NO: 194242 - RNA, 21 nt, Artificial Sequence
  Synthetic
auggauuucaaaaugcaguaa

SEQ ID NO: 194243 - RNA, 22 nt, Artificial Sequence
  Synthetic
cauggauuucaaaaugcaguaa

SEQ ID NO: 194244 - RNA, 23 nt, Artificial Sequence
  Synthetic
ucauggauuucaaaaugcaguaa

SEQ ID NO: 194245 - RNA, 24 nt, Artificial Sequence
  Synthetic
aucauggauuucaaaaugcaguaa

SEQ ID NO: 194246 - RNA, 18 nt, Artificial Sequence
  Synthetic
aacaagacagugcaguaa

SEQ ID NO: 194247 - RNA, 19 nt, Artificial Sequence
  Synthetic
uaacaagacagugcaguaa

SEQ ID NO: 194248 - RNA, 20 nt, Artificial Sequence
  Synthetic
cuaacaagacagugcaguaa

SEQ ID NO: 194249 - RNA, 21 nt, Artificial Sequence
  Synthetic
acuaacaagacagugcaguaa

SEQ ID NO: 194250 - RNA, 22 nt, Artificial Sequence
  Synthetic
aacuaacaagacagugcaguaa

SEQ ID NO: 194251 - RNA, 23 nt, Artificial Sequence
  Synthetic
uaacuaacaagacagugcaguaa

SEQ ID NO: 194252 - RNA, 24 nt, Artificial Sequence
  Synthetic
auaacuaacaagacagugcaguaa

SEQ ID NO: 194253 - RNA, 18 nt, Artificial Sequence
  Synthetic
accuuagacgugcaguaa

SEQ ID NO: 194254 - RNA, 19 nt, Artificial Sequence
  Synthetic
aaccuuagacgugcaguaa

SEQ ID NO: 194255 - RNA, 20 nt, Artificial Sequence
  Synthetic
aaaccuuagacgugcaguaa

SEQ ID NO: 194256 - RNA, 21 nt, Artificial Sequence
  Synthetic
caaaccuuagacgugcaguaa

SEQ ID NO: 194257 - RNA, 22 nt, Artificial Sequence
  Synthetic
ccaaaccuuagacgugcaguaa

SEQ ID NO: 194258 - RNA, 23 nt, Artificial Sequence
  Synthetic
accaaaccuuagacgugcaguaa

SEQ ID NO: 194259 - RNA, 24 nt, Artificial Sequence
  Synthetic
gaccaaaccuuagacgugcaguaa

SEQ ID NO: 194260 - RNA, 18 nt, Artificial Sequence
  Synthetic
ucuuuccuuuugcaguaa

SEQ ID NO: 194261 - RNA, 19 nt, Artificial Sequence
  Synthetic
uucuuuccuuuugcaguaa

SEQ ID NO: 194262 - RNA, 20 nt, Artificial Sequence
  Synthetic
auucuuuccuuuugcaguaa

SEQ ID NO: 194263 - RNA, 21 nt, Artificial Sequence
  Synthetic
aauucuuuccuuuugcaguaa

SEQ ID NO: 194264 - RNA, 22 nt, Artificial Sequence
  Synthetic
aaauucuuuccuuuugcaguaa

SEQ ID NO: 194265 - RNA, 23 nt, Artificial Sequence
  Synthetic
uaaauucuuuccuuuugcaguaa

SEQ ID NO: 194266 - RNA, 24 nt, Artificial Sequence
  Synthetic
guaaauucuuuccuuuugcaguaa

SEQ ID NO: 194267 - RNA, 18 nt, Artificial Sequence
  Synthetic
gcaguucugacucaguaa

SEQ ID NO: 194268 - RNA, 19 nt, Artificial Sequence
  Synthetic
ggcaguucugacucaguaa

SEQ ID NO: 194269 - RNA, 20 nt, Artificial Sequence
  Synthetic
gggcaguucugacucaguaa

SEQ ID NO: 194270 - RNA, 21 nt, Artificial Sequence
  Synthetic
ugggcaguucugacucaguaa

SEQ ID NO: 194271 - RNA, 22 nt, Artificial Sequence
  Synthetic
uugggcaguucugacucaguaa

SEQ ID NO: 194272 - RNA, 23 nt, Artificial Sequence
  Synthetic
guugggcaguucugacucaguaa

SEQ ID NO: 194273 - RNA, 24 nt, Artificial Sequence
  Synthetic
aguugggcaguucugacucaguaa

SEQ ID NO: 194274 - RNA, 18 nt, Artificial Sequence
  Synthetic
gugugggcaucucaguaa

SEQ ID NO: 194275 - RNA, 19 nt, Artificial Sequence
  Synthetic
agugugggcaucucaguaa

SEQ ID NO: 194276 - RNA, 20 nt, Artificial Sequence
  Synthetic
gagugugggcaucucaguaa

SEQ ID NO: 194277 - RNA, 21 nt, Artificial Sequence
  Synthetic
agagugugggcaucucaguaa

SEQ ID NO: 194278 - RNA, 22 nt, Artificial Sequence
  Synthetic
cagagugugggcaucucaguaa

SEQ ID NO: 194279 - RNA, 23 nt, Artificial Sequence
  Synthetic
ucagagugugggcaucucaguaa

SEQ ID NO: 194280 - RNA, 24 nt, Artificial Sequence
  Synthetic
uucagagugugggcaucucaguaa

SEQ ID NO: 194281 - RNA, 18 nt, Artificial Sequence
  Synthetic
cagggauaucuucaguaa

SEQ ID NO: 194282 - RNA, 19 nt, Artificial Sequence
  Synthetic
ucagggauaucuucaguaa

SEQ ID NO: 194283 - RNA, 20 nt, Artificial Sequence
  Synthetic
aucagggauaucuucaguaa

SEQ ID NO: 194284 - RNA, 21 nt, Artificial Sequence
  Synthetic
aaucagggauaucuucaguaa

SEQ ID NO: 194285 - RNA, 22 nt, Artificial Sequence
  Synthetic
uaaucagggauaucuucaguaa

SEQ ID NO: 194286 - RNA, 23 nt, Artificial Sequence
  Synthetic
guaaucagggauaucuucaguaa

SEQ ID NO: 194287 - RNA, 24 nt, Artificial Sequence
  Synthetic
aguaaucagggauaucuucaguaa

SEQ ID NO: 194288 - RNA, 18 nt, Artificial Sequence
  Synthetic
acuuucguggaagaguaa

SEQ ID NO: 194289 - RNA, 19 nt, Artificial Sequence
  Synthetic
aacuuucguggaagaguaa

SEQ ID NO: 194290 - RNA, 20 nt, Artificial Sequence
  Synthetic
uaacuuucguggaagaguaa

SEQ ID NO: 194291 - RNA, 21 nt, Artificial Sequence
  Synthetic
uuaacuuucguggaagaguaa

SEQ ID NO: 194292 - RNA, 22 nt, Artificial Sequence
  Synthetic
guuaacuuucguggaagaguaa

SEQ ID NO: 194293 - RNA, 23 nt, Artificial Sequence
  Synthetic
uguuaacuuucguggaagaguaa

SEQ ID NO: 194294 - RNA, 24 nt, Artificial Sequence
  Synthetic
uuguuaacuuucguggaagaguaa

SEQ ID NO: 194295 - RNA, 18 nt, Artificial Sequence
  Synthetic
gaggcaaaugaagaguaa

SEQ ID NO: 194296 - RNA, 19 nt, Artificial Sequence
  Synthetic
agaggcaaaugaagaguaa

SEQ ID NO: 194297 - RNA, 20 nt, Artificial Sequence
  Synthetic
aagaggcaaaugaagaguaa

SEQ ID NO: 194298 - RNA, 21 nt, Artificial Sequence
  Synthetic
gaagaggcaaaugaagaguaa

SEQ ID NO: 194299 - RNA, 22 nt, Artificial Sequence
  Synthetic
agaagaggcaaaugaagaguaa

SEQ ID NO: 194300 - RNA, 23 nt, Artificial Sequence
  Synthetic
gagaagaggcaaaugaagaguaa

SEQ ID NO: 194301 - RNA, 24 nt, Artificial Sequence
  Synthetic
ugagaagaggcaaaugaagaguaa

SEQ ID NO: 194302 - RNA, 18 nt, Artificial Sequence
  Synthetic
gugaggcagacagaguaa

SEQ ID NO: 194303 - RNA, 19 nt, Artificial Sequence
  Synthetic
agugaggcagacagaguaa

SEQ ID NO: 194304 - RNA, 20 nt, Artificial Sequence
  Synthetic
aagugaggcagacagaguaa

SEQ ID NO: 194305 - RNA, 21 nt, Artificial Sequence
  Synthetic
gaagugaggcagacagaguaa

SEQ ID NO: 194306 - RNA, 22 nt, Artificial Sequence
  Synthetic
agaagugaggcagacagaguaa

SEQ ID NO: 194307 - RNA, 23 nt, Artificial Sequence
  Synthetic
aagaagugaggcagacagaguaa

SEQ ID NO: 194308 - RNA, 24 nt, Artificial Sequence
  Synthetic
caagaagugaggcagacagaguaa

SEQ ID NO: 194309 - RNA, 18 nt, Artificial Sequence
  Synthetic
augauacaagcagaguaa

SEQ ID NO: 194310 - RNA, 19 nt, Artificial Sequence
  Synthetic
gaugauacaagcagaguaa

SEQ ID NO: 194311 - RNA, 20 nt, Artificial Sequence
  Synthetic
ugaugauacaagcagaguaa

SEQ ID NO: 194312 - RNA, 21 nt, Artificial Sequence
  Synthetic
gugaugauacaagcagaguaa

SEQ ID NO: 194313 - RNA, 22 nt, Artificial Sequence
  Synthetic
ggugaugauacaagcagaguaa

SEQ ID NO: 194314 - RNA, 23 nt, Artificial Sequence
  Synthetic
aggugaugauacaagcagaguaa

SEQ ID NO: 194315 - RNA, 24 nt, Artificial Sequence
  Synthetic
gaggugaugauacaagcagaguaa

SEQ ID NO: 194316 - RNA, 18 nt, Artificial Sequence
  Synthetic
aagauaauauuagaguaa

SEQ ID NO: 194317 - RNA, 19 nt, Artificial Sequence
  Synthetic
aaagauaauauuagaguaa

SEQ ID NO: 194318 - RNA, 20 nt, Artificial Sequence
  Synthetic
gaaagauaauauuagaguaa

SEQ ID NO: 194319 - RNA, 21 nt, Artificial Sequence
  Synthetic
ggaaagauaauauuagaguaa

SEQ ID NO: 194320 - RNA, 22 nt, Artificial Sequence
  Synthetic
gggaaagauaauauuagaguaa

SEQ ID NO: 194321 - RNA, 23 nt, Artificial Sequence
  Synthetic
ugggaaagauaauauuagaguaa

SEQ ID NO: 194322 - RNA, 24 nt, Artificial Sequence
  Synthetic
gugggaaagauaauauuagaguaa

SEQ ID NO: 194323 - RNA, 18 nt, Artificial Sequence
  Synthetic
ccucagccucccgaguaa

SEQ ID NO: 194324 - RNA, 19 nt, Artificial Sequence
  Synthetic
gccucagccucccgaguaa

SEQ ID NO: 194325 - RNA, 20 nt, Artificial Sequence
  Synthetic
ugccucagccucccgaguaa

SEQ ID NO: 194326 - RNA, 21 nt, Artificial Sequence
  Synthetic
cugccucagccucccgaguaa

SEQ ID NO: 194327 - RNA, 22 nt, Artificial Sequence
  Synthetic
ccugccucagccucccgaguaa

SEQ ID NO: 194328 - RNA, 23 nt, Artificial Sequence
  Synthetic
uccugccucagccucccgaguaa

SEQ ID NO: 194329 - RNA, 24 nt, Artificial Sequence
  Synthetic
cuccugccucagccucccgaguaa

SEQ ID NO: 194330 - RNA, 18 nt, Artificial Sequence
  Synthetic
cacuuuacagaggaguaa

SEQ ID NO: 194331 - RNA, 19 nt, Artificial Sequence
  Synthetic
ccacuuuacagaggaguaa

SEQ ID NO: 194332 - RNA, 20 nt, Artificial Sequence
  Synthetic
gccacuuuacagaggaguaa

SEQ ID NO: 194333 - RNA, 21 nt, Artificial Sequence
  Synthetic
cgccacuuuacagaggaguaa

SEQ ID NO: 194334 - RNA, 22 nt, Artificial Sequence
  Synthetic
ucgccacuuuacagaggaguaa

SEQ ID NO: 194335 - RNA, 23 nt, Artificial Sequence
  Synthetic
aucgccacuuuacagaggaguaa

SEQ ID NO: 194336 - RNA, 24 nt, Artificial Sequence
  Synthetic
aaucgccacuuuacagaggaguaa

SEQ ID NO: 194337 - RNA, 18 nt, Artificial Sequence
  Synthetic
guucauugugaggaguaa

SEQ ID NO: 194338 - RNA, 19 nt, Artificial Sequence
  Synthetic
gguucauugugaggaguaa

SEQ ID NO: 194339 - RNA, 20 nt, Artificial Sequence
  Synthetic
agguucauugugaggaguaa

SEQ ID NO: 194340 - RNA, 21 nt, Artificial Sequence
  Synthetic
uagguucauugugaggaguaa

SEQ ID NO: 194341 - RNA, 22 nt, Artificial Sequence
  Synthetic
auagguucauugugaggaguaa

SEQ ID NO: 194342 - RNA, 23 nt, Artificial Sequence
  Synthetic
aauagguucauugugaggaguaa

SEQ ID NO: 194343 - RNA, 24 nt, Artificial Sequence
  Synthetic
uaauagguucauugugaggaguaa

SEQ ID NO: 194344 - RNA, 18 nt, Artificial Sequence
  Synthetic
uggaggauaagggaguaa

SEQ ID NO: 194345 - RNA, 19 nt, Artificial Sequence
  Synthetic
guggaggauaagggaguaa

SEQ ID NO: 194346 - RNA, 20 nt, Artificial Sequence
  Synthetic
uguggaggauaagggaguaa

SEQ ID NO: 194347 - RNA, 21 nt, Artificial Sequence
  Synthetic
uuguggaggauaagggaguaa

SEQ ID NO: 194348 - RNA, 22 nt, Artificial Sequence
  Synthetic
guuguggaggauaagggaguaa

SEQ ID NO: 194349 - RNA, 23 nt, Artificial Sequence
  Synthetic
uguuguggaggauaagggaguaa

SEQ ID NO: 194350 - RNA, 24 nt, Artificial Sequence
  Synthetic
guguuguggaggauaagggaguaa

SEQ ID NO: 194351 - RNA, 18 nt, Artificial Sequence
  Synthetic
acagaugccagggaguaa

SEQ ID NO: 194352 - RNA, 19 nt, Artificial Sequence
  Synthetic
gacagaugccagggaguaa

SEQ ID NO: 194353 - RNA, 20 nt, Artificial Sequence
  Synthetic
ggacagaugccagggaguaa

SEQ ID NO: 194354 - RNA, 21 nt, Artificial Sequence
  Synthetic
aggacagaugccagggaguaa

SEQ ID NO: 194355 - RNA, 22 nt, Artificial Sequence
  Synthetic
caggacagaugccagggaguaa

SEQ ID NO: 194356 - RNA, 23 nt, Artificial Sequence
  Synthetic
acaggacagaugccagggaguaa

SEQ ID NO: 194357 - RNA, 24 nt, Artificial Sequence
  Synthetic
cacaggacagaugccagggaguaa

SEQ ID NO: 194358 - RNA, 18 nt, Artificial Sequence
  Synthetic
uuguauucuauggaguaa

SEQ ID NO: 194359 - RNA, 19 nt, Artificial Sequence
  Synthetic
uuuguauucuauggaguaa

SEQ ID NO: 194360 - RNA, 20 nt, Artificial Sequence
  Synthetic
uuuuguauucuauggaguaa

SEQ ID NO: 194361 - RNA, 21 nt, Artificial Sequence
  Synthetic
uuuuuguauucuauggaguaa

SEQ ID NO: 194362 - RNA, 22 nt, Artificial Sequence
  Synthetic
guuuuuguauucuauggaguaa

SEQ ID NO: 194363 - RNA, 23 nt, Artificial Sequence
  Synthetic
aguuuuuguauucuauggaguaa

SEQ ID NO: 194364 - RNA, 24 nt, Artificial Sequence
  Synthetic
gaguuuuuguauucuauggaguaa

SEQ ID NO: 194365 - RNA, 18 nt, Artificial Sequence
  Synthetic
augguuucuauggaguaa

SEQ ID NO: 194366 - RNA, 19 nt, Artificial Sequence
  Synthetic
uaugguuucuauggaguaa

SEQ ID NO: 194367 - RNA, 20 nt, Artificial Sequence
  Synthetic
auaugguuucuauggaguaa

SEQ ID NO: 194368 - RNA, 21 nt, Artificial Sequence
  Synthetic
uauaugguuucuauggaguaa

SEQ ID NO: 194369 - RNA, 22 nt, Artificial Sequence
  Synthetic
auauaugguuucuauggaguaa

SEQ ID NO: 194370 - RNA, 23 nt, Artificial Sequence
  Synthetic
cauauaugguuucuauggaguaa

SEQ ID NO: 194371 - RNA, 24 nt, Artificial Sequence
  Synthetic
ucauauaugguuucuauggaguaa

SEQ ID NO: 194372 - RNA, 18 nt, Artificial Sequence
  Synthetic
ucaggaguuacugaguaa

SEQ ID NO: 194373 - RNA, 19 nt, Artificial Sequence
  Synthetic
cucaggaguuacugaguaa

SEQ ID NO: 194374 - RNA, 20 nt, Artificial Sequence
  Synthetic
ucucaggaguuacugaguaa

SEQ ID NO: 194375 - RNA, 21 nt, Artificial Sequence
  Synthetic
aucucaggaguuacugaguaa

SEQ ID NO: 194376 - RNA, 22 nt, Artificial Sequence
  Synthetic
caucucaggaguuacugaguaa

SEQ ID NO: 194377 - RNA, 23 nt, Artificial Sequence
  Synthetic
ucaucucaggaguuacugaguaa

SEQ ID NO: 194378 - RNA, 24 nt, Artificial Sequence
  Synthetic
uucaucucaggaguuacugaguaa

SEQ ID NO: 194379 - RNA, 18 nt, Artificial Sequence
  Synthetic
aaguuguugucugaguaa

SEQ ID NO: 194380 - RNA, 19 nt, Artificial Sequence
  Synthetic
aaaguuguugucugaguaa

SEQ ID NO: 194381 - RNA, 20 nt, Artificial Sequence
  Synthetic
aaaaguuguugucugaguaa

SEQ ID NO: 194382 - RNA, 21 nt, Artificial Sequence
  Synthetic
uaaaaguuguugucugaguaa

SEQ ID NO: 194383 - RNA, 22 nt, Artificial Sequence
  Synthetic
guaaaaguuguugucugaguaa

SEQ ID NO: 194384 - RNA, 23 nt, Artificial Sequence
  Synthetic
uguaaaaguuguugucugaguaa

SEQ ID NO: 194385 - RNA, 24 nt, Artificial Sequence
  Synthetic
uuguaaaaguuguugucugaguaa

SEQ ID NO: 194386 - RNA, 18 nt, Artificial Sequence
  Synthetic
ccgcaugaaauugaguaa

SEQ ID NO: 194387 - RNA, 19 nt, Artificial Sequence
  Synthetic
accgcaugaaauugaguaa

SEQ ID NO: 194388 - RNA, 20 nt, Artificial Sequence
  Synthetic
uaccgcaugaaauugaguaa

SEQ ID NO: 194389 - RNA, 21 nt, Artificial Sequence
  Synthetic
guaccgcaugaaauugaguaa

SEQ ID NO: 194390 - RNA, 22 nt, Artificial Sequence
  Synthetic
uguaccgcaugaaauugaguaa

SEQ ID NO: 194391 - RNA, 23 nt, Artificial Sequence
  Synthetic
cuguaccgcaugaaauugaguaa

SEQ ID NO: 194392 - RNA, 24 nt, Artificial Sequence
  Synthetic
acuguaccgcaugaaauugaguaa

SEQ ID NO: 194393 - RNA, 18 nt, Artificial Sequence
  Synthetic
aauuauuagauugaguaa

SEQ ID NO: 194394 - RNA, 19 nt, Artificial Sequence
  Synthetic
aaauuauuagauugaguaa

SEQ ID NO: 194395 - RNA, 20 nt, Artificial Sequence
  Synthetic
aaaauuauuagauugaguaa

SEQ ID NO: 194396 - RNA, 21 nt, Artificial Sequence
  Synthetic
aaaaauuauuagauugaguaa

SEQ ID NO: 194397 - RNA, 22 nt, Artificial Sequence
  Synthetic
uaaaaauuauuagauugaguaa

SEQ ID NO: 194398 - RNA, 23 nt, Artificial Sequence
  Synthetic
uuaaaaauuauuagauugaguaa

SEQ ID NO: 194399 - RNA, 24 nt, Artificial Sequence
  Synthetic
cuuaaaaauuauuagauugaguaa

SEQ ID NO: 194400 - RNA, 18 nt, Artificial Sequence
  Synthetic
ucuggagucaaauaguaa

SEQ ID NO: 194401 - RNA, 19 nt, Artificial Sequence
  Synthetic
aucuggagucaaauaguaa

SEQ ID NO: 194402 - RNA, 20 nt, Artificial Sequence
  Synthetic
caucuggagucaaauaguaa

SEQ ID NO: 194403 - RNA, 21 nt, Artificial Sequence
  Synthetic
ucaucuggagucaaauaguaa

SEQ ID NO: 194404 - RNA, 22 nt, Artificial Sequence
  Synthetic
aucaucuggagucaaauaguaa

SEQ ID NO: 194405 - RNA, 23 nt, Artificial Sequence
  Synthetic
aaucaucuggagucaaauaguaa

SEQ ID NO: 194406 - RNA, 24 nt, Artificial Sequence
  Synthetic
aaaucaucuggagucaaauaguaa

SEQ ID NO: 194407 - RNA, 18 nt, Artificial Sequence
  Synthetic
ggauuuuuggaauaguaa

SEQ ID NO: 194408 - RNA, 19 nt, Artificial Sequence
  Synthetic
aggauuuuuggaauaguaa

SEQ ID NO: 194409 - RNA, 20 nt, Artificial Sequence
  Synthetic
uaggauuuuuggaauaguaa

SEQ ID NO: 194410 - RNA, 21 nt, Artificial Sequence
  Synthetic
cuaggauuuuuggaauaguaa

SEQ ID NO: 194411 - RNA, 22 nt, Artificial Sequence
  Synthetic
ccuaggauuuuuggaauaguaa

SEQ ID NO: 194412 - RNA, 23 nt, Artificial Sequence
  Synthetic
cccuaggauuuuuggaauaguaa

SEQ ID NO: 194413 - RNA, 24 nt, Artificial Sequence
  Synthetic
gcccuaggauuuuuggaauaguaa

SEQ ID NO: 194414 - RNA, 18 nt, Artificial Sequence
  Synthetic
uuauuuuagagauaguaa

SEQ ID NO: 194415 - RNA, 19 nt, Artificial Sequence
  Synthetic
auuauuuuagagauaguaa

SEQ ID NO: 194416 - RNA, 20 nt, Artificial Sequence
  Synthetic
gauuauuuuagagauaguaa

SEQ ID NO: 194417 - RNA, 21 nt, Artificial Sequence
  Synthetic
ugauuauuuuagagauaguaa

SEQ ID NO: 194418 - RNA, 22 nt, Artificial Sequence
  Synthetic
cugauuauuuuagagauaguaa

SEQ ID NO: 194419 - RNA, 23 nt, Artificial Sequence
  Synthetic
ucugauuauuuuagagauaguaa

SEQ ID NO: 194420 - RNA, 24 nt, Artificial Sequence
  Synthetic
cucugauuauuuuagagauaguaa

SEQ ID NO: 194421 - RNA, 18 nt, Artificial Sequence
  Synthetic
cauuugaguagauaguaa

SEQ ID NO: 194422 - RNA, 19 nt, Artificial Sequence
  Synthetic
acauuugaguagauaguaa

SEQ ID NO: 194423 - RNA, 20 nt, Artificial Sequence
  Synthetic
aacauuugaguagauaguaa

SEQ ID NO: 194424 - RNA, 21 nt, Artificial Sequence
  Synthetic
gaacauuugaguagauaguaa

SEQ ID NO: 194425 - RNA, 22 nt, Artificial Sequence
  Synthetic
agaacauuugaguagauaguaa

SEQ ID NO: 194426 - RNA, 23 nt, Artificial Sequence
  Synthetic
cagaacauuugaguagauaguaa

SEQ ID NO: 194427 - RNA, 24 nt, Artificial Sequence
  Synthetic
gcagaacauuugaguagauaguaa

SEQ ID NO: 194428 - RNA, 18 nt, Artificial Sequence
  Synthetic
agcuuaauuugauaguaa

SEQ ID NO: 194429 - RNA, 19 nt, Artificial Sequence
  Synthetic
cagcuuaauuugauaguaa

SEQ ID NO: 194430 - RNA, 20 nt, Artificial Sequence
  Synthetic
ucagcuuaauuugauaguaa

SEQ ID NO: 194431 - RNA, 21 nt, Artificial Sequence
  Synthetic
aucagcuuaauuugauaguaa

SEQ ID NO: 194432 - RNA, 22 nt, Artificial Sequence
  Synthetic
uaucagcuuaauuugauaguaa

SEQ ID NO: 194433 - RNA, 23 nt, Artificial Sequence
  Synthetic
uuaucagcuuaauuugauaguaa

SEQ ID NO: 194434 - RNA, 24 nt, Artificial Sequence
  Synthetic
uuuaucagcuuaauuugauaguaa

SEQ ID NO: 194435 - RNA, 18 nt, Artificial Sequence
  Synthetic
aaggagcucauauaguaa

SEQ ID NO: 194436 - RNA, 19 nt, Artificial Sequence
  Synthetic
caaggagcucauauaguaa

SEQ ID NO: 194437 - RNA, 20 nt, Artificial Sequence
  Synthetic
ucaaggagcucauauaguaa

SEQ ID NO: 194438 - RNA, 21 nt, Artificial Sequence
  Synthetic
uucaaggagcucauauaguaa

SEQ ID NO: 194439 - RNA, 22 nt, Artificial Sequence
  Synthetic
uuucaaggagcucauauaguaa

SEQ ID NO: 194440 - RNA, 23 nt, Artificial Sequence
  Synthetic
cuuucaaggagcucauauaguaa

SEQ ID NO: 194441 - RNA, 24 nt, Artificial Sequence
  Synthetic
ccuuucaaggagcucauauaguaa

SEQ ID NO: 194442 - RNA, 18 nt, Artificial Sequence
  Synthetic
aaaaaagaauuauaguaa

SEQ ID NO: 194443 - RNA, 19 nt, Artificial Sequence
  Synthetic
uaaaaaagaauuauaguaa

SEQ ID NO: 194444 - RNA, 20 nt, Artificial Sequence
  Synthetic
uuaaaaaagaauuauaguaa

SEQ ID NO: 194445 - RNA, 21 nt, Artificial Sequence
  Synthetic
auuaaaaaagaauuauaguaa

SEQ ID NO: 194446 - RNA, 22 nt, Artificial Sequence
  Synthetic
gauuaaaaaagaauuauaguaa

SEQ ID NO: 194447 - RNA, 23 nt, Artificial Sequence
  Synthetic
agauuaaaaaagaauuauaguaa

SEQ ID NO: 194448 - RNA, 24 nt, Artificial Sequence
  Synthetic
gagauuaaaaaagaauuauaguaa

SEQ ID NO: 194449 - RNA, 18 nt, Artificial Sequence
  Synthetic
uaucaauaguuauaguaa

SEQ ID NO: 194450 - RNA, 19 nt, Artificial Sequence
  Synthetic
auaucaauaguuauaguaa

SEQ ID NO: 194451 - RNA, 20 nt, Artificial Sequence
  Synthetic
cauaucaauaguuauaguaa

SEQ ID NO: 194452 - RNA, 21 nt, Artificial Sequence
  Synthetic
acauaucaauaguuauaguaa

SEQ ID NO: 194453 - RNA, 22 nt, Artificial Sequence
  Synthetic
uacauaucaauaguuauaguaa

SEQ ID NO: 194454 - RNA, 23 nt, Artificial Sequence
  Synthetic
cuacauaucaauaguuauaguaa

SEQ ID NO: 194455 - RNA, 24 nt, Artificial Sequence
  Synthetic
ccuacauaucaauaguuauaguaa

SEQ ID NO: 194456 - RNA, 18 nt, Artificial Sequence
  Synthetic
auuuugaauuccuaguaa

SEQ ID NO: 194457 - RNA, 19 nt, Artificial Sequence
  Synthetic
aauuuugaauuccuaguaa

SEQ ID NO: 194458 - RNA, 20 nt, Artificial Sequence
  Synthetic
uaauuuugaauuccuaguaa

SEQ ID NO: 194459 - RNA, 21 nt, Artificial Sequence
  Synthetic
guaauuuugaauuccuaguaa

SEQ ID NO: 194460 - RNA, 22 nt, Artificial Sequence
  Synthetic
aguaauuuugaauuccuaguaa

SEQ ID NO: 194461 - RNA, 23 nt, Artificial Sequence
  Synthetic
uaguaauuuugaauuccuaguaa

SEQ ID NO: 194462 - RNA, 24 nt, Artificial Sequence
  Synthetic
cuaguaauuuugaauuccuaguaa

SEQ ID NO: 194463 - RNA, 18 nt, Artificial Sequence
  Synthetic
aaaguagaauaguaguaa

SEQ ID NO: 194464 - RNA, 19 nt, Artificial Sequence
  Synthetic
gaaaguagaauaguaguaa

SEQ ID NO: 194465 - RNA, 20 nt, Artificial Sequence
  Synthetic
agaaaguagaauaguaguaa

SEQ ID NO: 194466 - RNA, 21 nt, Artificial Sequence
  Synthetic
gagaaaguagaauaguaguaa

SEQ ID NO: 194467 - RNA, 22 nt, Artificial Sequence
  Synthetic
agagaaaguagaauaguaguaa

SEQ ID NO: 194468 - RNA, 23 nt, Artificial Sequence
  Synthetic
uagagaaaguagaauaguaguaa

SEQ ID NO: 194469 - RNA, 24 nt, Artificial Sequence
  Synthetic
auagagaaaguagaauaguaguaa

SEQ ID NO: 194470 - RNA, 18 nt, Artificial Sequence
  Synthetic
augccugcugcguaguaa

SEQ ID NO: 194471 - RNA, 19 nt, Artificial Sequence
  Synthetic
uaugccugcugcguaguaa

SEQ ID NO: 194472 - RNA, 20 nt, Artificial Sequence
  Synthetic
guaugccugcugcguaguaa

SEQ ID NO: 194473 - RNA, 21 nt, Artificial Sequence
  Synthetic
aguaugccugcugcguaguaa

SEQ ID NO: 194474 - RNA, 22 nt, Artificial Sequence
  Synthetic
aaguaugccugcugcguaguaa

SEQ ID NO: 194475 - RNA, 23 nt, Artificial Sequence
  Synthetic
gaaguaugccugcugcguaguaa

SEQ ID NO: 194476 - RNA, 24 nt, Artificial Sequence
  Synthetic
agaaguaugccugcugcguaguaa

SEQ ID NO: 194477 - RNA, 18 nt, Artificial Sequence
  Synthetic
aauucaaugagguaguaa

SEQ ID NO: 194478 - RNA, 19 nt, Artificial Sequence
  Synthetic
aaauucaaugagguaguaa

SEQ ID NO: 194479 - RNA, 20 nt, Artificial Sequence
  Synthetic
aaaauucaaugagguaguaa

SEQ ID NO: 194480 - RNA, 21 nt, Artificial Sequence
  Synthetic
gaaaauucaaugagguaguaa

SEQ ID NO: 194481 - RNA, 22 nt, Artificial Sequence
  Synthetic
ugaaaauucaaugagguaguaa

SEQ ID NO: 194482 - RNA, 23 nt, Artificial Sequence
  Synthetic
gugaaaauucaaugagguaguaa

SEQ ID NO: 194483 - RNA, 24 nt, Artificial Sequence
  Synthetic
ggugaaaauucaaugagguaguaa

SEQ ID NO: 194484 - RNA, 18 nt, Artificial Sequence
  Synthetic
ugucauucucuguaguaa

SEQ ID NO: 194485 - RNA, 19 nt, Artificial Sequence
  Synthetic
gugucauucucuguaguaa

SEQ ID NO: 194486 - RNA, 20 nt, Artificial Sequence
  Synthetic
ugugucauucucuguaguaa

SEQ ID NO: 194487 - RNA, 21 nt, Artificial Sequence
  Synthetic
augugucauucucuguaguaa

SEQ ID NO: 194488 - RNA, 22 nt, Artificial Sequence
  Synthetic
uaugugucauucucuguaguaa

SEQ ID NO: 194489 - RNA, 23 nt, Artificial Sequence
  Synthetic
auaugugucauucucuguaguaa

SEQ ID NO: 194490 - RNA, 24 nt, Artificial Sequence
  Synthetic
uauaugugucauucucuguaguaa

SEQ ID NO: 194491 - RNA, 18 nt, Artificial Sequence
  Synthetic
aaaguguuuguguaguaa

SEQ ID NO: 194492 - RNA, 19 nt, Artificial Sequence
  Synthetic
gaaaguguuuguguaguaa

SEQ ID NO: 194493 - RNA, 20 nt, Artificial Sequence
  Synthetic
agaaaguguuuguguaguaa

SEQ ID NO: 194494 - RNA, 21 nt, Artificial Sequence
  Synthetic
cagaaaguguuuguguaguaa

SEQ ID NO: 194495 - RNA, 22 nt, Artificial Sequence
  Synthetic
ccagaaaguguuuguguaguaa

SEQ ID NO: 194496 - RNA, 23 nt, Artificial Sequence
  Synthetic
cccagaaaguguuuguguaguaa

SEQ ID NO: 194497 - RNA, 24 nt, Artificial Sequence
  Synthetic
ucccagaaaguguuuguguaguaa

SEQ ID NO: 194498 - RNA, 18 nt, Artificial Sequence
  Synthetic
acuuguacauuguaguaa

SEQ ID NO: 194499 - RNA, 19 nt, Artificial Sequence
  Synthetic
aacuuguacauuguaguaa

SEQ ID NO: 194500 - RNA, 20 nt, Artificial Sequence
  Synthetic
gaacuuguacauuguaguaa

SEQ ID NO: 194501 - RNA, 21 nt, Artificial Sequence
  Synthetic
agaacuuguacauuguaguaa

SEQ ID NO: 194502 - RNA, 22 nt, Artificial Sequence
  Synthetic
uagaacuuguacauuguaguaa

SEQ ID NO: 194503 - RNA, 23 nt, Artificial Sequence
  Synthetic
uuagaacuuguacauuguaguaa

SEQ ID NO: 194504 - RNA, 24 nt, Artificial Sequence
  Synthetic
guuagaacuuguacauuguaguaa

SEQ ID NO: 194505 - RNA, 18 nt, Artificial Sequence
  Synthetic
uagagauuuaauuaguaa

SEQ ID NO: 194506 - RNA, 19 nt, Artificial Sequence
  Synthetic
uuagagauuuaauuaguaa

SEQ ID NO: 194507 - RNA, 20 nt, Artificial Sequence
  Synthetic
guuagagauuuaauuaguaa

SEQ ID NO: 194508 - RNA, 21 nt, Artificial Sequence
  Synthetic
gguuagagauuuaauuaguaa

SEQ ID NO: 194509 - RNA, 22 nt, Artificial Sequence
  Synthetic
agguuagagauuuaauuaguaa

SEQ ID NO: 194510 - RNA, 23 nt, Artificial Sequence
  Synthetic
cagguuagagauuuaauuaguaa

SEQ ID NO: 194511 - RNA, 24 nt, Artificial Sequence
  Synthetic
ucagguuagagauuuaauuaguaa

SEQ ID NO: 194512 - RNA, 18 nt, Artificial Sequence
  Synthetic
uguuuucucauuuaguaa

SEQ ID NO: 194513 - RNA, 19 nt, Artificial Sequence
  Synthetic
cuguuuucucauuuaguaa

SEQ ID NO: 194514 - RNA, 20 nt, Artificial Sequence
  Synthetic
ccuguuuucucauuuaguaa

SEQ ID NO: 194515 - RNA, 21 nt, Artificial Sequence
  Synthetic
accuguuuucucauuuaguaa

SEQ ID NO: 194516 - RNA, 22 nt, Artificial Sequence
  Synthetic
aaccuguuuucucauuuaguaa

SEQ ID NO: 194517 - RNA, 23 nt, Artificial Sequence
  Synthetic
uaaccuguuuucucauuuaguaa

SEQ ID NO: 194518 - RNA, 24 nt, Artificial Sequence
  Synthetic
guaaccuguuuucucauuuaguaa

SEQ ID NO: 194519 - RNA, 18 nt, Artificial Sequence
  Synthetic
augcuguggauuuaguaa

SEQ ID NO: 194520 - RNA, 19 nt, Artificial Sequence
  Synthetic
gaugcuguggauuuaguaa

SEQ ID NO: 194521 - RNA, 20 nt, Artificial Sequence
  Synthetic
cgaugcuguggauuuaguaa

SEQ ID NO: 194522 - RNA, 21 nt, Artificial Sequence
  Synthetic
gcgaugcuguggauuuaguaa

SEQ ID NO: 194523 - RNA, 22 nt, Artificial Sequence
  Synthetic
ggcgaugcuguggauuuaguaa

SEQ ID NO: 194524 - RNA, 23 nt, Artificial Sequence
  Synthetic
gggcgaugcuguggauuuaguaa

SEQ ID NO: 194525 - RNA, 24 nt, Artificial Sequence
  Synthetic
ugggcgaugcuguggauuuaguaa

SEQ ID NO: 194526 - RNA, 18 nt, Artificial Sequence
  Synthetic
uccuuucagcaaacguaa

SEQ ID NO: 194527 - RNA, 19 nt, Artificial Sequence
  Synthetic
auccuuucagcaaacguaa

SEQ ID NO: 194528 - RNA, 20 nt, Artificial Sequence
  Synthetic
aauccuuucagcaaacguaa

SEQ ID NO: 194529 - RNA, 21 nt, Artificial Sequence
  Synthetic
uaauccuuucagcaaacguaa

SEQ ID NO: 194530 - RNA, 22 nt, Artificial Sequence
  Synthetic
guaauccuuucagcaaacguaa

SEQ ID NO: 194531 - RNA, 23 nt, Artificial Sequence
  Synthetic
gguaauccuuucagcaaacguaa

SEQ ID NO: 194532 - RNA, 24 nt, Artificial Sequence
  Synthetic
ggguaauccuuucagcaaacguaa

SEQ ID NO: 194533 - RNA, 18 nt, Artificial Sequence
  Synthetic
ccagccuggccaacguaa

SEQ ID NO: 194534 - RNA, 19 nt, Artificial Sequence
  Synthetic
accagccuggccaacguaa

SEQ ID NO: 194535 - RNA, 20 nt, Artificial Sequence
  Synthetic
uaccagccuggccaacguaa

SEQ ID NO: 194536 - RNA, 21 nt, Artificial Sequence
  Synthetic
auaccagccuggccaacguaa

SEQ ID NO: 194537 - RNA, 22 nt, Artificial Sequence
  Synthetic
aauaccagccuggccaacguaa

SEQ ID NO: 194538 - RNA, 23 nt, Artificial Sequence
  Synthetic
caauaccagccuggccaacguaa

SEQ ID NO: 194539 - RNA, 24 nt, Artificial Sequence
  Synthetic
ucaauaccagccuggccaacguaa

SEQ ID NO: 194540 - RNA, 18 nt, Artificial Sequence
  Synthetic
uauucaagaggcacguaa

SEQ ID NO: 194541 - RNA, 19 nt, Artificial Sequence
  Synthetic
uuauucaagaggcacguaa

SEQ ID NO: 194542 - RNA, 20 nt, Artificial Sequence
  Synthetic
auuauucaagaggcacguaa

SEQ ID NO: 194543 - RNA, 21 nt, Artificial Sequence
  Synthetic
uauuauucaagaggcacguaa

SEQ ID NO: 194544 - RNA, 22 nt, Artificial Sequence
  Synthetic
cuauuauucaagaggcacguaa

SEQ ID NO: 194545 - RNA, 23 nt, Artificial Sequence
  Synthetic
ccuauuauucaagaggcacguaa

SEQ ID NO: 194546 - RNA, 24 nt, Artificial Sequence
  Synthetic
accuauuauucaagaggcacguaa

SEQ ID NO: 194547 - RNA, 18 nt, Artificial Sequence
  Synthetic
caaauagaaaugacguaa

SEQ ID NO: 194548 - RNA, 19 nt, Artificial Sequence
  Synthetic
ccaaauagaaaugacguaa

SEQ ID NO: 194549 - RNA, 20 nt, Artificial Sequence
  Synthetic
uccaaauagaaaugacguaa

SEQ ID NO: 194550 - RNA, 21 nt, Artificial Sequence
  Synthetic
cuccaaauagaaaugacguaa

SEQ ID NO: 194551 - RNA, 22 nt, Artificial Sequence
  Synthetic
ccuccaaauagaaaugacguaa

SEQ ID NO: 194552 - RNA, 23 nt, Artificial Sequence
  Synthetic
uccuccaaauagaaaugacguaa

SEQ ID NO: 194553 - RNA, 24 nt, Artificial Sequence
  Synthetic
uuccuccaaauagaaaugacguaa

SEQ ID NO: 194554 - RNA, 18 nt, Artificial Sequence
  Synthetic
uuuggaagaagcccguaa

SEQ ID NO: 194555 - RNA, 19 nt, Artificial Sequence
  Synthetic
cuuuggaagaagcccguaa

SEQ ID NO: 194556 - RNA, 20 nt, Artificial Sequence
  Synthetic
ucuuuggaagaagcccguaa

SEQ ID NO: 194557 - RNA, 21 nt, Artificial Sequence
  Synthetic
uucuuuggaagaagcccguaa

SEQ ID NO: 194558 - RNA, 22 nt, Artificial Sequence
  Synthetic
auucuuuggaagaagcccguaa

SEQ ID NO: 194559 - RNA, 23 nt, Artificial Sequence
  Synthetic
aauucuuuggaagaagcccguaa

SEQ ID NO: 194560 - RNA, 24 nt, Artificial Sequence
  Synthetic
aaauucuuuggaagaagcccguaa

SEQ ID NO: 194561 - RNA, 18 nt, Artificial Sequence
  Synthetic
ugaaucauuucuccguaa

SEQ ID NO: 194562 - RNA, 19 nt, Artificial Sequence
  Synthetic
augaaucauuucuccguaa

SEQ ID NO: 194563 - RNA, 20 nt, Artificial Sequence
  Synthetic
aaugaaucauuucuccguaa

SEQ ID NO: 194564 - RNA, 21 nt, Artificial Sequence
  Synthetic
gaaugaaucauuucuccguaa

SEQ ID NO: 194565 - RNA, 22 nt, Artificial Sequence
  Synthetic
ggaaugaaucauuucuccguaa

SEQ ID NO: 194566 - RNA, 23 nt, Artificial Sequence
  Synthetic
gggaaugaaucauuucuccguaa

SEQ ID NO: 194567 - RNA, 24 nt, Artificial Sequence
  Synthetic
ggggaaugaaucauuucuccguaa

SEQ ID NO: 194568 - RNA, 18 nt, Artificial Sequence
  Synthetic
ccccuuccacuuccguaa

SEQ ID NO: 194569 - RNA, 19 nt, Artificial Sequence
  Synthetic
uccccuuccacuuccguaa

SEQ ID NO: 194570 - RNA, 20 nt, Artificial Sequence
  Synthetic
uuccccuuccacuuccguaa

SEQ ID NO: 194571 - RNA, 21 nt, Artificial Sequence
  Synthetic
uuuccccuuccacuuccguaa

SEQ ID NO: 194572 - RNA, 22 nt, Artificial Sequence
  Synthetic
uuuuccccuuccacuuccguaa

SEQ ID NO: 194573 - RNA, 23 nt, Artificial Sequence
  Synthetic
uuuuuccccuuccacuuccguaa

SEQ ID NO: 194574 - RNA, 24 nt, Artificial Sequence
  Synthetic
guuuuuccccuuccacuuccguaa

SEQ ID NO: 194575 - RNA, 18 nt, Artificial Sequence
  Synthetic
agcaaagcuaaagcguaa

SEQ ID NO: 194576 - RNA, 19 nt, Artificial Sequence
  Synthetic
gagcaaagcuaaagcguaa

SEQ ID NO: 194577 - RNA, 20 nt, Artificial Sequence
  Synthetic
agagcaaagcuaaagcguaa

SEQ ID NO: 194578 - RNA, 21 nt, Artificial Sequence
  Synthetic
aagagcaaagcuaaagcguaa

SEQ ID NO: 194579 - RNA, 22 nt, Artificial Sequence
  Synthetic
aaagagcaaagcuaaagcguaa

SEQ ID NO: 194580 - RNA, 23 nt, Artificial Sequence
  Synthetic
aaaagagcaaagcuaaagcguaa

SEQ ID NO: 194581 - RNA, 24 nt, Artificial Sequence
  Synthetic
gaaaagagcaaagcuaaagcguaa

SEQ ID NO: 194582 - RNA, 19 nt, Artificial Sequence
  Synthetic
cgcauguucucacucguaa

SEQ ID NO: 194583 - RNA, 20 nt, Artificial Sequence
  Synthetic
ccgcauguucucacucguaa

SEQ ID NO: 194584 - RNA, 21 nt, Artificial Sequence
  Synthetic
accgcauguucucacucguaa

SEQ ID NO: 194585 - RNA, 22 nt, Artificial Sequence
  Synthetic
caccgcauguucucacucguaa

SEQ ID NO: 194586 - RNA, 23 nt, Artificial Sequence
  Synthetic
gcaccgcauguucucacucguaa

SEQ ID NO: 194587 - RNA, 24 nt, Artificial Sequence
  Synthetic
ggcaccgcauguucucacucguaa

SEQ ID NO: 194588 - RNA, 18 nt, Artificial Sequence
  Synthetic
augugucuuguuucguaa

SEQ ID NO: 194589 - RNA, 19 nt, Artificial Sequence
  Synthetic
aaugugucuuguuucguaa

SEQ ID NO: 194590 - RNA, 20 nt, Artificial Sequence
  Synthetic
uaaugugucuuguuucguaa

SEQ ID NO: 194591 - RNA, 21 nt, Artificial Sequence
  Synthetic
uuaaugugucuuguuucguaa

SEQ ID NO: 194592 - RNA, 22 nt, Artificial Sequence
  Synthetic
guuaaugugucuuguuucguaa

SEQ ID NO: 194593 - RNA, 23 nt, Artificial Sequence
  Synthetic
uguuaaugugucuuguuucguaa

SEQ ID NO: 194594 - RNA, 24 nt, Artificial Sequence
  Synthetic
auguuaaugugucuuguuucguaa

SEQ ID NO: 194595 - RNA, 18 nt, Artificial Sequence
  Synthetic
auugacaaaagaagguaa

SEQ ID NO: 194596 - RNA, 19 nt, Artificial Sequence
  Synthetic
aauugacaaaagaagguaa

SEQ ID NO: 194597 - RNA, 20 nt, Artificial Sequence
  Synthetic
gaauugacaaaagaagguaa

SEQ ID NO: 194598 - RNA, 21 nt, Artificial Sequence
  Synthetic
ugaauugacaaaagaagguaa

SEQ ID NO: 194599 - RNA, 22 nt, Artificial Sequence
  Synthetic
augaauugacaaaagaagguaa

SEQ ID NO: 194600 - RNA, 23 nt, Artificial Sequence
  Synthetic
uaugaauugacaaaagaagguaa

SEQ ID NO: 194601 - RNA, 24 nt, Artificial Sequence
  Synthetic
uuaugaauugacaaaagaagguaa

SEQ ID NO: 194602 - RNA, 18 nt, Artificial Sequence
  Synthetic
uagagaauuagaagguaa

SEQ ID NO: 194603 - RNA, 19 nt, Artificial Sequence
  Synthetic
guagagaauuagaagguaa

SEQ ID NO: 194604 - RNA, 20 nt, Artificial Sequence
  Synthetic
aguagagaauuagaagguaa

SEQ ID NO: 194605 - RNA, 21 nt, Artificial Sequence
  Synthetic
gaguagagaauuagaagguaa

SEQ ID NO: 194606 - RNA, 22 nt, Artificial Sequence
  Synthetic
ugaguagagaauuagaagguaa

SEQ ID NO: 194607 - RNA, 23 nt, Artificial Sequence
  Synthetic
gugaguagagaauuagaagguaa

SEQ ID NO: 194608 - RNA, 24 nt, Artificial Sequence
  Synthetic
ugugaguagagaauuagaagguaa

SEQ ID NO: 194609 - RNA, 18 nt, Artificial Sequence
  Synthetic
aguaaauaaggaagguaa

SEQ ID NO: 194610 - RNA, 19 nt, Artificial Sequence
  Synthetic
uaguaaauaaggaagguaa

SEQ ID NO: 194611 - RNA, 20 nt, Artificial Sequence
  Synthetic
auaguaaauaaggaagguaa

SEQ ID NO: 194612 - RNA, 21 nt, Artificial Sequence
  Synthetic
aauaguaaauaaggaagguaa

SEQ ID NO: 194613 - RNA, 22 nt, Artificial Sequence
  Synthetic
uaauaguaaauaaggaagguaa

SEQ ID NO: 194614 - RNA, 23 nt, Artificial Sequence
  Synthetic
auaauaguaaauaaggaagguaa

SEQ ID NO: 194615 - RNA, 24 nt, Artificial Sequence
  Synthetic
aauaauaguaaauaaggaagguaa

SEQ ID NO: 194616 - RNA, 18 nt, Artificial Sequence
  Synthetic
guaaugggaggaagguaa

SEQ ID NO: 194617 - RNA, 19 nt, Artificial Sequence
  Synthetic
gguaaugggaggaagguaa

SEQ ID NO: 194618 - RNA, 20 nt, Artificial Sequence
  Synthetic
agguaaugggaggaagguaa

SEQ ID NO: 194619 - RNA, 21 nt, Artificial Sequence
  Synthetic
aagguaaugggaggaagguaa

SEQ ID NO: 194620 - RNA, 22 nt, Artificial Sequence
  Synthetic
gaagguaaugggaggaagguaa

SEQ ID NO: 194621 - RNA, 23 nt, Artificial Sequence
  Synthetic
agaagguaaugggaggaagguaa

SEQ ID NO: 194622 - RNA, 24 nt, Artificial Sequence
  Synthetic
uagaagguaaugggaggaagguaa

SEQ ID NO: 194623 - RNA, 18 nt, Artificial Sequence
  Synthetic
acuuuuaauaacagguaa

SEQ ID NO: 194624 - RNA, 19 nt, Artificial Sequence
  Synthetic
cacuuuuaauaacagguaa

SEQ ID NO: 194625 - RNA, 20 nt, Artificial Sequence
  Synthetic
ucacuuuuaauaacagguaa

SEQ ID NO: 194626 - RNA, 21 nt, Artificial Sequence
  Synthetic
cucacuuuuaauaacagguaa

SEQ ID NO: 194627 - RNA, 22 nt, Artificial Sequence
  Synthetic
ucucacuuuuaauaacagguaa

SEQ ID NO: 194628 - RNA, 23 nt, Artificial Sequence
  Synthetic
aucucacuuuuaauaacagguaa

SEQ ID NO: 194629 - RNA, 24 nt, Artificial Sequence
  Synthetic
caucucacuuuuaauaacagguaa

SEQ ID NO: 194630 - RNA, 18 nt, Artificial Sequence
  Synthetic
cauagaaugugcagguaa

SEQ ID NO: 194631 - RNA, 19 nt, Artificial Sequence
  Synthetic
acauagaaugugcagguaa

SEQ ID NO: 194632 - RNA, 20 nt, Artificial Sequence
  Synthetic
aacauagaaugugcagguaa

SEQ ID NO: 194633 - RNA, 21 nt, Artificial Sequence
  Synthetic
caacauagaaugugcagguaa

SEQ ID NO: 194634 - RNA, 22 nt, Artificial Sequence
  Synthetic
acaacauagaaugugcagguaa

SEQ ID NO: 194635 - RNA, 23 nt, Artificial Sequence
  Synthetic
uacaacauagaaugugcagguaa

SEQ ID NO: 194636 - RNA, 24 nt, Artificial Sequence
  Synthetic
guacaacauagaaugugcagguaa

SEQ ID NO: 194637 - RNA, 18 nt, Artificial Sequence
  Synthetic
ugaacaguaaucagguaa

SEQ ID NO: 194638 - RNA, 19 nt, Artificial Sequence
  Synthetic
augaacaguaaucagguaa

SEQ ID NO: 194639 - RNA, 20 nt, Artificial Sequence
  Synthetic
aaugaacaguaaucagguaa

SEQ ID NO: 194640 - RNA, 21 nt, Artificial Sequence
  Synthetic
gaaugaacaguaaucagguaa

SEQ ID NO: 194641 - RNA, 22 nt, Artificial Sequence
  Synthetic
ugaaugaacaguaaucagguaa

SEQ ID NO: 194642 - RNA, 23 nt, Artificial Sequence
  Synthetic
uugaaugaacaguaaucagguaa

SEQ ID NO: 194643 - RNA, 24 nt, Artificial Sequence
  Synthetic
guugaaugaacaguaaucagguaa

SEQ ID NO: 194644 - RNA, 18 nt, Artificial Sequence
  Synthetic
acauggguagucagguaa

SEQ ID NO: 194645 - RNA, 19 nt, Artificial Sequence
  Synthetic
cacauggguagucagguaa

SEQ ID NO: 194646 - RNA, 20 nt, Artificial Sequence
  Synthetic
acacauggguagucagguaa

SEQ ID NO: 194647 - RNA, 21 nt, Artificial Sequence
  Synthetic
uacacauggguagucagguaa

SEQ ID NO: 194648 - RNA, 22 nt, Artificial Sequence
  Synthetic
guacacauggguagucagguaa

SEQ ID NO: 194649 - RNA, 23 nt, Artificial Sequence
  Synthetic
uguacacauggguagucagguaa

SEQ ID NO: 194650 - RNA, 24 nt, Artificial Sequence
  Synthetic
auguacacauggguagucagguaa

SEQ ID NO: 194651 - RNA, 18 nt, Artificial Sequence
  Synthetic
cauucuccgaagagguaa

SEQ ID NO: 194652 - RNA, 19 nt, Artificial Sequence
  Synthetic
ccauucuccgaagagguaa

SEQ ID NO: 194653 - RNA, 20 nt, Artificial Sequence
  Synthetic
gccauucuccgaagagguaa

SEQ ID NO: 194654 - RNA, 21 nt, Artificial Sequence
  Synthetic
agccauucuccgaagagguaa

SEQ ID NO: 194655 - RNA, 22 nt, Artificial Sequence
  Synthetic
cagccauucuccgaagagguaa

SEQ ID NO: 194656 - RNA, 23 nt, Artificial Sequence
  Synthetic
ucagccauucuccgaagagguaa

SEQ ID NO: 194657 - RNA, 24 nt, Artificial Sequence
  Synthetic
aucagccauucuccgaagagguaa

SEQ ID NO: 194658 - RNA, 18 nt, Artificial Sequence
  Synthetic
ugauuuuccaggagguaa

SEQ ID NO: 194659 - RNA, 19 nt, Artificial Sequence
  Synthetic
augauuuuccaggagguaa

SEQ ID NO: 194660 - RNA, 20 nt, Artificial Sequence
  Synthetic
uaugauuuuccaggagguaa

SEQ ID NO: 194661 - RNA, 21 nt, Artificial Sequence
  Synthetic
uuaugauuuuccaggagguaa

SEQ ID NO: 194662 - RNA, 22 nt, Artificial Sequence
  Synthetic
guuaugauuuuccaggagguaa

SEQ ID NO: 194663 - RNA, 23 nt, Artificial Sequence
  Synthetic
aguuaugauuuuccaggagguaa

SEQ ID NO: 194664 - RNA, 24 nt, Artificial Sequence
  Synthetic
uaguuaugauuuuccaggagguaa

SEQ ID NO: 194665 - RNA, 18 nt, Artificial Sequence
  Synthetic
gcaaggccacugagguaa

SEQ ID NO: 194666 - RNA, 19 nt, Artificial Sequence
  Synthetic
ugcaaggccacugagguaa

SEQ ID NO: 194667 - RNA, 20 nt, Artificial Sequence
  Synthetic
uugcaaggccacugagguaa

SEQ ID NO: 194668 - RNA, 21 nt, Artificial Sequence
  Synthetic
uuugcaaggccacugagguaa

SEQ ID NO: 194669 - RNA, 22 nt, Artificial Sequence
  Synthetic
uuuugcaaggccacugagguaa

SEQ ID NO: 194670 - RNA, 23 nt, Artificial Sequence
  Synthetic
guuuugcaaggccacugagguaa

SEQ ID NO: 194671 - RNA, 24 nt, Artificial Sequence
  Synthetic
aguuuugcaaggccacugagguaa

SEQ ID NO: 194672 - RNA, 18 nt, Artificial Sequence
  Synthetic
aaacuugaaaauagguaa

SEQ ID NO: 194673 - RNA, 19 nt, Artificial Sequence
  Synthetic
caaacuugaaaauagguaa

SEQ ID NO: 194674 - RNA, 20 nt, Artificial Sequence
  Synthetic
gcaaacuugaaaauagguaa

SEQ ID NO: 194675 - RNA, 21 nt, Artificial Sequence
  Synthetic
agcaaacuugaaaauagguaa

SEQ ID NO: 194676 - RNA, 22 nt, Artificial Sequence
  Synthetic
cagcaaacuugaaaauagguaa

SEQ ID NO: 194677 - RNA, 23 nt, Artificial Sequence
  Synthetic
ucagcaaacuugaaaauagguaa

SEQ ID NO: 194678 - RNA, 24 nt, Artificial Sequence
  Synthetic
aucagcaaacuugaaaauagguaa

SEQ ID NO: 194679 - RNA, 18 nt, Artificial Sequence
  Synthetic
cucuggaaacauagguaa

SEQ ID NO: 194680 - RNA, 19 nt, Artificial Sequence
  Synthetic
acucuggaaacauagguaa

SEQ ID NO: 194681 - RNA, 20 nt, Artificial Sequence
  Synthetic
cacucuggaaacauagguaa

SEQ ID NO: 194682 - RNA, 21 nt, Artificial Sequence
  Synthetic
ccacucuggaaacauagguaa

SEQ ID NO: 194683 - RNA, 22 nt, Artificial Sequence
  Synthetic
accacucuggaaacauagguaa

SEQ ID NO: 194684 - RNA, 23 nt, Artificial Sequence
  Synthetic
uaccacucuggaaacauagguaa

SEQ ID NO: 194685 - RNA, 24 nt, Artificial Sequence
  Synthetic
uuaccacucuggaaacauagguaa

SEQ ID NO: 194686 - RNA, 18 nt, Artificial Sequence
  Synthetic
ugugacaucacuagguaa

SEQ ID NO: 194687 - RNA, 19 nt, Artificial Sequence
  Synthetic
cugugacaucacuagguaa

SEQ ID NO: 194688 - RNA, 20 nt, Artificial Sequence
  Synthetic
acugugacaucacuagguaa

SEQ ID NO: 194689 - RNA, 21 nt, Artificial Sequence
  Synthetic
cacugugacaucacuagguaa

SEQ ID NO: 194690 - RNA, 22 nt, Artificial Sequence
  Synthetic
gcacugugacaucacuagguaa

SEQ ID NO: 194691 - RNA, 23 nt, Artificial Sequence
  Synthetic
ugcacugugacaucacuagguaa

SEQ ID NO: 194692 - RNA, 24 nt, Artificial Sequence
  Synthetic
uugcacugugacaucacuagguaa

SEQ ID NO: 194693 - RNA, 18 nt, Artificial Sequence
  Synthetic
gauagaaggacacgguaa

SEQ ID NO: 194694 - RNA, 19 nt, Artificial Sequence
  Synthetic
ugauagaaggacacgguaa

SEQ ID NO: 194695 - RNA, 20 nt, Artificial Sequence
  Synthetic
augauagaaggacacgguaa

SEQ ID NO: 194696 - RNA, 21 nt, Artificial Sequence
  Synthetic
gaugauagaaggacacgguaa

SEQ ID NO: 194697 - RNA, 22 nt, Artificial Sequence
  Synthetic
ugaugauagaaggacacgguaa

SEQ ID NO: 194698 - RNA, 23 nt, Artificial Sequence
  Synthetic
gugaugauagaaggacacgguaa

SEQ ID NO: 194699 - RNA, 24 nt, Artificial Sequence
  Synthetic
agugaugauagaaggacacgguaa

SEQ ID NO: 194700 - RNA, 18 nt, Artificial Sequence
  Synthetic
auuuuauuugaaggguaa

SEQ ID NO: 194701 - RNA, 19 nt, Artificial Sequence
  Synthetic
cauuuuauuugaaggguaa

SEQ ID NO: 194702 - RNA, 20 nt, Artificial Sequence
  Synthetic
acauuuuauuugaaggguaa

SEQ ID NO: 194703 - RNA, 21 nt, Artificial Sequence
  Synthetic
cacauuuuauuugaaggguaa

SEQ ID NO: 194704 - RNA, 22 nt, Artificial Sequence
  Synthetic
acacauuuuauuugaaggguaa

SEQ ID NO: 194705 - RNA, 23 nt, Artificial Sequence
  Synthetic
aacacauuuuauuugaaggguaa

SEQ ID NO: 194706 - RNA, 24 nt, Artificial Sequence
  Synthetic
aaacacauuuuauuugaaggguaa

SEQ ID NO: 194707 - RNA, 18 nt, Artificial Sequence
  Synthetic
uaaaguauuuaaggguaa

SEQ ID NO: 194708 - RNA, 19 nt, Artificial Sequence
  Synthetic
cuaaaguauuuaaggguaa

SEQ ID NO: 194709 - RNA, 20 nt, Artificial Sequence
  Synthetic
ccuaaaguauuuaaggguaa

SEQ ID NO: 194710 - RNA, 21 nt, Artificial Sequence
  Synthetic
accuaaaguauuuaaggguaa

SEQ ID NO: 194711 - RNA, 22 nt, Artificial Sequence
  Synthetic
aaccuaaaguauuuaaggguaa

SEQ ID NO: 194712 - RNA, 23 nt, Artificial Sequence
  Synthetic
aaaccuaaaguauuuaaggguaa

SEQ ID NO: 194713 - RNA, 24 nt, Artificial Sequence
  Synthetic
aaaaccuaaaguauuuaaggguaa

SEQ ID NO: 194714 - RNA, 20 nt, Artificial Sequence
  Synthetic
uaaugaucaaaucaggguaa

SEQ ID NO: 194715 - RNA, 21 nt, Artificial Sequence
  Synthetic
guaaugaucaaaucaggguaa

SEQ ID NO: 194716 - RNA, 22 nt, Artificial Sequence
  Synthetic
uguaaugaucaaaucaggguaa

SEQ ID NO: 194717 - RNA, 23 nt, Artificial Sequence
  Synthetic
guguaaugaucaaaucaggguaa

SEQ ID NO: 194718 - RNA, 24 nt, Artificial Sequence
  Synthetic
uguguaaugaucaaaucaggguaa

SEQ ID NO: 194719 - RNA, 18 nt, Artificial Sequence
  Synthetic
aaaaaaucaucaggguaa

SEQ ID NO: 194720 - RNA, 19 nt, Artificial Sequence
  Synthetic
aaaaaaaucaucaggguaa

SEQ ID NO: 194721 - RNA, 20 nt, Artificial Sequence
  Synthetic
gaaaaaaaucaucaggguaa

SEQ ID NO: 194722 - RNA, 21 nt, Artificial Sequence
  Synthetic
ugaaaaaaaucaucaggguaa

SEQ ID NO: 194723 - RNA, 22 nt, Artificial Sequence
  Synthetic
augaaaaaaaucaucaggguaa

SEQ ID NO: 194724 - RNA, 23 nt, Artificial Sequence
  Synthetic
gaugaaaaaaaucaucaggguaa

SEQ ID NO: 194725 - RNA, 24 nt, Artificial Sequence
  Synthetic
cgaugaaaaaaaucaucaggguaa

SEQ ID NO: 194726 - RNA, 18 nt, Artificial Sequence
  Synthetic
aggaaacaucagggguaa

SEQ ID NO: 194727 - RNA, 19 nt, Artificial Sequence
  Synthetic
gaggaaacaucagggguaa

SEQ ID NO: 194728 - RNA, 20 nt, Artificial Sequence
  Synthetic
agaggaaacaucagggguaa

SEQ ID NO: 194729 - RNA, 21 nt, Artificial Sequence
  Synthetic
aagaggaaacaucagggguaa

SEQ ID NO: 194730 - RNA, 22 nt, Artificial Sequence
  Synthetic
uaagaggaaacaucagggguaa

SEQ ID NO: 194731 - RNA, 23 nt, Artificial Sequence
  Synthetic
uuaagaggaaacaucagggguaa

SEQ ID NO: 194732 - RNA, 24 nt, Artificial Sequence
  Synthetic
auuaagaggaaacaucagggguaa

SEQ ID NO: 194733 - RNA, 18 nt, Artificial Sequence
  Synthetic
gugacuuuuucgggguaa

SEQ ID NO: 194734 - RNA, 19 nt, Artificial Sequence
  Synthetic
agugacuuuuucgggguaa

SEQ ID NO: 194735 - RNA, 20 nt, Artificial Sequence
  Synthetic
uagugacuuuuucgggguaa

SEQ ID NO: 194736 - RNA, 21 nt, Artificial Sequence
  Synthetic
uuagugacuuuuucgggguaa

SEQ ID NO: 194737 - RNA, 22 nt, Artificial Sequence
  Synthetic
auuagugacuuuuucgggguaa

SEQ ID NO: 194738 - RNA, 23 nt, Artificial Sequence
  Synthetic
cauuagugacuuuuucgggguaa

SEQ ID NO: 194739 - RNA, 24 nt, Artificial Sequence
  Synthetic
gcauuagugacuuuuucgggguaa

SEQ ID NO: 194740 - RNA, 18 nt, Artificial Sequence
  Synthetic
uggcuuguauggggguaa

SEQ ID NO: 194741 - RNA, 19 nt, Artificial Sequence
  Synthetic
cuggcuuguauggggguaa

SEQ ID NO: 194742 - RNA, 20 nt, Artificial Sequence
  Synthetic
ccuggcuuguauggggguaa

SEQ ID NO: 194743 - RNA, 21 nt, Artificial Sequence
  Synthetic
cccuggcuuguauggggguaa

SEQ ID NO: 194744 - RNA, 22 nt, Artificial Sequence
  Synthetic
ucccuggcuuguauggggguaa

SEQ ID NO: 194745 - RNA, 23 nt, Artificial Sequence
  Synthetic
cucccuggcuuguauggggguaa

SEQ ID NO: 194746 - RNA, 24 nt, Artificial Sequence
  Synthetic
ucucccuggcuuguauggggguaa

SEQ ID NO: 194747 - RNA, 18 nt, Artificial Sequence
  Synthetic
uuuuugggggguggguaa

SEQ ID NO: 194748 - RNA, 19 nt, Artificial Sequence
  Synthetic
uuuuuugggggguggguaa

SEQ ID NO: 194749 - RNA, 20 nt, Artificial Sequence
  Synthetic
cuuuuuugggggguggguaa

SEQ ID NO: 194750 - RNA, 21 nt, Artificial Sequence
  Synthetic
ucuuuuuugggggguggguaa

SEQ ID NO: 194751 - RNA, 22 nt, Artificial Sequence
  Synthetic
uucuuuuuugggggguggguaa

SEQ ID NO: 194752 - RNA, 23 nt, Artificial Sequence
  Synthetic
uuucuuuuuugggggguggguaa

SEQ ID NO: 194753 - RNA, 24 nt, Artificial Sequence
  Synthetic
cuuucuuuuuugggggguggguaa

SEQ ID NO: 194754 - RNA, 18 nt, Artificial Sequence
  Synthetic
ugcuuuagcaaaugguaa

SEQ ID NO: 194755 - RNA, 19 nt, Artificial Sequence
  Synthetic
uugcuuuagcaaaugguaa

SEQ ID NO: 194756 - RNA, 20 nt, Artificial Sequence
  Synthetic
uuugcuuuagcaaaugguaa

SEQ ID NO: 194757 - RNA, 21 nt, Artificial Sequence
  Synthetic
auuugcuuuagcaaaugguaa

SEQ ID NO: 194758 - RNA, 22 nt, Artificial Sequence
  Synthetic
gauuugcuuuagcaaaugguaa

SEQ ID NO: 194759 - RNA, 23 nt, Artificial Sequence
  Synthetic
ugauuugcuuuagcaaaugguaa

SEQ ID NO: 194760 - RNA, 24 nt, Artificial Sequence
  Synthetic
gugauuugcuuuagcaaaugguaa

SEQ ID NO: 194761 - RNA, 18 nt, Artificial Sequence
  Synthetic
uuguaauguaaaugguaa

SEQ ID NO: 194762 - RNA, 19 nt, Artificial Sequence
  Synthetic
uuuguaauguaaaugguaa

SEQ ID NO: 194763 - RNA, 20 nt, Artificial Sequence
  Synthetic
auuuguaauguaaaugguaa

SEQ ID NO: 194764 - RNA, 21 nt, Artificial Sequence
  Synthetic
cauuuguaauguaaaugguaa

SEQ ID NO: 194765 - RNA, 22 nt, Artificial Sequence
  Synthetic
acauuuguaauguaaaugguaa

SEQ ID NO: 194766 - RNA, 23 nt, Artificial Sequence
  Synthetic
aacauuuguaauguaaaugguaa

SEQ ID NO: 194767 - RNA, 24 nt, Artificial Sequence
  Synthetic
gaacauuuguaauguaaaugguaa

SEQ ID NO: 194768 - RNA, 18 nt, Artificial Sequence
  Synthetic
uacauuacauaaugguaa

SEQ ID NO: 194769 - RNA, 19 nt, Artificial Sequence
  Synthetic
uuacauuacauaaugguaa

SEQ ID NO: 194770 - RNA, 20 nt, Artificial Sequence
  Synthetic
auuacauuacauaaugguaa

SEQ ID NO: 194771 - RNA, 21 nt, Artificial Sequence
  Synthetic
uauuacauuacauaaugguaa

SEQ ID NO: 194772 - RNA, 22 nt, Artificial Sequence
  Synthetic
guauuacauuacauaaugguaa

SEQ ID NO: 194773 - RNA, 23 nt, Artificial Sequence
  Synthetic
gguauuacauuacauaaugguaa

SEQ ID NO: 194774 - RNA, 24 nt, Artificial Sequence
  Synthetic
ggguauuacauuacauaaugguaa

SEQ ID NO: 194775 - RNA, 18 nt, Artificial Sequence
  Synthetic
uguucacuaauaugguaa

SEQ ID NO: 194776 - RNA, 19 nt, Artificial Sequence
  Synthetic
auguucacuaauaugguaa

SEQ ID NO: 194777 - RNA, 20 nt, Artificial Sequence
  Synthetic
uauguucacuaauaugguaa

SEQ ID NO: 194778 - RNA, 21 nt, Artificial Sequence
  Synthetic
auauguucacuaauaugguaa

SEQ ID NO: 194779 - RNA, 22 nt, Artificial Sequence
  Synthetic
gauauguucacuaauaugguaa

SEQ ID NO: 194780 - RNA, 23 nt, Artificial Sequence
  Synthetic
ugauauguucacuaauaugguaa

SEQ ID NO: 194781 - RNA, 24 nt, Artificial Sequence
  Synthetic
uugauauguucacuaauaugguaa

SEQ ID NO: 194782 - RNA, 18 nt, Artificial Sequence
  Synthetic
aucauggaaaagugguaa

SEQ ID NO: 194783 - RNA, 19 nt, Artificial Sequence
  Synthetic
uaucauggaaaagugguaa

SEQ ID NO: 194784 - RNA, 20 nt, Artificial Sequence
  Synthetic
uuaucauggaaaagugguaa

SEQ ID NO: 194785 - RNA, 21 nt, Artificial Sequence
  Synthetic
cuuaucauggaaaagugguaa

SEQ ID NO: 194786 - RNA, 22 nt, Artificial Sequence
  Synthetic
gcuuaucauggaaaagugguaa

SEQ ID NO: 194787 - RNA, 23 nt, Artificial Sequence
  Synthetic
ggcuuaucauggaaaagugguaa

SEQ ID NO: 194788 - RNA, 24 nt, Artificial Sequence
  Synthetic
aggcuuaucauggaaaagugguaa

SEQ ID NO: 194789 - RNA, 18 nt, Artificial Sequence
  Synthetic
guacaccauaggugguaa

SEQ ID NO: 194790 - RNA, 19 nt, Artificial Sequence
  Synthetic
aguacaccauaggugguaa

SEQ ID NO: 194791 - RNA, 20 nt, Artificial Sequence
  Synthetic
uaguacaccauaggugguaa

SEQ ID NO: 194792 - RNA, 21 nt, Artificial Sequence
  Synthetic
cuaguacaccauaggugguaa

SEQ ID NO: 194793 - RNA, 22 nt, Artificial Sequence
  Synthetic
gcuaguacaccauaggugguaa

SEQ ID NO: 194794 - RNA, 23 nt, Artificial Sequence
  Synthetic
cgcuaguacaccauaggugguaa

SEQ ID NO: 194795 - RNA, 24 nt, Artificial Sequence
  Synthetic
acgcuaguacaccauaggugguaa

SEQ ID NO: 194796 - RNA, 18 nt, Artificial Sequence
  Synthetic
uucauuucagggugguaa

SEQ ID NO: 194797 - RNA, 19 nt, Artificial Sequence
  Synthetic
uuucauuucagggugguaa

SEQ ID NO: 194798 - RNA, 20 nt, Artificial Sequence
  Synthetic
auuucauuucagggugguaa

SEQ ID NO: 194799 - RNA, 21 nt, Artificial Sequence
  Synthetic
cauuucauuucagggugguaa

SEQ ID NO: 194800 - RNA, 22 nt, Artificial Sequence
  Synthetic
ucauuucauuucagggugguaa

SEQ ID NO: 194801 - RNA, 23 nt, Artificial Sequence
  Synthetic
uucauuucauuucagggugguaa

SEQ ID NO: 194802 - RNA, 24 nt, Artificial Sequence
  Synthetic
auucauuucauuucagggugguaa

SEQ ID NO: 194803 - RNA, 18 nt, Artificial Sequence
  Synthetic
uuuuaauuucugugguaa

SEQ ID NO: 194804 - RNA, 19 nt, Artificial Sequence
  Synthetic
cuuuuaauuucugugguaa

SEQ ID NO: 194805 - RNA, 20 nt, Artificial Sequence
  Synthetic
ucuuuuaauuucugugguaa

SEQ ID NO: 194806 - RNA, 21 nt, Artificial Sequence
  Synthetic
uucuuuuaauuucugugguaa

SEQ ID NO: 194807 - RNA, 22 nt, Artificial Sequence
  Synthetic
uuucuuuuaauuucugugguaa

SEQ ID NO: 194808 - RNA, 23 nt, Artificial Sequence
  Synthetic
uuuucuuuuaauuucugugguaa

SEQ ID NO: 194809 - RNA, 24 nt, Artificial Sequence
  Synthetic
uuuuucuuuuaauuucugugguaa

SEQ ID NO: 194810 - RNA, 18 nt, Artificial Sequence
  Synthetic
guuucguuaccuugguaa

SEQ ID NO: 194811 - RNA, 19 nt, Artificial Sequence
  Synthetic
aguuucguuaccuugguaa

SEQ ID NO: 194812 - RNA, 20 nt, Artificial Sequence
  Synthetic
aaguuucguuaccuugguaa

SEQ ID NO: 194813 - RNA, 21 nt, Artificial Sequence
  Synthetic
caaguuucguuaccuugguaa

SEQ ID NO: 194814 - RNA, 22 nt, Artificial Sequence
  Synthetic
acaaguuucguuaccuugguaa

SEQ ID NO: 194815 - RNA, 23 nt, Artificial Sequence
  Synthetic
aacaaguuucguuaccuugguaa

SEQ ID NO: 194816 - RNA, 24 nt, Artificial Sequence
  Synthetic
gaacaaguuucguuaccuugguaa

SEQ ID NO: 194817 - RNA, 18 nt, Artificial Sequence
  Synthetic
uagacacgucguugguaa

SEQ ID NO: 194818 - RNA, 19 nt, Artificial Sequence
  Synthetic
cuagacacgucguugguaa

SEQ ID NO: 194819 - RNA, 20 nt, Artificial Sequence
  Synthetic
gcuagacacgucguugguaa

SEQ ID NO: 194820 - RNA, 21 nt, Artificial Sequence
  Synthetic
ggcuagacacgucguugguaa

SEQ ID NO: 194821 - RNA, 22 nt, Artificial Sequence
  Synthetic
gggcuagacacgucguugguaa

SEQ ID NO: 194822 - RNA, 23 nt, Artificial Sequence
  Synthetic
agggcuagacacgucguugguaa

SEQ ID NO: 194823 - RNA, 24 nt, Artificial Sequence
  Synthetic
uagggcuagacacgucguugguaa

SEQ ID NO: 194824 - RNA, 18 nt, Artificial Sequence
  Synthetic
gagcguaaucuuugguaa

SEQ ID NO: 194825 - RNA, 19 nt, Artificial Sequence
  Synthetic
ugagcguaaucuuugguaa

SEQ ID NO: 194826 - RNA, 20 nt, Artificial Sequence
  Synthetic
uugagcguaaucuuugguaa

SEQ ID NO: 194827 - RNA, 21 nt, Artificial Sequence
  Synthetic
auugagcguaaucuuugguaa

SEQ ID NO: 194828 - RNA, 22 nt, Artificial Sequence
  Synthetic
aauugagcguaaucuuugguaa

SEQ ID NO: 194829 - RNA, 23 nt, Artificial Sequence
  Synthetic
gaauugagcguaaucuuugguaa

SEQ ID NO: 194830 - RNA, 24 nt, Artificial Sequence
  Synthetic
agaauugagcguaaucuuugguaa

SEQ ID NO: 194831 - RNA, 18 nt, Artificial Sequence
  Synthetic
ugaaacacaguuugguaa

SEQ ID NO: 194832 - RNA, 19 nt, Artificial Sequence
  Synthetic
cugaaacacaguuugguaa

SEQ ID NO: 194833 - RNA, 20 nt, Artificial Sequence
  Synthetic
ccugaaacacaguuugguaa

SEQ ID NO: 194834 - RNA, 21 nt, Artificial Sequence
  Synthetic
gccugaaacacaguuugguaa

SEQ ID NO: 194835 - RNA, 22 nt, Artificial Sequence
  Synthetic
ugccugaaacacaguuugguaa

SEQ ID NO: 194836 - RNA, 23 nt, Artificial Sequence
  Synthetic
uugccugaaacacaguuugguaa

SEQ ID NO: 194837 - RNA, 24 nt, Artificial Sequence
  Synthetic
auugccugaaacacaguuugguaa

SEQ ID NO: 194838 - RNA, 18 nt, Artificial Sequence
  Synthetic
caggguggacaaauguaa

SEQ ID NO: 194839 - RNA, 19 nt, Artificial Sequence
  Synthetic
acaggguggacaaauguaa

SEQ ID NO: 194840 - RNA, 20 nt, Artificial Sequence
  Synthetic
cacaggguggacaaauguaa

SEQ ID NO: 194841 - RNA, 21 nt, Artificial Sequence
  Synthetic
gcacaggguggacaaauguaa

SEQ ID NO: 194842 - RNA, 22 nt, Artificial Sequence
  Synthetic
agcacaggguggacaaauguaa

SEQ ID NO: 194843 - RNA, 23 nt, Artificial Sequence
  Synthetic
aagcacaggguggacaaauguaa

SEQ ID NO: 194844 - RNA, 24 nt, Artificial Sequence
  Synthetic
uaagcacaggguggacaaauguaa

SEQ ID NO: 194845 - RNA, 18 nt, Artificial Sequence
  Synthetic
uauaaguaagaaauguaa

SEQ ID NO: 194846 - RNA, 19 nt, Artificial Sequence
  Synthetic
auauaaguaagaaauguaa

SEQ ID NO: 194847 - RNA, 20 nt, Artificial Sequence
  Synthetic
uauauaaguaagaaauguaa

SEQ ID NO: 194848 - RNA, 21 nt, Artificial Sequence
  Synthetic
guauauaaguaagaaauguaa

SEQ ID NO: 194849 - RNA, 22 nt, Artificial Sequence
  Synthetic
gguauauaaguaagaaauguaa

SEQ ID NO: 194850 - RNA, 23 nt, Artificial Sequence
  Synthetic
ugguauauaaguaagaaauguaa

SEQ ID NO: 194851 - RNA, 24 nt, Artificial Sequence
  Synthetic
augguauauaaguaagaaauguaa

SEQ ID NO: 194852 - RNA, 18 nt, Artificial Sequence
  Synthetic
uauuaacuuuaaauguaa

SEQ ID NO: 194853 - RNA, 19 nt, Artificial Sequence
  Synthetic
auauuaacuuuaaauguaa

SEQ ID NO: 194854 - RNA, 20 nt, Artificial Sequence
  Synthetic
aauauuaacuuuaaauguaa

SEQ ID NO: 194855 - RNA, 21 nt, Artificial Sequence
  Synthetic
caauauuaacuuuaaauguaa

SEQ ID NO: 194856 - RNA, 22 nt, Artificial Sequence
  Synthetic
acaauauuaacuuuaaauguaa

SEQ ID NO: 194857 - RNA, 23 nt, Artificial Sequence
  Synthetic
gacaauauuaacuuuaaauguaa

SEQ ID NO: 194858 - RNA, 24 nt, Artificial Sequence
  Synthetic
ugacaauauuaacuuuaaauguaa

SEQ ID NO: 194859 - RNA, 18 nt, Artificial Sequence
  Synthetic
auauccuuuuaaauguaa

SEQ ID NO: 194860 - RNA, 19 nt, Artificial Sequence
  Synthetic
aauauccuuuuaaauguaa

SEQ ID NO: 194861 - RNA, 20 nt, Artificial Sequence
  Synthetic
uaauauccuuuuaaauguaa

SEQ ID NO: 194862 - RNA, 21 nt, Artificial Sequence
  Synthetic
cuaauauccuuuuaaauguaa

SEQ ID NO: 194863 - RNA, 22 nt, Artificial Sequence
  Synthetic
ucuaauauccuuuuaaauguaa

SEQ ID NO: 194864 - RNA, 23 nt, Artificial Sequence
  Synthetic
uucuaauauccuuuuaaauguaa

SEQ ID NO: 194865 - RNA, 24 nt, Artificial Sequence
  Synthetic
uuucuaauauccuuuuaaauguaa

SEQ ID NO: 194866 - RNA, 18 nt, Artificial Sequence
  Synthetic
uagccugaggcaauguaa

SEQ ID NO: 194867 - RNA, 19 nt, Artificial Sequence
  Synthetic
uuagccugaggcaauguaa

SEQ ID NO: 194868 - RNA, 20 nt, Artificial Sequence
  Synthetic
guuagccugaggcaauguaa

SEQ ID NO: 194869 - RNA, 21 nt, Artificial Sequence
  Synthetic
aguuagccugaggcaauguaa

SEQ ID NO: 194870 - RNA, 22 nt, Artificial Sequence
  Synthetic
aaguuagccugaggcaauguaa

SEQ ID NO: 194871 - RNA, 23 nt, Artificial Sequence
  Synthetic
gaaguuagccugaggcaauguaa

SEQ ID NO: 194872 - RNA, 24 nt, Artificial Sequence
  Synthetic
ggaaguuagccugaggcaauguaa

SEQ ID NO: 194873 - RNA, 18 nt, Artificial Sequence
  Synthetic
aauuauuuuucaauguaa

SEQ ID NO: 194874 - RNA, 19 nt, Artificial Sequence
  Synthetic
gaauuauuuuucaauguaa

SEQ ID NO: 194875 - RNA, 20 nt, Artificial Sequence
  Synthetic
ugaauuauuuuucaauguaa

SEQ ID NO: 194876 - RNA, 21 nt, Artificial Sequence
  Synthetic
uugaauuauuuuucaauguaa

SEQ ID NO: 194877 - RNA, 22 nt, Artificial Sequence
  Synthetic
cuugaauuauuuuucaauguaa

SEQ ID NO: 194878 - RNA, 23 nt, Artificial Sequence
  Synthetic
ucuugaauuauuuuucaauguaa

SEQ ID NO: 194879 - RNA, 24 nt, Artificial Sequence
  Synthetic
cucuugaauuauuuuucaauguaa

SEQ ID NO: 194880 - RNA, 18 nt, Artificial Sequence
  Synthetic
ucucuugggagaauguaa

SEQ ID NO: 194881 - RNA, 19 nt, Artificial Sequence
  Synthetic
uucucuugggagaauguaa

SEQ ID NO: 194882 - RNA, 20 nt, Artificial Sequence
  Synthetic
cuucucuugggagaauguaa

SEQ ID NO: 194883 - RNA, 21 nt, Artificial Sequence
  Synthetic
ucuucucuugggagaauguaa

SEQ ID NO: 194884 - RNA, 22 nt, Artificial Sequence
  Synthetic
uucuucucuugggagaauguaa

SEQ ID NO: 194885 - RNA, 23 nt, Artificial Sequence
  Synthetic
uuucuucucuugggagaauguaa

SEQ ID NO: 194886 - RNA, 24 nt, Artificial Sequence
  Synthetic
uuuucuucucuugggagaauguaa

SEQ ID NO: 194887 - RNA, 18 nt, Artificial Sequence
  Synthetic
aaaaugagucccauguaa

SEQ ID NO: 194888 - RNA, 19 nt, Artificial Sequence
  Synthetic
gaaaaugagucccauguaa

SEQ ID NO: 194889 - RNA, 20 nt, Artificial Sequence
  Synthetic
agaaaaugagucccauguaa

SEQ ID NO: 194890 - RNA, 21 nt, Artificial Sequence
  Synthetic
aagaaaaugagucccauguaa

SEQ ID NO: 194891 - RNA, 22 nt, Artificial Sequence
  Synthetic
aaagaaaaugagucccauguaa

SEQ ID NO: 194892 - RNA, 23 nt, Artificial Sequence
  Synthetic
caaagaaaaugagucccauguaa

SEQ ID NO: 194893 - RNA, 24 nt, Artificial Sequence
  Synthetic
ccaaagaaaaugagucccauguaa

SEQ ID NO: 194894 - RNA, 18 nt, Artificial Sequence
  Synthetic
uguauguugagcauguaa

SEQ ID NO: 194895 - RNA, 19 nt, Artificial Sequence
  Synthetic
uuguauguugagcauguaa

SEQ ID NO: 194896 - RNA, 20 nt, Artificial Sequence
  Synthetic
uuuguauguugagcauguaa

SEQ ID NO: 194897 - RNA, 21 nt, Artificial Sequence
  Synthetic
uuuuguauguugagcauguaa

SEQ ID NO: 194898 - RNA, 22 nt, Artificial Sequence
  Synthetic
cuuuuguauguugagcauguaa

SEQ ID NO: 194899 - RNA, 23 nt, Artificial Sequence
  Synthetic
acuuuuguauguugagcauguaa

SEQ ID NO: 194900 - RNA, 24 nt, Artificial Sequence
  Synthetic
cacuuuuguauguugagcauguaa

SEQ ID NO: 194901 - RNA, 18 nt, Artificial Sequence
  Synthetic
uaaauuagaggcauguaa

SEQ ID NO: 194902 - RNA, 19 nt, Artificial Sequence
  Synthetic
uuaaauuagaggcauguaa

SEQ ID NO: 194903 - RNA, 20 nt, Artificial Sequence
  Synthetic
uuuaaauuagaggcauguaa

SEQ ID NO: 194904 - RNA, 21 nt, Artificial Sequence
  Synthetic
uuuuaaauuagaggcauguaa

SEQ ID NO: 194905 - RNA, 22 nt, Artificial Sequence
  Synthetic
auuuuaaauuagaggcauguaa

SEQ ID NO: 194906 - RNA, 23 nt, Artificial Sequence
  Synthetic
uauuuuaaauuagaggcauguaa

SEQ ID NO: 194907 - RNA, 24 nt, Artificial Sequence
  Synthetic
uuauuuuaaauuagaggcauguaa

SEQ ID NO: 194908 - RNA, 18 nt, Artificial Sequence
  Synthetic
auuguaguuacgauguaa

SEQ ID NO: 194909 - RNA, 19 nt, Artificial Sequence
  Synthetic
aauuguaguuacgauguaa

SEQ ID NO: 194910 - RNA, 20 nt, Artificial Sequence
  Synthetic
aaauuguaguuacgauguaa

SEQ ID NO: 194911 - RNA, 21 nt, Artificial Sequence
  Synthetic
gaaauuguaguuacgauguaa

SEQ ID NO: 194912 - RNA, 22 nt, Artificial Sequence
  Synthetic
cgaaauuguaguuacgauguaa

SEQ ID NO: 194913 - RNA, 23 nt, Artificial Sequence
  Synthetic
acgaaauuguaguuacgauguaa

SEQ ID NO: 194914 - RNA, 24 nt, Artificial Sequence
  Synthetic
uacgaaauuguaguuacgauguaa

SEQ ID NO: 194915 - RNA, 18 nt, Artificial Sequence
  Synthetic
aucagaaaacugauguaa

SEQ ID NO: 194916 - RNA, 19 nt, Artificial Sequence
  Synthetic
caucagaaaacugauguaa

SEQ ID NO: 194917 - RNA, 20 nt, Artificial Sequence
  Synthetic
acaucagaaaacugauguaa

SEQ ID NO: 194918 - RNA, 21 nt, Artificial Sequence
  Synthetic
aacaucagaaaacugauguaa

SEQ ID NO: 194919 - RNA, 22 nt, Artificial Sequence
  Synthetic
gaacaucagaaaacugauguaa

SEQ ID NO: 194920 - RNA, 23 nt, Artificial Sequence
  Synthetic
agaacaucagaaaacugauguaa

SEQ ID NO: 194921 - RNA, 24 nt, Artificial Sequence
  Synthetic
gagaacaucagaaaacugauguaa

SEQ ID NO: 194922 - RNA, 18 nt, Artificial Sequence
  Synthetic
gaugcauuagugauguaa

SEQ ID NO: 194923 - RNA, 19 nt, Artificial Sequence
  Synthetic
ugaugcauuagugauguaa

SEQ ID NO: 194924 - RNA, 20 nt, Artificial Sequence
  Synthetic
cugaugcauuagugauguaa

SEQ ID NO: 194925 - RNA, 21 nt, Artificial Sequence
  Synthetic
gcugaugcauuagugauguaa

SEQ ID NO: 194926 - RNA, 22 nt, Artificial Sequence
  Synthetic
ugcugaugcauuagugauguaa

SEQ ID NO: 194927 - RNA, 23 nt, Artificial Sequence
  Synthetic
cugcugaugcauuagugauguaa

SEQ ID NO: 194928 - RNA, 24 nt, Artificial Sequence
  Synthetic
ccugcugaugcauuagugauguaa

SEQ ID NO: 194929 - RNA, 18 nt, Artificial Sequence
  Synthetic
uauauacuagauauguaa

SEQ ID NO: 194930 - RNA, 19 nt, Artificial Sequence
  Synthetic
auauauacuagauauguaa

SEQ ID NO: 194931 - RNA, 20 nt, Artificial Sequence
  Synthetic
aauauauacuagauauguaa

SEQ ID NO: 194932 - RNA, 21 nt, Artificial Sequence
  Synthetic
aaauauauacuagauauguaa

SEQ ID NO: 194933 - RNA, 22 nt, Artificial Sequence
  Synthetic
aaaauauauacuagauauguaa

SEQ ID NO: 194934 - RNA, 23 nt, Artificial Sequence
  Synthetic
aaaaauauauacuagauauguaa

SEQ ID NO: 194935 - RNA, 24 nt, Artificial Sequence
  Synthetic
aaaaaauauauacuagauauguaa

SEQ ID NO: 194936 - RNA, 18 nt, Artificial Sequence
  Synthetic
auuacauaugcuauguaa

SEQ ID NO: 194937 - RNA, 19 nt, Artificial Sequence
  Synthetic
uauuacauaugcuauguaa

SEQ ID NO: 194938 - RNA, 20 nt, Artificial Sequence
  Synthetic
auauuacauaugcuauguaa

SEQ ID NO: 194939 - RNA, 21 nt, Artificial Sequence
  Synthetic
cauauuacauaugcuauguaa

SEQ ID NO: 194940 - RNA, 22 nt, Artificial Sequence
  Synthetic
gcauauuacauaugcuauguaa

SEQ ID NO: 194941 - RNA, 23 nt, Artificial Sequence
  Synthetic
ugcauauuacauaugcuauguaa

SEQ ID NO: 194942 - RNA, 24 nt, Artificial Sequence
  Synthetic
cugcauauuacauaugcuauguaa

SEQ ID NO: 194943 - RNA, 18 nt, Artificial Sequence
  Synthetic
gcuuuauucaguauguaa

SEQ ID NO: 194944 - RNA, 19 nt, Artificial Sequence
  Synthetic
ggcuuuauucaguauguaa

SEQ ID NO: 194945 - RNA, 20 nt, Artificial Sequence
  Synthetic
uggcuuuauucaguauguaa

SEQ ID NO: 194946 - RNA, 21 nt, Artificial Sequence
  Synthetic
uuggcuuuauucaguauguaa

SEQ ID NO: 194947 - RNA, 22 nt, Artificial Sequence
  Synthetic
uuuggcuuuauucaguauguaa

SEQ ID NO: 194948 - RNA, 23 nt, Artificial Sequence
  Synthetic
cuuuggcuuuauucaguauguaa

SEQ ID NO: 194949 - RNA, 24 nt, Artificial Sequence
  Synthetic
ccuuuggcuuuauucaguauguaa

SEQ ID NO: 194950 - RNA, 18 nt, Artificial Sequence
  Synthetic
acagcuucaauuauguaa

SEQ ID NO: 194951 - RNA, 19 nt, Artificial Sequence
  Synthetic
uacagcuucaauuauguaa

SEQ ID NO: 194952 - RNA, 20 nt, Artificial Sequence
  Synthetic
cuacagcuucaauuauguaa

SEQ ID NO: 194953 - RNA, 21 nt, Artificial Sequence
  Synthetic
acuacagcuucaauuauguaa

SEQ ID NO: 194954 - RNA, 22 nt, Artificial Sequence
  Synthetic
cacuacagcuucaauuauguaa

SEQ ID NO: 194955 - RNA, 23 nt, Artificial Sequence
  Synthetic
ucacuacagcuucaauuauguaa

SEQ ID NO: 194956 - RNA, 24 nt, Artificial Sequence
  Synthetic
uucacuacagcuucaauuauguaa

SEQ ID NO: 194957 - RNA, 18 nt, Artificial Sequence
  Synthetic
uuacuuuguauuauguaa

SEQ ID NO: 194958 - RNA, 19 nt, Artificial Sequence
  Synthetic
uuuacuuuguauuauguaa

SEQ ID NO: 194959 - RNA, 20 nt, Artificial Sequence
  Synthetic
cuuuacuuuguauuauguaa

SEQ ID NO: 194960 - RNA, 21 nt, Artificial Sequence
  Synthetic
acuuuacuuuguauuauguaa

SEQ ID NO: 194961 - RNA, 22 nt, Artificial Sequence
  Synthetic
uacuuuacuuuguauuauguaa

SEQ ID NO: 194962 - RNA, 23 nt, Artificial Sequence
  Synthetic
guacuuuacuuuguauuauguaa

SEQ ID NO: 194963 - RNA, 24 nt, Artificial Sequence
  Synthetic
uguacuuuacuuuguauuauguaa

SEQ ID NO: 194964 - RNA, 18 nt, Artificial Sequence
  Synthetic
agacagauuucacuguaa

SEQ ID NO: 194965 - RNA, 19 nt, Artificial Sequence
  Synthetic
aagacagauuucacuguaa

SEQ ID NO: 194966 - RNA, 20 nt, Artificial Sequence
  Synthetic
uaagacagauuucacuguaa

SEQ ID NO: 194967 - RNA, 21 nt, Artificial Sequence
  Synthetic
auaagacagauuucacuguaa

SEQ ID NO: 194968 - RNA, 22 nt, Artificial Sequence
  Synthetic
gauaagacagauuucacuguaa

SEQ ID NO: 194969 - RNA, 23 nt, Artificial Sequence
  Synthetic
agauaagacagauuucacuguaa

SEQ ID NO: 194970 - RNA, 24 nt, Artificial Sequence
  Synthetic
uagauaagacagauuucacuguaa

SEQ ID NO: 194971 - RNA, 18 nt, Artificial Sequence
  Synthetic
aauuuaaauuuccuguaa

SEQ ID NO: 194972 - RNA, 19 nt, Artificial Sequence
  Synthetic
aaauuuaaauuuccuguaa

SEQ ID NO: 194973 - RNA, 20 nt, Artificial Sequence
  Synthetic
uaaauuuaaauuuccuguaa

SEQ ID NO: 194974 - RNA, 21 nt, Artificial Sequence
  Synthetic
auaaauuuaaauuuccuguaa

SEQ ID NO: 194975 - RNA, 22 nt, Artificial Sequence
  Synthetic
aauaaauuuaaauuuccuguaa

SEQ ID NO: 194976 - RNA, 23 nt, Artificial Sequence
  Synthetic
aaauaaauuuaaauuuccuguaa

SEQ ID NO: 194977 - RNA, 24 nt, Artificial Sequence
  Synthetic
gaaauaaauuuaaauuuccuguaa

SEQ ID NO: 194978 - RNA, 18 nt, Artificial Sequence
  Synthetic
ggcuucccucagcuguaa

SEQ ID NO: 194979 - RNA, 19 nt, Artificial Sequence
  Synthetic
gggcuucccucagcuguaa

SEQ ID NO: 194980 - RNA, 20 nt, Artificial Sequence
  Synthetic
agggcuucccucagcuguaa

SEQ ID NO: 194981 - RNA, 21 nt, Artificial Sequence
  Synthetic
aagggcuucccucagcuguaa

SEQ ID NO: 194982 - RNA, 22 nt, Artificial Sequence
  Synthetic
caagggcuucccucagcuguaa

SEQ ID NO: 194983 - RNA, 23 nt, Artificial Sequence
  Synthetic
ucaagggcuucccucagcuguaa

SEQ ID NO: 194984 - RNA, 24 nt, Artificial Sequence
  Synthetic
uucaagggcuucccucagcuguaa

SEQ ID NO: 194985 - RNA, 18 nt, Artificial Sequence
  Synthetic
accuaucaucggcuguaa

SEQ ID NO: 194986 - RNA, 19 nt, Artificial Sequence
  Synthetic
aaccuaucaucggcuguaa

SEQ ID NO: 194987 - RNA, 20 nt, Artificial Sequence
  Synthetic
aaaccuaucaucggcuguaa

SEQ ID NO: 194988 - RNA, 21 nt, Artificial Sequence
  Synthetic
aaaaccuaucaucggcuguaa

SEQ ID NO: 194989 - RNA, 22 nt, Artificial Sequence
  Synthetic
aaaaaccuaucaucggcuguaa

SEQ ID NO: 194990 - RNA, 23 nt, Artificial Sequence
  Synthetic
uaaaaaccuaucaucggcuguaa

SEQ ID NO: 194991 - RNA, 24 nt, Artificial Sequence
  Synthetic
auaaaaaccuaucaucggcuguaa

SEQ ID NO: 194992 - RNA, 18 nt, Artificial Sequence
  Synthetic
ccacaguugaugcuguaa

SEQ ID NO: 194993 - RNA, 19 nt, Artificial Sequence
  Synthetic
uccacaguugaugcuguaa

SEQ ID NO: 194994 - RNA, 20 nt, Artificial Sequence
  Synthetic
uuccacaguugaugcuguaa

SEQ ID NO: 194995 - RNA, 21 nt, Artificial Sequence
  Synthetic
auuccacaguugaugcuguaa

SEQ ID NO: 194996 - RNA, 22 nt, Artificial Sequence
  Synthetic
gauuccacaguugaugcuguaa

SEQ ID NO: 194997 - RNA, 23 nt, Artificial Sequence
  Synthetic
ggauuccacaguugaugcuguaa

SEQ ID NO: 194998 - RNA, 24 nt, Artificial Sequence
  Synthetic
aggauuccacaguugaugcuguaa

SEQ ID NO: 194999 - RNA, 18 nt, Artificial Sequence
  Synthetic
accugucuagugcuguaa

SEQ ID NO: 195000 - RNA, 19 nt, Artificial Sequence
  Synthetic
gaccugucuagugcuguaa

SEQ ID NO: 195001 - RNA, 20 nt, Artificial Sequence
  Synthetic
ugaccugucuagugcuguaa

SEQ ID NO: 195002 - RNA, 21 nt, Artificial Sequence
  Synthetic
gugaccugucuagugcuguaa

SEQ ID NO: 195003 - RNA, 22 nt, Artificial Sequence
  Synthetic
agugaccugucuagugcuguaa

SEQ ID NO: 195004 - RNA, 23 nt, Artificial Sequence
  Synthetic
cagugaccugucuagugcuguaa

SEQ ID NO: 195005 - RNA, 24 nt, Artificial Sequence
  Synthetic
ucagugaccugucuagugcuguaa

SEQ ID NO: 195006 - RNA, 18 nt, Artificial Sequence
  Synthetic
gugaaauauaaucuguaa

SEQ ID NO: 195007 - RNA, 19 nt, Artificial Sequence
  Synthetic
agugaaauauaaucuguaa

SEQ ID NO: 195008 - RNA, 20 nt, Artificial Sequence
  Synthetic
cagugaaauauaaucuguaa

SEQ ID NO: 195009 - RNA, 21 nt, Artificial Sequence
  Synthetic
ucagugaaauauaaucuguaa

SEQ ID NO: 195010 - RNA, 22 nt, Artificial Sequence
  Synthetic
cucagugaaauauaaucuguaa

SEQ ID NO: 195011 - RNA, 23 nt, Artificial Sequence
  Synthetic
ccucagugaaauauaaucuguaa

SEQ ID NO: 195012 - RNA, 24 nt, Artificial Sequence
  Synthetic
gccucagugaaauauaaucuguaa

SEQ ID NO: 195013 - RNA, 18 nt, Artificial Sequence
  Synthetic
uuccacauagaucuguaa

SEQ ID NO: 195014 - RNA, 19 nt, Artificial Sequence
  Synthetic
guuccacauagaucuguaa

SEQ ID NO: 195015 - RNA, 20 nt, Artificial Sequence
  Synthetic
uguuccacauagaucuguaa

SEQ ID NO: 195016 - RNA, 21 nt, Artificial Sequence
  Synthetic
guguuccacauagaucuguaa

SEQ ID NO: 195017 - RNA, 22 nt, Artificial Sequence
  Synthetic
gguguuccacauagaucuguaa

SEQ ID NO: 195018 - RNA, 23 nt, Artificial Sequence
  Synthetic
agguguuccacauagaucuguaa

SEQ ID NO: 195019 - RNA, 24 nt, Artificial Sequence
  Synthetic
uagguguuccacauagaucuguaa

SEQ ID NO: 195020 - RNA, 18 nt, Artificial Sequence
  Synthetic
auuuugagguaucuguaa

SEQ ID NO: 195021 - RNA, 19 nt, Artificial Sequence
  Synthetic
gauuuugagguaucuguaa

SEQ ID NO: 195022 - RNA, 20 nt, Artificial Sequence
  Synthetic
ugauuuugagguaucuguaa

SEQ ID NO: 195023 - RNA, 21 nt, Artificial Sequence
  Synthetic
uugauuuugagguaucuguaa

SEQ ID NO: 195024 - RNA, 22 nt, Artificial Sequence
  Synthetic
uuugauuuugagguaucuguaa

SEQ ID NO: 195025 - RNA, 23 nt, Artificial Sequence
  Synthetic
guuugauuuugagguaucuguaa

SEQ ID NO: 195026 - RNA, 24 nt, Artificial Sequence
  Synthetic
uguuugauuuugagguaucuguaa

SEQ ID NO: 195027 - RNA, 18 nt, Artificial Sequence
  Synthetic
gccaagaguuaucuguaa

SEQ ID NO: 195028 - RNA, 19 nt, Artificial Sequence
  Synthetic
ggccaagaguuaucuguaa

SEQ ID NO: 195029 - RNA, 20 nt, Artificial Sequence
  Synthetic
uggccaagaguuaucuguaa

SEQ ID NO: 195030 - RNA, 21 nt, Artificial Sequence
  Synthetic
cuggccaagaguuaucuguaa

SEQ ID NO: 195031 - RNA, 22 nt, Artificial Sequence
  Synthetic
ccuggccaagaguuaucuguaa

SEQ ID NO: 195032 - RNA, 23 nt, Artificial Sequence
  Synthetic
gccuggccaagaguuaucuguaa

SEQ ID NO: 195033 - RNA, 24 nt, Artificial Sequence
  Synthetic
ugccuggccaagaguuaucuguaa

SEQ ID NO: 195034 - RNA, 18 nt, Artificial Sequence
  Synthetic
acaacaaugccucuguaa

SEQ ID NO: 195035 - RNA, 19 nt, Artificial Sequence
  Synthetic
aacaacaaugccucuguaa

SEQ ID NO: 195036 - RNA, 20 nt, Artificial Sequence
  Synthetic
aaacaacaaugccucuguaa

SEQ ID NO: 195037 - RNA, 21 nt, Artificial Sequence
  Synthetic
aaaacaacaaugccucuguaa

SEQ ID NO: 195038 - RNA, 22 nt, Artificial Sequence
  Synthetic
aaaaacaacaaugccucuguaa

SEQ ID NO: 195039 - RNA, 23 nt, Artificial Sequence
  Synthetic
aaaaaacaacaaugccucuguaa

SEQ ID NO: 195040 - RNA, 24 nt, Artificial Sequence
  Synthetic
gaaaaaacaacaaugccucuguaa

SEQ ID NO: 195041 - RNA, 18 nt, Artificial Sequence
  Synthetic
gcccaccucucucuguaa

SEQ ID NO: 195042 - RNA, 19 nt, Artificial Sequence
  Synthetic
agcccaccucucucuguaa

SEQ ID NO: 195043 - RNA, 20 nt, Artificial Sequence
  Synthetic
aagcccaccucucucuguaa

SEQ ID NO: 195044 - RNA, 21 nt, Artificial Sequence
  Synthetic
caagcccaccucucucuguaa

SEQ ID NO: 195045 - RNA, 22 nt, Artificial Sequence
  Synthetic
ccaagcccaccucucucuguaa

SEQ ID NO: 195046 - RNA, 23 nt, Artificial Sequence
  Synthetic
uccaagcccaccucucucuguaa

SEQ ID NO: 195047 - RNA, 24 nt, Artificial Sequence
  Synthetic
cuccaagcccaccucucucuguaa

SEQ ID NO: 195048 - RNA, 18 nt, Artificial Sequence
  Synthetic
gguccuuaaagucuguaa

SEQ ID NO: 195049 - RNA, 19 nt, Artificial Sequence
  Synthetic
ugguccuuaaagucuguaa

SEQ ID NO: 195050 - RNA, 20 nt, Artificial Sequence
  Synthetic
uugguccuuaaagucuguaa

SEQ ID NO: 195051 - RNA, 21 nt, Artificial Sequence
  Synthetic
uuugguccuuaaagucuguaa

SEQ ID NO: 195052 - RNA, 22 nt, Artificial Sequence
  Synthetic
uuuugguccuuaaagucuguaa

SEQ ID NO: 195053 - RNA, 23 nt, Artificial Sequence
  Synthetic
cuuuugguccuuaaagucuguaa

SEQ ID NO: 195054 - RNA, 24 nt, Artificial Sequence
  Synthetic
acuuuugguccuuaaagucuguaa

SEQ ID NO: 195055 - RNA, 18 nt, Artificial Sequence
  Synthetic
uacaaguacagucuguaa

SEQ ID NO: 195056 - RNA, 19 nt, Artificial Sequence
  Synthetic
auacaaguacagucuguaa

SEQ ID NO: 195057 - RNA, 20 nt, Artificial Sequence
  Synthetic
gauacaaguacagucuguaa

SEQ ID NO: 195058 - RNA, 21 nt, Artificial Sequence
  Synthetic
ugauacaaguacagucuguaa

SEQ ID NO: 195059 - RNA, 22 nt, Artificial Sequence
  Synthetic
augauacaaguacagucuguaa

SEQ ID NO: 195060 - RNA, 23 nt, Artificial Sequence
  Synthetic
caugauacaaguacagucuguaa

SEQ ID NO: 195061 - RNA, 24 nt, Artificial Sequence
  Synthetic
ucaugauacaaguacagucuguaa

SEQ ID NO: 195062 - RNA, 18 nt, Artificial Sequence
  Synthetic
uuacuuugucuucuguaa

SEQ ID NO: 195063 - RNA, 19 nt, Artificial Sequence
  Synthetic
auuacuuugucuucuguaa

SEQ ID NO: 195064 - RNA, 20 nt, Artificial Sequence
  Synthetic
cauuacuuugucuucuguaa

SEQ ID NO: 195065 - RNA, 21 nt, Artificial Sequence
  Synthetic
ucauuacuuugucuucuguaa

SEQ ID NO: 195066 - RNA, 22 nt, Artificial Sequence
  Synthetic
aucauuacuuugucuucuguaa

SEQ ID NO: 195067 - RNA, 23 nt, Artificial Sequence
  Synthetic
gaucauuacuuugucuucuguaa

SEQ ID NO: 195068 - RNA, 24 nt, Artificial Sequence
  Synthetic
ugaucauuacuuugucuucuguaa

SEQ ID NO: 195069 - RNA, 18 nt, Artificial Sequence
  Synthetic
gcauuuuuucuucuguaa

SEQ ID NO: 195070 - RNA, 19 nt, Artificial Sequence
  Synthetic
ugcauuuuuucuucuguaa

SEQ ID NO: 195071 - RNA, 20 nt, Artificial Sequence
  Synthetic
cugcauuuuuucuucuguaa

SEQ ID NO: 195072 - RNA, 21 nt, Artificial Sequence
  Synthetic
ucugcauuuuuucuucuguaa

SEQ ID NO: 195073 - RNA, 22 nt, Artificial Sequence
  Synthetic
aucugcauuuuuucuucuguaa

SEQ ID NO: 195074 - RNA, 23 nt, Artificial Sequence
  Synthetic
aaucugcauuuuuucuucuguaa

SEQ ID NO: 195075 - RNA, 24 nt, Artificial Sequence
  Synthetic
aaaucugcauuuuuucuucuguaa

SEQ ID NO: 195076 - RNA, 18 nt, Artificial Sequence
  Synthetic
ggauauuuuuuucuguaa

SEQ ID NO: 195077 - RNA, 19 nt, Artificial Sequence
  Synthetic
uggauauuuuuuucuguaa

SEQ ID NO: 195078 - RNA, 20 nt, Artificial Sequence
  Synthetic
auggauauuuuuuucuguaa

SEQ ID NO: 195079 - RNA, 21 nt, Artificial Sequence
  Synthetic
gauggauauuuuuuucuguaa

SEQ ID NO: 195080 - RNA, 22 nt, Artificial Sequence
  Synthetic
ggauggauauuuuuuucuguaa

SEQ ID NO: 195081 - RNA, 23 nt, Artificial Sequence
  Synthetic
aggauggauauuuuuuucuguaa

SEQ ID NO: 195082 - RNA, 24 nt, Artificial Sequence
  Synthetic
gaggauggauauuuuuuucuguaa

SEQ ID NO: 195083 - RNA, 18 nt, Artificial Sequence
  Synthetic
gcaaggauuccaguguaa

SEQ ID NO: 195084 - RNA, 19 nt, Artificial Sequence
  Synthetic
agcaaggauuccaguguaa

SEQ ID NO: 195085 - RNA, 20 nt, Artificial Sequence
  Synthetic
uagcaaggauuccaguguaa

SEQ ID NO: 195086 - RNA, 21 nt, Artificial Sequence
  Synthetic
auagcaaggauuccaguguaa

SEQ ID NO: 195087 - RNA, 22 nt, Artificial Sequence
  Synthetic
aauagcaaggauuccaguguaa

SEQ ID NO: 195088 - RNA, 23 nt, Artificial Sequence
  Synthetic
aaauagcaaggauuccaguguaa

SEQ ID NO: 195089 - RNA, 24 nt, Artificial Sequence
  Synthetic
caaauagcaaggauuccaguguaa

SEQ ID NO: 195090 - RNA, 18 nt, Artificial Sequence
  Synthetic
cagugugguagaguguaa

SEQ ID NO: 195091 - RNA, 19 nt, Artificial Sequence
  Synthetic
gcagugugguagaguguaa

SEQ ID NO: 195092 - RNA, 20 nt, Artificial Sequence
  Synthetic
agcagugugguagaguguaa

SEQ ID NO: 195093 - RNA, 21 nt, Artificial Sequence
  Synthetic
gagcagugugguagaguguaa

SEQ ID NO: 195094 - RNA, 22 nt, Artificial Sequence
  Synthetic
ugagcagugugguagaguguaa

SEQ ID NO: 195095 - RNA, 23 nt, Artificial Sequence
  Synthetic
gugagcagugugguagaguguaa

SEQ ID NO: 195096 - RNA, 24 nt, Artificial Sequence
  Synthetic
agugagcagugugguagaguguaa

SEQ ID NO: 195097 - RNA, 18 nt, Artificial Sequence
  Synthetic
uauaagacaugaguguaa

SEQ ID NO: 195098 - RNA, 19 nt, Artificial Sequence
  Synthetic
auauaagacaugaguguaa

SEQ ID NO: 195099 - RNA, 20 nt, Artificial Sequence
  Synthetic
uauauaagacaugaguguaa

SEQ ID NO: 195100 - RNA, 21 nt, Artificial Sequence
  Synthetic
auauauaagacaugaguguaa

SEQ ID NO: 195101 - RNA, 22 nt, Artificial Sequence
  Synthetic
aauauauaagacaugaguguaa

SEQ ID NO: 195102 - RNA, 23 nt, Artificial Sequence
  Synthetic
aaauauauaagacaugaguguaa

SEQ ID NO: 195103 - RNA, 24 nt, Artificial Sequence
  Synthetic
aaaauauauaagacaugaguguaa

SEQ ID NO: 195104 - RNA, 18 nt, Artificial Sequence
  Synthetic
ccuggaacaaugguguaa

SEQ ID NO: 195105 - RNA, 19 nt, Artificial Sequence
  Synthetic
gccuggaacaaugguguaa

SEQ ID NO: 195106 - RNA, 20 nt, Artificial Sequence
  Synthetic
ggccuggaacaaugguguaa

SEQ ID NO: 195107 - RNA, 21 nt, Artificial Sequence
  Synthetic
gggccuggaacaaugguguaa

SEQ ID NO: 195108 - RNA, 22 nt, Artificial Sequence
  Synthetic
ugggccuggaacaaugguguaa

SEQ ID NO: 195109 - RNA, 23 nt, Artificial Sequence
  Synthetic
gugggccuggaacaaugguguaa

SEQ ID NO: 195110 - RNA, 24 nt, Artificial Sequence
  Synthetic
ugugggccuggaacaaugguguaa

SEQ ID NO: 195111 - RNA, 18 nt, Artificial Sequence
  Synthetic
cuuuuuuaaaauguguaa

SEQ ID NO: 195112 - RNA, 19 nt, Artificial Sequence
  Synthetic
ucuuuuuuaaaauguguaa

SEQ ID NO: 195113 - RNA, 20 nt, Artificial Sequence
  Synthetic
cucuuuuuuaaaauguguaa

SEQ ID NO: 195114 - RNA, 21 nt, Artificial Sequence
  Synthetic
ccucuuuuuuaaaauguguaa

SEQ ID NO: 195115 - RNA, 22 nt, Artificial Sequence
  Synthetic
accucuuuuuuaaaauguguaa

SEQ ID NO: 195116 - RNA, 23 nt, Artificial Sequence
  Synthetic
aaccucuuuuuuaaaauguguaa

SEQ ID NO: 195117 - RNA, 24 nt, Artificial Sequence
  Synthetic
caaccucuuuuuuaaaauguguaa

SEQ ID NO: 195118 - RNA, 18 nt, Artificial Sequence
  Synthetic
caaaaagugaauguguaa

SEQ ID NO: 195119 - RNA, 19 nt, Artificial Sequence
  Synthetic
ucaaaaagugaauguguaa

SEQ ID NO: 195120 - RNA, 20 nt, Artificial Sequence
  Synthetic
aucaaaaagugaauguguaa

SEQ ID NO: 195121 - RNA, 21 nt, Artificial Sequence
  Synthetic
caucaaaaagugaauguguaa

SEQ ID NO: 195122 - RNA, 22 nt, Artificial Sequence
  Synthetic
acaucaaaaagugaauguguaa

SEQ ID NO: 195123 - RNA, 23 nt, Artificial Sequence
  Synthetic
aacaucaaaaagugaauguguaa

SEQ ID NO: 195124 - RNA, 24 nt, Artificial Sequence
  Synthetic
aaacaucaaaaagugaauguguaa

SEQ ID NO: 195125 - RNA, 18 nt, Artificial Sequence
  Synthetic
aaaaugacgauuguguaa

SEQ ID NO: 195126 - RNA, 19 nt, Artificial Sequence
  Synthetic
aaaaaugacgauuguguaa

SEQ ID NO: 195127 - RNA, 20 nt, Artificial Sequence
  Synthetic
gaaaaaugacgauuguguaa

SEQ ID NO: 195128 - RNA, 21 nt, Artificial Sequence
  Synthetic
ggaaaaaugacgauuguguaa

SEQ ID NO: 195129 - RNA, 22 nt, Artificial Sequence
  Synthetic
aggaaaaaugacgauuguguaa

SEQ ID NO: 195130 - RNA, 23 nt, Artificial Sequence
  Synthetic
aaggaaaaaugacgauuguguaa

SEQ ID NO: 195131 - RNA, 24 nt, Artificial Sequence
  Synthetic
uaaggaaaaaugacgauuguguaa

SEQ ID NO: 195132 - RNA, 18 nt, Artificial Sequence
  Synthetic
uuauacugaaaauuguaa

SEQ ID NO: 195133 - RNA, 19 nt, Artificial Sequence
  Synthetic
auuauacugaaaauuguaa

SEQ ID NO: 195134 - RNA, 20 nt, Artificial Sequence
  Synthetic
uauuauacugaaaauuguaa

SEQ ID NO: 195135 - RNA, 21 nt, Artificial Sequence
  Synthetic
auauuauacugaaaauuguaa

SEQ ID NO: 195136 - RNA, 22 nt, Artificial Sequence
  Synthetic
cauauuauacugaaaauuguaa

SEQ ID NO: 195137 - RNA, 23 nt, Artificial Sequence
  Synthetic
acauauuauacugaaaauuguaa

SEQ ID NO: 195138 - RNA, 24 nt, Artificial Sequence
  Synthetic
aacauauuauacugaaaauuguaa

SEQ ID NO: 195139 - RNA, 18 nt, Artificial Sequence
  Synthetic
caagaccaggcauuguaa

SEQ ID NO: 195140 - RNA, 19 nt, Artificial Sequence
  Synthetic
acaagaccaggcauuguaa

SEQ ID NO: 195141 - RNA, 20 nt, Artificial Sequence
  Synthetic
aacaagaccaggcauuguaa

SEQ ID NO: 195142 - RNA, 21 nt, Artificial Sequence
  Synthetic
caacaagaccaggcauuguaa

SEQ ID NO: 195143 - RNA, 22 nt, Artificial Sequence
  Synthetic
acaacaagaccaggcauuguaa

SEQ ID NO: 195144 - RNA, 23 nt, Artificial Sequence
  Synthetic
uacaacaagaccaggcauuguaa

SEQ ID NO: 195145 - RNA, 24 nt, Artificial Sequence
  Synthetic
auacaacaagaccaggcauuguaa

SEQ ID NO: 195146 - RNA, 18 nt, Artificial Sequence
  Synthetic
aucgcagccagauuguaa

SEQ ID NO: 195147 - RNA, 19 nt, Artificial Sequence
  Synthetic
aaucgcagccagauuguaa

SEQ ID NO: 195148 - RNA, 20 nt, Artificial Sequence
  Synthetic
gaaucgcagccagauuguaa

SEQ ID NO: 195149 - RNA, 21 nt, Artificial Sequence
  Synthetic
agaaucgcagccagauuguaa

SEQ ID NO: 195150 - RNA, 22 nt, Artificial Sequence
  Synthetic
gagaaucgcagccagauuguaa

SEQ ID NO: 195151 - RNA, 23 nt, Artificial Sequence
  Synthetic
ggagaaucgcagccagauuguaa

SEQ ID NO: 195152 - RNA, 24 nt, Artificial Sequence
  Synthetic
uggagaaucgcagccagauuguaa

SEQ ID NO: 195153 - RNA, 18 nt, Artificial Sequence
  Synthetic
auaaaacauauauuguaa

SEQ ID NO: 195154 - RNA, 19 nt, Artificial Sequence
  Synthetic
cauaaaacauauauuguaa

SEQ ID NO: 195155 - RNA, 20 nt, Artificial Sequence
  Synthetic
ucauaaaacauauauuguaa

SEQ ID NO: 195156 - RNA, 21 nt, Artificial Sequence
  Synthetic
uucauaaaacauauauuguaa

SEQ ID NO: 195157 - RNA, 22 nt, Artificial Sequence
  Synthetic
uuucauaaaacauauauuguaa

SEQ ID NO: 195158 - RNA, 23 nt, Artificial Sequence
  Synthetic
cuuucauaaaacauauauuguaa

SEQ ID NO: 195159 - RNA, 24 nt, Artificial Sequence
  Synthetic
ccuuucauaaaacauauauuguaa

SEQ ID NO: 195160 - RNA, 18 nt, Artificial Sequence
  Synthetic
uuuuuauugcuauuguaa

SEQ ID NO: 195161 - RNA, 19 nt, Artificial Sequence
  Synthetic
cuuuuuauugcuauuguaa

SEQ ID NO: 195162 - RNA, 20 nt, Artificial Sequence
  Synthetic
ucuuuuuauugcuauuguaa

SEQ ID NO: 195163 - RNA, 21 nt, Artificial Sequence
  Synthetic
uucuuuuuauugcuauuguaa

SEQ ID NO: 195164 - RNA, 22 nt, Artificial Sequence
  Synthetic
auucuuuuuauugcuauuguaa

SEQ ID NO: 195165 - RNA, 23 nt, Artificial Sequence
  Synthetic
uauucuuuuuauugcuauuguaa

SEQ ID NO: 195166 - RNA, 24 nt, Artificial Sequence
  Synthetic
uuauucuuuuuauugcuauuguaa

SEQ ID NO: 195167 - RNA, 18 nt, Artificial Sequence
  Synthetic
uuuagcuuccacuuguaa

SEQ ID NO: 195168 - RNA, 19 nt, Artificial Sequence
  Synthetic
auuuagcuuccacuuguaa

SEQ ID NO: 195169 - RNA, 20 nt, Artificial Sequence
  Synthetic
uauuuagcuuccacuuguaa

SEQ ID NO: 195170 - RNA, 21 nt, Artificial Sequence
  Synthetic
uuauuuagcuuccacuuguaa

SEQ ID NO: 195171 - RNA, 22 nt, Artificial Sequence
  Synthetic
auuauuuagcuuccacuuguaa

SEQ ID NO: 195172 - RNA, 23 nt, Artificial Sequence
  Synthetic
cauuauuuagcuuccacuuguaa

SEQ ID NO: 195173 - RNA, 24 nt, Artificial Sequence
  Synthetic
acauuauuuagcuuccacuuguaa

SEQ ID NO: 195174 - RNA, 18 nt, Artificial Sequence
  Synthetic
cuucuugccaccuuguaa

SEQ ID NO: 195175 - RNA, 19 nt, Artificial Sequence
  Synthetic
ccuucuugccaccuuguaa

SEQ ID NO: 195176 - RNA, 20 nt, Artificial Sequence
  Synthetic
uccuucuugccaccuuguaa

SEQ ID NO: 195177 - RNA, 21 nt, Artificial Sequence
  Synthetic
cuccuucuugccaccuuguaa

SEQ ID NO: 195178 - RNA, 22 nt, Artificial Sequence
  Synthetic
ucuccuucuugccaccuuguaa

SEQ ID NO: 195179 - RNA, 23 nt, Artificial Sequence
  Synthetic
uucuccuucuugccaccuuguaa

SEQ ID NO: 195180 - RNA, 24 nt, Artificial Sequence
  Synthetic
auucuccuucuugccaccuuguaa

SEQ ID NO: 195181 - RNA, 18 nt, Artificial Sequence
  Synthetic
auucuaccuuccuuguaa

SEQ ID NO: 195182 - RNA, 19 nt, Artificial Sequence
  Synthetic
uauucuaccuuccuuguaa

SEQ ID NO: 195183 - RNA, 20 nt, Artificial Sequence
  Synthetic
auauucuaccuuccuuguaa

SEQ ID NO: 195184 - RNA, 21 nt, Artificial Sequence
  Synthetic
aauauucuaccuuccuuguaa

SEQ ID NO: 195185 - RNA, 22 nt, Artificial Sequence
  Synthetic
aaauauucuaccuuccuuguaa

SEQ ID NO: 195186 - RNA, 23 nt, Artificial Sequence
  Synthetic
caaauauucuaccuuccuuguaa

SEQ ID NO: 195187 - RNA, 24 nt, Artificial Sequence
  Synthetic
acaaauauucuaccuuccuuguaa

SEQ ID NO: 195188 - RNA, 18 nt, Artificial Sequence
  Synthetic
agcaggcagaaguuguaa

SEQ ID NO: 195189 - RNA, 19 nt, Artificial Sequence
  Synthetic
gagcaggcagaaguuguaa

SEQ ID NO: 195190 - RNA, 20 nt, Artificial Sequence
  Synthetic
agagcaggcagaaguuguaa

SEQ ID NO: 195191 - RNA, 21 nt, Artificial Sequence
  Synthetic
aagagcaggcagaaguuguaa

SEQ ID NO: 195192 - RNA, 22 nt, Artificial Sequence
  Synthetic
gaagagcaggcagaaguuguaa

SEQ ID NO: 195193 - RNA, 23 nt, Artificial Sequence
  Synthetic
agaagagcaggcagaaguuguaa

SEQ ID NO: 195194 - RNA, 24 nt, Artificial Sequence
  Synthetic
cagaagagcaggcagaaguuguaa

SEQ ID NO: 195195 - RNA, 18 nt, Artificial Sequence
  Synthetic
gagaaaaguaaguuguaa

SEQ ID NO: 195196 - RNA, 19 nt, Artificial Sequence
  Synthetic
ugagaaaaguaaguuguaa

SEQ ID NO: 195197 - RNA, 20 nt, Artificial Sequence
  Synthetic
augagaaaaguaaguuguaa

SEQ ID NO: 195198 - RNA, 21 nt, Artificial Sequence
  Synthetic
gaugagaaaaguaaguuguaa

SEQ ID NO: 195199 - RNA, 22 nt, Artificial Sequence
  Synthetic
agaugagaaaaguaaguuguaa

SEQ ID NO: 195200 - RNA, 23 nt, Artificial Sequence
  Synthetic
gagaugagaaaaguaaguuguaa

SEQ ID NO: 195201 - RNA, 24 nt, Artificial Sequence
  Synthetic
cgagaugagaaaaguaaguuguaa

SEQ ID NO: 195202 - RNA, 18 nt, Artificial Sequence
  Synthetic
auuauguugcaguuguaa

SEQ ID NO: 195203 - RNA, 19 nt, Artificial Sequence
  Synthetic
uauuauguugcaguuguaa

SEQ ID NO: 195204 - RNA, 20 nt, Artificial Sequence
  Synthetic
uuauuauguugcaguuguaa

SEQ ID NO: 195205 - RNA, 21 nt, Artificial Sequence
  Synthetic
uuuauuauguugcaguuguaa

SEQ ID NO: 195206 - RNA, 22 nt, Artificial Sequence
  Synthetic
guuuauuauguugcaguuguaa

SEQ ID NO: 195207 - RNA, 23 nt, Artificial Sequence
  Synthetic
uguuuauuauguugcaguuguaa

SEQ ID NO: 195208 - RNA, 24 nt, Artificial Sequence
  Synthetic
auguuuauuauguugcaguuguaa

SEQ ID NO: 195209 - RNA, 18 nt, Artificial Sequence
  Synthetic
ucuuaggacuaguuguaa

SEQ ID NO: 195210 - RNA, 19 nt, Artificial Sequence
  Synthetic
aucuuaggacuaguuguaa

SEQ ID NO: 195211 - RNA, 20 nt, Artificial Sequence
  Synthetic
gaucuuaggacuaguuguaa

SEQ ID NO: 195212 - RNA, 21 nt, Artificial Sequence
  Synthetic
ugaucuuaggacuaguuguaa

SEQ ID NO: 195213 - RNA, 22 nt, Artificial Sequence
  Synthetic
cugaucuuaggacuaguuguaa

SEQ ID NO: 195214 - RNA, 23 nt, Artificial Sequence
  Synthetic
gcugaucuuaggacuaguuguaa

SEQ ID NO: 195215 - RNA, 24 nt, Artificial Sequence
  Synthetic
agcugaucuuaggacuaguuguaa

SEQ ID NO: 195216 - RNA, 18 nt, Artificial Sequence
  Synthetic
uugcauuuucauuuguaa

SEQ ID NO: 195217 - RNA, 19 nt, Artificial Sequence
  Synthetic
uuugcauuuucauuuguaa

SEQ ID NO: 195218 - RNA, 20 nt, Artificial Sequence
  Synthetic
auuugcauuuucauuuguaa

SEQ ID NO: 195219 - RNA, 21 nt, Artificial Sequence
  Synthetic
aauuugcauuuucauuuguaa

SEQ ID NO: 195220 - RNA, 22 nt, Artificial Sequence
  Synthetic
aaauuugcauuuucauuuguaa

SEQ ID NO: 195221 - RNA, 23 nt, Artificial Sequence
  Synthetic
gaaauuugcauuuucauuuguaa

SEQ ID NO: 195222 - RNA, 24 nt, Artificial Sequence
  Synthetic
agaaauuugcauuuucauuuguaa

SEQ ID NO: 195223 - RNA, 18 nt, Artificial Sequence
  Synthetic
aguggaaaauauuuguaa

SEQ ID NO: 195224 - RNA, 19 nt, Artificial Sequence
  Synthetic
aaguggaaaauauuuguaa

SEQ ID NO: 195225 - RNA, 20 nt, Artificial Sequence
  Synthetic
caaguggaaaauauuuguaa

SEQ ID NO: 195226 - RNA, 21 nt, Artificial Sequence
  Synthetic
acaaguggaaaauauuuguaa

SEQ ID NO: 195227 - RNA, 22 nt, Artificial Sequence
  Synthetic
cacaaguggaaaauauuuguaa

SEQ ID NO: 195228 - RNA, 23 nt, Artificial Sequence
  Synthetic
acacaaguggaaaauauuuguaa

SEQ ID NO: 195229 - RNA, 24 nt, Artificial Sequence
  Synthetic
uacacaaguggaaaauauuuguaa

SEQ ID NO: 195230 - RNA, 18 nt, Artificial Sequence
  Synthetic
ugccaugaauauuuguaa

SEQ ID NO: 195231 - RNA, 19 nt, Artificial Sequence
  Synthetic
uugccaugaauauuuguaa

SEQ ID NO: 195232 - RNA, 20 nt, Artificial Sequence
  Synthetic
uuugccaugaauauuuguaa

SEQ ID NO: 195233 - RNA, 21 nt, Artificial Sequence
  Synthetic
auuugccaugaauauuuguaa

SEQ ID NO: 195234 - RNA, 22 nt, Artificial Sequence
  Synthetic
uauuugccaugaauauuuguaa

SEQ ID NO: 195235 - RNA, 23 nt, Artificial Sequence
  Synthetic
auauuugccaugaauauuuguaa

SEQ ID NO: 195236 - RNA, 24 nt, Artificial Sequence
  Synthetic
cauauuugccaugaauauuuguaa

SEQ ID NO: 195237 - RNA, 18 nt, Artificial Sequence
  Synthetic
caaugugauuauuuguaa

SEQ ID NO: 195238 - RNA, 19 nt, Artificial Sequence
  Synthetic
ucaaugugauuauuuguaa

SEQ ID NO: 195239 - RNA, 20 nt, Artificial Sequence
  Synthetic
gucaaugugauuauuuguaa

SEQ ID NO: 195240 - RNA, 21 nt, Artificial Sequence
  Synthetic
ugucaaugugauuauuuguaa

SEQ ID NO: 195241 - RNA, 22 nt, Artificial Sequence
  Synthetic
augucaaugugauuauuuguaa

SEQ ID NO: 195242 - RNA, 23 nt, Artificial Sequence
  Synthetic
aaugucaaugugauuauuuguaa

SEQ ID NO: 195243 - RNA, 24 nt, Artificial Sequence
  Synthetic
caaugucaaugugauuauuuguaa

SEQ ID NO: 195244 - RNA, 18 nt, Artificial Sequence
  Synthetic
acuuuugugccuuuguaa

SEQ ID NO: 195245 - RNA, 19 nt, Artificial Sequence
  Synthetic
uacuuuugugccuuuguaa

SEQ ID NO: 195246 - RNA, 20 nt, Artificial Sequence
  Synthetic
uuacuuuugugccuuuguaa

SEQ ID NO: 195247 - RNA, 21 nt, Artificial Sequence
  Synthetic
uuuacuuuugugccuuuguaa

SEQ ID NO: 195248 - RNA, 22 nt, Artificial Sequence
  Synthetic
uuuuacuuuugugccuuuguaa

SEQ ID NO: 195249 - RNA, 23 nt, Artificial Sequence
  Synthetic
cuuuuacuuuugugccuuuguaa

SEQ ID NO: 195250 - RNA, 24 nt, Artificial Sequence
  Synthetic
gcuuuuacuuuugugccuuuguaa

SEQ ID NO: 195251 - RNA, 18 nt, Artificial Sequence
  Synthetic
agaugacuuucuuuguaa

SEQ ID NO: 195252 - RNA, 19 nt, Artificial Sequence
  Synthetic
uagaugacuuucuuuguaa

SEQ ID NO: 195253 - RNA, 20 nt, Artificial Sequence
  Synthetic
uuagaugacuuucuuuguaa

SEQ ID NO: 195254 - RNA, 21 nt, Artificial Sequence
  Synthetic
uuuagaugacuuucuuuguaa

SEQ ID NO: 195255 - RNA, 22 nt, Artificial Sequence
  Synthetic
auuuagaugacuuucuuuguaa

SEQ ID NO: 195256 - RNA, 23 nt, Artificial Sequence
  Synthetic
aauuuagaugacuuucuuuguaa

SEQ ID NO: 195257 - RNA, 24 nt, Artificial Sequence
  Synthetic
gaauuuagaugacuuucuuuguaa

SEQ ID NO: 195258 - RNA, 18 nt, Artificial Sequence
  Synthetic
uugaaaaaggguuuguaa

SEQ ID NO: 195259 - RNA, 19 nt, Artificial Sequence
  Synthetic
guugaaaaaggguuuguaa

SEQ ID NO: 195260 - RNA, 20 nt, Artificial Sequence
  Synthetic
aguugaaaaaggguuuguaa

SEQ ID NO: 195261 - RNA, 21 nt, Artificial Sequence
  Synthetic
aaguugaaaaaggguuuguaa

SEQ ID NO: 195262 - RNA, 22 nt, Artificial Sequence
  Synthetic
uaaguugaaaaaggguuuguaa

SEQ ID NO: 195263 - RNA, 23 nt, Artificial Sequence
  Synthetic
auaaguugaaaaaggguuuguaa

SEQ ID NO: 195264 - RNA, 24 nt, Artificial Sequence
  Synthetic
gauaaguugaaaaaggguuuguaa

SEQ ID NO: 195265 - RNA, 18 nt, Artificial Sequence
  Synthetic
cacaacuuuuuuuuguaa

SEQ ID NO: 195266 - RNA, 19 nt, Artificial Sequence
  Synthetic
gcacaacuuuuuuuuguaa

SEQ ID NO: 195267 - RNA, 20 nt, Artificial Sequence
  Synthetic
agcacaacuuuuuuuuguaa

SEQ ID NO: 195268 - RNA, 21 nt, Artificial Sequence
  Synthetic
uagcacaacuuuuuuuuguaa

SEQ ID NO: 195269 - RNA, 22 nt, Artificial Sequence
  Synthetic
cuagcacaacuuuuuuuuguaa

SEQ ID NO: 195270 - RNA, 23 nt, Artificial Sequence
  Synthetic
ccuagcacaacuuuuuuuuguaa

SEQ ID NO: 195271 - RNA, 24 nt, Artificial Sequence
  Synthetic
uccuagcacaacuuuuuuuuguaa

SEQ ID NO: 195272 - RNA, 18 nt, Artificial Sequence
  Synthetic
agcuuagaaaaaaauuaa

SEQ ID NO: 195273 - RNA, 19 nt, Artificial Sequence
  Synthetic
cagcuuagaaaaaaauuaa

SEQ ID NO: 195274 - RNA, 20 nt, Artificial Sequence
  Synthetic
acagcuuagaaaaaaauuaa

SEQ ID NO: 195275 - RNA, 21 nt, Artificial Sequence
  Synthetic
cacagcuuagaaaaaaauuaa

SEQ ID NO: 195276 - RNA, 22 nt, Artificial Sequence
  Synthetic
ccacagcuuagaaaaaaauuaa

SEQ ID NO: 195277 - RNA, 23 nt, Artificial Sequence
  Synthetic
uccacagcuuagaaaaaaauuaa

SEQ ID NO: 195278 - RNA, 24 nt, Artificial Sequence
  Synthetic
cuccacagcuuagaaaaaaauuaa

SEQ ID NO: 195279 - RNA, 18 nt, Artificial Sequence
  Synthetic
uauauguagaaaaauuaa

SEQ ID NO: 195280 - RNA, 19 nt, Artificial Sequence
  Synthetic
auauauguagaaaaauuaa

SEQ ID NO: 195281 - RNA, 20 nt, Artificial Sequence
  Synthetic
uauauauguagaaaaauuaa

SEQ ID NO: 195282 - RNA, 21 nt, Artificial Sequence
  Synthetic
auauauauguagaaaaauuaa

SEQ ID NO: 195283 - RNA, 22 nt, Artificial Sequence
  Synthetic
aauauauauguagaaaaauuaa

SEQ ID NO: 195284 - RNA, 23 nt, Artificial Sequence
  Synthetic
aaauauauauguagaaaaauuaa

SEQ ID NO: 195285 - RNA, 24 nt, Artificial Sequence
  Synthetic
aaaauauauauguagaaaaauuaa

SEQ ID NO: 195286 - RNA, 18 nt, Artificial Sequence
  Synthetic
acaaaacaggaaaauuaa

SEQ ID NO: 195287 - RNA, 19 nt, Artificial Sequence
  Synthetic
cacaaaacaggaaaauuaa

SEQ ID NO: 195288 - RNA, 20 nt, Artificial Sequence
  Synthetic
acacaaaacaggaaaauuaa

SEQ ID NO: 195289 - RNA, 21 nt, Artificial Sequence
  Synthetic
cacacaaaacaggaaaauuaa

SEQ ID NO: 195290 - RNA, 22 nt, Artificial Sequence
  Synthetic
acacacaaaacaggaaaauuaa

SEQ ID NO: 195291 - RNA, 23 nt, Artificial Sequence
  Synthetic
aacacacaaaacaggaaaauuaa

SEQ ID NO: 195292 - RNA, 24 nt, Artificial Sequence
  Synthetic
caacacacaaaacaggaaaauuaa

SEQ ID NO: 195293 - RNA, 18 nt, Artificial Sequence
  Synthetic
gaaucaauugaaaauuaa

SEQ ID NO: 195294 - RNA, 19 nt, Artificial Sequence
  Synthetic
ggaaucaauugaaaauuaa

SEQ ID NO: 195295 - RNA, 20 nt, Artificial Sequence
  Synthetic
aggaaucaauugaaaauuaa

SEQ ID NO: 195296 - RNA, 21 nt, Artificial Sequence
  Synthetic
aaggaaucaauugaaaauuaa

SEQ ID NO: 195297 - RNA, 22 nt, Artificial Sequence
  Synthetic
aaaggaaucaauugaaaauuaa

SEQ ID NO: 195298 - RNA, 23 nt, Artificial Sequence
  Synthetic
caaaggaaucaauugaaaauuaa

SEQ ID NO: 195299 - RNA, 24 nt, Artificial Sequence
  Synthetic
acaaaggaaucaauugaaaauuaa

SEQ ID NO: 195300 - RNA, 18 nt, Artificial Sequence
  Synthetic
cucgccagaauaaauuaa

SEQ ID NO: 195301 - RNA, 19 nt, Artificial Sequence
  Synthetic
ucucgccagaauaaauuaa

SEQ ID NO: 195302 - RNA, 20 nt, Artificial Sequence
  Synthetic
uucucgccagaauaaauuaa

SEQ ID NO: 195303 - RNA, 21 nt, Artificial Sequence
  Synthetic
cuucucgccagaauaaauuaa

SEQ ID NO: 195304 - RNA, 22 nt, Artificial Sequence
  Synthetic
acuucucgccagaauaaauuaa

SEQ ID NO: 195305 - RNA, 23 nt, Artificial Sequence
  Synthetic
cacuucucgccagaauaaauuaa

SEQ ID NO: 195306 - RNA, 24 nt, Artificial Sequence
  Synthetic
gcacuucucgccagaauaaauuaa

SEQ ID NO: 195307 - RNA, 18 nt, Artificial Sequence
  Synthetic
agcuagcugcacaauuaa

SEQ ID NO: 195308 - RNA, 19 nt, Artificial Sequence
  Synthetic
cagcuagcugcacaauuaa

SEQ ID NO: 195309 - RNA, 20 nt, Artificial Sequence
  Synthetic
acagcuagcugcacaauuaa

SEQ ID NO: 195310 - RNA, 21 nt, Artificial Sequence
  Synthetic
gacagcuagcugcacaauuaa

SEQ ID NO: 195311 - RNA, 22 nt, Artificial Sequence
  Synthetic
ugacagcuagcugcacaauuaa

SEQ ID NO: 195312 - RNA, 23 nt, Artificial Sequence
  Synthetic
augacagcuagcugcacaauuaa

SEQ ID NO: 195313 - RNA, 24 nt, Artificial Sequence
  Synthetic
aaugacagcuagcugcacaauuaa

SEQ ID NO: 195314 - RNA, 18 nt, Artificial Sequence
  Synthetic
ccuuaacaucacaauuaa

SEQ ID NO: 195315 - RNA, 19 nt, Artificial Sequence
  Synthetic
accuuaacaucacaauuaa

SEQ ID NO: 195316 - RNA, 20 nt, Artificial Sequence
  Synthetic
caccuuaacaucacaauuaa

SEQ ID NO: 195317 - RNA, 21 nt, Artificial Sequence
  Synthetic
acaccuuaacaucacaauuaa

SEQ ID NO: 195318 - RNA, 22 nt, Artificial Sequence
  Synthetic
gacaccuuaacaucacaauuaa

SEQ ID NO: 195319 - RNA, 23 nt, Artificial Sequence
  Synthetic
ugacaccuuaacaucacaauuaa

SEQ ID NO: 195320 - RNA, 24 nt, Artificial Sequence
  Synthetic
uugacaccuuaacaucacaauuaa

SEQ ID NO: 195321 - RNA, 18 nt, Artificial Sequence
  Synthetic
ucuaaauauaccaauuaa

SEQ ID NO: 195322 - RNA, 19 nt, Artificial Sequence
  Synthetic
gucuaaauauaccaauuaa

SEQ ID NO: 195323 - RNA, 20 nt, Artificial Sequence
  Synthetic
ggucuaaauauaccaauuaa

SEQ ID NO: 195324 - RNA, 21 nt, Artificial Sequence
  Synthetic
uggucuaaauauaccaauuaa

SEQ ID NO: 195325 - RNA, 22 nt, Artificial Sequence
  Synthetic
auggucuaaauauaccaauuaa

SEQ ID NO: 195326 - RNA, 23 nt, Artificial Sequence
  Synthetic
aauggucuaaauauaccaauuaa

SEQ ID NO: 195327 - RNA, 24 nt, Artificial Sequence
  Synthetic
aaauggucuaaauauaccaauuaa

SEQ ID NO: 195328 - RNA, 18 nt, Artificial Sequence
  Synthetic
caugggcagcccaauuaa

SEQ ID NO: 195329 - RNA, 19 nt, Artificial Sequence
  Synthetic
ucaugggcagcccaauuaa

SEQ ID NO: 195330 - RNA, 20 nt, Artificial Sequence
  Synthetic
uucaugggcagcccaauuaa

SEQ ID NO: 195331 - RNA, 21 nt, Artificial Sequence
  Synthetic
auucaugggcagcccaauuaa

SEQ ID NO: 195332 - RNA, 22 nt, Artificial Sequence
  Synthetic
cauucaugggcagcccaauuaa

SEQ ID NO: 195333 - RNA, 23 nt, Artificial Sequence
  Synthetic
ucauucaugggcagcccaauuaa

SEQ ID NO: 195334 - RNA, 24 nt, Artificial Sequence
  Synthetic
uucauucaugggcagcccaauuaa

SEQ ID NO: 195335 - RNA, 18 nt, Artificial Sequence
  Synthetic
uagcuaaaaaagaauuaa

SEQ ID NO: 195336 - RNA, 19 nt, Artificial Sequence
  Synthetic
guagcuaaaaaagaauuaa

SEQ ID NO: 195337 - RNA, 20 nt, Artificial Sequence
  Synthetic
aguagcuaaaaaagaauuaa

SEQ ID NO: 195338 - RNA, 21 nt, Artificial Sequence
  Synthetic
uaguagcuaaaaaagaauuaa

SEQ ID NO: 195339 - RNA, 22 nt, Artificial Sequence
  Synthetic
guaguagcuaaaaaagaauuaa

SEQ ID NO: 195340 - RNA, 23 nt, Artificial Sequence
  Synthetic
gguaguagcuaaaaaagaauuaa

SEQ ID NO: 195341 - RNA, 24 nt, Artificial Sequence
  Synthetic
ugguaguagcuaaaaaagaauuaa

SEQ ID NO: 195342 - RNA, 18 nt, Artificial Sequence
  Synthetic
ccuuccacauagaauuaa

SEQ ID NO: 195343 - RNA, 19 nt, Artificial Sequence
  Synthetic
uccuuccacauagaauuaa

SEQ ID NO: 195344 - RNA, 20 nt, Artificial Sequence
  Synthetic
uuccuuccacauagaauuaa

SEQ ID NO: 195345 - RNA, 21 nt, Artificial Sequence
  Synthetic
uuuccuuccacauagaauuaa

SEQ ID NO: 195346 - RNA, 22 nt, Artificial Sequence
  Synthetic
uuuuccuuccacauagaauuaa

SEQ ID NO: 195347 - RNA, 23 nt, Artificial Sequence
  Synthetic
cuuuuccuuccacauagaauuaa

SEQ ID NO: 195348 - RNA, 24 nt, Artificial Sequence
  Synthetic
acuuuuccuuccacauagaauuaa

SEQ ID NO: 195349 - RNA, 18 nt, Artificial Sequence
  Synthetic
guuuuccuaaggaauuaa

SEQ ID NO: 195350 - RNA, 19 nt, Artificial Sequence
  Synthetic
gguuuuccuaaggaauuaa

SEQ ID NO: 195351 - RNA, 20 nt, Artificial Sequence
  Synthetic
agguuuuccuaaggaauuaa

SEQ ID NO: 195352 - RNA, 21 nt, Artificial Sequence
  Synthetic
aagguuuuccuaaggaauuaa

SEQ ID NO: 195353 - RNA, 22 nt, Artificial Sequence
  Synthetic
uaagguuuuccuaaggaauuaa

SEQ ID NO: 195354 - RNA, 23 nt, Artificial Sequence
  Synthetic
cuaagguuuuccuaaggaauuaa

SEQ ID NO: 195355 - RNA, 24 nt, Artificial Sequence
  Synthetic
ccuaagguuuuccuaaggaauuaa

SEQ ID NO: 195356 - RNA, 18 nt, Artificial Sequence
  Synthetic
uaugugagagugaauuaa

SEQ ID NO: 195357 - RNA, 19 nt, Artificial Sequence
  Synthetic
uuaugugagagugaauuaa

SEQ ID NO: 195358 - RNA, 20 nt, Artificial Sequence
  Synthetic
guuaugugagagugaauuaa

SEQ ID NO: 195359 - RNA, 21 nt, Artificial Sequence
  Synthetic
gguuaugugagagugaauuaa

SEQ ID NO: 195360 - RNA, 22 nt, Artificial Sequence
  Synthetic
ugguuaugugagagugaauuaa

SEQ ID NO: 195361 - RNA, 23 nt, Artificial Sequence
  Synthetic
cugguuaugugagagugaauuaa

SEQ ID NO: 195362 - RNA, 24 nt, Artificial Sequence
  Synthetic
ucugguuaugugagagugaauuaa

SEQ ID NO: 195363 - RNA, 18 nt, Artificial Sequence
  Synthetic
gcauguuuaaauaauuaa

SEQ ID NO: 195364 - RNA, 19 nt, Artificial Sequence
  Synthetic
agcauguuuaaauaauuaa

SEQ ID NO: 195365 - RNA, 20 nt, Artificial Sequence
  Synthetic
aagcauguuuaaauaauuaa

SEQ ID NO: 195366 - RNA, 21 nt, Artificial Sequence
  Synthetic
aaagcauguuuaaauaauuaa

SEQ ID NO: 195367 - RNA, 22 nt, Artificial Sequence
  Synthetic
aaaagcauguuuaaauaauuaa

SEQ ID NO: 195368 - RNA, 23 nt, Artificial Sequence
  Synthetic
gaaaagcauguuuaaauaauuaa

SEQ ID NO: 195369 - RNA, 24 nt, Artificial Sequence
  Synthetic
agaaaagcauguuuaaauaauuaa

SEQ ID NO: 195370 - RNA, 18 nt, Artificial Sequence
  Synthetic
aagauuuuuaauaauuaa

SEQ ID NO: 195371 - RNA, 19 nt, Artificial Sequence
  Synthetic
caagauuuuuaauaauuaa

SEQ ID NO: 195372 - RNA, 20 nt, Artificial Sequence
  Synthetic
gcaagauuuuuaauaauuaa

SEQ ID NO: 195373 - RNA, 21 nt, Artificial Sequence
  Synthetic
ugcaagauuuuuaauaauuaa

SEQ ID NO: 195374 - RNA, 22 nt, Artificial Sequence
  Synthetic
augcaagauuuuuaauaauuaa

SEQ ID NO: 195375 - RNA, 23 nt, Artificial Sequence
  Synthetic
aaugcaagauuuuuaauaauuaa

SEQ ID NO: 195376 - RNA, 24 nt, Artificial Sequence
  Synthetic
aaaugcaagauuuuuaauaauuaa

SEQ ID NO: 195377 - RNA, 18 nt, Artificial Sequence
  Synthetic
auaaacguauauaauuaa

SEQ ID NO: 195378 - RNA, 19 nt, Artificial Sequence
  Synthetic
uauaaacguauauaauuaa

SEQ ID NO: 195379 - RNA, 20 nt, Artificial Sequence
  Synthetic
uuauaaacguauauaauuaa

SEQ ID NO: 195380 - RNA, 21 nt, Artificial Sequence
  Synthetic
auuauaaacguauauaauuaa

SEQ ID NO: 195381 - RNA, 22 nt, Artificial Sequence
  Synthetic
aauuauaaacguauauaauuaa

SEQ ID NO: 195382 - RNA, 23 nt, Artificial Sequence
  Synthetic
caauuauaaacguauauaauuaa

SEQ ID NO: 195383 - RNA, 24 nt, Artificial Sequence
  Synthetic
acaauuauaaacguauauaauuaa

SEQ ID NO: 195384 - RNA, 18 nt, Artificial Sequence
  Synthetic
agaccauguuauaauuaa

SEQ ID NO: 195385 - RNA, 19 nt, Artificial Sequence
  Synthetic
cagaccauguuauaauuaa

SEQ ID NO: 195386 - RNA, 20 nt, Artificial Sequence
  Synthetic
acagaccauguuauaauuaa

SEQ ID NO: 195387 - RNA, 21 nt, Artificial Sequence
  Synthetic
aacagaccauguuauaauuaa

SEQ ID NO: 195388 - RNA, 22 nt, Artificial Sequence
  Synthetic
uaacagaccauguuauaauuaa

SEQ ID NO: 195389 - RNA, 23 nt, Artificial Sequence
  Synthetic
uuaacagaccauguuauaauuaa

SEQ ID NO: 195390 - RNA, 24 nt, Artificial Sequence
  Synthetic
guuaacagaccauguuauaauuaa

SEQ ID NO: 195391 - RNA, 18 nt, Artificial Sequence
  Synthetic
aguuuacccauuaauuaa

SEQ ID NO: 195392 - RNA, 19 nt, Artificial Sequence
  Synthetic
uaguuuacccauuaauuaa

SEQ ID NO: 195393 - RNA, 20 nt, Artificial Sequence
  Synthetic
auaguuuacccauuaauuaa

SEQ ID NO: 195394 - RNA, 21 nt, Artificial Sequence
  Synthetic
gauaguuuacccauuaauuaa

SEQ ID NO: 195395 - RNA, 22 nt, Artificial Sequence
  Synthetic
cgauaguuuacccauuaauuaa

SEQ ID NO: 195396 - RNA, 23 nt, Artificial Sequence
  Synthetic
ucgauaguuuacccauuaauuaa

SEQ ID NO: 195397 - RNA, 24 nt, Artificial Sequence
  Synthetic
uucgauaguuuacccauuaauuaa

SEQ ID NO: 195398 - RNA, 18 nt, Artificial Sequence
  Synthetic
auauuuacuauuaauuaa

SEQ ID NO: 195399 - RNA, 19 nt, Artificial Sequence
  Synthetic
uauauuuacuauuaauuaa

SEQ ID NO: 195400 - RNA, 20 nt, Artificial Sequence
  Synthetic
auauauuuacuauuaauuaa

SEQ ID NO: 195401 - RNA, 21 nt, Artificial Sequence
  Synthetic
aauauauuuacuauuaauuaa

SEQ ID NO: 195402 - RNA, 22 nt, Artificial Sequence
  Synthetic
aaauauauuuacuauuaauuaa

SEQ ID NO: 195403 - RNA, 23 nt, Artificial Sequence
  Synthetic
aaaauauauuuacuauuaauuaa

SEQ ID NO: 195404 - RNA, 24 nt, Artificial Sequence
  Synthetic
aaaaauauauuuacuauuaauuaa

SEQ ID NO: 195405 - RNA, 18 nt, Artificial Sequence
  Synthetic
guaucauguuuuaauuaa

SEQ ID NO: 195406 - RNA, 19 nt, Artificial Sequence
  Synthetic
uguaucauguuuuaauuaa

SEQ ID NO: 195407 - RNA, 20 nt, Artificial Sequence
  Synthetic
guguaucauguuuuaauuaa

SEQ ID NO: 195408 - RNA, 21 nt, Artificial Sequence
  Synthetic
aguguaucauguuuuaauuaa

SEQ ID NO: 195409 - RNA, 22 nt, Artificial Sequence
  Synthetic
caguguaucauguuuuaauuaa

SEQ ID NO: 195410 - RNA, 23 nt, Artificial Sequence
  Synthetic
ucaguguaucauguuuuaauuaa

SEQ ID NO: 195411 - RNA, 24 nt, Artificial Sequence
  Synthetic
gucaguguaucauguuuuaauuaa

SEQ ID NO: 195412 - RNA, 18 nt, Artificial Sequence
  Synthetic
uucuacguuuuuaauuaa

SEQ ID NO: 195413 - RNA, 19 nt, Artificial Sequence
  Synthetic
auucuacguuuuuaauuaa

SEQ ID NO: 195414 - RNA, 20 nt, Artificial Sequence
  Synthetic
aauucuacguuuuuaauuaa

SEQ ID NO: 195415 - RNA, 21 nt, Artificial Sequence
  Synthetic
gaauucuacguuuuuaauuaa

SEQ ID NO: 195416 - RNA, 22 nt, Artificial Sequence
  Synthetic
ugaauucuacguuuuuaauuaa

SEQ ID NO: 195417 - RNA, 23 nt, Artificial Sequence
  Synthetic
uugaauucuacguuuuuaauuaa

SEQ ID NO: 195418 - RNA, 24 nt, Artificial Sequence
  Synthetic
cuugaauucuacguuuuuaauuaa

SEQ ID NO: 195419 - RNA, 18 nt, Artificial Sequence
  Synthetic
uugguuuaacaacauuaa

SEQ ID NO: 195420 - RNA, 19 nt, Artificial Sequence
  Synthetic
auugguuuaacaacauuaa

SEQ ID NO: 195421 - RNA, 20 nt, Artificial Sequence
  Synthetic
aauugguuuaacaacauuaa

SEQ ID NO: 195422 - RNA, 21 nt, Artificial Sequence
  Synthetic
caauugguuuaacaacauuaa

SEQ ID NO: 195423 - RNA, 22 nt, Artificial Sequence
  Synthetic
acaauugguuuaacaacauuaa

SEQ ID NO: 195424 - RNA, 23 nt, Artificial Sequence
  Synthetic
aacaauugguuuaacaacauuaa

SEQ ID NO: 195425 - RNA, 24 nt, Artificial Sequence
  Synthetic
aaacaauugguuuaacaacauuaa

SEQ ID NO: 195426 - RNA, 18 nt, Artificial Sequence
  Synthetic
cugucaaaagaacauuaa

SEQ ID NO: 195427 - RNA, 19 nt, Artificial Sequence
  Synthetic
acugucaaaagaacauuaa

SEQ ID NO: 195428 - RNA, 20 nt, Artificial Sequence
  Synthetic
uacugucaaaagaacauuaa

SEQ ID NO: 195429 - RNA, 21 nt, Artificial Sequence
  Synthetic
uuacugucaaaagaacauuaa

SEQ ID NO: 195430 - RNA, 22 nt, Artificial Sequence
  Synthetic
uuuacugucaaaagaacauuaa

SEQ ID NO: 195431 - RNA, 23 nt, Artificial Sequence
  Synthetic
cuuuacugucaaaagaacauuaa

SEQ ID NO: 195432 - RNA, 24 nt, Artificial Sequence
  Synthetic
ucuuuacugucaaaagaacauuaa

SEQ ID NO: 195433 - RNA, 18 nt, Artificial Sequence
  Synthetic
guuuuucuaugacauuaa

SEQ ID NO: 195434 - RNA, 19 nt, Artificial Sequence
  Synthetic
uguuuuucuaugacauuaa

SEQ ID NO: 195435 - RNA, 20 nt, Artificial Sequence
  Synthetic
auguuuuucuaugacauuaa

SEQ ID NO: 195436 - RNA, 21 nt, Artificial Sequence
  Synthetic
aauguuuuucuaugacauuaa

SEQ ID NO: 195437 - RNA, 22 nt, Artificial Sequence
  Synthetic
gaauguuuuucuaugacauuaa

SEQ ID NO: 195438 - RNA, 23 nt, Artificial Sequence
  Synthetic
agaauguuuuucuaugacauuaa

SEQ ID NO: 195439 - RNA, 24 nt, Artificial Sequence
  Synthetic
aagaauguuuuucuaugacauuaa

SEQ ID NO: 195440 - RNA, 18 nt, Artificial Sequence
  Synthetic
ugaaaaauucuacauuaa

SEQ ID NO: 195441 - RNA, 19 nt, Artificial Sequence
  Synthetic
uugaaaaauucuacauuaa

SEQ ID NO: 195442 - RNA, 20 nt, Artificial Sequence
  Synthetic
uuugaaaaauucuacauuaa

SEQ ID NO: 195443 - RNA, 21 nt, Artificial Sequence
  Synthetic
auuugaaaaauucuacauuaa

SEQ ID NO: 195444 - RNA, 22 nt, Artificial Sequence
  Synthetic
cauuugaaaaauucuacauuaa

SEQ ID NO: 195445 - RNA, 23 nt, Artificial Sequence
  Synthetic
acauuugaaaaauucuacauuaa

SEQ ID NO: 195446 - RNA, 24 nt, Artificial Sequence
  Synthetic
gacauuugaaaaauucuacauuaa

SEQ ID NO: 195447 - RNA, 18 nt, Artificial Sequence
  Synthetic
uaugguaacuuacauuaa

SEQ ID NO: 195448 - RNA, 19 nt, Artificial Sequence
  Synthetic
uuaugguaacuuacauuaa

SEQ ID NO: 195449 - RNA, 20 nt, Artificial Sequence
  Synthetic
auuaugguaacuuacauuaa

SEQ ID NO: 195450 - RNA, 21 nt, Artificial Sequence
  Synthetic
aauuaugguaacuuacauuaa

SEQ ID NO: 195451 - RNA, 22 nt, Artificial Sequence
  Synthetic
aaauuaugguaacuuacauuaa

SEQ ID NO: 195452 - RNA, 23 nt, Artificial Sequence
  Synthetic
uaaauuaugguaacuuacauuaa

SEQ ID NO: 195453 - RNA, 24 nt, Artificial Sequence
  Synthetic
uuaaauuaugguaacuuacauuaa

SEQ ID NO: 195454 - RNA, 18 nt, Artificial Sequence
  Synthetic
guugucacuuuacauuaa

SEQ ID NO: 195455 - RNA, 19 nt, Artificial Sequence
  Synthetic
aguugucacuuuacauuaa

SEQ ID NO: 195456 - RNA, 20 nt, Artificial Sequence
  Synthetic
uaguugucacuuuacauuaa

SEQ ID NO: 195457 - RNA, 21 nt, Artificial Sequence
  Synthetic
guaguugucacuuuacauuaa

SEQ ID NO: 195458 - RNA, 22 nt, Artificial Sequence
  Synthetic
aguaguugucacuuuacauuaa

SEQ ID NO: 195459 - RNA, 23 nt, Artificial Sequence
  Synthetic
gaguaguugucacuuuacauuaa

SEQ ID NO: 195460 - RNA, 24 nt, Artificial Sequence
  Synthetic
ggaguaguugucacuuuacauuaa

SEQ ID NO: 195461 - RNA, 18 nt, Artificial Sequence
  Synthetic
aauuaaaaacaccauuaa

SEQ ID NO: 195462 - RNA, 19 nt, Artificial Sequence
  Synthetic
aaauuaaaaacaccauuaa

SEQ ID NO: 195463 - RNA, 20 nt, Artificial Sequence
  Synthetic
uaaauuaaaaacaccauuaa

SEQ ID NO: 195464 - RNA, 21 nt, Artificial Sequence
  Synthetic
auaaauuaaaaacaccauuaa

SEQ ID NO: 195465 - RNA, 22 nt, Artificial Sequence
  Synthetic
uauaaauuaaaaacaccauuaa

SEQ ID NO: 195466 - RNA, 23 nt, Artificial Sequence
  Synthetic
guauaaauuaaaaacaccauuaa

SEQ ID NO: 195467 - RNA, 24 nt, Artificial Sequence
  Synthetic
gguauaaauuaaaaacaccauuaa

SEQ ID NO: 195468 - RNA, 18 nt, Artificial Sequence
  Synthetic
uaggccaugugccauuaa

SEQ ID NO: 195469 - RNA, 19 nt, Artificial Sequence
  Synthetic
guaggccaugugccauuaa

SEQ ID NO: 195470 - RNA, 20 nt, Artificial Sequence
  Synthetic
cguaggccaugugccauuaa

SEQ ID NO: 195471 - RNA, 21 nt, Artificial Sequence
  Synthetic
ccguaggccaugugccauuaa

SEQ ID NO: 195472 - RNA, 22 nt, Artificial Sequence
  Synthetic
uccguaggccaugugccauuaa

SEQ ID NO: 195473 - RNA, 23 nt, Artificial Sequence
  Synthetic
auccguaggccaugugccauuaa

SEQ ID NO: 195474 - RNA, 24 nt, Artificial Sequence
  Synthetic
uauccguaggccaugugccauuaa

SEQ ID NO: 195475 - RNA, 18 nt, Artificial Sequence
  Synthetic
aacauaauuauccauuaa

SEQ ID NO: 195476 - RNA, 19 nt, Artificial Sequence
  Synthetic
aaacauaauuauccauuaa

SEQ ID NO: 195477 - RNA, 20 nt, Artificial Sequence
  Synthetic
uaaacauaauuauccauuaa

SEQ ID NO: 195478 - RNA, 21 nt, Artificial Sequence
  Synthetic
uuaaacauaauuauccauuaa

SEQ ID NO: 195479 - RNA, 22 nt, Artificial Sequence
  Synthetic
cuuaaacauaauuauccauuaa

SEQ ID NO: 195480 - RNA, 23 nt, Artificial Sequence
  Synthetic
ucuuaaacauaauuauccauuaa

SEQ ID NO: 195481 - RNA, 24 nt, Artificial Sequence
  Synthetic
aucuuaaacauaauuauccauuaa

SEQ ID NO: 195482 - RNA, 18 nt, Artificial Sequence
  Synthetic
agagaucaauuccauuaa

SEQ ID NO: 195483 - RNA, 19 nt, Artificial Sequence
  Synthetic
gagagaucaauuccauuaa

SEQ ID NO: 195484 - RNA, 20 nt, Artificial Sequence
  Synthetic
agagagaucaauuccauuaa

SEQ ID NO: 195485 - RNA, 21 nt, Artificial Sequence
  Synthetic
uagagagaucaauuccauuaa

SEQ ID NO: 195486 - RNA, 22 nt, Artificial Sequence
  Synthetic
auagagagaucaauuccauuaa

SEQ ID NO: 195487 - RNA, 23 nt, Artificial Sequence
  Synthetic
uauagagagaucaauuccauuaa

SEQ ID NO: 195488 - RNA, 24 nt, Artificial Sequence
  Synthetic
auauagagagaucaauuccauuaa

SEQ ID NO: 195489 - RNA, 18 nt, Artificial Sequence
  Synthetic
uagcaacagaagcauuaa

SEQ ID NO: 195490 - RNA, 19 nt, Artificial Sequence
  Synthetic
uuagcaacagaagcauuaa

SEQ ID NO: 195491 - RNA, 20 nt, Artificial Sequence
  Synthetic
auuagcaacagaagcauuaa

SEQ ID NO: 195492 - RNA, 21 nt, Artificial Sequence
  Synthetic
aauuagcaacagaagcauuaa

SEQ ID NO: 195493 - RNA, 22 nt, Artificial Sequence
  Synthetic
aaauuagcaacagaagcauuaa

SEQ ID NO: 195494 - RNA, 23 nt, Artificial Sequence
  Synthetic
aaaauuagcaacagaagcauuaa

SEQ ID NO: 195495 - RNA, 24 nt, Artificial Sequence
  Synthetic
aaaaauuagcaacagaagcauuaa

SEQ ID NO: 195496 - RNA, 18 nt, Artificial Sequence
  Synthetic
ucauucaauaagcauuaa

SEQ ID NO: 195497 - RNA, 19 nt, Artificial Sequence
  Synthetic
uucauucaauaagcauuaa

SEQ ID NO: 195498 - RNA, 20 nt, Artificial Sequence
  Synthetic
guucauucaauaagcauuaa

SEQ ID NO: 195499 - RNA, 21 nt, Artificial Sequence
  Synthetic
gguucauucaauaagcauuaa

SEQ ID NO: 195500 - RNA, 22 nt, Artificial Sequence
  Synthetic
ugguucauucaauaagcauuaa

SEQ ID NO: 195501 - RNA, 23 nt, Artificial Sequence
  Synthetic
uugguucauucaauaagcauuaa

SEQ ID NO: 195502 - RNA, 24 nt, Artificial Sequence
  Synthetic
guugguucauucaauaagcauuaa

SEQ ID NO: 195503 - RNA, 18 nt, Artificial Sequence
  Synthetic
cacaucucugggcauuaa

SEQ ID NO: 195504 - RNA, 19 nt, Artificial Sequence
  Synthetic
ucacaucucugggcauuaa

SEQ ID NO: 195505 - RNA, 20 nt, Artificial Sequence
  Synthetic
gucacaucucugggcauuaa

SEQ ID NO: 195506 - RNA, 21 nt, Artificial Sequence
  Synthetic
ugucacaucucugggcauuaa

SEQ ID NO: 195507 - RNA, 22 nt, Artificial Sequence
  Synthetic
uugucacaucucugggcauuaa

SEQ ID NO: 195508 - RNA, 23 nt, Artificial Sequence
  Synthetic
guugucacaucucugggcauuaa

SEQ ID NO: 195509 - RNA, 24 nt, Artificial Sequence
  Synthetic
gguugucacaucucugggcauuaa

SEQ ID NO: 195510 - RNA, 18 nt, Artificial Sequence
  Synthetic
aagcuucugaaucauuaa

SEQ ID NO: 195511 - RNA, 19 nt, Artificial Sequence
  Synthetic
caagcuucugaaucauuaa

SEQ ID NO: 195512 - RNA, 20 nt, Artificial Sequence
  Synthetic
gcaagcuucugaaucauuaa

SEQ ID NO: 195513 - RNA, 21 nt, Artificial Sequence
  Synthetic
ugcaagcuucugaaucauuaa

SEQ ID NO: 195514 - RNA, 22 nt, Artificial Sequence
  Synthetic
cugcaagcuucugaaucauuaa

SEQ ID NO: 195515 - RNA, 23 nt, Artificial Sequence
  Synthetic
acugcaagcuucugaaucauuaa

SEQ ID NO: 195516 - RNA, 24 nt, Artificial Sequence
  Synthetic
aacugcaagcuucugaaucauuaa

SEQ ID NO: 195517 - RNA, 18 nt, Artificial Sequence
  Synthetic
ccugauccuucucauuaa

SEQ ID NO: 195518 - RNA, 19 nt, Artificial Sequence
  Synthetic
uccugauccuucucauuaa

SEQ ID NO: 195519 - RNA, 20 nt, Artificial Sequence
  Synthetic
guccugauccuucucauuaa

SEQ ID NO: 195520 - RNA, 21 nt, Artificial Sequence
  Synthetic
gguccugauccuucucauuaa

SEQ ID NO: 195521 - RNA, 22 nt, Artificial Sequence
  Synthetic
ggguccugauccuucucauuaa

SEQ ID NO: 195522 - RNA, 23 nt, Artificial Sequence
  Synthetic
uggguccugauccuucucauuaa

SEQ ID NO: 195523 - RNA, 24 nt, Artificial Sequence
  Synthetic
uuggguccugauccuucucauuaa

SEQ ID NO: 195524 - RNA, 18 nt, Artificial Sequence
  Synthetic
aaaaaaaauguucauuaa

SEQ ID NO: 195525 - RNA, 19 nt, Artificial Sequence
  Synthetic
caaaaaaaauguucauuaa

SEQ ID NO: 195526 - RNA, 20 nt, Artificial Sequence
  Synthetic
ccaaaaaaaauguucauuaa

SEQ ID NO: 195527 - RNA, 21 nt, Artificial Sequence
  Synthetic
uccaaaaaaaauguucauuaa

SEQ ID NO: 195528 - RNA, 22 nt, Artificial Sequence
  Synthetic
auccaaaaaaaauguucauuaa

SEQ ID NO: 195529 - RNA, 23 nt, Artificial Sequence
  Synthetic
gauccaaaaaaaauguucauuaa

SEQ ID NO: 195530 - RNA, 24 nt, Artificial Sequence
  Synthetic
ugauccaaaaaaaauguucauuaa

SEQ ID NO: 195531 - RNA, 18 nt, Artificial Sequence
  Synthetic
ugaaaaguaaaagauuaa

SEQ ID NO: 195532 - RNA, 19 nt, Artificial Sequence
  Synthetic
uugaaaaguaaaagauuaa

SEQ ID NO: 195533 - RNA, 20 nt, Artificial Sequence
  Synthetic
uuugaaaaguaaaagauuaa

SEQ ID NO: 195534 - RNA, 21 nt, Artificial Sequence
  Synthetic
uuuugaaaaguaaaagauuaa

SEQ ID NO: 195535 - RNA, 22 nt, Artificial Sequence
  Synthetic
uuuuugaaaaguaaaagauuaa

SEQ ID NO: 195536 - RNA, 23 nt, Artificial Sequence
  Synthetic
auuuuugaaaaguaaaagauuaa

SEQ ID NO: 195537 - RNA, 24 nt, Artificial Sequence
  Synthetic
uauuuuugaaaaguaaaagauuaa

SEQ ID NO: 195538 - RNA, 18 nt, Artificial Sequence
  Synthetic
uaauauugugaagauuaa

SEQ ID NO: 195539 - RNA, 19 nt, Artificial Sequence
  Synthetic
uuaauauugugaagauuaa

SEQ ID NO: 195540 - RNA, 20 nt, Artificial Sequence
  Synthetic
auuaauauugugaagauuaa

SEQ ID NO: 195541 - RNA, 21 nt, Artificial Sequence
  Synthetic
gauuaauauugugaagauuaa

SEQ ID NO: 195542 - RNA, 22 nt, Artificial Sequence
  Synthetic
agauuaauauugugaagauuaa

SEQ ID NO: 195543 - RNA, 23 nt, Artificial Sequence
  Synthetic
gagauuaauauugugaagauuaa

SEQ ID NO: 195544 - RNA, 24 nt, Artificial Sequence
  Synthetic
agagauuaauauugugaagauuaa

SEQ ID NO: 195545 - RNA, 18 nt, Artificial Sequence
  Synthetic
agaauugcuagagauuaa

SEQ ID NO: 195546 - RNA, 19 nt, Artificial Sequence
  Synthetic
uagaauugcuagagauuaa

SEQ ID NO: 195547 - RNA, 20 nt, Artificial Sequence
  Synthetic
auagaauugcuagagauuaa

SEQ ID NO: 195548 - RNA, 21 nt, Artificial Sequence
  Synthetic
aauagaauugcuagagauuaa

SEQ ID NO: 195549 - RNA, 22 nt, Artificial Sequence
  Synthetic
uaauagaauugcuagagauuaa

SEQ ID NO: 195550 - RNA, 23 nt, Artificial Sequence
  Synthetic
cuaauagaauugcuagagauuaa

SEQ ID NO: 195551 - RNA, 24 nt, Artificial Sequence
  Synthetic
acuaauagaauugcuagagauuaa

SEQ ID NO: 195552 - RNA, 18 nt, Artificial Sequence
  Synthetic
uuacgagugugagauuaa

SEQ ID NO: 195553 - RNA, 19 nt, Artificial Sequence
  Synthetic
cuuacgagugugagauuaa

SEQ ID NO: 195554 - RNA, 20 nt, Artificial Sequence
  Synthetic
ucuuacgagugugagauuaa

SEQ ID NO: 195555 - RNA, 21 nt, Artificial Sequence
  Synthetic
uucuuacgagugugagauuaa

SEQ ID NO: 195556 - RNA, 22 nt, Artificial Sequence
  Synthetic
uuucuuacgagugugagauuaa

SEQ ID NO: 195557 - RNA, 23 nt, Artificial Sequence
  Synthetic
uuuucuuacgagugugagauuaa

SEQ ID NO: 195558 - RNA, 24 nt, Artificial Sequence
  Synthetic
uuuuucuuacgagugugagauuaa

SEQ ID NO: 195559 - RNA, 18 nt, Artificial Sequence
  Synthetic
ggaaaaugaauagauuaa

SEQ ID NO: 195560 - RNA, 19 nt, Artificial Sequence
  Synthetic
uggaaaaugaauagauuaa

SEQ ID NO: 195561 - RNA, 20 nt, Artificial Sequence
  Synthetic
cuggaaaaugaauagauuaa

SEQ ID NO: 195562 - RNA, 21 nt, Artificial Sequence
  Synthetic
ucuggaaaaugaauagauuaa

SEQ ID NO: 195563 - RNA, 22 nt, Artificial Sequence
  Synthetic
uucuggaaaaugaauagauuaa

SEQ ID NO: 195564 - RNA, 23 nt, Artificial Sequence
  Synthetic
cuucuggaaaaugaauagauuaa

SEQ ID NO: 195565 - RNA, 24 nt, Artificial Sequence
  Synthetic
ucuucuggaaaaugaauagauuaa

SEQ ID NO: 195566 - RNA, 18 nt, Artificial Sequence
  Synthetic
aaauagugcuuggauuaa

SEQ ID NO: 195567 - RNA, 19 nt, Artificial Sequence
  Synthetic
uaaauagugcuuggauuaa

SEQ ID NO: 195568 - RNA, 20 nt, Artificial Sequence
  Synthetic
auaaauagugcuuggauuaa

SEQ ID NO: 195569 - RNA, 21 nt, Artificial Sequence
  Synthetic
cauaaauagugcuuggauuaa

SEQ ID NO: 195570 - RNA, 22 nt, Artificial Sequence
  Synthetic
gcauaaauagugcuuggauuaa

SEQ ID NO: 195571 - RNA, 23 nt, Artificial Sequence
  Synthetic
ggcauaaauagugcuuggauuaa

SEQ ID NO: 195572 - RNA, 24 nt, Artificial Sequence
  Synthetic
aggcauaaauagugcuuggauuaa

SEQ ID NO: 195573 - RNA, 18 nt, Artificial Sequence
  Synthetic
acaaaccaaaaugauuaa

SEQ ID NO: 195574 - RNA, 19 nt, Artificial Sequence
  Synthetic
aacaaaccaaaaugauuaa

SEQ ID NO: 195575 - RNA, 20 nt, Artificial Sequence
  Synthetic
aaacaaaccaaaaugauuaa

SEQ ID NO: 195576 - RNA, 21 nt, Artificial Sequence
  Synthetic
uaaacaaaccaaaaugauuaa

SEQ ID NO: 195577 - RNA, 22 nt, Artificial Sequence
  Synthetic
uuaaacaaaccaaaaugauuaa

SEQ ID NO: 195578 - RNA, 23 nt, Artificial Sequence
  Synthetic
uuuaaacaaaccaaaaugauuaa

SEQ ID NO: 195579 - RNA, 24 nt, Artificial Sequence
  Synthetic
guuuaaacaaaccaaaaugauuaa

SEQ ID NO: 195580 - RNA, 18 nt, Artificial Sequence
  Synthetic
aucaaaaagccugauuaa

SEQ ID NO: 195581 - RNA, 19 nt, Artificial Sequence
  Synthetic
aaucaaaaagccugauuaa

SEQ ID NO: 195582 - RNA, 20 nt, Artificial Sequence
  Synthetic
uaaucaaaaagccugauuaa

SEQ ID NO: 195583 - RNA, 21 nt, Artificial Sequence
  Synthetic
cuaaucaaaaagccugauuaa

SEQ ID NO: 195584 - RNA, 22 nt, Artificial Sequence
  Synthetic
ccuaaucaaaaagccugauuaa

SEQ ID NO: 195585 - RNA, 23 nt, Artificial Sequence
  Synthetic
accuaaucaaaaagccugauuaa

SEQ ID NO: 195586 - RNA, 24 nt, Artificial Sequence
  Synthetic
gaccuaaucaaaaagccugauuaa

SEQ ID NO: 195587 - RNA, 18 nt, Artificial Sequence
  Synthetic
cguuuuugcucugauuaa

SEQ ID NO: 195588 - RNA, 19 nt, Artificial Sequence
  Synthetic
acguuuuugcucugauuaa

SEQ ID NO: 195589 - RNA, 20 nt, Artificial Sequence
  Synthetic
aacguuuuugcucugauuaa

SEQ ID NO: 195590 - RNA, 21 nt, Artificial Sequence
  Synthetic
caacguuuuugcucugauuaa

SEQ ID NO: 195591 - RNA, 22 nt, Artificial Sequence
  Synthetic
ccaacguuuuugcucugauuaa

SEQ ID NO: 195592 - RNA, 23 nt, Artificial Sequence
  Synthetic
uccaacguuuuugcucugauuaa

SEQ ID NO: 195593 - RNA, 24 nt, Artificial Sequence
  Synthetic
cuccaacguuuuugcucugauuaa

SEQ ID NO: 195594 - RNA, 18 nt, Artificial Sequence
  Synthetic
uaacugaaguuugauuaa

SEQ ID NO: 195595 - RNA, 19 nt, Artificial Sequence
  Synthetic
auaacugaaguuugauuaa

SEQ ID NO: 195596 - RNA, 20 nt, Artificial Sequence
  Synthetic
gauaacugaaguuugauuaa

SEQ ID NO: 195597 - RNA, 21 nt, Artificial Sequence
  Synthetic
agauaacugaaguuugauuaa

SEQ ID NO: 195598 - RNA, 22 nt, Artificial Sequence
  Synthetic
cagauaacugaaguuugauuaa

SEQ ID NO: 195599 - RNA, 23 nt, Artificial Sequence
  Synthetic
acagauaacugaaguuugauuaa

SEQ ID NO: 195600 - RNA, 24 nt, Artificial Sequence
  Synthetic
uacagauaacugaaguuugauuaa

SEQ ID NO: 195601 - RNA, 18 nt, Artificial Sequence
  Synthetic
ugaccuuaaaaauauuaa

SEQ ID NO: 195602 - RNA, 19 nt, Artificial Sequence
  Synthetic
augaccuuaaaaauauuaa

SEQ ID NO: 195603 - RNA, 20 nt, Artificial Sequence
  Synthetic
gaugaccuuaaaaauauuaa

SEQ ID NO: 195604 - RNA, 21 nt, Artificial Sequence
  Synthetic
agaugaccuuaaaaauauuaa

SEQ ID NO: 195605 - RNA, 22 nt, Artificial Sequence
  Synthetic
uagaugaccuuaaaaauauuaa

SEQ ID NO: 195606 - RNA, 23 nt, Artificial Sequence
  Synthetic
cuagaugaccuuaaaaauauuaa

SEQ ID NO: 195607 - RNA, 24 nt, Artificial Sequence
  Synthetic
ucuagaugaccuuaaaaauauuaa

SEQ ID NO: 195608 - RNA, 18 nt, Artificial Sequence
  Synthetic
aaaaugaauaaauauuaa

SEQ ID NO: 195609 - RNA, 19 nt, Artificial Sequence
  Synthetic
caaaaugaauaaauauuaa

SEQ ID NO: 195610 - RNA, 20 nt, Artificial Sequence
  Synthetic
ucaaaaugaauaaauauuaa

SEQ ID NO: 195611 - RNA, 21 nt, Artificial Sequence
  Synthetic
gucaaaaugaauaaauauuaa

SEQ ID NO: 195612 - RNA, 22 nt, Artificial Sequence
  Synthetic
ugucaaaaugaauaaauauuaa

SEQ ID NO: 195613 - RNA, 23 nt, Artificial Sequence
  Synthetic
augucaaaaugaauaaauauuaa

SEQ ID NO: 195614 - RNA, 24 nt, Artificial Sequence
  Synthetic
gaugucaaaaugaauaaauauuaa

SEQ ID NO: 195615 - RNA, 18 nt, Artificial Sequence
  Synthetic
uucugcaaaacauauuaa

SEQ ID NO: 195616 - RNA, 19 nt, Artificial Sequence
  Synthetic
uuucugcaaaacauauuaa

SEQ ID NO: 195617 - RNA, 20 nt, Artificial Sequence
  Synthetic
auuucugcaaaacauauuaa

SEQ ID NO: 195618 - RNA, 21 nt, Artificial Sequence
  Synthetic
aauuucugcaaaacauauuaa

SEQ ID NO: 195619 - RNA, 22 nt, Artificial Sequence
  Synthetic
caauuucugcaaaacauauuaa

SEQ ID NO: 195620 - RNA, 23 nt, Artificial Sequence
  Synthetic
acaauuucugcaaaacauauuaa

SEQ ID NO: 195621 - RNA, 24 nt, Artificial Sequence
  Synthetic
aacaauuucugcaaaacauauuaa

SEQ ID NO: 195622 - RNA, 18 nt, Artificial Sequence
  Synthetic
ugagaacguacauauuaa

SEQ ID NO: 195623 - RNA, 19 nt, Artificial Sequence
  Synthetic
uugagaacguacauauuaa

SEQ ID NO: 195624 - RNA, 20 nt, Artificial Sequence
  Synthetic
auugagaacguacauauuaa

SEQ ID NO: 195625 - RNA, 21 nt, Artificial Sequence
  Synthetic
aauugagaacguacauauuaa

SEQ ID NO: 195626 - RNA, 22 nt, Artificial Sequence
  Synthetic
uaauugagaacguacauauuaa

SEQ ID NO: 195627 - RNA, 23 nt, Artificial Sequence
  Synthetic
guaauugagaacguacauauuaa

SEQ ID NO: 195628 - RNA, 24 nt, Artificial Sequence
  Synthetic
aguaauugagaacguacauauuaa

SEQ ID NO: 195629 - RNA, 18 nt, Artificial Sequence
  Synthetic
gcagggcagccauauuaa

SEQ ID NO: 195630 - RNA, 19 nt, Artificial Sequence
  Synthetic
ugcagggcagccauauuaa

SEQ ID NO: 195631 - RNA, 20 nt, Artificial Sequence
  Synthetic
cugcagggcagccauauuaa

SEQ ID NO: 195632 - RNA, 21 nt, Artificial Sequence
  Synthetic
acugcagggcagccauauuaa

SEQ ID NO: 195633 - RNA, 22 nt, Artificial Sequence
  Synthetic
cacugcagggcagccauauuaa

SEQ ID NO: 195634 - RNA, 23 nt, Artificial Sequence
  Synthetic
ucacugcagggcagccauauuaa

SEQ ID NO: 195635 - RNA, 24 nt, Artificial Sequence
  Synthetic
uucacugcagggcagccauauuaa

SEQ ID NO: 195636 - RNA, 18 nt, Artificial Sequence
  Synthetic
aucgugaaaugauauuaa

SEQ ID NO: 195637 - RNA, 19 nt, Artificial Sequence
  Synthetic
aaucgugaaaugauauuaa

SEQ ID NO: 195638 - RNA, 20 nt, Artificial Sequence
  Synthetic
uaaucgugaaaugauauuaa

SEQ ID NO: 195639 - RNA, 21 nt, Artificial Sequence
  Synthetic
auaaucgugaaaugauauuaa

SEQ ID NO: 195640 - RNA, 22 nt, Artificial Sequence
  Synthetic
aauaaucgugaaaugauauuaa

SEQ ID NO: 195641 - RNA, 23 nt, Artificial Sequence
  Synthetic
uaauaaucgugaaaugauauuaa

SEQ ID NO: 195642 - RNA, 24 nt, Artificial Sequence
  Synthetic
uuaauaaucgugaaaugauauuaa

SEQ ID NO: 195643 - RNA, 18 nt, Artificial Sequence
  Synthetic
gaaaacuuguuauauuaa

SEQ ID NO: 195644 - RNA, 19 nt, Artificial Sequence
  Synthetic
ugaaaacuuguuauauuaa

SEQ ID NO: 195645 - RNA, 20 nt, Artificial Sequence
  Synthetic
augaaaacuuguuauauuaa

SEQ ID NO: 195646 - RNA, 21 nt, Artificial Sequence
  Synthetic
aaugaaaacuuguuauauuaa

SEQ ID NO: 195647 - RNA, 22 nt, Artificial Sequence
  Synthetic
caaugaaaacuuguuauauuaa

SEQ ID NO: 195648 - RNA, 23 nt, Artificial Sequence
  Synthetic
ucaaugaaaacuuguuauauuaa

SEQ ID NO: 195649 - RNA, 24 nt, Artificial Sequence
  Synthetic
aucaaugaaaacuuguuauauuaa

SEQ ID NO: 195650 - RNA, 18 nt, Artificial Sequence
  Synthetic
auuugaacuuuauauuaa

SEQ ID NO: 195651 - RNA, 19 nt, Artificial Sequence
  Synthetic
gauuugaacuuuauauuaa

SEQ ID NO: 195652 - RNA, 20 nt, Artificial Sequence
  Synthetic
ggauuugaacuuuauauuaa

SEQ ID NO: 195653 - RNA, 21 nt, Artificial Sequence
  Synthetic
uggauuugaacuuuauauuaa

SEQ ID NO: 195654 - RNA, 22 nt, Artificial Sequence
  Synthetic
cuggauuugaacuuuauauuaa

SEQ ID NO: 195655 - RNA, 23 nt, Artificial Sequence
  Synthetic
ccuggauuugaacuuuauauuaa

SEQ ID NO: 195656 - RNA, 24 nt, Artificial Sequence
  Synthetic
gccuggauuugaacuuuauauuaa

SEQ ID NO: 195657 - RNA, 18 nt, Artificial Sequence
  Synthetic
gucucaaaugacuauuaa

SEQ ID NO: 195658 - RNA, 19 nt, Artificial Sequence
  Synthetic
ugucucaaaugacuauuaa

SEQ ID NO: 195659 - RNA, 20 nt, Artificial Sequence
  Synthetic
cugucucaaaugacuauuaa

SEQ ID NO: 195660 - RNA, 21 nt, Artificial Sequence
  Synthetic
gcugucucaaaugacuauuaa

SEQ ID NO: 195661 - RNA, 22 nt, Artificial Sequence
  Synthetic
agcugucucaaaugacuauuaa

SEQ ID NO: 195662 - RNA, 23 nt, Artificial Sequence
  Synthetic
uagcugucucaaaugacuauuaa

SEQ ID NO: 195663 - RNA, 24 nt, Artificial Sequence
  Synthetic
cuagcugucucaaaugacuauuaa

SEQ ID NO: 195664 - RNA, 18 nt, Artificial Sequence
  Synthetic
uaaagaacuugcuauuaa

SEQ ID NO: 195665 - RNA, 19 nt, Artificial Sequence
  Synthetic
guaaagaacuugcuauuaa

SEQ ID NO: 195666 - RNA, 20 nt, Artificial Sequence
  Synthetic
uguaaagaacuugcuauuaa

SEQ ID NO: 195667 - RNA, 21 nt, Artificial Sequence
  Synthetic
auguaaagaacuugcuauuaa

SEQ ID NO: 195668 - RNA, 22 nt, Artificial Sequence
  Synthetic
aauguaaagaacuugcuauuaa

SEQ ID NO: 195669 - RNA, 23 nt, Artificial Sequence
  Synthetic
aaauguaaagaacuugcuauuaa

SEQ ID NO: 195670 - RNA, 24 nt, Artificial Sequence
  Synthetic
aaaauguaaagaacuugcuauuaa

SEQ ID NO: 195671 - RNA, 18 nt, Artificial Sequence
  Synthetic
caacuacuacucuauuaa

SEQ ID NO: 195672 - RNA, 19 nt, Artificial Sequence
  Synthetic
gcaacuacuacucuauuaa

SEQ ID NO: 195673 - RNA, 20 nt, Artificial Sequence
  Synthetic
ugcaacuacuacucuauuaa

SEQ ID NO: 195674 - RNA, 21 nt, Artificial Sequence
  Synthetic
uugcaacuacuacucuauuaa

SEQ ID NO: 195675 - RNA, 22 nt, Artificial Sequence
  Synthetic
uuugcaacuacuacucuauuaa

SEQ ID NO: 195676 - RNA, 23 nt, Artificial Sequence
  Synthetic
guuugcaacuacuacucuauuaa

SEQ ID NO: 195677 - RNA, 24 nt, Artificial Sequence
  Synthetic
uguuugcaacuacuacucuauuaa

SEQ ID NO: 195678 - RNA, 18 nt, Artificial Sequence
  Synthetic
ggaaaaagagaguauuaa

SEQ ID NO: 195679 - RNA, 19 nt, Artificial Sequence
  Synthetic
aggaaaaagagaguauuaa

SEQ ID NO: 195680 - RNA, 20 nt, Artificial Sequence
  Synthetic
caggaaaaagagaguauuaa

SEQ ID NO: 195681 - RNA, 21 nt, Artificial Sequence
  Synthetic
acaggaaaaagagaguauuaa

SEQ ID NO: 195682 - RNA, 22 nt, Artificial Sequence
  Synthetic
cacaggaaaaagagaguauuaa

SEQ ID NO: 195683 - RNA, 23 nt, Artificial Sequence
  Synthetic
ucacaggaaaaagagaguauuaa

SEQ ID NO: 195684 - RNA, 24 nt, Artificial Sequence
  Synthetic
cucacaggaaaaagagaguauuaa

SEQ ID NO: 195685 - RNA, 18 nt, Artificial Sequence
  Synthetic
aaagugacaggguauuaa

SEQ ID NO: 195686 - RNA, 19 nt, Artificial Sequence
  Synthetic
caaagugacaggguauuaa

SEQ ID NO: 195687 - RNA, 20 nt, Artificial Sequence
  Synthetic
ccaaagugacaggguauuaa

SEQ ID NO: 195688 - RNA, 21 nt, Artificial Sequence
  Synthetic
cccaaagugacaggguauuaa

SEQ ID NO: 195689 - RNA, 22 nt, Artificial Sequence
  Synthetic
gcccaaagugacaggguauuaa

SEQ ID NO: 195690 - RNA, 23 nt, Artificial Sequence
  Synthetic
agcccaaagugacaggguauuaa

SEQ ID NO: 195691 - RNA, 24 nt, Artificial Sequence
  Synthetic
aagcccaaagugacaggguauuaa

SEQ ID NO: 195692 - RNA, 18 nt, Artificial Sequence
  Synthetic
ugacccauaguguauuaa

SEQ ID NO: 195693 - RNA, 19 nt, Artificial Sequence
  Synthetic
uugacccauaguguauuaa

SEQ ID NO: 195694 - RNA, 20 nt, Artificial Sequence
  Synthetic
uuugacccauaguguauuaa

SEQ ID NO: 195695 - RNA, 21 nt, Artificial Sequence
  Synthetic
auuugacccauaguguauuaa

SEQ ID NO: 195696 - RNA, 22 nt, Artificial Sequence
  Synthetic
aauuugacccauaguguauuaa

SEQ ID NO: 195697 - RNA, 23 nt, Artificial Sequence
  Synthetic
uaauuugacccauaguguauuaa

SEQ ID NO: 195698 - RNA, 24 nt, Artificial Sequence
  Synthetic
auaauuugacccauaguguauuaa

SEQ ID NO: 195699 - RNA, 18 nt, Artificial Sequence
  Synthetic
ccuaaaaauguguauuaa

SEQ ID NO: 195700 - RNA, 19 nt, Artificial Sequence
  Synthetic
gccuaaaaauguguauuaa

SEQ ID NO: 195701 - RNA, 20 nt, Artificial Sequence
  Synthetic
agccuaaaaauguguauuaa

SEQ ID NO: 195702 - RNA, 21 nt, Artificial Sequence
  Synthetic
aagccuaaaaauguguauuaa

SEQ ID NO: 195703 - RNA, 22 nt, Artificial Sequence
  Synthetic
caagccuaaaaauguguauuaa

SEQ ID NO: 195704 - RNA, 23 nt, Artificial Sequence
  Synthetic
ucaagccuaaaaauguguauuaa

SEQ ID NO: 195705 - RNA, 24 nt, Artificial Sequence
  Synthetic
gucaagccuaaaaauguguauuaa

SEQ ID NO: 195706 - RNA, 18 nt, Artificial Sequence
  Synthetic
uagauggaaaauuauuaa

SEQ ID NO: 195707 - RNA, 19 nt, Artificial Sequence
  Synthetic
guagauggaaaauuauuaa

SEQ ID NO: 195708 - RNA, 20 nt, Artificial Sequence
  Synthetic
aguagauggaaaauuauuaa

SEQ ID NO: 195709 - RNA, 21 nt, Artificial Sequence
  Synthetic
caguagauggaaaauuauuaa

SEQ ID NO: 195710 - RNA, 22 nt, Artificial Sequence
  Synthetic
ucaguagauggaaaauuauuaa

SEQ ID NO: 195711 - RNA, 23 nt, Artificial Sequence
  Synthetic
gucaguagauggaaaauuauuaa

SEQ ID NO: 195712 - RNA, 24 nt, Artificial Sequence
  Synthetic
agucaguagauggaaaauuauuaa

SEQ ID NO: 195713 - RNA, 18 nt, Artificial Sequence
  Synthetic
guauuuuucaauuauuaa

SEQ ID NO: 195714 - RNA, 19 nt, Artificial Sequence
  Synthetic
uguauuuuucaauuauuaa

SEQ ID NO: 195715 - RNA, 20 nt, Artificial Sequence
  Synthetic
auguauuuuucaauuauuaa

SEQ ID NO: 195716 - RNA, 21 nt, Artificial Sequence
  Synthetic
cauguauuuuucaauuauuaa

SEQ ID NO: 195717 - RNA, 22 nt, Artificial Sequence
  Synthetic
ucauguauuuuucaauuauuaa

SEQ ID NO: 195718 - RNA, 23 nt, Artificial Sequence
  Synthetic
aucauguauuuuucaauuauuaa

SEQ ID NO: 195719 - RNA, 24 nt, Artificial Sequence
  Synthetic
caucauguauuuuucaauuauuaa

SEQ ID NO: 195720 - RNA, 18 nt, Artificial Sequence
  Synthetic
agguaguagcauuauuaa

SEQ ID NO: 195721 - RNA, 19 nt, Artificial Sequence
  Synthetic
uagguaguagcauuauuaa

SEQ ID NO: 195722 - RNA, 20 nt, Artificial Sequence
  Synthetic
uuagguaguagcauuauuaa

SEQ ID NO: 195723 - RNA, 21 nt, Artificial Sequence
  Synthetic
uuuagguaguagcauuauuaa

SEQ ID NO: 195724 - RNA, 22 nt, Artificial Sequence
  Synthetic
auuuagguaguagcauuauuaa

SEQ ID NO: 195725 - RNA, 23 nt, Artificial Sequence
  Synthetic
aauuuagguaguagcauuauuaa

SEQ ID NO: 195726 - RNA, 24 nt, Artificial Sequence
  Synthetic
aaauuuagguaguagcauuauuaa

SEQ ID NO: 195727 - RNA, 18 nt, Artificial Sequence
  Synthetic
augaaucuguauuauuaa

SEQ ID NO: 195728 - RNA, 19 nt, Artificial Sequence
  Synthetic
aaugaaucuguauuauuaa

SEQ ID NO: 195729 - RNA, 20 nt, Artificial Sequence
  Synthetic
aaaugaaucuguauuauuaa

SEQ ID NO: 195730 - RNA, 21 nt, Artificial Sequence
  Synthetic
gaaaugaaucuguauuauuaa

SEQ ID NO: 195731 - RNA, 22 nt, Artificial Sequence
  Synthetic
ggaaaugaaucuguauuauuaa

SEQ ID NO: 195732 - RNA, 23 nt, Artificial Sequence
  Synthetic
uggaaaugaaucuguauuauuaa

SEQ ID NO: 195733 - RNA, 24 nt, Artificial Sequence
  Synthetic
auggaaaugaaucuguauuauuaa

SEQ ID NO: 195734 - RNA, 18 nt, Artificial Sequence
  Synthetic
uuugcaaucucuuauuaa

SEQ ID NO: 195735 - RNA, 19 nt, Artificial Sequence
  Synthetic
uuuugcaaucucuuauuaa

SEQ ID NO: 195736 - RNA, 20 nt, Artificial Sequence
  Synthetic
auuuugcaaucucuuauuaa

SEQ ID NO: 195737 - RNA, 21 nt, Artificial Sequence
  Synthetic
aauuuugcaaucucuuauuaa

SEQ ID NO: 195738 - RNA, 22 nt, Artificial Sequence
  Synthetic
aaauuuugcaaucucuuauuaa

SEQ ID NO: 195739 - RNA, 23 nt, Artificial Sequence
  Synthetic
caaauuuugcaaucucuuauuaa

SEQ ID NO: 195740 - RNA, 24 nt, Artificial Sequence
  Synthetic
acaaauuuugcaaucucuuauuaa

SEQ ID NO: 195741 - RNA, 18 nt, Artificial Sequence
  Synthetic
auuuuuaaaaguuauuaa

SEQ ID NO: 195742 - RNA, 19 nt, Artificial Sequence
  Synthetic
uauuuuuaaaaguuauuaa

SEQ ID NO: 195743 - RNA, 20 nt, Artificial Sequence
  Synthetic
auauuuuuaaaaguuauuaa

SEQ ID NO: 195744 - RNA, 21 nt, Artificial Sequence
  Synthetic
uauauuuuuaaaaguuauuaa

SEQ ID NO: 195745 - RNA, 22 nt, Artificial Sequence
  Synthetic
uuauauuuuuaaaaguuauuaa

SEQ ID NO: 195746 - RNA, 23 nt, Artificial Sequence
  Synthetic
uuuauauuuuuaaaaguuauuaa

SEQ ID NO: 195747 - RNA, 24 nt, Artificial Sequence
  Synthetic
auuuauauuuuuaaaaguuauuaa

SEQ ID NO: 195748 - RNA, 18 nt, Artificial Sequence
  Synthetic
uuaauguaaaguuauuaa

SEQ ID NO: 195749 - RNA, 19 nt, Artificial Sequence
  Synthetic
uuuaauguaaaguuauuaa

SEQ ID NO: 195750 - RNA, 20 nt, Artificial Sequence
  Synthetic
guuuaauguaaaguuauuaa

SEQ ID NO: 195751 - RNA, 21 nt, Artificial Sequence
  Synthetic
uguuuaauguaaaguuauuaa

SEQ ID NO: 195752 - RNA, 22 nt, Artificial Sequence
  Synthetic
auguuuaauguaaaguuauuaa

SEQ ID NO: 195753 - RNA, 23 nt, Artificial Sequence
  Synthetic
gauguuuaauguaaaguuauuaa

SEQ ID NO: 195754 - RNA, 24 nt, Artificial Sequence
  Synthetic
ugauguuuaauguaaaguuauuaa

SEQ ID NO: 195755 - RNA, 18 nt, Artificial Sequence
  Synthetic
auuuguuguauuuauuaa

SEQ ID NO: 195756 - RNA, 19 nt, Artificial Sequence
  Synthetic
aauuuguuguauuuauuaa

SEQ ID NO: 195757 - RNA, 20 nt, Artificial Sequence
  Synthetic
aaauuuguuguauuuauuaa

SEQ ID NO: 195758 - RNA, 21 nt, Artificial Sequence
  Synthetic
aaaauuuguuguauuuauuaa

SEQ ID NO: 195759 - RNA, 22 nt, Artificial Sequence
  Synthetic
gaaaauuuguuguauuuauuaa

SEQ ID NO: 195760 - RNA, 23 nt, Artificial Sequence
  Synthetic
agaaaauuuguuguauuuauuaa

SEQ ID NO: 195761 - RNA, 24 nt, Artificial Sequence
  Synthetic
aagaaaauuuguuguauuuauuaa

SEQ ID NO: 195762 - RNA, 18 nt, Artificial Sequence
  Synthetic
gcugaauauuuuuauuaa

SEQ ID NO: 195763 - RNA, 19 nt, Artificial Sequence
  Synthetic
agcugaauauuuuuauuaa

SEQ ID NO: 195764 - RNA, 20 nt, Artificial Sequence
  Synthetic
cagcugaauauuuuuauuaa

SEQ ID NO: 195765 - RNA, 21 nt, Artificial Sequence
  Synthetic
ccagcugaauauuuuuauuaa

SEQ ID NO: 195766 - RNA, 22 nt, Artificial Sequence
  Synthetic
accagcugaauauuuuuauuaa

SEQ ID NO: 195767 - RNA, 23 nt, Artificial Sequence
  Synthetic
aaccagcugaauauuuuuauuaa

SEQ ID NO: 195768 - RNA, 24 nt, Artificial Sequence
  Synthetic
aaaccagcugaauauuuuuauuaa

SEQ ID NO: 195769 - RNA, 18 nt, Artificial Sequence
  Synthetic
auacagggcaaaacuuaa

SEQ ID NO: 195770 - RNA, 19 nt, Artificial Sequence
  Synthetic
gauacagggcaaaacuuaa

SEQ ID NO: 195771 - RNA, 20 nt, Artificial Sequence
  Synthetic
agauacagggcaaaacuuaa

SEQ ID NO: 195772 - RNA, 21 nt, Artificial Sequence
  Synthetic
aagauacagggcaaaacuuaa

SEQ ID NO: 195773 - RNA, 22 nt, Artificial Sequence
  Synthetic
aaagauacagggcaaaacuuaa

SEQ ID NO: 195774 - RNA, 23 nt, Artificial Sequence
  Synthetic
aaaagauacagggcaaaacuuaa

SEQ ID NO: 195775 - RNA, 24 nt, Artificial Sequence
  Synthetic
caaaagauacagggcaaaacuuaa

SEQ ID NO: 195776 - RNA, 18 nt, Artificial Sequence
  Synthetic
aggauuuucaaaacuuaa

SEQ ID NO: 195777 - RNA, 19 nt, Artificial Sequence
  Synthetic
uaggauuuucaaaacuuaa

SEQ ID NO: 195778 - RNA, 20 nt, Artificial Sequence
  Synthetic
uuaggauuuucaaaacuuaa

SEQ ID NO: 195779 - RNA, 21 nt, Artificial Sequence
  Synthetic
cuuaggauuuucaaaacuuaa

SEQ ID NO: 195780 - RNA, 22 nt, Artificial Sequence
  Synthetic
gcuuaggauuuucaaaacuuaa

SEQ ID NO: 195781 - RNA, 23 nt, Artificial Sequence
  Synthetic
agcuuaggauuuucaaaacuuaa

SEQ ID NO: 195782 - RNA, 24 nt, Artificial Sequence
  Synthetic
uagcuuaggauuuucaaaacuuaa

SEQ ID NO: 195783 - RNA, 18 nt, Artificial Sequence
  Synthetic
aauuguugagaaacuuaa

SEQ ID NO: 195784 - RNA, 19 nt, Artificial Sequence
  Synthetic
aaauuguugagaaacuuaa

SEQ ID NO: 195785 - RNA, 20 nt, Artificial Sequence
  Synthetic
gaaauuguugagaaacuuaa

SEQ ID NO: 195786 - RNA, 21 nt, Artificial Sequence
  Synthetic
agaaauuguugagaaacuuaa

SEQ ID NO: 195787 - RNA, 22 nt, Artificial Sequence
  Synthetic
gagaaauuguugagaaacuuaa

SEQ ID NO: 195788 - RNA, 23 nt, Artificial Sequence
  Synthetic
agagaaauuguugagaaacuuaa

SEQ ID NO: 195789 - RNA, 24 nt, Artificial Sequence
  Synthetic
cagagaaauuguugagaaacuuaa

SEQ ID NO: 195790 - RNA, 18 nt, Artificial Sequence
  Synthetic
auagcauaauaaacuuaa

SEQ ID NO: 195791 - RNA, 19 nt, Artificial Sequence
  Synthetic
aauagcauaauaaacuuaa

SEQ ID NO: 195792 - RNA, 20 nt, Artificial Sequence
  Synthetic
aaauagcauaauaaacuuaa

SEQ ID NO: 195793 - RNA, 21 nt, Artificial Sequence
  Synthetic
aaaauagcauaauaaacuuaa

SEQ ID NO: 195794 - RNA, 22 nt, Artificial Sequence
  Synthetic
gaaaauagcauaauaaacuuaa

SEQ ID NO: 195795 - RNA, 23 nt, Artificial Sequence
  Synthetic
ugaaaauagcauaauaaacuuaa

SEQ ID NO: 195796 - RNA, 24 nt, Artificial Sequence
  Synthetic
uugaaaauagcauaauaaacuuaa

SEQ ID NO: 195797 - RNA, 18 nt, Artificial Sequence
  Synthetic
agaccuauauaaacuuaa

SEQ ID NO: 195798 - RNA, 19 nt, Artificial Sequence
  Synthetic
gagaccuauauaaacuuaa

SEQ ID NO: 195799 - RNA, 20 nt, Artificial Sequence
  Synthetic
ugagaccuauauaaacuuaa

SEQ ID NO: 195800 - RNA, 21 nt, Artificial Sequence
  Synthetic
augagaccuauauaaacuuaa

SEQ ID NO: 195801 - RNA, 22 nt, Artificial Sequence
  Synthetic
aaugagaccuauauaaacuuaa

SEQ ID NO: 195802 - RNA, 23 nt, Artificial Sequence
  Synthetic
gaaugagaccuauauaaacuuaa

SEQ ID NO: 195803 - RNA, 24 nt, Artificial Sequence
  Synthetic
agaaugagaccuauauaaacuuaa

SEQ ID NO: 195804 - RNA, 18 nt, Artificial Sequence
  Synthetic
auuucucaaagaacuuaa

SEQ ID NO: 195805 - RNA, 19 nt, Artificial Sequence
  Synthetic
aauuucucaaagaacuuaa

SEQ ID NO: 195806 - RNA, 20 nt, Artificial Sequence
  Synthetic
aaauuucucaaagaacuuaa

SEQ ID NO: 195807 - RNA, 21 nt, Artificial Sequence
  Synthetic
aaaauuucucaaagaacuuaa

SEQ ID NO: 195808 - RNA, 22 nt, Artificial Sequence
  Synthetic
gaaaauuucucaaagaacuuaa

SEQ ID NO: 195809 - RNA, 23 nt, Artificial Sequence
  Synthetic
ugaaaauuucucaaagaacuuaa

SEQ ID NO: 195810 - RNA, 24 nt, Artificial Sequence
  Synthetic
uugaaaauuucucaaagaacuuaa

SEQ ID NO: 195811 - RNA, 18 nt, Artificial Sequence
  Synthetic
gggagaagcugaacuuaa

SEQ ID NO: 195812 - RNA, 19 nt, Artificial Sequence
  Synthetic
ugggagaagcugaacuuaa

SEQ ID NO: 195813 - RNA, 20 nt, Artificial Sequence
  Synthetic
uugggagaagcugaacuuaa

SEQ ID NO: 195814 - RNA, 21 nt, Artificial Sequence
  Synthetic
auugggagaagcugaacuuaa

SEQ ID NO: 195815 - RNA, 22 nt, Artificial Sequence
  Synthetic
cauugggagaagcugaacuuaa

SEQ ID NO: 195816 - RNA, 23 nt, Artificial Sequence
  Synthetic
acauugggagaagcugaacuuaa

SEQ ID NO: 195817 - RNA, 24 nt, Artificial Sequence
  Synthetic
cacauugggagaagcugaacuuaa

SEQ ID NO: 195818 - RNA, 18 nt, Artificial Sequence
  Synthetic
gaguuauagauaacuuaa

SEQ ID NO: 195819 - RNA, 19 nt, Artificial Sequence
  Synthetic
ugaguuauagauaacuuaa

SEQ ID NO: 195820 - RNA, 20 nt, Artificial Sequence
  Synthetic
augaguuauagauaacuuaa

SEQ ID NO: 195821 - RNA, 21 nt, Artificial Sequence
  Synthetic
caugaguuauagauaacuuaa

SEQ ID NO: 195822 - RNA, 22 nt, Artificial Sequence
  Synthetic
ucaugaguuauagauaacuuaa

SEQ ID NO: 195823 - RNA, 23 nt, Artificial Sequence
  Synthetic
cucaugaguuauagauaacuuaa

SEQ ID NO: 195824 - RNA, 24 nt, Artificial Sequence
  Synthetic
ucucaugaguuauagauaacuuaa

SEQ ID NO: 195825 - RNA, 18 nt, Artificial Sequence
  Synthetic
ucucaagcaggcacuuaa

SEQ ID NO: 195826 - RNA, 19 nt, Artificial Sequence
  Synthetic
uucucaagcaggcacuuaa

SEQ ID NO: 195827 - RNA, 20 nt, Artificial Sequence
  Synthetic
uuucucaagcaggcacuuaa

SEQ ID NO: 195828 - RNA, 21 nt, Artificial Sequence
  Synthetic
cuuucucaagcaggcacuuaa

SEQ ID NO: 195829 - RNA, 22 nt, Artificial Sequence
  Synthetic
gcuuucucaagcaggcacuuaa

SEQ ID NO: 195830 - RNA, 23 nt, Artificial Sequence
  Synthetic
agcuuucucaagcaggcacuuaa

SEQ ID NO: 195831 - RNA, 24 nt, Artificial Sequence
  Synthetic
gagcuuucucaagcaggcacuuaa

SEQ ID NO: 195832 - RNA, 18 nt, Artificial Sequence
  Synthetic
uccacuuaaaagacuuaa

SEQ ID NO: 195833 - RNA, 19 nt, Artificial Sequence
  Synthetic
auccacuuaaaagacuuaa

SEQ ID NO: 195834 - RNA, 20 nt, Artificial Sequence
  Synthetic
gauccacuuaaaagacuuaa

SEQ ID NO: 195835 - RNA, 21 nt, Artificial Sequence
  Synthetic
ugauccacuuaaaagacuuaa

SEQ ID NO: 195836 - RNA, 22 nt, Artificial Sequence
  Synthetic
augauccacuuaaaagacuuaa

SEQ ID NO: 195837 - RNA, 23 nt, Artificial Sequence
  Synthetic
aaugauccacuuaaaagacuuaa

SEQ ID NO: 195838 - RNA, 24 nt, Artificial Sequence
  Synthetic
aaaugauccacuuaaaagacuuaa

SEQ ID NO: 195839 - RNA, 18 nt, Artificial Sequence
  Synthetic
uuuaaaauauugacuuaa

SEQ ID NO: 195840 - RNA, 19 nt, Artificial Sequence
  Synthetic
uuuuaaaauauugacuuaa

SEQ ID NO: 195841 - RNA, 20 nt, Artificial Sequence
  Synthetic
cuuuuaaaauauugacuuaa

SEQ ID NO: 195842 - RNA, 21 nt, Artificial Sequence
  Synthetic
ucuuuuaaaauauugacuuaa

SEQ ID NO: 195843 - RNA, 22 nt, Artificial Sequence
  Synthetic
gucuuuuaaaauauugacuuaa

SEQ ID NO: 195844 - RNA, 23 nt, Artificial Sequence
  Synthetic
agucuuuuaaaauauugacuuaa

SEQ ID NO: 195845 - RNA, 24 nt, Artificial Sequence
  Synthetic
cagucuuuuaaaauauugacuuaa

SEQ ID NO: 195846 - RNA, 18 nt, Artificial Sequence
  Synthetic
auuuagcuguugacuuaa

SEQ ID NO: 195847 - RNA, 19 nt, Artificial Sequence
  Synthetic
uauuuagcuguugacuuaa

SEQ ID NO: 195848 - RNA, 20 nt, Artificial Sequence
  Synthetic
auauuuagcuguugacuuaa

SEQ ID NO: 195849 - RNA, 21 nt, Artificial Sequence
  Synthetic
aauauuuagcuguugacuuaa

SEQ ID NO: 195850 - RNA, 22 nt, Artificial Sequence
  Synthetic
aaauauuuagcuguugacuuaa

SEQ ID NO: 195851 - RNA, 23 nt, Artificial Sequence
  Synthetic
gaaauauuuagcuguugacuuaa

SEQ ID NO: 195852 - RNA, 24 nt, Artificial Sequence
  Synthetic
ugaaauauuuagcuguugacuuaa

SEQ ID NO: 195853 - RNA, 18 nt, Artificial Sequence
  Synthetic
uucaguaauaauacuuaa

SEQ ID NO: 195854 - RNA, 19 nt, Artificial Sequence
  Synthetic
auucaguaauaauacuuaa

SEQ ID NO: 195855 - RNA, 20 nt, Artificial Sequence
  Synthetic
uauucaguaauaauacuuaa

SEQ ID NO: 195856 - RNA, 21 nt, Artificial Sequence
  Synthetic
uuauucaguaauaauacuuaa

SEQ ID NO: 195857 - RNA, 22 nt, Artificial Sequence
  Synthetic
auuauucaguaauaauacuuaa

SEQ ID NO: 195858 - RNA, 23 nt, Artificial Sequence
  Synthetic
aauuauucaguaauaauacuuaa

SEQ ID NO: 195859 - RNA, 24 nt, Artificial Sequence
  Synthetic
uaauuauucaguaauaauacuuaa

SEQ ID NO: 195860 - RNA, 18 nt, Artificial Sequence
  Synthetic
cuaauucauccuacuuaa

SEQ ID NO: 195861 - RNA, 19 nt, Artificial Sequence
  Synthetic
gcuaauucauccuacuuaa

SEQ ID NO: 195862 - RNA, 20 nt, Artificial Sequence
  Synthetic
agcuaauucauccuacuuaa

SEQ ID NO: 195863 - RNA, 21 nt, Artificial Sequence
  Synthetic
gagcuaauucauccuacuuaa

SEQ ID NO: 195864 - RNA, 22 nt, Artificial Sequence
  Synthetic
agagcuaauucauccuacuuaa

SEQ ID NO: 195865 - RNA, 23 nt, Artificial Sequence
  Synthetic
uagagcuaauucauccuacuuaa

SEQ ID NO: 195866 - RNA, 24 nt, Artificial Sequence
  Synthetic
cuagagcuaauucauccuacuuaa

SEQ ID NO: 195867 - RNA, 18 nt, Artificial Sequence
  Synthetic
uaucaaagaucuacuuaa

SEQ ID NO: 195868 - RNA, 19 nt, Artificial Sequence
  Synthetic
uuaucaaagaucuacuuaa

SEQ ID NO: 195869 - RNA, 20 nt, Artificial Sequence
  Synthetic
guuaucaaagaucuacuuaa

SEQ ID NO: 195870 - RNA, 21 nt, Artificial Sequence
  Synthetic
cguuaucaaagaucuacuuaa

SEQ ID NO: 195871 - RNA, 22 nt, Artificial Sequence
  Synthetic
ccguuaucaaagaucuacuuaa

SEQ ID NO: 195872 - RNA, 23 nt, Artificial Sequence
  Synthetic
uccguuaucaaagaucuacuuaa

SEQ ID NO: 195873 - RNA, 24 nt, Artificial Sequence
  Synthetic
uuccguuaucaaagaucuacuuaa

SEQ ID NO: 195874 - RNA, 18 nt, Artificial Sequence
  Synthetic
ugcuucguagguacuuaa

SEQ ID NO: 195875 - RNA, 19 nt, Artificial Sequence
  Synthetic
uugcuucguagguacuuaa

SEQ ID NO: 195876 - RNA, 20 nt, Artificial Sequence
  Synthetic
guugcuucguagguacuuaa

SEQ ID NO: 195877 - RNA, 21 nt, Artificial Sequence
  Synthetic
gguugcuucguagguacuuaa

SEQ ID NO: 195878 - RNA, 22 nt, Artificial Sequence
  Synthetic
ugguugcuucguagguacuuaa

SEQ ID NO: 195879 - RNA, 23 nt, Artificial Sequence
  Synthetic
uugguugcuucguagguacuuaa

SEQ ID NO: 195880 - RNA, 24 nt, Artificial Sequence
  Synthetic
auugguugcuucguagguacuuaa

SEQ ID NO: 195881 - RNA, 18 nt, Artificial Sequence
  Synthetic
uaccuguuugguacuuaa

SEQ ID NO: 195882 - RNA, 19 nt, Artificial Sequence
  Synthetic
auaccuguuugguacuuaa

SEQ ID NO: 195883 - RNA, 20 nt, Artificial Sequence
  Synthetic
uauaccuguuugguacuuaa

SEQ ID NO: 195884 - RNA, 21 nt, Artificial Sequence
  Synthetic
auauaccuguuugguacuuaa

SEQ ID NO: 195885 - RNA, 22 nt, Artificial Sequence
  Synthetic
cauauaccuguuugguacuuaa

SEQ ID NO: 195886 - RNA, 23 nt, Artificial Sequence
  Synthetic
ucauauaccuguuugguacuuaa

SEQ ID NO: 195887 - RNA, 24 nt, Artificial Sequence
  Synthetic
uucauauaccuguuugguacuuaa

SEQ ID NO: 195888 - RNA, 18 nt, Artificial Sequence
  Synthetic
auucguaaauguacuuaa

SEQ ID NO: 195889 - RNA, 19 nt, Artificial Sequence
  Synthetic
cauucguaaauguacuuaa

SEQ ID NO: 195890 - RNA, 20 nt, Artificial Sequence
  Synthetic
gcauucguaaauguacuuaa

SEQ ID NO: 195891 - RNA, 21 nt, Artificial Sequence
  Synthetic
ggcauucguaaauguacuuaa

SEQ ID NO: 195892 - RNA, 22 nt, Artificial Sequence
  Synthetic
aggcauucguaaauguacuuaa

SEQ ID NO: 195893 - RNA, 23 nt, Artificial Sequence
  Synthetic
gaggcauucguaaauguacuuaa

SEQ ID NO: 195894 - RNA, 24 nt, Artificial Sequence
  Synthetic
ggaggcauucguaaauguacuuaa

SEQ ID NO: 195895 - RNA, 18 nt, Artificial Sequence
  Synthetic
ucauuugcauguacuuaa

SEQ ID NO: 195896 - RNA, 19 nt, Artificial Sequence
  Synthetic
aucauuugcauguacuuaa

SEQ ID NO: 195897 - RNA, 20 nt, Artificial Sequence
  Synthetic
caucauuugcauguacuuaa

SEQ ID NO: 195898 - RNA, 21 nt, Artificial Sequence
  Synthetic
ucaucauuugcauguacuuaa

SEQ ID NO: 195899 - RNA, 22 nt, Artificial Sequence
  Synthetic
uucaucauuugcauguacuuaa

SEQ ID NO: 195900 - RNA, 23 nt, Artificial Sequence
  Synthetic
auucaucauuugcauguacuuaa

SEQ ID NO: 195901 - RNA, 24 nt, Artificial Sequence
  Synthetic
uauucaucauuugcauguacuuaa

SEQ ID NO: 195902 - RNA, 18 nt, Artificial Sequence
  Synthetic
ucccaaauauuuacuuaa

SEQ ID NO: 195903 - RNA, 19 nt, Artificial Sequence
  Synthetic
aucccaaauauuuacuuaa

SEQ ID NO: 195904 - RNA, 20 nt, Artificial Sequence
  Synthetic
uaucccaaauauuuacuuaa

SEQ ID NO: 195905 - RNA, 21 nt, Artificial Sequence
  Synthetic
uuaucccaaauauuuacuuaa

SEQ ID NO: 195906 - RNA, 22 nt, Artificial Sequence
  Synthetic
cuuaucccaaauauuuacuuaa

SEQ ID NO: 195907 - RNA, 23 nt, Artificial Sequence
  Synthetic
ucuuaucccaaauauuuacuuaa

SEQ ID NO: 195908 - RNA, 24 nt, Artificial Sequence
  Synthetic
uucuuaucccaaauauuuacuuaa

SEQ ID NO: 195909 - RNA, 18 nt, Artificial Sequence
  Synthetic
aggaaaaaaaaaccuuaa

SEQ ID NO: 195910 - RNA, 19 nt, Artificial Sequence
  Synthetic
gaggaaaaaaaaaccuuaa

SEQ ID NO: 195911 - RNA, 20 nt, Artificial Sequence
  Synthetic
ggaggaaaaaaaaaccuuaa

SEQ ID NO: 195912 - RNA, 21 nt, Artificial Sequence
  Synthetic
uggaggaaaaaaaaaccuuaa

SEQ ID NO: 195913 - RNA, 22 nt, Artificial Sequence
  Synthetic
auggaggaaaaaaaaaccuuaa

SEQ ID NO: 195914 - RNA, 23 nt, Artificial Sequence
  Synthetic
cauggaggaaaaaaaaaccuuaa

SEQ ID NO: 195915 - RNA, 24 nt, Artificial Sequence
  Synthetic
gcauggaggaaaaaaaaaccuuaa

SEQ ID NO: 195916 - RNA, 18 nt, Artificial Sequence
  Synthetic
auguugaaggaaccuuaa

SEQ ID NO: 195917 - RNA, 19 nt, Artificial Sequence
  Synthetic
cauguugaaggaaccuuaa

SEQ ID NO: 195918 - RNA, 20 nt, Artificial Sequence
  Synthetic
gcauguugaaggaaccuuaa

SEQ ID NO: 195919 - RNA, 21 nt, Artificial Sequence
  Synthetic
ggcauguugaaggaaccuuaa

SEQ ID NO: 195920 - RNA, 22 nt, Artificial Sequence
  Synthetic
uggcauguugaaggaaccuuaa

SEQ ID NO: 195921 - RNA, 23 nt, Artificial Sequence
  Synthetic
uuggcauguugaaggaaccuuaa

SEQ ID NO: 195922 - RNA, 24 nt, Artificial Sequence
  Synthetic
cuuggcauguugaaggaaccuuaa

SEQ ID NO: 195923 - RNA, 18 nt, Artificial Sequence
  Synthetic
aaauagucucacccuuaa

SEQ ID NO: 195924 - RNA, 19 nt, Artificial Sequence
  Synthetic
uaaauagucucacccuuaa

SEQ ID NO: 195925 - RNA, 20 nt, Artificial Sequence
  Synthetic
auaaauagucucacccuuaa

SEQ ID NO: 195926 - RNA, 21 nt, Artificial Sequence
  Synthetic
uauaaauagucucacccuuaa

SEQ ID NO: 195927 - RNA, 22 nt, Artificial Sequence
  Synthetic
auauaaauagucucacccuuaa

SEQ ID NO: 195928 - RNA, 23 nt, Artificial Sequence
  Synthetic
cauauaaauagucucacccuuaa

SEQ ID NO: 195929 - RNA, 24 nt, Artificial Sequence
  Synthetic
gcauauaaauagucucacccuuaa

SEQ ID NO: 195930 - RNA, 18 nt, Artificial Sequence
  Synthetic
uaaauagaauacccuuaa

SEQ ID NO: 195931 - RNA, 19 nt, Artificial Sequence
  Synthetic
auaaauagaauacccuuaa

SEQ ID NO: 195932 - RNA, 20 nt, Artificial Sequence
  Synthetic
aauaaauagaauacccuuaa

SEQ ID NO: 195933 - RNA, 21 nt, Artificial Sequence
  Synthetic
aaauaaauagaauacccuuaa

SEQ ID NO: 195934 - RNA, 22 nt, Artificial Sequence
  Synthetic
caaauaaauagaauacccuuaa

SEQ ID NO: 195935 - RNA, 23 nt, Artificial Sequence
  Synthetic
gcaaauaaauagaauacccuuaa

SEQ ID NO: 195936 - RNA, 24 nt, Artificial Sequence
  Synthetic
agcaaauaaauagaauacccuuaa

SEQ ID NO: 195937 - RNA, 18 nt, Artificial Sequence
  Synthetic
uuguuuugaaucccuuaa

SEQ ID NO: 195938 - RNA, 19 nt, Artificial Sequence
  Synthetic
guuguuuugaaucccuuaa

SEQ ID NO: 195939 - RNA, 20 nt, Artificial Sequence
  Synthetic
gguuguuuugaaucccuuaa

SEQ ID NO: 195940 - RNA, 21 nt, Artificial Sequence
  Synthetic
ggguuguuuugaaucccuuaa

SEQ ID NO: 195941 - RNA, 22 nt, Artificial Sequence
  Synthetic
gggguuguuuugaaucccuuaa

SEQ ID NO: 195942 - RNA, 23 nt, Artificial Sequence
  Synthetic
agggguuguuuugaaucccuuaa

SEQ ID NO: 195943 - RNA, 24 nt, Artificial Sequence
  Synthetic
aagggguuguuuugaaucccuuaa

SEQ ID NO: 195944 - RNA, 18 nt, Artificial Sequence
  Synthetic
guuaaaucagagccuuaa

SEQ ID NO: 195945 - RNA, 19 nt, Artificial Sequence
  Synthetic
aguuaaaucagagccuuaa

SEQ ID NO: 195946 - RNA, 20 nt, Artificial Sequence
  Synthetic
caguuaaaucagagccuuaa

SEQ ID NO: 195947 - RNA, 21 nt, Artificial Sequence
  Synthetic
ccaguuaaaucagagccuuaa

SEQ ID NO: 195948 - RNA, 22 nt, Artificial Sequence
  Synthetic
accaguuaaaucagagccuuaa

SEQ ID NO: 195949 - RNA, 23 nt, Artificial Sequence
  Synthetic
aaccaguuaaaucagagccuuaa

SEQ ID NO: 195950 - RNA, 24 nt, Artificial Sequence
  Synthetic
aaaccaguuaaaucagagccuuaa

SEQ ID NO: 195951 - RNA, 18 nt, Artificial Sequence
  Synthetic
aauauuauuuggccuuaa

SEQ ID NO: 195952 - RNA, 19 nt, Artificial Sequence
  Synthetic
gaauauuauuuggccuuaa

SEQ ID NO: 195953 - RNA, 20 nt, Artificial Sequence
  Synthetic
ggaauauuauuuggccuuaa

SEQ ID NO: 195954 - RNA, 21 nt, Artificial Sequence
  Synthetic
gggaauauuauuuggccuuaa

SEQ ID NO: 195955 - RNA, 22 nt, Artificial Sequence
  Synthetic
agggaauauuauuuggccuuaa

SEQ ID NO: 195956 - RNA, 23 nt, Artificial Sequence
  Synthetic
cagggaauauuauuuggccuuaa

SEQ ID NO: 195957 - RNA, 24 nt, Artificial Sequence
  Synthetic
acagggaauauuauuuggccuuaa

SEQ ID NO: 195958 - RNA, 18 nt, Artificial Sequence
  Synthetic
gaaaggaugcuuccuuaa

SEQ ID NO: 195959 - RNA, 19 nt, Artificial Sequence
  Synthetic
ugaaaggaugcuuccuuaa

SEQ ID NO: 195960 - RNA, 20 nt, Artificial Sequence
  Synthetic
augaaaggaugcuuccuuaa

SEQ ID NO: 195961 - RNA, 21 nt, Artificial Sequence
  Synthetic
uaugaaaggaugcuuccuuaa

SEQ ID NO: 195962 - RNA, 22 nt, Artificial Sequence
  Synthetic
uuaugaaaggaugcuuccuuaa

SEQ ID NO: 195963 - RNA, 23 nt, Artificial Sequence
  Synthetic
auuaugaaaggaugcuuccuuaa

SEQ ID NO: 195964 - RNA, 24 nt, Artificial Sequence
  Synthetic
cauuaugaaaggaugcuuccuuaa

SEQ ID NO: 195965 - RNA, 18 nt, Artificial Sequence
  Synthetic
uagguuucaguuccuuaa

SEQ ID NO: 195966 - RNA, 19 nt, Artificial Sequence
  Synthetic
cuagguuucaguuccuuaa

SEQ ID NO: 195967 - RNA, 20 nt, Artificial Sequence
  Synthetic
gcuagguuucaguuccuuaa

SEQ ID NO: 195968 - RNA, 21 nt, Artificial Sequence
  Synthetic
agcuagguuucaguuccuuaa

SEQ ID NO: 195969 - RNA, 22 nt, Artificial Sequence
  Synthetic
cagcuagguuucaguuccuuaa

SEQ ID NO: 195970 - RNA, 23 nt, Artificial Sequence
  Synthetic
ccagcuagguuucaguuccuuaa

SEQ ID NO: 195971 - RNA, 24 nt, Artificial Sequence
  Synthetic
accagcuagguuucaguuccuuaa

SEQ ID NO: 195972 - RNA, 18 nt, Artificial Sequence
  Synthetic
gcaagaaacuuuccuuaa

SEQ ID NO: 195973 - RNA, 19 nt, Artificial Sequence
  Synthetic
ugcaagaaacuuuccuuaa

SEQ ID NO: 195974 - RNA, 20 nt, Artificial Sequence
  Synthetic
gugcaagaaacuuuccuuaa

SEQ ID NO: 195975 - RNA, 21 nt, Artificial Sequence
  Synthetic
ggugcaagaaacuuuccuuaa

SEQ ID NO: 195976 - RNA, 22 nt, Artificial Sequence
  Synthetic
uggugcaagaaacuuuccuuaa

SEQ ID NO: 195977 - RNA, 23 nt, Artificial Sequence
  Synthetic
cuggugcaagaaacuuuccuuaa

SEQ ID NO: 195978 - RNA, 24 nt, Artificial Sequence
  Synthetic
ccuggugcaagaaacuuuccuuaa

SEQ ID NO: 195979 - RNA, 18 nt, Artificial Sequence
  Synthetic
caaaaagaaaaagcuuaa

SEQ ID NO: 195980 - RNA, 19 nt, Artificial Sequence
  Synthetic
gcaaaaagaaaaagcuuaa

SEQ ID NO: 195981 - RNA, 20 nt, Artificial Sequence
  Synthetic
ggcaaaaagaaaaagcuuaa

SEQ ID NO: 195982 - RNA, 21 nt, Artificial Sequence
  Synthetic
gggcaaaaagaaaaagcuuaa

SEQ ID NO: 195983 - RNA, 22 nt, Artificial Sequence
  Synthetic
ugggcaaaaagaaaaagcuuaa

SEQ ID NO: 195984 - RNA, 23 nt, Artificial Sequence
  Synthetic
augggcaaaaagaaaaagcuuaa

SEQ ID NO: 195985 - RNA, 24 nt, Artificial Sequence
  Synthetic
uaugggcaaaaagaaaaagcuuaa

SEQ ID NO: 195986 - RNA, 18 nt, Artificial Sequence
  Synthetic
uaggcaaauaaagcuuaa

SEQ ID NO: 195987 - RNA, 19 nt, Artificial Sequence
  Synthetic
cuaggcaaauaaagcuuaa

SEQ ID NO: 195988 - RNA, 20 nt, Artificial Sequence
  Synthetic
acuaggcaaauaaagcuuaa

SEQ ID NO: 195989 - RNA, 21 nt, Artificial Sequence
  Synthetic
aacuaggcaaauaaagcuuaa

SEQ ID NO: 195990 - RNA, 22 nt, Artificial Sequence
  Synthetic
aaacuaggcaaauaaagcuuaa

SEQ ID NO: 195991 - RNA, 23 nt, Artificial Sequence
  Synthetic
uaaacuaggcaaauaaagcuuaa

SEQ ID NO: 195992 - RNA, 24 nt, Artificial Sequence
  Synthetic
cuaaacuaggcaaauaaagcuuaa

SEQ ID NO: 195993 - RNA, 18 nt, Artificial Sequence
  Synthetic
uuccuaccugaagcuuaa

SEQ ID NO: 195994 - RNA, 19 nt, Artificial Sequence
  Synthetic
auuccuaccugaagcuuaa

SEQ ID NO: 195995 - RNA, 20 nt, Artificial Sequence
  Synthetic
gauuccuaccugaagcuuaa

SEQ ID NO: 195996 - RNA, 21 nt, Artificial Sequence
  Synthetic
ggauuccuaccugaagcuuaa

SEQ ID NO: 195997 - RNA, 22 nt, Artificial Sequence
  Synthetic
aggauuccuaccugaagcuuaa

SEQ ID NO: 195998 - RNA, 23 nt, Artificial Sequence
  Synthetic
caggauuccuaccugaagcuuaa

SEQ ID NO: 195999 - RNA, 24 nt, Artificial Sequence
  Synthetic
gcaggauuccuaccugaagcuuaa

SEQ ID NO: 196000 - RNA, 18 nt, Artificial Sequence
  Synthetic
augaauuuuacagcuuaa

SEQ ID NO: 196001 - RNA, 19 nt, Artificial Sequence
  Synthetic
aaugaauuuuacagcuuaa

SEQ ID NO: 196002 - RNA, 20 nt, Artificial Sequence
  Synthetic
aaaugaauuuuacagcuuaa

SEQ ID NO: 196003 - RNA, 21 nt, Artificial Sequence
  Synthetic
caaaugaauuuuacagcuuaa

SEQ ID NO: 196004 - RNA, 22 nt, Artificial Sequence
  Synthetic
gcaaaugaauuuuacagcuuaa

SEQ ID NO: 196005 - RNA, 23 nt, Artificial Sequence
  Synthetic
ugcaaaugaauuuuacagcuuaa

SEQ ID NO: 196006 - RNA, 24 nt, Artificial Sequence
  Synthetic
augcaaaugaauuuuacagcuuaa

SEQ ID NO: 196007 - RNA, 18 nt, Artificial Sequence
  Synthetic
acguauauuucagcuuaa

SEQ ID NO: 196008 - RNA, 19 nt, Artificial Sequence
  Synthetic
aacguauauuucagcuuaa

SEQ ID NO: 196009 - RNA, 20 nt, Artificial Sequence
  Synthetic
gaacguauauuucagcuuaa

SEQ ID NO: 196010 - RNA, 21 nt, Artificial Sequence
  Synthetic
agaacguauauuucagcuuaa

SEQ ID NO: 196011 - RNA, 22 nt, Artificial Sequence
  Synthetic
aagaacguauauuucagcuuaa

SEQ ID NO: 196012 - RNA, 23 nt, Artificial Sequence
  Synthetic
uaagaacguauauuucagcuuaa

SEQ ID NO: 196013 - RNA, 24 nt, Artificial Sequence
  Synthetic
cuaagaacguauauuucagcuuaa

SEQ ID NO: 196014 - RNA, 18 nt, Artificial Sequence
  Synthetic
gcuuguaugguagcuuaa

SEQ ID NO: 196015 - RNA, 19 nt, Artificial Sequence
  Synthetic
ggcuuguaugguagcuuaa

SEQ ID NO: 196016 - RNA, 20 nt, Artificial Sequence
  Synthetic
uggcuuguaugguagcuuaa

SEQ ID NO: 196017 - RNA, 21 nt, Artificial Sequence
  Synthetic
cuggcuuguaugguagcuuaa

SEQ ID NO: 196018 - RNA, 22 nt, Artificial Sequence
  Synthetic
ccuggcuuguaugguagcuuaa

SEQ ID NO: 196019 - RNA, 23 nt, Artificial Sequence
  Synthetic
gccuggcuuguaugguagcuuaa

SEQ ID NO: 196020 - RNA, 24 nt, Artificial Sequence
  Synthetic
cgccuggcuuguaugguagcuuaa

SEQ ID NO: 196021 - RNA, 18 nt, Artificial Sequence
  Synthetic
cuuuaaaaguuagcuuaa

SEQ ID NO: 196022 - RNA, 19 nt, Artificial Sequence
  Synthetic
ucuuuaaaaguuagcuuaa

SEQ ID NO: 196023 - RNA, 20 nt, Artificial Sequence
  Synthetic
cucuuuaaaaguuagcuuaa

SEQ ID NO: 196024 - RNA, 21 nt, Artificial Sequence
  Synthetic
ucucuuuaaaaguuagcuuaa

SEQ ID NO: 196025 - RNA, 22 nt, Artificial Sequence
  Synthetic
aucucuuuaaaaguuagcuuaa

SEQ ID NO: 196026 - RNA, 23 nt, Artificial Sequence
  Synthetic
aaucucuuuaaaaguuagcuuaa

SEQ ID NO: 196027 - RNA, 24 nt, Artificial Sequence
  Synthetic
aaaucucuuuaaaaguuagcuuaa

SEQ ID NO: 196028 - RNA, 18 nt, Artificial Sequence
  Synthetic
ggugacuaaagggcuuaa

SEQ ID NO: 196029 - RNA, 19 nt, Artificial Sequence
  Synthetic
gggugacuaaagggcuuaa

SEQ ID NO: 196030 - RNA, 20 nt, Artificial Sequence
  Synthetic
agggugacuaaagggcuuaa

SEQ ID NO: 196031 - RNA, 21 nt, Artificial Sequence
  Synthetic
uagggugacuaaagggcuuaa

SEQ ID NO: 196032 - RNA, 22 nt, Artificial Sequence
  Synthetic
uuagggugacuaaagggcuuaa

SEQ ID NO: 196033 - RNA, 23 nt, Artificial Sequence
  Synthetic
cuuagggugacuaaagggcuuaa

SEQ ID NO: 196034 - RNA, 24 nt, Artificial Sequence
  Synthetic
ucuuagggugacuaaagggcuuaa

SEQ ID NO: 196035 - RNA, 18 nt, Artificial Sequence
  Synthetic
cugugcagccuggcuuaa

SEQ ID NO: 196036 - RNA, 19 nt, Artificial Sequence
  Synthetic
acugugcagccuggcuuaa

SEQ ID NO: 196037 - RNA, 20 nt, Artificial Sequence
  Synthetic
aacugugcagccuggcuuaa

SEQ ID NO: 196038 - RNA, 21 nt, Artificial Sequence
  Synthetic
aaacugugcagccuggcuuaa

SEQ ID NO: 196039 - RNA, 22 nt, Artificial Sequence
  Synthetic
uaaacugugcagccuggcuuaa

SEQ ID NO: 196040 - RNA, 23 nt, Artificial Sequence
  Synthetic
auaaacugugcagccuggcuuaa

SEQ ID NO: 196041 - RNA, 24 nt, Artificial Sequence
  Synthetic
aauaaacugugcagccuggcuuaa

SEQ ID NO: 196042 - RNA, 18 nt, Artificial Sequence
  Synthetic
acuuuagguuuggcuuaa

SEQ ID NO: 196043 - RNA, 19 nt, Artificial Sequence
  Synthetic
cacuuuagguuuggcuuaa

SEQ ID NO: 196044 - RNA, 20 nt, Artificial Sequence
  Synthetic
ucacuuuagguuuggcuuaa

SEQ ID NO: 196045 - RNA, 21 nt, Artificial Sequence
  Synthetic
aucacuuuagguuuggcuuaa

SEQ ID NO: 196046 - RNA, 22 nt, Artificial Sequence
  Synthetic
uaucacuuuagguuuggcuuaa

SEQ ID NO: 196047 - RNA, 23 nt, Artificial Sequence
  Synthetic
uuaucacuuuagguuuggcuuaa

SEQ ID NO: 196048 - RNA, 24 nt, Artificial Sequence
  Synthetic
uuuaucacuuuagguuuggcuuaa

SEQ ID NO: 196049 - RNA, 18 nt, Artificial Sequence
  Synthetic
cacuccagaaaugcuuaa

SEQ ID NO: 196050 - RNA, 19 nt, Artificial Sequence
  Synthetic
gcacuccagaaaugcuuaa

SEQ ID NO: 196051 - RNA, 20 nt, Artificial Sequence
  Synthetic
cgcacuccagaaaugcuuaa

SEQ ID NO: 196052 - RNA, 21 nt, Artificial Sequence
  Synthetic
acgcacuccagaaaugcuuaa

SEQ ID NO: 196053 - RNA, 22 nt, Artificial Sequence
  Synthetic
cacgcacuccagaaaugcuuaa

SEQ ID NO: 196054 - RNA, 23 nt, Artificial Sequence
  Synthetic
ccacgcacuccagaaaugcuuaa

SEQ ID NO: 196055 - RNA, 24 nt, Artificial Sequence
  Synthetic
accacgcacuccagaaaugcuuaa

SEQ ID NO: 196056 - RNA, 18 nt, Artificial Sequence
  Synthetic
auaggcauuuaugcuuaa

SEQ ID NO: 196057 - RNA, 19 nt, Artificial Sequence
  Synthetic
aauaggcauuuaugcuuaa

SEQ ID NO: 196058 - RNA, 20 nt, Artificial Sequence
  Synthetic
aaauaggcauuuaugcuuaa

SEQ ID NO: 196059 - RNA, 21 nt, Artificial Sequence
  Synthetic
uaaauaggcauuuaugcuuaa

SEQ ID NO: 196060 - RNA, 22 nt, Artificial Sequence
  Synthetic
auaaauaggcauuuaugcuuaa

SEQ ID NO: 196061 - RNA, 23 nt, Artificial Sequence
  Synthetic
uauaaauaggcauuuaugcuuaa

SEQ ID NO: 196062 - RNA, 24 nt, Artificial Sequence
  Synthetic
auauaaauaggcauuuaugcuuaa

SEQ ID NO: 196063 - RNA, 18 nt, Artificial Sequence
  Synthetic
aauaucuaaacugcuuaa

SEQ ID NO: 196064 - RNA, 19 nt, Artificial Sequence
  Synthetic
aaauaucuaaacugcuuaa

SEQ ID NO: 196065 - RNA, 20 nt, Artificial Sequence
  Synthetic
aaaauaucuaaacugcuuaa

SEQ ID NO: 196066 - RNA, 21 nt, Artificial Sequence
  Synthetic
uaaaauaucuaaacugcuuaa

SEQ ID NO: 196067 - RNA, 22 nt, Artificial Sequence
  Synthetic
uuaaaauaucuaaacugcuuaa

SEQ ID NO: 196068 - RNA, 23 nt, Artificial Sequence
  Synthetic
auuaaaauaucuaaacugcuuaa

SEQ ID NO: 196069 - RNA, 24 nt, Artificial Sequence
  Synthetic
aauuaaaauaucuaaacugcuuaa

SEQ ID NO: 196070 - RNA, 18 nt, Artificial Sequence
  Synthetic
cuuuugaccucugcuuaa

SEQ ID NO: 196071 - RNA, 19 nt, Artificial Sequence
  Synthetic
gcuuuugaccucugcuuaa

SEQ ID NO: 196072 - RNA, 20 nt, Artificial Sequence
  Synthetic
agcuuuugaccucugcuuaa

SEQ ID NO: 196073 - RNA, 21 nt, Artificial Sequence
  Synthetic
uagcuuuugaccucugcuuaa

SEQ ID NO: 196074 - RNA, 22 nt, Artificial Sequence
  Synthetic
cuagcuuuugaccucugcuuaa

SEQ ID NO: 196075 - RNA, 23 nt, Artificial Sequence
  Synthetic
ucuagcuuuugaccucugcuuaa

SEQ ID NO: 196076 - RNA, 24 nt, Artificial Sequence
  Synthetic
gucuagcuuuugaccucugcuuaa

SEQ ID NO: 196077 - RNA, 18 nt, Artificial Sequence
  Synthetic
auuauaguuguugcuuaa

SEQ ID NO: 196078 - RNA, 19 nt, Artificial Sequence
  Synthetic
uauuauaguuguugcuuaa

SEQ ID NO: 196079 - RNA, 20 nt, Artificial Sequence
  Synthetic
auauuauaguuguugcuuaa

SEQ ID NO: 196080 - RNA, 21 nt, Artificial Sequence
  Synthetic
aauauuauaguuguugcuuaa

SEQ ID NO: 196081 - RNA, 22 nt, Artificial Sequence
  Synthetic
caauauuauaguuguugcuuaa

SEQ ID NO: 196082 - RNA, 23 nt, Artificial Sequence
  Synthetic
acaauauuauaguuguugcuuaa

SEQ ID NO: 196083 - RNA, 24 nt, Artificial Sequence
  Synthetic
cacaauauuauaguuguugcuuaa

SEQ ID NO: 196084 - RNA, 18 nt, Artificial Sequence
  Synthetic
agcaaacaaaaaucuuaa

SEQ ID NO: 196085 - RNA, 19 nt, Artificial Sequence
  Synthetic
gagcaaacaaaaaucuuaa

SEQ ID NO: 196086 - RNA, 20 nt, Artificial Sequence
  Synthetic
ugagcaaacaaaaaucuuaa

SEQ ID NO: 196087 - RNA, 21 nt, Artificial Sequence
  Synthetic
augagcaaacaaaaaucuuaa

SEQ ID NO: 196088 - RNA, 22 nt, Artificial Sequence
  Synthetic
aaugagcaaacaaaaaucuuaa

SEQ ID NO: 196089 - RNA, 23 nt, Artificial Sequence
  Synthetic
caaugagcaaacaaaaaucuuaa

SEQ ID NO: 196090 - RNA, 24 nt, Artificial Sequence
  Synthetic
ucaaugagcaaacaaaaaucuuaa

SEQ ID NO: 196091 - RNA, 18 nt, Artificial Sequence
  Synthetic
ugaacuuugaaaucuuaa

SEQ ID NO: 196092 - RNA, 19 nt, Artificial Sequence
  Synthetic
augaacuuugaaaucuuaa

SEQ ID NO: 196093 - RNA, 20 nt, Artificial Sequence
  Synthetic
aaugaacuuugaaaucuuaa

SEQ ID NO: 196094 - RNA, 21 nt, Artificial Sequence
  Synthetic
aaaugaacuuugaaaucuuaa

SEQ ID NO: 196095 - RNA, 22 nt, Artificial Sequence
  Synthetic
uaaaugaacuuugaaaucuuaa

SEQ ID NO: 196096 - RNA, 23 nt, Artificial Sequence
  Synthetic
uuaaaugaacuuugaaaucuuaa

SEQ ID NO: 196097 - RNA, 24 nt, Artificial Sequence
  Synthetic
cuuaaaugaacuuugaaaucuuaa

SEQ ID NO: 196098 - RNA, 18 nt, Artificial Sequence
  Synthetic
auuguugaccaaucuuaa

SEQ ID NO: 196099 - RNA, 19 nt, Artificial Sequence
  Synthetic
gauuguugaccaaucuuaa

SEQ ID NO: 196100 - RNA, 20 nt, Artificial Sequence
  Synthetic
agauuguugaccaaucuuaa

SEQ ID NO: 196101 - RNA, 21 nt, Artificial Sequence
  Synthetic
cagauuguugaccaaucuuaa

SEQ ID NO: 196102 - RNA, 22 nt, Artificial Sequence
  Synthetic
ucagauuguugaccaaucuuaa

SEQ ID NO: 196103 - RNA, 23 nt, Artificial Sequence
  Synthetic
cucagauuguugaccaaucuuaa

SEQ ID NO: 196104 - RNA, 24 nt, Artificial Sequence
  Synthetic
acucagauuguugaccaaucuuaa

SEQ ID NO: 196105 - RNA, 18 nt, Artificial Sequence
  Synthetic
aguucuuuguaaucuuaa

SEQ ID NO: 196106 - RNA, 19 nt, Artificial Sequence
  Synthetic
uaguucuuuguaaucuuaa

SEQ ID NO: 196107 - RNA, 20 nt, Artificial Sequence
  Synthetic
uuaguucuuuguaaucuuaa

SEQ ID NO: 196108 - RNA, 21 nt, Artificial Sequence
  Synthetic
uuuaguucuuuguaaucuuaa

SEQ ID NO: 196109 - RNA, 22 nt, Artificial Sequence
  Synthetic
uuuuaguucuuuguaaucuuaa

SEQ ID NO: 196110 - RNA, 23 nt, Artificial Sequence
  Synthetic
auuuuaguucuuuguaaucuuaa

SEQ ID NO: 196111 - RNA, 24 nt, Artificial Sequence
  Synthetic
cauuuuaguucuuuguaaucuuaa

SEQ ID NO: 196112 - RNA, 18 nt, Artificial Sequence
  Synthetic
caaccuaggagaucuuaa

SEQ ID NO: 196113 - RNA, 19 nt, Artificial Sequence
  Synthetic
ccaaccuaggagaucuuaa

SEQ ID NO: 196114 - RNA, 20 nt, Artificial Sequence
  Synthetic
uccaaccuaggagaucuuaa

SEQ ID NO: 196115 - RNA, 21 nt, Artificial Sequence
  Synthetic
uuccaaccuaggagaucuuaa

SEQ ID NO: 196116 - RNA, 22 nt, Artificial Sequence
  Synthetic
cuuccaaccuaggagaucuuaa

SEQ ID NO: 196117 - RNA, 23 nt, Artificial Sequence
  Synthetic
acuuccaaccuaggagaucuuaa

SEQ ID NO: 196118 - RNA, 24 nt, Artificial Sequence
  Synthetic
uacuuccaaccuaggagaucuuaa

SEQ ID NO: 196119 - RNA, 18 nt, Artificial Sequence
  Synthetic
agggggacaugaucuuaa

SEQ ID NO: 196120 - RNA, 19 nt, Artificial Sequence
  Synthetic
cagggggacaugaucuuaa

SEQ ID NO: 196121 - RNA, 20 nt, Artificial Sequence
  Synthetic
ccagggggacaugaucuuaa

SEQ ID NO: 196122 - RNA, 21 nt, Artificial Sequence
  Synthetic
cccagggggacaugaucuuaa

SEQ ID NO: 196123 - RNA, 22 nt, Artificial Sequence
  Synthetic
ucccagggggacaugaucuuaa

SEQ ID NO: 196124 - RNA, 23 nt, Artificial Sequence
  Synthetic
uucccagggggacaugaucuuaa

SEQ ID NO: 196125 - RNA, 24 nt, Artificial Sequence
  Synthetic
guucccagggggacaugaucuuaa

SEQ ID NO: 196126 - RNA, 18 nt, Artificial Sequence
  Synthetic
ucuuguuucugaucuuaa

SEQ ID NO: 196127 - RNA, 19 nt, Artificial Sequence
  Synthetic
gucuuguuucugaucuuaa

SEQ ID NO: 196128 - RNA, 20 nt, Artificial Sequence
  Synthetic
ugucuuguuucugaucuuaa

SEQ ID NO: 196129 - RNA, 21 nt, Artificial Sequence
  Synthetic
uugucuuguuucugaucuuaa

SEQ ID NO: 196130 - RNA, 22 nt, Artificial Sequence
  Synthetic
cuugucuuguuucugaucuuaa

SEQ ID NO: 196131 - RNA, 23 nt, Artificial Sequence
  Synthetic
ucuugucuuguuucugaucuuaa

SEQ ID NO: 196132 - RNA, 24 nt, Artificial Sequence
  Synthetic
uucuugucuuguuucugaucuuaa

SEQ ID NO: 196133 - RNA, 18 nt, Artificial Sequence
  Synthetic
aguuguccuuuaucuuaa

SEQ ID NO: 196134 - RNA, 19 nt, Artificial Sequence
  Synthetic
aaguuguccuuuaucuuaa

SEQ ID NO: 196135 - RNA, 20 nt, Artificial Sequence
  Synthetic
uaaguuguccuuuaucuuaa

SEQ ID NO: 196136 - RNA, 21 nt, Artificial Sequence
  Synthetic
uuaaguuguccuuuaucuuaa

SEQ ID NO: 196137 - RNA, 22 nt, Artificial Sequence
  Synthetic
auuaaguuguccuuuaucuuaa

SEQ ID NO: 196138 - RNA, 23 nt, Artificial Sequence
  Synthetic
uauuaaguuguccuuuaucuuaa

SEQ ID NO: 196139 - RNA, 24 nt, Artificial Sequence
  Synthetic
uuauuaaguuguccuuuaucuuaa

SEQ ID NO: 196140 - RNA, 18 nt, Artificial Sequence
  Synthetic
uguuucuuuuuaucuuaa

SEQ ID NO: 196141 - RNA, 19 nt, Artificial Sequence
  Synthetic
auguuucuuuuuaucuuaa

SEQ ID NO: 196142 - RNA, 20 nt, Artificial Sequence
  Synthetic
cauguuucuuuuuaucuuaa

SEQ ID NO: 196143 - RNA, 21 nt, Artificial Sequence
  Synthetic
ucauguuucuuuuuaucuuaa

SEQ ID NO: 196144 - RNA, 22 nt, Artificial Sequence
  Synthetic
aucauguuucuuuuuaucuuaa

SEQ ID NO: 196145 - RNA, 23 nt, Artificial Sequence
  Synthetic
aaucauguuucuuuuuaucuuaa

SEQ ID NO: 196146 - RNA, 24 nt, Artificial Sequence
  Synthetic
aaaucauguuucuuuuuaucuuaa

SEQ ID NO: 196147 - RNA, 18 nt, Artificial Sequence
  Synthetic
uacagcuuaaacucuuaa

SEQ ID NO: 196148 - RNA, 19 nt, Artificial Sequence
  Synthetic
cuacagcuuaaacucuuaa

SEQ ID NO: 196149 - RNA, 20 nt, Artificial Sequence
  Synthetic
ucuacagcuuaaacucuuaa

SEQ ID NO: 196150 - RNA, 21 nt, Artificial Sequence
  Synthetic
uucuacagcuuaaacucuuaa

SEQ ID NO: 196151 - RNA, 22 nt, Artificial Sequence
  Synthetic
uuucuacagcuuaaacucuuaa

SEQ ID NO: 196152 - RNA, 23 nt, Artificial Sequence
  Synthetic
cuuucuacagcuuaaacucuuaa

SEQ ID NO: 196153 - RNA, 24 nt, Artificial Sequence
  Synthetic
gcuuucuacagcuuaaacucuuaa

SEQ ID NO: 196154 - RNA, 18 nt, Artificial Sequence
  Synthetic
ggucuuguuaccucuuaa

SEQ ID NO: 196155 - RNA, 19 nt, Artificial Sequence
  Synthetic
gggucuuguuaccucuuaa

SEQ ID NO: 196156 - RNA, 20 nt, Artificial Sequence
  Synthetic
ugggucuuguuaccucuuaa

SEQ ID NO: 196157 - RNA, 21 nt, Artificial Sequence
  Synthetic
cugggucuuguuaccucuuaa

SEQ ID NO: 196158 - RNA, 22 nt, Artificial Sequence
  Synthetic
ucugggucuuguuaccucuuaa

SEQ ID NO: 196159 - RNA, 23 nt, Artificial Sequence
  Synthetic
cucugggucuuguuaccucuuaa

SEQ ID NO: 196160 - RNA, 24 nt, Artificial Sequence
  Synthetic
acucugggucuuguuaccucuuaa

SEQ ID NO: 196161 - RNA, 18 nt, Artificial Sequence
  Synthetic
agaccguccuccucuuaa

SEQ ID NO: 196162 - RNA, 19 nt, Artificial Sequence
  Synthetic
aagaccguccuccucuuaa

SEQ ID NO: 196163 - RNA, 20 nt, Artificial Sequence
  Synthetic
aaagaccguccuccucuuaa

SEQ ID NO: 196164 - RNA, 21 nt, Artificial Sequence
  Synthetic
aaaagaccguccuccucuuaa

SEQ ID NO: 196165 - RNA, 22 nt, Artificial Sequence
  Synthetic
gaaaagaccguccuccucuuaa

SEQ ID NO: 196166 - RNA, 23 nt, Artificial Sequence
  Synthetic
ugaaaagaccguccuccucuuaa

SEQ ID NO: 196167 - RNA, 24 nt, Artificial Sequence
  Synthetic
augaaaagaccguccuccucuuaa

SEQ ID NO: 196168 - RNA, 18 nt, Artificial Sequence
  Synthetic
agcauucauggcucuuaa

SEQ ID NO: 196169 - RNA, 19 nt, Artificial Sequence
  Synthetic
aagcauucauggcucuuaa

SEQ ID NO: 196170 - RNA, 20 nt, Artificial Sequence
  Synthetic
caagcauucauggcucuuaa

SEQ ID NO: 196171 - RNA, 21 nt, Artificial Sequence
  Synthetic
ccaagcauucauggcucuuaa

SEQ ID NO: 196172 - RNA, 22 nt, Artificial Sequence
  Synthetic
uccaagcauucauggcucuuaa

SEQ ID NO: 196173 - RNA, 23 nt, Artificial Sequence
  Synthetic
auccaagcauucauggcucuuaa

SEQ ID NO: 196174 - RNA, 24 nt, Artificial Sequence
  Synthetic
uauccaagcauucauggcucuuaa

SEQ ID NO: 196175 - RNA, 18 nt, Artificial Sequence
  Synthetic
acagacuauggcucuuaa

SEQ ID NO: 196176 - RNA, 19 nt, Artificial Sequence
  Synthetic
aacagacuauggcucuuaa

SEQ ID NO: 196177 - RNA, 20 nt, Artificial Sequence
  Synthetic
aaacagacuauggcucuuaa

SEQ ID NO: 196178 - RNA, 21 nt, Artificial Sequence
  Synthetic
gaaacagacuauggcucuuaa

SEQ ID NO: 196179 - RNA, 22 nt, Artificial Sequence
  Synthetic
agaaacagacuauggcucuuaa

SEQ ID NO: 196180 - RNA, 23 nt, Artificial Sequence
  Synthetic
gagaaacagacuauggcucuuaa

SEQ ID NO: 196181 - RNA, 24 nt, Artificial Sequence
  Synthetic
ggagaaacagacuauggcucuuaa

SEQ ID NO: 196182 - RNA, 18 nt, Artificial Sequence
  Synthetic
gauuuaauaaucucuuaa

SEQ ID NO: 196183 - RNA, 19 nt, Artificial Sequence
  Synthetic
ggauuuaauaaucucuuaa

SEQ ID NO: 196184 - RNA, 20 nt, Artificial Sequence
  Synthetic
gggauuuaauaaucucuuaa

SEQ ID NO: 196185 - RNA, 21 nt, Artificial Sequence
  Synthetic
agggauuuaauaaucucuuaa

SEQ ID NO: 196186 - RNA, 22 nt, Artificial Sequence
  Synthetic
uagggauuuaauaaucucuuaa

SEQ ID NO: 196187 - RNA, 23 nt, Artificial Sequence
  Synthetic
auagggauuuaauaaucucuuaa

SEQ ID NO: 196188 - RNA, 24 nt, Artificial Sequence
  Synthetic
gauagggauuuaauaaucucuuaa

SEQ ID NO: 196189 - RNA, 18 nt, Artificial Sequence
  Synthetic
caaauuuuaaagucuuaa

SEQ ID NO: 196190 - RNA, 19 nt, Artificial Sequence
  Synthetic
ucaaauuuuaaagucuuaa

SEQ ID NO: 196191 - RNA, 20 nt, Artificial Sequence
  Synthetic
uucaaauuuuaaagucuuaa

SEQ ID NO: 196192 - RNA, 21 nt, Artificial Sequence
  Synthetic
guucaaauuuuaaagucuuaa

SEQ ID NO: 196193 - RNA, 22 nt, Artificial Sequence
  Synthetic
uguucaaauuuuaaagucuuaa

SEQ ID NO: 196194 - RNA, 23 nt, Artificial Sequence
  Synthetic
cuguucaaauuuuaaagucuuaa

SEQ ID NO: 196195 - RNA, 24 nt, Artificial Sequence
  Synthetic
ucuguucaaauuuuaaagucuuaa

SEQ ID NO: 196196 - RNA, 18 nt, Artificial Sequence
  Synthetic
uaauuuggugagucuuaa

SEQ ID NO: 196197 - RNA, 19 nt, Artificial Sequence
  Synthetic
cuaauuuggugagucuuaa

SEQ ID NO: 196198 - RNA, 20 nt, Artificial Sequence
  Synthetic
gcuaauuuggugagucuuaa

SEQ ID NO: 196199 - RNA, 21 nt, Artificial Sequence
  Synthetic
ggcuaauuuggugagucuuaa

SEQ ID NO: 196200 - RNA, 22 nt, Artificial Sequence
  Synthetic
uggcuaauuuggugagucuuaa

SEQ ID NO: 196201 - RNA, 23 nt, Artificial Sequence
  Synthetic
uuggcuaauuuggugagucuuaa

SEQ ID NO: 196202 - RNA, 24 nt, Artificial Sequence
  Synthetic
uuuggcuaauuuggugagucuuaa

SEQ ID NO: 196203 - RNA, 18 nt, Artificial Sequence
  Synthetic
aaaaacauaaauucuuaa

SEQ ID NO: 196204 - RNA, 19 nt, Artificial Sequence
  Synthetic
uaaaaacauaaauucuuaa

SEQ ID NO: 196205 - RNA, 20 nt, Artificial Sequence
  Synthetic
auaaaaacauaaauucuuaa

SEQ ID NO: 196206 - RNA, 21 nt, Artificial Sequence
  Synthetic
cauaaaaacauaaauucuuaa

SEQ ID NO: 196207 - RNA, 22 nt, Artificial Sequence
  Synthetic
ucauaaaaacauaaauucuuaa

SEQ ID NO: 196208 - RNA, 23 nt, Artificial Sequence
  Synthetic
uucauaaaaacauaaauucuuaa

SEQ ID NO: 196209 - RNA, 24 nt, Artificial Sequence
  Synthetic
uuucauaaaaacauaaauucuuaa

SEQ ID NO: 196210 - RNA, 18 nt, Artificial Sequence
  Synthetic
uuacaacauacuucuuaa

SEQ ID NO: 196211 - RNA, 19 nt, Artificial Sequence
  Synthetic
uuuacaacauacuucuuaa

SEQ ID NO: 196212 - RNA, 20 nt, Artificial Sequence
  Synthetic
uuuuacaacauacuucuuaa

SEQ ID NO: 196213 - RNA, 21 nt, Artificial Sequence
  Synthetic
cuuuuacaacauacuucuuaa

SEQ ID NO: 196214 - RNA, 22 nt, Artificial Sequence
  Synthetic
acuuuuacaacauacuucuuaa

SEQ ID NO: 196215 - RNA, 23 nt, Artificial Sequence
  Synthetic
uacuuuuacaacauacuucuuaa

SEQ ID NO: 196216 - RNA, 24 nt, Artificial Sequence
  Synthetic
uuacuuuuacaacauacuucuuaa

SEQ ID NO: 196217 - RNA, 18 nt, Artificial Sequence
  Synthetic
aaccaauuaucuucuuaa

SEQ ID NO: 196218 - RNA, 19 nt, Artificial Sequence
  Synthetic
aaaccaauuaucuucuuaa

SEQ ID NO: 196219 - RNA, 20 nt, Artificial Sequence
  Synthetic
aaaaccaauuaucuucuuaa

SEQ ID NO: 196220 - RNA, 21 nt, Artificial Sequence
  Synthetic
aaaaaccaauuaucuucuuaa

SEQ ID NO: 196221 - RNA, 22 nt, Artificial Sequence
  Synthetic
uaaaaaccaauuaucuucuuaa

SEQ ID NO: 196222 - RNA, 23 nt, Artificial Sequence
  Synthetic
uuaaaaaccaauuaucuucuuaa

SEQ ID NO: 196223 - RNA, 24 nt, Artificial Sequence
  Synthetic
uuuaaaaaccaauuaucuucuuaa

SEQ ID NO: 196224 - RNA, 18 nt, Artificial Sequence
  Synthetic
ucuucuugcucuucuuaa

SEQ ID NO: 196225 - RNA, 19 nt, Artificial Sequence
  Synthetic
cucuucuugcucuucuuaa

SEQ ID NO: 196226 - RNA, 20 nt, Artificial Sequence
  Synthetic
ucucuucuugcucuucuuaa

SEQ ID NO: 196227 - RNA, 21 nt, Artificial Sequence
  Synthetic
cucucuucuugcucuucuuaa

SEQ ID NO: 196228 - RNA, 22 nt, Artificial Sequence
  Synthetic
ucucucuucuugcucuucuuaa

SEQ ID NO: 196229 - RNA, 23 nt, Artificial Sequence
  Synthetic
gucucucuucuugcucuucuuaa

SEQ ID NO: 196230 - RNA, 24 nt, Artificial Sequence
  Synthetic
agucucucuucuugcucuucuuaa

SEQ ID NO: 196231 - RNA, 18 nt, Artificial Sequence
  Synthetic
auuguuuuuauuucuuaa

SEQ ID NO: 196232 - RNA, 19 nt, Artificial Sequence
  Synthetic
uauuguuuuuauuucuuaa

SEQ ID NO: 196233 - RNA, 20 nt, Artificial Sequence
  Synthetic
auauuguuuuuauuucuuaa

SEQ ID NO: 196234 - RNA, 21 nt, Artificial Sequence
  Synthetic
gauauuguuuuuauuucuuaa

SEQ ID NO: 196235 - RNA, 22 nt, Artificial Sequence
  Synthetic
ugauauuguuuuuauuucuuaa

SEQ ID NO: 196236 - RNA, 23 nt, Artificial Sequence
  Synthetic
augauauuguuuuuauuucuuaa

SEQ ID NO: 196237 - RNA, 24 nt, Artificial Sequence
  Synthetic
aaugauauuguuuuuauuucuuaa

SEQ ID NO: 196238 - RNA, 18 nt, Artificial Sequence
  Synthetic
auugcuucaguuucuuaa

SEQ ID NO: 196239 - RNA, 19 nt, Artificial Sequence
  Synthetic
aauugcuucaguuucuuaa

SEQ ID NO: 196240 - RNA, 20 nt, Artificial Sequence
  Synthetic
uaauugcuucaguuucuuaa

SEQ ID NO: 196241 - RNA, 21 nt, Artificial Sequence
  Synthetic
guaauugcuucaguuucuuaa

SEQ ID NO: 196242 - RNA, 22 nt, Artificial Sequence
  Synthetic
aguaauugcuucaguuucuuaa

SEQ ID NO: 196243 - RNA, 23 nt, Artificial Sequence
  Synthetic
uaguaauugcuucaguuucuuaa

SEQ ID NO: 196244 - RNA, 24 nt, Artificial Sequence
  Synthetic
uuaguaauugcuucaguuucuuaa

SEQ ID NO: 196245 - RNA, 18 nt, Artificial Sequence
  Synthetic
agcuaaauuguuucuuaa

SEQ ID NO: 196246 - RNA, 19 nt, Artificial Sequence
  Synthetic
cagcuaaauuguuucuuaa

SEQ ID NO: 196247 - RNA, 20 nt, Artificial Sequence
  Synthetic
ccagcuaaauuguuucuuaa

SEQ ID NO: 196248 - RNA, 21 nt, Artificial Sequence
  Synthetic
cccagcuaaauuguuucuuaa

SEQ ID NO: 196249 - RNA, 22 nt, Artificial Sequence
  Synthetic
ccccagcuaaauuguuucuuaa

SEQ ID NO: 196250 - RNA, 23 nt, Artificial Sequence
  Synthetic
uccccagcuaaauuguuucuuaa

SEQ ID NO: 196251 - RNA, 24 nt, Artificial Sequence
  Synthetic
auccccagcuaaauuguuucuuaa

SEQ ID NO: 196252 - RNA, 18 nt, Artificial Sequence
  Synthetic
gaguugugagaaaguuaa

SEQ ID NO: 196253 - RNA, 19 nt, Artificial Sequence
  Synthetic
ggaguugugagaaaguuaa

SEQ ID NO: 196254 - RNA, 20 nt, Artificial Sequence
  Synthetic
uggaguugugagaaaguuaa

SEQ ID NO: 196255 - RNA, 21 nt, Artificial Sequence
  Synthetic
uuggaguugugagaaaguuaa

SEQ ID NO: 196256 - RNA, 22 nt, Artificial Sequence
  Synthetic
guuggaguugugagaaaguuaa

SEQ ID NO: 196257 - RNA, 23 nt, Artificial Sequence
  Synthetic
uguuggaguugugagaaaguuaa

SEQ ID NO: 196258 - RNA, 24 nt, Artificial Sequence
  Synthetic
auguuggaguugugagaaaguuaa

SEQ ID NO: 196259 - RNA, 18 nt, Artificial Sequence
  Synthetic
aggaaguuguaaaguuaa

SEQ ID NO: 196260 - RNA, 19 nt, Artificial Sequence
  Synthetic
gaggaaguuguaaaguuaa

SEQ ID NO: 196261 - RNA, 20 nt, Artificial Sequence
  Synthetic
agaggaaguuguaaaguuaa

SEQ ID NO: 196262 - RNA, 21 nt, Artificial Sequence
  Synthetic
aagaggaaguuguaaaguuaa

SEQ ID NO: 196263 - RNA, 22 nt, Artificial Sequence
  Synthetic
caagaggaaguuguaaaguuaa

SEQ ID NO: 196264 - RNA, 23 nt, Artificial Sequence
  Synthetic
gcaagaggaaguuguaaaguuaa

SEQ ID NO: 196265 - RNA, 24 nt, Artificial Sequence
  Synthetic
ggcaagaggaaguuguaaaguuaa

SEQ ID NO: 196266 - RNA, 18 nt, Artificial Sequence
  Synthetic
auguaagauuaaaguuaa

SEQ ID NO: 196267 - RNA, 19 nt, Artificial Sequence
  Synthetic
aauguaagauuaaaguuaa

SEQ ID NO: 196268 - RNA, 20 nt, Artificial Sequence
  Synthetic
aaauguaagauuaaaguuaa

SEQ ID NO: 196269 - RNA, 21 nt, Artificial Sequence
  Synthetic
gaaauguaagauuaaaguuaa

SEQ ID NO: 196270 - RNA, 22 nt, Artificial Sequence
  Synthetic
ugaaauguaagauuaaaguuaa

SEQ ID NO: 196271 - RNA, 23 nt, Artificial Sequence
  Synthetic
augaaauguaagauuaaaguuaa

SEQ ID NO: 196272 - RNA, 24 nt, Artificial Sequence
  Synthetic
aaugaaauguaagauuaaaguuaa

SEQ ID NO: 196273 - RNA, 18 nt, Artificial Sequence
  Synthetic
uuuuaucuuccaaguuaa

SEQ ID NO: 196274 - RNA, 19 nt, Artificial Sequence
  Synthetic
cuuuuaucuuccaaguuaa

SEQ ID NO: 196275 - RNA, 20 nt, Artificial Sequence
  Synthetic
gcuuuuaucuuccaaguuaa

SEQ ID NO: 196276 - RNA, 21 nt, Artificial Sequence
  Synthetic
ugcuuuuaucuuccaaguuaa

SEQ ID NO: 196277 - RNA, 22 nt, Artificial Sequence
  Synthetic
uugcuuuuaucuuccaaguuaa

SEQ ID NO: 196278 - RNA, 23 nt, Artificial Sequence
  Synthetic
cuugcuuuuaucuuccaaguuaa

SEQ ID NO: 196279 - RNA, 24 nt, Artificial Sequence
  Synthetic
acuugcuuuuaucuuccaaguuaa

SEQ ID NO: 196280 - RNA, 18 nt, Artificial Sequence
  Synthetic
ccaggucaggcaaguuaa

SEQ ID NO: 196281 - RNA, 19 nt, Artificial Sequence
  Synthetic
cccaggucaggcaaguuaa

SEQ ID NO: 196282 - RNA, 20 nt, Artificial Sequence
  Synthetic
gcccaggucaggcaaguuaa

SEQ ID NO: 196283 - RNA, 21 nt, Artificial Sequence
  Synthetic
ugcccaggucaggcaaguuaa

SEQ ID NO: 196284 - RNA, 22 nt, Artificial Sequence
  Synthetic
cugcccaggucaggcaaguuaa

SEQ ID NO: 196285 - RNA, 23 nt, Artificial Sequence
  Synthetic
gcugcccaggucaggcaaguuaa

SEQ ID NO: 196286 - RNA, 24 nt, Artificial Sequence
  Synthetic
ggcugcccaggucaggcaaguuaa

SEQ ID NO: 196287 - RNA, 18 nt, Artificial Sequence
  Synthetic
agaaacaauggaaguuaa

SEQ ID NO: 196288 - RNA, 19 nt, Artificial Sequence
  Synthetic
cagaaacaauggaaguuaa

SEQ ID NO: 196289 - RNA, 20 nt, Artificial Sequence
  Synthetic
gcagaaacaauggaaguuaa

SEQ ID NO: 196290 - RNA, 21 nt, Artificial Sequence
  Synthetic
ugcagaaacaauggaaguuaa

SEQ ID NO: 196291 - RNA, 22 nt, Artificial Sequence
  Synthetic
gugcagaaacaauggaaguuaa

SEQ ID NO: 196292 - RNA, 23 nt, Artificial Sequence
  Synthetic
ggugcagaaacaauggaaguuaa

SEQ ID NO: 196293 - RNA, 24 nt, Artificial Sequence
  Synthetic
cggugcagaaacaauggaaguuaa

SEQ ID NO: 196294 - RNA, 18 nt, Artificial Sequence
  Synthetic
ugagauaagugaaguuaa

SEQ ID NO: 196295 - RNA, 19 nt, Artificial Sequence
  Synthetic
augagauaagugaaguuaa

SEQ ID NO: 196296 - RNA, 20 nt, Artificial Sequence
  Synthetic
aaugagauaagugaaguuaa

SEQ ID NO: 196297 - RNA, 21 nt, Artificial Sequence
  Synthetic
aaaugagauaagugaaguuaa

SEQ ID NO: 196298 - RNA, 22 nt, Artificial Sequence
  Synthetic
aaaaugagauaagugaaguuaa

SEQ ID NO: 196299 - RNA, 23 nt, Artificial Sequence
  Synthetic
aaaaaugagauaagugaaguuaa

SEQ ID NO: 196300 - RNA, 24 nt, Artificial Sequence
  Synthetic
gaaaaaugagauaagugaaguuaa

SEQ ID NO: 196301 - RNA, 18 nt, Artificial Sequence
  Synthetic
ucuacaaaacuaaguuaa

SEQ ID NO: 196302 - RNA, 19 nt, Artificial Sequence
  Synthetic
aucuacaaaacuaaguuaa

SEQ ID NO: 196303 - RNA, 20 nt, Artificial Sequence
  Synthetic
caucuacaaaacuaaguuaa

SEQ ID NO: 196304 - RNA, 21 nt, Artificial Sequence
  Synthetic
acaucuacaaaacuaaguuaa

SEQ ID NO: 196305 - RNA, 22 nt, Artificial Sequence
  Synthetic
uacaucuacaaaacuaaguuaa

SEQ ID NO: 196306 - RNA, 23 nt, Artificial Sequence
  Synthetic
auacaucuacaaaacuaaguuaa

SEQ ID NO: 196307 - RNA, 24 nt, Artificial Sequence
  Synthetic
uauacaucuacaaaacuaaguuaa

SEQ ID NO: 196308 - RNA, 18 nt, Artificial Sequence
  Synthetic
accucgcuuuuaaguuaa

SEQ ID NO: 196309 - RNA, 19 nt, Artificial Sequence
  Synthetic
gaccucgcuuuuaaguuaa

SEQ ID NO: 196310 - RNA, 20 nt, Artificial Sequence
  Synthetic
agaccucgcuuuuaaguuaa

SEQ ID NO: 196311 - RNA, 21 nt, Artificial Sequence
  Synthetic
aagaccucgcuuuuaaguuaa

SEQ ID NO: 196312 - RNA, 22 nt, Artificial Sequence
  Synthetic
caagaccucgcuuuuaaguuaa

SEQ ID NO: 196313 - RNA, 23 nt, Artificial Sequence
  Synthetic
ccaagaccucgcuuuuaaguuaa

SEQ ID NO: 196314 - RNA, 24 nt, Artificial Sequence
  Synthetic
uccaagaccucgcuuuuaaguuaa

SEQ ID NO: 196315 - RNA, 18 nt, Artificial Sequence
  Synthetic
auuagauagcccaguuaa

SEQ ID NO: 196316 - RNA, 19 nt, Artificial Sequence
  Synthetic
aauuagauagcccaguuaa

SEQ ID NO: 196317 - RNA, 20 nt, Artificial Sequence
  Synthetic
uaauuagauagcccaguuaa

SEQ ID NO: 196318 - RNA, 21 nt, Artificial Sequence
  Synthetic
uuaauuagauagcccaguuaa

SEQ ID NO: 196319 - RNA, 22 nt, Artificial Sequence
  Synthetic
auuaauuagauagcccaguuaa

SEQ ID NO: 196320 - RNA, 23 nt, Artificial Sequence
  Synthetic
uauuaauuagauagcccaguuaa

SEQ ID NO: 196321 - RNA, 24 nt, Artificial Sequence
  Synthetic
uuauuaauuagauagcccaguuaa

SEQ ID NO: 196322 - RNA, 18 nt, Artificial Sequence
  Synthetic
ugaaagcuuuucaguuaa

SEQ ID NO: 196323 - RNA, 19 nt, Artificial Sequence
  Synthetic
cugaaagcuuuucaguuaa

SEQ ID NO: 196324 - RNA, 20 nt, Artificial Sequence
  Synthetic
ucugaaagcuuuucaguuaa

SEQ ID NO: 196325 - RNA, 21 nt, Artificial Sequence
  Synthetic
aucugaaagcuuuucaguuaa

SEQ ID NO: 196326 - RNA, 22 nt, Artificial Sequence
  Synthetic
uaucugaaagcuuuucaguuaa

SEQ ID NO: 196327 - RNA, 23 nt, Artificial Sequence
  Synthetic
cuaucugaaagcuuuucaguuaa

SEQ ID NO: 196328 - RNA, 24 nt, Artificial Sequence
  Synthetic
gcuaucugaaagcuuuucaguuaa

SEQ ID NO: 196329 - RNA, 18 nt, Artificial Sequence
  Synthetic
uuugacuuguagaguuaa

SEQ ID NO: 196330 - RNA, 19 nt, Artificial Sequence
  Synthetic
guuugacuuguagaguuaa

SEQ ID NO: 196331 - RNA, 20 nt, Artificial Sequence
  Synthetic
gguuugacuuguagaguuaa

SEQ ID NO: 196332 - RNA, 21 nt, Artificial Sequence
  Synthetic
agguuugacuuguagaguuaa

SEQ ID NO: 196333 - RNA, 22 nt, Artificial Sequence
  Synthetic
cagguuugacuuguagaguuaa

SEQ ID NO: 196334 - RNA, 23 nt, Artificial Sequence
  Synthetic
ucagguuugacuuguagaguuaa

SEQ ID NO: 196335 - RNA, 24 nt, Artificial Sequence
  Synthetic
uucagguuugacuuguagaguuaa

SEQ ID NO: 196336 - RNA, 18 nt, Artificial Sequence
  Synthetic
aaauaaaaagggaguuaa

SEQ ID NO: 196337 - RNA, 19 nt, Artificial Sequence
  Synthetic
aaaauaaaaagggaguuaa

SEQ ID NO: 196338 - RNA, 20 nt, Artificial Sequence
  Synthetic
uaaaauaaaaagggaguuaa

SEQ ID NO: 196339 - RNA, 21 nt, Artificial Sequence
  Synthetic
guaaaauaaaaagggaguuaa

SEQ ID NO: 196340 - RNA, 22 nt, Artificial Sequence
  Synthetic
uguaaaauaaaaagggaguuaa

SEQ ID NO: 196341 - RNA, 23 nt, Artificial Sequence
  Synthetic
cuguaaaauaaaaagggaguuaa

SEQ ID NO: 196342 - RNA, 24 nt, Artificial Sequence
  Synthetic
ucuguaaaauaaaaagggaguuaa

SEQ ID NO: 196343 - RNA, 18 nt, Artificial Sequence
  Synthetic
gggagaaaaaugaguuaa

SEQ ID NO: 196344 - RNA, 19 nt, Artificial Sequence
  Synthetic
agggagaaaaaugaguuaa

SEQ ID NO: 196345 - RNA, 20 nt, Artificial Sequence
  Synthetic
aagggagaaaaaugaguuaa

SEQ ID NO: 196346 - RNA, 21 nt, Artificial Sequence
  Synthetic
uaagggagaaaaaugaguuaa

SEQ ID NO: 196347 - RNA, 22 nt, Artificial Sequence
  Synthetic
uuaagggagaaaaaugaguuaa

SEQ ID NO: 196348 - RNA, 23 nt, Artificial Sequence
  Synthetic
uuuaagggagaaaaaugaguuaa

SEQ ID NO: 196349 - RNA, 24 nt, Artificial Sequence
  Synthetic
guuuaagggagaaaaaugaguuaa

SEQ ID NO: 196350 - RNA, 18 nt, Artificial Sequence
  Synthetic
auaaucccaauuaguuaa

SEQ ID NO: 196351 - RNA, 19 nt, Artificial Sequence
  Synthetic
aauaaucccaauuaguuaa

SEQ ID NO: 196352 - RNA, 20 nt, Artificial Sequence
  Synthetic
uaauaaucccaauuaguuaa

SEQ ID NO: 196353 - RNA, 21 nt, Artificial Sequence
  Synthetic
uuaauaaucccaauuaguuaa

SEQ ID NO: 196354 - RNA, 22 nt, Artificial Sequence
  Synthetic
uuuaauaaucccaauuaguuaa

SEQ ID NO: 196355 - RNA, 23 nt, Artificial Sequence
  Synthetic
auuuaauaaucccaauuaguuaa

SEQ ID NO: 196356 - RNA, 24 nt, Artificial Sequence
  Synthetic
aauuuaauaaucccaauuaguuaa

SEQ ID NO: 196357 - RNA, 18 nt, Artificial Sequence
  Synthetic
cuaggauguuuuaguuaa

SEQ ID NO: 196358 - RNA, 19 nt, Artificial Sequence
  Synthetic
ucuaggauguuuuaguuaa

SEQ ID NO: 196359 - RNA, 20 nt, Artificial Sequence
  Synthetic
uucuaggauguuuuaguuaa

SEQ ID NO: 196360 - RNA, 21 nt, Artificial Sequence
  Synthetic
auucuaggauguuuuaguuaa

SEQ ID NO: 196361 - RNA, 22 nt, Artificial Sequence
  Synthetic
gauucuaggauguuuuaguuaa

SEQ ID NO: 196362 - RNA, 23 nt, Artificial Sequence
  Synthetic
ugauucuaggauguuuuaguuaa

SEQ ID NO: 196363 - RNA, 24 nt, Artificial Sequence
  Synthetic
uugauucuaggauguuuuaguuaa

SEQ ID NO: 196364 - RNA, 18 nt, Artificial Sequence
  Synthetic
ucagaugccaaacguuaa

SEQ ID NO: 196365 - RNA, 19 nt, Artificial Sequence
  Synthetic
aucagaugccaaacguuaa

SEQ ID NO: 196366 - RNA, 20 nt, Artificial Sequence
  Synthetic
uaucagaugccaaacguuaa

SEQ ID NO: 196367 - RNA, 21 nt, Artificial Sequence
  Synthetic
uuaucagaugccaaacguuaa

SEQ ID NO: 196368 - RNA, 22 nt, Artificial Sequence
  Synthetic
guuaucagaugccaaacguuaa

SEQ ID NO: 196369 - RNA, 23 nt, Artificial Sequence
  Synthetic
uguuaucagaugccaaacguuaa

SEQ ID NO: 196370 - RNA, 24 nt, Artificial Sequence
  Synthetic
auguuaucagaugccaaacguuaa

SEQ ID NO: 196371 - RNA, 18 nt, Artificial Sequence
  Synthetic
agcagguaucaacguuaa

SEQ ID NO: 196372 - RNA, 19 nt, Artificial Sequence
  Synthetic
gagcagguaucaacguuaa

SEQ ID NO: 196373 - RNA, 20 nt, Artificial Sequence
  Synthetic
agagcagguaucaacguuaa

SEQ ID NO: 196374 - RNA, 21 nt, Artificial Sequence
  Synthetic
aagagcagguaucaacguuaa

SEQ ID NO: 196375 - RNA, 22 nt, Artificial Sequence
  Synthetic
uaagagcagguaucaacguuaa

SEQ ID NO: 196376 - RNA, 23 nt, Artificial Sequence
  Synthetic
auaagagcagguaucaacguuaa

SEQ ID NO: 196377 - RNA, 24 nt, Artificial Sequence
  Synthetic
aauaagagcagguaucaacguuaa

SEQ ID NO: 196378 - RNA, 18 nt, Artificial Sequence
  Synthetic
aaggugguggaacguuaa

SEQ ID NO: 196379 - RNA, 19 nt, Artificial Sequence
  Synthetic
uaaggugguggaacguuaa

SEQ ID NO: 196380 - RNA, 20 nt, Artificial Sequence
  Synthetic
auaaggugguggaacguuaa

SEQ ID NO: 196381 - RNA, 21 nt, Artificial Sequence
  Synthetic
aauaaggugguggaacguuaa

SEQ ID NO: 196382 - RNA, 22 nt, Artificial Sequence
  Synthetic
gaauaaggugguggaacguuaa

SEQ ID NO: 196383 - RNA, 23 nt, Artificial Sequence
  Synthetic
ggaauaaggugguggaacguuaa

SEQ ID NO: 196384 - RNA, 24 nt, Artificial Sequence
  Synthetic
aggaauaaggugguggaacguuaa

SEQ ID NO: 196385 - RNA, 18 nt, Artificial Sequence
  Synthetic
aauaaagcauaagguuaa

SEQ ID NO: 196386 - RNA, 19 nt, Artificial Sequence
  Synthetic
caauaaagcauaagguuaa

SEQ ID NO: 196387 - RNA, 20 nt, Artificial Sequence
  Synthetic
ccaauaaagcauaagguuaa

SEQ ID NO: 196388 - RNA, 21 nt, Artificial Sequence
  Synthetic
uccaauaaagcauaagguuaa

SEQ ID NO: 196389 - RNA, 22 nt, Artificial Sequence
  Synthetic
auccaauaaagcauaagguuaa

SEQ ID NO: 196390 - RNA, 23 nt, Artificial Sequence
  Synthetic
cauccaauaaagcauaagguuaa

SEQ ID NO: 196391 - RNA, 24 nt, Artificial Sequence
  Synthetic
gcauccaauaaagcauaagguuaa

SEQ ID NO: 196392 - RNA, 18 nt, Artificial Sequence
  Synthetic
ugaguuugguaagguuaa

SEQ ID NO: 196393 - RNA, 19 nt, Artificial Sequence
  Synthetic
augaguuugguaagguuaa

SEQ ID NO: 196394 - RNA, 20 nt, Artificial Sequence
  Synthetic
uaugaguuugguaagguuaa

SEQ ID NO: 196395 - RNA, 21 nt, Artificial Sequence
  Synthetic
guaugaguuugguaagguuaa

SEQ ID NO: 196396 - RNA, 22 nt, Artificial Sequence
  Synthetic
uguaugaguuugguaagguuaa

SEQ ID NO: 196397 - RNA, 23 nt, Artificial Sequence
  Synthetic
uuguaugaguuugguaagguuaa

SEQ ID NO: 196398 - RNA, 24 nt, Artificial Sequence
  Synthetic
uuuguaugaguuugguaagguuaa

SEQ ID NO: 196399 - RNA, 18 nt, Artificial Sequence
  Synthetic
acagaguagaaggguuaa

SEQ ID NO: 196400 - RNA, 19 nt, Artificial Sequence
  Synthetic
cacagaguagaaggguuaa

SEQ ID NO: 196401 - RNA, 20 nt, Artificial Sequence
  Synthetic
ccacagaguagaaggguuaa

SEQ ID NO: 196402 - RNA, 21 nt, Artificial Sequence
  Synthetic
accacagaguagaaggguuaa

SEQ ID NO: 196403 - RNA, 22 nt, Artificial Sequence
  Synthetic
caccacagaguagaaggguuaa

SEQ ID NO: 196404 - RNA, 23 nt, Artificial Sequence
  Synthetic
acaccacagaguagaaggguuaa

SEQ ID NO: 196405 - RNA, 24 nt, Artificial Sequence
  Synthetic
uacaccacagaguagaaggguuaa

SEQ ID NO: 196406 - RNA, 18 nt, Artificial Sequence
  Synthetic
ucgcaguuguaggguuaa

SEQ ID NO: 196407 - RNA, 19 nt, Artificial Sequence
  Synthetic
aucgcaguuguaggguuaa

SEQ ID NO: 196408 - RNA, 20 nt, Artificial Sequence
  Synthetic
aaucgcaguuguaggguuaa

SEQ ID NO: 196409 - RNA, 21 nt, Artificial Sequence
  Synthetic
aaaucgcaguuguaggguuaa

SEQ ID NO: 196410 - RNA, 22 nt, Artificial Sequence
  Synthetic
gaaaucgcaguuguaggguuaa

SEQ ID NO: 196411 - RNA, 23 nt, Artificial Sequence
  Synthetic
cgaaaucgcaguuguaggguuaa

SEQ ID NO: 196412 - RNA, 24 nt, Artificial Sequence
  Synthetic
ccgaaaucgcaguuguaggguuaa

SEQ ID NO: 196413 - RNA, 18 nt, Artificial Sequence
  Synthetic
gaguagaaucaugguuaa

SEQ ID NO: 196414 - RNA, 19 nt, Artificial Sequence
  Synthetic
agaguagaaucaugguuaa

SEQ ID NO: 196415 - RNA, 20 nt, Artificial Sequence
  Synthetic
uagaguagaaucaugguuaa

SEQ ID NO: 196416 - RNA, 21 nt, Artificial Sequence
  Synthetic
guagaguagaaucaugguuaa

SEQ ID NO: 196417 - RNA, 22 nt, Artificial Sequence
  Synthetic
uguagaguagaaucaugguuaa

SEQ ID NO: 196418 - RNA, 23 nt, Artificial Sequence
  Synthetic
auguagaguagaaucaugguuaa

SEQ ID NO: 196419 - RNA, 24 nt, Artificial Sequence
  Synthetic
gauguagaguagaaucaugguuaa

SEQ ID NO: 196420 - RNA, 18 nt, Artificial Sequence
  Synthetic
acaaugcucacugguuaa

SEQ ID NO: 196421 - RNA, 19 nt, Artificial Sequence
  Synthetic
aacaaugcucacugguuaa

SEQ ID NO: 196422 - RNA, 20 nt, Artificial Sequence
  Synthetic
caacaaugcucacugguuaa

SEQ ID NO: 196423 - RNA, 21 nt, Artificial Sequence
  Synthetic
ucaacaaugcucacugguuaa

SEQ ID NO: 196424 - RNA, 22 nt, Artificial Sequence
  Synthetic
uucaacaaugcucacugguuaa

SEQ ID NO: 196425 - RNA, 23 nt, Artificial Sequence
  Synthetic
cuucaacaaugcucacugguuaa

SEQ ID NO: 196426 - RNA, 24 nt, Artificial Sequence
  Synthetic
ccuucaacaaugcucacugguuaa

SEQ ID NO: 196427 - RNA, 18 nt, Artificial Sequence
  Synthetic
gcaggugaaauugguuaa

SEQ ID NO: 196428 - RNA, 19 nt, Artificial Sequence
  Synthetic
ugcaggugaaauugguuaa

SEQ ID NO: 196429 - RNA, 20 nt, Artificial Sequence
  Synthetic
gugcaggugaaauugguuaa

SEQ ID NO: 196430 - RNA, 21 nt, Artificial Sequence
  Synthetic
ugugcaggugaaauugguuaa

SEQ ID NO: 196431 - RNA, 22 nt, Artificial Sequence
  Synthetic
gugugcaggugaaauugguuaa

SEQ ID NO: 196432 - RNA, 23 nt, Artificial Sequence
  Synthetic
agugugcaggugaaauugguuaa

SEQ ID NO: 196433 - RNA, 24 nt, Artificial Sequence
  Synthetic
cagugugcaggugaaauugguuaa

SEQ ID NO: 196434 - RNA, 18 nt, Artificial Sequence
  Synthetic
gcuacaauaauugguuaa

SEQ ID NO: 196435 - RNA, 19 nt, Artificial Sequence
  Synthetic
agcuacaauaauugguuaa

SEQ ID NO: 196436 - RNA, 20 nt, Artificial Sequence
  Synthetic
uagcuacaauaauugguuaa

SEQ ID NO: 196437 - RNA, 21 nt, Artificial Sequence
  Synthetic
auagcuacaauaauugguuaa

SEQ ID NO: 196438 - RNA, 22 nt, Artificial Sequence
  Synthetic
uauagcuacaauaauugguuaa

SEQ ID NO: 196439 - RNA, 23 nt, Artificial Sequence
  Synthetic
uuauagcuacaauaauugguuaa

SEQ ID NO: 196440 - RNA, 24 nt, Artificial Sequence
  Synthetic
cuuauagcuacaauaauugguuaa

SEQ ID NO: 196441 - RNA, 18 nt, Artificial Sequence
  Synthetic
ucaagguguguugguuaa

SEQ ID NO: 196442 - RNA, 19 nt, Artificial Sequence
  Synthetic
uucaagguguguugguuaa

SEQ ID NO: 196443 - RNA, 20 nt, Artificial Sequence
  Synthetic
auucaagguguguugguuaa

SEQ ID NO: 196444 - RNA, 21 nt, Artificial Sequence
  Synthetic
gauucaagguguguugguuaa

SEQ ID NO: 196445 - RNA, 22 nt, Artificial Sequence
  Synthetic
ggauucaagguguguugguuaa

SEQ ID NO: 196446 - RNA, 23 nt, Artificial Sequence
  Synthetic
uggauucaagguguguugguuaa

SEQ ID NO: 196447 - RNA, 24 nt, Artificial Sequence
  Synthetic
auggauucaagguguguugguuaa

SEQ ID NO: 196448 - RNA, 18 nt, Artificial Sequence
  Synthetic
ggaagguuauuugguuaa

SEQ ID NO: 196449 - RNA, 19 nt, Artificial Sequence
  Synthetic
aggaagguuauuugguuaa

SEQ ID NO: 196450 - RNA, 20 nt, Artificial Sequence
  Synthetic
aaggaagguuauuugguuaa

SEQ ID NO: 196451 - RNA, 21 nt, Artificial Sequence
  Synthetic
uaaggaagguuauuugguuaa

SEQ ID NO: 196452 - RNA, 22 nt, Artificial Sequence
  Synthetic
uuaaggaagguuauuugguuaa

SEQ ID NO: 196453 - RNA, 23 nt, Artificial Sequence
  Synthetic
uuuaaggaagguuauuugguuaa

SEQ ID NO: 196454 - RNA, 24 nt, Artificial Sequence
  Synthetic
guuuaaggaagguuauuugguuaa

SEQ ID NO: 196455 - RNA, 18 nt, Artificial Sequence
  Synthetic
aacaagaagaaauguuaa

SEQ ID NO: 196456 - RNA, 19 nt, Artificial Sequence
  Synthetic
uaacaagaagaaauguuaa

SEQ ID NO: 196457 - RNA, 20 nt, Artificial Sequence
  Synthetic
cuaacaagaagaaauguuaa

SEQ ID NO: 196458 - RNA, 21 nt, Artificial Sequence
  Synthetic
gcuaacaagaagaaauguuaa

SEQ ID NO: 196459 - RNA, 22 nt, Artificial Sequence
  Synthetic
agcuaacaagaagaaauguuaa

SEQ ID NO: 196460 - RNA, 23 nt, Artificial Sequence
  Synthetic
uagcuaacaagaagaaauguuaa

SEQ ID NO: 196461 - RNA, 24 nt, Artificial Sequence
  Synthetic
cuagcuaacaagaagaaauguuaa

SEQ ID NO: 196462 - RNA, 18 nt, Artificial Sequence
  Synthetic
cagagguugacauguuaa

SEQ ID NO: 196463 - RNA, 19 nt, Artificial Sequence
  Synthetic
acagagguugacauguuaa

SEQ ID NO: 196464 - RNA, 20 nt, Artificial Sequence
  Synthetic
aacagagguugacauguuaa

SEQ ID NO: 196465 - RNA, 21 nt, Artificial Sequence
  Synthetic
aaacagagguugacauguuaa

SEQ ID NO: 196466 - RNA, 22 nt, Artificial Sequence
  Synthetic
uaaacagagguugacauguuaa

SEQ ID NO: 196467 - RNA, 23 nt, Artificial Sequence
  Synthetic
uuaaacagagguugacauguuaa

SEQ ID NO: 196468 - RNA, 24 nt, Artificial Sequence
  Synthetic
guuaaacagagguugacauguuaa

SEQ ID NO: 196469 - RNA, 18 nt, Artificial Sequence
  Synthetic
agaaacauuccauguuaa

SEQ ID NO: 196470 - RNA, 19 nt, Artificial Sequence
  Synthetic
gagaaacauuccauguuaa

SEQ ID NO: 196471 - RNA, 20 nt, Artificial Sequence
  Synthetic
ggagaaacauuccauguuaa

SEQ ID NO: 196472 - RNA, 21 nt, Artificial Sequence
  Synthetic
uggagaaacauuccauguuaa

SEQ ID NO: 196473 - RNA, 22 nt, Artificial Sequence
  Synthetic
auggagaaacauuccauguuaa

SEQ ID NO: 196474 - RNA, 23 nt, Artificial Sequence
  Synthetic
aauggagaaacauuccauguuaa

SEQ ID NO: 196475 - RNA, 24 nt, Artificial Sequence
  Synthetic
aaauggagaaacauuccauguuaa

SEQ ID NO: 196476 - RNA, 18 nt, Artificial Sequence
  Synthetic
aauaaaacuagauguuaa

SEQ ID NO: 196477 - RNA, 19 nt, Artificial Sequence
  Synthetic
aaauaaaacuagauguuaa

SEQ ID NO: 196478 - RNA, 20 nt, Artificial Sequence
  Synthetic
aaaauaaaacuagauguuaa

SEQ ID NO: 196479 - RNA, 21 nt, Artificial Sequence
  Synthetic
gaaaauaaaacuagauguuaa

SEQ ID NO: 196480 - RNA, 22 nt, Artificial Sequence
  Synthetic
agaaaauaaaacuagauguuaa

SEQ ID NO: 196481 - RNA, 23 nt, Artificial Sequence
  Synthetic
aagaaaauaaaacuagauguuaa

SEQ ID NO: 196482 - RNA, 24 nt, Artificial Sequence
  Synthetic
uaagaaaauaaaacuagauguuaa

SEQ ID NO: 196483 - RNA, 18 nt, Artificial Sequence
  Synthetic
uuaaaagaaggauguuaa

SEQ ID NO: 196484 - RNA, 19 nt, Artificial Sequence
  Synthetic
auuaaaagaaggauguuaa

SEQ ID NO: 196485 - RNA, 20 nt, Artificial Sequence
  Synthetic
uauuaaaagaaggauguuaa

SEQ ID NO: 196486 - RNA, 21 nt, Artificial Sequence
  Synthetic
guauuaaaagaaggauguuaa

SEQ ID NO: 196487 - RNA, 22 nt, Artificial Sequence
  Synthetic
uguauuaaaagaaggauguuaa

SEQ ID NO: 196488 - RNA, 23 nt, Artificial Sequence
  Synthetic
guguauuaaaagaaggauguuaa

SEQ ID NO: 196489 - RNA, 24 nt, Artificial Sequence
  Synthetic
aguguauuaaaagaaggauguuaa

SEQ ID NO: 196490 - RNA, 18 nt, Artificial Sequence
  Synthetic
cucucugguugauguuaa

SEQ ID NO: 196491 - RNA, 19 nt, Artificial Sequence
  Synthetic
ucucucugguugauguuaa

SEQ ID NO: 196492 - RNA, 20 nt, Artificial Sequence
  Synthetic
gucucucugguugauguuaa

SEQ ID NO: 196493 - RNA, 21 nt, Artificial Sequence
  Synthetic
agucucucugguugauguuaa

SEQ ID NO: 196494 - RNA, 22 nt, Artificial Sequence
  Synthetic
gagucucucugguugauguuaa

SEQ ID NO: 196495 - RNA, 23 nt, Artificial Sequence
  Synthetic
ggagucucucugguugauguuaa

SEQ ID NO: 196496 - RNA, 24 nt, Artificial Sequence
  Synthetic
gggagucucucugguugauguuaa

SEQ ID NO: 196497 - RNA, 18 nt, Artificial Sequence
  Synthetic
auaaauuuuugauguuaa

SEQ ID NO: 196498 - RNA, 19 nt, Artificial Sequence
  Synthetic
aauaaauuuuugauguuaa

SEQ ID NO: 196499 - RNA, 20 nt, Artificial Sequence
  Synthetic
caauaaauuuuugauguuaa

SEQ ID NO: 196500 - RNA, 21 nt, Artificial Sequence
  Synthetic
ccaauaaauuuuugauguuaa

SEQ ID NO: 196501 - RNA, 22 nt, Artificial Sequence
  Synthetic
uccaauaaauuuuugauguuaa

SEQ ID NO: 196502 - RNA, 23 nt, Artificial Sequence
  Synthetic
guccaauaaauuuuugauguuaa

SEQ ID NO: 196503 - RNA, 24 nt, Artificial Sequence
  Synthetic
uguccaauaaauuuuugauguuaa

SEQ ID NO: 196504 - RNA, 18 nt, Artificial Sequence
  Synthetic
uuuuguaaaauauguuaa

SEQ ID NO: 196505 - RNA, 19 nt, Artificial Sequence
  Synthetic
cuuuuguaaaauauguuaa

SEQ ID NO: 196506 - RNA, 20 nt, Artificial Sequence
  Synthetic
ccuuuuguaaaauauguuaa

SEQ ID NO: 196507 - RNA, 21 nt, Artificial Sequence
  Synthetic
uccuuuuguaaaauauguuaa

SEQ ID NO: 196508 - RNA, 22 nt, Artificial Sequence
  Synthetic
uuccuuuuguaaaauauguuaa

SEQ ID NO: 196509 - RNA, 23 nt, Artificial Sequence
  Synthetic
uuuccuuuuguaaaauauguuaa

SEQ ID NO: 196510 - RNA, 24 nt, Artificial Sequence
  Synthetic
auuuccuuuuguaaaauauguuaa

SEQ ID NO: 196511 - RNA, 18 nt, Artificial Sequence
  Synthetic
caugaaguaguauguuaa

SEQ ID NO: 196512 - RNA, 19 nt, Artificial Sequence
  Synthetic
acaugaaguaguauguuaa

SEQ ID NO: 196513 - RNA, 20 nt, Artificial Sequence
  Synthetic
aacaugaaguaguauguuaa

SEQ ID NO: 196514 - RNA, 21 nt, Artificial Sequence
  Synthetic
gaacaugaaguaguauguuaa

SEQ ID NO: 196515 - RNA, 22 nt, Artificial Sequence
  Synthetic
agaacaugaaguaguauguuaa

SEQ ID NO: 196516 - RNA, 23 nt, Artificial Sequence
  Synthetic
uagaacaugaaguaguauguuaa

SEQ ID NO: 196517 - RNA, 24 nt, Artificial Sequence
  Synthetic
uuagaacaugaaguaguauguuaa

SEQ ID NO: 196518 - RNA, 18 nt, Artificial Sequence
  Synthetic
auauaguauguauguuaa

SEQ ID NO: 196519 - RNA, 19 nt, Artificial Sequence
  Synthetic
aauauaguauguauguuaa

SEQ ID NO: 196520 - RNA, 20 nt, Artificial Sequence
  Synthetic
uaauauaguauguauguuaa

SEQ ID NO: 196521 - RNA, 21 nt, Artificial Sequence
  Synthetic
auaauauaguauguauguuaa

SEQ ID NO: 196522 - RNA, 22 nt, Artificial Sequence
  Synthetic
aauaauauaguauguauguuaa

SEQ ID NO: 196523 - RNA, 23 nt, Artificial Sequence
  Synthetic
uaauaauauaguauguauguuaa

SEQ ID NO: 196524 - RNA, 24 nt, Artificial Sequence
  Synthetic
uuaauaauauaguauguauguuaa

SEQ ID NO: 196525 - RNA, 18 nt, Artificial Sequence
  Synthetic
cuuugauacuuauguuaa

SEQ ID NO: 196526 - RNA, 19 nt, Artificial Sequence
  Synthetic
ucuuugauacuuauguuaa

SEQ ID NO: 196527 - RNA, 20 nt, Artificial Sequence
  Synthetic
gucuuugauacuuauguuaa

SEQ ID NO: 196528 - RNA, 21 nt, Artificial Sequence
  Synthetic
ugucuuugauacuuauguuaa

SEQ ID NO: 196529 - RNA, 22 nt, Artificial Sequence
  Synthetic
augucuuugauacuuauguuaa

SEQ ID NO: 196530 - RNA, 23 nt, Artificial Sequence
  Synthetic
caugucuuugauacuuauguuaa

SEQ ID NO: 196531 - RNA, 24 nt, Artificial Sequence
  Synthetic
acaugucuuugauacuuauguuaa

SEQ ID NO: 196532 - RNA, 18 nt, Artificial Sequence
  Synthetic
uguacauauuuauguuaa

SEQ ID NO: 196533 - RNA, 19 nt, Artificial Sequence
  Synthetic
cuguacauauuuauguuaa

SEQ ID NO: 196534 - RNA, 20 nt, Artificial Sequence
  Synthetic
ucuguacauauuuauguuaa

SEQ ID NO: 196535 - RNA, 21 nt, Artificial Sequence
  Synthetic
uucuguacauauuuauguuaa

SEQ ID NO: 196536 - RNA, 22 nt, Artificial Sequence
  Synthetic
auucuguacauauuuauguuaa

SEQ ID NO: 196537 - RNA, 23 nt, Artificial Sequence
  Synthetic
gauucuguacauauuuauguuaa

SEQ ID NO: 196538 - RNA, 24 nt, Artificial Sequence
  Synthetic
ugauucuguacauauuuauguuaa

SEQ ID NO: 196539 - RNA, 18 nt, Artificial Sequence
  Synthetic
uuuuaugguuuauguuaa

SEQ ID NO: 196540 - RNA, 19 nt, Artificial Sequence
  Synthetic
auuuuaugguuuauguuaa

SEQ ID NO: 196541 - RNA, 20 nt, Artificial Sequence
  Synthetic
cauuuuaugguuuauguuaa

SEQ ID NO: 196542 - RNA, 21 nt, Artificial Sequence
  Synthetic
acauuuuaugguuuauguuaa

SEQ ID NO: 196543 - RNA, 22 nt, Artificial Sequence
  Synthetic
gacauuuuaugguuuauguuaa

SEQ ID NO: 196544 - RNA, 23 nt, Artificial Sequence
  Synthetic
ugacauuuuaugguuuauguuaa

SEQ ID NO: 196545 - RNA, 24 nt, Artificial Sequence
  Synthetic
uugacauuuuaugguuuauguuaa

SEQ ID NO: 196546 - RNA, 18 nt, Artificial Sequence
  Synthetic
acuuaauaaagcuguuaa

SEQ ID NO: 196547 - RNA, 19 nt, Artificial Sequence
  Synthetic
uacuuaauaaagcuguuaa

SEQ ID NO: 196548 - RNA, 20 nt, Artificial Sequence
  Synthetic
auacuuaauaaagcuguuaa

SEQ ID NO: 196549 - RNA, 21 nt, Artificial Sequence
  Synthetic
aauacuuaauaaagcuguuaa

SEQ ID NO: 196550 - RNA, 22 nt, Artificial Sequence
  Synthetic
aaauacuuaauaaagcuguuaa

SEQ ID NO: 196551 - RNA, 23 nt, Artificial Sequence
  Synthetic
uaaauacuuaauaaagcuguuaa

SEQ ID NO: 196552 - RNA, 24 nt, Artificial Sequence
  Synthetic
uuaaauacuuaauaaagcuguuaa

SEQ ID NO: 196553 - RNA, 18 nt, Artificial Sequence
  Synthetic
gggaagcuugucuguuaa

SEQ ID NO: 196554 - RNA, 19 nt, Artificial Sequence
  Synthetic
agggaagcuugucuguuaa

SEQ ID NO: 196555 - RNA, 20 nt, Artificial Sequence
  Synthetic
cagggaagcuugucuguuaa

SEQ ID NO: 196556 - RNA, 21 nt, Artificial Sequence
  Synthetic
ucagggaagcuugucuguuaa

SEQ ID NO: 196557 - RNA, 22 nt, Artificial Sequence
  Synthetic
gucagggaagcuugucuguuaa

SEQ ID NO: 196558 - RNA, 23 nt, Artificial Sequence
  Synthetic
ggucagggaagcuugucuguuaa

SEQ ID NO: 196559 - RNA, 24 nt, Artificial Sequence
  Synthetic
uggucagggaagcuugucuguuaa

SEQ ID NO: 196560 - RNA, 18 nt, Artificial Sequence
  Synthetic
cacuuaaaaauguguuaa

SEQ ID NO: 196561 - RNA, 19 nt, Artificial Sequence
  Synthetic
gcacuuaaaaauguguuaa

SEQ ID NO: 196562 - RNA, 20 nt, Artificial Sequence
  Synthetic
ugcacuuaaaaauguguuaa

SEQ ID NO: 196563 - RNA, 21 nt, Artificial Sequence
  Synthetic
gugcacuuaaaaauguguuaa

SEQ ID NO: 196564 - RNA, 22 nt, Artificial Sequence
  Synthetic
ugugcacuuaaaaauguguuaa

SEQ ID NO: 196565 - RNA, 23 nt, Artificial Sequence
  Synthetic
uugugcacuuaaaaauguguuaa

SEQ ID NO: 196566 - RNA, 24 nt, Artificial Sequence
  Synthetic
uuugugcacuuaaaaauguguuaa

SEQ ID NO: 196567 - RNA, 18 nt, Artificial Sequence
  Synthetic
agcaucuggaauuguuaa

SEQ ID NO: 196568 - RNA, 19 nt, Artificial Sequence
  Synthetic
gagcaucuggaauuguuaa

SEQ ID NO: 196569 - RNA, 20 nt, Artificial Sequence
  Synthetic
agagcaucuggaauuguuaa

SEQ ID NO: 196570 - RNA, 21 nt, Artificial Sequence
  Synthetic
cagagcaucuggaauuguuaa

SEQ ID NO: 196571 - RNA, 22 nt, Artificial Sequence
  Synthetic
ccagagcaucuggaauuguuaa

SEQ ID NO: 196572 - RNA, 23 nt, Artificial Sequence
  Synthetic
gccagagcaucuggaauuguuaa

SEQ ID NO: 196573 - RNA, 24 nt, Artificial Sequence
  Synthetic
ugccagagcaucuggaauuguuaa

SEQ ID NO: 196574 - RNA, 18 nt, Artificial Sequence
  Synthetic
cuaagguggaauuguuaa

SEQ ID NO: 196575 - RNA, 19 nt, Artificial Sequence
  Synthetic
gcuaagguggaauuguuaa

SEQ ID NO: 196576 - RNA, 20 nt, Artificial Sequence
  Synthetic
ugcuaagguggaauuguuaa

SEQ ID NO: 196577 - RNA, 21 nt, Artificial Sequence
  Synthetic
uugcuaagguggaauuguuaa

SEQ ID NO: 196578 - RNA, 22 nt, Artificial Sequence
  Synthetic
auugcuaagguggaauuguuaa

SEQ ID NO: 196579 - RNA, 23 nt, Artificial Sequence
  Synthetic
aauugcuaagguggaauuguuaa

SEQ ID NO: 196580 - RNA, 24 nt, Artificial Sequence
  Synthetic
gaauugcuaagguggaauuguuaa

SEQ ID NO: 196581 - RNA, 18 nt, Artificial Sequence
  Synthetic
auucuuagguauuguuaa

SEQ ID NO: 196582 - RNA, 19 nt, Artificial Sequence
  Synthetic
aauucuuagguauuguuaa

SEQ ID NO: 196583 - RNA, 20 nt, Artificial Sequence
  Synthetic
gaauucuuagguauuguuaa

SEQ ID NO: 196584 - RNA, 21 nt, Artificial Sequence
  Synthetic
ugaauucuuagguauuguuaa

SEQ ID NO: 196585 - RNA, 22 nt, Artificial Sequence
  Synthetic
gugaauucuuagguauuguuaa

SEQ ID NO: 196586 - RNA, 23 nt, Artificial Sequence
  Synthetic
cgugaauucuuagguauuguuaa

SEQ ID NO: 196587 - RNA, 24 nt, Artificial Sequence
  Synthetic
gcgugaauucuuagguauuguuaa

SEQ ID NO: 196588 - RNA, 18 nt, Artificial Sequence
  Synthetic
acuaauaaugguuguuaa

SEQ ID NO: 196589 - RNA, 19 nt, Artificial Sequence
  Synthetic
gacuaauaaugguuguuaa

SEQ ID NO: 196590 - RNA, 20 nt, Artificial Sequence
  Synthetic
agacuaauaaugguuguuaa

SEQ ID NO: 196591 - RNA, 21 nt, Artificial Sequence
  Synthetic
aagacuaauaaugguuguuaa

SEQ ID NO: 196592 - RNA, 22 nt, Artificial Sequence
  Synthetic
aaagacuaauaaugguuguuaa

SEQ ID NO: 196593 - RNA, 23 nt, Artificial Sequence
  Synthetic
aaaagacuaauaaugguuguuaa

SEQ ID NO: 196594 - RNA, 24 nt, Artificial Sequence
  Synthetic
caaaagacuaauaaugguuguuaa

SEQ ID NO: 196595 - RNA, 18 nt, Artificial Sequence
  Synthetic
uauuuccucauuuguuaa

SEQ ID NO: 196596 - RNA, 19 nt, Artificial Sequence
  Synthetic
uuauuuccucauuuguuaa

SEQ ID NO: 196597 - RNA, 20 nt, Artificial Sequence
  Synthetic
uuuauuuccucauuuguuaa

SEQ ID NO: 196598 - RNA, 21 nt, Artificial Sequence
  Synthetic
cuuuauuuccucauuuguuaa

SEQ ID NO: 196599 - RNA, 22 nt, Artificial Sequence
  Synthetic
ucuuuauuuccucauuuguuaa

SEQ ID NO: 196600 - RNA, 23 nt, Artificial Sequence
  Synthetic
gucuuuauuuccucauuuguuaa

SEQ ID NO: 196601 - RNA, 24 nt, Artificial Sequence
  Synthetic
ugucuuuauuuccucauuuguuaa

SEQ ID NO: 196602 - RNA, 18 nt, Artificial Sequence
  Synthetic
gagagaaaagaaauuuaa

SEQ ID NO: 196603 - RNA, 19 nt, Artificial Sequence
  Synthetic
ugagagaaaagaaauuuaa

SEQ ID NO: 196604 - RNA, 20 nt, Artificial Sequence
  Synthetic
uugagagaaaagaaauuuaa

SEQ ID NO: 196605 - RNA, 21 nt, Artificial Sequence
  Synthetic
uuugagagaaaagaaauuuaa

SEQ ID NO: 196606 - RNA, 22 nt, Artificial Sequence
  Synthetic
cuuugagagaaaagaaauuuaa

SEQ ID NO: 196607 - RNA, 23 nt, Artificial Sequence
  Synthetic
ucuuugagagaaaagaaauuuaa

SEQ ID NO: 196608 - RNA, 24 nt, Artificial Sequence
  Synthetic
gucuuugagagaaaagaaauuuaa

SEQ ID NO: 196609 - RNA, 18 nt, Artificial Sequence
  Synthetic
auguauaaaugaauuuaa

SEQ ID NO: 196610 - RNA, 19 nt, Artificial Sequence
  Synthetic
aauguauaaaugaauuuaa

SEQ ID NO: 196611 - RNA, 20 nt, Artificial Sequence
  Synthetic
aaauguauaaaugaauuuaa

SEQ ID NO: 196612 - RNA, 21 nt, Artificial Sequence
  Synthetic
uaaauguauaaaugaauuuaa

SEQ ID NO: 196613 - RNA, 22 nt, Artificial Sequence
  Synthetic
auaaauguauaaaugaauuuaa

SEQ ID NO: 196614 - RNA, 23 nt, Artificial Sequence
  Synthetic
aauaaauguauaaaugaauuuaa

SEQ ID NO: 196615 - RNA, 24 nt, Artificial Sequence
  Synthetic
gaauaaauguauaaaugaauuuaa

SEQ ID NO: 196616 - RNA, 18 nt, Artificial Sequence
  Synthetic
acaucagagugaauuuaa

SEQ ID NO: 196617 - RNA, 19 nt, Artificial Sequence
  Synthetic
gacaucagagugaauuuaa

SEQ ID NO: 196618 - RNA, 20 nt, Artificial Sequence
  Synthetic
agacaucagagugaauuuaa

SEQ ID NO: 196619 - RNA, 21 nt, Artificial Sequence
  Synthetic
aagacaucagagugaauuuaa

SEQ ID NO: 196620 - RNA, 22 nt, Artificial Sequence
  Synthetic
uaagacaucagagugaauuuaa

SEQ ID NO: 196621 - RNA, 23 nt, Artificial Sequence
  Synthetic
uuaagacaucagagugaauuuaa

SEQ ID NO: 196622 - RNA, 24 nt, Artificial Sequence
  Synthetic
auuaagacaucagagugaauuuaa

SEQ ID NO: 196623 - RNA, 18 nt, Artificial Sequence
  Synthetic
uucaggaaaauaauuuaa

SEQ ID NO: 196624 - RNA, 19 nt, Artificial Sequence
  Synthetic
cuucaggaaaauaauuuaa

SEQ ID NO: 196625 - RNA, 20 nt, Artificial Sequence
  Synthetic
ccuucaggaaaauaauuuaa

SEQ ID NO: 196626 - RNA, 21 nt, Artificial Sequence
  Synthetic
accuucaggaaaauaauuuaa

SEQ ID NO: 196627 - RNA, 22 nt, Artificial Sequence
  Synthetic
caccuucaggaaaauaauuuaa

SEQ ID NO: 196628 - RNA, 23 nt, Artificial Sequence
  Synthetic
ucaccuucaggaaaauaauuuaa

SEQ ID NO: 196629 - RNA, 24 nt, Artificial Sequence
  Synthetic
gucaccuucaggaaaauaauuuaa

SEQ ID NO: 196630 - RNA, 18 nt, Artificial Sequence
  Synthetic
aauacuguuauaauuuaa

SEQ ID NO: 196631 - RNA, 19 nt, Artificial Sequence
  Synthetic
gaauacuguuauaauuuaa

SEQ ID NO: 196632 - RNA, 20 nt, Artificial Sequence
  Synthetic
ugaauacuguuauaauuuaa

SEQ ID NO: 196633 - RNA, 21 nt, Artificial Sequence
  Synthetic
cugaauacuguuauaauuuaa

SEQ ID NO: 196634 - RNA, 22 nt, Artificial Sequence
  Synthetic
ucugaauacuguuauaauuuaa

SEQ ID NO: 196635 - RNA, 23 nt, Artificial Sequence
  Synthetic
uucugaauacuguuauaauuuaa

SEQ ID NO: 196636 - RNA, 24 nt, Artificial Sequence
  Synthetic
auucugaauacuguuauaauuuaa

SEQ ID NO: 196637 - RNA, 18 nt, Artificial Sequence
  Synthetic
uuaugucaaaacauuuaa

SEQ ID NO: 196638 - RNA, 19 nt, Artificial Sequence
  Synthetic
cuuaugucaaaacauuuaa

SEQ ID NO: 196639 - RNA, 20 nt, Artificial Sequence
  Synthetic
gcuuaugucaaaacauuuaa

SEQ ID NO: 196640 - RNA, 21 nt, Artificial Sequence
  Synthetic
agcuuaugucaaaacauuuaa

SEQ ID NO: 196641 - RNA, 22 nt, Artificial Sequence
  Synthetic
gagcuuaugucaaaacauuuaa

SEQ ID NO: 196642 - RNA, 23 nt, Artificial Sequence
  Synthetic
ugagcuuaugucaaaacauuuaa

SEQ ID NO: 196643 - RNA, 24 nt, Artificial Sequence
  Synthetic
gugagcuuaugucaaaacauuuaa

SEQ ID NO: 196644 - RNA, 18 nt, Artificial Sequence
  Synthetic
accgaagaugccauuuaa

SEQ ID NO: 196645 - RNA, 19 nt, Artificial Sequence
  Synthetic
caccgaagaugccauuuaa

SEQ ID NO: 196646 - RNA, 20 nt, Artificial Sequence
  Synthetic
acaccgaagaugccauuuaa

SEQ ID NO: 196647 - RNA, 21 nt, Artificial Sequence
  Synthetic
cacaccgaagaugccauuuaa

SEQ ID NO: 196648 - RNA, 22 nt, Artificial Sequence
  Synthetic
acacaccgaagaugccauuuaa

SEQ ID NO: 196649 - RNA, 23 nt, Artificial Sequence
  Synthetic
gacacaccgaagaugccauuuaa

SEQ ID NO: 196650 - RNA, 24 nt, Artificial Sequence
  Synthetic
ggacacaccgaagaugccauuuaa

SEQ ID NO: 196651 - RNA, 18 nt, Artificial Sequence
  Synthetic
acacuccuauccauuuaa

SEQ ID NO: 196652 - RNA, 19 nt, Artificial Sequence
  Synthetic
uacacuccuauccauuuaa

SEQ ID NO: 196653 - RNA, 20 nt, Artificial Sequence
  Synthetic
auacacuccuauccauuuaa

SEQ ID NO: 196654 - RNA, 21 nt, Artificial Sequence
  Synthetic
cauacacuccuauccauuuaa

SEQ ID NO: 196655 - RNA, 22 nt, Artificial Sequence
  Synthetic
acauacacuccuauccauuuaa

SEQ ID NO: 196656 - RNA, 23 nt, Artificial Sequence
  Synthetic
gacauacacuccuauccauuuaa

SEQ ID NO: 196657 - RNA, 24 nt, Artificial Sequence
  Synthetic
ugacauacacuccuauccauuuaa

SEQ ID NO: 196658 - RNA, 18 nt, Artificial Sequence
  Synthetic
gaagccaucuccauuuaa

SEQ ID NO: 196659 - RNA, 19 nt, Artificial Sequence
  Synthetic
agaagccaucuccauuuaa

SEQ ID NO: 196660 - RNA, 20 nt, Artificial Sequence
  Synthetic
cagaagccaucuccauuuaa

SEQ ID NO: 196661 - RNA, 21 nt, Artificial Sequence
  Synthetic
gcagaagccaucuccauuuaa

SEQ ID NO: 196662 - RNA, 22 nt, Artificial Sequence
  Synthetic
agcagaagccaucuccauuuaa

SEQ ID NO: 196663 - RNA, 23 nt, Artificial Sequence
  Synthetic
aagcagaagccaucuccauuuaa

SEQ ID NO: 196664 - RNA, 24 nt, Artificial Sequence
  Synthetic
gaagcagaagccaucuccauuuaa

SEQ ID NO: 196665 - RNA, 18 nt, Artificial Sequence
  Synthetic
uaaccucaaugcauuuaa

SEQ ID NO: 196666 - RNA, 19 nt, Artificial Sequence
  Synthetic
guaaccucaaugcauuuaa

SEQ ID NO: 196667 - RNA, 20 nt, Artificial Sequence
  Synthetic
aguaaccucaaugcauuuaa

SEQ ID NO: 196668 - RNA, 21 nt, Artificial Sequence
  Synthetic
caguaaccucaaugcauuuaa

SEQ ID NO: 196669 - RNA, 22 nt, Artificial Sequence
  Synthetic
ccaguaaccucaaugcauuuaa

SEQ ID NO: 196670 - RNA, 23 nt, Artificial Sequence
  Synthetic
gccaguaaccucaaugcauuuaa

SEQ ID NO: 196671 - RNA, 24 nt, Artificial Sequence
  Synthetic
ggccaguaaccucaaugcauuuaa

SEQ ID NO: 196672 - RNA, 18 nt, Artificial Sequence
  Synthetic
uuaauagucaucauuuaa

SEQ ID NO: 196673 - RNA, 19 nt, Artificial Sequence
  Synthetic
auuaauagucaucauuuaa

SEQ ID NO: 196674 - RNA, 20 nt, Artificial Sequence
  Synthetic
uauuaauagucaucauuuaa

SEQ ID NO: 196675 - RNA, 21 nt, Artificial Sequence
  Synthetic
uuauuaauagucaucauuuaa

SEQ ID NO: 196676 - RNA, 22 nt, Artificial Sequence
  Synthetic
guuauuaauagucaucauuuaa

SEQ ID NO: 196677 - RNA, 23 nt, Artificial Sequence
  Synthetic
aguuauuaauagucaucauuuaa

SEQ ID NO: 196678 - RNA, 24 nt, Artificial Sequence
  Synthetic
uaguuauuaauagucaucauuuaa

SEQ ID NO: 196679 - RNA, 18 nt, Artificial Sequence
  Synthetic
cuacuugaacagauuuaa

SEQ ID NO: 196680 - RNA, 19 nt, Artificial Sequence
  Synthetic
ccuacuugaacagauuuaa

SEQ ID NO: 196681 - RNA, 20 nt, Artificial Sequence
  Synthetic
accuacuugaacagauuuaa

SEQ ID NO: 196682 - RNA, 21 nt, Artificial Sequence
  Synthetic
aaccuacuugaacagauuuaa

SEQ ID NO: 196683 - RNA, 22 nt, Artificial Sequence
  Synthetic
caaccuacuugaacagauuuaa

SEQ ID NO: 196684 - RNA, 23 nt, Artificial Sequence
  Synthetic
acaaccuacuugaacagauuuaa

SEQ ID NO: 196685 - RNA, 24 nt, Artificial Sequence
  Synthetic
aacaaccuacuugaacagauuuaa

SEQ ID NO: 196686 - RNA, 18 nt, Artificial Sequence
  Synthetic
auaugcugaaggauuuaa

SEQ ID NO: 196687 - RNA, 19 nt, Artificial Sequence
  Synthetic
aauaugcugaaggauuuaa

SEQ ID NO: 196688 - RNA, 20 nt, Artificial Sequence
  Synthetic
gaauaugcugaaggauuuaa

SEQ ID NO: 196689 - RNA, 21 nt, Artificial Sequence
  Synthetic
ggaauaugcugaaggauuuaa

SEQ ID NO: 196690 - RNA, 22 nt, Artificial Sequence
  Synthetic
aggaauaugcugaaggauuuaa

SEQ ID NO: 196691 - RNA, 23 nt, Artificial Sequence
  Synthetic
gaggaauaugcugaaggauuuaa

SEQ ID NO: 196692 - RNA, 24 nt, Artificial Sequence
  Synthetic
agaggaauaugcugaaggauuuaa

SEQ ID NO: 196693 - RNA, 18 nt, Artificial Sequence
  Synthetic
uaccucuauuggauuuaa

SEQ ID NO: 196694 - RNA, 19 nt, Artificial Sequence
  Synthetic
cuaccucuauuggauuuaa

SEQ ID NO: 196695 - RNA, 20 nt, Artificial Sequence
  Synthetic
acuaccucuauuggauuuaa

SEQ ID NO: 196696 - RNA, 21 nt, Artificial Sequence
  Synthetic
aacuaccucuauuggauuuaa

SEQ ID NO: 196697 - RNA, 22 nt, Artificial Sequence
  Synthetic
aaacuaccucuauuggauuuaa

SEQ ID NO: 196698 - RNA, 23 nt, Artificial Sequence
  Synthetic
aaaacuaccucuauuggauuuaa

SEQ ID NO: 196699 - RNA, 24 nt, Artificial Sequence
  Synthetic
gaaaacuaccucuauuggauuuaa

SEQ ID NO: 196700 - RNA, 18 nt, Artificial Sequence
  Synthetic
cucaugugaaauauuuaa

SEQ ID NO: 196701 - RNA, 19 nt, Artificial Sequence
  Synthetic
acucaugugaaauauuuaa

SEQ ID NO: 196702 - RNA, 20 nt, Artificial Sequence
  Synthetic
aacucaugugaaauauuuaa

SEQ ID NO: 196703 - RNA, 21 nt, Artificial Sequence
  Synthetic
uaacucaugugaaauauuuaa

SEQ ID NO: 196704 - RNA, 22 nt, Artificial Sequence
  Synthetic
auaacucaugugaaauauuuaa

SEQ ID NO: 196705 - RNA, 23 nt, Artificial Sequence
  Synthetic
gauaacucaugugaaauauuuaa

SEQ ID NO: 196706 - RNA, 24 nt, Artificial Sequence
  Synthetic
agauaacucaugugaaauauuuaa

SEQ ID NO: 196707 - RNA, 18 nt, Artificial Sequence
  Synthetic
aucuggcucaauauuuaa

SEQ ID NO: 196708 - RNA, 19 nt, Artificial Sequence
  Synthetic
uaucuggcucaauauuuaa

SEQ ID NO: 196709 - RNA, 20 nt, Artificial Sequence
  Synthetic
auaucuggcucaauauuuaa

SEQ ID NO: 196710 - RNA, 21 nt, Artificial Sequence
  Synthetic
cauaucuggcucaauauuuaa

SEQ ID NO: 196711 - RNA, 22 nt, Artificial Sequence
  Synthetic
ucauaucuggcucaauauuuaa

SEQ ID NO: 196712 - RNA, 23 nt, Artificial Sequence
  Synthetic
aucauaucuggcucaauauuuaa

SEQ ID NO: 196713 - RNA, 24 nt, Artificial Sequence
  Synthetic
caucauaucuggcucaauauuuaa

SEQ ID NO: 196714 - RNA, 18 nt, Artificial Sequence
  Synthetic
uacuugguauauauuuaa

SEQ ID NO: 196715 - RNA, 19 nt, Artificial Sequence
  Synthetic
uuacuugguauauauuuaa

SEQ ID NO: 196716 - RNA, 20 nt, Artificial Sequence
  Synthetic
auuacuugguauauauuuaa

SEQ ID NO: 196717 - RNA, 21 nt, Artificial Sequence
  Synthetic
cauuacuugguauauauuuaa

SEQ ID NO: 196718 - RNA, 22 nt, Artificial Sequence
  Synthetic
ucauuacuugguauauauuuaa

SEQ ID NO: 196719 - RNA, 23 nt, Artificial Sequence
  Synthetic
cucauuacuugguauauauuuaa

SEQ ID NO: 196720 - RNA, 24 nt, Artificial Sequence
  Synthetic
ucucauuacuugguauauauuuaa

SEQ ID NO: 196721 - RNA, 18 nt, Artificial Sequence
  Synthetic
gguauaguguauauuuaa

SEQ ID NO: 196722 - RNA, 19 nt, Artificial Sequence
  Synthetic
ggguauaguguauauuuaa

SEQ ID NO: 196723 - RNA, 20 nt, Artificial Sequence
  Synthetic
uggguauaguguauauuuaa

SEQ ID NO: 196724 - RNA, 21 nt, Artificial Sequence
  Synthetic
guggguauaguguauauuuaa

SEQ ID NO: 196725 - RNA, 22 nt, Artificial Sequence
  Synthetic
aguggguauaguguauauuuaa

SEQ ID NO: 196726 - RNA, 23 nt, Artificial Sequence
  Synthetic
uaguggguauaguguauauuuaa

SEQ ID NO: 196727 - RNA, 24 nt, Artificial Sequence
  Synthetic
uuaguggguauaguguauauuuaa

SEQ ID NO: 196728 - RNA, 18 nt, Artificial Sequence
  Synthetic
cauaaugauuauauuuaa

SEQ ID NO: 196729 - RNA, 19 nt, Artificial Sequence
  Synthetic
acauaaugauuauauuuaa

SEQ ID NO: 196730 - RNA, 20 nt, Artificial Sequence
  Synthetic
cacauaaugauuauauuuaa

SEQ ID NO: 196731 - RNA, 21 nt, Artificial Sequence
  Synthetic
ucacauaaugauuauauuuaa

SEQ ID NO: 196732 - RNA, 22 nt, Artificial Sequence
  Synthetic
uucacauaaugauuauauuuaa

SEQ ID NO: 196733 - RNA, 23 nt, Artificial Sequence
  Synthetic
auucacauaaugauuauauuuaa

SEQ ID NO: 196734 - RNA, 24 nt, Artificial Sequence
  Synthetic
uauucacauaaugauuauauuuaa

SEQ ID NO: 196735 - RNA, 18 nt, Artificial Sequence
  Synthetic
ccagagauaccuauuuaa

SEQ ID NO: 196736 - RNA, 19 nt, Artificial Sequence
  Synthetic
gccagagauaccuauuuaa

SEQ ID NO: 196737 - RNA, 20 nt, Artificial Sequence
  Synthetic
agccagagauaccuauuuaa

SEQ ID NO: 196738 - RNA, 21 nt, Artificial Sequence
  Synthetic
uagccagagauaccuauuuaa

SEQ ID NO: 196739 - RNA, 22 nt, Artificial Sequence
  Synthetic
cuagccagagauaccuauuuaa

SEQ ID NO: 196740 - RNA, 23 nt, Artificial Sequence
  Synthetic
acuagccagagauaccuauuuaa

SEQ ID NO: 196741 - RNA, 24 nt, Artificial Sequence
  Synthetic
uacuagccagagauaccuauuuaa

SEQ ID NO: 196742 - RNA, 18 nt, Artificial Sequence
  Synthetic
cucuaggauccuauuuaa

SEQ ID NO: 196743 - RNA, 19 nt, Artificial Sequence
  Synthetic
gcucuaggauccuauuuaa

SEQ ID NO: 196744 - RNA, 20 nt, Artificial Sequence
  Synthetic
ugcucuaggauccuauuuaa

SEQ ID NO: 196745 - RNA, 21 nt, Artificial Sequence
  Synthetic
cugcucuaggauccuauuuaa

SEQ ID NO: 196746 - RNA, 22 nt, Artificial Sequence
  Synthetic
gcugcucuaggauccuauuuaa

SEQ ID NO: 196747 - RNA, 23 nt, Artificial Sequence
  Synthetic
agcugcucuaggauccuauuuaa

SEQ ID NO: 196748 - RNA, 24 nt, Artificial Sequence
  Synthetic
uagcugcucuaggauccuauuuaa

SEQ ID NO: 196749 - RNA, 18 nt, Artificial Sequence
  Synthetic
aucaacuuaucuauuuaa

SEQ ID NO: 196750 - RNA, 19 nt, Artificial Sequence
  Synthetic
uaucaacuuaucuauuuaa

SEQ ID NO: 196751 - RNA, 20 nt, Artificial Sequence
  Synthetic
auaucaacuuaucuauuuaa

SEQ ID NO: 196752 - RNA, 21 nt, Artificial Sequence
  Synthetic
aauaucaacuuaucuauuuaa

SEQ ID NO: 196753 - RNA, 22 nt, Artificial Sequence
  Synthetic
aaauaucaacuuaucuauuuaa

SEQ ID NO: 196754 - RNA, 23 nt, Artificial Sequence
  Synthetic
caaauaucaacuuaucuauuuaa

SEQ ID NO: 196755 - RNA, 24 nt, Artificial Sequence
  Synthetic
ucaaauaucaacuuaucuauuuaa

SEQ ID NO: 196756 - RNA, 18 nt, Artificial Sequence
  Synthetic
ugugaguuauuuauuuaa

SEQ ID NO: 196757 - RNA, 19 nt, Artificial Sequence
  Synthetic
augugaguuauuuauuuaa

SEQ ID NO: 196758 - RNA, 20 nt, Artificial Sequence
  Synthetic
aaugugaguuauuuauuuaa

SEQ ID NO: 196759 - RNA, 21 nt, Artificial Sequence
  Synthetic
aaaugugaguuauuuauuuaa

SEQ ID NO: 196760 - RNA, 22 nt, Artificial Sequence
  Synthetic
aaaaugugaguuauuuauuuaa

SEQ ID NO: 196761 - RNA, 23 nt, Artificial Sequence
  Synthetic
uaaaaugugaguuauuuauuuaa

SEQ ID NO: 196762 - RNA, 24 nt, Artificial Sequence
  Synthetic
cuaaaaugugaguuauuuauuuaa

SEQ ID NO: 196763 - RNA, 18 nt, Artificial Sequence
  Synthetic
uuacgguuugaacuuuaa

SEQ ID NO: 196764 - RNA, 19 nt, Artificial Sequence
  Synthetic
auuacgguuugaacuuuaa

SEQ ID NO: 196765 - RNA, 20 nt, Artificial Sequence
  Synthetic
aauuacgguuugaacuuuaa

SEQ ID NO: 196766 - RNA, 21 nt, Artificial Sequence
  Synthetic
uaauuacgguuugaacuuuaa

SEQ ID NO: 196767 - RNA, 22 nt, Artificial Sequence
  Synthetic
auaauuacgguuugaacuuuaa

SEQ ID NO: 196768 - RNA, 23 nt, Artificial Sequence
  Synthetic
uauaauuacgguuugaacuuuaa

SEQ ID NO: 196769 - RNA, 24 nt, Artificial Sequence
  Synthetic
uuauaauuacgguuugaacuuuaa

SEQ ID NO: 196770 - RNA, 18 nt, Artificial Sequence
  Synthetic
auauugcagacacuuuaa

SEQ ID NO: 196771 - RNA, 19 nt, Artificial Sequence
  Synthetic
cauauugcagacacuuuaa

SEQ ID NO: 196772 - RNA, 20 nt, Artificial Sequence
  Synthetic
ucauauugcagacacuuuaa

SEQ ID NO: 196773 - RNA, 21 nt, Artificial Sequence
  Synthetic
aucauauugcagacacuuuaa

SEQ ID NO: 196774 - RNA, 22 nt, Artificial Sequence
  Synthetic
aaucauauugcagacacuuuaa

SEQ ID NO: 196775 - RNA, 23 nt, Artificial Sequence
  Synthetic
aaaucauauugcagacacuuuaa

SEQ ID NO: 196776 - RNA, 24 nt, Artificial Sequence
  Synthetic
aaaaucauauugcagacacuuuaa

SEQ ID NO: 196777 - RNA, 18 nt, Artificial Sequence
  Synthetic
gaaaauuaugcacuuuaa

SEQ ID NO: 196778 - RNA, 19 nt, Artificial Sequence
  Synthetic
agaaaauuaugcacuuuaa

SEQ ID NO: 196779 - RNA, 20 nt, Artificial Sequence
  Synthetic
cagaaaauuaugcacuuuaa

SEQ ID NO: 196780 - RNA, 21 nt, Artificial Sequence
  Synthetic
ccagaaaauuaugcacuuuaa

SEQ ID NO: 196781 - RNA, 22 nt, Artificial Sequence
  Synthetic
accagaaaauuaugcacuuuaa

SEQ ID NO: 196782 - RNA, 23 nt, Artificial Sequence
  Synthetic
aaccagaaaauuaugcacuuuaa

SEQ ID NO: 196783 - RNA, 24 nt, Artificial Sequence
  Synthetic
gaaccagaaaauuaugcacuuuaa

SEQ ID NO: 196784 - RNA, 18 nt, Artificial Sequence
  Synthetic
uaggaggaacuacuuuaa

SEQ ID NO: 196785 - RNA, 19 nt, Artificial Sequence
  Synthetic
uuaggaggaacuacuuuaa

SEQ ID NO: 196786 - RNA, 20 nt, Artificial Sequence
  Synthetic
cuuaggaggaacuacuuuaa

SEQ ID NO: 196787 - RNA, 21 nt, Artificial Sequence
  Synthetic
ccuuaggaggaacuacuuuaa

SEQ ID NO: 196788 - RNA, 22 nt, Artificial Sequence
  Synthetic
uccuuaggaggaacuacuuuaa

SEQ ID NO: 196789 - RNA, 23 nt, Artificial Sequence
  Synthetic
cuccuuaggaggaacuacuuuaa

SEQ ID NO: 196790 - RNA, 24 nt, Artificial Sequence
  Synthetic
acuccuuaggaggaacuacuuuaa

SEQ ID NO: 196791 - RNA, 18 nt, Artificial Sequence
  Synthetic
ucugcagcuguacuuuaa

SEQ ID NO: 196792 - RNA, 19 nt, Artificial Sequence
  Synthetic
cucugcagcuguacuuuaa

SEQ ID NO: 196793 - RNA, 20 nt, Artificial Sequence
  Synthetic
acucugcagcuguacuuuaa

SEQ ID NO: 196794 - RNA, 21 nt, Artificial Sequence
  Synthetic
uacucugcagcuguacuuuaa

SEQ ID NO: 196795 - RNA, 22 nt, Artificial Sequence
  Synthetic
auacucugcagcuguacuuuaa

SEQ ID NO: 196796 - RNA, 23 nt, Artificial Sequence
  Synthetic
uauacucugcagcuguacuuuaa

SEQ ID NO: 196797 - RNA, 24 nt, Artificial Sequence
  Synthetic
uuauacucugcagcuguacuuuaa

SEQ ID NO: 196798 - RNA, 18 nt, Artificial Sequence
  Synthetic
aauaaacaguuacuuuaa

SEQ ID NO: 196799 - RNA, 19 nt, Artificial Sequence
  Synthetic
uaauaaacaguuacuuuaa

SEQ ID NO: 196800 - RNA, 20 nt, Artificial Sequence
  Synthetic
uuaauaaacaguuacuuuaa

SEQ ID NO: 196801 - RNA, 21 nt, Artificial Sequence
  Synthetic
auuaauaaacaguuacuuuaa

SEQ ID NO: 196802 - RNA, 22 nt, Artificial Sequence
  Synthetic
aauuaauaaacaguuacuuuaa

SEQ ID NO: 196803 - RNA, 23 nt, Artificial Sequence
  Synthetic
caauuaauaaacaguuacuuuaa

SEQ ID NO: 196804 - RNA, 24 nt, Artificial Sequence
  Synthetic
ucaauuaauaaacaguuacuuuaa

SEQ ID NO: 196805 - RNA, 18 nt, Artificial Sequence
  Synthetic
auuuuagaguuacuuuaa

SEQ ID NO: 196806 - RNA, 19 nt, Artificial Sequence
  Synthetic
uauuuuagaguuacuuuaa

SEQ ID NO: 196807 - RNA, 20 nt, Artificial Sequence
  Synthetic
auauuuuagaguuacuuuaa

SEQ ID NO: 196808 - RNA, 21 nt, Artificial Sequence
  Synthetic
uauauuuuagaguuacuuuaa

SEQ ID NO: 196809 - RNA, 22 nt, Artificial Sequence
  Synthetic
uuauauuuuagaguuacuuuaa

SEQ ID NO: 196810 - RNA, 23 nt, Artificial Sequence
  Synthetic
auuauauuuuagaguuacuuuaa

SEQ ID NO: 196811 - RNA, 24 nt, Artificial Sequence
  Synthetic
aauuauauuuuagaguuacuuuaa

SEQ ID NO: 196812 - RNA, 18 nt, Artificial Sequence
  Synthetic
cugccaguguuacuuuaa

SEQ ID NO: 196813 - RNA, 19 nt, Artificial Sequence
  Synthetic
gcugccaguguuacuuuaa

SEQ ID NO: 196814 - RNA, 20 nt, Artificial Sequence
  Synthetic
agcugccaguguuacuuuaa

SEQ ID NO: 196815 - RNA, 21 nt, Artificial Sequence
  Synthetic
aagcugccaguguuacuuuaa

SEQ ID NO: 196816 - RNA, 22 nt, Artificial Sequence
  Synthetic
aaagcugccaguguuacuuuaa

SEQ ID NO: 196817 - RNA, 23 nt, Artificial Sequence
  Synthetic
caaagcugccaguguuacuuuaa

SEQ ID NO: 196818 - RNA, 24 nt, Artificial Sequence
  Synthetic
ucaaagcugccaguguuacuuuaa

SEQ ID NO: 196819 - RNA, 18 nt, Artificial Sequence
  Synthetic
cuccauuugagccuuuaa

SEQ ID NO: 196820 - RNA, 19 nt, Artificial Sequence
  Synthetic
ucuccauuugagccuuuaa

SEQ ID NO: 196821 - RNA, 20 nt, Artificial Sequence
  Synthetic
gucuccauuugagccuuuaa

SEQ ID NO: 196822 - RNA, 21 nt, Artificial Sequence
  Synthetic
ugucuccauuugagccuuuaa

SEQ ID NO: 196823 - RNA, 22 nt, Artificial Sequence
  Synthetic
augucuccauuugagccuuuaa

SEQ ID NO: 196824 - RNA, 23 nt, Artificial Sequence
  Synthetic
aaugucuccauuugagccuuuaa

SEQ ID NO: 196825 - RNA, 24 nt, Artificial Sequence
  Synthetic
gaaugucuccauuugagccuuuaa

SEQ ID NO: 196826 - RNA, 18 nt, Artificial Sequence
  Synthetic
gaagccuuuauccuuuaa

SEQ ID NO: 196827 - RNA, 19 nt, Artificial Sequence
  Synthetic
ugaagccuuuauccuuuaa

SEQ ID NO: 196828 - RNA, 20 nt, Artificial Sequence
  Synthetic
uugaagccuuuauccuuuaa

SEQ ID NO: 196829 - RNA, 21 nt, Artificial Sequence
  Synthetic
uuugaagccuuuauccuuuaa

SEQ ID NO: 196830 - RNA, 22 nt, Artificial Sequence
  Synthetic
uuuugaagccuuuauccuuuaa

SEQ ID NO: 196831 - RNA, 23 nt, Artificial Sequence
  Synthetic
auuuugaagccuuuauccuuuaa

SEQ ID NO: 196832 - RNA, 24 nt, Artificial Sequence
  Synthetic
cauuuugaagccuuuauccuuuaa

SEQ ID NO: 196833 - RNA, 18 nt, Artificial Sequence
  Synthetic
uaauuauaauuccuuuaa

SEQ ID NO: 196834 - RNA, 19 nt, Artificial Sequence
  Synthetic
auaauuauaauuccuuuaa

SEQ ID NO: 196835 - RNA, 20 nt, Artificial Sequence
  Synthetic
aauaauuauaauuccuuuaa

SEQ ID NO: 196836 - RNA, 21 nt, Artificial Sequence
  Synthetic
aaauaauuauaauuccuuuaa

SEQ ID NO: 196837 - RNA, 22 nt, Artificial Sequence
  Synthetic
aaaauaauuauaauuccuuuaa

SEQ ID NO: 196838 - RNA, 23 nt, Artificial Sequence
  Synthetic
uaaaauaauuauaauuccuuuaa

SEQ ID NO: 196839 - RNA, 24 nt, Artificial Sequence
  Synthetic
cuaaaauaauuauaauuccuuuaa

SEQ ID NO: 196840 - RNA, 18 nt, Artificial Sequence
  Synthetic
aaacauuaacugcuuuaa

SEQ ID NO: 196841 - RNA, 19 nt, Artificial Sequence
  Synthetic
aaaacauuaacugcuuuaa

SEQ ID NO: 196842 - RNA, 20 nt, Artificial Sequence
  Synthetic
gaaaacauuaacugcuuuaa

SEQ ID NO: 196843 - RNA, 21 nt, Artificial Sequence
  Synthetic
cgaaaacauuaacugcuuuaa

SEQ ID NO: 196844 - RNA, 22 nt, Artificial Sequence
  Synthetic
acgaaaacauuaacugcuuuaa

SEQ ID NO: 196845 - RNA, 23 nt, Artificial Sequence
  Synthetic
aacgaaaacauuaacugcuuuaa

SEQ ID NO: 196846 - RNA, 24 nt, Artificial Sequence
  Synthetic
aaacgaaaacauuaacugcuuuaa

SEQ ID NO: 196847 - RNA, 18 nt, Artificial Sequence
  Synthetic
gagaauuuagugcuuuaa

SEQ ID NO: 196848 - RNA, 19 nt, Artificial Sequence
  Synthetic
agagaauuuagugcuuuaa

SEQ ID NO: 196849 - RNA, 20 nt, Artificial Sequence
  Synthetic
aagagaauuuagugcuuuaa

SEQ ID NO: 196850 - RNA, 21 nt, Artificial Sequence
  Synthetic
gaagagaauuuagugcuuuaa

SEQ ID NO: 196851 - RNA, 22 nt, Artificial Sequence
  Synthetic
agaagagaauuuagugcuuuaa

SEQ ID NO: 196852 - RNA, 23 nt, Artificial Sequence
  Synthetic
aagaagagaauuuagugcuuuaa

SEQ ID NO: 196853 - RNA, 24 nt, Artificial Sequence
  Synthetic
aaagaagagaauuuagugcuuuaa

SEQ ID NO: 196854 - RNA, 18 nt, Artificial Sequence
  Synthetic
uucaaucucgugcuuuaa

SEQ ID NO: 196855 - RNA, 19 nt, Artificial Sequence
  Synthetic
uuucaaucucgugcuuuaa

SEQ ID NO: 196856 - RNA, 20 nt, Artificial Sequence
  Synthetic
cuuucaaucucgugcuuuaa

SEQ ID NO: 196857 - RNA, 21 nt, Artificial Sequence
  Synthetic
ucuuucaaucucgugcuuuaa

SEQ ID NO: 196858 - RNA, 22 nt, Artificial Sequence
  Synthetic
aucuuucaaucucgugcuuuaa

SEQ ID NO: 196859 - RNA, 23 nt, Artificial Sequence
  Synthetic
caucuuucaaucucgugcuuuaa

SEQ ID NO: 196860 - RNA, 24 nt, Artificial Sequence
  Synthetic
gcaucuuucaaucucgugcuuuaa

SEQ ID NO: 196861 - RNA, 18 nt, Artificial Sequence
  Synthetic
guuaguuuuaaucuuuaa

SEQ ID NO: 196862 - RNA, 19 nt, Artificial Sequence
  Synthetic
uguuaguuuuaaucuuuaa

SEQ ID NO: 196863 - RNA, 20 nt, Artificial Sequence
  Synthetic
auguuaguuuuaaucuuuaa

SEQ ID NO: 196864 - RNA, 21 nt, Artificial Sequence
  Synthetic
uauguuaguuuuaaucuuuaa

SEQ ID NO: 196865 - RNA, 22 nt, Artificial Sequence
  Synthetic
uuauguuaguuuuaaucuuuaa

SEQ ID NO: 196866 - RNA, 23 nt, Artificial Sequence
  Synthetic
uuuauguuaguuuuaaucuuuaa

SEQ ID NO: 196867 - RNA, 24 nt, Artificial Sequence
  Synthetic
auuuauguuaguuuuaaucuuuaa

SEQ ID NO: 196868 - RNA, 18 nt, Artificial Sequence
  Synthetic
ccugaucaguaucuuuaa

SEQ ID NO: 196869 - RNA, 19 nt, Artificial Sequence
  Synthetic
cccugaucaguaucuuuaa

SEQ ID NO: 196870 - RNA, 20 nt, Artificial Sequence
  Synthetic
ucccugaucaguaucuuuaa

SEQ ID NO: 196871 - RNA, 21 nt, Artificial Sequence
  Synthetic
uucccugaucaguaucuuuaa

SEQ ID NO: 196872 - RNA, 22 nt, Artificial Sequence
  Synthetic
guucccugaucaguaucuuuaa

SEQ ID NO: 196873 - RNA, 23 nt, Artificial Sequence
  Synthetic
aguucccugaucaguaucuuuaa

SEQ ID NO: 196874 - RNA, 24 nt, Artificial Sequence
  Synthetic
gaguucccugaucaguaucuuuaa

SEQ ID NO: 196875 - RNA, 18 nt, Artificial Sequence
  Synthetic
cugcccauuacucuuuaa

SEQ ID NO: 196876 - RNA, 19 nt, Artificial Sequence
  Synthetic
ccugcccauuacucuuuaa

SEQ ID NO: 196877 - RNA, 20 nt, Artificial Sequence
  Synthetic
uccugcccauuacucuuuaa

SEQ ID NO: 196878 - RNA, 21 nt, Artificial Sequence
  Synthetic
cuccugcccauuacucuuuaa

SEQ ID NO: 196879 - RNA, 22 nt, Artificial Sequence
  Synthetic
ccuccugcccauuacucuuuaa

SEQ ID NO: 196880 - RNA, 23 nt, Artificial Sequence
  Synthetic
cccuccugcccauuacucuuuaa

SEQ ID NO: 196881 - RNA, 24 nt, Artificial Sequence
  Synthetic
ccccuccugcccauuacucuuuaa

SEQ ID NO: 196882 - RNA, 18 nt, Artificial Sequence
  Synthetic
gggguuaagguucuuuaa

SEQ ID NO: 196883 - RNA, 19 nt, Artificial Sequence
  Synthetic
cgggguuaagguucuuuaa

SEQ ID NO: 196884 - RNA, 20 nt, Artificial Sequence
  Synthetic
gcgggguuaagguucuuuaa

SEQ ID NO: 196885 - RNA, 21 nt, Artificial Sequence
  Synthetic
agcgggguuaagguucuuuaa

SEQ ID NO: 196886 - RNA, 22 nt, Artificial Sequence
  Synthetic
gagcgggguuaagguucuuuaa

SEQ ID NO: 196887 - RNA, 23 nt, Artificial Sequence
  Synthetic
agagcgggguuaagguucuuuaa

SEQ ID NO: 196888 - RNA, 24 nt, Artificial Sequence
  Synthetic
cagagcgggguuaagguucuuuaa

SEQ ID NO: 196889 - RNA, 18 nt, Artificial Sequence
  Synthetic
auaaagaagaaaguuuaa

SEQ ID NO: 196890 - RNA, 19 nt, Artificial Sequence
  Synthetic
uauaaagaagaaaguuuaa

SEQ ID NO: 196891 - RNA, 20 nt, Artificial Sequence
  Synthetic
guauaaagaagaaaguuuaa

SEQ ID NO: 196892 - RNA, 21 nt, Artificial Sequence
  Synthetic
uguauaaagaagaaaguuuaa

SEQ ID NO: 196893 - RNA, 22 nt, Artificial Sequence
  Synthetic
auguauaaagaagaaaguuuaa

SEQ ID NO: 196894 - RNA, 23 nt, Artificial Sequence
  Synthetic
aauguauaaagaagaaaguuuaa

SEQ ID NO: 196895 - RNA, 24 nt, Artificial Sequence
  Synthetic
aaauguauaaagaagaaaguuuaa

SEQ ID NO: 196896 - RNA, 18 nt, Artificial Sequence
  Synthetic
aaagagguacaaguuuaa

SEQ ID NO: 196897 - RNA, 19 nt, Artificial Sequence
  Synthetic
caaagagguacaaguuuaa

SEQ ID NO: 196898 - RNA, 20 nt, Artificial Sequence
  Synthetic
ccaaagagguacaaguuuaa

SEQ ID NO: 196899 - RNA, 21 nt, Artificial Sequence
  Synthetic
gccaaagagguacaaguuuaa

SEQ ID NO: 196900 - RNA, 22 nt, Artificial Sequence
  Synthetic
agccaaagagguacaaguuuaa

SEQ ID NO: 196901 - RNA, 23 nt, Artificial Sequence
  Synthetic
gagccaaagagguacaaguuuaa

SEQ ID NO: 196902 - RNA, 24 nt, Artificial Sequence
  Synthetic
ugagccaaagagguacaaguuuaa

SEQ ID NO: 196903 - RNA, 18 nt, Artificial Sequence
  Synthetic
aaggacacugaaguuuaa

SEQ ID NO: 196904 - RNA, 19 nt, Artificial Sequence
  Synthetic
caaggacacugaaguuuaa

SEQ ID NO: 196905 - RNA, 20 nt, Artificial Sequence
  Synthetic
ccaaggacacugaaguuuaa

SEQ ID NO: 196906 - RNA, 21 nt, Artificial Sequence
  Synthetic
accaaggacacugaaguuuaa

SEQ ID NO: 196907 - RNA, 22 nt, Artificial Sequence
  Synthetic
uaccaaggacacugaaguuuaa

SEQ ID NO: 196908 - RNA, 23 nt, Artificial Sequence
  Synthetic
guaccaaggacacugaaguuuaa

SEQ ID NO: 196909 - RNA, 24 nt, Artificial Sequence
  Synthetic
aguaccaaggacacugaaguuuaa

SEQ ID NO: 196910 - RNA, 18 nt, Artificial Sequence
  Synthetic
ccaagggagggaguuuaa

SEQ ID NO: 196911 - RNA, 19 nt, Artificial Sequence
  Synthetic
accaagggagggaguuuaa

SEQ ID NO: 196912 - RNA, 20 nt, Artificial Sequence
  Synthetic
uaccaagggagggaguuuaa

SEQ ID NO: 196913 - RNA, 21 nt, Artificial Sequence
  Synthetic
guaccaagggagggaguuuaa

SEQ ID NO: 196914 - RNA, 22 nt, Artificial Sequence
  Synthetic
aguaccaagggagggaguuuaa

SEQ ID NO: 196915 - RNA, 23 nt, Artificial Sequence
  Synthetic
uaguaccaagggagggaguuuaa

SEQ ID NO: 196916 - RNA, 24 nt, Artificial Sequence
  Synthetic
auaguaccaagggagggaguuuaa

SEQ ID NO: 196917 - RNA, 18 nt, Artificial Sequence
  Synthetic
aauggaauuuuaguuuaa

SEQ ID NO: 196918 - RNA, 19 nt, Artificial Sequence
  Synthetic
aaauggaauuuuaguuuaa

SEQ ID NO: 196919 - RNA, 20 nt, Artificial Sequence
  Synthetic
uaaauggaauuuuaguuuaa

SEQ ID NO: 196920 - RNA, 21 nt, Artificial Sequence
  Synthetic
auaaauggaauuuuaguuuaa

SEQ ID NO: 196921 - RNA, 22 nt, Artificial Sequence
  Synthetic
gauaaauggaauuuuaguuuaa

SEQ ID NO: 196922 - RNA, 23 nt, Artificial Sequence
  Synthetic
ggauaaauggaauuuuaguuuaa

SEQ ID NO: 196923 - RNA, 24 nt, Artificial Sequence
  Synthetic
gggauaaauggaauuuuaguuuaa

SEQ ID NO: 196924 - RNA, 18 nt, Artificial Sequence
  Synthetic
ucacuacgagagguuuaa

SEQ ID NO: 196925 - RNA, 19 nt, Artificial Sequence
  Synthetic
aucacuacgagagguuuaa

SEQ ID NO: 196926 - RNA, 20 nt, Artificial Sequence
  Synthetic
aaucacuacgagagguuuaa

SEQ ID NO: 196927 - RNA, 21 nt, Artificial Sequence
  Synthetic
gaaucacuacgagagguuuaa

SEQ ID NO: 196928 - RNA, 22 nt, Artificial Sequence
  Synthetic
ugaaucacuacgagagguuuaa

SEQ ID NO: 196929 - RNA, 23 nt, Artificial Sequence
  Synthetic
uugaaucacuacgagagguuuaa

SEQ ID NO: 196930 - RNA, 24 nt, Artificial Sequence
  Synthetic
guugaaucacuacgagagguuuaa

SEQ ID NO: 196931 - RNA, 18 nt, Artificial Sequence
  Synthetic
aacucuucggagguuuaa

SEQ ID NO: 196932 - RNA, 19 nt, Artificial Sequence
  Synthetic
gaacucuucggagguuuaa

SEQ ID NO: 196933 - RNA, 20 nt, Artificial Sequence
  Synthetic
agaacucuucggagguuuaa

SEQ ID NO: 196934 - RNA, 21 nt, Artificial Sequence
  Synthetic
aagaacucuucggagguuuaa

SEQ ID NO: 196935 - RNA, 22 nt, Artificial Sequence
  Synthetic
uaagaacucuucggagguuuaa

SEQ ID NO: 196936 - RNA, 23 nt, Artificial Sequence
  Synthetic
auaagaacucuucggagguuuaa

SEQ ID NO: 196937 - RNA, 24 nt, Artificial Sequence
  Synthetic
cauaagaacucuucggagguuuaa

SEQ ID NO: 196938 - RNA, 18 nt, Artificial Sequence
  Synthetic
uuuucuuauuugguuuaa

SEQ ID NO: 196939 - RNA, 19 nt, Artificial Sequence
  Synthetic
uuuuucuuauuugguuuaa

SEQ ID NO: 196940 - RNA, 20 nt, Artificial Sequence
  Synthetic
guuuuucuuauuugguuuaa

SEQ ID NO: 196941 - RNA, 21 nt, Artificial Sequence
  Synthetic
aguuuuucuuauuugguuuaa

SEQ ID NO: 196942 - RNA, 22 nt, Artificial Sequence
  Synthetic
aaguuuuucuuauuugguuuaa

SEQ ID NO: 196943 - RNA, 23 nt, Artificial Sequence
  Synthetic
aaaguuuuucuuauuugguuuaa

SEQ ID NO: 196944 - RNA, 24 nt, Artificial Sequence
  Synthetic
gaaaguuuuucuuauuugguuuaa

SEQ ID NO: 196945 - RNA, 18 nt, Artificial Sequence
  Synthetic
gaauauuaaaauguuuaa

SEQ ID NO: 196946 - RNA, 19 nt, Artificial Sequence
  Synthetic
ugaauauuaaaauguuuaa

SEQ ID NO: 196947 - RNA, 20 nt, Artificial Sequence
  Synthetic
cugaauauuaaaauguuuaa

SEQ ID NO: 196948 - RNA, 21 nt, Artificial Sequence
  Synthetic
acugaauauuaaaauguuuaa

SEQ ID NO: 196949 - RNA, 22 nt, Artificial Sequence
  Synthetic
cacugaauauuaaaauguuuaa

SEQ ID NO: 196950 - RNA, 23 nt, Artificial Sequence
  Synthetic
ccacugaauauuaaaauguuuaa

SEQ ID NO: 196951 - RNA, 24 nt, Artificial Sequence
  Synthetic
accacugaauauuaaaauguuuaa

SEQ ID NO: 196952 - RNA, 18 nt, Artificial Sequence
  Synthetic
acuugcagaaauguuuaa

SEQ ID NO: 196953 - RNA, 19 nt, Artificial Sequence
  Synthetic
cacuugcagaaauguuuaa

SEQ ID NO: 196954 - RNA, 20 nt, Artificial Sequence
  Synthetic
gcacuugcagaaauguuuaa

SEQ ID NO: 196955 - RNA, 21 nt, Artificial Sequence
  Synthetic
ugcacuugcagaaauguuuaa

SEQ ID NO: 196956 - RNA, 22 nt, Artificial Sequence
  Synthetic
cugcacuugcagaaauguuuaa

SEQ ID NO: 196957 - RNA, 23 nt, Artificial Sequence
  Synthetic
ucugcacuugcagaaauguuuaa

SEQ ID NO: 196958 - RNA, 24 nt, Artificial Sequence
  Synthetic
cucugcacuugcagaaauguuuaa

SEQ ID NO: 196959 - RNA, 18 nt, Artificial Sequence
  Synthetic
gcaugccacaauguuuaa

SEQ ID NO: 196960 - RNA, 19 nt, Artificial Sequence
  Synthetic
agcaugccacaauguuuaa

SEQ ID NO: 196961 - RNA, 20 nt, Artificial Sequence
  Synthetic
aagcaugccacaauguuuaa

SEQ ID NO: 196962 - RNA, 21 nt, Artificial Sequence
  Synthetic
aaagcaugccacaauguuuaa

SEQ ID NO: 196963 - RNA, 22 nt, Artificial Sequence
  Synthetic
uaaagcaugccacaauguuuaa

SEQ ID NO: 196964 - RNA, 23 nt, Artificial Sequence
  Synthetic
auaaagcaugccacaauguuuaa

SEQ ID NO: 196965 - RNA, 24 nt, Artificial Sequence
  Synthetic
aauaaagcaugccacaauguuuaa

SEQ ID NO: 196966 - RNA, 18 nt, Artificial Sequence
  Synthetic
ugucuucuacauguuuaa

SEQ ID NO: 196967 - RNA, 19 nt, Artificial Sequence
  Synthetic
uugucuucuacauguuuaa

SEQ ID NO: 196968 - RNA, 20 nt, Artificial Sequence
  Synthetic
uuugucuucuacauguuuaa

SEQ ID NO: 196969 - RNA, 21 nt, Artificial Sequence
  Synthetic
cuuugucuucuacauguuuaa

SEQ ID NO: 196970 - RNA, 22 nt, Artificial Sequence
  Synthetic
acuuugucuucuacauguuuaa

SEQ ID NO: 196971 - RNA, 23 nt, Artificial Sequence
  Synthetic
uacuuugucuucuacauguuuaa

SEQ ID NO: 196972 - RNA, 24 nt, Artificial Sequence
  Synthetic
uuacuuugucuucuacauguuuaa

SEQ ID NO: 196973 - RNA, 18 nt, Artificial Sequence
  Synthetic
gacaaaauagauguuuaa

SEQ ID NO: 196974 - RNA, 19 nt, Artificial Sequence
  Synthetic
agacaaaauagauguuuaa

SEQ ID NO: 196975 - RNA, 20 nt, Artificial Sequence
  Synthetic
aagacaaaauagauguuuaa

SEQ ID NO: 196976 - RNA, 21 nt, Artificial Sequence
  Synthetic
aaagacaaaauagauguuuaa

SEQ ID NO: 196977 - RNA, 22 nt, Artificial Sequence
  Synthetic
gaaagacaaaauagauguuuaa

SEQ ID NO: 196978 - RNA, 23 nt, Artificial Sequence
  Synthetic
ugaaagacaaaauagauguuuaa

SEQ ID NO: 196979 - RNA, 24 nt, Artificial Sequence
  Synthetic
gugaaagacaaaauagauguuuaa

SEQ ID NO: 196980 - RNA, 18 nt, Artificial Sequence
  Synthetic
aggaaaguaacuguuuaa

SEQ ID NO: 196981 - RNA, 19 nt, Artificial Sequence
  Synthetic
uaggaaaguaacuguuuaa

SEQ ID NO: 196982 - RNA, 20 nt, Artificial Sequence
  Synthetic
cuaggaaaguaacuguuuaa

SEQ ID NO: 196983 - RNA, 21 nt, Artificial Sequence
  Synthetic
acuaggaaaguaacuguuuaa

SEQ ID NO: 196984 - RNA, 22 nt, Artificial Sequence
  Synthetic
aacuaggaaaguaacuguuuaa

SEQ ID NO: 196985 - RNA, 23 nt, Artificial Sequence
  Synthetic
uaacuaggaaaguaacuguuuaa

SEQ ID NO: 196986 - RNA, 24 nt, Artificial Sequence
  Synthetic
uuaacuaggaaaguaacuguuuaa

SEQ ID NO: 196987 - RNA, 18 nt, Artificial Sequence
  Synthetic
caaccauaguuuguuuaa

SEQ ID NO: 196988 - RNA, 19 nt, Artificial Sequence
  Synthetic
ccaaccauaguuuguuuaa

SEQ ID NO: 196989 - RNA, 20 nt, Artificial Sequence
  Synthetic
uccaaccauaguuuguuuaa

SEQ ID NO: 196990 - RNA, 21 nt, Artificial Sequence
  Synthetic
auccaaccauaguuuguuuaa

SEQ ID NO: 196991 - RNA, 22 nt, Artificial Sequence
  Synthetic
uauccaaccauaguuuguuuaa

SEQ ID NO: 196992 - RNA, 23 nt, Artificial Sequence
  Synthetic
auauccaaccauaguuuguuuaa

SEQ ID NO: 196993 - RNA, 24 nt, Artificial Sequence
  Synthetic
aauauccaaccauaguuuguuuaa

SEQ ID NO: 196994 - RNA, 18 nt, Artificial Sequence
  Synthetic
ugggguaguuuuguuuaa

SEQ ID NO: 196995 - RNA, 19 nt, Artificial Sequence
  Synthetic
gugggguaguuuuguuuaa

SEQ ID NO: 196996 - RNA, 20 nt, Artificial Sequence
  Synthetic
cgugggguaguuuuguuuaa

SEQ ID NO: 196997 - RNA, 21 nt, Artificial Sequence
  Synthetic
acgugggguaguuuuguuuaa

SEQ ID NO: 196998 - RNA, 22 nt, Artificial Sequence
  Synthetic
aacgugggguaguuuuguuuaa

SEQ ID NO: 196999 - RNA, 23 nt, Artificial Sequence
  Synthetic
gaacgugggguaguuuuguuuaa

SEQ ID NO: 197000 - RNA, 24 nt, Artificial Sequence
  Synthetic
agaacgugggguaguuuuguuuaa

SEQ ID NO: 197001 - RNA, 18 nt, Artificial Sequence
  Synthetic
uuuuuuguuuuuguuuaa

SEQ ID NO: 197002 - RNA, 19 nt, Artificial Sequence
  Synthetic
guuuuuuguuuuuguuuaa

SEQ ID NO: 197003 - RNA, 20 nt, Artificial Sequence
  Synthetic
uguuuuuuguuuuuguuuaa

SEQ ID NO: 197004 - RNA, 21 nt, Artificial Sequence
  Synthetic
cuguuuuuuguuuuuguuuaa

SEQ ID NO: 197005 - RNA, 22 nt, Artificial Sequence
  Synthetic
ucuguuuuuuguuuuuguuuaa

SEQ ID NO: 197006 - RNA, 23 nt, Artificial Sequence
  Synthetic
cucuguuuuuuguuuuuguuuaa

SEQ ID NO: 197007 - RNA, 24 nt, Artificial Sequence
  Synthetic
acucuguuuuuuguuuuuguuuaa

SEQ ID NO: 197008 - RNA, 18 nt, Artificial Sequence
  Synthetic
guaccauagaaauuuuaa

SEQ ID NO: 197009 - RNA, 19 nt, Artificial Sequence
  Synthetic
aguaccauagaaauuuuaa

SEQ ID NO: 197010 - RNA, 20 nt, Artificial Sequence
  Synthetic
aaguaccauagaaauuuuaa

SEQ ID NO: 197011 - RNA, 21 nt, Artificial Sequence
  Synthetic
aaaguaccauagaaauuuuaa

SEQ ID NO: 197012 - RNA, 22 nt, Artificial Sequence
  Synthetic
aaaaguaccauagaaauuuuaa

SEQ ID NO: 197013 - RNA, 23 nt, Artificial Sequence
  Synthetic
caaaaguaccauagaaauuuuaa

SEQ ID NO: 197014 - RNA, 24 nt, Artificial Sequence
  Synthetic
ucaaaaguaccauagaaauuuuaa

SEQ ID NO: 197015 - RNA, 18 nt, Artificial Sequence
  Synthetic
uuuugaacuaaauuuuaa

SEQ ID NO: 197016 - RNA, 19 nt, Artificial Sequence
  Synthetic
cuuuugaacuaaauuuuaa

SEQ ID NO: 197017 - RNA, 20 nt, Artificial Sequence
  Synthetic
gcuuuugaacuaaauuuuaa

SEQ ID NO: 197018 - RNA, 21 nt, Artificial Sequence
  Synthetic
ggcuuuugaacuaaauuuuaa

SEQ ID NO: 197019 - RNA, 22 nt, Artificial Sequence
  Synthetic
uggcuuuugaacuaaauuuuaa

SEQ ID NO: 197020 - RNA, 23 nt, Artificial Sequence
  Synthetic
uuggcuuuugaacuaaauuuuaa

SEQ ID NO: 197021 - RNA, 24 nt, Artificial Sequence
  Synthetic
guuggcuuuugaacuaaauuuuaa

SEQ ID NO: 197022 - RNA, 18 nt, Artificial Sequence
  Synthetic
uuuuuuuguaaauuuuaa

SEQ ID NO: 197023 - RNA, 19 nt, Artificial Sequence
  Synthetic
uuuuuuuuguaaauuuuaa

SEQ ID NO: 197024 - RNA, 20 nt, Artificial Sequence
  Synthetic
uuuuuuuuuguaaauuuuaa

SEQ ID NO: 197025 - RNA, 21 nt, Artificial Sequence
  Synthetic
uuuuuuuuuuguaaauuuuaa

SEQ ID NO: 197026 - RNA, 22 nt, Artificial Sequence
  Synthetic
auuuuuuuuuuguaaauuuuaa

SEQ ID NO: 197027 - RNA, 23 nt, Artificial Sequence
  Synthetic
cauuuuuuuuuuguaaauuuuaa

SEQ ID NO: 197028 - RNA, 24 nt, Artificial Sequence
  Synthetic
gcauuuuuuuuuuguaaauuuuaa

SEQ ID NO: 197029 - RNA, 18 nt, Artificial Sequence
  Synthetic
auccauuuuaaauuuuaa

SEQ ID NO: 197030 - RNA, 19 nt, Artificial Sequence
  Synthetic
uauccauuuuaaauuuuaa

SEQ ID NO: 197031 - RNA, 20 nt, Artificial Sequence
  Synthetic
uuauccauuuuaaauuuuaa

SEQ ID NO: 197032 - RNA, 21 nt, Artificial Sequence
  Synthetic
uuuauccauuuuaaauuuuaa

SEQ ID NO: 197033 - RNA, 22 nt, Artificial Sequence
  Synthetic
auuuauccauuuuaaauuuuaa

SEQ ID NO: 197034 - RNA, 23 nt, Artificial Sequence
  Synthetic
uauuuauccauuuuaaauuuuaa

SEQ ID NO: 197035 - RNA, 24 nt, Artificial Sequence
  Synthetic
auauuuauccauuuuaaauuuuaa

SEQ ID NO: 197036 - RNA, 18 nt, Artificial Sequence
  Synthetic
acuuguaagcaauuuuaa

SEQ ID NO: 197037 - RNA, 19 nt, Artificial Sequence
  Synthetic
uacuuguaagcaauuuuaa

SEQ ID NO: 197038 - RNA, 20 nt, Artificial Sequence
  Synthetic
guacuuguaagcaauuuuaa

SEQ ID NO: 197039 - RNA, 21 nt, Artificial Sequence
  Synthetic
uguacuuguaagcaauuuuaa

SEQ ID NO: 197040 - RNA, 22 nt, Artificial Sequence
  Synthetic
uuguacuuguaagcaauuuuaa

SEQ ID NO: 197041 - RNA, 23 nt, Artificial Sequence
  Synthetic
auuguacuuguaagcaauuuuaa

SEQ ID NO: 197042 - RNA, 24 nt, Artificial Sequence
  Synthetic
gauuguacuuguaagcaauuuuaa

SEQ ID NO: 197043 - RNA, 18 nt, Artificial Sequence
  Synthetic
ucacaaaacacauuuuaa

SEQ ID NO: 197044 - RNA, 19 nt, Artificial Sequence
  Synthetic
aucacaaaacacauuuuaa

SEQ ID NO: 197045 - RNA, 20 nt, Artificial Sequence
  Synthetic
uaucacaaaacacauuuuaa

SEQ ID NO: 197046 - RNA, 21 nt, Artificial Sequence
  Synthetic
auaucacaaaacacauuuuaa

SEQ ID NO: 197047 - RNA, 22 nt, Artificial Sequence
  Synthetic
aauaucacaaaacacauuuuaa

SEQ ID NO: 197048 - RNA, 23 nt, Artificial Sequence
  Synthetic
gaauaucacaaaacacauuuuaa

SEQ ID NO: 197049 - RNA, 24 nt, Artificial Sequence
  Synthetic
ugaauaucacaaaacacauuuuaa

SEQ ID NO: 197050 - RNA, 18 nt, Artificial Sequence
  Synthetic
ggauauaagccauuuuaa

SEQ ID NO: 197051 - RNA, 19 nt, Artificial Sequence
  Synthetic
uggauauaagccauuuuaa

SEQ ID NO: 197052 - RNA, 20 nt, Artificial Sequence
  Synthetic
uuggauauaagccauuuuaa

SEQ ID NO: 197053 - RNA, 21 nt, Artificial Sequence
  Synthetic
uuuggauauaagccauuuuaa

SEQ ID NO: 197054 - RNA, 22 nt, Artificial Sequence
  Synthetic
uuuuggauauaagccauuuuaa

SEQ ID NO: 197055 - RNA, 23 nt, Artificial Sequence
  Synthetic
cuuuuggauauaagccauuuuaa

SEQ ID NO: 197056 - RNA, 24 nt, Artificial Sequence
  Synthetic
ucuuuuggauauaagccauuuuaa

SEQ ID NO: 197057 - RNA, 18 nt, Artificial Sequence
  Synthetic
cuauguccugcauuuuaa

SEQ ID NO: 197058 - RNA, 19 nt, Artificial Sequence
  Synthetic
ccuauguccugcauuuuaa

SEQ ID NO: 197059 - RNA, 20 nt, Artificial Sequence
  Synthetic
accuauguccugcauuuuaa

SEQ ID NO: 197060 - RNA, 21 nt, Artificial Sequence
  Synthetic
uaccuauguccugcauuuuaa

SEQ ID NO: 197061 - RNA, 22 nt, Artificial Sequence
  Synthetic
uuaccuauguccugcauuuuaa

SEQ ID NO: 197062 - RNA, 23 nt, Artificial Sequence
  Synthetic
auuaccuauguccugcauuuuaa

SEQ ID NO: 197063 - RNA, 24 nt, Artificial Sequence
  Synthetic
gauuaccuauguccugcauuuuaa

SEQ ID NO: 197064 - RNA, 18 nt, Artificial Sequence
  Synthetic
augucucucucauuuuaa

SEQ ID NO: 197065 - RNA, 19 nt, Artificial Sequence
  Synthetic
aaugucucucucauuuuaa

SEQ ID NO: 197066 - RNA, 20 nt, Artificial Sequence
  Synthetic
uaaugucucucucauuuuaa

SEQ ID NO: 197067 - RNA, 21 nt, Artificial Sequence
  Synthetic
cuaaugucucucucauuuuaa

SEQ ID NO: 197068 - RNA, 22 nt, Artificial Sequence
  Synthetic
acuaaugucucucucauuuuaa

SEQ ID NO: 197069 - RNA, 23 nt, Artificial Sequence
  Synthetic
uacuaaugucucucucauuuuaa

SEQ ID NO: 197070 - RNA, 24 nt, Artificial Sequence
  Synthetic
auacuaaugucucucucauuuuaa

SEQ ID NO: 197071 - RNA, 18 nt, Artificial Sequence
  Synthetic
uaaauauauucauuuuaa

SEQ ID NO: 197072 - RNA, 19 nt, Artificial Sequence
  Synthetic
auaaauauauucauuuuaa

SEQ ID NO: 197073 - RNA, 20 nt, Artificial Sequence
  Synthetic
aauaaauauauucauuuuaa

SEQ ID NO: 197074 - RNA, 21 nt, Artificial Sequence
  Synthetic
caauaaauauauucauuuuaa

SEQ ID NO: 197075 - RNA, 22 nt, Artificial Sequence
  Synthetic
ucaauaaauauauucauuuuaa

SEQ ID NO: 197076 - RNA, 23 nt, Artificial Sequence
  Synthetic
aucaauaaauauauucauuuuaa

SEQ ID NO: 197077 - RNA, 24 nt, Artificial Sequence
  Synthetic
aaucaauaaauauauucauuuuaa

SEQ ID NO: 197078 - RNA, 18 nt, Artificial Sequence
  Synthetic
acugaaacuucauuuuaa

SEQ ID NO: 197079 - RNA, 19 nt, Artificial Sequence
  Synthetic
aacugaaacuucauuuuaa

SEQ ID NO: 197080 - RNA, 20 nt, Artificial Sequence
  Synthetic
caacugaaacuucauuuuaa

SEQ ID NO: 197081 - RNA, 21 nt, Artificial Sequence
  Synthetic
acaacugaaacuucauuuuaa

SEQ ID NO: 197082 - RNA, 22 nt, Artificial Sequence
  Synthetic
aacaacugaaacuucauuuuaa

SEQ ID NO: 197083 - RNA, 23 nt, Artificial Sequence
  Synthetic
gaacaacugaaacuucauuuuaa

SEQ ID NO: 197084 - RNA, 24 nt, Artificial Sequence
  Synthetic
agaacaacugaaacuucauuuuaa

SEQ ID NO: 197085 - RNA, 18 nt, Artificial Sequence
  Synthetic
ugaugcccuagauuuuaa

SEQ ID NO: 197086 - RNA, 19 nt, Artificial Sequence
  Synthetic
augaugcccuagauuuuaa

SEQ ID NO: 197087 - RNA, 20 nt, Artificial Sequence
  Synthetic
gaugaugcccuagauuuuaa

SEQ ID NO: 197088 - RNA, 21 nt, Artificial Sequence
  Synthetic
ugaugaugcccuagauuuuaa

SEQ ID NO: 197089 - RNA, 22 nt, Artificial Sequence
  Synthetic
gugaugaugcccuagauuuuaa

SEQ ID NO: 197090 - RNA, 23 nt, Artificial Sequence
  Synthetic
agugaugaugcccuagauuuuaa

SEQ ID NO: 197091 - RNA, 24 nt, Artificial Sequence
  Synthetic
gagugaugaugcccuagauuuuaa

SEQ ID NO: 197092 - RNA, 18 nt, Artificial Sequence
  Synthetic
aaguauucuugauuuuaa

SEQ ID NO: 197093 - RNA, 19 nt, Artificial Sequence
  Synthetic
aaaguauucuugauuuuaa

SEQ ID NO: 197094 - RNA, 20 nt, Artificial Sequence
  Synthetic
aaaaguauucuugauuuuaa

SEQ ID NO: 197095 - RNA, 21 nt, Artificial Sequence
  Synthetic
uaaaaguauucuugauuuuaa

SEQ ID NO: 197096 - RNA, 22 nt, Artificial Sequence
  Synthetic
guaaaaguauucuugauuuuaa

SEQ ID NO: 197097 - RNA, 23 nt, Artificial Sequence
  Synthetic
gguaaaaguauucuugauuuuaa

SEQ ID NO: 197098 - RNA, 24 nt, Artificial Sequence
  Synthetic
ugguaaaaguauucuugauuuuaa

SEQ ID NO: 197099 - RNA, 18 nt, Artificial Sequence
  Synthetic
cauugucaaauauuuuaa

SEQ ID NO: 197100 - RNA, 19 nt, Artificial Sequence
  Synthetic
ccauugucaaauauuuuaa

SEQ ID NO: 197101 - RNA, 20 nt, Artificial Sequence
  Synthetic
uccauugucaaauauuuuaa

SEQ ID NO: 197102 - RNA, 21 nt, Artificial Sequence
  Synthetic
uuccauugucaaauauuuuaa

SEQ ID NO: 197103 - RNA, 22 nt, Artificial Sequence
  Synthetic
cuuccauugucaaauauuuuaa

SEQ ID NO: 197104 - RNA, 23 nt, Artificial Sequence
  Synthetic
gcuuccauugucaaauauuuuaa

SEQ ID NO: 197105 - RNA, 24 nt, Artificial Sequence
  Synthetic
agcuuccauugucaaauauuuuaa

SEQ ID NO: 197106 - RNA, 18 nt, Artificial Sequence
  Synthetic
aauuaauaaauauuuuaa

SEQ ID NO: 197107 - RNA, 19 nt, Artificial Sequence
  Synthetic
uaauuaauaaauauuuuaa

SEQ ID NO: 197108 - RNA, 20 nt, Artificial Sequence
  Synthetic
guaauuaauaaauauuuuaa

SEQ ID NO: 197109 - RNA, 21 nt, Artificial Sequence
  Synthetic
uguaauuaauaaauauuuuaa

SEQ ID NO: 197110 - RNA, 22 nt, Artificial Sequence
  Synthetic
auguaauuaauaaauauuuuaa

SEQ ID NO: 197111 - RNA, 23 nt, Artificial Sequence
  Synthetic
uauguaauuaauaaauauuuuaa

SEQ ID NO: 197112 - RNA, 24 nt, Artificial Sequence
  Synthetic
auauguaauuaauaaauauuuuaa

SEQ ID NO: 197113 - RNA, 18 nt, Artificial Sequence
  Synthetic
cauacauaaauauuuuaa

SEQ ID NO: 197114 - RNA, 19 nt, Artificial Sequence
  Synthetic
ccauacauaaauauuuuaa

SEQ ID NO: 197115 - RNA, 20 nt, Artificial Sequence
  Synthetic
cccauacauaaauauuuuaa

SEQ ID NO: 197116 - RNA, 21 nt, Artificial Sequence
  Synthetic
gcccauacauaaauauuuuaa

SEQ ID NO: 197117 - RNA, 22 nt, Artificial Sequence
  Synthetic
ggcccauacauaaauauuuuaa

SEQ ID NO: 197118 - RNA, 23 nt, Artificial Sequence
  Synthetic
cggcccauacauaaauauuuuaa

SEQ ID NO: 197119 - RNA, 24 nt, Artificial Sequence
  Synthetic
ccggcccauacauaaauauuuuaa

SEQ ID NO: 197120 - RNA, 18 nt, Artificial Sequence
  Synthetic
uacaauaagauauuuuaa

SEQ ID NO: 197121 - RNA, 19 nt, Artificial Sequence
  Synthetic
auacaauaagauauuuuaa

SEQ ID NO: 197122 - RNA, 20 nt, Artificial Sequence
  Synthetic
aauacaauaagauauuuuaa

SEQ ID NO: 197123 - RNA, 21 nt, Artificial Sequence
  Synthetic
caauacaauaagauauuuuaa

SEQ ID NO: 197124 - RNA, 22 nt, Artificial Sequence
  Synthetic
acaauacaauaagauauuuuaa

SEQ ID NO: 197125 - RNA, 23 nt, Artificial Sequence
  Synthetic
uacaauacaauaagauauuuuaa

SEQ ID NO: 197126 - RNA, 24 nt, Artificial Sequence
  Synthetic
cuacaauacaauaagauauuuuaa

SEQ ID NO: 197127 - RNA, 18 nt, Artificial Sequence
  Synthetic
auaagguauauauuuuaa

SEQ ID NO: 197128 - RNA, 19 nt, Artificial Sequence
  Synthetic
aauaagguauauauuuuaa

SEQ ID NO: 197129 - RNA, 20 nt, Artificial Sequence
  Synthetic
aaauaagguauauauuuuaa

SEQ ID NO: 197130 - RNA, 21 nt, Artificial Sequence
  Synthetic
uaaauaagguauauauuuuaa

SEQ ID NO: 197131 - RNA, 22 nt, Artificial Sequence
  Synthetic
uuaaauaagguauauauuuuaa

SEQ ID NO: 197132 - RNA, 23 nt, Artificial Sequence
  Synthetic
auuaaauaagguauauauuuuaa

SEQ ID NO: 197133 - RNA, 24 nt, Artificial Sequence
  Synthetic
cauuaaauaagguauauauuuuaa

SEQ ID NO: 197134 - RNA, 18 nt, Artificial Sequence
  Synthetic
uuaagaguuauauuuuaa

SEQ ID NO: 197135 - RNA, 19 nt, Artificial Sequence
  Synthetic
cuuaagaguuauauuuuaa

SEQ ID NO: 197136 - RNA, 20 nt, Artificial Sequence
  Synthetic
acuuaagaguuauauuuuaa

SEQ ID NO: 197137 - RNA, 21 nt, Artificial Sequence
  Synthetic
uacuuaagaguuauauuuuaa

SEQ ID NO: 197138 - RNA, 22 nt, Artificial Sequence
  Synthetic
auacuuaagaguuauauuuuaa

SEQ ID NO: 197139 - RNA, 23 nt, Artificial Sequence
  Synthetic
aauacuuaagaguuauauuuuaa

SEQ ID NO: 197140 - RNA, 24 nt, Artificial Sequence
  Synthetic
aaauacuuaagaguuauauuuuaa

SEQ ID NO: 197141 - RNA, 18 nt, Artificial Sequence
  Synthetic
cuuauaagcguauuuuaa

SEQ ID NO: 197142 - RNA, 19 nt, Artificial Sequence
  Synthetic
ccuuauaagcguauuuuaa

SEQ ID NO: 197143 - RNA, 20 nt, Artificial Sequence
  Synthetic
uccuuauaagcguauuuuaa

SEQ ID NO: 197144 - RNA, 21 nt, Artificial Sequence
  Synthetic
uuccuuauaagcguauuuuaa

SEQ ID NO: 197145 - RNA, 22 nt, Artificial Sequence
  Synthetic
cuuccuuauaagcguauuuuaa

SEQ ID NO: 197146 - RNA, 23 nt, Artificial Sequence
  Synthetic
ucuuccuuauaagcguauuuuaa

SEQ ID NO: 197147 - RNA, 24 nt, Artificial Sequence
  Synthetic
gucuuccuuauaagcguauuuuaa

SEQ ID NO: 197148 - RNA, 18 nt, Artificial Sequence
  Synthetic
uguaauugcaacuuuuaa

SEQ ID NO: 197149 - RNA, 19 nt, Artificial Sequence
  Synthetic
uuguaauugcaacuuuuaa

SEQ ID NO: 197150 - RNA, 20 nt, Artificial Sequence
  Synthetic
guuguaauugcaacuuuuaa

SEQ ID NO: 197151 - RNA, 21 nt, Artificial Sequence
  Synthetic
aguuguaauugcaacuuuuaa

SEQ ID NO: 197152 - RNA, 22 nt, Artificial Sequence
  Synthetic
aaguuguaauugcaacuuuuaa

SEQ ID NO: 197153 - RNA, 23 nt, Artificial Sequence
  Synthetic
caaguuguaauugcaacuuuuaa

SEQ ID NO: 197154 - RNA, 24 nt, Artificial Sequence
  Synthetic
gcaaguuguaauugcaacuuuuaa

SEQ ID NO: 197155 - RNA, 18 nt, Artificial Sequence
  Synthetic
uuuagcucccacuuuuaa

SEQ ID NO: 197156 - RNA, 19 nt, Artificial Sequence
  Synthetic
guuuagcucccacuuuuaa

SEQ ID NO: 197157 - RNA, 20 nt, Artificial Sequence
  Synthetic
uguuuagcucccacuuuuaa

SEQ ID NO: 197158 - RNA, 21 nt, Artificial Sequence
  Synthetic
auguuuagcucccacuuuuaa

SEQ ID NO: 197159 - RNA, 22 nt, Artificial Sequence
  Synthetic
aauguuuagcucccacuuuuaa

SEQ ID NO: 197160 - RNA, 23 nt, Artificial Sequence
  Synthetic
caauguuuagcucccacuuuuaa

SEQ ID NO: 197161 - RNA, 24 nt, Artificial Sequence
  Synthetic
ucaauguuuagcucccacuuuuaa

SEQ ID NO: 197162 - RNA, 18 nt, Artificial Sequence
  Synthetic
auaccucuacccuuuuaa

SEQ ID NO: 197163 - RNA, 19 nt, Artificial Sequence
  Synthetic
gauaccucuacccuuuuaa

SEQ ID NO: 197164 - RNA, 20 nt, Artificial Sequence
  Synthetic
ggauaccucuacccuuuuaa

SEQ ID NO: 197165 - RNA, 21 nt, Artificial Sequence
  Synthetic
gggauaccucuacccuuuuaa

SEQ ID NO: 197166 - RNA, 22 nt, Artificial Sequence
  Synthetic
agggauaccucuacccuuuuaa

SEQ ID NO: 197167 - RNA, 23 nt, Artificial Sequence
  Synthetic
aagggauaccucuacccuuuuaa

SEQ ID NO: 197168 - RNA, 24 nt, Artificial Sequence
  Synthetic
aaagggauaccucuacccuuuuaa

SEQ ID NO: 197169 - RNA, 18 nt, Artificial Sequence
  Synthetic
gauggaaaauccuuuuaa

SEQ ID NO: 197170 - RNA, 19 nt, Artificial Sequence
  Synthetic
agauggaaaauccuuuuaa

SEQ ID NO: 197171 - RNA, 20 nt, Artificial Sequence
  Synthetic
gagauggaaaauccuuuuaa

SEQ ID NO: 197172 - RNA, 21 nt, Artificial Sequence
  Synthetic
agagauggaaaauccuuuuaa

SEQ ID NO: 197173 - RNA, 22 nt, Artificial Sequence
  Synthetic
gagagauggaaaauccuuuuaa

SEQ ID NO: 197174 - RNA, 23 nt, Artificial Sequence
  Synthetic
ggagagauggaaaauccuuuuaa

SEQ ID NO: 197175 - RNA, 24 nt, Artificial Sequence
  Synthetic
gggagagauggaaaauccuuuuaa

SEQ ID NO: 197176 - RNA, 18 nt, Artificial Sequence
  Synthetic
aggcugcucugcuuuuaa

SEQ ID NO: 197177 - RNA, 19 nt, Artificial Sequence
  Synthetic
uaggcugcucugcuuuuaa

SEQ ID NO: 197178 - RNA, 20 nt, Artificial Sequence
  Synthetic
auaggcugcucugcuuuuaa

SEQ ID NO: 197179 - RNA, 21 nt, Artificial Sequence
  Synthetic
cauaggcugcucugcuuuuaa

SEQ ID NO: 197180 - RNA, 22 nt, Artificial Sequence
  Synthetic
ccauaggcugcucugcuuuuaa

SEQ ID NO: 197181 - RNA, 23 nt, Artificial Sequence
  Synthetic
cccauaggcugcucugcuuuuaa

SEQ ID NO: 197182 - RNA, 24 nt, Artificial Sequence
  Synthetic
ucccauaggcugcucugcuuuuaa

SEQ ID NO: 197183 - RNA, 18 nt, Artificial Sequence
  Synthetic
ucccggcaucucuuuuaa

SEQ ID NO: 197184 - RNA, 19 nt, Artificial Sequence
  Synthetic
cucccggcaucucuuuuaa

SEQ ID NO: 197185 - RNA, 20 nt, Artificial Sequence
  Synthetic
ccucccggcaucucuuuuaa

SEQ ID NO: 197186 - RNA, 21 nt, Artificial Sequence
  Synthetic
uccucccggcaucucuuuuaa

SEQ ID NO: 197187 - RNA, 22 nt, Artificial Sequence
  Synthetic
cuccucccggcaucucuuuuaa

SEQ ID NO: 197188 - RNA, 23 nt, Artificial Sequence
  Synthetic
ucuccucccggcaucucuuuuaa

SEQ ID NO: 197189 - RNA, 24 nt, Artificial Sequence
  Synthetic
cucuccucccggcaucucuuuuaa

SEQ ID NO: 197190 - RNA, 18 nt, Artificial Sequence
  Synthetic
uuaguuaaguucuuuuaa

SEQ ID NO: 197191 - RNA, 19 nt, Artificial Sequence
  Synthetic
cuuaguuaaguucuuuuaa

SEQ ID NO: 197192 - RNA, 20 nt, Artificial Sequence
  Synthetic
gcuuaguuaaguucuuuuaa

SEQ ID NO: 197193 - RNA, 21 nt, Artificial Sequence
  Synthetic
agcuuaguuaaguucuuuuaa

SEQ ID NO: 197194 - RNA, 22 nt, Artificial Sequence
  Synthetic
cagcuuaguuaaguucuuuuaa

SEQ ID NO: 197195 - RNA, 23 nt, Artificial Sequence
  Synthetic
acagcuuaguuaaguucuuuuaa

SEQ ID NO: 197196 - RNA, 24 nt, Artificial Sequence
  Synthetic
aacagcuuaguuaaguucuuuuaa

SEQ ID NO: 197197 - RNA, 18 nt, Artificial Sequence
  Synthetic
cagaauuccaaguuuuaa

SEQ ID NO: 197198 - RNA, 19 nt, Artificial Sequence
  Synthetic
acagaauuccaaguuuuaa

SEQ ID NO: 197199 - RNA, 20 nt, Artificial Sequence
  Synthetic
aacagaauuccaaguuuuaa

SEQ ID NO: 197200 - RNA, 21 nt, Artificial Sequence
  Synthetic
aaacagaauuccaaguuuuaa

SEQ ID NO: 197201 - RNA, 22 nt, Artificial Sequence
  Synthetic
gaaacagaauuccaaguuuuaa

SEQ ID NO: 197202 - RNA, 23 nt, Artificial Sequence
  Synthetic
ugaaacagaauuccaaguuuuaa

SEQ ID NO: 197203 - RNA, 24 nt, Artificial Sequence
  Synthetic
cugaaacagaauuccaaguuuuaa

SEQ ID NO: 197204 - RNA, 18 nt, Artificial Sequence
  Synthetic
aaaguugggaaguuuuaa

SEQ ID NO: 197205 - RNA, 19 nt, Artificial Sequence
  Synthetic
uaaaguugggaaguuuuaa

SEQ ID NO: 197206 - RNA, 20 nt, Artificial Sequence
  Synthetic
cuaaaguugggaaguuuuaa

SEQ ID NO: 197207 - RNA, 21 nt, Artificial Sequence
  Synthetic
ccuaaaguugggaaguuuuaa

SEQ ID NO: 197208 - RNA, 22 nt, Artificial Sequence
  Synthetic
accuaaaguugggaaguuuuaa

SEQ ID NO: 197209 - RNA, 23 nt, Artificial Sequence
  Synthetic
aaccuaaaguugggaaguuuuaa

SEQ ID NO: 197210 - RNA, 24 nt, Artificial Sequence
  Synthetic
caaccuaaaguugggaaguuuuaa

SEQ ID NO: 197211 - RNA, 18 nt, Artificial Sequence
  Synthetic
accuagagagaguuuuaa

SEQ ID NO: 197212 - RNA, 19 nt, Artificial Sequence
  Synthetic
aaccuagagagaguuuuaa

SEQ ID NO: 197213 - RNA, 20 nt, Artificial Sequence
  Synthetic
uaaccuagagagaguuuuaa

SEQ ID NO: 197214 - RNA, 21 nt, Artificial Sequence
  Synthetic
uuaaccuagagagaguuuuaa

SEQ ID NO: 197215 - RNA, 22 nt, Artificial Sequence
  Synthetic
auuaaccuagagagaguuuuaa

SEQ ID NO: 197216 - RNA, 23 nt, Artificial Sequence
  Synthetic
gauuaaccuagagagaguuuuaa

SEQ ID NO: 197217 - RNA, 24 nt, Artificial Sequence
  Synthetic
ugauuaaccuagagagaguuuuaa

SEQ ID NO: 197218 - RNA, 18 nt, Artificial Sequence
  Synthetic
cuagaggaggaguuuuaa

SEQ ID NO: 197219 - RNA, 19 nt, Artificial Sequence
  Synthetic
acuagaggaggaguuuuaa

SEQ ID NO: 197220 - RNA, 20 nt, Artificial Sequence
  Synthetic
aacuagaggaggaguuuuaa

SEQ ID NO: 197221 - RNA, 21 nt, Artificial Sequence
  Synthetic
aaacuagaggaggaguuuuaa

SEQ ID NO: 197222 - RNA, 22 nt, Artificial Sequence
  Synthetic
aaaacuagaggaggaguuuuaa

SEQ ID NO: 197223 - RNA, 23 nt, Artificial Sequence
  Synthetic
gaaaacuagaggaggaguuuuaa

SEQ ID NO: 197224 - RNA, 24 nt, Artificial Sequence
  Synthetic
agaaaacuagaggaggaguuuuaa

SEQ ID NO: 197225 - RNA, 18 nt, Artificial Sequence
  Synthetic
uuggauaugucguuuuaa

SEQ ID NO: 197226 - RNA, 19 nt, Artificial Sequence
  Synthetic
uuuggauaugucguuuuaa

SEQ ID NO: 197227 - RNA, 20 nt, Artificial Sequence
  Synthetic
uuuuggauaugucguuuuaa

SEQ ID NO: 197228 - RNA, 21 nt, Artificial Sequence
  Synthetic
cuuuuggauaugucguuuuaa

SEQ ID NO: 197229 - RNA, 22 nt, Artificial Sequence
  Synthetic
ucuuuuggauaugucguuuuaa

SEQ ID NO: 197230 - RNA, 23 nt, Artificial Sequence
  Synthetic
gucuuuuggauaugucguuuuaa

SEQ ID NO: 197231 - RNA, 24 nt, Artificial Sequence
  Synthetic
ugucuuuuggauaugucguuuuaa

SEQ ID NO: 197232 - RNA, 18 nt, Artificial Sequence
  Synthetic
cuuuagcuacgguuuuaa

SEQ ID NO: 197233 - RNA, 19 nt, Artificial Sequence
  Synthetic
acuuuagcuacgguuuuaa

SEQ ID NO: 197234 - RNA, 20 nt, Artificial Sequence
  Synthetic
gacuuuagcuacgguuuuaa

SEQ ID NO: 197235 - RNA, 21 nt, Artificial Sequence
  Synthetic
ggacuuuagcuacgguuuuaa

SEQ ID NO: 197236 - RNA, 22 nt, Artificial Sequence
  Synthetic
uggacuuuagcuacgguuuuaa

SEQ ID NO: 197237 - RNA, 23 nt, Artificial Sequence
  Synthetic
cuggacuuuagcuacgguuuuaa

SEQ ID NO: 197238 - RNA, 24 nt, Artificial Sequence
  Synthetic
ucuggacuuuagcuacgguuuuaa

SEQ ID NO: 197239 - RNA, 18 nt, Artificial Sequence
  Synthetic
auuuuucuaauguuuuaa

SEQ ID NO: 197240 - RNA, 19 nt, Artificial Sequence
  Synthetic
uauuuuucuaauguuuuaa

SEQ ID NO: 197241 - RNA, 20 nt, Artificial Sequence
  Synthetic
cuauuuuucuaauguuuuaa

SEQ ID NO: 197242 - RNA, 21 nt, Artificial Sequence
  Synthetic
ccuauuuuucuaauguuuuaa

SEQ ID NO: 197243 - RNA, 22 nt, Artificial Sequence
  Synthetic
accuauuuuucuaauguuuuaa

SEQ ID NO: 197244 - RNA, 23 nt, Artificial Sequence
  Synthetic
aaccuauuuuucuaauguuuuaa

SEQ ID NO: 197245 - RNA, 24 nt, Artificial Sequence
  Synthetic
uaaccuauuuuucuaauguuuuaa

SEQ ID NO: 197246 - RNA, 18 nt, Artificial Sequence
  Synthetic
ugccuuuccuuguuuuaa

SEQ ID NO: 197247 - RNA, 19 nt, Artificial Sequence
  Synthetic
cugccuuuccuuguuuuaa

SEQ ID NO: 197248 - RNA, 20 nt, Artificial Sequence
  Synthetic
acugccuuuccuuguuuuaa

SEQ ID NO: 197249 - RNA, 21 nt, Artificial Sequence
  Synthetic
aacugccuuuccuuguuuuaa

SEQ ID NO: 197250 - RNA, 22 nt, Artificial Sequence
  Synthetic
uaacugccuuuccuuguuuuaa

SEQ ID NO: 197251 - RNA, 23 nt, Artificial Sequence
  Synthetic
guaacugccuuuccuuguuuuaa

SEQ ID NO: 197252 - RNA, 24 nt, Artificial Sequence
  Synthetic
gguaacugccuuuccuuguuuuaa

SEQ ID NO: 197253 - RNA, 18 nt, Artificial Sequence
  Synthetic
auuggaacuuuguuuuaa

SEQ ID NO: 197254 - RNA, 19 nt, Artificial Sequence
  Synthetic
aauuggaacuuuguuuuaa

SEQ ID NO: 197255 - RNA, 20 nt, Artificial Sequence
  Synthetic
aaauuggaacuuuguuuuaa

SEQ ID NO: 197256 - RNA, 21 nt, Artificial Sequence
  Synthetic
gaaauuggaacuuuguuuuaa

SEQ ID NO: 197257 - RNA, 22 nt, Artificial Sequence
  Synthetic
ugaaauuggaacuuuguuuuaa

SEQ ID NO: 197258 - RNA, 23 nt, Artificial Sequence
  Synthetic
cugaaauuggaacuuuguuuuaa

SEQ ID NO: 197259 - RNA, 24 nt, Artificial Sequence
  Synthetic
ucugaaauuggaacuuuguuuuaa

SEQ ID NO: 197260 - RNA, 18 nt, Artificial Sequence
  Synthetic
cuuuguagcaauuuuuaa

SEQ ID NO: 197261 - RNA, 19 nt, Artificial Sequence
  Synthetic
ucuuuguagcaauuuuuaa

SEQ ID NO: 197262 - RNA, 20 nt, Artificial Sequence
  Synthetic
cucuuuguagcaauuuuuaa

SEQ ID NO: 197263 - RNA, 21 nt, Artificial Sequence
  Synthetic
ucucuuuguagcaauuuuuaa

SEQ ID NO: 197264 - RNA, 22 nt, Artificial Sequence
  Synthetic
uucucuuuguagcaauuuuuaa

SEQ ID NO: 197265 - RNA, 23 nt, Artificial Sequence
  Synthetic
auucucuuuguagcaauuuuuaa

SEQ ID NO: 197266 - RNA, 24 nt, Artificial Sequence
  Synthetic
uauucucuuuguagcaauuuuuaa

SEQ ID NO: 197267 - RNA, 18 nt, Artificial Sequence
  Synthetic
aagaaugauaauuuuuaa

SEQ ID NO: 197268 - RNA, 19 nt, Artificial Sequence
  Synthetic
uaagaaugauaauuuuuaa

SEQ ID NO: 197269 - RNA, 20 nt, Artificial Sequence
  Synthetic
uuaagaaugauaauuuuuaa

SEQ ID NO: 197270 - RNA, 21 nt, Artificial Sequence
  Synthetic
auuaagaaugauaauuuuuaa

SEQ ID NO: 197271 - RNA, 22 nt, Artificial Sequence
  Synthetic
aauuaagaaugauaauuuuuaa

SEQ ID NO: 197272 - RNA, 23 nt, Artificial Sequence
  Synthetic
aaauuaagaaugauaauuuuuaa

SEQ ID NO: 197273 - RNA, 24 nt, Artificial Sequence
  Synthetic
gaaauuaagaaugauaauuuuuaa

SEQ ID NO: 197274 - RNA, 18 nt, Artificial Sequence
  Synthetic
ugugcaauucauuuuuaa

SEQ ID NO: 197275 - RNA, 19 nt, Artificial Sequence
  Synthetic
augugcaauucauuuuuaa

SEQ ID NO: 197276 - RNA, 20 nt, Artificial Sequence
  Synthetic
aaugugcaauucauuuuuaa

SEQ ID NO: 197277 - RNA, 21 nt, Artificial Sequence
  Synthetic
caaugugcaauucauuuuuaa

SEQ ID NO: 197278 - RNA, 22 nt, Artificial Sequence
  Synthetic
gcaaugugcaauucauuuuuaa

SEQ ID NO: 197279 - RNA, 23 nt, Artificial Sequence
  Synthetic
ugcaaugugcaauucauuuuuaa

SEQ ID NO: 197280 - RNA, 24 nt, Artificial Sequence
  Synthetic
augcaaugugcaauucauuuuuaa

SEQ ID NO: 197281 - RNA, 18 nt, Artificial Sequence
  Synthetic
uuuuuuguucauuuuuaa

SEQ ID NO: 197282 - RNA, 19 nt, Artificial Sequence
  Synthetic
uuuuuuuguucauuuuuaa

SEQ ID NO: 197283 - RNA, 20 nt, Artificial Sequence
  Synthetic
cuuuuuuuguucauuuuuaa

SEQ ID NO: 197284 - RNA, 21 nt, Artificial Sequence
  Synthetic
ccuuuuuuuguucauuuuuaa

SEQ ID NO: 197285 - RNA, 22 nt, Artificial Sequence
  Synthetic
uccuuuuuuuguucauuuuuaa

SEQ ID NO: 197286 - RNA, 23 nt, Artificial Sequence
  Synthetic
uuccuuuuuuuguucauuuuuaa

SEQ ID NO: 197287 - RNA, 24 nt, Artificial Sequence
  Synthetic
cuuccuuuuuuuguucauuuuuaa

SEQ ID NO: 197288 - RNA, 18 nt, Artificial Sequence
  Synthetic
aaucacuaauauuuuuaa

SEQ ID NO: 197289 - RNA, 19 nt, Artificial Sequence
  Synthetic
uaaucacuaauauuuuuaa

SEQ ID NO: 197290 - RNA, 20 nt, Artificial Sequence
  Synthetic
auaaucacuaauauuuuuaa

SEQ ID NO: 197291 - RNA, 21 nt, Artificial Sequence
  Synthetic
uauaaucacuaauauuuuuaa

SEQ ID NO: 197292 - RNA, 22 nt, Artificial Sequence
  Synthetic
uuauaaucacuaauauuuuuaa

SEQ ID NO: 197293 - RNA, 23 nt, Artificial Sequence
  Synthetic
auuauaaucacuaauauuuuuaa

SEQ ID NO: 197294 - RNA, 24 nt, Artificial Sequence
  Synthetic
gauuauaaucacuaauauuuuuaa

SEQ ID NO: 197295 - RNA, 18 nt, Artificial Sequence
  Synthetic
auucccaucuauuuuuaa

SEQ ID NO: 197296 - RNA, 19 nt, Artificial Sequence
  Synthetic
aauucccaucuauuuuuaa

SEQ ID NO: 197297 - RNA, 20 nt, Artificial Sequence
  Synthetic
gaauucccaucuauuuuuaa

SEQ ID NO: 197298 - RNA, 21 nt, Artificial Sequence
  Synthetic
ugaauucccaucuauuuuuaa

SEQ ID NO: 197299 - RNA, 22 nt, Artificial Sequence
  Synthetic
augaauucccaucuauuuuuaa

SEQ ID NO: 197300 - RNA, 23 nt, Artificial Sequence
  Synthetic
aaugaauucccaucuauuuuuaa

SEQ ID NO: 197301 - RNA, 24 nt, Artificial Sequence
  Synthetic
caaugaauucccaucuauuuuuaa

SEQ ID NO: 197302 - RNA, 18 nt, Artificial Sequence
  Synthetic
ucucuaguguauuuuuaa

SEQ ID NO: 197303 - RNA, 19 nt, Artificial Sequence
  Synthetic
cucucuaguguauuuuuaa

SEQ ID NO: 197304 - RNA, 20 nt, Artificial Sequence
  Synthetic
ucucucuaguguauuuuuaa

SEQ ID NO: 197305 - RNA, 21 nt, Artificial Sequence
  Synthetic
aucucucuaguguauuuuuaa

SEQ ID NO: 197306 - RNA, 22 nt, Artificial Sequence
  Synthetic
aaucucucuaguguauuuuuaa

SEQ ID NO: 197307 - RNA, 23 nt, Artificial Sequence
  Synthetic
uaaucucucuaguguauuuuuaa

SEQ ID NO: 197308 - RNA, 24 nt, Artificial Sequence
  Synthetic
auaaucucucuaguguauuuuuaa

SEQ ID NO: 197309 - RNA, 18 nt, Artificial Sequence
  Synthetic
cauuauguuucuuuuuaa

SEQ ID NO: 197310 - RNA, 19 nt, Artificial Sequence
  Synthetic
ucauuauguuucuuuuuaa

SEQ ID NO: 197311 - RNA, 20 nt, Artificial Sequence
  Synthetic
uucauuauguuucuuuuuaa

SEQ ID NO: 197312 - RNA, 21 nt, Artificial Sequence
  Synthetic
cuucauuauguuucuuuuuaa

SEQ ID NO: 197313 - RNA, 22 nt, Artificial Sequence
  Synthetic
ucuucauuauguuucuuuuuaa

SEQ ID NO: 197314 - RNA, 23 nt, Artificial Sequence
  Synthetic
gucuucauuauguuucuuuuuaa

SEQ ID NO: 197315 - RNA, 24 nt, Artificial Sequence
  Synthetic
ugucuucauuauguuucuuuuuaa

SEQ ID NO: 197316 - RNA, 18 nt, Artificial Sequence
  Synthetic
ucuugugccaguuuuuaa

SEQ ID NO: 197317 - RNA, 19 nt, Artificial Sequence
  Synthetic
gucuugugccaguuuuuaa

SEQ ID NO: 197318 - RNA, 20 nt, Artificial Sequence
  Synthetic
ugucuugugccaguuuuuaa

SEQ ID NO: 197319 - RNA, 21 nt, Artificial Sequence
  Synthetic
cugucuugugccaguuuuuaa

SEQ ID NO: 197320 - RNA, 22 nt, Artificial Sequence
  Synthetic
ccugucuugugccaguuuuuaa

SEQ ID NO: 197321 - RNA, 23 nt, Artificial Sequence
  Synthetic
cccugucuugugccaguuuuuaa

SEQ ID NO: 197322 - RNA, 24 nt, Artificial Sequence
  Synthetic
ucccugucuugugccaguuuuuaa

SEQ ID NO: 197323 - RNA, 18 nt, Artificial Sequence
  Synthetic
ccuucugcugguuuuuaa

SEQ ID NO: 197324 - RNA, 19 nt, Artificial Sequence
  Synthetic
accuucugcugguuuuuaa

SEQ ID NO: 197325 - RNA, 20 nt, Artificial Sequence
  Synthetic
aaccuucugcugguuuuuaa

SEQ ID NO: 197326 - RNA, 21 nt, Artificial Sequence
  Synthetic
gaaccuucugcugguuuuuaa

SEQ ID NO: 197327 - RNA, 22 nt, Artificial Sequence
  Synthetic
ugaaccuucugcugguuuuuaa

SEQ ID NO: 197328 - RNA, 23 nt, Artificial Sequence
  Synthetic
augaaccuucugcugguuuuuaa

SEQ ID NO: 197329 - RNA, 24 nt, Artificial Sequence
  Synthetic
caugaaccuucugcugguuuuuaa

SEQ ID NO: 197330 - RNA, 18 nt, Artificial Sequence
  Synthetic
ugaaagucuuguuuuuaa

SEQ ID NO: 197331 - RNA, 19 nt, Artificial Sequence
  Synthetic
augaaagucuuguuuuuaa

SEQ ID NO: 197332 - RNA, 20 nt, Artificial Sequence
  Synthetic
aaugaaagucuuguuuuuaa

SEQ ID NO: 197333 - RNA, 21 nt, Artificial Sequence
  Synthetic
gaaugaaagucuuguuuuuaa

SEQ ID NO: 197334 - RNA, 22 nt, Artificial Sequence
  Synthetic
agaaugaaagucuuguuuuuaa

SEQ ID NO: 197335 - RNA, 23 nt, Artificial Sequence
  Synthetic
uagaaugaaagucuuguuuuuaa

SEQ ID NO: 197336 - RNA, 24 nt, Artificial Sequence
  Synthetic
cuagaaugaaagucuuguuuuuaa

SEQ ID NO: 197337 - RNA, 18 nt, Artificial Sequence
  Synthetic
gaaauauacauuuuuuaa

SEQ ID NO: 197338 - RNA, 19 nt, Artificial Sequence
  Synthetic
ugaaauauacauuuuuuaa

SEQ ID NO: 197339 - RNA, 20 nt, Artificial Sequence
  Synthetic
cugaaauauacauuuuuuaa

SEQ ID NO: 197340 - RNA, 21 nt, Artificial Sequence
  Synthetic
acugaaauauacauuuuuuaa

SEQ ID NO: 197341 - RNA, 22 nt, Artificial Sequence
  Synthetic
gacugaaauauacauuuuuuaa

SEQ ID NO: 197342 - RNA, 23 nt, Artificial Sequence
  Synthetic
ugacugaaauauacauuuuuuaa

SEQ ID NO: 197343 - RNA, 24 nt, Artificial Sequence
  Synthetic
augacugaaauauacauuuuuuaa

SEQ ID NO: 197344 - RNA, 18 nt, Artificial Sequence
  Synthetic
aaugauuuucuuuuuuaa

SEQ ID NO: 197345 - RNA, 19 nt, Artificial Sequence
  Synthetic
uaaugauuuucuuuuuuaa

SEQ ID NO: 197346 - RNA, 20 nt, Artificial Sequence
  Synthetic
auaaugauuuucuuuuuuaa

SEQ ID NO: 197347 - RNA, 21 nt, Artificial Sequence
  Synthetic
aauaaugauuuucuuuuuuaa

SEQ ID NO: 197348 - RNA, 22 nt, Artificial Sequence
  Synthetic
aaauaaugauuuucuuuuuuaa

SEQ ID NO: 197349 - RNA, 23 nt, Artificial Sequence
  Synthetic
aaaauaaugauuuucuuuuuuaa

SEQ ID NO: 197350 - RNA, 24 nt, Artificial Sequence
  Synthetic
uaaaauaaugauuuucuuuuuuaa

SEQ ID NO: 197351 - RNA, 18 nt, Artificial Sequence
  Synthetic
cucuaaaacuuuuuuuaa

SEQ ID NO: 197352 - RNA, 19 nt, Artificial Sequence
  Synthetic
acucuaaaacuuuuuuuaa

SEQ ID NO: 197353 - RNA, 20 nt, Artificial Sequence
  Synthetic
gacucuaaaacuuuuuuuaa

SEQ ID NO: 197354 - RNA, 21 nt, Artificial Sequence
  Synthetic
agacucuaaaacuuuuuuuaa

SEQ ID NO: 197355 - RNA, 22 nt, Artificial Sequence
  Synthetic
cagacucuaaaacuuuuuuuaa

SEQ ID NO: 197356 - RNA, 23 nt, Artificial Sequence
  Synthetic
acagacucuaaaacuuuuuuuaa

SEQ ID NO: 197357 - RNA, 24 nt, Artificial Sequence
  Synthetic
aacagacucuaaaacuuuuuuuaa

SEQ ID NO: 197358 - RNA, 18 nt, Artificial Sequence
  Synthetic
aguccaauuuuuuuuuaa

SEQ ID NO: 197359 - RNA, 19 nt, Artificial Sequence
  Synthetic
gaguccaauuuuuuuuuaa

SEQ ID NO: 197360 - RNA, 20 nt, Artificial Sequence
  Synthetic
ugaguccaauuuuuuuuuaa

SEQ ID NO: 197361 - RNA, 21 nt, Artificial Sequence
  Synthetic
uugaguccaauuuuuuuuuaa

SEQ ID NO: 197362 - RNA, 22 nt, Artificial Sequence
  Synthetic
auugaguccaauuuuuuuuuaa

SEQ ID NO: 197363 - RNA, 23 nt, Artificial Sequence
  Synthetic
aauugaguccaauuuuuuuuuaa

SEQ ID NO: 197364 - RNA, 24 nt, Artificial Sequence
  Synthetic
aaauugaguccaauuuuuuuuuaa

SEQ ID NO: 197365 - RNA, 18 nt, Artificial Sequence
  Synthetic
guguccuuuuuuuuuuaa

SEQ ID NO: 197366 - RNA, 19 nt, Artificial Sequence
  Synthetic
gguguccuuuuuuuuuuaa

SEQ ID NO: 197367 - RNA, 20 nt, Artificial Sequence
  Synthetic
ugguguccuuuuuuuuuuaa

SEQ ID NO: 197368 - RNA, 21 nt, Artificial Sequence
  Synthetic
cugguguccuuuuuuuuuuaa

SEQ ID NO: 197369 - RNA, 22 nt, Artificial Sequence
  Synthetic
ccugguguccuuuuuuuuuuaa

SEQ ID NO: 197370 - RNA, 23 nt, Artificial Sequence
  Synthetic
cccugguguccuuuuuuuuuuaa

SEQ ID NO: 197371 - RNA, 24 nt, Artificial Sequence
  Synthetic
acccugguguccuuuuuuuuuuaa

SEQ ID NO: 197372 - RNA, 18 nt, Artificial Sequence
  Synthetic
auaagcuuuuuuuuuuaa

SEQ ID NO: 197373 - RNA, 19 nt, Artificial Sequence
  Synthetic
gauaagcuuuuuuuuuuaa

SEQ ID NO: 197374 - RNA, 20 nt, Artificial Sequence
  Synthetic
agauaagcuuuuuuuuuuaa

SEQ ID NO: 197375 - RNA, 21 nt, Artificial Sequence
  Synthetic
uagauaagcuuuuuuuuuuaa

SEQ ID NO: 197376 - RNA, 22 nt, Artificial Sequence
  Synthetic
uuagauaagcuuuuuuuuuuaa

SEQ ID NO: 197377 - RNA, 23 nt, Artificial Sequence
  Synthetic
uuuagauaagcuuuuuuuuuuaa

SEQ ID NO: 197378 - RNA, 24 nt, Artificial Sequence
  Synthetic
auuuagauaagcuuuuuuuuuuaa

SEQ ID NO: 197379 - RNA, 18 nt, Artificial Sequence
  Synthetic
ugcaaaaaaaaaaaaaca

SEQ ID NO: 197380 - RNA, 19 nt, Artificial Sequence
  Synthetic
uugcaaaaaaaaaaaaaca

SEQ ID NO: 197381 - RNA, 20 nt, Artificial Sequence
  Synthetic
uuugcaaaaaaaaaaaaaca

SEQ ID NO: 197382 - RNA, 21 nt, Artificial Sequence
  Synthetic
uuuugcaaaaaaaaaaaaaca

SEQ ID NO: 197383 - RNA, 22 nt, Artificial Sequence
  Synthetic
cuuuugcaaaaaaaaaaaaaca

SEQ ID NO: 197384 - RNA, 23 nt, Artificial Sequence
  Synthetic
gcuuuugcaaaaaaaaaaaaaca

SEQ ID NO: 197385 - RNA, 24 nt, Artificial Sequence
  Synthetic
agcuuuugcaaaaaaaaaaaaaca

SEQ ID NO: 197386 - RNA, 18 nt, Artificial Sequence
  Synthetic
aagauuuaaaaaaaaaca

SEQ ID NO: 197387 - RNA, 19 nt, Artificial Sequence
  Synthetic
aaagauuuaaaaaaaaaca

SEQ ID NO: 197388 - RNA, 20 nt, Artificial Sequence
  Synthetic
aaaagauuuaaaaaaaaaca

SEQ ID NO: 197389 - RNA, 21 nt, Artificial Sequence
  Synthetic
aaaaagauuuaaaaaaaaaca

SEQ ID NO: 197390 - RNA, 22 nt, Artificial Sequence
  Synthetic
uaaaaagauuuaaaaaaaaaca

SEQ ID NO: 197391 - RNA, 23 nt, Artificial Sequence
  Synthetic
auaaaaagauuuaaaaaaaaaca

SEQ ID NO: 197392 - RNA, 24 nt, Artificial Sequence
  Synthetic
aauaaaaagauuuaaaaaaaaaca

SEQ ID NO: 197393 - RNA, 18 nt, Artificial Sequence
  Synthetic
gauggagaagaaaaaaca

SEQ ID NO: 197394 - RNA, 19 nt, Artificial Sequence
  Synthetic
ugauggagaagaaaaaaca

SEQ ID NO: 197395 - RNA, 20 nt, Artificial Sequence
  Synthetic
uugauggagaagaaaaaaca

SEQ ID NO: 197396 - RNA, 21 nt, Artificial Sequence
  Synthetic
uuugauggagaagaaaaaaca

SEQ ID NO: 197397 - RNA, 22 nt, Artificial Sequence
  Synthetic
cuuugauggagaagaaaaaaca

SEQ ID NO: 197398 - RNA, 23 nt, Artificial Sequence
  Synthetic
ccuuugauggagaagaaaaaaca

SEQ ID NO: 197399 - RNA, 24 nt, Artificial Sequence
  Synthetic
gccuuugauggagaagaaaaaaca

SEQ ID NO: 197400 - RNA, 18 nt, Artificial Sequence
  Synthetic
ucuuuucaauaaaaaaca

SEQ ID NO: 197401 - RNA, 19 nt, Artificial Sequence
  Synthetic
aucuuuucaauaaaaaaca

SEQ ID NO: 197402 - RNA, 20 nt, Artificial Sequence
  Synthetic
uaucuuuucaauaaaaaaca

SEQ ID NO: 197403 - RNA, 21 nt, Artificial Sequence
  Synthetic
uuaucuuuucaauaaaaaaca

SEQ ID NO: 197404 - RNA, 22 nt, Artificial Sequence
  Synthetic
uuuaucuuuucaauaaaaaaca

SEQ ID NO: 197405 - RNA, 23 nt, Artificial Sequence
  Synthetic
guuuaucuuuucaauaaaaaaca

SEQ ID NO: 197406 - RNA, 24 nt, Artificial Sequence
  Synthetic
uguuuaucuuuucaauaaaaaaca

SEQ ID NO: 197407 - RNA, 18 nt, Artificial Sequence
  Synthetic
cuaauuuuguaaaaaaca

SEQ ID NO: 197408 - RNA, 19 nt, Artificial Sequence
  Synthetic
ccuaauuuuguaaaaaaca

SEQ ID NO: 197409 - RNA, 20 nt, Artificial Sequence
  Synthetic
uccuaauuuuguaaaaaaca

SEQ ID NO: 197410 - RNA, 21 nt, Artificial Sequence
  Synthetic
auccuaauuuuguaaaaaaca

SEQ ID NO: 197411 - RNA, 22 nt, Artificial Sequence
  Synthetic
gauccuaauuuuguaaaaaaca

SEQ ID NO: 197412 - RNA, 23 nt, Artificial Sequence
  Synthetic
ggauccuaauuuuguaaaaaaca

SEQ ID NO: 197413 - RNA, 24 nt, Artificial Sequence
  Synthetic
aggauccuaauuuuguaaaaaaca

SEQ ID NO: 197414 - RNA, 18 nt, Artificial Sequence
  Synthetic
auaauauuuucaaaaaca

SEQ ID NO: 197415 - RNA, 19 nt, Artificial Sequence
  Synthetic
aauaauauuuucaaaaaca

SEQ ID NO: 197416 - RNA, 20 nt, Artificial Sequence
  Synthetic
gaauaauauuuucaaaaaca

SEQ ID NO: 197417 - RNA, 21 nt, Artificial Sequence
  Synthetic
agaauaauauuuucaaaaaca

SEQ ID NO: 197418 - RNA, 22 nt, Artificial Sequence
  Synthetic
uagaauaauauuuucaaaaaca

SEQ ID NO: 197419 - RNA, 23 nt, Artificial Sequence
  Synthetic
guagaauaauauuuucaaaaaca

SEQ ID NO: 197420 - RNA, 24 nt, Artificial Sequence
  Synthetic
gguagaauaauauuuucaaaaaca

SEQ ID NO: 197421 - RNA, 18 nt, Artificial Sequence
  Synthetic
auguaaaagagaaaaaca

SEQ ID NO: 197422 - RNA, 19 nt, Artificial Sequence
  Synthetic
gauguaaaagagaaaaaca

SEQ ID NO: 197423 - RNA, 20 nt, Artificial Sequence
  Synthetic
cgauguaaaagagaaaaaca

SEQ ID NO: 197424 - RNA, 21 nt, Artificial Sequence
  Synthetic
acgauguaaaagagaaaaaca

SEQ ID NO: 197425 - RNA, 22 nt, Artificial Sequence
  Synthetic
uacgauguaaaagagaaaaaca

SEQ ID NO: 197426 - RNA, 23 nt, Artificial Sequence
  Synthetic
uuacgauguaaaagagaaaaaca

SEQ ID NO: 197427 - RNA, 24 nt, Artificial Sequence
  Synthetic
guuacgauguaaaagagaaaaaca

SEQ ID NO: 197428 - RNA, 18 nt, Artificial Sequence
  Synthetic
guuuuggagggaaaaaca

SEQ ID NO: 197429 - RNA, 19 nt, Artificial Sequence
  Synthetic
aguuuuggagggaaaaaca

SEQ ID NO: 197430 - RNA, 20 nt, Artificial Sequence
  Synthetic
caguuuuggagggaaaaaca

SEQ ID NO: 197431 - RNA, 21 nt, Artificial Sequence
  Synthetic
ucaguuuuggagggaaaaaca

SEQ ID NO: 197432 - RNA, 22 nt, Artificial Sequence
  Synthetic
aucaguuuuggagggaaaaaca

SEQ ID NO: 197433 - RNA, 23 nt, Artificial Sequence
  Synthetic
caucaguuuuggagggaaaaaca

SEQ ID NO: 197434 - RNA, 24 nt, Artificial Sequence
  Synthetic
acaucaguuuuggagggaaaaaca

SEQ ID NO: 197435 - RNA, 18 nt, Artificial Sequence
  Synthetic
guuuggcaaauaaaaaca

SEQ ID NO: 197436 - RNA, 19 nt, Artificial Sequence
  Synthetic
uguuuggcaaauaaaaaca

SEQ ID NO: 197437 - RNA, 20 nt, Artificial Sequence
  Synthetic
auguuuggcaaauaaaaaca

SEQ ID NO: 197438 - RNA, 21 nt, Artificial Sequence
  Synthetic
cauguuuggcaaauaaaaaca

SEQ ID NO: 197439 - RNA, 22 nt, Artificial Sequence
  Synthetic
acauguuuggcaaauaaaaaca

SEQ ID NO: 197440 - RNA, 23 nt, Artificial Sequence
  Synthetic
gacauguuuggcaaauaaaaaca

SEQ ID NO: 197441 - RNA, 24 nt, Artificial Sequence
  Synthetic
ggacauguuuggcaaauaaaaaca

SEQ ID NO: 197442 - RNA, 18 nt, Artificial Sequence
  Synthetic
gcauucuggauaaaaaca

SEQ ID NO: 197443 - RNA, 19 nt, Artificial Sequence
  Synthetic
ugcauucuggauaaaaaca

SEQ ID NO: 197444 - RNA, 20 nt, Artificial Sequence
  Synthetic
augcauucuggauaaaaaca

SEQ ID NO: 197445 - RNA, 21 nt, Artificial Sequence
  Synthetic
caugcauucuggauaaaaaca

SEQ ID NO: 197446 - RNA, 22 nt, Artificial Sequence
  Synthetic
ucaugcauucuggauaaaaaca

SEQ ID NO: 197447 - RNA, 23 nt, Artificial Sequence
  Synthetic
aucaugcauucuggauaaaaaca

SEQ ID NO: 197448 - RNA, 24 nt, Artificial Sequence
  Synthetic
caucaugcauucuggauaaaaaca

SEQ ID NO: 197449 - RNA, 18 nt, Artificial Sequence
  Synthetic
agaaucuaaaacaaaaca

SEQ ID NO: 197450 - RNA, 19 nt, Artificial Sequence
  Synthetic
aagaaucuaaaacaaaaca

SEQ ID NO: 197451 - RNA, 20 nt, Artificial Sequence
  Synthetic
uaagaaucuaaaacaaaaca

SEQ ID NO: 197452 - RNA, 21 nt, Artificial Sequence
  Synthetic
uuaagaaucuaaaacaaaaca

SEQ ID NO: 197453 - RNA, 22 nt, Artificial Sequence
  Synthetic
guuaagaaucuaaaacaaaaca

SEQ ID NO: 197454 - RNA, 23 nt, Artificial Sequence
  Synthetic
cguuaagaaucuaaaacaaaaca

SEQ ID NO: 197455 - RNA, 24 nt, Artificial Sequence
  Synthetic
gcguuaagaaucuaaaacaaaaca

SEQ ID NO: 197456 - RNA, 18 nt, Artificial Sequence
  Synthetic
gucaugugcaacaaaaca

SEQ ID NO: 197457 - RNA, 19 nt, Artificial Sequence
  Synthetic
agucaugugcaacaaaaca

SEQ ID NO: 197458 - RNA, 20 nt, Artificial Sequence
  Synthetic
aagucaugugcaacaaaaca

SEQ ID NO: 197459 - RNA, 21 nt, Artificial Sequence
  Synthetic
gaagucaugugcaacaaaaca

SEQ ID NO: 197460 - RNA, 22 nt, Artificial Sequence
  Synthetic
agaagucaugugcaacaaaaca

SEQ ID NO: 197461 - RNA, 23 nt, Artificial Sequence
  Synthetic
aagaagucaugugcaacaaaaca

SEQ ID NO: 197462 - RNA, 24 nt, Artificial Sequence
  Synthetic
aaagaagucaugugcaacaaaaca

SEQ ID NO: 197463 - RNA, 18 nt, Artificial Sequence
  Synthetic
uagagaaaugacaaaaca

SEQ ID NO: 197464 - RNA, 19 nt, Artificial Sequence
  Synthetic
guagagaaaugacaaaaca

SEQ ID NO: 197465 - RNA, 20 nt, Artificial Sequence
  Synthetic
uguagagaaaugacaaaaca

SEQ ID NO: 197466 - RNA, 21 nt, Artificial Sequence
  Synthetic
uuguagagaaaugacaaaaca

SEQ ID NO: 197467 - RNA, 22 nt, Artificial Sequence
  Synthetic
cuuguagagaaaugacaaaaca

SEQ ID NO: 197468 - RNA, 23 nt, Artificial Sequence
  Synthetic
acuuguagagaaaugacaaaaca

SEQ ID NO: 197469 - RNA, 24 nt, Artificial Sequence
  Synthetic
aacuuguagagaaaugacaaaaca

SEQ ID NO: 197470 - RNA, 18 nt, Artificial Sequence
  Synthetic
cugguccuccccaaaaca

SEQ ID NO: 197471 - RNA, 19 nt, Artificial Sequence
  Synthetic
ucugguccuccccaaaaca

SEQ ID NO: 197472 - RNA, 20 nt, Artificial Sequence
  Synthetic
uucugguccuccccaaaaca

SEQ ID NO: 197473 - RNA, 21 nt, Artificial Sequence
  Synthetic
auucugguccuccccaaaaca

SEQ ID NO: 197474 - RNA, 22 nt, Artificial Sequence
  Synthetic
uauucugguccuccccaaaaca

SEQ ID NO: 197475 - RNA, 23 nt, Artificial Sequence
  Synthetic
uuauucugguccuccccaaaaca

SEQ ID NO: 197476 - RNA, 24 nt, Artificial Sequence
  Synthetic
cuuauucugguccuccccaaaaca

SEQ ID NO: 197477 - RNA, 18 nt, Artificial Sequence
  Synthetic
ccuucauccuccaaaaca

SEQ ID NO: 197478 - RNA, 19 nt, Artificial Sequence
  Synthetic
cccuucauccuccaaaaca

SEQ ID NO: 197479 - RNA, 20 nt, Artificial Sequence
  Synthetic
ccccuucauccuccaaaaca

SEQ ID NO: 197480 - RNA, 21 nt, Artificial Sequence
  Synthetic
uccccuucauccuccaaaaca

SEQ ID NO: 197481 - RNA, 22 nt, Artificial Sequence
  Synthetic
auccccuucauccuccaaaaca

SEQ ID NO: 197482 - RNA, 23 nt, Artificial Sequence
  Synthetic
aauccccuucauccuccaaaaca

SEQ ID NO: 197483 - RNA, 24 nt, Artificial Sequence
  Synthetic
gaauccccuucauccuccaaaaca

SEQ ID NO: 197484 - RNA, 18 nt, Artificial Sequence
  Synthetic
cauuaagaaggcaaaaca

SEQ ID NO: 197485 - RNA, 19 nt, Artificial Sequence
  Synthetic
gcauuaagaaggcaaaaca

SEQ ID NO: 197486 - RNA, 20 nt, Artificial Sequence
  Synthetic
agcauuaagaaggcaaaaca

SEQ ID NO: 197487 - RNA, 21 nt, Artificial Sequence
  Synthetic
aagcauuaagaaggcaaaaca

SEQ ID NO: 197488 - RNA, 22 nt, Artificial Sequence
  Synthetic
uaagcauuaagaaggcaaaaca

SEQ ID NO: 197489 - RNA, 23 nt, Artificial Sequence
  Synthetic
guaagcauuaagaaggcaaaaca

SEQ ID NO: 197490 - RNA, 24 nt, Artificial Sequence
  Synthetic
gguaagcauuaagaaggcaaaaca

SEQ ID NO: 197491 - RNA, 18 nt, Artificial Sequence
  Synthetic
uagcuuugugucaaaaca

SEQ ID NO: 197492 - RNA, 19 nt, Artificial Sequence
  Synthetic
auagcuuugugucaaaaca

SEQ ID NO: 197493 - RNA, 20 nt, Artificial Sequence
  Synthetic
cauagcuuugugucaaaaca

SEQ ID NO: 197494 - RNA, 21 nt, Artificial Sequence
  Synthetic
ucauagcuuugugucaaaaca

SEQ ID NO: 197495 - RNA, 22 nt, Artificial Sequence
  Synthetic
gucauagcuuugugucaaaaca

SEQ ID NO: 197496 - RNA, 23 nt, Artificial Sequence
  Synthetic
agucauagcuuugugucaaaaca

SEQ ID NO: 197497 - RNA, 24 nt, Artificial Sequence
  Synthetic
gagucauagcuuugugucaaaaca

SEQ ID NO: 197498 - RNA, 18 nt, Artificial Sequence
  Synthetic
uaauaauaacagaaaaca

SEQ ID NO: 197499 - RNA, 19 nt, Artificial Sequence
  Synthetic
auaauaauaacagaaaaca

SEQ ID NO: 197500 - RNA, 20 nt, Artificial Sequence
  Synthetic
uauaauaauaacagaaaaca

SEQ ID NO: 197501 - RNA, 21 nt, Artificial Sequence
  Synthetic
auauaauaauaacagaaaaca

SEQ ID NO: 197502 - RNA, 22 nt, Artificial Sequence
  Synthetic
cauauaauaauaacagaaaaca

SEQ ID NO: 197503 - RNA, 23 nt, Artificial Sequence
  Synthetic
ucauauaauaauaacagaaaaca

SEQ ID NO: 197504 - RNA, 24 nt, Artificial Sequence
  Synthetic
uucauauaauaauaacagaaaaca

SEQ ID NO: 197505 - RNA, 18 nt, Artificial Sequence
  Synthetic
agcagauuuuagaaaaca

SEQ ID NO: 197506 - RNA, 19 nt, Artificial Sequence
  Synthetic
uagcagauuuuagaaaaca

SEQ ID NO: 197507 - RNA, 20 nt, Artificial Sequence
  Synthetic
cuagcagauuuuagaaaaca

SEQ ID NO: 197508 - RNA, 21 nt, Artificial Sequence
  Synthetic
ucuagcagauuuuagaaaaca

SEQ ID NO: 197509 - RNA, 22 nt, Artificial Sequence
  Synthetic
cucuagcagauuuuagaaaaca

SEQ ID NO: 197510 - RNA, 23 nt, Artificial Sequence
  Synthetic
acucuagcagauuuuagaaaaca

SEQ ID NO: 197511 - RNA, 24 nt, Artificial Sequence
  Synthetic
gacucuagcagauuuuagaaaaca

SEQ ID NO: 197512 - RNA, 18 nt, Artificial Sequence
  Synthetic
guacaagaaaggaaaaca

SEQ ID NO: 197513 - RNA, 19 nt, Artificial Sequence
  Synthetic
aguacaagaaaggaaaaca

SEQ ID NO: 197514 - RNA, 20 nt, Artificial Sequence
  Synthetic
gaguacaagaaaggaaaaca

SEQ ID NO: 197515 - RNA, 21 nt, Artificial Sequence
  Synthetic
ugaguacaagaaaggaaaaca

SEQ ID NO: 197516 - RNA, 22 nt, Artificial Sequence
  Synthetic
uugaguacaagaaaggaaaaca

SEQ ID NO: 197517 - RNA, 23 nt, Artificial Sequence
  Synthetic
auugaguacaagaaaggaaaaca

SEQ ID NO: 197518 - RNA, 24 nt, Artificial Sequence
  Synthetic
aauugaguacaagaaaggaaaaca

SEQ ID NO: 197519 - RNA, 18 nt, Artificial Sequence
  Synthetic
cuuaaaaauaggaaaaca

SEQ ID NO: 197520 - RNA, 19 nt, Artificial Sequence
  Synthetic
ucuuaaaaauaggaaaaca

SEQ ID NO: 197521 - RNA, 20 nt, Artificial Sequence
  Synthetic
cucuuaaaaauaggaaaaca

SEQ ID NO: 197522 - RNA, 21 nt, Artificial Sequence
  Synthetic
gcucuuaaaaauaggaaaaca

SEQ ID NO: 197523 - RNA, 22 nt, Artificial Sequence
  Synthetic
agcucuuaaaaauaggaaaaca

SEQ ID NO: 197524 - RNA, 23 nt, Artificial Sequence
  Synthetic
gagcucuuaaaaauaggaaaaca

SEQ ID NO: 197525 - RNA, 24 nt, Artificial Sequence
  Synthetic
agagcucuuaaaaauaggaaaaca

SEQ ID NO: 197526 - RNA, 18 nt, Artificial Sequence
  Synthetic
ccuaggauccggaaaaca

SEQ ID NO: 197527 - RNA, 19 nt, Artificial Sequence
  Synthetic
gccuaggauccggaaaaca

SEQ ID NO: 197528 - RNA, 20 nt, Artificial Sequence
  Synthetic
agccuaggauccggaaaaca

SEQ ID NO: 197529 - RNA, 21 nt, Artificial Sequence
  Synthetic
aagccuaggauccggaaaaca

SEQ ID NO: 197530 - RNA, 22 nt, Artificial Sequence
  Synthetic
aaagccuaggauccggaaaaca

SEQ ID NO: 197531 - RNA, 23 nt, Artificial Sequence
  Synthetic
caaagccuaggauccggaaaaca

SEQ ID NO: 197532 - RNA, 24 nt, Artificial Sequence
  Synthetic
gcaaagccuaggauccggaaaaca

SEQ ID NO: 197533 - RNA, 18 nt, Artificial Sequence
  Synthetic
gauucuuuauggaaaaca

SEQ ID NO: 197534 - RNA, 19 nt, Artificial Sequence
  Synthetic
ggauucuuuauggaaaaca

SEQ ID NO: 197535 - RNA, 20 nt, Artificial Sequence
  Synthetic
uggauucuuuauggaaaaca

SEQ ID NO: 197536 - RNA, 21 nt, Artificial Sequence
  Synthetic
guggauucuuuauggaaaaca

SEQ ID NO: 197537 - RNA, 22 nt, Artificial Sequence
  Synthetic
uguggauucuuuauggaaaaca

SEQ ID NO: 197538 - RNA, 23 nt, Artificial Sequence
  Synthetic
auguggauucuuuauggaaaaca

SEQ ID NO: 197539 - RNA, 24 nt, Artificial Sequence
  Synthetic
gauguggauucuuuauggaaaaca

SEQ ID NO: 197540 - RNA, 18 nt, Artificial Sequence
  Synthetic
agaccagccuggaaaaca

SEQ ID NO: 197541 - RNA, 19 nt, Artificial Sequence
  Synthetic
gagaccagccuggaaaaca

SEQ ID NO: 197542 - RNA, 20 nt, Artificial Sequence
  Synthetic
ugagaccagccuggaaaaca

SEQ ID NO: 197543 - RNA, 21 nt, Artificial Sequence
  Synthetic
uugagaccagccuggaaaaca

SEQ ID NO: 197544 - RNA, 22 nt, Artificial Sequence
  Synthetic
uuugagaccagccuggaaaaca

SEQ ID NO: 197545 - RNA, 23 nt, Artificial Sequence
  Synthetic
guuugagaccagccuggaaaaca

SEQ ID NO: 197546 - RNA, 24 nt, Artificial Sequence
  Synthetic
aguuugagaccagccuggaaaaca

SEQ ID NO: 197547 - RNA, 18 nt, Artificial Sequence
  Synthetic
aggagguaaaugaaaaca

SEQ ID NO: 197548 - RNA, 19 nt, Artificial Sequence
  Synthetic
caggagguaaaugaaaaca

SEQ ID NO: 197549 - RNA, 20 nt, Artificial Sequence
  Synthetic
ccaggagguaaaugaaaaca

SEQ ID NO: 197550 - RNA, 21 nt, Artificial Sequence
  Synthetic
uccaggagguaaaugaaaaca

SEQ ID NO: 197551 - RNA, 22 nt, Artificial Sequence
  Synthetic
uuccaggagguaaaugaaaaca

SEQ ID NO: 197552 - RNA, 23 nt, Artificial Sequence
  Synthetic
uuuccaggagguaaaugaaaaca

SEQ ID NO: 197553 - RNA, 24 nt, Artificial Sequence
  Synthetic
uuuuccaggagguaaaugaaaaca

SEQ ID NO: 197554 - RNA, 18 nt, Artificial Sequence
  Synthetic
gcaguggcaaugaaaaca

SEQ ID NO: 197555 - RNA, 19 nt, Artificial Sequence
  Synthetic
ggcaguggcaaugaaaaca

SEQ ID NO: 197556 - RNA, 20 nt, Artificial Sequence
  Synthetic
gggcaguggcaaugaaaaca

SEQ ID NO: 197557 - RNA, 21 nt, Artificial Sequence
  Synthetic
ggggcaguggcaaugaaaaca

SEQ ID NO: 197558 - RNA, 22 nt, Artificial Sequence
  Synthetic
uggggcaguggcaaugaaaaca

SEQ ID NO: 197559 - RNA, 23 nt, Artificial Sequence
  Synthetic
auggggcaguggcaaugaaaaca

SEQ ID NO: 197560 - RNA, 24 nt, Artificial Sequence
  Synthetic
cauggggcaguggcaaugaaaaca

SEQ ID NO: 197561 - RNA, 18 nt, Artificial Sequence
  Synthetic
aagcuuucagugaaaaca

SEQ ID NO: 197562 - RNA, 19 nt, Artificial Sequence
  Synthetic
gaagcuuucagugaaaaca

SEQ ID NO: 197563 - RNA, 20 nt, Artificial Sequence
  Synthetic
ggaagcuuucagugaaaaca

SEQ ID NO: 197564 - RNA, 21 nt, Artificial Sequence
  Synthetic
aggaagcuuucagugaaaaca

SEQ ID NO: 197565 - RNA, 22 nt, Artificial Sequence
  Synthetic
caggaagcuuucagugaaaaca

SEQ ID NO: 197566 - RNA, 23 nt, Artificial Sequence
  Synthetic
ccaggaagcuuucagugaaaaca

SEQ ID NO: 197567 - RNA, 24 nt, Artificial Sequence
  Synthetic
accaggaagcuuucagugaaaaca

SEQ ID NO: 197568 - RNA, 18 nt, Artificial Sequence
  Synthetic
auguccagagugaaaaca

SEQ ID NO: 197569 - RNA, 19 nt, Artificial Sequence
  Synthetic
cauguccagagugaaaaca

SEQ ID NO: 197570 - RNA, 20 nt, Artificial Sequence
  Synthetic
ucauguccagagugaaaaca

SEQ ID NO: 197571 - RNA, 21 nt, Artificial Sequence
  Synthetic
gucauguccagagugaaaaca

SEQ ID NO: 197572 - RNA, 22 nt, Artificial Sequence
  Synthetic
cgucauguccagagugaaaaca

SEQ ID NO: 197573 - RNA, 23 nt, Artificial Sequence
  Synthetic
ccgucauguccagagugaaaaca

SEQ ID NO: 197574 - RNA, 24 nt, Artificial Sequence
  Synthetic
uccgucauguccagagugaaaaca

SEQ ID NO: 197575 - RNA, 18 nt, Artificial Sequence
  Synthetic
aagaaaugguugaaaaca

SEQ ID NO: 197576 - RNA, 19 nt, Artificial Sequence
  Synthetic
aaagaaaugguugaaaaca

SEQ ID NO: 197577 - RNA, 20 nt, Artificial Sequence
  Synthetic
uaaagaaaugguugaaaaca

SEQ ID NO: 197578 - RNA, 21 nt, Artificial Sequence
  Synthetic
uuaaagaaaugguugaaaaca

SEQ ID NO: 197579 - RNA, 22 nt, Artificial Sequence
  Synthetic
uuuaaagaaaugguugaaaaca

SEQ ID NO: 197580 - RNA, 23 nt, Artificial Sequence
  Synthetic
uuuuaaagaaaugguugaaaaca

SEQ ID NO: 197581 - RNA, 24 nt, Artificial Sequence
  Synthetic
auuuuaaagaaaugguugaaaaca

SEQ ID NO: 197582 - RNA, 18 nt, Artificial Sequence
  Synthetic
ccuuauacaaauaaaaca

SEQ ID NO: 197583 - RNA, 19 nt, Artificial Sequence
  Synthetic
accuuauacaaauaaaaca

SEQ ID NO: 197584 - RNA, 20 nt, Artificial Sequence
  Synthetic
caccuuauacaaauaaaaca

SEQ ID NO: 197585 - RNA, 21 nt, Artificial Sequence
  Synthetic
ucaccuuauacaaauaaaaca

SEQ ID NO: 197586 - RNA, 22 nt, Artificial Sequence
  Synthetic
cucaccuuauacaaauaaaaca

SEQ ID NO: 197587 - RNA, 23 nt, Artificial Sequence
  Synthetic
gcucaccuuauacaaauaaaaca

SEQ ID NO: 197588 - RNA, 24 nt, Artificial Sequence
  Synthetic
ugcucaccuuauacaaauaaaaca

SEQ ID NO: 197589 - RNA, 18 nt, Artificial Sequence
  Synthetic
gacaauguccauaaaaca

SEQ ID NO: 197590 - RNA, 19 nt, Artificial Sequence
  Synthetic
agacaauguccauaaaaca

SEQ ID NO: 197591 - RNA, 20 nt, Artificial Sequence
  Synthetic
uagacaauguccauaaaaca

SEQ ID NO: 197592 - RNA, 21 nt, Artificial Sequence
  Synthetic
cuagacaauguccauaaaaca

SEQ ID NO: 197593 - RNA, 22 nt, Artificial Sequence
  Synthetic
ucuagacaauguccauaaaaca

SEQ ID NO: 197594 - RNA, 23 nt, Artificial Sequence
  Synthetic
uucuagacaauguccauaaaaca

SEQ ID NO: 197595 - RNA, 24 nt, Artificial Sequence
  Synthetic
uuucuagacaauguccauaaaaca

SEQ ID NO: 197596 - RNA, 18 nt, Artificial Sequence
  Synthetic
cuaagugcuuauaaaaca

SEQ ID NO: 197597 - RNA, 19 nt, Artificial Sequence
  Synthetic
ucuaagugcuuauaaaaca

SEQ ID NO: 197598 - RNA, 20 nt, Artificial Sequence
  Synthetic
uucuaagugcuuauaaaaca

SEQ ID NO: 197599 - RNA, 21 nt, Artificial Sequence
  Synthetic
auucuaagugcuuauaaaaca

SEQ ID NO: 197600 - RNA, 22 nt, Artificial Sequence
  Synthetic
uauucuaagugcuuauaaaaca

SEQ ID NO: 197601 - RNA, 23 nt, Artificial Sequence
  Synthetic
cuauucuaagugcuuauaaaaca

SEQ ID NO: 197602 - RNA, 24 nt, Artificial Sequence
  Synthetic
acuauucuaagugcuuauaaaaca

SEQ ID NO: 197603 - RNA, 18 nt, Artificial Sequence
  Synthetic
gcaagugcaaguaaaaca

SEQ ID NO: 197604 - RNA, 19 nt, Artificial Sequence
  Synthetic
agcaagugcaaguaaaaca

SEQ ID NO: 197605 - RNA, 20 nt, Artificial Sequence
  Synthetic
cagcaagugcaaguaaaaca

SEQ ID NO: 197606 - RNA, 21 nt, Artificial Sequence
  Synthetic
ucagcaagugcaaguaaaaca

SEQ ID NO: 197607 - RNA, 22 nt, Artificial Sequence
  Synthetic
cucagcaagugcaaguaaaaca

SEQ ID NO: 197608 - RNA, 23 nt, Artificial Sequence
  Synthetic
acucagcaagugcaaguaaaaca

SEQ ID NO: 197609 - RNA, 24 nt, Artificial Sequence
  Synthetic
gacucagcaagugcaaguaaaaca

SEQ ID NO: 197610 - RNA, 18 nt, Artificial Sequence
  Synthetic
uuuaacgcauguaaaaca

SEQ ID NO: 197611 - RNA, 19 nt, Artificial Sequence
  Synthetic
uuuuaacgcauguaaaaca

SEQ ID NO: 197612 - RNA, 20 nt, Artificial Sequence
  Synthetic
auuuuaacgcauguaaaaca

SEQ ID NO: 197613 - RNA, 21 nt, Artificial Sequence
  Synthetic
uauuuuaacgcauguaaaaca

SEQ ID NO: 197614 - RNA, 22 nt, Artificial Sequence
  Synthetic
cuauuuuaacgcauguaaaaca

SEQ ID NO: 197615 - RNA, 23 nt, Artificial Sequence
  Synthetic
gcuauuuuaacgcauguaaaaca

SEQ ID NO: 197616 - RNA, 24 nt, Artificial Sequence
  Synthetic
agcuauuuuaacgcauguaaaaca

SEQ ID NO: 197617 - RNA, 18 nt, Artificial Sequence
  Synthetic
cauuucuacuuuaaaaca

SEQ ID NO: 197618 - RNA, 19 nt, Artificial Sequence
  Synthetic
gcauuucuacuuuaaaaca

SEQ ID NO: 197619 - RNA, 20 nt, Artificial Sequence
  Synthetic
agcauuucuacuuuaaaaca

SEQ ID NO: 197620 - RNA, 21 nt, Artificial Sequence
  Synthetic
uagcauuucuacuuuaaaaca

SEQ ID NO: 197621 - RNA, 22 nt, Artificial Sequence
  Synthetic
auagcauuucuacuuuaaaaca

SEQ ID NO: 197622 - RNA, 23 nt, Artificial Sequence
  Synthetic
aauagcauuucuacuuuaaaaca

SEQ ID NO: 197623 - RNA, 24 nt, Artificial Sequence
  Synthetic
uaauagcauuucuacuuuaaaaca

SEQ ID NO: 197624 - RNA, 18 nt, Artificial Sequence
  Synthetic
auagaccuaacacaaaca

SEQ ID NO: 197625 - RNA, 19 nt, Artificial Sequence
  Synthetic
aauagaccuaacacaaaca

SEQ ID NO: 197626 - RNA, 20 nt, Artificial Sequence
  Synthetic
gaauagaccuaacacaaaca

SEQ ID NO: 197627 - RNA, 21 nt, Artificial Sequence
  Synthetic
ugaauagaccuaacacaaaca

SEQ ID NO: 197628 - RNA, 22 nt, Artificial Sequence
  Synthetic
augaauagaccuaacacaaaca

SEQ ID NO: 197629 - RNA, 23 nt, Artificial Sequence
  Synthetic
uaugaauagaccuaacacaaaca

SEQ ID NO: 197630 - RNA, 24 nt, Artificial Sequence
  Synthetic
auaugaauagaccuaacacaaaca

SEQ ID NO: 197631 - RNA, 18 nt, Artificial Sequence
  Synthetic
cacacacacacacaaaca

SEQ ID NO: 197632 - RNA, 19 nt, Artificial Sequence
  Synthetic
acacacacacacacaaaca

SEQ ID NO: 197633 - RNA, 20 nt, Artificial Sequence
  Synthetic
cacacacacacacacaaaca

SEQ ID NO: 197634 - RNA, 21 nt, Artificial Sequence
  Synthetic
acacacacacacacacaaaca

SEQ ID NO: 197635 - RNA, 22 nt, Artificial Sequence
  Synthetic
cacacacacacacacacaaaca

SEQ ID NO: 197636 - RNA, 23 nt, Artificial Sequence
  Synthetic
acacacacacacacacacaaaca

SEQ ID NO: 197637 - RNA, 24 nt, Artificial Sequence
  Synthetic
cacacacacacacacacacaaaca

SEQ ID NO: 197638 - RNA, 18 nt, Artificial Sequence
  Synthetic
aauugccaaagacaaaca

SEQ ID NO: 197639 - RNA, 19 nt, Artificial Sequence
  Synthetic
gaauugccaaagacaaaca

SEQ ID NO: 197640 - RNA, 20 nt, Artificial Sequence
  Synthetic
ugaauugccaaagacaaaca

SEQ ID NO: 197641 - RNA, 21 nt, Artificial Sequence
  Synthetic
cugaauugccaaagacaaaca

SEQ ID NO: 197642 - RNA, 22 nt, Artificial Sequence
  Synthetic
acugaauugccaaagacaaaca

SEQ ID NO: 197643 - RNA, 23 nt, Artificial Sequence
  Synthetic
cacugaauugccaaagacaaaca

SEQ ID NO: 197644 - RNA, 24 nt, Artificial Sequence
  Synthetic
acacugaauugccaaagacaaaca

SEQ ID NO: 197645 - RNA, 18 nt, Artificial Sequence
  Synthetic
accaacaacagacaaaca

SEQ ID NO: 197646 - RNA, 19 nt, Artificial Sequence
  Synthetic
caccaacaacagacaaaca

SEQ ID NO: 197647 - RNA, 20 nt, Artificial Sequence
  Synthetic
acaccaacaacagacaaaca

SEQ ID NO: 197648 - RNA, 21 nt, Artificial Sequence
  Synthetic
uacaccaacaacagacaaaca

SEQ ID NO: 197649 - RNA, 22 nt, Artificial Sequence
  Synthetic
auacaccaacaacagacaaaca

SEQ ID NO: 197650 - RNA, 23 nt, Artificial Sequence
  Synthetic
uauacaccaacaacagacaaaca

SEQ ID NO: 197651 - RNA, 24 nt, Artificial Sequence
  Synthetic
uuauacaccaacaacagacaaaca

SEQ ID NO: 197652 - RNA, 18 nt, Artificial Sequence
  Synthetic
ucagacacuuuacaaaca

SEQ ID NO: 197653 - RNA, 19 nt, Artificial Sequence
  Synthetic
aucagacacuuuacaaaca

SEQ ID NO: 197654 - RNA, 20 nt, Artificial Sequence
  Synthetic
gaucagacacuuuacaaaca

SEQ ID NO: 197655 - RNA, 21 nt, Artificial Sequence
  Synthetic
ggaucagacacuuuacaaaca

SEQ ID NO: 197656 - RNA, 22 nt, Artificial Sequence
  Synthetic
uggaucagacacuuuacaaaca

SEQ ID NO: 197657 - RNA, 23 nt, Artificial Sequence
  Synthetic
auggaucagacacuuuacaaaca

SEQ ID NO: 197658 - RNA, 24 nt, Artificial Sequence
  Synthetic
uauggaucagacacuuuacaaaca

SEQ ID NO: 197659 - RNA, 18 nt, Artificial Sequence
  Synthetic
guggcacgaacccaaaca

SEQ ID NO: 197660 - RNA, 19 nt, Artificial Sequence
  Synthetic
gguggcacgaacccaaaca

SEQ ID NO: 197661 - RNA, 20 nt, Artificial Sequence
  Synthetic
agguggcacgaacccaaaca

SEQ ID NO: 197662 - RNA, 21 nt, Artificial Sequence
  Synthetic
aagguggcacgaacccaaaca

SEQ ID NO: 197663 - RNA, 22 nt, Artificial Sequence
  Synthetic
aaagguggcacgaacccaaaca

SEQ ID NO: 197664 - RNA, 23 nt, Artificial Sequence
  Synthetic
uaaagguggcacgaacccaaaca

SEQ ID NO: 197665 - RNA, 24 nt, Artificial Sequence
  Synthetic
uuaaagguggcacgaacccaaaca

SEQ ID NO: 197666 - RNA, 18 nt, Artificial Sequence
  Synthetic
gaucucaucacccaaaca

SEQ ID NO: 197667 - RNA, 19 nt, Artificial Sequence
  Synthetic
agaucucaucacccaaaca

SEQ ID NO: 197668 - RNA, 20 nt, Artificial Sequence
  Synthetic
cagaucucaucacccaaaca

SEQ ID NO: 197669 - RNA, 21 nt, Artificial Sequence
  Synthetic
acagaucucaucacccaaaca

SEQ ID NO: 197670 - RNA, 22 nt, Artificial Sequence
  Synthetic
uacagaucucaucacccaaaca

SEQ ID NO: 197671 - RNA, 23 nt, Artificial Sequence
  Synthetic
guacagaucucaucacccaaaca

SEQ ID NO: 197672 - RNA, 24 nt, Artificial Sequence
  Synthetic
gguacagaucucaucacccaaaca

SEQ ID NO: 197673 - RNA, 18 nt, Artificial Sequence
  Synthetic
gagaaauuggcccaaaca

SEQ ID NO: 197674 - RNA, 19 nt, Artificial Sequence
  Synthetic
ggagaaauuggcccaaaca

SEQ ID NO: 197675 - RNA, 20 nt, Artificial Sequence
  Synthetic
gggagaaauuggcccaaaca

SEQ ID NO: 197676 - RNA, 21 nt, Artificial Sequence
  Synthetic
ugggagaaauuggcccaaaca

SEQ ID NO: 197677 - RNA, 22 nt, Artificial Sequence
  Synthetic
augggagaaauuggcccaaaca

SEQ ID NO: 197678 - RNA, 23 nt, Artificial Sequence
  Synthetic
gaugggagaaauuggcccaaaca

SEQ ID NO: 197679 - RNA, 24 nt, Artificial Sequence
  Synthetic
agaugggagaaauuggcccaaaca

SEQ ID NO: 197680 - RNA, 18 nt, Artificial Sequence
  Synthetic
uauuaacuaagccaaaca

SEQ ID NO: 197681 - RNA, 19 nt, Artificial Sequence
  Synthetic
guauuaacuaagccaaaca

SEQ ID NO: 197682 - RNA, 20 nt, Artificial Sequence
  Synthetic
uguauuaacuaagccaaaca

SEQ ID NO: 197683 - RNA, 21 nt, Artificial Sequence
  Synthetic
uuguauuaacuaagccaaaca

SEQ ID NO: 197684 - RNA, 22 nt, Artificial Sequence
  Synthetic
guuguauuaacuaagccaaaca

SEQ ID NO: 197685 - RNA, 23 nt, Artificial Sequence
  Synthetic
uguuguauuaacuaagccaaaca

SEQ ID NO: 197686 - RNA, 24 nt, Artificial Sequence
  Synthetic
auguuguauuaacuaagccaaaca

SEQ ID NO: 197687 - RNA, 18 nt, Artificial Sequence
  Synthetic
ucccuucagguccaaaca

SEQ ID NO: 197688 - RNA, 19 nt, Artificial Sequence
  Synthetic
cucccuucagguccaaaca

SEQ ID NO: 197689 - RNA, 20 nt, Artificial Sequence
  Synthetic
ccucccuucagguccaaaca

SEQ ID NO: 197690 - RNA, 21 nt, Artificial Sequence
  Synthetic
gccucccuucagguccaaaca

SEQ ID NO: 197691 - RNA, 22 nt, Artificial Sequence
  Synthetic
ugccucccuucagguccaaaca

SEQ ID NO: 197692 - RNA, 23 nt, Artificial Sequence
  Synthetic
uugccucccuucagguccaaaca

SEQ ID NO: 197693 - RNA, 24 nt, Artificial Sequence
  Synthetic
auugccucccuucagguccaaaca

SEQ ID NO: 197694 - RNA, 18 nt, Artificial Sequence
  Synthetic
aauagaagcaagcaaaca

SEQ ID NO: 197695 - RNA, 19 nt, Artificial Sequence
  Synthetic
gaauagaagcaagcaaaca

SEQ ID NO: 197696 - RNA, 20 nt, Artificial Sequence
  Synthetic
agaauagaagcaagcaaaca

SEQ ID NO: 197697 - RNA, 21 nt, Artificial Sequence
  Synthetic
cagaauagaagcaagcaaaca

SEQ ID NO: 197698 - RNA, 22 nt, Artificial Sequence
  Synthetic
acagaauagaagcaagcaaaca

SEQ ID NO: 197699 - RNA, 23 nt, Artificial Sequence
  Synthetic
gacagaauagaagcaagcaaaca

SEQ ID NO: 197700 - RNA, 24 nt, Artificial Sequence
  Synthetic
agacagaauagaagcaagcaaaca

SEQ ID NO: 197701 - RNA, 18 nt, Artificial Sequence
  Synthetic
auuguggugaugcaaaca

SEQ ID NO: 197702 - RNA, 19 nt, Artificial Sequence
  Synthetic
aauuguggugaugcaaaca

SEQ ID NO: 197703 - RNA, 20 nt, Artificial Sequence
  Synthetic
aaauuguggugaugcaaaca

SEQ ID NO: 197704 - RNA, 21 nt, Artificial Sequence
  Synthetic
caaauuguggugaugcaaaca

SEQ ID NO: 197705 - RNA, 22 nt, Artificial Sequence
  Synthetic
ucaaauuguggugaugcaaaca

SEQ ID NO: 197706 - RNA, 23 nt, Artificial Sequence
  Synthetic
uucaaauuguggugaugcaaaca

SEQ ID NO: 197707 - RNA, 24 nt, Artificial Sequence
  Synthetic
guucaaauuguggugaugcaaaca

SEQ ID NO: 197708 - RNA, 18 nt, Artificial Sequence
  Synthetic
auuugaucugaucaaaca

SEQ ID NO: 197709 - RNA, 19 nt, Artificial Sequence
  Synthetic
uauuugaucugaucaaaca

SEQ ID NO: 197710 - RNA, 20 nt, Artificial Sequence
  Synthetic
cuauuugaucugaucaaaca

SEQ ID NO: 197711 - RNA, 21 nt, Artificial Sequence
  Synthetic
acuauuugaucugaucaaaca

SEQ ID NO: 197712 - RNA, 22 nt, Artificial Sequence
  Synthetic
cacuauuugaucugaucaaaca

SEQ ID NO: 197713 - RNA, 23 nt, Artificial Sequence
  Synthetic
acacuauuugaucugaucaaaca

SEQ ID NO: 197714 - RNA, 24 nt, Artificial Sequence
  Synthetic
cacacuauuugaucugaucaaaca

SEQ ID NO: 197715 - RNA, 18 nt, Artificial Sequence
  Synthetic
aaauaaaaaauucaaaca

SEQ ID NO: 197716 - RNA, 19 nt, Artificial Sequence
  Synthetic
aaaauaaaaaauucaaaca

SEQ ID NO: 197717 - RNA, 20 nt, Artificial Sequence
  Synthetic
uaaaauaaaaaauucaaaca

SEQ ID NO: 197718 - RNA, 21 nt, Artificial Sequence
  Synthetic
auaaaauaaaaaauucaaaca

SEQ ID NO: 197719 - RNA, 22 nt, Artificial Sequence
  Synthetic
aauaaaauaaaaaauucaaaca

SEQ ID NO: 197720 - RNA, 23 nt, Artificial Sequence
  Synthetic
aaauaaaauaaaaaauucaaaca

SEQ ID NO: 197721 - RNA, 24 nt, Artificial Sequence
  Synthetic
aaaauaaaauaaaaaauucaaaca

SEQ ID NO: 197722 - RNA, 18 nt, Artificial Sequence
  Synthetic
ggucaacuucuucaaaca

SEQ ID NO: 197723 - RNA, 19 nt, Artificial Sequence
  Synthetic
aggucaacuucuucaaaca

SEQ ID NO: 197724 - RNA, 20 nt, Artificial Sequence
  Synthetic
caggucaacuucuucaaaca

SEQ ID NO: 197725 - RNA, 21 nt, Artificial Sequence
  Synthetic
acaggucaacuucuucaaaca

SEQ ID NO: 197726 - RNA, 22 nt, Artificial Sequence
  Synthetic
gacaggucaacuucuucaaaca

SEQ ID NO: 197727 - RNA, 23 nt, Artificial Sequence
  Synthetic
agacaggucaacuucuucaaaca

SEQ ID NO: 197728 - RNA, 24 nt, Artificial Sequence
  Synthetic
cagacaggucaacuucuucaaaca

SEQ ID NO: 197729 - RNA, 18 nt, Artificial Sequence
  Synthetic
cauucgauauuucaaaca

SEQ ID NO: 197730 - RNA, 19 nt, Artificial Sequence
  Synthetic
acauucgauauuucaaaca

SEQ ID NO: 197731 - RNA, 20 nt, Artificial Sequence
  Synthetic
cacauucgauauuucaaaca

SEQ ID NO: 197732 - RNA, 21 nt, Artificial Sequence
  Synthetic
ccacauucgauauuucaaaca

SEQ ID NO: 197733 - RNA, 22 nt, Artificial Sequence
  Synthetic
accacauucgauauuucaaaca

SEQ ID NO: 197734 - RNA, 23 nt, Artificial Sequence
  Synthetic
aaccacauucgauauuucaaaca

SEQ ID NO: 197735 - RNA, 24 nt, Artificial Sequence
  Synthetic
aaaccacauucgauauuucaaaca

SEQ ID NO: 197736 - RNA, 18 nt, Artificial Sequence
  Synthetic
aaugaugcuuuucaaaca

SEQ ID NO: 197737 - RNA, 19 nt, Artificial Sequence
  Synthetic
caaugaugcuuuucaaaca

SEQ ID NO: 197738 - RNA, 20 nt, Artificial Sequence
  Synthetic
ccaaugaugcuuuucaaaca

SEQ ID NO: 197739 - RNA, 21 nt, Artificial Sequence
  Synthetic
accaaugaugcuuuucaaaca

SEQ ID NO: 197740 - RNA, 22 nt, Artificial Sequence
  Synthetic
aaccaaugaugcuuuucaaaca

SEQ ID NO: 197741 - RNA, 23 nt, Artificial Sequence
  Synthetic
aaaccaaugaugcuuuucaaaca

SEQ ID NO: 197742 - RNA, 24 nt, Artificial Sequence
  Synthetic
uaaaccaaugaugcuuuucaaaca

SEQ ID NO: 197743 - RNA, 18 nt, Artificial Sequence
  Synthetic
auauuagaaaaagaaaca

SEQ ID NO: 197744 - RNA, 19 nt, Artificial Sequence
  Synthetic
cauauuagaaaaagaaaca

SEQ ID NO: 197745 - RNA, 20 nt, Artificial Sequence
  Synthetic
ccauauuagaaaaagaaaca

SEQ ID NO: 197746 - RNA, 21 nt, Artificial Sequence
  Synthetic
gccauauuagaaaaagaaaca

SEQ ID NO: 197747 - RNA, 22 nt, Artificial Sequence
  Synthetic
agccauauuagaaaaagaaaca

SEQ ID NO: 197748 - RNA, 23 nt, Artificial Sequence
  Synthetic
uagccauauuagaaaaagaaaca

SEQ ID NO: 197749 - RNA, 24 nt, Artificial Sequence
  Synthetic
cuagccauauuagaaaaagaaaca

SEQ ID NO: 197750 - RNA, 18 nt, Artificial Sequence
  Synthetic
guggcaguggaagaaaca

SEQ ID NO: 197751 - RNA, 19 nt, Artificial Sequence
  Synthetic
aguggcaguggaagaaaca

SEQ ID NO: 197752 - RNA, 20 nt, Artificial Sequence
  Synthetic
aaguggcaguggaagaaaca

SEQ ID NO: 197753 - RNA, 21 nt, Artificial Sequence
  Synthetic
uaaguggcaguggaagaaaca

SEQ ID NO: 197754 - RNA, 22 nt, Artificial Sequence
  Synthetic
cuaaguggcaguggaagaaaca

SEQ ID NO: 197755 - RNA, 23 nt, Artificial Sequence
  Synthetic
ucuaaguggcaguggaagaaaca

SEQ ID NO: 197756 - RNA, 24 nt, Artificial Sequence
  Synthetic
uucuaaguggcaguggaagaaaca

SEQ ID NO: 197757 - RNA, 18 nt, Artificial Sequence
  Synthetic
ggcauuaaauaagaaaca

SEQ ID NO: 197758 - RNA, 19 nt, Artificial Sequence
  Synthetic
aggcauuaaauaagaaaca

SEQ ID NO: 197759 - RNA, 20 nt, Artificial Sequence
  Synthetic
aaggcauuaaauaagaaaca

SEQ ID NO: 197760 - RNA, 21 nt, Artificial Sequence
  Synthetic
aaaggcauuaaauaagaaaca

SEQ ID NO: 197761 - RNA, 22 nt, Artificial Sequence
  Synthetic
caaaggcauuaaauaagaaaca

SEQ ID NO: 197762 - RNA, 23 nt, Artificial Sequence
  Synthetic
acaaaggcauuaaauaagaaaca

SEQ ID NO: 197763 - RNA, 24 nt, Artificial Sequence
  Synthetic
uacaaaggcauuaaauaagaaaca

SEQ ID NO: 197764 - RNA, 18 nt, Artificial Sequence
  Synthetic
gaacgcggugcagaaaca

SEQ ID NO: 197765 - RNA, 19 nt, Artificial Sequence
  Synthetic
agaacgcggugcagaaaca

SEQ ID NO: 197766 - RNA, 20 nt, Artificial Sequence
  Synthetic
cagaacgcggugcagaaaca

SEQ ID NO: 197767 - RNA, 21 nt, Artificial Sequence
  Synthetic
acagaacgcggugcagaaaca

SEQ ID NO: 197768 - RNA, 22 nt, Artificial Sequence
  Synthetic
gacagaacgcggugcagaaaca

SEQ ID NO: 197769 - RNA, 23 nt, Artificial Sequence
  Synthetic
agacagaacgcggugcagaaaca

SEQ ID NO: 197770 - RNA, 24 nt, Artificial Sequence
  Synthetic
cagacagaacgcggugcagaaaca

SEQ ID NO: 197771 - RNA, 18 nt, Artificial Sequence
  Synthetic
ccugcuugaucagaaaca

SEQ ID NO: 197772 - RNA, 19 nt, Artificial Sequence
  Synthetic
accugcuugaucagaaaca

SEQ ID NO: 197773 - RNA, 20 nt, Artificial Sequence
  Synthetic
gaccugcuugaucagaaaca

SEQ ID NO: 197774 - RNA, 21 nt, Artificial Sequence
  Synthetic
agaccugcuugaucagaaaca

SEQ ID NO: 197775 - RNA, 22 nt, Artificial Sequence
  Synthetic
cagaccugcuugaucagaaaca

SEQ ID NO: 197776 - RNA, 23 nt, Artificial Sequence
  Synthetic
ucagaccugcuugaucagaaaca

SEQ ID NO: 197777 - RNA, 24 nt, Artificial Sequence
  Synthetic
cucagaccugcuugaucagaaaca

SEQ ID NO: 197778 - RNA, 18 nt, Artificial Sequence
  Synthetic
cagagaacuucagaaaca

SEQ ID NO: 197779 - RNA, 19 nt, Artificial Sequence
  Synthetic
ucagagaacuucagaaaca

SEQ ID NO: 197780 - RNA, 20 nt, Artificial Sequence
  Synthetic
aucagagaacuucagaaaca

SEQ ID NO: 197781 - RNA, 21 nt, Artificial Sequence
  Synthetic
uaucagagaacuucagaaaca

SEQ ID NO: 197782 - RNA, 22 nt, Artificial Sequence
  Synthetic
auaucagagaacuucagaaaca

SEQ ID NO: 197783 - RNA, 23 nt, Artificial Sequence
  Synthetic
aauaucagagaacuucagaaaca

SEQ ID NO: 197784 - RNA, 24 nt, Artificial Sequence
  Synthetic
caauaucagagaacuucagaaaca

SEQ ID NO: 197785 - RNA, 18 nt, Artificial Sequence
  Synthetic
gagagagagagagaaaca

SEQ ID NO: 197786 - RNA, 19 nt, Artificial Sequence
  Synthetic
agagagagagagagaaaca

SEQ ID NO: 197787 - RNA, 20 nt, Artificial Sequence
  Synthetic
gagagagagagagagaaaca

SEQ ID NO: 197788 - RNA, 21 nt, Artificial Sequence
  Synthetic
agagagagagagagagaaaca

SEQ ID NO: 197789 - RNA, 22 nt, Artificial Sequence
  Synthetic
gagagagagagagagagaaaca

SEQ ID NO: 197790 - RNA, 23 nt, Artificial Sequence
  Synthetic
agagagagagagagagagaaaca

SEQ ID NO: 197791 - RNA, 24 nt, Artificial Sequence
  Synthetic
gagagagagagagagagagaaaca

SEQ ID NO: 197792 - RNA, 18 nt, Artificial Sequence
  Synthetic
aaaauaaggagagaaaca

SEQ ID NO: 197793 - RNA, 19 nt, Artificial Sequence
  Synthetic
uaaaauaaggagagaaaca

SEQ ID NO: 197794 - RNA, 20 nt, Artificial Sequence
  Synthetic
auaaaauaaggagagaaaca

SEQ ID NO: 197795 - RNA, 21 nt, Artificial Sequence
  Synthetic
aauaaaauaaggagagaaaca

SEQ ID NO: 197796 - RNA, 22 nt, Artificial Sequence
  Synthetic
aaauaaaauaaggagagaaaca

SEQ ID NO: 197797 - RNA, 23 nt, Artificial Sequence
  Synthetic
gaaauaaaauaaggagagaaaca

SEQ ID NO: 197798 - RNA, 24 nt, Artificial Sequence
  Synthetic
agaaauaaaauaaggagagaaaca

SEQ ID NO: 197799 - RNA, 18 nt, Artificial Sequence
  Synthetic
agcuuuaccugagaaaca

SEQ ID NO: 197800 - RNA, 19 nt, Artificial Sequence
  Synthetic
gagcuuuaccugagaaaca

SEQ ID NO: 197801 - RNA, 20 nt, Artificial Sequence
  Synthetic
agagcuuuaccugagaaaca

SEQ ID NO: 197802 - RNA, 21 nt, Artificial Sequence
  Synthetic
cagagcuuuaccugagaaaca

SEQ ID NO: 197803 - RNA, 22 nt, Artificial Sequence
  Synthetic
ccagagcuuuaccugagaaaca

SEQ ID NO: 197804 - RNA, 23 nt, Artificial Sequence
  Synthetic
uccagagcuuuaccugagaaaca

SEQ ID NO: 197805 - RNA, 24 nt, Artificial Sequence
  Synthetic
uuccagagcuuuaccugagaaaca

SEQ ID NO: 197806 - RNA, 18 nt, Artificial Sequence
  Synthetic
uuaagaugcugagaaaca

SEQ ID NO: 197807 - RNA, 19 nt, Artificial Sequence
  Synthetic
uuuaagaugcugagaaaca

SEQ ID NO: 197808 - RNA, 20 nt, Artificial Sequence
  Synthetic
cuuuaagaugcugagaaaca

SEQ ID NO: 197809 - RNA, 21 nt, Artificial Sequence
  Synthetic
ccuuuaagaugcugagaaaca

SEQ ID NO: 197810 - RNA, 22 nt, Artificial Sequence
  Synthetic
uccuuuaagaugcugagaaaca

SEQ ID NO: 197811 - RNA, 23 nt, Artificial Sequence
  Synthetic
auccuuuaagaugcugagaaaca

SEQ ID NO: 197812 - RNA, 24 nt, Artificial Sequence
  Synthetic
aauccuuuaagaugcugagaaaca

SEQ ID NO: 197813 - RNA, 18 nt, Artificial Sequence
  Synthetic
aaaauauuaauagaaaca

SEQ ID NO: 197814 - RNA, 19 nt, Artificial Sequence
  Synthetic
aaaaauauuaauagaaaca

SEQ ID NO: 197815 - RNA, 20 nt, Artificial Sequence
  Synthetic
uaaaaauauuaauagaaaca

SEQ ID NO: 197816 - RNA, 21 nt, Artificial Sequence
  Synthetic
uuaaaaauauuaauagaaaca

SEQ ID NO: 197817 - RNA, 22 nt, Artificial Sequence
  Synthetic
cuuaaaaauauuaauagaaaca

SEQ ID NO: 197818 - RNA, 23 nt, Artificial Sequence
  Synthetic
ccuuaaaaauauuaauagaaaca

SEQ ID NO: 197819 - RNA, 24 nt, Artificial Sequence
  Synthetic
accuuaaaaauauuaauagaaaca

SEQ ID NO: 197820 - RNA, 18 nt, Artificial Sequence
  Synthetic
auuugcagaguagaaaca

SEQ ID NO: 197821 - RNA, 19 nt, Artificial Sequence
  Synthetic
gauuugcagaguagaaaca

SEQ ID NO: 197822 - RNA, 20 nt, Artificial Sequence
  Synthetic
ugauuugcagaguagaaaca

SEQ ID NO: 197823 - RNA, 21 nt, Artificial Sequence
  Synthetic
augauuugcagaguagaaaca

SEQ ID NO: 197824 - RNA, 22 nt, Artificial Sequence
  Synthetic
aaugauuugcagaguagaaaca

SEQ ID NO: 197825 - RNA, 23 nt, Artificial Sequence
  Synthetic
caaugauuugcagaguagaaaca

SEQ ID NO: 197826 - RNA, 24 nt, Artificial Sequence
  Synthetic
gcaaugauuugcagaguagaaaca

SEQ ID NO: 197827 - RNA, 18 nt, Artificial Sequence
  Synthetic
agucaacugguagaaaca

SEQ ID NO: 197828 - RNA, 19 nt, Artificial Sequence
  Synthetic
aagucaacugguagaaaca

SEQ ID NO: 197829 - RNA, 20 nt, Artificial Sequence
  Synthetic
uaagucaacugguagaaaca

SEQ ID NO: 197830 - RNA, 21 nt, Artificial Sequence
  Synthetic
cuaagucaacugguagaaaca

SEQ ID NO: 197831 - RNA, 22 nt, Artificial Sequence
  Synthetic
ccuaagucaacugguagaaaca

SEQ ID NO: 197832 - RNA, 23 nt, Artificial Sequence
  Synthetic
accuaagucaacugguagaaaca

SEQ ID NO: 197833 - RNA, 24 nt, Artificial Sequence
  Synthetic
aaccuaagucaacugguagaaaca

SEQ ID NO: 197834 - RNA, 18 nt, Artificial Sequence
  Synthetic
agaaagcccuuagaaaca

SEQ ID NO: 197835 - RNA, 19 nt, Artificial Sequence
  Synthetic
gagaaagcccuuagaaaca

SEQ ID NO: 197836 - RNA, 20 nt, Artificial Sequence
  Synthetic
ugagaaagcccuuagaaaca

SEQ ID NO: 197837 - RNA, 21 nt, Artificial Sequence
  Synthetic
augagaaagcccuuagaaaca

SEQ ID NO: 197838 - RNA, 22 nt, Artificial Sequence
  Synthetic
aaugagaaagcccuuagaaaca

SEQ ID NO: 197839 - RNA, 23 nt, Artificial Sequence
  Synthetic
aaaugagaaagcccuuagaaaca

SEQ ID NO: 197840 - RNA, 24 nt, Artificial Sequence
  Synthetic
uaaaugagaaagcccuuagaaaca

SEQ ID NO: 197841 - RNA, 18 nt, Artificial Sequence
  Synthetic
ugccgcucuucggaaaca

SEQ ID NO: 197842 - RNA, 19 nt, Artificial Sequence
  Synthetic
augccgcucuucggaaaca

SEQ ID NO: 197843 - RNA, 20 nt, Artificial Sequence
  Synthetic
aaugccgcucuucggaaaca

SEQ ID NO: 197844 - RNA, 21 nt, Artificial Sequence
  Synthetic
caaugccgcucuucggaaaca

SEQ ID NO: 197845 - RNA, 22 nt, Artificial Sequence
  Synthetic
acaaugccgcucuucggaaaca

SEQ ID NO: 197846 - RNA, 23 nt, Artificial Sequence
  Synthetic
cacaaugccgcucuucggaaaca

SEQ ID NO: 197847 - RNA, 24 nt, Artificial Sequence
  Synthetic
gcacaaugccgcucuucggaaaca

SEQ ID NO: 197848 - RNA, 18 nt, Artificial Sequence
  Synthetic
auaucacccagggaaaca

SEQ ID NO: 197849 - RNA, 19 nt, Artificial Sequence
  Synthetic
gauaucacccagggaaaca

SEQ ID NO: 197850 - RNA, 20 nt, Artificial Sequence
  Synthetic
ugauaucacccagggaaaca

SEQ ID NO: 197851 - RNA, 21 nt, Artificial Sequence
  Synthetic
gugauaucacccagggaaaca

SEQ ID NO: 197852 - RNA, 22 nt, Artificial Sequence
  Synthetic
ggugauaucacccagggaaaca

SEQ ID NO: 197853 - RNA, 23 nt, Artificial Sequence
  Synthetic
uggugauaucacccagggaaaca

SEQ ID NO: 197854 - RNA, 24 nt, Artificial Sequence
  Synthetic
guggugauaucacccagggaaaca

SEQ ID NO: 197855 - RNA, 18 nt, Artificial Sequence
  Synthetic
gaagacaguagggaaaca

SEQ ID NO: 197856 - RNA, 19 nt, Artificial Sequence
  Synthetic
agaagacaguagggaaaca

SEQ ID NO: 197857 - RNA, 20 nt, Artificial Sequence
  Synthetic
cagaagacaguagggaaaca

SEQ ID NO: 197858 - RNA, 21 nt, Artificial Sequence
  Synthetic
ccagaagacaguagggaaaca

SEQ ID NO: 197859 - RNA, 22 nt, Artificial Sequence
  Synthetic
uccagaagacaguagggaaaca

SEQ ID NO: 197860 - RNA, 23 nt, Artificial Sequence
  Synthetic
uuccagaagacaguagggaaaca

SEQ ID NO: 197861 - RNA, 24 nt, Artificial Sequence
  Synthetic
auuccagaagacaguagggaaaca

SEQ ID NO: 197862 - RNA, 18 nt, Artificial Sequence
  Synthetic
aaaauaacaggggaaaca

SEQ ID NO: 197863 - RNA, 19 nt, Artificial Sequence
  Synthetic
aaaaauaacaggggaaaca

SEQ ID NO: 197864 - RNA, 20 nt, Artificial Sequence
  Synthetic
gaaaaauaacaggggaaaca

SEQ ID NO: 197865 - RNA, 21 nt, Artificial Sequence
  Synthetic
ggaaaaauaacaggggaaaca

SEQ ID NO: 197866 - RNA, 22 nt, Artificial Sequence
  Synthetic
uggaaaaauaacaggggaaaca

SEQ ID NO: 197867 - RNA, 23 nt, Artificial Sequence
  Synthetic
auggaaaaauaacaggggaaaca

SEQ ID NO: 197868 - RNA, 24 nt, Artificial Sequence
  Synthetic
aauggaaaaauaacaggggaaaca

SEQ ID NO: 197869 - RNA, 18 nt, Artificial Sequence
  Synthetic
gacaauguuuaugaaaca

SEQ ID NO: 197870 - RNA, 19 nt, Artificial Sequence
  Synthetic
cgacaauguuuaugaaaca

SEQ ID NO: 197871 - RNA, 20 nt, Artificial Sequence
  Synthetic
acgacaauguuuaugaaaca

SEQ ID NO: 197872 - RNA, 21 nt, Artificial Sequence
  Synthetic
gacgacaauguuuaugaaaca

SEQ ID NO: 197873 - RNA, 22 nt, Artificial Sequence
  Synthetic
ugacgacaauguuuaugaaaca

SEQ ID NO: 197874 - RNA, 23 nt, Artificial Sequence
  Synthetic
augacgacaauguuuaugaaaca

SEQ ID NO: 197875 - RNA, 24 nt, Artificial Sequence
  Synthetic
uaugacgacaauguuuaugaaaca

SEQ ID NO: 197876 - RNA, 18 nt, Artificial Sequence
  Synthetic
uguggcauuucugaaaca

SEQ ID NO: 197877 - RNA, 19 nt, Artificial Sequence
  Synthetic
uuguggcauuucugaaaca

SEQ ID NO: 197878 - RNA, 20 nt, Artificial Sequence
  Synthetic
uuuguggcauuucugaaaca

SEQ ID NO: 197879 - RNA, 21 nt, Artificial Sequence
  Synthetic
uuuuguggcauuucugaaaca

SEQ ID NO: 197880 - RNA, 22 nt, Artificial Sequence
  Synthetic
uuuuuguggcauuucugaaaca

SEQ ID NO: 197881 - RNA, 23 nt, Artificial Sequence
  Synthetic
guuuuuguggcauuucugaaaca

SEQ ID NO: 197882 - RNA, 24 nt, Artificial Sequence
  Synthetic
uguuuuuguggcauuucugaaaca

SEQ ID NO: 197883 - RNA, 18 nt, Artificial Sequence
  Synthetic
cucuggccuagugaaaca

SEQ ID NO: 197884 - RNA, 19 nt, Artificial Sequence
  Synthetic
acucuggccuagugaaaca

SEQ ID NO: 197885 - RNA, 20 nt, Artificial Sequence
  Synthetic
uacucuggccuagugaaaca

SEQ ID NO: 197886 - RNA, 21 nt, Artificial Sequence
  Synthetic
cuacucuggccuagugaaaca

SEQ ID NO: 197887 - RNA, 22 nt, Artificial Sequence
  Synthetic
acuacucuggccuagugaaaca

SEQ ID NO: 197888 - RNA, 23 nt, Artificial Sequence
  Synthetic
gacuacucuggccuagugaaaca

SEQ ID NO: 197889 - RNA, 24 nt, Artificial Sequence
  Synthetic
ggacuacucuggccuagugaaaca

SEQ ID NO: 197890 - RNA, 18 nt, Artificial Sequence
  Synthetic
uggugauagugugaaaca

SEQ ID NO: 197891 - RNA, 19 nt, Artificial Sequence
  Synthetic
auggugauagugugaaaca

SEQ ID NO: 197892 - RNA, 20 nt, Artificial Sequence
  Synthetic
gauggugauagugugaaaca

SEQ ID NO: 197893 - RNA, 21 nt, Artificial Sequence
  Synthetic
ugauggugauagugugaaaca

SEQ ID NO: 197894 - RNA, 22 nt, Artificial Sequence
  Synthetic
gugauggugauagugugaaaca

SEQ ID NO: 197895 - RNA, 23 nt, Artificial Sequence
  Synthetic
ugugauggugauagugugaaaca

SEQ ID NO: 197896 - RNA, 24 nt, Artificial Sequence
  Synthetic
cugugauggugauagugugaaaca

SEQ ID NO: 197897 - RNA, 18 nt, Artificial Sequence
  Synthetic
aaaaugcuacaauaaaca

SEQ ID NO: 197898 - RNA, 19 nt, Artificial Sequence
  Synthetic
aaaaaugcuacaauaaaca

SEQ ID NO: 197899 - RNA, 20 nt, Artificial Sequence
  Synthetic
uaaaaaugcuacaauaaaca

SEQ ID NO: 197900 - RNA, 21 nt, Artificial Sequence
  Synthetic
guaaaaaugcuacaauaaaca

SEQ ID NO: 197901 - RNA, 22 nt, Artificial Sequence
  Synthetic
uguaaaaaugcuacaauaaaca

SEQ ID NO: 197902 - RNA, 23 nt, Artificial Sequence
  Synthetic
cuguaaaaaugcuacaauaaaca

SEQ ID NO: 197903 - RNA, 24 nt, Artificial Sequence
  Synthetic
acuguaaaaaugcuacaauaaaca

SEQ ID NO: 197904 - RNA, 18 nt, Artificial Sequence
  Synthetic
auagagcugcaauaaaca

SEQ ID NO: 197905 - RNA, 19 nt, Artificial Sequence
  Synthetic
aauagagcugcaauaaaca

SEQ ID NO: 197906 - RNA, 20 nt, Artificial Sequence
  Synthetic
gaauagagcugcaauaaaca

SEQ ID NO: 197907 - RNA, 21 nt, Artificial Sequence
  Synthetic
ugaauagagcugcaauaaaca

SEQ ID NO: 197908 - RNA, 22 nt, Artificial Sequence
  Synthetic
gugaauagagcugcaauaaaca

SEQ ID NO: 197909 - RNA, 23 nt, Artificial Sequence
  Synthetic
ugugaauagagcugcaauaaaca

SEQ ID NO: 197910 - RNA, 24 nt, Artificial Sequence
  Synthetic
uugugaauagagcugcaauaaaca

SEQ ID NO: 197911 - RNA, 18 nt, Artificial Sequence
  Synthetic
auagcgcugcaauaaaca

SEQ ID NO: 197912 - RNA, 19 nt, Artificial Sequence
  Synthetic
aauagcgcugcaauaaaca

SEQ ID NO: 197913 - RNA, 20 nt, Artificial Sequence
  Synthetic
gaauagcgcugcaauaaaca

SEQ ID NO: 197914 - RNA, 21 nt, Artificial Sequence
  Synthetic
ugaauagcgcugcaauaaaca

SEQ ID NO: 197915 - RNA, 22 nt, Artificial Sequence
  Synthetic
gugaauagcgcugcaauaaaca

SEQ ID NO: 197916 - RNA, 23 nt, Artificial Sequence
  Synthetic
ugugaauagcgcugcaauaaaca

SEQ ID NO: 197917 - RNA, 24 nt, Artificial Sequence
  Synthetic
uugugaauagcgcugcaauaaaca

SEQ ID NO: 197918 - RNA, 18 nt, Artificial Sequence
  Synthetic
auaaugcugcaauaaaca

SEQ ID NO: 197919 - RNA, 19 nt, Artificial Sequence
  Synthetic
aauaaugcugcaauaaaca

SEQ ID NO: 197920 - RNA, 20 nt, Artificial Sequence
  Synthetic
gaauaaugcugcaauaaaca

SEQ ID NO: 197921 - RNA, 21 nt, Artificial Sequence
  Synthetic
ugaauaaugcugcaauaaaca

SEQ ID NO: 197922 - RNA, 22 nt, Artificial Sequence
  Synthetic
gugaauaaugcugcaauaaaca

SEQ ID NO: 197923 - RNA, 23 nt, Artificial Sequence
  Synthetic
ugugaauaaugcugcaauaaaca

SEQ ID NO: 197924 - RNA, 24 nt, Artificial Sequence
  Synthetic
uugugaauaaugcugcaauaaaca

SEQ ID NO: 197925 - RNA, 18 nt, Artificial Sequence
  Synthetic
agauucacagaauaaaca

SEQ ID NO: 197926 - RNA, 19 nt, Artificial Sequence
  Synthetic
uagauucacagaauaaaca

SEQ ID NO: 197927 - RNA, 20 nt, Artificial Sequence
  Synthetic
cuagauucacagaauaaaca

SEQ ID NO: 197928 - RNA, 21 nt, Artificial Sequence
  Synthetic
ucuagauucacagaauaaaca

SEQ ID NO: 197929 - RNA, 22 nt, Artificial Sequence
  Synthetic
cucuagauucacagaauaaaca

SEQ ID NO: 197930 - RNA, 23 nt, Artificial Sequence
  Synthetic
ucucuagauucacagaauaaaca

SEQ ID NO: 197931 - RNA, 24 nt, Artificial Sequence
  Synthetic
uucucuagauucacagaauaaaca

SEQ ID NO: 197932 - RNA, 18 nt, Artificial Sequence
  Synthetic
uuuagaaaauaauaaaca

SEQ ID NO: 197933 - RNA, 19 nt, Artificial Sequence
  Synthetic
auuuagaaaauaauaaaca

SEQ ID NO: 197934 - RNA, 20 nt, Artificial Sequence
  Synthetic
cauuuagaaaauaauaaaca

SEQ ID NO: 197935 - RNA, 21 nt, Artificial Sequence
  Synthetic
acauuuagaaaauaauaaaca

SEQ ID NO: 197936 - RNA, 22 nt, Artificial Sequence
  Synthetic
aacauuuagaaaauaauaaaca

SEQ ID NO: 197937 - RNA, 23 nt, Artificial Sequence
  Synthetic
gaacauuuagaaaauaauaaaca

SEQ ID NO: 197938 - RNA, 24 nt, Artificial Sequence
  Synthetic
ggaacauuuagaaaauaauaaaca

SEQ ID NO: 197939 - RNA, 18 nt, Artificial Sequence
  Synthetic
guuccauaugcauaaaca

SEQ ID NO: 197940 - RNA, 19 nt, Artificial Sequence
  Synthetic
aguuccauaugcauaaaca

SEQ ID NO: 197941 - RNA, 20 nt, Artificial Sequence
  Synthetic
aaguuccauaugcauaaaca

SEQ ID NO: 197942 - RNA, 21 nt, Artificial Sequence
  Synthetic
aaaguuccauaugcauaaaca

SEQ ID NO: 197943 - RNA, 22 nt, Artificial Sequence
  Synthetic
uaaaguuccauaugcauaaaca

SEQ ID NO: 197944 - RNA, 23 nt, Artificial Sequence
  Synthetic
auaaaguuccauaugcauaaaca

SEQ ID NO: 197945 - RNA, 24 nt, Artificial Sequence
  Synthetic
cauaaaguuccauaugcauaaaca

SEQ ID NO: 197946 - RNA, 18 nt, Artificial Sequence
  Synthetic
gcaaagacuucauaaaca

SEQ ID NO: 197947 - RNA, 19 nt, Artificial Sequence
  Synthetic
ugcaaagacuucauaaaca

SEQ ID NO: 197948 - RNA, 20 nt, Artificial Sequence
  Synthetic
augcaaagacuucauaaaca

SEQ ID NO: 197949 - RNA, 21 nt, Artificial Sequence
  Synthetic
aaugcaaagacuucauaaaca

SEQ ID NO: 197950 - RNA, 22 nt, Artificial Sequence
  Synthetic
caaugcaaagacuucauaaaca

SEQ ID NO: 197951 - RNA, 23 nt, Artificial Sequence
  Synthetic
acaaugcaaagacuucauaaaca

SEQ ID NO: 197952 - RNA, 24 nt, Artificial Sequence
  Synthetic
uacaaugcaaagacuucauaaaca

SEQ ID NO: 197953 - RNA, 18 nt, Artificial Sequence
  Synthetic
ccuuuucuuauauaaaca

SEQ ID NO: 197954 - RNA, 19 nt, Artificial Sequence
  Synthetic
uccuuuucuuauauaaaca

SEQ ID NO: 197955 - RNA, 20 nt, Artificial Sequence
  Synthetic
uuccuuuucuuauauaaaca

SEQ ID NO: 197956 - RNA, 21 nt, Artificial Sequence
  Synthetic
guuccuuuucuuauauaaaca

SEQ ID NO: 197957 - RNA, 22 nt, Artificial Sequence
  Synthetic
aguuccuuuucuuauauaaaca

SEQ ID NO: 197958 - RNA, 23 nt, Artificial Sequence
  Synthetic
uaguuccuuuucuuauauaaaca

SEQ ID NO: 197959 - RNA, 24 nt, Artificial Sequence
  Synthetic
uuaguuccuuuucuuauauaaaca

SEQ ID NO: 197960 - RNA, 18 nt, Artificial Sequence
  Synthetic
gguaauguuuuauaaaca

SEQ ID NO: 197961 - RNA, 19 nt, Artificial Sequence
  Synthetic
ugguaauguuuuauaaaca

SEQ ID NO: 197962 - RNA, 20 nt, Artificial Sequence
  Synthetic
gugguaauguuuuauaaaca

SEQ ID NO: 197963 - RNA, 21 nt, Artificial Sequence
  Synthetic
agugguaauguuuuauaaaca

SEQ ID NO: 197964 - RNA, 22 nt, Artificial Sequence
  Synthetic
aagugguaauguuuuauaaaca

SEQ ID NO: 197965 - RNA, 23 nt, Artificial Sequence
  Synthetic
aaagugguaauguuuuauaaaca

SEQ ID NO: 197966 - RNA, 24 nt, Artificial Sequence
  Synthetic
uaaagugguaauguuuuauaaaca

SEQ ID NO: 197967 - RNA, 18 nt, Artificial Sequence
  Synthetic
ugaaggaaucacuaaaca

SEQ ID NO: 197968 - RNA, 19 nt, Artificial Sequence
  Synthetic
cugaaggaaucacuaaaca

SEQ ID NO: 197969 - RNA, 20 nt, Artificial Sequence
  Synthetic
ccugaaggaaucacuaaaca

SEQ ID NO: 197970 - RNA, 21 nt, Artificial Sequence
  Synthetic
uccugaaggaaucacuaaaca

SEQ ID NO: 197971 - RNA, 22 nt, Artificial Sequence
  Synthetic
cuccugaaggaaucacuaaaca

SEQ ID NO: 197972 - RNA, 23 nt, Artificial Sequence
  Synthetic
gcuccugaaggaaucacuaaaca

SEQ ID NO: 197973 - RNA, 24 nt, Artificial Sequence
  Synthetic
agcuccugaaggaaucacuaaaca

SEQ ID NO: 197974 - RNA, 18 nt, Artificial Sequence
  Synthetic
uaccaguucaccuaaaca

SEQ ID NO: 197975 - RNA, 19 nt, Artificial Sequence
  Synthetic
uuaccaguucaccuaaaca

SEQ ID NO: 197976 - RNA, 20 nt, Artificial Sequence
  Synthetic
cuuaccaguucaccuaaaca

SEQ ID NO: 197977 - RNA, 21 nt, Artificial Sequence
  Synthetic
acuuaccaguucaccuaaaca

SEQ ID NO: 197978 - RNA, 22 nt, Artificial Sequence
  Synthetic
cacuuaccaguucaccuaaaca

SEQ ID NO: 197979 - RNA, 23 nt, Artificial Sequence
  Synthetic
acacuuaccaguucaccuaaaca

SEQ ID NO: 197980 - RNA, 24 nt, Artificial Sequence
  Synthetic
aacacuuaccaguucaccuaaaca

SEQ ID NO: 197981 - RNA, 18 nt, Artificial Sequence
  Synthetic
uauaagugggccuaaaca

SEQ ID NO: 197982 - RNA, 19 nt, Artificial Sequence
  Synthetic
uuauaagugggccuaaaca

SEQ ID NO: 197983 - RNA, 20 nt, Artificial Sequence
  Synthetic
cuuauaagugggccuaaaca

SEQ ID NO: 197984 - RNA, 21 nt, Artificial Sequence
  Synthetic
acuuauaagugggccuaaaca

SEQ ID NO: 197985 - RNA, 22 nt, Artificial Sequence
  Synthetic
cacuuauaagugggccuaaaca

SEQ ID NO: 197986 - RNA, 23 nt, Artificial Sequence
  Synthetic
ucacuuauaagugggccuaaaca

SEQ ID NO: 197987 - RNA, 24 nt, Artificial Sequence
  Synthetic
cucacuuauaagugggccuaaaca

SEQ ID NO: 197988 - RNA, 18 nt, Artificial Sequence
  Synthetic
uguucccauuccuaaaca

SEQ ID NO: 197989 - RNA, 19 nt, Artificial Sequence
  Synthetic
cuguucccauuccuaaaca

SEQ ID NO: 197990 - RNA, 20 nt, Artificial Sequence
  Synthetic
ccuguucccauuccuaaaca

SEQ ID NO: 197991 - RNA, 21 nt, Artificial Sequence
  Synthetic
accuguucccauuccuaaaca

SEQ ID NO: 197992 - RNA, 22 nt, Artificial Sequence
  Synthetic
gaccuguucccauuccuaaaca

SEQ ID NO: 197993 - RNA, 23 nt, Artificial Sequence
  Synthetic
agaccuguucccauuccuaaaca

SEQ ID NO: 197994 - RNA, 24 nt, Artificial Sequence
  Synthetic
cagaccuguucccauuccuaaaca

SEQ ID NO: 197995 - RNA, 18 nt, Artificial Sequence
  Synthetic
ucuaaucacaucuaaaca

SEQ ID NO: 197996 - RNA, 19 nt, Artificial Sequence
  Synthetic
aucuaaucacaucuaaaca

SEQ ID NO: 197997 - RNA, 20 nt, Artificial Sequence
  Synthetic
uaucuaaucacaucuaaaca

SEQ ID NO: 197998 - RNA, 21 nt, Artificial Sequence
  Synthetic
guaucuaaucacaucuaaaca

SEQ ID NO: 197999 - RNA, 22 nt, Artificial Sequence
  Synthetic
uguaucuaaucacaucuaaaca

SEQ ID NO: 198000 - RNA, 23 nt, Artificial Sequence
  Synthetic
guguaucuaaucacaucuaaaca

SEQ ID NO: 198001 - RNA, 24 nt, Artificial Sequence
  Synthetic
uguguaucuaaucacaucuaaaca

SEQ ID NO: 198002 - RNA, 18 nt, Artificial Sequence
  Synthetic
uuucaaaaauucuaaaca

SEQ ID NO: 198003 - RNA, 19 nt, Artificial Sequence
  Synthetic
auuucaaaaauucuaaaca

SEQ ID NO: 198004 - RNA, 20 nt, Artificial Sequence
  Synthetic
cauuucaaaaauucuaaaca

SEQ ID NO: 198005 - RNA, 21 nt, Artificial Sequence
  Synthetic
ucauuucaaaaauucuaaaca

SEQ ID NO: 198006 - RNA, 22 nt, Artificial Sequence
  Synthetic
aucauuucaaaaauucuaaaca

SEQ ID NO: 198007 - RNA, 23 nt, Artificial Sequence
  Synthetic
uaucauuucaaaaauucuaaaca

SEQ ID NO: 198008 - RNA, 24 nt, Artificial Sequence
  Synthetic
uuaucauuucaaaaauucuaaaca

SEQ ID NO: 198009 - RNA, 18 nt, Artificial Sequence
  Synthetic
ucccccucaaaguaaaca

SEQ ID NO: 198010 - RNA, 19 nt, Artificial Sequence
  Synthetic
aucccccucaaaguaaaca

SEQ ID NO: 198011 - RNA, 20 nt, Artificial Sequence
  Synthetic
caucccccucaaaguaaaca

SEQ ID NO: 198012 - RNA, 21 nt, Artificial Sequence
  Synthetic
ccaucccccucaaaguaaaca

SEQ ID NO: 198013 - RNA, 22 nt, Artificial Sequence
  Synthetic
cccaucccccucaaaguaaaca

SEQ ID NO: 198014 - RNA, 23 nt, Artificial Sequence
  Synthetic
ccccaucccccucaaaguaaaca

SEQ ID NO: 198015 - RNA, 24 nt, Artificial Sequence
  Synthetic
uccccaucccccucaaaguaaaca

SEQ ID NO: 198016 - RNA, 18 nt, Artificial Sequence
  Synthetic
ccauauuccuaguaaaca

SEQ ID NO: 198017 - RNA, 19 nt, Artificial Sequence
  Synthetic
uccauauuccuaguaaaca

SEQ ID NO: 198018 - RNA, 20 nt, Artificial Sequence
  Synthetic
auccauauuccuaguaaaca

SEQ ID NO: 198019 - RNA, 21 nt, Artificial Sequence
  Synthetic
gauccauauuccuaguaaaca

SEQ ID NO: 198020 - RNA, 22 nt, Artificial Sequence
  Synthetic
ugauccauauuccuaguaaaca

SEQ ID NO: 198021 - RNA, 23 nt, Artificial Sequence
  Synthetic
augauccauauuccuaguaaaca

SEQ ID NO: 198022 - RNA, 24 nt, Artificial Sequence
  Synthetic
uaugauccauauuccuaguaaaca

SEQ ID NO: 198023 - RNA, 18 nt, Artificial Sequence
  Synthetic
auguuaauguaguaaaca

SEQ ID NO: 198024 - RNA, 19 nt, Artificial Sequence
  Synthetic
uauguuaauguaguaaaca

SEQ ID NO: 198025 - RNA, 20 nt, Artificial Sequence
  Synthetic
guauguuaauguaguaaaca

SEQ ID NO: 198026 - RNA, 21 nt, Artificial Sequence
  Synthetic
uguauguuaauguaguaaaca

SEQ ID NO: 198027 - RNA, 22 nt, Artificial Sequence
  Synthetic
auguauguuaauguaguaaaca

SEQ ID NO: 198028 - RNA, 23 nt, Artificial Sequence
  Synthetic
uauguauguuaauguaguaaaca

SEQ ID NO: 198029 - RNA, 24 nt, Artificial Sequence
  Synthetic
auauguauguuaauguaguaaaca

SEQ ID NO: 198030 - RNA, 18 nt, Artificial Sequence
  Synthetic
uaagcaaguagguaaaca

SEQ ID NO: 198031 - RNA, 19 nt, Artificial Sequence
  Synthetic
uuaagcaaguagguaaaca

SEQ ID NO: 198032 - RNA, 20 nt, Artificial Sequence
  Synthetic
auuaagcaaguagguaaaca

SEQ ID NO: 198033 - RNA, 21 nt, Artificial Sequence
  Synthetic
cauuaagcaaguagguaaaca

SEQ ID NO: 198034 - RNA, 22 nt, Artificial Sequence
  Synthetic
gcauuaagcaaguagguaaaca

SEQ ID NO: 198035 - RNA, 23 nt, Artificial Sequence
  Synthetic
agcauuaagcaaguagguaaaca

SEQ ID NO: 198036 - RNA, 24 nt, Artificial Sequence
  Synthetic
aagcauuaagcaaguagguaaaca

SEQ ID NO: 198037 - RNA, 18 nt, Artificial Sequence
  Synthetic
ugagagaucaauuaaaca

SEQ ID NO: 198038 - RNA, 19 nt, Artificial Sequence
  Synthetic
augagagaucaauuaaaca

SEQ ID NO: 198039 - RNA, 20 nt, Artificial Sequence
  Synthetic
uaugagagaucaauuaaaca

SEQ ID NO: 198040 - RNA, 21 nt, Artificial Sequence
  Synthetic
guaugagagaucaauuaaaca

SEQ ID NO: 198041 - RNA, 22 nt, Artificial Sequence
  Synthetic
aguaugagagaucaauuaaaca

SEQ ID NO: 198042 - RNA, 23 nt, Artificial Sequence
  Synthetic
uaguaugagagaucaauuaaaca

SEQ ID NO: 198043 - RNA, 24 nt, Artificial Sequence
  Synthetic
cuaguaugagagaucaauuaaaca

SEQ ID NO: 198044 - RNA, 18 nt, Artificial Sequence
  Synthetic
uucauagacuauuaaaca

SEQ ID NO: 198045 - RNA, 19 nt, Artificial Sequence
  Synthetic
uuucauagacuauuaaaca

SEQ ID NO: 198046 - RNA, 20 nt, Artificial Sequence
  Synthetic
auuucauagacuauuaaaca

SEQ ID NO: 198047 - RNA, 21 nt, Artificial Sequence
  Synthetic
cauuucauagacuauuaaaca

SEQ ID NO: 198048 - RNA, 22 nt, Artificial Sequence
  Synthetic
acauuucauagacuauuaaaca

SEQ ID NO: 198049 - RNA, 23 nt, Artificial Sequence
  Synthetic
aacauuucauagacuauuaaaca

SEQ ID NO: 198050 - RNA, 24 nt, Artificial Sequence
  Synthetic
caacauuucauagacuauuaaaca

SEQ ID NO: 198051 - RNA, 18 nt, Artificial Sequence
  Synthetic
ccauaauaugcuuaaaca

SEQ ID NO: 198052 - RNA, 19 nt, Artificial Sequence
  Synthetic
uccauaauaugcuuaaaca

SEQ ID NO: 198053 - RNA, 20 nt, Artificial Sequence
  Synthetic
guccauaauaugcuuaaaca

SEQ ID NO: 198054 - RNA, 21 nt, Artificial Sequence
  Synthetic
uguccauaauaugcuuaaaca

SEQ ID NO: 198055 - RNA, 22 nt, Artificial Sequence
  Synthetic
guguccauaauaugcuuaaaca

SEQ ID NO: 198056 - RNA, 23 nt, Artificial Sequence
  Synthetic
aguguccauaauaugcuuaaaca

SEQ ID NO: 198057 - RNA, 24 nt, Artificial Sequence
  Synthetic
gaguguccauaauaugcuuaaaca

SEQ ID NO: 198058 - RNA, 18 nt, Artificial Sequence
  Synthetic
ugauaagcuauuuaaaca

SEQ ID NO: 198059 - RNA, 19 nt, Artificial Sequence
  Synthetic
augauaagcuauuuaaaca

SEQ ID NO: 198060 - RNA, 20 nt, Artificial Sequence
  Synthetic
uaugauaagcuauuuaaaca

SEQ ID NO: 198061 - RNA, 21 nt, Artificial Sequence
  Synthetic
auaugauaagcuauuuaaaca

SEQ ID NO: 198062 - RNA, 22 nt, Artificial Sequence
  Synthetic
uauaugauaagcuauuuaaaca

SEQ ID NO: 198063 - RNA, 23 nt, Artificial Sequence
  Synthetic
uuauaugauaagcuauuuaaaca

SEQ ID NO: 198064 - RNA, 24 nt, Artificial Sequence
  Synthetic
uuuauaugauaagcuauuuaaaca

SEQ ID NO: 198065 - RNA, 18 nt, Artificial Sequence
  Synthetic
aguuuucauuuuuaaaca

SEQ ID NO: 198066 - RNA, 19 nt, Artificial Sequence
  Synthetic
gaguuuucauuuuuaaaca

SEQ ID NO: 198067 - RNA, 20 nt, Artificial Sequence
  Synthetic
agaguuuucauuuuuaaaca

SEQ ID NO: 198068 - RNA, 21 nt, Artificial Sequence
  Synthetic
aagaguuuucauuuuuaaaca

SEQ ID NO: 198069 - RNA, 22 nt, Artificial Sequence
  Synthetic
gaagaguuuucauuuuuaaaca

SEQ ID NO: 198070 - RNA, 23 nt, Artificial Sequence
  Synthetic
agaagaguuuucauuuuuaaaca

SEQ ID NO: 198071 - RNA, 24 nt, Artificial Sequence
  Synthetic
cagaagaguuuucauuuuuaaaca

SEQ ID NO: 198072 - RNA, 18 nt, Artificial Sequence
  Synthetic
uuuuauucuuuuuaaaca

SEQ ID NO: 198073 - RNA, 19 nt, Artificial Sequence
  Synthetic
guuuuauucuuuuuaaaca

SEQ ID NO: 198074 - RNA, 20 nt, Artificial Sequence
  Synthetic
aguuuuauucuuuuuaaaca

SEQ ID NO: 198075 - RNA, 21 nt, Artificial Sequence
  Synthetic
gaguuuuauucuuuuuaaaca

SEQ ID NO: 198076 - RNA, 22 nt, Artificial Sequence
  Synthetic
ugaguuuuauucuuuuuaaaca

SEQ ID NO: 198077 - RNA, 23 nt, Artificial Sequence
  Synthetic
gugaguuuuauucuuuuuaaaca

SEQ ID NO: 198078 - RNA, 24 nt, Artificial Sequence
  Synthetic
agugaguuuuauucuuuuuaaaca

SEQ ID NO: 198079 - RNA, 18 nt, Artificial Sequence
  Synthetic
cugaaccacaaaacaaca

SEQ ID NO: 198080 - RNA, 19 nt, Artificial Sequence
  Synthetic
acugaaccacaaaacaaca

SEQ ID NO: 198081 - RNA, 20 nt, Artificial Sequence
  Synthetic
cacugaaccacaaaacaaca

SEQ ID NO: 198082 - RNA, 21 nt, Artificial Sequence
  Synthetic
acacugaaccacaaaacaaca

SEQ ID NO: 198083 - RNA, 22 nt, Artificial Sequence
  Synthetic
gacacugaaccacaaaacaaca

SEQ ID NO: 198084 - RNA, 23 nt, Artificial Sequence
  Synthetic
ugacacugaaccacaaaacaaca

SEQ ID NO: 198085 - RNA, 24 nt, Artificial Sequence
  Synthetic
uugacacugaaccacaaaacaaca

SEQ ID NO: 198086 - RNA, 18 nt, Artificial Sequence
  Synthetic
ccuaguggaacaacaaca

SEQ ID NO: 198087 - RNA, 19 nt, Artificial Sequence
  Synthetic
accuaguggaacaacaaca

SEQ ID NO: 198088 - RNA, 20 nt, Artificial Sequence
  Synthetic
uaccuaguggaacaacaaca

SEQ ID NO: 198089 - RNA, 21 nt, Artificial Sequence
  Synthetic
cuaccuaguggaacaacaaca

SEQ ID NO: 198090 - RNA, 22 nt, Artificial Sequence
  Synthetic
acuaccuaguggaacaacaaca

SEQ ID NO: 198091 - RNA, 23 nt, Artificial Sequence
  Synthetic
cacuaccuaguggaacaacaaca

SEQ ID NO: 198092 - RNA, 24 nt, Artificial Sequence
  Synthetic
ccacuaccuaguggaacaacaaca

SEQ ID NO: 198093 - RNA, 18 nt, Artificial Sequence
  Synthetic
ccagccagggcaacaaca

SEQ ID NO: 198094 - RNA, 19 nt, Artificial Sequence
  Synthetic
uccagccagggcaacaaca

SEQ ID NO: 198095 - RNA, 20 nt, Artificial Sequence
  Synthetic
uuccagccagggcaacaaca

SEQ ID NO: 198096 - RNA, 21 nt, Artificial Sequence
  Synthetic
auuccagccagggcaacaaca

SEQ ID NO: 198097 - RNA, 22 nt, Artificial Sequence
  Synthetic
cauuccagccagggcaacaaca

SEQ ID NO: 198098 - RNA, 23 nt, Artificial Sequence
  Synthetic
gcauuccagccagggcaacaaca

SEQ ID NO: 198099 - RNA, 24 nt, Artificial Sequence
  Synthetic
ugcauuccagccagggcaacaaca

SEQ ID NO: 198100 - RNA, 18 nt, Artificial Sequence
  Synthetic
cuugaaaaaagaacaaca

SEQ ID NO: 198101 - RNA, 19 nt, Artificial Sequence
  Synthetic
ccuugaaaaaagaacaaca

SEQ ID NO: 198102 - RNA, 20 nt, Artificial Sequence
  Synthetic
accuugaaaaaagaacaaca

SEQ ID NO: 198103 - RNA, 21 nt, Artificial Sequence
  Synthetic
aaccuugaaaaaagaacaaca

SEQ ID NO: 198104 - RNA, 22 nt, Artificial Sequence
  Synthetic
caaccuugaaaaaagaacaaca

SEQ ID NO: 198105 - RNA, 23 nt, Artificial Sequence
  Synthetic
acaaccuugaaaaaagaacaaca

SEQ ID NO: 198106 - RNA, 24 nt, Artificial Sequence
  Synthetic
aacaaccuugaaaaaagaacaaca

SEQ ID NO: 198107 - RNA, 18 nt, Artificial Sequence
  Synthetic
ugcaaggaaagaacaaca

SEQ ID NO: 198108 - RNA, 19 nt, Artificial Sequence
  Synthetic
augcaaggaaagaacaaca

SEQ ID NO: 198109 - RNA, 20 nt, Artificial Sequence
  Synthetic
aaugcaaggaaagaacaaca

SEQ ID NO: 198110 - RNA, 21 nt, Artificial Sequence
  Synthetic
uaaugcaaggaaagaacaaca

SEQ ID NO: 198111 - RNA, 22 nt, Artificial Sequence
  Synthetic
uuaaugcaaggaaagaacaaca

SEQ ID NO: 198112 - RNA, 23 nt, Artificial Sequence
  Synthetic
auuaaugcaaggaaagaacaaca

SEQ ID NO: 198113 - RNA, 24 nt, Artificial Sequence
  Synthetic
gauuaaugcaaggaaagaacaaca

SEQ ID NO: 198114 - RNA, 18 nt, Artificial Sequence
  Synthetic
caggcguaagccacaaca

SEQ ID NO: 198115 - RNA, 19 nt, Artificial Sequence
  Synthetic
acaggcguaagccacaaca

SEQ ID NO: 198116 - RNA, 20 nt, Artificial Sequence
  Synthetic
uacaggcguaagccacaaca

SEQ ID NO: 198117 - RNA, 21 nt, Artificial Sequence
  Synthetic
uuacaggcguaagccacaaca

SEQ ID NO: 198118 - RNA, 22 nt, Artificial Sequence
  Synthetic
auuacaggcguaagccacaaca

SEQ ID NO: 198119 - RNA, 23 nt, Artificial Sequence
  Synthetic
gauuacaggcguaagccacaaca

SEQ ID NO: 198120 - RNA, 24 nt, Artificial Sequence
  Synthetic
ggauuacaggcguaagccacaaca

SEQ ID NO: 198121 - RNA, 18 nt, Artificial Sequence
  Synthetic
aguccuuuauccacaaca

SEQ ID NO: 198122 - RNA, 19 nt, Artificial Sequence
  Synthetic
caguccuuuauccacaaca

SEQ ID NO: 198123 - RNA, 20 nt, Artificial Sequence
  Synthetic
ccaguccuuuauccacaaca

SEQ ID NO: 198124 - RNA, 21 nt, Artificial Sequence
  Synthetic
gccaguccuuuauccacaaca

SEQ ID NO: 198125 - RNA, 22 nt, Artificial Sequence
  Synthetic
ugccaguccuuuauccacaaca

SEQ ID NO: 198126 - RNA, 23 nt, Artificial Sequence
  Synthetic
cugccaguccuuuauccacaaca

SEQ ID NO: 198127 - RNA, 24 nt, Artificial Sequence
  Synthetic
ccugccaguccuuuauccacaaca

SEQ ID NO: 198128 - RNA, 18 nt, Artificial Sequence
  Synthetic
ugguuccuuuucacaaca

SEQ ID NO: 198129 - RNA, 19 nt, Artificial Sequence
  Synthetic
uugguuccuuuucacaaca

SEQ ID NO: 198130 - RNA, 20 nt, Artificial Sequence
  Synthetic
guugguuccuuuucacaaca

SEQ ID NO: 198131 - RNA, 21 nt, Artificial Sequence
  Synthetic
uguugguuccuuuucacaaca

SEQ ID NO: 198132 - RNA, 22 nt, Artificial Sequence
  Synthetic
uuguugguuccuuuucacaaca

SEQ ID NO: 198133 - RNA, 23 nt, Artificial Sequence
  Synthetic
auuguugguuccuuuucacaaca

SEQ ID NO: 198134 - RNA, 24 nt, Artificial Sequence
  Synthetic
cauuguugguuccuuuucacaaca

SEQ ID NO: 198135 - RNA, 18 nt, Artificial Sequence
  Synthetic
aaggaguccgggacaaca

SEQ ID NO: 198136 - RNA, 19 nt, Artificial Sequence
  Synthetic
caaggaguccgggacaaca

SEQ ID NO: 198137 - RNA, 20 nt, Artificial Sequence
  Synthetic
gcaaggaguccgggacaaca

SEQ ID NO: 198138 - RNA, 21 nt, Artificial Sequence
  Synthetic
ugcaaggaguccgggacaaca

SEQ ID NO: 198139 - RNA, 22 nt, Artificial Sequence
  Synthetic
uugcaaggaguccgggacaaca

SEQ ID NO: 198140 - RNA, 23 nt, Artificial Sequence
  Synthetic
auugcaaggaguccgggacaaca

SEQ ID NO: 198141 - RNA, 24 nt, Artificial Sequence
  Synthetic
gauugcaaggaguccgggacaaca

SEQ ID NO: 198142 - RNA, 18 nt, Artificial Sequence
  Synthetic
aacaggcaaccuacaaca

SEQ ID NO: 198143 - RNA, 19 nt, Artificial Sequence
  Synthetic
gaacaggcaaccuacaaca

SEQ ID NO: 198144 - RNA, 20 nt, Artificial Sequence
  Synthetic
ugaacaggcaaccuacaaca

SEQ ID NO: 198145 - RNA, 21 nt, Artificial Sequence
  Synthetic
gugaacaggcaaccuacaaca

SEQ ID NO: 198146 - RNA, 22 nt, Artificial Sequence
  Synthetic
agugaacaggcaaccuacaaca

SEQ ID NO: 198147 - RNA, 23 nt, Artificial Sequence
  Synthetic
gagugaacaggcaaccuacaaca

SEQ ID NO: 198148 - RNA, 24 nt, Artificial Sequence
  Synthetic
agagugaacaggcaaccuacaaca

SEQ ID NO: 198149 - RNA, 18 nt, Artificial Sequence
  Synthetic
aacagggaaccuacaaca

SEQ ID NO: 198150 - RNA, 19 nt, Artificial Sequence
  Synthetic
gaacagggaaccuacaaca

SEQ ID NO: 198151 - RNA, 20 nt, Artificial Sequence
  Synthetic
ugaacagggaaccuacaaca

SEQ ID NO: 198152 - RNA, 21 nt, Artificial Sequence
  Synthetic
gugaacagggaaccuacaaca

SEQ ID NO: 198153 - RNA, 22 nt, Artificial Sequence
  Synthetic
agugaacagggaaccuacaaca

SEQ ID NO: 198154 - RNA, 23 nt, Artificial Sequence
  Synthetic
gagugaacagggaaccuacaaca

SEQ ID NO: 198155 - RNA, 24 nt, Artificial Sequence
  Synthetic
agagugaacagggaaccuacaaca

SEQ ID NO: 198156 - RNA, 18 nt, Artificial Sequence
  Synthetic
caggccccaccaccaaca

SEQ ID NO: 198157 - RNA, 19 nt, Artificial Sequence
  Synthetic
ccaggccccaccaccaaca

SEQ ID NO: 198158 - RNA, 20 nt, Artificial Sequence
  Synthetic
gccaggccccaccaccaaca

SEQ ID NO: 198159 - RNA, 21 nt, Artificial Sequence
  Synthetic
cgccaggccccaccaccaaca

SEQ ID NO: 198160 - RNA, 22 nt, Artificial Sequence
  Synthetic
ccgccaggccccaccaccaaca

SEQ ID NO: 198161 - RNA, 23 nt, Artificial Sequence
  Synthetic
cccgccaggccccaccaccaaca

SEQ ID NO: 198162 - RNA, 24 nt, Artificial Sequence
  Synthetic
ucccgccaggccccaccaccaaca

SEQ ID NO: 198163 - RNA, 20 nt, Artificial Sequence
  Synthetic
ugagaccagccugaccaaca

SEQ ID NO: 198164 - RNA, 21 nt, Artificial Sequence
  Synthetic
uugagaccagccugaccaaca

SEQ ID NO: 198165 - RNA, 22 nt, Artificial Sequence
  Synthetic
uuugagaccagccugaccaaca

SEQ ID NO: 198166 - RNA, 23 nt, Artificial Sequence
  Synthetic
guuugagaccagccugaccaaca

SEQ ID NO: 198167 - RNA, 24 nt, Artificial Sequence
  Synthetic
aguuugagaccagccugaccaaca

SEQ ID NO: 198168 - RNA, 18 nt, Artificial Sequence
  Synthetic
uugcaccccuuaccaaca

SEQ ID NO: 198169 - RNA, 19 nt, Artificial Sequence
  Synthetic
auugcaccccuuaccaaca

SEQ ID NO: 198170 - RNA, 20 nt, Artificial Sequence
  Synthetic
uauugcaccccuuaccaaca

SEQ ID NO: 198171 - RNA, 21 nt, Artificial Sequence
  Synthetic
uuauugcaccccuuaccaaca

SEQ ID NO: 198172 - RNA, 22 nt, Artificial Sequence
  Synthetic
uuuauugcaccccuuaccaaca

SEQ ID NO: 198173 - RNA, 23 nt, Artificial Sequence
  Synthetic
auuuauugcaccccuuaccaaca

SEQ ID NO: 198174 - RNA, 24 nt, Artificial Sequence
  Synthetic
aauuuauugcaccccuuaccaaca

SEQ ID NO: 198175 - RNA, 18 nt, Artificial Sequence
  Synthetic
gagcugacaaacccaaca

SEQ ID NO: 198176 - RNA, 19 nt, Artificial Sequence
  Synthetic
ggagcugacaaacccaaca

SEQ ID NO: 198177 - RNA, 20 nt, Artificial Sequence
  Synthetic
aggagcugacaaacccaaca

SEQ ID NO: 198178 - RNA, 21 nt, Artificial Sequence
  Synthetic
aaggagcugacaaacccaaca

SEQ ID NO: 198179 - RNA, 22 nt, Artificial Sequence
  Synthetic
gaaggagcugacaaacccaaca

SEQ ID NO: 198180 - RNA, 23 nt, Artificial Sequence
  Synthetic
ugaaggagcugacaaacccaaca

SEQ ID NO: 198181 - RNA, 24 nt, Artificial Sequence
  Synthetic
augaaggagcugacaaacccaaca

SEQ ID NO: 198182 - RNA, 18 nt, Artificial Sequence
  Synthetic
auauauaugcacccaaca

SEQ ID NO: 198183 - RNA, 19 nt, Artificial Sequence
  Synthetic
aauauauaugcacccaaca

SEQ ID NO: 198184 - RNA, 20 nt, Artificial Sequence
  Synthetic
aaauauauaugcacccaaca

SEQ ID NO: 198185 - RNA, 21 nt, Artificial Sequence
  Synthetic
uaaauauauaugcacccaaca

SEQ ID NO: 198186 - RNA, 22 nt, Artificial Sequence
  Synthetic
guaaauauauaugcacccaaca

SEQ ID NO: 198187 - RNA, 23 nt, Artificial Sequence
  Synthetic
uguaaauauauaugcacccaaca

SEQ ID NO: 198188 - RNA, 24 nt, Artificial Sequence
  Synthetic
uuguaaauauauaugcacccaaca

SEQ ID NO: 198189 - RNA, 18 nt, Artificial Sequence
  Synthetic
uguguugcaaccccaaca

SEQ ID NO: 198190 - RNA, 19 nt, Artificial Sequence
  Synthetic
auguguugcaaccccaaca

SEQ ID NO: 198191 - RNA, 20 nt, Artificial Sequence
  Synthetic
cauguguugcaaccccaaca

SEQ ID NO: 198192 - RNA, 21 nt, Artificial Sequence
  Synthetic
gcauguguugcaaccccaaca

SEQ ID NO: 198193 - RNA, 22 nt, Artificial Sequence
  Synthetic
agcauguguugcaaccccaaca

SEQ ID NO: 198194 - RNA, 23 nt, Artificial Sequence
  Synthetic
cagcauguguugcaaccccaaca

SEQ ID NO: 198195 - RNA, 24 nt, Artificial Sequence
  Synthetic
acagcauguguugcaaccccaaca

SEQ ID NO: 198196 - RNA, 18 nt, Artificial Sequence
  Synthetic
ucaaucguugccccaaca

SEQ ID NO: 198197 - RNA, 19 nt, Artificial Sequence
  Synthetic
cucaaucguugccccaaca

SEQ ID NO: 198198 - RNA, 20 nt, Artificial Sequence
  Synthetic
gcucaaucguugccccaaca

SEQ ID NO: 198199 - RNA, 21 nt, Artificial Sequence
  Synthetic
agcucaaucguugccccaaca

SEQ ID NO: 198200 - RNA, 22 nt, Artificial Sequence
  Synthetic
cagcucaaucguugccccaaca

SEQ ID NO: 198201 - RNA, 23 nt, Artificial Sequence
  Synthetic
ccagcucaaucguugccccaaca

SEQ ID NO: 198202 - RNA, 24 nt, Artificial Sequence
  Synthetic
uccagcucaaucguugccccaaca

SEQ ID NO: 198203 - RNA, 18 nt, Artificial Sequence
  Synthetic
acacuaguaaucccaaca

SEQ ID NO: 198204 - RNA, 19 nt, Artificial Sequence
  Synthetic
cacacuaguaaucccaaca

SEQ ID NO: 198205 - RNA, 20 nt, Artificial Sequence
  Synthetic
ucacacuaguaaucccaaca

SEQ ID NO: 198206 - RNA, 21 nt, Artificial Sequence
  Synthetic
cucacacuaguaaucccaaca

SEQ ID NO: 198207 - RNA, 22 nt, Artificial Sequence
  Synthetic
ccucacacuaguaaucccaaca

SEQ ID NO: 198208 - RNA, 23 nt, Artificial Sequence
  Synthetic
gccucacacuaguaaucccaaca

SEQ ID NO: 198209 - RNA, 24 nt, Artificial Sequence
  Synthetic
ugccucacacuaguaaucccaaca

SEQ ID NO: 198210 - RNA, 18 nt, Artificial Sequence
  Synthetic
aaaguugacuucccaaca

SEQ ID NO: 198211 - RNA, 19 nt, Artificial Sequence
  Synthetic
caaaguugacuucccaaca

SEQ ID NO: 198212 - RNA, 20 nt, Artificial Sequence
  Synthetic
ccaaaguugacuucccaaca

SEQ ID NO: 198213 - RNA, 21 nt, Artificial Sequence
  Synthetic
accaaaguugacuucccaaca

SEQ ID NO: 198214 - RNA, 22 nt, Artificial Sequence
  Synthetic
gaccaaaguugacuucccaaca

SEQ ID NO: 198215 - RNA, 23 nt, Artificial Sequence
  Synthetic
ggaccaaaguugacuucccaaca

SEQ ID NO: 198216 - RNA, 24 nt, Artificial Sequence
  Synthetic
aggaccaaaguugacuucccaaca

SEQ ID NO: 198217 - RNA, 21 nt, Artificial Sequence
  Synthetic
caccaggccccaccuccaaca

SEQ ID NO: 198218 - RNA, 22 nt, Artificial Sequence
  Synthetic
ccaccaggccccaccuccaaca

SEQ ID NO: 198219 - RNA, 23 nt, Artificial Sequence
  Synthetic
cccaccaggccccaccuccaaca

SEQ ID NO: 198220 - RNA, 24 nt, Artificial Sequence
  Synthetic
ucccaccaggccccaccuccaaca

SEQ ID NO: 198221 - RNA, 22 nt, Artificial Sequence
  Synthetic
ucaccaggccccaccuccaaca

SEQ ID NO: 198222 - RNA, 23 nt, Artificial Sequence
  Synthetic
cucaccaggccccaccuccaaca

SEQ ID NO: 198223 - RNA, 24 nt, Artificial Sequence
  Synthetic
ucucaccaggccccaccuccaaca

SEQ ID NO: 198224 - RNA, 18 nt, Artificial Sequence
  Synthetic
aauuaaauuccuccaaca

SEQ ID NO: 198225 - RNA, 19 nt, Artificial Sequence
  Synthetic
gaauuaaauuccuccaaca

SEQ ID NO: 198226 - RNA, 20 nt, Artificial Sequence
  Synthetic
ugaauuaaauuccuccaaca

SEQ ID NO: 198227 - RNA, 21 nt, Artificial Sequence
  Synthetic
cugaauuaaauuccuccaaca

SEQ ID NO: 198228 - RNA, 22 nt, Artificial Sequence
  Synthetic
acugaauuaaauuccuccaaca

SEQ ID NO: 198229 - RNA, 23 nt, Artificial Sequence
  Synthetic
gacugaauuaaauuccuccaaca

SEQ ID NO: 198230 - RNA, 24 nt, Artificial Sequence
  Synthetic
ugacugaauuaaauuccuccaaca

SEQ ID NO: 198231 - RNA, 18 nt, Artificial Sequence
  Synthetic
agaccagacugagcaaca

SEQ ID NO: 198232 - RNA, 19 nt, Artificial Sequence
  Synthetic
gagaccagacugagcaaca

SEQ ID NO: 198233 - RNA, 20 nt, Artificial Sequence
  Synthetic
cgagaccagacugagcaaca

SEQ ID NO: 198234 - RNA, 21 nt, Artificial Sequence
  Synthetic
ucgagaccagacugagcaaca

SEQ ID NO: 198235 - RNA, 22 nt, Artificial Sequence
  Synthetic
uucgagaccagacugagcaaca

SEQ ID NO: 198236 - RNA, 23 nt, Artificial Sequence
  Synthetic
guucgagaccagacugagcaaca

SEQ ID NO: 198237 - RNA, 24 nt, Artificial Sequence
  Synthetic
aguucgagaccagacugagcaaca

SEQ ID NO: 198238 - RNA, 18 nt, Artificial Sequence
  Synthetic
ucucacuacugagcaaca

SEQ ID NO: 198239 - RNA, 19 nt, Artificial Sequence
  Synthetic
cucucacuacugagcaaca

SEQ ID NO: 198240 - RNA, 20 nt, Artificial Sequence
  Synthetic
acucucacuacugagcaaca

SEQ ID NO: 198241 - RNA, 21 nt, Artificial Sequence
  Synthetic
aacucucacuacugagcaaca

SEQ ID NO: 198242 - RNA, 22 nt, Artificial Sequence
  Synthetic
uaacucucacuacugagcaaca

SEQ ID NO: 198243 - RNA, 23 nt, Artificial Sequence
  Synthetic
cuaacucucacuacugagcaaca

SEQ ID NO: 198244 - RNA, 24 nt, Artificial Sequence
  Synthetic
acuaacucucacuacugagcaaca

SEQ ID NO: 198245 - RNA, 18 nt, Artificial Sequence
  Synthetic
ccuauuaauuuagcaaca

SEQ ID NO: 198246 - RNA, 19 nt, Artificial Sequence
  Synthetic
uccuauuaauuuagcaaca

SEQ ID NO: 198247 - RNA, 20 nt, Artificial Sequence
  Synthetic
auccuauuaauuuagcaaca

SEQ ID NO: 198248 - RNA, 21 nt, Artificial Sequence
  Synthetic
uauccuauuaauuuagcaaca

SEQ ID NO: 198249 - RNA, 22 nt, Artificial Sequence
  Synthetic
auauccuauuaauuuagcaaca

SEQ ID NO: 198250 - RNA, 23 nt, Artificial Sequence
  Synthetic
uauauccuauuaauuuagcaaca

SEQ ID NO: 198251 - RNA, 24 nt, Artificial Sequence
  Synthetic
auauauccuauuaauuuagcaaca

SEQ ID NO: 198252 - RNA, 18 nt, Artificial Sequence
  Synthetic
gacuccaaaagggcaaca

SEQ ID NO: 198253 - RNA, 19 nt, Artificial Sequence
  Synthetic
ugacuccaaaagggcaaca

SEQ ID NO: 198254 - RNA, 20 nt, Artificial Sequence
  Synthetic
gugacuccaaaagggcaaca

SEQ ID NO: 198255 - RNA, 21 nt, Artificial Sequence
  Synthetic
ugugacuccaaaagggcaaca

SEQ ID NO: 198256 - RNA, 22 nt, Artificial Sequence
  Synthetic
augugacuccaaaagggcaaca

SEQ ID NO: 198257 - RNA, 23 nt, Artificial Sequence
  Synthetic
gaugugacuccaaaagggcaaca

SEQ ID NO: 198258 - RNA, 24 nt, Artificial Sequence
  Synthetic
ggaugugacuccaaaagggcaaca

SEQ ID NO: 198259 - RNA, 18 nt, Artificial Sequence
  Synthetic
agagaguacagggcaaca

SEQ ID NO: 198260 - RNA, 19 nt, Artificial Sequence
  Synthetic
aagagaguacagggcaaca

SEQ ID NO: 198261 - RNA, 20 nt, Artificial Sequence
  Synthetic
uaagagaguacagggcaaca

SEQ ID NO: 198262 - RNA, 21 nt, Artificial Sequence
  Synthetic
cuaagagaguacagggcaaca

SEQ ID NO: 198263 - RNA, 22 nt, Artificial Sequence
  Synthetic
acuaagagaguacagggcaaca

SEQ ID NO: 198264 - RNA, 23 nt, Artificial Sequence
  Synthetic
gacuaagagaguacagggcaaca

SEQ ID NO: 198265 - RNA, 24 nt, Artificial Sequence
  Synthetic
agacuaagagaguacagggcaaca

SEQ ID NO: 198266 - RNA, 18 nt, Artificial Sequence
  Synthetic
auuucuguucuggcaaca

SEQ ID NO: 198267 - RNA, 19 nt, Artificial Sequence
  Synthetic
aauuucuguucuggcaaca

SEQ ID NO: 198268 - RNA, 20 nt, Artificial Sequence
  Synthetic
gaauuucuguucuggcaaca

SEQ ID NO: 198269 - RNA, 21 nt, Artificial Sequence
  Synthetic
agaauuucuguucuggcaaca

SEQ ID NO: 198270 - RNA, 22 nt, Artificial Sequence
  Synthetic
cagaauuucuguucuggcaaca

SEQ ID NO: 198271 - RNA, 23 nt, Artificial Sequence
  Synthetic
gcagaauuucuguucuggcaaca

SEQ ID NO: 198272 - RNA, 24 nt, Artificial Sequence
  Synthetic
ggcagaauuucuguucuggcaaca

SEQ ID NO: 198273 - RNA, 18 nt, Artificial Sequence
  Synthetic
uaucauuguuuggcaaca

SEQ ID NO: 198274 - RNA, 19 nt, Artificial Sequence
  Synthetic
auaucauuguuuggcaaca

SEQ ID NO: 198275 - RNA, 20 nt, Artificial Sequence
  Synthetic
gauaucauuguuuggcaaca

SEQ ID NO: 198276 - RNA, 21 nt, Artificial Sequence
  Synthetic
agauaucauuguuuggcaaca

SEQ ID NO: 198277 - RNA, 22 nt, Artificial Sequence
  Synthetic
gagauaucauuguuuggcaaca

SEQ ID NO: 198278 - RNA, 23 nt, Artificial Sequence
  Synthetic
ugagauaucauuguuuggcaaca

SEQ ID NO: 198279 - RNA, 24 nt, Artificial Sequence
  Synthetic
uugagauaucauuguuuggcaaca

SEQ ID NO: 198280 - RNA, 18 nt, Artificial Sequence
  Synthetic
cauauaaacaaugcaaca

SEQ ID NO: 198281 - RNA, 19 nt, Artificial Sequence
  Synthetic
ccauauaaacaaugcaaca

SEQ ID NO: 198282 - RNA, 20 nt, Artificial Sequence
  Synthetic
gccauauaaacaaugcaaca

SEQ ID NO: 198283 - RNA, 21 nt, Artificial Sequence
  Synthetic
ugccauauaaacaaugcaaca

SEQ ID NO: 198284 - RNA, 22 nt, Artificial Sequence
  Synthetic
uugccauauaaacaaugcaaca

SEQ ID NO: 198285 - RNA, 23 nt, Artificial Sequence
  Synthetic
auugccauauaaacaaugcaaca

SEQ ID NO: 198286 - RNA, 24 nt, Artificial Sequence
  Synthetic
uauugccauauaaacaaugcaaca

SEQ ID NO: 198287 - RNA, 18 nt, Artificial Sequence
  Synthetic
auagauuuagcugcaaca

SEQ ID NO: 198288 - RNA, 19 nt, Artificial Sequence
  Synthetic
gauagauuuagcugcaaca

SEQ ID NO: 198289 - RNA, 20 nt, Artificial Sequence
  Synthetic
agauagauuuagcugcaaca

SEQ ID NO: 198290 - RNA, 21 nt, Artificial Sequence
  Synthetic
gagauagauuuagcugcaaca

SEQ ID NO: 198291 - RNA, 22 nt, Artificial Sequence
  Synthetic
ugagauagauuuagcugcaaca

SEQ ID NO: 198292 - RNA, 23 nt, Artificial Sequence
  Synthetic
augagauagauuuagcugcaaca

SEQ ID NO: 198293 - RNA, 24 nt, Artificial Sequence
  Synthetic
gaugagauagauuuagcugcaaca

SEQ ID NO: 198294 - RNA, 18 nt, Artificial Sequence
  Synthetic
aaaguugagauugcaaca

SEQ ID NO: 198295 - RNA, 19 nt, Artificial Sequence
  Synthetic
gaaaguugagauugcaaca

SEQ ID NO: 198296 - RNA, 20 nt, Artificial Sequence
  Synthetic
ggaaaguugagauugcaaca

SEQ ID NO: 198297 - RNA, 21 nt, Artificial Sequence
  Synthetic
uggaaaguugagauugcaaca

SEQ ID NO: 198298 - RNA, 22 nt, Artificial Sequence
  Synthetic
guggaaaguugagauugcaaca

SEQ ID NO: 198299 - RNA, 23 nt, Artificial Sequence
  Synthetic
uguggaaaguugagauugcaaca

SEQ ID NO: 198300 - RNA, 24 nt, Artificial Sequence
  Synthetic
auguggaaaguugagauugcaaca

SEQ ID NO: 198301 - RNA, 18 nt, Artificial Sequence
  Synthetic
guaagacugaaaucaaca

SEQ ID NO: 198302 - RNA, 19 nt, Artificial Sequence
  Synthetic
uguaagacugaaaucaaca

SEQ ID NO: 198303 - RNA, 20 nt, Artificial Sequence
  Synthetic
auguaagacugaaaucaaca

SEQ ID NO: 198304 - RNA, 21 nt, Artificial Sequence
  Synthetic
uauguaagacugaaaucaaca

SEQ ID NO: 198305 - RNA, 22 nt, Artificial Sequence
  Synthetic
auauguaagacugaaaucaaca

SEQ ID NO: 198306 - RNA, 23 nt, Artificial Sequence
  Synthetic
aauauguaagacugaaaucaaca

SEQ ID NO: 198307 - RNA, 24 nt, Artificial Sequence
  Synthetic
aaauauguaagacugaaaucaaca

SEQ ID NO: 198308 - RNA, 18 nt, Artificial Sequence
  Synthetic
aauugaaggacaucaaca

SEQ ID NO: 198309 - RNA, 19 nt, Artificial Sequence
  Synthetic
aaauugaaggacaucaaca

SEQ ID NO: 198310 - RNA, 20 nt, Artificial Sequence
  Synthetic
aaaauugaaggacaucaaca

SEQ ID NO: 198311 - RNA, 21 nt, Artificial Sequence
  Synthetic
uaaaauugaaggacaucaaca

SEQ ID NO: 198312 - RNA, 22 nt, Artificial Sequence
  Synthetic
uuaaaauugaaggacaucaaca

SEQ ID NO: 198313 - RNA, 23 nt, Artificial Sequence
  Synthetic
uuuaaaauugaaggacaucaaca

SEQ ID NO: 198314 - RNA, 24 nt, Artificial Sequence
  Synthetic
auuuaaaauugaaggacaucaaca

SEQ ID NO: 198315 - RNA, 18 nt, Artificial Sequence
  Synthetic
aacaauaugacaucaaca

SEQ ID NO: 198316 - RNA, 19 nt, Artificial Sequence
  Synthetic
uaacaauaugacaucaaca

SEQ ID NO: 198317 - RNA, 20 nt, Artificial Sequence
  Synthetic
auaacaauaugacaucaaca

SEQ ID NO: 198318 - RNA, 21 nt, Artificial Sequence
  Synthetic
cauaacaauaugacaucaaca

SEQ ID NO: 198319 - RNA, 22 nt, Artificial Sequence
  Synthetic
ucauaacaauaugacaucaaca

SEQ ID NO: 198320 - RNA, 23 nt, Artificial Sequence
  Synthetic
cucauaacaauaugacaucaaca

SEQ ID NO: 198321 - RNA, 24 nt, Artificial Sequence
  Synthetic
gcucauaacaauaugacaucaaca

SEQ ID NO: 198322 - RNA, 18 nt, Artificial Sequence
  Synthetic
gcaaugaagagaucaaca

SEQ ID NO: 198323 - RNA, 19 nt, Artificial Sequence
  Synthetic
ugcaaugaagagaucaaca

SEQ ID NO: 198324 - RNA, 20 nt, Artificial Sequence
  Synthetic
uugcaaugaagagaucaaca

SEQ ID NO: 198325 - RNA, 21 nt, Artificial Sequence
  Synthetic
auugcaaugaagagaucaaca

SEQ ID NO: 198326 - RNA, 22 nt, Artificial Sequence
  Synthetic
gauugcaaugaagagaucaaca

SEQ ID NO: 198327 - RNA, 23 nt, Artificial Sequence
  Synthetic
agauugcaaugaagagaucaaca

SEQ ID NO: 198328 - RNA, 24 nt, Artificial Sequence
  Synthetic
aagauugcaaugaagagaucaaca

SEQ ID NO: 198329 - RNA, 18 nt, Artificial Sequence
  Synthetic
ccccuagugagaucaaca

SEQ ID NO: 198330 - RNA, 19 nt, Artificial Sequence
  Synthetic
gccccuagugagaucaaca

SEQ ID NO: 198331 - RNA, 20 nt, Artificial Sequence
  Synthetic
agccccuagugagaucaaca

SEQ ID NO: 198332 - RNA, 21 nt, Artificial Sequence
  Synthetic
cagccccuagugagaucaaca

SEQ ID NO: 198333 - RNA, 22 nt, Artificial Sequence
  Synthetic
gcagccccuagugagaucaaca

SEQ ID NO: 198334 - RNA, 23 nt, Artificial Sequence
  Synthetic
cgcagccccuagugagaucaaca

SEQ ID NO: 198335 - RNA, 24 nt, Artificial Sequence
  Synthetic
gcgcagccccuagugagaucaaca

SEQ ID NO: 198336 - RNA, 18 nt, Artificial Sequence
  Synthetic
ucguaacaaucgucaaca

SEQ ID NO: 198337 - RNA, 19 nt, Artificial Sequence
  Synthetic
aucguaacaaucgucaaca

SEQ ID NO: 198338 - RNA, 20 nt, Artificial Sequence
  Synthetic
aaucguaacaaucgucaaca

SEQ ID NO: 198339 - RNA, 21 nt, Artificial Sequence
  Synthetic
aaaucguaacaaucgucaaca

SEQ ID NO: 198340 - RNA, 22 nt, Artificial Sequence
  Synthetic
caaaucguaacaaucgucaaca

SEQ ID NO: 198341 - RNA, 23 nt, Artificial Sequence
  Synthetic
ucaaaucguaacaaucgucaaca

SEQ ID NO: 198342 - RNA, 24 nt, Artificial Sequence
  Synthetic
cucaaaucguaacaaucgucaaca

SEQ ID NO: 198343 - RNA, 18 nt, Artificial Sequence
  Synthetic
ggcucugccaugucaaca

SEQ ID NO: 198344 - RNA, 19 nt, Artificial Sequence
  Synthetic
uggcucugccaugucaaca

SEQ ID NO: 198345 - RNA, 20 nt, Artificial Sequence
  Synthetic
guggcucugccaugucaaca

SEQ ID NO: 198346 - RNA, 21 nt, Artificial Sequence
  Synthetic
uguggcucugccaugucaaca

SEQ ID NO: 198347 - RNA, 22 nt, Artificial Sequence
  Synthetic
uuguggcucugccaugucaaca

SEQ ID NO: 198348 - RNA, 23 nt, Artificial Sequence
  Synthetic
cuuguggcucugccaugucaaca

SEQ ID NO: 198349 - RNA, 24 nt, Artificial Sequence
  Synthetic
ucuuguggcucugccaugucaaca

SEQ ID NO: 198350 - RNA, 18 nt, Artificial Sequence
  Synthetic
cucccuuuccauucaaca

SEQ ID NO: 198351 - RNA, 19 nt, Artificial Sequence
  Synthetic
ccucccuuuccauucaaca

SEQ ID NO: 198352 - RNA, 20 nt, Artificial Sequence
  Synthetic
uccucccuuuccauucaaca

SEQ ID NO: 198353 - RNA, 21 nt, Artificial Sequence
  Synthetic
cuccucccuuuccauucaaca

SEQ ID NO: 198354 - RNA, 22 nt, Artificial Sequence
  Synthetic
ccuccucccuuuccauucaaca

SEQ ID NO: 198355 - RNA, 23 nt, Artificial Sequence
  Synthetic
cccuccucccuuuccauucaaca

SEQ ID NO: 198356 - RNA, 24 nt, Artificial Sequence
  Synthetic
ucccuccucccuuuccauucaaca

SEQ ID NO: 198357 - RNA, 18 nt, Artificial Sequence
  Synthetic
cccuuuuucuauucaaca

SEQ ID NO: 198358 - RNA, 19 nt, Artificial Sequence
  Synthetic
ucccuuuuucuauucaaca

SEQ ID NO: 198359 - RNA, 20 nt, Artificial Sequence
  Synthetic
aucccuuuuucuauucaaca

SEQ ID NO: 198360 - RNA, 21 nt, Artificial Sequence
  Synthetic
uaucccuuuuucuauucaaca

SEQ ID NO: 198361 - RNA, 22 nt, Artificial Sequence
  Synthetic
uuaucccuuuuucuauucaaca

SEQ ID NO: 198362 - RNA, 23 nt, Artificial Sequence
  Synthetic
uuuaucccuuuuucuauucaaca

SEQ ID NO: 198363 - RNA, 24 nt, Artificial Sequence
  Synthetic
guuuaucccuuuuucuauucaaca

SEQ ID NO: 198364 - RNA, 18 nt, Artificial Sequence
  Synthetic
gcgaaggcaauuucaaca

SEQ ID NO: 198365 - RNA, 19 nt, Artificial Sequence
  Synthetic
ggcgaaggcaauuucaaca

SEQ ID NO: 198366 - RNA, 20 nt, Artificial Sequence
  Synthetic
uggcgaaggcaauuucaaca

SEQ ID NO: 198367 - RNA, 21 nt, Artificial Sequence
  Synthetic
uuggcgaaggcaauuucaaca

SEQ ID NO: 198368 - RNA, 22 nt, Artificial Sequence
  Synthetic
guuggcgaaggcaauuucaaca

SEQ ID NO: 198369 - RNA, 23 nt, Artificial Sequence
  Synthetic
uguuggcgaaggcaauuucaaca

SEQ ID NO: 198370 - RNA, 24 nt, Artificial Sequence
  Synthetic
cuguuggcgaaggcaauuucaaca

SEQ ID NO: 198371 - RNA, 18 nt, Artificial Sequence
  Synthetic
auguguagaauuucaaca

SEQ ID NO: 198372 - RNA, 19 nt, Artificial Sequence
  Synthetic
aauguguagaauuucaaca

SEQ ID NO: 198373 - RNA, 20 nt, Artificial Sequence
  Synthetic
aaauguguagaauuucaaca

SEQ ID NO: 198374 - RNA, 21 nt, Artificial Sequence
  Synthetic
aaaauguguagaauuucaaca

SEQ ID NO: 198375 - RNA, 22 nt, Artificial Sequence
  Synthetic
aaaaauguguagaauuucaaca

SEQ ID NO: 198376 - RNA, 23 nt, Artificial Sequence
  Synthetic
aaaaaauguguagaauuucaaca

SEQ ID NO: 198377 - RNA, 24 nt, Artificial Sequence
  Synthetic
gaaaaaauguguagaauuucaaca

SEQ ID NO: 198378 - RNA, 18 nt, Artificial Sequence
  Synthetic
uuuuuuaggauuucaaca

SEQ ID NO: 198379 - RNA, 19 nt, Artificial Sequence
  Synthetic
auuuuuuaggauuucaaca

SEQ ID NO: 198380 - RNA, 20 nt, Artificial Sequence
  Synthetic
uauuuuuuaggauuucaaca

SEQ ID NO: 198381 - RNA, 21 nt, Artificial Sequence
  Synthetic
uuauuuuuuaggauuucaaca

SEQ ID NO: 198382 - RNA, 22 nt, Artificial Sequence
  Synthetic
uuuauuuuuuaggauuucaaca

SEQ ID NO: 198383 - RNA, 23 nt, Artificial Sequence
  Synthetic
uuuuauuuuuuaggauuucaaca

SEQ ID NO: 198384 - RNA, 24 nt, Artificial Sequence
  Synthetic
uuuuuauuuuuuaggauuucaaca

SEQ ID NO: 198385 - RNA, 18 nt, Artificial Sequence
  Synthetic
agaccaaaaguuucaaca

SEQ ID NO: 198386 - RNA, 19 nt, Artificial Sequence
  Synthetic
cagaccaaaaguuucaaca

SEQ ID NO: 198387 - RNA, 20 nt, Artificial Sequence
  Synthetic
gcagaccaaaaguuucaaca

SEQ ID NO: 198388 - RNA, 21 nt, Artificial Sequence
  Synthetic
ugcagaccaaaaguuucaaca

SEQ ID NO: 198389 - RNA, 22 nt, Artificial Sequence
  Synthetic
cugcagaccaaaaguuucaaca

SEQ ID NO: 198390 - RNA, 23 nt, Artificial Sequence
  Synthetic
gcugcagaccaaaaguuucaaca

SEQ ID NO: 198391 - RNA, 24 nt, Artificial Sequence
  Synthetic
ugcugcagaccaaaaguuucaaca

SEQ ID NO: 198392 - RNA, 18 nt, Artificial Sequence
  Synthetic
gaggagagaguuucaaca

SEQ ID NO: 198393 - RNA, 19 nt, Artificial Sequence
  Synthetic
agaggagagaguuucaaca

SEQ ID NO: 198394 - RNA, 20 nt, Artificial Sequence
  Synthetic
gagaggagagaguuucaaca

SEQ ID NO: 198395 - RNA, 21 nt, Artificial Sequence
  Synthetic
agagaggagagaguuucaaca

SEQ ID NO: 198396 - RNA, 22 nt, Artificial Sequence
  Synthetic
cagagaggagagaguuucaaca

SEQ ID NO: 198397 - RNA, 23 nt, Artificial Sequence
  Synthetic
gcagagaggagagaguuucaaca

SEQ ID NO: 198398 - RNA, 24 nt, Artificial Sequence
  Synthetic
agcagagaggagagaguuucaaca

SEQ ID NO: 198399 - RNA, 18 nt, Artificial Sequence
  Synthetic
uuaaucuuuuuuucaaca

SEQ ID NO: 198400 - RNA, 19 nt, Artificial Sequence
  Synthetic
cuuaaucuuuuuuucaaca

SEQ ID NO: 198401 - RNA, 20 nt, Artificial Sequence
  Synthetic
ucuuaaucuuuuuuucaaca

SEQ ID NO: 198402 - RNA, 21 nt, Artificial Sequence
  Synthetic
aucuuaaucuuuuuuucaaca

SEQ ID NO: 198403 - RNA, 22 nt, Artificial Sequence
  Synthetic
caucuuaaucuuuuuuucaaca

SEQ ID NO: 198404 - RNA, 23 nt, Artificial Sequence
  Synthetic
ccaucuuaaucuuuuuuucaaca

SEQ ID NO: 198405 - RNA, 24 nt, Artificial Sequence
  Synthetic
accaucuuaaucuuuuuuucaaca

SEQ ID NO: 198406 - RNA, 18 nt, Artificial Sequence
  Synthetic
ccuaugggcaaaagaaca

SEQ ID NO: 198407 - RNA, 19 nt, Artificial Sequence
  Synthetic
gccuaugggcaaaagaaca

SEQ ID NO: 198408 - RNA, 20 nt, Artificial Sequence
  Synthetic
agccuaugggcaaaagaaca

SEQ ID NO: 198409 - RNA, 21 nt, Artificial Sequence
  Synthetic
aagccuaugggcaaaagaaca

SEQ ID NO: 198410 - RNA, 22 nt, Artificial Sequence
  Synthetic
gaagccuaugggcaaaagaaca

SEQ ID NO: 198411 - RNA, 23 nt, Artificial Sequence
  Synthetic
ugaagccuaugggcaaaagaaca

SEQ ID NO: 198412 - RNA, 24 nt, Artificial Sequence
  Synthetic
uugaagccuaugggcaaaagaaca

SEQ ID NO: 198413 - RNA, 18 nt, Artificial Sequence
  Synthetic
cguaagugguaaagaaca

SEQ ID NO: 198414 - RNA, 19 nt, Artificial Sequence
  Synthetic
acguaagugguaaagaaca

SEQ ID NO: 198415 - RNA, 20 nt, Artificial Sequence
  Synthetic
cacguaagugguaaagaaca

SEQ ID NO: 198416 - RNA, 21 nt, Artificial Sequence
  Synthetic
ucacguaagugguaaagaaca

SEQ ID NO: 198417 - RNA, 22 nt, Artificial Sequence
  Synthetic
aucacguaagugguaaagaaca

SEQ ID NO: 198418 - RNA, 23 nt, Artificial Sequence
  Synthetic
uaucacguaagugguaaagaaca

SEQ ID NO: 198419 - RNA, 24 nt, Artificial Sequence
  Synthetic
auaucacguaagugguaaagaaca

SEQ ID NO: 198420 - RNA, 18 nt, Artificial Sequence
  Synthetic
acacaguguggaagaaca

SEQ ID NO: 198421 - RNA, 19 nt, Artificial Sequence
  Synthetic
cacacaguguggaagaaca

SEQ ID NO: 198422 - RNA, 20 nt, Artificial Sequence
  Synthetic
acacacaguguggaagaaca

SEQ ID NO: 198423 - RNA, 21 nt, Artificial Sequence
  Synthetic
uacacacaguguggaagaaca

SEQ ID NO: 198424 - RNA, 22 nt, Artificial Sequence
  Synthetic
auacacacaguguggaagaaca

SEQ ID NO: 198425 - RNA, 23 nt, Artificial Sequence
  Synthetic
cauacacacaguguggaagaaca

SEQ ID NO: 198426 - RNA, 24 nt, Artificial Sequence
  Synthetic
ucauacacacaguguggaagaaca

SEQ ID NO: 198427 - RNA, 18 nt, Artificial Sequence
  Synthetic
guuuaagguugaagaaca

SEQ ID NO: 198428 - RNA, 19 nt, Artificial Sequence
  Synthetic
aguuuaagguugaagaaca

SEQ ID NO: 198429 - RNA, 20 nt, Artificial Sequence
  Synthetic
uaguuuaagguugaagaaca

SEQ ID NO: 198430 - RNA, 21 nt, Artificial Sequence
  Synthetic
guaguuuaagguugaagaaca

SEQ ID NO: 198431 - RNA, 22 nt, Artificial Sequence
  Synthetic
uguaguuuaagguugaagaaca

SEQ ID NO: 198432 - RNA, 23 nt, Artificial Sequence
  Synthetic
auguaguuuaagguugaagaaca

SEQ ID NO: 198433 - RNA, 24 nt, Artificial Sequence
  Synthetic
gauguaguuuaagguugaagaaca

SEQ ID NO: 198434 - RNA, 18 nt, Artificial Sequence
  Synthetic
ugauggaagauaagaaca

SEQ ID NO: 198435 - RNA, 19 nt, Artificial Sequence
  Synthetic
augauggaagauaagaaca

SEQ ID NO: 198436 - RNA, 20 nt, Artificial Sequence
  Synthetic
caugauggaagauaagaaca

SEQ ID NO: 198437 - RNA, 21 nt, Artificial Sequence
  Synthetic
ucaugauggaagauaagaaca

SEQ ID NO: 198438 - RNA, 22 nt, Artificial Sequence
  Synthetic
cucaugauggaagauaagaaca

SEQ ID NO: 198439 - RNA, 23 nt, Artificial Sequence
  Synthetic
ucucaugauggaagauaagaaca

SEQ ID NO: 198440 - RNA, 24 nt, Artificial Sequence
  Synthetic
cucucaugauggaagauaagaaca

SEQ ID NO: 198441 - RNA, 18 nt, Artificial Sequence
  Synthetic
gcuuuuauuauaagaaca

SEQ ID NO: 198442 - RNA, 19 nt, Artificial Sequence
  Synthetic
ggcuuuuauuauaagaaca

SEQ ID NO: 198443 - RNA, 20 nt, Artificial Sequence
  Synthetic
cggcuuuuauuauaagaaca

SEQ ID NO: 198444 - RNA, 21 nt, Artificial Sequence
  Synthetic
ucggcuuuuauuauaagaaca

SEQ ID NO: 198445 - RNA, 22 nt, Artificial Sequence
  Synthetic
uucggcuuuuauuauaagaaca

SEQ ID NO: 198446 - RNA, 23 nt, Artificial Sequence
  Synthetic
auucggcuuuuauuauaagaaca

SEQ ID NO: 198447 - RNA, 24 nt, Artificial Sequence
  Synthetic
aauucggcuuuuauuauaagaaca

SEQ ID NO: 198448 - RNA, 18 nt, Artificial Sequence
  Synthetic
gaaggacaaggcagaaca

SEQ ID NO: 198449 - RNA, 19 nt, Artificial Sequence
  Synthetic
ugaaggacaaggcagaaca

SEQ ID NO: 198450 - RNA, 20 nt, Artificial Sequence
  Synthetic
uugaaggacaaggcagaaca

SEQ ID NO: 198451 - RNA, 21 nt, Artificial Sequence
  Synthetic
uuugaaggacaaggcagaaca

SEQ ID NO: 198452 - RNA, 22 nt, Artificial Sequence
  Synthetic
uuuugaaggacaaggcagaaca

SEQ ID NO: 198453 - RNA, 23 nt, Artificial Sequence
  Synthetic
uuuuugaaggacaaggcagaaca

SEQ ID NO: 198454 - RNA, 24 nt, Artificial Sequence
  Synthetic
uuuuuugaaggacaaggcagaaca

SEQ ID NO: 198455 - RNA, 18 nt, Artificial Sequence
  Synthetic
agaucaaacugcagaaca

SEQ ID NO: 198456 - RNA, 19 nt, Artificial Sequence
  Synthetic
aagaucaaacugcagaaca

SEQ ID NO: 198457 - RNA, 20 nt, Artificial Sequence
  Synthetic
uaagaucaaacugcagaaca

SEQ ID NO: 198458 - RNA, 21 nt, Artificial Sequence
  Synthetic
uuaagaucaaacugcagaaca

SEQ ID NO: 198459 - RNA, 22 nt, Artificial Sequence
  Synthetic
cuuaagaucaaacugcagaaca

SEQ ID NO: 198460 - RNA, 23 nt, Artificial Sequence
  Synthetic
ccuuaagaucaaacugcagaaca

SEQ ID NO: 198461 - RNA, 24 nt, Artificial Sequence
  Synthetic
uccuuaagaucaaacugcagaaca

SEQ ID NO: 198462 - RNA, 18 nt, Artificial Sequence
  Synthetic
caaacuguugucagaaca

SEQ ID NO: 198463 - RNA, 19 nt, Artificial Sequence
  Synthetic
gcaaacuguugucagaaca

SEQ ID NO: 198464 - RNA, 20 nt, Artificial Sequence
  Synthetic
ggcaaacuguugucagaaca

SEQ ID NO: 198465 - RNA, 21 nt, Artificial Sequence
  Synthetic
cggcaaacuguugucagaaca

SEQ ID NO: 198466 - RNA, 22 nt, Artificial Sequence
  Synthetic
gcggcaaacuguugucagaaca

SEQ ID NO: 198467 - RNA, 23 nt, Artificial Sequence
  Synthetic
agcggcaaacuguugucagaaca

SEQ ID NO: 198468 - RNA, 24 nt, Artificial Sequence
  Synthetic
cagcggcaaacuguugucagaaca

SEQ ID NO: 198469 - RNA, 18 nt, Artificial Sequence
  Synthetic
ccucauaaaaagagaaca

SEQ ID NO: 198470 - RNA, 19 nt, Artificial Sequence
  Synthetic
cccucauaaaaagagaaca

SEQ ID NO: 198471 - RNA, 20 nt, Artificial Sequence
  Synthetic
ucccucauaaaaagagaaca

SEQ ID NO: 198472 - RNA, 21 nt, Artificial Sequence
  Synthetic
aucccucauaaaaagagaaca

SEQ ID NO: 198473 - RNA, 22 nt, Artificial Sequence
  Synthetic
caucccucauaaaaagagaaca

SEQ ID NO: 198474 - RNA, 23 nt, Artificial Sequence
  Synthetic
ucaucccucauaaaaagagaaca

SEQ ID NO: 198475 - RNA, 24 nt, Artificial Sequence
  Synthetic
aucaucccucauaaaaagagaaca

SEQ ID NO: 198476 - RNA, 18 nt, Artificial Sequence
  Synthetic
gacaaagggcagagaaca

SEQ ID NO: 198477 - RNA, 19 nt, Artificial Sequence
  Synthetic
agacaaagggcagagaaca

SEQ ID NO: 198478 - RNA, 20 nt, Artificial Sequence
  Synthetic
gagacaaagggcagagaaca

SEQ ID NO: 198479 - RNA, 21 nt, Artificial Sequence
  Synthetic
agagacaaagggcagagaaca

SEQ ID NO: 198480 - RNA, 22 nt, Artificial Sequence
  Synthetic
aagagacaaagggcagagaaca

SEQ ID NO: 198481 - RNA, 23 nt, Artificial Sequence
  Synthetic
aaagagacaaagggcagagaaca

SEQ ID NO: 198482 - RNA, 24 nt, Artificial Sequence
  Synthetic
gaaagagacaaagggcagagaaca

SEQ ID NO: 198483 - RNA, 18 nt, Artificial Sequence
  Synthetic
gaaaggaaggagagaaca

SEQ ID NO: 198484 - RNA, 19 nt, Artificial Sequence
  Synthetic
ggaaaggaaggagagaaca

SEQ ID NO: 198485 - RNA, 20 nt, Artificial Sequence
  Synthetic
aggaaaggaaggagagaaca

SEQ ID NO: 198486 - RNA, 21 nt, Artificial Sequence
  Synthetic
aaggaaaggaaggagagaaca

SEQ ID NO: 198487 - RNA, 22 nt, Artificial Sequence
  Synthetic
uaaggaaaggaaggagagaaca

SEQ ID NO: 198488 - RNA, 23 nt, Artificial Sequence
  Synthetic
uuaaggaaaggaaggagagaaca

SEQ ID NO: 198489 - RNA, 24 nt, Artificial Sequence
  Synthetic
cuuaaggaaaggaaggagagaaca

SEQ ID NO: 198490 - RNA, 18 nt, Artificial Sequence
  Synthetic
ugcauugaggagagaaca

SEQ ID NO: 198491 - RNA, 19 nt, Artificial Sequence
  Synthetic
augcauugaggagagaaca

SEQ ID NO: 198492 - RNA, 20 nt, Artificial Sequence
  Synthetic
uaugcauugaggagagaaca

SEQ ID NO: 198493 - RNA, 21 nt, Artificial Sequence
  Synthetic
auaugcauugaggagagaaca

SEQ ID NO: 198494 - RNA, 22 nt, Artificial Sequence
  Synthetic
aauaugcauugaggagagaaca

SEQ ID NO: 198495 - RNA, 23 nt, Artificial Sequence
  Synthetic
aaauaugcauugaggagagaaca

SEQ ID NO: 198496 - RNA, 24 nt, Artificial Sequence
  Synthetic
caaauaugcauugaggagagaaca

SEQ ID NO: 198497 - RNA, 18 nt, Artificial Sequence
  Synthetic
agaguaguccugagaaca

SEQ ID NO: 198498 - RNA, 19 nt, Artificial Sequence
  Synthetic
cagaguaguccugagaaca

SEQ ID NO: 198499 - RNA, 20 nt, Artificial Sequence
  Synthetic
ucagaguaguccugagaaca

SEQ ID NO: 198500 - RNA, 21 nt, Artificial Sequence
  Synthetic
uucagaguaguccugagaaca

SEQ ID NO: 198501 - RNA, 22 nt, Artificial Sequence
  Synthetic
cuucagaguaguccugagaaca

SEQ ID NO: 198502 - RNA, 23 nt, Artificial Sequence
  Synthetic
ccuucagaguaguccugagaaca

SEQ ID NO: 198503 - RNA, 24 nt, Artificial Sequence
  Synthetic
cccuucagaguaguccugagaaca

SEQ ID NO: 198504 - RNA, 18 nt, Artificial Sequence
  Synthetic
acacaaugugauagaaca

SEQ ID NO: 198505 - RNA, 19 nt, Artificial Sequence
  Synthetic
cacacaaugugauagaaca

SEQ ID NO: 198506 - RNA, 20 nt, Artificial Sequence
  Synthetic
acacacaaugugauagaaca

SEQ ID NO: 198507 - RNA, 21 nt, Artificial Sequence
  Synthetic
aacacacaaugugauagaaca

SEQ ID NO: 198508 - RNA, 22 nt, Artificial Sequence
  Synthetic
caacacacaaugugauagaaca

SEQ ID NO: 198509 - RNA, 23 nt, Artificial Sequence
  Synthetic
acaacacacaaugugauagaaca

SEQ ID NO: 198510 - RNA, 24 nt, Artificial Sequence
  Synthetic
cacaacacacaaugugauagaaca

SEQ ID NO: 198511 - RNA, 18 nt, Artificial Sequence
  Synthetic
ugguuauacccuagaaca

SEQ ID NO: 198512 - RNA, 19 nt, Artificial Sequence
  Synthetic
augguuauacccuagaaca

SEQ ID NO: 198513 - RNA, 20 nt, Artificial Sequence
  Synthetic
gaugguuauacccuagaaca

SEQ ID NO: 198514 - RNA, 21 nt, Artificial Sequence
  Synthetic
agaugguuauacccuagaaca

SEQ ID NO: 198515 - RNA, 22 nt, Artificial Sequence
  Synthetic
aagaugguuauacccuagaaca

SEQ ID NO: 198516 - RNA, 23 nt, Artificial Sequence
  Synthetic
gaagaugguuauacccuagaaca

SEQ ID NO: 198517 - RNA, 24 nt, Artificial Sequence
  Synthetic
ugaagaugguuauacccuagaaca

SEQ ID NO: 198518 - RNA, 18 nt, Artificial Sequence
  Synthetic
uugaagacauuuagaaca

SEQ ID NO: 198519 - RNA, 19 nt, Artificial Sequence
  Synthetic
uuugaagacauuuagaaca

SEQ ID NO: 198520 - RNA, 20 nt, Artificial Sequence
  Synthetic
cuuugaagacauuuagaaca

SEQ ID NO: 198521 - RNA, 21 nt, Artificial Sequence
  Synthetic
ucuuugaagacauuuagaaca

SEQ ID NO: 198522 - RNA, 22 nt, Artificial Sequence
  Synthetic
gucuuugaagacauuuagaaca

SEQ ID NO: 198523 - RNA, 23 nt, Artificial Sequence
  Synthetic
agucuuugaagacauuuagaaca

SEQ ID NO: 198524 - RNA, 24 nt, Artificial Sequence
  Synthetic
aagucuuugaagacauuuagaaca

SEQ ID NO: 198525 - RNA, 18 nt, Artificial Sequence
  Synthetic
ugccguaucuuuagaaca

SEQ ID NO: 198526 - RNA, 19 nt, Artificial Sequence
  Synthetic
cugccguaucuuuagaaca

SEQ ID NO: 198527 - RNA, 20 nt, Artificial Sequence
  Synthetic
acugccguaucuuuagaaca

SEQ ID NO: 198528 - RNA, 21 nt, Artificial Sequence
  Synthetic
cacugccguaucuuuagaaca

SEQ ID NO: 198529 - RNA, 22 nt, Artificial Sequence
  Synthetic
ucacugccguaucuuuagaaca

SEQ ID NO: 198530 - RNA, 23 nt, Artificial Sequence
  Synthetic
cucacugccguaucuuuagaaca

SEQ ID NO: 198531 - RNA, 24 nt, Artificial Sequence
  Synthetic
gcucacugccguaucuuuagaaca

SEQ ID NO: 198532 - RNA, 18 nt, Artificial Sequence
  Synthetic
uguguggggaaaggaaca

SEQ ID NO: 198533 - RNA, 19 nt, Artificial Sequence
  Synthetic
uuguguggggaaaggaaca

SEQ ID NO: 198534 - RNA, 20 nt, Artificial Sequence
  Synthetic
cuuguguggggaaaggaaca

SEQ ID NO: 198535 - RNA, 21 nt, Artificial Sequence
  Synthetic
ccuuguguggggaaaggaaca

SEQ ID NO: 198536 - RNA, 22 nt, Artificial Sequence
  Synthetic
accuuguguggggaaaggaaca

SEQ ID NO: 198537 - RNA, 23 nt, Artificial Sequence
  Synthetic
gaccuuguguggggaaaggaaca

SEQ ID NO: 198538 - RNA, 24 nt, Artificial Sequence
  Synthetic
ugaccuuguguggggaaaggaaca

SEQ ID NO: 198539 - RNA, 18 nt, Artificial Sequence
  Synthetic
uucgggagguaaggaaca

SEQ ID NO: 198540 - RNA, 19 nt, Artificial Sequence
  Synthetic
guucgggagguaaggaaca

SEQ ID NO: 198541 - RNA, 20 nt, Artificial Sequence
  Synthetic
uguucgggagguaaggaaca

SEQ ID NO: 198542 - RNA, 21 nt, Artificial Sequence
  Synthetic
guguucgggagguaaggaaca

SEQ ID NO: 198543 - RNA, 22 nt, Artificial Sequence
  Synthetic
gguguucgggagguaaggaaca

SEQ ID NO: 198544 - RNA, 23 nt, Artificial Sequence
  Synthetic
ugguguucgggagguaaggaaca

SEQ ID NO: 198545 - RNA, 24 nt, Artificial Sequence
  Synthetic
gugguguucgggagguaaggaaca

SEQ ID NO: 198546 - RNA, 18 nt, Artificial Sequence
  Synthetic
aaugaaugaauaggaaca

SEQ ID NO: 198547 - RNA, 19 nt, Artificial Sequence
  Synthetic
aaaugaaugaauaggaaca

SEQ ID NO: 198548 - RNA, 20 nt, Artificial Sequence
  Synthetic
caaaugaaugaauaggaaca

SEQ ID NO: 198549 - RNA, 21 nt, Artificial Sequence
  Synthetic
acaaaugaaugaauaggaaca

SEQ ID NO: 198550 - RNA, 22 nt, Artificial Sequence
  Synthetic
gacaaaugaaugaauaggaaca

SEQ ID NO: 198551 - RNA, 23 nt, Artificial Sequence
  Synthetic
agacaaaugaaugaauaggaaca

SEQ ID NO: 198552 - RNA, 24 nt, Artificial Sequence
  Synthetic
aagacaaaugaaugaauaggaaca

SEQ ID NO: 198553 - RNA, 18 nt, Artificial Sequence
  Synthetic
acuauucugcugggaaca

SEQ ID NO: 198554 - RNA, 19 nt, Artificial Sequence
  Synthetic
gacuauucugcugggaaca

SEQ ID NO: 198555 - RNA, 20 nt, Artificial Sequence
  Synthetic
ugacuauucugcugggaaca

SEQ ID NO: 198556 - RNA, 21 nt, Artificial Sequence
  Synthetic
uugacuauucugcugggaaca

SEQ ID NO: 198557 - RNA, 22 nt, Artificial Sequence
  Synthetic
uuugacuauucugcugggaaca

SEQ ID NO: 198558 - RNA, 23 nt, Artificial Sequence
  Synthetic
cuuugacuauucugcugggaaca

SEQ ID NO: 198559 - RNA, 24 nt, Artificial Sequence
  Synthetic
gcuuugacuauucugcugggaaca

SEQ ID NO: 198560 - RNA, 18 nt, Artificial Sequence
  Synthetic
aauagauuaacuggaaca

SEQ ID NO: 198561 - RNA, 19 nt, Artificial Sequence
  Synthetic
gaauagauuaacuggaaca

SEQ ID NO: 198562 - RNA, 20 nt, Artificial Sequence
  Synthetic
ugaauagauuaacuggaaca

SEQ ID NO: 198563 - RNA, 21 nt, Artificial Sequence
  Synthetic
augaauagauuaacuggaaca

SEQ ID NO: 198564 - RNA, 22 nt, Artificial Sequence
  Synthetic
aaugaauagauuaacuggaaca

SEQ ID NO: 198565 - RNA, 23 nt, Artificial Sequence
  Synthetic
aaaugaauagauuaacuggaaca

SEQ ID NO: 198566 - RNA, 24 nt, Artificial Sequence
  Synthetic
aaaaugaauagauuaacuggaaca

SEQ ID NO: 198567 - RNA, 18 nt, Artificial Sequence
  Synthetic
uaaggagcucuuggaaca

SEQ ID NO: 198568 - RNA, 19 nt, Artificial Sequence
  Synthetic
uuaaggagcucuuggaaca

SEQ ID NO: 198569 - RNA, 20 nt, Artificial Sequence
  Synthetic
cuuaaggagcucuuggaaca

SEQ ID NO: 198570 - RNA, 21 nt, Artificial Sequence
  Synthetic
ucuuaaggagcucuuggaaca

SEQ ID NO: 198571 - RNA, 22 nt, Artificial Sequence
  Synthetic
gucuuaaggagcucuuggaaca

SEQ ID NO: 198572 - RNA, 23 nt, Artificial Sequence
  Synthetic
agucuuaaggagcucuuggaaca

SEQ ID NO: 198573 - RNA, 24 nt, Artificial Sequence
  Synthetic
uagucuuaaggagcucuuggaaca

SEQ ID NO: 198574 - RNA, 18 nt, Artificial Sequence
  Synthetic
aaaugacuugaaugaaca

SEQ ID NO: 198575 - RNA, 19 nt, Artificial Sequence
  Synthetic
gaaaugacuugaaugaaca

SEQ ID NO: 198576 - RNA, 20 nt, Artificial Sequence
  Synthetic
ggaaaugacuugaaugaaca

SEQ ID NO: 198577 - RNA, 21 nt, Artificial Sequence
  Synthetic
aggaaaugacuugaaugaaca

SEQ ID NO: 198578 - RNA, 22 nt, Artificial Sequence
  Synthetic
caggaaaugacuugaaugaaca

SEQ ID NO: 198579 - RNA, 23 nt, Artificial Sequence
  Synthetic
ucaggaaaugacuugaaugaaca

SEQ ID NO: 198580 - RNA, 24 nt, Artificial Sequence
  Synthetic
cucaggaaaugacuugaaugaaca

SEQ ID NO: 198581 - RNA, 18 nt, Artificial Sequence
  Synthetic
aacaagaaaccaugaaca

SEQ ID NO: 198582 - RNA, 19 nt, Artificial Sequence
  Synthetic
aaacaagaaaccaugaaca

SEQ ID NO: 198583 - RNA, 20 nt, Artificial Sequence
  Synthetic
aaaacaagaaaccaugaaca

SEQ ID NO: 198584 - RNA, 21 nt, Artificial Sequence
  Synthetic
aaaaacaagaaaccaugaaca

SEQ ID NO: 198585 - RNA, 22 nt, Artificial Sequence
  Synthetic
aaaaaacaagaaaccaugaaca

SEQ ID NO: 198586 - RNA, 23 nt, Artificial Sequence
  Synthetic
uaaaaaacaagaaaccaugaaca

SEQ ID NO: 198587 - RNA, 24 nt, Artificial Sequence
  Synthetic
uuaaaaaacaagaaaccaugaaca

SEQ ID NO: 198588 - RNA, 18 nt, Artificial Sequence
  Synthetic
gcaauaguuugaugaaca

SEQ ID NO: 198589 - RNA, 19 nt, Artificial Sequence
  Synthetic
ugcaauaguuugaugaaca

SEQ ID NO: 198590 - RNA, 20 nt, Artificial Sequence
  Synthetic
cugcaauaguuugaugaaca

SEQ ID NO: 198591 - RNA, 21 nt, Artificial Sequence
  Synthetic
ucugcaauaguuugaugaaca

SEQ ID NO: 198592 - RNA, 22 nt, Artificial Sequence
  Synthetic
aucugcaauaguuugaugaaca

SEQ ID NO: 198593 - RNA, 23 nt, Artificial Sequence
  Synthetic
aaucugcaauaguuugaugaaca

SEQ ID NO: 198594 - RNA, 24 nt, Artificial Sequence
  Synthetic
aaaucugcaauaguuugaugaaca

SEQ ID NO: 198595 - RNA, 18 nt, Artificial Sequence
  Synthetic
uauauauauauaugaaca

SEQ ID NO: 198596 - RNA, 19 nt, Artificial Sequence
  Synthetic
auauauauauauaugaaca

SEQ ID NO: 198597 - RNA, 20 nt, Artificial Sequence
  Synthetic
uauauauauauauaugaaca

SEQ ID NO: 198598 - RNA, 21 nt, Artificial Sequence
  Synthetic
auauauauauauauaugaaca

SEQ ID NO: 198599 - RNA, 22 nt, Artificial Sequence
  Synthetic
uauauauauauauauaugaaca

SEQ ID NO: 198600 - RNA, 23 nt, Artificial Sequence
  Synthetic
auauauauauauauauaugaaca

SEQ ID NO: 198601 - RNA, 24 nt, Artificial Sequence
  Synthetic
uauauauauauauauauaugaaca

SEQ ID NO: 198602 - RNA, 18 nt, Artificial Sequence
  Synthetic
agacuauuguuaugaaca

SEQ ID NO: 198603 - RNA, 19 nt, Artificial Sequence
  Synthetic
gagacuauuguuaugaaca

SEQ ID NO: 198604 - RNA, 20 nt, Artificial Sequence
  Synthetic
ugagacuauuguuaugaaca

SEQ ID NO: 198605 - RNA, 21 nt, Artificial Sequence
  Synthetic
augagacuauuguuaugaaca

SEQ ID NO: 198606 - RNA, 22 nt, Artificial Sequence
  Synthetic
aaugagacuauuguuaugaaca

SEQ ID NO: 198607 - RNA, 23 nt, Artificial Sequence
  Synthetic
aaaugagacuauuguuaugaaca

SEQ ID NO: 198608 - RNA, 24 nt, Artificial Sequence
  Synthetic
caaaugagacuauuguuaugaaca

SEQ ID NO: 198609 - RNA, 18 nt, Artificial Sequence
  Synthetic
uuuuccaauuuaugaaca

SEQ ID NO: 198610 - RNA, 19 nt, Artificial Sequence
  Synthetic
uuuuuccaauuuaugaaca

SEQ ID NO: 198611 - RNA, 20 nt, Artificial Sequence
  Synthetic
auuuuuccaauuuaugaaca

SEQ ID NO: 198612 - RNA, 21 nt, Artificial Sequence
  Synthetic
aauuuuuccaauuuaugaaca

SEQ ID NO: 198613 - RNA, 22 nt, Artificial Sequence
  Synthetic
uaauuuuuccaauuuaugaaca

SEQ ID NO: 198614 - RNA, 23 nt, Artificial Sequence
  Synthetic
uuaauuuuuccaauuuaugaaca

SEQ ID NO: 198615 - RNA, 24 nt, Artificial Sequence
  Synthetic
auuaauuuuuccaauuuaugaaca

SEQ ID NO: 198616 - RNA, 18 nt, Artificial Sequence
  Synthetic
ugagagcacaccugaaca

SEQ ID NO: 198617 - RNA, 19 nt, Artificial Sequence
  Synthetic
augagagcacaccugaaca

SEQ ID NO: 198618 - RNA, 20 nt, Artificial Sequence
  Synthetic
caugagagcacaccugaaca

SEQ ID NO: 198619 - RNA, 21 nt, Artificial Sequence
  Synthetic
ccaugagagcacaccugaaca

SEQ ID NO: 198620 - RNA, 22 nt, Artificial Sequence
  Synthetic
gccaugagagcacaccugaaca

SEQ ID NO: 198621 - RNA, 23 nt, Artificial Sequence
  Synthetic
ugccaugagagcacaccugaaca

SEQ ID NO: 198622 - RNA, 24 nt, Artificial Sequence
  Synthetic
uugccaugagagcacaccugaaca

SEQ ID NO: 198623 - RNA, 18 nt, Artificial Sequence
  Synthetic
aaaagugggagcugaaca

SEQ ID NO: 198624 - RNA, 19 nt, Artificial Sequence
  Synthetic
uaaaagugggagcugaaca

SEQ ID NO: 198625 - RNA, 20 nt, Artificial Sequence
  Synthetic
uuaaaagugggagcugaaca

SEQ ID NO: 198626 - RNA, 21 nt, Artificial Sequence
  Synthetic
cuuaaaagugggagcugaaca

SEQ ID NO: 198627 - RNA, 22 nt, Artificial Sequence
  Synthetic
acuuaaaagugggagcugaaca

SEQ ID NO: 198628 - RNA, 23 nt, Artificial Sequence
  Synthetic
cacuuaaaagugggagcugaaca

SEQ ID NO: 198629 - RNA, 24 nt, Artificial Sequence
  Synthetic
ucacuuaaaagugggagcugaaca

SEQ ID NO: 198630 - RNA, 18 nt, Artificial Sequence
  Synthetic
uuauauagcaucugaaca

SEQ ID NO: 198631 - RNA, 19 nt, Artificial Sequence
  Synthetic
uuuauauagcaucugaaca

SEQ ID NO: 198632 - RNA, 20 nt, Artificial Sequence
  Synthetic
guuuauauagcaucugaaca

SEQ ID NO: 198633 - RNA, 21 nt, Artificial Sequence
  Synthetic
gguuuauauagcaucugaaca

SEQ ID NO: 198634 - RNA, 22 nt, Artificial Sequence
  Synthetic
ggguuuauauagcaucugaaca

SEQ ID NO: 198635 - RNA, 23 nt, Artificial Sequence
  Synthetic
uggguuuauauagcaucugaaca

SEQ ID NO: 198636 - RNA, 24 nt, Artificial Sequence
  Synthetic
uuggguuuauauagcaucugaaca

SEQ ID NO: 198637 - RNA, 18 nt, Artificial Sequence
  Synthetic
uacauaucuaagugaaca

SEQ ID NO: 198638 - RNA, 19 nt, Artificial Sequence
  Synthetic
uuacauaucuaagugaaca

SEQ ID NO: 198639 - RNA, 20 nt, Artificial Sequence
  Synthetic
auuacauaucuaagugaaca

SEQ ID NO: 198640 - RNA, 21 nt, Artificial Sequence
  Synthetic
gauuacauaucuaagugaaca

SEQ ID NO: 198641 - RNA, 22 nt, Artificial Sequence
  Synthetic
agauuacauaucuaagugaaca

SEQ ID NO: 198642 - RNA, 23 nt, Artificial Sequence
  Synthetic
uagauuacauaucuaagugaaca

SEQ ID NO: 198643 - RNA, 24 nt, Artificial Sequence
  Synthetic
auagauuacauaucuaagugaaca

SEQ ID NO: 198644 - RNA, 18 nt, Artificial Sequence
  Synthetic
cuaccaucagagugaaca

SEQ ID NO: 198645 - RNA, 19 nt, Artificial Sequence
  Synthetic
acuaccaucagagugaaca

SEQ ID NO: 198646 - RNA, 20 nt, Artificial Sequence
  Synthetic
aacuaccaucagagugaaca

SEQ ID NO: 198647 - RNA, 21 nt, Artificial Sequence
  Synthetic
aaacuaccaucagagugaaca

SEQ ID NO: 198648 - RNA, 22 nt, Artificial Sequence
  Synthetic
gaaacuaccaucagagugaaca

SEQ ID NO: 198649 - RNA, 23 nt, Artificial Sequence
  Synthetic
agaaacuaccaucagagugaaca

SEQ ID NO: 198650 - RNA, 24 nt, Artificial Sequence
  Synthetic
aagaaacuaccaucagagugaaca

SEQ ID NO: 198651 - RNA, 18 nt, Artificial Sequence
  Synthetic
gcugaucugcugugaaca

SEQ ID NO: 198652 - RNA, 19 nt, Artificial Sequence
  Synthetic
agcugaucugcugugaaca

SEQ ID NO: 198653 - RNA, 20 nt, Artificial Sequence
  Synthetic
aagcugaucugcugugaaca

SEQ ID NO: 198654 - RNA, 21 nt, Artificial Sequence
  Synthetic
aaagcugaucugcugugaaca

SEQ ID NO: 198655 - RNA, 22 nt, Artificial Sequence
  Synthetic
gaaagcugaucugcugugaaca

SEQ ID NO: 198656 - RNA, 23 nt, Artificial Sequence
  Synthetic
ugaaagcugaucugcugugaaca

SEQ ID NO: 198657 - RNA, 24 nt, Artificial Sequence
  Synthetic
uugaaagcugaucugcugugaaca

SEQ ID NO: 198658 - RNA, 18 nt, Artificial Sequence
  Synthetic
acaggugggaauugaaca

SEQ ID NO: 198659 - RNA, 19 nt, Artificial Sequence
  Synthetic
cacaggugggaauugaaca

SEQ ID NO: 198660 - RNA, 20 nt, Artificial Sequence
  Synthetic
ucacaggugggaauugaaca

SEQ ID NO: 198661 - RNA, 18 nt, Artificial Sequence
  Synthetic
auaggugggaauugaaca

SEQ ID NO: 198662 - RNA, 19 nt, Artificial Sequence
  Synthetic
cauaggugggaauugaaca

SEQ ID NO: 198663 - RNA, 20 nt, Artificial Sequence
  Synthetic
ucauaggugggaauugaaca

SEQ ID NO: 198664 - RNA, 22 nt, Artificial Sequence
  Synthetic
acucauaggugggaauugaaca

SEQ ID NO: 198665 - RNA, 23 nt, Artificial Sequence
  Synthetic
cacucauaggugggaauugaaca

SEQ ID NO: 198666 - RNA, 24 nt, Artificial Sequence
  Synthetic
ucacucauaggugggaauugaaca

SEQ ID NO: 198667 - RNA, 21 nt, Artificial Sequence
  Synthetic
uucauaggugggaauugaaca

SEQ ID NO: 198668 - RNA, 22 nt, Artificial Sequence
  Synthetic
auucauaggugggaauugaaca

SEQ ID NO: 198669 - RNA, 23 nt, Artificial Sequence
  Synthetic
cauucauaggugggaauugaaca

SEQ ID NO: 198670 - RNA, 24 nt, Artificial Sequence
  Synthetic
ucauucauaggugggaauugaaca

SEQ ID NO: 198671 - RNA, 18 nt, Artificial Sequence
  Synthetic
uggggugggaauugaaca

SEQ ID NO: 198672 - RNA, 19 nt, Artificial Sequence
  Synthetic
guggggugggaauugaaca

SEQ ID NO: 198673 - RNA, 20 nt, Artificial Sequence
  Synthetic
gguggggugggaauugaaca

SEQ ID NO: 198674 - RNA, 21 nt, Artificial Sequence
  Synthetic
agguggggugggaauugaaca

SEQ ID NO: 198675 - RNA, 22 nt, Artificial Sequence
  Synthetic
uagguggggugggaauugaaca

SEQ ID NO: 198676 - RNA, 23 nt, Artificial Sequence
  Synthetic
auagguggggugggaauugaaca

SEQ ID NO: 198677 - RNA, 24 nt, Artificial Sequence
  Synthetic
cauagguggggugggaauugaaca

SEQ ID NO: 198678 - RNA, 18 nt, Artificial Sequence
  Synthetic
gucucucugaauugaaca

SEQ ID NO: 198679 - RNA, 19 nt, Artificial Sequence
  Synthetic
ggucucucugaauugaaca

SEQ ID NO: 198680 - RNA, 20 nt, Artificial Sequence
  Synthetic
uggucucucugaauugaaca

SEQ ID NO: 198681 - RNA, 21 nt, Artificial Sequence
  Synthetic
auggucucucugaauugaaca

SEQ ID NO: 198682 - RNA, 22 nt, Artificial Sequence
  Synthetic
uauggucucucugaauugaaca

SEQ ID NO: 198683 - RNA, 23 nt, Artificial Sequence
  Synthetic
auauggucucucugaauugaaca

SEQ ID NO: 198684 - RNA, 24 nt, Artificial Sequence
  Synthetic
aauauggucucucugaauugaaca

SEQ ID NO: 198685 - RNA, 18 nt, Artificial Sequence
  Synthetic
ugaucaauagauugaaca

SEQ ID NO: 198686 - RNA, 19 nt, Artificial Sequence
  Synthetic
augaucaauagauugaaca

SEQ ID NO: 198687 - RNA, 20 nt, Artificial Sequence
  Synthetic
caugaucaauagauugaaca

SEQ ID NO: 198688 - RNA, 21 nt, Artificial Sequence
  Synthetic
acaugaucaauagauugaaca

SEQ ID NO: 198689 - RNA, 22 nt, Artificial Sequence
  Synthetic
aacaugaucaauagauugaaca

SEQ ID NO: 198690 - RNA, 23 nt, Artificial Sequence
  Synthetic
caacaugaucaauagauugaaca

SEQ ID NO: 198691 - RNA, 24 nt, Artificial Sequence
  Synthetic
ucaacaugaucaauagauugaaca

SEQ ID NO: 198692 - RNA, 18 nt, Artificial Sequence
  Synthetic
guaagugggaguugaaca

SEQ ID NO: 198693 - RNA, 19 nt, Artificial Sequence
  Synthetic
cguaagugggaguugaaca

SEQ ID NO: 198694 - RNA, 20 nt, Artificial Sequence
  Synthetic
ucguaagugggaguugaaca

SEQ ID NO: 198695 - RNA, 21 nt, Artificial Sequence
  Synthetic
cucguaagugggaguugaaca

SEQ ID NO: 198696 - RNA, 22 nt, Artificial Sequence
  Synthetic
acucguaagugggaguugaaca

SEQ ID NO: 198697 - RNA, 23 nt, Artificial Sequence
  Synthetic
cacucguaagugggaguugaaca

SEQ ID NO: 198698 - RNA, 24 nt, Artificial Sequence
  Synthetic
ucacucguaagugggaguugaaca

SEQ ID NO: 198699 - RNA, 18 nt, Artificial Sequence
  Synthetic
gugcuacucuguugaaca

SEQ ID NO: 198700 - RNA, 19 nt, Artificial Sequence
  Synthetic
agugcuacucuguugaaca

SEQ ID NO: 198701 - RNA, 20 nt, Artificial Sequence
  Synthetic
aagugcuacucuguugaaca

SEQ ID NO: 198702 - RNA, 21 nt, Artificial Sequence
  Synthetic
aaagugcuacucuguugaaca

SEQ ID NO: 198703 - RNA, 22 nt, Artificial Sequence
  Synthetic
aaaagugcuacucuguugaaca

SEQ ID NO: 198704 - RNA, 23 nt, Artificial Sequence
  Synthetic
uaaaagugcuacucuguugaaca

SEQ ID NO: 198705 - RNA, 24 nt, Artificial Sequence
  Synthetic
uuaaaagugcuacucuguugaaca

SEQ ID NO: 198706 - RNA, 18 nt, Artificial Sequence
  Synthetic
acaaauggaaaaauaaca

SEQ ID NO: 198707 - RNA, 19 nt, Artificial Sequence
  Synthetic
cacaaauggaaaaauaaca

SEQ ID NO: 198708 - RNA, 20 nt, Artificial Sequence
  Synthetic
gcacaaauggaaaaauaaca

SEQ ID NO: 198709 - RNA, 21 nt, Artificial Sequence
  Synthetic
ugcacaaauggaaaaauaaca

SEQ ID NO: 198710 - RNA, 22 nt, Artificial Sequence
  Synthetic
cugcacaaauggaaaaauaaca

SEQ ID NO: 198711 - RNA, 23 nt, Artificial Sequence
  Synthetic
acugcacaaauggaaaaauaaca

SEQ ID NO: 198712 - RNA, 24 nt, Artificial Sequence
  Synthetic
aacugcacaaauggaaaaauaaca

SEQ ID NO: 198713 - RNA, 18 nt, Artificial Sequence
  Synthetic
caaagauuaaaaauaaca

SEQ ID NO: 198714 - RNA, 19 nt, Artificial Sequence
  Synthetic
ucaaagauuaaaaauaaca

SEQ ID NO: 198715 - RNA, 20 nt, Artificial Sequence
  Synthetic
cucaaagauuaaaaauaaca

SEQ ID NO: 198716 - RNA, 21 nt, Artificial Sequence
  Synthetic
ucucaaagauuaaaaauaaca

SEQ ID NO: 198717 - RNA, 22 nt, Artificial Sequence
  Synthetic
aucucaaagauuaaaaauaaca

SEQ ID NO: 198718 - RNA, 23 nt, Artificial Sequence
  Synthetic
uaucucaaagauuaaaaauaaca

SEQ ID NO: 198719 - RNA, 24 nt, Artificial Sequence
  Synthetic
auaucucaaagauuaaaaauaaca

SEQ ID NO: 198720 - RNA, 18 nt, Artificial Sequence
  Synthetic
aauaagguagaaauaaca

SEQ ID NO: 198721 - RNA, 19 nt, Artificial Sequence
  Synthetic
aaauaagguagaaauaaca

SEQ ID NO: 198722 - RNA, 20 nt, Artificial Sequence
  Synthetic
aaaauaagguagaaauaaca

SEQ ID NO: 198723 - RNA, 21 nt, Artificial Sequence
  Synthetic
aaaaauaagguagaaauaaca

SEQ ID NO: 198724 - RNA, 22 nt, Artificial Sequence
  Synthetic
aaaaaauaagguagaaauaaca

SEQ ID NO: 198725 - RNA, 23 nt, Artificial Sequence
  Synthetic
uaaaaaauaagguagaaauaaca

SEQ ID NO: 198726 - RNA, 24 nt, Artificial Sequence
  Synthetic
auaaaaaauaagguagaaauaaca

SEQ ID NO: 198727 - RNA, 18 nt, Artificial Sequence
  Synthetic
cagcuacaggaaauaaca

SEQ ID NO: 198728 - RNA, 19 nt, Artificial Sequence
  Synthetic
acagcuacaggaaauaaca

SEQ ID NO: 198729 - RNA, 20 nt, Artificial Sequence
  Synthetic
gacagcuacaggaaauaaca

SEQ ID NO: 198730 - RNA, 21 nt, Artificial Sequence
  Synthetic
agacagcuacaggaaauaaca

SEQ ID NO: 198731 - RNA, 22 nt, Artificial Sequence
  Synthetic
cagacagcuacaggaaauaaca

SEQ ID NO: 198732 - RNA, 23 nt, Artificial Sequence
  Synthetic
ccagacagcuacaggaaauaaca

SEQ ID NO: 198733 - RNA, 24 nt, Artificial Sequence
  Synthetic
uccagacagcuacaggaaauaaca

SEQ ID NO: 198734 - RNA, 18 nt, Artificial Sequence
  Synthetic
uagaaaggaacaauaaca

SEQ ID NO: 198735 - RNA, 19 nt, Artificial Sequence
  Synthetic
uuagaaaggaacaauaaca

SEQ ID NO: 198736 - RNA, 20 nt, Artificial Sequence
  Synthetic
uuuagaaaggaacaauaaca

SEQ ID NO: 198737 - RNA, 21 nt, Artificial Sequence
  Synthetic
uuuuagaaaggaacaauaaca

SEQ ID NO: 198738 - RNA, 22 nt, Artificial Sequence
  Synthetic
cuuuuagaaaggaacaauaaca

SEQ ID NO: 198739 - RNA, 23 nt, Artificial Sequence
  Synthetic
ucuuuuagaaaggaacaauaaca

SEQ ID NO: 198740 - RNA, 24 nt, Artificial Sequence
  Synthetic
uucuuuuagaaaggaacaauaaca

SEQ ID NO: 198741 - RNA, 18 nt, Artificial Sequence
  Synthetic
ugugucugaagaauaaca

SEQ ID NO: 198742 - RNA, 19 nt, Artificial Sequence
  Synthetic
augugucugaagaauaaca

SEQ ID NO: 198743 - RNA, 20 nt, Artificial Sequence
  Synthetic
gaugugucugaagaauaaca

SEQ ID NO: 198744 - RNA, 21 nt, Artificial Sequence
  Synthetic
ggaugugucugaagaauaaca

SEQ ID NO: 198745 - RNA, 22 nt, Artificial Sequence
  Synthetic
aggaugugucugaagaauaaca

SEQ ID NO: 198746 - RNA, 23 nt, Artificial Sequence
  Synthetic
aaggaugugucugaagaauaaca

SEQ ID NO: 198747 - RNA, 24 nt, Artificial Sequence
  Synthetic
gaaggaugugucugaagaauaaca

SEQ ID NO: 198748 - RNA, 18 nt, Artificial Sequence
  Synthetic
aaauagaauagaauaaca

SEQ ID NO: 198749 - RNA, 19 nt, Artificial Sequence
  Synthetic
gaaauagaauagaauaaca

SEQ ID NO: 198750 - RNA, 20 nt, Artificial Sequence
  Synthetic
ugaaauagaauagaauaaca

SEQ ID NO: 198751 - RNA, 21 nt, Artificial Sequence
  Synthetic
augaaauagaauagaauaaca

SEQ ID NO: 198752 - RNA, 22 nt, Artificial Sequence
  Synthetic
uaugaaauagaauagaauaaca

SEQ ID NO: 198753 - RNA, 23 nt, Artificial Sequence
  Synthetic
uuaugaaauagaauagaauaaca

SEQ ID NO: 198754 - RNA, 24 nt, Artificial Sequence
  Synthetic
auuaugaaauagaauagaauaaca

SEQ ID NO: 198755 - RNA, 18 nt, Artificial Sequence
  Synthetic
ucucuuucaggaauaaca

SEQ ID NO: 198756 - RNA, 19 nt, Artificial Sequence
  Synthetic
cucucuuucaggaauaaca

SEQ ID NO: 198757 - RNA, 20 nt, Artificial Sequence
  Synthetic
acucucuuucaggaauaaca

SEQ ID NO: 198758 - RNA, 21 nt, Artificial Sequence
  Synthetic
aacucucuuucaggaauaaca

SEQ ID NO: 198759 - RNA, 22 nt, Artificial Sequence
  Synthetic
aaacucucuuucaggaauaaca

SEQ ID NO: 198760 - RNA, 23 nt, Artificial Sequence
  Synthetic
gaaacucucuuucaggaauaaca

SEQ ID NO: 198761 - RNA, 24 nt, Artificial Sequence
  Synthetic
agaaacucucuuucaggaauaaca

SEQ ID NO: 198762 - RNA, 18 nt, Artificial Sequence
  Synthetic
ggaaaaguaggaauaaca

SEQ ID NO: 198763 - RNA, 19 nt, Artificial Sequence
  Synthetic
uggaaaaguaggaauaaca

SEQ ID NO: 198764 - RNA, 20 nt, Artificial Sequence
  Synthetic
auggaaaaguaggaauaaca

SEQ ID NO: 198765 - RNA, 21 nt, Artificial Sequence
  Synthetic
uauggaaaaguaggaauaaca

SEQ ID NO: 198766 - RNA, 22 nt, Artificial Sequence
  Synthetic
auauggaaaaguaggaauaaca

SEQ ID NO: 198767 - RNA, 23 nt, Artificial Sequence
  Synthetic
aauauggaaaaguaggaauaaca

SEQ ID NO: 198768 - RNA, 24 nt, Artificial Sequence
  Synthetic
gaauauggaaaaguaggaauaaca

SEQ ID NO: 198769 - RNA, 18 nt, Artificial Sequence
  Synthetic
ccuuacaguuucauaaca

SEQ ID NO: 198770 - RNA, 19 nt, Artificial Sequence
  Synthetic
gccuuacaguuucauaaca

SEQ ID NO: 198771 - RNA, 20 nt, Artificial Sequence
  Synthetic
cgccuuacaguuucauaaca

SEQ ID NO: 198772 - RNA, 21 nt, Artificial Sequence
  Synthetic
ucgccuuacaguuucauaaca

SEQ ID NO: 198773 - RNA, 22 nt, Artificial Sequence
  Synthetic
cucgccuuacaguuucauaaca

SEQ ID NO: 198774 - RNA, 23 nt, Artificial Sequence
  Synthetic
ccucgccuuacaguuucauaaca

SEQ ID NO: 198775 - RNA, 24 nt, Artificial Sequence
  Synthetic
uccucgccuuacaguuucauaaca

SEQ ID NO: 198776 - RNA, 18 nt, Artificial Sequence
  Synthetic
agaaauuaacagauaaca

SEQ ID NO: 198777 - RNA, 19 nt, Artificial Sequence
  Synthetic
aagaaauuaacagauaaca

SEQ ID NO: 198778 - RNA, 20 nt, Artificial Sequence
  Synthetic
caagaaauuaacagauaaca

SEQ ID NO: 198779 - RNA, 21 nt, Artificial Sequence
  Synthetic
acaagaaauuaacagauaaca

SEQ ID NO: 198780 - RNA, 22 nt, Artificial Sequence
  Synthetic
cacaagaaauuaacagauaaca

SEQ ID NO: 198781 - RNA, 23 nt, Artificial Sequence
  Synthetic
acacaagaaauuaacagauaaca

SEQ ID NO: 198782 - RNA, 24 nt, Artificial Sequence
  Synthetic
gacacaagaaauuaacagauaaca

SEQ ID NO: 198783 - RNA, 18 nt, Artificial Sequence
  Synthetic
uuacacuuagauauaaca

SEQ ID NO: 198784 - RNA, 19 nt, Artificial Sequence
  Synthetic
uuuacacuuagauauaaca

SEQ ID NO: 198785 - RNA, 20 nt, Artificial Sequence
  Synthetic
uuuuacacuuagauauaaca

SEQ ID NO: 198786 - RNA, 21 nt, Artificial Sequence
  Synthetic
auuuuacacuuagauauaaca

SEQ ID NO: 198787 - RNA, 22 nt, Artificial Sequence
  Synthetic
cauuuuacacuuagauauaaca

SEQ ID NO: 198788 - RNA, 23 nt, Artificial Sequence
  Synthetic
gcauuuuacacuuagauauaaca

SEQ ID NO: 198789 - RNA, 24 nt, Artificial Sequence
  Synthetic
ugcauuuuacacuuagauauaaca

SEQ ID NO: 198790 - RNA, 18 nt, Artificial Sequence
  Synthetic
ucagcuuuuauuauaaca

SEQ ID NO: 198791 - RNA, 19 nt, Artificial Sequence
  Synthetic
uucagcuuuuauuauaaca

SEQ ID NO: 198792 - RNA, 20 nt, Artificial Sequence
  Synthetic
auucagcuuuuauuauaaca

SEQ ID NO: 198793 - RNA, 21 nt, Artificial Sequence
  Synthetic
cauucagcuuuuauuauaaca

SEQ ID NO: 198794 - RNA, 22 nt, Artificial Sequence
  Synthetic
ucauucagcuuuuauuauaaca

SEQ ID NO: 198795 - RNA, 23 nt, Artificial Sequence
  Synthetic
cucauucagcuuuuauuauaaca

SEQ ID NO: 198796 - RNA, 24 nt, Artificial Sequence
  Synthetic
ccucauucagcuuuuauuauaaca

SEQ ID NO: 198797 - RNA, 18 nt, Artificial Sequence
  Synthetic
auccucagcaaacuaaca

SEQ ID NO: 198798 - RNA, 19 nt, Artificial Sequence
  Synthetic
cauccucagcaaacuaaca

SEQ ID NO: 198799 - RNA, 20 nt, Artificial Sequence
  Synthetic
ucauccucagcaaacuaaca

SEQ ID NO: 198800 - RNA, 21 nt, Artificial Sequence
  Synthetic
aucauccucagcaaacuaaca

SEQ ID NO: 198801 - RNA, 22 nt, Artificial Sequence
  Synthetic
caucauccucagcaaacuaaca

SEQ ID NO: 198802 - RNA, 23 nt, Artificial Sequence
  Synthetic
ccaucauccucagcaaacuaaca

SEQ ID NO: 198803 - RNA, 24 nt, Artificial Sequence
  Synthetic
gccaucauccucagcaaacuaaca

SEQ ID NO: 198804 - RNA, 19 nt, Artificial Sequence
  Synthetic
uauccucagcaaacuaaca

SEQ ID NO: 198805 - RNA, 20 nt, Artificial Sequence
  Synthetic
uuauccucagcaaacuaaca

SEQ ID NO: 198806 - RNA, 21 nt, Artificial Sequence
  Synthetic
auuauccucagcaaacuaaca

SEQ ID NO: 198807 - RNA, 22 nt, Artificial Sequence
  Synthetic
cauuauccucagcaaacuaaca

SEQ ID NO: 198808 - RNA, 23 nt, Artificial Sequence
  Synthetic
ccauuauccucagcaaacuaaca

SEQ ID NO: 198809 - RNA, 24 nt, Artificial Sequence
  Synthetic
gccauuauccucagcaaacuaaca

SEQ ID NO: 198810 - RNA, 18 nt, Artificial Sequence
  Synthetic
aaucucagcaaacuaaca

SEQ ID NO: 198811 - RNA, 19 nt, Artificial Sequence
  Synthetic
caaucucagcaaacuaaca

SEQ ID NO: 198812 - RNA, 20 nt, Artificial Sequence
  Synthetic
ucaaucucagcaaacuaaca

SEQ ID NO: 198813 - RNA, 21 nt, Artificial Sequence
  Synthetic
aucaaucucagcaaacuaaca

SEQ ID NO: 198814 - RNA, 22 nt, Artificial Sequence
  Synthetic
caucaaucucagcaaacuaaca

SEQ ID NO: 198815 - RNA, 23 nt, Artificial Sequence
  Synthetic
ccaucaaucucagcaaacuaaca

SEQ ID NO: 198816 - RNA, 24 nt, Artificial Sequence
  Synthetic
gccaucaaucucagcaaacuaaca

SEQ ID NO: 198817 - RNA, 18 nt, Artificial Sequence
  Synthetic
auucucagcaaacuaaca

SEQ ID NO: 198818 - RNA, 19 nt, Artificial Sequence
  Synthetic
cauucucagcaaacuaaca

SEQ ID NO: 198819 - RNA, 20 nt, Artificial Sequence
  Synthetic
ucauucucagcaaacuaaca

SEQ ID NO: 198820 - RNA, 21 nt, Artificial Sequence
  Synthetic
aucauucucagcaaacuaaca

SEQ ID NO: 198821 - RNA, 22 nt, Artificial Sequence
  Synthetic
caucauucucagcaaacuaaca

SEQ ID NO: 198822 - RNA, 23 nt, Artificial Sequence
  Synthetic
ccaucauucucagcaaacuaaca

SEQ ID NO: 198823 - RNA, 24 nt, Artificial Sequence
  Synthetic
accaucauucucagcaaacuaaca

SEQ ID NO: 198824 - RNA, 18 nt, Artificial Sequence
  Synthetic
uuugcucuucugcuaaca

SEQ ID NO: 198825 - RNA, 19 nt, Artificial Sequence
  Synthetic
uuuugcucuucugcuaaca

SEQ ID NO: 198826 - RNA, 20 nt, Artificial Sequence
  Synthetic
uuuuugcucuucugcuaaca

SEQ ID NO: 198827 - RNA, 21 nt, Artificial Sequence
  Synthetic
cuuuuugcucuucugcuaaca

SEQ ID NO: 198828 - RNA, 22 nt, Artificial Sequence
  Synthetic
ccuuuuugcucuucugcuaaca

SEQ ID NO: 198829 - RNA, 23 nt, Artificial Sequence
  Synthetic
cccuuuuugcucuucugcuaaca

SEQ ID NO: 198830 - RNA, 24 nt, Artificial Sequence
  Synthetic
ucccuuuuugcucuucugcuaaca

SEQ ID NO: 198831 - RNA, 18 nt, Artificial Sequence
  Synthetic
aguaaggaugaucuaaca

SEQ ID NO: 198832 - RNA, 19 nt, Artificial Sequence
  Synthetic
gaguaaggaugaucuaaca

SEQ ID NO: 198833 - RNA, 20 nt, Artificial Sequence
  Synthetic
ugaguaaggaugaucuaaca

SEQ ID NO: 198834 - RNA, 21 nt, Artificial Sequence
  Synthetic
augaguaaggaugaucuaaca

SEQ ID NO: 198835 - RNA, 22 nt, Artificial Sequence
  Synthetic
gaugaguaaggaugaucuaaca

SEQ ID NO: 198836 - RNA, 23 nt, Artificial Sequence
  Synthetic
ugaugaguaaggaugaucuaaca

SEQ ID NO: 198837 - RNA, 24 nt, Artificial Sequence
  Synthetic
cugaugaguaaggaugaucuaaca

SEQ ID NO: 198838 - RNA, 18 nt, Artificial Sequence
  Synthetic
gaguuucacauucuaaca

SEQ ID NO: 198839 - RNA, 19 nt, Artificial Sequence
  Synthetic
agaguuucacauucuaaca

SEQ ID NO: 198840 - RNA, 20 nt, Artificial Sequence
  Synthetic
cagaguuucacauucuaaca

SEQ ID NO: 198841 - RNA, 21 nt, Artificial Sequence
  Synthetic
ccagaguuucacauucuaaca

SEQ ID NO: 198842 - RNA, 22 nt, Artificial Sequence
  Synthetic
accagaguuucacauucuaaca

SEQ ID NO: 198843 - RNA, 23 nt, Artificial Sequence
  Synthetic
gaccagaguuucacauucuaaca

SEQ ID NO: 198844 - RNA, 24 nt, Artificial Sequence
  Synthetic
ugaccagaguuucacauucuaaca

SEQ ID NO: 198845 - RNA, 18 nt, Artificial Sequence
  Synthetic
gaaaaaaaucaaguaaca

SEQ ID NO: 198846 - RNA, 19 nt, Artificial Sequence
  Synthetic
ugaaaaaaaucaaguaaca

SEQ ID NO: 198847 - RNA, 20 nt, Artificial Sequence
  Synthetic
gugaaaaaaaucaaguaaca

SEQ ID NO: 198848 - RNA, 21 nt, Artificial Sequence
  Synthetic
ugugaaaaaaaucaaguaaca

SEQ ID NO: 198849 - RNA, 22 nt, Artificial Sequence
  Synthetic
uugugaaaaaaaucaaguaaca

SEQ ID NO: 198850 - RNA, 23 nt, Artificial Sequence
  Synthetic
auugugaaaaaaaucaaguaaca

SEQ ID NO: 198851 - RNA, 24 nt, Artificial Sequence
  Synthetic
uauugugaaaaaaaucaaguaaca

SEQ ID NO: 198852 - RNA, 18 nt, Artificial Sequence
  Synthetic
auguguuuuagaguaaca

SEQ ID NO: 198853 - RNA, 19 nt, Artificial Sequence
  Synthetic
cauguguuuuagaguaaca

SEQ ID NO: 198854 - RNA, 20 nt, Artificial Sequence
  Synthetic
gcauguguuuuagaguaaca

SEQ ID NO: 198855 - RNA, 21 nt, Artificial Sequence
  Synthetic
agcauguguuuuagaguaaca

SEQ ID NO: 198856 - RNA, 22 nt, Artificial Sequence
  Synthetic
aagcauguguuuuagaguaaca

SEQ ID NO: 198857 - RNA, 23 nt, Artificial Sequence
  Synthetic
caagcauguguuuuagaguaaca

SEQ ID NO: 198858 - RNA, 24 nt, Artificial Sequence
  Synthetic
gcaagcauguguuuuagaguaaca

SEQ ID NO: 198859 - RNA, 18 nt, Artificial Sequence
  Synthetic
agaugggcaugaguaaca

SEQ ID NO: 198860 - RNA, 19 nt, Artificial Sequence
  Synthetic
aagaugggcaugaguaaca

SEQ ID NO: 198861 - RNA, 20 nt, Artificial Sequence
  Synthetic
gaagaugggcaugaguaaca

SEQ ID NO: 198862 - RNA, 21 nt, Artificial Sequence
  Synthetic
ggaagaugggcaugaguaaca

SEQ ID NO: 198863 - RNA, 22 nt, Artificial Sequence
  Synthetic
gggaagaugggcaugaguaaca

SEQ ID NO: 198864 - RNA, 23 nt, Artificial Sequence
  Synthetic
cgggaagaugggcaugaguaaca

SEQ ID NO: 198865 - RNA, 24 nt, Artificial Sequence
  Synthetic
ucgggaagaugggcaugaguaaca

SEQ ID NO: 198866 - RNA, 18 nt, Artificial Sequence
  Synthetic
caaacauccugaguaaca

SEQ ID NO: 198867 - RNA, 19 nt, Artificial Sequence
  Synthetic
ccaaacauccugaguaaca

SEQ ID NO: 198868 - RNA, 20 nt, Artificial Sequence
  Synthetic
cccaaacauccugaguaaca

SEQ ID NO: 198869 - RNA, 21 nt, Artificial Sequence
  Synthetic
ucccaaacauccugaguaaca

SEQ ID NO: 198870 - RNA, 22 nt, Artificial Sequence
  Synthetic
uucccaaacauccugaguaaca

SEQ ID NO: 198871 - RNA, 23 nt, Artificial Sequence
  Synthetic
uuucccaaacauccugaguaaca

SEQ ID NO: 198872 - RNA, 24 nt, Artificial Sequence
  Synthetic
uuuucccaaacauccugaguaaca

SEQ ID NO: 198873 - RNA, 18 nt, Artificial Sequence
  Synthetic
ggcaugaaaucuguaaca

SEQ ID NO: 198874 - RNA, 19 nt, Artificial Sequence
  Synthetic
uggcaugaaaucuguaaca

SEQ ID NO: 198875 - RNA, 20 nt, Artificial Sequence
  Synthetic
uuggcaugaaaucuguaaca

SEQ ID NO: 198876 - RNA, 21 nt, Artificial Sequence
  Synthetic
uuuggcaugaaaucuguaaca

SEQ ID NO: 198877 - RNA, 22 nt, Artificial Sequence
  Synthetic
uuuuggcaugaaaucuguaaca

SEQ ID NO: 198878 - RNA, 23 nt, Artificial Sequence
  Synthetic
uuuuuggcaugaaaucuguaaca

SEQ ID NO: 198879 - RNA, 24 nt, Artificial Sequence
  Synthetic
uuuuuuggcaugaaaucuguaaca

SEQ ID NO: 198880 - RNA, 18 nt, Artificial Sequence
  Synthetic
aauuguuggcuuguaaca

SEQ ID NO: 198881 - RNA, 19 nt, Artificial Sequence
  Synthetic
aaauuguuggcuuguaaca

SEQ ID NO: 198882 - RNA, 20 nt, Artificial Sequence
  Synthetic
uaaauuguuggcuuguaaca

SEQ ID NO: 198883 - RNA, 21 nt, Artificial Sequence
  Synthetic
auaaauuguuggcuuguaaca

SEQ ID NO: 198884 - RNA, 22 nt, Artificial Sequence
  Synthetic
aauaaauuguuggcuuguaaca

SEQ ID NO: 198885 - RNA, 23 nt, Artificial Sequence
  Synthetic
uaauaaauuguuggcuuguaaca

SEQ ID NO: 198886 - RNA, 24 nt, Artificial Sequence
  Synthetic
cuaauaaauuguuggcuuguaaca

SEQ ID NO: 198887 - RNA, 18 nt, Artificial Sequence
  Synthetic
gaacuaggcaaauuaaca

SEQ ID NO: 198888 - RNA, 19 nt, Artificial Sequence
  Synthetic
agaacuaggcaaauuaaca

SEQ ID NO: 198889 - RNA, 20 nt, Artificial Sequence
  Synthetic
aagaacuaggcaaauuaaca

SEQ ID NO: 198890 - RNA, 21 nt, Artificial Sequence
  Synthetic
aaagaacuaggcaaauuaaca

SEQ ID NO: 198891 - RNA, 22 nt, Artificial Sequence
  Synthetic
aaaagaacuaggcaaauuaaca

SEQ ID NO: 198892 - RNA, 23 nt, Artificial Sequence
  Synthetic
uaaaagaacuaggcaaauuaaca

SEQ ID NO: 198893 - RNA, 24 nt, Artificial Sequence
  Synthetic
guaaaagaacuaggcaaauuaaca

SEQ ID NO: 198894 - RNA, 18 nt, Artificial Sequence
  Synthetic
acucuacagaaauuaaca

SEQ ID NO: 198895 - RNA, 19 nt, Artificial Sequence
  Synthetic
aacucuacagaaauuaaca

SEQ ID NO: 198896 - RNA, 20 nt, Artificial Sequence
  Synthetic
aaacucuacagaaauuaaca

SEQ ID NO: 198897 - RNA, 21 nt, Artificial Sequence
  Synthetic
aaaacucuacagaaauuaaca

SEQ ID NO: 198898 - RNA, 22 nt, Artificial Sequence
  Synthetic
aaaaacucuacagaaauuaaca

SEQ ID NO: 198899 - RNA, 23 nt, Artificial Sequence
  Synthetic
caaaaacucuacagaaauuaaca

SEQ ID NO: 198900 - RNA, 24 nt, Artificial Sequence
  Synthetic
ucaaaaacucuacagaaauuaaca

SEQ ID NO: 198901 - RNA, 18 nt, Artificial Sequence
  Synthetic
uuucuauaacaauuaaca

SEQ ID NO: 198902 - RNA, 19 nt, Artificial Sequence
  Synthetic
cuuucuauaacaauuaaca

SEQ ID NO: 198903 - RNA, 20 nt, Artificial Sequence
  Synthetic
ucuuucuauaacaauuaaca

SEQ ID NO: 198904 - RNA, 21 nt, Artificial Sequence
  Synthetic
cucuuucuauaacaauuaaca

SEQ ID NO: 198905 - RNA, 22 nt, Artificial Sequence
  Synthetic
acucuuucuauaacaauuaaca

SEQ ID NO: 198906 - RNA, 23 nt, Artificial Sequence
  Synthetic
uacucuuucuauaacaauuaaca

SEQ ID NO: 198907 - RNA, 24 nt, Artificial Sequence
  Synthetic
cuacucuuucuauaacaauuaaca

SEQ ID NO: 198908 - RNA, 18 nt, Artificial Sequence
  Synthetic
gugggcaccauauuaaca

SEQ ID NO: 198909 - RNA, 19 nt, Artificial Sequence
  Synthetic
agugggcaccauauuaaca

SEQ ID NO: 198910 - RNA, 20 nt, Artificial Sequence
  Synthetic
cagugggcaccauauuaaca

SEQ ID NO: 198911 - RNA, 21 nt, Artificial Sequence
  Synthetic
acagugggcaccauauuaaca

SEQ ID NO: 198912 - RNA, 22 nt, Artificial Sequence
  Synthetic
aacagugggcaccauauuaaca

SEQ ID NO: 198913 - RNA, 23 nt, Artificial Sequence
  Synthetic
aaacagugggcaccauauuaaca

SEQ ID NO: 198914 - RNA, 24 nt, Artificial Sequence
  Synthetic
aaaacagugggcaccauauuaaca

SEQ ID NO: 198915 - RNA, 18 nt, Artificial Sequence
  Synthetic
ucuguauauauauuaaca

SEQ ID NO: 198916 - RNA, 19 nt, Artificial Sequence
  Synthetic
uucuguauauauauuaaca

SEQ ID NO: 198917 - RNA, 20 nt, Artificial Sequence
  Synthetic
uuucuguauauauauuaaca

SEQ ID NO: 198918 - RNA, 21 nt, Artificial Sequence
  Synthetic
cuuucuguauauauauuaaca

SEQ ID NO: 198919 - RNA, 22 nt, Artificial Sequence
  Synthetic
ccuuucuguauauauauuaaca

SEQ ID NO: 198920 - RNA, 23 nt, Artificial Sequence
  Synthetic
uccuuucuguauauauauuaaca

SEQ ID NO: 198921 - RNA, 24 nt, Artificial Sequence
  Synthetic
cuccuuucuguauauauauuaaca

SEQ ID NO: 198922 - RNA, 18 nt, Artificial Sequence
  Synthetic
uugucuugccuauuaaca

SEQ ID NO: 198923 - RNA, 19 nt, Artificial Sequence
  Synthetic
auugucuugccuauuaaca

SEQ ID NO: 198924 - RNA, 20 nt, Artificial Sequence
  Synthetic
cauugucuugccuauuaaca

SEQ ID NO: 198925 - RNA, 21 nt, Artificial Sequence
  Synthetic
ccauugucuugccuauuaaca

SEQ ID NO: 198926 - RNA, 22 nt, Artificial Sequence
  Synthetic
cccauugucuugccuauuaaca

SEQ ID NO: 198927 - RNA, 23 nt, Artificial Sequence
  Synthetic
ccccauugucuugccuauuaaca

SEQ ID NO: 198928 - RNA, 24 nt, Artificial Sequence
  Synthetic
uccccauugucuugccuauuaaca

SEQ ID NO: 198929 - RNA, 18 nt, Artificial Sequence
  Synthetic
auaaaauuuuuauuaaca

SEQ ID NO: 198930 - RNA, 19 nt, Artificial Sequence
  Synthetic
uauaaaauuuuuauuaaca

SEQ ID NO: 198931 - RNA, 20 nt, Artificial Sequence
  Synthetic
uuauaaaauuuuuauuaaca

SEQ ID NO: 198932 - RNA, 21 nt, Artificial Sequence
  Synthetic
auuauaaaauuuuuauuaaca

SEQ ID NO: 198933 - RNA, 22 nt, Artificial Sequence
  Synthetic
aauuauaaaauuuuuauuaaca

SEQ ID NO: 198934 - RNA, 23 nt, Artificial Sequence
  Synthetic
aaauuauaaaauuuuuauuaaca

SEQ ID NO: 198935 - RNA, 24 nt, Artificial Sequence
  Synthetic
aaaauuauaaaauuuuuauuaaca

SEQ ID NO: 198936 - RNA, 18 nt, Artificial Sequence
  Synthetic
ggaguaaugggcuuaaca

SEQ ID NO: 198937 - RNA, 19 nt, Artificial Sequence
  Synthetic
gggaguaaugggcuuaaca

SEQ ID NO: 198938 - RNA, 20 nt, Artificial Sequence
  Synthetic
agggaguaaugggcuuaaca

SEQ ID NO: 198939 - RNA, 21 nt, Artificial Sequence
  Synthetic
uagggaguaaugggcuuaaca

SEQ ID NO: 198940 - RNA, 22 nt, Artificial Sequence
  Synthetic
auagggaguaaugggcuuaaca

SEQ ID NO: 198941 - RNA, 23 nt, Artificial Sequence
  Synthetic
cauagggaguaaugggcuuaaca

SEQ ID NO: 198942 - RNA, 24 nt, Artificial Sequence
  Synthetic
gcauagggaguaaugggcuuaaca

SEQ ID NO: 198943 - RNA, 18 nt, Artificial Sequence
  Synthetic
uaauuagaccuguuaaca

SEQ ID NO: 198944 - RNA, 19 nt, Artificial Sequence
  Synthetic
auaauuagaccuguuaaca

SEQ ID NO: 198945 - RNA, 20 nt, Artificial Sequence
  Synthetic
cauaauuagaccuguuaaca

SEQ ID NO: 198946 - RNA, 21 nt, Artificial Sequence
  Synthetic
acauaauuagaccuguuaaca

SEQ ID NO: 198947 - RNA, 22 nt, Artificial Sequence
  Synthetic
uacauaauuagaccuguuaaca

SEQ ID NO: 198948 - RNA, 23 nt, Artificial Sequence
  Synthetic
auacauaauuagaccuguuaaca

SEQ ID NO: 198949 - RNA, 24 nt, Artificial Sequence
  Synthetic
aauacauaauuagaccuguuaaca

SEQ ID NO: 198950 - RNA, 18 nt, Artificial Sequence
  Synthetic
uuaaaauaaaauuuaaca

SEQ ID NO: 198951 - RNA, 19 nt, Artificial Sequence
  Synthetic
cuuaaaauaaaauuuaaca

SEQ ID NO: 198952 - RNA, 20 nt, Artificial Sequence
  Synthetic
ucuuaaaauaaaauuuaaca

SEQ ID NO: 198953 - RNA, 21 nt, Artificial Sequence
  Synthetic
uucuuaaaauaaaauuuaaca

SEQ ID NO: 198954 - RNA, 22 nt, Artificial Sequence
  Synthetic
guucuuaaaauaaaauuuaaca

SEQ ID NO: 198955 - RNA, 23 nt, Artificial Sequence
  Synthetic
aguucuuaaaauaaaauuuaaca

SEQ ID NO: 198956 - RNA, 24 nt, Artificial Sequence
  Synthetic
uaguucuuaaaauaaaauuuaaca

SEQ ID NO: 198957 - RNA, 18 nt, Artificial Sequence
  Synthetic
cuaggauccuauuuaaca

SEQ ID NO: 198958 - RNA, 19 nt, Artificial Sequence
  Synthetic
ucuaggauccuauuuaaca

SEQ ID NO: 198959 - RNA, 20 nt, Artificial Sequence
  Synthetic
cucuaggauccuauuuaaca

SEQ ID NO: 198960 - RNA, 21 nt, Artificial Sequence
  Synthetic
gcucuaggauccuauuuaaca

SEQ ID NO: 198961 - RNA, 22 nt, Artificial Sequence
  Synthetic
ugcucuaggauccuauuuaaca

SEQ ID NO: 198962 - RNA, 23 nt, Artificial Sequence
  Synthetic
cugcucuaggauccuauuuaaca

SEQ ID NO: 198963 - RNA, 24 nt, Artificial Sequence
  Synthetic
gcugcucuaggauccuauuuaaca

SEQ ID NO: 198964 - RNA, 18 nt, Artificial Sequence
  Synthetic
ugagagcuagguuuaaca

SEQ ID NO: 198965 - RNA, 19 nt, Artificial Sequence
  Synthetic
cugagagcuagguuuaaca

SEQ ID NO: 198966 - RNA, 20 nt, Artificial Sequence
  Synthetic
ccugagagcuagguuuaaca

SEQ ID NO: 198967 - RNA, 21 nt, Artificial Sequence
  Synthetic
gccugagagcuagguuuaaca

SEQ ID NO: 198968 - RNA, 22 nt, Artificial Sequence
  Synthetic
agccugagagcuagguuuaaca

SEQ ID NO: 198969 - RNA, 23 nt, Artificial Sequence
  Synthetic
aagccugagagcuagguuuaaca

SEQ ID NO: 198970 - RNA, 24 nt, Artificial Sequence
  Synthetic
aaagccugagagcuagguuuaaca

SEQ ID NO: 198971 - RNA, 18 nt, Artificial Sequence
  Synthetic
uuuguagauauuuuaaca

SEQ ID NO: 198972 - RNA, 19 nt, Artificial Sequence
  Synthetic
auuuguagauauuuuaaca

SEQ ID NO: 198973 - RNA, 20 nt, Artificial Sequence
  Synthetic
aauuuguagauauuuuaaca

SEQ ID NO: 198974 - RNA, 21 nt, Artificial Sequence
  Synthetic
uaauuuguagauauuuuaaca

SEQ ID NO: 198975 - RNA, 22 nt, Artificial Sequence
  Synthetic
auaauuuguagauauuuuaaca

SEQ ID NO: 198976 - RNA, 23 nt, Artificial Sequence
  Synthetic
uauaauuuguagauauuuuaaca

SEQ ID NO: 198977 - RNA, 24 nt, Artificial Sequence
  Synthetic
guauaauuuguagauauuuuaaca

SEQ ID NO: 198978 - RNA, 18 nt, Artificial Sequence
  Synthetic
uuaagugagcuuuuaaca

SEQ ID NO: 198979 - RNA, 19 nt, Artificial Sequence
  Synthetic
uuuaagugagcuuuuaaca

SEQ ID NO: 198980 - RNA, 20 nt, Artificial Sequence
  Synthetic
auuuaagugagcuuuuaaca

SEQ ID NO: 198981 - RNA, 21 nt, Artificial Sequence
  Synthetic
cauuuaagugagcuuuuaaca

SEQ ID NO: 198982 - RNA, 22 nt, Artificial Sequence
  Synthetic
acauuuaagugagcuuuuaaca

SEQ ID NO: 198983 - RNA, 23 nt, Artificial Sequence
  Synthetic
aacauuuaagugagcuuuuaaca

SEQ ID NO: 198984 - RNA, 24 nt, Artificial Sequence
  Synthetic
aaacauuuaagugagcuuuuaaca

SEQ ID NO: 198985 - RNA, 18 nt, Artificial Sequence
  Synthetic
uacuguccaguuuuaaca

SEQ ID NO: 198986 - RNA, 19 nt, Artificial Sequence
  Synthetic
uuacuguccaguuuuaaca

SEQ ID NO: 198987 - RNA, 20 nt, Artificial Sequence
  Synthetic
uuuacuguccaguuuuaaca

SEQ ID NO: 198988 - RNA, 21 nt, Artificial Sequence
  Synthetic
auuuacuguccaguuuuaaca

SEQ ID NO: 198989 - RNA, 22 nt, Artificial Sequence
  Synthetic
uauuuacuguccaguuuuaaca

SEQ ID NO: 198990 - RNA, 23 nt, Artificial Sequence
  Synthetic
uuauuuacuguccaguuuuaaca

SEQ ID NO: 198991 - RNA, 24 nt, Artificial Sequence
  Synthetic
auuauuuacuguccaguuuuaaca

SEQ ID NO: 198992 - RNA, 18 nt, Artificial Sequence
  Synthetic
acuauucugguuuuaaca

SEQ ID NO: 198993 - RNA, 19 nt, Artificial Sequence
  Synthetic
aacuauucugguuuuaaca

SEQ ID NO: 198994 - RNA, 20 nt, Artificial Sequence
  Synthetic
aaacuauucugguuuuaaca

SEQ ID NO: 198995 - RNA, 21 nt, Artificial Sequence
  Synthetic
gaaacuauucugguuuuaaca

SEQ ID NO: 198996 - RNA, 22 nt, Artificial Sequence
  Synthetic
ugaaacuauucugguuuuaaca

SEQ ID NO: 198997 - RNA, 23 nt, Artificial Sequence
  Synthetic
cugaaacuauucugguuuuaaca

SEQ ID NO: 198998 - RNA, 24 nt, Artificial Sequence
  Synthetic
ccugaaacuauucugguuuuaaca

SEQ ID NO: 198999 - RNA, 18 nt, Artificial Sequence
  Synthetic
ucgcuuugauuuuuaaca

SEQ ID NO: 199000 - RNA, 19 nt, Artificial Sequence
  Synthetic
aucgcuuugauuuuuaaca

SEQ ID NO: 199001 - RNA, 20 nt, Artificial Sequence
  Synthetic
uaucgcuuugauuuuuaaca

SEQ ID NO: 199002 - RNA, 21 nt, Artificial Sequence
  Synthetic
uuaucgcuuugauuuuuaaca

SEQ ID NO: 199003 - RNA, 22 nt, Artificial Sequence
  Synthetic
guuaucgcuuugauuuuuaaca

SEQ ID NO: 199004 - RNA, 23 nt, Artificial Sequence
  Synthetic
aguuaucgcuuugauuuuuaaca

SEQ ID NO: 199005 - RNA, 24 nt, Artificial Sequence
  Synthetic
gaguuaucgcuuugauuuuuaaca

SEQ ID NO: 199006 - RNA, 18 nt, Artificial Sequence
  Synthetic
gagugauagccaaacaca

SEQ ID NO: 199007 - RNA, 19 nt, Artificial Sequence
  Synthetic
ugagugauagccaaacaca

SEQ ID NO: 199008 - RNA, 20 nt, Artificial Sequence
  Synthetic
cugagugauagccaaacaca

SEQ ID NO: 199009 - RNA, 21 nt, Artificial Sequence
  Synthetic
acugagugauagccaaacaca

SEQ ID NO: 199010 - RNA, 22 nt, Artificial Sequence
  Synthetic
cacugagugauagccaaacaca

SEQ ID NO: 199011 - RNA, 23 nt, Artificial Sequence
  Synthetic
ccacugagugauagccaaacaca

SEQ ID NO: 199012 - RNA, 24 nt, Artificial Sequence
  Synthetic
accacugagugauagccaaacaca

SEQ ID NO: 199013 - RNA, 18 nt, Artificial Sequence
  Synthetic
acaugaaaaggaaacaca

SEQ ID NO: 199014 - RNA, 19 nt, Artificial Sequence
  Synthetic
aacaugaaaaggaaacaca

SEQ ID NO: 199015 - RNA, 20 nt, Artificial Sequence
  Synthetic
uaacaugaaaaggaaacaca

SEQ ID NO: 199016 - RNA, 21 nt, Artificial Sequence
  Synthetic
auaacaugaaaaggaaacaca

SEQ ID NO: 199017 - RNA, 22 nt, Artificial Sequence
  Synthetic
cauaacaugaaaaggaaacaca

SEQ ID NO: 199018 - RNA, 23 nt, Artificial Sequence
  Synthetic
ccauaacaugaaaaggaaacaca

SEQ ID NO: 199019 - RNA, 24 nt, Artificial Sequence
  Synthetic
cccauaacaugaaaaggaaacaca

SEQ ID NO: 199020 - RNA, 18 nt, Artificial Sequence
  Synthetic
augagucuaggaaacaca

SEQ ID NO: 199021 - RNA, 19 nt, Artificial Sequence
  Synthetic
aaugagucuaggaaacaca

SEQ ID NO: 199022 - RNA, 20 nt, Artificial Sequence
  Synthetic
caaugagucuaggaaacaca

SEQ ID NO: 199023 - RNA, 21 nt, Artificial Sequence
  Synthetic
ucaaugagucuaggaaacaca

SEQ ID NO: 199024 - RNA, 22 nt, Artificial Sequence
  Synthetic
uucaaugagucuaggaaacaca

SEQ ID NO: 199025 - RNA, 23 nt, Artificial Sequence
  Synthetic
uuucaaugagucuaggaaacaca

SEQ ID NO: 199026 - RNA, 24 nt, Artificial Sequence
  Synthetic
uuuucaaugagucuaggaaacaca

SEQ ID NO: 199027 - RNA, 18 nt, Artificial Sequence
  Synthetic
aaaaugaaaauaaacaca

SEQ ID NO: 199028 - RNA, 19 nt, Artificial Sequence
  Synthetic
aaaaaugaaaauaaacaca

SEQ ID NO: 199029 - RNA, 20 nt, Artificial Sequence
  Synthetic
uaaaaaugaaaauaaacaca

SEQ ID NO: 199030 - RNA, 21 nt, Artificial Sequence
  Synthetic
uuaaaaaugaaaauaaacaca

SEQ ID NO: 199031 - RNA, 22 nt, Artificial Sequence
  Synthetic
guuaaaaaugaaaauaaacaca

SEQ ID NO: 199032 - RNA, 23 nt, Artificial Sequence
  Synthetic
gguuaaaaaugaaaauaaacaca

SEQ ID NO: 199033 - RNA, 24 nt, Artificial Sequence
  Synthetic
ugguuaaaaaugaaaauaaacaca

SEQ ID NO: 199034 - RNA, 18 nt, Artificial Sequence
  Synthetic
aaaaauuuuuuaaacaca

SEQ ID NO: 199035 - RNA, 19 nt, Artificial Sequence
  Synthetic
gaaaaauuuuuuaaacaca

SEQ ID NO: 199036 - RNA, 20 nt, Artificial Sequence
  Synthetic
agaaaaauuuuuuaaacaca

SEQ ID NO: 199037 - RNA, 21 nt, Artificial Sequence
  Synthetic
aagaaaaauuuuuuaaacaca

SEQ ID NO: 199038 - RNA, 22 nt, Artificial Sequence
  Synthetic
aaagaaaaauuuuuuaaacaca

SEQ ID NO: 199039 - RNA, 23 nt, Artificial Sequence
  Synthetic
caaagaaaaauuuuuuaaacaca

SEQ ID NO: 199040 - RNA, 24 nt, Artificial Sequence
  Synthetic
gcaaagaaaaauuuuuuaaacaca

SEQ ID NO: 199041 - RNA, 18 nt, Artificial Sequence
  Synthetic
ggcgcugagcccaacaca

SEQ ID NO: 199042 - RNA, 19 nt, Artificial Sequence
  Synthetic
gggcgcugagcccaacaca

SEQ ID NO: 199043 - RNA, 20 nt, Artificial Sequence
  Synthetic
ggggcgcugagcccaacaca

SEQ ID NO: 199044 - RNA, 21 nt, Artificial Sequence
  Synthetic
aggggcgcugagcccaacaca

SEQ ID NO: 199045 - RNA, 22 nt, Artificial Sequence
  Synthetic
uaggggcgcugagcccaacaca

SEQ ID NO: 199046 - RNA, 23 nt, Artificial Sequence
  Synthetic
uuaggggcgcugagcccaacaca

SEQ ID NO: 199047 - RNA, 24 nt, Artificial Sequence
  Synthetic
guuaggggcgcugagcccaacaca

SEQ ID NO: 199048 - RNA, 18 nt, Artificial Sequence
  Synthetic
accagccugggcaacaca

SEQ ID NO: 199049 - RNA, 19 nt, Artificial Sequence
  Synthetic
aaccagccugggcaacaca

SEQ ID NO: 199050 - RNA, 20 nt, Artificial Sequence
  Synthetic
aaaccagccugggcaacaca

SEQ ID NO: 199051 - RNA, 21 nt, Artificial Sequence
  Synthetic
aaaaccagccugggcaacaca

SEQ ID NO: 199052 - RNA, 22 nt, Artificial Sequence
  Synthetic
caaaaccagccugggcaacaca

SEQ ID NO: 199053 - RNA, 23 nt, Artificial Sequence
  Synthetic
ucaaaaccagccugggcaacaca

SEQ ID NO: 199054 - RNA, 24 nt, Artificial Sequence
  Synthetic
uucaaaaccagccugggcaacaca

SEQ ID NO: 199055 - RNA, 18 nt, Artificial Sequence
  Synthetic
cuuuuucuauucaacaca

SEQ ID NO: 199056 - RNA, 19 nt, Artificial Sequence
  Synthetic
ccuuuuucuauucaacaca

SEQ ID NO: 199057 - RNA, 20 nt, Artificial Sequence
  Synthetic
cccuuuuucuauucaacaca

SEQ ID NO: 199058 - RNA, 21 nt, Artificial Sequence
  Synthetic
ucccuuuuucuauucaacaca

SEQ ID NO: 199059 - RNA, 22 nt, Artificial Sequence
  Synthetic
aucccuuuuucuauucaacaca

SEQ ID NO: 199060 - RNA, 23 nt, Artificial Sequence
  Synthetic
uaucccuuuuucuauucaacaca

SEQ ID NO: 199061 - RNA, 24 nt, Artificial Sequence
  Synthetic
uuaucccuuuuucuauucaacaca

SEQ ID NO: 199062 - RNA, 18 nt, Artificial Sequence
  Synthetic
aaucuuuuuuucaacaca

SEQ ID NO: 199063 - RNA, 19 nt, Artificial Sequence
  Synthetic
uaaucuuuuuuucaacaca

SEQ ID NO: 199064 - RNA, 20 nt, Artificial Sequence
  Synthetic
uuaaucuuuuuuucaacaca

SEQ ID NO: 199065 - RNA, 21 nt, Artificial Sequence
  Synthetic
cuuaaucuuuuuuucaacaca

SEQ ID NO: 199066 - RNA, 22 nt, Artificial Sequence
  Synthetic
ucuuaaucuuuuuuucaacaca

SEQ ID NO: 199067 - RNA, 23 nt, Artificial Sequence
  Synthetic
aucuuaaucuuuuuuucaacaca

SEQ ID NO: 199068 - RNA, 24 nt, Artificial Sequence
  Synthetic
caucuuaaucuuuuuuucaacaca

SEQ ID NO: 199069 - RNA, 18 nt, Artificial Sequence
  Synthetic
uugaacgaugagaacaca

SEQ ID NO: 199070 - RNA, 19 nt, Artificial Sequence
  Synthetic
guugaacgaugagaacaca

SEQ ID NO: 199071 - RNA, 20 nt, Artificial Sequence
  Synthetic
aguugaacgaugagaacaca

SEQ ID NO: 199072 - RNA, 21 nt, Artificial Sequence
  Synthetic
gaguugaacgaugagaacaca

SEQ ID NO: 199073 - RNA, 22 nt, Artificial Sequence
  Synthetic
ggaguugaacgaugagaacaca

SEQ ID NO: 199074 - RNA, 23 nt, Artificial Sequence
  Synthetic
gggaguugaacgaugagaacaca

SEQ ID NO: 199075 - RNA, 24 nt, Artificial Sequence
  Synthetic
ugggaguugaacgaugagaacaca

SEQ ID NO: 199076 - RNA, 18 nt, Artificial Sequence
  Synthetic
uggcuuacuuagaacaca

SEQ ID NO: 199077 - RNA, 19 nt, Artificial Sequence
  Synthetic
uuggcuuacuuagaacaca

SEQ ID NO: 199078 - RNA, 20 nt, Artificial Sequence
  Synthetic
guuggcuuacuuagaacaca

SEQ ID NO: 199079 - RNA, 21 nt, Artificial Sequence
  Synthetic
gguuggcuuacuuagaacaca

SEQ ID NO: 199080 - RNA, 22 nt, Artificial Sequence
  Synthetic
ggguuggcuuacuuagaacaca

SEQ ID NO: 199081 - RNA, 23 nt, Artificial Sequence
  Synthetic
aggguuggcuuacuuagaacaca

SEQ ID NO: 199082 - RNA, 24 nt, Artificial Sequence
  Synthetic
aaggguuggcuuacuuagaacaca

SEQ ID NO: 199083 - RNA, 18 nt, Artificial Sequence
  Synthetic
auaauguuuuagaacaca

SEQ ID NO: 199084 - RNA, 19 nt, Artificial Sequence
  Synthetic
uauaauguuuuagaacaca

SEQ ID NO: 199085 - RNA, 20 nt, Artificial Sequence
  Synthetic
uuauaauguuuuagaacaca

SEQ ID NO: 199086 - RNA, 21 nt, Artificial Sequence
  Synthetic
auuauaauguuuuagaacaca

SEQ ID NO: 199087 - RNA, 22 nt, Artificial Sequence
  Synthetic
uauuauaauguuuuagaacaca

SEQ ID NO: 199088 - RNA, 23 nt, Artificial Sequence
  Synthetic
guauuauaauguuuuagaacaca

SEQ ID NO: 199089 - RNA, 24 nt, Artificial Sequence
  Synthetic
aguauuauaauguuuuagaacaca

SEQ ID NO: 199090 - RNA, 18 nt, Artificial Sequence
  Synthetic
ggucccucccauaacaca

SEQ ID NO: 199091 - RNA, 19 nt, Artificial Sequence
  Synthetic
gggucccucccauaacaca

SEQ ID NO: 199092 - RNA, 20 nt, Artificial Sequence
  Synthetic
ugggucccucccauaacaca

SEQ ID NO: 199093 - RNA, 21 nt, Artificial Sequence
  Synthetic
cugggucccucccauaacaca

SEQ ID NO: 199094 - RNA, 22 nt, Artificial Sequence
  Synthetic
acugggucccucccauaacaca

SEQ ID NO: 199095 - RNA, 23 nt, Artificial Sequence
  Synthetic
cacugggucccucccauaacaca

SEQ ID NO: 199096 - RNA, 24 nt, Artificial Sequence
  Synthetic
ccacugggucccucccauaacaca

SEQ ID NO: 199097 - RNA, 18 nt, Artificial Sequence
  Synthetic
accauccuggcuaacaca

SEQ ID NO: 199098 - RNA, 19 nt, Artificial Sequence
  Synthetic
gaccauccuggcuaacaca

SEQ ID NO: 199099 - RNA, 20 nt, Artificial Sequence
  Synthetic
agaccauccuggcuaacaca

SEQ ID NO: 199100 - RNA, 18 nt, Artificial Sequence
  Synthetic
accagccuggguaacaca

SEQ ID NO: 199101 - RNA, 19 nt, Artificial Sequence
  Synthetic
gaccagccuggguaacaca

SEQ ID NO: 199102 - RNA, 20 nt, Artificial Sequence
  Synthetic
agaccagccuggguaacaca

SEQ ID NO: 199103 - RNA, 21 nt, Artificial Sequence
  Synthetic
aagaccagccuggguaacaca

SEQ ID NO: 199104 - RNA, 22 nt, Artificial Sequence
  Synthetic
caagaccagccuggguaacaca

SEQ ID NO: 199105 - RNA, 23 nt, Artificial Sequence
  Synthetic
ccaagaccagccuggguaacaca

SEQ ID NO: 199106 - RNA, 24 nt, Artificial Sequence
  Synthetic
uccaagaccagccuggguaacaca

SEQ ID NO: 199107 - RNA, 18 nt, Artificial Sequence
  Synthetic
uggauuguuuguaacaca

SEQ ID NO: 199108 - RNA, 19 nt, Artificial Sequence
  Synthetic
uuggauuguuuguaacaca

SEQ ID NO: 199109 - RNA, 20 nt, Artificial Sequence
  Synthetic
auuggauuguuuguaacaca

SEQ ID NO: 199110 - RNA, 21 nt, Artificial Sequence
  Synthetic
gauuggauuguuuguaacaca

SEQ ID NO: 199111 - RNA, 22 nt, Artificial Sequence
  Synthetic
ugauuggauuguuuguaacaca

SEQ ID NO: 199112 - RNA, 23 nt, Artificial Sequence
  Synthetic
gugauuggauuguuuguaacaca

SEQ ID NO: 199113 - RNA, 24 nt, Artificial Sequence
  Synthetic
ugugauuggauuguuuguaacaca

SEQ ID NO: 199114 - RNA, 18 nt, Artificial Sequence
  Synthetic
uauaugauuguuaacaca

SEQ ID NO: 199115 - RNA, 19 nt, Artificial Sequence
  Synthetic
uuauaugauuguuaacaca

SEQ ID NO: 199116 - RNA, 20 nt, Artificial Sequence
  Synthetic
auuauaugauuguuaacaca

SEQ ID NO: 199117 - RNA, 21 nt, Artificial Sequence
  Synthetic
gauuauaugauuguuaacaca

SEQ ID NO: 199118 - RNA, 22 nt, Artificial Sequence
  Synthetic
ugauuauaugauuguuaacaca

SEQ ID NO: 199119 - RNA, 23 nt, Artificial Sequence
  Synthetic
gugauuauaugauuguuaacaca

SEQ ID NO: 199120 - RNA, 24 nt, Artificial Sequence
  Synthetic
cgugauuauaugauuguuaacaca

SEQ ID NO: 199121 - RNA, 18 nt, Artificial Sequence
  Synthetic
uuacauugauuuaacaca

SEQ ID NO: 199122 - RNA, 19 nt, Artificial Sequence
  Synthetic
auuacauugauuuaacaca

SEQ ID NO: 199123 - RNA, 20 nt, Artificial Sequence
  Synthetic
gauuacauugauuuaacaca

SEQ ID NO: 199124 - RNA, 21 nt, Artificial Sequence
  Synthetic
ggauuacauugauuuaacaca

SEQ ID NO: 199125 - RNA, 22 nt, Artificial Sequence
  Synthetic
gggauuacauugauuuaacaca

SEQ ID NO: 199126 - RNA, 23 nt, Artificial Sequence
  Synthetic
ugggauuacauugauuuaacaca

SEQ ID NO: 199127 - RNA, 24 nt, Artificial Sequence
  Synthetic
cugggauuacauugauuuaacaca

SEQ ID NO: 199128 - RNA, 18 nt, Artificial Sequence
  Synthetic
accacauacaaacacaca

SEQ ID NO: 199129 - RNA, 19 nt, Artificial Sequence
  Synthetic
uaccacauacaaacacaca

SEQ ID NO: 199130 - RNA, 20 nt, Artificial Sequence
  Synthetic
uuaccacauacaaacacaca

SEQ ID NO: 199131 - RNA, 21 nt, Artificial Sequence
  Synthetic
cuuaccacauacaaacacaca

SEQ ID NO: 199132 - RNA, 22 nt, Artificial Sequence
  Synthetic
ucuuaccacauacaaacacaca

SEQ ID NO: 199133 - RNA, 23 nt, Artificial Sequence
  Synthetic
uucuuaccacauacaaacacaca

SEQ ID NO: 199134 - RNA, 24 nt, Artificial Sequence
  Synthetic
uuucuuaccacauacaaacacaca

SEQ ID NO: 199135 - RNA, 18 nt, Artificial Sequence
  Synthetic
acaggggaacaacacaca

SEQ ID NO: 199136 - RNA, 19 nt, Artificial Sequence
  Synthetic
uacaggggaacaacacaca

SEQ ID NO: 199137 - RNA, 20 nt, Artificial Sequence
  Synthetic
auacaggggaacaacacaca

SEQ ID NO: 199138 - RNA, 21 nt, Artificial Sequence
  Synthetic
cauacaggggaacaacacaca

SEQ ID NO: 199139 - RNA, 22 nt, Artificial Sequence
  Synthetic
acauacaggggaacaacacaca

SEQ ID NO: 199140 - RNA, 23 nt, Artificial Sequence
  Synthetic
cacauacaggggaacaacacaca

SEQ ID NO: 199141 - RNA, 24 nt, Artificial Sequence
  Synthetic
acacauacaggggaacaacacaca

SEQ ID NO: 199142 - RNA, 18 nt, Artificial Sequence
  Synthetic
ggaggggaacaacacaca

SEQ ID NO: 199143 - RNA, 19 nt, Artificial Sequence
  Synthetic
uggaggggaacaacacaca

SEQ ID NO: 199144 - RNA, 20 nt, Artificial Sequence
  Synthetic
auggaggggaacaacacaca

SEQ ID NO: 199145 - RNA, 21 nt, Artificial Sequence
  Synthetic
cauggaggggaacaacacaca

SEQ ID NO: 199146 - RNA, 22 nt, Artificial Sequence
  Synthetic
ucauggaggggaacaacacaca

SEQ ID NO: 199147 - RNA, 23 nt, Artificial Sequence
  Synthetic
cucauggaggggaacaacacaca

SEQ ID NO: 199148 - RNA, 24 nt, Artificial Sequence
  Synthetic
acucauggaggggaacaacacaca

SEQ ID NO: 199149 - RNA, 18 nt, Artificial Sequence
  Synthetic
aagaaguuggaacacaca

SEQ ID NO: 199150 - RNA, 19 nt, Artificial Sequence
  Synthetic
caagaaguuggaacacaca

SEQ ID NO: 199151 - RNA, 20 nt, Artificial Sequence
  Synthetic
gcaagaaguuggaacacaca

SEQ ID NO: 199152 - RNA, 21 nt, Artificial Sequence
  Synthetic
ggcaagaaguuggaacacaca

SEQ ID NO: 199153 - RNA, 22 nt, Artificial Sequence
  Synthetic
aggcaagaaguuggaacacaca

SEQ ID NO: 199154 - RNA, 23 nt, Artificial Sequence
  Synthetic
gaggcaagaaguuggaacacaca

SEQ ID NO: 199155 - RNA, 24 nt, Artificial Sequence
  Synthetic
agaggcaagaaguuggaacacaca

SEQ ID NO: 199156 - RNA, 18 nt, Artificial Sequence
  Synthetic
agaggggaauaacacaca

SEQ ID NO: 199157 - RNA, 19 nt, Artificial Sequence
  Synthetic
aagaggggaauaacacaca

SEQ ID NO: 199158 - RNA, 20 nt, Artificial Sequence
  Synthetic
aaagaggggaauaacacaca

SEQ ID NO: 199159 - RNA, 21 nt, Artificial Sequence
  Synthetic
caaagaggggaauaacacaca

SEQ ID NO: 199160 - RNA, 22 nt, Artificial Sequence
  Synthetic
acaaagaggggaauaacacaca

SEQ ID NO: 199161 - RNA, 23 nt, Artificial Sequence
  Synthetic
cacaaagaggggaauaacacaca

SEQ ID NO: 199162 - RNA, 24 nt, Artificial Sequence
  Synthetic
acacaaagaggggaauaacacaca

SEQ ID NO: 199163 - RNA, 18 nt, Artificial Sequence
  Synthetic
cacacagacacacacaca

SEQ ID NO: 199164 - RNA, 19 nt, Artificial Sequence
  Synthetic
acacacagacacacacaca

SEQ ID NO: 199165 - RNA, 20 nt, Artificial Sequence
  Synthetic
cacacacagacacacacaca

SEQ ID NO: 199166 - RNA, 21 nt, Artificial Sequence
  Synthetic
acacacacagacacacacaca

SEQ ID NO: 199167 - RNA, 22 nt, Artificial Sequence
  Synthetic
cacacacacagacacacacaca

SEQ ID NO: 199168 - RNA, 23 nt, Artificial Sequence
  Synthetic
acacacacacagacacacacaca

SEQ ID NO: 199169 - RNA, 24 nt, Artificial Sequence
  Synthetic
cacacacacacagacacacacaca

SEQ ID NO: 199170 - RNA, 18 nt, Artificial Sequence
  Synthetic
cacacaugcacacacaca

SEQ ID NO: 199171 - RNA, 19 nt, Artificial Sequence
  Synthetic
ucacacaugcacacacaca

SEQ ID NO: 199172 - RNA, 20 nt, Artificial Sequence
  Synthetic
uucacacaugcacacacaca

SEQ ID NO: 199173 - RNA, 21 nt, Artificial Sequence
  Synthetic
cuucacacaugcacacacaca

SEQ ID NO: 199174 - RNA, 22 nt, Artificial Sequence
  Synthetic
ucuucacacaugcacacacaca

SEQ ID NO: 199175 - RNA, 23 nt, Artificial Sequence
  Synthetic
uucuucacacaugcacacacaca

SEQ ID NO: 199176 - RNA, 24 nt, Artificial Sequence
  Synthetic
auucuucacacaugcacacacaca

SEQ ID NO: 199177 - RNA, 18 nt, Artificial Sequence
  Synthetic
agcuaggauagacacaca

SEQ ID NO: 199178 - RNA, 19 nt, Artificial Sequence
  Synthetic
aagcuaggauagacacaca

SEQ ID NO: 199179 - RNA, 20 nt, Artificial Sequence
  Synthetic
gaagcuaggauagacacaca

SEQ ID NO: 199180 - RNA, 21 nt, Artificial Sequence
  Synthetic
agaagcuaggauagacacaca

SEQ ID NO: 199181 - RNA, 22 nt, Artificial Sequence
  Synthetic
uagaagcuaggauagacacaca

SEQ ID NO: 199182 - RNA, 23 nt, Artificial Sequence
  Synthetic
uuagaagcuaggauagacacaca

SEQ ID NO: 199183 - RNA, 24 nt, Artificial Sequence
  Synthetic
cuuagaagcuaggauagacacaca

SEQ ID NO: 199184 - RNA, 18 nt, Artificial Sequence
  Synthetic
auuucaaaaauacacaca

SEQ ID NO: 199185 - RNA, 19 nt, Artificial Sequence
  Synthetic
cauuucaaaaauacacaca

SEQ ID NO: 199186 - RNA, 20 nt, Artificial Sequence
  Synthetic
acauuucaaaaauacacaca

SEQ ID NO: 199187 - RNA, 21 nt, Artificial Sequence
  Synthetic
aacauuucaaaaauacacaca

SEQ ID NO: 199188 - RNA, 22 nt, Artificial Sequence
  Synthetic
aaacauuucaaaaauacacaca

SEQ ID NO: 199189 - RNA, 23 nt, Artificial Sequence
  Synthetic
aaaacauuucaaaaauacacaca

SEQ ID NO: 199190 - RNA, 24 nt, Artificial Sequence
  Synthetic
gaaaacauuucaaaaauacacaca

SEQ ID NO: 199191 - RNA, 18 nt, Artificial Sequence
  Synthetic
agcacacagauacacaca

SEQ ID NO: 199192 - RNA, 19 nt, Artificial Sequence
  Synthetic
aagcacacagauacacaca

SEQ ID NO: 199193 - RNA, 20 nt, Artificial Sequence
  Synthetic
caagcacacagauacacaca

SEQ ID NO: 199194 - RNA, 21 nt, Artificial Sequence
  Synthetic
ucaagcacacagauacacaca

SEQ ID NO: 199195 - RNA, 22 nt, Artificial Sequence
  Synthetic
cucaagcacacagauacacaca

SEQ ID NO: 199196 - RNA, 23 nt, Artificial Sequence
  Synthetic
gcucaagcacacagauacacaca

SEQ ID NO: 199197 - RNA, 24 nt, Artificial Sequence
  Synthetic
cgcucaagcacacagauacacaca

SEQ ID NO: 199198 - RNA, 18 nt, Artificial Sequence
  Synthetic
uauauaucuauacacaca

SEQ ID NO: 199199 - RNA, 19 nt, Artificial Sequence
  Synthetic
uuauauaucuauacacaca

SEQ ID NO: 199200 - RNA, 20 nt, Artificial Sequence
  Synthetic
guuauauaucuauacacaca

SEQ ID NO: 199201 - RNA, 21 nt, Artificial Sequence
  Synthetic
aguuauauaucuauacacaca

SEQ ID NO: 199202 - RNA, 22 nt, Artificial Sequence
  Synthetic
caguuauauaucuauacacaca

SEQ ID NO: 199203 - RNA, 23 nt, Artificial Sequence
  Synthetic
acaguuauauaucuauacacaca

SEQ ID NO: 199204 - RNA, 24 nt, Artificial Sequence
  Synthetic
uacaguuauauaucuauacacaca

SEQ ID NO: 199205 - RNA, 18 nt, Artificial Sequence
  Synthetic
ugauauuugcuacacaca

SEQ ID NO: 199206 - RNA, 19 nt, Artificial Sequence
  Synthetic
cugauauuugcuacacaca

SEQ ID NO: 199207 - RNA, 20 nt, Artificial Sequence
  Synthetic
acugauauuugcuacacaca

SEQ ID NO: 199208 - RNA, 21 nt, Artificial Sequence
  Synthetic
cacugauauuugcuacacaca

SEQ ID NO: 199209 - RNA, 22 nt, Artificial Sequence
  Synthetic
ccacugauauuugcuacacaca

SEQ ID NO: 199210 - RNA, 23 nt, Artificial Sequence
  Synthetic
uccacugauauuugcuacacaca

SEQ ID NO: 199211 - RNA, 24 nt, Artificial Sequence
  Synthetic
uuccacugauauuugcuacacaca

SEQ ID NO: 199212 - RNA, 18 nt, Artificial Sequence
  Synthetic
ccaacucucacccacaca

SEQ ID NO: 199213 - RNA, 19 nt, Artificial Sequence
  Synthetic
cccaacucucacccacaca

SEQ ID NO: 199214 - RNA, 20 nt, Artificial Sequence
  Synthetic
gcccaacucucacccacaca

SEQ ID NO: 199215 - RNA, 21 nt, Artificial Sequence
  Synthetic
ugcccaacucucacccacaca

SEQ ID NO: 199216 - RNA, 22 nt, Artificial Sequence
  Synthetic
uugcccaacucucacccacaca

SEQ ID NO: 199217 - RNA, 23 nt, Artificial Sequence
  Synthetic
uuugcccaacucucacccacaca

SEQ ID NO: 199218 - RNA, 24 nt, Artificial Sequence
  Synthetic
uuuugcccaacucucacccacaca

SEQ ID NO: 199219 - RNA, 18 nt, Artificial Sequence
  Synthetic
gaaagcaugauccacaca

SEQ ID NO: 199220 - RNA, 19 nt, Artificial Sequence
  Synthetic
ugaaagcaugauccacaca

SEQ ID NO: 199221 - RNA, 20 nt, Artificial Sequence
  Synthetic
uugaaagcaugauccacaca

SEQ ID NO: 199222 - RNA, 21 nt, Artificial Sequence
  Synthetic
auugaaagcaugauccacaca

SEQ ID NO: 199223 - RNA, 22 nt, Artificial Sequence
  Synthetic
cauugaaagcaugauccacaca

SEQ ID NO: 199224 - RNA, 23 nt, Artificial Sequence
  Synthetic
gcauugaaagcaugauccacaca

SEQ ID NO: 199225 - RNA, 24 nt, Artificial Sequence
  Synthetic
ggcauugaaagcaugauccacaca

SEQ ID NO: 199226 - RNA, 18 nt, Artificial Sequence
  Synthetic
uugcagggauugcacaca

SEQ ID NO: 199227 - RNA, 19 nt, Artificial Sequence
  Synthetic
cuugcagggauugcacaca

SEQ ID NO: 199228 - RNA, 20 nt, Artificial Sequence
  Synthetic
gcuugcagggauugcacaca

SEQ ID NO: 199229 - RNA, 21 nt, Artificial Sequence
  Synthetic
agcuugcagggauugcacaca

SEQ ID NO: 199230 - RNA, 22 nt, Artificial Sequence
  Synthetic
uagcuugcagggauugcacaca

SEQ ID NO: 199231 - RNA, 23 nt, Artificial Sequence
  Synthetic
cuagcuugcagggauugcacaca

SEQ ID NO: 199232 - RNA, 24 nt, Artificial Sequence
  Synthetic
ucuagcuugcagggauugcacaca

SEQ ID NO: 199233 - RNA, 18 nt, Artificial Sequence
  Synthetic
ggacgggaacaucacaca

SEQ ID NO: 199234 - RNA, 19 nt, Artificial Sequence
  Synthetic
gggacgggaacaucacaca

SEQ ID NO: 199235 - RNA, 20 nt, Artificial Sequence
  Synthetic
agggacgggaacaucacaca

SEQ ID NO: 199236 - RNA, 21 nt, Artificial Sequence
  Synthetic
cagggacgggaacaucacaca

SEQ ID NO: 199237 - RNA, 22 nt, Artificial Sequence
  Synthetic
acagggacgggaacaucacaca

SEQ ID NO: 199238 - RNA, 23 nt, Artificial Sequence
  Synthetic
cacagggacgggaacaucacaca

SEQ ID NO: 199239 - RNA, 24 nt, Artificial Sequence
  Synthetic
acacagggacgggaacaucacaca

SEQ ID NO: 199240 - RNA, 18 nt, Artificial Sequence
  Synthetic
gaaggggaacaucacaca

SEQ ID NO: 199241 - RNA, 19 nt, Artificial Sequence
  Synthetic
ggaaggggaacaucacaca

SEQ ID NO: 199242 - RNA, 20 nt, Artificial Sequence
  Synthetic
aggaaggggaacaucacaca

SEQ ID NO: 199243 - RNA, 18 nt, Artificial Sequence
  Synthetic
ggaggggaacaucacaca

SEQ ID NO: 199244 - RNA, 19 nt, Artificial Sequence
  Synthetic
gggaggggaacaucacaca

SEQ ID NO: 199245 - RNA, 20 nt, Artificial Sequence
  Synthetic
cgggaggggaacaucacaca

SEQ ID NO: 199246 - RNA, 21 nt, Artificial Sequence
  Synthetic
ccgggaggggaacaucacaca

SEQ ID NO: 199247 - RNA, 22 nt, Artificial Sequence
  Synthetic
accgggaggggaacaucacaca

SEQ ID NO: 199248 - RNA, 23 nt, Artificial Sequence
  Synthetic
caccgggaggggaacaucacaca

SEQ ID NO: 199249 - RNA, 24 nt, Artificial Sequence
  Synthetic
acaccgggaggggaacaucacaca

SEQ ID NO: 199250 - RNA, 18 nt, Artificial Sequence
  Synthetic
gagucagagggucacaca

SEQ ID NO: 199251 - RNA, 19 nt, Artificial Sequence
  Synthetic
ggagucagagggucacaca

SEQ ID NO: 199252 - RNA, 20 nt, Artificial Sequence
  Synthetic
uggagucagagggucacaca

SEQ ID NO: 199253 - RNA, 21 nt, Artificial Sequence
  Synthetic
auggagucagagggucacaca

SEQ ID NO: 199254 - RNA, 22 nt, Artificial Sequence
  Synthetic
aauggagucagagggucacaca

SEQ ID NO: 199255 - RNA, 23 nt, Artificial Sequence
  Synthetic
gaauggagucagagggucacaca

SEQ ID NO: 199256 - RNA, 24 nt, Artificial Sequence
  Synthetic
agaauggagucagagggucacaca

SEQ ID NO: 199257 - RNA, 18 nt, Artificial Sequence
  Synthetic
auuugugguugucacaca

SEQ ID NO: 199258 - RNA, 19 nt, Artificial Sequence
  Synthetic
uauuugugguugucacaca

SEQ ID NO: 199259 - RNA, 20 nt, Artificial Sequence
  Synthetic
auauuugugguugucacaca

SEQ ID NO: 199260 - RNA, 21 nt, Artificial Sequence
  Synthetic
gauauuugugguugucacaca

SEQ ID NO: 199261 - RNA, 22 nt, Artificial Sequence
  Synthetic
agauauuugugguugucacaca

SEQ ID NO: 199262 - RNA, 23 nt, Artificial Sequence
  Synthetic
gagauauuugugguugucacaca

SEQ ID NO: 199263 - RNA, 24 nt, Artificial Sequence
  Synthetic
ggagauauuugugguugucacaca

SEQ ID NO: 199264 - RNA, 18 nt, Artificial Sequence
  Synthetic
gucguuuuaauucacaca

SEQ ID NO: 199265 - RNA, 19 nt, Artificial Sequence
  Synthetic
ggucguuuuaauucacaca

SEQ ID NO: 199266 - RNA, 20 nt, Artificial Sequence
  Synthetic
aggucguuuuaauucacaca

SEQ ID NO: 199267 - RNA, 21 nt, Artificial Sequence
  Synthetic
uaggucguuuuaauucacaca

SEQ ID NO: 199268 - RNA, 22 nt, Artificial Sequence
  Synthetic
auaggucguuuuaauucacaca

SEQ ID NO: 199269 - RNA, 23 nt, Artificial Sequence
  Synthetic
uauaggucguuuuaauucacaca

SEQ ID NO: 199270 - RNA, 24 nt, Artificial Sequence
  Synthetic
uuauaggucguuuuaauucacaca

SEQ ID NO: 199271 - RNA, 18 nt, Artificial Sequence
  Synthetic
aaaaacuaaaaagacaca

SEQ ID NO: 199272 - RNA, 19 nt, Artificial Sequence
  Synthetic
caaaaacuaaaaagacaca

SEQ ID NO: 199273 - RNA, 20 nt, Artificial Sequence
  Synthetic
ucaaaaacuaaaaagacaca

SEQ ID NO: 199274 - RNA, 21 nt, Artificial Sequence
  Synthetic
aucaaaaacuaaaaagacaca

SEQ ID NO: 199275 - RNA, 22 nt, Artificial Sequence
  Synthetic
aaucaaaaacuaaaaagacaca

SEQ ID NO: 199276 - RNA, 23 nt, Artificial Sequence
  Synthetic
aaaucaaaaacuaaaaagacaca

SEQ ID NO: 199277 - RNA, 24 nt, Artificial Sequence
  Synthetic
aaaaucaaaaacuaaaaagacaca

SEQ ID NO: 199278 - RNA, 18 nt, Artificial Sequence
  Synthetic
cugaaguauaaagacaca

SEQ ID NO: 199279 - RNA, 19 nt, Artificial Sequence
  Synthetic
acugaaguauaaagacaca

SEQ ID NO: 199280 - RNA, 20 nt, Artificial Sequence
  Synthetic
aacugaaguauaaagacaca

SEQ ID NO: 199281 - RNA, 21 nt, Artificial Sequence
  Synthetic
aaacugaaguauaaagacaca

SEQ ID NO: 199282 - RNA, 22 nt, Artificial Sequence
  Synthetic
uaaacugaaguauaaagacaca

SEQ ID NO: 199283 - RNA, 23 nt, Artificial Sequence
  Synthetic
cuaaacugaaguauaaagacaca

SEQ ID NO: 199284 - RNA, 24 nt, Artificial Sequence
  Synthetic
ucuaaacugaaguauaaagacaca

SEQ ID NO: 199285 - RNA, 18 nt, Artificial Sequence
  Synthetic
ugaaguuuuaaagacaca

SEQ ID NO: 199286 - RNA, 19 nt, Artificial Sequence
  Synthetic
gugaaguuuuaaagacaca

SEQ ID NO: 199287 - RNA, 20 nt, Artificial Sequence
  Synthetic
ugugaaguuuuaaagacaca

SEQ ID NO: 199288 - RNA, 21 nt, Artificial Sequence
  Synthetic
augugaaguuuuaaagacaca

SEQ ID NO: 199289 - RNA, 22 nt, Artificial Sequence
  Synthetic
aaugugaaguuuuaaagacaca

SEQ ID NO: 199290 - RNA, 23 nt, Artificial Sequence
  Synthetic
aaaugugaaguuuuaaagacaca

SEQ ID NO: 199291 - RNA, 24 nt, Artificial Sequence
  Synthetic
uaaaugugaaguuuuaaagacaca

SEQ ID NO: 199292 - RNA, 18 nt, Artificial Sequence
  Synthetic
cuuguagucccagacaca

SEQ ID NO: 199293 - RNA, 19 nt, Artificial Sequence
  Synthetic
gcuuguagucccagacaca

SEQ ID NO: 199294 - RNA, 20 nt, Artificial Sequence
  Synthetic
ugcuuguagucccagacaca

SEQ ID NO: 199295 - RNA, 21 nt, Artificial Sequence
  Synthetic
augcuuguagucccagacaca

SEQ ID NO: 199296 - RNA, 22 nt, Artificial Sequence
  Synthetic
caugcuuguagucccagacaca

SEQ ID NO: 199297 - RNA, 23 nt, Artificial Sequence
  Synthetic
ucaugcuuguagucccagacaca

SEQ ID NO: 199298 - RNA, 24 nt, Artificial Sequence
  Synthetic
cucaugcuuguagucccagacaca

SEQ ID NO: 199299 - RNA, 18 nt, Artificial Sequence
  Synthetic
auguagcugucagacaca

SEQ ID NO: 199300 - RNA, 19 nt, Artificial Sequence
  Synthetic
gauguagcugucagacaca

SEQ ID NO: 199301 - RNA, 20 nt, Artificial Sequence
  Synthetic
cgauguagcugucagacaca

SEQ ID NO: 199302 - RNA, 21 nt, Artificial Sequence
  Synthetic
gcgauguagcugucagacaca

SEQ ID NO: 199303 - RNA, 22 nt, Artificial Sequence
  Synthetic
agcgauguagcugucagacaca

SEQ ID NO: 199304 - RNA, 23 nt, Artificial Sequence
  Synthetic
cagcgauguagcugucagacaca

SEQ ID NO: 199305 - RNA, 24 nt, Artificial Sequence
  Synthetic
acagcgauguagcugucagacaca

SEQ ID NO: 199306 - RNA, 18 nt, Artificial Sequence
  Synthetic
aagaucuuuucagacaca

SEQ ID NO: 199307 - RNA, 19 nt, Artificial Sequence
  Synthetic
aaagaucuuuucagacaca

SEQ ID NO: 199308 - RNA, 20 nt, Artificial Sequence
  Synthetic
uaaagaucuuuucagacaca

SEQ ID NO: 199309 - RNA, 21 nt, Artificial Sequence
  Synthetic
auaaagaucuuuucagacaca

SEQ ID NO: 199310 - RNA, 22 nt, Artificial Sequence
  Synthetic
aauaaagaucuuuucagacaca

SEQ ID NO: 199311 - RNA, 23 nt, Artificial Sequence
  Synthetic
aaauaaagaucuuuucagacaca

SEQ ID NO: 199312 - RNA, 24 nt, Artificial Sequence
  Synthetic
gaaauaaagaucuuuucagacaca

SEQ ID NO: 199313 - RNA, 18 nt, Artificial Sequence
  Synthetic
cacugacgaagagacaca

SEQ ID NO: 199314 - RNA, 19 nt, Artificial Sequence
  Synthetic
gcacugacgaagagacaca

SEQ ID NO: 199315 - RNA, 20 nt, Artificial Sequence
  Synthetic
ggcacugacgaagagacaca

SEQ ID NO: 199316 - RNA, 21 nt, Artificial Sequence
  Synthetic
uggcacugacgaagagacaca

SEQ ID NO: 199317 - RNA, 22 nt, Artificial Sequence
  Synthetic
uuggcacugacgaagagacaca

SEQ ID NO: 199318 - RNA, 23 nt, Artificial Sequence
  Synthetic
cuuggcacugacgaagagacaca

SEQ ID NO: 199319 - RNA, 24 nt, Artificial Sequence
  Synthetic
ucuuggcacugacgaagagacaca

SEQ ID NO: 199320 - RNA, 18 nt, Artificial Sequence
  Synthetic
ugaaaaaggcgagacaca

SEQ ID NO: 199321 - RNA, 19 nt, Artificial Sequence
  Synthetic
augaaaaaggcgagacaca

SEQ ID NO: 199322 - RNA, 20 nt, Artificial Sequence
  Synthetic
aaugaaaaaggcgagacaca

SEQ ID NO: 199323 - RNA, 21 nt, Artificial Sequence
  Synthetic
gaaugaaaaaggcgagacaca

SEQ ID NO: 199324 - RNA, 22 nt, Artificial Sequence
  Synthetic
ugaaugaaaaaggcgagacaca

SEQ ID NO: 199325 - RNA, 23 nt, Artificial Sequence
  Synthetic
uugaaugaaaaaggcgagacaca

SEQ ID NO: 199326 - RNA, 24 nt, Artificial Sequence
  Synthetic
uuugaaugaaaaaggcgagacaca

SEQ ID NO: 199327 - RNA, 18 nt, Artificial Sequence
  Synthetic
caucugcguuuagacaca

SEQ ID NO: 199328 - RNA, 19 nt, Artificial Sequence
  Synthetic
acaucugcguuuagacaca

SEQ ID NO: 199329 - RNA, 20 nt, Artificial Sequence
  Synthetic
aacaucugcguuuagacaca

SEQ ID NO: 199330 - RNA, 21 nt, Artificial Sequence
  Synthetic
aaacaucugcguuuagacaca

SEQ ID NO: 199331 - RNA, 22 nt, Artificial Sequence
  Synthetic
aaaacaucugcguuuagacaca

SEQ ID NO: 199332 - RNA, 23 nt, Artificial Sequence
  Synthetic
uaaaacaucugcguuuagacaca

SEQ ID NO: 199333 - RNA, 24 nt, Artificial Sequence
  Synthetic
guaaaacaucugcguuuagacaca

SEQ ID NO: 199334 - RNA, 18 nt, Artificial Sequence
  Synthetic
ccaccauguaaggacaca

SEQ ID NO: 199335 - RNA, 19 nt, Artificial Sequence
  Synthetic
cccaccauguaaggacaca

SEQ ID NO: 199336 - RNA, 20 nt, Artificial Sequence
  Synthetic
ucccaccauguaaggacaca

SEQ ID NO: 199337 - RNA, 21 nt, Artificial Sequence
  Synthetic
cucccaccauguaaggacaca

SEQ ID NO: 199338 - RNA, 22 nt, Artificial Sequence
  Synthetic
ccucccaccauguaaggacaca

SEQ ID NO: 199339 - RNA, 23 nt, Artificial Sequence
  Synthetic
cccucccaccauguaaggacaca

SEQ ID NO: 199340 - RNA, 24 nt, Artificial Sequence
  Synthetic
gcccucccaccauguaaggacaca

SEQ ID NO: 199341 - RNA, 18 nt, Artificial Sequence
  Synthetic
uuuacaaaugaggacaca

SEQ ID NO: 199342 - RNA, 19 nt, Artificial Sequence
  Synthetic
uuuuacaaaugaggacaca

SEQ ID NO: 199343 - RNA, 20 nt, Artificial Sequence
  Synthetic
auuuuacaaaugaggacaca

SEQ ID NO: 199344 - RNA, 21 nt, Artificial Sequence
  Synthetic
cauuuuacaaaugaggacaca

SEQ ID NO: 199345 - RNA, 22 nt, Artificial Sequence
  Synthetic
acauuuuacaaaugaggacaca

SEQ ID NO: 199346 - RNA, 23 nt, Artificial Sequence
  Synthetic
cacauuuuacaaaugaggacaca

SEQ ID NO: 199347 - RNA, 24 nt, Artificial Sequence
  Synthetic
ccacauuuuacaaaugaggacaca

SEQ ID NO: 199348 - RNA, 18 nt, Artificial Sequence
  Synthetic
ucaguaaaaugggacaca

SEQ ID NO: 199349 - RNA, 19 nt, Artificial Sequence
  Synthetic
aucaguaaaaugggacaca

SEQ ID NO: 199350 - RNA, 20 nt, Artificial Sequence
  Synthetic
aaucaguaaaaugggacaca

SEQ ID NO: 199351 - RNA, 21 nt, Artificial Sequence
  Synthetic
gaaucaguaaaaugggacaca

SEQ ID NO: 199352 - RNA, 22 nt, Artificial Sequence
  Synthetic
agaaucaguaaaaugggacaca

SEQ ID NO: 199353 - RNA, 23 nt, Artificial Sequence
  Synthetic
aagaaucaguaaaaugggacaca

SEQ ID NO: 199354 - RNA, 24 nt, Artificial Sequence
  Synthetic
caagaaucaguaaaaugggacaca

SEQ ID NO: 199355 - RNA, 18 nt, Artificial Sequence
  Synthetic
ugagaacauauggacaca

SEQ ID NO: 199356 - RNA, 19 nt, Artificial Sequence
  Synthetic
augagaacauauggacaca

SEQ ID NO: 199357 - RNA, 20 nt, Artificial Sequence
  Synthetic
gaugagaacauauggacaca

SEQ ID NO: 199358 - RNA, 21 nt, Artificial Sequence
  Synthetic
ugaugagaacauauggacaca

SEQ ID NO: 199359 - RNA, 22 nt, Artificial Sequence
  Synthetic
augaugagaacauauggacaca

SEQ ID NO: 199360 - RNA, 23 nt, Artificial Sequence
  Synthetic
aaugaugagaacauauggacaca

SEQ ID NO: 199361 - RNA, 24 nt, Artificial Sequence
  Synthetic
aaaugaugagaacauauggacaca

SEQ ID NO: 199362 - RNA, 18 nt, Artificial Sequence
  Synthetic
caggauaaauuggacaca

SEQ ID NO: 199363 - RNA, 19 nt, Artificial Sequence
  Synthetic
gcaggauaaauuggacaca

SEQ ID NO: 199364 - RNA, 20 nt, Artificial Sequence
  Synthetic
ggcaggauaaauuggacaca

SEQ ID NO: 199365 - RNA, 21 nt, Artificial Sequence
  Synthetic
uggcaggauaaauuggacaca

SEQ ID NO: 199366 - RNA, 22 nt, Artificial Sequence
  Synthetic
auggcaggauaaauuggacaca

SEQ ID NO: 199367 - RNA, 23 nt, Artificial Sequence
  Synthetic
aauggcaggauaaauuggacaca

SEQ ID NO: 199368 - RNA, 24 nt, Artificial Sequence
  Synthetic
aaauggcaggauaaauuggacaca

SEQ ID NO: 199369 - RNA, 18 nt, Artificial Sequence
  Synthetic
gcacgugugaaugacaca

SEQ ID NO: 199370 - RNA, 19 nt, Artificial Sequence
  Synthetic
ggcacgugugaaugacaca

SEQ ID NO: 199371 - RNA, 20 nt, Artificial Sequence
  Synthetic
aggcacgugugaaugacaca

SEQ ID NO: 199372 - RNA, 21 nt, Artificial Sequence
  Synthetic
caggcacgugugaaugacaca

SEQ ID NO: 199373 - RNA, 22 nt, Artificial Sequence
  Synthetic
acaggcacgugugaaugacaca

SEQ ID NO: 199374 - RNA, 23 nt, Artificial Sequence
  Synthetic
cacaggcacgugugaaugacaca

SEQ ID NO: 199375 - RNA, 24 nt, Artificial Sequence
  Synthetic
ucacaggcacgugugaaugacaca

SEQ ID NO: 199376 - RNA, 18 nt, Artificial Sequence
  Synthetic
ggucccucacaugacaca

SEQ ID NO: 199377 - RNA, 19 nt, Artificial Sequence
  Synthetic
gggucccucacaugacaca

SEQ ID NO: 199378 - RNA, 20 nt, Artificial Sequence
  Synthetic
ugggucccucacaugacaca

SEQ ID NO: 199379 - RNA, 21 nt, Artificial Sequence
  Synthetic
cugggucccucacaugacaca

SEQ ID NO: 199380 - RNA, 22 nt, Artificial Sequence
  Synthetic
acugggucccucacaugacaca

SEQ ID NO: 199381 - RNA, 23 nt, Artificial Sequence
  Synthetic
aacugggucccucacaugacaca

SEQ ID NO: 199382 - RNA, 24 nt, Artificial Sequence
  Synthetic
caacugggucccucacaugacaca

SEQ ID NO: 199383 - RNA, 18 nt, Artificial Sequence
  Synthetic
ggucacucccaugacaca

SEQ ID NO: 199384 - RNA, 19 nt, Artificial Sequence
  Synthetic
aggucacucccaugacaca

SEQ ID NO: 199385 - RNA, 20 nt, Artificial Sequence
  Synthetic
caggucacucccaugacaca

SEQ ID NO: 199386 - RNA, 21 nt, Artificial Sequence
  Synthetic
ccaggucacucccaugacaca

SEQ ID NO: 199387 - RNA, 22 nt, Artificial Sequence
  Synthetic
accaggucacucccaugacaca

SEQ ID NO: 199388 - RNA, 23 nt, Artificial Sequence
  Synthetic
caccaggucacucccaugacaca

SEQ ID NO: 199389 - RNA, 24 nt, Artificial Sequence
  Synthetic
ccaccaggucacucccaugacaca

SEQ ID NO: 199390 - RNA, 18 nt, Artificial Sequence
  Synthetic
uccagccugggugacaca

SEQ ID NO: 199391 - RNA, 19 nt, Artificial Sequence
  Synthetic
cuccagccugggugacaca

SEQ ID NO: 199392 - RNA, 20 nt, Artificial Sequence
  Synthetic
acuccagccugggugacaca

SEQ ID NO: 199393 - RNA, 21 nt, Artificial Sequence
  Synthetic
cacuccagccugggugacaca

SEQ ID NO: 199394 - RNA, 22 nt, Artificial Sequence
  Synthetic
gcacuccagccugggugacaca

SEQ ID NO: 199395 - RNA, 23 nt, Artificial Sequence
  Synthetic
ugcacuccagccugggugacaca

SEQ ID NO: 199396 - RNA, 24 nt, Artificial Sequence
  Synthetic
uugcacuccagccugggugacaca

SEQ ID NO: 199397 - RNA, 18 nt, Artificial Sequence
  Synthetic
uucucucaauuugacaca

SEQ ID NO: 199398 - RNA, 19 nt, Artificial Sequence
  Synthetic
uuucucucaauuugacaca

SEQ ID NO: 199399 - RNA, 20 nt, Artificial Sequence
  Synthetic
uuuucucucaauuugacaca

SEQ ID NO: 199400 - RNA, 21 nt, Artificial Sequence
  Synthetic
auuuucucucaauuugacaca

SEQ ID NO: 199401 - RNA, 22 nt, Artificial Sequence
  Synthetic
uauuuucucucaauuugacaca

SEQ ID NO: 199402 - RNA, 23 nt, Artificial Sequence
  Synthetic
cuauuuucucucaauuugacaca

SEQ ID NO: 199403 - RNA, 24 nt, Artificial Sequence
  Synthetic
ccuauuuucucucaauuugacaca

SEQ ID NO: 199404 - RNA, 18 nt, Artificial Sequence
  Synthetic
acacugugauuugacaca

SEQ ID NO: 199405 - RNA, 19 nt, Artificial Sequence
  Synthetic
uacacugugauuugacaca

SEQ ID NO: 199406 - RNA, 20 nt, Artificial Sequence
  Synthetic
auacacugugauuugacaca

SEQ ID NO: 199407 - RNA, 21 nt, Artificial Sequence
  Synthetic
cauacacugugauuugacaca

SEQ ID NO: 199408 - RNA, 22 nt, Artificial Sequence
  Synthetic
acauacacugugauuugacaca

SEQ ID NO: 199409 - RNA, 23 nt, Artificial Sequence
  Synthetic
aacauacacugugauuugacaca

SEQ ID NO: 199410 - RNA, 24 nt, Artificial Sequence
  Synthetic
uaacauacacugugauuugacaca

SEQ ID NO: 199411 - RNA, 18 nt, Artificial Sequence
  Synthetic
acauuucaaaaauacaca

SEQ ID NO: 199412 - RNA, 19 nt, Artificial Sequence
  Synthetic
aacauuucaaaaauacaca

SEQ ID NO: 199413 - RNA, 20 nt, Artificial Sequence
  Synthetic
aaacauuucaaaaauacaca

SEQ ID NO: 199414 - RNA, 21 nt, Artificial Sequence
  Synthetic
aaaacauuucaaaaauacaca

SEQ ID NO: 199415 - RNA, 22 nt, Artificial Sequence
  Synthetic
gaaaacauuucaaaaauacaca

SEQ ID NO: 199416 - RNA, 23 nt, Artificial Sequence
  Synthetic
agaaaacauuucaaaaauacaca

SEQ ID NO: 199417 - RNA, 24 nt, Artificial Sequence
  Synthetic
uagaaaacauuucaaaaauacaca

SEQ ID NO: 199418 - RNA, 18 nt, Artificial Sequence
  Synthetic
aaugagaauaaauacaca

SEQ ID NO: 199419 - RNA, 19 nt, Artificial Sequence
  Synthetic
caaugagaauaaauacaca

SEQ ID NO: 199420 - RNA, 20 nt, Artificial Sequence
  Synthetic
ccaaugagaauaaauacaca

SEQ ID NO: 199421 - RNA, 21 nt, Artificial Sequence
  Synthetic
accaaugagaauaaauacaca

SEQ ID NO: 199422 - RNA, 22 nt, Artificial Sequence
  Synthetic
aaccaaugagaauaaauacaca

SEQ ID NO: 199423 - RNA, 23 nt, Artificial Sequence
  Synthetic
aaaccaaugagaauaaauacaca

SEQ ID NO: 199424 - RNA, 24 nt, Artificial Sequence
  Synthetic
caaaccaaugagaauaaauacaca

SEQ ID NO: 199425 - RNA, 18 nt, Artificial Sequence
  Synthetic
ggaaaagaggcauacaca

SEQ ID NO: 199426 - RNA, 19 nt, Artificial Sequence
  Synthetic
aggaaaagaggcauacaca

SEQ ID NO: 199427 - RNA, 20 nt, Artificial Sequence
  Synthetic
gaggaaaagaggcauacaca

SEQ ID NO: 199428 - RNA, 21 nt, Artificial Sequence
  Synthetic
agaggaaaagaggcauacaca

SEQ ID NO: 199429 - RNA, 22 nt, Artificial Sequence
  Synthetic
aagaggaaaagaggcauacaca

SEQ ID NO: 199430 - RNA, 23 nt, Artificial Sequence
  Synthetic
gaagaggaaaagaggcauacaca

SEQ ID NO: 199431 - RNA, 24 nt, Artificial Sequence
  Synthetic
agaagaggaaaagaggcauacaca

SEQ ID NO: 199432 - RNA, 18 nt, Artificial Sequence
  Synthetic
caagcacacagauacaca

SEQ ID NO: 199433 - RNA, 19 nt, Artificial Sequence
  Synthetic
ucaagcacacagauacaca

SEQ ID NO: 199434 - RNA, 20 nt, Artificial Sequence
  Synthetic
cucaagcacacagauacaca

SEQ ID NO: 199435 - RNA, 21 nt, Artificial Sequence
  Synthetic
gcucaagcacacagauacaca

SEQ ID NO: 199436 - RNA, 22 nt, Artificial Sequence
  Synthetic
cgcucaagcacacagauacaca

SEQ ID NO: 199437 - RNA, 23 nt, Artificial Sequence
  Synthetic
gcgcucaagcacacagauacaca

SEQ ID NO: 199438 - RNA, 24 nt, Artificial Sequence
  Synthetic
ugcgcucaagcacacagauacaca

SEQ ID NO: 199439 - RNA, 18 nt, Artificial Sequence
  Synthetic
augugguacauauacaca

SEQ ID NO: 199440 - RNA, 19 nt, Artificial Sequence
  Synthetic
aaugugguacauauacaca

SEQ ID NO: 199441 - RNA, 20 nt, Artificial Sequence
  Synthetic
aaaugugguacauauacaca

SEQ ID NO: 199442 - RNA, 21 nt, Artificial Sequence
  Synthetic
aaaaugugguacauauacaca

SEQ ID NO: 199443 - RNA, 22 nt, Artificial Sequence
  Synthetic
gaaaaugugguacauauacaca

SEQ ID NO: 199444 - RNA, 23 nt, Artificial Sequence
  Synthetic
agaaaaugugguacauauacaca

SEQ ID NO: 199445 - RNA, 24 nt, Artificial Sequence
  Synthetic
aagaaaaugugguacauauacaca

SEQ ID NO: 199446 - RNA, 18 nt, Artificial Sequence
  Synthetic
gaauauuuuauauacaca

SEQ ID NO: 199447 - RNA, 19 nt, Artificial Sequence
  Synthetic
ugaauauuuuauauacaca

SEQ ID NO: 199448 - RNA, 20 nt, Artificial Sequence
  Synthetic
augaauauuuuauauacaca

SEQ ID NO: 199449 - RNA, 21 nt, Artificial Sequence
  Synthetic
uaugaauauuuuauauacaca

SEQ ID NO: 199450 - RNA, 22 nt, Artificial Sequence
  Synthetic
cuaugaauauuuuauauacaca

SEQ ID NO: 199451 - RNA, 23 nt, Artificial Sequence
  Synthetic
ucuaugaauauuuuauauacaca

SEQ ID NO: 199452 - RNA, 24 nt, Artificial Sequence
  Synthetic
aucuaugaauauuuuauauacaca

SEQ ID NO: 199453 - RNA, 18 nt, Artificial Sequence
  Synthetic
guuauauaucuauacaca

SEQ ID NO: 199454 - RNA, 19 nt, Artificial Sequence
  Synthetic
aguuauauaucuauacaca

SEQ ID NO: 199455 - RNA, 20 nt, Artificial Sequence
  Synthetic
caguuauauaucuauacaca

SEQ ID NO: 199456 - RNA, 21 nt, Artificial Sequence
  Synthetic
acaguuauauaucuauacaca

SEQ ID NO: 199457 - RNA, 22 nt, Artificial Sequence
  Synthetic
uacaguuauauaucuauacaca

SEQ ID NO: 199458 - RNA, 23 nt, Artificial Sequence
  Synthetic
auacaguuauauaucuauacaca

SEQ ID NO: 199459 - RNA, 24 nt, Artificial Sequence
  Synthetic
uauacaguuauauaucuauacaca

SEQ ID NO: 199460 - RNA, 18 nt, Artificial Sequence
  Synthetic
acaauggaauacuacaca

SEQ ID NO: 199461 - RNA, 19 nt, Artificial Sequence
  Synthetic
cacaauggaauacuacaca

SEQ ID NO: 199462 - RNA, 20 nt, Artificial Sequence
  Synthetic
acacaauggaauacuacaca

SEQ ID NO: 199463 - RNA, 21 nt, Artificial Sequence
  Synthetic
cacacaauggaauacuacaca

SEQ ID NO: 199464 - RNA, 22 nt, Artificial Sequence
  Synthetic
acacacaauggaauacuacaca

SEQ ID NO: 199465 - RNA, 23 nt, Artificial Sequence
  Synthetic
gacacacaauggaauacuacaca

SEQ ID NO: 199466 - RNA, 24 nt, Artificial Sequence
  Synthetic
agacacacaauggaauacuacaca

SEQ ID NO: 199467 - RNA, 18 nt, Artificial Sequence
  Synthetic
uuuuuccaaaccuacaca

SEQ ID NO: 199468 - RNA, 19 nt, Artificial Sequence
  Synthetic
auuuuuccaaaccuacaca

SEQ ID NO: 199469 - RNA, 20 nt, Artificial Sequence
  Synthetic
aauuuuuccaaaccuacaca

SEQ ID NO: 199470 - RNA, 21 nt, Artificial Sequence
  Synthetic
aaauuuuuccaaaccuacaca

SEQ ID NO: 199471 - RNA, 22 nt, Artificial Sequence
  Synthetic
uaaauuuuuccaaaccuacaca

SEQ ID NO: 199472 - RNA, 23 nt, Artificial Sequence
  Synthetic
auaaauuuuuccaaaccuacaca

SEQ ID NO: 199473 - RNA, 24 nt, Artificial Sequence
  Synthetic
cauaaauuuuuccaaaccuacaca

SEQ ID NO: 199474 - RNA, 18 nt, Artificial Sequence
  Synthetic
uguggaguaaauuacaca

SEQ ID NO: 199475 - RNA, 19 nt, Artificial Sequence
  Synthetic
cuguggaguaaauuacaca

SEQ ID NO: 199476 - RNA, 20 nt, Artificial Sequence
  Synthetic
acuguggaguaaauuacaca

SEQ ID NO: 199477 - RNA, 21 nt, Artificial Sequence
  Synthetic
gacuguggaguaaauuacaca

SEQ ID NO: 199478 - RNA, 22 nt, Artificial Sequence
  Synthetic
agacuguggaguaaauuacaca

SEQ ID NO: 199479 - RNA, 23 nt, Artificial Sequence
  Synthetic
aagacuguggaguaaauuacaca

SEQ ID NO: 199480 - RNA, 24 nt, Artificial Sequence
  Synthetic
gaagacuguggaguaaauuacaca

SEQ ID NO: 199481 - RNA, 18 nt, Artificial Sequence
  Synthetic
caauaugaauauuacaca

SEQ ID NO: 199482 - RNA, 19 nt, Artificial Sequence
  Synthetic
acaauaugaauauuacaca

SEQ ID NO: 199483 - RNA, 20 nt, Artificial Sequence
  Synthetic
aacaauaugaauauuacaca

SEQ ID NO: 199484 - RNA, 21 nt, Artificial Sequence
  Synthetic
caacaauaugaauauuacaca

SEQ ID NO: 199485 - RNA, 22 nt, Artificial Sequence
  Synthetic
gcaacaauaugaauauuacaca

SEQ ID NO: 199486 - RNA, 23 nt, Artificial Sequence
  Synthetic
ugcaacaauaugaauauuacaca

SEQ ID NO: 199487 - RNA, 24 nt, Artificial Sequence
  Synthetic
uugcaacaauaugaauauuacaca

SEQ ID NO: 199488 - RNA, 18 nt, Artificial Sequence
  Synthetic
uauauugcuccuuacaca

SEQ ID NO: 199489 - RNA, 19 nt, Artificial Sequence
  Synthetic
cuauauugcuccuuacaca

SEQ ID NO: 199490 - RNA, 20 nt, Artificial Sequence
  Synthetic
gcuauauugcuccuuacaca

SEQ ID NO: 199491 - RNA, 21 nt, Artificial Sequence
  Synthetic
ugcuauauugcuccuuacaca

SEQ ID NO: 199492 - RNA, 22 nt, Artificial Sequence
  Synthetic
cugcuauauugcuccuuacaca

SEQ ID NO: 199493 - RNA, 23 nt, Artificial Sequence
  Synthetic
ucugcuauauugcuccuuacaca

SEQ ID NO: 199494 - RNA, 24 nt, Artificial Sequence
  Synthetic
uucugcuauauugcuccuuacaca

SEQ ID NO: 199495 - RNA, 18 nt, Artificial Sequence
  Synthetic
aaggaucuaauuuacaca

SEQ ID NO: 199496 - RNA, 19 nt, Artificial Sequence
  Synthetic
uaaggaucuaauuuacaca

SEQ ID NO: 199497 - RNA, 20 nt, Artificial Sequence
  Synthetic
guaaggaucuaauuuacaca

SEQ ID NO: 199498 - RNA, 21 nt, Artificial Sequence
  Synthetic
aguaaggaucuaauuuacaca

SEQ ID NO: 199499 - RNA, 22 nt, Artificial Sequence
  Synthetic
uaguaaggaucuaauuuacaca

SEQ ID NO: 199500 - RNA, 23 nt, Artificial Sequence
  Synthetic
uuaguaaggaucuaauuuacaca

SEQ ID NO: 199501 - RNA, 24 nt, Artificial Sequence
  Synthetic
uuuaguaaggaucuaauuuacaca

SEQ ID NO: 199502 - RNA, 18 nt, Artificial Sequence
  Synthetic
ggucauagacuuuacaca

SEQ ID NO: 199503 - RNA, 19 nt, Artificial Sequence
  Synthetic
aggucauagacuuuacaca

SEQ ID NO: 199504 - RNA, 20 nt, Artificial Sequence
  Synthetic
caggucauagacuuuacaca

SEQ ID NO: 199505 - RNA, 21 nt, Artificial Sequence
  Synthetic
gcaggucauagacuuuacaca

SEQ ID NO: 199506 - RNA, 22 nt, Artificial Sequence
  Synthetic
agcaggucauagacuuuacaca

SEQ ID NO: 199507 - RNA, 23 nt, Artificial Sequence
  Synthetic
cagcaggucauagacuuuacaca

SEQ ID NO: 199508 - RNA, 24 nt, Artificial Sequence
  Synthetic
acagcaggucauagacuuuacaca

SEQ ID NO: 199509 - RNA, 18 nt, Artificial Sequence
  Synthetic
auugaaagguuuuacaca

SEQ ID NO: 199510 - RNA, 19 nt, Artificial Sequence
  Synthetic
cauugaaagguuuuacaca

SEQ ID NO: 199511 - RNA, 20 nt, Artificial Sequence
  Synthetic
ccauugaaagguuuuacaca

SEQ ID NO: 199512 - RNA, 21 nt, Artificial Sequence
  Synthetic
accauugaaagguuuuacaca

SEQ ID NO: 199513 - RNA, 22 nt, Artificial Sequence
  Synthetic
aaccauugaaagguuuuacaca

SEQ ID NO: 199514 - RNA, 23 nt, Artificial Sequence
  Synthetic
aaaccauugaaagguuuuacaca

SEQ ID NO: 199515 - RNA, 24 nt, Artificial Sequence
  Synthetic
caaaccauugaaagguuuuacaca

SEQ ID NO: 199516 - RNA, 18 nt, Artificial Sequence
  Synthetic
cuuaguacuuuuuacaca

SEQ ID NO: 199517 - RNA, 19 nt, Artificial Sequence
  Synthetic
ucuuaguacuuuuuacaca

SEQ ID NO: 199518 - RNA, 20 nt, Artificial Sequence
  Synthetic
gucuuaguacuuuuuacaca

SEQ ID NO: 199519 - RNA, 21 nt, Artificial Sequence
  Synthetic
ugucuuaguacuuuuuacaca

SEQ ID NO: 199520 - RNA, 22 nt, Artificial Sequence
  Synthetic
uugucuuaguacuuuuuacaca

SEQ ID NO: 199521 - RNA, 23 nt, Artificial Sequence
  Synthetic
guugucuuaguacuuuuuacaca

SEQ ID NO: 199522 - RNA, 24 nt, Artificial Sequence
  Synthetic
uguugucuuaguacuuuuuacaca

SEQ ID NO: 199523 - RNA, 18 nt, Artificial Sequence
  Synthetic
augcaaaucaaaaccaca

SEQ ID NO: 199524 - RNA, 19 nt, Artificial Sequence
  Synthetic
aaugcaaaucaaaaccaca

SEQ ID NO: 199525 - RNA, 20 nt, Artificial Sequence
  Synthetic
aaaugcaaaucaaaaccaca

SEQ ID NO: 199526 - RNA, 21 nt, Artificial Sequence
  Synthetic
gaaaugcaaaucaaaaccaca

SEQ ID NO: 199527 - RNA, 22 nt, Artificial Sequence
  Synthetic
agaaaugcaaaucaaaaccaca

SEQ ID NO: 199528 - RNA, 23 nt, Artificial Sequence
  Synthetic
gagaaaugcaaaucaaaaccaca

SEQ ID NO: 199529 - RNA, 24 nt, Artificial Sequence
  Synthetic
agagaaaugcaaaucaaaaccaca

SEQ ID NO: 199530 - RNA, 19 nt, Artificial Sequence
  Synthetic
caugcaaaucaaaaccaca

SEQ ID NO: 199531 - RNA, 20 nt, Artificial Sequence
  Synthetic
acaugcaaaucaaaaccaca

SEQ ID NO: 199532 - RNA, 21 nt, Artificial Sequence
  Synthetic
gacaugcaaaucaaaaccaca

SEQ ID NO: 199533 - RNA, 22 nt, Artificial Sequence
  Synthetic
agacaugcaaaucaaaaccaca

SEQ ID NO: 199534 - RNA, 23 nt, Artificial Sequence
  Synthetic
gagacaugcaaaucaaaaccaca

SEQ ID NO: 199535 - RNA, 24 nt, Artificial Sequence
  Synthetic
agagacaugcaaaucaaaaccaca

SEQ ID NO: 199536 - RNA, 18 nt, Artificial Sequence
  Synthetic
augcaaaugaaaaccaca

SEQ ID NO: 199537 - RNA, 19 nt, Artificial Sequence
  Synthetic
aaugcaaaugaaaaccaca

SEQ ID NO: 199538 - RNA, 20 nt, Artificial Sequence
  Synthetic
aaaugcaaaugaaaaccaca

SEQ ID NO: 199539 - RNA, 21 nt, Artificial Sequence
  Synthetic
aaaaugcaaaugaaaaccaca

SEQ ID NO: 199540 - RNA, 22 nt, Artificial Sequence
  Synthetic
aaaaaugcaaaugaaaaccaca

SEQ ID NO: 199541 - RNA, 23 nt, Artificial Sequence
  Synthetic
aaaaaaugcaaaugaaaaccaca

SEQ ID NO: 199542 - RNA, 24 nt, Artificial Sequence
  Synthetic
uaaaaaaugcaaaugaaaaccaca

SEQ ID NO: 199543 - RNA, 18 nt, Artificial Sequence
  Synthetic
ucaaaguugucaaccaca

SEQ ID NO: 199544 - RNA, 19 nt, Artificial Sequence
  Synthetic
cucaaaguugucaaccaca

SEQ ID NO: 199545 - RNA, 20 nt, Artificial Sequence
  Synthetic
ccucaaaguugucaaccaca

SEQ ID NO: 199546 - RNA, 21 nt, Artificial Sequence
  Synthetic
gccucaaaguugucaaccaca

SEQ ID NO: 199547 - RNA, 22 nt, Artificial Sequence
  Synthetic
ugccucaaaguugucaaccaca

SEQ ID NO: 199548 - RNA, 23 nt, Artificial Sequence
  Synthetic
augccucaaaguugucaaccaca

SEQ ID NO: 199549 - RNA, 24 nt, Artificial Sequence
  Synthetic
caugccucaaaguugucaaccaca

SEQ ID NO: 199550 - RNA, 18 nt, Artificial Sequence
  Synthetic
uuuucugaaauaaccaca

SEQ ID NO: 199551 - RNA, 19 nt, Artificial Sequence
  Synthetic
uuuuucugaaauaaccaca

SEQ ID NO: 199552 - RNA, 20 nt, Artificial Sequence
  Synthetic
uuuuuucugaaauaaccaca

SEQ ID NO: 199553 - RNA, 21 nt, Artificial Sequence
  Synthetic
uuuuuuucugaaauaaccaca

SEQ ID NO: 199554 - RNA, 22 nt, Artificial Sequence
  Synthetic
uuuuuuuucugaaauaaccaca

SEQ ID NO: 199555 - RNA, 23 nt, Artificial Sequence
  Synthetic
auuuuuuuucugaaauaaccaca

SEQ ID NO: 199556 - RNA, 24 nt, Artificial Sequence
  Synthetic
aauuuuuuuucugaaauaaccaca

SEQ ID NO: 199557 - RNA, 18 nt, Artificial Sequence
  Synthetic
gcuaguucuuuaaccaca

SEQ ID NO: 199558 - RNA, 19 nt, Artificial Sequence
  Synthetic
agcuaguucuuuaaccaca

SEQ ID NO: 199559 - RNA, 20 nt, Artificial Sequence
  Synthetic
uagcuaguucuuuaaccaca

SEQ ID NO: 199560 - RNA, 21 nt, Artificial Sequence
  Synthetic
uuagcuaguucuuuaaccaca

SEQ ID NO: 199561 - RNA, 22 nt, Artificial Sequence
  Synthetic
auuagcuaguucuuuaaccaca

SEQ ID NO: 199562 - RNA, 23 nt, Artificial Sequence
  Synthetic
uauuagcuaguucuuuaaccaca

SEQ ID NO: 199563 - RNA, 24 nt, Artificial Sequence
  Synthetic
uuauuagcuaguucuuuaaccaca

SEQ ID NO: 199564 - RNA, 18 nt, Artificial Sequence
  Synthetic
cacaggcucaacaccaca

SEQ ID NO: 199565 - RNA, 19 nt, Artificial Sequence
  Synthetic
ccacaggcucaacaccaca

SEQ ID NO: 199566 - RNA, 20 nt, Artificial Sequence
  Synthetic
cccacaggcucaacaccaca

SEQ ID NO: 199567 - RNA, 21 nt, Artificial Sequence
  Synthetic
acccacaggcucaacaccaca

SEQ ID NO: 199568 - RNA, 22 nt, Artificial Sequence
  Synthetic
uacccacaggcucaacaccaca

SEQ ID NO: 199569 - RNA, 23 nt, Artificial Sequence
  Synthetic
guacccacaggcucaacaccaca

SEQ ID NO: 199570 - RNA, 24 nt, Artificial Sequence
  Synthetic
uguacccacaggcucaacaccaca

SEQ ID NO: 199571 - RNA, 18 nt, Artificial Sequence
  Synthetic
uuguuuucuuucaccaca

SEQ ID NO: 199572 - RNA, 19 nt, Artificial Sequence
  Synthetic
uuuguuuucuuucaccaca

SEQ ID NO: 199573 - RNA, 20 nt, Artificial Sequence
  Synthetic
guuuguuuucuuucaccaca

SEQ ID NO: 199574 - RNA, 21 nt, Artificial Sequence
  Synthetic
uguuuguuuucuuucaccaca

SEQ ID NO: 199575 - RNA, 22 nt, Artificial Sequence
  Synthetic
guguuuguuuucuuucaccaca

SEQ ID NO: 199576 - RNA, 23 nt, Artificial Sequence
  Synthetic
uguguuuguuuucuuucaccaca

SEQ ID NO: 199577 - RNA, 24 nt, Artificial Sequence
  Synthetic
auguguuuguuuucuuucaccaca

SEQ ID NO: 199578 - RNA, 18 nt, Artificial Sequence
  Synthetic
uucaaguucgagaccaca

SEQ ID NO: 199579 - RNA, 19 nt, Artificial Sequence
  Synthetic
guucaaguucgagaccaca

SEQ ID NO: 199580 - RNA, 20 nt, Artificial Sequence
  Synthetic
uguucaaguucgagaccaca

SEQ ID NO: 199581 - RNA, 21 nt, Artificial Sequence
  Synthetic
uuguucaaguucgagaccaca

SEQ ID NO: 199582 - RNA, 22 nt, Artificial Sequence
  Synthetic
cuuguucaaguucgagaccaca

SEQ ID NO: 199583 - RNA, 23 nt, Artificial Sequence
  Synthetic
ccuuguucaaguucgagaccaca

SEQ ID NO: 199584 - RNA, 24 nt, Artificial Sequence
  Synthetic
cccuuguucaaguucgagaccaca

SEQ ID NO: 199585 - RNA, 18 nt, Artificial Sequence
  Synthetic
auacugacuacuaccaca

SEQ ID NO: 199586 - RNA, 19 nt, Artificial Sequence
  Synthetic
gauacugacuacuaccaca

SEQ ID NO: 199587 - RNA, 20 nt, Artificial Sequence
  Synthetic
ugauacugacuacuaccaca

SEQ ID NO: 199588 - RNA, 21 nt, Artificial Sequence
  Synthetic
gugauacugacuacuaccaca

SEQ ID NO: 199589 - RNA, 22 nt, Artificial Sequence
  Synthetic
agugauacugacuacuaccaca

SEQ ID NO: 199590 - RNA, 23 nt, Artificial Sequence
  Synthetic
uagugauacugacuacuaccaca

SEQ ID NO: 199591 - RNA, 24 nt, Artificial Sequence
  Synthetic
guagugauacugacuacuaccaca

SEQ ID NO: 199592 - RNA, 18 nt, Artificial Sequence
  Synthetic
aaaaugauauuuaccaca

SEQ ID NO: 199593 - RNA, 19 nt, Artificial Sequence
  Synthetic
uaaaaugauauuuaccaca

SEQ ID NO: 199594 - RNA, 20 nt, Artificial Sequence
  Synthetic
uuaaaaugauauuuaccaca

SEQ ID NO: 199595 - RNA, 21 nt, Artificial Sequence
  Synthetic
auuaaaaugauauuuaccaca

SEQ ID NO: 199596 - RNA, 22 nt, Artificial Sequence
  Synthetic
aauuaaaaugauauuuaccaca

SEQ ID NO: 199597 - RNA, 23 nt, Artificial Sequence
  Synthetic
gaauuaaaaugauauuuaccaca

SEQ ID NO: 199598 - RNA, 24 nt, Artificial Sequence
  Synthetic
ggaauuaaaaugauauuuaccaca

SEQ ID NO: 199599 - RNA, 18 nt, Artificial Sequence
  Synthetic
ucuggagauacacccaca

SEQ ID NO: 199600 - RNA, 19 nt, Artificial Sequence
  Synthetic
cucuggagauacacccaca

SEQ ID NO: 199601 - RNA, 20 nt, Artificial Sequence
  Synthetic
ucucuggagauacacccaca

SEQ ID NO: 199602 - RNA, 21 nt, Artificial Sequence
  Synthetic
uucucuggagauacacccaca

SEQ ID NO: 199603 - RNA, 22 nt, Artificial Sequence
  Synthetic
guucucuggagauacacccaca

SEQ ID NO: 199604 - RNA, 23 nt, Artificial Sequence
  Synthetic
uguucucuggagauacacccaca

SEQ ID NO: 199605 - RNA, 24 nt, Artificial Sequence
  Synthetic
guguucucuggagauacacccaca

SEQ ID NO: 199606 - RNA, 18 nt, Artificial Sequence
  Synthetic
gcccaacucucacccaca

SEQ ID NO: 199607 - RNA, 19 nt, Artificial Sequence
  Synthetic
ugcccaacucucacccaca

SEQ ID NO: 199608 - RNA, 20 nt, Artificial Sequence
  Synthetic
uugcccaacucucacccaca

SEQ ID NO: 199609 - RNA, 21 nt, Artificial Sequence
  Synthetic
uuugcccaacucucacccaca

SEQ ID NO: 199610 - RNA, 22 nt, Artificial Sequence
  Synthetic
uuuugcccaacucucacccaca

SEQ ID NO: 199611 - RNA, 23 nt, Artificial Sequence
  Synthetic
cuuuugcccaacucucacccaca

SEQ ID NO: 199612 - RNA, 24 nt, Artificial Sequence
  Synthetic
ucuuuugcccaacucucacccaca

SEQ ID NO: 199613 - RNA, 18 nt, Artificial Sequence
  Synthetic
aaauaaauccuacccaca

SEQ ID NO: 199614 - RNA, 19 nt, Artificial Sequence
  Synthetic
uaaauaaauccuacccaca

SEQ ID NO: 199615 - RNA, 20 nt, Artificial Sequence
  Synthetic
auaaauaaauccuacccaca

SEQ ID NO: 199616 - RNA, 21 nt, Artificial Sequence
  Synthetic
aauaaauaaauccuacccaca

SEQ ID NO: 199617 - RNA, 22 nt, Artificial Sequence
  Synthetic
gaauaaauaaauccuacccaca

SEQ ID NO: 199618 - RNA, 23 nt, Artificial Sequence
  Synthetic
ggaauaaauaaauccuacccaca

SEQ ID NO: 199619 - RNA, 24 nt, Artificial Sequence
  Synthetic
gggaauaaauaaauccuacccaca

SEQ ID NO: 199620 - RNA, 18 nt, Artificial Sequence
  Synthetic
aaggcuggguuacccaca

SEQ ID NO: 199621 - RNA, 19 nt, Artificial Sequence
  Synthetic
aaaggcuggguuacccaca

SEQ ID NO: 199622 - RNA, 20 nt, Artificial Sequence
  Synthetic
gaaaggcuggguuacccaca

SEQ ID NO: 199623 - RNA, 21 nt, Artificial Sequence
  Synthetic
agaaaggcuggguuacccaca

SEQ ID NO: 199624 - RNA, 22 nt, Artificial Sequence
  Synthetic
gagaaaggcuggguuacccaca

SEQ ID NO: 199625 - RNA, 23 nt, Artificial Sequence
  Synthetic
agagaaaggcuggguuacccaca

SEQ ID NO: 199626 - RNA, 24 nt, Artificial Sequence
  Synthetic
gagagaaaggcuggguuacccaca

SEQ ID NO: 199627 - RNA, 18 nt, Artificial Sequence
  Synthetic
uuuucuggcagccccaca

SEQ ID NO: 199628 - RNA, 19 nt, Artificial Sequence
  Synthetic
cuuuucuggcagccccaca

SEQ ID NO: 199629 - RNA, 20 nt, Artificial Sequence
  Synthetic
gcuuuucuggcagccccaca

SEQ ID NO: 199630 - RNA, 21 nt, Artificial Sequence
  Synthetic
ugcuuuucuggcagccccaca

SEQ ID NO: 199631 - RNA, 22 nt, Artificial Sequence
  Synthetic
gugcuuuucuggcagccccaca

SEQ ID NO: 199632 - RNA, 23 nt, Artificial Sequence
  Synthetic
agugcuuuucuggcagccccaca

SEQ ID NO: 199633 - RNA, 24 nt, Artificial Sequence
  Synthetic
cagugcuuuucuggcagccccaca

SEQ ID NO: 199634 - RNA, 18 nt, Artificial Sequence
  Synthetic
cagugggugcagcccaca

SEQ ID NO: 199635 - RNA, 19 nt, Artificial Sequence
  Synthetic
acagugggugcagcccaca

SEQ ID NO: 199636 - RNA, 20 nt, Artificial Sequence
  Synthetic
gacagugggugcagcccaca

SEQ ID NO: 199637 - RNA, 21 nt, Artificial Sequence
  Synthetic
agacagugggugcagcccaca

SEQ ID NO: 199638 - RNA, 22 nt, Artificial Sequence
  Synthetic
uagacagugggugcagcccaca

SEQ ID NO: 199639 - RNA, 23 nt, Artificial Sequence
  Synthetic
uuagacagugggugcagcccaca

SEQ ID NO: 199640 - RNA, 24 nt, Artificial Sequence
  Synthetic
guuagacagugggugcagcccaca

SEQ ID NO: 199641 - RNA, 18 nt, Artificial Sequence
  Synthetic
uuguauauacaucccaca

SEQ ID NO: 199642 - RNA, 19 nt, Artificial Sequence
  Synthetic
uuuguauauacaucccaca

SEQ ID NO: 199643 - RNA, 20 nt, Artificial Sequence
  Synthetic
guuuguauauacaucccaca

SEQ ID NO: 199644 - RNA, 21 nt, Artificial Sequence
  Synthetic
uguuuguauauacaucccaca

SEQ ID NO: 199645 - RNA, 22 nt, Artificial Sequence
  Synthetic
auguuuguauauacaucccaca

SEQ ID NO: 199646 - RNA, 23 nt, Artificial Sequence
  Synthetic
aauguuuguauauacaucccaca

SEQ ID NO: 199647 - RNA, 24 nt, Artificial Sequence
  Synthetic
uaauguuuguauauacaucccaca

SEQ ID NO: 199648 - RNA, 18 nt, Artificial Sequence
  Synthetic
guaagccacucucccaca

SEQ ID NO: 199649 - RNA, 19 nt, Artificial Sequence
  Synthetic
uguaagccacucucccaca

SEQ ID NO: 199650 - RNA, 20 nt, Artificial Sequence
  Synthetic
guguaagccacucucccaca

SEQ ID NO: 199651 - RNA, 21 nt, Artificial Sequence
  Synthetic
gguguaagccacucucccaca

SEQ ID NO: 199652 - RNA, 22 nt, Artificial Sequence
  Synthetic
ugguguaagccacucucccaca

SEQ ID NO: 199653 - RNA, 23 nt, Artificial Sequence
  Synthetic
cugguguaagccacucucccaca

SEQ ID NO: 199654 - RNA, 24 nt, Artificial Sequence
  Synthetic
acugguguaagccacucucccaca

SEQ ID NO: 199655 - RNA, 18 nt, Artificial Sequence
  Synthetic
uuccugagacuucccaca

SEQ ID NO: 199656 - RNA, 19 nt, Artificial Sequence
  Synthetic
uuuccugagacuucccaca

SEQ ID NO: 199657 - RNA, 20 nt, Artificial Sequence
  Synthetic
uuuuccugagacuucccaca

SEQ ID NO: 199658 - RNA, 21 nt, Artificial Sequence
  Synthetic
uuuuuccugagacuucccaca

SEQ ID NO: 199659 - RNA, 22 nt, Artificial Sequence
  Synthetic
uuuuuuccugagacuucccaca

SEQ ID NO: 199660 - RNA, 23 nt, Artificial Sequence
  Synthetic
uuuuuuuccugagacuucccaca

SEQ ID NO: 199661 - RNA, 24 nt, Artificial Sequence
  Synthetic
uuuuuuuuccugagacuucccaca

SEQ ID NO: 199662 - RNA, 18 nt, Artificial Sequence
  Synthetic
ggauucuaucuucccaca

SEQ ID NO: 199663 - RNA, 19 nt, Artificial Sequence
  Synthetic
aggauucuaucuucccaca

SEQ ID NO: 199664 - RNA, 20 nt, Artificial Sequence
  Synthetic
uaggauucuaucuucccaca

SEQ ID NO: 199665 - RNA, 21 nt, Artificial Sequence
  Synthetic
uuaggauucuaucuucccaca

SEQ ID NO: 199666 - RNA, 22 nt, Artificial Sequence
  Synthetic
guuaggauucuaucuucccaca

SEQ ID NO: 199667 - RNA, 23 nt, Artificial Sequence
  Synthetic
aguuaggauucuaucuucccaca

SEQ ID NO: 199668 - RNA, 24 nt, Artificial Sequence
  Synthetic
aaguuaggauucuaucuucccaca

SEQ ID NO: 199669 - RNA, 18 nt, Artificial Sequence
  Synthetic
uauauaaccaaagccaca

SEQ ID NO: 199670 - RNA, 19 nt, Artificial Sequence
  Synthetic
auauauaaccaaagccaca

SEQ ID NO: 199671 - RNA, 20 nt, Artificial Sequence
  Synthetic
aauauauaaccaaagccaca

SEQ ID NO: 199672 - RNA, 21 nt, Artificial Sequence
  Synthetic
caauauauaaccaaagccaca

SEQ ID NO: 199673 - RNA, 22 nt, Artificial Sequence
  Synthetic
ucaauauauaaccaaagccaca

SEQ ID NO: 199674 - RNA, 23 nt, Artificial Sequence
  Synthetic
aucaauauauaaccaaagccaca

SEQ ID NO: 199675 - RNA, 24 nt, Artificial Sequence
  Synthetic
uaucaauauauaaccaaagccaca

SEQ ID NO: 199676 - RNA, 18 nt, Artificial Sequence
  Synthetic
aggcagcgcccagccaca

SEQ ID NO: 199677 - RNA, 19 nt, Artificial Sequence
  Synthetic
gaggcagcgcccagccaca

SEQ ID NO: 199678 - RNA, 20 nt, Artificial Sequence
  Synthetic
ugaggcagcgcccagccaca

SEQ ID NO: 199679 - RNA, 21 nt, Artificial Sequence
  Synthetic
augaggcagcgcccagccaca

SEQ ID NO: 199680 - RNA, 22 nt, Artificial Sequence
  Synthetic
caugaggcagcgcccagccaca

SEQ ID NO: 199681 - RNA, 23 nt, Artificial Sequence
  Synthetic
ucaugaggcagcgcccagccaca

SEQ ID NO: 199682 - RNA, 24 nt, Artificial Sequence
  Synthetic
aucaugaggcagcgcccagccaca

SEQ ID NO: 199683 - RNA, 18 nt, Artificial Sequence
  Synthetic
ugaaauacauuugccaca

SEQ ID NO: 199684 - RNA, 19 nt, Artificial Sequence
  Synthetic
uugaaauacauuugccaca

SEQ ID NO: 199685 - RNA, 20 nt, Artificial Sequence
  Synthetic
uuugaaauacauuugccaca

SEQ ID NO: 199686 - RNA, 21 nt, Artificial Sequence
  Synthetic
auuugaaauacauuugccaca

SEQ ID NO: 199687 - RNA, 22 nt, Artificial Sequence
  Synthetic
uauuugaaauacauuugccaca

SEQ ID NO: 199688 - RNA, 23 nt, Artificial Sequence
  Synthetic
guauuugaaauacauuugccaca

SEQ ID NO: 199689 - RNA, 24 nt, Artificial Sequence
  Synthetic
gguauuugaaauacauuugccaca

SEQ ID NO: 199690 - RNA, 18 nt, Artificial Sequence
  Synthetic
caauccaacaaauccaca

SEQ ID NO: 199691 - RNA, 19 nt, Artificial Sequence
  Synthetic
gcaauccaacaaauccaca

SEQ ID NO: 199692 - RNA, 20 nt, Artificial Sequence
  Synthetic
agcaauccaacaaauccaca

SEQ ID NO: 199693 - RNA, 21 nt, Artificial Sequence
  Synthetic
aagcaauccaacaaauccaca

SEQ ID NO: 199694 - RNA, 22 nt, Artificial Sequence
  Synthetic
aaagcaauccaacaaauccaca

SEQ ID NO: 199695 - RNA, 23 nt, Artificial Sequence
  Synthetic
aaaagcaauccaacaaauccaca

SEQ ID NO: 199696 - RNA, 24 nt, Artificial Sequence
  Synthetic
gaaaagcaauccaacaaauccaca

SEQ ID NO: 199697 - RNA, 18 nt, Artificial Sequence
  Synthetic
acucagccuggcuccaca

SEQ ID NO: 199698 - RNA, 19 nt, Artificial Sequence
  Synthetic
cacucagccuggcuccaca

SEQ ID NO: 199699 - RNA, 20 nt, Artificial Sequence
  Synthetic
ccacucagccuggcuccaca

SEQ ID NO: 199700 - RNA, 21 nt, Artificial Sequence
  Synthetic
uccacucagccuggcuccaca

SEQ ID NO: 199701 - RNA, 22 nt, Artificial Sequence
  Synthetic
guccacucagccuggcuccaca

SEQ ID NO: 199702 - RNA, 23 nt, Artificial Sequence
  Synthetic
gguccacucagccuggcuccaca

SEQ ID NO: 199703 - RNA, 24 nt, Artificial Sequence
  Synthetic
agguccacucagccuggcuccaca

SEQ ID NO: 199704 - RNA, 18 nt, Artificial Sequence
  Synthetic
cacuaacgccauuccaca

SEQ ID NO: 199705 - RNA, 19 nt, Artificial Sequence
  Synthetic
acacuaacgccauuccaca

SEQ ID NO: 199706 - RNA, 20 nt, Artificial Sequence
  Synthetic
aacacuaacgccauuccaca

SEQ ID NO: 199707 - RNA, 21 nt, Artificial Sequence
  Synthetic
aaacacuaacgccauuccaca

SEQ ID NO: 199708 - RNA, 22 nt, Artificial Sequence
  Synthetic
gaaacacuaacgccauuccaca

SEQ ID NO: 199709 - RNA, 23 nt, Artificial Sequence
  Synthetic
agaaacacuaacgccauuccaca

SEQ ID NO: 199710 - RNA, 24 nt, Artificial Sequence
  Synthetic
cagaaacacuaacgccauuccaca

SEQ ID NO: 199711 - RNA, 18 nt, Artificial Sequence
  Synthetic
uaugaaaugccuuccaca

SEQ ID NO: 199712 - RNA, 19 nt, Artificial Sequence
  Synthetic
uuaugaaaugccuuccaca

SEQ ID NO: 199713 - RNA, 20 nt, Artificial Sequence
  Synthetic
guuaugaaaugccuuccaca

SEQ ID NO: 199714 - RNA, 21 nt, Artificial Sequence
  Synthetic
uguuaugaaaugccuuccaca

SEQ ID NO: 199715 - RNA, 22 nt, Artificial Sequence
  Synthetic
cuguuaugaaaugccuuccaca

SEQ ID NO: 199716 - RNA, 23 nt, Artificial Sequence
  Synthetic
acuguuaugaaaugccuuccaca

SEQ ID NO: 199717 - RNA, 24 nt, Artificial Sequence
  Synthetic
gacuguuaugaaaugccuuccaca

SEQ ID NO: 199718 - RNA, 18 nt, Artificial Sequence
  Synthetic
gccacacugccuuccaca

SEQ ID NO: 199719 - RNA, 19 nt, Artificial Sequence
  Synthetic
cgccacacugccuuccaca

SEQ ID NO: 199720 - RNA, 20 nt, Artificial Sequence
  Synthetic
ucgccacacugccuuccaca

SEQ ID NO: 199721 - RNA, 21 nt, Artificial Sequence
  Synthetic
aucgccacacugccuuccaca

SEQ ID NO: 199722 - RNA, 22 nt, Artificial Sequence
  Synthetic
aaucgccacacugccuuccaca

SEQ ID NO: 199723 - RNA, 23 nt, Artificial Sequence
  Synthetic
gaaucgccacacugccuuccaca

SEQ ID NO: 199724 - RNA, 24 nt, Artificial Sequence
  Synthetic
ggaaucgccacacugccuuccaca

SEQ ID NO: 199725 - RNA, 18 nt, Artificial Sequence
  Synthetic
ugagucuuugcuuccaca

SEQ ID NO: 199726 - RNA, 19 nt, Artificial Sequence
  Synthetic
cugagucuuugcuuccaca

SEQ ID NO: 199727 - RNA, 20 nt, Artificial Sequence
  Synthetic
ucugagucuuugcuuccaca

SEQ ID NO: 199728 - RNA, 21 nt, Artificial Sequence
  Synthetic
uucugagucuuugcuuccaca

SEQ ID NO: 199729 - RNA, 22 nt, Artificial Sequence
  Synthetic
cuucugagucuuugcuuccaca

SEQ ID NO: 199730 - RNA, 23 nt, Artificial Sequence
  Synthetic
ucuucugagucuuugcuuccaca

SEQ ID NO: 199731 - RNA, 24 nt, Artificial Sequence
  Synthetic
uucuucugagucuuugcuuccaca

SEQ ID NO: 199732 - RNA, 18 nt, Artificial Sequence
  Synthetic
aaagguuguucuuccaca

SEQ ID NO: 199733 - RNA, 19 nt, Artificial Sequence
  Synthetic
aaaagguuguucuuccaca

SEQ ID NO: 199734 - RNA, 20 nt, Artificial Sequence
  Synthetic
gaaaagguuguucuuccaca

SEQ ID NO: 199735 - RNA, 21 nt, Artificial Sequence
  Synthetic
ggaaaagguuguucuuccaca

SEQ ID NO: 199736 - RNA, 22 nt, Artificial Sequence
  Synthetic
aggaaaagguuguucuuccaca

SEQ ID NO: 199737 - RNA, 23 nt, Artificial Sequence
  Synthetic
gaggaaaagguuguucuuccaca

SEQ ID NO: 199738 - RNA, 24 nt, Artificial Sequence
  Synthetic
agaggaaaagguuguucuuccaca

SEQ ID NO: 199739 - RNA, 18 nt, Artificial Sequence
  Synthetic
ccuguugcgaguuccaca

SEQ ID NO: 199740 - RNA, 19 nt, Artificial Sequence
  Synthetic
cccuguugcgaguuccaca

SEQ ID NO: 199741 - RNA, 20 nt, Artificial Sequence
  Synthetic
ccccuguugcgaguuccaca

SEQ ID NO: 199742 - RNA, 21 nt, Artificial Sequence
  Synthetic
accccuguugcgaguuccaca

SEQ ID NO: 199743 - RNA, 22 nt, Artificial Sequence
  Synthetic
caccccuguugcgaguuccaca

SEQ ID NO: 199744 - RNA, 23 nt, Artificial Sequence
  Synthetic
gcaccccuguugcgaguuccaca

SEQ ID NO: 199745 - RNA, 24 nt, Artificial Sequence
  Synthetic
ggcaccccuguugcgaguuccaca

SEQ ID NO: 199746 - RNA, 18 nt, Artificial Sequence
  Synthetic
gucagauugaguuccaca

SEQ ID NO: 199747 - RNA, 19 nt, Artificial Sequence
  Synthetic
ggucagauugaguuccaca

SEQ ID NO: 199748 - RNA, 20 nt, Artificial Sequence
  Synthetic
uggucagauugaguuccaca

SEQ ID NO: 199749 - RNA, 21 nt, Artificial Sequence
  Synthetic
auggucagauugaguuccaca

SEQ ID NO: 199750 - RNA, 22 nt, Artificial Sequence
  Synthetic
uauggucagauugaguuccaca

SEQ ID NO: 199751 - RNA, 23 nt, Artificial Sequence
  Synthetic
guauggucagauugaguuccaca

SEQ ID NO: 199752 - RNA, 24 nt, Artificial Sequence
  Synthetic
uguauggucagauugaguuccaca

SEQ ID NO: 199753 - RNA, 18 nt, Artificial Sequence
  Synthetic
cugauauaacuuuccaca

SEQ ID NO: 199754 - RNA, 19 nt, Artificial Sequence
  Synthetic
ucugauauaacuuuccaca

SEQ ID NO: 199755 - RNA, 20 nt, Artificial Sequence
  Synthetic
gucugauauaacuuuccaca

SEQ ID NO: 199756 - RNA, 21 nt, Artificial Sequence
  Synthetic
agucugauauaacuuuccaca

SEQ ID NO: 199757 - RNA, 22 nt, Artificial Sequence
  Synthetic
cagucugauauaacuuuccaca

SEQ ID NO: 199758 - RNA, 23 nt, Artificial Sequence
  Synthetic
ucagucugauauaacuuuccaca

SEQ ID NO: 199759 - RNA, 24 nt, Artificial Sequence
  Synthetic
uucagucugauauaacuuuccaca

SEQ ID NO: 199760 - RNA, 18 nt, Artificial Sequence
  Synthetic
uuugguggaaacagcaca

SEQ ID NO: 199761 - RNA, 19 nt, Artificial Sequence
  Synthetic
guuugguggaaacagcaca

SEQ ID NO: 199762 - RNA, 20 nt, Artificial Sequence
  Synthetic
aguuugguggaaacagcaca

SEQ ID NO: 199763 - RNA, 21 nt, Artificial Sequence
  Synthetic
uaguuugguggaaacagcaca

SEQ ID NO: 199764 - RNA, 22 nt, Artificial Sequence
  Synthetic
uuaguuugguggaaacagcaca

SEQ ID NO: 199765 - RNA, 23 nt, Artificial Sequence
  Synthetic
cuuaguuugguggaaacagcaca

SEQ ID NO: 199766 - RNA, 24 nt, Artificial Sequence
  Synthetic
acuuaguuugguggaaacagcaca

SEQ ID NO: 199767 - RNA, 18 nt, Artificial Sequence
  Synthetic
aacucuaaauacagcaca

SEQ ID NO: 199768 - RNA, 19 nt, Artificial Sequence
  Synthetic
caacucuaaauacagcaca

SEQ ID NO: 199769 - RNA, 20 nt, Artificial Sequence
  Synthetic
ucaacucuaaauacagcaca

SEQ ID NO: 199770 - RNA, 21 nt, Artificial Sequence
  Synthetic
cucaacucuaaauacagcaca

SEQ ID NO: 199771 - RNA, 22 nt, Artificial Sequence
  Synthetic
gcucaacucuaaauacagcaca

SEQ ID NO: 199772 - RNA, 23 nt, Artificial Sequence
  Synthetic
ggcucaacucuaaauacagcaca

SEQ ID NO: 199773 - RNA, 24 nt, Artificial Sequence
  Synthetic
gggcucaacucuaaauacagcaca

SEQ ID NO: 199774 - RNA, 18 nt, Artificial Sequence
  Synthetic
gccugcaaucccagcaca

SEQ ID NO: 199775 - RNA, 19 nt, Artificial Sequence
  Synthetic
ugccugcaaucccagcaca

SEQ ID NO: 199776 - RNA, 20 nt, Artificial Sequence
  Synthetic
augccugcaaucccagcaca

SEQ ID NO: 199777 - RNA, 21 nt, Artificial Sequence
  Synthetic
caugccugcaaucccagcaca

SEQ ID NO: 199778 - RNA, 22 nt, Artificial Sequence
  Synthetic
ucaugccugcaaucccagcaca

SEQ ID NO: 199779 - RNA, 23 nt, Artificial Sequence
  Synthetic
cucaugccugcaaucccagcaca

SEQ ID NO: 199780 - RNA, 24 nt, Artificial Sequence
  Synthetic
gcucaugccugcaaucccagcaca

SEQ ID NO: 199781 - RNA, 18 nt, Artificial Sequence
  Synthetic
cuaccaccuaucagcaca

SEQ ID NO: 199782 - RNA, 19 nt, Artificial Sequence
  Synthetic
ucuaccaccuaucagcaca

SEQ ID NO: 199783 - RNA, 20 nt, Artificial Sequence
  Synthetic
uucuaccaccuaucagcaca

SEQ ID NO: 199784 - RNA, 21 nt, Artificial Sequence
  Synthetic
auucuaccaccuaucagcaca

SEQ ID NO: 199785 - RNA, 22 nt, Artificial Sequence
  Synthetic
aauucuaccaccuaucagcaca

SEQ ID NO: 199786 - RNA, 23 nt, Artificial Sequence
  Synthetic
uaauucuaccaccuaucagcaca

SEQ ID NO: 199787 - RNA, 24 nt, Artificial Sequence
  Synthetic
auaauucuaccaccuaucagcaca

SEQ ID NO: 199788 - RNA, 18 nt, Artificial Sequence
  Synthetic
aaggaagagaagagcaca

SEQ ID NO: 199789 - RNA, 19 nt, Artificial Sequence
  Synthetic
caaggaagagaagagcaca

SEQ ID NO: 199790 - RNA, 20 nt, Artificial Sequence
  Synthetic
acaaggaagagaagagcaca

SEQ ID NO: 199791 - RNA, 21 nt, Artificial Sequence
  Synthetic
cacaaggaagagaagagcaca

SEQ ID NO: 199792 - RNA, 22 nt, Artificial Sequence
  Synthetic
ccacaaggaagagaagagcaca

SEQ ID NO: 199793 - RNA, 23 nt, Artificial Sequence
  Synthetic
cccacaaggaagagaagagcaca

SEQ ID NO: 199794 - RNA, 24 nt, Artificial Sequence
  Synthetic
acccacaaggaagagaagagcaca

SEQ ID NO: 199795 - RNA, 18 nt, Artificial Sequence
  Synthetic
uugaguaaagagagcaca

SEQ ID NO: 199796 - RNA, 19 nt, Artificial Sequence
  Synthetic
auugaguaaagagagcaca

SEQ ID NO: 199797 - RNA, 20 nt, Artificial Sequence
  Synthetic
cauugaguaaagagagcaca

SEQ ID NO: 199798 - RNA, 21 nt, Artificial Sequence
  Synthetic
ccauugaguaaagagagcaca

SEQ ID NO: 199799 - RNA, 22 nt, Artificial Sequence
  Synthetic
gccauugaguaaagagagcaca

SEQ ID NO: 199800 - RNA, 23 nt, Artificial Sequence
  Synthetic
ugccauugaguaaagagagcaca

SEQ ID NO: 199801 - RNA, 24 nt, Artificial Sequence
  Synthetic
uugccauugaguaaagagagcaca

SEQ ID NO: 199802 - RNA, 18 nt, Artificial Sequence
  Synthetic
uuagauucagagagcaca

SEQ ID NO: 199803 - RNA, 19 nt, Artificial Sequence
  Synthetic
uuuagauucagagagcaca

SEQ ID NO: 199804 - RNA, 20 nt, Artificial Sequence
  Synthetic
guuuagauucagagagcaca

SEQ ID NO: 199805 - RNA, 21 nt, Artificial Sequence
  Synthetic
aguuuagauucagagagcaca

SEQ ID NO: 199806 - RNA, 22 nt, Artificial Sequence
  Synthetic
gaguuuagauucagagagcaca

SEQ ID NO: 199807 - RNA, 23 nt, Artificial Sequence
  Synthetic
agaguuuagauucagagagcaca

SEQ ID NO: 199808 - RNA, 24 nt, Artificial Sequence
  Synthetic
aagaguuuagauucagagagcaca

SEQ ID NO: 199809 - RNA, 18 nt, Artificial Sequence
  Synthetic
caaagaagcuggagcaca

SEQ ID NO: 199810 - RNA, 19 nt, Artificial Sequence
  Synthetic
gcaaagaagcuggagcaca

SEQ ID NO: 199811 - RNA, 20 nt, Artificial Sequence
  Synthetic
ggcaaagaagcuggagcaca

SEQ ID NO: 199812 - RNA, 21 nt, Artificial Sequence
  Synthetic
aggcaaagaagcuggagcaca

SEQ ID NO: 199813 - RNA, 22 nt, Artificial Sequence
  Synthetic
caggcaaagaagcuggagcaca

SEQ ID NO: 199814 - RNA, 23 nt, Artificial Sequence
  Synthetic
ccaggcaaagaagcuggagcaca

SEQ ID NO: 199815 - RNA, 24 nt, Artificial Sequence
  Synthetic
uccaggcaaagaagcuggagcaca

SEQ ID NO: 199816 - RNA, 18 nt, Artificial Sequence
  Synthetic
caauagauauugagcaca

SEQ ID NO: 199817 - RNA, 19 nt, Artificial Sequence
  Synthetic
gcaauagauauugagcaca

SEQ ID NO: 199818 - RNA, 20 nt, Artificial Sequence
  Synthetic
ugcaauagauauugagcaca

SEQ ID NO: 199819 - RNA, 21 nt, Artificial Sequence
  Synthetic
cugcaauagauauugagcaca

SEQ ID NO: 199820 - RNA, 22 nt, Artificial Sequence
  Synthetic
acugcaauagauauugagcaca

SEQ ID NO: 199821 - RNA, 23 nt, Artificial Sequence
  Synthetic
uacugcaauagauauugagcaca

SEQ ID NO: 199822 - RNA, 24 nt, Artificial Sequence
  Synthetic
auacugcaauagauauugagcaca

SEQ ID NO: 199823 - RNA, 18 nt, Artificial Sequence
  Synthetic
gccucucaaacuagcaca

SEQ ID NO: 199824 - RNA, 19 nt, Artificial Sequence
  Synthetic
ugccucucaaacuagcaca

SEQ ID NO: 199825 - RNA, 20 nt, Artificial Sequence
  Synthetic
uugccucucaaacuagcaca

SEQ ID NO: 199826 - RNA, 21 nt, Artificial Sequence
  Synthetic
auugccucucaaacuagcaca

SEQ ID NO: 199827 - RNA, 22 nt, Artificial Sequence
  Synthetic
aauugccucucaaacuagcaca

SEQ ID NO: 199828 - RNA, 23 nt, Artificial Sequence
  Synthetic
aaauugccucucaaacuagcaca

SEQ ID NO: 199829 - RNA, 24 nt, Artificial Sequence
  Synthetic
uaaauugccucucaaacuagcaca

SEQ ID NO: 199830 - RNA, 18 nt, Artificial Sequence
  Synthetic
ugugcaauaucuagcaca

SEQ ID NO: 199831 - RNA, 19 nt, Artificial Sequence
  Synthetic
augugcaauaucuagcaca

SEQ ID NO: 199832 - RNA, 20 nt, Artificial Sequence
  Synthetic
caugugcaauaucuagcaca

SEQ ID NO: 199833 - RNA, 21 nt, Artificial Sequence
  Synthetic
ccaugugcaauaucuagcaca

SEQ ID NO: 199834 - RNA, 22 nt, Artificial Sequence
  Synthetic
cccaugugcaauaucuagcaca

SEQ ID NO: 199835 - RNA, 23 nt, Artificial Sequence
  Synthetic
ucccaugugcaauaucuagcaca

SEQ ID NO: 199836 - RNA, 24 nt, Artificial Sequence
  Synthetic
aucccaugugcaauaucuagcaca

SEQ ID NO: 199837 - RNA, 18 nt, Artificial Sequence
  Synthetic
agagagaugauuagcaca

SEQ ID NO: 199838 - RNA, 19 nt, Artificial Sequence
  Synthetic
aagagagaugauuagcaca

SEQ ID NO: 199839 - RNA, 20 nt, Artificial Sequence
  Synthetic
aaagagagaugauuagcaca

SEQ ID NO: 199840 - RNA, 21 nt, Artificial Sequence
  Synthetic
uaaagagagaugauuagcaca

SEQ ID NO: 199841 - RNA, 22 nt, Artificial Sequence
  Synthetic
guaaagagagaugauuagcaca

SEQ ID NO: 199842 - RNA, 23 nt, Artificial Sequence
  Synthetic
uguaaagagagaugauuagcaca

SEQ ID NO: 199843 - RNA, 24 nt, Artificial Sequence
  Synthetic
uuguaaagagagaugauuagcaca

SEQ ID NO: 199844 - RNA, 18 nt, Artificial Sequence
  Synthetic
uagcaaacuuuacgcaca

SEQ ID NO: 199845 - RNA, 19 nt, Artificial Sequence
  Synthetic
cuagcaaacuuuacgcaca

SEQ ID NO: 199846 - RNA, 20 nt, Artificial Sequence
  Synthetic
ccuagcaaacuuuacgcaca

SEQ ID NO: 199847 - RNA, 21 nt, Artificial Sequence
  Synthetic
uccuagcaaacuuuacgcaca

SEQ ID NO: 199848 - RNA, 22 nt, Artificial Sequence
  Synthetic
uuccuagcaaacuuuacgcaca

SEQ ID NO: 199849 - RNA, 23 nt, Artificial Sequence
  Synthetic
guuccuagcaaacuuuacgcaca

SEQ ID NO: 199850 - RNA, 24 nt, Artificial Sequence
  Synthetic
uguuccuagcaaacuuuacgcaca

SEQ ID NO: 199851 - RNA, 18 nt, Artificial Sequence
  Synthetic
cugcacauuaaaggcaca

SEQ ID NO: 199852 - RNA, 19 nt, Artificial Sequence
  Synthetic
ccugcacauuaaaggcaca

SEQ ID NO: 199853 - RNA, 20 nt, Artificial Sequence
  Synthetic
gccugcacauuaaaggcaca

SEQ ID NO: 199854 - RNA, 21 nt, Artificial Sequence
  Synthetic
agccugcacauuaaaggcaca

SEQ ID NO: 199855 - RNA, 22 nt, Artificial Sequence
  Synthetic
cagccugcacauuaaaggcaca

SEQ ID NO: 199856 - RNA, 23 nt, Artificial Sequence
  Synthetic
acagccugcacauuaaaggcaca

SEQ ID NO: 199857 - RNA, 24 nt, Artificial Sequence
  Synthetic
aacagccugcacauuaaaggcaca

SEQ ID NO: 199858 - RNA, 18 nt, Artificial Sequence
  Synthetic
guugagaaaacaggcaca

SEQ ID NO: 199859 - RNA, 19 nt, Artificial Sequence
  Synthetic
uguugagaaaacaggcaca

SEQ ID NO: 199860 - RNA, 20 nt, Artificial Sequence
  Synthetic
cuguugagaaaacaggcaca

SEQ ID NO: 199861 - RNA, 21 nt, Artificial Sequence
  Synthetic
acuguugagaaaacaggcaca

SEQ ID NO: 199862 - RNA, 22 nt, Artificial Sequence
  Synthetic
uacuguugagaaaacaggcaca

SEQ ID NO: 199863 - RNA, 23 nt, Artificial Sequence
  Synthetic
uuacuguugagaaaacaggcaca

SEQ ID NO: 199864 - RNA, 24 nt, Artificial Sequence
  Synthetic
uuuacuguugagaaaacaggcaca

SEQ ID NO: 199865 - RNA, 18 nt, Artificial Sequence
  Synthetic
gauguuuuaggaggcaca

SEQ ID NO: 199866 - RNA, 19 nt, Artificial Sequence
  Synthetic
agauguuuuaggaggcaca

SEQ ID NO: 199867 - RNA, 20 nt, Artificial Sequence
  Synthetic
aagauguuuuaggaggcaca

SEQ ID NO: 199868 - RNA, 21 nt, Artificial Sequence
  Synthetic
uaagauguuuuaggaggcaca

SEQ ID NO: 199869 - RNA, 22 nt, Artificial Sequence
  Synthetic
auaagauguuuuaggaggcaca

SEQ ID NO: 199870 - RNA, 23 nt, Artificial Sequence
  Synthetic
aauaagauguuuuaggaggcaca

SEQ ID NO: 199871 - RNA, 24 nt, Artificial Sequence
  Synthetic
gaauaagauguuuuaggaggcaca

SEQ ID NO: 199872 - RNA, 18 nt, Artificial Sequence
  Synthetic
ugaagaaagugaggcaca

SEQ ID NO: 199873 - RNA, 19 nt, Artificial Sequence
  Synthetic
uugaagaaagugaggcaca

SEQ ID NO: 199874 - RNA, 20 nt, Artificial Sequence
  Synthetic
uuugaagaaagugaggcaca

SEQ ID NO: 199875 - RNA, 21 nt, Artificial Sequence
  Synthetic
auuugaagaaagugaggcaca

SEQ ID NO: 199876 - RNA, 22 nt, Artificial Sequence
  Synthetic
cauuugaagaaagugaggcaca

SEQ ID NO: 199877 - RNA, 23 nt, Artificial Sequence
  Synthetic
acauuugaagaaagugaggcaca

SEQ ID NO: 199878 - RNA, 24 nt, Artificial Sequence
  Synthetic
uacauuugaagaaagugaggcaca

SEQ ID NO: 199879 - RNA, 18 nt, Artificial Sequence
  Synthetic
auuucucuaguaggcaca

SEQ ID NO: 199880 - RNA, 19 nt, Artificial Sequence
  Synthetic
aauuucucuaguaggcaca

SEQ ID NO: 199881 - RNA, 20 nt, Artificial Sequence
  Synthetic
aaauuucucuaguaggcaca

SEQ ID NO: 199882 - RNA, 21 nt, Artificial Sequence
  Synthetic
uaaauuucucuaguaggcaca

SEQ ID NO: 199883 - RNA, 22 nt, Artificial Sequence
  Synthetic
uuaaauuucucuaguaggcaca

SEQ ID NO: 199884 - RNA, 23 nt, Artificial Sequence
  Synthetic
uuuaaauuucucuaguaggcaca

SEQ ID NO: 199885 - RNA, 24 nt, Artificial Sequence
  Synthetic
auuuaaauuucucuaguaggcaca

SEQ ID NO: 199886 - RNA, 18 nt, Artificial Sequence
  Synthetic
caaagcauuccgggcaca

SEQ ID NO: 199887 - RNA, 19 nt, Artificial Sequence
  Synthetic
gcaaagcauuccgggcaca

SEQ ID NO: 199888 - RNA, 20 nt, Artificial Sequence
  Synthetic
ggcaaagcauuccgggcaca

SEQ ID NO: 199889 - RNA, 21 nt, Artificial Sequence
  Synthetic
gggcaaagcauuccgggcaca

SEQ ID NO: 199890 - RNA, 22 nt, Artificial Sequence
  Synthetic
ggggcaaagcauuccgggcaca

SEQ ID NO: 199891 - RNA, 23 nt, Artificial Sequence
  Synthetic
aggggcaaagcauuccgggcaca

SEQ ID NO: 199892 - RNA, 24 nt, Artificial Sequence
  Synthetic
uaggggcaaagcauuccgggcaca

SEQ ID NO: 199893 - RNA, 18 nt, Artificial Sequence
  Synthetic
gggugggcagggggcaca

SEQ ID NO: 199894 - RNA, 19 nt, Artificial Sequence
  Synthetic
ggggugggcagggggcaca

SEQ ID NO: 199895 - RNA, 20 nt, Artificial Sequence
  Synthetic
uggggugggcagggggcaca

SEQ ID NO: 199896 - RNA, 21 nt, Artificial Sequence
  Synthetic
auggggugggcagggggcaca

SEQ ID NO: 199897 - RNA, 22 nt, Artificial Sequence
  Synthetic
gauggggugggcagggggcaca

SEQ ID NO: 199898 - RNA, 23 nt, Artificial Sequence
  Synthetic
agauggggugggcagggggcaca

SEQ ID NO: 199899 - RNA, 24 nt, Artificial Sequence
  Synthetic
cagauggggugggcagggggcaca

SEQ ID NO: 199900 - RNA, 18 nt, Artificial Sequence
  Synthetic
cauguaagauuuggcaca

SEQ ID NO: 199901 - RNA, 19 nt, Artificial Sequence
  Synthetic
acauguaagauuuggcaca

SEQ ID NO: 199902 - RNA, 20 nt, Artificial Sequence
  Synthetic
uacauguaagauuuggcaca

SEQ ID NO: 199903 - RNA, 21 nt, Artificial Sequence
  Synthetic
guacauguaagauuuggcaca

SEQ ID NO: 199904 - RNA, 22 nt, Artificial Sequence
  Synthetic
aguacauguaagauuuggcaca

SEQ ID NO: 199905 - RNA, 23 nt, Artificial Sequence
  Synthetic
aaguacauguaagauuuggcaca

SEQ ID NO: 199906 - RNA, 24 nt, Artificial Sequence
  Synthetic
aaaguacauguaagauuuggcaca

SEQ ID NO: 199907 - RNA, 18 nt, Artificial Sequence
  Synthetic
gauguguggggaugcaca

SEQ ID NO: 199908 - RNA, 19 nt, Artificial Sequence
  Synthetic
ggauguguggggaugcaca

SEQ ID NO: 199909 - RNA, 20 nt, Artificial Sequence
  Synthetic
uggauguguggggaugcaca

SEQ ID NO: 199910 - RNA, 21 nt, Artificial Sequence
  Synthetic
auggauguguggggaugcaca

SEQ ID NO: 199911 - RNA, 22 nt, Artificial Sequence
  Synthetic
gauggauguguggggaugcaca

SEQ ID NO: 199912 - RNA, 23 nt, Artificial Sequence
  Synthetic
ggauggauguguggggaugcaca

SEQ ID NO: 199913 - RNA, 24 nt, Artificial Sequence
  Synthetic
uggauggauguguggggaugcaca

SEQ ID NO: 199914 - RNA, 18 nt, Artificial Sequence
  Synthetic
ucagagauuggaugcaca

SEQ ID NO: 199915 - RNA, 19 nt, Artificial Sequence
  Synthetic
aucagagauuggaugcaca

SEQ ID NO: 199916 - RNA, 20 nt, Artificial Sequence
  Synthetic
gaucagagauuggaugcaca

SEQ ID NO: 199917 - RNA, 21 nt, Artificial Sequence
  Synthetic
ggaucagagauuggaugcaca

SEQ ID NO: 199918 - RNA, 22 nt, Artificial Sequence
  Synthetic
gggaucagagauuggaugcaca

SEQ ID NO: 199919 - RNA, 23 nt, Artificial Sequence
  Synthetic
agggaucagagauuggaugcaca

SEQ ID NO: 199920 - RNA, 24 nt, Artificial Sequence
  Synthetic
uagggaucagagauuggaugcaca

SEQ ID NO: 199921 - RNA, 18 nt, Artificial Sequence
  Synthetic
gagcuagaggacugcaca

SEQ ID NO: 199922 - RNA, 19 nt, Artificial Sequence
  Synthetic
ugagcuagaggacugcaca

SEQ ID NO: 199923 - RNA, 20 nt, Artificial Sequence
  Synthetic
augagcuagaggacugcaca

SEQ ID NO: 199924 - RNA, 21 nt, Artificial Sequence
  Synthetic
aaugagcuagaggacugcaca

SEQ ID NO: 199925 - RNA, 22 nt, Artificial Sequence
  Synthetic
gaaugagcuagaggacugcaca

SEQ ID NO: 199926 - RNA, 23 nt, Artificial Sequence
  Synthetic
ggaaugagcuagaggacugcaca

SEQ ID NO: 199927 - RNA, 24 nt, Artificial Sequence
  Synthetic
gggaaugagcuagaggacugcaca

SEQ ID NO: 199928 - RNA, 18 nt, Artificial Sequence
  Synthetic
caauuuuacuucugcaca

SEQ ID NO: 199929 - RNA, 19 nt, Artificial Sequence
  Synthetic
gcaauuuuacuucugcaca

SEQ ID NO: 199930 - RNA, 20 nt, Artificial Sequence
  Synthetic
agcaauuuuacuucugcaca

SEQ ID NO: 199931 - RNA, 21 nt, Artificial Sequence
  Synthetic
aagcaauuuuacuucugcaca

SEQ ID NO: 199932 - RNA, 22 nt, Artificial Sequence
  Synthetic
aaagcaauuuuacuucugcaca

SEQ ID NO: 199933 - RNA, 23 nt, Artificial Sequence
  Synthetic
caaagcaauuuuacuucugcaca

SEQ ID NO: 199934 - RNA, 24 nt, Artificial Sequence
  Synthetic
gcaaagcaauuuuacuucugcaca

SEQ ID NO: 199935 - RNA, 18 nt, Artificial Sequence
  Synthetic
caauuaggagauugcaca

SEQ ID NO: 199936 - RNA, 19 nt, Artificial Sequence
  Synthetic
gcaauuaggagauugcaca

SEQ ID NO: 199937 - RNA, 20 nt, Artificial Sequence
  Synthetic
ugcaauuaggagauugcaca

SEQ ID NO: 199938 - RNA, 21 nt, Artificial Sequence
  Synthetic
augcaauuaggagauugcaca

SEQ ID NO: 199939 - RNA, 22 nt, Artificial Sequence
  Synthetic
gaugcaauuaggagauugcaca

SEQ ID NO: 199940 - RNA, 23 nt, Artificial Sequence
  Synthetic
agaugcaauuaggagauugcaca

SEQ ID NO: 199941 - RNA, 24 nt, Artificial Sequence
  Synthetic
aagaugcaauuaggagauugcaca

SEQ ID NO: 199942 - RNA, 18 nt, Artificial Sequence
  Synthetic
ucacaccaggauugcaca

SEQ ID NO: 199943 - RNA, 19 nt, Artificial Sequence
  Synthetic
aucacaccaggauugcaca

SEQ ID NO: 199944 - RNA, 20 nt, Artificial Sequence
  Synthetic
gaucacaccaggauugcaca

SEQ ID NO: 199945 - RNA, 21 nt, Artificial Sequence
  Synthetic
ugaucacaccaggauugcaca

SEQ ID NO: 199946 - RNA, 22 nt, Artificial Sequence
  Synthetic
gugaucacaccaggauugcaca

SEQ ID NO: 199947 - RNA, 23 nt, Artificial Sequence
  Synthetic
agugaucacaccaggauugcaca

SEQ ID NO: 199948 - RNA, 24 nt, Artificial Sequence
  Synthetic
cagugaucacaccaggauugcaca

SEQ ID NO: 199949 - RNA, 18 nt, Artificial Sequence
  Synthetic
auauuauucacuugcaca

SEQ ID NO: 199950 - RNA, 19 nt, Artificial Sequence
  Synthetic
uauauuauucacuugcaca

SEQ ID NO: 199951 - RNA, 20 nt, Artificial Sequence
  Synthetic
guauauuauucacuugcaca

SEQ ID NO: 199952 - RNA, 21 nt, Artificial Sequence
  Synthetic
aguauauuauucacuugcaca

SEQ ID NO: 199953 - RNA, 22 nt, Artificial Sequence
  Synthetic
uaguauauuauucacuugcaca

SEQ ID NO: 199954 - RNA, 23 nt, Artificial Sequence
  Synthetic
uuaguauauuauucacuugcaca

SEQ ID NO: 199955 - RNA, 24 nt, Artificial Sequence
  Synthetic
uuuaguauauuauucacuugcaca

SEQ ID NO: 199956 - RNA, 18 nt, Artificial Sequence
  Synthetic
aaugucugagcuugcaca

SEQ ID NO: 199957 - RNA, 19 nt, Artificial Sequence
  Synthetic
gaaugucugagcuugcaca

SEQ ID NO: 199958 - RNA, 20 nt, Artificial Sequence
  Synthetic
ggaaugucugagcuugcaca

SEQ ID NO: 199959 - RNA, 21 nt, Artificial Sequence
  Synthetic
uggaaugucugagcuugcaca

SEQ ID NO: 199960 - RNA, 22 nt, Artificial Sequence
  Synthetic
cuggaaugucugagcuugcaca

SEQ ID NO: 199961 - RNA, 23 nt, Artificial Sequence
  Synthetic
ccuggaaugucugagcuugcaca

SEQ ID NO: 199962 - RNA, 24 nt, Artificial Sequence
  Synthetic
accuggaaugucugagcuugcaca

SEQ ID NO: 199963 - RNA, 18 nt, Artificial Sequence
  Synthetic
gagacaaaaaguugcaca

SEQ ID NO: 199964 - RNA, 19 nt, Artificial Sequence
  Synthetic
ugagacaaaaaguugcaca

SEQ ID NO: 199965 - RNA, 20 nt, Artificial Sequence
  Synthetic
cugagacaaaaaguugcaca

SEQ ID NO: 199966 - RNA, 21 nt, Artificial Sequence
  Synthetic
ucugagacaaaaaguugcaca

SEQ ID NO: 199967 - RNA, 22 nt, Artificial Sequence
  Synthetic
cucugagacaaaaaguugcaca

SEQ ID NO: 199968 - RNA, 23 nt, Artificial Sequence
  Synthetic
ucucugagacaaaaaguugcaca

SEQ ID NO: 199969 - RNA, 24 nt, Artificial Sequence
  Synthetic
gucucugagacaaaaaguugcaca

SEQ ID NO: 199970 - RNA, 18 nt, Artificial Sequence
  Synthetic
gaguuuauuaaaaucaca

SEQ ID NO: 199971 - RNA, 19 nt, Artificial Sequence
  Synthetic
agaguuuauuaaaaucaca

SEQ ID NO: 199972 - RNA, 20 nt, Artificial Sequence
  Synthetic
cagaguuuauuaaaaucaca

SEQ ID NO: 199973 - RNA, 21 nt, Artificial Sequence
  Synthetic
acagaguuuauuaaaaucaca

SEQ ID NO: 199974 - RNA, 22 nt, Artificial Sequence
  Synthetic
cacagaguuuauuaaaaucaca

SEQ ID NO: 199975 - RNA, 23 nt, Artificial Sequence
  Synthetic
ucacagaguuuauuaaaaucaca

SEQ ID NO: 199976 - RNA, 24 nt, Artificial Sequence
  Synthetic
aucacagaguuuauuaaaaucaca

SEQ ID NO: 199977 - RNA, 18 nt, Artificial Sequence
  Synthetic
guuaaaaacuaaaucaca

SEQ ID NO: 199978 - RNA, 19 nt, Artificial Sequence
  Synthetic
gguuaaaaacuaaaucaca

SEQ ID NO: 199979 - RNA, 20 nt, Artificial Sequence
  Synthetic
ugguuaaaaacuaaaucaca

SEQ ID NO: 199980 - RNA, 21 nt, Artificial Sequence
  Synthetic
uugguuaaaaacuaaaucaca

SEQ ID NO: 199981 - RNA, 22 nt, Artificial Sequence
  Synthetic
auugguuaaaaacuaaaucaca

SEQ ID NO: 199982 - RNA, 23 nt, Artificial Sequence
  Synthetic
cauugguuaaaaacuaaaucaca

SEQ ID NO: 199983 - RNA, 24 nt, Artificial Sequence
  Synthetic
ccauugguuaaaaacuaaaucaca

SEQ ID NO: 199984 - RNA, 18 nt, Artificial Sequence
  Synthetic
uugggccucauaaucaca

SEQ ID NO: 199985 - RNA, 19 nt, Artificial Sequence
  Synthetic
cuugggccucauaaucaca

SEQ ID NO: 199986 - RNA, 20 nt, Artificial Sequence
  Synthetic
ucuugggccucauaaucaca

SEQ ID NO: 199987 - RNA, 21 nt, Artificial Sequence
  Synthetic
uucuugggccucauaaucaca

SEQ ID NO: 199988 - RNA, 22 nt, Artificial Sequence
  Synthetic
uuucuugggccucauaaucaca

SEQ ID NO: 199989 - RNA, 23 nt, Artificial Sequence
  Synthetic
uuuucuugggccucauaaucaca

SEQ ID NO: 199990 - RNA, 24 nt, Artificial Sequence
  Synthetic
auuuucuugggccucauaaucaca

SEQ ID NO: 199991 - RNA, 18 nt, Artificial Sequence
  Synthetic
acuuucaucuuaaucaca

SEQ ID NO: 199992 - RNA, 19 nt, Artificial Sequence
  Synthetic
uacuuucaucuuaaucaca

SEQ ID NO: 199993 - RNA, 20 nt, Artificial Sequence
  Synthetic
auacuuucaucuuaaucaca

SEQ ID NO: 199994 - RNA, 21 nt, Artificial Sequence
  Synthetic
aauacuuucaucuuaaucaca

SEQ ID NO: 199995 - RNA, 22 nt, Artificial Sequence
  Synthetic
aaauacuuucaucuuaaucaca

SEQ ID NO: 199996 - RNA, 23 nt, Artificial Sequence
  Synthetic
gaaauacuuucaucuuaaucaca

SEQ ID NO: 199997 - RNA, 24 nt, Artificial Sequence
  Synthetic
ugaaauacuuucaucuuaaucaca

SEQ ID NO: 199998 - RNA, 18 nt, Artificial Sequence
  Synthetic
gcauuccaguuaaucaca

SEQ ID NO: 199999 - RNA, 19 nt, Artificial Sequence
  Synthetic
agcauuccaguuaaucaca

SEQ ID NO: 200000 - RNA, 20 nt, Artificial Sequence
  Synthetic
cagcauuccaguuaaucaca

SEQ ID NO: 200001 - RNA, 21 nt, Artificial Sequence
  Synthetic
acagcauuccaguuaaucaca

SEQ ID NO: 200002 - RNA, 22 nt, Artificial Sequence
  Synthetic
aacagcauuccaguuaaucaca

SEQ ID NO: 200003 - RNA, 23 nt, Artificial Sequence
  Synthetic
aaacagcauuccaguuaaucaca

SEQ ID NO: 200004 - RNA, 24 nt, Artificial Sequence
  Synthetic
caaacagcauuccaguuaaucaca

SEQ ID NO: 200005 - RNA, 18 nt, Artificial Sequence
  Synthetic
agaaagggccacaucaca

SEQ ID NO: 200006 - RNA, 19 nt, Artificial Sequence
  Synthetic
cagaaagggccacaucaca

SEQ ID NO: 200007 - RNA, 20 nt, Artificial Sequence
  Synthetic
acagaaagggccacaucaca

SEQ ID NO: 200008 - RNA, 21 nt, Artificial Sequence
  Synthetic
gacagaaagggccacaucaca

SEQ ID NO: 200009 - RNA, 22 nt, Artificial Sequence
  Synthetic
agacagaaagggccacaucaca

SEQ ID NO: 200010 - RNA, 23 nt, Artificial Sequence
  Synthetic
aagacagaaagggccacaucaca

SEQ ID NO: 200011 - RNA, 24 nt, Artificial Sequence
  Synthetic
gaagacagaaagggccacaucaca

SEQ ID NO: 200012 - RNA, 18 nt, Artificial Sequence
  Synthetic
ccaccacaucccaucaca

SEQ ID NO: 200013 - RNA, 19 nt, Artificial Sequence
  Synthetic
uccaccacaucccaucaca

SEQ ID NO: 200014 - RNA, 20 nt, Artificial Sequence
  Synthetic
uuccaccacaucccaucaca

SEQ ID NO: 200015 - RNA, 21 nt, Artificial Sequence
  Synthetic
cuuccaccacaucccaucaca

SEQ ID NO: 200016 - RNA, 22 nt, Artificial Sequence
  Synthetic
acuuccaccacaucccaucaca

SEQ ID NO: 200017 - RNA, 23 nt, Artificial Sequence
  Synthetic
cacuuccaccacaucccaucaca

SEQ ID NO: 200018 - RNA, 24 nt, Artificial Sequence
  Synthetic
ucacuuccaccacaucccaucaca

SEQ ID NO: 200019 - RNA, 18 nt, Artificial Sequence
  Synthetic
aguagagaccagaucaca

SEQ ID NO: 200020 - RNA, 19 nt, Artificial Sequence
  Synthetic
aaguagagaccagaucaca

SEQ ID NO: 200021 - RNA, 20 nt, Artificial Sequence
  Synthetic
gaaguagagaccagaucaca

SEQ ID NO: 200022 - RNA, 21 nt, Artificial Sequence
  Synthetic
agaaguagagaccagaucaca

SEQ ID NO: 200023 - RNA, 22 nt, Artificial Sequence
  Synthetic
uagaaguagagaccagaucaca

SEQ ID NO: 200024 - RNA, 23 nt, Artificial Sequence
  Synthetic
auagaaguagagaccagaucaca

SEQ ID NO: 200025 - RNA, 24 nt, Artificial Sequence
  Synthetic
aauagaaguagagaccagaucaca

SEQ ID NO: 200026 - RNA, 18 nt, Artificial Sequence
  Synthetic
uauucaggcaggaucaca

SEQ ID NO: 200027 - RNA, 19 nt, Artificial Sequence
  Synthetic
uuauucaggcaggaucaca

SEQ ID NO: 200028 - RNA, 20 nt, Artificial Sequence
  Synthetic
guuauucaggcaggaucaca

SEQ ID NO: 200029 - RNA, 21 nt, Artificial Sequence
  Synthetic
aguuauucaggcaggaucaca

SEQ ID NO: 200030 - RNA, 22 nt, Artificial Sequence
  Synthetic
caguuauucaggcaggaucaca

SEQ ID NO: 200031 - RNA, 23 nt, Artificial Sequence
  Synthetic
gcaguuauucaggcaggaucaca

SEQ ID NO: 200032 - RNA, 24 nt, Artificial Sequence
  Synthetic
ugcaguuauucaggcaggaucaca

SEQ ID NO: 200033 - RNA, 18 nt, Artificial Sequence
  Synthetic
uagucauacaugaucaca

SEQ ID NO: 200034 - RNA, 19 nt, Artificial Sequence
  Synthetic
uuagucauacaugaucaca

SEQ ID NO: 200035 - RNA, 20 nt, Artificial Sequence
  Synthetic
uuuagucauacaugaucaca

SEQ ID NO: 200036 - RNA, 21 nt, Artificial Sequence
  Synthetic
uuuuagucauacaugaucaca

SEQ ID NO: 200037 - RNA, 22 nt, Artificial Sequence
  Synthetic
auuuuagucauacaugaucaca

SEQ ID NO: 200038 - RNA, 23 nt, Artificial Sequence
  Synthetic
aauuuuagucauacaugaucaca

SEQ ID NO: 200039 - RNA, 24 nt, Artificial Sequence
  Synthetic
gaauuuuagucauacaugaucaca

SEQ ID NO: 200040 - RNA, 18 nt, Artificial Sequence
  Synthetic
agauuuuuggugaucaca

SEQ ID NO: 200041 - RNA, 19 nt, Artificial Sequence
  Synthetic
uagauuuuuggugaucaca

SEQ ID NO: 200042 - RNA, 20 nt, Artificial Sequence
  Synthetic
guagauuuuuggugaucaca

SEQ ID NO: 200043 - RNA, 21 nt, Artificial Sequence
  Synthetic
uguagauuuuuggugaucaca

SEQ ID NO: 200044 - RNA, 22 nt, Artificial Sequence
  Synthetic
uuguagauuuuuggugaucaca

SEQ ID NO: 200045 - RNA, 23 nt, Artificial Sequence
  Synthetic
auuguagauuuuuggugaucaca

SEQ ID NO: 200046 - RNA, 24 nt, Artificial Sequence
  Synthetic
uauuguagauuuuuggugaucaca

SEQ ID NO: 200047 - RNA, 18 nt, Artificial Sequence
  Synthetic
aagccaaaccauaucaca

SEQ ID NO: 200048 - RNA, 19 nt, Artificial Sequence
  Synthetic
aaagccaaaccauaucaca

SEQ ID NO: 200049 - RNA, 20 nt, Artificial Sequence
  Synthetic
caaagccaaaccauaucaca

SEQ ID NO: 200050 - RNA, 21 nt, Artificial Sequence
  Synthetic
acaaagccaaaccauaucaca

SEQ ID NO: 200051 - RNA, 22 nt, Artificial Sequence
  Synthetic
cacaaagccaaaccauaucaca

SEQ ID NO: 200052 - RNA, 23 nt, Artificial Sequence
  Synthetic
acacaaagccaaaccauaucaca

SEQ ID NO: 200053 - RNA, 24 nt, Artificial Sequence
  Synthetic
gacacaaagccaaaccauaucaca

SEQ ID NO: 200054 - RNA, 18 nt, Artificial Sequence
  Synthetic
aacucacucacuaucaca

SEQ ID NO: 200055 - RNA, 19 nt, Artificial Sequence
  Synthetic
gaacucacucacuaucaca

SEQ ID NO: 200056 - RNA, 20 nt, Artificial Sequence
  Synthetic
agaacucacucacuaucaca

SEQ ID NO: 200057 - RNA, 21 nt, Artificial Sequence
  Synthetic
gagaacucacucacuaucaca

SEQ ID NO: 200058 - RNA, 22 nt, Artificial Sequence
  Synthetic
ugagaacucacucacuaucaca

SEQ ID NO: 200059 - RNA, 23 nt, Artificial Sequence
  Synthetic
augagaacucacucacuaucaca

SEQ ID NO: 200060 - RNA, 24 nt, Artificial Sequence
  Synthetic
caugagaacucacucacuaucaca

SEQ ID NO: 200061 - RNA, 18 nt, Artificial Sequence
  Synthetic
acugauaauccacucaca

SEQ ID NO: 200062 - RNA, 19 nt, Artificial Sequence
  Synthetic
uacugauaauccacucaca

SEQ ID NO: 200063 - RNA, 20 nt, Artificial Sequence
  Synthetic
auacugauaauccacucaca

SEQ ID NO: 200064 - RNA, 21 nt, Artificial Sequence
  Synthetic
aauacugauaauccacucaca

SEQ ID NO: 200065 - RNA, 22 nt, Artificial Sequence
  Synthetic
aaauacugauaauccacucaca

SEQ ID NO: 200066 - RNA, 23 nt, Artificial Sequence
  Synthetic
caaauacugauaauccacucaca

SEQ ID NO: 200067 - RNA, 24 nt, Artificial Sequence
  Synthetic
acaaauacugauaauccacucaca

SEQ ID NO: 200068 - RNA, 18 nt, Artificial Sequence
  Synthetic
aaaaaaaaagcccucaca

SEQ ID NO: 200069 - RNA, 19 nt, Artificial Sequence
  Synthetic
aaaaaaaaaagcccucaca

SEQ ID NO: 200070 - RNA, 20 nt, Artificial Sequence
  Synthetic
gaaaaaaaaaagcccucaca

SEQ ID NO: 200071 - RNA, 21 nt, Artificial Sequence
  Synthetic
agaaaaaaaaaagcccucaca

SEQ ID NO: 200072 - RNA, 22 nt, Artificial Sequence
  Synthetic
aagaaaaaaaaaagcccucaca

SEQ ID NO: 200073 - RNA, 23 nt, Artificial Sequence
  Synthetic
aaagaaaaaaaaaagcccucaca

SEQ ID NO: 200074 - RNA, 24 nt, Artificial Sequence
  Synthetic
aaaagaaaaaaaaaagcccucaca

SEQ ID NO: 200075 - RNA, 18 nt, Artificial Sequence
  Synthetic
aaaacagcuguccucaca

SEQ ID NO: 200076 - RNA, 19 nt, Artificial Sequence
  Synthetic
uaaaacagcuguccucaca

SEQ ID NO: 200077 - RNA, 20 nt, Artificial Sequence
  Synthetic
uuaaaacagcuguccucaca

SEQ ID NO: 200078 - RNA, 21 nt, Artificial Sequence
  Synthetic
cuuaaaacagcuguccucaca

SEQ ID NO: 200079 - RNA, 22 nt, Artificial Sequence
  Synthetic
ucuuaaaacagcuguccucaca

SEQ ID NO: 200080 - RNA, 23 nt, Artificial Sequence
  Synthetic
uucuuaaaacagcuguccucaca

SEQ ID NO: 200081 - RNA, 24 nt, Artificial Sequence
  Synthetic
uuucuuaaaacagcuguccucaca

SEQ ID NO: 200082 - RNA, 18 nt, Artificial Sequence
  Synthetic
uaaaauuauuaucucaca

SEQ ID NO: 200083 - RNA, 19 nt, Artificial Sequence
  Synthetic
auaaaauuauuaucucaca

SEQ ID NO: 200084 - RNA, 20 nt, Artificial Sequence
  Synthetic
uauaaaauuauuaucucaca

SEQ ID NO: 200085 - RNA, 21 nt, Artificial Sequence
  Synthetic
cuauaaaauuauuaucucaca

SEQ ID NO: 200086 - RNA, 22 nt, Artificial Sequence
  Synthetic
gcuauaaaauuauuaucucaca

SEQ ID NO: 200087 - RNA, 23 nt, Artificial Sequence
  Synthetic
agcuauaaaauuauuaucucaca

SEQ ID NO: 200088 - RNA, 24 nt, Artificial Sequence
  Synthetic
uagcuauaaaauuauuaucucaca

SEQ ID NO: 200089 - RNA, 18 nt, Artificial Sequence
  Synthetic
agaaaguguuuucucaca

SEQ ID NO: 200090 - RNA, 19 nt, Artificial Sequence
  Synthetic
uagaaaguguuuucucaca

SEQ ID NO: 200091 - RNA, 20 nt, Artificial Sequence
  Synthetic
uuagaaaguguuuucucaca

SEQ ID NO: 200092 - RNA, 21 nt, Artificial Sequence
  Synthetic
uuuagaaaguguuuucucaca

SEQ ID NO: 200093 - RNA, 22 nt, Artificial Sequence
  Synthetic
guuuagaaaguguuuucucaca

SEQ ID NO: 200094 - RNA, 23 nt, Artificial Sequence
  Synthetic
uguuuagaaaguguuuucucaca

SEQ ID NO: 200095 - RNA, 24 nt, Artificial Sequence
  Synthetic
guguuuagaaaguguuuucucaca

SEQ ID NO: 200096 - RNA, 18 nt, Artificial Sequence
  Synthetic
guaggcauuuuucucaca

SEQ ID NO: 200097 - RNA, 19 nt, Artificial Sequence
  Synthetic
uguaggcauuuuucucaca

SEQ ID NO: 200098 - RNA, 20 nt, Artificial Sequence
  Synthetic
auguaggcauuuuucucaca

SEQ ID NO: 200099 - RNA, 21 nt, Artificial Sequence
  Synthetic
cauguaggcauuuuucucaca

SEQ ID NO: 200100 - RNA, 22 nt, Artificial Sequence
  Synthetic
ucauguaggcauuuuucucaca

SEQ ID NO: 200101 - RNA, 23 nt, Artificial Sequence
  Synthetic
uucauguaggcauuuuucucaca

SEQ ID NO: 200102 - RNA, 24 nt, Artificial Sequence
  Synthetic
uuucauguaggcauuuuucucaca

SEQ ID NO: 200103 - RNA, 18 nt, Artificial Sequence
  Synthetic
cucaugugacaagucaca

SEQ ID NO: 200104 - RNA, 19 nt, Artificial Sequence
  Synthetic
ccucaugugacaagucaca

SEQ ID NO: 200105 - RNA, 20 nt, Artificial Sequence
  Synthetic
accucaugugacaagucaca

SEQ ID NO: 200106 - RNA, 21 nt, Artificial Sequence
  Synthetic
gaccucaugugacaagucaca

SEQ ID NO: 200107 - RNA, 22 nt, Artificial Sequence
  Synthetic
ugaccucaugugacaagucaca

SEQ ID NO: 200108 - RNA, 23 nt, Artificial Sequence
  Synthetic
cugaccucaugugacaagucaca

SEQ ID NO: 200109 - RNA, 24 nt, Artificial Sequence
  Synthetic
ucugaccucaugugacaagucaca

SEQ ID NO: 200110 - RNA, 18 nt, Artificial Sequence
  Synthetic
caauguguaacagucaca

SEQ ID NO: 200111 - RNA, 19 nt, Artificial Sequence
  Synthetic
acaauguguaacagucaca

SEQ ID NO: 200112 - RNA, 20 nt, Artificial Sequence
  Synthetic
uacaauguguaacagucaca

SEQ ID NO: 200113 - RNA, 21 nt, Artificial Sequence
  Synthetic
auacaauguguaacagucaca

SEQ ID NO: 200114 - RNA, 22 nt, Artificial Sequence
  Synthetic
cauacaauguguaacagucaca

SEQ ID NO: 200115 - RNA, 23 nt, Artificial Sequence
  Synthetic
gcauacaauguguaacagucaca

SEQ ID NO: 200116 - RNA, 24 nt, Artificial Sequence
  Synthetic
ggcauacaauguguaacagucaca

SEQ ID NO: 200117 - RNA, 18 nt, Artificial Sequence
  Synthetic
cugagacuuucagucaca

SEQ ID NO: 200118 - RNA, 19 nt, Artificial Sequence
  Synthetic
acugagacuuucagucaca

SEQ ID NO: 200119 - RNA, 20 nt, Artificial Sequence
  Synthetic
cacugagacuuucagucaca

SEQ ID NO: 200120 - RNA, 21 nt, Artificial Sequence
  Synthetic
gcacugagacuuucagucaca

SEQ ID NO: 200121 - RNA, 22 nt, Artificial Sequence
  Synthetic
ugcacugagacuuucagucaca

SEQ ID NO: 200122 - RNA, 23 nt, Artificial Sequence
  Synthetic
cugcacugagacuuucagucaca

SEQ ID NO: 200123 - RNA, 24 nt, Artificial Sequence
  Synthetic
ccugcacugagacuuucagucaca

SEQ ID NO: 200124 - RNA, 18 nt, Artificial Sequence
  Synthetic
aaacaggauggagucaca

SEQ ID NO: 200125 - RNA, 19 nt, Artificial Sequence
  Synthetic
gaaacaggauggagucaca

SEQ ID NO: 200126 - RNA, 20 nt, Artificial Sequence
  Synthetic
ugaaacaggauggagucaca

SEQ ID NO: 200127 - RNA, 21 nt, Artificial Sequence
  Synthetic
augaaacaggauggagucaca

SEQ ID NO: 200128 - RNA, 22 nt, Artificial Sequence
  Synthetic
aaugaaacaggauggagucaca

SEQ ID NO: 200129 - RNA, 23 nt, Artificial Sequence
  Synthetic
aaaugaaacaggauggagucaca

SEQ ID NO: 200130 - RNA, 24 nt, Artificial Sequence
  Synthetic
caaaugaaacaggauggagucaca

SEQ ID NO: 200131 - RNA, 18 nt, Artificial Sequence
  Synthetic
cauauguucauagucaca

SEQ ID NO: 200132 - RNA, 19 nt, Artificial Sequence
  Synthetic
gcauauguucauagucaca

SEQ ID NO: 200133 - RNA, 20 nt, Artificial Sequence
  Synthetic
ggcauauguucauagucaca

SEQ ID NO: 200134 - RNA, 21 nt, Artificial Sequence
  Synthetic
gggcauauguucauagucaca

SEQ ID NO: 200135 - RNA, 22 nt, Artificial Sequence
  Synthetic
agggcauauguucauagucaca

SEQ ID NO: 200136 - RNA, 23 nt, Artificial Sequence
  Synthetic
gagggcauauguucauagucaca

SEQ ID NO: 200137 - RNA, 24 nt, Artificial Sequence
  Synthetic
ugagggcauauguucauagucaca

SEQ ID NO: 200138 - RNA, 18 nt, Artificial Sequence
  Synthetic
aauaguuccagcgucaca

SEQ ID NO: 200139 - RNA, 19 nt, Artificial Sequence
  Synthetic
gaauaguuccagcgucaca

SEQ ID NO: 200140 - RNA, 20 nt, Artificial Sequence
  Synthetic
ugaauaguuccagcgucaca

SEQ ID NO: 200141 - RNA, 21 nt, Artificial Sequence
  Synthetic
cugaauaguuccagcgucaca

SEQ ID NO: 200142 - RNA, 22 nt, Artificial Sequence
  Synthetic
acugaauaguuccagcgucaca

SEQ ID NO: 200143 - RNA, 23 nt, Artificial Sequence
  Synthetic
uacugaauaguuccagcgucaca

SEQ ID NO: 200144 - RNA, 24 nt, Artificial Sequence
  Synthetic
guacugaauaguuccagcgucaca

SEQ ID NO: 200145 - RNA, 18 nt, Artificial Sequence
  Synthetic
gauguuucaaaggucaca

SEQ ID NO: 200146 - RNA, 19 nt, Artificial Sequence
  Synthetic
ugauguuucaaaggucaca

SEQ ID NO: 200147 - RNA, 20 nt, Artificial Sequence
  Synthetic
gugauguuucaaaggucaca

SEQ ID NO: 200148 - RNA, 21 nt, Artificial Sequence
  Synthetic
agugauguuucaaaggucaca

SEQ ID NO: 200149 - RNA, 22 nt, Artificial Sequence
  Synthetic
cagugauguuucaaaggucaca

SEQ ID NO: 200150 - RNA, 23 nt, Artificial Sequence
  Synthetic
acagugauguuucaaaggucaca

SEQ ID NO: 200151 - RNA, 24 nt, Artificial Sequence
  Synthetic
aacagugauguuucaaaggucaca

SEQ ID NO: 200152 - RNA, 18 nt, Artificial Sequence
  Synthetic
guauuucucacugucaca

SEQ ID NO: 200153 - RNA, 19 nt, Artificial Sequence
  Synthetic
uguauuucucacugucaca

SEQ ID NO: 200154 - RNA, 20 nt, Artificial Sequence
  Synthetic
cuguauuucucacugucaca

SEQ ID NO: 200155 - RNA, 21 nt, Artificial Sequence
  Synthetic
ucuguauuucucacugucaca

SEQ ID NO: 200156 - RNA, 22 nt, Artificial Sequence
  Synthetic
uucuguauuucucacugucaca

SEQ ID NO: 200157 - RNA, 23 nt, Artificial Sequence
  Synthetic
guucuguauuucucacugucaca

SEQ ID NO: 200158 - RNA, 24 nt, Artificial Sequence
  Synthetic
aguucuguauuucucacugucaca

SEQ ID NO: 200159 - RNA, 18 nt, Artificial Sequence
  Synthetic
auguacaggcuugucaca

SEQ ID NO: 200160 - RNA, 19 nt, Artificial Sequence
  Synthetic
cauguacaggcuugucaca

SEQ ID NO: 200161 - RNA, 20 nt, Artificial Sequence
  Synthetic
acauguacaggcuugucaca

SEQ ID NO: 200162 - RNA, 21 nt, Artificial Sequence
  Synthetic
uacauguacaggcuugucaca

SEQ ID NO: 200163 - RNA, 22 nt, Artificial Sequence
  Synthetic
guacauguacaggcuugucaca

SEQ ID NO: 200164 - RNA, 23 nt, Artificial Sequence
  Synthetic
gguacauguacaggcuugucaca

SEQ ID NO: 200165 - RNA, 24 nt, Artificial Sequence
  Synthetic
ggguacauguacaggcuugucaca

SEQ ID NO: 200166 - RNA, 18 nt, Artificial Sequence
  Synthetic
cggucgggcguugucaca

SEQ ID NO: 200167 - RNA, 19 nt, Artificial Sequence
  Synthetic
gcggucgggcguugucaca

SEQ ID NO: 200168 - RNA, 20 nt, Artificial Sequence
  Synthetic
ugcggucgggcguugucaca

SEQ ID NO: 200169 - RNA, 21 nt, Artificial Sequence
  Synthetic
gugcggucgggcguugucaca

SEQ ID NO: 200170 - RNA, 22 nt, Artificial Sequence
  Synthetic
cgugcggucgggcguugucaca

SEQ ID NO: 200171 - RNA, 23 nt, Artificial Sequence
  Synthetic
acgugcggucgggcguugucaca

SEQ ID NO: 200172 - RNA, 24 nt, Artificial Sequence
  Synthetic
gacgugcggucgggcguugucaca

SEQ ID NO: 200173 - RNA, 18 nt, Artificial Sequence
  Synthetic
aaauucuugguugucaca

SEQ ID NO: 200174 - RNA, 19 nt, Artificial Sequence
  Synthetic
gaaauucuugguugucaca

SEQ ID NO: 200175 - RNA, 20 nt, Artificial Sequence
  Synthetic
agaaauucuugguugucaca

SEQ ID NO: 200176 - RNA, 21 nt, Artificial Sequence
  Synthetic
aagaaauucuugguugucaca

SEQ ID NO: 200177 - RNA, 22 nt, Artificial Sequence
  Synthetic
caagaaauucuugguugucaca

SEQ ID NO: 200178 - RNA, 23 nt, Artificial Sequence
  Synthetic
ucaagaaauucuugguugucaca

SEQ ID NO: 200179 - RNA, 24 nt, Artificial Sequence
  Synthetic
cucaagaaauucuugguugucaca

SEQ ID NO: 200180 - RNA, 18 nt, Artificial Sequence
  Synthetic
uguaaaugcacauucaca

SEQ ID NO: 200181 - RNA, 19 nt, Artificial Sequence
  Synthetic
auguaaaugcacauucaca

SEQ ID NO: 200182 - RNA, 20 nt, Artificial Sequence
  Synthetic
aauguaaaugcacauucaca

SEQ ID NO: 200183 - RNA, 21 nt, Artificial Sequence
  Synthetic
aaauguaaaugcacauucaca

SEQ ID NO: 200184 - RNA, 22 nt, Artificial Sequence
  Synthetic
aaaauguaaaugcacauucaca

SEQ ID NO: 200185 - RNA, 23 nt, Artificial Sequence
  Synthetic
uaaaauguaaaugcacauucaca

SEQ ID NO: 200186 - RNA, 24 nt, Artificial Sequence
  Synthetic
cuaaaauguaaaugcacauucaca

SEQ ID NO: 200187 - RNA, 18 nt, Artificial Sequence
  Synthetic
acaauuuagucauucaca

SEQ ID NO: 200188 - RNA, 19 nt, Artificial Sequence
  Synthetic
uacaauuuagucauucaca

SEQ ID NO: 200189 - RNA, 20 nt, Artificial Sequence
  Synthetic
auacaauuuagucauucaca

SEQ ID NO: 200190 - RNA, 21 nt, Artificial Sequence
  Synthetic
uauacaauuuagucauucaca

SEQ ID NO: 200191 - RNA, 22 nt, Artificial Sequence
  Synthetic
auauacaauuuagucauucaca

SEQ ID NO: 200192 - RNA, 23 nt, Artificial Sequence
  Synthetic
cauauacaauuuagucauucaca

SEQ ID NO: 200193 - RNA, 24 nt, Artificial Sequence
  Synthetic
ucauauacaauuuagucauucaca

SEQ ID NO: 200194 - RNA, 18 nt, Artificial Sequence
  Synthetic
gguuacagaaacuucaca

SEQ ID NO: 200195 - RNA, 19 nt, Artificial Sequence
  Synthetic
ggguuacagaaacuucaca

SEQ ID NO: 200196 - RNA, 20 nt, Artificial Sequence
  Synthetic
aggguuacagaaacuucaca

SEQ ID NO: 200197 - RNA, 21 nt, Artificial Sequence
  Synthetic
uaggguuacagaaacuucaca

SEQ ID NO: 200198 - RNA, 22 nt, Artificial Sequence
  Synthetic
guaggguuacagaaacuucaca

SEQ ID NO: 200199 - RNA, 23 nt, Artificial Sequence
  Synthetic
uguaggguuacagaaacuucaca

SEQ ID NO: 200200 - RNA, 24 nt, Artificial Sequence
  Synthetic
uuguaggguuacagaaacuucaca

SEQ ID NO: 200201 - RNA, 18 nt, Artificial Sequence
  Synthetic
ucccacaggaacuucaca

SEQ ID NO: 200202 - RNA, 19 nt, Artificial Sequence
  Synthetic
gucccacaggaacuucaca

SEQ ID NO: 200203 - RNA, 20 nt, Artificial Sequence
  Synthetic
ugucccacaggaacuucaca

SEQ ID NO: 200204 - RNA, 21 nt, Artificial Sequence
  Synthetic
augucccacaggaacuucaca

SEQ ID NO: 200205 - RNA, 22 nt, Artificial Sequence
  Synthetic
aaugucccacaggaacuucaca

SEQ ID NO: 200206 - RNA, 23 nt, Artificial Sequence
  Synthetic
uaaugucccacaggaacuucaca

SEQ ID NO: 200207 - RNA, 24 nt, Artificial Sequence
  Synthetic
uuaaugucccacaggaacuucaca

SEQ ID NO: 200208 - RNA, 18 nt, Artificial Sequence
  Synthetic
guugauuccuacuucaca

SEQ ID NO: 200209 - RNA, 19 nt, Artificial Sequence
  Synthetic
uguugauuccuacuucaca

SEQ ID NO: 200210 - RNA, 20 nt, Artificial Sequence
  Synthetic
cuguugauuccuacuucaca

SEQ ID NO: 200211 - RNA, 21 nt, Artificial Sequence
  Synthetic
ucuguugauuccuacuucaca

SEQ ID NO: 200212 - RNA, 22 nt, Artificial Sequence
  Synthetic
gucuguugauuccuacuucaca

SEQ ID NO: 200213 - RNA, 23 nt, Artificial Sequence
  Synthetic
ggucuguugauuccuacuucaca

SEQ ID NO: 200214 - RNA, 24 nt, Artificial Sequence
  Synthetic
aggucuguugauuccuacuucaca

SEQ ID NO: 200215 - RNA, 18 nt, Artificial Sequence
  Synthetic
cauuauauuuacuucaca

SEQ ID NO: 200216 - RNA, 19 nt, Artificial Sequence
  Synthetic
ccauuauauuuacuucaca

SEQ ID NO: 200217 - RNA, 20 nt, Artificial Sequence
  Synthetic
uccauuauauuuacuucaca

SEQ ID NO: 200218 - RNA, 21 nt, Artificial Sequence
  Synthetic
auccauuauauuuacuucaca

SEQ ID NO: 200219 - RNA, 22 nt, Artificial Sequence
  Synthetic
uauccauuauauuuacuucaca

SEQ ID NO: 200220 - RNA, 23 nt, Artificial Sequence
  Synthetic
auauccauuauauuuacuucaca

SEQ ID NO: 200221 - RNA, 24 nt, Artificial Sequence
  Synthetic
aauauccauuauauuuacuucaca

SEQ ID NO: 200222 - RNA, 18 nt, Artificial Sequence
  Synthetic
uauuaaauuuccuucaca

SEQ ID NO: 200223 - RNA, 19 nt, Artificial Sequence
  Synthetic
cuauuaaauuuccuucaca

SEQ ID NO: 200224 - RNA, 20 nt, Artificial Sequence
  Synthetic
acuauuaaauuuccuucaca

SEQ ID NO: 200225 - RNA, 21 nt, Artificial Sequence
  Synthetic
uacuauuaaauuuccuucaca

SEQ ID NO: 200226 - RNA, 22 nt, Artificial Sequence
  Synthetic
auacuauuaaauuuccuucaca

SEQ ID NO: 200227 - RNA, 23 nt, Artificial Sequence
  Synthetic
aauacuauuaaauuuccuucaca

SEQ ID NO: 200228 - RNA, 24 nt, Artificial Sequence
  Synthetic
uaauacuauuaaauuuccuucaca

SEQ ID NO: 200229 - RNA, 18 nt, Artificial Sequence
  Synthetic
aguuguuaccucuucaca

SEQ ID NO: 200230 - RNA, 19 nt, Artificial Sequence
  Synthetic
caguuguuaccucuucaca

SEQ ID NO: 200231 - RNA, 20 nt, Artificial Sequence
  Synthetic
ccaguuguuaccucuucaca

SEQ ID NO: 200232 - RNA, 21 nt, Artificial Sequence
  Synthetic
uccaguuguuaccucuucaca

SEQ ID NO: 200233 - RNA, 22 nt, Artificial Sequence
  Synthetic
uuccaguuguuaccucuucaca

SEQ ID NO: 200234 - RNA, 23 nt, Artificial Sequence
  Synthetic
auuccaguuguuaccucuucaca

SEQ ID NO: 200235 - RNA, 24 nt, Artificial Sequence
  Synthetic
aauuccaguuguuaccucuucaca

SEQ ID NO: 200236 - RNA, 18 nt, Artificial Sequence
  Synthetic
caugguauguaguucaca

SEQ ID NO: 200237 - RNA, 19 nt, Artificial Sequence
  Synthetic
ccaugguauguaguucaca

SEQ ID NO: 200238 - RNA, 20 nt, Artificial Sequence
  Synthetic
uccaugguauguaguucaca

SEQ ID NO: 200239 - RNA, 21 nt, Artificial Sequence
  Synthetic
auccaugguauguaguucaca

SEQ ID NO: 200240 - RNA, 22 nt, Artificial Sequence
  Synthetic
cauccaugguauguaguucaca

SEQ ID NO: 200241 - RNA, 23 nt, Artificial Sequence
  Synthetic
ucauccaugguauguaguucaca

SEQ ID NO: 200242 - RNA, 24 nt, Artificial Sequence
  Synthetic
gucauccaugguauguaguucaca

SEQ ID NO: 200243 - RNA, 18 nt, Artificial Sequence
  Synthetic
uucucccagcauuucaca

SEQ ID NO: 200244 - RNA, 19 nt, Artificial Sequence
  Synthetic
uuucucccagcauuucaca

SEQ ID NO: 200245 - RNA, 20 nt, Artificial Sequence
  Synthetic
cuuucucccagcauuucaca

SEQ ID NO: 200246 - RNA, 21 nt, Artificial Sequence
  Synthetic
acuuucucccagcauuucaca

SEQ ID NO: 200247 - RNA, 22 nt, Artificial Sequence
  Synthetic
uacuuucucccagcauuucaca

SEQ ID NO: 200248 - RNA, 23 nt, Artificial Sequence
  Synthetic
guacuuucucccagcauuucaca

SEQ ID NO: 200249 - RNA, 24 nt, Artificial Sequence
  Synthetic
uguacuuucucccagcauuucaca

SEQ ID NO: 200250 - RNA, 18 nt, Artificial Sequence
  Synthetic
uaguaucccuauuucaca

SEQ ID NO: 200251 - RNA, 19 nt, Artificial Sequence
  Synthetic
guaguaucccuauuucaca

SEQ ID NO: 200252 - RNA, 20 nt, Artificial Sequence
  Synthetic
aguaguaucccuauuucaca

SEQ ID NO: 200253 - RNA, 21 nt, Artificial Sequence
  Synthetic
uaguaguaucccuauuucaca

SEQ ID NO: 200254 - RNA, 22 nt, Artificial Sequence
  Synthetic
guaguaguaucccuauuucaca

SEQ ID NO: 200255 - RNA, 23 nt, Artificial Sequence
  Synthetic
aguaguaguaucccuauuucaca

SEQ ID NO: 200256 - RNA, 24 nt, Artificial Sequence
  Synthetic
caguaguaguaucccuauuucaca

SEQ ID NO: 200257 - RNA, 18 nt, Artificial Sequence
  Synthetic
caucacugcuguuucaca

SEQ ID NO: 200258 - RNA, 19 nt, Artificial Sequence
  Synthetic
ccaucacugcuguuucaca

SEQ ID NO: 200259 - RNA, 20 nt, Artificial Sequence
  Synthetic
cccaucacugcuguuucaca

SEQ ID NO: 200260 - RNA, 21 nt, Artificial Sequence
  Synthetic
ucccaucacugcuguuucaca

SEQ ID NO: 200261 - RNA, 22 nt, Artificial Sequence
  Synthetic
uucccaucacugcuguuucaca

SEQ ID NO: 200262 - RNA, 23 nt, Artificial Sequence
  Synthetic
guucccaucacugcuguuucaca

SEQ ID NO: 200263 - RNA, 24 nt, Artificial Sequence
  Synthetic
gguucccaucacugcuguuucaca

SEQ ID NO: 200264 - RNA, 18 nt, Artificial Sequence
  Synthetic
cauagggaaauuuucaca

SEQ ID NO: 200265 - RNA, 19 nt, Artificial Sequence
  Synthetic
ucauagggaaauuuucaca

SEQ ID NO: 200266 - RNA, 20 nt, Artificial Sequence
  Synthetic
uucauagggaaauuuucaca

SEQ ID NO: 200267 - RNA, 21 nt, Artificial Sequence
  Synthetic
uuucauagggaaauuuucaca

SEQ ID NO: 200268 - RNA, 22 nt, Artificial Sequence
  Synthetic
guuucauagggaaauuuucaca

SEQ ID NO: 200269 - RNA, 23 nt, Artificial Sequence
  Synthetic
aguuucauagggaaauuuucaca

SEQ ID NO: 200270 - RNA, 24 nt, Artificial Sequence
  Synthetic
caguuucauagggaaauuuucaca

SEQ ID NO: 200271 - RNA, 18 nt, Artificial Sequence
  Synthetic
uggaaauauguuuucaca

SEQ ID NO: 200272 - RNA, 19 nt, Artificial Sequence
  Synthetic
cuggaaauauguuuucaca

SEQ ID NO: 200273 - RNA, 20 nt, Artificial Sequence
  Synthetic
ucuggaaauauguuuucaca

SEQ ID NO: 200274 - RNA, 21 nt, Artificial Sequence
  Synthetic
gucuggaaauauguuuucaca

SEQ ID NO: 200275 - RNA, 22 nt, Artificial Sequence
  Synthetic
ggucuggaaauauguuuucaca

SEQ ID NO: 200276 - RNA, 23 nt, Artificial Sequence
  Synthetic
uggucuggaaauauguuuucaca

SEQ ID NO: 200277 - RNA, 24 nt, Artificial Sequence
  Synthetic
uuggucuggaaauauguuuucaca

SEQ ID NO: 200278 - RNA, 18 nt, Artificial Sequence
  Synthetic
cuccauggaaaaaagaca

SEQ ID NO: 200279 - RNA, 19 nt, Artificial Sequence
  Synthetic
ccuccauggaaaaaagaca

SEQ ID NO: 200280 - RNA, 20 nt, Artificial Sequence
  Synthetic
cccuccauggaaaaaagaca

SEQ ID NO: 200281 - RNA, 21 nt, Artificial Sequence
  Synthetic
acccuccauggaaaaaagaca

SEQ ID NO: 200282 - RNA, 22 nt, Artificial Sequence
  Synthetic
uacccuccauggaaaaaagaca

SEQ ID NO: 200283 - RNA, 23 nt, Artificial Sequence
  Synthetic
guacccuccauggaaaaaagaca

SEQ ID NO: 200284 - RNA, 24 nt, Artificial Sequence
  Synthetic
aguacccuccauggaaaaaagaca

SEQ ID NO: 200285 - RNA, 18 nt, Artificial Sequence
  Synthetic
uucucaaauaaaaagaca

SEQ ID NO: 200286 - RNA, 19 nt, Artificial Sequence
  Synthetic
uuucucaaauaaaaagaca

SEQ ID NO: 200287 - RNA, 20 nt, Artificial Sequence
  Synthetic
uuuucucaaauaaaaagaca

SEQ ID NO: 200288 - RNA, 21 nt, Artificial Sequence
  Synthetic
cuuuucucaaauaaaaagaca

SEQ ID NO: 200289 - RNA, 22 nt, Artificial Sequence
  Synthetic
ucuuuucucaaauaaaaagaca

SEQ ID NO: 200290 - RNA, 23 nt, Artificial Sequence
  Synthetic
aucuuuucucaaauaaaaagaca

SEQ ID NO: 200291 - RNA, 24 nt, Artificial Sequence
  Synthetic
aaucuuuucucaaauaaaaagaca

SEQ ID NO: 200292 - RNA, 18 nt, Artificial Sequence
  Synthetic
gauguuguugaaaagaca

SEQ ID NO: 200293 - RNA, 19 nt, Artificial Sequence
  Synthetic
ugauguuguugaaaagaca

SEQ ID NO: 200294 - RNA, 20 nt, Artificial Sequence
  Synthetic
uugauguuguugaaaagaca

SEQ ID NO: 200295 - RNA, 21 nt, Artificial Sequence
  Synthetic
uuugauguuguugaaaagaca

SEQ ID NO: 200296 - RNA, 22 nt, Artificial Sequence
  Synthetic
auuugauguuguugaaaagaca

SEQ ID NO: 200297 - RNA, 23 nt, Artificial Sequence
  Synthetic
aauuugauguuguugaaaagaca

SEQ ID NO: 200298 - RNA, 24 nt, Artificial Sequence
  Synthetic
uaauuugauguuguugaaaagaca

SEQ ID NO: 200299 - RNA, 18 nt, Artificial Sequence
  Synthetic
caaaauagaucaaagaca

SEQ ID NO: 200300 - RNA, 19 nt, Artificial Sequence
  Synthetic
gcaaaauagaucaaagaca

SEQ ID NO: 200301 - RNA, 20 nt, Artificial Sequence
  Synthetic
ugcaaaauagaucaaagaca

SEQ ID NO: 200302 - RNA, 21 nt, Artificial Sequence
  Synthetic
augcaaaauagaucaaagaca

SEQ ID NO: 200303 - RNA, 22 nt, Artificial Sequence
  Synthetic
aaugcaaaauagaucaaagaca

SEQ ID NO: 200304 - RNA, 23 nt, Artificial Sequence
  Synthetic
aaaugcaaaauagaucaaagaca

SEQ ID NO: 200305 - RNA, 24 nt, Artificial Sequence
  Synthetic
gaaaugcaaaauagaucaaagaca

SEQ ID NO: 200306 - RNA, 18 nt, Artificial Sequence
  Synthetic
gagaaagucucaaagaca

SEQ ID NO: 200307 - RNA, 19 nt, Artificial Sequence
  Synthetic
ggagaaagucucaaagaca

SEQ ID NO: 200308 - RNA, 20 nt, Artificial Sequence
  Synthetic
aggagaaagucucaaagaca

SEQ ID NO: 200309 - RNA, 21 nt, Artificial Sequence
  Synthetic
aaggagaaagucucaaagaca

SEQ ID NO: 200310 - RNA, 22 nt, Artificial Sequence
  Synthetic
caaggagaaagucucaaagaca

SEQ ID NO: 200311 - RNA, 23 nt, Artificial Sequence
  Synthetic
gcaaggagaaagucucaaagaca

SEQ ID NO: 200312 - RNA, 24 nt, Artificial Sequence
  Synthetic
agcaaggagaaagucucaaagaca

SEQ ID NO: 200313 - RNA, 18 nt, Artificial Sequence
  Synthetic
caaagaucaagaaagaca

SEQ ID NO: 200314 - RNA, 19 nt, Artificial Sequence
  Synthetic
acaaagaucaagaaagaca

SEQ ID NO: 200315 - RNA, 20 nt, Artificial Sequence
  Synthetic
aacaaagaucaagaaagaca

SEQ ID NO: 200316 - RNA, 21 nt, Artificial Sequence
  Synthetic
caacaaagaucaagaaagaca

SEQ ID NO: 200317 - RNA, 22 nt, Artificial Sequence
  Synthetic
ccaacaaagaucaagaaagaca

SEQ ID NO: 200318 - RNA, 23 nt, Artificial Sequence
  Synthetic
accaacaaagaucaagaaagaca

SEQ ID NO: 200319 - RNA, 24 nt, Artificial Sequence
  Synthetic
aaccaacaaagaucaagaaagaca

SEQ ID NO: 200320 - RNA, 18 nt, Artificial Sequence
  Synthetic
aacaugagaggaaagaca

SEQ ID NO: 200321 - RNA, 19 nt, Artificial Sequence
  Synthetic
caacaugagaggaaagaca

SEQ ID NO: 200322 - RNA, 20 nt, Artificial Sequence
  Synthetic
ccaacaugagaggaaagaca

SEQ ID NO: 200323 - RNA, 21 nt, Artificial Sequence
  Synthetic
cccaacaugagaggaaagaca

SEQ ID NO: 200324 - RNA, 22 nt, Artificial Sequence
  Synthetic
acccaacaugagaggaaagaca

SEQ ID NO: 200325 - RNA, 23 nt, Artificial Sequence
  Synthetic
cacccaacaugagaggaaagaca

SEQ ID NO: 200326 - RNA, 24 nt, Artificial Sequence
  Synthetic
ucacccaacaugagaggaaagaca

SEQ ID NO: 200327 - RNA, 18 nt, Artificial Sequence
  Synthetic
aaguggaguugaaagaca

SEQ ID NO: 200328 - RNA, 19 nt, Artificial Sequence
  Synthetic
aaaguggaguugaaagaca

SEQ ID NO: 200329 - RNA, 20 nt, Artificial Sequence
  Synthetic
gaaaguggaguugaaagaca

SEQ ID NO: 200330 - RNA, 21 nt, Artificial Sequence
  Synthetic
ugaaaguggaguugaaagaca

SEQ ID NO: 200331 - RNA, 22 nt, Artificial Sequence
  Synthetic
uugaaaguggaguugaaagaca

SEQ ID NO: 200332 - RNA, 23 nt, Artificial Sequence
  Synthetic
uuugaaaguggaguugaaagaca

SEQ ID NO: 200333 - RNA, 24 nt, Artificial Sequence
  Synthetic
auuugaaaguggaguugaaagaca

SEQ ID NO: 200334 - RNA, 18 nt, Artificial Sequence
  Synthetic
ugugaaguuuuaaagaca

SEQ ID NO: 200335 - RNA, 19 nt, Artificial Sequence
  Synthetic
augugaaguuuuaaagaca

SEQ ID NO: 200336 - RNA, 20 nt, Artificial Sequence
  Synthetic
aaugugaaguuuuaaagaca

SEQ ID NO: 200337 - RNA, 21 nt, Artificial Sequence
  Synthetic
aaaugugaaguuuuaaagaca

SEQ ID NO: 200338 - RNA, 22 nt, Artificial Sequence
  Synthetic
uaaaugugaaguuuuaaagaca

SEQ ID NO: 200339 - RNA, 23 nt, Artificial Sequence
  Synthetic
auaaaugugaaguuuuaaagaca

SEQ ID NO: 200340 - RNA, 24 nt, Artificial Sequence
  Synthetic
uauaaaugugaaguuuuaaagaca

SEQ ID NO: 200341 - RNA, 18 nt, Artificial Sequence
  Synthetic
agaugguuuuuaaagaca

SEQ ID NO: 200342 - RNA, 19 nt, Artificial Sequence
  Synthetic
uagaugguuuuuaaagaca

SEQ ID NO: 200343 - RNA, 20 nt, Artificial Sequence
  Synthetic
uuagaugguuuuuaaagaca

SEQ ID NO: 200344 - RNA, 21 nt, Artificial Sequence
  Synthetic
cuuagaugguuuuuaaagaca

SEQ ID NO: 200345 - RNA, 22 nt, Artificial Sequence
  Synthetic
ccuuagaugguuuuuaaagaca

SEQ ID NO: 200346 - RNA, 23 nt, Artificial Sequence
  Synthetic
cccuuagaugguuuuuaaagaca

SEQ ID NO: 200347 - RNA, 24 nt, Artificial Sequence
  Synthetic
gcccuuagaugguuuuuaaagaca

SEQ ID NO: 200348 - RNA, 18 nt, Artificial Sequence
  Synthetic
cugauaucaaccaagaca

SEQ ID NO: 200349 - RNA, 19 nt, Artificial Sequence
  Synthetic
ccugauaucaaccaagaca

SEQ ID NO: 200350 - RNA, 20 nt, Artificial Sequence
  Synthetic
accugauaucaaccaagaca

SEQ ID NO: 200351 - RNA, 21 nt, Artificial Sequence
  Synthetic
caccugauaucaaccaagaca

SEQ ID NO: 200352 - RNA, 22 nt, Artificial Sequence
  Synthetic
ucaccugauaucaaccaagaca

SEQ ID NO: 200353 - RNA, 23 nt, Artificial Sequence
  Synthetic
uucaccugauaucaaccaagaca

SEQ ID NO: 200354 - RNA, 24 nt, Artificial Sequence
  Synthetic
cuucaccugauaucaaccaagaca

SEQ ID NO: 200355 - RNA, 18 nt, Artificial Sequence
  Synthetic
auguuaagcgccaagaca

SEQ ID NO: 200356 - RNA, 19 nt, Artificial Sequence
  Synthetic
aauguuaagcgccaagaca

SEQ ID NO: 200357 - RNA, 20 nt, Artificial Sequence
  Synthetic
aaauguuaagcgccaagaca

SEQ ID NO: 200358 - RNA, 21 nt, Artificial Sequence
  Synthetic
caaauguuaagcgccaagaca

SEQ ID NO: 200359 - RNA, 22 nt, Artificial Sequence
  Synthetic
ccaaauguuaagcgccaagaca

SEQ ID NO: 200360 - RNA, 23 nt, Artificial Sequence
  Synthetic
gccaaauguuaagcgccaagaca

SEQ ID NO: 200361 - RNA, 24 nt, Artificial Sequence
  Synthetic
agccaaauguuaagcgccaagaca

SEQ ID NO: 200362 - RNA, 18 nt, Artificial Sequence
  Synthetic
ggagauacugccaagaca

SEQ ID NO: 200363 - RNA, 19 nt, Artificial Sequence
  Synthetic
aggagauacugccaagaca

SEQ ID NO: 200364 - RNA, 20 nt, Artificial Sequence
  Synthetic
aaggagauacugccaagaca

SEQ ID NO: 200365 - RNA, 21 nt, Artificial Sequence
  Synthetic
aaaggagauacugccaagaca

SEQ ID NO: 200366 - RNA, 22 nt, Artificial Sequence
  Synthetic
caaaggagauacugccaagaca

SEQ ID NO: 200367 - RNA, 23 nt, Artificial Sequence
  Synthetic
acaaaggagauacugccaagaca

SEQ ID NO: 200368 - RNA, 24 nt, Artificial Sequence
  Synthetic
gacaaaggagauacugccaagaca

SEQ ID NO: 200369 - RNA, 18 nt, Artificial Sequence
  Synthetic
uugugccaaaucaagaca

SEQ ID NO: 200370 - RNA, 19 nt, Artificial Sequence
  Synthetic
auugugccaaaucaagaca

SEQ ID NO: 200371 - RNA, 20 nt, Artificial Sequence
  Synthetic
aauugugccaaaucaagaca

SEQ ID NO: 200372 - RNA, 21 nt, Artificial Sequence
  Synthetic
uaauugugccaaaucaagaca

SEQ ID NO: 200373 - RNA, 22 nt, Artificial Sequence
  Synthetic
cuaauugugccaaaucaagaca

SEQ ID NO: 200374 - RNA, 23 nt, Artificial Sequence
  Synthetic
gcuaauugugccaaaucaagaca

SEQ ID NO: 200375 - RNA, 24 nt, Artificial Sequence
  Synthetic
ugcuaauugugccaaaucaagaca

SEQ ID NO: 200376 - RNA, 18 nt, Artificial Sequence
  Synthetic
auuucuccaaagaagaca

SEQ ID NO: 200377 - RNA, 19 nt, Artificial Sequence
  Synthetic
uauuucuccaaagaagaca

SEQ ID NO: 200378 - RNA, 20 nt, Artificial Sequence
  Synthetic
auauuucuccaaagaagaca

SEQ ID NO: 200379 - RNA, 21 nt, Artificial Sequence
  Synthetic
uauauuucuccaaagaagaca

SEQ ID NO: 200380 - RNA, 22 nt, Artificial Sequence
  Synthetic
auauauuucuccaaagaagaca

SEQ ID NO: 200381 - RNA, 23 nt, Artificial Sequence
  Synthetic
uauauauuucuccaaagaagaca

SEQ ID NO: 200382 - RNA, 24 nt, Artificial Sequence
  Synthetic
auauauauuucuccaaagaagaca

SEQ ID NO: 200383 - RNA, 18 nt, Artificial Sequence
  Synthetic
ccuguacuagagaagaca

SEQ ID NO: 200384 - RNA, 19 nt, Artificial Sequence
  Synthetic
accuguacuagagaagaca

SEQ ID NO: 200385 - RNA, 20 nt, Artificial Sequence
  Synthetic
uaccuguacuagagaagaca

SEQ ID NO: 200386 - RNA, 21 nt, Artificial Sequence
  Synthetic
cuaccuguacuagagaagaca

SEQ ID NO: 200387 - RNA, 22 nt, Artificial Sequence
  Synthetic
acuaccuguacuagagaagaca

SEQ ID NO: 200388 - RNA, 23 nt, Artificial Sequence
  Synthetic
aacuaccuguacuagagaagaca

SEQ ID NO: 200389 - RNA, 24 nt, Artificial Sequence
  Synthetic
gaacuaccuguacuagagaagaca

SEQ ID NO: 200390 - RNA, 18 nt, Artificial Sequence
  Synthetic
uuuaugcuugagaagaca

SEQ ID NO: 200391 - RNA, 19 nt, Artificial Sequence
  Synthetic
auuuaugcuugagaagaca

SEQ ID NO: 200392 - RNA, 20 nt, Artificial Sequence
  Synthetic
uauuuaugcuugagaagaca

SEQ ID NO: 200393 - RNA, 21 nt, Artificial Sequence
  Synthetic
cuauuuaugcuugagaagaca

SEQ ID NO: 200394 - RNA, 22 nt, Artificial Sequence
  Synthetic
ccuauuuaugcuugagaagaca

SEQ ID NO: 200395 - RNA, 23 nt, Artificial Sequence
  Synthetic
uccuauuuaugcuugagaagaca

SEQ ID NO: 200396 - RNA, 24 nt, Artificial Sequence
  Synthetic
auccuauuuaugcuugagaagaca

SEQ ID NO: 200397 - RNA, 18 nt, Artificial Sequence
  Synthetic
aagagagagaggaagaca

SEQ ID NO: 200398 - RNA, 19 nt, Artificial Sequence
  Synthetic
aaagagagagaggaagaca

SEQ ID NO: 200399 - RNA, 20 nt, Artificial Sequence
  Synthetic
gaaagagagagaggaagaca

SEQ ID NO: 200400 - RNA, 21 nt, Artificial Sequence
  Synthetic
agaaagagagagaggaagaca

SEQ ID NO: 200401 - RNA, 22 nt, Artificial Sequence
  Synthetic
gagaaagagagagaggaagaca

SEQ ID NO: 200402 - RNA, 23 nt, Artificial Sequence
  Synthetic
agagaaagagagagaggaagaca

SEQ ID NO: 200403 - RNA, 24 nt, Artificial Sequence
  Synthetic
cagagaaagagagagaggaagaca

SEQ ID NO: 200404 - RNA, 18 nt, Artificial Sequence
  Synthetic
uaauggauggggaagaca

SEQ ID NO: 200405 - RNA, 19 nt, Artificial Sequence
  Synthetic
uuaauggauggggaagaca

SEQ ID NO: 200406 - RNA, 20 nt, Artificial Sequence
  Synthetic
uuuaauggauggggaagaca

SEQ ID NO: 200407 - RNA, 21 nt, Artificial Sequence
  Synthetic
auuuaauggauggggaagaca

SEQ ID NO: 200408 - RNA, 22 nt, Artificial Sequence
  Synthetic
uauuuaauggauggggaagaca

SEQ ID NO: 200409 - RNA, 23 nt, Artificial Sequence
  Synthetic
guauuuaauggauggggaagaca

SEQ ID NO: 200410 - RNA, 24 nt, Artificial Sequence
  Synthetic
uguauuuaauggauggggaagaca

SEQ ID NO: 200411 - RNA, 18 nt, Artificial Sequence
  Synthetic
ggaaguaaguggaagaca

SEQ ID NO: 200412 - RNA, 19 nt, Artificial Sequence
  Synthetic
aggaaguaaguggaagaca

SEQ ID NO: 200413 - RNA, 20 nt, Artificial Sequence
  Synthetic
gaggaaguaaguggaagaca

SEQ ID NO: 200414 - RNA, 21 nt, Artificial Sequence
  Synthetic
ugaggaaguaaguggaagaca

SEQ ID NO: 200415 - RNA, 22 nt, Artificial Sequence
  Synthetic
gugaggaaguaaguggaagaca

SEQ ID NO: 200416 - RNA, 23 nt, Artificial Sequence
  Synthetic
agugaggaaguaaguggaagaca

SEQ ID NO: 200417 - RNA, 24 nt, Artificial Sequence
  Synthetic
aagugaggaaguaaguggaagaca

SEQ ID NO: 200418 - RNA, 18 nt, Artificial Sequence
  Synthetic
guuaugcuaaugaagaca

SEQ ID NO: 200419 - RNA, 19 nt, Artificial Sequence
  Synthetic
aguuaugcuaaugaagaca

SEQ ID NO: 200420 - RNA, 20 nt, Artificial Sequence
  Synthetic
aaguuaugcuaaugaagaca

SEQ ID NO: 200421 - RNA, 21 nt, Artificial Sequence
  Synthetic
aaaguuaugcuaaugaagaca

SEQ ID NO: 200422 - RNA, 22 nt, Artificial Sequence
  Synthetic
gaaaguuaugcuaaugaagaca

SEQ ID NO: 200423 - RNA, 23 nt, Artificial Sequence
  Synthetic
ggaaaguuaugcuaaugaagaca

SEQ ID NO: 200424 - RNA, 24 nt, Artificial Sequence
  Synthetic
aggaaaguuaugcuaaugaagaca

SEQ ID NO: 200425 - RNA, 18 nt, Artificial Sequence
  Synthetic
agagcgaaacugaagaca

SEQ ID NO: 200426 - RNA, 19 nt, Artificial Sequence
  Synthetic
aagagcgaaacugaagaca

SEQ ID NO: 200427 - RNA, 20 nt, Artificial Sequence
  Synthetic
aaagagcgaaacugaagaca

SEQ ID NO: 200428 - RNA, 21 nt, Artificial Sequence
  Synthetic
aaaagagcgaaacugaagaca

SEQ ID NO: 200429 - RNA, 22 nt, Artificial Sequence
  Synthetic
aaaaagagcgaaacugaagaca

SEQ ID NO: 200430 - RNA, 23 nt, Artificial Sequence
  Synthetic
uaaaaagagcgaaacugaagaca

SEQ ID NO: 200431 - RNA, 24 nt, Artificial Sequence
  Synthetic
auaaaaagagcgaaacugaagaca

SEQ ID NO: 200432 - RNA, 18 nt, Artificial Sequence
  Synthetic
agacaagggcugaagaca

SEQ ID NO: 200433 - RNA, 19 nt, Artificial Sequence
  Synthetic
aagacaagggcugaagaca

SEQ ID NO: 200434 - RNA, 20 nt, Artificial Sequence
  Synthetic
gaagacaagggcugaagaca

SEQ ID NO: 200435 - RNA, 21 nt, Artificial Sequence
  Synthetic
ggaagacaagggcugaagaca

SEQ ID NO: 200436 - RNA, 22 nt, Artificial Sequence
  Synthetic
aggaagacaagggcugaagaca

SEQ ID NO: 200437 - RNA, 23 nt, Artificial Sequence
  Synthetic
gaggaagacaagggcugaagaca

SEQ ID NO: 200438 - RNA, 24 nt, Artificial Sequence
  Synthetic
ggaggaagacaagggcugaagaca

SEQ ID NO: 200439 - RNA, 18 nt, Artificial Sequence
  Synthetic
ugagaagaauugaagaca

SEQ ID NO: 200440 - RNA, 19 nt, Artificial Sequence
  Synthetic
cugagaagaauugaagaca

SEQ ID NO: 200441 - RNA, 20 nt, Artificial Sequence
  Synthetic
gcugagaagaauugaagaca

SEQ ID NO: 200442 - RNA, 21 nt, Artificial Sequence
  Synthetic
ugcugagaagaauugaagaca

SEQ ID NO: 200443 - RNA, 22 nt, Artificial Sequence
  Synthetic
uugcugagaagaauugaagaca

SEQ ID NO: 200444 - RNA, 23 nt, Artificial Sequence
  Synthetic
uuugcugagaagaauugaagaca

SEQ ID NO: 200445 - RNA, 24 nt, Artificial Sequence
  Synthetic
guuugcugagaagaauugaagaca

SEQ ID NO: 200446 - RNA, 18 nt, Artificial Sequence
  Synthetic
agacggagauugaagaca

SEQ ID NO: 200447 - RNA, 19 nt, Artificial Sequence
  Synthetic
uagacggagauugaagaca

SEQ ID NO: 200448 - RNA, 20 nt, Artificial Sequence
  Synthetic
guagacggagauugaagaca

SEQ ID NO: 200449 - RNA, 21 nt, Artificial Sequence
  Synthetic
uguagacggagauugaagaca

SEQ ID NO: 200450 - RNA, 22 nt, Artificial Sequence
  Synthetic
uuguagacggagauugaagaca

SEQ ID NO: 200451 - RNA, 23 nt, Artificial Sequence
  Synthetic
guuguagacggagauugaagaca

SEQ ID NO: 200452 - RNA, 24 nt, Artificial Sequence
  Synthetic
gguuguagacggagauugaagaca

SEQ ID NO: 200453 - RNA, 18 nt, Artificial Sequence
  Synthetic
gccaauauggcuaagaca

SEQ ID NO: 200454 - RNA, 19 nt, Artificial Sequence
  Synthetic
agccaauauggcuaagaca

SEQ ID NO: 200455 - RNA, 20 nt, Artificial Sequence
  Synthetic
aagccaauauggcuaagaca

SEQ ID NO: 200456 - RNA, 21 nt, Artificial Sequence
  Synthetic
uaagccaauauggcuaagaca

SEQ ID NO: 200457 - RNA, 22 nt, Artificial Sequence
  Synthetic
auaagccaauauggcuaagaca

SEQ ID NO: 200458 - RNA, 23 nt, Artificial Sequence
  Synthetic
aauaagccaauauggcuaagaca

SEQ ID NO: 200459 - RNA, 24 nt, Artificial Sequence
  Synthetic
caauaagccaauauggcuaagaca

SEQ ID NO: 200460 - RNA, 18 nt, Artificial Sequence
  Synthetic
aucaaaaggauuaagaca

SEQ ID NO: 200461 - RNA, 19 nt, Artificial Sequence
  Synthetic
caucaaaaggauuaagaca

SEQ ID NO: 200462 - RNA, 20 nt, Artificial Sequence
  Synthetic
ucaucaaaaggauuaagaca

SEQ ID NO: 200463 - RNA, 21 nt, Artificial Sequence
  Synthetic
uucaucaaaaggauuaagaca

SEQ ID NO: 200464 - RNA, 22 nt, Artificial Sequence
  Synthetic
auucaucaaaaggauuaagaca

SEQ ID NO: 200465 - RNA, 23 nt, Artificial Sequence
  Synthetic
cauucaucaaaaggauuaagaca

SEQ ID NO: 200466 - RNA, 24 nt, Artificial Sequence
  Synthetic
ccauucaucaaaaggauuaagaca

SEQ ID NO: 200467 - RNA, 18 nt, Artificial Sequence
  Synthetic
gcagagacacaacagaca

SEQ ID NO: 200468 - RNA, 19 nt, Artificial Sequence
  Synthetic
ggcagagacacaacagaca

SEQ ID NO: 200469 - RNA, 20 nt, Artificial Sequence
  Synthetic
uggcagagacacaacagaca

SEQ ID NO: 200470 - RNA, 21 nt, Artificial Sequence
  Synthetic
cuggcagagacacaacagaca

SEQ ID NO: 200471 - RNA, 22 nt, Artificial Sequence
  Synthetic
ccuggcagagacacaacagaca

SEQ ID NO: 200472 - RNA, 23 nt, Artificial Sequence
  Synthetic
accuggcagagacacaacagaca

SEQ ID NO: 200473 - RNA, 24 nt, Artificial Sequence
  Synthetic
aaccuggcagagacacaacagaca

SEQ ID NO: 200474 - RNA, 18 nt, Artificial Sequence
  Synthetic
cacacacacacacagaca

SEQ ID NO: 200475 - RNA, 19 nt, Artificial Sequence
  Synthetic
acacacacacacacagaca

SEQ ID NO: 200476 - RNA, 20 nt, Artificial Sequence
  Synthetic
cacacacacacacacagaca

SEQ ID NO: 200477 - RNA, 21 nt, Artificial Sequence
  Synthetic
acacacacacacacacagaca

SEQ ID NO: 200478 - RNA, 22 nt, Artificial Sequence
  Synthetic
cacacacacacacacacagaca

SEQ ID NO: 200479 - RNA, 23 nt, Artificial Sequence
  Synthetic
acacacacacacacacacagaca

SEQ ID NO: 200480 - RNA, 24 nt, Artificial Sequence
  Synthetic
cacacacacacacacacacagaca

SEQ ID NO: 200481 - RNA, 18 nt, Artificial Sequence
  Synthetic
agauacaguagacagaca

SEQ ID NO: 200482 - RNA, 19 nt, Artificial Sequence
  Synthetic
aagauacaguagacagaca

SEQ ID NO: 200483 - RNA, 20 nt, Artificial Sequence
  Synthetic
gaagauacaguagacagaca

SEQ ID NO: 200484 - RNA, 21 nt, Artificial Sequence
  Synthetic
agaagauacaguagacagaca

SEQ ID NO: 200485 - RNA, 22 nt, Artificial Sequence
  Synthetic
aagaagauacaguagacagaca

SEQ ID NO: 200486 - RNA, 23 nt, Artificial Sequence
  Synthetic
gaagaagauacaguagacagaca

SEQ ID NO: 200487 - RNA, 24 nt, Artificial Sequence
  Synthetic
agaagaagauacaguagacagaca

SEQ ID NO: 200488 - RNA, 18 nt, Artificial Sequence
  Synthetic
aacauagugaaccagaca

SEQ ID NO: 200489 - RNA, 19 nt, Artificial Sequence
  Synthetic
caacauagugaaccagaca

SEQ ID NO: 200490 - RNA, 20 nt, Artificial Sequence
  Synthetic
ucaacauagugaaccagaca

SEQ ID NO: 200491 - RNA, 21 nt, Artificial Sequence
  Synthetic
aucaacauagugaaccagaca

SEQ ID NO: 200492 - RNA, 22 nt, Artificial Sequence
  Synthetic
uaucaacauagugaaccagaca

SEQ ID NO: 200493 - RNA, 23 nt, Artificial Sequence
  Synthetic
uuaucaacauagugaaccagaca

SEQ ID NO: 200494 - RNA, 24 nt, Artificial Sequence
  Synthetic
uuuaucaacauagugaaccagaca

SEQ ID NO: 200495 - RNA, 18 nt, Artificial Sequence
  Synthetic
auguccaaacaccagaca

SEQ ID NO: 200496 - RNA, 19 nt, Artificial Sequence
  Synthetic
aauguccaaacaccagaca

SEQ ID NO: 200497 - RNA, 20 nt, Artificial Sequence
  Synthetic
uaauguccaaacaccagaca

SEQ ID NO: 200498 - RNA, 21 nt, Artificial Sequence
  Synthetic
uuaauguccaaacaccagaca

SEQ ID NO: 200499 - RNA, 22 nt, Artificial Sequence
  Synthetic
cuuaauguccaaacaccagaca

SEQ ID NO: 200500 - RNA, 23 nt, Artificial Sequence
  Synthetic
gcuuaauguccaaacaccagaca

SEQ ID NO: 200501 - RNA, 24 nt, Artificial Sequence
  Synthetic
agcuuaauguccaaacaccagaca

SEQ ID NO: 200502 - RNA, 18 nt, Artificial Sequence
  Synthetic
gagacauaacaccagaca

SEQ ID NO: 200503 - RNA, 19 nt, Artificial Sequence
  Synthetic
ugagacauaacaccagaca

SEQ ID NO: 200504 - RNA, 20 nt, Artificial Sequence
  Synthetic
uugagacauaacaccagaca

SEQ ID NO: 200505 - RNA, 21 nt, Artificial Sequence
  Synthetic
guugagacauaacaccagaca

SEQ ID NO: 200506 - RNA, 22 nt, Artificial Sequence
  Synthetic
aguugagacauaacaccagaca

SEQ ID NO: 200507 - RNA, 23 nt, Artificial Sequence
  Synthetic
gaguugagacauaacaccagaca

SEQ ID NO: 200508 - RNA, 24 nt, Artificial Sequence
  Synthetic
ugaguugagacauaacaccagaca

SEQ ID NO: 200509 - RNA, 18 nt, Artificial Sequence
  Synthetic
ucccugggcuaccagaca

SEQ ID NO: 200510 - RNA, 19 nt, Artificial Sequence
  Synthetic
uucccugggcuaccagaca

SEQ ID NO: 200511 - RNA, 20 nt, Artificial Sequence
  Synthetic
uuucccugggcuaccagaca

SEQ ID NO: 200512 - RNA, 21 nt, Artificial Sequence
  Synthetic
guuucccugggcuaccagaca

SEQ ID NO: 200513 - RNA, 22 nt, Artificial Sequence
  Synthetic
uguuucccugggcuaccagaca

SEQ ID NO: 200514 - RNA, 23 nt, Artificial Sequence
  Synthetic
cuguuucccugggcuaccagaca

SEQ ID NO: 200515 - RNA, 24 nt, Artificial Sequence
  Synthetic
acuguuucccugggcuaccagaca

SEQ ID NO: 200516 - RNA, 18 nt, Artificial Sequence
  Synthetic
aagaauauguuccagaca

SEQ ID NO: 200517 - RNA, 19 nt, Artificial Sequence
  Synthetic
aaagaauauguuccagaca

SEQ ID NO: 200518 - RNA, 20 nt, Artificial Sequence
  Synthetic
uaaagaauauguuccagaca

SEQ ID NO: 200519 - RNA, 21 nt, Artificial Sequence
  Synthetic
cuaaagaauauguuccagaca

SEQ ID NO: 200520 - RNA, 22 nt, Artificial Sequence
  Synthetic
ccuaaagaauauguuccagaca

SEQ ID NO: 200521 - RNA, 23 nt, Artificial Sequence
  Synthetic
accuaaagaauauguuccagaca

SEQ ID NO: 200522 - RNA, 24 nt, Artificial Sequence
  Synthetic
uaccuaaagaauauguuccagaca

SEQ ID NO: 200523 - RNA, 18 nt, Artificial Sequence
  Synthetic
acaaauguuaagcagaca

SEQ ID NO: 200524 - RNA, 19 nt, Artificial Sequence
  Synthetic
aacaaauguuaagcagaca

SEQ ID NO: 200525 - RNA, 20 nt, Artificial Sequence
  Synthetic
caacaaauguuaagcagaca

SEQ ID NO: 200526 - RNA, 21 nt, Artificial Sequence
  Synthetic
ucaacaaauguuaagcagaca

SEQ ID NO: 200527 - RNA, 22 nt, Artificial Sequence
  Synthetic
aucaacaaauguuaagcagaca

SEQ ID NO: 200528 - RNA, 23 nt, Artificial Sequence
  Synthetic
aaucaacaaauguuaagcagaca

SEQ ID NO: 200529 - RNA, 24 nt, Artificial Sequence
  Synthetic
aaaucaacaaauguuaagcagaca

SEQ ID NO: 200530 - RNA, 18 nt, Artificial Sequence
  Synthetic
acaugggcugagcagaca

SEQ ID NO: 200531 - RNA, 19 nt, Artificial Sequence
  Synthetic
aacaugggcugagcagaca

SEQ ID NO: 200532 - RNA, 20 nt, Artificial Sequence
  Synthetic
aaacaugggcugagcagaca

SEQ ID NO: 200533 - RNA, 21 nt, Artificial Sequence
  Synthetic
gaaacaugggcugagcagaca

SEQ ID NO: 200534 - RNA, 22 nt, Artificial Sequence
  Synthetic
agaaacaugggcugagcagaca

SEQ ID NO: 200535 - RNA, 23 nt, Artificial Sequence
  Synthetic
aagaaacaugggcugagcagaca

SEQ ID NO: 200536 - RNA, 24 nt, Artificial Sequence
  Synthetic
aaagaaacaugggcugagcagaca

SEQ ID NO: 200537 - RNA, 18 nt, Artificial Sequence
  Synthetic
cagcuguuugggcagaca

SEQ ID NO: 200538 - RNA, 19 nt, Artificial Sequence
  Synthetic
gcagcuguuugggcagaca

SEQ ID NO: 200539 - RNA, 20 nt, Artificial Sequence
  Synthetic
ggcagcuguuugggcagaca

SEQ ID NO: 200540 - RNA, 21 nt, Artificial Sequence
  Synthetic
gggcagcuguuugggcagaca

SEQ ID NO: 200541 - RNA, 22 nt, Artificial Sequence
  Synthetic
ugggcagcuguuugggcagaca

SEQ ID NO: 200542 - RNA, 23 nt, Artificial Sequence
  Synthetic
uugggcagcuguuugggcagaca

SEQ ID NO: 200543 - RNA, 24 nt, Artificial Sequence
  Synthetic
auugggcagcuguuugggcagaca

SEQ ID NO: 200544 - RNA, 18 nt, Artificial Sequence
  Synthetic
cgauguagcugucagaca

SEQ ID NO: 200545 - RNA, 19 nt, Artificial Sequence
  Synthetic
gcgauguagcugucagaca

SEQ ID NO: 200546 - RNA, 20 nt, Artificial Sequence
  Synthetic
agcgauguagcugucagaca

SEQ ID NO: 200547 - RNA, 21 nt, Artificial Sequence
  Synthetic
cagcgauguagcugucagaca

SEQ ID NO: 200548 - RNA, 22 nt, Artificial Sequence
  Synthetic
acagcgauguagcugucagaca

SEQ ID NO: 200549 - RNA, 23 nt, Artificial Sequence
  Synthetic
uacagcgauguagcugucagaca

SEQ ID NO: 200550 - RNA, 24 nt, Artificial Sequence
  Synthetic
auacagcgauguagcugucagaca

SEQ ID NO: 200551 - RNA, 18 nt, Artificial Sequence
  Synthetic
caacuuucuugucagaca

SEQ ID NO: 200552 - RNA, 19 nt, Artificial Sequence
  Synthetic
gcaacuuucuugucagaca

SEQ ID NO: 200553 - RNA, 20 nt, Artificial Sequence
  Synthetic
agcaacuuucuugucagaca

SEQ ID NO: 200554 - RNA, 21 nt, Artificial Sequence
  Synthetic
cagcaacuuucuugucagaca

SEQ ID NO: 200555 - RNA, 22 nt, Artificial Sequence
  Synthetic
ucagcaacuuucuugucagaca

SEQ ID NO: 200556 - RNA, 23 nt, Artificial Sequence
  Synthetic
uucagcaacuuucuugucagaca

SEQ ID NO: 200557 - RNA, 24 nt, Artificial Sequence
  Synthetic
auucagcaacuuucuugucagaca

SEQ ID NO: 200558 - RNA, 18 nt, Artificial Sequence
  Synthetic
auauagcagaaagagaca

SEQ ID NO: 200559 - RNA, 19 nt, Artificial Sequence
  Synthetic
aauauagcagaaagagaca

SEQ ID NO: 200560 - RNA, 20 nt, Artificial Sequence
  Synthetic
uaauauagcagaaagagaca

SEQ ID NO: 200561 - RNA, 21 nt, Artificial Sequence
  Synthetic
uuaauauagcagaaagagaca

SEQ ID NO: 200562 - RNA, 22 nt, Artificial Sequence
  Synthetic
auuaauauagcagaaagagaca

SEQ ID NO: 200563 - RNA, 23 nt, Artificial Sequence
  Synthetic
cauuaauauagcagaaagagaca

SEQ ID NO: 200564 - RNA, 24 nt, Artificial Sequence
  Synthetic
ucauuaauauagcagaaagagaca

SEQ ID NO: 200565 - RNA, 18 nt, Artificial Sequence
  Synthetic
ggaggggggaaagagaca

SEQ ID NO: 200566 - RNA, 19 nt, Artificial Sequence
  Synthetic
gggaggggggaaagagaca

SEQ ID NO: 200567 - RNA, 20 nt, Artificial Sequence
  Synthetic
ggggaggggggaaagagaca

SEQ ID NO: 200568 - RNA, 21 nt, Artificial Sequence
  Synthetic
gggggaggggggaaagagaca

SEQ ID NO: 200569 - RNA, 22 nt, Artificial Sequence
  Synthetic
ugggggaggggggaaagagaca

SEQ ID NO: 200570 - RNA, 23 nt, Artificial Sequence
  Synthetic
gugggggaggggggaaagagaca

SEQ ID NO: 200571 - RNA, 24 nt, Artificial Sequence
  Synthetic
agugggggaggggggaaagagaca

SEQ ID NO: 200572 - RNA, 18 nt, Artificial Sequence
  Synthetic
uuaaucuugaaagagaca

SEQ ID NO: 200573 - RNA, 19 nt, Artificial Sequence
  Synthetic
auuaaucuugaaagagaca

SEQ ID NO: 200574 - RNA, 20 nt, Artificial Sequence
  Synthetic
uauuaaucuugaaagagaca

SEQ ID NO: 200575 - RNA, 21 nt, Artificial Sequence
  Synthetic
auauuaaucuugaaagagaca

SEQ ID NO: 200576 - RNA, 22 nt, Artificial Sequence
  Synthetic
cauauuaaucuugaaagagaca

SEQ ID NO: 200577 - RNA, 23 nt, Artificial Sequence
  Synthetic
ucauauuaaucuugaaagagaca

SEQ ID NO: 200578 - RNA, 24 nt, Artificial Sequence
  Synthetic
gucauauuaaucuugaaagagaca

SEQ ID NO: 200579 - RNA, 18 nt, Artificial Sequence
  Synthetic
ccuaagcuugaagagaca

SEQ ID NO: 200580 - RNA, 19 nt, Artificial Sequence
  Synthetic
cccuaagcuugaagagaca

SEQ ID NO: 200581 - RNA, 20 nt, Artificial Sequence
  Synthetic
ccccuaagcuugaagagaca

SEQ ID NO: 200582 - RNA, 21 nt, Artificial Sequence
  Synthetic
uccccuaagcuugaagagaca

SEQ ID NO: 200583 - RNA, 22 nt, Artificial Sequence
  Synthetic
cuccccuaagcuugaagagaca

SEQ ID NO: 200584 - RNA, 23 nt, Artificial Sequence
  Synthetic
gcuccccuaagcuugaagagaca

SEQ ID NO: 200585 - RNA, 24 nt, Artificial Sequence
  Synthetic
agcuccccuaagcuugaagagaca

SEQ ID NO: 200586 - RNA, 18 nt, Artificial Sequence
  Synthetic
ggcaaggccgcagagaca

SEQ ID NO: 200587 - RNA, 19 nt, Artificial Sequence
  Synthetic
uggcaaggccgcagagaca

SEQ ID NO: 200588 - RNA, 20 nt, Artificial Sequence
  Synthetic
cuggcaaggccgcagagaca

SEQ ID NO: 200589 - RNA, 21 nt, Artificial Sequence
  Synthetic
gcuggcaaggccgcagagaca

SEQ ID NO: 200590 - RNA, 22 nt, Artificial Sequence
  Synthetic
ugcuggcaaggccgcagagaca

SEQ ID NO: 200591 - RNA, 23 nt, Artificial Sequence
  Synthetic
augcuggcaaggccgcagagaca

SEQ ID NO: 200592 - RNA, 24 nt, Artificial Sequence
  Synthetic
aaugcuggcaaggccgcagagaca

SEQ ID NO: 200593 - RNA, 18 nt, Artificial Sequence
  Synthetic
ugugguuuaucagagaca

SEQ ID NO: 200594 - RNA, 19 nt, Artificial Sequence
  Synthetic
augugguuuaucagagaca

SEQ ID NO: 200595 - RNA, 20 nt, Artificial Sequence
  Synthetic
caugugguuuaucagagaca

SEQ ID NO: 200596 - RNA, 21 nt, Artificial Sequence
  Synthetic
gcaugugguuuaucagagaca

SEQ ID NO: 200597 - RNA, 22 nt, Artificial Sequence
  Synthetic
ggcaugugguuuaucagagaca

SEQ ID NO: 200598 - RNA, 23 nt, Artificial Sequence
  Synthetic
uggcaugugguuuaucagagaca

SEQ ID NO: 200599 - RNA, 24 nt, Artificial Sequence
  Synthetic
guggcaugugguuuaucagagaca

SEQ ID NO: 200600 - RNA, 18 nt, Artificial Sequence
  Synthetic
cacuuaaagagagagaca

SEQ ID NO: 200601 - RNA, 19 nt, Artificial Sequence
  Synthetic
acacuuaaagagagagaca

SEQ ID NO: 200602 - RNA, 20 nt, Artificial Sequence
  Synthetic
uacacuuaaagagagagaca

SEQ ID NO: 200603 - RNA, 21 nt, Artificial Sequence
  Synthetic
uuacacuuaaagagagagaca

SEQ ID NO: 200604 - RNA, 22 nt, Artificial Sequence
  Synthetic
guuacacuuaaagagagagaca

SEQ ID NO: 200605 - RNA, 23 nt, Artificial Sequence
  Synthetic
aguuacacuuaaagagagagaca

SEQ ID NO: 200606 - RNA, 24 nt, Artificial Sequence
  Synthetic
uaguuacacuuaaagagagagaca

SEQ ID NO: 200607 - RNA, 18 nt, Artificial Sequence
  Synthetic
gagagagagagagagaca

SEQ ID NO: 200608 - RNA, 19 nt, Artificial Sequence
  Synthetic
agagagagagagagagaca

SEQ ID NO: 200609 - RNA, 20 nt, Artificial Sequence
  Synthetic
gagagagagagagagagaca

SEQ ID NO: 200610 - RNA, 21 nt, Artificial Sequence
  Synthetic
agagagagagagagagagaca

SEQ ID NO: 200611 - RNA, 22 nt, Artificial Sequence
  Synthetic
gagagagagagagagagagaca

SEQ ID NO: 200612 - RNA, 23 nt, Artificial Sequence
  Synthetic
cgagagagagagagagagagaca

SEQ ID NO: 200613 - RNA, 24 nt, Artificial Sequence
  Synthetic
ucgagagagagagagagagagaca

SEQ ID NO: 200614 - RNA, 18 nt, Artificial Sequence
  Synthetic
gagggagagagagagaca

SEQ ID NO: 200615 - RNA, 19 nt, Artificial Sequence
  Synthetic
agagggagagagagagaca

SEQ ID NO: 200616 - RNA, 20 nt, Artificial Sequence
  Synthetic
gagagggagagagagagaca

SEQ ID NO: 200617 - RNA, 21 nt, Artificial Sequence
  Synthetic
ggagagggagagagagagaca

SEQ ID NO: 200618 - RNA, 22 nt, Artificial Sequence
  Synthetic
aggagagggagagagagagaca

SEQ ID NO: 200619 - RNA, 23 nt, Artificial Sequence
  Synthetic
aaggagagggagagagagagaca

SEQ ID NO: 200620 - RNA, 24 nt, Artificial Sequence
  Synthetic
gaaggagagggagagagagagaca

SEQ ID NO: 200621 - RNA, 18 nt, Artificial Sequence
  Synthetic
guugauuuuagagagaca

SEQ ID NO: 200622 - RNA, 19 nt, Artificial Sequence
  Synthetic
aguugauuuuagagagaca

SEQ ID NO: 200623 - RNA, 20 nt, Artificial Sequence
  Synthetic
uaguugauuuuagagagaca

SEQ ID NO: 200624 - RNA, 21 nt, Artificial Sequence
  Synthetic
uuaguugauuuuagagagaca

SEQ ID NO: 200625 - RNA, 22 nt, Artificial Sequence
  Synthetic
auuaguugauuuuagagagaca

SEQ ID NO: 200626 - RNA, 23 nt, Artificial Sequence
  Synthetic
aauuaguugauuuuagagagaca

SEQ ID NO: 200627 - RNA, 24 nt, Artificial Sequence
  Synthetic
uaauuaguugauuuuagagagaca

SEQ ID NO: 200628 - RNA, 18 nt, Artificial Sequence
  Synthetic
gcuagcuagcuagagaca

SEQ ID NO: 200629 - RNA, 19 nt, Artificial Sequence
  Synthetic
agcuagcuagcuagagaca

SEQ ID NO: 200630 - RNA, 20 nt, Artificial Sequence
  Synthetic
uagcuagcuagcuagagaca

SEQ ID NO: 200631 - RNA, 21 nt, Artificial Sequence
  Synthetic
uuagcuagcuagcuagagaca

SEQ ID NO: 200632 - RNA, 22 nt, Artificial Sequence
  Synthetic
auuagcuagcuagcuagagaca

SEQ ID NO: 200633 - RNA, 23 nt, Artificial Sequence
  Synthetic
aauuagcuagcuagcuagagaca

SEQ ID NO: 200634 - RNA, 24 nt, Artificial Sequence
  Synthetic
uaauuagcuagcuagcuagagaca

SEQ ID NO: 200635 - RNA, 18 nt, Artificial Sequence
  Synthetic
acugaacggaaggagaca

SEQ ID NO: 200636 - RNA, 19 nt, Artificial Sequence
  Synthetic
aacugaacggaaggagaca

SEQ ID NO: 200637 - RNA, 20 nt, Artificial Sequence
  Synthetic
aaacugaacggaaggagaca

SEQ ID NO: 200638 - RNA, 21 nt, Artificial Sequence
  Synthetic
aaaacugaacggaaggagaca

SEQ ID NO: 200639 - RNA, 22 nt, Artificial Sequence
  Synthetic
gaaaacugaacggaaggagaca

SEQ ID NO: 200640 - RNA, 23 nt, Artificial Sequence
  Synthetic
ugaaaacugaacggaaggagaca

SEQ ID NO: 200641 - RNA, 24 nt, Artificial Sequence
  Synthetic
cugaaaacugaacggaaggagaca

SEQ ID NO: 200642 - RNA, 18 nt, Artificial Sequence
  Synthetic
cacagagaacaggagaca

SEQ ID NO: 200643 - RNA, 19 nt, Artificial Sequence
  Synthetic
ccacagagaacaggagaca

SEQ ID NO: 200644 - RNA, 20 nt, Artificial Sequence
  Synthetic
cccacagagaacaggagaca

SEQ ID NO: 200645 - RNA, 21 nt, Artificial Sequence
  Synthetic
ucccacagagaacaggagaca

SEQ ID NO: 200646 - RNA, 22 nt, Artificial Sequence
  Synthetic
uucccacagagaacaggagaca

SEQ ID NO: 200647 - RNA, 23 nt, Artificial Sequence
  Synthetic
cuucccacagagaacaggagaca

SEQ ID NO: 200648 - RNA, 24 nt, Artificial Sequence
  Synthetic
ucuucccacagagaacaggagaca

SEQ ID NO: 200649 - RNA, 18 nt, Artificial Sequence
  Synthetic
cagugggaaacggagaca

SEQ ID NO: 200650 - RNA, 19 nt, Artificial Sequence
  Synthetic
ccagugggaaacggagaca

SEQ ID NO: 200651 - RNA, 20 nt, Artificial Sequence
  Synthetic
uccagugggaaacggagaca

SEQ ID NO: 200652 - RNA, 21 nt, Artificial Sequence
  Synthetic
guccagugggaaacggagaca

SEQ ID NO: 200653 - RNA, 22 nt, Artificial Sequence
  Synthetic
cguccagugggaaacggagaca

SEQ ID NO: 200654 - RNA, 23 nt, Artificial Sequence
  Synthetic
ccguccagugggaaacggagaca

SEQ ID NO: 200655 - RNA, 24 nt, Artificial Sequence
  Synthetic
gccguccagugggaaacggagaca

SEQ ID NO: 200656 - RNA, 18 nt, Artificial Sequence
  Synthetic
gauggaggaagggagaca

SEQ ID NO: 200657 - RNA, 19 nt, Artificial Sequence
  Synthetic
ggauggaggaagggagaca

SEQ ID NO: 200658 - RNA, 20 nt, Artificial Sequence
  Synthetic
gggauggaggaagggagaca

SEQ ID NO: 200659 - RNA, 21 nt, Artificial Sequence
  Synthetic
agggauggaggaagggagaca

SEQ ID NO: 200660 - RNA, 22 nt, Artificial Sequence
  Synthetic
gagggauggaggaagggagaca

SEQ ID NO: 200661 - RNA, 23 nt, Artificial Sequence
  Synthetic
ggagggauggaggaagggagaca

SEQ ID NO: 200662 - RNA, 24 nt, Artificial Sequence
  Synthetic
gggagggauggaggaagggagaca

SEQ ID NO: 200663 - RNA, 18 nt, Artificial Sequence
  Synthetic
aagcuuucaguggagaca

SEQ ID NO: 200664 - RNA, 19 nt, Artificial Sequence
  Synthetic
uaagcuuucaguggagaca

SEQ ID NO: 200665 - RNA, 20 nt, Artificial Sequence
  Synthetic
auaagcuuucaguggagaca

SEQ ID NO: 200666 - RNA, 21 nt, Artificial Sequence
  Synthetic
aauaagcuuucaguggagaca

SEQ ID NO: 200667 - RNA, 22 nt, Artificial Sequence
  Synthetic
aaauaagcuuucaguggagaca

SEQ ID NO: 200668 - RNA, 23 nt, Artificial Sequence
  Synthetic
aaaauaagcuuucaguggagaca

SEQ ID NO: 200669 - RNA, 24 nt, Artificial Sequence
  Synthetic
aaaaauaagcuuucaguggagaca

SEQ ID NO: 200670 - RNA, 18 nt, Artificial Sequence
  Synthetic
cacccaagaacugagaca

SEQ ID NO: 200671 - RNA, 19 nt, Artificial Sequence
  Synthetic
gcacccaagaacugagaca

SEQ ID NO: 200672 - RNA, 20 nt, Artificial Sequence
  Synthetic
ggcacccaagaacugagaca

SEQ ID NO: 200673 - RNA, 21 nt, Artificial Sequence
  Synthetic
aggcacccaagaacugagaca

SEQ ID NO: 200674 - RNA, 22 nt, Artificial Sequence
  Synthetic
gaggcacccaagaacugagaca

SEQ ID NO: 200675 - RNA, 23 nt, Artificial Sequence
  Synthetic
ugaggcacccaagaacugagaca

SEQ ID NO: 200676 - RNA, 24 nt, Artificial Sequence
  Synthetic
uugaggcacccaagaacugagaca

SEQ ID NO: 200677 - RNA, 18 nt, Artificial Sequence
  Synthetic
gcacagcaagcugagaca

SEQ ID NO: 200678 - RNA, 19 nt, Artificial Sequence
  Synthetic
ggcacagcaagcugagaca

SEQ ID NO: 200679 - RNA, 20 nt, Artificial Sequence
  Synthetic
gggcacagcaagcugagaca

SEQ ID NO: 200680 - RNA, 21 nt, Artificial Sequence
  Synthetic
ggggcacagcaagcugagaca

SEQ ID NO: 200681 - RNA, 22 nt, Artificial Sequence
  Synthetic
aggggcacagcaagcugagaca

SEQ ID NO: 200682 - RNA, 23 nt, Artificial Sequence
  Synthetic
aaggggcacagcaagcugagaca

SEQ ID NO: 200683 - RNA, 24 nt, Artificial Sequence
  Synthetic
gaaggggcacagcaagcugagaca

SEQ ID NO: 200684 - RNA, 18 nt, Artificial Sequence
  Synthetic
agauuuugggcugagaca

SEQ ID NO: 200685 - RNA, 19 nt, Artificial Sequence
  Synthetic
gagauuuugggcugagaca

SEQ ID NO: 200686 - RNA, 20 nt, Artificial Sequence
  Synthetic
ggagauuuugggcugagaca

SEQ ID NO: 200687 - RNA, 21 nt, Artificial Sequence
  Synthetic
aggagauuuugggcugagaca

SEQ ID NO: 200688 - RNA, 22 nt, Artificial Sequence
  Synthetic
aaggagauuuugggcugagaca

SEQ ID NO: 200689 - RNA, 23 nt, Artificial Sequence
  Synthetic
uaaggagauuuugggcugagaca

SEQ ID NO: 200690 - RNA, 24 nt, Artificial Sequence
  Synthetic
uuaaggagauuuugggcugagaca

SEQ ID NO: 200691 - RNA, 18 nt, Artificial Sequence
  Synthetic
aggcauaccucugagaca

SEQ ID NO: 200692 - RNA, 19 nt, Artificial Sequence
  Synthetic
caggcauaccucugagaca

SEQ ID NO: 200693 - RNA, 20 nt, Artificial Sequence
  Synthetic
acaggcauaccucugagaca

SEQ ID NO: 200694 - RNA, 21 nt, Artificial Sequence
  Synthetic
uacaggcauaccucugagaca

SEQ ID NO: 200695 - RNA, 22 nt, Artificial Sequence
  Synthetic
auacaggcauaccucugagaca

SEQ ID NO: 200696 - RNA, 23 nt, Artificial Sequence
  Synthetic
uauacaggcauaccucugagaca

SEQ ID NO: 200697 - RNA, 24 nt, Artificial Sequence
  Synthetic
auauacaggcauaccucugagaca

SEQ ID NO: 200698 - RNA, 18 nt, Artificial Sequence
  Synthetic
ugacagagaaaauagaca

SEQ ID NO: 200699 - RNA, 19 nt, Artificial Sequence
  Synthetic
augacagagaaaauagaca

SEQ ID NO: 200700 - RNA, 20 nt, Artificial Sequence
  Synthetic
gaugacagagaaaauagaca

SEQ ID NO: 200701 - RNA, 21 nt, Artificial Sequence
  Synthetic
agaugacagagaaaauagaca

SEQ ID NO: 200702 - RNA, 22 nt, Artificial Sequence
  Synthetic
aagaugacagagaaaauagaca

SEQ ID NO: 200703 - RNA, 23 nt, Artificial Sequence
  Synthetic
uaagaugacagagaaaauagaca

SEQ ID NO: 200704 - RNA, 24 nt, Artificial Sequence
  Synthetic
cuaagaugacagagaaaauagaca

SEQ ID NO: 200705 - RNA, 18 nt, Artificial Sequence
  Synthetic
aggugaaaacaauagaca

SEQ ID NO: 200706 - RNA, 19 nt, Artificial Sequence
  Synthetic
aaggugaaaacaauagaca

SEQ ID NO: 200707 - RNA, 20 nt, Artificial Sequence
  Synthetic
aaaggugaaaacaauagaca

SEQ ID NO: 200708 - RNA, 21 nt, Artificial Sequence
  Synthetic
uaaaggugaaaacaauagaca

SEQ ID NO: 200709 - RNA, 22 nt, Artificial Sequence
  Synthetic
auaaaggugaaaacaauagaca

SEQ ID NO: 200710 - RNA, 23 nt, Artificial Sequence
  Synthetic
uauaaaggugaaaacaauagaca

SEQ ID NO: 200711 - RNA, 24 nt, Artificial Sequence
  Synthetic
uuauaaaggugaaaacaauagaca

SEQ ID NO: 200712 - RNA, 18 nt, Artificial Sequence
  Synthetic
uuuaaaagagaauagaca

SEQ ID NO: 200713 - RNA, 19 nt, Artificial Sequence
  Synthetic
auuuaaaagagaauagaca

SEQ ID NO: 200714 - RNA, 20 nt, Artificial Sequence
  Synthetic
aauuuaaaagagaauagaca

SEQ ID NO: 200715 - RNA, 21 nt, Artificial Sequence
  Synthetic
gaauuuaaaagagaauagaca

SEQ ID NO: 200716 - RNA, 22 nt, Artificial Sequence
  Synthetic
ugaauuuaaaagagaauagaca

SEQ ID NO: 200717 - RNA, 23 nt, Artificial Sequence
  Synthetic
augaauuuaaaagagaauagaca

SEQ ID NO: 200718 - RNA, 24 nt, Artificial Sequence
  Synthetic
aaugaauuuaaaagagaauagaca

SEQ ID NO: 200719 - RNA, 18 nt, Artificial Sequence
  Synthetic
auacgccaauaauagaca

SEQ ID NO: 200720 - RNA, 19 nt, Artificial Sequence
  Synthetic
uauacgccaauaauagaca

SEQ ID NO: 200721 - RNA, 20 nt, Artificial Sequence
  Synthetic
cuauacgccaauaauagaca

SEQ ID NO: 200722 - RNA, 21 nt, Artificial Sequence
  Synthetic
ccuauacgccaauaauagaca

SEQ ID NO: 200723 - RNA, 22 nt, Artificial Sequence
  Synthetic
uccuauacgccaauaauagaca

SEQ ID NO: 200724 - RNA, 23 nt, Artificial Sequence
  Synthetic
uuccuauacgccaauaauagaca

SEQ ID NO: 200725 - RNA, 24 nt, Artificial Sequence
  Synthetic
auuccuauacgccaauaauagaca

SEQ ID NO: 200726 - RNA, 18 nt, Artificial Sequence
  Synthetic
cagauaagugcauagaca

SEQ ID NO: 200727 - RNA, 19 nt, Artificial Sequence
  Synthetic
acagauaagugcauagaca

SEQ ID NO: 200728 - RNA, 20 nt, Artificial Sequence
  Synthetic
uacagauaagugcauagaca

SEQ ID NO: 200729 - RNA, 21 nt, Artificial Sequence
  Synthetic
auacagauaagugcauagaca

SEQ ID NO: 200730 - RNA, 22 nt, Artificial Sequence
  Synthetic
gauacagauaagugcauagaca

SEQ ID NO: 200731 - RNA, 23 nt, Artificial Sequence
  Synthetic
agauacagauaagugcauagaca

SEQ ID NO: 200732 - RNA, 24 nt, Artificial Sequence
  Synthetic
uagauacagauaagugcauagaca

SEQ ID NO: 200733 - RNA, 18 nt, Artificial Sequence
  Synthetic
uaguggcagagauagaca

SEQ ID NO: 200734 - RNA, 19 nt, Artificial Sequence
  Synthetic
cuaguggcagagauagaca

SEQ ID NO: 200735 - RNA, 20 nt, Artificial Sequence
  Synthetic
acuaguggcagagauagaca

SEQ ID NO: 200736 - RNA, 21 nt, Artificial Sequence
  Synthetic
aacuaguggcagagauagaca

SEQ ID NO: 200737 - RNA, 22 nt, Artificial Sequence
  Synthetic
aaacuaguggcagagauagaca

SEQ ID NO: 200738 - RNA, 23 nt, Artificial Sequence
  Synthetic
uaaacuaguggcagagauagaca

SEQ ID NO: 200739 - RNA, 24 nt, Artificial Sequence
  Synthetic
auaaacuaguggcagagauagaca

SEQ ID NO: 200740 - RNA, 18 nt, Artificial Sequence
  Synthetic
caaaguuucaacuagaca

SEQ ID NO: 200741 - RNA, 19 nt, Artificial Sequence
  Synthetic
acaaaguuucaacuagaca

SEQ ID NO: 200742 - RNA, 20 nt, Artificial Sequence
  Synthetic
uacaaaguuucaacuagaca

SEQ ID NO: 200743 - RNA, 21 nt, Artificial Sequence
  Synthetic
uuacaaaguuucaacuagaca

SEQ ID NO: 200744 - RNA, 22 nt, Artificial Sequence
  Synthetic
auuacaaaguuucaacuagaca

SEQ ID NO: 200745 - RNA, 23 nt, Artificial Sequence
  Synthetic
gauuacaaaguuucaacuagaca

SEQ ID NO: 200746 - RNA, 24 nt, Artificial Sequence
  Synthetic
agauuacaaaguuucaacuagaca

SEQ ID NO: 200747 - RNA, 18 nt, Artificial Sequence
  Synthetic
uacagagaugacuagaca

SEQ ID NO: 200748 - RNA, 19 nt, Artificial Sequence
  Synthetic
uuacagagaugacuagaca

SEQ ID NO: 200749 - RNA, 20 nt, Artificial Sequence
  Synthetic
auuacagagaugacuagaca

SEQ ID NO: 200750 - RNA, 21 nt, Artificial Sequence
  Synthetic
aauuacagagaugacuagaca

SEQ ID NO: 200751 - RNA, 22 nt, Artificial Sequence
  Synthetic
uaauuacagagaugacuagaca

SEQ ID NO: 200752 - RNA, 23 nt, Artificial Sequence
  Synthetic
auaauuacagagaugacuagaca

SEQ ID NO: 200753 - RNA, 24 nt, Artificial Sequence
  Synthetic
cauaauuacagagaugacuagaca

SEQ ID NO: 200754 - RNA, 18 nt, Artificial Sequence
  Synthetic
ugaggugacuccuagaca

SEQ ID NO: 200755 - RNA, 19 nt, Artificial Sequence
  Synthetic
uugaggugacuccuagaca

SEQ ID NO: 200756 - RNA, 20 nt, Artificial Sequence
  Synthetic
auugaggugacuccuagaca

SEQ ID NO: 200757 - RNA, 21 nt, Artificial Sequence
  Synthetic
uauugaggugacuccuagaca

SEQ ID NO: 200758 - RNA, 22 nt, Artificial Sequence
  Synthetic
cuauugaggugacuccuagaca

SEQ ID NO: 200759 - RNA, 23 nt, Artificial Sequence
  Synthetic
ccuauugaggugacuccuagaca

SEQ ID NO: 200760 - RNA, 24 nt, Artificial Sequence
  Synthetic
uccuauugaggugacuccuagaca

SEQ ID NO: 200761 - RNA, 18 nt, Artificial Sequence
  Synthetic
auagcaacgugcuagaca

SEQ ID NO: 200762 - RNA, 19 nt, Artificial Sequence
  Synthetic
uauagcaacgugcuagaca

SEQ ID NO: 200763 - RNA, 20 nt, Artificial Sequence
  Synthetic
auauagcaacgugcuagaca

SEQ ID NO: 200764 - RNA, 21 nt, Artificial Sequence
  Synthetic
cauauagcaacgugcuagaca

SEQ ID NO: 200765 - RNA, 22 nt, Artificial Sequence
  Synthetic
acauauagcaacgugcuagaca

SEQ ID NO: 200766 - RNA, 23 nt, Artificial Sequence
  Synthetic
gacauauagcaacgugcuagaca

SEQ ID NO: 200767 - RNA, 24 nt, Artificial Sequence
  Synthetic
agacauauagcaacgugcuagaca

SEQ ID NO: 200768 - RNA, 18 nt, Artificial Sequence
  Synthetic
uauuuguguaucuagaca

SEQ ID NO: 200769 - RNA, 19 nt, Artificial Sequence
  Synthetic
auauuuguguaucuagaca

SEQ ID NO: 200770 - RNA, 20 nt, Artificial Sequence
  Synthetic
aauauuuguguaucuagaca

SEQ ID NO: 200771 - RNA, 21 nt, Artificial Sequence
  Synthetic
caauauuuguguaucuagaca

SEQ ID NO: 200772 - RNA, 22 nt, Artificial Sequence
  Synthetic
acaauauuuguguaucuagaca

SEQ ID NO: 200773 - RNA, 23 nt, Artificial Sequence
  Synthetic
aacaauauuuguguaucuagaca

SEQ ID NO: 200774 - RNA, 24 nt, Artificial Sequence
  Synthetic
caacaauauuuguguaucuagaca

SEQ ID NO: 200775 - RNA, 18 nt, Artificial Sequence
  Synthetic
ugugcauccaaguagaca

SEQ ID NO: 200776 - RNA, 19 nt, Artificial Sequence
  Synthetic
cugugcauccaaguagaca

SEQ ID NO: 200777 - RNA, 20 nt, Artificial Sequence
  Synthetic
gcugugcauccaaguagaca

SEQ ID NO: 200778 - RNA, 21 nt, Artificial Sequence
  Synthetic
agcugugcauccaaguagaca

SEQ ID NO: 200779 - RNA, 22 nt, Artificial Sequence
  Synthetic
cagcugugcauccaaguagaca

SEQ ID NO: 200780 - RNA, 23 nt, Artificial Sequence
  Synthetic
gcagcugugcauccaaguagaca

SEQ ID NO: 200781 - RNA, 24 nt, Artificial Sequence
  Synthetic
ggcagcugugcauccaaguagaca

SEQ ID NO: 200782 - RNA, 18 nt, Artificial Sequence
  Synthetic
uugcuaagcauguagaca

SEQ ID NO: 200783 - RNA, 19 nt, Artificial Sequence
  Synthetic
guugcuaagcauguagaca

SEQ ID NO: 200784 - RNA, 20 nt, Artificial Sequence
  Synthetic
gguugcuaagcauguagaca

SEQ ID NO: 200785 - RNA, 21 nt, Artificial Sequence
  Synthetic
ugguugcuaagcauguagaca

SEQ ID NO: 200786 - RNA, 22 nt, Artificial Sequence
  Synthetic
cugguugcuaagcauguagaca

SEQ ID NO: 200787 - RNA, 23 nt, Artificial Sequence
  Synthetic
ucugguugcuaagcauguagaca

SEQ ID NO: 200788 - RNA, 24 nt, Artificial Sequence
  Synthetic
aucugguugcuaagcauguagaca

SEQ ID NO: 200789 - RNA, 18 nt, Artificial Sequence
  Synthetic
acauggcucuuguagaca

SEQ ID NO: 200790 - RNA, 19 nt, Artificial Sequence
  Synthetic
cacauggcucuuguagaca

SEQ ID NO: 200791 - RNA, 20 nt, Artificial Sequence
  Synthetic
ccacauggcucuuguagaca

SEQ ID NO: 200792 - RNA, 21 nt, Artificial Sequence
  Synthetic
uccacauggcucuuguagaca

SEQ ID NO: 200793 - RNA, 22 nt, Artificial Sequence
  Synthetic
guccacauggcucuuguagaca

SEQ ID NO: 200794 - RNA, 23 nt, Artificial Sequence
  Synthetic
aguccacauggcucuuguagaca

SEQ ID NO: 200795 - RNA, 24 nt, Artificial Sequence
  Synthetic
uaguccacauggcucuuguagaca

SEQ ID NO: 200796 - RNA, 18 nt, Artificial Sequence
  Synthetic
auuaauugauguuagaca

SEQ ID NO: 200797 - RNA, 19 nt, Artificial Sequence
  Synthetic
aauuaauugauguuagaca

SEQ ID NO: 200798 - RNA, 20 nt, Artificial Sequence
  Synthetic
caauuaauugauguuagaca

SEQ ID NO: 200799 - RNA, 21 nt, Artificial Sequence
  Synthetic
ucaauuaauugauguuagaca

SEQ ID NO: 200800 - RNA, 22 nt, Artificial Sequence
  Synthetic
aucaauuaauugauguuagaca

SEQ ID NO: 200801 - RNA, 23 nt, Artificial Sequence
  Synthetic
aaucaauuaauugauguuagaca

SEQ ID NO: 200802 - RNA, 24 nt, Artificial Sequence
  Synthetic
aaaucaauuaauugauguuagaca

SEQ ID NO: 200803 - RNA, 18 nt, Artificial Sequence
  Synthetic
ucugcuuuuauuuagaca

SEQ ID NO: 200804 - RNA, 19 nt, Artificial Sequence
  Synthetic
uucugcuuuuauuuagaca

SEQ ID NO: 200805 - RNA, 20 nt, Artificial Sequence
  Synthetic
uuucugcuuuuauuuagaca

SEQ ID NO: 200806 - RNA, 21 nt, Artificial Sequence
  Synthetic
guuucugcuuuuauuuagaca

SEQ ID NO: 200807 - RNA, 22 nt, Artificial Sequence
  Synthetic
aguuucugcuuuuauuuagaca

SEQ ID NO: 200808 - RNA, 23 nt, Artificial Sequence
  Synthetic
aaguuucugcuuuuauuuagaca

SEQ ID NO: 200809 - RNA, 24 nt, Artificial Sequence
  Synthetic
gaaguuucugcuuuuauuuagaca

SEQ ID NO: 200810 - RNA, 18 nt, Artificial Sequence
  Synthetic
ucaagaaaggccacgaca

SEQ ID NO: 200811 - RNA, 19 nt, Artificial Sequence
  Synthetic
uucaagaaaggccacgaca

SEQ ID NO: 200812 - RNA, 20 nt, Artificial Sequence
  Synthetic
uuucaagaaaggccacgaca

SEQ ID NO: 200813 - RNA, 21 nt, Artificial Sequence
  Synthetic
uuuucaagaaaggccacgaca

SEQ ID NO: 200814 - RNA, 22 nt, Artificial Sequence
  Synthetic
guuuucaagaaaggccacgaca

SEQ ID NO: 200815 - RNA, 23 nt, Artificial Sequence
  Synthetic
aguuuucaagaaaggccacgaca

SEQ ID NO: 200816 - RNA, 24 nt, Artificial Sequence
  Synthetic
gaguuuucaagaaaggccacgaca

SEQ ID NO: 200817 - RNA, 18 nt, Artificial Sequence
  Synthetic
acuccagccugggcgaca

SEQ ID NO: 200818 - RNA, 19 nt, Artificial Sequence
  Synthetic
cacuccagccugggcgaca

SEQ ID NO: 200819 - RNA, 20 nt, Artificial Sequence
  Synthetic
gcacuccagccugggcgaca

SEQ ID NO: 200820 - RNA, 21 nt, Artificial Sequence
  Synthetic
ugcacuccagccugggcgaca

SEQ ID NO: 200821 - RNA, 22 nt, Artificial Sequence
  Synthetic
cugcacuccagccugggcgaca

SEQ ID NO: 200822 - RNA, 23 nt, Artificial Sequence
  Synthetic
acugcacuccagccugggcgaca

SEQ ID NO: 200823 - RNA, 24 nt, Artificial Sequence
  Synthetic
cacugcacuccagccugggcgaca

SEQ ID NO: 200824 - RNA, 18 nt, Artificial Sequence
  Synthetic
uuuacaaaaacaaggaca

SEQ ID NO: 200825 - RNA, 19 nt, Artificial Sequence
  Synthetic
uuuuacaaaaacaaggaca

SEQ ID NO: 200826 - RNA, 20 nt, Artificial Sequence
  Synthetic
uuuuuacaaaaacaaggaca

SEQ ID NO: 200827 - RNA, 21 nt, Artificial Sequence
  Synthetic
auuuuuacaaaaacaaggaca

SEQ ID NO: 200828 - RNA, 22 nt, Artificial Sequence
  Synthetic
aauuuuuacaaaaacaaggaca

SEQ ID NO: 200829 - RNA, 23 nt, Artificial Sequence
  Synthetic
aaauuuuuacaaaaacaaggaca

SEQ ID NO: 200830 - RNA, 24 nt, Artificial Sequence
  Synthetic
uaaauuuuuacaaaaacaaggaca

SEQ ID NO: 200831 - RNA, 18 nt, Artificial Sequence
  Synthetic
augucugccacaaggaca

SEQ ID NO: 200832 - RNA, 19 nt, Artificial Sequence
  Synthetic
caugucugccacaaggaca

SEQ ID NO: 200833 - RNA, 20 nt, Artificial Sequence
  Synthetic
ccaugucugccacaaggaca

SEQ ID NO: 200834 - RNA, 21 nt, Artificial Sequence
  Synthetic
accaugucugccacaaggaca

SEQ ID NO: 200835 - RNA, 22 nt, Artificial Sequence
  Synthetic
aaccaugucugccacaaggaca

SEQ ID NO: 200836 - RNA, 23 nt, Artificial Sequence
  Synthetic
aaaccaugucugccacaaggaca

SEQ ID NO: 200837 - RNA, 24 nt, Artificial Sequence
  Synthetic
uaaaccaugucugccacaaggaca

SEQ ID NO: 200838 - RNA, 18 nt, Artificial Sequence
  Synthetic
uuauuaguaccaaggaca

SEQ ID NO: 200839 - RNA, 19 nt, Artificial Sequence
  Synthetic
guuauuaguaccaaggaca

SEQ ID NO: 200840 - RNA, 20 nt, Artificial Sequence
  Synthetic
uguuauuaguaccaaggaca

SEQ ID NO: 200841 - RNA, 21 nt, Artificial Sequence
  Synthetic
guguuauuaguaccaaggaca

SEQ ID NO: 200842 - RNA, 22 nt, Artificial Sequence
  Synthetic
aguguuauuaguaccaaggaca

SEQ ID NO: 200843 - RNA, 23 nt, Artificial Sequence
  Synthetic
gaguguuauuaguaccaaggaca

SEQ ID NO: 200844 - RNA, 24 nt, Artificial Sequence
  Synthetic
ugaguguuauuaguaccaaggaca

SEQ ID NO: 200845 - RNA, 18 nt, Artificial Sequence
  Synthetic
gggagaacaggaaggaca

SEQ ID NO: 200846 - RNA, 19 nt, Artificial Sequence
  Synthetic
agggagaacaggaaggaca

SEQ ID NO: 200847 - RNA, 20 nt, Artificial Sequence
  Synthetic
gagggagaacaggaaggaca

SEQ ID NO: 200848 - RNA, 21 nt, Artificial Sequence
  Synthetic
agagggagaacaggaaggaca

SEQ ID NO: 200849 - RNA, 22 nt, Artificial Sequence
  Synthetic
gagagggagaacaggaaggaca

SEQ ID NO: 200850 - RNA, 23 nt, Artificial Sequence
  Synthetic
agagagggagaacaggaaggaca

SEQ ID NO: 200851 - RNA, 24 nt, Artificial Sequence
  Synthetic
gagagagggagaacaggaaggaca

SEQ ID NO: 200852 - RNA, 18 nt, Artificial Sequence
  Synthetic
uagacacuguacaggaca

SEQ ID NO: 200853 - RNA, 19 nt, Artificial Sequence
  Synthetic
guagacacuguacaggaca

SEQ ID NO: 200854 - RNA, 20 nt, Artificial Sequence
  Synthetic
gguagacacuguacaggaca

SEQ ID NO: 200855 - RNA, 21 nt, Artificial Sequence
  Synthetic
ugguagacacuguacaggaca

SEQ ID NO: 200856 - RNA, 22 nt, Artificial Sequence
  Synthetic
uugguagacacuguacaggaca

SEQ ID NO: 200857 - RNA, 23 nt, Artificial Sequence
  Synthetic
auugguagacacuguacaggaca

SEQ ID NO: 200858 - RNA, 24 nt, Artificial Sequence
  Synthetic
uauugguagacacuguacaggaca

SEQ ID NO: 200859 - RNA, 18 nt, Artificial Sequence
  Synthetic
caaacccaacagaggaca

SEQ ID NO: 200860 - RNA, 19 nt, Artificial Sequence
  Synthetic
acaaacccaacagaggaca

SEQ ID NO: 200861 - RNA, 20 nt, Artificial Sequence
  Synthetic
gacaaacccaacagaggaca

SEQ ID NO: 200862 - RNA, 21 nt, Artificial Sequence
  Synthetic
ugacaaacccaacagaggaca

SEQ ID NO: 200863 - RNA, 22 nt, Artificial Sequence
  Synthetic
cugacaaacccaacagaggaca

SEQ ID NO: 200864 - RNA, 23 nt, Artificial Sequence
  Synthetic
gcugacaaacccaacagaggaca

SEQ ID NO: 200865 - RNA, 24 nt, Artificial Sequence
  Synthetic
agcugacaaacccaacagaggaca

SEQ ID NO: 200866 - RNA, 18 nt, Artificial Sequence
  Synthetic
gcuuggggcaggaggaca

SEQ ID NO: 200867 - RNA, 19 nt, Artificial Sequence
  Synthetic
ggcuuggggcaggaggaca

SEQ ID NO: 200868 - RNA, 20 nt, Artificial Sequence
  Synthetic
gggcuuggggcaggaggaca

SEQ ID NO: 200869 - RNA, 21 nt, Artificial Sequence
  Synthetic
ggggcuuggggcaggaggaca

SEQ ID NO: 200870 - RNA, 22 nt, Artificial Sequence
  Synthetic
uggggcuuggggcaggaggaca

SEQ ID NO: 200871 - RNA, 23 nt, Artificial Sequence
  Synthetic
guggggcuuggggcaggaggaca

SEQ ID NO: 200872 - RNA, 24 nt, Artificial Sequence
  Synthetic
gguggggcuuggggcaggaggaca

SEQ ID NO: 200873 - RNA, 18 nt, Artificial Sequence
  Synthetic
auuuuacaaaugaggaca

SEQ ID NO: 200874 - RNA, 19 nt, Artificial Sequence
  Synthetic
cauuuuacaaaugaggaca

SEQ ID NO: 200875 - RNA, 20 nt, Artificial Sequence
  Synthetic
acauuuuacaaaugaggaca

SEQ ID NO: 200876 - RNA, 21 nt, Artificial Sequence
  Synthetic
cacauuuuacaaaugaggaca

SEQ ID NO: 200877 - RNA, 22 nt, Artificial Sequence
  Synthetic
ccacauuuuacaaaugaggaca

SEQ ID NO: 200878 - RNA, 23 nt, Artificial Sequence
  Synthetic
cccacauuuuacaaaugaggaca

SEQ ID NO: 200879 - RNA, 24 nt, Artificial Sequence
  Synthetic
gcccacauuuuacaaaugaggaca

SEQ ID NO: 200880 - RNA, 18 nt, Artificial Sequence
  Synthetic
cucaaaauccugaggaca

SEQ ID NO: 200881 - RNA, 19 nt, Artificial Sequence
  Synthetic
gcucaaaauccugaggaca

SEQ ID NO: 200882 - RNA, 20 nt, Artificial Sequence
  Synthetic
ugcucaaaauccugaggaca

SEQ ID NO: 200883 - RNA, 21 nt, Artificial Sequence
  Synthetic
augcucaaaauccugaggaca

SEQ ID NO: 200884 - RNA, 22 nt, Artificial Sequence
  Synthetic
aaugcucaaaauccugaggaca

SEQ ID NO: 200885 - RNA, 23 nt, Artificial Sequence
  Synthetic
uaaugcucaaaauccugaggaca

SEQ ID NO: 200886 - RNA, 24 nt, Artificial Sequence
  Synthetic
auaaugcucaaaauccugaggaca

SEQ ID NO: 200887 - RNA, 18 nt, Artificial Sequence
  Synthetic
aaucacaggcaagggaca

SEQ ID NO: 200888 - RNA, 19 nt, Artificial Sequence
  Synthetic
uaaucacaggcaagggaca

SEQ ID NO: 200889 - RNA, 20 nt, Artificial Sequence
  Synthetic
cuaaucacaggcaagggaca

SEQ ID NO: 200890 - RNA, 21 nt, Artificial Sequence
  Synthetic
acuaaucacaggcaagggaca

SEQ ID NO: 200891 - RNA, 22 nt, Artificial Sequence
  Synthetic
cacuaaucacaggcaagggaca

SEQ ID NO: 200892 - RNA, 23 nt, Artificial Sequence
  Synthetic
ucacuaaucacaggcaagggaca

SEQ ID NO: 200893 - RNA, 24 nt, Artificial Sequence
  Synthetic
uucacuaaucacaggcaagggaca

SEQ ID NO: 200894 - RNA, 18 nt, Artificial Sequence
  Synthetic
gcccaugugacagggaca

SEQ ID NO: 200895 - RNA, 19 nt, Artificial Sequence
  Synthetic
agcccaugugacagggaca

SEQ ID NO: 200896 - RNA, 20 nt, Artificial Sequence
  Synthetic
cagcccaugugacagggaca

SEQ ID NO: 200897 - RNA, 21 nt, Artificial Sequence
  Synthetic
ucagcccaugugacagggaca

SEQ ID NO: 200898 - RNA, 22 nt, Artificial Sequence
  Synthetic
uucagcccaugugacagggaca

SEQ ID NO: 200899 - RNA, 23 nt, Artificial Sequence
  Synthetic
cuucagcccaugugacagggaca

SEQ ID NO: 200900 - RNA, 24 nt, Artificial Sequence
  Synthetic
gcuucagcccaugugacagggaca

SEQ ID NO: 200901 - RNA, 18 nt, Artificial Sequence
  Synthetic
gaccacagagacgggaca

SEQ ID NO: 200902 - RNA, 19 nt, Artificial Sequence
  Synthetic
ugaccacagagacgggaca

SEQ ID NO: 200903 - RNA, 20 nt, Artificial Sequence
  Synthetic
augaccacagagacgggaca

SEQ ID NO: 200904 - RNA, 21 nt, Artificial Sequence
  Synthetic
aaugaccacagagacgggaca

SEQ ID NO: 200905 - RNA, 22 nt, Artificial Sequence
  Synthetic
gaaugaccacagagacgggaca

SEQ ID NO: 200906 - RNA, 23 nt, Artificial Sequence
  Synthetic
ugaaugaccacagagacgggaca

SEQ ID NO: 200907 - RNA, 24 nt, Artificial Sequence
  Synthetic
uugaaugaccacagagacgggaca

SEQ ID NO: 200908 - RNA, 18 nt, Artificial Sequence
  Synthetic
gaucuguauugggggaca

SEQ ID NO: 200909 - RNA, 19 nt, Artificial Sequence
  Synthetic
ugaucuguauugggggaca

SEQ ID NO: 200910 - RNA, 20 nt, Artificial Sequence
  Synthetic
augaucuguauugggggaca

SEQ ID NO: 200911 - RNA, 21 nt, Artificial Sequence
  Synthetic
aaugaucuguauugggggaca

SEQ ID NO: 200912 - RNA, 22 nt, Artificial Sequence
  Synthetic
aaaugaucuguauugggggaca

SEQ ID NO: 200913 - RNA, 23 nt, Artificial Sequence
  Synthetic
caaaugaucuguauugggggaca

SEQ ID NO: 200914 - RNA, 24 nt, Artificial Sequence
  Synthetic
acaaaugaucuguauugggggaca

SEQ ID NO: 200915 - RNA, 18 nt, Artificial Sequence
  Synthetic
uaaauagccaaugggaca

SEQ ID NO: 200916 - RNA, 19 nt, Artificial Sequence
  Synthetic
uuaaauagccaaugggaca

SEQ ID NO: 200917 - RNA, 20 nt, Artificial Sequence
  Synthetic
cuuaaauagccaaugggaca

SEQ ID NO: 200918 - RNA, 21 nt, Artificial Sequence
  Synthetic
ucuuaaauagccaaugggaca

SEQ ID NO: 200919 - RNA, 22 nt, Artificial Sequence
  Synthetic
cucuuaaauagccaaugggaca

SEQ ID NO: 200920 - RNA, 23 nt, Artificial Sequence
  Synthetic
acucuuaaauagccaaugggaca

SEQ ID NO: 200921 - RNA, 24 nt, Artificial Sequence
  Synthetic
cacucuuaaauagccaaugggaca

SEQ ID NO: 200922 - RNA, 18 nt, Artificial Sequence
  Synthetic
uuuugucaaucugggaca

SEQ ID NO: 200923 - RNA, 19 nt, Artificial Sequence
  Synthetic
uuuuugucaaucugggaca

SEQ ID NO: 200924 - RNA, 20 nt, Artificial Sequence
  Synthetic
uuuuuugucaaucugggaca

SEQ ID NO: 200925 - RNA, 21 nt, Artificial Sequence
  Synthetic
uuuuuuugucaaucugggaca

SEQ ID NO: 200926 - RNA, 22 nt, Artificial Sequence
  Synthetic
uuuuuuuugucaaucugggaca

SEQ ID NO: 200927 - RNA, 23 nt, Artificial Sequence
  Synthetic
uuuuuuuuugucaaucugggaca

SEQ ID NO: 200928 - RNA, 24 nt, Artificial Sequence
  Synthetic
uuuuuuuuuugucaaucugggaca

SEQ ID NO: 200929 - RNA, 18 nt, Artificial Sequence
  Synthetic
caguaggagagugggaca

SEQ ID NO: 200930 - RNA, 19 nt, Artificial Sequence
  Synthetic
ccaguaggagagugggaca

SEQ ID NO: 200931 - RNA, 20 nt, Artificial Sequence
  Synthetic
accaguaggagagugggaca

SEQ ID NO: 200932 - RNA, 21 nt, Artificial Sequence
  Synthetic
uaccaguaggagagugggaca

SEQ ID NO: 200933 - RNA, 22 nt, Artificial Sequence
  Synthetic
guaccaguaggagagugggaca

SEQ ID NO: 200934 - RNA, 23 nt, Artificial Sequence
  Synthetic
aguaccaguaggagagugggaca

SEQ ID NO: 200935 - RNA, 24 nt, Artificial Sequence
  Synthetic
aaguaccaguaggagagugggaca

SEQ ID NO: 200936 - RNA, 18 nt, Artificial Sequence
  Synthetic
acacucuaguuugggaca

SEQ ID NO: 200937 - RNA, 19 nt, Artificial Sequence
  Synthetic
cacacucuaguuugggaca

SEQ ID NO: 200938 - RNA, 20 nt, Artificial Sequence
  Synthetic
acacacucuaguuugggaca

SEQ ID NO: 200939 - RNA, 21 nt, Artificial Sequence
  Synthetic
cacacacucuaguuugggaca

SEQ ID NO: 200940 - RNA, 22 nt, Artificial Sequence
  Synthetic
gcacacacucuaguuugggaca

SEQ ID NO: 200941 - RNA, 23 nt, Artificial Sequence
  Synthetic
agcacacacucuaguuugggaca

SEQ ID NO: 200942 - RNA, 24 nt, Artificial Sequence
  Synthetic
aagcacacacucuaguuugggaca

SEQ ID NO: 200943 - RNA, 18 nt, Artificial Sequence
  Synthetic
acaaaaaauuuugggaca

SEQ ID NO: 200944 - RNA, 19 nt, Artificial Sequence
  Synthetic
gacaaaaaauuuugggaca

SEQ ID NO: 200945 - RNA, 20 nt, Artificial Sequence
  Synthetic
agacaaaaaauuuugggaca

SEQ ID NO: 200946 - RNA, 21 nt, Artificial Sequence
  Synthetic
cagacaaaaaauuuugggaca

SEQ ID NO: 200947 - RNA, 22 nt, Artificial Sequence
  Synthetic
acagacaaaaaauuuugggaca

SEQ ID NO: 200948 - RNA, 23 nt, Artificial Sequence
  Synthetic
gacagacaaaaaauuuugggaca

SEQ ID NO: 200949 - RNA, 24 nt, Artificial Sequence
  Synthetic
ggacagacaaaaaauuuugggaca

SEQ ID NO: 200950 - RNA, 18 nt, Artificial Sequence
  Synthetic
ucugcuaaucaauggaca

SEQ ID NO: 200951 - RNA, 19 nt, Artificial Sequence
  Synthetic
uucugcuaaucaauggaca

SEQ ID NO: 200952 - RNA, 20 nt, Artificial Sequence
  Synthetic
auucugcuaaucaauggaca

SEQ ID NO: 200953 - RNA, 21 nt, Artificial Sequence
  Synthetic
cauucugcuaaucaauggaca

SEQ ID NO: 200954 - RNA, 22 nt, Artificial Sequence
  Synthetic
ccauucugcuaaucaauggaca

SEQ ID NO: 200955 - RNA, 23 nt, Artificial Sequence
  Synthetic
uccauucugcuaaucaauggaca

SEQ ID NO: 200956 - RNA, 24 nt, Artificial Sequence
  Synthetic
auccauucugcuaaucaauggaca

SEQ ID NO: 200957 - RNA, 18 nt, Artificial Sequence
  Synthetic
aaugagaacacauggaca

SEQ ID NO: 200958 - RNA, 19 nt, Artificial Sequence
  Synthetic
caaugagaacacauggaca

SEQ ID NO: 200959 - RNA, 20 nt, Artificial Sequence
  Synthetic
acaaugagaacacauggaca

SEQ ID NO: 200960 - RNA, 23 nt, Artificial Sequence
  Synthetic
ugaacaaugagaacacauggaca

SEQ ID NO: 200961 - RNA, 24 nt, Artificial Sequence
  Synthetic
uugaacaaugagaacacauggaca

SEQ ID NO: 200962 - RNA, 20 nt, Artificial Sequence
  Synthetic
gcaaugagaacacauggaca

SEQ ID NO: 200963 - RNA, 21 nt, Artificial Sequence
  Synthetic
agcaaugagaacacauggaca

SEQ ID NO: 200964 - RNA, 22 nt, Artificial Sequence
  Synthetic
gagcaaugagaacacauggaca

SEQ ID NO: 200965 - RNA, 23 nt, Artificial Sequence
  Synthetic
ugagcaaugagaacacauggaca

SEQ ID NO: 200966 - RNA, 24 nt, Artificial Sequence
  Synthetic
uugagcaaugagaacacauggaca

SEQ ID NO: 200967 - RNA, 18 nt, Artificial Sequence
  Synthetic
aaugagaucacauggaca

SEQ ID NO: 200968 - RNA, 19 nt, Artificial Sequence
  Synthetic
caaugagaucacauggaca

SEQ ID NO: 200969 - RNA, 20 nt, Artificial Sequence
  Synthetic
acaaugagaucacauggaca

SEQ ID NO: 200970 - RNA, 21 nt, Artificial Sequence
  Synthetic
aacaaugagaucacauggaca

SEQ ID NO: 200971 - RNA, 22 nt, Artificial Sequence
  Synthetic
gaacaaugagaucacauggaca

SEQ ID NO: 200972 - RNA, 23 nt, Artificial Sequence
  Synthetic
ugaacaaugagaucacauggaca

SEQ ID NO: 200973 - RNA, 24 nt, Artificial Sequence
  Synthetic
uugaacaaugagaucacauggaca

SEQ ID NO: 200974 - RNA, 18 nt, Artificial Sequence
  Synthetic
aacgagagcccauggaca

SEQ ID NO: 200975 - RNA, 19 nt, Artificial Sequence
  Synthetic
caacgagagcccauggaca

SEQ ID NO: 200976 - RNA, 20 nt, Artificial Sequence
  Synthetic
acaacgagagcccauggaca

SEQ ID NO: 200977 - RNA, 21 nt, Artificial Sequence
  Synthetic
aacaacgagagcccauggaca

SEQ ID NO: 200978 - RNA, 22 nt, Artificial Sequence
  Synthetic
gaacaacgagagcccauggaca

SEQ ID NO: 200979 - RNA, 23 nt, Artificial Sequence
  Synthetic
ugaacaacgagagcccauggaca

SEQ ID NO: 200980 - RNA, 24 nt, Artificial Sequence
  Synthetic
uugaacaacgagagcccauggaca

SEQ ID NO: 200981 - RNA, 18 nt, Artificial Sequence
  Synthetic
auuguggacagauggaca

SEQ ID NO: 200982 - RNA, 19 nt, Artificial Sequence
  Synthetic
gauuguggacagauggaca

SEQ ID NO: 200983 - RNA, 20 nt, Artificial Sequence
  Synthetic
ggauuguggacagauggaca

SEQ ID NO: 200984 - RNA, 21 nt, Artificial Sequence
  Synthetic
gggauuguggacagauggaca

SEQ ID NO: 200985 - RNA, 22 nt, Artificial Sequence
  Synthetic
ugggauuguggacagauggaca

SEQ ID NO: 200986 - RNA, 23 nt, Artificial Sequence
  Synthetic
augggauuguggacagauggaca

SEQ ID NO: 200987 - RNA, 24 nt, Artificial Sequence
  Synthetic
caugggauuguggacagauggaca

SEQ ID NO: 200988 - RNA, 18 nt, Artificial Sequence
  Synthetic
gucugucauggauggaca

SEQ ID NO: 200989 - RNA, 19 nt, Artificial Sequence
  Synthetic
ggucugucauggauggaca

SEQ ID NO: 200990 - RNA, 20 nt, Artificial Sequence
  Synthetic
aggucugucauggauggaca

SEQ ID NO: 200991 - RNA, 21 nt, Artificial Sequence
  Synthetic
aaggucugucauggauggaca

SEQ ID NO: 200992 - RNA, 22 nt, Artificial Sequence
  Synthetic
aaaggucugucauggauggaca

SEQ ID NO: 200993 - RNA, 23 nt, Artificial Sequence
  Synthetic
gaaaggucugucauggauggaca

SEQ ID NO: 200994 - RNA, 24 nt, Artificial Sequence
  Synthetic
agaaaggucugucauggauggaca

SEQ ID NO: 200995 - RNA, 18 nt, Artificial Sequence
  Synthetic
ugggauggauuauggaca

SEQ ID NO: 200996 - RNA, 19 nt, Artificial Sequence
  Synthetic
augggauggauuauggaca

SEQ ID NO: 200997 - RNA, 20 nt, Artificial Sequence
  Synthetic
aaugggauggauuauggaca

SEQ ID NO: 200998 - RNA, 21 nt, Artificial Sequence
  Synthetic
aaaugggauggauuauggaca

SEQ ID NO: 200999 - RNA, 22 nt, Artificial Sequence
  Synthetic
caaaugggauggauuauggaca

SEQ ID NO: 201000 - RNA, 23 nt, Artificial Sequence
  Synthetic
acaaaugggauggauuauggaca

SEQ ID NO: 201001 - RNA, 24 nt, Artificial Sequence
  Synthetic
aacaaaugggauggauuauggaca

SEQ ID NO: 201002 - RNA, 18 nt, Artificial Sequence
  Synthetic
guccaguaugacuggaca

SEQ ID NO: 201003 - RNA, 19 nt, Artificial Sequence
  Synthetic
uguccaguaugacuggaca

SEQ ID NO: 201004 - RNA, 20 nt, Artificial Sequence
  Synthetic
auguccaguaugacuggaca

SEQ ID NO: 201005 - RNA, 21 nt, Artificial Sequence
  Synthetic
gauguccaguaugacuggaca

SEQ ID NO: 201006 - RNA, 22 nt, Artificial Sequence
  Synthetic
agauguccaguaugacuggaca

SEQ ID NO: 201007 - RNA, 23 nt, Artificial Sequence
  Synthetic
uagauguccaguaugacuggaca

SEQ ID NO: 201008 - RNA, 24 nt, Artificial Sequence
  Synthetic
guagauguccaguaugacuggaca

SEQ ID NO: 201009 - RNA, 18 nt, Artificial Sequence
  Synthetic
aguuugauaacuuggaca

SEQ ID NO: 201010 - RNA, 19 nt, Artificial Sequence
  Synthetic
uaguuugauaacuuggaca

SEQ ID NO: 201011 - RNA, 20 nt, Artificial Sequence
  Synthetic
guaguuugauaacuuggaca

SEQ ID NO: 201012 - RNA, 21 nt, Artificial Sequence
  Synthetic
uguaguuugauaacuuggaca

SEQ ID NO: 201013 - RNA, 22 nt, Artificial Sequence
  Synthetic
cuguaguuugauaacuuggaca

SEQ ID NO: 201014 - RNA, 23 nt, Artificial Sequence
  Synthetic
ccuguaguuugauaacuuggaca

SEQ ID NO: 201015 - RNA, 24 nt, Artificial Sequence
  Synthetic
gccuguaguuugauaacuuggaca

SEQ ID NO: 201016 - RNA, 18 nt, Artificial Sequence
  Synthetic
uauuucgguauuuggaca

SEQ ID NO: 201017 - RNA, 19 nt, Artificial Sequence
  Synthetic
guauuucgguauuuggaca

SEQ ID NO: 201018 - RNA, 20 nt, Artificial Sequence
  Synthetic
uguauuucgguauuuggaca

SEQ ID NO: 201019 - RNA, 21 nt, Artificial Sequence
  Synthetic
auguauuucgguauuuggaca

SEQ ID NO: 201020 - RNA, 22 nt, Artificial Sequence
  Synthetic
gauguauuucgguauuuggaca

SEQ ID NO: 201021 - RNA, 23 nt, Artificial Sequence
  Synthetic
ugauguauuucgguauuuggaca

SEQ ID NO: 201022 - RNA, 24 nt, Artificial Sequence
  Synthetic
cugauguauuucgguauuuggaca

SEQ ID NO: 201023 - RNA, 18 nt, Artificial Sequence
  Synthetic
aguguucagguuuggaca

SEQ ID NO: 201024 - RNA, 19 nt, Artificial Sequence
  Synthetic
aaguguucagguuuggaca

SEQ ID NO: 201025 - RNA, 20 nt, Artificial Sequence
  Synthetic
aaaguguucagguuuggaca

SEQ ID NO: 201026 - RNA, 21 nt, Artificial Sequence
  Synthetic
aaaaguguucagguuuggaca

SEQ ID NO: 201027 - RNA, 22 nt, Artificial Sequence
  Synthetic
caaaaguguucagguuuggaca

SEQ ID NO: 201028 - RNA, 23 nt, Artificial Sequence
  Synthetic
ucaaaaguguucagguuuggaca

SEQ ID NO: 201029 - RNA, 24 nt, Artificial Sequence
  Synthetic
cucaaaaguguucagguuuggaca

SEQ ID NO: 201030 - RNA, 18 nt, Artificial Sequence
  Synthetic
ucuuucugguuuuggaca

SEQ ID NO: 201031 - RNA, 19 nt, Artificial Sequence
  Synthetic
gucuuucugguuuuggaca

SEQ ID NO: 201032 - RNA, 20 nt, Artificial Sequence
  Synthetic
agucuuucugguuuuggaca

SEQ ID NO: 201033 - RNA, 21 nt, Artificial Sequence
  Synthetic
cagucuuucugguuuuggaca

SEQ ID NO: 201034 - RNA, 22 nt, Artificial Sequence
  Synthetic
ucagucuuucugguuuuggaca

SEQ ID NO: 201035 - RNA, 23 nt, Artificial Sequence
  Synthetic
gucagucuuucugguuuuggaca

SEQ ID NO: 201036 - RNA, 24 nt, Artificial Sequence
  Synthetic
agucagucuuucugguuuuggaca

SEQ ID NO: 201037 - RNA, 18 nt, Artificial Sequence
  Synthetic
aguuucuuauaaaugaca

SEQ ID NO: 201038 - RNA, 19 nt, Artificial Sequence
  Synthetic
aaguuucuuauaaaugaca

SEQ ID NO: 201039 - RNA, 20 nt, Artificial Sequence
  Synthetic
aaaguuucuuauaaaugaca

SEQ ID NO: 201040 - RNA, 21 nt, Artificial Sequence
  Synthetic
caaaguuucuuauaaaugaca

SEQ ID NO: 201041 - RNA, 22 nt, Artificial Sequence
  Synthetic
acaaaguuucuuauaaaugaca

SEQ ID NO: 201042 - RNA, 23 nt, Artificial Sequence
  Synthetic
uacaaaguuucuuauaaaugaca

SEQ ID NO: 201043 - RNA, 24 nt, Artificial Sequence
  Synthetic
auacaaaguuucuuauaaaugaca

SEQ ID NO: 201044 - RNA, 18 nt, Artificial Sequence
  Synthetic
uuuauaaacuaaaugaca

SEQ ID NO: 201045 - RNA, 19 nt, Artificial Sequence
  Synthetic
auuuauaaacuaaaugaca

SEQ ID NO: 201046 - RNA, 20 nt, Artificial Sequence
  Synthetic
uauuuauaaacuaaaugaca

SEQ ID NO: 201047 - RNA, 21 nt, Artificial Sequence
  Synthetic
cuauuuauaaacuaaaugaca

SEQ ID NO: 201048 - RNA, 22 nt, Artificial Sequence
  Synthetic
gcuauuuauaaacuaaaugaca

SEQ ID NO: 201049 - RNA, 23 nt, Artificial Sequence
  Synthetic
agcuauuuauaaacuaaaugaca

SEQ ID NO: 201050 - RNA, 24 nt, Artificial Sequence
  Synthetic
aagcuauuuauaaacuaaaugaca

SEQ ID NO: 201051 - RNA, 18 nt, Artificial Sequence
  Synthetic
caagccuuccacaugaca

SEQ ID NO: 201052 - RNA, 19 nt, Artificial Sequence
  Synthetic
acaagccuuccacaugaca

SEQ ID NO: 201053 - RNA, 20 nt, Artificial Sequence
  Synthetic
aacaagccuuccacaugaca

SEQ ID NO: 201054 - RNA, 21 nt, Artificial Sequence
  Synthetic
uaacaagccuuccacaugaca

SEQ ID NO: 201055 - RNA, 22 nt, Artificial Sequence
  Synthetic
uuaacaagccuuccacaugaca

SEQ ID NO: 201056 - RNA, 23 nt, Artificial Sequence
  Synthetic
guuaacaagccuuccacaugaca

SEQ ID NO: 201057 - RNA, 24 nt, Artificial Sequence
  Synthetic
uguuaacaagccuuccacaugaca

SEQ ID NO: 201058 - RNA, 18 nt, Artificial Sequence
  Synthetic
uauaaguuucacaugaca

SEQ ID NO: 201059 - RNA, 19 nt, Artificial Sequence
  Synthetic
auauaaguuucacaugaca

SEQ ID NO: 201060 - RNA, 20 nt, Artificial Sequence
  Synthetic
aauauaaguuucacaugaca

SEQ ID NO: 201061 - RNA, 21 nt, Artificial Sequence
  Synthetic
uaauauaaguuucacaugaca

SEQ ID NO: 201062 - RNA, 22 nt, Artificial Sequence
  Synthetic
uuaauauaaguuucacaugaca

SEQ ID NO: 201063 - RNA, 23 nt, Artificial Sequence
  Synthetic
uuuaauauaaguuucacaugaca

SEQ ID NO: 201064 - RNA, 24 nt, Artificial Sequence
  Synthetic
auuuaauauaaguuucacaugaca

SEQ ID NO: 201065 - RNA, 18 nt, Artificial Sequence
  Synthetic
ucaaaguguugcaugaca

SEQ ID NO: 201066 - RNA, 19 nt, Artificial Sequence
  Synthetic
uucaaaguguugcaugaca

SEQ ID NO: 201067 - RNA, 20 nt, Artificial Sequence
  Synthetic
auucaaaguguugcaugaca

SEQ ID NO: 201068 - RNA, 21 nt, Artificial Sequence
  Synthetic
gauucaaaguguugcaugaca

SEQ ID NO: 201069 - RNA, 22 nt, Artificial Sequence
  Synthetic
ugauucaaaguguugcaugaca

SEQ ID NO: 201070 - RNA, 23 nt, Artificial Sequence
  Synthetic
cugauucaaaguguugcaugaca

SEQ ID NO: 201071 - RNA, 24 nt, Artificial Sequence
  Synthetic
ucugauucaaaguguugcaugaca

SEQ ID NO: 201072 - RNA, 18 nt, Artificial Sequence
  Synthetic
cucaggaaucucaugaca

SEQ ID NO: 201073 - RNA, 19 nt, Artificial Sequence
  Synthetic
acucaggaaucucaugaca

SEQ ID NO: 201074 - RNA, 20 nt, Artificial Sequence
  Synthetic
uacucaggaaucucaugaca

SEQ ID NO: 201075 - RNA, 21 nt, Artificial Sequence
  Synthetic
uuacucaggaaucucaugaca

SEQ ID NO: 201076 - RNA, 22 nt, Artificial Sequence
  Synthetic
cuuacucaggaaucucaugaca

SEQ ID NO: 201077 - RNA, 23 nt, Artificial Sequence
  Synthetic
ccuuacucaggaaucucaugaca

SEQ ID NO: 201078 - RNA, 24 nt, Artificial Sequence
  Synthetic
uccuuacucaggaaucucaugaca

SEQ ID NO: 201079 - RNA, 18 nt, Artificial Sequence
  Synthetic
agagagacuaagaugaca

SEQ ID NO: 201080 - RNA, 19 nt, Artificial Sequence
  Synthetic
uagagagacuaagaugaca

SEQ ID NO: 201081 - RNA, 20 nt, Artificial Sequence
  Synthetic
cuagagagacuaagaugaca

SEQ ID NO: 201082 - RNA, 21 nt, Artificial Sequence
  Synthetic
ucuagagagacuaagaugaca

SEQ ID NO: 201083 - RNA, 22 nt, Artificial Sequence
  Synthetic
aucuagagagacuaagaugaca

SEQ ID NO: 201084 - RNA, 23 nt, Artificial Sequence
  Synthetic
aaucuagagagacuaagaugaca

SEQ ID NO: 201085 - RNA, 24 nt, Artificial Sequence
  Synthetic
aaaucuagagagacuaagaugaca

SEQ ID NO: 201086 - RNA, 18 nt, Artificial Sequence
  Synthetic
acuucagccuggaugaca

SEQ ID NO: 201087 - RNA, 19 nt, Artificial Sequence
  Synthetic
cacuucagccuggaugaca

SEQ ID NO: 201088 - RNA, 20 nt, Artificial Sequence
  Synthetic
gcacuucagccuggaugaca

SEQ ID NO: 201089 - RNA, 21 nt, Artificial Sequence
  Synthetic
ugcacuucagccuggaugaca

SEQ ID NO: 201090 - RNA, 22 nt, Artificial Sequence
  Synthetic
cugcacuucagccuggaugaca

SEQ ID NO: 201091 - RNA, 23 nt, Artificial Sequence
  Synthetic
acugcacuucagccuggaugaca

SEQ ID NO: 201092 - RNA, 24 nt, Artificial Sequence
  Synthetic
cacugcacuucagccuggaugaca

SEQ ID NO: 201093 - RNA, 18 nt, Artificial Sequence
  Synthetic
aucaaaauauuuaugaca

SEQ ID NO: 201094 - RNA, 19 nt, Artificial Sequence
  Synthetic
uaucaaaauauuuaugaca

SEQ ID NO: 201095 - RNA, 20 nt, Artificial Sequence
  Synthetic
auaucaaaauauuuaugaca

SEQ ID NO: 201096 - RNA, 21 nt, Artificial Sequence
  Synthetic
aauaucaaaauauuuaugaca

SEQ ID NO: 201097 - RNA, 22 nt, Artificial Sequence
  Synthetic
caauaucaaaauauuuaugaca

SEQ ID NO: 201098 - RNA, 23 nt, Artificial Sequence
  Synthetic
ucaauaucaaaauauuuaugaca

SEQ ID NO: 201099 - RNA, 24 nt, Artificial Sequence
  Synthetic
uucaauaucaaaauauuuaugaca

SEQ ID NO: 201100 - RNA, 18 nt, Artificial Sequence
  Synthetic
auauuugaaacacugaca

SEQ ID NO: 201101 - RNA, 19 nt, Artificial Sequence
  Synthetic
uauauuugaaacacugaca

SEQ ID NO: 201102 - RNA, 20 nt, Artificial Sequence
  Synthetic
auauauuugaaacacugaca

SEQ ID NO: 201103 - RNA, 21 nt, Artificial Sequence
  Synthetic
aauauauuugaaacacugaca

SEQ ID NO: 201104 - RNA, 22 nt, Artificial Sequence
  Synthetic
aaauauauuugaaacacugaca

SEQ ID NO: 201105 - RNA, 23 nt, Artificial Sequence
  Synthetic
aaaauauauuugaaacacugaca

SEQ ID NO: 201106 - RNA, 24 nt, Artificial Sequence
  Synthetic
uaaaauauauuugaaacacugaca

SEQ ID NO: 201107 - RNA, 18 nt, Artificial Sequence
  Synthetic
ccucaaagaccacugaca

SEQ ID NO: 201108 - RNA, 19 nt, Artificial Sequence
  Synthetic
uccucaaagaccacugaca

SEQ ID NO: 201109 - RNA, 20 nt, Artificial Sequence
  Synthetic
uuccucaaagaccacugaca

SEQ ID NO: 201110 - RNA, 21 nt, Artificial Sequence
  Synthetic
guuccucaaagaccacugaca

SEQ ID NO: 201111 - RNA, 22 nt, Artificial Sequence
  Synthetic
aguuccucaaagaccacugaca

SEQ ID NO: 201112 - RNA, 23 nt, Artificial Sequence
  Synthetic
uaguuccucaaagaccacugaca

SEQ ID NO: 201113 - RNA, 24 nt, Artificial Sequence
  Synthetic
auaguuccucaaagaccacugaca

SEQ ID NO: 201114 - RNA, 18 nt, Artificial Sequence
  Synthetic
guucacauagcacugaca

SEQ ID NO: 201115 - RNA, 19 nt, Artificial Sequence
  Synthetic
uguucacauagcacugaca

SEQ ID NO: 201116 - RNA, 20 nt, Artificial Sequence
  Synthetic
auguucacauagcacugaca

SEQ ID NO: 201117 - RNA, 21 nt, Artificial Sequence
  Synthetic
uauguucacauagcacugaca

SEQ ID NO: 201118 - RNA, 22 nt, Artificial Sequence
  Synthetic
auauguucacauagcacugaca

SEQ ID NO: 201119 - RNA, 23 nt, Artificial Sequence
  Synthetic
uauauguucacauagcacugaca

SEQ ID NO: 201120 - RNA, 24 nt, Artificial Sequence
  Synthetic
auauauguucacauagcacugaca

SEQ ID NO: 201121 - RNA, 18 nt, Artificial Sequence
  Synthetic
auucuuaguguccugaca

SEQ ID NO: 201122 - RNA, 19 nt, Artificial Sequence
  Synthetic
aauucuuaguguccugaca

SEQ ID NO: 201123 - RNA, 20 nt, Artificial Sequence
  Synthetic
uaauucuuaguguccugaca

SEQ ID NO: 201124 - RNA, 21 nt, Artificial Sequence
  Synthetic
auaauucuuaguguccugaca

SEQ ID NO: 201125 - RNA, 22 nt, Artificial Sequence
  Synthetic
uauaauucuuaguguccugaca

SEQ ID NO: 201126 - RNA, 23 nt, Artificial Sequence
  Synthetic
cuauaauucuuaguguccugaca

SEQ ID NO: 201127 - RNA, 24 nt, Artificial Sequence
  Synthetic
ccuauaauucuuaguguccugaca

SEQ ID NO: 201128 - RNA, 18 nt, Artificial Sequence
  Synthetic
agauuuuuuuuccugaca

SEQ ID NO: 201129 - RNA, 19 nt, Artificial Sequence
  Synthetic
gagauuuuuuuuccugaca

SEQ ID NO: 201130 - RNA, 20 nt, Artificial Sequence
  Synthetic
ugagauuuuuuuuccugaca

SEQ ID NO: 201131 - RNA, 21 nt, Artificial Sequence
  Synthetic
uugagauuuuuuuuccugaca

SEQ ID NO: 201132 - RNA, 22 nt, Artificial Sequence
  Synthetic
guugagauuuuuuuuccugaca

SEQ ID NO: 201133 - RNA, 23 nt, Artificial Sequence
  Synthetic
uguugagauuuuuuuuccugaca

SEQ ID NO: 201134 - RNA, 24 nt, Artificial Sequence
  Synthetic
cuguugagauuuuuuuuccugaca

SEQ ID NO: 201135 - RNA, 18 nt, Artificial Sequence
  Synthetic
ccauucauagcgcugaca

SEQ ID NO: 201136 - RNA, 19 nt, Artificial Sequence
  Synthetic
cccauucauagcgcugaca

SEQ ID NO: 201137 - RNA, 20 nt, Artificial Sequence
  Synthetic
acccauucauagcgcugaca

SEQ ID NO: 201138 - RNA, 21 nt, Artificial Sequence
  Synthetic
gacccauucauagcgcugaca

SEQ ID NO: 201139 - RNA, 22 nt, Artificial Sequence
  Synthetic
agacccauucauagcgcugaca

SEQ ID NO: 201140 - RNA, 23 nt, Artificial Sequence
  Synthetic
gagacccauucauagcgcugaca

SEQ ID NO: 201141 - RNA, 24 nt, Artificial Sequence
  Synthetic
agagacccauucauagcgcugaca

SEQ ID NO: 201142 - RNA, 18 nt, Artificial Sequence
  Synthetic
cugcaugggaggcugaca

SEQ ID NO: 201143 - RNA, 19 nt, Artificial Sequence
  Synthetic
gcugcaugggaggcugaca

SEQ ID NO: 201144 - RNA, 20 nt, Artificial Sequence
  Synthetic
agcugcaugggaggcugaca

SEQ ID NO: 201145 - RNA, 21 nt, Artificial Sequence
  Synthetic
cagcugcaugggaggcugaca

SEQ ID NO: 201146 - RNA, 22 nt, Artificial Sequence
  Synthetic
ccagcugcaugggaggcugaca

SEQ ID NO: 201147 - RNA, 23 nt, Artificial Sequence
  Synthetic
gccagcugcaugggaggcugaca

SEQ ID NO: 201148 - RNA, 24 nt, Artificial Sequence
  Synthetic
ugccagcugcaugggaggcugaca

SEQ ID NO: 201149 - RNA, 18 nt, Artificial Sequence
  Synthetic
caaccuacucaucugaca

SEQ ID NO: 201150 - RNA, 19 nt, Artificial Sequence
  Synthetic
gcaaccuacucaucugaca

SEQ ID NO: 201151 - RNA, 20 nt, Artificial Sequence
  Synthetic
cgcaaccuacucaucugaca

SEQ ID NO: 201152 - RNA, 21 nt, Artificial Sequence
  Synthetic
ccgcaaccuacucaucugaca

SEQ ID NO: 201153 - RNA, 22 nt, Artificial Sequence
  Synthetic
uccgcaaccuacucaucugaca

SEQ ID NO: 201154 - RNA, 23 nt, Artificial Sequence
  Synthetic
uuccgcaaccuacucaucugaca

SEQ ID NO: 201155 - RNA, 24 nt, Artificial Sequence
  Synthetic
uuuccgcaaccuacucaucugaca

SEQ ID NO: 201156 - RNA, 21 nt, Artificial Sequence
  Synthetic
ucgcaaccuacucaucugaca

SEQ ID NO: 201157 - RNA, 22 nt, Artificial Sequence
  Synthetic
uucgcaaccuacucaucugaca

SEQ ID NO: 201158 - RNA, 23 nt, Artificial Sequence
  Synthetic
uuucgcaaccuacucaucugaca

SEQ ID NO: 201159 - RNA, 24 nt, Artificial Sequence
  Synthetic
uuuucgcaaccuacucaucugaca

SEQ ID NO: 201160 - RNA, 18 nt, Artificial Sequence
  Synthetic
ccaucuauucaucugaca

SEQ ID NO: 201161 - RNA, 19 nt, Artificial Sequence
  Synthetic
gccaucuauucaucugaca

SEQ ID NO: 201162 - RNA, 20 nt, Artificial Sequence
  Synthetic
ugccaucuauucaucugaca

SEQ ID NO: 201163 - RNA, 21 nt, Artificial Sequence
  Synthetic
uugccaucuauucaucugaca

SEQ ID NO: 201164 - RNA, 22 nt, Artificial Sequence
  Synthetic
uuugccaucuauucaucugaca

SEQ ID NO: 201165 - RNA, 23 nt, Artificial Sequence
  Synthetic
guuugccaucuauucaucugaca

SEQ ID NO: 201166 - RNA, 24 nt, Artificial Sequence
  Synthetic
uguuugccaucuauucaucugaca

SEQ ID NO: 201167 - RNA, 18 nt, Artificial Sequence
  Synthetic
caaccugcuuaucugaca

SEQ ID NO: 201168 - RNA, 19 nt, Artificial Sequence
  Synthetic
gcaaccugcuuaucugaca

SEQ ID NO: 201169 - RNA, 20 nt, Artificial Sequence
  Synthetic
cgcaaccugcuuaucugaca

SEQ ID NO: 201170 - RNA, 21 nt, Artificial Sequence
  Synthetic
ucgcaaccugcuuaucugaca

SEQ ID NO: 201171 - RNA, 22 nt, Artificial Sequence
  Synthetic
uucgcaaccugcuuaucugaca

SEQ ID NO: 201172 - RNA, 23 nt, Artificial Sequence
  Synthetic
uuucgcaaccugcuuaucugaca

SEQ ID NO: 201173 - RNA, 24 nt, Artificial Sequence
  Synthetic
uuuucgcaaccugcuuaucugaca

SEQ ID NO: 201174 - RNA, 18 nt, Artificial Sequence
  Synthetic
cauggaagaucucugaca

SEQ ID NO: 201175 - RNA, 19 nt, Artificial Sequence
  Synthetic
acauggaagaucucugaca

SEQ ID NO: 201176 - RNA, 20 nt, Artificial Sequence
  Synthetic
aacauggaagaucucugaca

SEQ ID NO: 201177 - RNA, 21 nt, Artificial Sequence
  Synthetic
gaacauggaagaucucugaca

SEQ ID NO: 201178 - RNA, 22 nt, Artificial Sequence
  Synthetic
agaacauggaagaucucugaca

SEQ ID NO: 201179 - RNA, 23 nt, Artificial Sequence
  Synthetic
uagaacauggaagaucucugaca

SEQ ID NO: 201180 - RNA, 24 nt, Artificial Sequence
  Synthetic
uuagaacauggaagaucucugaca

SEQ ID NO: 201181 - RNA, 18 nt, Artificial Sequence
  Synthetic
cauuucagcucucugaca

SEQ ID NO: 201182 - RNA, 19 nt, Artificial Sequence
  Synthetic
gcauuucagcucucugaca

SEQ ID NO: 201183 - RNA, 20 nt, Artificial Sequence
  Synthetic
cgcauuucagcucucugaca

SEQ ID NO: 201184 - RNA, 21 nt, Artificial Sequence
  Synthetic
ucgcauuucagcucucugaca

SEQ ID NO: 201185 - RNA, 22 nt, Artificial Sequence
  Synthetic
uucgcauuucagcucucugaca

SEQ ID NO: 201186 - RNA, 23 nt, Artificial Sequence
  Synthetic
auucgcauuucagcucucugaca

SEQ ID NO: 201187 - RNA, 24 nt, Artificial Sequence
  Synthetic
uauucgcauuucagcucucugaca

SEQ ID NO: 201188 - RNA, 18 nt, Artificial Sequence
  Synthetic
uuuguguuaauucugaca

SEQ ID NO: 201189 - RNA, 19 nt, Artificial Sequence
  Synthetic
guuuguguuaauucugaca

SEQ ID NO: 201190 - RNA, 20 nt, Artificial Sequence
  Synthetic
aguuuguguuaauucugaca

SEQ ID NO: 201191 - RNA, 21 nt, Artificial Sequence
  Synthetic
caguuuguguuaauucugaca

SEQ ID NO: 201192 - RNA, 22 nt, Artificial Sequence
  Synthetic
ccaguuuguguuaauucugaca

SEQ ID NO: 201193 - RNA, 23 nt, Artificial Sequence
  Synthetic
accaguuuguguuaauucugaca

SEQ ID NO: 201194 - RNA, 24 nt, Artificial Sequence
  Synthetic
caccaguuuguguuaauucugaca

SEQ ID NO: 201195 - RNA, 18 nt, Artificial Sequence
  Synthetic
caugucuacuuucugaca

SEQ ID NO: 201196 - RNA, 19 nt, Artificial Sequence
  Synthetic
ccaugucuacuuucugaca

SEQ ID NO: 201197 - RNA, 20 nt, Artificial Sequence
  Synthetic
gccaugucuacuuucugaca

SEQ ID NO: 201198 - RNA, 21 nt, Artificial Sequence
  Synthetic
ugccaugucuacuuucugaca

SEQ ID NO: 201199 - RNA, 22 nt, Artificial Sequence
  Synthetic
uugccaugucuacuuucugaca

SEQ ID NO: 201200 - RNA, 23 nt, Artificial Sequence
  Synthetic
uuugccaugucuacuuucugaca

SEQ ID NO: 201201 - RNA, 24 nt, Artificial Sequence
  Synthetic
guuugccaugucuacuuucugaca

SEQ ID NO: 201202 - RNA, 18 nt, Artificial Sequence
  Synthetic
gauuucuucuuucugaca

SEQ ID NO: 201203 - RNA, 19 nt, Artificial Sequence
  Synthetic
ugauuucuucuuucugaca

SEQ ID NO: 201204 - RNA, 20 nt, Artificial Sequence
  Synthetic
uugauuucuucuuucugaca

SEQ ID NO: 201205 - RNA, 21 nt, Artificial Sequence
  Synthetic
uuugauuucuucuuucugaca

SEQ ID NO: 201206 - RNA, 22 nt, Artificial Sequence
  Synthetic
auuugauuucuucuuucugaca

SEQ ID NO: 201207 - RNA, 23 nt, Artificial Sequence
  Synthetic
uauuugauuucuucuuucugaca

SEQ ID NO: 201208 - RNA, 24 nt, Artificial Sequence
  Synthetic
auauuugauuucuucuuucugaca

SEQ ID NO: 201209 - RNA, 18 nt, Artificial Sequence
  Synthetic
caauaauguacagugaca

SEQ ID NO: 201210 - RNA, 19 nt, Artificial Sequence
  Synthetic
acaauaauguacagugaca

SEQ ID NO: 201211 - RNA, 20 nt, Artificial Sequence
  Synthetic
uacaauaauguacagugaca

SEQ ID NO: 201212 - RNA, 21 nt, Artificial Sequence
  Synthetic
cuacaauaauguacagugaca

SEQ ID NO: 201213 - RNA, 22 nt, Artificial Sequence
  Synthetic
acuacaauaauguacagugaca

SEQ ID NO: 201214 - RNA, 23 nt, Artificial Sequence
  Synthetic
aacuacaauaauguacagugaca

SEQ ID NO: 201215 - RNA, 24 nt, Artificial Sequence
  Synthetic
uaacuacaauaauguacagugaca

SEQ ID NO: 201216 - RNA, 18 nt, Artificial Sequence
  Synthetic
ucugcccccuuagugaca

SEQ ID NO: 201217 - RNA, 19 nt, Artificial Sequence
  Synthetic
cucugcccccuuagugaca

SEQ ID NO: 201218 - RNA, 20 nt, Artificial Sequence
  Synthetic
gcucugcccccuuagugaca

SEQ ID NO: 201219 - RNA, 21 nt, Artificial Sequence
  Synthetic
ggcucugcccccuuagugaca

SEQ ID NO: 201220 - RNA, 22 nt, Artificial Sequence
  Synthetic
uggcucugcccccuuagugaca

SEQ ID NO: 201221 - RNA, 23 nt, Artificial Sequence
  Synthetic
cuggcucugcccccuuagugaca

SEQ ID NO: 201222 - RNA, 24 nt, Artificial Sequence
  Synthetic
acuggcucugcccccuuagugaca

SEQ ID NO: 201223 - RNA, 18 nt, Artificial Sequence
  Synthetic
aaaaauagcuuagugaca

SEQ ID NO: 201224 - RNA, 19 nt, Artificial Sequence
  Synthetic
aaaaaauagcuuagugaca

SEQ ID NO: 201225 - RNA, 20 nt, Artificial Sequence
  Synthetic
caaaaaauagcuuagugaca

SEQ ID NO: 201226 - RNA, 21 nt, Artificial Sequence
  Synthetic
acaaaaaauagcuuagugaca

SEQ ID NO: 201227 - RNA, 22 nt, Artificial Sequence
  Synthetic
gacaaaaaauagcuuagugaca

SEQ ID NO: 201228 - RNA, 23 nt, Artificial Sequence
  Synthetic
ggacaaaaaauagcuuagugaca

SEQ ID NO: 201229 - RNA, 24 nt, Artificial Sequence
  Synthetic
aggacaaaaaauagcuuagugaca

SEQ ID NO: 201230 - RNA, 18 nt, Artificial Sequence
  Synthetic
uaguucaaggaggugaca

SEQ ID NO: 201231 - RNA, 19 nt, Artificial Sequence
  Synthetic
auaguucaaggaggugaca

SEQ ID NO: 201232 - RNA, 20 nt, Artificial Sequence
  Synthetic
aauaguucaaggaggugaca

SEQ ID NO: 201233 - RNA, 21 nt, Artificial Sequence
  Synthetic
uaauaguucaaggaggugaca

SEQ ID NO: 201234 - RNA, 22 nt, Artificial Sequence
  Synthetic
uuaauaguucaaggaggugaca

SEQ ID NO: 201235 - RNA, 23 nt, Artificial Sequence
  Synthetic
cuuaauaguucaaggaggugaca

SEQ ID NO: 201236 - RNA, 24 nt, Artificial Sequence
  Synthetic
acuuaauaguucaaggaggugaca

SEQ ID NO: 201237 - RNA, 18 nt, Artificial Sequence
  Synthetic
cacuccauuggggugaca

SEQ ID NO: 201238 - RNA, 19 nt, Artificial Sequence
  Synthetic
ucacuccauuggggugaca

SEQ ID NO: 201239 - RNA, 20 nt, Artificial Sequence
  Synthetic
uucacuccauuggggugaca

SEQ ID NO: 201240 - RNA, 21 nt, Artificial Sequence
  Synthetic
auucacuccauuggggugaca

SEQ ID NO: 201241 - RNA, 22 nt, Artificial Sequence
  Synthetic
uauucacuccauuggggugaca

SEQ ID NO: 201242 - RNA, 23 nt, Artificial Sequence
  Synthetic
auauucacuccauuggggugaca

SEQ ID NO: 201243 - RNA, 24 nt, Artificial Sequence
  Synthetic
aauauucacuccauuggggugaca

SEQ ID NO: 201244 - RNA, 18 nt, Artificial Sequence
  Synthetic
gaaaucucugcugugaca

SEQ ID NO: 201245 - RNA, 19 nt, Artificial Sequence
  Synthetic
ggaaaucucugcugugaca

SEQ ID NO: 201246 - RNA, 20 nt, Artificial Sequence
  Synthetic
gggaaaucucugcugugaca

SEQ ID NO: 201247 - RNA, 21 nt, Artificial Sequence
  Synthetic
ugggaaaucucugcugugaca

SEQ ID NO: 201248 - RNA, 22 nt, Artificial Sequence
  Synthetic
augggaaaucucugcugugaca

SEQ ID NO: 201249 - RNA, 23 nt, Artificial Sequence
  Synthetic
gaugggaaaucucugcugugaca

SEQ ID NO: 201250 - RNA, 24 nt, Artificial Sequence
  Synthetic
ugaugggaaaucucugcugugaca

SEQ ID NO: 201251 - RNA, 18 nt, Artificial Sequence
  Synthetic
auaauugaaucugugaca

SEQ ID NO: 201252 - RNA, 19 nt, Artificial Sequence
  Synthetic
uauaauugaaucugugaca

SEQ ID NO: 201253 - RNA, 20 nt, Artificial Sequence
  Synthetic
auauaauugaaucugugaca

SEQ ID NO: 201254 - RNA, 21 nt, Artificial Sequence
  Synthetic
aauauaauugaaucugugaca

SEQ ID NO: 201255 - RNA, 22 nt, Artificial Sequence
  Synthetic
aaauauaauugaaucugugaca

SEQ ID NO: 201256 - RNA, 23 nt, Artificial Sequence
  Synthetic
aaaauauaauugaaucugugaca

SEQ ID NO: 201257 - RNA, 24 nt, Artificial Sequence
  Synthetic
caaaauauaauugaaucugugaca

SEQ ID NO: 201258 - RNA, 18 nt, Artificial Sequence
  Synthetic
uuaugaaaaugugugaca

SEQ ID NO: 201259 - RNA, 19 nt, Artificial Sequence
  Synthetic
uuuaugaaaaugugugaca

SEQ ID NO: 201260 - RNA, 20 nt, Artificial Sequence
  Synthetic
auuuaugaaaaugugugaca

SEQ ID NO: 201261 - RNA, 21 nt, Artificial Sequence
  Synthetic
cauuuaugaaaaugugugaca

SEQ ID NO: 201262 - RNA, 22 nt, Artificial Sequence
  Synthetic
ucauuuaugaaaaugugugaca

SEQ ID NO: 201263 - RNA, 23 nt, Artificial Sequence
  Synthetic
aucauuuaugaaaaugugugaca

SEQ ID NO: 201264 - RNA, 24 nt, Artificial Sequence
  Synthetic
aaucauuuaugaaaaugugugaca

SEQ ID NO: 201265 - RNA, 18 nt, Artificial Sequence
  Synthetic
aauuaucaaauugugaca

SEQ ID NO: 201266 - RNA, 19 nt, Artificial Sequence
  Synthetic
gaauuaucaaauugugaca

SEQ ID NO: 201267 - RNA, 20 nt, Artificial Sequence
  Synthetic
agaauuaucaaauugugaca

SEQ ID NO: 201268 - RNA, 21 nt, Artificial Sequence
  Synthetic
gagaauuaucaaauugugaca

SEQ ID NO: 201269 - RNA, 22 nt, Artificial Sequence
  Synthetic
ugagaauuaucaaauugugaca

SEQ ID NO: 201270 - RNA, 23 nt, Artificial Sequence
  Synthetic
gugagaauuaucaaauugugaca

SEQ ID NO: 201271 - RNA, 24 nt, Artificial Sequence
  Synthetic
ugugagaauuaucaaauugugaca

SEQ ID NO: 201272 - RNA, 18 nt, Artificial Sequence
  Synthetic
aagauauagguugugaca

SEQ ID NO: 201273 - RNA, 19 nt, Artificial Sequence
  Synthetic
gaagauauagguugugaca

SEQ ID NO: 201274 - RNA, 20 nt, Artificial Sequence
  Synthetic
agaagauauagguugugaca

SEQ ID NO: 201275 - RNA, 21 nt, Artificial Sequence
  Synthetic
aagaagauauagguugugaca

SEQ ID NO: 201276 - RNA, 22 nt, Artificial Sequence
  Synthetic
aaagaagauauagguugugaca

SEQ ID NO: 201277 - RNA, 23 nt, Artificial Sequence
  Synthetic
uaaagaagauauagguugugaca

SEQ ID NO: 201278 - RNA, 24 nt, Artificial Sequence
  Synthetic
auaaagaagauauagguugugaca

SEQ ID NO: 201279 - RNA, 18 nt, Artificial Sequence
  Synthetic
cauugccgauaauugaca

SEQ ID NO: 201280 - RNA, 19 nt, Artificial Sequence
  Synthetic
acauugccgauaauugaca

SEQ ID NO: 201281 - RNA, 20 nt, Artificial Sequence
  Synthetic
gacauugccgauaauugaca

SEQ ID NO: 201282 - RNA, 21 nt, Artificial Sequence
  Synthetic
agacauugccgauaauugaca

SEQ ID NO: 201283 - RNA, 22 nt, Artificial Sequence
  Synthetic
cagacauugccgauaauugaca

SEQ ID NO: 201284 - RNA, 23 nt, Artificial Sequence
  Synthetic
acagacauugccgauaauugaca

SEQ ID NO: 201285 - RNA, 24 nt, Artificial Sequence
  Synthetic
aacagacauugccgauaauugaca

SEQ ID NO: 201286 - RNA, 18 nt, Artificial Sequence
  Synthetic
uuuccuggaacauugaca

SEQ ID NO: 201287 - RNA, 19 nt, Artificial Sequence
  Synthetic
auuuccuggaacauugaca

SEQ ID NO: 201288 - RNA, 20 nt, Artificial Sequence
  Synthetic
uauuuccuggaacauugaca

SEQ ID NO: 201289 - RNA, 21 nt, Artificial Sequence
  Synthetic
uuauuuccuggaacauugaca

SEQ ID NO: 201290 - RNA, 22 nt, Artificial Sequence
  Synthetic
auuauuuccuggaacauugaca

SEQ ID NO: 201291 - RNA, 23 nt, Artificial Sequence
  Synthetic
uauuauuuccuggaacauugaca

SEQ ID NO: 201292 - RNA, 24 nt, Artificial Sequence
  Synthetic
cuauuauuuccuggaacauugaca

SEQ ID NO: 201293 - RNA, 18 nt, Artificial Sequence
  Synthetic
uuaagagguggauugaca

SEQ ID NO: 201294 - RNA, 19 nt, Artificial Sequence
  Synthetic
auuaagagguggauugaca

SEQ ID NO: 201295 - RNA, 20 nt, Artificial Sequence
  Synthetic
cauuaagagguggauugaca

SEQ ID NO: 201296 - RNA, 21 nt, Artificial Sequence
  Synthetic
acauuaagagguggauugaca

SEQ ID NO: 201297 - RNA, 22 nt, Artificial Sequence
  Synthetic
aacauuaagagguggauugaca

SEQ ID NO: 201298 - RNA, 23 nt, Artificial Sequence
  Synthetic
uaacauuaagagguggauugaca

SEQ ID NO: 201299 - RNA, 24 nt, Artificial Sequence
  Synthetic
cuaacauuaagagguggauugaca

SEQ ID NO: 201300 - RNA, 18 nt, Artificial Sequence
  Synthetic
acuucagagguauugaca

SEQ ID NO: 201301 - RNA, 19 nt, Artificial Sequence
  Synthetic
aacuucagagguauugaca

SEQ ID NO: 201302 - RNA, 20 nt, Artificial Sequence
  Synthetic
aaacuucagagguauugaca

SEQ ID NO: 201303 - RNA, 21 nt, Artificial Sequence
  Synthetic
gaaacuucagagguauugaca

SEQ ID NO: 201304 - RNA, 22 nt, Artificial Sequence
  Synthetic
ugaaacuucagagguauugaca

SEQ ID NO: 201305 - RNA, 23 nt, Artificial Sequence
  Synthetic
uugaaacuucagagguauugaca

SEQ ID NO: 201306 - RNA, 24 nt, Artificial Sequence
  Synthetic
auugaaacuucagagguauugaca

SEQ ID NO: 201307 - RNA, 18 nt, Artificial Sequence
  Synthetic
cauccauugaacuugaca

SEQ ID NO: 201308 - RNA, 19 nt, Artificial Sequence
  Synthetic
ucauccauugaacuugaca

SEQ ID NO: 201309 - RNA, 20 nt, Artificial Sequence
  Synthetic
gucauccauugaacuugaca

SEQ ID NO: 201310 - RNA, 21 nt, Artificial Sequence
  Synthetic
agucauccauugaacuugaca

SEQ ID NO: 201311 - RNA, 22 nt, Artificial Sequence
  Synthetic
gagucauccauugaacuugaca

SEQ ID NO: 201312 - RNA, 23 nt, Artificial Sequence
  Synthetic
ggagucauccauugaacuugaca

SEQ ID NO: 201313 - RNA, 24 nt, Artificial Sequence
  Synthetic
uggagucauccauugaacuugaca

SEQ ID NO: 201314 - RNA, 18 nt, Artificial Sequence
  Synthetic
ucccugacagacuugaca

SEQ ID NO: 201315 - RNA, 19 nt, Artificial Sequence
  Synthetic
gucccugacagacuugaca

SEQ ID NO: 201316 - RNA, 20 nt, Artificial Sequence
  Synthetic
agucccugacagacuugaca

SEQ ID NO: 201317 - RNA, 21 nt, Artificial Sequence
  Synthetic
aagucccugacagacuugaca

SEQ ID NO: 201318 - RNA, 22 nt, Artificial Sequence
  Synthetic
gaagucccugacagacuugaca

SEQ ID NO: 201319 - RNA, 23 nt, Artificial Sequence
  Synthetic
ggaagucccugacagacuugaca

SEQ ID NO: 201320 - RNA, 24 nt, Artificial Sequence
  Synthetic
cggaagucccugacagacuugaca

SEQ ID NO: 201321 - RNA, 18 nt, Artificial Sequence
  Synthetic
uuguauguuuacuugaca

SEQ ID NO: 201322 - RNA, 19 nt, Artificial Sequence
  Synthetic
uuuguauguuuacuugaca

SEQ ID NO: 201323 - RNA, 20 nt, Artificial Sequence
  Synthetic
uuuuguauguuuacuugaca

SEQ ID NO: 201324 - RNA, 21 nt, Artificial Sequence
  Synthetic
guuuuguauguuuacuugaca

SEQ ID NO: 201325 - RNA, 22 nt, Artificial Sequence
  Synthetic
cguuuuguauguuuacuugaca

SEQ ID NO: 201326 - RNA, 23 nt, Artificial Sequence
  Synthetic
acguuuuguauguuuacuugaca

SEQ ID NO: 201327 - RNA, 24 nt, Artificial Sequence
  Synthetic
aacguuuuguauguuuacuugaca

SEQ ID NO: 201328 - RNA, 18 nt, Artificial Sequence
  Synthetic
aaguuaaaaaucuugaca

SEQ ID NO: 201329 - RNA, 19 nt, Artificial Sequence
  Synthetic
uaaguuaaaaaucuugaca

SEQ ID NO: 201330 - RNA, 20 nt, Artificial Sequence
  Synthetic
uuaaguuaaaaaucuugaca

SEQ ID NO: 201331 - RNA, 21 nt, Artificial Sequence
  Synthetic
guuaaguuaaaaaucuugaca

SEQ ID NO: 201332 - RNA, 22 nt, Artificial Sequence
  Synthetic
gguuaaguuaaaaaucuugaca

SEQ ID NO: 201333 - RNA, 23 nt, Artificial Sequence
  Synthetic
ugguuaaguuaaaaaucuugaca

SEQ ID NO: 201334 - RNA, 24 nt, Artificial Sequence
  Synthetic
gugguuaaguuaaaaaucuugaca

SEQ ID NO: 201335 - RNA, 18 nt, Artificial Sequence
  Synthetic
agcaacaaaauguugaca

SEQ ID NO: 201336 - RNA, 19 nt, Artificial Sequence
  Synthetic
uagcaacaaaauguugaca

SEQ ID NO: 201337 - RNA, 20 nt, Artificial Sequence
  Synthetic
uuagcaacaaaauguugaca

SEQ ID NO: 201338 - RNA, 21 nt, Artificial Sequence
  Synthetic
uuuagcaacaaaauguugaca

SEQ ID NO: 201339 - RNA, 22 nt, Artificial Sequence
  Synthetic
auuuagcaacaaaauguugaca

SEQ ID NO: 201340 - RNA, 23 nt, Artificial Sequence
  Synthetic
aauuuagcaacaaaauguugaca

SEQ ID NO: 201341 - RNA, 24 nt, Artificial Sequence
  Synthetic
uaauuuagcaacaaaauguugaca

SEQ ID NO: 201342 - RNA, 18 nt, Artificial Sequence
  Synthetic
gcacuccuaauguugaca

SEQ ID NO: 201343 - RNA, 19 nt, Artificial Sequence
  Synthetic
ugcacuccuaauguugaca

SEQ ID NO: 201344 - RNA, 20 nt, Artificial Sequence
  Synthetic
cugcacuccuaauguugaca

SEQ ID NO: 201345 - RNA, 21 nt, Artificial Sequence
  Synthetic
acugcacuccuaauguugaca

SEQ ID NO: 201346 - RNA, 22 nt, Artificial Sequence
  Synthetic
aacugcacuccuaauguugaca

SEQ ID NO: 201347 - RNA, 23 nt, Artificial Sequence
  Synthetic
uaacugcacuccuaauguugaca

SEQ ID NO: 201348 - RNA, 24 nt, Artificial Sequence
  Synthetic
cuaacugcacuccuaauguugaca

SEQ ID NO: 201349 - RNA, 18 nt, Artificial Sequence
  Synthetic
aucugucuaauguugaca

SEQ ID NO: 201350 - RNA, 19 nt, Artificial Sequence
  Synthetic
gaucugucuaauguugaca

SEQ ID NO: 201351 - RNA, 20 nt, Artificial Sequence
  Synthetic
ugaucugucuaauguugaca

SEQ ID NO: 201352 - RNA, 21 nt, Artificial Sequence
  Synthetic
uugaucugucuaauguugaca

SEQ ID NO: 201353 - RNA, 22 nt, Artificial Sequence
  Synthetic
guugaucugucuaauguugaca

SEQ ID NO: 201354 - RNA, 23 nt, Artificial Sequence
  Synthetic
cguugaucugucuaauguugaca

SEQ ID NO: 201355 - RNA, 24 nt, Artificial Sequence
  Synthetic
ucguugaucugucuaauguugaca

SEQ ID NO: 201356 - RNA, 18 nt, Artificial Sequence
  Synthetic
cuauguuagaauuugaca

SEQ ID NO: 201357 - RNA, 19 nt, Artificial Sequence
  Synthetic
gcuauguuagaauuugaca

SEQ ID NO: 201358 - RNA, 20 nt, Artificial Sequence
  Synthetic
cgcuauguuagaauuugaca

SEQ ID NO: 201359 - RNA, 21 nt, Artificial Sequence
  Synthetic
acgcuauguuagaauuugaca

SEQ ID NO: 201360 - RNA, 22 nt, Artificial Sequence
  Synthetic
aacgcuauguuagaauuugaca

SEQ ID NO: 201361 - RNA, 23 nt, Artificial Sequence
  Synthetic
aaacgcuauguuagaauuugaca

SEQ ID NO: 201362 - RNA, 24 nt, Artificial Sequence
  Synthetic
gaaacgcuauguuagaauuugaca

SEQ ID NO: 201363 - RNA, 18 nt, Artificial Sequence
  Synthetic
uaaauguugaauuugaca

SEQ ID NO: 201364 - RNA, 19 nt, Artificial Sequence
  Synthetic
cuaaauguugaauuugaca

SEQ ID NO: 201365 - RNA, 20 nt, Artificial Sequence
  Synthetic
ccuaaauguugaauuugaca

SEQ ID NO: 201366 - RNA, 21 nt, Artificial Sequence
  Synthetic
gccuaaauguugaauuugaca

SEQ ID NO: 201367 - RNA, 22 nt, Artificial Sequence
  Synthetic
agccuaaauguugaauuugaca

SEQ ID NO: 201368 - RNA, 23 nt, Artificial Sequence
  Synthetic
aagccuaaauguugaauuugaca

SEQ ID NO: 201369 - RNA, 24 nt, Artificial Sequence
  Synthetic
aaagccuaaauguugaauuugaca

SEQ ID NO: 201370 - RNA, 18 nt, Artificial Sequence
  Synthetic
auacacugugauuugaca

SEQ ID NO: 201371 - RNA, 19 nt, Artificial Sequence
  Synthetic
cauacacugugauuugaca

SEQ ID NO: 201372 - RNA, 20 nt, Artificial Sequence
  Synthetic
acauacacugugauuugaca

SEQ ID NO: 201373 - RNA, 21 nt, Artificial Sequence
  Synthetic
aacauacacugugauuugaca

SEQ ID NO: 201374 - RNA, 22 nt, Artificial Sequence
  Synthetic
uaacauacacugugauuugaca

SEQ ID NO: 201375 - RNA, 23 nt, Artificial Sequence
  Synthetic
cuaacauacacugugauuugaca

SEQ ID NO: 201376 - RNA, 24 nt, Artificial Sequence
  Synthetic
acuaacauacacugugauuugaca

SEQ ID NO: 201377 - RNA, 18 nt, Artificial Sequence
  Synthetic
ugcaauuucuauuugaca

SEQ ID NO: 201378 - RNA, 19 nt, Artificial Sequence
  Synthetic
gugcaauuucuauuugaca

SEQ ID NO: 201379 - RNA, 20 nt, Artificial Sequence
  Synthetic
ugugcaauuucuauuugaca

SEQ ID NO: 201380 - RNA, 21 nt, Artificial Sequence
  Synthetic
augugcaauuucuauuugaca

SEQ ID NO: 201381 - RNA, 22 nt, Artificial Sequence
  Synthetic
gaugugcaauuucuauuugaca

SEQ ID NO: 201382 - RNA, 23 nt, Artificial Sequence
  Synthetic
ugaugugcaauuucuauuugaca

SEQ ID NO: 201383 - RNA, 24 nt, Artificial Sequence
  Synthetic
uugaugugcaauuucuauuugaca

SEQ ID NO: 201384 - RNA, 18 nt, Artificial Sequence
  Synthetic
aggugauuguguuugaca

SEQ ID NO: 201385 - RNA, 19 nt, Artificial Sequence
  Synthetic
aaggugauuguguuugaca

SEQ ID NO: 201386 - RNA, 20 nt, Artificial Sequence
  Synthetic
caaggugauuguguuugaca

SEQ ID NO: 201387 - RNA, 21 nt, Artificial Sequence
  Synthetic
gcaaggugauuguguuugaca

SEQ ID NO: 201388 - RNA, 22 nt, Artificial Sequence
  Synthetic
agcaaggugauuguguuugaca

SEQ ID NO: 201389 - RNA, 23 nt, Artificial Sequence
  Synthetic
gagcaaggugauuguguuugaca

SEQ ID NO: 201390 - RNA, 24 nt, Artificial Sequence
  Synthetic
agagcaaggugauuguguuugaca

SEQ ID NO: 201391 - RNA, 18 nt, Artificial Sequence
  Synthetic
uguuucuguuguuugaca

SEQ ID NO: 201392 - RNA, 19 nt, Artificial Sequence
  Synthetic
uuguuucuguuguuugaca

SEQ ID NO: 201393 - RNA, 20 nt, Artificial Sequence
  Synthetic
uuuguuucuguuguuugaca

SEQ ID NO: 201394 - RNA, 21 nt, Artificial Sequence
  Synthetic
guuuguuucuguuguuugaca

SEQ ID NO: 201395 - RNA, 22 nt, Artificial Sequence
  Synthetic
aguuuguuucuguuguuugaca

SEQ ID NO: 201396 - RNA, 23 nt, Artificial Sequence
  Synthetic
caguuuguuucuguuguuugaca

SEQ ID NO: 201397 - RNA, 24 nt, Artificial Sequence
  Synthetic
acaguuuguuucuguuguuugaca

SEQ ID NO: 201398 - RNA, 18 nt, Artificial Sequence
  Synthetic
gaaugcccuauuuugaca

SEQ ID NO: 201399 - RNA, 19 nt, Artificial Sequence
  Synthetic
ugaaugcccuauuuugaca

SEQ ID NO: 201400 - RNA, 20 nt, Artificial Sequence
  Synthetic
augaaugcccuauuuugaca

SEQ ID NO: 201401 - RNA, 21 nt, Artificial Sequence
  Synthetic
aaugaaugcccuauuuugaca

SEQ ID NO: 201402 - RNA, 22 nt, Artificial Sequence
  Synthetic
caaugaaugcccuauuuugaca

SEQ ID NO: 201403 - RNA, 23 nt, Artificial Sequence
  Synthetic
ucaaugaaugcccuauuuugaca

SEQ ID NO: 201404 - RNA, 24 nt, Artificial Sequence
  Synthetic
uucaaugaaugcccuauuuugaca

SEQ ID NO: 201405 - RNA, 18 nt, Artificial Sequence
  Synthetic
uuaaauauguuuuugaca

SEQ ID NO: 201406 - RNA, 19 nt, Artificial Sequence
  Synthetic
uuuaaauauguuuuugaca

SEQ ID NO: 201407 - RNA, 20 nt, Artificial Sequence
  Synthetic
cuuuaaauauguuuuugaca

SEQ ID NO: 201408 - RNA, 21 nt, Artificial Sequence
  Synthetic
acuuuaaauauguuuuugaca

SEQ ID NO: 201409 - RNA, 22 nt, Artificial Sequence
  Synthetic
aacuuuaaauauguuuuugaca

SEQ ID NO: 201410 - RNA, 23 nt, Artificial Sequence
  Synthetic
aaacuuuaaauauguuuuugaca

SEQ ID NO: 201411 - RNA, 24 nt, Artificial Sequence
  Synthetic
uaaacuuuaaauauguuuuugaca

SEQ ID NO: 201412 - RNA, 18 nt, Artificial Sequence
  Synthetic
aaaugguguuuuuugaca

SEQ ID NO: 201413 - RNA, 19 nt, Artificial Sequence
  Synthetic
aaaaugguguuuuuugaca

SEQ ID NO: 201414 - RNA, 20 nt, Artificial Sequence
  Synthetic
uaaaaugguguuuuuugaca

SEQ ID NO: 201415 - RNA, 21 nt, Artificial Sequence
  Synthetic
auaaaaugguguuuuuugaca

SEQ ID NO: 201416 - RNA, 22 nt, Artificial Sequence
  Synthetic
cauaaaaugguguuuuuugaca

SEQ ID NO: 201417 - RNA, 23 nt, Artificial Sequence
  Synthetic
ucauaaaaugguguuuuuugaca

SEQ ID NO: 201418 - RNA, 24 nt, Artificial Sequence
  Synthetic
gucauaaaaugguguuuuuugaca

SEQ ID NO: 201419 - RNA, 18 nt, Artificial Sequence
  Synthetic
ucagcaucaaaaaauaca

SEQ ID NO: 201420 - RNA, 19 nt, Artificial Sequence
  Synthetic
cucagcaucaaaaaauaca

SEQ ID NO: 201421 - RNA, 20 nt, Artificial Sequence
  Synthetic
ucucagcaucaaaaaauaca

SEQ ID NO: 201422 - RNA, 21 nt, Artificial Sequence
  Synthetic
aucucagcaucaaaaaauaca

SEQ ID NO: 201423 - RNA, 22 nt, Artificial Sequence
  Synthetic
uaucucagcaucaaaaaauaca

SEQ ID NO: 201424 - RNA, 23 nt, Artificial Sequence
  Synthetic
cuaucucagcaucaaaaaauaca

SEQ ID NO: 201425 - RNA, 24 nt, Artificial Sequence
  Synthetic
ccuaucucagcaucaaaaaauaca

SEQ ID NO: 201426 - RNA, 18 nt, Artificial Sequence
  Synthetic
guuuauaagaaaaauaca

SEQ ID NO: 201427 - RNA, 19 nt, Artificial Sequence
  Synthetic
uguuuauaagaaaaauaca

SEQ ID NO: 201428 - RNA, 20 nt, Artificial Sequence
  Synthetic
auguuuauaagaaaaauaca

SEQ ID NO: 201429 - RNA, 21 nt, Artificial Sequence
  Synthetic
aauguuuauaagaaaaauaca

SEQ ID NO: 201430 - RNA, 22 nt, Artificial Sequence
  Synthetic
caauguuuauaagaaaaauaca

SEQ ID NO: 201431 - RNA, 23 nt, Artificial Sequence
  Synthetic
acaauguuuauaagaaaaauaca

SEQ ID NO: 201432 - RNA, 24 nt, Artificial Sequence
  Synthetic
aacaauguuuauaagaaaaauaca

SEQ ID NO: 201433 - RNA, 18 nt, Artificial Sequence
  Synthetic
aaagucauuacaaauaca

SEQ ID NO: 201434 - RNA, 19 nt, Artificial Sequence
  Synthetic
aaaagucauuacaaauaca

SEQ ID NO: 201435 - RNA, 20 nt, Artificial Sequence
  Synthetic
aaaaagucauuacaaauaca

SEQ ID NO: 201436 - RNA, 21 nt, Artificial Sequence
  Synthetic
aaaaaagucauuacaaauaca

SEQ ID NO: 201437 - RNA, 22 nt, Artificial Sequence
  Synthetic
aaaaaaagucauuacaaauaca

SEQ ID NO: 201438 - RNA, 23 nt, Artificial Sequence
  Synthetic
aaaaaaaagucauuacaaauaca

SEQ ID NO: 201439 - RNA, 24 nt, Artificial Sequence
  Synthetic
gaaaaaaaagucauuacaaauaca

SEQ ID NO: 201440 - RNA, 18 nt, Artificial Sequence
  Synthetic
aaagugacuucaaauaca

SEQ ID NO: 201441 - RNA, 19 nt, Artificial Sequence
  Synthetic
caaagugacuucaaauaca

SEQ ID NO: 201442 - RNA, 20 nt, Artificial Sequence
  Synthetic
gcaaagugacuucaaauaca

SEQ ID NO: 201443 - RNA, 21 nt, Artificial Sequence
  Synthetic
agcaaagugacuucaaauaca

SEQ ID NO: 201444 - RNA, 22 nt, Artificial Sequence
  Synthetic
uagcaaagugacuucaaauaca

SEQ ID NO: 201445 - RNA, 23 nt, Artificial Sequence
  Synthetic
uuagcaaagugacuucaaauaca

SEQ ID NO: 201446 - RNA, 24 nt, Artificial Sequence
  Synthetic
cuuagcaaagugacuucaaauaca

SEQ ID NO: 201447 - RNA, 18 nt, Artificial Sequence
  Synthetic
uaaaauuuuucaaauaca

SEQ ID NO: 201448 - RNA, 19 nt, Artificial Sequence
  Synthetic
uuaaaauuuuucaaauaca

SEQ ID NO: 201449 - RNA, 20 nt, Artificial Sequence
  Synthetic
uuuaaaauuuuucaaauaca

SEQ ID NO: 201450 - RNA, 21 nt, Artificial Sequence
  Synthetic
uuuuaaaauuuuucaaauaca

SEQ ID NO: 201451 - RNA, 22 nt, Artificial Sequence
  Synthetic
auuuuaaaauuuuucaaauaca

SEQ ID NO: 201452 - RNA, 23 nt, Artificial Sequence
  Synthetic
uauuuuaaaauuuuucaaauaca

SEQ ID NO: 201453 - RNA, 24 nt, Artificial Sequence
  Synthetic
cuauuuuaaaauuuuucaaauaca

SEQ ID NO: 201454 - RNA, 18 nt, Artificial Sequence
  Synthetic
gucaggauaggaaauaca

SEQ ID NO: 201455 - RNA, 19 nt, Artificial Sequence
  Synthetic
agucaggauaggaaauaca

SEQ ID NO: 201456 - RNA, 20 nt, Artificial Sequence
  Synthetic
uagucaggauaggaaauaca

SEQ ID NO: 201457 - RNA, 21 nt, Artificial Sequence
  Synthetic
uuagucaggauaggaaauaca

SEQ ID NO: 201458 - RNA, 22 nt, Artificial Sequence
  Synthetic
guuagucaggauaggaaauaca

SEQ ID NO: 201459 - RNA, 23 nt, Artificial Sequence
  Synthetic
uguuagucaggauaggaaauaca

SEQ ID NO: 201460 - RNA, 24 nt, Artificial Sequence
  Synthetic
cuguuagucaggauaggaaauaca

SEQ ID NO: 201461 - RNA, 18 nt, Artificial Sequence
  Synthetic
uaucagguaugaaauaca

SEQ ID NO: 201462 - RNA, 19 nt, Artificial Sequence
  Synthetic
auaucagguaugaaauaca

SEQ ID NO: 201463 - RNA, 20 nt, Artificial Sequence
  Synthetic
cauaucagguaugaaauaca

SEQ ID NO: 201464 - RNA, 21 nt, Artificial Sequence
  Synthetic
acauaucagguaugaaauaca

SEQ ID NO: 201465 - RNA, 22 nt, Artificial Sequence
  Synthetic
uacauaucagguaugaaauaca

SEQ ID NO: 201466 - RNA, 23 nt, Artificial Sequence
  Synthetic
uuacauaucagguaugaaauaca

SEQ ID NO: 201467 - RNA, 24 nt, Artificial Sequence
  Synthetic
auuacauaucagguaugaaauaca

SEQ ID NO: 201468 - RNA, 18 nt, Artificial Sequence
  Synthetic
cuaucucuacacaauaca

SEQ ID NO: 201469 - RNA, 19 nt, Artificial Sequence
  Synthetic
ccuaucucuacacaauaca

SEQ ID NO: 201470 - RNA, 20 nt, Artificial Sequence
  Synthetic
gccuaucucuacacaauaca

SEQ ID NO: 201471 - RNA, 21 nt, Artificial Sequence
  Synthetic
agccuaucucuacacaauaca

SEQ ID NO: 201472 - RNA, 22 nt, Artificial Sequence
  Synthetic
uagccuaucucuacacaauaca

SEQ ID NO: 201473 - RNA, 23 nt, Artificial Sequence
  Synthetic
uuagccuaucucuacacaauaca

SEQ ID NO: 201474 - RNA, 24 nt, Artificial Sequence
  Synthetic
uuuagccuaucucuacacaauaca

SEQ ID NO: 201475 - RNA, 18 nt, Artificial Sequence
  Synthetic
cagaggaaauucaauaca

SEQ ID NO: 201476 - RNA, 19 nt, Artificial Sequence
  Synthetic
acagaggaaauucaauaca

SEQ ID NO: 201477 - RNA, 20 nt, Artificial Sequence
  Synthetic
aacagaggaaauucaauaca

SEQ ID NO: 201478 - RNA, 21 nt, Artificial Sequence
  Synthetic
aaacagaggaaauucaauaca

SEQ ID NO: 201479 - RNA, 22 nt, Artificial Sequence
  Synthetic
caaacagaggaaauucaauaca

SEQ ID NO: 201480 - RNA, 23 nt, Artificial Sequence
  Synthetic
ucaaacagaggaaauucaauaca

SEQ ID NO: 201481 - RNA, 24 nt, Artificial Sequence
  Synthetic
uucaaacagaggaaauucaauaca

SEQ ID NO: 201482 - RNA, 18 nt, Artificial Sequence
  Synthetic
cuccaauuuuucaauaca

SEQ ID NO: 201483 - RNA, 19 nt, Artificial Sequence
  Synthetic
ccuccaauuuuucaauaca

SEQ ID NO: 201484 - RNA, 20 nt, Artificial Sequence
  Synthetic
cccuccaauuuuucaauaca

SEQ ID NO: 201485 - RNA, 21 nt, Artificial Sequence
  Synthetic
ccccuccaauuuuucaauaca

SEQ ID NO: 201486 - RNA, 22 nt, Artificial Sequence
  Synthetic
gccccuccaauuuuucaauaca

SEQ ID NO: 201487 - RNA, 23 nt, Artificial Sequence
  Synthetic
agccccuccaauuuuucaauaca

SEQ ID NO: 201488 - RNA, 24 nt, Artificial Sequence
  Synthetic
uagccccuccaauuuuucaauaca

SEQ ID NO: 201489 - RNA, 18 nt, Artificial Sequence
  Synthetic
aaucucuuucagaauaca

SEQ ID NO: 201490 - RNA, 19 nt, Artificial Sequence
  Synthetic
aaaucucuuucagaauaca

SEQ ID NO: 201491 - RNA, 20 nt, Artificial Sequence
  Synthetic
caaaucucuuucagaauaca

SEQ ID NO: 201492 - RNA, 21 nt, Artificial Sequence
  Synthetic
acaaaucucuuucagaauaca

SEQ ID NO: 201493 - RNA, 22 nt, Artificial Sequence
  Synthetic
gacaaaucucuuucagaauaca

SEQ ID NO: 201494 - RNA, 23 nt, Artificial Sequence
  Synthetic
ugacaaaucucuuucagaauaca

SEQ ID NO: 201495 - RNA, 24 nt, Artificial Sequence
  Synthetic
uugacaaaucucuuucagaauaca

SEQ ID NO: 201496 - RNA, 18 nt, Artificial Sequence
  Synthetic
gaagcaauagugaauaca

SEQ ID NO: 201497 - RNA, 19 nt, Artificial Sequence
  Synthetic
ggaagcaauagugaauaca

SEQ ID NO: 201498 - RNA, 20 nt, Artificial Sequence
  Synthetic
uggaagcaauagugaauaca

SEQ ID NO: 201499 - RNA, 21 nt, Artificial Sequence
  Synthetic
auggaagcaauagugaauaca

SEQ ID NO: 201500 - RNA, 22 nt, Artificial Sequence
  Synthetic
aauggaagcaauagugaauaca

SEQ ID NO: 201501 - RNA, 23 nt, Artificial Sequence
  Synthetic
aaauggaagcaauagugaauaca

SEQ ID NO: 201502 - RNA, 24 nt, Artificial Sequence
  Synthetic
gaaauggaagcaauagugaauaca

SEQ ID NO: 201503 - RNA, 18 nt, Artificial Sequence
  Synthetic
aaagucauuuauaauaca

SEQ ID NO: 201504 - RNA, 19 nt, Artificial Sequence
  Synthetic
uaaagucauuuauaauaca

SEQ ID NO: 201505 - RNA, 20 nt, Artificial Sequence
  Synthetic
uuaaagucauuuauaauaca

SEQ ID NO: 201506 - RNA, 21 nt, Artificial Sequence
  Synthetic
auuaaagucauuuauaauaca

SEQ ID NO: 201507 - RNA, 22 nt, Artificial Sequence
  Synthetic
uauuaaagucauuuauaauaca

SEQ ID NO: 201508 - RNA, 23 nt, Artificial Sequence
  Synthetic
auauuaaagucauuuauaauaca

SEQ ID NO: 201509 - RNA, 24 nt, Artificial Sequence
  Synthetic
uauauuaaagucauuuauaauaca

SEQ ID NO: 201510 - RNA, 18 nt, Artificial Sequence
  Synthetic
uuauaaaauauuaauaca

SEQ ID NO: 201511 - RNA, 19 nt, Artificial Sequence
  Synthetic
uuuauaaaauauuaauaca

SEQ ID NO: 201512 - RNA, 20 nt, Artificial Sequence
  Synthetic
cuuuauaaaauauuaauaca

SEQ ID NO: 201513 - RNA, 21 nt, Artificial Sequence
  Synthetic
ccuuuauaaaauauuaauaca

SEQ ID NO: 201514 - RNA, 22 nt, Artificial Sequence
  Synthetic
uccuuuauaaaauauuaauaca

SEQ ID NO: 201515 - RNA, 23 nt, Artificial Sequence
  Synthetic
auccuuuauaaaauauuaauaca

SEQ ID NO: 201516 - RNA, 24 nt, Artificial Sequence
  Synthetic
aauccuuuauaaaauauuaauaca

SEQ ID NO: 201517 - RNA, 18 nt, Artificial Sequence
  Synthetic
aguuuucguaaacauaca

SEQ ID NO: 201518 - RNA, 19 nt, Artificial Sequence
  Synthetic
caguuuucguaaacauaca

SEQ ID NO: 201519 - RNA, 20 nt, Artificial Sequence
  Synthetic
ucaguuuucguaaacauaca

SEQ ID NO: 201520 - RNA, 21 nt, Artificial Sequence
  Synthetic
uucaguuuucguaaacauaca

SEQ ID NO: 201521 - RNA, 22 nt, Artificial Sequence
  Synthetic
cuucaguuuucguaaacauaca

SEQ ID NO: 201522 - RNA, 23 nt, Artificial Sequence
  Synthetic
ccuucaguuuucguaaacauaca

SEQ ID NO: 201523 - RNA, 24 nt, Artificial Sequence
  Synthetic
cccuucaguuuucguaaacauaca

SEQ ID NO: 201524 - RNA, 18 nt, Artificial Sequence
  Synthetic
uuuuauucugaacauaca

SEQ ID NO: 201525 - RNA, 19 nt, Artificial Sequence
  Synthetic
cuuuuauucugaacauaca

SEQ ID NO: 201526 - RNA, 20 nt, Artificial Sequence
  Synthetic
ucuuuuauucugaacauaca

SEQ ID NO: 201527 - RNA, 21 nt, Artificial Sequence
  Synthetic
uucuuuuauucugaacauaca

SEQ ID NO: 201528 - RNA, 22 nt, Artificial Sequence
  Synthetic
uuucuuuuauucugaacauaca

SEQ ID NO: 201529 - RNA, 23 nt, Artificial Sequence
  Synthetic
uuuucuuuuauucugaacauaca

SEQ ID NO: 201530 - RNA, 24 nt, Artificial Sequence
  Synthetic
cuuuucuuuuauucugaacauaca

SEQ ID NO: 201531 - RNA, 18 nt, Artificial Sequence
  Synthetic
uaaauguuugaacauaca

SEQ ID NO: 201532 - RNA, 19 nt, Artificial Sequence
  Synthetic
auaaauguuugaacauaca

SEQ ID NO: 201533 - RNA, 20 nt, Artificial Sequence
  Synthetic
aauaaauguuugaacauaca

SEQ ID NO: 201534 - RNA, 21 nt, Artificial Sequence
  Synthetic
aaauaaauguuugaacauaca

SEQ ID NO: 201535 - RNA, 22 nt, Artificial Sequence
  Synthetic
uaaauaaauguuugaacauaca

SEQ ID NO: 201536 - RNA, 23 nt, Artificial Sequence
  Synthetic
auaaauaaauguuugaacauaca

SEQ ID NO: 201537 - RNA, 24 nt, Artificial Sequence
  Synthetic
aauaaauaaauguuugaacauaca

SEQ ID NO: 201538 - RNA, 18 nt, Artificial Sequence
  Synthetic
auuuacugauaacauaca

SEQ ID NO: 201539 - RNA, 19 nt, Artificial Sequence
  Synthetic
cauuuacugauaacauaca

SEQ ID NO: 201540 - RNA, 20 nt, Artificial Sequence
  Synthetic
gcauuuacugauaacauaca

SEQ ID NO: 201541 - RNA, 21 nt, Artificial Sequence
  Synthetic
ggcauuuacugauaacauaca

SEQ ID NO: 201542 - RNA, 22 nt, Artificial Sequence
  Synthetic
uggcauuuacugauaacauaca

SEQ ID NO: 201543 - RNA, 23 nt, Artificial Sequence
  Synthetic
guggcauuuacugauaacauaca

SEQ ID NO: 201544 - RNA, 24 nt, Artificial Sequence
  Synthetic
aguggcauuuacugauaacauaca

SEQ ID NO: 201545 - RNA, 18 nt, Artificial Sequence
  Synthetic
uauauauacacacauaca

SEQ ID NO: 201546 - RNA, 19 nt, Artificial Sequence
  Synthetic
auauauauacacacauaca

SEQ ID NO: 201547 - RNA, 20 nt, Artificial Sequence
  Synthetic
uauauauauacacacauaca

SEQ ID NO: 201548 - RNA, 21 nt, Artificial Sequence
  Synthetic
uuauauauauacacacauaca

SEQ ID NO: 201549 - RNA, 22 nt, Artificial Sequence
  Synthetic
auuauauauauacacacauaca

SEQ ID NO: 201550 - RNA, 23 nt, Artificial Sequence
  Synthetic
uauuauauauauacacacauaca

SEQ ID NO: 201551 - RNA, 24 nt, Artificial Sequence
  Synthetic
auauuauauauauacacacauaca

SEQ ID NO: 201552 - RNA, 18 nt, Artificial Sequence
  Synthetic
aacacauggacacauaca

SEQ ID NO: 201553 - RNA, 19 nt, Artificial Sequence
  Synthetic
gaacacauggacacauaca

SEQ ID NO: 201554 - RNA, 20 nt, Artificial Sequence
  Synthetic
agaacacauggacacauaca

SEQ ID NO: 201555 - RNA, 21 nt, Artificial Sequence
  Synthetic
gagaacacauggacacauaca

SEQ ID NO: 201556 - RNA, 22 nt, Artificial Sequence
  Synthetic
ugagaacacauggacacauaca

SEQ ID NO: 201557 - RNA, 23 nt, Artificial Sequence
  Synthetic
augagaacacauggacacauaca

SEQ ID NO: 201558 - RNA, 24 nt, Artificial Sequence
  Synthetic
gaugagaacacauggacacauaca

SEQ ID NO: 201559 - RNA, 18 nt, Artificial Sequence
  Synthetic
gaggaaaagaggcauaca

SEQ ID NO: 201560 - RNA, 19 nt, Artificial Sequence
  Synthetic
agaggaaaagaggcauaca

SEQ ID NO: 201561 - RNA, 20 nt, Artificial Sequence
  Synthetic
aagaggaaaagaggcauaca

SEQ ID NO: 201562 - RNA, 21 nt, Artificial Sequence
  Synthetic
gaagaggaaaagaggcauaca

SEQ ID NO: 201563 - RNA, 22 nt, Artificial Sequence
  Synthetic
agaagaggaaaagaggcauaca

SEQ ID NO: 201564 - RNA, 23 nt, Artificial Sequence
  Synthetic
aagaagaggaaaagaggcauaca

SEQ ID NO: 201565 - RNA, 24 nt, Artificial Sequence
  Synthetic
uaagaagaggaaaagaggcauaca

SEQ ID NO: 201566 - RNA, 18 nt, Artificial Sequence
  Synthetic
caaaaagaugugcauaca

SEQ ID NO: 201567 - RNA, 19 nt, Artificial Sequence
  Synthetic
gcaaaaagaugugcauaca

SEQ ID NO: 201568 - RNA, 20 nt, Artificial Sequence
  Synthetic
ugcaaaaagaugugcauaca

SEQ ID NO: 201569 - RNA, 21 nt, Artificial Sequence
  Synthetic
uugcaaaaagaugugcauaca

SEQ ID NO: 201570 - RNA, 22 nt, Artificial Sequence
  Synthetic
auugcaaaaagaugugcauaca

SEQ ID NO: 201571 - RNA, 23 nt, Artificial Sequence
  Synthetic
cauugcaaaaagaugugcauaca

SEQ ID NO: 201572 - RNA, 24 nt, Artificial Sequence
  Synthetic
acauugcaaaaagaugugcauaca

SEQ ID NO: 201573 - RNA, 18 nt, Artificial Sequence
  Synthetic
gacuaagacaaucauaca

SEQ ID NO: 201574 - RNA, 19 nt, Artificial Sequence
  Synthetic
agacuaagacaaucauaca

SEQ ID NO: 201575 - RNA, 20 nt, Artificial Sequence
  Synthetic
cagacuaagacaaucauaca

SEQ ID NO: 201576 - RNA, 21 nt, Artificial Sequence
  Synthetic
acagacuaagacaaucauaca

SEQ ID NO: 201577 - RNA, 22 nt, Artificial Sequence
  Synthetic
aacagacuaagacaaucauaca

SEQ ID NO: 201578 - RNA, 23 nt, Artificial Sequence
  Synthetic
aaacagacuaagacaaucauaca

SEQ ID NO: 201579 - RNA, 24 nt, Artificial Sequence
  Synthetic
caaacagacuaagacaaucauaca

SEQ ID NO: 201580 - RNA, 18 nt, Artificial Sequence
  Synthetic
auaaauauaacucauaca

SEQ ID NO: 201581 - RNA, 19 nt, Artificial Sequence
  Synthetic
gauaaauauaacucauaca

SEQ ID NO: 201582 - RNA, 20 nt, Artificial Sequence
  Synthetic
ugauaaauauaacucauaca

SEQ ID NO: 201583 - RNA, 21 nt, Artificial Sequence
  Synthetic
uugauaaauauaacucauaca

SEQ ID NO: 201584 - RNA, 22 nt, Artificial Sequence
  Synthetic
uuugauaaauauaacucauaca

SEQ ID NO: 201585 - RNA, 23 nt, Artificial Sequence
  Synthetic
auuugauaaauauaacucauaca

SEQ ID NO: 201586 - RNA, 24 nt, Artificial Sequence
  Synthetic
uauuugauaaauauaacucauaca

SEQ ID NO: 201587 - RNA, 18 nt, Artificial Sequence
  Synthetic
uaguuaguuguucauaca

SEQ ID NO: 201588 - RNA, 19 nt, Artificial Sequence
  Synthetic
uuaguuaguuguucauaca

SEQ ID NO: 201589 - RNA, 20 nt, Artificial Sequence
  Synthetic
guuaguuaguuguucauaca

SEQ ID NO: 201590 - RNA, 21 nt, Artificial Sequence
  Synthetic
aguuaguuaguuguucauaca

SEQ ID NO: 201591 - RNA, 22 nt, Artificial Sequence
  Synthetic
aaguuaguuaguuguucauaca

SEQ ID NO: 201592 - RNA, 23 nt, Artificial Sequence
  Synthetic
gaaguuaguuaguuguucauaca

SEQ ID NO: 201593 - RNA, 24 nt, Artificial Sequence
  Synthetic
ggaaguuaguuaguuguucauaca

SEQ ID NO: 201594 - RNA, 18 nt, Artificial Sequence
  Synthetic
uacucuugugaagauaca

SEQ ID NO: 201595 - RNA, 19 nt, Artificial Sequence
  Synthetic
guacucuugugaagauaca

SEQ ID NO: 201596 - RNA, 20 nt, Artificial Sequence
  Synthetic
uguacucuugugaagauaca

SEQ ID NO: 201597 - RNA, 21 nt, Artificial Sequence
  Synthetic
cuguacucuugugaagauaca

SEQ ID NO: 201598 - RNA, 22 nt, Artificial Sequence
  Synthetic
acuguacucuugugaagauaca

SEQ ID NO: 201599 - RNA, 23 nt, Artificial Sequence
  Synthetic
aacuguacucuugugaagauaca

SEQ ID NO: 201600 - RNA, 24 nt, Artificial Sequence
  Synthetic
caacuguacucuugugaagauaca

SEQ ID NO: 201601 - RNA, 18 nt, Artificial Sequence
  Synthetic
auaaaauggagagauaca

SEQ ID NO: 201602 - RNA, 19 nt, Artificial Sequence
  Synthetic
cauaaaauggagagauaca

SEQ ID NO: 201603 - RNA, 20 nt, Artificial Sequence
  Synthetic
acauaaaauggagagauaca

SEQ ID NO: 201604 - RNA, 21 nt, Artificial Sequence
  Synthetic
gacauaaaauggagagauaca

SEQ ID NO: 201605 - RNA, 22 nt, Artificial Sequence
  Synthetic
ggacauaaaauggagagauaca

SEQ ID NO: 201606 - RNA, 23 nt, Artificial Sequence
  Synthetic
uggacauaaaauggagagauaca

SEQ ID NO: 201607 - RNA, 24 nt, Artificial Sequence
  Synthetic
uuggacauaaaauggagagauaca

SEQ ID NO: 201608 - RNA, 18 nt, Artificial Sequence
  Synthetic
guggaacccauggauaca

SEQ ID NO: 201609 - RNA, 19 nt, Artificial Sequence
  Synthetic
uguggaacccauggauaca

SEQ ID NO: 201610 - RNA, 20 nt, Artificial Sequence
  Synthetic
auguggaacccauggauaca

SEQ ID NO: 201611 - RNA, 21 nt, Artificial Sequence
  Synthetic
aauguggaacccauggauaca

SEQ ID NO: 201612 - RNA, 22 nt, Artificial Sequence
  Synthetic
aaauguggaacccauggauaca

SEQ ID NO: 201613 - RNA, 23 nt, Artificial Sequence
  Synthetic
caaauguggaacccauggauaca

SEQ ID NO: 201614 - RNA, 24 nt, Artificial Sequence
  Synthetic
acaaauguggaacccauggauaca

SEQ ID NO: 201615 - RNA, 18 nt, Artificial Sequence
  Synthetic
gcaaagggcauggauaca

SEQ ID NO: 201616 - RNA, 19 nt, Artificial Sequence
  Synthetic
agcaaagggcauggauaca

SEQ ID NO: 201617 - RNA, 20 nt, Artificial Sequence
  Synthetic
uagcaaagggcauggauaca

SEQ ID NO: 201618 - RNA, 21 nt, Artificial Sequence
  Synthetic
uuagcaaagggcauggauaca

SEQ ID NO: 201619 - RNA, 22 nt, Artificial Sequence
  Synthetic
cuuagcaaagggcauggauaca

SEQ ID NO: 201620 - RNA, 23 nt, Artificial Sequence
  Synthetic
acuuagcaaagggcauggauaca

SEQ ID NO: 201621 - RNA, 24 nt, Artificial Sequence
  Synthetic
uacuuagcaaagggcauggauaca

SEQ ID NO: 201622 - RNA, 18 nt, Artificial Sequence
  Synthetic
guugcaggcuuggauaca

SEQ ID NO: 201623 - RNA, 19 nt, Artificial Sequence
  Synthetic
uguugcaggcuuggauaca

SEQ ID NO: 201624 - RNA, 20 nt, Artificial Sequence
  Synthetic
auguugcaggcuuggauaca

SEQ ID NO: 201625 - RNA, 21 nt, Artificial Sequence
  Synthetic
aauguugcaggcuuggauaca

SEQ ID NO: 201626 - RNA, 22 nt, Artificial Sequence
  Synthetic
uaauguugcaggcuuggauaca

SEQ ID NO: 201627 - RNA, 23 nt, Artificial Sequence
  Synthetic
uuaauguugcaggcuuggauaca

SEQ ID NO: 201628 - RNA, 24 nt, Artificial Sequence
  Synthetic
guuaauguugcaggcuuggauaca

SEQ ID NO: 201629 - RNA, 18 nt, Artificial Sequence
  Synthetic
agcaacucugaugauaca

SEQ ID NO: 201630 - RNA, 19 nt, Artificial Sequence
  Synthetic
cagcaacucugaugauaca

SEQ ID NO: 201631 - RNA, 20 nt, Artificial Sequence
  Synthetic
acagcaacucugaugauaca

SEQ ID NO: 201632 - RNA, 21 nt, Artificial Sequence
  Synthetic
aacagcaacucugaugauaca

SEQ ID NO: 201633 - RNA, 22 nt, Artificial Sequence
  Synthetic
aaacagcaacucugaugauaca

SEQ ID NO: 201634 - RNA, 23 nt, Artificial Sequence
  Synthetic
gaaacagcaacucugaugauaca

SEQ ID NO: 201635 - RNA, 24 nt, Artificial Sequence
  Synthetic
agaaacagcaacucugaugauaca

SEQ ID NO: 201636 - RNA, 18 nt, Artificial Sequence
  Synthetic
ggauagaaaguugauaca

SEQ ID NO: 201637 - RNA, 19 nt, Artificial Sequence
  Synthetic
gggauagaaaguugauaca

SEQ ID NO: 201638 - RNA, 20 nt, Artificial Sequence
  Synthetic
agggauagaaaguugauaca

SEQ ID NO: 201639 - RNA, 21 nt, Artificial Sequence
  Synthetic
uagggauagaaaguugauaca

SEQ ID NO: 201640 - RNA, 22 nt, Artificial Sequence
  Synthetic
auagggauagaaaguugauaca

SEQ ID NO: 201641 - RNA, 23 nt, Artificial Sequence
  Synthetic
gauagggauagaaaguugauaca

SEQ ID NO: 201642 - RNA, 24 nt, Artificial Sequence
  Synthetic
agauagggauagaaaguugauaca

SEQ ID NO: 201643 - RNA, 18 nt, Artificial Sequence
  Synthetic
uauuuuuguguugauaca

SEQ ID NO: 201644 - RNA, 19 nt, Artificial Sequence
  Synthetic
uuauuuuuguguugauaca

SEQ ID NO: 201645 - RNA, 20 nt, Artificial Sequence
  Synthetic
uuuauuuuuguguugauaca

SEQ ID NO: 201646 - RNA, 21 nt, Artificial Sequence
  Synthetic
uuuuauuuuuguguugauaca

SEQ ID NO: 201647 - RNA, 22 nt, Artificial Sequence
  Synthetic
auuuuauuuuuguguugauaca

SEQ ID NO: 201648 - RNA, 23 nt, Artificial Sequence
  Synthetic
uauuuuauuuuuguguugauaca

SEQ ID NO: 201649 - RNA, 24 nt, Artificial Sequence
  Synthetic
uuauuuuauuuuuguguugauaca

SEQ ID NO: 201650 - RNA, 18 nt, Artificial Sequence
  Synthetic
cccaggccccaauauaca

SEQ ID NO: 201651 - RNA, 19 nt, Artificial Sequence
  Synthetic
gcccaggccccaauauaca

SEQ ID NO: 201652 - RNA, 20 nt, Artificial Sequence
  Synthetic
ugcccaggccccaauauaca

SEQ ID NO: 201653 - RNA, 21 nt, Artificial Sequence
  Synthetic
cugcccaggccccaauauaca

SEQ ID NO: 201654 - RNA, 22 nt, Artificial Sequence
  Synthetic
ucugcccaggccccaauauaca

SEQ ID NO: 201655 - RNA, 23 nt, Artificial Sequence
  Synthetic
cucugcccaggccccaauauaca

SEQ ID NO: 201656 - RNA, 24 nt, Artificial Sequence
  Synthetic
ucucugcccaggccccaauauaca

SEQ ID NO: 201657 - RNA, 18 nt, Artificial Sequence
  Synthetic
acuuuacaagaauauaca

SEQ ID NO: 201658 - RNA, 19 nt, Artificial Sequence
  Synthetic
aacuuuacaagaauauaca

SEQ ID NO: 201659 - RNA, 20 nt, Artificial Sequence
  Synthetic
caacuuuacaagaauauaca

SEQ ID NO: 201660 - RNA, 21 nt, Artificial Sequence
  Synthetic
ucaacuuuacaagaauauaca

SEQ ID NO: 201661 - RNA, 22 nt, Artificial Sequence
  Synthetic
aucaacuuuacaagaauauaca

SEQ ID NO: 201662 - RNA, 23 nt, Artificial Sequence
  Synthetic
aaucaacuuuacaagaauauaca

SEQ ID NO: 201663 - RNA, 24 nt, Artificial Sequence
  Synthetic
aaaucaacuuuacaagaauauaca

SEQ ID NO: 201664 - RNA, 18 nt, Artificial Sequence
  Synthetic
uccauauaugaauauaca

SEQ ID NO: 201665 - RNA, 19 nt, Artificial Sequence
  Synthetic
uuccauauaugaauauaca

SEQ ID NO: 201666 - RNA, 20 nt, Artificial Sequence
  Synthetic
auuccauauaugaauauaca

SEQ ID NO: 201667 - RNA, 21 nt, Artificial Sequence
  Synthetic
uauuccauauaugaauauaca

SEQ ID NO: 201668 - RNA, 22 nt, Artificial Sequence
  Synthetic
uuauuccauauaugaauauaca

SEQ ID NO: 201669 - RNA, 23 nt, Artificial Sequence
  Synthetic
uuuauuccauauaugaauauaca

SEQ ID NO: 201670 - RNA, 24 nt, Artificial Sequence
  Synthetic
guuuauuccauauaugaauauaca

SEQ ID NO: 201671 - RNA, 18 nt, Artificial Sequence
  Synthetic
auguuuaucucauauaca

SEQ ID NO: 201672 - RNA, 19 nt, Artificial Sequence
  Synthetic
cauguuuaucucauauaca

SEQ ID NO: 201673 - RNA, 20 nt, Artificial Sequence
  Synthetic
acauguuuaucucauauaca

SEQ ID NO: 201674 - RNA, 21 nt, Artificial Sequence
  Synthetic
aacauguuuaucucauauaca

SEQ ID NO: 201675 - RNA, 22 nt, Artificial Sequence
  Synthetic
aaacauguuuaucucauauaca

SEQ ID NO: 201676 - RNA, 23 nt, Artificial Sequence
  Synthetic
uaaacauguuuaucucauauaca

SEQ ID NO: 201677 - RNA, 24 nt, Artificial Sequence
  Synthetic
auaaacauguuuaucucauauaca

SEQ ID NO: 201678 - RNA, 18 nt, Artificial Sequence
  Synthetic
auacuguugcuauauaca

SEQ ID NO: 201679 - RNA, 19 nt, Artificial Sequence
  Synthetic
gauacuguugcuauauaca

SEQ ID NO: 201680 - RNA, 20 nt, Artificial Sequence
  Synthetic
ggauacuguugcuauauaca

SEQ ID NO: 201681 - RNA, 21 nt, Artificial Sequence
  Synthetic
gggauacuguugcuauauaca

SEQ ID NO: 201682 - RNA, 22 nt, Artificial Sequence
  Synthetic
ggggauacuguugcuauauaca

SEQ ID NO: 201683 - RNA, 23 nt, Artificial Sequence
  Synthetic
aggggauacuguugcuauauaca

SEQ ID NO: 201684 - RNA, 24 nt, Artificial Sequence
  Synthetic
aaggggauacuguugcuauauaca

SEQ ID NO: 201685 - RNA, 18 nt, Artificial Sequence
  Synthetic
ucaagcaaaguauauaca

SEQ ID NO: 201686 - RNA, 19 nt, Artificial Sequence
  Synthetic
uucaagcaaaguauauaca

SEQ ID NO: 201687 - RNA, 20 nt, Artificial Sequence
  Synthetic
uuucaagcaaaguauauaca

SEQ ID NO: 201688 - RNA, 21 nt, Artificial Sequence
  Synthetic
uuuucaagcaaaguauauaca

SEQ ID NO: 201689 - RNA, 22 nt, Artificial Sequence
  Synthetic
auuuucaagcaaaguauauaca

SEQ ID NO: 201690 - RNA, 23 nt, Artificial Sequence
  Synthetic
uauuuucaagcaaaguauauaca

SEQ ID NO: 201691 - RNA, 24 nt, Artificial Sequence
  Synthetic
auauuuucaagcaaaguauauaca

SEQ ID NO: 201692 - RNA, 18 nt, Artificial Sequence
  Synthetic
uuuauaaauaccuauaca

SEQ ID NO: 201693 - RNA, 19 nt, Artificial Sequence
  Synthetic
uuuuauaaauaccuauaca

SEQ ID NO: 201694 - RNA, 20 nt, Artificial Sequence
  Synthetic
auuuuauaaauaccuauaca

SEQ ID NO: 201695 - RNA, 21 nt, Artificial Sequence
  Synthetic
cauuuuauaaauaccuauaca

SEQ ID NO: 201696 - RNA, 22 nt, Artificial Sequence
  Synthetic
acauuuuauaaauaccuauaca

SEQ ID NO: 201697 - RNA, 23 nt, Artificial Sequence
  Synthetic
aacauuuuauaaauaccuauaca

SEQ ID NO: 201698 - RNA, 24 nt, Artificial Sequence
  Synthetic
aaacauuuuauaaauaccuauaca

SEQ ID NO: 201699 - RNA, 18 nt, Artificial Sequence
  Synthetic
uuuagucuugucuauaca

SEQ ID NO: 201700 - RNA, 19 nt, Artificial Sequence
  Synthetic
guuuagucuugucuauaca

SEQ ID NO: 201701 - RNA, 20 nt, Artificial Sequence
  Synthetic
uguuuagucuugucuauaca

SEQ ID NO: 201702 - RNA, 21 nt, Artificial Sequence
  Synthetic
uuguuuagucuugucuauaca

SEQ ID NO: 201703 - RNA, 22 nt, Artificial Sequence
  Synthetic
auuguuuagucuugucuauaca

SEQ ID NO: 201704 - RNA, 23 nt, Artificial Sequence
  Synthetic
cauuguuuagucuugucuauaca

SEQ ID NO: 201705 - RNA, 24 nt, Artificial Sequence
  Synthetic
ucauuguuuagucuugucuauaca

SEQ ID NO: 201706 - RNA, 18 nt, Artificial Sequence
  Synthetic
uucaagagaaaguauaca

SEQ ID NO: 201707 - RNA, 19 nt, Artificial Sequence
  Synthetic
guucaagagaaaguauaca

SEQ ID NO: 201708 - RNA, 20 nt, Artificial Sequence
  Synthetic
aguucaagagaaaguauaca

SEQ ID NO: 201709 - RNA, 21 nt, Artificial Sequence
  Synthetic
gaguucaagagaaaguauaca

SEQ ID NO: 201710 - RNA, 22 nt, Artificial Sequence
  Synthetic
ugaguucaagagaaaguauaca

SEQ ID NO: 201711 - RNA, 23 nt, Artificial Sequence
  Synthetic
cugaguucaagagaaaguauaca

SEQ ID NO: 201712 - RNA, 24 nt, Artificial Sequence
  Synthetic
acugaguucaagagaaaguauaca

SEQ ID NO: 201713 - RNA, 18 nt, Artificial Sequence
  Synthetic
uauccagcugaguauaca

SEQ ID NO: 201714 - RNA, 19 nt, Artificial Sequence
  Synthetic
auauccagcugaguauaca

SEQ ID NO: 201715 - RNA, 20 nt, Artificial Sequence
  Synthetic
aauauccagcugaguauaca

SEQ ID NO: 201716 - RNA, 21 nt, Artificial Sequence
  Synthetic
aaauauccagcugaguauaca

SEQ ID NO: 201717 - RNA, 22 nt, Artificial Sequence
  Synthetic
gaaauauccagcugaguauaca

SEQ ID NO: 201718 - RNA, 23 nt, Artificial Sequence
  Synthetic
ugaaauauccagcugaguauaca

SEQ ID NO: 201719 - RNA, 24 nt, Artificial Sequence
  Synthetic
augaaauauccagcugaguauaca

SEQ ID NO: 201720 - RNA, 18 nt, Artificial Sequence
  Synthetic
auguaaguguaguauaca

SEQ ID NO: 201721 - RNA, 19 nt, Artificial Sequence
  Synthetic
uauguaaguguaguauaca

SEQ ID NO: 201722 - RNA, 20 nt, Artificial Sequence
  Synthetic
uuauguaaguguaguauaca

SEQ ID NO: 201723 - RNA, 21 nt, Artificial Sequence
  Synthetic
cuuauguaaguguaguauaca

SEQ ID NO: 201724 - RNA, 22 nt, Artificial Sequence
  Synthetic
acuuauguaaguguaguauaca

SEQ ID NO: 201725 - RNA, 23 nt, Artificial Sequence
  Synthetic
aacuuauguaaguguaguauaca

SEQ ID NO: 201726 - RNA, 24 nt, Artificial Sequence
  Synthetic
caacuuauguaaguguaguauaca

SEQ ID NO: 201727 - RNA, 18 nt, Artificial Sequence
  Synthetic
gaaacauauauguauaca

SEQ ID NO: 201728 - RNA, 19 nt, Artificial Sequence
  Synthetic
agaaacauauauguauaca

SEQ ID NO: 201729 - RNA, 20 nt, Artificial Sequence
  Synthetic
uagaaacauauauguauaca

SEQ ID NO: 201730 - RNA, 21 nt, Artificial Sequence
  Synthetic
auagaaacauauauguauaca

SEQ ID NO: 201731 - RNA, 22 nt, Artificial Sequence
  Synthetic
aauagaaacauauauguauaca

SEQ ID NO: 201732 - RNA, 23 nt, Artificial Sequence
  Synthetic
uaauagaaacauauauguauaca

SEQ ID NO: 201733 - RNA, 24 nt, Artificial Sequence
  Synthetic
auaauagaaacauauauguauaca

SEQ ID NO: 201734 - RNA, 18 nt, Artificial Sequence
  Synthetic
caaacacaaaauuauaca

SEQ ID NO: 201735 - RNA, 19 nt, Artificial Sequence
  Synthetic
gcaaacacaaaauuauaca

SEQ ID NO: 201736 - RNA, 20 nt, Artificial Sequence
  Synthetic
ugcaaacacaaaauuauaca

SEQ ID NO: 201737 - RNA, 21 nt, Artificial Sequence
  Synthetic
uugcaaacacaaaauuauaca

SEQ ID NO: 201738 - RNA, 22 nt, Artificial Sequence
  Synthetic
uuugcaaacacaaaauuauaca

SEQ ID NO: 201739 - RNA, 23 nt, Artificial Sequence
  Synthetic
auuugcaaacacaaaauuauaca

SEQ ID NO: 201740 - RNA, 24 nt, Artificial Sequence
  Synthetic
cauuugcaaacacaaaauuauaca

SEQ ID NO: 201741 - RNA, 18 nt, Artificial Sequence
  Synthetic
ggaccugggaguuauaca

SEQ ID NO: 201742 - RNA, 19 nt, Artificial Sequence
  Synthetic
gggaccugggaguuauaca

SEQ ID NO: 201743 - RNA, 20 nt, Artificial Sequence
  Synthetic
ugggaccugggaguuauaca

SEQ ID NO: 201744 - RNA, 21 nt, Artificial Sequence
  Synthetic
uugggaccugggaguuauaca

SEQ ID NO: 201745 - RNA, 22 nt, Artificial Sequence
  Synthetic
auugggaccugggaguuauaca

SEQ ID NO: 201746 - RNA, 23 nt, Artificial Sequence
  Synthetic
aauugggaccugggaguuauaca

SEQ ID NO: 201747 - RNA, 24 nt, Artificial Sequence
  Synthetic
aaauugggaccugggaguuauaca

SEQ ID NO: 201748 - RNA, 18 nt, Artificial Sequence
  Synthetic
caaaaccacacaacuaca

SEQ ID NO: 201749 - RNA, 19 nt, Artificial Sequence
  Synthetic
ucaaaaccacacaacuaca

SEQ ID NO: 201750 - RNA, 20 nt, Artificial Sequence
  Synthetic
cucaaaaccacacaacuaca

SEQ ID NO: 201751 - RNA, 21 nt, Artificial Sequence
  Synthetic
acucaaaaccacacaacuaca

SEQ ID NO: 201752 - RNA, 22 nt, Artificial Sequence
  Synthetic
cacucaaaaccacacaacuaca

SEQ ID NO: 201753 - RNA, 23 nt, Artificial Sequence
  Synthetic
ucacucaaaaccacacaacuaca

SEQ ID NO: 201754 - RNA, 24 nt, Artificial Sequence
  Synthetic
cucacucaaaaccacacaacuaca

SEQ ID NO: 201755 - RNA, 18 nt, Artificial Sequence
  Synthetic
agccaaauaccaacuaca

SEQ ID NO: 201756 - RNA, 19 nt, Artificial Sequence
  Synthetic
gagccaaauaccaacuaca

SEQ ID NO: 201757 - RNA, 20 nt, Artificial Sequence
  Synthetic
agagccaaauaccaacuaca

SEQ ID NO: 201758 - RNA, 21 nt, Artificial Sequence
  Synthetic
aagagccaaauaccaacuaca

SEQ ID NO: 201759 - RNA, 22 nt, Artificial Sequence
  Synthetic
uaagagccaaauaccaacuaca

SEQ ID NO: 201760 - RNA, 23 nt, Artificial Sequence
  Synthetic
uuaagagccaaauaccaacuaca

SEQ ID NO: 201761 - RNA, 24 nt, Artificial Sequence
  Synthetic
uuuaagagccaaauaccaacuaca

SEQ ID NO: 201762 - RNA, 18 nt, Artificial Sequence
  Synthetic
aucgccauagcaacuaca

SEQ ID NO: 201763 - RNA, 19 nt, Artificial Sequence
  Synthetic
uaucgccauagcaacuaca

SEQ ID NO: 201764 - RNA, 20 nt, Artificial Sequence
  Synthetic
auaucgccauagcaacuaca

SEQ ID NO: 201765 - RNA, 21 nt, Artificial Sequence
  Synthetic
uauaucgccauagcaacuaca

SEQ ID NO: 201766 - RNA, 22 nt, Artificial Sequence
  Synthetic
uuauaucgccauagcaacuaca

SEQ ID NO: 201767 - RNA, 23 nt, Artificial Sequence
  Synthetic
uuuauaucgccauagcaacuaca

SEQ ID NO: 201768 - RNA, 24 nt, Artificial Sequence
  Synthetic
guuuauaucgccauagcaacuaca

SEQ ID NO: 201769 - RNA, 18 nt, Artificial Sequence
  Synthetic
auuucccugagaacuaca

SEQ ID NO: 201770 - RNA, 19 nt, Artificial Sequence
  Synthetic
aauuucccugagaacuaca

SEQ ID NO: 201771 - RNA, 20 nt, Artificial Sequence
  Synthetic
aaauuucccugagaacuaca

SEQ ID NO: 201772 - RNA, 21 nt, Artificial Sequence
  Synthetic
caaauuucccugagaacuaca

SEQ ID NO: 201773 - RNA, 22 nt, Artificial Sequence
  Synthetic
ucaaauuucccugagaacuaca

SEQ ID NO: 201774 - RNA, 23 nt, Artificial Sequence
  Synthetic
uucaaauuucccugagaacuaca

SEQ ID NO: 201775 - RNA, 24 nt, Artificial Sequence
  Synthetic
uuucaaauuucccugagaacuaca

SEQ ID NO: 201776 - RNA, 18 nt, Artificial Sequence
  Synthetic
aacaugaguagaacuaca

SEQ ID NO: 201777 - RNA, 19 nt, Artificial Sequence
  Synthetic
gaacaugaguagaacuaca

SEQ ID NO: 201778 - RNA, 20 nt, Artificial Sequence
  Synthetic
agaacaugaguagaacuaca

SEQ ID NO: 201779 - RNA, 21 nt, Artificial Sequence
  Synthetic
cagaacaugaguagaacuaca

SEQ ID NO: 201780 - RNA, 22 nt, Artificial Sequence
  Synthetic
acagaacaugaguagaacuaca

SEQ ID NO: 201781 - RNA, 23 nt, Artificial Sequence
  Synthetic
gacagaacaugaguagaacuaca

SEQ ID NO: 201782 - RNA, 24 nt, Artificial Sequence
  Synthetic
ugacagaacaugaguagaacuaca

SEQ ID NO: 201783 - RNA, 18 nt, Artificial Sequence
  Synthetic
uuuuuacuuuuaacuaca

SEQ ID NO: 201784 - RNA, 19 nt, Artificial Sequence
  Synthetic
auuuuuacuuuuaacuaca

SEQ ID NO: 201785 - RNA, 20 nt, Artificial Sequence
  Synthetic
uauuuuuacuuuuaacuaca

SEQ ID NO: 201786 - RNA, 21 nt, Artificial Sequence
  Synthetic
guauuuuuacuuuuaacuaca

SEQ ID NO: 201787 - RNA, 22 nt, Artificial Sequence
  Synthetic
uguauuuuuacuuuuaacuaca

SEQ ID NO: 201788 - RNA, 23 nt, Artificial Sequence
  Synthetic
auguauuuuuacuuuuaacuaca

SEQ ID NO: 201789 - RNA, 24 nt, Artificial Sequence
  Synthetic
aauguauuuuuacuuuuaacuaca

SEQ ID NO: 201790 - RNA, 18 nt, Artificial Sequence
  Synthetic
auuacaguauccacuaca

SEQ ID NO: 201791 - RNA, 19 nt, Artificial Sequence
  Synthetic
cauuacaguauccacuaca

SEQ ID NO: 201792 - RNA, 20 nt, Artificial Sequence
  Synthetic
gcauuacaguauccacuaca

SEQ ID NO: 201793 - RNA, 21 nt, Artificial Sequence
  Synthetic
agcauuacaguauccacuaca

SEQ ID NO: 201794 - RNA, 22 nt, Artificial Sequence
  Synthetic
aagcauuacaguauccacuaca

SEQ ID NO: 201795 - RNA, 23 nt, Artificial Sequence
  Synthetic
gaagcauuacaguauccacuaca

SEQ ID NO: 201796 - RNA, 24 nt, Artificial Sequence
  Synthetic
ugaagcauuacaguauccacuaca

SEQ ID NO: 201797 - RNA, 18 nt, Artificial Sequence
  Synthetic
uauacacaaaucacuaca

SEQ ID NO: 201798 - RNA, 19 nt, Artificial Sequence
  Synthetic
uuauacacaaaucacuaca

SEQ ID NO: 201799 - RNA, 20 nt, Artificial Sequence
  Synthetic
uuuauacacaaaucacuaca

SEQ ID NO: 201800 - RNA, 21 nt, Artificial Sequence
  Synthetic
auuuauacacaaaucacuaca

SEQ ID NO: 201801 - RNA, 22 nt, Artificial Sequence
  Synthetic
uauuuauacacaaaucacuaca

SEQ ID NO: 201802 - RNA, 23 nt, Artificial Sequence
  Synthetic
guauuuauacacaaaucacuaca

SEQ ID NO: 201803 - RNA, 24 nt, Artificial Sequence
  Synthetic
cguauuuauacacaaaucacuaca

SEQ ID NO: 201804 - RNA, 18 nt, Artificial Sequence
  Synthetic
gaaaacucacucacuaca

SEQ ID NO: 201805 - RNA, 19 nt, Artificial Sequence
  Synthetic
ugaaaacucacucacuaca

SEQ ID NO: 201806 - RNA, 20 nt, Artificial Sequence
  Synthetic
augaaaacucacucacuaca

SEQ ID NO: 201807 - RNA, 21 nt, Artificial Sequence
  Synthetic
caugaaaacucacucacuaca

SEQ ID NO: 201808 - RNA, 22 nt, Artificial Sequence
  Synthetic
ucaugaaaacucacucacuaca

SEQ ID NO: 201809 - RNA, 23 nt, Artificial Sequence
  Synthetic
cucaugaaaacucacucacuaca

SEQ ID NO: 201810 - RNA, 24 nt, Artificial Sequence
  Synthetic
ucucaugaaaacucacucacuaca

SEQ ID NO: 201811 - RNA, 18 nt, Artificial Sequence
  Synthetic
cagggguuggagacuaca

SEQ ID NO: 201812 - RNA, 19 nt, Artificial Sequence
  Synthetic
ucagggguuggagacuaca

SEQ ID NO: 201813 - RNA, 20 nt, Artificial Sequence
  Synthetic
cucagggguuggagacuaca

SEQ ID NO: 201814 - RNA, 21 nt, Artificial Sequence
  Synthetic
gcucagggguuggagacuaca

SEQ ID NO: 201815 - RNA, 22 nt, Artificial Sequence
  Synthetic
agcucagggguuggagacuaca

SEQ ID NO: 201816 - RNA, 23 nt, Artificial Sequence
  Synthetic
gagcucagggguuggagacuaca

SEQ ID NO: 201817 - RNA, 24 nt, Artificial Sequence
  Synthetic
agagcucagggguuggagacuaca

SEQ ID NO: 201818 - RNA, 18 nt, Artificial Sequence
  Synthetic
guccuucuugugacuaca

SEQ ID NO: 201819 - RNA, 19 nt, Artificial Sequence
  Synthetic
uguccuucuugugacuaca

SEQ ID NO: 201820 - RNA, 20 nt, Artificial Sequence
  Synthetic
auguccuucuugugacuaca

SEQ ID NO: 201821 - RNA, 21 nt, Artificial Sequence
  Synthetic
aauguccuucuugugacuaca

SEQ ID NO: 201822 - RNA, 22 nt, Artificial Sequence
  Synthetic
gaauguccuucuugugacuaca

SEQ ID NO: 201823 - RNA, 23 nt, Artificial Sequence
  Synthetic
agaauguccuucuugugacuaca

SEQ ID NO: 201824 - RNA, 24 nt, Artificial Sequence
  Synthetic
uagaauguccuucuugugacuaca

SEQ ID NO: 201825 - RNA, 18 nt, Artificial Sequence
  Synthetic
aaguauuuaccuacuaca

SEQ ID NO: 201826 - RNA, 19 nt, Artificial Sequence
  Synthetic
aaaguauuuaccuacuaca

SEQ ID NO: 201827 - RNA, 20 nt, Artificial Sequence
  Synthetic
aaaaguauuuaccuacuaca

SEQ ID NO: 201828 - RNA, 21 nt, Artificial Sequence
  Synthetic
gaaaaguauuuaccuacuaca

SEQ ID NO: 201829 - RNA, 22 nt, Artificial Sequence
  Synthetic
ggaaaaguauuuaccuacuaca

SEQ ID NO: 201830 - RNA, 23 nt, Artificial Sequence
  Synthetic
gggaaaaguauuuaccuacuaca

SEQ ID NO: 201831 - RNA, 24 nt, Artificial Sequence
  Synthetic
agggaaaaguauuuaccuacuaca

SEQ ID NO: 201832 - RNA, 18 nt, Artificial Sequence
  Synthetic
augaagugaauuacuaca

SEQ ID NO: 201833 - RNA, 19 nt, Artificial Sequence
  Synthetic
aaugaagugaauuacuaca

SEQ ID NO: 201834 - RNA, 20 nt, Artificial Sequence
  Synthetic
gaaugaagugaauuacuaca

SEQ ID NO: 201835 - RNA, 21 nt, Artificial Sequence
  Synthetic
agaaugaagugaauuacuaca

SEQ ID NO: 201836 - RNA, 22 nt, Artificial Sequence
  Synthetic
uagaaugaagugaauuacuaca

SEQ ID NO: 201837 - RNA, 23 nt, Artificial Sequence
  Synthetic
uuagaaugaagugaauuacuaca

SEQ ID NO: 201838 - RNA, 24 nt, Artificial Sequence
  Synthetic
auuagaaugaagugaauuacuaca

SEQ ID NO: 201839 - RNA, 18 nt, Artificial Sequence
  Synthetic
aauugaaacauuacuaca

SEQ ID NO: 201840 - RNA, 19 nt, Artificial Sequence
  Synthetic
aaauugaaacauuacuaca

SEQ ID NO: 201841 - RNA, 20 nt, Artificial Sequence
  Synthetic
caaauugaaacauuacuaca

SEQ ID NO: 201842 - RNA, 21 nt, Artificial Sequence
  Synthetic
acaaauugaaacauuacuaca

SEQ ID NO: 201843 - RNA, 22 nt, Artificial Sequence
  Synthetic
aacaaauugaaacauuacuaca

SEQ ID NO: 201844 - RNA, 23 nt, Artificial Sequence
  Synthetic
caacaaauugaaacauuacuaca

SEQ ID NO: 201845 - RNA, 24 nt, Artificial Sequence
  Synthetic
ucaacaaauugaaacauuacuaca

SEQ ID NO: 201846 - RNA, 18 nt, Artificial Sequence
  Synthetic
ucuuauaauuuuacuaca

SEQ ID NO: 201847 - RNA, 19 nt, Artificial Sequence
  Synthetic
uucuuauaauuuuacuaca

SEQ ID NO: 201848 - RNA, 20 nt, Artificial Sequence
  Synthetic
auucuuauaauuuuacuaca

SEQ ID NO: 201849 - RNA, 21 nt, Artificial Sequence
  Synthetic
cauucuuauaauuuuacuaca

SEQ ID NO: 201850 - RNA, 22 nt, Artificial Sequence
  Synthetic
ucauucuuauaauuuuacuaca

SEQ ID NO: 201851 - RNA, 23 nt, Artificial Sequence
  Synthetic
aucauucuuauaauuuuacuaca

SEQ ID NO: 201852 - RNA, 24 nt, Artificial Sequence
  Synthetic
uaucauucuuauaauuuuacuaca

SEQ ID NO: 201853 - RNA, 18 nt, Artificial Sequence
  Synthetic
uguuuuuggaaaccuaca

SEQ ID NO: 201854 - RNA, 19 nt, Artificial Sequence
  Synthetic
uuguuuuuggaaaccuaca

SEQ ID NO: 201855 - RNA, 20 nt, Artificial Sequence
  Synthetic
cuuguuuuuggaaaccuaca

SEQ ID NO: 201856 - RNA, 21 nt, Artificial Sequence
  Synthetic
acuuguuuuuggaaaccuaca

SEQ ID NO: 201857 - RNA, 22 nt, Artificial Sequence
  Synthetic
cacuuguuuuuggaaaccuaca

SEQ ID NO: 201858 - RNA, 23 nt, Artificial Sequence
  Synthetic
ucacuuguuuuuggaaaccuaca

SEQ ID NO: 201859 - RNA, 24 nt, Artificial Sequence
  Synthetic
gucacuuguuuuuggaaaccuaca

SEQ ID NO: 201860 - RNA, 18 nt, Artificial Sequence
  Synthetic
aaauuaguacaaccuaca

SEQ ID NO: 201861 - RNA, 19 nt, Artificial Sequence
  Synthetic
uaaauuaguacaaccuaca

SEQ ID NO: 201862 - RNA, 20 nt, Artificial Sequence
  Synthetic
guaaauuaguacaaccuaca

SEQ ID NO: 201863 - RNA, 21 nt, Artificial Sequence
  Synthetic
uguaaauuaguacaaccuaca

SEQ ID NO: 201864 - RNA, 22 nt, Artificial Sequence
  Synthetic
uuguaaauuaguacaaccuaca

SEQ ID NO: 201865 - RNA, 23 nt, Artificial Sequence
  Synthetic
auuguaaauuaguacaaccuaca

SEQ ID NO: 201866 - RNA, 24 nt, Artificial Sequence
  Synthetic
gauuguaaauuaguacaaccuaca

SEQ ID NO: 201867 - RNA, 18 nt, Artificial Sequence
  Synthetic
aguuccuagagaccuaca

SEQ ID NO: 201868 - RNA, 19 nt, Artificial Sequence
  Synthetic
aaguuccuagagaccuaca

SEQ ID NO: 201869 - RNA, 20 nt, Artificial Sequence
  Synthetic
caaguuccuagagaccuaca

SEQ ID NO: 201870 - RNA, 21 nt, Artificial Sequence
  Synthetic
gcaaguuccuagagaccuaca

SEQ ID NO: 201871 - RNA, 22 nt, Artificial Sequence
  Synthetic
agcaaguuccuagagaccuaca

SEQ ID NO: 201872 - RNA, 23 nt, Artificial Sequence
  Synthetic
aagcaaguuccuagagaccuaca

SEQ ID NO: 201873 - RNA, 24 nt, Artificial Sequence
  Synthetic
aaagcaaguuccuagagaccuaca

SEQ ID NO: 201874 - RNA, 18 nt, Artificial Sequence
  Synthetic
aguucuuagagaccuaca

SEQ ID NO: 201875 - RNA, 19 nt, Artificial Sequence
  Synthetic
aaguucuuagagaccuaca

SEQ ID NO: 201876 - RNA, 20 nt, Artificial Sequence
  Synthetic
uaaguucuuagagaccuaca

SEQ ID NO: 201877 - RNA, 21 nt, Artificial Sequence
  Synthetic
guaaguucuuagagaccuaca

SEQ ID NO: 201878 - RNA, 22 nt, Artificial Sequence
  Synthetic
aguaaguucuuagagaccuaca

SEQ ID NO: 201879 - RNA, 23 nt, Artificial Sequence
  Synthetic
aaguaaguucuuagagaccuaca

SEQ ID NO: 201880 - RNA, 24 nt, Artificial Sequence
  Synthetic
aaaguaaguucuuagagaccuaca

SEQ ID NO: 201881 - RNA, 18 nt, Artificial Sequence
  Synthetic
caucauaacagcccuaca

SEQ ID NO: 201882 - RNA, 19 nt, Artificial Sequence
  Synthetic
ucaucauaacagcccuaca

SEQ ID NO: 201883 - RNA, 20 nt, Artificial Sequence
  Synthetic
gucaucauaacagcccuaca

SEQ ID NO: 201884 - RNA, 21 nt, Artificial Sequence
  Synthetic
ggucaucauaacagcccuaca

SEQ ID NO: 201885 - RNA, 22 nt, Artificial Sequence
  Synthetic
uggucaucauaacagcccuaca

SEQ ID NO: 201886 - RNA, 23 nt, Artificial Sequence
  Synthetic
auggucaucauaacagcccuaca

SEQ ID NO: 201887 - RNA, 24 nt, Artificial Sequence
  Synthetic
uauggucaucauaacagcccuaca

SEQ ID NO: 201888 - RNA, 18 nt, Artificial Sequence
  Synthetic
uucagcugcugcccuaca

SEQ ID NO: 201889 - RNA, 19 nt, Artificial Sequence
  Synthetic
guucagcugcugcccuaca

SEQ ID NO: 201890 - RNA, 20 nt, Artificial Sequence
  Synthetic
uguucagcugcugcccuaca

SEQ ID NO: 201891 - RNA, 21 nt, Artificial Sequence
  Synthetic
cuguucagcugcugcccuaca

SEQ ID NO: 201892 - RNA, 22 nt, Artificial Sequence
  Synthetic
ccuguucagcugcugcccuaca

SEQ ID NO: 201893 - RNA, 23 nt, Artificial Sequence
  Synthetic
cccuguucagcugcugcccuaca

SEQ ID NO: 201894 - RNA, 24 nt, Artificial Sequence
  Synthetic
ccccuguucagcugcugcccuaca

SEQ ID NO: 201895 - RNA, 18 nt, Artificial Sequence
  Synthetic
uucauccauaucccuaca

SEQ ID NO: 201896 - RNA, 19 nt, Artificial Sequence
  Synthetic
cuucauccauaucccuaca

SEQ ID NO: 201897 - RNA, 20 nt, Artificial Sequence
  Synthetic
gcuucauccauaucccuaca

SEQ ID NO: 201898 - RNA, 21 nt, Artificial Sequence
  Synthetic
agcuucauccauaucccuaca

SEQ ID NO: 201899 - RNA, 22 nt, Artificial Sequence
  Synthetic
cagcuucauccauaucccuaca

SEQ ID NO: 201900 - RNA, 23 nt, Artificial Sequence
  Synthetic
acagcuucauccauaucccuaca

SEQ ID NO: 201901 - RNA, 24 nt, Artificial Sequence
  Synthetic
uacagcuucauccauaucccuaca

SEQ ID NO: 201902 - RNA, 18 nt, Artificial Sequence
  Synthetic
uucauccaugucccuaca

SEQ ID NO: 201903 - RNA, 19 nt, Artificial Sequence
  Synthetic
uuucauccaugucccuaca

SEQ ID NO: 201904 - RNA, 20 nt, Artificial Sequence
  Synthetic
guuucauccaugucccuaca

SEQ ID NO: 201905 - RNA, 21 nt, Artificial Sequence
  Synthetic
aguuucauccaugucccuaca

SEQ ID NO: 201906 - RNA, 22 nt, Artificial Sequence
  Synthetic
caguuucauccaugucccuaca

SEQ ID NO: 201907 - RNA, 23 nt, Artificial Sequence
  Synthetic
ccaguuucauccaugucccuaca

SEQ ID NO: 201908 - RNA, 24 nt, Artificial Sequence
  Synthetic
uccaguuucauccaugucccuaca

SEQ ID NO: 201909 - RNA, 18 nt, Artificial Sequence
  Synthetic
aagaaaaaauggccuaca

SEQ ID NO: 201910 - RNA, 19 nt, Artificial Sequence
  Synthetic
caagaaaaaauggccuaca

SEQ ID NO: 201911 - RNA, 20 nt, Artificial Sequence
  Synthetic
gcaagaaaaaauggccuaca

SEQ ID NO: 201912 - RNA, 21 nt, Artificial Sequence
  Synthetic
agcaagaaaaaauggccuaca

SEQ ID NO: 201913 - RNA, 22 nt, Artificial Sequence
  Synthetic
aagcaagaaaaaauggccuaca

SEQ ID NO: 201914 - RNA, 23 nt, Artificial Sequence
  Synthetic
gaagcaagaaaaaauggccuaca

SEQ ID NO: 201915 - RNA, 24 nt, Artificial Sequence
  Synthetic
ugaagcaagaaaaaauggccuaca

SEQ ID NO: 201916 - RNA, 18 nt, Artificial Sequence
  Synthetic
cugccuaucccuccuaca

SEQ ID NO: 201917 - RNA, 19 nt, Artificial Sequence
  Synthetic
ccugccuaucccuccuaca

SEQ ID NO: 201918 - RNA, 20 nt, Artificial Sequence
  Synthetic
cccugccuaucccuccuaca

SEQ ID NO: 201919 - RNA, 21 nt, Artificial Sequence
  Synthetic
acccugccuaucccuccuaca

SEQ ID NO: 201920 - RNA, 22 nt, Artificial Sequence
  Synthetic
uacccugccuaucccuccuaca

SEQ ID NO: 201921 - RNA, 23 nt, Artificial Sequence
  Synthetic
uuacccugccuaucccuccuaca

SEQ ID NO: 201922 - RNA, 24 nt, Artificial Sequence
  Synthetic
auuacccugccuaucccuccuaca

SEQ ID NO: 201923 - RNA, 18 nt, Artificial Sequence
  Synthetic
cuauaaggagguccuaca

SEQ ID NO: 201924 - RNA, 19 nt, Artificial Sequence
  Synthetic
ucuauaaggagguccuaca

SEQ ID NO: 201925 - RNA, 20 nt, Artificial Sequence
  Synthetic
uucuauaaggagguccuaca

SEQ ID NO: 201926 - RNA, 21 nt, Artificial Sequence
  Synthetic
uuucuauaaggagguccuaca

SEQ ID NO: 201927 - RNA, 22 nt, Artificial Sequence
  Synthetic
uuuucuauaaggagguccuaca

SEQ ID NO: 201928 - RNA, 23 nt, Artificial Sequence
  Synthetic
uuuuucuauaaggagguccuaca

SEQ ID NO: 201929 - RNA, 24 nt, Artificial Sequence
  Synthetic
guuuuucuauaaggagguccuaca

SEQ ID NO: 201930 - RNA, 18 nt, Artificial Sequence
  Synthetic
gaacuuaaacuuccuaca

SEQ ID NO: 201931 - RNA, 19 nt, Artificial Sequence
  Synthetic
ggaacuuaaacuuccuaca

SEQ ID NO: 201932 - RNA, 20 nt, Artificial Sequence
  Synthetic
uggaacuuaaacuuccuaca

SEQ ID NO: 201933 - RNA, 21 nt, Artificial Sequence
  Synthetic
guggaacuuaaacuuccuaca

SEQ ID NO: 201934 - RNA, 22 nt, Artificial Sequence
  Synthetic
uguggaacuuaaacuuccuaca

SEQ ID NO: 201935 - RNA, 23 nt, Artificial Sequence
  Synthetic
uuguggaacuuaaacuuccuaca

SEQ ID NO: 201936 - RNA, 24 nt, Artificial Sequence
  Synthetic
auuguggaacuuaaacuuccuaca

SEQ ID NO: 201937 - RNA, 18 nt, Artificial Sequence
  Synthetic
aaguagacucuuccuaca

SEQ ID NO: 201938 - RNA, 19 nt, Artificial Sequence
  Synthetic
aaaguagacucuuccuaca

SEQ ID NO: 201939 - RNA, 20 nt, Artificial Sequence
  Synthetic
gaaaguagacucuuccuaca

SEQ ID NO: 201940 - RNA, 21 nt, Artificial Sequence
  Synthetic
agaaaguagacucuuccuaca

SEQ ID NO: 201941 - RNA, 22 nt, Artificial Sequence
  Synthetic
gagaaaguagacucuuccuaca

SEQ ID NO: 201942 - RNA, 23 nt, Artificial Sequence
  Synthetic
ugagaaaguagacucuuccuaca

SEQ ID NO: 201943 - RNA, 24 nt, Artificial Sequence
  Synthetic
augagaaaguagacucuuccuaca

SEQ ID NO: 201944 - RNA, 18 nt, Artificial Sequence
  Synthetic
uucuuuaaaguuccuaca

SEQ ID NO: 201945 - RNA, 19 nt, Artificial Sequence
  Synthetic
uuucuuuaaaguuccuaca

SEQ ID NO: 201946 - RNA, 20 nt, Artificial Sequence
  Synthetic
uuuucuuuaaaguuccuaca

SEQ ID NO: 201947 - RNA, 21 nt, Artificial Sequence
  Synthetic
uuuuucuuuaaaguuccuaca

SEQ ID NO: 201948 - RNA, 22 nt, Artificial Sequence
  Synthetic
uuuuuucuuuaaaguuccuaca

SEQ ID NO: 201949 - RNA, 23 nt, Artificial Sequence
  Synthetic
guuuuuucuuuaaaguuccuaca

SEQ ID NO: 201950 - RNA, 24 nt, Artificial Sequence
  Synthetic
aguuuuuucuuuaaaguuccuaca

SEQ ID NO: 201951 - RNA, 18 nt, Artificial Sequence
  Synthetic
ggaguacuuuuuccuaca

SEQ ID NO: 201952 - RNA, 19 nt, Artificial Sequence
  Synthetic
uggaguacuuuuuccuaca

SEQ ID NO: 201953 - RNA, 20 nt, Artificial Sequence
  Synthetic
guggaguacuuuuuccuaca

SEQ ID NO: 201954 - RNA, 21 nt, Artificial Sequence
  Synthetic
aguggaguacuuuuuccuaca

SEQ ID NO: 201955 - RNA, 22 nt, Artificial Sequence
  Synthetic
caguggaguacuuuuuccuaca

SEQ ID NO: 201956 - RNA, 23 nt, Artificial Sequence
  Synthetic
ucaguggaguacuuuuuccuaca

SEQ ID NO: 201957 - RNA, 24 nt, Artificial Sequence
  Synthetic
uucaguggaguacuuuuuccuaca

SEQ ID NO: 201958 - RNA, 18 nt, Artificial Sequence
  Synthetic
uuuacacaagaagcuaca

SEQ ID NO: 201959 - RNA, 19 nt, Artificial Sequence
  Synthetic
cuuuacacaagaagcuaca

SEQ ID NO: 201960 - RNA, 20 nt, Artificial Sequence
  Synthetic
ccuuuacacaagaagcuaca

SEQ ID NO: 201961 - RNA, 21 nt, Artificial Sequence
  Synthetic
accuuuacacaagaagcuaca

SEQ ID NO: 201962 - RNA, 22 nt, Artificial Sequence
  Synthetic
caccuuuacacaagaagcuaca

SEQ ID NO: 201963 - RNA, 23 nt, Artificial Sequence
  Synthetic
acaccuuuacacaagaagcuaca

SEQ ID NO: 201964 - RNA, 24 nt, Artificial Sequence
  Synthetic
uacaccuuuacacaagaagcuaca

SEQ ID NO: 201965 - RNA, 18 nt, Artificial Sequence
  Synthetic
ccuguagucccagcuaca

SEQ ID NO: 201966 - RNA, 19 nt, Artificial Sequence
  Synthetic
gccuguagucccagcuaca

SEQ ID NO: 201967 - RNA, 20 nt, Artificial Sequence
  Synthetic
ggccuguagucccagcuaca

SEQ ID NO: 201968 - RNA, 21 nt, Artificial Sequence
  Synthetic
gggccuguagucccagcuaca

SEQ ID NO: 201969 - RNA, 22 nt, Artificial Sequence
  Synthetic
ugggccuguagucccagcuaca

SEQ ID NO: 201970 - RNA, 23 nt, Artificial Sequence
  Synthetic
gugggccuguagucccagcuaca

SEQ ID NO: 201971 - RNA, 24 nt, Artificial Sequence
  Synthetic
cgugggccuguagucccagcuaca

SEQ ID NO: 201972 - RNA, 18 nt, Artificial Sequence
  Synthetic
aguguuccugcagcuaca

SEQ ID NO: 201973 - RNA, 19 nt, Artificial Sequence
  Synthetic
uaguguuccugcagcuaca

SEQ ID NO: 201974 - RNA, 20 nt, Artificial Sequence
  Synthetic
uuaguguuccugcagcuaca

SEQ ID NO: 201975 - RNA, 21 nt, Artificial Sequence
  Synthetic
uuuaguguuccugcagcuaca

SEQ ID NO: 201976 - RNA, 22 nt, Artificial Sequence
  Synthetic
auuuaguguuccugcagcuaca

SEQ ID NO: 201977 - RNA, 23 nt, Artificial Sequence
  Synthetic
aauuuaguguuccugcagcuaca

SEQ ID NO: 201978 - RNA, 24 nt, Artificial Sequence
  Synthetic
aaauuuaguguuccugcagcuaca

SEQ ID NO: 201979 - RNA, 18 nt, Artificial Sequence
  Synthetic
agaaaauggcaggcuaca

SEQ ID NO: 201980 - RNA, 19 nt, Artificial Sequence
  Synthetic
cagaaaauggcaggcuaca

SEQ ID NO: 201981 - RNA, 20 nt, Artificial Sequence
  Synthetic
ccagaaaauggcaggcuaca

SEQ ID NO: 201982 - RNA, 21 nt, Artificial Sequence
  Synthetic
gccagaaaauggcaggcuaca

SEQ ID NO: 201983 - RNA, 22 nt, Artificial Sequence
  Synthetic
ggccagaaaauggcaggcuaca

SEQ ID NO: 201984 - RNA, 23 nt, Artificial Sequence
  Synthetic
uggccagaaaauggcaggcuaca

SEQ ID NO: 201985 - RNA, 24 nt, Artificial Sequence
  Synthetic
guggccagaaaauggcaggcuaca

SEQ ID NO: 201986 - RNA, 18 nt, Artificial Sequence
  Synthetic
acagcaucacaugcuaca

SEQ ID NO: 201987 - RNA, 19 nt, Artificial Sequence
  Synthetic
aacagcaucacaugcuaca

SEQ ID NO: 201988 - RNA, 20 nt, Artificial Sequence
  Synthetic
aaacagcaucacaugcuaca

SEQ ID NO: 201989 - RNA, 21 nt, Artificial Sequence
  Synthetic
caaacagcaucacaugcuaca

SEQ ID NO: 201990 - RNA, 22 nt, Artificial Sequence
  Synthetic
ucaaacagcaucacaugcuaca

SEQ ID NO: 201991 - RNA, 23 nt, Artificial Sequence
  Synthetic
aucaaacagcaucacaugcuaca

SEQ ID NO: 201992 - RNA, 24 nt, Artificial Sequence
  Synthetic
uaucaaacagcaucacaugcuaca

SEQ ID NO: 201993 - RNA, 18 nt, Artificial Sequence
  Synthetic
agaacauucccugcuaca

SEQ ID NO: 201994 - RNA, 19 nt, Artificial Sequence
  Synthetic
cagaacauucccugcuaca

SEQ ID NO: 201995 - RNA, 20 nt, Artificial Sequence
  Synthetic
gcagaacauucccugcuaca

SEQ ID NO: 201996 - RNA, 21 nt, Artificial Sequence
  Synthetic
agcagaacauucccugcuaca

SEQ ID NO: 201997 - RNA, 22 nt, Artificial Sequence
  Synthetic
gagcagaacauucccugcuaca

SEQ ID NO: 201998 - RNA, 23 nt, Artificial Sequence
  Synthetic
ggagcagaacauucccugcuaca

SEQ ID NO: 201999 - RNA, 24 nt, Artificial Sequence
  Synthetic
gggagcagaacauucccugcuaca

SEQ ID NO: 202000 - RNA, 18 nt, Artificial Sequence
  Synthetic
auacagcuaugugcuaca

SEQ ID NO: 202001 - RNA, 19 nt, Artificial Sequence
  Synthetic
cauacagcuaugugcuaca

SEQ ID NO: 202002 - RNA, 20 nt, Artificial Sequence
  Synthetic
acauacagcuaugugcuaca

SEQ ID NO: 202003 - RNA, 21 nt, Artificial Sequence
  Synthetic
uacauacagcuaugugcuaca

SEQ ID NO: 202004 - RNA, 22 nt, Artificial Sequence
  Synthetic
auacauacagcuaugugcuaca

SEQ ID NO: 202005 - RNA, 23 nt, Artificial Sequence
  Synthetic
uauacauacagcuaugugcuaca

SEQ ID NO: 202006 - RNA, 24 nt, Artificial Sequence
  Synthetic
guauacauacagcuaugugcuaca

SEQ ID NO: 202007 - RNA, 18 nt, Artificial Sequence
  Synthetic
cauuguccccaaucuaca

SEQ ID NO: 202008 - RNA, 19 nt, Artificial Sequence
  Synthetic
ucauuguccccaaucuaca

SEQ ID NO: 202009 - RNA, 20 nt, Artificial Sequence
  Synthetic
aucauuguccccaaucuaca

SEQ ID NO: 202010 - RNA, 21 nt, Artificial Sequence
  Synthetic
uaucauuguccccaaucuaca

SEQ ID NO: 202011 - RNA, 22 nt, Artificial Sequence
  Synthetic
cuaucauuguccccaaucuaca

SEQ ID NO: 202012 - RNA, 23 nt, Artificial Sequence
  Synthetic
gcuaucauuguccccaaucuaca

SEQ ID NO: 202013 - RNA, 24 nt, Artificial Sequence
  Synthetic
ugcuaucauuguccccaaucuaca

SEQ ID NO: 202014 - RNA, 18 nt, Artificial Sequence
  Synthetic
uaauauccagaaucuaca

SEQ ID NO: 202015 - RNA, 19 nt, Artificial Sequence
  Synthetic
cuaauauccagaaucuaca

SEQ ID NO: 202016 - RNA, 20 nt, Artificial Sequence
  Synthetic
gcuaauauccagaaucuaca

SEQ ID NO: 202017 - RNA, 21 nt, Artificial Sequence
  Synthetic
agcuaauauccagaaucuaca

SEQ ID NO: 202018 - RNA, 22 nt, Artificial Sequence
  Synthetic
gagcuaauauccagaaucuaca

SEQ ID NO: 202019 - RNA, 23 nt, Artificial Sequence
  Synthetic
agagcuaauauccagaaucuaca

SEQ ID NO: 202020 - RNA, 24 nt, Artificial Sequence
  Synthetic
aagagcuaauauccagaaucuaca

SEQ ID NO: 202021 - RNA, 21 nt, Artificial Sequence
  Synthetic
ggcuaauauccagaaucuaca

SEQ ID NO: 202022 - RNA, 22 nt, Artificial Sequence
  Synthetic
gggcuaauauccagaaucuaca

SEQ ID NO: 202023 - RNA, 23 nt, Artificial Sequence
  Synthetic
agggcuaauauccagaaucuaca

SEQ ID NO: 202024 - RNA, 24 nt, Artificial Sequence
  Synthetic
aagggcuaauauccagaaucuaca

SEQ ID NO: 202025 - RNA, 18 nt, Artificial Sequence
  Synthetic
ugauauccagaaucuaca

SEQ ID NO: 202026 - RNA, 19 nt, Artificial Sequence
  Synthetic
cugauauccagaaucuaca

SEQ ID NO: 202027 - RNA, 20 nt, Artificial Sequence
  Synthetic
gcugauauccagaaucuaca

SEQ ID NO: 202028 - RNA, 21 nt, Artificial Sequence
  Synthetic
ggcugauauccagaaucuaca

SEQ ID NO: 202029 - RNA, 22 nt, Artificial Sequence
  Synthetic
gggcugauauccagaaucuaca

SEQ ID NO: 202030 - RNA, 23 nt, Artificial Sequence
  Synthetic
agggcugauauccagaaucuaca

SEQ ID NO: 202031 - RNA, 24 nt, Artificial Sequence
  Synthetic
aagggcugauauccagaaucuaca

SEQ ID NO: 202032 - RNA, 18 nt, Artificial Sequence
  Synthetic
gggcuuuaugcaucuaca

SEQ ID NO: 202033 - RNA, 19 nt, Artificial Sequence
  Synthetic
agggcuuuaugcaucuaca

SEQ ID NO: 202034 - RNA, 20 nt, Artificial Sequence
  Synthetic
uagggcuuuaugcaucuaca

SEQ ID NO: 202035 - RNA, 21 nt, Artificial Sequence
  Synthetic
auagggcuuuaugcaucuaca

SEQ ID NO: 202036 - RNA, 22 nt, Artificial Sequence
  Synthetic
uauagggcuuuaugcaucuaca

SEQ ID NO: 202037 - RNA, 23 nt, Artificial Sequence
  Synthetic
guauagggcuuuaugcaucuaca

SEQ ID NO: 202038 - RNA, 24 nt, Artificial Sequence
  Synthetic
gguauagggcuuuaugcaucuaca

SEQ ID NO: 202039 - RNA, 18 nt, Artificial Sequence
  Synthetic
aagacugcuucaucuaca

SEQ ID NO: 202040 - RNA, 19 nt, Artificial Sequence
  Synthetic
gaagacugcuucaucuaca

SEQ ID NO: 202041 - RNA, 20 nt, Artificial Sequence
  Synthetic
agaagacugcuucaucuaca

SEQ ID NO: 202042 - RNA, 21 nt, Artificial Sequence
  Synthetic
uagaagacugcuucaucuaca

SEQ ID NO: 202043 - RNA, 22 nt, Artificial Sequence
  Synthetic
auagaagacugcuucaucuaca

SEQ ID NO: 202044 - RNA, 23 nt, Artificial Sequence
  Synthetic
aauagaagacugcuucaucuaca

SEQ ID NO: 202045 - RNA, 24 nt, Artificial Sequence
  Synthetic
caauagaagacugcuucaucuaca

SEQ ID NO: 202046 - RNA, 18 nt, Artificial Sequence
  Synthetic
uucauccaugucucuaca

SEQ ID NO: 202047 - RNA, 19 nt, Artificial Sequence
  Synthetic
uuucauccaugucucuaca

SEQ ID NO: 202048 - RNA, 20 nt, Artificial Sequence
  Synthetic
auuucauccaugucucuaca

SEQ ID NO: 202049 - RNA, 21 nt, Artificial Sequence
  Synthetic
aauuucauccaugucucuaca

SEQ ID NO: 202050 - RNA, 22 nt, Artificial Sequence
  Synthetic
caauuucauccaugucucuaca

SEQ ID NO: 202051 - RNA, 23 nt, Artificial Sequence
  Synthetic
ccaauuucauccaugucucuaca

SEQ ID NO: 202052 - RNA, 24 nt, Artificial Sequence
  Synthetic
uccaauuucauccaugucucuaca

SEQ ID NO: 202053 - RNA, 18 nt, Artificial Sequence
  Synthetic
cugccuuguaugucuaca

SEQ ID NO: 202054 - RNA, 19 nt, Artificial Sequence
  Synthetic
ucugccuuguaugucuaca

SEQ ID NO: 202055 - RNA, 20 nt, Artificial Sequence
  Synthetic
cucugccuuguaugucuaca

SEQ ID NO: 202056 - RNA, 21 nt, Artificial Sequence
  Synthetic
gcucugccuuguaugucuaca

SEQ ID NO: 202057 - RNA, 22 nt, Artificial Sequence
  Synthetic
ggcucugccuuguaugucuaca

SEQ ID NO: 202058 - RNA, 23 nt, Artificial Sequence
  Synthetic
uggcucugccuuguaugucuaca

SEQ ID NO: 202059 - RNA, 24 nt, Artificial Sequence
  Synthetic
uuggcucugccuuguaugucuaca

SEQ ID NO: 202060 - RNA, 18 nt, Artificial Sequence
  Synthetic
uuuccaaauaauucuaca

SEQ ID NO: 202061 - RNA, 19 nt, Artificial Sequence
  Synthetic
auuuccaaauaauucuaca

SEQ ID NO: 202062 - RNA, 20 nt, Artificial Sequence
  Synthetic
aauuuccaaauaauucuaca

SEQ ID NO: 202063 - RNA, 21 nt, Artificial Sequence
  Synthetic
aaauuuccaaauaauucuaca

SEQ ID NO: 202064 - RNA, 22 nt, Artificial Sequence
  Synthetic
aaaauuuccaaauaauucuaca

SEQ ID NO: 202065 - RNA, 23 nt, Artificial Sequence
  Synthetic
gaaaauuuccaaauaauucuaca

SEQ ID NO: 202066 - RNA, 24 nt, Artificial Sequence
  Synthetic
agaaaauuuccaaauaauucuaca

SEQ ID NO: 202067 - RNA, 18 nt, Artificial Sequence
  Synthetic
aaugaaugacauucuaca

SEQ ID NO: 202068 - RNA, 19 nt, Artificial Sequence
  Synthetic
gaaugaaugacauucuaca

SEQ ID NO: 202069 - RNA, 20 nt, Artificial Sequence
  Synthetic
agaaugaaugacauucuaca

SEQ ID NO: 202070 - RNA, 21 nt, Artificial Sequence
  Synthetic
aagaaugaaugacauucuaca

SEQ ID NO: 202071 - RNA, 22 nt, Artificial Sequence
  Synthetic
gaagaaugaaugacauucuaca

SEQ ID NO: 202072 - RNA, 23 nt, Artificial Sequence
  Synthetic
ggaagaaugaaugacauucuaca

SEQ ID NO: 202073 - RNA, 24 nt, Artificial Sequence
  Synthetic
gggaagaaugaaugacauucuaca

SEQ ID NO: 202074 - RNA, 18 nt, Artificial Sequence
  Synthetic
aagaaggaaacuucuaca

SEQ ID NO: 202075 - RNA, 19 nt, Artificial Sequence
  Synthetic
aaagaaggaaacuucuaca

SEQ ID NO: 202076 - RNA, 20 nt, Artificial Sequence
  Synthetic
gaaagaaggaaacuucuaca

SEQ ID NO: 202077 - RNA, 21 nt, Artificial Sequence
  Synthetic
agaaagaaggaaacuucuaca

SEQ ID NO: 202078 - RNA, 22 nt, Artificial Sequence
  Synthetic
aagaaagaaggaaacuucuaca

SEQ ID NO: 202079 - RNA, 23 nt, Artificial Sequence
  Synthetic
aaagaaagaaggaaacuucuaca

SEQ ID NO: 202080 - RNA, 24 nt, Artificial Sequence
  Synthetic
uaaagaaagaaggaaacuucuaca

SEQ ID NO: 202081 - RNA, 18 nt, Artificial Sequence
  Synthetic
uugagaucgauuucuaca

SEQ ID NO: 202082 - RNA, 19 nt, Artificial Sequence
  Synthetic
uuugagaucgauuucuaca

SEQ ID NO: 202083 - RNA, 20 nt, Artificial Sequence
  Synthetic
guuugagaucgauuucuaca

SEQ ID NO: 202084 - RNA, 21 nt, Artificial Sequence
  Synthetic
aguuugagaucgauuucuaca

SEQ ID NO: 202085 - RNA, 22 nt, Artificial Sequence
  Synthetic
aaguuugagaucgauuucuaca

SEQ ID NO: 202086 - RNA, 23 nt, Artificial Sequence
  Synthetic
uaaguuugagaucgauuucuaca

SEQ ID NO: 202087 - RNA, 24 nt, Artificial Sequence
  Synthetic
cuaaguuugagaucgauuucuaca

SEQ ID NO: 202088 - RNA, 18 nt, Artificial Sequence
  Synthetic
augaauuguuuuucuaca

SEQ ID NO: 202089 - RNA, 19 nt, Artificial Sequence
  Synthetic
uaugaauuguuuuucuaca

SEQ ID NO: 202090 - RNA, 20 nt, Artificial Sequence
  Synthetic
cuaugaauuguuuuucuaca

SEQ ID NO: 202091 - RNA, 21 nt, Artificial Sequence
  Synthetic
ucuaugaauuguuuuucuaca

SEQ ID NO: 202092 - RNA, 22 nt, Artificial Sequence
  Synthetic
aucuaugaauuguuuuucuaca

SEQ ID NO: 202093 - RNA, 23 nt, Artificial Sequence
  Synthetic
gaucuaugaauuguuuuucuaca

SEQ ID NO: 202094 - RNA, 24 nt, Artificial Sequence
  Synthetic
agaucuaugaauuguuuuucuaca

SEQ ID NO: 202095 - RNA, 18 nt, Artificial Sequence
  Synthetic
gagaaguaaaaaaguaca

SEQ ID NO: 202096 - RNA, 19 nt, Artificial Sequence
  Synthetic
agagaaguaaaaaaguaca

SEQ ID NO: 202097 - RNA, 20 nt, Artificial Sequence
  Synthetic
uagagaaguaaaaaaguaca

SEQ ID NO: 202098 - RNA, 21 nt, Artificial Sequence
  Synthetic
uuagagaaguaaaaaaguaca

SEQ ID NO: 202099 - RNA, 22 nt, Artificial Sequence
  Synthetic
guuagagaaguaaaaaaguaca

SEQ ID NO: 202100 - RNA, 23 nt, Artificial Sequence
  Synthetic
aguuagagaaguaaaaaaguaca

SEQ ID NO: 202101 - RNA, 24 nt, Artificial Sequence
  Synthetic
gaguuagagaaguaaaaaaguaca

SEQ ID NO: 202102 - RNA, 18 nt, Artificial Sequence
  Synthetic
auaauggagaaaaguaca

SEQ ID NO: 202103 - RNA, 19 nt, Artificial Sequence
  Synthetic
aauaauggagaaaaguaca

SEQ ID NO: 202104 - RNA, 20 nt, Artificial Sequence
  Synthetic
gaauaauggagaaaaguaca

SEQ ID NO: 202105 - RNA, 21 nt, Artificial Sequence
  Synthetic
ugaauaauggagaaaaguaca

SEQ ID NO: 202106 - RNA, 22 nt, Artificial Sequence
  Synthetic
uugaauaauggagaaaaguaca

SEQ ID NO: 202107 - RNA, 23 nt, Artificial Sequence
  Synthetic
uuugaauaauggagaaaaguaca

SEQ ID NO: 202108 - RNA, 24 nt, Artificial Sequence
  Synthetic
uuuugaauaauggagaaaaguaca

SEQ ID NO: 202109 - RNA, 18 nt, Artificial Sequence
  Synthetic
aagaaaaaugaaaguaca

SEQ ID NO: 202110 - RNA, 19 nt, Artificial Sequence
  Synthetic
aaagaaaaaugaaaguaca

SEQ ID NO: 202111 - RNA, 20 nt, Artificial Sequence
  Synthetic
caaagaaaaaugaaaguaca

SEQ ID NO: 202112 - RNA, 21 nt, Artificial Sequence
  Synthetic
gcaaagaaaaaugaaaguaca

SEQ ID NO: 202113 - RNA, 22 nt, Artificial Sequence
  Synthetic
agcaaagaaaaaugaaaguaca

SEQ ID NO: 202114 - RNA, 23 nt, Artificial Sequence
  Synthetic
aagcaaagaaaaaugaaaguaca

SEQ ID NO: 202115 - RNA, 24 nt, Artificial Sequence
  Synthetic
caagcaaagaaaaaugaaaguaca

SEQ ID NO: 202116 - RNA, 18 nt, Artificial Sequence
  Synthetic
cgagcaagacucaguaca

SEQ ID NO: 202117 - RNA, 19 nt, Artificial Sequence
  Synthetic
acgagcaagacucaguaca

SEQ ID NO: 202118 - RNA, 20 nt, Artificial Sequence
  Synthetic
uacgagcaagacucaguaca

SEQ ID NO: 202119 - RNA, 21 nt, Artificial Sequence
  Synthetic
uuacgagcaagacucaguaca

SEQ ID NO: 202120 - RNA, 22 nt, Artificial Sequence
  Synthetic
auuacgagcaagacucaguaca

SEQ ID NO: 202121 - RNA, 23 nt, Artificial Sequence
  Synthetic
aauuacgagcaagacucaguaca

SEQ ID NO: 202122 - RNA, 24 nt, Artificial Sequence
  Synthetic
uaauuacgagcaagacucaguaca

SEQ ID NO: 202123 - RNA, 18 nt, Artificial Sequence
  Synthetic
acuggaacauugaguaca

SEQ ID NO: 202124 - RNA, 19 nt, Artificial Sequence
  Synthetic
gacuggaacauugaguaca

SEQ ID NO: 202125 - RNA, 20 nt, Artificial Sequence
  Synthetic
agacuggaacauugaguaca

SEQ ID NO: 202126 - RNA, 21 nt, Artificial Sequence
  Synthetic
gagacuggaacauugaguaca

SEQ ID NO: 202127 - RNA, 22 nt, Artificial Sequence
  Synthetic
agagacuggaacauugaguaca

SEQ ID NO: 202128 - RNA, 23 nt, Artificial Sequence
  Synthetic
aagagacuggaacauugaguaca

SEQ ID NO: 202129 - RNA, 24 nt, Artificial Sequence
  Synthetic
gaagagacuggaacauugaguaca

SEQ ID NO: 202130 - RNA, 18 nt, Artificial Sequence
  Synthetic
guaaugucuuauaguaca

SEQ ID NO: 202131 - RNA, 19 nt, Artificial Sequence
  Synthetic
gguaaugucuuauaguaca

SEQ ID NO: 202132 - RNA, 20 nt, Artificial Sequence
  Synthetic
agguaaugucuuauaguaca

SEQ ID NO: 202133 - RNA, 21 nt, Artificial Sequence
  Synthetic
gagguaaugucuuauaguaca

SEQ ID NO: 202134 - RNA, 22 nt, Artificial Sequence
  Synthetic
agagguaaugucuuauaguaca

SEQ ID NO: 202135 - RNA, 23 nt, Artificial Sequence
  Synthetic
gagagguaaugucuuauaguaca

SEQ ID NO: 202136 - RNA, 24 nt, Artificial Sequence
  Synthetic
ugagagguaaugucuuauaguaca

SEQ ID NO: 202137 - RNA, 18 nt, Artificial Sequence
  Synthetic
aucauauucuguaguaca

SEQ ID NO: 202138 - RNA, 19 nt, Artificial Sequence
  Synthetic
aaucauauucuguaguaca

SEQ ID NO: 202139 - RNA, 20 nt, Artificial Sequence
  Synthetic
gaaucauauucuguaguaca

SEQ ID NO: 202140 - RNA, 21 nt, Artificial Sequence
  Synthetic
agaaucauauucuguaguaca

SEQ ID NO: 202141 - RNA, 22 nt, Artificial Sequence
  Synthetic
gagaaucauauucuguaguaca

SEQ ID NO: 202142 - RNA, 23 nt, Artificial Sequence
  Synthetic
ugagaaucauauucuguaguaca

SEQ ID NO: 202143 - RNA, 24 nt, Artificial Sequence
  Synthetic
gugagaaucauauucuguaguaca

SEQ ID NO: 202144 - RNA, 18 nt, Artificial Sequence
  Synthetic
gagucaagaguuaguaca

SEQ ID NO: 202145 - RNA, 19 nt, Artificial Sequence
  Synthetic
ugagucaagaguuaguaca

SEQ ID NO: 202146 - RNA, 20 nt, Artificial Sequence
  Synthetic
augagucaagaguuaguaca

SEQ ID NO: 202147 - RNA, 21 nt, Artificial Sequence
  Synthetic
uaugagucaagaguuaguaca

SEQ ID NO: 202148 - RNA, 22 nt, Artificial Sequence
  Synthetic
guaugagucaagaguuaguaca

SEQ ID NO: 202149 - RNA, 23 nt, Artificial Sequence
  Synthetic
aguaugagucaagaguuaguaca

SEQ ID NO: 202150 - RNA, 24 nt, Artificial Sequence
  Synthetic
aaguaugagucaagaguuaguaca

SEQ ID NO: 202151 - RNA, 18 nt, Artificial Sequence
  Synthetic
caucguauauuuaguaca

SEQ ID NO: 202152 - RNA, 19 nt, Artificial Sequence
  Synthetic
ccaucguauauuuaguaca

SEQ ID NO: 202153 - RNA, 20 nt, Artificial Sequence
  Synthetic
accaucguauauuuaguaca

SEQ ID NO: 202154 - RNA, 21 nt, Artificial Sequence
  Synthetic
uaccaucguauauuuaguaca

SEQ ID NO: 202155 - RNA, 22 nt, Artificial Sequence
  Synthetic
auaccaucguauauuuaguaca

SEQ ID NO: 202156 - RNA, 23 nt, Artificial Sequence
  Synthetic
aauaccaucguauauuuaguaca

SEQ ID NO: 202157 - RNA, 24 nt, Artificial Sequence
  Synthetic
uaauaccaucguauauuuaguaca

SEQ ID NO: 202158 - RNA, 18 nt, Artificial Sequence
  Synthetic
uccugcacacuacguaca

SEQ ID NO: 202159 - RNA, 19 nt, Artificial Sequence
  Synthetic
auccugcacacuacguaca

SEQ ID NO: 202160 - RNA, 20 nt, Artificial Sequence
  Synthetic
uauccugcacacuacguaca

SEQ ID NO: 202161 - RNA, 21 nt, Artificial Sequence
  Synthetic
auauccugcacacuacguaca

SEQ ID NO: 202162 - RNA, 22 nt, Artificial Sequence
  Synthetic
aauauccugcacacuacguaca

SEQ ID NO: 202163 - RNA, 23 nt, Artificial Sequence
  Synthetic
uaauauccugcacacuacguaca

SEQ ID NO: 202164 - RNA, 24 nt, Artificial Sequence
  Synthetic
guaauauccugcacacuacguaca

SEQ ID NO: 202165 - RNA, 18 nt, Artificial Sequence
  Synthetic
acaagucacaugcguaca

SEQ ID NO: 202166 - RNA, 19 nt, Artificial Sequence
  Synthetic
uacaagucacaugcguaca

SEQ ID NO: 202167 - RNA, 20 nt, Artificial Sequence
  Synthetic
guacaagucacaugcguaca

SEQ ID NO: 202168 - RNA, 21 nt, Artificial Sequence
  Synthetic
uguacaagucacaugcguaca

SEQ ID NO: 202169 - RNA, 22 nt, Artificial Sequence
  Synthetic
uuguacaagucacaugcguaca

SEQ ID NO: 202170 - RNA, 23 nt, Artificial Sequence
  Synthetic
cuuguacaagucacaugcguaca

SEQ ID NO: 202171 - RNA, 24 nt, Artificial Sequence
  Synthetic
ccuuguacaagucacaugcguaca

SEQ ID NO: 202172 - RNA, 18 nt, Artificial Sequence
  Synthetic
uuuuuuauuucucguaca

SEQ ID NO: 202173 - RNA, 19 nt, Artificial Sequence
  Synthetic
uuuuuuuauuucucguaca

SEQ ID NO: 202174 - RNA, 20 nt, Artificial Sequence
  Synthetic
guuuuuuuauuucucguaca

SEQ ID NO: 202175 - RNA, 21 nt, Artificial Sequence
  Synthetic
aguuuuuuuauuucucguaca

SEQ ID NO: 202176 - RNA, 22 nt, Artificial Sequence
  Synthetic
aaguuuuuuuauuucucguaca

SEQ ID NO: 202177 - RNA, 23 nt, Artificial Sequence
  Synthetic
aaaguuuuuuuauuucucguaca

SEQ ID NO: 202178 - RNA, 24 nt, Artificial Sequence
  Synthetic
aaaaguuuuuuuauuucucguaca

SEQ ID NO: 202179 - RNA, 18 nt, Artificial Sequence
  Synthetic
aauucuaccagagguaca

SEQ ID NO: 202180 - RNA, 19 nt, Artificial Sequence
  Synthetic
gaauucuaccagagguaca

SEQ ID NO: 202181 - RNA, 20 nt, Artificial Sequence
  Synthetic
cgaauucuaccagagguaca

SEQ ID NO: 202182 - RNA, 21 nt, Artificial Sequence
  Synthetic
ccgaauucuaccagagguaca

SEQ ID NO: 202183 - RNA, 22 nt, Artificial Sequence
  Synthetic
gccgaauucuaccagagguaca

SEQ ID NO: 202184 - RNA, 23 nt, Artificial Sequence
  Synthetic
agccgaauucuaccagagguaca

SEQ ID NO: 202185 - RNA, 24 nt, Artificial Sequence
  Synthetic
cagccgaauucuaccagagguaca

SEQ ID NO: 202186 - RNA, 20 nt, Artificial Sequence
  Synthetic
ugaauucuaccagagguaca

SEQ ID NO: 202187 - RNA, 21 nt, Artificial Sequence
  Synthetic
cugaauucuaccagagguaca

SEQ ID NO: 202188 - RNA, 22 nt, Artificial Sequence
  Synthetic
gcugaauucuaccagagguaca

SEQ ID NO: 202189 - RNA, 23 nt, Artificial Sequence
  Synthetic
agcugaauucuaccagagguaca

SEQ ID NO: 202190 - RNA, 24 nt, Artificial Sequence
  Synthetic
cagcugaauucuaccagagguaca

SEQ ID NO: 202191 - RNA, 18 nt, Artificial Sequence
  Synthetic
aguuacuuucuagguaca

SEQ ID NO: 202192 - RNA, 19 nt, Artificial Sequence
  Synthetic
uaguuacuuucuagguaca

SEQ ID NO: 202193 - RNA, 20 nt, Artificial Sequence
  Synthetic
uuaguuacuuucuagguaca

SEQ ID NO: 202194 - RNA, 21 nt, Artificial Sequence
  Synthetic
guuaguuacuuucuagguaca

SEQ ID NO: 202195 - RNA, 22 nt, Artificial Sequence
  Synthetic
aguuaguuacuuucuagguaca

SEQ ID NO: 202196 - RNA, 23 nt, Artificial Sequence
  Synthetic
aaguuaguuacuuucuagguaca

SEQ ID NO: 202197 - RNA, 24 nt, Artificial Sequence
  Synthetic
caaguuaguuacuuucuagguaca

SEQ ID NO: 202198 - RNA, 18 nt, Artificial Sequence
  Synthetic
guuuuuugagaggguaca

SEQ ID NO: 202199 - RNA, 19 nt, Artificial Sequence
  Synthetic
uguuuuuugagaggguaca

SEQ ID NO: 202200 - RNA, 20 nt, Artificial Sequence
  Synthetic
auguuuuuugagaggguaca

SEQ ID NO: 202201 - RNA, 21 nt, Artificial Sequence
  Synthetic
gauguuuuuugagaggguaca

SEQ ID NO: 202202 - RNA, 22 nt, Artificial Sequence
  Synthetic
ugauguuuuuugagaggguaca

SEQ ID NO: 202203 - RNA, 23 nt, Artificial Sequence
  Synthetic
augauguuuuuugagaggguaca

SEQ ID NO: 202204 - RNA, 24 nt, Artificial Sequence
  Synthetic
caugauguuuuuugagaggguaca

SEQ ID NO: 202205 - RNA, 18 nt, Artificial Sequence
  Synthetic
ucagaagaugaggguaca

SEQ ID NO: 202206 - RNA, 19 nt, Artificial Sequence
  Synthetic
aucagaagaugaggguaca

SEQ ID NO: 202207 - RNA, 20 nt, Artificial Sequence
  Synthetic
uaucagaagaugaggguaca

SEQ ID NO: 202208 - RNA, 21 nt, Artificial Sequence
  Synthetic
guaucagaagaugaggguaca

SEQ ID NO: 202209 - RNA, 22 nt, Artificial Sequence
  Synthetic
aguaucagaagaugaggguaca

SEQ ID NO: 202210 - RNA, 23 nt, Artificial Sequence
  Synthetic
caguaucagaagaugaggguaca

SEQ ID NO: 202211 - RNA, 24 nt, Artificial Sequence
  Synthetic
gcaguaucagaagaugaggguaca

SEQ ID NO: 202212 - RNA, 18 nt, Artificial Sequence
  Synthetic
aagauuaaauaggguaca

SEQ ID NO: 202213 - RNA, 19 nt, Artificial Sequence
  Synthetic
uaagauuaaauaggguaca

SEQ ID NO: 202214 - RNA, 20 nt, Artificial Sequence
  Synthetic
uuaagauuaaauaggguaca

SEQ ID NO: 202215 - RNA, 21 nt, Artificial Sequence
  Synthetic
guuaagauuaaauaggguaca

SEQ ID NO: 202216 - RNA, 22 nt, Artificial Sequence
  Synthetic
gguuaagauuaaauaggguaca

SEQ ID NO: 202217 - RNA, 23 nt, Artificial Sequence
  Synthetic
ggguuaagauuaaauaggguaca

SEQ ID NO: 202218 - RNA, 24 nt, Artificial Sequence
  Synthetic
gggguuaagauuaaauaggguaca

SEQ ID NO: 202219 - RNA, 18 nt, Artificial Sequence
  Synthetic
aaaaccaccagggguaca

SEQ ID NO: 202220 - RNA, 19 nt, Artificial Sequence
  Synthetic
uaaaaccaccagggguaca

SEQ ID NO: 202221 - RNA, 20 nt, Artificial Sequence
  Synthetic
uuaaaaccaccagggguaca

SEQ ID NO: 202222 - RNA, 21 nt, Artificial Sequence
  Synthetic
cuuaaaaccaccagggguaca

SEQ ID NO: 202223 - RNA, 22 nt, Artificial Sequence
  Synthetic
ucuuaaaaccaccagggguaca

SEQ ID NO: 202224 - RNA, 23 nt, Artificial Sequence
  Synthetic
cucuuaaaaccaccagggguaca

SEQ ID NO: 202225 - RNA, 24 nt, Artificial Sequence
  Synthetic
ucucuuaaaaccaccagggguaca

SEQ ID NO: 202226 - RNA, 18 nt, Artificial Sequence
  Synthetic
agaaaucucagggguaca

SEQ ID NO: 202227 - RNA, 19 nt, Artificial Sequence
  Synthetic
gagaaaucucagggguaca

SEQ ID NO: 202228 - RNA, 20 nt, Artificial Sequence
  Synthetic
ugagaaaucucagggguaca

SEQ ID NO: 202229 - RNA, 21 nt, Artificial Sequence
  Synthetic
gugagaaaucucagggguaca

SEQ ID NO: 202230 - RNA, 22 nt, Artificial Sequence
  Synthetic
ggugagaaaucucagggguaca

SEQ ID NO: 202231 - RNA, 23 nt, Artificial Sequence
  Synthetic
aggugagaaaucucagggguaca

SEQ ID NO: 202232 - RNA, 24 nt, Artificial Sequence
  Synthetic
caggugagaaaucucagggguaca

SEQ ID NO: 202233 - RNA, 18 nt, Artificial Sequence
  Synthetic
ucuaagauucaugguaca

SEQ ID NO: 202234 - RNA, 19 nt, Artificial Sequence
  Synthetic
uucuaagauucaugguaca

SEQ ID NO: 202235 - RNA, 20 nt, Artificial Sequence
  Synthetic
auucuaagauucaugguaca

SEQ ID NO: 202236 - RNA, 21 nt, Artificial Sequence
  Synthetic
gauucuaagauucaugguaca

SEQ ID NO: 202237 - RNA, 22 nt, Artificial Sequence
  Synthetic
ugauucuaagauucaugguaca

SEQ ID NO: 202238 - RNA, 23 nt, Artificial Sequence
  Synthetic
uugauucuaagauucaugguaca

SEQ ID NO: 202239 - RNA, 24 nt, Artificial Sequence
  Synthetic
cuugauucuaagauucaugguaca

SEQ ID NO: 202240 - RNA, 18 nt, Artificial Sequence
  Synthetic
caacuugguggugguaca

SEQ ID NO: 202241 - RNA, 19 nt, Artificial Sequence
  Synthetic
ucaacuugguggugguaca

SEQ ID NO: 202242 - RNA, 20 nt, Artificial Sequence
  Synthetic
gucaacuugguggugguaca

SEQ ID NO: 202243 - RNA, 21 nt, Artificial Sequence
  Synthetic
ugucaacuugguggugguaca

SEQ ID NO: 202244 - RNA, 22 nt, Artificial Sequence
  Synthetic
gugucaacuugguggugguaca

SEQ ID NO: 202245 - RNA, 23 nt, Artificial Sequence
  Synthetic
ugugucaacuugguggugguaca

SEQ ID NO: 202246 - RNA, 24 nt, Artificial Sequence
  Synthetic
uugugucaacuugguggugguaca

SEQ ID NO: 202247 - RNA, 18 nt, Artificial Sequence
  Synthetic
ugcagugacauugguaca

SEQ ID NO: 202248 - RNA, 19 nt, Artificial Sequence
  Synthetic
augcagugacauugguaca

SEQ ID NO: 202249 - RNA, 20 nt, Artificial Sequence
  Synthetic
caugcagugacauugguaca

SEQ ID NO: 202250 - RNA, 21 nt, Artificial Sequence
  Synthetic
ucaugcagugacauugguaca

SEQ ID NO: 202251 - RNA, 22 nt, Artificial Sequence
  Synthetic
aucaugcagugacauugguaca

SEQ ID NO: 202252 - RNA, 23 nt, Artificial Sequence
  Synthetic
uaucaugcagugacauugguaca

SEQ ID NO: 202253 - RNA, 24 nt, Artificial Sequence
  Synthetic
auaucaugcagugacauugguaca

SEQ ID NO: 202254 - RNA, 18 nt, Artificial Sequence
  Synthetic
aaaucacuuauugguaca

SEQ ID NO: 202255 - RNA, 19 nt, Artificial Sequence
  Synthetic
caaaucacuuauugguaca

SEQ ID NO: 202256 - RNA, 20 nt, Artificial Sequence
  Synthetic
ucaaaucacuuauugguaca

SEQ ID NO: 202257 - RNA, 21 nt, Artificial Sequence
  Synthetic
gucaaaucacuuauugguaca

SEQ ID NO: 202258 - RNA, 22 nt, Artificial Sequence
  Synthetic
agucaaaucacuuauugguaca

SEQ ID NO: 202259 - RNA, 23 nt, Artificial Sequence
  Synthetic
aagucaaaucacuuauugguaca

SEQ ID NO: 202260 - RNA, 24 nt, Artificial Sequence
  Synthetic
aaagucaaaucacuuauugguaca

SEQ ID NO: 202261 - RNA, 18 nt, Artificial Sequence
  Synthetic
ugagauggauuugguaca

SEQ ID NO: 202262 - RNA, 19 nt, Artificial Sequence
  Synthetic
gugagauggauuugguaca

SEQ ID NO: 202263 - RNA, 20 nt, Artificial Sequence
  Synthetic
ggugagauggauuugguaca

SEQ ID NO: 202264 - RNA, 21 nt, Artificial Sequence
  Synthetic
uggugagauggauuugguaca

SEQ ID NO: 202265 - RNA, 22 nt, Artificial Sequence
  Synthetic
auggugagauggauuugguaca

SEQ ID NO: 202266 - RNA, 23 nt, Artificial Sequence
  Synthetic
uauggugagauggauuugguaca

SEQ ID NO: 202267 - RNA, 24 nt, Artificial Sequence
  Synthetic
uuauggugagauggauuugguaca

SEQ ID NO: 202268 - RNA, 18 nt, Artificial Sequence
  Synthetic
cauauuaauucauguaca

SEQ ID NO: 202269 - RNA, 19 nt, Artificial Sequence
  Synthetic
ucauauuaauucauguaca

SEQ ID NO: 202270 - RNA, 20 nt, Artificial Sequence
  Synthetic
gucauauuaauucauguaca

SEQ ID NO: 202271 - RNA, 21 nt, Artificial Sequence
  Synthetic
ugucauauuaauucauguaca

SEQ ID NO: 202272 - RNA, 22 nt, Artificial Sequence
  Synthetic
augucauauuaauucauguaca

SEQ ID NO: 202273 - RNA, 23 nt, Artificial Sequence
  Synthetic
caugucauauuaauucauguaca

SEQ ID NO: 202274 - RNA, 24 nt, Artificial Sequence
  Synthetic
ucaugucauauuaauucauguaca

SEQ ID NO: 202275 - RNA, 18 nt, Artificial Sequence
  Synthetic
uaaaaauacauauguaca

SEQ ID NO: 202276 - RNA, 19 nt, Artificial Sequence
  Synthetic
auaaaaauacauauguaca

SEQ ID NO: 202277 - RNA, 20 nt, Artificial Sequence
  Synthetic
aauaaaaauacauauguaca

SEQ ID NO: 202278 - RNA, 21 nt, Artificial Sequence
  Synthetic
aaauaaaaauacauauguaca

SEQ ID NO: 202279 - RNA, 22 nt, Artificial Sequence
  Synthetic
gaaauaaaaauacauauguaca

SEQ ID NO: 202280 - RNA, 23 nt, Artificial Sequence
  Synthetic
agaaauaaaaauacauauguaca

SEQ ID NO: 202281 - RNA, 24 nt, Artificial Sequence
  Synthetic
cagaaauaaaaauacauauguaca

SEQ ID NO: 202282 - RNA, 18 nt, Artificial Sequence
  Synthetic
acguauucuguauguaca

SEQ ID NO: 202283 - RNA, 19 nt, Artificial Sequence
  Synthetic
uacguauucuguauguaca

SEQ ID NO: 202284 - RNA, 20 nt, Artificial Sequence
  Synthetic
auacguauucuguauguaca

SEQ ID NO: 202285 - RNA, 21 nt, Artificial Sequence
  Synthetic
aauacguauucuguauguaca

SEQ ID NO: 202286 - RNA, 22 nt, Artificial Sequence
  Synthetic
aaauacguauucuguauguaca

SEQ ID NO: 202287 - RNA, 23 nt, Artificial Sequence
  Synthetic
uaaauacguauucuguauguaca

SEQ ID NO: 202288 - RNA, 24 nt, Artificial Sequence
  Synthetic
guaaauacguauucuguauguaca

SEQ ID NO: 202289 - RNA, 18 nt, Artificial Sequence
  Synthetic
uuucaccuugacuguaca

SEQ ID NO: 202290 - RNA, 19 nt, Artificial Sequence
  Synthetic
uuuucaccuugacuguaca

SEQ ID NO: 202291 - RNA, 20 nt, Artificial Sequence
  Synthetic
uuuuucaccuugacuguaca

SEQ ID NO: 202292 - RNA, 21 nt, Artificial Sequence
  Synthetic
guuuuucaccuugacuguaca

SEQ ID NO: 202293 - RNA, 22 nt, Artificial Sequence
  Synthetic
uguuuuucaccuugacuguaca

SEQ ID NO: 202294 - RNA, 23 nt, Artificial Sequence
  Synthetic
guguuuuucaccuugacuguaca

SEQ ID NO: 202295 - RNA, 24 nt, Artificial Sequence
  Synthetic
aguguuuuucaccuugacuguaca

SEQ ID NO: 202296 - RNA, 18 nt, Artificial Sequence
  Synthetic
aagggcagcauuuguaca

SEQ ID NO: 202297 - RNA, 19 nt, Artificial Sequence
  Synthetic
aaagggcagcauuuguaca

SEQ ID NO: 202298 - RNA, 20 nt, Artificial Sequence
  Synthetic
uaaagggcagcauuuguaca

SEQ ID NO: 202299 - RNA, 18 nt, Artificial Sequence
  Synthetic
uaaagaauagaaauuaca

SEQ ID NO: 202300 - RNA, 19 nt, Artificial Sequence
  Synthetic
auaaagaauagaaauuaca

SEQ ID NO: 202301 - RNA, 20 nt, Artificial Sequence
  Synthetic
aauaaagaauagaaauuaca

SEQ ID NO: 202302 - RNA, 21 nt, Artificial Sequence
  Synthetic
aaauaaagaauagaaauuaca

SEQ ID NO: 202303 - RNA, 22 nt, Artificial Sequence
  Synthetic
uaaauaaagaauagaaauuaca

SEQ ID NO: 202304 - RNA, 23 nt, Artificial Sequence
  Synthetic
cuaaauaaagaauagaaauuaca

SEQ ID NO: 202305 - RNA, 24 nt, Artificial Sequence
  Synthetic
ucuaaauaaagaauagaaauuaca

SEQ ID NO: 202306 - RNA, 18 nt, Artificial Sequence
  Synthetic
cuauugaugccaauuaca

SEQ ID NO: 202307 - RNA, 19 nt, Artificial Sequence
  Synthetic
acuauugaugccaauuaca

SEQ ID NO: 202308 - RNA, 20 nt, Artificial Sequence
  Synthetic
gacuauugaugccaauuaca

SEQ ID NO: 202309 - RNA, 21 nt, Artificial Sequence
  Synthetic
ugacuauugaugccaauuaca

SEQ ID NO: 202310 - RNA, 22 nt, Artificial Sequence
  Synthetic
uugacuauugaugccaauuaca

SEQ ID NO: 202311 - RNA, 23 nt, Artificial Sequence
  Synthetic
uuugacuauugaugccaauuaca

SEQ ID NO: 202312 - RNA, 24 nt, Artificial Sequence
  Synthetic
auuugacuauugaugccaauuaca

SEQ ID NO: 202313 - RNA, 18 nt, Artificial Sequence
  Synthetic
gcagguaauggaauuaca

SEQ ID NO: 202314 - RNA, 19 nt, Artificial Sequence
  Synthetic
agcagguaauggaauuaca

SEQ ID NO: 202315 - RNA, 20 nt, Artificial Sequence
  Synthetic
cagcagguaauggaauuaca

SEQ ID NO: 202316 - RNA, 21 nt, Artificial Sequence
  Synthetic
acagcagguaauggaauuaca

SEQ ID NO: 202317 - RNA, 22 nt, Artificial Sequence
  Synthetic
cacagcagguaauggaauuaca

SEQ ID NO: 202318 - RNA, 23 nt, Artificial Sequence
  Synthetic
gcacagcagguaauggaauuaca

SEQ ID NO: 202319 - RNA, 24 nt, Artificial Sequence
  Synthetic
ugcacagcagguaauggaauuaca

SEQ ID NO: 202320 - RNA, 18 nt, Artificial Sequence
  Synthetic
uugagaaacaccauuaca

SEQ ID NO: 202321 - RNA, 19 nt, Artificial Sequence
  Synthetic
uuugagaaacaccauuaca

SEQ ID NO: 202322 - RNA, 20 nt, Artificial Sequence
  Synthetic
auuugagaaacaccauuaca

SEQ ID NO: 202323 - RNA, 21 nt, Artificial Sequence
  Synthetic
cauuugagaaacaccauuaca

SEQ ID NO: 202324 - RNA, 22 nt, Artificial Sequence
  Synthetic
acauuugagaaacaccauuaca

SEQ ID NO: 202325 - RNA, 23 nt, Artificial Sequence
  Synthetic
gacauuugagaaacaccauuaca

SEQ ID NO: 202326 - RNA, 24 nt, Artificial Sequence
  Synthetic
ugacauuugagaaacaccauuaca

SEQ ID NO: 202327 - RNA, 18 nt, Artificial Sequence
  Synthetic
uucaugaucuccauuaca

SEQ ID NO: 202328 - RNA, 19 nt, Artificial Sequence
  Synthetic
uuucaugaucuccauuaca

SEQ ID NO: 202329 - RNA, 20 nt, Artificial Sequence
  Synthetic
auuucaugaucuccauuaca

SEQ ID NO: 202330 - RNA, 21 nt, Artificial Sequence
  Synthetic
uauuucaugaucuccauuaca

SEQ ID NO: 202331 - RNA, 22 nt, Artificial Sequence
  Synthetic
uuauuucaugaucuccauuaca

SEQ ID NO: 202332 - RNA, 23 nt, Artificial Sequence
  Synthetic
guuauuucaugaucuccauuaca

SEQ ID NO: 202333 - RNA, 24 nt, Artificial Sequence
  Synthetic
gguuauuucaugaucuccauuaca

SEQ ID NO: 202334 - RNA, 18 nt, Artificial Sequence
  Synthetic
cauugacucagcauuaca

SEQ ID NO: 202335 - RNA, 19 nt, Artificial Sequence
  Synthetic
acauugacucagcauuaca

SEQ ID NO: 202336 - RNA, 20 nt, Artificial Sequence
  Synthetic
uacauugacucagcauuaca

SEQ ID NO: 202337 - RNA, 21 nt, Artificial Sequence
  Synthetic
cuacauugacucagcauuaca

SEQ ID NO: 202338 - RNA, 22 nt, Artificial Sequence
  Synthetic
ucuacauugacucagcauuaca

SEQ ID NO: 202339 - RNA, 23 nt, Artificial Sequence
  Synthetic
cucuacauugacucagcauuaca

SEQ ID NO: 202340 - RNA, 24 nt, Artificial Sequence
  Synthetic
acucuacauugacucagcauuaca

SEQ ID NO: 202341 - RNA, 18 nt, Artificial Sequence
  Synthetic
ccaagugacacgauuaca

SEQ ID NO: 202342 - RNA, 19 nt, Artificial Sequence
  Synthetic
uccaagugacacgauuaca

SEQ ID NO: 202343 - RNA, 20 nt, Artificial Sequence
  Synthetic
auccaagugacacgauuaca

SEQ ID NO: 202344 - RNA, 21 nt, Artificial Sequence
  Synthetic
gauccaagugacacgauuaca

SEQ ID NO: 202345 - RNA, 22 nt, Artificial Sequence
  Synthetic
ugauccaagugacacgauuaca

SEQ ID NO: 202346 - RNA, 23 nt, Artificial Sequence
  Synthetic
cugauccaagugacacgauuaca

SEQ ID NO: 202347 - RNA, 24 nt, Artificial Sequence
  Synthetic
gcugauccaagugacacgauuaca

SEQ ID NO: 202348 - RNA, 18 nt, Artificial Sequence
  Synthetic
aaggcugaggauauuaca

SEQ ID NO: 202349 - RNA, 19 nt, Artificial Sequence
  Synthetic
uaaggcugaggauauuaca

SEQ ID NO: 202350 - RNA, 20 nt, Artificial Sequence
  Synthetic
guaaggcugaggauauuaca

SEQ ID NO: 202351 - RNA, 21 nt, Artificial Sequence
  Synthetic
cguaaggcugaggauauuaca

SEQ ID NO: 202352 - RNA, 22 nt, Artificial Sequence
  Synthetic
acguaaggcugaggauauuaca

SEQ ID NO: 202353 - RNA, 23 nt, Artificial Sequence
  Synthetic
uacguaaggcugaggauauuaca

SEQ ID NO: 202354 - RNA, 24 nt, Artificial Sequence
  Synthetic
cuacguaaggcugaggauauuaca

SEQ ID NO: 202355 - RNA, 18 nt, Artificial Sequence
  Synthetic
uguuuuaccucuauuaca

SEQ ID NO: 202356 - RNA, 19 nt, Artificial Sequence
  Synthetic
uuguuuuaccucuauuaca

SEQ ID NO: 202357 - RNA, 20 nt, Artificial Sequence
  Synthetic
auuguuuuaccucuauuaca

SEQ ID NO: 202358 - RNA, 21 nt, Artificial Sequence
  Synthetic
aauuguuuuaccucuauuaca

SEQ ID NO: 202359 - RNA, 22 nt, Artificial Sequence
  Synthetic
gaauuguuuuaccucuauuaca

SEQ ID NO: 202360 - RNA, 23 nt, Artificial Sequence
  Synthetic
ggaauuguuuuaccucuauuaca

SEQ ID NO: 202361 - RNA, 24 nt, Artificial Sequence
  Synthetic
aggaauuguuuuaccucuauuaca

SEQ ID NO: 202362 - RNA, 18 nt, Artificial Sequence
  Synthetic
ccuaacucaguuauuaca

SEQ ID NO: 202363 - RNA, 19 nt, Artificial Sequence
  Synthetic
cccuaacucaguuauuaca

SEQ ID NO: 202364 - RNA, 20 nt, Artificial Sequence
  Synthetic
ucccuaacucaguuauuaca

SEQ ID NO: 202365 - RNA, 21 nt, Artificial Sequence
  Synthetic
uucccuaacucaguuauuaca

SEQ ID NO: 202366 - RNA, 22 nt, Artificial Sequence
  Synthetic
cuucccuaacucaguuauuaca

SEQ ID NO: 202367 - RNA, 23 nt, Artificial Sequence
  Synthetic
ccuucccuaacucaguuauuaca

SEQ ID NO: 202368 - RNA, 24 nt, Artificial Sequence
  Synthetic
uccuucccuaacucaguuauuaca

SEQ ID NO: 202369 - RNA, 18 nt, Artificial Sequence
  Synthetic
aauacaaccuuuauuaca

SEQ ID NO: 202370 - RNA, 19 nt, Artificial Sequence
  Synthetic
aaauacaaccuuuauuaca

SEQ ID NO: 202371 - RNA, 20 nt, Artificial Sequence
  Synthetic
aaaauacaaccuuuauuaca

SEQ ID NO: 202372 - RNA, 21 nt, Artificial Sequence
  Synthetic
uaaaauacaaccuuuauuaca

SEQ ID NO: 202373 - RNA, 22 nt, Artificial Sequence
  Synthetic
uuaaaauacaaccuuuauuaca

SEQ ID NO: 202374 - RNA, 23 nt, Artificial Sequence
  Synthetic
uuuaaaauacaaccuuuauuaca

SEQ ID NO: 202375 - RNA, 24 nt, Artificial Sequence
  Synthetic
guuuaaaauacaaccuuuauuaca

SEQ ID NO: 202376 - RNA, 18 nt, Artificial Sequence
  Synthetic
ugauaacauauacuuaca

SEQ ID NO: 202377 - RNA, 19 nt, Artificial Sequence
  Synthetic
gugauaacauauacuuaca

SEQ ID NO: 202378 - RNA, 20 nt, Artificial Sequence
  Synthetic
agugauaacauauacuuaca

SEQ ID NO: 202379 - RNA, 21 nt, Artificial Sequence
  Synthetic
aagugauaacauauacuuaca

SEQ ID NO: 202380 - RNA, 22 nt, Artificial Sequence
  Synthetic
aaagugauaacauauacuuaca

SEQ ID NO: 202381 - RNA, 23 nt, Artificial Sequence
  Synthetic
caaagugauaacauauacuuaca

SEQ ID NO: 202382 - RNA, 24 nt, Artificial Sequence
  Synthetic
ucaaagugauaacauauacuuaca

SEQ ID NO: 202383 - RNA, 18 nt, Artificial Sequence
  Synthetic
aguacucagguacuuaca

SEQ ID NO: 202384 - RNA, 19 nt, Artificial Sequence
  Synthetic
caguacucagguacuuaca

SEQ ID NO: 202385 - RNA, 20 nt, Artificial Sequence
  Synthetic
ucaguacucagguacuuaca

SEQ ID NO: 202386 - RNA, 21 nt, Artificial Sequence
  Synthetic
uucaguacucagguacuuaca

SEQ ID NO: 202387 - RNA, 22 nt, Artificial Sequence
  Synthetic
cuucaguacucagguacuuaca

SEQ ID NO: 202388 - RNA, 23 nt, Artificial Sequence
  Synthetic
gcuucaguacucagguacuuaca

SEQ ID NO: 202389 - RNA, 24 nt, Artificial Sequence
  Synthetic
ggcuucaguacucagguacuuaca

SEQ ID NO: 202390 - RNA, 18 nt, Artificial Sequence
  Synthetic
ggcacucauugccuuaca

SEQ ID NO: 202391 - RNA, 19 nt, Artificial Sequence
  Synthetic
aggcacucauugccuuaca

SEQ ID NO: 202392 - RNA, 20 nt, Artificial Sequence
  Synthetic
aaggcacucauugccuuaca

SEQ ID NO: 202393 - RNA, 21 nt, Artificial Sequence
  Synthetic
caaggcacucauugccuuaca

SEQ ID NO: 202394 - RNA, 22 nt, Artificial Sequence
  Synthetic
gcaaggcacucauugccuuaca

SEQ ID NO: 202395 - RNA, 23 nt, Artificial Sequence
  Synthetic
agcaaggcacucauugccuuaca

SEQ ID NO: 202396 - RNA, 24 nt, Artificial Sequence
  Synthetic
uagcaaggcacucauugccuuaca

SEQ ID NO: 202397 - RNA, 18 nt, Artificial Sequence
  Synthetic
aaagaauucuagcuuaca

SEQ ID NO: 202398 - RNA, 19 nt, Artificial Sequence
  Synthetic
uaaagaauucuagcuuaca

SEQ ID NO: 202399 - RNA, 20 nt, Artificial Sequence
  Synthetic
auaaagaauucuagcuuaca

SEQ ID NO: 202400 - RNA, 21 nt, Artificial Sequence
  Synthetic
uauaaagaauucuagcuuaca

SEQ ID NO: 202401 - RNA, 22 nt, Artificial Sequence
  Synthetic
cuauaaagaauucuagcuuaca

SEQ ID NO: 202402 - RNA, 23 nt, Artificial Sequence
  Synthetic
gcuauaaagaauucuagcuuaca

SEQ ID NO: 202403 - RNA, 24 nt, Artificial Sequence
  Synthetic
ggcuauaaagaauucuagcuuaca

SEQ ID NO: 202404 - RNA, 18 nt, Artificial Sequence
  Synthetic
acuaaagcagugcuuaca

SEQ ID NO: 202405 - RNA, 19 nt, Artificial Sequence
  Synthetic
aacuaaagcagugcuuaca

SEQ ID NO: 202406 - RNA, 20 nt, Artificial Sequence
  Synthetic
uaacuaaagcagugcuuaca

SEQ ID NO: 202407 - RNA, 21 nt, Artificial Sequence
  Synthetic
guaacuaaagcagugcuuaca

SEQ ID NO: 202408 - RNA, 22 nt, Artificial Sequence
  Synthetic
uguaacuaaagcagugcuuaca

SEQ ID NO: 202409 - RNA, 23 nt, Artificial Sequence
  Synthetic
auguaacuaaagcagugcuuaca

SEQ ID NO: 202410 - RNA, 24 nt, Artificial Sequence
  Synthetic
gauguaacuaaagcagugcuuaca

SEQ ID NO: 202411 - RNA, 18 nt, Artificial Sequence
  Synthetic
aagauaucauugcuuaca

SEQ ID NO: 202412 - RNA, 19 nt, Artificial Sequence
  Synthetic
uaagauaucauugcuuaca

SEQ ID NO: 202413 - RNA, 20 nt, Artificial Sequence
  Synthetic
uuaagauaucauugcuuaca

SEQ ID NO: 202414 - RNA, 21 nt, Artificial Sequence
  Synthetic
uuuaagauaucauugcuuaca

SEQ ID NO: 202415 - RNA, 22 nt, Artificial Sequence
  Synthetic
uuuuaagauaucauugcuuaca

SEQ ID NO: 202416 - RNA, 23 nt, Artificial Sequence
  Synthetic
auuuuaagauaucauugcuuaca

SEQ ID NO: 202417 - RNA, 24 nt, Artificial Sequence
  Synthetic
gauuuuaagauaucauugcuuaca

SEQ ID NO: 202418 - RNA, 18 nt, Artificial Sequence
  Synthetic
gagaaaauauugcuuaca

SEQ ID NO: 202419 - RNA, 19 nt, Artificial Sequence
  Synthetic
agagaaaauauugcuuaca

SEQ ID NO: 202420 - RNA, 20 nt, Artificial Sequence
  Synthetic
gagagaaaauauugcuuaca

SEQ ID NO: 202421 - RNA, 21 nt, Artificial Sequence
  Synthetic
agagagaaaauauugcuuaca

SEQ ID NO: 202422 - RNA, 22 nt, Artificial Sequence
  Synthetic
aagagagaaaauauugcuuaca

SEQ ID NO: 202423 - RNA, 23 nt, Artificial Sequence
  Synthetic
aaagagagaaaauauugcuuaca

SEQ ID NO: 202424 - RNA, 24 nt, Artificial Sequence
  Synthetic
aaaagagagaaaauauugcuuaca

SEQ ID NO: 202425 - RNA, 18 nt, Artificial Sequence
  Synthetic
ucuccaauguugcuuaca

SEQ ID NO: 202426 - RNA, 19 nt, Artificial Sequence
  Synthetic
uucuccaauguugcuuaca

SEQ ID NO: 202427 - RNA, 20 nt, Artificial Sequence
  Synthetic
auucuccaauguugcuuaca

SEQ ID NO: 202428 - RNA, 21 nt, Artificial Sequence
  Synthetic
uauucuccaauguugcuuaca

SEQ ID NO: 202429 - RNA, 22 nt, Artificial Sequence
  Synthetic
auauucuccaauguugcuuaca

SEQ ID NO: 202430 - RNA, 23 nt, Artificial Sequence
  Synthetic
aauauucuccaauguugcuuaca

SEQ ID NO: 202431 - RNA, 24 nt, Artificial Sequence
  Synthetic
aaauauucuccaauguugcuuaca

SEQ ID NO: 202432 - RNA, 18 nt, Artificial Sequence
  Synthetic
aucuacuugacucuuaca

SEQ ID NO: 202433 - RNA, 19 nt, Artificial Sequence
  Synthetic
aaucuacuugacucuuaca

SEQ ID NO: 202434 - RNA, 20 nt, Artificial Sequence
  Synthetic
gaaucuacuugacucuuaca

SEQ ID NO: 202435 - RNA, 21 nt, Artificial Sequence
  Synthetic
agaaucuacuugacucuuaca

SEQ ID NO: 202436 - RNA, 22 nt, Artificial Sequence
  Synthetic
uagaaucuacuugacucuuaca

SEQ ID NO: 202437 - RNA, 23 nt, Artificial Sequence
  Synthetic
uuagaaucuacuugacucuuaca

SEQ ID NO: 202438 - RNA, 24 nt, Artificial Sequence
  Synthetic
uuuagaaucuacuugacucuuaca

SEQ ID NO: 202439 - RNA, 18 nt, Artificial Sequence
  Synthetic
aaaacauucucucuuaca

SEQ ID NO: 202440 - RNA, 19 nt, Artificial Sequence
  Synthetic
caaaacauucucucuuaca

SEQ ID NO: 202441 - RNA, 20 nt, Artificial Sequence
  Synthetic
ccaaaacauucucucuuaca

SEQ ID NO: 202442 - RNA, 21 nt, Artificial Sequence
  Synthetic
gccaaaacauucucucuuaca

SEQ ID NO: 202443 - RNA, 22 nt, Artificial Sequence
  Synthetic
agccaaaacauucucucuuaca

SEQ ID NO: 202444 - RNA, 23 nt, Artificial Sequence
  Synthetic
uagccaaaacauucucucuuaca

SEQ ID NO: 202445 - RNA, 24 nt, Artificial Sequence
  Synthetic
auagccaaaacauucucucuuaca

SEQ ID NO: 202446 - RNA, 18 nt, Artificial Sequence
  Synthetic
cauauacugcuucuuaca

SEQ ID NO: 202447 - RNA, 19 nt, Artificial Sequence
  Synthetic
acauauacugcuucuuaca

SEQ ID NO: 202448 - RNA, 20 nt, Artificial Sequence
  Synthetic
gacauauacugcuucuuaca

SEQ ID NO: 202449 - RNA, 21 nt, Artificial Sequence
  Synthetic
agacauauacugcuucuuaca

SEQ ID NO: 202450 - RNA, 22 nt, Artificial Sequence
  Synthetic
uagacauauacugcuucuuaca

SEQ ID NO: 202451 - RNA, 23 nt, Artificial Sequence
  Synthetic
auagacauauacugcuucuuaca

SEQ ID NO: 202452 - RNA, 24 nt, Artificial Sequence
  Synthetic
uauagacauauacugcuucuuaca

SEQ ID NO: 202453 - RNA, 18 nt, Artificial Sequence
  Synthetic
uauucucugggaguuaca

SEQ ID NO: 202454 - RNA, 19 nt, Artificial Sequence
  Synthetic
uuauucucugggaguuaca

SEQ ID NO: 202455 - RNA, 20 nt, Artificial Sequence
  Synthetic
auuauucucugggaguuaca

SEQ ID NO: 202456 - RNA, 21 nt, Artificial Sequence
  Synthetic
uauuauucucugggaguuaca

SEQ ID NO: 202457 - RNA, 22 nt, Artificial Sequence
  Synthetic
auauuauucucugggaguuaca

SEQ ID NO: 202458 - RNA, 23 nt, Artificial Sequence
  Synthetic
uauauuauucucugggaguuaca

SEQ ID NO: 202459 - RNA, 24 nt, Artificial Sequence
  Synthetic
auauauuauucucugggaguuaca

SEQ ID NO: 202460 - RNA, 18 nt, Artificial Sequence
  Synthetic
uuaguggauauaguuaca

SEQ ID NO: 202461 - RNA, 19 nt, Artificial Sequence
  Synthetic
uuuaguggauauaguuaca

SEQ ID NO: 202462 - RNA, 20 nt, Artificial Sequence
  Synthetic
cuuuaguggauauaguuaca

SEQ ID NO: 202463 - RNA, 21 nt, Artificial Sequence
  Synthetic
acuuuaguggauauaguuaca

SEQ ID NO: 202464 - RNA, 22 nt, Artificial Sequence
  Synthetic
gacuuuaguggauauaguuaca

SEQ ID NO: 202465 - RNA, 23 nt, Artificial Sequence
  Synthetic
ggacuuuaguggauauaguuaca

SEQ ID NO: 202466 - RNA, 24 nt, Artificial Sequence
  Synthetic
aggacuuuaguggauauaguuaca

SEQ ID NO: 202467 - RNA, 18 nt, Artificial Sequence
  Synthetic
caaagccaacuaguuaca

SEQ ID NO: 202468 - RNA, 19 nt, Artificial Sequence
  Synthetic
gcaaagccaacuaguuaca

SEQ ID NO: 202469 - RNA, 20 nt, Artificial Sequence
  Synthetic
agcaaagccaacuaguuaca

SEQ ID NO: 202470 - RNA, 21 nt, Artificial Sequence
  Synthetic
gagcaaagccaacuaguuaca

SEQ ID NO: 202471 - RNA, 22 nt, Artificial Sequence
  Synthetic
ggagcaaagccaacuaguuaca

SEQ ID NO: 202472 - RNA, 23 nt, Artificial Sequence
  Synthetic
uggagcaaagccaacuaguuaca

SEQ ID NO: 202473 - RNA, 24 nt, Artificial Sequence
  Synthetic
auggagcaaagccaacuaguuaca

SEQ ID NO: 202474 - RNA, 18 nt, Artificial Sequence
  Synthetic
uggaaccaucacguuaca

SEQ ID NO: 202475 - RNA, 19 nt, Artificial Sequence
  Synthetic
auggaaccaucacguuaca

SEQ ID NO: 202476 - RNA, 20 nt, Artificial Sequence
  Synthetic
cauggaaccaucacguuaca

SEQ ID NO: 202477 - RNA, 21 nt, Artificial Sequence
  Synthetic
ucauggaaccaucacguuaca

SEQ ID NO: 202478 - RNA, 22 nt, Artificial Sequence
  Synthetic
gucauggaaccaucacguuaca

SEQ ID NO: 202479 - RNA, 23 nt, Artificial Sequence
  Synthetic
ugucauggaaccaucacguuaca

SEQ ID NO: 202480 - RNA, 24 nt, Artificial Sequence
  Synthetic
gugucauggaaccaucacguuaca

SEQ ID NO: 202481 - RNA, 18 nt, Artificial Sequence
  Synthetic
cauuuguagaagguuaca

SEQ ID NO: 202482 - RNA, 19 nt, Artificial Sequence
  Synthetic
gcauuuguagaagguuaca

SEQ ID NO: 202483 - RNA, 20 nt, Artificial Sequence
  Synthetic
agcauuuguagaagguuaca

SEQ ID NO: 202484 - RNA, 21 nt, Artificial Sequence
  Synthetic
aagcauuuguagaagguuaca

SEQ ID NO: 202485 - RNA, 22 nt, Artificial Sequence
  Synthetic
aaagcauuuguagaagguuaca

SEQ ID NO: 202486 - RNA, 23 nt, Artificial Sequence
  Synthetic
aaaagcauuuguagaagguuaca

SEQ ID NO: 202487 - RNA, 24 nt, Artificial Sequence
  Synthetic
gaaaagcauuuguagaagguuaca

SEQ ID NO: 202488 - RNA, 18 nt, Artificial Sequence
  Synthetic
caggaguuggagguuaca

SEQ ID NO: 202489 - RNA, 19 nt, Artificial Sequence
  Synthetic
ccaggaguuggagguuaca

SEQ ID NO: 202490 - RNA, 20 nt, Artificial Sequence
  Synthetic
cccaggaguuggagguuaca

SEQ ID NO: 202491 - RNA, 21 nt, Artificial Sequence
  Synthetic
gcccaggaguuggagguuaca

SEQ ID NO: 202492 - RNA, 22 nt, Artificial Sequence
  Synthetic
agcccaggaguuggagguuaca

SEQ ID NO: 202493 - RNA, 23 nt, Artificial Sequence
  Synthetic
gagcccaggaguuggagguuaca

SEQ ID NO: 202494 - RNA, 24 nt, Artificial Sequence
  Synthetic
ugagcccaggaguuggagguuaca

SEQ ID NO: 202495 - RNA, 18 nt, Artificial Sequence
  Synthetic
caagcugaaaauguuaca

SEQ ID NO: 202496 - RNA, 19 nt, Artificial Sequence
  Synthetic
ucaagcugaaaauguuaca

SEQ ID NO: 202497 - RNA, 20 nt, Artificial Sequence
  Synthetic
uucaagcugaaaauguuaca

SEQ ID NO: 202498 - RNA, 21 nt, Artificial Sequence
  Synthetic
guucaagcugaaaauguuaca

SEQ ID NO: 202499 - RNA, 22 nt, Artificial Sequence
  Synthetic
gguucaagcugaaaauguuaca

SEQ ID NO: 202500 - RNA, 23 nt, Artificial Sequence
  Synthetic
cgguucaagcugaaaauguuaca

SEQ ID NO: 202501 - RNA, 24 nt, Artificial Sequence
  Synthetic
ccgguucaagcugaaaauguuaca

SEQ ID NO: 202502 - RNA, 18 nt, Artificial Sequence
  Synthetic
aaagaggauauuguuaca

SEQ ID NO: 202503 - RNA, 19 nt, Artificial Sequence
  Synthetic
aaaagaggauauuguuaca

SEQ ID NO: 202504 - RNA, 20 nt, Artificial Sequence
  Synthetic
uaaaagaggauauuguuaca

SEQ ID NO: 202505 - RNA, 21 nt, Artificial Sequence
  Synthetic
uuaaaagaggauauuguuaca

SEQ ID NO: 202506 - RNA, 22 nt, Artificial Sequence
  Synthetic
guuaaaagaggauauuguuaca

SEQ ID NO: 202507 - RNA, 23 nt, Artificial Sequence
  Synthetic
gguuaaaagaggauauuguuaca

SEQ ID NO: 202508 - RNA, 24 nt, Artificial Sequence
  Synthetic
ugguuaaaagaggauauuguuaca

SEQ ID NO: 202509 - RNA, 18 nt, Artificial Sequence
  Synthetic
acauaauuucuuguuaca

SEQ ID NO: 202510 - RNA, 19 nt, Artificial Sequence
  Synthetic
aacauaauuucuuguuaca

SEQ ID NO: 202511 - RNA, 20 nt, Artificial Sequence
  Synthetic
uaacauaauuucuuguuaca

SEQ ID NO: 202512 - RNA, 21 nt, Artificial Sequence
  Synthetic
guaacauaauuucuuguuaca

SEQ ID NO: 202513 - RNA, 22 nt, Artificial Sequence
  Synthetic
gguaacauaauuucuuguuaca

SEQ ID NO: 202514 - RNA, 23 nt, Artificial Sequence
  Synthetic
ggguaacauaauuucuuguuaca

SEQ ID NO: 202515 - RNA, 24 nt, Artificial Sequence
  Synthetic
uggguaacauaauuucuuguuaca

SEQ ID NO: 202516 - RNA, 18 nt, Artificial Sequence
  Synthetic
gauuaauacaaauuuaca

SEQ ID NO: 202517 - RNA, 19 nt, Artificial Sequence
  Synthetic
ugauuaauacaaauuuaca

SEQ ID NO: 202518 - RNA, 20 nt, Artificial Sequence
  Synthetic
augauuaauacaaauuuaca

SEQ ID NO: 202519 - RNA, 21 nt, Artificial Sequence
  Synthetic
uaugauuaauacaaauuuaca

SEQ ID NO: 202520 - RNA, 22 nt, Artificial Sequence
  Synthetic
auaugauuaauacaaauuuaca

SEQ ID NO: 202521 - RNA, 23 nt, Artificial Sequence
  Synthetic
aauaugauuaauacaaauuuaca

SEQ ID NO: 202522 - RNA, 24 nt, Artificial Sequence
  Synthetic
gaauaugauuaauacaaauuuaca

SEQ ID NO: 202523 - RNA, 18 nt, Artificial Sequence
  Synthetic
uuaggucuucaauuuaca

SEQ ID NO: 202524 - RNA, 19 nt, Artificial Sequence
  Synthetic
uuuaggucuucaauuuaca

SEQ ID NO: 202525 - RNA, 20 nt, Artificial Sequence
  Synthetic
cuuuaggucuucaauuuaca

SEQ ID NO: 202526 - RNA, 21 nt, Artificial Sequence
  Synthetic
ccuuuaggucuucaauuuaca

SEQ ID NO: 202527 - RNA, 22 nt, Artificial Sequence
  Synthetic
uccuuuaggucuucaauuuaca

SEQ ID NO: 202528 - RNA, 23 nt, Artificial Sequence
  Synthetic
auccuuuaggucuucaauuuaca

SEQ ID NO: 202529 - RNA, 24 nt, Artificial Sequence
  Synthetic
uauccuuuaggucuucaauuuaca

SEQ ID NO: 202530 - RNA, 18 nt, Artificial Sequence
  Synthetic
gcaaucaaagaauuuaca

SEQ ID NO: 202531 - RNA, 19 nt, Artificial Sequence
  Synthetic
ugcaaucaaagaauuuaca

SEQ ID NO: 202532 - RNA, 20 nt, Artificial Sequence
  Synthetic
augcaaucaaagaauuuaca

SEQ ID NO: 202533 - RNA, 21 nt, Artificial Sequence
  Synthetic
gaugcaaucaaagaauuuaca

SEQ ID NO: 202534 - RNA, 22 nt, Artificial Sequence
  Synthetic
ugaugcaaucaaagaauuuaca

SEQ ID NO: 202535 - RNA, 23 nt, Artificial Sequence
  Synthetic
augaugcaaucaaagaauuuaca

SEQ ID NO: 202536 - RNA, 24 nt, Artificial Sequence
  Synthetic
gaugaugcaaucaaagaauuuaca

SEQ ID NO: 202537 - RNA, 18 nt, Artificial Sequence
  Synthetic
ugccucaaagaauuuaca

SEQ ID NO: 202538 - RNA, 19 nt, Artificial Sequence
  Synthetic
augccucaaagaauuuaca

SEQ ID NO: 202539 - RNA, 20 nt, Artificial Sequence
  Synthetic
gaugccucaaagaauuuaca

SEQ ID NO: 202540 - RNA, 21 nt, Artificial Sequence
  Synthetic
ugaugccucaaagaauuuaca

SEQ ID NO: 202541 - RNA, 22 nt, Artificial Sequence
  Synthetic
augaugccucaaagaauuuaca

SEQ ID NO: 202542 - RNA, 23 nt, Artificial Sequence
  Synthetic
gaugaugccucaaagaauuuaca

SEQ ID NO: 202543 - RNA, 24 nt, Artificial Sequence
  Synthetic
ugaugaugccucaaagaauuuaca

SEQ ID NO: 202544 - RNA, 18 nt, Artificial Sequence
  Synthetic
gaaaauggguaauuuaca

SEQ ID NO: 202545 - RNA, 19 nt, Artificial Sequence
  Synthetic
ugaaaauggguaauuuaca

SEQ ID NO: 202546 - RNA, 20 nt, Artificial Sequence
  Synthetic
cugaaaauggguaauuuaca

SEQ ID NO: 202547 - RNA, 21 nt, Artificial Sequence
  Synthetic
ccugaaaauggguaauuuaca

SEQ ID NO: 202548 - RNA, 22 nt, Artificial Sequence
  Synthetic
accugaaaauggguaauuuaca

SEQ ID NO: 202549 - RNA, 23 nt, Artificial Sequence
  Synthetic
uaccugaaaauggguaauuuaca

SEQ ID NO: 202550 - RNA, 24 nt, Artificial Sequence
  Synthetic
auaccugaaaauggguaauuuaca

SEQ ID NO: 202551 - RNA, 18 nt, Artificial Sequence
  Synthetic
ccaauaauuccauuuaca

SEQ ID NO: 202552 - RNA, 19 nt, Artificial Sequence
  Synthetic
accaauaauuccauuuaca

SEQ ID NO: 202553 - RNA, 20 nt, Artificial Sequence
  Synthetic
gaccaauaauuccauuuaca

SEQ ID NO: 202554 - RNA, 21 nt, Artificial Sequence
  Synthetic
agaccaauaauuccauuuaca

SEQ ID NO: 202555 - RNA, 22 nt, Artificial Sequence
  Synthetic
gagaccaauaauuccauuuaca

SEQ ID NO: 202556 - RNA, 23 nt, Artificial Sequence
  Synthetic
agagaccaauaauuccauuuaca

SEQ ID NO: 202557 - RNA, 24 nt, Artificial Sequence
  Synthetic
uagagaccaauaauuccauuuaca

SEQ ID NO: 202558 - RNA, 18 nt, Artificial Sequence
  Synthetic
uguaccugagcauuuaca

SEQ ID NO: 202559 - RNA, 19 nt, Artificial Sequence
  Synthetic
cuguaccugagcauuuaca

SEQ ID NO: 202560 - RNA, 20 nt, Artificial Sequence
  Synthetic
gcuguaccugagcauuuaca

SEQ ID NO: 202561 - RNA, 21 nt, Artificial Sequence
  Synthetic
ggcuguaccugagcauuuaca

SEQ ID NO: 202562 - RNA, 22 nt, Artificial Sequence
  Synthetic
uggcuguaccugagcauuuaca

SEQ ID NO: 202563 - RNA, 23 nt, Artificial Sequence
  Synthetic
uuggcuguaccugagcauuuaca

SEQ ID NO: 202564 - RNA, 24 nt, Artificial Sequence
  Synthetic
auuggcuguaccugagcauuuaca

SEQ ID NO: 202565 - RNA, 18 nt, Artificial Sequence
  Synthetic
gaugcucauugauuuaca

SEQ ID NO: 202566 - RNA, 19 nt, Artificial Sequence
  Synthetic
agaugcucauugauuuaca

SEQ ID NO: 202567 - RNA, 20 nt, Artificial Sequence
  Synthetic
cagaugcucauugauuuaca

SEQ ID NO: 202568 - RNA, 21 nt, Artificial Sequence
  Synthetic
acagaugcucauugauuuaca

SEQ ID NO: 202569 - RNA, 22 nt, Artificial Sequence
  Synthetic
uacagaugcucauugauuuaca

SEQ ID NO: 202570 - RNA, 23 nt, Artificial Sequence
  Synthetic
auacagaugcucauugauuuaca

SEQ ID NO: 202571 - RNA, 24 nt, Artificial Sequence
  Synthetic
uauacagaugcucauugauuuaca

SEQ ID NO: 202572 - RNA, 18 nt, Artificial Sequence
  Synthetic
uauaaucgccacuuuaca

SEQ ID NO: 202573 - RNA, 19 nt, Artificial Sequence
  Synthetic
uuauaaucgccacuuuaca

SEQ ID NO: 202574 - RNA, 20 nt, Artificial Sequence
  Synthetic
auuauaaucgccacuuuaca

SEQ ID NO: 202575 - RNA, 21 nt, Artificial Sequence
  Synthetic
uauuauaaucgccacuuuaca

SEQ ID NO: 202576 - RNA, 22 nt, Artificial Sequence
  Synthetic
cuauuauaaucgccacuuuaca

SEQ ID NO: 202577 - RNA, 23 nt, Artificial Sequence
  Synthetic
acuauuauaaucgccacuuuaca

SEQ ID NO: 202578 - RNA, 24 nt, Artificial Sequence
  Synthetic
uacuauuauaaucgccacuuuaca

SEQ ID NO: 202579 - RNA, 18 nt, Artificial Sequence
  Synthetic
uguagaaaacaguuuaca

SEQ ID NO: 202580 - RNA, 19 nt, Artificial Sequence
  Synthetic
auguagaaaacaguuuaca

SEQ ID NO: 202581 - RNA, 20 nt, Artificial Sequence
  Synthetic
uauguagaaaacaguuuaca

SEQ ID NO: 202582 - RNA, 21 nt, Artificial Sequence
  Synthetic
auauguagaaaacaguuuaca

SEQ ID NO: 202583 - RNA, 22 nt, Artificial Sequence
  Synthetic
aauauguagaaaacaguuuaca

SEQ ID NO: 202584 - RNA, 23 nt, Artificial Sequence
  Synthetic
gaauauguagaaaacaguuuaca

SEQ ID NO: 202585 - RNA, 24 nt, Artificial Sequence
  Synthetic
agaauauguagaaaacaguuuaca

SEQ ID NO: 202586 - RNA, 18 nt, Artificial Sequence
  Synthetic
aaaaucaugucguuuaca

SEQ ID NO: 202587 - RNA, 19 nt, Artificial Sequence
  Synthetic
aaaaaucaugucguuuaca

SEQ ID NO: 202588 - RNA, 20 nt, Artificial Sequence
  Synthetic
aaaaaaucaugucguuuaca

SEQ ID NO: 202589 - RNA, 21 nt, Artificial Sequence
  Synthetic
aaaaaaaucaugucguuuaca

SEQ ID NO: 202590 - RNA, 22 nt, Artificial Sequence
  Synthetic
aaaaaaaaucaugucguuuaca

SEQ ID NO: 202591 - RNA, 23 nt, Artificial Sequence
  Synthetic
aaaaaaaaaucaugucguuuaca

SEQ ID NO: 202592 - RNA, 24 nt, Artificial Sequence
  Synthetic
aaaaaaaaaaucaugucguuuaca

SEQ ID NO: 202593 - RNA, 18 nt, Artificial Sequence
  Synthetic
cugaaccuggauuuuaca

SEQ ID NO: 202594 - RNA, 19 nt, Artificial Sequence
  Synthetic
gcugaaccuggauuuuaca

SEQ ID NO: 202595 - RNA, 20 nt, Artificial Sequence
  Synthetic
ugcugaaccuggauuuuaca

SEQ ID NO: 202596 - RNA, 21 nt, Artificial Sequence
  Synthetic
uugcugaaccuggauuuuaca

SEQ ID NO: 202597 - RNA, 22 nt, Artificial Sequence
  Synthetic
uuugcugaaccuggauuuuaca

SEQ ID NO: 202598 - RNA, 23 nt, Artificial Sequence
  Synthetic
cuuugcugaaccuggauuuuaca

SEQ ID NO: 202599 - RNA, 24 nt, Artificial Sequence
  Synthetic
ucuuugcugaaccuggauuuuaca

SEQ ID NO: 202600 - RNA, 18 nt, Artificial Sequence
  Synthetic
ucuuauauugauuuuaca

SEQ ID NO: 202601 - RNA, 19 nt, Artificial Sequence
  Synthetic
aucuuauauugauuuuaca

SEQ ID NO: 202602 - RNA, 20 nt, Artificial Sequence
  Synthetic
aaucuuauauugauuuuaca

SEQ ID NO: 202603 - RNA, 21 nt, Artificial Sequence
  Synthetic
aaaucuuauauugauuuuaca

SEQ ID NO: 202604 - RNA, 22 nt, Artificial Sequence
  Synthetic
aaaaucuuauauugauuuuaca

SEQ ID NO: 202605 - RNA, 23 nt, Artificial Sequence
  Synthetic
aaaaaucuuauauugauuuuaca

SEQ ID NO: 202606 - RNA, 24 nt, Artificial Sequence
  Synthetic
uaaaaaucuuauauugauuuuaca

SEQ ID NO: 202607 - RNA, 18 nt, Artificial Sequence
  Synthetic
uuuauuuaauauuuuaca

SEQ ID NO: 202608 - RNA, 19 nt, Artificial Sequence
  Synthetic
guuuauuuaauauuuuaca

SEQ ID NO: 202609 - RNA, 20 nt, Artificial Sequence
  Synthetic
uguuuauuuaauauuuuaca

SEQ ID NO: 202610 - RNA, 21 nt, Artificial Sequence
  Synthetic
guguuuauuuaauauuuuaca

SEQ ID NO: 202611 - RNA, 22 nt, Artificial Sequence
  Synthetic
aguguuuauuuaauauuuuaca

SEQ ID NO: 202612 - RNA, 23 nt, Artificial Sequence
  Synthetic
gaguguuuauuuaauauuuuaca

SEQ ID NO: 202613 - RNA, 24 nt, Artificial Sequence
  Synthetic
ugaguguuuauuuaauauuuuaca

SEQ ID NO: 202614 - RNA, 18 nt, Artificial Sequence
  Synthetic
cuguccagaccuuuuaca

SEQ ID NO: 202615 - RNA, 19 nt, Artificial Sequence
  Synthetic
ucuguccagaccuuuuaca

SEQ ID NO: 202616 - RNA, 20 nt, Artificial Sequence
  Synthetic
gucuguccagaccuuuuaca

SEQ ID NO: 202617 - RNA, 21 nt, Artificial Sequence
  Synthetic
ggucuguccagaccuuuuaca

SEQ ID NO: 202618 - RNA, 22 nt, Artificial Sequence
  Synthetic
aggucuguccagaccuuuuaca

SEQ ID NO: 202619 - RNA, 23 nt, Artificial Sequence
  Synthetic
caggucuguccagaccuuuuaca

SEQ ID NO: 202620 - RNA, 24 nt, Artificial Sequence
  Synthetic
gcaggucuguccagaccuuuuaca

SEQ ID NO: 202621 - RNA, 18 nt, Artificial Sequence
  Synthetic
auuuuuuugccuuuuaca

SEQ ID NO: 202622 - RNA, 19 nt, Artificial Sequence
  Synthetic
uauuuuuuugccuuuuaca

SEQ ID NO: 202623 - RNA, 20 nt, Artificial Sequence
  Synthetic
uuauuuuuuugccuuuuaca

SEQ ID NO: 202624 - RNA, 21 nt, Artificial Sequence
  Synthetic
uuuauuuuuuugccuuuuaca

SEQ ID NO: 202625 - RNA, 22 nt, Artificial Sequence
  Synthetic
cuuuauuuuuuugccuuuuaca

SEQ ID NO: 202626 - RNA, 23 nt, Artificial Sequence
  Synthetic
acuuuauuuuuuugccuuuuaca

SEQ ID NO: 202627 - RNA, 24 nt, Artificial Sequence
  Synthetic
aacuuuauuuuuuugccuuuuaca

SEQ ID NO: 202628 - RNA, 18 nt, Artificial Sequence
  Synthetic
uuucuccaggcuuuuaca

SEQ ID NO: 202629 - RNA, 19 nt, Artificial Sequence
  Synthetic
uuuucuccaggcuuuuaca

SEQ ID NO: 202630 - RNA, 20 nt, Artificial Sequence
  Synthetic
auuuucuccaggcuuuuaca

SEQ ID NO: 202631 - RNA, 21 nt, Artificial Sequence
  Synthetic
aauuuucuccaggcuuuuaca

SEQ ID NO: 202632 - RNA, 22 nt, Artificial Sequence
  Synthetic
aaauuuucuccaggcuuuuaca

SEQ ID NO: 202633 - RNA, 23 nt, Artificial Sequence
  Synthetic
uaaauuuucuccaggcuuuuaca

SEQ ID NO: 202634 - RNA, 24 nt, Artificial Sequence
  Synthetic
uuaaauuuucuccaggcuuuuaca

SEQ ID NO: 202635 - RNA, 18 nt, Artificial Sequence
  Synthetic
guuguagcugcuuuuaca

SEQ ID NO: 202636 - RNA, 19 nt, Artificial Sequence
  Synthetic
uguuguagcugcuuuuaca

SEQ ID NO: 202637 - RNA, 20 nt, Artificial Sequence
  Synthetic
cuguuguagcugcuuuuaca

SEQ ID NO: 202638 - RNA, 21 nt, Artificial Sequence
  Synthetic
ucuguuguagcugcuuuuaca

SEQ ID NO: 202639 - RNA, 22 nt, Artificial Sequence
  Synthetic
uucuguuguagcugcuuuuaca

SEQ ID NO: 202640 - RNA, 23 nt, Artificial Sequence
  Synthetic
uuucuguuguagcugcuuuuaca

SEQ ID NO: 202641 - RNA, 24 nt, Artificial Sequence
  Synthetic
auuucuguuguagcugcuuuuaca

SEQ ID NO: 202642 - RNA, 18 nt, Artificial Sequence
  Synthetic
uccccucuuucuuuuaca

SEQ ID NO: 202643 - RNA, 19 nt, Artificial Sequence
  Synthetic
uuccccucuuucuuuuaca

SEQ ID NO: 202644 - RNA, 20 nt, Artificial Sequence
  Synthetic
uuuccccucuuucuuuuaca

SEQ ID NO: 202645 - RNA, 21 nt, Artificial Sequence
  Synthetic
auuuccccucuuucuuuuaca

SEQ ID NO: 202646 - RNA, 22 nt, Artificial Sequence
  Synthetic
uauuuccccucuuucuuuuaca

SEQ ID NO: 202647 - RNA, 23 nt, Artificial Sequence
  Synthetic
auauuuccccucuuucuuuuaca

SEQ ID NO: 202648 - RNA, 24 nt, Artificial Sequence
  Synthetic
cauauuuccccucuuucuuuuaca

SEQ ID NO: 202649 - RNA, 18 nt, Artificial Sequence
  Synthetic
ccauugaaagguuuuaca

SEQ ID NO: 202650 - RNA, 19 nt, Artificial Sequence
  Synthetic
accauugaaagguuuuaca

SEQ ID NO: 202651 - RNA, 20 nt, Artificial Sequence
  Synthetic
aaccauugaaagguuuuaca

SEQ ID NO: 202652 - RNA, 21 nt, Artificial Sequence
  Synthetic
aaaccauugaaagguuuuaca

SEQ ID NO: 202653 - RNA, 22 nt, Artificial Sequence
  Synthetic
caaaccauugaaagguuuuaca

SEQ ID NO: 202654 - RNA, 23 nt, Artificial Sequence
  Synthetic
gcaaaccauugaaagguuuuaca

SEQ ID NO: 202655 - RNA, 24 nt, Artificial Sequence
  Synthetic
agcaaaccauugaaagguuuuaca

SEQ ID NO: 202656 - RNA, 18 nt, Artificial Sequence
  Synthetic
auaaaauaauguuuuaca

SEQ ID NO: 202657 - RNA, 19 nt, Artificial Sequence
  Synthetic
gauaaaauaauguuuuaca

SEQ ID NO: 202658 - RNA, 20 nt, Artificial Sequence
  Synthetic
agauaaaauaauguuuuaca

SEQ ID NO: 202659 - RNA, 21 nt, Artificial Sequence
  Synthetic
gagauaaaauaauguuuuaca

SEQ ID NO: 202660 - RNA, 22 nt, Artificial Sequence
  Synthetic
ugagauaaaauaauguuuuaca

SEQ ID NO: 202661 - RNA, 23 nt, Artificial Sequence
  Synthetic
uugagauaaaauaauguuuuaca

SEQ ID NO: 202662 - RNA, 24 nt, Artificial Sequence
  Synthetic
auugagauaaaauaauguuuuaca

SEQ ID NO: 202663 - RNA, 18 nt, Artificial Sequence
  Synthetic
aauauguuguguuuuaca

SEQ ID NO: 202664 - RNA, 19 nt, Artificial Sequence
  Synthetic
uaauauguuguguuuuaca

SEQ ID NO: 202665 - RNA, 20 nt, Artificial Sequence
  Synthetic
uuaauauguuguguuuuaca

SEQ ID NO: 202666 - RNA, 21 nt, Artificial Sequence
  Synthetic
uuuaauauguuguguuuuaca

SEQ ID NO: 202667 - RNA, 22 nt, Artificial Sequence
  Synthetic
uuuuaauauguuguguuuuaca

SEQ ID NO: 202668 - RNA, 23 nt, Artificial Sequence
  Synthetic
guuuuaauauguuguguuuuaca

SEQ ID NO: 202669 - RNA, 24 nt, Artificial Sequence
  Synthetic
uguuuuaauauguuguguuuuaca

SEQ ID NO: 202670 - RNA, 18 nt, Artificial Sequence
  Synthetic
aauuuuacuuguuuuaca

SEQ ID NO: 202671 - RNA, 19 nt, Artificial Sequence
  Synthetic
uaauuuuacuuguuuuaca

SEQ ID NO: 202672 - RNA, 20 nt, Artificial Sequence
  Synthetic
auaauuuuacuuguuuuaca

SEQ ID NO: 202673 - RNA, 21 nt, Artificial Sequence
  Synthetic
uauaauuuuacuuguuuuaca

SEQ ID NO: 202674 - RNA, 22 nt, Artificial Sequence
  Synthetic
auauaauuuuacuuguuuuaca

SEQ ID NO: 202675 - RNA, 23 nt, Artificial Sequence
  Synthetic
cauauaauuuuacuuguuuuaca

SEQ ID NO: 202676 - RNA, 24 nt, Artificial Sequence
  Synthetic
ucauauaauuuuacuuguuuuaca

SEQ ID NO: 202677 - RNA, 18 nt, Artificial Sequence
  Synthetic
uugaaaauauuuuuuaca

SEQ ID NO: 202678 - RNA, 19 nt, Artificial Sequence
  Synthetic
uuugaaaauauuuuuuaca

SEQ ID NO: 202679 - RNA, 20 nt, Artificial Sequence
  Synthetic
cuuugaaaauauuuuuuaca

SEQ ID NO: 202680 - RNA, 21 nt, Artificial Sequence
  Synthetic
ucuuugaaaauauuuuuuaca

SEQ ID NO: 202681 - RNA, 22 nt, Artificial Sequence
  Synthetic
aucuuugaaaauauuuuuuaca

SEQ ID NO: 202682 - RNA, 23 nt, Artificial Sequence
  Synthetic
aaucuuugaaaauauuuuuuaca

SEQ ID NO: 202683 - RNA, 24 nt, Artificial Sequence
  Synthetic
uaaucuuugaaaauauuuuuuaca

SEQ ID NO: 202684 - RNA, 18 nt, Artificial Sequence
  Synthetic
aaaggagcacaaaaacca

SEQ ID NO: 202685 - RNA, 19 nt, Artificial Sequence
  Synthetic
aaaaggagcacaaaaacca

SEQ ID NO: 202686 - RNA, 20 nt, Artificial Sequence
  Synthetic
gaaaaggagcacaaaaacca

SEQ ID NO: 202687 - RNA, 21 nt, Artificial Sequence
  Synthetic
ugaaaaggagcacaaaaacca

SEQ ID NO: 202688 - RNA, 22 nt, Artificial Sequence
  Synthetic
cugaaaaggagcacaaaaacca

SEQ ID NO: 202689 - RNA, 23 nt, Artificial Sequence
  Synthetic
ccugaaaaggagcacaaaaacca

SEQ ID NO: 202690 - RNA, 24 nt, Artificial Sequence
  Synthetic
cccugaaaaggagcacaaaaacca

SEQ ID NO: 202691 - RNA, 18 nt, Artificial Sequence
  Synthetic
aacccaaacagaaaacca

SEQ ID NO: 202692 - RNA, 19 nt, Artificial Sequence
  Synthetic
aaacccaaacagaaaacca

SEQ ID NO: 202693 - RNA, 20 nt, Artificial Sequence
  Synthetic
caaacccaaacagaaaacca

SEQ ID NO: 202694 - RNA, 21 nt, Artificial Sequence
  Synthetic
ucaaacccaaacagaaaacca

SEQ ID NO: 202695 - RNA, 22 nt, Artificial Sequence
  Synthetic
gucaaacccaaacagaaaacca

SEQ ID NO: 202696 - RNA, 23 nt, Artificial Sequence
  Synthetic
ggucaaacccaaacagaaaacca

SEQ ID NO: 202697 - RNA, 24 nt, Artificial Sequence
  Synthetic
uggucaaacccaaacagaaaacca

SEQ ID NO: 202698 - RNA, 18 nt, Artificial Sequence
  Synthetic
ccagccaagagaaaacca

SEQ ID NO: 202699 - RNA, 19 nt, Artificial Sequence
  Synthetic
gccagccaagagaaaacca

SEQ ID NO: 202700 - RNA, 20 nt, Artificial Sequence
  Synthetic
ugccagccaagagaaaacca

SEQ ID NO: 202701 - RNA, 21 nt, Artificial Sequence
  Synthetic
uugccagccaagagaaaacca

SEQ ID NO: 202702 - RNA, 22 nt, Artificial Sequence
  Synthetic
cuugccagccaagagaaaacca

SEQ ID NO: 202703 - RNA, 23 nt, Artificial Sequence
  Synthetic
gcuugccagccaagagaaaacca

SEQ ID NO: 202704 - RNA, 24 nt, Artificial Sequence
  Synthetic
ugcuugccagccaagagaaaacca

SEQ ID NO: 202705 - RNA, 18 nt, Artificial Sequence
  Synthetic
uagcauaauuuaaaacca

SEQ ID NO: 202706 - RNA, 19 nt, Artificial Sequence
  Synthetic
auagcauaauuuaaaacca

SEQ ID NO: 202707 - RNA, 20 nt, Artificial Sequence
  Synthetic
aauagcauaauuuaaaacca

SEQ ID NO: 202708 - RNA, 21 nt, Artificial Sequence
  Synthetic
caauagcauaauuuaaaacca

SEQ ID NO: 202709 - RNA, 22 nt, Artificial Sequence
  Synthetic
ucaauagcauaauuuaaaacca

SEQ ID NO: 202710 - RNA, 23 nt, Artificial Sequence
  Synthetic
uucaauagcauaauuuaaaacca

SEQ ID NO: 202711 - RNA, 24 nt, Artificial Sequence
  Synthetic
uuucaauagcauaauuuaaaacca

SEQ ID NO: 202712 - RNA, 18 nt, Artificial Sequence
  Synthetic
gcagguaauagcaaacca

SEQ ID NO: 202713 - RNA, 19 nt, Artificial Sequence
  Synthetic
ugcagguaauagcaaacca

SEQ ID NO: 202714 - RNA, 20 nt, Artificial Sequence
  Synthetic
uugcagguaauagcaaacca

SEQ ID NO: 202715 - RNA, 21 nt, Artificial Sequence
  Synthetic
cuugcagguaauagcaaacca

SEQ ID NO: 202716 - RNA, 22 nt, Artificial Sequence
  Synthetic
ucuugcagguaauagcaaacca

SEQ ID NO: 202717 - RNA, 23 nt, Artificial Sequence
  Synthetic
gucuugcagguaauagcaaacca

SEQ ID NO: 202718 - RNA, 24 nt, Artificial Sequence
  Synthetic
ugucuugcagguaauagcaaacca

SEQ ID NO: 202719 - RNA, 18 nt, Artificial Sequence
  Synthetic
cccuagugcuucaaacca

SEQ ID NO: 202720 - RNA, 19 nt, Artificial Sequence
  Synthetic
ccccuagugcuucaaacca

SEQ ID NO: 202721 - RNA, 20 nt, Artificial Sequence
  Synthetic
accccuagugcuucaaacca

SEQ ID NO: 202722 - RNA, 21 nt, Artificial Sequence
  Synthetic
gaccccuagugcuucaaacca

SEQ ID NO: 202723 - RNA, 22 nt, Artificial Sequence
  Synthetic
ugaccccuagugcuucaaacca

SEQ ID NO: 202724 - RNA, 23 nt, Artificial Sequence
  Synthetic
cugaccccuagugcuucaaacca

SEQ ID NO: 202725 - RNA, 24 nt, Artificial Sequence
  Synthetic
gcugaccccuagugcuucaaacca

SEQ ID NO: 202726 - RNA, 18 nt, Artificial Sequence
  Synthetic
aagcagcaguucaaacca

SEQ ID NO: 202727 - RNA, 19 nt, Artificial Sequence
  Synthetic
caagcagcaguucaaacca

SEQ ID NO: 202728 - RNA, 20 nt, Artificial Sequence
  Synthetic
ccaagcagcaguucaaacca

SEQ ID NO: 202729 - RNA, 21 nt, Artificial Sequence
  Synthetic
cccaagcagcaguucaaacca

SEQ ID NO: 202730 - RNA, 22 nt, Artificial Sequence
  Synthetic
ccccaagcagcaguucaaacca

SEQ ID NO: 202731 - RNA, 23 nt, Artificial Sequence
  Synthetic
gccccaagcagcaguucaaacca

SEQ ID NO: 202732 - RNA, 24 nt, Artificial Sequence
  Synthetic
agccccaagcagcaguucaaacca

SEQ ID NO: 202733 - RNA, 18 nt, Artificial Sequence
  Synthetic
auaaguucuuucaaacca

SEQ ID NO: 202734 - RNA, 19 nt, Artificial Sequence
  Synthetic
aauaaguucuuucaaacca

SEQ ID NO: 202735 - RNA, 20 nt, Artificial Sequence
  Synthetic
gaauaaguucuuucaaacca

SEQ ID NO: 202736 - RNA, 21 nt, Artificial Sequence
  Synthetic
ugaauaaguucuuucaaacca

SEQ ID NO: 202737 - RNA, 22 nt, Artificial Sequence
  Synthetic
augaauaaguucuuucaaacca

SEQ ID NO: 202738 - RNA, 23 nt, Artificial Sequence
  Synthetic
aaugaauaaguucuuucaaacca

SEQ ID NO: 202739 - RNA, 24 nt, Artificial Sequence
  Synthetic
aaaugaauaaguucuuucaaacca

SEQ ID NO: 202740 - RNA, 18 nt, Artificial Sequence
  Synthetic
caaaaaucacagaaacca

SEQ ID NO: 202741 - RNA, 19 nt, Artificial Sequence
  Synthetic
acaaaaaucacagaaacca

SEQ ID NO: 202742 - RNA, 20 nt, Artificial Sequence
  Synthetic
uacaaaaaucacagaaacca

SEQ ID NO: 202743 - RNA, 21 nt, Artificial Sequence
  Synthetic
cuacaaaaaucacagaaacca

SEQ ID NO: 202744 - RNA, 22 nt, Artificial Sequence
  Synthetic
ucuacaaaaaucacagaaacca

SEQ ID NO: 202745 - RNA, 23 nt, Artificial Sequence
  Synthetic
gucuacaaaaaucacagaaacca

SEQ ID NO: 202746 - RNA, 24 nt, Artificial Sequence
  Synthetic
ugucuacaaaaaucacagaaacca

SEQ ID NO: 202747 - RNA, 18 nt, Artificial Sequence
  Synthetic
ugcuaguuccagaaacca

SEQ ID NO: 202748 - RNA, 19 nt, Artificial Sequence
  Synthetic
augcuaguuccagaaacca

SEQ ID NO: 202749 - RNA, 20 nt, Artificial Sequence
  Synthetic
uaugcuaguuccagaaacca

SEQ ID NO: 202750 - RNA, 21 nt, Artificial Sequence
  Synthetic
uuaugcuaguuccagaaacca

SEQ ID NO: 202751 - RNA, 22 nt, Artificial Sequence
  Synthetic
uuuaugcuaguuccagaaacca

SEQ ID NO: 202752 - RNA, 23 nt, Artificial Sequence
  Synthetic
uuuuaugcuaguuccagaaacca

SEQ ID NO: 202753 - RNA, 24 nt, Artificial Sequence
  Synthetic
auuuuaugcuaguuccagaaacca

SEQ ID NO: 202754 - RNA, 18 nt, Artificial Sequence
  Synthetic
uauaaauuauagaaacca

SEQ ID NO: 202755 - RNA, 19 nt, Artificial Sequence
  Synthetic
uuauaaauuauagaaacca

SEQ ID NO: 202756 - RNA, 20 nt, Artificial Sequence
  Synthetic
guuauaaauuauagaaacca

SEQ ID NO: 202757 - RNA, 21 nt, Artificial Sequence
  Synthetic
uguuauaaauuauagaaacca

SEQ ID NO: 202758 - RNA, 22 nt, Artificial Sequence
  Synthetic
auguuauaaauuauagaaacca

SEQ ID NO: 202759 - RNA, 23 nt, Artificial Sequence
  Synthetic
gauguuauaaauuauagaaacca

SEQ ID NO: 202760 - RNA, 24 nt, Artificial Sequence
  Synthetic
ugauguuauaaauuauagaaacca

SEQ ID NO: 202761 - RNA, 18 nt, Artificial Sequence
  Synthetic
uguaguagguauaaacca

SEQ ID NO: 202762 - RNA, 19 nt, Artificial Sequence
  Synthetic
uuguaguagguauaaacca

SEQ ID NO: 202763 - RNA, 20 nt, Artificial Sequence
  Synthetic
uuuguaguagguauaaacca

SEQ ID NO: 202764 - RNA, 21 nt, Artificial Sequence
  Synthetic
auuuguaguagguauaaacca

SEQ ID NO: 202765 - RNA, 22 nt, Artificial Sequence
  Synthetic
uauuuguaguagguauaaacca

SEQ ID NO: 202766 - RNA, 23 nt, Artificial Sequence
  Synthetic
uuauuuguaguagguauaaacca

SEQ ID NO: 202767 - RNA, 24 nt, Artificial Sequence
  Synthetic
uuuauuuguaguagguauaaacca

SEQ ID NO: 202768 - RNA, 18 nt, Artificial Sequence
  Synthetic
cuuuuauuagcuaaacca

SEQ ID NO: 202769 - RNA, 19 nt, Artificial Sequence
  Synthetic
ccuuuuauuagcuaaacca

SEQ ID NO: 202770 - RNA, 20 nt, Artificial Sequence
  Synthetic
gccuuuuauuagcuaaacca

SEQ ID NO: 202771 - RNA, 21 nt, Artificial Sequence
  Synthetic
ggccuuuuauuagcuaaacca

SEQ ID NO: 202772 - RNA, 22 nt, Artificial Sequence
  Synthetic
uggccuuuuauuagcuaaacca

SEQ ID NO: 202773 - RNA, 23 nt, Artificial Sequence
  Synthetic
guggccuuuuauuagcuaaacca

SEQ ID NO: 202774 - RNA, 24 nt, Artificial Sequence
  Synthetic
uguggccuuuuauuagcuaaacca

SEQ ID NO: 202775 - RNA, 18 nt, Artificial Sequence
  Synthetic
aagaaaucuuuuaaacca

SEQ ID NO: 202776 - RNA, 19 nt, Artificial Sequence
  Synthetic
caagaaaucuuuuaaacca

SEQ ID NO: 202777 - RNA, 20 nt, Artificial Sequence
  Synthetic
ccaagaaaucuuuuaaacca

SEQ ID NO: 202778 - RNA, 21 nt, Artificial Sequence
  Synthetic
uccaagaaaucuuuuaaacca

SEQ ID NO: 202779 - RNA, 22 nt, Artificial Sequence
  Synthetic
cuccaagaaaucuuuuaaacca

SEQ ID NO: 202780 - RNA, 23 nt, Artificial Sequence
  Synthetic
acuccaagaaaucuuuuaaacca

SEQ ID NO: 202781 - RNA, 24 nt, Artificial Sequence
  Synthetic
aacuccaagaaaucuuuuaaacca

SEQ ID NO: 202782 - RNA, 18 nt, Artificial Sequence
  Synthetic
cggcaggaccugcaacca

SEQ ID NO: 202783 - RNA, 19 nt, Artificial Sequence
  Synthetic
ucggcaggaccugcaacca

SEQ ID NO: 202784 - RNA, 20 nt, Artificial Sequence
  Synthetic
uucggcaggaccugcaacca

SEQ ID NO: 202785 - RNA, 21 nt, Artificial Sequence
  Synthetic
guucggcaggaccugcaacca

SEQ ID NO: 202786 - RNA, 22 nt, Artificial Sequence
  Synthetic
uguucggcaggaccugcaacca

SEQ ID NO: 202787 - RNA, 23 nt, Artificial Sequence
  Synthetic
cuguucggcaggaccugcaacca

SEQ ID NO: 202788 - RNA, 24 nt, Artificial Sequence
  Synthetic
ccuguucggcaggaccugcaacca

SEQ ID NO: 202789 - RNA, 18 nt, Artificial Sequence
  Synthetic
aguauaaggcugcaacca

SEQ ID NO: 202790 - RNA, 19 nt, Artificial Sequence
  Synthetic
uaguauaaggcugcaacca

SEQ ID NO: 202791 - RNA, 20 nt, Artificial Sequence
  Synthetic
auaguauaaggcugcaacca

SEQ ID NO: 202792 - RNA, 21 nt, Artificial Sequence
  Synthetic
gauaguauaaggcugcaacca

SEQ ID NO: 202793 - RNA, 22 nt, Artificial Sequence
  Synthetic
agauaguauaaggcugcaacca

SEQ ID NO: 202794 - RNA, 23 nt, Artificial Sequence
  Synthetic
gagauaguauaaggcugcaacca

SEQ ID NO: 202795 - RNA, 24 nt, Artificial Sequence
  Synthetic
agagauaguauaaggcugcaacca

SEQ ID NO: 202796 - RNA, 18 nt, Artificial Sequence
  Synthetic
aaaacauggcugcaacca

SEQ ID NO: 202797 - RNA, 19 nt, Artificial Sequence
  Synthetic
caaaacauggcugcaacca

SEQ ID NO: 202798 - RNA, 20 nt, Artificial Sequence
  Synthetic
ucaaaacauggcugcaacca

SEQ ID NO: 202799 - RNA, 21 nt, Artificial Sequence
  Synthetic
cucaaaacauggcugcaacca

SEQ ID NO: 202800 - RNA, 22 nt, Artificial Sequence
  Synthetic
ucucaaaacauggcugcaacca

SEQ ID NO: 202801 - RNA, 23 nt, Artificial Sequence
  Synthetic
gucucaaaacauggcugcaacca

SEQ ID NO: 202802 - RNA, 24 nt, Artificial Sequence
  Synthetic
ugucucaaaacauggcugcaacca

SEQ ID NO: 202803 - RNA, 18 nt, Artificial Sequence
  Synthetic
uugcuuucuuaucaacca

SEQ ID NO: 202804 - RNA, 19 nt, Artificial Sequence
  Synthetic
cuugcuuucuuaucaacca

SEQ ID NO: 202805 - RNA, 20 nt, Artificial Sequence
  Synthetic
ucuugcuuucuuaucaacca

SEQ ID NO: 202806 - RNA, 21 nt, Artificial Sequence
  Synthetic
uucuugcuuucuuaucaacca

SEQ ID NO: 202807 - RNA, 22 nt, Artificial Sequence
  Synthetic
cuucuugcuuucuuaucaacca

SEQ ID NO: 202808 - RNA, 23 nt, Artificial Sequence
  Synthetic
gcuucuugcuuucuuaucaacca

SEQ ID NO: 202809 - RNA, 24 nt, Artificial Sequence
  Synthetic
ugcuucuugcuuucuuaucaacca

SEQ ID NO: 202810 - RNA, 18 nt, Artificial Sequence
  Synthetic
gugagcaaccuucaacca

SEQ ID NO: 202811 - RNA, 19 nt, Artificial Sequence
  Synthetic
agugagcaaccuucaacca

SEQ ID NO: 202812 - RNA, 20 nt, Artificial Sequence
  Synthetic
gagugagcaaccuucaacca

SEQ ID NO: 202813 - RNA, 21 nt, Artificial Sequence
  Synthetic
ugagugagcaaccuucaacca

SEQ ID NO: 202814 - RNA, 22 nt, Artificial Sequence
  Synthetic
gugagugagcaaccuucaacca

SEQ ID NO: 202815 - RNA, 23 nt, Artificial Sequence
  Synthetic
agugagugagcaaccuucaacca

SEQ ID NO: 202816 - RNA, 24 nt, Artificial Sequence
  Synthetic
uagugagugagcaaccuucaacca

SEQ ID NO: 202817 - RNA, 18 nt, Artificial Sequence
  Synthetic
acucaaguuaaagaacca

SEQ ID NO: 202818 - RNA, 19 nt, Artificial Sequence
  Synthetic
cacucaaguuaaagaacca

SEQ ID NO: 202819 - RNA, 20 nt, Artificial Sequence
  Synthetic
acacucaaguuaaagaacca

SEQ ID NO: 202820 - RNA, 21 nt, Artificial Sequence
  Synthetic
cacacucaaguuaaagaacca

SEQ ID NO: 202821 - RNA, 22 nt, Artificial Sequence
  Synthetic
gcacacucaaguuaaagaacca

SEQ ID NO: 202822 - RNA, 23 nt, Artificial Sequence
  Synthetic
cgcacacucaaguuaaagaacca

SEQ ID NO: 202823 - RNA, 24 nt, Artificial Sequence
  Synthetic
acgcacacucaaguuaaagaacca

SEQ ID NO: 202824 - RNA, 18 nt, Artificial Sequence
  Synthetic
gguguaaguacagaacca

SEQ ID NO: 202825 - RNA, 19 nt, Artificial Sequence
  Synthetic
ggguguaaguacagaacca

SEQ ID NO: 202826 - RNA, 20 nt, Artificial Sequence
  Synthetic
aggguguaaguacagaacca

SEQ ID NO: 202827 - RNA, 21 nt, Artificial Sequence
  Synthetic
aaggguguaaguacagaacca

SEQ ID NO: 202828 - RNA, 22 nt, Artificial Sequence
  Synthetic
aaaggguguaaguacagaacca

SEQ ID NO: 202829 - RNA, 23 nt, Artificial Sequence
  Synthetic
aaaaggguguaaguacagaacca

SEQ ID NO: 202830 - RNA, 24 nt, Artificial Sequence
  Synthetic
uaaaaggguguaaguacagaacca

SEQ ID NO: 202831 - RNA, 18 nt, Artificial Sequence
  Synthetic
agagucuuaccagaacca

SEQ ID NO: 202832 - RNA, 19 nt, Artificial Sequence
  Synthetic
uagagucuuaccagaacca

SEQ ID NO: 202833 - RNA, 20 nt, Artificial Sequence
  Synthetic
guagagucuuaccagaacca

SEQ ID NO: 202834 - RNA, 21 nt, Artificial Sequence
  Synthetic
uguagagucuuaccagaacca

SEQ ID NO: 202835 - RNA, 22 nt, Artificial Sequence
  Synthetic
auguagagucuuaccagaacca

SEQ ID NO: 202836 - RNA, 23 nt, Artificial Sequence
  Synthetic
gauguagagucuuaccagaacca

SEQ ID NO: 202837 - RNA, 24 nt, Artificial Sequence
  Synthetic
ggauguagagucuuaccagaacca

SEQ ID NO: 202838 - RNA, 18 nt, Artificial Sequence
  Synthetic
cuuaauauaucagaacca

SEQ ID NO: 202839 - RNA, 19 nt, Artificial Sequence
  Synthetic
ccuuaauauaucagaacca

SEQ ID NO: 202840 - RNA, 20 nt, Artificial Sequence
  Synthetic
gccuuaauauaucagaacca

SEQ ID NO: 202841 - RNA, 21 nt, Artificial Sequence
  Synthetic
ggccuuaauauaucagaacca

SEQ ID NO: 202842 - RNA, 22 nt, Artificial Sequence
  Synthetic
gggccuuaauauaucagaacca

SEQ ID NO: 202843 - RNA, 23 nt, Artificial Sequence
  Synthetic
ugggccuuaauauaucagaacca

SEQ ID NO: 202844 - RNA, 24 nt, Artificial Sequence
  Synthetic
cugggccuuaauauaucagaacca

SEQ ID NO: 202845 - RNA, 18 nt, Artificial Sequence
  Synthetic
uugaauuucuuagaacca

SEQ ID NO: 202846 - RNA, 19 nt, Artificial Sequence
  Synthetic
uuugaauuucuuagaacca

SEQ ID NO: 202847 - RNA, 20 nt, Artificial Sequence
  Synthetic
auuugaauuucuuagaacca

SEQ ID NO: 202848 - RNA, 21 nt, Artificial Sequence
  Synthetic
uauuugaauuucuuagaacca

SEQ ID NO: 202849 - RNA, 22 nt, Artificial Sequence
  Synthetic
cuauuugaauuucuuagaacca

SEQ ID NO: 202850 - RNA, 23 nt, Artificial Sequence
  Synthetic
ucuauuugaauuucuuagaacca

SEQ ID NO: 202851 - RNA, 24 nt, Artificial Sequence
  Synthetic
cucuauuugaauuucuuagaacca

SEQ ID NO: 202852 - RNA, 18 nt, Artificial Sequence
  Synthetic
ucuuucauacaggaacca

SEQ ID NO: 202853 - RNA, 19 nt, Artificial Sequence
  Synthetic
cucuuucauacaggaacca

SEQ ID NO: 202854 - RNA, 20 nt, Artificial Sequence
  Synthetic
ucucuuucauacaggaacca

SEQ ID NO: 202855 - RNA, 21 nt, Artificial Sequence
  Synthetic
uucucuuucauacaggaacca

SEQ ID NO: 202856 - RNA, 22 nt, Artificial Sequence
  Synthetic
uuucucuuucauacaggaacca

SEQ ID NO: 202857 - RNA, 23 nt, Artificial Sequence
  Synthetic
uuuucucuuucauacaggaacca

SEQ ID NO: 202858 - RNA, 24 nt, Artificial Sequence
  Synthetic
uuuuucucuuucauacaggaacca

SEQ ID NO: 202859 - RNA, 18 nt, Artificial Sequence
  Synthetic
ccuggggccagugaacca

SEQ ID NO: 202860 - RNA, 19 nt, Artificial Sequence
  Synthetic
gccuggggccagugaacca

SEQ ID NO: 202861 - RNA, 20 nt, Artificial Sequence
  Synthetic
ggccuggggccagugaacca

SEQ ID NO: 202862 - RNA, 21 nt, Artificial Sequence
  Synthetic
aggccuggggccagugaacca

SEQ ID NO: 202863 - RNA, 22 nt, Artificial Sequence
  Synthetic
uaggccuggggccagugaacca

SEQ ID NO: 202864 - RNA, 23 nt, Artificial Sequence
  Synthetic
uuaggccuggggccagugaacca

SEQ ID NO: 202865 - RNA, 24 nt, Artificial Sequence
  Synthetic
auuaggccuggggccagugaacca

SEQ ID NO: 202866 - RNA, 18 nt, Artificial Sequence
  Synthetic
caaacuugaugauaacca

SEQ ID NO: 202867 - RNA, 19 nt, Artificial Sequence
  Synthetic
ccaaacuugaugauaacca

SEQ ID NO: 202868 - RNA, 20 nt, Artificial Sequence
  Synthetic
accaaacuugaugauaacca

SEQ ID NO: 202869 - RNA, 21 nt, Artificial Sequence
  Synthetic
aaccaaacuugaugauaacca

SEQ ID NO: 202870 - RNA, 22 nt, Artificial Sequence
  Synthetic
gaaccaaacuugaugauaacca

SEQ ID NO: 202871 - RNA, 23 nt, Artificial Sequence
  Synthetic
ggaaccaaacuugaugauaacca

SEQ ID NO: 202872 - RNA, 24 nt, Artificial Sequence
  Synthetic
aggaaccaaacuugaugauaacca

SEQ ID NO: 202873 - RNA, 18 nt, Artificial Sequence
  Synthetic
cauuugccaugcuaacca

SEQ ID NO: 202874 - RNA, 19 nt, Artificial Sequence
  Synthetic
acauuugccaugcuaacca

SEQ ID NO: 202875 - RNA, 20 nt, Artificial Sequence
  Synthetic
uacauuugccaugcuaacca

SEQ ID NO: 202876 - RNA, 21 nt, Artificial Sequence
  Synthetic
auacauuugccaugcuaacca

SEQ ID NO: 202877 - RNA, 22 nt, Artificial Sequence
  Synthetic
uauacauuugccaugcuaacca

SEQ ID NO: 202878 - RNA, 23 nt, Artificial Sequence
  Synthetic
cuauacauuugccaugcuaacca

SEQ ID NO: 202879 - RNA, 24 nt, Artificial Sequence
  Synthetic
ccuauacauuugccaugcuaacca

SEQ ID NO: 202880 - RNA, 18 nt, Artificial Sequence
  Synthetic
uaggaauacaucuaacca

SEQ ID NO: 202881 - RNA, 19 nt, Artificial Sequence
  Synthetic
cuaggaauacaucuaacca

SEQ ID NO: 202882 - RNA, 20 nt, Artificial Sequence
  Synthetic
ucuaggaauacaucuaacca

SEQ ID NO: 202883 - RNA, 21 nt, Artificial Sequence
  Synthetic
aucuaggaauacaucuaacca

SEQ ID NO: 202884 - RNA, 22 nt, Artificial Sequence
  Synthetic
uaucuaggaauacaucuaacca

SEQ ID NO: 202885 - RNA, 23 nt, Artificial Sequence
  Synthetic
auaucuaggaauacaucuaacca

SEQ ID NO: 202886 - RNA, 24 nt, Artificial Sequence
  Synthetic
aauaucuaggaauacaucuaacca

SEQ ID NO: 202887 - RNA, 18 nt, Artificial Sequence
  Synthetic
caauuacuugucuaacca

SEQ ID NO: 202888 - RNA, 19 nt, Artificial Sequence
  Synthetic
ucaauuacuugucuaacca

SEQ ID NO: 202889 - RNA, 20 nt, Artificial Sequence
  Synthetic
gucaauuacuugucuaacca

SEQ ID NO: 202890 - RNA, 21 nt, Artificial Sequence
  Synthetic
ggucaauuacuugucuaacca

SEQ ID NO: 202891 - RNA, 22 nt, Artificial Sequence
  Synthetic
gggucaauuacuugucuaacca

SEQ ID NO: 202892 - RNA, 23 nt, Artificial Sequence
  Synthetic
ggggucaauuacuugucuaacca

SEQ ID NO: 202893 - RNA, 24 nt, Artificial Sequence
  Synthetic
aggggucaauuacuugucuaacca

SEQ ID NO: 202894 - RNA, 18 nt, Artificial Sequence
  Synthetic
uacacaagcauguaacca

SEQ ID NO: 202895 - RNA, 19 nt, Artificial Sequence
  Synthetic
auacacaagcauguaacca

SEQ ID NO: 202896 - RNA, 20 nt, Artificial Sequence
  Synthetic
cauacacaagcauguaacca

SEQ ID NO: 202897 - RNA, 21 nt, Artificial Sequence
  Synthetic
acauacacaagcauguaacca

SEQ ID NO: 202898 - RNA, 22 nt, Artificial Sequence
  Synthetic
cacauacacaagcauguaacca

SEQ ID NO: 202899 - RNA, 23 nt, Artificial Sequence
  Synthetic
acacauacacaagcauguaacca

SEQ ID NO: 202900 - RNA, 24 nt, Artificial Sequence
  Synthetic
cacacauacacaagcauguaacca

SEQ ID NO: 202901 - RNA, 18 nt, Artificial Sequence
  Synthetic
uuggauuuacuguaacca

SEQ ID NO: 202902 - RNA, 19 nt, Artificial Sequence
  Synthetic
uuuggauuuacuguaacca

SEQ ID NO: 202903 - RNA, 20 nt, Artificial Sequence
  Synthetic
guuuggauuuacuguaacca

SEQ ID NO: 202904 - RNA, 21 nt, Artificial Sequence
  Synthetic
uguuuggauuuacuguaacca

SEQ ID NO: 202905 - RNA, 22 nt, Artificial Sequence
  Synthetic
uuguuuggauuuacuguaacca

SEQ ID NO: 202906 - RNA, 23 nt, Artificial Sequence
  Synthetic
auuguuuggauuuacuguaacca

SEQ ID NO: 202907 - RNA, 24 nt, Artificial Sequence
  Synthetic
aauuguuuggauuuacuguaacca

SEQ ID NO: 202908 - RNA, 18 nt, Artificial Sequence
  Synthetic
uggaauagcacuuaacca

SEQ ID NO: 202909 - RNA, 19 nt, Artificial Sequence
  Synthetic
cuggaauagcacuuaacca

SEQ ID NO: 202910 - RNA, 20 nt, Artificial Sequence
  Synthetic
ucuggaauagcacuuaacca

SEQ ID NO: 202911 - RNA, 21 nt, Artificial Sequence
  Synthetic
cucuggaauagcacuuaacca

SEQ ID NO: 202912 - RNA, 22 nt, Artificial Sequence
  Synthetic
ucucuggaauagcacuuaacca

SEQ ID NO: 202913 - RNA, 23 nt, Artificial Sequence
  Synthetic
aucucuggaauagcacuuaacca

SEQ ID NO: 202914 - RNA, 24 nt, Artificial Sequence
  Synthetic
uaucucuggaauagcacuuaacca

SEQ ID NO: 202915 - RNA, 18 nt, Artificial Sequence
  Synthetic
ucuguauagauuuaacca

SEQ ID NO: 202916 - RNA, 19 nt, Artificial Sequence
  Synthetic
uucuguauagauuuaacca

SEQ ID NO: 202917 - RNA, 20 nt, Artificial Sequence
  Synthetic
cuucuguauagauuuaacca

SEQ ID NO: 202918 - RNA, 21 nt, Artificial Sequence
  Synthetic
ucuucuguauagauuuaacca

SEQ ID NO: 202919 - RNA, 22 nt, Artificial Sequence
  Synthetic
aucuucuguauagauuuaacca

SEQ ID NO: 202920 - RNA, 23 nt, Artificial Sequence
  Synthetic
uaucuucuguauagauuuaacca

SEQ ID NO: 202921 - RNA, 24 nt, Artificial Sequence
  Synthetic
cuaucuucuguauagauuuaacca

SEQ ID NO: 202922 - RNA, 18 nt, Artificial Sequence
  Synthetic
cauugggguuuuuaacca

SEQ ID NO: 202923 - RNA, 19 nt, Artificial Sequence
  Synthetic
ccauugggguuuuuaacca

SEQ ID NO: 202924 - RNA, 20 nt, Artificial Sequence
  Synthetic
gccauugggguuuuuaacca

SEQ ID NO: 202925 - RNA, 21 nt, Artificial Sequence
  Synthetic
agccauugggguuuuuaacca

SEQ ID NO: 202926 - RNA, 22 nt, Artificial Sequence
  Synthetic
aagccauugggguuuuuaacca

SEQ ID NO: 202927 - RNA, 23 nt, Artificial Sequence
  Synthetic
uaagccauugggguuuuuaacca

SEQ ID NO: 202928 - RNA, 24 nt, Artificial Sequence
  Synthetic
uuaagccauugggguuuuuaacca

SEQ ID NO: 202929 - RNA, 18 nt, Artificial Sequence
  Synthetic
cacacauauucaacacca

SEQ ID NO: 202930 - RNA, 19 nt, Artificial Sequence
  Synthetic
acacacauauucaacacca

SEQ ID NO: 202931 - RNA, 20 nt, Artificial Sequence
  Synthetic
uacacacauauucaacacca

SEQ ID NO: 202932 - RNA, 21 nt, Artificial Sequence
  Synthetic
auacacacauauucaacacca

SEQ ID NO: 202933 - RNA, 22 nt, Artificial Sequence
  Synthetic
uauacacacauauucaacacca

SEQ ID NO: 202934 - RNA, 23 nt, Artificial Sequence
  Synthetic
auauacacacauauucaacacca

SEQ ID NO: 202935 - RNA, 24 nt, Artificial Sequence
  Synthetic
cauauacacacauauucaacacca

SEQ ID NO: 202936 - RNA, 18 nt, Artificial Sequence
  Synthetic
gcgucaccuggaacacca

SEQ ID NO: 202937 - RNA, 19 nt, Artificial Sequence
  Synthetic
agcgucaccuggaacacca

SEQ ID NO: 202938 - RNA, 20 nt, Artificial Sequence
  Synthetic
cagcgucaccuggaacacca

SEQ ID NO: 202939 - RNA, 21 nt, Artificial Sequence
  Synthetic
ccagcgucaccuggaacacca

SEQ ID NO: 202940 - RNA, 22 nt, Artificial Sequence
  Synthetic
cccagcgucaccuggaacacca

SEQ ID NO: 202941 - RNA, 23 nt, Artificial Sequence
  Synthetic
ucccagcgucaccuggaacacca

SEQ ID NO: 202942 - RNA, 24 nt, Artificial Sequence
  Synthetic
aucccagcgucaccuggaacacca

SEQ ID NO: 202943 - RNA, 18 nt, Artificial Sequence
  Synthetic
gcuuacacacacacacca

SEQ ID NO: 202944 - RNA, 19 nt, Artificial Sequence
  Synthetic
cgcuuacacacacacacca

SEQ ID NO: 202945 - RNA, 20 nt, Artificial Sequence
  Synthetic
acgcuuacacacacacacca

SEQ ID NO: 202946 - RNA, 21 nt, Artificial Sequence
  Synthetic
cacgcuuacacacacacacca

SEQ ID NO: 202947 - RNA, 22 nt, Artificial Sequence
  Synthetic
acacgcuuacacacacacacca

SEQ ID NO: 202948 - RNA, 23 nt, Artificial Sequence
  Synthetic
cacacgcuuacacacacacacca

SEQ ID NO: 202949 - RNA, 24 nt, Artificial Sequence
  Synthetic
acacacgcuuacacacacacacca

SEQ ID NO: 202950 - RNA, 18 nt, Artificial Sequence
  Synthetic
auugcauuuugcacacca

SEQ ID NO: 202951 - RNA, 19 nt, Artificial Sequence
  Synthetic
cauugcauuuugcacacca

SEQ ID NO: 202952 - RNA, 20 nt, Artificial Sequence
  Synthetic
ucauugcauuuugcacacca

SEQ ID NO: 202953 - RNA, 21 nt, Artificial Sequence
  Synthetic
gucauugcauuuugcacacca

SEQ ID NO: 202954 - RNA, 22 nt, Artificial Sequence
  Synthetic
agucauugcauuuugcacacca

SEQ ID NO: 202955 - RNA, 23 nt, Artificial Sequence
  Synthetic
cagucauugcauuuugcacacca

SEQ ID NO: 202956 - RNA, 24 nt, Artificial Sequence
  Synthetic
ccagucauugcauuuugcacacca

SEQ ID NO: 202957 - RNA, 18 nt, Artificial Sequence
  Synthetic
caggacagaaucacacca

SEQ ID NO: 202958 - RNA, 19 nt, Artificial Sequence
  Synthetic
gcaggacagaaucacacca

SEQ ID NO: 202959 - RNA, 20 nt, Artificial Sequence
  Synthetic
ugcaggacagaaucacacca

SEQ ID NO: 202960 - RNA, 21 nt, Artificial Sequence
  Synthetic
gugcaggacagaaucacacca

SEQ ID NO: 202961 - RNA, 22 nt, Artificial Sequence
  Synthetic
ugugcaggacagaaucacacca

SEQ ID NO: 202962 - RNA, 23 nt, Artificial Sequence
  Synthetic
cugugcaggacagaaucacacca

SEQ ID NO: 202963 - RNA, 24 nt, Artificial Sequence
  Synthetic
gcugugcaggacagaaucacacca

SEQ ID NO: 202964 - RNA, 18 nt, Artificial Sequence
  Synthetic
aacugaaauaucacacca

SEQ ID NO: 202965 - RNA, 19 nt, Artificial Sequence
  Synthetic
aaacugaaauaucacacca

SEQ ID NO: 202966 - RNA, 20 nt, Artificial Sequence
  Synthetic
uaaacugaaauaucacacca

SEQ ID NO: 202967 - RNA, 21 nt, Artificial Sequence
  Synthetic
guaaacugaaauaucacacca

SEQ ID NO: 202968 - RNA, 22 nt, Artificial Sequence
  Synthetic
aguaaacugaaauaucacacca

SEQ ID NO: 202969 - RNA, 23 nt, Artificial Sequence
  Synthetic
gaguaaacugaaauaucacacca

SEQ ID NO: 202970 - RNA, 24 nt, Artificial Sequence
  Synthetic
ugaguaaacugaaauaucacacca

SEQ ID NO: 202971 - RNA, 18 nt, Artificial Sequence
  Synthetic
uugaauuaaaagacacca

SEQ ID NO: 202972 - RNA, 19 nt, Artificial Sequence
  Synthetic
auugaauuaaaagacacca

SEQ ID NO: 202973 - RNA, 20 nt, Artificial Sequence
  Synthetic
cauugaauuaaaagacacca

SEQ ID NO: 202974 - RNA, 21 nt, Artificial Sequence
  Synthetic
acauugaauuaaaagacacca

SEQ ID NO: 202975 - RNA, 22 nt, Artificial Sequence
  Synthetic
gacauugaauuaaaagacacca

SEQ ID NO: 202976 - RNA, 23 nt, Artificial Sequence
  Synthetic
ugacauugaauuaaaagacacca

SEQ ID NO: 202977 - RNA, 24 nt, Artificial Sequence
  Synthetic
augacauugaauuaaaagacacca

SEQ ID NO: 202978 - RNA, 18 nt, Artificial Sequence
  Synthetic
ucaaaucccaagacacca

SEQ ID NO: 202979 - RNA, 19 nt, Artificial Sequence
  Synthetic
uucaaaucccaagacacca

SEQ ID NO: 202980 - RNA, 20 nt, Artificial Sequence
  Synthetic
uuucaaaucccaagacacca

SEQ ID NO: 202981 - RNA, 21 nt, Artificial Sequence
  Synthetic
guuucaaaucccaagacacca

SEQ ID NO: 202982 - RNA, 22 nt, Artificial Sequence
  Synthetic
uguuucaaaucccaagacacca

SEQ ID NO: 202983 - RNA, 23 nt, Artificial Sequence
  Synthetic
uuguuucaaaucccaagacacca

SEQ ID NO: 202984 - RNA, 24 nt, Artificial Sequence
  Synthetic
auuguuucaaaucccaagacacca

SEQ ID NO: 202985 - RNA, 18 nt, Artificial Sequence
  Synthetic
ugaaaaccauguacacca

SEQ ID NO: 202986 - RNA, 19 nt, Artificial Sequence
  Synthetic
uugaaaaccauguacacca

SEQ ID NO: 202987 - RNA, 20 nt, Artificial Sequence
  Synthetic
cuugaaaaccauguacacca

SEQ ID NO: 202988 - RNA, 21 nt, Artificial Sequence
  Synthetic
ucuugaaaaccauguacacca

SEQ ID NO: 202989 - RNA, 22 nt, Artificial Sequence
  Synthetic
uucuugaaaaccauguacacca

SEQ ID NO: 202990 - RNA, 23 nt, Artificial Sequence
  Synthetic
uuucuugaaaaccauguacacca

SEQ ID NO: 202991 - RNA, 24 nt, Artificial Sequence
  Synthetic
uuuucuugaaaaccauguacacca

SEQ ID NO: 202992 - RNA, 18 nt, Artificial Sequence
  Synthetic
gugagagcacuuacacca

SEQ ID NO: 202993 - RNA, 19 nt, Artificial Sequence
  Synthetic
ugugagagcacuuacacca

SEQ ID NO: 202994 - RNA, 20 nt, Artificial Sequence
  Synthetic
uugugagagcacuuacacca

SEQ ID NO: 202995 - RNA, 21 nt, Artificial Sequence
  Synthetic
auugugagagcacuuacacca

SEQ ID NO: 202996 - RNA, 22 nt, Artificial Sequence
  Synthetic
uauugugagagcacuuacacca

SEQ ID NO: 202997 - RNA, 23 nt, Artificial Sequence
  Synthetic
cuauugugagagcacuuacacca

SEQ ID NO: 202998 - RNA, 24 nt, Artificial Sequence
  Synthetic
gcuauugugagagcacuuacacca

SEQ ID NO: 202999 - RNA, 18 nt, Artificial Sequence
  Synthetic
guaggaauauuuacacca

SEQ ID NO: 203000 - RNA, 19 nt, Artificial Sequence
  Synthetic
gguaggaauauuuacacca

SEQ ID NO: 203001 - RNA, 20 nt, Artificial Sequence
  Synthetic
ugguaggaauauuuacacca

SEQ ID NO: 203002 - RNA, 21 nt, Artificial Sequence
  Synthetic
gugguaggaauauuuacacca

SEQ ID NO: 203003 - RNA, 22 nt, Artificial Sequence
  Synthetic
cgugguaggaauauuuacacca

SEQ ID NO: 203004 - RNA, 23 nt, Artificial Sequence
  Synthetic
ccgugguaggaauauuuacacca

SEQ ID NO: 203005 - RNA, 24 nt, Artificial Sequence
  Synthetic
accgugguaggaauauuuacacca

SEQ ID NO: 203006 - RNA, 18 nt, Artificial Sequence
  Synthetic
ugggucuauuccccacca

SEQ ID NO: 203007 - RNA, 19 nt, Artificial Sequence
  Synthetic
gugggucuauuccccacca

SEQ ID NO: 203008 - RNA, 20 nt, Artificial Sequence
  Synthetic
ggugggucuauuccccacca

SEQ ID NO: 203009 - RNA, 21 nt, Artificial Sequence
  Synthetic
gggugggucuauuccccacca

SEQ ID NO: 203010 - RNA, 22 nt, Artificial Sequence
  Synthetic
ugggugggucuauuccccacca

SEQ ID NO: 203011 - RNA, 23 nt, Artificial Sequence
  Synthetic
augggugggucuauuccccacca

SEQ ID NO: 203012 - RNA, 24 nt, Artificial Sequence
  Synthetic
uaugggugggucuauuccccacca

SEQ ID NO: 203013 - RNA, 18 nt, Artificial Sequence
  Synthetic
guugucuggaucccacca

SEQ ID NO: 203014 - RNA, 19 nt, Artificial Sequence
  Synthetic
aguugucuggaucccacca

SEQ ID NO: 203015 - RNA, 20 nt, Artificial Sequence
  Synthetic
caguugucuggaucccacca

SEQ ID NO: 203016 - RNA, 21 nt, Artificial Sequence
  Synthetic
gcaguugucuggaucccacca

SEQ ID NO: 203017 - RNA, 22 nt, Artificial Sequence
  Synthetic
ugcaguugucuggaucccacca

SEQ ID NO: 203018 - RNA, 23 nt, Artificial Sequence
  Synthetic
augcaguugucuggaucccacca

SEQ ID NO: 203019 - RNA, 24 nt, Artificial Sequence
  Synthetic
aaugcaguugucuggaucccacca

SEQ ID NO: 203020 - RNA, 18 nt, Artificial Sequence
  Synthetic
acucucaaacugccacca

SEQ ID NO: 203021 - RNA, 19 nt, Artificial Sequence
  Synthetic
gacucucaaacugccacca

SEQ ID NO: 203022 - RNA, 20 nt, Artificial Sequence
  Synthetic
agacucucaaacugccacca

SEQ ID NO: 203023 - RNA, 21 nt, Artificial Sequence
  Synthetic
gagacucucaaacugccacca

SEQ ID NO: 203024 - RNA, 22 nt, Artificial Sequence
  Synthetic
agagacucucaaacugccacca

SEQ ID NO: 203025 - RNA, 23 nt, Artificial Sequence
  Synthetic
cagagacucucaaacugccacca

SEQ ID NO: 203026 - RNA, 24 nt, Artificial Sequence
  Synthetic
gcagagacucucaaacugccacca

SEQ ID NO: 203027 - RNA, 18 nt, Artificial Sequence
  Synthetic
auuuggucagugccacca

SEQ ID NO: 203028 - RNA, 19 nt, Artificial Sequence
  Synthetic
aauuuggucagugccacca

SEQ ID NO: 203029 - RNA, 20 nt, Artificial Sequence
  Synthetic
aaauuuggucagugccacca

SEQ ID NO: 203030 - RNA, 21 nt, Artificial Sequence
  Synthetic
aaaauuuggucagugccacca

SEQ ID NO: 203031 - RNA, 22 nt, Artificial Sequence
  Synthetic
uaaaauuuggucagugccacca

SEQ ID NO: 203032 - RNA, 23 nt, Artificial Sequence
  Synthetic
cuaaaauuuggucagugccacca

SEQ ID NO: 203033 - RNA, 24 nt, Artificial Sequence
  Synthetic
ccuaaaauuuggucagugccacca

SEQ ID NO: 203034 - RNA, 18 nt, Artificial Sequence
  Synthetic
uuauuguuauugccacca

SEQ ID NO: 203035 - RNA, 19 nt, Artificial Sequence
  Synthetic
auuauuguuauugccacca

SEQ ID NO: 203036 - RNA, 20 nt, Artificial Sequence
  Synthetic
gauuauuguuauugccacca

SEQ ID NO: 203037 - RNA, 21 nt, Artificial Sequence
  Synthetic
ugauuauuguuauugccacca

SEQ ID NO: 203038 - RNA, 22 nt, Artificial Sequence
  Synthetic
augauuauuguuauugccacca

SEQ ID NO: 203039 - RNA, 23 nt, Artificial Sequence
  Synthetic
uaugauuauuguuauugccacca

SEQ ID NO: 203040 - RNA, 24 nt, Artificial Sequence
  Synthetic
uuaugauuauuguuauugccacca

SEQ ID NO: 203041 - RNA, 18 nt, Artificial Sequence
  Synthetic
auauguaaugauccacca

SEQ ID NO: 203042 - RNA, 19 nt, Artificial Sequence
  Synthetic
gauauguaaugauccacca

SEQ ID NO: 203043 - RNA, 20 nt, Artificial Sequence
  Synthetic
ugauauguaaugauccacca

SEQ ID NO: 203044 - RNA, 21 nt, Artificial Sequence
  Synthetic
augauauguaaugauccacca

SEQ ID NO: 203045 - RNA, 22 nt, Artificial Sequence
  Synthetic
aaugauauguaaugauccacca

SEQ ID NO: 203046 - RNA, 23 nt, Artificial Sequence
  Synthetic
uaaugauauguaaugauccacca

SEQ ID NO: 203047 - RNA, 24 nt, Artificial Sequence
  Synthetic
uuaaugauauguaaugauccacca

SEQ ID NO: 203048 - RNA, 18 nt, Artificial Sequence
  Synthetic
cuuuuaguauauccacca

SEQ ID NO: 203049 - RNA, 19 nt, Artificial Sequence
  Synthetic
gcuuuuaguauauccacca

SEQ ID NO: 203050 - RNA, 20 nt, Artificial Sequence
  Synthetic
agcuuuuaguauauccacca

SEQ ID NO: 203051 - RNA, 21 nt, Artificial Sequence
  Synthetic
gagcuuuuaguauauccacca

SEQ ID NO: 203052 - RNA, 22 nt, Artificial Sequence
  Synthetic
agagcuuuuaguauauccacca

SEQ ID NO: 203053 - RNA, 23 nt, Artificial Sequence
  Synthetic
cagagcuuuuaguauauccacca

SEQ ID NO: 203054 - RNA, 24 nt, Artificial Sequence
  Synthetic
gcagagcuuuuaguauauccacca

SEQ ID NO: 203055 - RNA, 18 nt, Artificial Sequence
  Synthetic
aucacaagaacagcacca

SEQ ID NO: 203056 - RNA, 19 nt, Artificial Sequence
  Synthetic
uaucacaagaacagcacca

SEQ ID NO: 203057 - RNA, 20 nt, Artificial Sequence
  Synthetic
cuaucacaagaacagcacca

SEQ ID NO: 203058 - RNA, 21 nt, Artificial Sequence
  Synthetic
acuaucacaagaacagcacca

SEQ ID NO: 203059 - RNA, 22 nt, Artificial Sequence
  Synthetic
cacuaucacaagaacagcacca

SEQ ID NO: 203060 - RNA, 23 nt, Artificial Sequence
  Synthetic
ucacuaucacaagaacagcacca

SEQ ID NO: 203061 - RNA, 24 nt, Artificial Sequence
  Synthetic
cucacuaucacaagaacagcacca

SEQ ID NO: 203062 - RNA, 18 nt, Artificial Sequence
  Synthetic
cccugggacagagcacca

SEQ ID NO: 203063 - RNA, 19 nt, Artificial Sequence
  Synthetic
ucccugggacagagcacca

SEQ ID NO: 203064 - RNA, 20 nt, Artificial Sequence
  Synthetic
cucccugggacagagcacca

SEQ ID NO: 203065 - RNA, 21 nt, Artificial Sequence
  Synthetic
ucucccugggacagagcacca

SEQ ID NO: 203066 - RNA, 22 nt, Artificial Sequence
  Synthetic
aucucccugggacagagcacca

SEQ ID NO: 203067 - RNA, 23 nt, Artificial Sequence
  Synthetic
caucucccugggacagagcacca

SEQ ID NO: 203068 - RNA, 24 nt, Artificial Sequence
  Synthetic
ccaucucccugggacagagcacca

SEQ ID NO: 203069 - RNA, 21 nt, Artificial Sequence
  Synthetic
acuagccaagagcaggcacca

SEQ ID NO: 203070 - RNA, 22 nt, Artificial Sequence
  Synthetic
cacuagccaagagcaggcacca

SEQ ID NO: 203071 - RNA, 23 nt, Artificial Sequence
  Synthetic
gcacuagccaagagcaggcacca

SEQ ID NO: 203072 - RNA, 24 nt, Artificial Sequence
  Synthetic
ugcacuagccaagagcaggcacca

SEQ ID NO: 203073 - RNA, 18 nt, Artificial Sequence
  Synthetic
cuugacuacaaugcacca

SEQ ID NO: 203074 - RNA, 19 nt, Artificial Sequence
  Synthetic
ucuugacuacaaugcacca

SEQ ID NO: 203075 - RNA, 20 nt, Artificial Sequence
  Synthetic
aucuugacuacaaugcacca

SEQ ID NO: 203076 - RNA, 21 nt, Artificial Sequence
  Synthetic
uaucuugacuacaaugcacca

SEQ ID NO: 203077 - RNA, 22 nt, Artificial Sequence
  Synthetic
guaucuugacuacaaugcacca

SEQ ID NO: 203078 - RNA, 23 nt, Artificial Sequence
  Synthetic
uguaucuugacuacaaugcacca

SEQ ID NO: 203079 - RNA, 24 nt, Artificial Sequence
  Synthetic
auguaucuugacuacaaugcacca

SEQ ID NO: 203080 - RNA, 18 nt, Artificial Sequence
  Synthetic
uucucugagaaugcacca

SEQ ID NO: 203081 - RNA, 19 nt, Artificial Sequence
  Synthetic
auucucugagaaugcacca

SEQ ID NO: 203082 - RNA, 20 nt, Artificial Sequence
  Synthetic
cauucucugagaaugcacca

SEQ ID NO: 203083 - RNA, 21 nt, Artificial Sequence
  Synthetic
gcauucucugagaaugcacca

SEQ ID NO: 203084 - RNA, 22 nt, Artificial Sequence
  Synthetic
agcauucucugagaaugcacca

SEQ ID NO: 203085 - RNA, 23 nt, Artificial Sequence
  Synthetic
cagcauucucugagaaugcacca

SEQ ID NO: 203086 - RNA, 24 nt, Artificial Sequence
  Synthetic
acagcauucucugagaaugcacca

SEQ ID NO: 203087 - RNA, 18 nt, Artificial Sequence
  Synthetic
uuguaauaaacaucacca

SEQ ID NO: 203088 - RNA, 19 nt, Artificial Sequence
  Synthetic
uuuguaauaaacaucacca

SEQ ID NO: 203089 - RNA, 20 nt, Artificial Sequence
  Synthetic
cuuuguaauaaacaucacca

SEQ ID NO: 203090 - RNA, 21 nt, Artificial Sequence
  Synthetic
ucuuuguaauaaacaucacca

SEQ ID NO: 203091 - RNA, 22 nt, Artificial Sequence
  Synthetic
cucuuuguaauaaacaucacca

SEQ ID NO: 203092 - RNA, 23 nt, Artificial Sequence
  Synthetic
gcucuuuguaauaaacaucacca

SEQ ID NO: 203093 - RNA, 24 nt, Artificial Sequence
  Synthetic
ugcucuuuguaauaaacaucacca

SEQ ID NO: 203094 - RNA, 18 nt, Artificial Sequence
  Synthetic
uaagcagcuucaucacca

SEQ ID NO: 203095 - RNA, 19 nt, Artificial Sequence
  Synthetic
auaagcagcuucaucacca

SEQ ID NO: 203096 - RNA, 20 nt, Artificial Sequence
  Synthetic
aauaagcagcuucaucacca

SEQ ID NO: 203097 - RNA, 21 nt, Artificial Sequence
  Synthetic
aaauaagcagcuucaucacca

SEQ ID NO: 203098 - RNA, 22 nt, Artificial Sequence
  Synthetic
gaaauaagcagcuucaucacca

SEQ ID NO: 203099 - RNA, 23 nt, Artificial Sequence
  Synthetic
ggaaauaagcagcuucaucacca

SEQ ID NO: 203100 - RNA, 24 nt, Artificial Sequence
  Synthetic
uggaaauaagcagcuucaucacca

SEQ ID NO: 203101 - RNA, 18 nt, Artificial Sequence
  Synthetic
augcaauccauaucacca

SEQ ID NO: 203102 - RNA, 19 nt, Artificial Sequence
  Synthetic
gaugcaauccauaucacca

SEQ ID NO: 203103 - RNA, 20 nt, Artificial Sequence
  Synthetic
agaugcaauccauaucacca

SEQ ID NO: 203104 - RNA, 21 nt, Artificial Sequence
  Synthetic
uagaugcaauccauaucacca

SEQ ID NO: 203105 - RNA, 22 nt, Artificial Sequence
  Synthetic
uuagaugcaauccauaucacca

SEQ ID NO: 203106 - RNA, 23 nt, Artificial Sequence
  Synthetic
uuuagaugcaauccauaucacca

SEQ ID NO: 203107 - RNA, 24 nt, Artificial Sequence
  Synthetic
uuuuagaugcaauccauaucacca

SEQ ID NO: 203108 - RNA, 18 nt, Artificial Sequence
  Synthetic
acauacaugaacucacca

SEQ ID NO: 203109 - RNA, 19 nt, Artificial Sequence
  Synthetic
uacauacaugaacucacca

SEQ ID NO: 203110 - RNA, 20 nt, Artificial Sequence
  Synthetic
auacauacaugaacucacca

SEQ ID NO: 203111 - RNA, 21 nt, Artificial Sequence
  Synthetic
uauacauacaugaacucacca

SEQ ID NO: 203112 - RNA, 22 nt, Artificial Sequence
  Synthetic
auauacauacaugaacucacca

SEQ ID NO: 203113 - RNA, 23 nt, Artificial Sequence
  Synthetic
aauauacauacaugaacucacca

SEQ ID NO: 203114 - RNA, 24 nt, Artificial Sequence
  Synthetic
caauauacauacaugaacucacca

SEQ ID NO: 203115 - RNA, 18 nt, Artificial Sequence
  Synthetic
aagaaguaaaagucacca

SEQ ID NO: 203116 - RNA, 19 nt, Artificial Sequence
  Synthetic
caagaaguaaaagucacca

SEQ ID NO: 203117 - RNA, 20 nt, Artificial Sequence
  Synthetic
acaagaaguaaaagucacca

SEQ ID NO: 203118 - RNA, 21 nt, Artificial Sequence
  Synthetic
aacaagaaguaaaagucacca

SEQ ID NO: 203119 - RNA, 22 nt, Artificial Sequence
  Synthetic
uaacaagaaguaaaagucacca

SEQ ID NO: 203120 - RNA, 23 nt, Artificial Sequence
  Synthetic
uuaacaagaaguaaaagucacca

SEQ ID NO: 203121 - RNA, 24 nt, Artificial Sequence
  Synthetic
uuuaacaagaaguaaaagucacca

SEQ ID NO: 203122 - RNA, 18 nt, Artificial Sequence
  Synthetic
gaaauaagccagucacca

SEQ ID NO: 203123 - RNA, 19 nt, Artificial Sequence
  Synthetic
ugaaauaagccagucacca

SEQ ID NO: 203124 - RNA, 20 nt, Artificial Sequence
  Synthetic
gugaaauaagccagucacca

SEQ ID NO: 203125 - RNA, 21 nt, Artificial Sequence
  Synthetic
agugaaauaagccagucacca

SEQ ID NO: 203126 - RNA, 22 nt, Artificial Sequence
  Synthetic
aagugaaauaagccagucacca

SEQ ID NO: 203127 - RNA, 23 nt, Artificial Sequence
  Synthetic
uaagugaaauaagccagucacca

SEQ ID NO: 203128 - RNA, 24 nt, Artificial Sequence
  Synthetic
cuaagugaaauaagccagucacca

SEQ ID NO: 203129 - RNA, 18 nt, Artificial Sequence
  Synthetic
uuuccuuuucagucacca

SEQ ID NO: 203130 - RNA, 19 nt, Artificial Sequence
  Synthetic
uuuuccuuuucagucacca

SEQ ID NO: 203131 - RNA, 20 nt, Artificial Sequence
  Synthetic
guuuuccuuuucagucacca

SEQ ID NO: 203132 - RNA, 21 nt, Artificial Sequence
  Synthetic
uguuuuccuuuucagucacca

SEQ ID NO: 203133 - RNA, 22 nt, Artificial Sequence
  Synthetic
uuguuuuccuuuucagucacca

SEQ ID NO: 203134 - RNA, 23 nt, Artificial Sequence
  Synthetic
auuguuuuccuuuucagucacca

SEQ ID NO: 203135 - RNA, 24 nt, Artificial Sequence
  Synthetic
uauuguuuuccuuuucagucacca

SEQ ID NO: 203136 - RNA, 18 nt, Artificial Sequence
  Synthetic
ugcaauguucauucacca

SEQ ID NO: 203137 - RNA, 19 nt, Artificial Sequence
  Synthetic
augcaauguucauucacca

SEQ ID NO: 203138 - RNA, 20 nt, Artificial Sequence
  Synthetic
uaugcaauguucauucacca

SEQ ID NO: 203139 - RNA, 21 nt, Artificial Sequence
  Synthetic
guaugcaauguucauucacca

SEQ ID NO: 203140 - RNA, 22 nt, Artificial Sequence
  Synthetic
aguaugcaauguucauucacca

SEQ ID NO: 203141 - RNA, 23 nt, Artificial Sequence
  Synthetic
gaguaugcaauguucauucacca

SEQ ID NO: 203142 - RNA, 24 nt, Artificial Sequence
  Synthetic
ugaguaugcaauguucauucacca

SEQ ID NO: 203143 - RNA, 18 nt, Artificial Sequence
  Synthetic
gugcucugaucuucacca

SEQ ID NO: 203144 - RNA, 19 nt, Artificial Sequence
  Synthetic
ugugcucugaucuucacca

SEQ ID NO: 203145 - RNA, 20 nt, Artificial Sequence
  Synthetic
augugcucugaucuucacca

SEQ ID NO: 203146 - RNA, 21 nt, Artificial Sequence
  Synthetic
uaugugcucugaucuucacca

SEQ ID NO: 203147 - RNA, 22 nt, Artificial Sequence
  Synthetic
uuaugugcucugaucuucacca

SEQ ID NO: 203148 - RNA, 23 nt, Artificial Sequence
  Synthetic
auuaugugcucugaucuucacca

SEQ ID NO: 203149 - RNA, 24 nt, Artificial Sequence
  Synthetic
cauuaugugcucugaucuucacca

SEQ ID NO: 203150 - RNA, 18 nt, Artificial Sequence
  Synthetic
uacuaauuuucuucacca

SEQ ID NO: 203151 - RNA, 19 nt, Artificial Sequence
  Synthetic
guacuaauuuucuucacca

SEQ ID NO: 203152 - RNA, 20 nt, Artificial Sequence
  Synthetic
aguacuaauuuucuucacca

SEQ ID NO: 203153 - RNA, 21 nt, Artificial Sequence
  Synthetic
gaguacuaauuuucuucacca

SEQ ID NO: 203154 - RNA, 22 nt, Artificial Sequence
  Synthetic
agaguacuaauuuucuucacca

SEQ ID NO: 203155 - RNA, 23 nt, Artificial Sequence
  Synthetic
aagaguacuaauuuucuucacca

SEQ ID NO: 203156 - RNA, 24 nt, Artificial Sequence
  Synthetic
aaagaguacuaauuuucuucacca

SEQ ID NO: 203157 - RNA, 18 nt, Artificial Sequence
  Synthetic
uuacauuuuauuucacca

SEQ ID NO: 203158 - RNA, 19 nt, Artificial Sequence
  Synthetic
uuuacauuuuauuucacca

SEQ ID NO: 203159 - RNA, 20 nt, Artificial Sequence
  Synthetic
uuuuacauuuuauuucacca

SEQ ID NO: 203160 - RNA, 21 nt, Artificial Sequence
  Synthetic
guuuuacauuuuauuucacca

SEQ ID NO: 203161 - RNA, 22 nt, Artificial Sequence
  Synthetic
cguuuuacauuuuauuucacca

SEQ ID NO: 203162 - RNA, 23 nt, Artificial Sequence
  Synthetic
ccguuuuacauuuuauuucacca

SEQ ID NO: 203163 - RNA, 24 nt, Artificial Sequence
  Synthetic
uccguuuuacauuuuauuucacca

SEQ ID NO: 203164 - RNA, 18 nt, Artificial Sequence
  Synthetic
guuuguuuucuuucacca

SEQ ID NO: 203165 - RNA, 19 nt, Artificial Sequence
  Synthetic
uguuuguuuucuuucacca

SEQ ID NO: 203166 - RNA, 20 nt, Artificial Sequence
  Synthetic
guguuuguuuucuuucacca

SEQ ID NO: 203167 - RNA, 21 nt, Artificial Sequence
  Synthetic
uguguuuguuuucuuucacca

SEQ ID NO: 203168 - RNA, 22 nt, Artificial Sequence
  Synthetic
auguguuuguuuucuuucacca

SEQ ID NO: 203169 - RNA, 23 nt, Artificial Sequence
  Synthetic
aauguguuuguuuucuuucacca

SEQ ID NO: 203170 - RNA, 24 nt, Artificial Sequence
  Synthetic
gaauguguuuguuuucuuucacca

SEQ ID NO: 203171 - RNA, 18 nt, Artificial Sequence
  Synthetic
uauagauggaaaagacca

SEQ ID NO: 203172 - RNA, 19 nt, Artificial Sequence
  Synthetic
guauagauggaaaagacca

SEQ ID NO: 203173 - RNA, 20 nt, Artificial Sequence
  Synthetic
uguauagauggaaaagacca

SEQ ID NO: 203174 - RNA, 21 nt, Artificial Sequence
  Synthetic
guguauagauggaaaagacca

SEQ ID NO: 203175 - RNA, 22 nt, Artificial Sequence
  Synthetic
gguguauagauggaaaagacca

SEQ ID NO: 203176 - RNA, 23 nt, Artificial Sequence
  Synthetic
agguguauagauggaaaagacca

SEQ ID NO: 203177 - RNA, 24 nt, Artificial Sequence
  Synthetic
uagguguauagauggaaaagacca

SEQ ID NO: 203178 - RNA, 18 nt, Artificial Sequence
  Synthetic
caauuucgaaacagacca

SEQ ID NO: 203179 - RNA, 19 nt, Artificial Sequence
  Synthetic
gcaauuucgaaacagacca

SEQ ID NO: 203180 - RNA, 20 nt, Artificial Sequence
  Synthetic
ugcaauuucgaaacagacca

SEQ ID NO: 203181 - RNA, 21 nt, Artificial Sequence
  Synthetic
cugcaauuucgaaacagacca

SEQ ID NO: 203182 - RNA, 22 nt, Artificial Sequence
  Synthetic
gcugcaauuucgaaacagacca

SEQ ID NO: 203183 - RNA, 23 nt, Artificial Sequence
  Synthetic
ggcugcaauuucgaaacagacca

SEQ ID NO: 203184 - RNA, 24 nt, Artificial Sequence
  Synthetic
gggcugcaauuucgaaacagacca

SEQ ID NO: 203185 - RNA, 18 nt, Artificial Sequence
  Synthetic
auaacgcuuuagagacca

SEQ ID NO: 203186 - RNA, 19 nt, Artificial Sequence
  Synthetic
cauaacgcuuuagagacca

SEQ ID NO: 203187 - RNA, 20 nt, Artificial Sequence
  Synthetic
gcauaacgcuuuagagacca

SEQ ID NO: 203188 - RNA, 21 nt, Artificial Sequence
  Synthetic
agcauaacgcuuuagagacca

SEQ ID NO: 203189 - RNA, 22 nt, Artificial Sequence
  Synthetic
gagcauaacgcuuuagagacca

SEQ ID NO: 203190 - RNA, 23 nt, Artificial Sequence
  Synthetic
ggagcauaacgcuuuagagacca

SEQ ID NO: 203191 - RNA, 24 nt, Artificial Sequence
  Synthetic
gggagcauaacgcuuuagagacca

SEQ ID NO: 203192 - RNA, 18 nt, Artificial Sequence
  Synthetic
caggccagcaggagacca

SEQ ID NO: 203193 - RNA, 19 nt, Artificial Sequence
  Synthetic
ucaggccagcaggagacca

SEQ ID NO: 203194 - RNA, 20 nt, Artificial Sequence
  Synthetic
gucaggccagcaggagacca

SEQ ID NO: 203195 - RNA, 21 nt, Artificial Sequence
  Synthetic
ggucaggccagcaggagacca

SEQ ID NO: 203196 - RNA, 22 nt, Artificial Sequence
  Synthetic
gggucaggccagcaggagacca

SEQ ID NO: 203197 - RNA, 23 nt, Artificial Sequence
  Synthetic
ugggucaggccagcaggagacca

SEQ ID NO: 203198 - RNA, 24 nt, Artificial Sequence
  Synthetic
gugggucaggccagcaggagacca

SEQ ID NO: 203199 - RNA, 18 nt, Artificial Sequence
  Synthetic
cuggcaggauggagacca

SEQ ID NO: 203200 - RNA, 19 nt, Artificial Sequence
  Synthetic
ccuggcaggauggagacca

SEQ ID NO: 203201 - RNA, 20 nt, Artificial Sequence
  Synthetic
gccuggcaggauggagacca

SEQ ID NO: 203202 - RNA, 21 nt, Artificial Sequence
  Synthetic
agccuggcaggauggagacca

SEQ ID NO: 203203 - RNA, 22 nt, Artificial Sequence
  Synthetic
aagccuggcaggauggagacca

SEQ ID NO: 203204 - RNA, 23 nt, Artificial Sequence
  Synthetic
aaagccuggcaggauggagacca

SEQ ID NO: 203205 - RNA, 24 nt, Artificial Sequence
  Synthetic
aaaagccuggcaggauggagacca

SEQ ID NO: 203206 - RNA, 18 nt, Artificial Sequence
  Synthetic
agggguggcuggagacca

SEQ ID NO: 203207 - RNA, 19 nt, Artificial Sequence
  Synthetic
aagggguggcuggagacca

SEQ ID NO: 203208 - RNA, 20 nt, Artificial Sequence
  Synthetic
aaagggguggcuggagacca

SEQ ID NO: 203209 - RNA, 21 nt, Artificial Sequence
  Synthetic
uaaagggguggcuggagacca

SEQ ID NO: 203210 - RNA, 22 nt, Artificial Sequence
  Synthetic
uuaaagggguggcuggagacca

SEQ ID NO: 203211 - RNA, 23 nt, Artificial Sequence
  Synthetic
cuuaaagggguggcuggagacca

SEQ ID NO: 203212 - RNA, 24 nt, Artificial Sequence
  Synthetic
ccuuaaagggguggcuggagacca

SEQ ID NO: 203213 - RNA, 18 nt, Artificial Sequence
  Synthetic
aaacagauauauagacca

SEQ ID NO: 203214 - RNA, 19 nt, Artificial Sequence
  Synthetic
aaaacagauauauagacca

SEQ ID NO: 203215 - RNA, 20 nt, Artificial Sequence
  Synthetic
caaaacagauauauagacca

SEQ ID NO: 203216 - RNA, 21 nt, Artificial Sequence
  Synthetic
ccaaaacagauauauagacca

SEQ ID NO: 203217 - RNA, 22 nt, Artificial Sequence
  Synthetic
accaaaacagauauauagacca

SEQ ID NO: 203218 - RNA, 23 nt, Artificial Sequence
  Synthetic
uaccaaaacagauauauagacca

SEQ ID NO: 203219 - RNA, 24 nt, Artificial Sequence
  Synthetic
guaccaaaacagauauauagacca

SEQ ID NO: 203220 - RNA, 18 nt, Artificial Sequence
  Synthetic
acuucuauauuuagacca

SEQ ID NO: 203221 - RNA, 19 nt, Artificial Sequence
  Synthetic
aacuucuauauuuagacca

SEQ ID NO: 203222 - RNA, 20 nt, Artificial Sequence
  Synthetic
gaacuucuauauuuagacca

SEQ ID NO: 203223 - RNA, 21 nt, Artificial Sequence
  Synthetic
ugaacuucuauauuuagacca

SEQ ID NO: 203224 - RNA, 22 nt, Artificial Sequence
  Synthetic
gugaacuucuauauuuagacca

SEQ ID NO: 203225 - RNA, 23 nt, Artificial Sequence
  Synthetic
agugaacuucuauauuuagacca

SEQ ID NO: 203226 - RNA, 24 nt, Artificial Sequence
  Synthetic
cagugaacuucuauauuuagacca

SEQ ID NO: 203227 - RNA, 18 nt, Artificial Sequence
  Synthetic
agcacauucauccgacca

SEQ ID NO: 203228 - RNA, 19 nt, Artificial Sequence
  Synthetic
aagcacauucauccgacca

SEQ ID NO: 203229 - RNA, 20 nt, Artificial Sequence
  Synthetic
gaagcacauucauccgacca

SEQ ID NO: 203230 - RNA, 21 nt, Artificial Sequence
  Synthetic
ugaagcacauucauccgacca

SEQ ID NO: 203231 - RNA, 22 nt, Artificial Sequence
  Synthetic
augaagcacauucauccgacca

SEQ ID NO: 203232 - RNA, 23 nt, Artificial Sequence
  Synthetic
uaugaagcacauucauccgacca

SEQ ID NO: 203233 - RNA, 24 nt, Artificial Sequence
  Synthetic
uuaugaagcacauucauccgacca

SEQ ID NO: 203234 - RNA, 18 nt, Artificial Sequence
  Synthetic
gaagaaagaauucgacca

SEQ ID NO: 203235 - RNA, 19 nt, Artificial Sequence
  Synthetic
agaagaaagaauucgacca

SEQ ID NO: 203236 - RNA, 20 nt, Artificial Sequence
  Synthetic
cagaagaaagaauucgacca

SEQ ID NO: 203237 - RNA, 21 nt, Artificial Sequence
  Synthetic
ucagaagaaagaauucgacca

SEQ ID NO: 203238 - RNA, 22 nt, Artificial Sequence
  Synthetic
cucagaagaaagaauucgacca

SEQ ID NO: 203239 - RNA, 23 nt, Artificial Sequence
  Synthetic
ccucagaagaaagaauucgacca

SEQ ID NO: 203240 - RNA, 24 nt, Artificial Sequence
  Synthetic
uccucagaagaaagaauucgacca

SEQ ID NO: 203241 - RNA, 18 nt, Artificial Sequence
  Synthetic
uaaaauuucccaggacca

SEQ ID NO: 203242 - RNA, 19 nt, Artificial Sequence
  Synthetic
cuaaaauuucccaggacca

SEQ ID NO: 203243 - RNA, 20 nt, Artificial Sequence
  Synthetic
gcuaaaauuucccaggacca

SEQ ID NO: 203244 - RNA, 21 nt, Artificial Sequence
  Synthetic
agcuaaaauuucccaggacca

SEQ ID NO: 203245 - RNA, 22 nt, Artificial Sequence
  Synthetic
uagcuaaaauuucccaggacca

SEQ ID NO: 203246 - RNA, 23 nt, Artificial Sequence
  Synthetic
auagcuaaaauuucccaggacca

SEQ ID NO: 203247 - RNA, 24 nt, Artificial Sequence
  Synthetic
uauagcuaaaauuucccaggacca

SEQ ID NO: 203248 - RNA, 18 nt, Artificial Sequence
  Synthetic
aggugggguguaggacca

SEQ ID NO: 203249 - RNA, 19 nt, Artificial Sequence
  Synthetic
caggugggguguaggacca

SEQ ID NO: 203250 - RNA, 20 nt, Artificial Sequence
  Synthetic
gcaggugggguguaggacca

SEQ ID NO: 203251 - RNA, 21 nt, Artificial Sequence
  Synthetic
cgcaggugggguguaggacca

SEQ ID NO: 203252 - RNA, 22 nt, Artificial Sequence
  Synthetic
acgcaggugggguguaggacca

SEQ ID NO: 203253 - RNA, 23 nt, Artificial Sequence
  Synthetic
gacgcaggugggguguaggacca

SEQ ID NO: 203254 - RNA, 24 nt, Artificial Sequence
  Synthetic
ggacgcaggugggguguaggacca

SEQ ID NO: 203255 - RNA, 18 nt, Artificial Sequence
  Synthetic
caugguugccagggacca

SEQ ID NO: 203256 - RNA, 19 nt, Artificial Sequence
  Synthetic
gcaugguugccagggacca

SEQ ID NO: 203257 - RNA, 20 nt, Artificial Sequence
  Synthetic
ugcaugguugccagggacca

SEQ ID NO: 203258 - RNA, 21 nt, Artificial Sequence
  Synthetic
uugcaugguugccagggacca

SEQ ID NO: 203259 - RNA, 22 nt, Artificial Sequence
  Synthetic
guugcaugguugccagggacca

SEQ ID NO: 203260 - RNA, 23 nt, Artificial Sequence
  Synthetic
aguugcaugguugccagggacca

SEQ ID NO: 203261 - RNA, 24 nt, Artificial Sequence
  Synthetic
uaguugcaugguugccagggacca

SEQ ID NO: 203262 - RNA, 18 nt, Artificial Sequence
  Synthetic
uugcuacauauuggacca

SEQ ID NO: 203263 - RNA, 19 nt, Artificial Sequence
  Synthetic
uuugcuacauauuggacca

SEQ ID NO: 203264 - RNA, 20 nt, Artificial Sequence
  Synthetic
auuugcuacauauuggacca

SEQ ID NO: 203265 - RNA, 21 nt, Artificial Sequence
  Synthetic
cauuugcuacauauuggacca

SEQ ID NO: 203266 - RNA, 22 nt, Artificial Sequence
  Synthetic
acauuugcuacauauuggacca

SEQ ID NO: 203267 - RNA, 23 nt, Artificial Sequence
  Synthetic
cacauuugcuacauauuggacca

SEQ ID NO: 203268 - RNA, 24 nt, Artificial Sequence
  Synthetic
gcacauuugcuacauauuggacca

SEQ ID NO: 203269 - RNA, 18 nt, Artificial Sequence
  Synthetic
ggcugaauugaaugacca

SEQ ID NO: 203270 - RNA, 19 nt, Artificial Sequence
  Synthetic
uggcugaauugaaugacca

SEQ ID NO: 203271 - RNA, 20 nt, Artificial Sequence
  Synthetic
auggcugaauugaaugacca

SEQ ID NO: 203272 - RNA, 21 nt, Artificial Sequence
  Synthetic
aauggcugaauugaaugacca

SEQ ID NO: 203273 - RNA, 22 nt, Artificial Sequence
  Synthetic
aaauggcugaauugaaugacca

SEQ ID NO: 203274 - RNA, 23 nt, Artificial Sequence
  Synthetic
gaaauggcugaauugaaugacca

SEQ ID NO: 203275 - RNA, 24 nt, Artificial Sequence
  Synthetic
agaaauggcugaauugaaugacca

SEQ ID NO: 203276 - RNA, 18 nt, Artificial Sequence
  Synthetic
acauaaaggcacugacca

SEQ ID NO: 203277 - RNA, 19 nt, Artificial Sequence
  Synthetic
cacauaaaggcacugacca

SEQ ID NO: 203278 - RNA, 20 nt, Artificial Sequence
  Synthetic
ccacauaaaggcacugacca

SEQ ID NO: 203279 - RNA, 21 nt, Artificial Sequence
  Synthetic
gccacauaaaggcacugacca

SEQ ID NO: 203280 - RNA, 22 nt, Artificial Sequence
  Synthetic
ugccacauaaaggcacugacca

SEQ ID NO: 203281 - RNA, 23 nt, Artificial Sequence
  Synthetic
augccacauaaaggcacugacca

SEQ ID NO: 203282 - RNA, 24 nt, Artificial Sequence
  Synthetic
aaugccacauaaaggcacugacca

SEQ ID NO: 203283 - RNA, 18 nt, Artificial Sequence
  Synthetic
ucuuuaaaauccugacca

SEQ ID NO: 203284 - RNA, 19 nt, Artificial Sequence
  Synthetic
aucuuuaaaauccugacca

SEQ ID NO: 203285 - RNA, 20 nt, Artificial Sequence
  Synthetic
caucuuuaaaauccugacca

SEQ ID NO: 203286 - RNA, 21 nt, Artificial Sequence
  Synthetic
ucaucuuuaaaauccugacca

SEQ ID NO: 203287 - RNA, 22 nt, Artificial Sequence
  Synthetic
uucaucuuuaaaauccugacca

SEQ ID NO: 203288 - RNA, 23 nt, Artificial Sequence
  Synthetic
auucaucuuuaaaauccugacca

SEQ ID NO: 203289 - RNA, 24 nt, Artificial Sequence
  Synthetic
uauucaucuuuaaaauccugacca

SEQ ID NO: 203290 - RNA, 18 nt, Artificial Sequence
  Synthetic
cccaagccucgcugacca

SEQ ID NO: 203291 - RNA, 19 nt, Artificial Sequence
  Synthetic
ucccaagccucgcugacca

SEQ ID NO: 203292 - RNA, 20 nt, Artificial Sequence
  Synthetic
aucccaagccucgcugacca

SEQ ID NO: 203293 - RNA, 21 nt, Artificial Sequence
  Synthetic
aaucccaagccucgcugacca

SEQ ID NO: 203294 - RNA, 22 nt, Artificial Sequence
  Synthetic
uaaucccaagccucgcugacca

SEQ ID NO: 203295 - RNA, 23 nt, Artificial Sequence
  Synthetic
cuaaucccaagccucgcugacca

SEQ ID NO: 203296 - RNA, 24 nt, Artificial Sequence
  Synthetic
acuaaucccaagccucgcugacca

SEQ ID NO: 203297 - RNA, 18 nt, Artificial Sequence
  Synthetic
ggaagccaguucugacca

SEQ ID NO: 203298 - RNA, 19 nt, Artificial Sequence
  Synthetic
uggaagccaguucugacca

SEQ ID NO: 203299 - RNA, 20 nt, Artificial Sequence
  Synthetic
uuggaagccaguucugacca

SEQ ID NO: 203300 - RNA, 21 nt, Artificial Sequence
  Synthetic
uuuggaagccaguucugacca

SEQ ID NO: 203301 - RNA, 22 nt, Artificial Sequence
  Synthetic
auuuggaagccaguucugacca

SEQ ID NO: 203302 - RNA, 23 nt, Artificial Sequence
  Synthetic
cauuuggaagccaguucugacca

SEQ ID NO: 203303 - RNA, 24 nt, Artificial Sequence
  Synthetic
ccauuuggaagccaguucugacca

SEQ ID NO: 203304 - RNA, 18 nt, Artificial Sequence
  Synthetic
auaauacuuuagugacca

SEQ ID NO: 203305 - RNA, 19 nt, Artificial Sequence
  Synthetic
aauaauacuuuagugacca

SEQ ID NO: 203306 - RNA, 20 nt, Artificial Sequence
  Synthetic
uaauaauacuuuagugacca

SEQ ID NO: 203307 - RNA, 21 nt, Artificial Sequence
  Synthetic
uuaauaauacuuuagugacca

SEQ ID NO: 203308 - RNA, 22 nt, Artificial Sequence
  Synthetic
uuuaauaauacuuuagugacca

SEQ ID NO: 203309 - RNA, 23 nt, Artificial Sequence
  Synthetic
auuuaauaauacuuuagugacca

SEQ ID NO: 203310 - RNA, 24 nt, Artificial Sequence
  Synthetic
cauuuaauaauacuuuagugacca

SEQ ID NO: 203311 - RNA, 18 nt, Artificial Sequence
  Synthetic
ucaggaaaaguuugacca

SEQ ID NO: 203312 - RNA, 19 nt, Artificial Sequence
  Synthetic
gucaggaaaaguuugacca

SEQ ID NO: 203313 - RNA, 20 nt, Artificial Sequence
  Synthetic
ggucaggaaaaguuugacca

SEQ ID NO: 203314 - RNA, 21 nt, Artificial Sequence
  Synthetic
aggucaggaaaaguuugacca

SEQ ID NO: 203315 - RNA, 22 nt, Artificial Sequence
  Synthetic
aaggucaggaaaaguuugacca

SEQ ID NO: 203316 - RNA, 23 nt, Artificial Sequence
  Synthetic
aaaggucaggaaaaguuugacca

SEQ ID NO: 203317 - RNA, 24 nt, Artificial Sequence
  Synthetic
aaaaggucaggaaaaguuugacca

SEQ ID NO: 203318 - RNA, 18 nt, Artificial Sequence
  Synthetic
guuuuccauaaaauacca

SEQ ID NO: 203319 - RNA, 19 nt, Artificial Sequence
  Synthetic
uguuuuccauaaaauacca

SEQ ID NO: 203320 - RNA, 20 nt, Artificial Sequence
  Synthetic
guguuuuccauaaaauacca

SEQ ID NO: 203321 - RNA, 21 nt, Artificial Sequence
  Synthetic
uguguuuuccauaaaauacca

SEQ ID NO: 203322 - RNA, 22 nt, Artificial Sequence
  Synthetic
cuguguuuuccauaaaauacca

SEQ ID NO: 203323 - RNA, 23 nt, Artificial Sequence
  Synthetic
acuguguuuuccauaaaauacca

SEQ ID NO: 203324 - RNA, 24 nt, Artificial Sequence
  Synthetic
uacuguguuuuccauaaaauacca

SEQ ID NO: 203325 - RNA, 18 nt, Artificial Sequence
  Synthetic
ugacauaugcaaauacca

SEQ ID NO: 203326 - RNA, 19 nt, Artificial Sequence
  Synthetic
uugacauaugcaaauacca

SEQ ID NO: 203327 - RNA, 20 nt, Artificial Sequence
  Synthetic
uuugacauaugcaaauacca

SEQ ID NO: 203328 - RNA, 21 nt, Artificial Sequence
  Synthetic
uuuugacauaugcaaauacca

SEQ ID NO: 203329 - RNA, 22 nt, Artificial Sequence
  Synthetic
guuuugacauaugcaaauacca

SEQ ID NO: 203330 - RNA, 23 nt, Artificial Sequence
  Synthetic
aguuuugacauaugcaaauacca

SEQ ID NO: 203331 - RNA, 24 nt, Artificial Sequence
  Synthetic
aaguuuugacauaugcaaauacca

SEQ ID NO: 203332 - RNA, 18 nt, Artificial Sequence
  Synthetic
aaaaggucaguaauacca

SEQ ID NO: 203333 - RNA, 19 nt, Artificial Sequence
  Synthetic
uaaaaggucaguaauacca

SEQ ID NO: 203334 - RNA, 20 nt, Artificial Sequence
  Synthetic
uuaaaaggucaguaauacca

SEQ ID NO: 203335 - RNA, 21 nt, Artificial Sequence
  Synthetic
auuaaaaggucaguaauacca

SEQ ID NO: 203336 - RNA, 22 nt, Artificial Sequence
  Synthetic
gauuaaaaggucaguaauacca

SEQ ID NO: 203337 - RNA, 23 nt, Artificial Sequence
  Synthetic
agauuaaaaggucaguaauacca

SEQ ID NO: 203338 - RNA, 24 nt, Artificial Sequence
  Synthetic
gagauuaaaaggucaguaauacca

SEQ ID NO: 203339 - RNA, 18 nt, Artificial Sequence
  Synthetic
uauguaaaaugcauacca

SEQ ID NO: 203340 - RNA, 19 nt, Artificial Sequence
  Synthetic
auauguaaaaugcauacca

SEQ ID NO: 203341 - RNA, 20 nt, Artificial Sequence
  Synthetic
uauauguaaaaugcauacca

SEQ ID NO: 203342 - RNA, 21 nt, Artificial Sequence
  Synthetic
auauauguaaaaugcauacca

SEQ ID NO: 203343 - RNA, 22 nt, Artificial Sequence
  Synthetic
gauauauguaaaaugcauacca

SEQ ID NO: 203344 - RNA, 23 nt, Artificial Sequence
  Synthetic
agauauauguaaaaugcauacca

SEQ ID NO: 203345 - RNA, 24 nt, Artificial Sequence
  Synthetic
aagauauauguaaaaugcauacca

SEQ ID NO: 203346 - RNA, 18 nt, Artificial Sequence
  Synthetic
uagucuaaaugcauacca

SEQ ID NO: 203347 - RNA, 19 nt, Artificial Sequence
  Synthetic
uuagucuaaaugcauacca

SEQ ID NO: 203348 - RNA, 20 nt, Artificial Sequence
  Synthetic
auuagucuaaaugcauacca

SEQ ID NO: 203349 - RNA, 21 nt, Artificial Sequence
  Synthetic
cauuagucuaaaugcauacca

SEQ ID NO: 203350 - RNA, 22 nt, Artificial Sequence
  Synthetic
gcauuagucuaaaugcauacca

SEQ ID NO: 203351 - RNA, 23 nt, Artificial Sequence
  Synthetic
ggcauuagucuaaaugcauacca

SEQ ID NO: 203352 - RNA, 24 nt, Artificial Sequence
  Synthetic
uggcauuagucuaaaugcauacca

SEQ ID NO: 203353 - RNA, 18 nt, Artificial Sequence
  Synthetic
uguuuuaaaugcauacca

SEQ ID NO: 203354 - RNA, 19 nt, Artificial Sequence
  Synthetic
uuguuuuaaaugcauacca

SEQ ID NO: 203355 - RNA, 20 nt, Artificial Sequence
  Synthetic
guuguuuuaaaugcauacca

SEQ ID NO: 203356 - RNA, 21 nt, Artificial Sequence
  Synthetic
aguuguuuuaaaugcauacca

SEQ ID NO: 203357 - RNA, 22 nt, Artificial Sequence
  Synthetic
aaguuguuuuaaaugcauacca

SEQ ID NO: 203358 - RNA, 23 nt, Artificial Sequence
  Synthetic
aaaguuguuuuaaaugcauacca

SEQ ID NO: 203359 - RNA, 24 nt, Artificial Sequence
  Synthetic
uaaaguuguuuuaaaugcauacca

SEQ ID NO: 203360 - RNA, 18 nt, Artificial Sequence
  Synthetic
auuguguguuauauacca

SEQ ID NO: 203361 - RNA, 19 nt, Artificial Sequence
  Synthetic
uauuguguguuauauacca

SEQ ID NO: 203362 - RNA, 20 nt, Artificial Sequence
  Synthetic
uuauuguguguuauauacca

SEQ ID NO: 203363 - RNA, 21 nt, Artificial Sequence
  Synthetic
uuuauuguguguuauauacca

SEQ ID NO: 203364 - RNA, 22 nt, Artificial Sequence
  Synthetic
auuuauuguguguuauauacca

SEQ ID NO: 203365 - RNA, 23 nt, Artificial Sequence
  Synthetic
cauuuauuguguguuauauacca

SEQ ID NO: 203366 - RNA, 24 nt, Artificial Sequence
  Synthetic
ucauuuauuguguguuauauacca

SEQ ID NO: 203367 - RNA, 18 nt, Artificial Sequence
  Synthetic
gcagcccucaguauacca

SEQ ID NO: 203368 - RNA, 19 nt, Artificial Sequence
  Synthetic
ugcagcccucaguauacca

SEQ ID NO: 203369 - RNA, 20 nt, Artificial Sequence
  Synthetic
augcagcccucaguauacca

SEQ ID NO: 203370 - RNA, 21 nt, Artificial Sequence
  Synthetic
gaugcagcccucaguauacca

SEQ ID NO: 203371 - RNA, 22 nt, Artificial Sequence
  Synthetic
ugaugcagcccucaguauacca

SEQ ID NO: 203372 - RNA, 23 nt, Artificial Sequence
  Synthetic
cugaugcagcccucaguauacca

SEQ ID NO: 203373 - RNA, 24 nt, Artificial Sequence
  Synthetic
ucugaugcagcccucaguauacca

SEQ ID NO: 203374 - RNA, 18 nt, Artificial Sequence
  Synthetic
ccacacuaaaaacuacca

SEQ ID NO: 203375 - RNA, 19 nt, Artificial Sequence
  Synthetic
uccacacuaaaaacuacca

SEQ ID NO: 203376 - RNA, 20 nt, Artificial Sequence
  Synthetic
auccacacuaaaaacuacca

SEQ ID NO: 203377 - RNA, 21 nt, Artificial Sequence
  Synthetic
aauccacacuaaaaacuacca

SEQ ID NO: 203378 - RNA, 22 nt, Artificial Sequence
  Synthetic
aaauccacacuaaaaacuacca

SEQ ID NO: 203379 - RNA, 23 nt, Artificial Sequence
  Synthetic
caaauccacacuaaaaacuacca

SEQ ID NO: 203380 - RNA, 24 nt, Artificial Sequence
  Synthetic
ucaaauccacacuaaaaacuacca

SEQ ID NO: 203381 - RNA, 18 nt, Artificial Sequence
  Synthetic
acaauuuaaaaacuacca

SEQ ID NO: 203382 - RNA, 19 nt, Artificial Sequence
  Synthetic
aacaauuuaaaaacuacca

SEQ ID NO: 203383 - RNA, 20 nt, Artificial Sequence
  Synthetic
caacaauuuaaaaacuacca

SEQ ID NO: 203384 - RNA, 21 nt, Artificial Sequence
  Synthetic
acaacaauuuaaaaacuacca

SEQ ID NO: 203385 - RNA, 22 nt, Artificial Sequence
  Synthetic
aacaacaauuuaaaaacuacca

SEQ ID NO: 203386 - RNA, 23 nt, Artificial Sequence
  Synthetic
uaacaacaauuuaaaaacuacca

SEQ ID NO: 203387 - RNA, 24 nt, Artificial Sequence
  Synthetic
auaacaacaauuuaaaaacuacca

SEQ ID NO: 203388 - RNA, 18 nt, Artificial Sequence
  Synthetic
uccccagagacccuacca

SEQ ID NO: 203389 - RNA, 19 nt, Artificial Sequence
  Synthetic
uuccccagagacccuacca

SEQ ID NO: 203390 - RNA, 20 nt, Artificial Sequence
  Synthetic
cuuccccagagacccuacca

SEQ ID NO: 203391 - RNA, 21 nt, Artificial Sequence
  Synthetic
acuuccccagagacccuacca

SEQ ID NO: 203392 - RNA, 22 nt, Artificial Sequence
  Synthetic
uacuuccccagagacccuacca

SEQ ID NO: 203393 - RNA, 23 nt, Artificial Sequence
  Synthetic
guacuuccccagagacccuacca

SEQ ID NO: 203394 - RNA, 24 nt, Artificial Sequence
  Synthetic
uguacuuccccagagacccuacca

SEQ ID NO: 203395 - RNA, 18 nt, Artificial Sequence
  Synthetic
acaagcuuuccccuacca

SEQ ID NO: 203396 - RNA, 19 nt, Artificial Sequence
  Synthetic
cacaagcuuuccccuacca

SEQ ID NO: 203397 - RNA, 20 nt, Artificial Sequence
  Synthetic
ucacaagcuuuccccuacca

SEQ ID NO: 203398 - RNA, 21 nt, Artificial Sequence
  Synthetic
cucacaagcuuuccccuacca

SEQ ID NO: 203399 - RNA, 22 nt, Artificial Sequence
  Synthetic
gcucacaagcuuuccccuacca

SEQ ID NO: 203400 - RNA, 23 nt, Artificial Sequence
  Synthetic
agcucacaagcuuuccccuacca

SEQ ID NO: 203401 - RNA, 24 nt, Artificial Sequence
  Synthetic
cagcucacaagcuuuccccuacca

SEQ ID NO: 203402 - RNA, 18 nt, Artificial Sequence
  Synthetic
ggaaugaagugccuacca

SEQ ID NO: 203403 - RNA, 19 nt, Artificial Sequence
  Synthetic
uggaaugaagugccuacca

SEQ ID NO: 203404 - RNA, 20 nt, Artificial Sequence
  Synthetic
uuggaaugaagugccuacca

SEQ ID NO: 203405 - RNA, 21 nt, Artificial Sequence
  Synthetic
auuggaaugaagugccuacca

SEQ ID NO: 203406 - RNA, 22 nt, Artificial Sequence
  Synthetic
aauuggaaugaagugccuacca

SEQ ID NO: 203407 - RNA, 23 nt, Artificial Sequence
  Synthetic
aaauuggaaugaagugccuacca

SEQ ID NO: 203408 - RNA, 24 nt, Artificial Sequence
  Synthetic
aaaauuggaaugaagugccuacca

SEQ ID NO: 203409 - RNA, 18 nt, Artificial Sequence
  Synthetic
uugcuuuucucucuacca

SEQ ID NO: 203410 - RNA, 19 nt, Artificial Sequence
  Synthetic
uuugcuuuucucucuacca

SEQ ID NO: 203411 - RNA, 20 nt, Artificial Sequence
  Synthetic
auuugcuuuucucucuacca

SEQ ID NO: 203412 - RNA, 21 nt, Artificial Sequence
  Synthetic
aauuugcuuuucucucuacca

SEQ ID NO: 203413 - RNA, 22 nt, Artificial Sequence
  Synthetic
aaauuugcuuuucucucuacca

SEQ ID NO: 203414 - RNA, 23 nt, Artificial Sequence
  Synthetic
uaaauuugcuuuucucucuacca

SEQ ID NO: 203415 - RNA, 24 nt, Artificial Sequence
  Synthetic
uuaaauuugcuuuucucucuacca

SEQ ID NO: 203416 - RNA, 18 nt, Artificial Sequence
  Synthetic
acacgaaucuuucuacca

SEQ ID NO: 203417 - RNA, 19 nt, Artificial Sequence
  Synthetic
aacacgaaucuuucuacca

SEQ ID NO: 203418 - RNA, 20 nt, Artificial Sequence
  Synthetic
gaacacgaaucuuucuacca

SEQ ID NO: 203419 - RNA, 21 nt, Artificial Sequence
  Synthetic
agaacacgaaucuuucuacca

SEQ ID NO: 203420 - RNA, 22 nt, Artificial Sequence
  Synthetic
aagaacacgaaucuuucuacca

SEQ ID NO: 203421 - RNA, 23 nt, Artificial Sequence
  Synthetic
aaagaacacgaaucuuucuacca

SEQ ID NO: 203422 - RNA, 24 nt, Artificial Sequence
  Synthetic
aaaagaacacgaaucuuucuacca

SEQ ID NO: 203423 - RNA, 18 nt, Artificial Sequence
  Synthetic
ugagacucaaaaguacca

SEQ ID NO: 203424 - RNA, 19 nt, Artificial Sequence
  Synthetic
uugagacucaaaaguacca

SEQ ID NO: 203425 - RNA, 20 nt, Artificial Sequence
  Synthetic
uuugagacucaaaaguacca

SEQ ID NO: 203426 - RNA, 21 nt, Artificial Sequence
  Synthetic
uuuugagacucaaaaguacca

SEQ ID NO: 203427 - RNA, 22 nt, Artificial Sequence
  Synthetic
auuuugagacucaaaaguacca

SEQ ID NO: 203428 - RNA, 23 nt, Artificial Sequence
  Synthetic
gauuuugagacucaaaaguacca

SEQ ID NO: 203429 - RNA, 24 nt, Artificial Sequence
  Synthetic
ugauuuugagacucaaaaguacca

SEQ ID NO: 203430 - RNA, 18 nt, Artificial Sequence
  Synthetic
uuauaugguacaguacca

SEQ ID NO: 203431 - RNA, 19 nt, Artificial Sequence
  Synthetic
auuauaugguacaguacca

SEQ ID NO: 203432 - RNA, 20 nt, Artificial Sequence
  Synthetic
uauuauaugguacaguacca

SEQ ID NO: 203433 - RNA, 21 nt, Artificial Sequence
  Synthetic
auauuauaugguacaguacca

SEQ ID NO: 203434 - RNA, 22 nt, Artificial Sequence
  Synthetic
cauauuauaugguacaguacca

SEQ ID NO: 203435 - RNA, 23 nt, Artificial Sequence
  Synthetic
ccauauuauaugguacaguacca

SEQ ID NO: 203436 - RNA, 24 nt, Artificial Sequence
  Synthetic
uccauauuauaugguacaguacca

SEQ ID NO: 203437 - RNA, 18 nt, Artificial Sequence
  Synthetic
uggaaacaaggaguacca

SEQ ID NO: 203438 - RNA, 19 nt, Artificial Sequence
  Synthetic
cuggaaacaaggaguacca

SEQ ID NO: 203439 - RNA, 20 nt, Artificial Sequence
  Synthetic
ucuggaaacaaggaguacca

SEQ ID NO: 203440 - RNA, 21 nt, Artificial Sequence
  Synthetic
uucuggaaacaaggaguacca

SEQ ID NO: 203441 - RNA, 22 nt, Artificial Sequence
  Synthetic
cuucuggaaacaaggaguacca

SEQ ID NO: 203442 - RNA, 23 nt, Artificial Sequence
  Synthetic
ucuucuggaaacaaggaguacca

SEQ ID NO: 203443 - RNA, 24 nt, Artificial Sequence
  Synthetic
gucuucuggaaacaaggaguacca

SEQ ID NO: 203444 - RNA, 18 nt, Artificial Sequence
  Synthetic
cuccuccaaauaguacca

SEQ ID NO: 203445 - RNA, 19 nt, Artificial Sequence
  Synthetic
acuccuccaaauaguacca

SEQ ID NO: 203446 - RNA, 20 nt, Artificial Sequence
  Synthetic
aacuccuccaaauaguacca

SEQ ID NO: 203447 - RNA, 21 nt, Artificial Sequence
  Synthetic
gaacuccuccaaauaguacca

SEQ ID NO: 203448 - RNA, 22 nt, Artificial Sequence
  Synthetic
agaacuccuccaaauaguacca

SEQ ID NO: 203449 - RNA, 23 nt, Artificial Sequence
  Synthetic
gagaacuccuccaaauaguacca

SEQ ID NO: 203450 - RNA, 24 nt, Artificial Sequence
  Synthetic
agagaacuccuccaaauaguacca

SEQ ID NO: 203451 - RNA, 18 nt, Artificial Sequence
  Synthetic
uugguauuugagguacca

SEQ ID NO: 203452 - RNA, 19 nt, Artificial Sequence
  Synthetic
guugguauuugagguacca

SEQ ID NO: 203453 - RNA, 20 nt, Artificial Sequence
  Synthetic
uguugguauuugagguacca

SEQ ID NO: 203454 - RNA, 21 nt, Artificial Sequence
  Synthetic
cuguugguauuugagguacca

SEQ ID NO: 203455 - RNA, 22 nt, Artificial Sequence
  Synthetic
acuguugguauuugagguacca

SEQ ID NO: 203456 - RNA, 23 nt, Artificial Sequence
  Synthetic
aacuguugguauuugagguacca

SEQ ID NO: 203457 - RNA, 24 nt, Artificial Sequence
  Synthetic
aaacuguugguauuugagguacca

SEQ ID NO: 203458 - RNA, 18 nt, Artificial Sequence
  Synthetic
accaucuccgggguacca

SEQ ID NO: 203459 - RNA, 19 nt, Artificial Sequence
  Synthetic
uaccaucuccgggguacca

SEQ ID NO: 203460 - RNA, 20 nt, Artificial Sequence
  Synthetic
cuaccaucuccgggguacca

SEQ ID NO: 203461 - RNA, 21 nt, Artificial Sequence
  Synthetic
acuaccaucuccgggguacca

SEQ ID NO: 203462 - RNA, 22 nt, Artificial Sequence
  Synthetic
aacuaccaucuccgggguacca

SEQ ID NO: 203463 - RNA, 23 nt, Artificial Sequence
  Synthetic
aaacuaccaucuccgggguacca

SEQ ID NO: 203464 - RNA, 24 nt, Artificial Sequence
  Synthetic
gaaacuaccaucuccgggguacca

SEQ ID NO: 203465 - RNA, 18 nt, Artificial Sequence
  Synthetic
cauccugcacauguacca

SEQ ID NO: 203466 - RNA, 19 nt, Artificial Sequence
  Synthetic
acauccugcacauguacca

SEQ ID NO: 203467 - RNA, 20 nt, Artificial Sequence
  Synthetic
cacauccugcacauguacca

SEQ ID NO: 203468 - RNA, 21 nt, Artificial Sequence
  Synthetic
gcacauccugcacauguacca

SEQ ID NO: 203469 - RNA, 22 nt, Artificial Sequence
  Synthetic
ugcacauccugcacauguacca

SEQ ID NO: 203470 - RNA, 23 nt, Artificial Sequence
  Synthetic
cugcacauccugcacauguacca

SEQ ID NO: 203471 - RNA, 24 nt, Artificial Sequence
  Synthetic
ccugcacauccugcacauguacca

SEQ ID NO: 203472 - RNA, 18 nt, Artificial Sequence
  Synthetic
gcagggauguuuguacca

SEQ ID NO: 203473 - RNA, 19 nt, Artificial Sequence
  Synthetic
agcagggauguuuguacca

SEQ ID NO: 203474 - RNA, 20 nt, Artificial Sequence
  Synthetic
uagcagggauguuuguacca

SEQ ID NO: 203475 - RNA, 21 nt, Artificial Sequence
  Synthetic
cuagcagggauguuuguacca

SEQ ID NO: 203476 - RNA, 22 nt, Artificial Sequence
  Synthetic
ucuagcagggauguuuguacca

SEQ ID NO: 203477 - RNA, 23 nt, Artificial Sequence
  Synthetic
cucuagcagggauguuuguacca

SEQ ID NO: 203478 - RNA, 24 nt, Artificial Sequence
  Synthetic
gcucuagcagggauguuuguacca

SEQ ID NO: 203479 - RNA, 18 nt, Artificial Sequence
  Synthetic
uaaaaggucaccuuacca

SEQ ID NO: 203480 - RNA, 19 nt, Artificial Sequence
  Synthetic
uuaaaaggucaccuuacca

SEQ ID NO: 203481 - RNA, 20 nt, Artificial Sequence
  Synthetic
auuaaaaggucaccuuacca

SEQ ID NO: 203482 - RNA, 21 nt, Artificial Sequence
  Synthetic
aauuaaaaggucaccuuacca

SEQ ID NO: 203483 - RNA, 22 nt, Artificial Sequence
  Synthetic
aaauuaaaaggucaccuuacca

SEQ ID NO: 203484 - RNA, 23 nt, Artificial Sequence
  Synthetic
aaaauuaaaaggucaccuuacca

SEQ ID NO: 203485 - RNA, 24 nt, Artificial Sequence
  Synthetic
aaaaauuaaaaggucaccuuacca

SEQ ID NO: 203486 - RNA, 18 nt, Artificial Sequence
  Synthetic
uucuuguugcaguuacca

SEQ ID NO: 203487 - RNA, 19 nt, Artificial Sequence
  Synthetic
guucuuguugcaguuacca

SEQ ID NO: 203488 - RNA, 20 nt, Artificial Sequence
  Synthetic
aguucuuguugcaguuacca

SEQ ID NO: 203489 - RNA, 21 nt, Artificial Sequence
  Synthetic
caguucuuguugcaguuacca

SEQ ID NO: 203490 - RNA, 22 nt, Artificial Sequence
  Synthetic
acaguucuuguugcaguuacca

SEQ ID NO: 203491 - RNA, 23 nt, Artificial Sequence
  Synthetic
gacaguucuuguugcaguuacca

SEQ ID NO: 203492 - RNA, 24 nt, Artificial Sequence
  Synthetic
agacaguucuuguugcaguuacca

SEQ ID NO: 203493 - RNA, 18 nt, Artificial Sequence
  Synthetic
caggacuuuuauuuacca

SEQ ID NO: 203494 - RNA, 19 nt, Artificial Sequence
  Synthetic
ccaggacuuuuauuuacca

SEQ ID NO: 203495 - RNA, 20 nt, Artificial Sequence
  Synthetic
cccaggacuuuuauuuacca

SEQ ID NO: 203496 - RNA, 21 nt, Artificial Sequence
  Synthetic
ucccaggacuuuuauuuacca

SEQ ID NO: 203497 - RNA, 22 nt, Artificial Sequence
  Synthetic
cucccaggacuuuuauuuacca

SEQ ID NO: 203498 - RNA, 23 nt, Artificial Sequence
  Synthetic
acucccaggacuuuuauuuacca

SEQ ID NO: 203499 - RNA, 24 nt, Artificial Sequence
  Synthetic
uacucccaggacuuuuauuuacca

SEQ ID NO: 203500 - RNA, 18 nt, Artificial Sequence
  Synthetic
uuaaugcaccguuuacca

SEQ ID NO: 203501 - RNA, 19 nt, Artificial Sequence
  Synthetic
uuuaaugcaccguuuacca

SEQ ID NO: 203502 - RNA, 20 nt, Artificial Sequence
  Synthetic
uuuuaaugcaccguuuacca

SEQ ID NO: 203503 - RNA, 21 nt, Artificial Sequence
  Synthetic
auuuuaaugcaccguuuacca

SEQ ID NO: 203504 - RNA, 22 nt, Artificial Sequence
  Synthetic
uauuuuaaugcaccguuuacca

SEQ ID NO: 203505 - RNA, 23 nt, Artificial Sequence
  Synthetic
uuauuuuaaugcaccguuuacca

SEQ ID NO: 203506 - RNA, 24 nt, Artificial Sequence
  Synthetic
auuauuuuaaugcaccguuuacca

SEQ ID NO: 203507 - RNA, 18 nt, Artificial Sequence
  Synthetic
agagacaugaaaaaccca

SEQ ID NO: 203508 - RNA, 19 nt, Artificial Sequence
  Synthetic
cagagacaugaaaaaccca

SEQ ID NO: 203509 - RNA, 20 nt, Artificial Sequence
  Synthetic
ccagagacaugaaaaaccca

SEQ ID NO: 203510 - RNA, 21 nt, Artificial Sequence
  Synthetic
accagagacaugaaaaaccca

SEQ ID NO: 203511 - RNA, 22 nt, Artificial Sequence
  Synthetic
aaccagagacaugaaaaaccca

SEQ ID NO: 203512 - RNA, 23 nt, Artificial Sequence
  Synthetic
uaaccagagacaugaaaaaccca

SEQ ID NO: 203513 - RNA, 24 nt, Artificial Sequence
  Synthetic
auaaccagagacaugaaaaaccca

SEQ ID NO: 203514 - RNA, 18 nt, Artificial Sequence
  Synthetic
uccgaaacuccaaaccca

SEQ ID NO: 203515 - RNA, 19 nt, Artificial Sequence
  Synthetic
auccgaaacuccaaaccca

SEQ ID NO: 203516 - RNA, 20 nt, Artificial Sequence
  Synthetic
aauccgaaacuccaaaccca

SEQ ID NO: 203517 - RNA, 21 nt, Artificial Sequence
  Synthetic
aaauccgaaacuccaaaccca

SEQ ID NO: 203518 - RNA, 22 nt, Artificial Sequence
  Synthetic
caaauccgaaacuccaaaccca

SEQ ID NO: 203519 - RNA, 23 nt, Artificial Sequence
  Synthetic
ucaaauccgaaacuccaaaccca

SEQ ID NO: 203520 - RNA, 24 nt, Artificial Sequence
  Synthetic
cucaaauccgaaacuccaaaccca

SEQ ID NO: 203521 - RNA, 18 nt, Artificial Sequence
  Synthetic
uauauuuguccaaaccca

SEQ ID NO: 203522 - RNA, 19 nt, Artificial Sequence
  Synthetic
auauauuuguccaaaccca

SEQ ID NO: 203523 - RNA, 20 nt, Artificial Sequence
  Synthetic
uauauauuuguccaaaccca

SEQ ID NO: 203524 - RNA, 21 nt, Artificial Sequence
  Synthetic
uuauauauuuguccaaaccca

SEQ ID NO: 203525 - RNA, 22 nt, Artificial Sequence
  Synthetic
auuauauauuuguccaaaccca

SEQ ID NO: 203526 - RNA, 23 nt, Artificial Sequence
  Synthetic
cauuauauauuuguccaaaccca

SEQ ID NO: 203527 - RNA, 24 nt, Artificial Sequence
  Synthetic
ucauuauauauuuguccaaaccca

SEQ ID NO: 203528 - RNA, 18 nt, Artificial Sequence
  Synthetic
guauuauuacccaaccca

SEQ ID NO: 203529 - RNA, 19 nt, Artificial Sequence
  Synthetic
uguauuauuacccaaccca

SEQ ID NO: 203530 - RNA, 20 nt, Artificial Sequence
  Synthetic
guguauuauuacccaaccca

SEQ ID NO: 203531 - RNA, 21 nt, Artificial Sequence
  Synthetic
aguguauuauuacccaaccca

SEQ ID NO: 203532 - RNA, 22 nt, Artificial Sequence
  Synthetic
gaguguauuauuacccaaccca

SEQ ID NO: 203533 - RNA, 23 nt, Artificial Sequence
  Synthetic
ugaguguauuauuacccaaccca

SEQ ID NO: 203534 - RNA, 24 nt, Artificial Sequence
  Synthetic
uugaguguauuauuacccaaccca

SEQ ID NO: 203535 - RNA, 18 nt, Artificial Sequence
  Synthetic
uacuaacuuugcaaccca

SEQ ID NO: 203536 - RNA, 19 nt, Artificial Sequence
  Synthetic
uuacuaacuuugcaaccca

SEQ ID NO: 203537 - RNA, 20 nt, Artificial Sequence
  Synthetic
uuuacuaacuuugcaaccca

SEQ ID NO: 203538 - RNA, 21 nt, Artificial Sequence
  Synthetic
auuuacuaacuuugcaaccca

SEQ ID NO: 203539 - RNA, 22 nt, Artificial Sequence
  Synthetic
uauuuacuaacuuugcaaccca

SEQ ID NO: 203540 - RNA, 23 nt, Artificial Sequence
  Synthetic
auauuuacuaacuuugcaaccca

SEQ ID NO: 203541 - RNA, 24 nt, Artificial Sequence
  Synthetic
aauauuuacuaacuuugcaaccca

SEQ ID NO: 203542 - RNA, 18 nt, Artificial Sequence
  Synthetic
guaaagucugauaaccca

SEQ ID NO: 203543 - RNA, 19 nt, Artificial Sequence
  Synthetic
uguaaagucugauaaccca

SEQ ID NO: 203544 - RNA, 20 nt, Artificial Sequence
  Synthetic
guguaaagucugauaaccca

SEQ ID NO: 203545 - RNA, 21 nt, Artificial Sequence
  Synthetic
uguguaaagucugauaaccca

SEQ ID NO: 203546 - RNA, 22 nt, Artificial Sequence
  Synthetic
guguguaaagucugauaaccca

SEQ ID NO: 203547 - RNA, 23 nt, Artificial Sequence
  Synthetic
aguguguaaagucugauaaccca

SEQ ID NO: 203548 - RNA, 24 nt, Artificial Sequence
  Synthetic
uaguguguaaagucugauaaccca

SEQ ID NO: 203549 - RNA, 18 nt, Artificial Sequence
  Synthetic
ucucacuccacacaccca

SEQ ID NO: 203550 - RNA, 19 nt, Artificial Sequence
  Synthetic
aucucacuccacacaccca

SEQ ID NO: 203551 - RNA, 20 nt, Artificial Sequence
  Synthetic
uaucucacuccacacaccca

SEQ ID NO: 203552 - RNA, 21 nt, Artificial Sequence
  Synthetic
guaucucacuccacacaccca

SEQ ID NO: 203553 - RNA, 22 nt, Artificial Sequence
  Synthetic
aguaucucacuccacacaccca

SEQ ID NO: 203554 - RNA, 23 nt, Artificial Sequence
  Synthetic
uaguaucucacuccacacaccca

SEQ ID NO: 203555 - RNA, 24 nt, Artificial Sequence
  Synthetic
cuaguaucucacuccacacaccca

SEQ ID NO: 203556 - RNA, 18 nt, Artificial Sequence
  Synthetic
aagcaauuuucacaccca

SEQ ID NO: 203557 - RNA, 19 nt, Artificial Sequence
  Synthetic
aaagcaauuuucacaccca

SEQ ID NO: 203558 - RNA, 20 nt, Artificial Sequence
  Synthetic
caaagcaauuuucacaccca

SEQ ID NO: 203559 - RNA, 21 nt, Artificial Sequence
  Synthetic
ucaaagcaauuuucacaccca

SEQ ID NO: 203560 - RNA, 22 nt, Artificial Sequence
  Synthetic
cucaaagcaauuuucacaccca

SEQ ID NO: 203561 - RNA, 23 nt, Artificial Sequence
  Synthetic
ccucaaagcaauuuucacaccca

SEQ ID NO: 203562 - RNA, 24 nt, Artificial Sequence
  Synthetic
uccucaaagcaauuuucacaccca

SEQ ID NO: 203563 - RNA, 18 nt, Artificial Sequence
  Synthetic
caaucucugaagcaccca

SEQ ID NO: 203564 - RNA, 19 nt, Artificial Sequence
  Synthetic
gcaaucucugaagcaccca

SEQ ID NO: 203565 - RNA, 20 nt, Artificial Sequence
  Synthetic
agcaaucucugaagcaccca

SEQ ID NO: 203566 - RNA, 21 nt, Artificial Sequence
  Synthetic
uagcaaucucugaagcaccca

SEQ ID NO: 203567 - RNA, 22 nt, Artificial Sequence
  Synthetic
guagcaaucucugaagcaccca

SEQ ID NO: 203568 - RNA, 23 nt, Artificial Sequence
  Synthetic
cguagcaaucucugaagcaccca

SEQ ID NO: 203569 - RNA, 24 nt, Artificial Sequence
  Synthetic
gcguagcaaucucugaagcaccca

SEQ ID NO: 203570 - RNA, 18 nt, Artificial Sequence
  Synthetic
guguggugauaucaccca

SEQ ID NO: 203571 - RNA, 19 nt, Artificial Sequence
  Synthetic
uguguggugauaucaccca

SEQ ID NO: 203572 - RNA, 20 nt, Artificial Sequence
  Synthetic
auguguggugauaucaccca

SEQ ID NO: 203573 - RNA, 21 nt, Artificial Sequence
  Synthetic
aauguguggugauaucaccca

SEQ ID NO: 203574 - RNA, 22 nt, Artificial Sequence
  Synthetic
gaauguguggugauaucaccca

SEQ ID NO: 203575 - RNA, 23 nt, Artificial Sequence
  Synthetic
ggaauguguggugauaucaccca

SEQ ID NO: 203576 - RNA, 24 nt, Artificial Sequence
  Synthetic
uggaauguguggugauaucaccca

SEQ ID NO: 203577 - RNA, 18 nt, Artificial Sequence
  Synthetic
ccaucaugaagggaccca

SEQ ID NO: 203578 - RNA, 19 nt, Artificial Sequence
  Synthetic
accaucaugaagggaccca

SEQ ID NO: 203579 - RNA, 20 nt, Artificial Sequence
  Synthetic
uaccaucaugaagggaccca

SEQ ID NO: 203580 - RNA, 21 nt, Artificial Sequence
  Synthetic
guaccaucaugaagggaccca

SEQ ID NO: 203581 - RNA, 22 nt, Artificial Sequence
  Synthetic
gguaccaucaugaagggaccca

SEQ ID NO: 203582 - RNA, 23 nt, Artificial Sequence
  Synthetic
agguaccaucaugaagggaccca

SEQ ID NO: 203583 - RNA, 24 nt, Artificial Sequence
  Synthetic
uagguaccaucaugaagggaccca

SEQ ID NO: 203584 - RNA, 18 nt, Artificial Sequence
  Synthetic
ugucaugggagggaccca

SEQ ID NO: 203585 - RNA, 19 nt, Artificial Sequence
  Synthetic
gugucaugggagggaccca

SEQ ID NO: 203586 - RNA, 20 nt, Artificial Sequence
  Synthetic
ggugucaugggagggaccca

SEQ ID NO: 203587 - RNA, 21 nt, Artificial Sequence
  Synthetic
aggugucaugggagggaccca

SEQ ID NO: 203588 - RNA, 22 nt, Artificial Sequence
  Synthetic
caggugucaugggagggaccca

SEQ ID NO: 203589 - RNA, 23 nt, Artificial Sequence
  Synthetic
ccaggugucaugggagggaccca

SEQ ID NO: 203590 - RNA, 24 nt, Artificial Sequence
  Synthetic
cccaggugucaugggagggaccca

SEQ ID NO: 203591 - RNA, 18 nt, Artificial Sequence
  Synthetic
uguugugggagggaccca

SEQ ID NO: 203592 - RNA, 19 nt, Artificial Sequence
  Synthetic
guguugugggagggaccca

SEQ ID NO: 203593 - RNA, 20 nt, Artificial Sequence
  Synthetic
uguguugugggagggaccca

SEQ ID NO: 203594 - RNA, 21 nt, Artificial Sequence
  Synthetic
auguguugugggagggaccca

SEQ ID NO: 203595 - RNA, 22 nt, Artificial Sequence
  Synthetic
cauguguugugggagggaccca

SEQ ID NO: 203596 - RNA, 23 nt, Artificial Sequence
  Synthetic
ccauguguugugggagggaccca

SEQ ID NO: 203597 - RNA, 24 nt, Artificial Sequence
  Synthetic
cccauguguugugggagggaccca

SEQ ID NO: 203598 - RNA, 18 nt, Artificial Sequence
  Synthetic
ugugccuuagcauaccca

SEQ ID NO: 203599 - RNA, 19 nt, Artificial Sequence
  Synthetic
augugccuuagcauaccca

SEQ ID NO: 203600 - RNA, 20 nt, Artificial Sequence
  Synthetic
caugugccuuagcauaccca

SEQ ID NO: 203601 - RNA, 21 nt, Artificial Sequence
  Synthetic
gcaugugccuuagcauaccca

SEQ ID NO: 203602 - RNA, 22 nt, Artificial Sequence
  Synthetic
ggcaugugccuuagcauaccca

SEQ ID NO: 203603 - RNA, 23 nt, Artificial Sequence
  Synthetic
gggcaugugccuuagcauaccca

SEQ ID NO: 203604 - RNA, 24 nt, Artificial Sequence
  Synthetic
agggcaugugccuuagcauaccca

SEQ ID NO: 203605 - RNA, 18 nt, Artificial Sequence
  Synthetic
ugugaaaauagauaccca

SEQ ID NO: 203606 - RNA, 19 nt, Artificial Sequence
  Synthetic
cugugaaaauagauaccca

SEQ ID NO: 203607 - RNA, 20 nt, Artificial Sequence
  Synthetic
ucugugaaaauagauaccca

SEQ ID NO: 203608 - RNA, 21 nt, Artificial Sequence
  Synthetic
uucugugaaaauagauaccca

SEQ ID NO: 203609 - RNA, 22 nt, Artificial Sequence
  Synthetic
auucugugaaaauagauaccca

SEQ ID NO: 203610 - RNA, 23 nt, Artificial Sequence
  Synthetic
uauucugugaaaauagauaccca

SEQ ID NO: 203611 - RNA, 24 nt, Artificial Sequence
  Synthetic
cuauucugugaaaauagauaccca

SEQ ID NO: 203612 - RNA, 18 nt, Artificial Sequence
  Synthetic
uuauugggcauauaccca

SEQ ID NO: 203613 - RNA, 19 nt, Artificial Sequence
  Synthetic
auuauugggcauauaccca

SEQ ID NO: 203614 - RNA, 20 nt, Artificial Sequence
  Synthetic
cauuauugggcauauaccca

SEQ ID NO: 203615 - RNA, 21 nt, Artificial Sequence
  Synthetic
ccauuauugggcauauaccca

SEQ ID NO: 203616 - RNA, 22 nt, Artificial Sequence
  Synthetic
cccauuauugggcauauaccca

SEQ ID NO: 203617 - RNA, 23 nt, Artificial Sequence
  Synthetic
ucccauuauugggcauauaccca

SEQ ID NO: 203618 - RNA, 24 nt, Artificial Sequence
  Synthetic
aucccauuauugggcauauaccca

SEQ ID NO: 203619 - RNA, 18 nt, Artificial Sequence
  Synthetic
uuacuggguauauaccca

SEQ ID NO: 203620 - RNA, 19 nt, Artificial Sequence
  Synthetic
auuacuggguauauaccca

SEQ ID NO: 203621 - RNA, 20 nt, Artificial Sequence
  Synthetic
cauuacuggguauauaccca

SEQ ID NO: 203622 - RNA, 18 nt, Artificial Sequence
  Synthetic
gauugaaaccuauaccca

SEQ ID NO: 203623 - RNA, 19 nt, Artificial Sequence
  Synthetic
ugauugaaaccuauaccca

SEQ ID NO: 203624 - RNA, 20 nt, Artificial Sequence
  Synthetic
augauugaaaccuauaccca

SEQ ID NO: 203625 - RNA, 21 nt, Artificial Sequence
  Synthetic
uaugauugaaaccuauaccca

SEQ ID NO: 203626 - RNA, 22 nt, Artificial Sequence
  Synthetic
auaugauugaaaccuauaccca

SEQ ID NO: 203627 - RNA, 23 nt, Artificial Sequence
  Synthetic
gauaugauugaaaccuauaccca

SEQ ID NO: 203628 - RNA, 24 nt, Artificial Sequence
  Synthetic
ugauaugauugaaaccuauaccca

SEQ ID NO: 203629 - RNA, 18 nt, Artificial Sequence
  Synthetic
guccagauuggcuaccca

SEQ ID NO: 203630 - RNA, 19 nt, Artificial Sequence
  Synthetic
uguccagauuggcuaccca

SEQ ID NO: 203631 - RNA, 20 nt, Artificial Sequence
  Synthetic
uuguccagauuggcuaccca

SEQ ID NO: 203632 - RNA, 21 nt, Artificial Sequence
  Synthetic
uuuguccagauuggcuaccca

SEQ ID NO: 203633 - RNA, 22 nt, Artificial Sequence
  Synthetic
cuuuguccagauuggcuaccca

SEQ ID NO: 203634 - RNA, 23 nt, Artificial Sequence
  Synthetic
ccuuuguccagauuggcuaccca

SEQ ID NO: 203635 - RNA, 24 nt, Artificial Sequence
  Synthetic
uccuuuguccagauuggcuaccca

SEQ ID NO: 203636 - RNA, 18 nt, Artificial Sequence
  Synthetic
uagcauaguaauuaccca

SEQ ID NO: 203637 - RNA, 19 nt, Artificial Sequence
  Synthetic
cuagcauaguaauuaccca

SEQ ID NO: 203638 - RNA, 20 nt, Artificial Sequence
  Synthetic
ucuagcauaguaauuaccca

SEQ ID NO: 203639 - RNA, 21 nt, Artificial Sequence
  Synthetic
uucuagcauaguaauuaccca

SEQ ID NO: 203640 - RNA, 22 nt, Artificial Sequence
  Synthetic
cuucuagcauaguaauuaccca

SEQ ID NO: 203641 - RNA, 23 nt, Artificial Sequence
  Synthetic
gcuucuagcauaguaauuaccca

SEQ ID NO: 203642 - RNA, 24 nt, Artificial Sequence
  Synthetic
ugcuucuagcauaguaauuaccca

SEQ ID NO: 203643 - RNA, 18 nt, Artificial Sequence
  Synthetic
gcccuguucucuuaccca

SEQ ID NO: 203644 - RNA, 19 nt, Artificial Sequence
  Synthetic
ggcccuguucucuuaccca

SEQ ID NO: 203645 - RNA, 20 nt, Artificial Sequence
  Synthetic
uggcccuguucucuuaccca

SEQ ID NO: 203646 - RNA, 21 nt, Artificial Sequence
  Synthetic
auggcccuguucucuuaccca

SEQ ID NO: 203647 - RNA, 22 nt, Artificial Sequence
  Synthetic
gauggcccuguucucuuaccca

SEQ ID NO: 203648 - RNA, 23 nt, Artificial Sequence
  Synthetic
ugauggcccuguucucuuaccca

SEQ ID NO: 203649 - RNA, 24 nt, Artificial Sequence
  Synthetic
augauggcccuguucucuuaccca

SEQ ID NO: 203650 - RNA, 18 nt, Artificial Sequence
  Synthetic
uaaggcuacaguuaccca

SEQ ID NO: 203651 - RNA, 19 nt, Artificial Sequence
  Synthetic
auaaggcuacaguuaccca

SEQ ID NO: 203652 - RNA, 20 nt, Artificial Sequence
  Synthetic
uauaaggcuacaguuaccca

SEQ ID NO: 203653 - RNA, 21 nt, Artificial Sequence
  Synthetic
cuauaaggcuacaguuaccca

SEQ ID NO: 203654 - RNA, 22 nt, Artificial Sequence
  Synthetic
acuauaaggcuacaguuaccca

SEQ ID NO: 203655 - RNA, 23 nt, Artificial Sequence
  Synthetic
uacuauaaggcuacaguuaccca

SEQ ID NO: 203656 - RNA, 24 nt, Artificial Sequence
  Synthetic
auacuauaaggcuacaguuaccca

SEQ ID NO: 203657 - RNA, 18 nt, Artificial Sequence
  Synthetic
agugggaugcacacccca

SEQ ID NO: 203658 - RNA, 19 nt, Artificial Sequence
  Synthetic
cagugggaugcacacccca

SEQ ID NO: 203659 - RNA, 20 nt, Artificial Sequence
  Synthetic
ucagugggaugcacacccca

SEQ ID NO: 203660 - RNA, 21 nt, Artificial Sequence
  Synthetic
cucagugggaugcacacccca

SEQ ID NO: 203661 - RNA, 22 nt, Artificial Sequence
  Synthetic
ccucagugggaugcacacccca

SEQ ID NO: 203662 - RNA, 23 nt, Artificial Sequence
  Synthetic
cccucagugggaugcacacccca

SEQ ID NO: 203663 - RNA, 24 nt, Artificial Sequence
  Synthetic
acccucagugggaugcacacccca

SEQ ID NO: 203664 - RNA, 18 nt, Artificial Sequence
  Synthetic
ugguccugggucacccca

SEQ ID NO: 203665 - RNA, 19 nt, Artificial Sequence
  Synthetic
augguccugggucacccca

SEQ ID NO: 203666 - RNA, 20 nt, Artificial Sequence
  Synthetic
aaugguccugggucacccca

SEQ ID NO: 203667 - RNA, 21 nt, Artificial Sequence
  Synthetic
uaaugguccugggucacccca

SEQ ID NO: 203668 - RNA, 22 nt, Artificial Sequence
  Synthetic
uuaaugguccugggucacccca

SEQ ID NO: 203669 - RNA, 23 nt, Artificial Sequence
  Synthetic
guuaaugguccugggucacccca

SEQ ID NO: 203670 - RNA, 24 nt, Artificial Sequence
  Synthetic
aguuaaugguccugggucacccca

SEQ ID NO: 203671 - RNA, 18 nt, Artificial Sequence
  Synthetic
augauggaaaugacccca

SEQ ID NO: 203672 - RNA, 19 nt, Artificial Sequence
  Synthetic
aaugauggaaaugacccca

SEQ ID NO: 203673 - RNA, 20 nt, Artificial Sequence
  Synthetic
gaaugauggaaaugacccca

SEQ ID NO: 203674 - RNA, 21 nt, Artificial Sequence
  Synthetic
agaaugauggaaaugacccca

SEQ ID NO: 203675 - RNA, 22 nt, Artificial Sequence
  Synthetic
cagaaugauggaaaugacccca

SEQ ID NO: 203676 - RNA, 23 nt, Artificial Sequence
  Synthetic
acagaaugauggaaaugacccca

SEQ ID NO: 203677 - RNA, 24 nt, Artificial Sequence
  Synthetic
uacagaaugauggaaaugacccca

SEQ ID NO: 203678 - RNA, 18 nt, Artificial Sequence
  Synthetic
cuccccauuccuacccca

SEQ ID NO: 203679 - RNA, 19 nt, Artificial Sequence
  Synthetic
acuccccauuccuacccca

SEQ ID NO: 203680 - RNA, 20 nt, Artificial Sequence
  Synthetic
cacuccccauuccuacccca

SEQ ID NO: 203681 - RNA, 21 nt, Artificial Sequence
  Synthetic
gcacuccccauuccuacccca

SEQ ID NO: 203682 - RNA, 22 nt, Artificial Sequence
  Synthetic
ugcacuccccauuccuacccca

SEQ ID NO: 203683 - RNA, 23 nt, Artificial Sequence
  Synthetic
cugcacuccccauuccuacccca

SEQ ID NO: 203684 - RNA, 24 nt, Artificial Sequence
  Synthetic
ucugcacuccccauuccuacccca

SEQ ID NO: 203685 - RNA, 18 nt, Artificial Sequence
  Synthetic
aaaggucaggcuacccca

SEQ ID NO: 203686 - RNA, 19 nt, Artificial Sequence
  Synthetic
gaaaggucaggcuacccca

SEQ ID NO: 203687 - RNA, 20 nt, Artificial Sequence
  Synthetic
agaaaggucaggcuacccca

SEQ ID NO: 203688 - RNA, 21 nt, Artificial Sequence
  Synthetic
gagaaaggucaggcuacccca

SEQ ID NO: 203689 - RNA, 22 nt, Artificial Sequence
  Synthetic
agagaaaggucaggcuacccca

SEQ ID NO: 203690 - RNA, 23 nt, Artificial Sequence
  Synthetic
gagagaaaggucaggcuacccca

SEQ ID NO: 203691 - RNA, 24 nt, Artificial Sequence
  Synthetic
agagagaaaggucaggcuacccca

SEQ ID NO: 203692 - RNA, 18 nt, Artificial Sequence
  Synthetic
caguggaucccaccccca

SEQ ID NO: 203693 - RNA, 19 nt, Artificial Sequence
  Synthetic
ucaguggaucccaccccca

SEQ ID NO: 203694 - RNA, 20 nt, Artificial Sequence
  Synthetic
cucaguggaucccaccccca

SEQ ID NO: 203695 - RNA, 21 nt, Artificial Sequence
  Synthetic
gcucaguggaucccaccccca

SEQ ID NO: 203696 - RNA, 22 nt, Artificial Sequence
  Synthetic
agcucaguggaucccaccccca

SEQ ID NO: 203697 - RNA, 23 nt, Artificial Sequence
  Synthetic
uagcucaguggaucccaccccca

SEQ ID NO: 203698 - RNA, 24 nt, Artificial Sequence
  Synthetic
cuagcucaguggaucccaccccca

SEQ ID NO: 203699 - RNA, 18 nt, Artificial Sequence
  Synthetic
ccugcuuuuucaccccca

SEQ ID NO: 203700 - RNA, 19 nt, Artificial Sequence
  Synthetic
gccugcuuuuucaccccca

SEQ ID NO: 203701 - RNA, 20 nt, Artificial Sequence
  Synthetic
ugccugcuuuuucaccccca

SEQ ID NO: 203702 - RNA, 21 nt, Artificial Sequence
  Synthetic
augccugcuuuuucaccccca

SEQ ID NO: 203703 - RNA, 22 nt, Artificial Sequence
  Synthetic
uaugccugcuuuuucaccccca

SEQ ID NO: 203704 - RNA, 23 nt, Artificial Sequence
  Synthetic
auaugccugcuuuuucaccccca

SEQ ID NO: 203705 - RNA, 24 nt, Artificial Sequence
  Synthetic
aauaugccugcuuuuucaccccca

SEQ ID NO: 203706 - RNA, 18 nt, Artificial Sequence
  Synthetic
uccacaugcuguccccca

SEQ ID NO: 203707 - RNA, 19 nt, Artificial Sequence
  Synthetic
uuccacaugcuguccccca

SEQ ID NO: 203708 - RNA, 20 nt, Artificial Sequence
  Synthetic
cuuccacaugcuguccccca

SEQ ID NO: 203709 - RNA, 21 nt, Artificial Sequence
  Synthetic
acuuccacaugcuguccccca

SEQ ID NO: 203710 - RNA, 22 nt, Artificial Sequence
  Synthetic
cacuuccacaugcuguccccca

SEQ ID NO: 203711 - RNA, 23 nt, Artificial Sequence
  Synthetic
ccacuuccacaugcuguccccca

SEQ ID NO: 203712 - RNA, 24 nt, Artificial Sequence
  Synthetic
uccacuuccacaugcuguccccca

SEQ ID NO: 203713 - RNA, 18 nt, Artificial Sequence
  Synthetic
gucugccuuguuccccca

SEQ ID NO: 203714 - RNA, 19 nt, Artificial Sequence
  Synthetic
ugucugccuuguuccccca

SEQ ID NO: 203715 - RNA, 20 nt, Artificial Sequence
  Synthetic
cugucugccuuguuccccca

SEQ ID NO: 203716 - RNA, 21 nt, Artificial Sequence
  Synthetic
ucugucugccuuguuccccca

SEQ ID NO: 203717 - RNA, 22 nt, Artificial Sequence
  Synthetic
aucugucugccuuguuccccca

SEQ ID NO: 203718 - RNA, 23 nt, Artificial Sequence
  Synthetic
gaucugucugccuuguuccccca

SEQ ID NO: 203719 - RNA, 24 nt, Artificial Sequence
  Synthetic
ugaucugucugccuuguuccccca

SEQ ID NO: 203720 - RNA, 18 nt, Artificial Sequence
  Synthetic
gacagcugagaagcccca

SEQ ID NO: 203721 - RNA, 19 nt, Artificial Sequence
  Synthetic
agacagcugagaagcccca

SEQ ID NO: 203722 - RNA, 20 nt, Artificial Sequence
  Synthetic
aagacagcugagaagcccca

SEQ ID NO: 203723 - RNA, 21 nt, Artificial Sequence
  Synthetic
aaagacagcugagaagcccca

SEQ ID NO: 203724 - RNA, 22 nt, Artificial Sequence
  Synthetic
caaagacagcugagaagcccca

SEQ ID NO: 203725 - RNA, 23 nt, Artificial Sequence
  Synthetic
ucaaagacagcugagaagcccca

SEQ ID NO: 203726 - RNA, 24 nt, Artificial Sequence
  Synthetic
uucaaagacagcugagaagcccca

SEQ ID NO: 203727 - RNA, 18 nt, Artificial Sequence
  Synthetic
aauaaucaaauagcccca

SEQ ID NO: 203728 - RNA, 19 nt, Artificial Sequence
  Synthetic
gaauaaucaaauagcccca

SEQ ID NO: 203729 - RNA, 20 nt, Artificial Sequence
  Synthetic
ugaauaaucaaauagcccca

SEQ ID NO: 203730 - RNA, 21 nt, Artificial Sequence
  Synthetic
uugaauaaucaaauagcccca

SEQ ID NO: 203731 - RNA, 22 nt, Artificial Sequence
  Synthetic
uuugaauaaucaaauagcccca

SEQ ID NO: 203732 - RNA, 23 nt, Artificial Sequence
  Synthetic
uuuugaauaaucaaauagcccca

SEQ ID NO: 203733 - RNA, 24 nt, Artificial Sequence
  Synthetic
cuuuugaauaaucaaauagcccca

SEQ ID NO: 203734 - RNA, 18 nt, Artificial Sequence
  Synthetic
cuacuaggcagugcccca

SEQ ID NO: 203735 - RNA, 19 nt, Artificial Sequence
  Synthetic
ucuacuaggcagugcccca

SEQ ID NO: 203736 - RNA, 20 nt, Artificial Sequence
  Synthetic
cucuacuaggcagugcccca

SEQ ID NO: 203737 - RNA, 21 nt, Artificial Sequence
  Synthetic
gcucuacuaggcagugcccca

SEQ ID NO: 203738 - RNA, 22 nt, Artificial Sequence
  Synthetic
agcucuacuaggcagugcccca

SEQ ID NO: 203739 - RNA, 23 nt, Artificial Sequence
  Synthetic
cagcucuacuaggcagugcccca

SEQ ID NO: 203740 - RNA, 24 nt, Artificial Sequence
  Synthetic
acagcucuacuaggcagugcccca

SEQ ID NO: 203741 - RNA, 18 nt, Artificial Sequence
  Synthetic
ccgcuaggcagugcccca

SEQ ID NO: 203742 - RNA, 19 nt, Artificial Sequence
  Synthetic
uccgcuaggcagugcccca

SEQ ID NO: 203743 - RNA, 20 nt, Artificial Sequence
  Synthetic
cuccgcuaggcagugcccca

SEQ ID NO: 203744 - RNA, 21 nt, Artificial Sequence
  Synthetic
gcuccgcuaggcagugcccca

SEQ ID NO: 203745 - RNA, 22 nt, Artificial Sequence
  Synthetic
agcuccgcuaggcagugcccca

SEQ ID NO: 203746 - RNA, 23 nt, Artificial Sequence
  Synthetic
uagcuccgcuaggcagugcccca

SEQ ID NO: 203747 - RNA, 24 nt, Artificial Sequence
  Synthetic
auagcuccgcuaggcagugcccca

SEQ ID NO: 203748 - RNA, 18 nt, Artificial Sequence
  Synthetic
guguagauaaaaucccca

SEQ ID NO: 203749 - RNA, 19 nt, Artificial Sequence
  Synthetic
aguguagauaaaaucccca

SEQ ID NO: 203750 - RNA, 20 nt, Artificial Sequence
  Synthetic
uaguguagauaaaaucccca

SEQ ID NO: 203751 - RNA, 21 nt, Artificial Sequence
  Synthetic
auaguguagauaaaaucccca

SEQ ID NO: 203752 - RNA, 22 nt, Artificial Sequence
  Synthetic
gauaguguagauaaaaucccca

SEQ ID NO: 203753 - RNA, 23 nt, Artificial Sequence
  Synthetic
ggauaguguagauaaaaucccca

SEQ ID NO: 203754 - RNA, 24 nt, Artificial Sequence
  Synthetic
uggauaguguagauaaaaucccca

SEQ ID NO: 203755 - RNA, 18 nt, Artificial Sequence
  Synthetic
acagcauuaaaaucccca

SEQ ID NO: 203756 - RNA, 19 nt, Artificial Sequence
  Synthetic
uacagcauuaaaaucccca

SEQ ID NO: 203757 - RNA, 20 nt, Artificial Sequence
  Synthetic
uuacagcauuaaaaucccca

SEQ ID NO: 203758 - RNA, 21 nt, Artificial Sequence
  Synthetic
uuuacagcauuaaaaucccca

SEQ ID NO: 203759 - RNA, 22 nt, Artificial Sequence
  Synthetic
auuuacagcauuaaaaucccca

SEQ ID NO: 203760 - RNA, 23 nt, Artificial Sequence
  Synthetic
aauuuacagcauuaaaaucccca

SEQ ID NO: 203761 - RNA, 24 nt, Artificial Sequence
  Synthetic
aaauuuacagcauuaaaaucccca

SEQ ID NO: 203762 - RNA, 18 nt, Artificial Sequence
  Synthetic
guuuauucagcaucccca

SEQ ID NO: 203763 - RNA, 19 nt, Artificial Sequence
  Synthetic
aguuuauucagcaucccca

SEQ ID NO: 203764 - RNA, 20 nt, Artificial Sequence
  Synthetic
gaguuuauucagcaucccca

SEQ ID NO: 203765 - RNA, 21 nt, Artificial Sequence
  Synthetic
agaguuuauucagcaucccca

SEQ ID NO: 203766 - RNA, 22 nt, Artificial Sequence
  Synthetic
uagaguuuauucagcaucccca

SEQ ID NO: 203767 - RNA, 23 nt, Artificial Sequence
  Synthetic
auagaguuuauucagcaucccca

SEQ ID NO: 203768 - RNA, 24 nt, Artificial Sequence
  Synthetic
cauagaguuuauucagcaucccca

SEQ ID NO: 203769 - RNA, 18 nt, Artificial Sequence
  Synthetic
gauauaauuucaucccca

SEQ ID NO: 203770 - RNA, 19 nt, Artificial Sequence
  Synthetic
ugauauaauuucaucccca

SEQ ID NO: 203771 - RNA, 20 nt, Artificial Sequence
  Synthetic
cugauauaauuucaucccca

SEQ ID NO: 203772 - RNA, 21 nt, Artificial Sequence
  Synthetic
ccugauauaauuucaucccca

SEQ ID NO: 203773 - RNA, 22 nt, Artificial Sequence
  Synthetic
accugauauaauuucaucccca

SEQ ID NO: 203774 - RNA, 23 nt, Artificial Sequence
  Synthetic
aaccugauauaauuucaucccca

SEQ ID NO: 203775 - RNA, 24 nt, Artificial Sequence
  Synthetic
uaaccugauauaauuucaucccca

SEQ ID NO: 203776 - RNA, 18 nt, Artificial Sequence
  Synthetic
gacaucugcaacucccca

SEQ ID NO: 203777 - RNA, 19 nt, Artificial Sequence
  Synthetic
ugacaucugcaacucccca

SEQ ID NO: 203778 - RNA, 20 nt, Artificial Sequence
  Synthetic
uugacaucugcaacucccca

SEQ ID NO: 203779 - RNA, 21 nt, Artificial Sequence
  Synthetic
auugacaucugcaacucccca

SEQ ID NO: 203780 - RNA, 22 nt, Artificial Sequence
  Synthetic
cauugacaucugcaacucccca

SEQ ID NO: 203781 - RNA, 23 nt, Artificial Sequence
  Synthetic
acauugacaucugcaacucccca

SEQ ID NO: 203782 - RNA, 24 nt, Artificial Sequence
  Synthetic
uacauugacaucugcaacucccca

SEQ ID NO: 203783 - RNA, 18 nt, Artificial Sequence
  Synthetic
ugcagggagaacucccca

SEQ ID NO: 203784 - RNA, 19 nt, Artificial Sequence
  Synthetic
cugcagggagaacucccca

SEQ ID NO: 203785 - RNA, 20 nt, Artificial Sequence
  Synthetic
gcugcagggagaacucccca

SEQ ID NO: 203786 - RNA, 21 nt, Artificial Sequence
  Synthetic
agcugcagggagaacucccca

SEQ ID NO: 203787 - RNA, 22 nt, Artificial Sequence
  Synthetic
cagcugcagggagaacucccca

SEQ ID NO: 203788 - RNA, 23 nt, Artificial Sequence
  Synthetic
ccagcugcagggagaacucccca

SEQ ID NO: 203789 - RNA, 24 nt, Artificial Sequence
  Synthetic
accagcugcagggagaacucccca

SEQ ID NO: 203790 - RNA, 18 nt, Artificial Sequence
  Synthetic
uucgggguguccucccca

SEQ ID NO: 203791 - RNA, 19 nt, Artificial Sequence
  Synthetic
guucgggguguccucccca

SEQ ID NO: 203792 - RNA, 20 nt, Artificial Sequence
  Synthetic
uguucgggguguccucccca

SEQ ID NO: 203793 - RNA, 21 nt, Artificial Sequence
  Synthetic
guguucgggguguccucccca

SEQ ID NO: 203794 - RNA, 22 nt, Artificial Sequence
  Synthetic
uguguucgggguguccucccca

SEQ ID NO: 203795 - RNA, 23 nt, Artificial Sequence
  Synthetic
auguguucgggguguccucccca

SEQ ID NO: 203796 - RNA, 24 nt, Artificial Sequence
  Synthetic
aauguguucgggguguccucccca

SEQ ID NO: 203797 - RNA, 18 nt, Artificial Sequence
  Synthetic
auuuugaaaagcucccca

SEQ ID NO: 203798 - RNA, 19 nt, Artificial Sequence
  Synthetic
uauuuugaaaagcucccca

SEQ ID NO: 203799 - RNA, 20 nt, Artificial Sequence
  Synthetic
auauuuugaaaagcucccca

SEQ ID NO: 203800 - RNA, 21 nt, Artificial Sequence
  Synthetic
uauauuuugaaaagcucccca

SEQ ID NO: 203801 - RNA, 22 nt, Artificial Sequence
  Synthetic
uuauauuuugaaaagcucccca

SEQ ID NO: 203802 - RNA, 23 nt, Artificial Sequence
  Synthetic
uuuauauuuugaaaagcucccca

SEQ ID NO: 203803 - RNA, 24 nt, Artificial Sequence
  Synthetic
uuuuauauuuugaaaagcucccca

SEQ ID NO: 203804 - RNA, 18 nt, Artificial Sequence
  Synthetic
cuccacacagagucccca

SEQ ID NO: 203805 - RNA, 19 nt, Artificial Sequence
  Synthetic
gcuccacacagagucccca

SEQ ID NO: 203806 - RNA, 20 nt, Artificial Sequence
  Synthetic
agcuccacacagagucccca

SEQ ID NO: 203807 - RNA, 21 nt, Artificial Sequence
  Synthetic
gagcuccacacagagucccca

SEQ ID NO: 203808 - RNA, 22 nt, Artificial Sequence
  Synthetic
ggagcuccacacagagucccca

SEQ ID NO: 203809 - RNA, 23 nt, Artificial Sequence
  Synthetic
cggagcuccacacagagucccca

SEQ ID NO: 203810 - RNA, 24 nt, Artificial Sequence
  Synthetic
ucggagcuccacacagagucccca

SEQ ID NO: 203811 - RNA, 18 nt, Artificial Sequence
  Synthetic
aaauauggcuagucccca

SEQ ID NO: 203812 - RNA, 19 nt, Artificial Sequence
  Synthetic
gaaauauggcuagucccca

SEQ ID NO: 203813 - RNA, 20 nt, Artificial Sequence
  Synthetic
ugaaauauggcuagucccca

SEQ ID NO: 203814 - RNA, 21 nt, Artificial Sequence
  Synthetic
uugaaauauggcuagucccca

SEQ ID NO: 203815 - RNA, 22 nt, Artificial Sequence
  Synthetic
uuugaaauauggcuagucccca

SEQ ID NO: 203816 - RNA, 23 nt, Artificial Sequence
  Synthetic
auuugaaauauggcuagucccca

SEQ ID NO: 203817 - RNA, 24 nt, Artificial Sequence
  Synthetic
cauuugaaauauggcuagucccca

SEQ ID NO: 203818 - RNA, 18 nt, Artificial Sequence
  Synthetic
gaaaagggauggucccca

SEQ ID NO: 203819 - RNA, 19 nt, Artificial Sequence
  Synthetic
agaaaagggauggucccca

SEQ ID NO: 203820 - RNA, 20 nt, Artificial Sequence
  Synthetic
cagaaaagggauggucccca

SEQ ID NO: 203821 - RNA, 21 nt, Artificial Sequence
  Synthetic
gcagaaaagggauggucccca

SEQ ID NO: 203822 - RNA, 22 nt, Artificial Sequence
  Synthetic
ggcagaaaagggauggucccca

SEQ ID NO: 203823 - RNA, 23 nt, Artificial Sequence
  Synthetic
aggcagaaaagggauggucccca

SEQ ID NO: 203824 - RNA, 24 nt, Artificial Sequence
  Synthetic
uaggcagaaaagggauggucccca

SEQ ID NO: 203825 - RNA, 18 nt, Artificial Sequence
  Synthetic
cuaauuuguuuuucccca

SEQ ID NO: 203826 - RNA, 19 nt, Artificial Sequence
  Synthetic
gcuaauuuguuuuucccca

SEQ ID NO: 203827 - RNA, 20 nt, Artificial Sequence
  Synthetic
ugcuaauuuguuuuucccca

SEQ ID NO: 203828 - RNA, 21 nt, Artificial Sequence
  Synthetic
cugcuaauuuguuuuucccca

SEQ ID NO: 203829 - RNA, 22 nt, Artificial Sequence
  Synthetic
acugcuaauuuguuuuucccca

SEQ ID NO: 203830 - RNA, 23 nt, Artificial Sequence
  Synthetic
uacugcuaauuuguuuuucccca

SEQ ID NO: 203831 - RNA, 24 nt, Artificial Sequence
  Synthetic
auacugcuaauuuguuuuucccca

SEQ ID NO: 203832 - RNA, 18 nt, Artificial Sequence
  Synthetic
aaaucaccauaaagccca

SEQ ID NO: 203833 - RNA, 19 nt, Artificial Sequence
  Synthetic
aaaaucaccauaaagccca

SEQ ID NO: 203834 - RNA, 20 nt, Artificial Sequence
  Synthetic
aaaaaucaccauaaagccca

SEQ ID NO: 203835 - RNA, 21 nt, Artificial Sequence
  Synthetic
uaaaaaucaccauaaagccca

SEQ ID NO: 203836 - RNA, 22 nt, Artificial Sequence
  Synthetic
auaaaaaucaccauaaagccca

SEQ ID NO: 203837 - RNA, 23 nt, Artificial Sequence
  Synthetic
aauaaaaaucaccauaaagccca

SEQ ID NO: 203838 - RNA, 24 nt, Artificial Sequence
  Synthetic
uaauaaaaaucaccauaaagccca

SEQ ID NO: 203839 - RNA, 18 nt, Artificial Sequence
  Synthetic
aaaaaaaaaauaagccca

SEQ ID NO: 203840 - RNA, 19 nt, Artificial Sequence
  Synthetic
gaaaaaaaaaauaagccca

SEQ ID NO: 203841 - RNA, 20 nt, Artificial Sequence
  Synthetic
agaaaaaaaaaauaagccca

SEQ ID NO: 203842 - RNA, 21 nt, Artificial Sequence
  Synthetic
gagaaaaaaaaaauaagccca

SEQ ID NO: 203843 - RNA, 22 nt, Artificial Sequence
  Synthetic
ugagaaaaaaaaaauaagccca

SEQ ID NO: 203844 - RNA, 23 nt, Artificial Sequence
  Synthetic
augagaaaaaaaaaauaagccca

SEQ ID NO: 203845 - RNA, 24 nt, Artificial Sequence
  Synthetic
gaugagaaaaaaaaaauaagccca

SEQ ID NO: 203846 - RNA, 18 nt, Artificial Sequence
  Synthetic
agauauucagccagccca

SEQ ID NO: 203847 - RNA, 19 nt, Artificial Sequence
  Synthetic
aagauauucagccagccca

SEQ ID NO: 203848 - RNA, 20 nt, Artificial Sequence
  Synthetic
gaagauauucagccagccca

SEQ ID NO: 203849 - RNA, 21 nt, Artificial Sequence
  Synthetic
ugaagauauucagccagccca

SEQ ID NO: 203850 - RNA, 22 nt, Artificial Sequence
  Synthetic
cugaagauauucagccagccca

SEQ ID NO: 203851 - RNA, 23 nt, Artificial Sequence
  Synthetic
ccugaagauauucagccagccca

SEQ ID NO: 203852 - RNA, 24 nt, Artificial Sequence
  Synthetic
uccugaagauauucagccagccca

SEQ ID NO: 203853 - RNA, 18 nt, Artificial Sequence
  Synthetic
ucuuaagaggccagccca

SEQ ID NO: 203854 - RNA, 19 nt, Artificial Sequence
  Synthetic
aucuuaagaggccagccca

SEQ ID NO: 203855 - RNA, 20 nt, Artificial Sequence
  Synthetic
caucuuaagaggccagccca

SEQ ID NO: 203856 - RNA, 21 nt, Artificial Sequence
  Synthetic
gcaucuuaagaggccagccca

SEQ ID NO: 203857 - RNA, 22 nt, Artificial Sequence
  Synthetic
ugcaucuuaagaggccagccca

SEQ ID NO: 203858 - RNA, 23 nt, Artificial Sequence
  Synthetic
uugcaucuuaagaggccagccca

SEQ ID NO: 203859 - RNA, 24 nt, Artificial Sequence
  Synthetic
auugcaucuuaagaggccagccca

SEQ ID NO: 203860 - RNA, 18 nt, Artificial Sequence
  Synthetic
guuggaaggagcagccca

SEQ ID NO: 203861 - RNA, 19 nt, Artificial Sequence
  Synthetic
gguuggaaggagcagccca

SEQ ID NO: 203862 - RNA, 20 nt, Artificial Sequence
  Synthetic
agguuggaaggagcagccca

SEQ ID NO: 203863 - RNA, 21 nt, Artificial Sequence
  Synthetic
gagguuggaaggagcagccca

SEQ ID NO: 203864 - RNA, 22 nt, Artificial Sequence
  Synthetic
ugagguuggaaggagcagccca

SEQ ID NO: 203865 - RNA, 23 nt, Artificial Sequence
  Synthetic
gugagguuggaaggagcagccca

SEQ ID NO: 203866 - RNA, 24 nt, Artificial Sequence
  Synthetic
agugagguuggaaggagcagccca

SEQ ID NO: 203867 - RNA, 18 nt, Artificial Sequence
  Synthetic
gacagugggugcagccca

SEQ ID NO: 203868 - RNA, 19 nt, Artificial Sequence
  Synthetic
agacagugggugcagccca

SEQ ID NO: 203869 - RNA, 20 nt, Artificial Sequence
  Synthetic
uagacagugggugcagccca

SEQ ID NO: 203870 - RNA, 21 nt, Artificial Sequence
  Synthetic
uuagacagugggugcagccca

SEQ ID NO: 203871 - RNA, 22 nt, Artificial Sequence
  Synthetic
guuagacagugggugcagccca

SEQ ID NO: 203872 - RNA, 23 nt, Artificial Sequence
  Synthetic
gguuagacagugggugcagccca

SEQ ID NO: 203873 - RNA, 24 nt, Artificial Sequence
  Synthetic
ugguuagacagugggugcagccca

SEQ ID NO: 203874 - RNA, 18 nt, Artificial Sequence
  Synthetic
uuuuucaguuucagccca

SEQ ID NO: 203875 - RNA, 19 nt, Artificial Sequence
  Synthetic
cuuuuucaguuucagccca

SEQ ID NO: 203876 - RNA, 20 nt, Artificial Sequence
  Synthetic
gcuuuuucaguuucagccca

SEQ ID NO: 203877 - RNA, 21 nt, Artificial Sequence
  Synthetic
ugcuuuuucaguuucagccca

SEQ ID NO: 203878 - RNA, 22 nt, Artificial Sequence
  Synthetic
uugcuuuuucaguuucagccca

SEQ ID NO: 203879 - RNA, 23 nt, Artificial Sequence
  Synthetic
uuugcuuuuucaguuucagccca

SEQ ID NO: 203880 - RNA, 24 nt, Artificial Sequence
  Synthetic
uuuugcuuuuucaguuucagccca

SEQ ID NO: 203881 - RNA, 18 nt, Artificial Sequence
  Synthetic
cguaaucuguagagccca

SEQ ID NO: 203882 - RNA, 19 nt, Artificial Sequence
  Synthetic
acguaaucuguagagccca

SEQ ID NO: 203883 - RNA, 20 nt, Artificial Sequence
  Synthetic
uacguaaucuguagagccca

SEQ ID NO: 203884 - RNA, 21 nt, Artificial Sequence
  Synthetic
guacguaaucuguagagccca

SEQ ID NO: 203885 - RNA, 22 nt, Artificial Sequence
  Synthetic
gguacguaaucuguagagccca

SEQ ID NO: 203886 - RNA, 23 nt, Artificial Sequence
  Synthetic
agguacguaaucuguagagccca

SEQ ID NO: 203887 - RNA, 24 nt, Artificial Sequence
  Synthetic
cagguacguaaucuguagagccca

SEQ ID NO: 203888 - RNA, 18 nt, Artificial Sequence
  Synthetic
ugucaggugcggagccca

SEQ ID NO: 203889 - RNA, 19 nt, Artificial Sequence
  Synthetic
uugucaggugcggagccca

SEQ ID NO: 203890 - RNA, 20 nt, Artificial Sequence
  Synthetic
uuugucaggugcggagccca

SEQ ID NO: 203891 - RNA, 21 nt, Artificial Sequence
  Synthetic
cuuugucaggugcggagccca

SEQ ID NO: 203892 - RNA, 22 nt, Artificial Sequence
  Synthetic
gcuuugucaggugcggagccca

SEQ ID NO: 203893 - RNA, 23 nt, Artificial Sequence
  Synthetic
ugcuuugucaggugcggagccca

SEQ ID NO: 203894 - RNA, 24 nt, Artificial Sequence
  Synthetic
augcuuugucaggugcggagccca

SEQ ID NO: 203895 - RNA, 18 nt, Artificial Sequence
  Synthetic
cagaguugcaguagccca

SEQ ID NO: 203896 - RNA, 19 nt, Artificial Sequence
  Synthetic
acagaguugcaguagccca

SEQ ID NO: 203897 - RNA, 20 nt, Artificial Sequence
  Synthetic
aacagaguugcaguagccca

SEQ ID NO: 203898 - RNA, 21 nt, Artificial Sequence
  Synthetic
uaacagaguugcaguagccca

SEQ ID NO: 203899 - RNA, 22 nt, Artificial Sequence
  Synthetic
uuaacagaguugcaguagccca

SEQ ID NO: 203900 - RNA, 23 nt, Artificial Sequence
  Synthetic
auuaacagaguugcaguagccca

SEQ ID NO: 203901 - RNA, 24 nt, Artificial Sequence
  Synthetic
aauuaacagaguugcaguagccca

SEQ ID NO: 203902 - RNA, 18 nt, Artificial Sequence
  Synthetic
uccacuccucguagccca

SEQ ID NO: 203903 - RNA, 19 nt, Artificial Sequence
  Synthetic
cuccacuccucguagccca

SEQ ID NO: 203904 - RNA, 20 nt, Artificial Sequence
  Synthetic
acuccacuccucguagccca

SEQ ID NO: 203905 - RNA, 21 nt, Artificial Sequence
  Synthetic
aacuccacuccucguagccca

SEQ ID NO: 203906 - RNA, 22 nt, Artificial Sequence
  Synthetic
caacuccacuccucguagccca

SEQ ID NO: 203907 - RNA, 23 nt, Artificial Sequence
  Synthetic
gcaacuccacuccucguagccca

SEQ ID NO: 203908 - RNA, 24 nt, Artificial Sequence
  Synthetic
ggcaacuccacuccucguagccca

SEQ ID NO: 203909 - RNA, 18 nt, Artificial Sequence
  Synthetic
aggaaggagaagcgccca

SEQ ID NO: 203910 - RNA, 19 nt, Artificial Sequence
  Synthetic
caggaaggagaagcgccca

SEQ ID NO: 203911 - RNA, 20 nt, Artificial Sequence
  Synthetic
gcaggaaggagaagcgccca

SEQ ID NO: 203912 - RNA, 21 nt, Artificial Sequence
  Synthetic
cgcaggaaggagaagcgccca

SEQ ID NO: 203913 - RNA, 22 nt, Artificial Sequence
  Synthetic
ccgcaggaaggagaagcgccca

SEQ ID NO: 203914 - RNA, 23 nt, Artificial Sequence
  Synthetic
gccgcaggaaggagaagcgccca

SEQ ID NO: 203915 - RNA, 24 nt, Artificial Sequence
  Synthetic
ggccgcaggaaggagaagcgccca

SEQ ID NO: 203916 - RNA, 18 nt, Artificial Sequence
  Synthetic
ucagaauagggaggccca

SEQ ID NO: 203917 - RNA, 19 nt, Artificial Sequence
  Synthetic
cucagaauagggaggccca

SEQ ID NO: 203918 - RNA, 20 nt, Artificial Sequence
  Synthetic
ucucagaauagggaggccca

SEQ ID NO: 203919 - RNA, 21 nt, Artificial Sequence
  Synthetic
gucucagaauagggaggccca

SEQ ID NO: 203920 - RNA, 22 nt, Artificial Sequence
  Synthetic
ugucucagaauagggaggccca

SEQ ID NO: 203921 - RNA, 23 nt, Artificial Sequence
  Synthetic
gugucucagaauagggaggccca

SEQ ID NO: 203922 - RNA, 24 nt, Artificial Sequence
  Synthetic
ugugucucagaauagggaggccca

SEQ ID NO: 203923 - RNA, 18 nt, Artificial Sequence
  Synthetic
uacaaauuccugggccca

SEQ ID NO: 203924 - RNA, 19 nt, Artificial Sequence
  Synthetic
auacaaauuccugggccca

SEQ ID NO: 203925 - RNA, 20 nt, Artificial Sequence
  Synthetic
cauacaaauuccugggccca

SEQ ID NO: 203926 - RNA, 21 nt, Artificial Sequence
  Synthetic
gcauacaaauuccugggccca

SEQ ID NO: 203927 - RNA, 22 nt, Artificial Sequence
  Synthetic
ugcauacaaauuccugggccca

SEQ ID NO: 203928 - RNA, 23 nt, Artificial Sequence
  Synthetic
uugcauacaaauuccugggccca

SEQ ID NO: 203929 - RNA, 24 nt, Artificial Sequence
  Synthetic
uuugcauacaaauuccugggccca

SEQ ID NO: 203930 - RNA, 18 nt, Artificial Sequence
  Synthetic
gaaaagacaaauggccca

SEQ ID NO: 203931 - RNA, 19 nt, Artificial Sequence
  Synthetic
ugaaaagacaaauggccca

SEQ ID NO: 203932 - RNA, 20 nt, Artificial Sequence
  Synthetic
gugaaaagacaaauggccca

SEQ ID NO: 203933 - RNA, 21 nt, Artificial Sequence
  Synthetic
ugugaaaagacaaauggccca

SEQ ID NO: 203934 - RNA, 22 nt, Artificial Sequence
  Synthetic
cugugaaaagacaaauggccca

SEQ ID NO: 203935 - RNA, 23 nt, Artificial Sequence
  Synthetic
ccugugaaaagacaaauggccca

SEQ ID NO: 203936 - RNA, 24 nt, Artificial Sequence
  Synthetic
uccugugaaaagacaaauggccca

SEQ ID NO: 203937 - RNA, 18 nt, Artificial Sequence
  Synthetic
ucgauugucuauggccca

SEQ ID NO: 203938 - RNA, 19 nt, Artificial Sequence
  Synthetic
uucgauugucuauggccca

SEQ ID NO: 203939 - RNA, 20 nt, Artificial Sequence
  Synthetic
cuucgauugucuauggccca

SEQ ID NO: 203940 - RNA, 21 nt, Artificial Sequence
  Synthetic
ucuucgauugucuauggccca

SEQ ID NO: 203941 - RNA, 22 nt, Artificial Sequence
  Synthetic
gucuucgauugucuauggccca

SEQ ID NO: 203942 - RNA, 23 nt, Artificial Sequence
  Synthetic
ugucuucgauugucuauggccca

SEQ ID NO: 203943 - RNA, 24 nt, Artificial Sequence
  Synthetic
gugucuucgauugucuauggccca

SEQ ID NO: 203944 - RNA, 18 nt, Artificial Sequence
  Synthetic
uucuuccaguguggccca

SEQ ID NO: 203945 - RNA, 19 nt, Artificial Sequence
  Synthetic
cuucuuccaguguggccca

SEQ ID NO: 203946 - RNA, 20 nt, Artificial Sequence
  Synthetic
ucuucuuccaguguggccca

SEQ ID NO: 203947 - RNA, 21 nt, Artificial Sequence
  Synthetic
uucuucuuccaguguggccca

SEQ ID NO: 203948 - RNA, 22 nt, Artificial Sequence
  Synthetic
auucuucuuccaguguggccca

SEQ ID NO: 203949 - RNA, 23 nt, Artificial Sequence
  Synthetic
aauucuucuuccaguguggccca

SEQ ID NO: 203950 - RNA, 24 nt, Artificial Sequence
  Synthetic
caauucuucuuccaguguggccca

SEQ ID NO: 203951 - RNA, 18 nt, Artificial Sequence
  Synthetic
cuuaucagggaaugccca

SEQ ID NO: 203952 - RNA, 19 nt, Artificial Sequence
  Synthetic
acuuaucagggaaugccca

SEQ ID NO: 203953 - RNA, 20 nt, Artificial Sequence
  Synthetic
uacuuaucagggaaugccca

SEQ ID NO: 203954 - RNA, 21 nt, Artificial Sequence
  Synthetic
auacuuaucagggaaugccca

SEQ ID NO: 203955 - RNA, 22 nt, Artificial Sequence
  Synthetic
aauacuuaucagggaaugccca

SEQ ID NO: 203956 - RNA, 23 nt, Artificial Sequence
  Synthetic
gaauacuuaucagggaaugccca

SEQ ID NO: 203957 - RNA, 24 nt, Artificial Sequence
  Synthetic
agaauacuuaucagggaaugccca

SEQ ID NO: 203958 - RNA, 18 nt, Artificial Sequence
  Synthetic
uguaaaauuauaugccca

SEQ ID NO: 203959 - RNA, 19 nt, Artificial Sequence
  Synthetic
cuguaaaauuauaugccca

SEQ ID NO: 203960 - RNA, 20 nt, Artificial Sequence
  Synthetic
ccuguaaaauuauaugccca

SEQ ID NO: 203961 - RNA, 21 nt, Artificial Sequence
  Synthetic
uccuguaaaauuauaugccca

SEQ ID NO: 203962 - RNA, 22 nt, Artificial Sequence
  Synthetic
cuccuguaaaauuauaugccca

SEQ ID NO: 203963 - RNA, 23 nt, Artificial Sequence
  Synthetic
acuccuguaaaauuauaugccca

SEQ ID NO: 203964 - RNA, 24 nt, Artificial Sequence
  Synthetic
aacuccuguaaaauuauaugccca

SEQ ID NO: 203965 - RNA, 18 nt, Artificial Sequence
  Synthetic
cguauagcuagcugccca

SEQ ID NO: 203966 - RNA, 19 nt, Artificial Sequence
  Synthetic
ucguauagcuagcugccca

SEQ ID NO: 203967 - RNA, 20 nt, Artificial Sequence
  Synthetic
aucguauagcuagcugccca

SEQ ID NO: 203968 - RNA, 21 nt, Artificial Sequence
  Synthetic
uaucguauagcuagcugccca

SEQ ID NO: 203969 - RNA, 22 nt, Artificial Sequence
  Synthetic
uuaucguauagcuagcugccca

SEQ ID NO: 203970 - RNA, 23 nt, Artificial Sequence
  Synthetic
auuaucguauagcuagcugccca

SEQ ID NO: 203971 - RNA, 24 nt, Artificial Sequence
  Synthetic
aauuaucguauagcuagcugccca

SEQ ID NO: 203972 - RNA, 18 nt, Artificial Sequence
  Synthetic
uugaaacaaacuugccca

SEQ ID NO: 203973 - RNA, 19 nt, Artificial Sequence
  Synthetic
uuugaaacaaacuugccca

SEQ ID NO: 203974 - RNA, 20 nt, Artificial Sequence
  Synthetic
auuugaaacaaacuugccca

SEQ ID NO: 203975 - RNA, 21 nt, Artificial Sequence
  Synthetic
cauuugaaacaaacuugccca

SEQ ID NO: 203976 - RNA, 22 nt, Artificial Sequence
  Synthetic
gcauuugaaacaaacuugccca

SEQ ID NO: 203977 - RNA, 23 nt, Artificial Sequence
  Synthetic
ugcauuugaaacaaacuugccca

SEQ ID NO: 203978 - RNA, 24 nt, Artificial Sequence
  Synthetic
uugcauuugaaacaaacuugccca

SEQ ID NO: 203979 - RNA, 18 nt, Artificial Sequence
  Synthetic
ucaguuuuucuuugccca

SEQ ID NO: 203980 - RNA, 19 nt, Artificial Sequence
  Synthetic
aucaguuuuucuuugccca

SEQ ID NO: 203981 - RNA, 20 nt, Artificial Sequence
  Synthetic
aaucaguuuuucuuugccca

SEQ ID NO: 203982 - RNA, 21 nt, Artificial Sequence
  Synthetic
gaaucaguuuuucuuugccca

SEQ ID NO: 203983 - RNA, 22 nt, Artificial Sequence
  Synthetic
ggaaucaguuuuucuuugccca

SEQ ID NO: 203984 - RNA, 23 nt, Artificial Sequence
  Synthetic
uggaaucaguuuuucuuugccca

SEQ ID NO: 203985 - RNA, 24 nt, Artificial Sequence
  Synthetic
auggaaucaguuuuucuuugccca

SEQ ID NO: 203986 - RNA, 18 nt, Artificial Sequence
  Synthetic
aauuuugaauuuugccca

SEQ ID NO: 203987 - RNA, 19 nt, Artificial Sequence
  Synthetic
aaauuuugaauuuugccca

SEQ ID NO: 203988 - RNA, 20 nt, Artificial Sequence
  Synthetic
gaaauuuugaauuuugccca

SEQ ID NO: 203989 - RNA, 21 nt, Artificial Sequence
  Synthetic
ugaaauuuugaauuuugccca

SEQ ID NO: 203990 - RNA, 22 nt, Artificial Sequence
  Synthetic
uugaaauuuugaauuuugccca

SEQ ID NO: 203991 - RNA, 23 nt, Artificial Sequence
  Synthetic
cuugaaauuuugaauuuugccca

SEQ ID NO: 203992 - RNA, 24 nt, Artificial Sequence
  Synthetic
gcuugaaauuuugaauuuugccca

SEQ ID NO: 203993 - RNA, 18 nt, Artificial Sequence
  Synthetic
aucaucacaacaauccca

SEQ ID NO: 203994 - RNA, 19 nt, Artificial Sequence
  Synthetic
aaucaucacaacaauccca

SEQ ID NO: 203995 - RNA, 20 nt, Artificial Sequence
  Synthetic
caaucaucacaacaauccca

SEQ ID NO: 203996 - RNA, 21 nt, Artificial Sequence
  Synthetic
gcaaucaucacaacaauccca

SEQ ID NO: 203997 - RNA, 22 nt, Artificial Sequence
  Synthetic
ggcaaucaucacaacaauccca

SEQ ID NO: 203998 - RNA, 23 nt, Artificial Sequence
  Synthetic
aggcaaucaucacaacaauccca

SEQ ID NO: 203999 - RNA, 24 nt, Artificial Sequence
  Synthetic
caggcaaucaucacaacaauccca

SEQ ID NO: 204000 - RNA, 18 nt, Artificial Sequence
  Synthetic
uaaaauauacuaauccca

SEQ ID NO: 204001 - RNA, 19 nt, Artificial Sequence
  Synthetic
auaaaauauacuaauccca

SEQ ID NO: 204002 - RNA, 20 nt, Artificial Sequence
  Synthetic
aauaaaauauacuaauccca

SEQ ID NO: 204003 - RNA, 21 nt, Artificial Sequence
  Synthetic
gaauaaaauauacuaauccca

SEQ ID NO: 204004 - RNA, 22 nt, Artificial Sequence
  Synthetic
ggaauaaaauauacuaauccca

SEQ ID NO: 204005 - RNA, 23 nt, Artificial Sequence
  Synthetic
uggaauaaaauauacuaauccca

SEQ ID NO: 204006 - RNA, 24 nt, Artificial Sequence
  Synthetic
auggaauaaaauauacuaauccca

SEQ ID NO: 204007 - RNA, 18 nt, Artificial Sequence
  Synthetic
uucuccuuucuaauccca

SEQ ID NO: 204008 - RNA, 19 nt, Artificial Sequence
  Synthetic
cuucuccuuucuaauccca

SEQ ID NO: 204009 - RNA, 20 nt, Artificial Sequence
  Synthetic
acuucuccuuucuaauccca

SEQ ID NO: 204010 - RNA, 21 nt, Artificial Sequence
  Synthetic
gacuucuccuuucuaauccca

SEQ ID NO: 204011 - RNA, 22 nt, Artificial Sequence
  Synthetic
ugacuucuccuuucuaauccca

SEQ ID NO: 204012 - RNA, 23 nt, Artificial Sequence
  Synthetic
cugacuucuccuuucuaauccca

SEQ ID NO: 204013 - RNA, 24 nt, Artificial Sequence
  Synthetic
ucugacuucuccuuucuaauccca

SEQ ID NO: 204014 - RNA, 18 nt, Artificial Sequence
  Synthetic
uaguggaguuuaauccca

SEQ ID NO: 204015 - RNA, 19 nt, Artificial Sequence
  Synthetic
cuaguggaguuuaauccca

SEQ ID NO: 204016 - RNA, 20 nt, Artificial Sequence
  Synthetic
ucuaguggaguuuaauccca

SEQ ID NO: 204017 - RNA, 21 nt, Artificial Sequence
  Synthetic
gucuaguggaguuuaauccca

SEQ ID NO: 204018 - RNA, 22 nt, Artificial Sequence
  Synthetic
ggucuaguggaguuuaauccca

SEQ ID NO: 204019 - RNA, 23 nt, Artificial Sequence
  Synthetic
uggucuaguggaguuuaauccca

SEQ ID NO: 204020 - RNA, 24 nt, Artificial Sequence
  Synthetic
cuggucuaguggaguuuaauccca

SEQ ID NO: 204021 - RNA, 18 nt, Artificial Sequence
  Synthetic
uaccagccugccauccca

SEQ ID NO: 204022 - RNA, 19 nt, Artificial Sequence
  Synthetic
cuaccagccugccauccca

SEQ ID NO: 204023 - RNA, 20 nt, Artificial Sequence
  Synthetic
ccuaccagccugccauccca

SEQ ID NO: 204024 - RNA, 21 nt, Artificial Sequence
  Synthetic
uccuaccagccugccauccca

SEQ ID NO: 204025 - RNA, 22 nt, Artificial Sequence
  Synthetic
uuccuaccagccugccauccca

SEQ ID NO: 204026 - RNA, 23 nt, Artificial Sequence
  Synthetic
uuuccuaccagccugccauccca

SEQ ID NO: 204027 - RNA, 24 nt, Artificial Sequence
  Synthetic
auuuccuaccagccugccauccca

SEQ ID NO: 204028 - RNA, 18 nt, Artificial Sequence
  Synthetic
auauuagcucucauccca

SEQ ID NO: 204029 - RNA, 19 nt, Artificial Sequence
  Synthetic
gauauuagcucucauccca

SEQ ID NO: 204030 - RNA, 20 nt, Artificial Sequence
  Synthetic
ggauauuagcucucauccca

SEQ ID NO: 204031 - RNA, 21 nt, Artificial Sequence
  Synthetic
gggauauuagcucucauccca

SEQ ID NO: 204032 - RNA, 22 nt, Artificial Sequence
  Synthetic
ggggauauuagcucucauccca

SEQ ID NO: 204033 - RNA, 23 nt, Artificial Sequence
  Synthetic
aggggauauuagcucucauccca

SEQ ID NO: 204034 - RNA, 24 nt, Artificial Sequence
  Synthetic
aaggggauauuagcucucauccca

SEQ ID NO: 204035 - RNA, 18 nt, Artificial Sequence
  Synthetic
guaaaaaguuucauccca

SEQ ID NO: 204036 - RNA, 19 nt, Artificial Sequence
  Synthetic
uguaaaaaguuucauccca

SEQ ID NO: 204037 - RNA, 20 nt, Artificial Sequence
  Synthetic
guguaaaaaguuucauccca

SEQ ID NO: 204038 - RNA, 21 nt, Artificial Sequence
  Synthetic
uguguaaaaaguuucauccca

SEQ ID NO: 204039 - RNA, 22 nt, Artificial Sequence
  Synthetic
cuguguaaaaaguuucauccca

SEQ ID NO: 204040 - RNA, 23 nt, Artificial Sequence
  Synthetic
acuguguaaaaaguuucauccca

SEQ ID NO: 204041 - RNA, 24 nt, Artificial Sequence
  Synthetic
uacuguguaaaaaguuucauccca

SEQ ID NO: 204042 - RNA, 18 nt, Artificial Sequence
  Synthetic
caagcuguuuucauccca

SEQ ID NO: 204043 - RNA, 19 nt, Artificial Sequence
  Synthetic
acaagcuguuuucauccca

SEQ ID NO: 204044 - RNA, 20 nt, Artificial Sequence
  Synthetic
cacaagcuguuuucauccca

SEQ ID NO: 204045 - RNA, 21 nt, Artificial Sequence
  Synthetic
gcacaagcuguuuucauccca

SEQ ID NO: 204046 - RNA, 22 nt, Artificial Sequence
  Synthetic
ggcacaagcuguuuucauccca

SEQ ID NO: 204047 - RNA, 23 nt, Artificial Sequence
  Synthetic
aggcacaagcuguuuucauccca

SEQ ID NO: 204048 - RNA, 24 nt, Artificial Sequence
  Synthetic
gaggcacaagcuguuuucauccca

SEQ ID NO: 204049 - RNA, 20 nt, Artificial Sequence
  Synthetic
ugauaucaccaccgauccca

SEQ ID NO: 204050 - RNA, 21 nt, Artificial Sequence
  Synthetic
gugauaucaccaccgauccca

SEQ ID NO: 204051 - RNA, 22 nt, Artificial Sequence
  Synthetic
agugauaucaccaccgauccca

SEQ ID NO: 204052 - RNA, 23 nt, Artificial Sequence
  Synthetic
aagugauaucaccaccgauccca

SEQ ID NO: 204053 - RNA, 24 nt, Artificial Sequence
  Synthetic
gaagugauaucaccaccgauccca

SEQ ID NO: 204054 - RNA, 18 nt, Artificial Sequence
  Synthetic
gguuacgacgugauccca

SEQ ID NO: 204055 - RNA, 19 nt, Artificial Sequence
  Synthetic
agguuacgacgugauccca

SEQ ID NO: 204056 - RNA, 20 nt, Artificial Sequence
  Synthetic
cagguuacgacgugauccca

SEQ ID NO: 204057 - RNA, 21 nt, Artificial Sequence
  Synthetic
ucagguuacgacgugauccca

SEQ ID NO: 204058 - RNA, 22 nt, Artificial Sequence
  Synthetic
gucagguuacgacgugauccca

SEQ ID NO: 204059 - RNA, 23 nt, Artificial Sequence
  Synthetic
ggucagguuacgacgugauccca

SEQ ID NO: 204060 - RNA, 24 nt, Artificial Sequence
  Synthetic
aggucagguuacgacgugauccca

SEQ ID NO: 204061 - RNA, 18 nt, Artificial Sequence
  Synthetic
acuucuaguaauauccca

SEQ ID NO: 204062 - RNA, 19 nt, Artificial Sequence
  Synthetic
uacuucuaguaauauccca

SEQ ID NO: 204063 - RNA, 20 nt, Artificial Sequence
  Synthetic
uuacuucuaguaauauccca

SEQ ID NO: 204064 - RNA, 21 nt, Artificial Sequence
  Synthetic
guuacuucuaguaauauccca

SEQ ID NO: 204065 - RNA, 22 nt, Artificial Sequence
  Synthetic
uguuacuucuaguaauauccca

SEQ ID NO: 204066 - RNA, 23 nt, Artificial Sequence
  Synthetic
guguuacuucuaguaauauccca

SEQ ID NO: 204067 - RNA, 24 nt, Artificial Sequence
  Synthetic
uguguuacuucuaguaauauccca

SEQ ID NO: 204068 - RNA, 18 nt, Artificial Sequence
  Synthetic
uggcuaaugacuauccca

SEQ ID NO: 204069 - RNA, 19 nt, Artificial Sequence
  Synthetic
guggcuaaugacuauccca

SEQ ID NO: 204070 - RNA, 20 nt, Artificial Sequence
  Synthetic
uguggcuaaugacuauccca

SEQ ID NO: 204071 - RNA, 21 nt, Artificial Sequence
  Synthetic
auguggcuaaugacuauccca

SEQ ID NO: 204072 - RNA, 22 nt, Artificial Sequence
  Synthetic
cauguggcuaaugacuauccca

SEQ ID NO: 204073 - RNA, 23 nt, Artificial Sequence
  Synthetic
acauguggcuaaugacuauccca

SEQ ID NO: 204074 - RNA, 24 nt, Artificial Sequence
  Synthetic
cacauguggcuaaugacuauccca

SEQ ID NO: 204075 - RNA, 18 nt, Artificial Sequence
  Synthetic
ccuguguuuuuuauccca

SEQ ID NO: 204076 - RNA, 19 nt, Artificial Sequence
  Synthetic
accuguguuuuuuauccca

SEQ ID NO: 204077 - RNA, 20 nt, Artificial Sequence
  Synthetic
aaccuguguuuuuuauccca

SEQ ID NO: 204078 - RNA, 21 nt, Artificial Sequence
  Synthetic
aaaccuguguuuuuuauccca

SEQ ID NO: 204079 - RNA, 22 nt, Artificial Sequence
  Synthetic
aaaaccuguguuuuuuauccca

SEQ ID NO: 204080 - RNA, 23 nt, Artificial Sequence
  Synthetic
aaaaaccuguguuuuuuauccca

SEQ ID NO: 204081 - RNA, 24 nt, Artificial Sequence
  Synthetic
aaaaaaccuguguuuuuuauccca

SEQ ID NO: 204082 - RNA, 18 nt, Artificial Sequence
  Synthetic
auccagauaaaacuccca

SEQ ID NO: 204083 - RNA, 19 nt, Artificial Sequence
  Synthetic
aauccagauaaaacuccca

SEQ ID NO: 204084 - RNA, 20 nt, Artificial Sequence
  Synthetic
aaauccagauaaaacuccca

SEQ ID NO: 204085 - RNA, 21 nt, Artificial Sequence
  Synthetic
aaaauccagauaaaacuccca

SEQ ID NO: 204086 - RNA, 22 nt, Artificial Sequence
  Synthetic
caaaauccagauaaaacuccca

SEQ ID NO: 204087 - RNA, 23 nt, Artificial Sequence
  Synthetic
ucaaaauccagauaaaacuccca

SEQ ID NO: 204088 - RNA, 24 nt, Artificial Sequence
  Synthetic
cucaaaauccagauaaaacuccca

SEQ ID NO: 204089 - RNA, 18 nt, Artificial Sequence
  Synthetic
agaguuguuaaacuccca

SEQ ID NO: 204090 - RNA, 19 nt, Artificial Sequence
  Synthetic
uagaguuguuaaacuccca

SEQ ID NO: 204091 - RNA, 20 nt, Artificial Sequence
  Synthetic
guagaguuguuaaacuccca

SEQ ID NO: 204092 - RNA, 21 nt, Artificial Sequence
  Synthetic
aguagaguuguuaaacuccca

SEQ ID NO: 204093 - RNA, 22 nt, Artificial Sequence
  Synthetic
aaguagaguuguuaaacuccca

SEQ ID NO: 204094 - RNA, 23 nt, Artificial Sequence
  Synthetic
aaaguagaguuguuaaacuccca

SEQ ID NO: 204095 - RNA, 24 nt, Artificial Sequence
  Synthetic
aaaaguagaguuguuaaacuccca

SEQ ID NO: 204096 - RNA, 18 nt, Artificial Sequence
  Synthetic
ccauuuccaauacuccca

SEQ ID NO: 204097 - RNA, 19 nt, Artificial Sequence
  Synthetic
cccauuuccaauacuccca

SEQ ID NO: 204098 - RNA, 20 nt, Artificial Sequence
  Synthetic
acccauuuccaauacuccca

SEQ ID NO: 204099 - RNA, 21 nt, Artificial Sequence
  Synthetic
aacccauuuccaauacuccca

SEQ ID NO: 204100 - RNA, 22 nt, Artificial Sequence
  Synthetic
aaacccauuuccaauacuccca

SEQ ID NO: 204101 - RNA, 23 nt, Artificial Sequence
  Synthetic
aaaacccauuuccaauacuccca

SEQ ID NO: 204102 - RNA, 24 nt, Artificial Sequence
  Synthetic
aaaaacccauuuccaauacuccca

SEQ ID NO: 204103 - RNA, 18 nt, Artificial Sequence
  Synthetic
ugagauaacguacuccca

SEQ ID NO: 204104 - RNA, 19 nt, Artificial Sequence
  Synthetic
gugagauaacguacuccca

SEQ ID NO: 204105 - RNA, 20 nt, Artificial Sequence
  Synthetic
agugagauaacguacuccca

SEQ ID NO: 204106 - RNA, 21 nt, Artificial Sequence
  Synthetic
aagugagauaacguacuccca

SEQ ID NO: 204107 - RNA, 22 nt, Artificial Sequence
  Synthetic
uaagugagauaacguacuccca

SEQ ID NO: 204108 - RNA, 23 nt, Artificial Sequence
  Synthetic
cuaagugagauaacguacuccca

SEQ ID NO: 204109 - RNA, 24 nt, Artificial Sequence
  Synthetic
acuaagugagauaacguacuccca

SEQ ID NO: 204110 - RNA, 18 nt, Artificial Sequence
  Synthetic
aaugauggucagcuccca

SEQ ID NO: 204111 - RNA, 19 nt, Artificial Sequence
  Synthetic
uaaugauggucagcuccca

SEQ ID NO: 204112 - RNA, 20 nt, Artificial Sequence
  Synthetic
guaaugauggucagcuccca

SEQ ID NO: 204113 - RNA, 21 nt, Artificial Sequence
  Synthetic
gguaaugauggucagcuccca

SEQ ID NO: 204114 - RNA, 22 nt, Artificial Sequence
  Synthetic
agguaaugauggucagcuccca

SEQ ID NO: 204115 - RNA, 23 nt, Artificial Sequence
  Synthetic
aagguaaugauggucagcuccca

SEQ ID NO: 204116 - RNA, 24 nt, Artificial Sequence
  Synthetic
gaagguaaugauggucagcuccca

SEQ ID NO: 204117 - RNA, 18 nt, Artificial Sequence
  Synthetic
gaagucccaugucuccca

SEQ ID NO: 204118 - RNA, 19 nt, Artificial Sequence
  Synthetic
agaagucccaugucuccca

SEQ ID NO: 204119 - RNA, 20 nt, Artificial Sequence
  Synthetic
aagaagucccaugucuccca

SEQ ID NO: 204120 - RNA, 21 nt, Artificial Sequence
  Synthetic
aaagaagucccaugucuccca
